United States Patent Application Publication US 2022/0213167 A1 - sequence listing, part 3

SEQ ID NO: 43397 - protein, 15 aa, Homo sapiens
  CDR3 for alpha chain variable domain of TCR clone 21699 (TRAV21, TRAJ53)
CATLNSGGSNYKLTF

SEQ ID NO: 43398 - protein, 16 aa, Homo sapiens
  CDR3 for beta chain variable domain of TCR clone 21699 (TRBV9, TRBJ2-1)
CASSVGGGGNYNEQFL

SEQ ID NO: 43399 - protein, 12 aa, Homo sapiens
  CDR3 for alpha chain variable domain of TCR clone 21700 (TRAV13-1, TRAJ21)
CAAKEGFNKFYF

SEQ ID NO: 43400 - protein, 16 aa, Homo sapiens
  CDR3 for beta chain variable domain of TCR clone 21700 (TRBV19, TRBJ2-1)
CASSKAGPSSYNEQFF

SEQ ID NO: 43401 - protein, 15 aa, Homo sapiens
  CDR3 for alpha chain variable domain of TCR clone 21701 (TRAV8-3, TRAJ27)
CAVGPSKTNASKSTF

SEQ ID NO: 43402 - protein, 15 aa, Homo sapiens
  CDR3 for beta chain variable domain of TCR clone 21701 (TRBV7-2, TRBJ2-1)
CASSSGLAGGNEQFF

SEQ ID NO: 43403 - protein, 11 aa, Homo sapiens
  CDR3 for alpha chain variable domain of TCR clone 21702 (TRAV21, TRAJ34)
CAHYNTDKLIF

SEQ ID NO: 43404 - protein, 13 aa, Homo sapiens
  CDR3 for beta chain variable domain of TCR clone 21702 (TRBV7-6, TRBJ1-2)
CASSLVADYGYSF

SEQ ID NO: 43405 - protein, 13 aa, Homo sapiens
  CDR3 for alpha chain variable domain of TCR clone 21703 (TRAV21, TRAJ27)
CAARPGNAGRSTF

SEQ ID NO: 43406 - protein, 15 aa, Homo sapiens
  CDR3 for beta chain variable domain of TCR clone 21703 (TRBV2, TRBJ2-3)
CASSDAGGPPDTQYF

SEQ ID NO: 43407 - protein, 14 aa, Homo sapiens
  CDR3 for alpha chain variable domain of TCR clone 21704 (TRAV9-2, TRAJ34)
CALTQSYNTDKLIF

SEQ ID NO: 43408 - protein, 16 aa, Homo sapiens
  CDR3 for beta chain variable domain of TCR clone 21704 (TRBV20-1, TRBJ2-1)
CSARDLKQGMNNEQFF

SEQ ID NO: 43409 - protein, 13 aa, Homo sapiens
  CDR3 for alpha chain variable domain of TCR clone 21705 (TRAV27, TRAJ49)
CAPRPYTGNQFYF

SEQ ID NO: 43410 - protein, 16 aa, Homo sapiens
  CDR3 for beta chain variable domain of TCR clone 21705 (TRBV4-1, TRBJ1-2)
CASSQDAGQVLYGYTV

SEQ ID NO: 43411 - protein, 17 aa, Homo sapiens
  CDR3 for alpha chain variable domain of TCR clone 21706 (TRAV13-1, TRAJ31)
CAPRDRLMFGDGTQRVV

SEQ ID NO: 43412 - protein, 12 aa, Homo sapiens
  CDR3 for beta chain variable domain of TCR clone 21706 (TRBV7-9, TRBJ2-7)
CASSLEGYEQYF

SEQ ID NO: 43413 - protein, 14 aa, Homo sapiens
  CDR3 for alpha chain variable domain of TCR clone 21707 (TRAV38-1, TRAJ45)
CAYYSGGGADGLTF

SEQ ID NO: 43414 - protein, 20 aa, Homo sapiens
  CDR3 for beta chain variable domain of TCR clone 21707 (TRBV28, TRBJ2-1)
CASTHIGRSPGLAGGNEQFF

SEQ ID NO: 43415 - protein, 16 aa, Homo sapiens
  CDR3 for alpha chain variable domain of TCR clone 21708 (TRAV3, TRAJ37)
CAVRGKGSGNTGKLIL

SEQ ID NO: 43416 - protein, 12 aa, Homo sapiens
  CDR3 for beta chain variable domain of TCR clone 21708 (TRBV11-2, TRBJ2-2)
CASSLGGGELFF

SEQ ID NO: 43417 - protein, 14 aa, Homo sapiens
  CDR3 for alpha chain variable domain of TCR clone 21709 (TRAV8-4, TRAJ13)
CAVTLSGGYQKVTF

SEQ ID NO: 43418 - protein, 13 aa, Homo sapiens
  CDR3 for beta chain variable domain of TCR clone 21709 (TRBV4-2, TRBJ1-1)
CASSQAGNTEAFF

SEQ ID NO: 43419 - protein, 13 aa, Homo sapiens
  CDR3 for alpha chain variable domain of TCR clone 21710 (TRAV3, TRAJ15)
CSVRDQAGTALIF

SEQ ID NO: 43420 - protein, 15 aa, Homo sapiens
  CDR3 for beta chain variable domain of TCR clone 21710 (TRBV11-1, TRBJ2-7)
CASSLNYGASYEQYF

SEQ ID NO: 43421 - protein, 13 aa, Homo sapiens
  CDR3 for alpha chain variable domain of TCR clone 21711 (TRAV12-3, TRAJ40)
CAMSDSGTYKYIF

SEQ ID NO: 43422 - protein, 14 aa, Homo sapiens
  CDR3 for beta chain variable domain of TCR clone 21711 (TRBV7-2, TRBJ1-5)
CASSTQGAGQPQHS

SEQ ID NO: 43423 - protein, 13 aa, Homo sapiens
  CDR3 for alpha chain variable domain of TCR clone 21712 (TRAV38-1, TRAJ42)
CARWGGSQGNLIF

SEQ ID NO: 43424 - protein, 17 aa, Homo sapiens
  CDR3 for beta chain variable domain of TCR clone 21712 (TRBV20-1, TRBJ2-1)
CSARDPLAGVWGNEQFF

SEQ ID NO: 43425 - protein, 12 aa, Homo sapiens
  CDR3 for alpha chain variable domain of TCR clone 21713 (TRAV12-3, TRAJ40)
CAMSSGTYKYIF

SEQ ID NO: 43426 - protein, 15 aa, Homo sapiens
  CDR3 for beta chain variable domain of TCR clone 21713 (TRBV7-3, TRBJ2-2)
CASSEAGQGTGELFF

SEQ ID NO: 43427 - protein, 15 aa, Homo sapiens
  CDR3 for alpha chain variable domain of TCR clone 21714 (TRAV8-3, TRAJ27)
CAVGPSQTNAGKSTF

SEQ ID NO: 43428 - protein, 15 aa, Homo sapiens
  CDR3 for beta chain variable domain of TCR clone 21714 (TRBV7-2, TRBJ2-1)
CASSSGLAGGNEQFF

SEQ ID NO: 43429 - protein, 15 aa, Homo sapiens
  CDR3 for alpha chain variable domain of TCR clone 21715 (TRAV27, TRAJ38)
CAARRNAGNNRKRIW

SEQ ID NO: 43430 - protein, 11 aa, Homo sapiens
  CDR3 for beta chain variable domain of TCR clone 21715 (TRBV12-4, TRBJ2-2)
CASSSAGELFF

SEQ ID NO: 43431 - protein, 12 aa, Homo sapiens
  CDR3 for alpha chain variable domain of TCR clone 21716 (TRAV13-1, TRAJ48)
CAANFGNEKLTF

SEQ ID NO: 43432 - protein, 12 aa, Homo sapiens
  CDR3 for beta chain variable domain of TCR clone 21716 (TRBV7-3, TRBJ1-1)
CQQPGLGAEAFF

SEQ ID NO: 43433 - protein, 13 aa, Homo sapiens
  CDR3 for alpha chain variable domain of TCR clone 21717 (TRAV13-1, TRAJ21)
CSASIYNFNKFYF

SEQ ID NO: 43434 - protein, 13 aa, Homo sapiens
  CDR3 for beta chain variable domain of TCR clone 21717 (TRBV27, TRBJ1-4)
CASSLMGDEKLFF

SEQ ID NO: 43435 - protein, 13 aa, Homo sapiens
  CDR3 for alpha chain variable domain of TCR clone 21718 (TRAV1-1, TRAJ9)
CAAKNTGGFKTLF

SEQ ID NO: 43436 - protein, 14 aa, Homo sapiens
  CDR3 for beta chain variable domain of TCR clone 21718 (TRBV20-1, TRBJ2-1)
CSAQIGGSANEQFF

SEQ ID NO: 43437 - protein, 19 aa, Homo sapiens
  CDR3 for alpha chain variable domain of TCR clone 21719 (TRAV26-1, TRAJ52)
CVVRAHRNAGGTSYGKLTF

SEQ ID NO: 43438 - protein, 15 aa, Homo sapiens
  CDR3 for beta chain variable domain of TCR clone 21719 (TRBV12-4, TRBJ2-5)
CASSPPTGLQETQYF

SEQ ID NO: 43439 - protein, 13 aa, Homo sapiens
  CDR3 for alpha chain variable domain of TCR clone 21720 (TRAV12-3, TRAJ7)
CAMTPYGNNRLAF

SEQ ID NO: 43440 - protein, 16 aa, Homo sapiens
  CDR3 for beta chain variable domain of TCR clone 21720 (TRBV20-1, TRBJ1-4)
CSARPYGGELNEKLFL

SEQ ID NO: 43441 - protein, 14 aa, Homo sapiens
  CDR3 for alpha chain variable domain of TCR clone 21721 (TRAV1-2, TRAJ16)
CAVNRFSDGQKLLF

SEQ ID NO: 43442 - protein, 15 aa, Homo sapiens
  CDR3 for beta chain variable domain of TCR clone 21721 (TRBV9, TRBJ1-6)
CASSVAGTGYSPLHF

SEQ ID NO: 43443 - protein, 18 aa, Homo sapiens
  CDR3 for alpha chain variable domain of TCR clone 21722 (TRAV21, TRAJ52)
CAVRPSPAGGTSYGKLTF

SEQ ID NO: 43444 - protein, 14 aa, Homo sapiens
  CDR3 for beta chain variable domain of TCR clone 21722 (TRBV7-8, TRBJ2-3)
CASSLEAGTDTQYF

SEQ ID NO: 43445 - protein, 11 aa, Homo sapiens
  CDR3 for alpha chain variable domain of TCR clone 21723 (TRAV2, TRAJ33)
CAVDSDYQLIW

SEQ ID NO: 43446 - protein, 15 aa, Homo sapiens
  CDR3 for beta chain variable domain of TCR clone 21723 (TRBV19, TRBJ1-2)
CASSVGQVLNYGYTF

SEQ ID NO: 43447 - protein, 11 aa, Homo sapiens
  CDR3 for alpha chain variable domain of TCR clone 21724 (TRAV1-2, TRAJ31)
CAVNNNARLMF

SEQ ID NO: 43448 - protein, 14 aa, Homo sapiens
  CDR3 for beta chain variable domain of TCR clone 21724 (TRBV28, TRBJ2-1)
CQQYNSGGRSEQFF

SEQ ID NO: 43449 - protein, 11 aa, Homo sapiens
  CDR3 for alpha chain variable domain of TCR clone 21725 (TRAV2, TRAJ13)
CASGGYQKVTF

SEQ ID NO: 43450 - protein, 14 aa, Homo sapiens
  CDR3 for beta chain variable domain of TCR clone 21725 (TRBV18, TRBJ2-7)
CASSPRGGAYEQYF

SEQ ID NO: 43451 - protein, 14 aa, Homo sapiens
  CDR3 for alpha chain variable domain of TCR clone 21726 (TRAV26-1, TRAJ39)
CIVRGSRAGNMLTF

SEQ ID NO: 43452 - protein, 15 aa, Homo sapiens
  CDR3 for beta chain variable domain of TCR clone 21726 (TRBV7-9, TRBJ1-5)
CASSQGHQPNQPQYF

SEQ ID NO: 43453 - protein, 16 aa, Homo sapiens
  CDR3 for alpha chain variable domain of TCR clone 21727 (TRAV12-3, TRAJ53)
CAMSPGCGGSNYKLTF

SEQ ID NO: 43454 - protein, 11 aa, Homo sapiens
  CDR3 for beta chain variable domain of TCR clone 21727 (TRBV29-1, TRBJ2-5)
CSEDRTGTQYF

SEQ ID NO: 43455 - protein, 15 aa, Homo sapiens
  CDR3 for alpha chain variable domain of TCR clone 21728 (TRAV25, TRAJ52)
CAGRPGGTSYGKLTF

SEQ ID NO: 43456 - protein, 17 aa, Homo sapiens
  CDR3 for beta chain variable domain of TCR clone 21728 (TRBV7-8, TRBJ2-6)
CASSAGTGGAGANVPTF

SEQ ID NO: 43457 - protein, 13 aa, Homo sapiens
  CDR3 for alpha chain variable domain of TCR clone 21729 (TRAV8-3, TRAJ28)
CAVGAVGSYQITF

SEQ ID NO: 43458 - protein, 15 aa, Homo sapiens
  CDR3 for beta chain variable domain of TCR clone 21729 (TRBV7-9, TRBJ1-5)
CASSQGHQPNQPQHF

SEQ ID NO: 43459 - protein, 14 aa, Homo sapiens
  CDR3 for alpha chain variable domain of TCR clone 21730 (TRAV1-2, TRAJ8)
CAVREDTGFQKLVF

SEQ ID NO: 43460 - protein, 17 aa, Homo sapiens
  CDR3 for beta chain variable domain of TCR clone 21730 (TRBV6-5, TRBJ2-7)
CAGRPSVGEVQHYEQYF

SEQ ID NO: 43461 - protein, 15 aa, Homo sapiens
  CDR3 for alpha chain variable domain of TCR clone 21731 (TRAV12-3, TRAJ49)
CAMAVTPNTGNQFYL

SEQ ID NO: 43462 - protein, 18 aa, Homo sapiens
  CDR3 for beta chain variable domain of TCR clone 21731 (TRBV4-1, TRBJ1-5)
CASSQDPRGQGLNQPQHF

SEQ ID NO: 43463 - protein, 17 aa, Homo sapiens
  CDR3 for alpha chain variable domain of TCR clone 21732 (TRAV13-1, TRAJ53)
CAASWKSSGGSNYKLTF

SEQ ID NO: 43464 - protein, 19 aa, Homo sapiens
  CDR3 for beta chain variable domain of TCR clone 21732 (TRBV7-9, TRBJ2-1)
CASSHSRGALLRSYNEQFF

SEQ ID NO: 43465 - protein, 14 aa, Homo sapiens
  CDR3 for alpha chain variable domain of TCR clone 21733 (TRAV8-3, TRAJ9)
CAVFYNTGGFKTIF

SEQ ID NO: 43466 - protein, 14 aa, Homo sapiens
  CDR3 for beta chain variable domain of TCR clone 21733 (TRBV7-3, TRBJ2-2)
CASSSGGYTGELFF

SEQ ID NO: 43467 - protein, 14 aa, Homo sapiens
  CDR3 for alpha chain variable domain of TCR clone 21734 (TRAV26-1, TRAJ39)
CIVRGSRAGNMLTF

SEQ ID NO: 43468 - protein, 16 aa, Homo sapiens
  CDR3 for beta chain variable domain of TCR clone 21734 (TRBV6-5, TRBJ1-1)
CASSYSGGLRNTEAFF

SEQ ID NO: 43469 - protein, 16 aa, Homo sapiens
  CDR3 for alpha chain variable domain of TCR clone 21735 (TRAV3, TRAJ37)
CAVRGKGSGNPGKLIF

SEQ ID NO: 43470 - protein, 13 aa, Homo sapiens
  CDR3 for beta chain variable domain of TCR clone 21735 (TRBV14, TRBJ2-7)
CASSQDRRYEQYF

SEQ ID NO: 43471 - protein, 12 aa, Homo sapiens
  CDR3 for alpha chain variable domain of TCR clone 21736 (TRAV2, TRAJ9)
CAVGAGGFKTIF

SEQ ID NO: 43472 - protein, 13 aa, Homo sapiens
  CDR3 for beta chain variable domain of TCR clone 21736 (TRBV7-9, TRBJ1-2)
CASSLKQNYGYTF

SEQ ID NO: 43473 - protein, 11 aa, Homo sapiens
  CDR3 for alpha chain variable domain of TCR clone 21737 (TRAV3, TRAJ21)
CAVGNFNKFYF

SEQ ID NO: 43474 - protein, 15 aa, Homo sapiens
  CDR3 for beta chain variable domain of TCR clone 21737 (TRBV7-2, TRBJ2-1)
CASSSGLAGGNEQFF

SEQ ID NO: 43475 - protein, 16 aa, Homo sapiens
  CDR3 for alpha chain variable domain of TCR clone 21738 (TRAV4, TRAJ5)
CLVGPDHGHGQESTYF

SEQ ID NO: 43476 - protein, 17 aa, Homo sapiens
  CDR3 for beta chain variable domain of TCR clone 21738 (TRBV11-2, TRBJ2-1)
CASSLYPPGVEYNEQFF

SEQ ID NO: 43477 - protein, 14 aa, Homo sapiens
  CDR3 for alpha chain variable domain of TCR clone 21739 (TRAV29/DV5, TRAJ36)
CAARRKTEANNLFF

SEQ ID NO: 43478 - protein, 14 aa, Homo sapiens
  CDR3 for beta chain variable domain of TCR clone 21739 (TRBV12-5, TRBJ2-5)
CASGSRTHQETQYF

SEQ ID NO: 43479 - protein, 13 aa, Homo sapiens
  CDR3 for alpha chain variable domain of TCR clone 21740 (TRAV12-2, TRAJ20)
CAVYPSNDYKLRF

SEQ ID NO: 43480 - protein, 15 aa, Homo sapiens
  CDR3 for beta chain variable domain of TCR clone 21740 (TRBV27, TRBJ2-5)
CASSLYPRGGETQYF

SEQ ID NO: 43481 - protein, 14 aa, Homo sapiens
  CDR3 for alpha chain variable domain of TCR clone 21741 (TRAV38-1, TRAJ43)
CAFMKHNNNNDIRF

SEQ ID NO: 43482 - protein, 17 aa, Homo sapiens
  CDR3 for beta chain variable domain of TCR clone 21741 (TRBV7-7, TRBJ1-4)
CASSLVGQGASNEKLFF

SEQ ID NO: 43483 - protein, 14 aa, Homo sapiens
  CDR3 for alpha chain variable domain of TCR clone 21742 (TRAV26-1, TRAJ38)
CIADNAGNTRKLIW

SEQ ID NO: 43484 - protein, 13 aa, Homo sapiens
  CDR3 for beta chain variable domain of TCR clone 21742 (TRBV20-1, TRBJ1-1)
CSARGGGNTEAFF

SEQ ID NO: 43485 - protein, 16 aa, Homo sapiens
  CDR3 for alpha chain variable domain of TCR clone 21743 (TRAV30, TRAJ24)
CGTEIVDADSWGKFQF

SEQ ID NO: 43486 - protein, 13 aa, Homo sapiens
  CDR3 for beta chain variable domain of TCR clone 21743 (TRBV4-1, TRBJ1-1)
CASSQLGTGEAFF

SEQ ID NO: 43487 - protein, 16 aa, Homo sapiens
  CDR3 for alpha chain variable domain of TCR clone 21744 (TRAV8-3, TRAJ13)
CAVGAYTSGGYQKVTF

SEQ ID NO: 43488 - protein, 15 aa, Homo sapiens
  CDR3 for beta chain variable domain of TCR clone 21744 (TRBV19, TRBJ1-5)
CASSIVWADNQPQHF

SEQ ID NO: 43489 - protein, 14 aa, Homo sapiens
  CDR3 for alpha chain variable domain of TCR clone 21745 (TRAV29/DV5, TRAJ45)
CAASFRGGADGLTF

SEQ ID NO: 43490 - protein, 11 aa, Homo sapiens
  CDR3 for beta chain variable domain of TCR clone 21745 (TRBV11-2, TRBJ2-2)
CASSLPGELSF

SEQ ID NO: 43491 - protein, 14 aa, Homo sapiens
  CDR3 for alpha chain variable domain of TCR clone 21746 (TRAV13-1, TRAJ44)
CAAKATGTASKLTF

SEQ ID NO: 43492 - protein, 13 aa, Homo sapiens
  CDR3 for beta chain variable domain of TCR clone 21746 (TRBV15, TRBJ1-6)
CATSGGLNSPLHF

SEQ ID NO: 43493 - protein, 14 aa, Homo sapiens
  CDR3 for alpha chain variable domain of TCR clone 21747 (TRAV1-2, TRAJ16)
CAVNRFSDGQKLLF

SEQ ID NO: 43494 - protein, 14 aa, Homo sapiens
  CDR3 for beta chain variable domain of TCR clone 21747 (TRBV11-2, TRBJ1-5)
CASSLDRGRQPQHF

SEQ ID NO: 43495 - protein, 16 aa, Homo sapiens
  CDR3 for alpha chain variable domain of TCR clone 21748 (TRAV26-2, TRAJ48)
CILGPPFNFGNEKLTF

SEQ ID NO: 43496 - protein, 15 aa, Homo sapiens
  CDR3 for beta chain variable domain of TCR clone 21748 (TRBV20-1, TRBJ2-3)
CSARVEGTYTDTQYF

SEQ ID NO: 43497 - protein, 15 aa, Homo sapiens
  CDR3 for alpha chain variable domain of TCR clone 21749 (TRAV25, TRAJ53)
CPTSNSGGSNYKLTF

SEQ ID NO: 43498 - protein, 14 aa, Homo sapiens
  CDR3 for beta chain variable domain of TCR clone 21749 (TRBV11-2, TRBJ2-3)
CASSRLARTDTQHF

SEQ ID NO: 43499 - protein, 17 aa, Homo sapiens
  CDR3 for alpha chain variable domain of TCR clone 21750 (TRAV13-1, TRAJ31)
CAPRDRLVFGDGTQLVV

SEQ ID NO: 43500 - protein, 12 aa, Homo sapiens
  CDR3 for beta chain variable domain of TCR clone 21750 (TRBV7-9, TRBJ2-7)
CASSLEGYEQYF

SEQ ID NO: 43501 - protein, 13 aa, Homo sapiens
  CDR3 for alpha chain variable domain of TCR clone 21751 (TRAV21, TRAJ27)
CAARPGNAGKSTF

SEQ ID NO: 43502 - protein, 14 aa, Homo sapiens
  CDR3 for beta chain variable domain of TCR clone 21751 (TRBV7-6, TRBJ2-3)
CDSSLGTVTDTQYF

SEQ ID NO: 43503 - protein, 14 aa, Homo sapiens
  CDR3 for alpha chain variable domain of TCR clone 21752 (TRAV17, TRAJ22)
CATSPSGSARQLTF

SEQ ID NO: 43504 - protein, 15 aa, Homo sapiens
  CDR3 for beta chain variable domain of TCR clone 21752 (TRBV4-1, TRBJ2-5)
CASSHWDLYQETQYF

SEQ ID NO: 43505 - protein, 13 aa, Homo sapiens
  CDR3 for alpha chain variable domain of TCR clone 21753 (TRAV17, TRAJ9)
CATDYTGGFKTIF

SEQ ID NO: 43506 - protein, 14 aa, Homo sapiens
  CDR3 for beta chain variable domain of TCR clone 21753 (TRBV19, TRBJ2-5)
CASSMTGQQETQYS

SEQ ID NO: 43507 - protein, 15 aa, Homo sapiens
  CDR3 for alpha chain variable domain of TCR clone 21754 (TRAV12-1, TRAJ44)
CVADLPTGPASKLTF

SEQ ID NO: 43508 - protein, 13 aa, Homo sapiens
  CDR3 for beta chain variable domain of TCR clone 21754 (TRBV6-5, TRBJ2-5)
CASSPQGGETQYF

SEQ ID NO: 43509 - protein, 14 aa, Homo sapiens
  CDR3 for alpha chain variable domain of TCR clone 21755 (TRAV21, TRAJ35)
CAVMPIGFGNVMHC

SEQ ID NO: 43510 - protein, 12 aa, Homo sapiens
  CDR3 for beta chain variable domain of TCR clone 21755 (TRBV7-9, TRBJ2-7)
CASSIKREEQYF

SEQ ID NO: 43511 - protein, 13 aa, Homo sapiens
  CDR3 for alpha chain variable domain of TCR clone 21756 (TRAV27, TRAJ41)
CVGEGNSGYALNF

SEQ ID NO: 43512 - protein, 14 aa, Homo sapiens
  CDR3 for beta chain variable domain of TCR clone 21756 (TRBV7-2, TRBJ1-1)
CASSFLTGTTEAFF

SEQ ID NO: 43513 - protein, 17 aa, Homo sapiens
  CDR3 for alpha chain variable domain of TCR clone 21757 (TRAV4, TRAJ18)
CLVGERSVGSTLGRLYF

SEQ ID NO: 43514 - protein, 14 aa, Homo sapiens
  CDR3 for beta chain variable domain of TCR clone 21757 (TRBV6-5, TRBJ1-2)
CASSYDGTGGGDTF

SEQ ID NO: 43515 - protein, 14 aa, Homo sapiens
  CDR3 for alpha chain variable domain of TCR clone 21758 (TRAV17, TRAJ56)
CATVPAGANSKLTF

SEQ ID NO: 43516 - protein, 13 aa, Homo sapiens
  CDR3 for beta chain variable domain of TCR clone 21758 (TRBV12-4, TRBJ2-2)
CASSITGSGEPFF

SEQ ID NO: 43517 - protein, 20 aa, Homo sapiens
  CDR3 for alpha chain variable domain of TCR clone 21759 (TRAV26-1, TRAJ42)
CCVLLHRQTYYGGSQGNLIF

SEQ ID NO: 43518 - protein, 16 aa, Homo sapiens
  CDR3 for beta chain variable domain of TCR clone 21759 (TRBV7-3, TRBJ2-2)
CASSLKRGTLSGELFL

SEQ ID NO: 43519 - protein, 10 aa, Homo sapiens
  CDR3 for alpha chain variable domain of TCR clone 21760 (TRAV23/DV6, TRAJ57)
CAASSTLSQG

SEQ ID NO: 43520 - protein, 14 aa, Homo sapiens
  CDR3 for beta chain variable domain of TCR clone 21760 (TRBV25-1, TRBJ1-1)
CTSTHLGGNTEAFF

SEQ ID NO: 43521 - protein, 12 aa, Homo sapiens
  CDR3 for alpha chain variable domain of TCR clone 21761 (TRAV16, TRAJ10)
CSRTGGGNNLTF

SEQ ID NO: 43522 - protein, 15 aa, Homo sapiens
  CDR3 for beta chain variable domain of TCR clone 21761 (TRBV6-3, TRBJ2-7)
CASSSPGTVFYEQYF

SEQ ID NO: 43523 - protein, 15 aa, Homo sapiens
  CDR3 for alpha chain variable domain of TCR clone 21762 (TRAV26-1, TRAJ29)
CIVRVEGSGNTPLVF

SEQ ID NO: 43524 - protein, 14 aa, Homo sapiens
  CDR3 for beta chain variable domain of TCR clone 21762 (TRBV18, TRBJ2-5)
CASSPVVSQETQYF

SEQ ID NO: 43525 - protein, 14 aa, Homo sapiens
  CDR3 for alpha chain variable domain of TCR clone 21763 (TRAV12-2, TRAJ5)
CAVNRSTGRIALTF

SEQ ID NO: 43526 - protein, 12 aa, Homo sapiens
  CDR3 for beta chain variable domain of TCR clone 21763 (TRBV19, TRBJ1-5)
CASSIAQQPQHF

SEQ ID NO: 43527 - protein, 17 aa, Homo sapiens
  CDR3 for alpha chain variable domain of TCR clone 21764 (TRAV13-1, TRAJ52)
CAASSGAGGTSYGKLTF

SEQ ID NO: 43528 - protein, 15 aa, Homo sapiens
  CDR3 for beta chain variable domain of TCR clone 21764 (TRBV9, TRBJ1-6)
CASSVSGTGDSPLHF

SEQ ID NO: 43529 - protein, 23 aa, Homo sapiens
  CDR3 for alpha chain variable domain of TCR clone 21765 (TRAV21, TRAJ9)
CAVEAVALEASKLSLEQEQDYLL

SEQ ID NO: 43530 - protein, 13 aa, Homo sapiens
  CDR3 for beta chain variable domain of TCR clone 21765 (TRBV12-4, TRBJ1-2)
CASSSGLTVISTF

SEQ ID NO: 43531 - protein, 12 aa, Homo sapiens
  CDR3 for alpha chain variable domain of TCR clone 21766 (TRAV12-3, TRAJ17)
CAMTLTGNKLTF

SEQ ID NO: 43532 - protein, 17 aa, Homo sapiens
  CDR3 for beta chain variable domain of TCR clone 21766 (TRBV20-1, TRBJ2-7)
CSARDRVSGMTSSTSGR

SEQ ID NO: 43533 - protein, 15 aa, Homo sapiens
  CDR3 for alpha chain variable domain of TCR clone 21767 (TRAV34, TRAJ38)
CGADFTPGNNRKLIR

SEQ ID NO: 43534 - protein, 16 aa, Homo sapiens
  CDR3 for beta chain variable domain of TCR clone 21767 (TRBV12-5, TRBJ2-5)
CASGPRTSGNQETQYF

SEQ ID NO: 43535 - protein, 18 aa, Homo sapiens
  CDR3 for alpha chain variable domain of TCR clone 21768 (TRAV26-2, TRAJ54)
CILRDVEVGIRGAQKLVF

SEQ ID NO: 43536 - protein, 16 aa, Homo sapiens
  CDR3 for beta chain variable domain of TCR clone 21768 (TRBV6-1, TRBJ2-5)
CASSETLDRGAETQYF

SEQ ID NO: 43537 - protein, 14 aa, Homo sapiens
  CDR3 for alpha chain variable domain of TCR clone 21769 (TRAV12-2, TRAJ44)
CAVNPAGTASKLTF

SEQ ID NO: 43538 - protein, 14 aa, Homo sapiens
  CDR3 for beta chain variable domain of TCR clone 21769 (TRBV23-1, TRBJ2-5)
CASSFLRSQETQYF

SEQ ID NO: 43539 - protein, 13 aa, Homo sapiens
  CDR3 for alpha chain variable domain of TCR clone 21770 (TRAV21, TRAJ27)
CAALNTNAGKSTF

SEQ ID NO: 43540 - protein, 14 aa, Homo sapiens
  CDR3 for beta chain variable domain of TCR clone 21770 (TRBV27, TRBJ1-1)
CASSLLSGLSEAVF

SEQ ID NO: 43541 - protein, 17 aa, Homo sapiens
  CDR3 for alpha chain variable domain of TCR clone 21771 (TRAV13-1, TRAJ52)
CAASSGAGGTSYGKLTF

SEQ ID NO: 43542 - protein, 13 aa, Homo sapiens
  CDR3 for beta chain variable domain of TCR clone 21771 (TRBV12-4, TRBJ1-2)
CASSSGLTVISTF

SEQ ID NO: 43543 - protein, 12 aa, Homo sapiens
  CDR3 for alpha chain variable domain of TCR clone 21772 (TRAV8-3, TRAJ26)
CAGDNYGQNFVF

SEQ ID NO: 43544 - protein, 15 aa, Homo sapiens
  CDR3 for beta chain variable domain of TCR clone 21772 (TRBV7-3, TRBJ2-1)
CASSPTGGGEVEQFF

SEQ ID NO: 43545 - protein, 13 aa, Homo sapiens
  CDR3 for alpha chain variable domain of TCR clone 21773 (TRAV23/DV6, TRAJ30)
CAASNSGDDKIIF

SEQ ID NO: 43546 - protein, 14 aa, Homo sapiens
  CDR3 for beta chain variable domain of TCR clone 21773 (TRBV28, TRBJ2-1)
CASSRPGLRDEQFF

SEQ ID NO: 43547 - protein, 16 aa, Homo sapiens
  CDR3 for alpha chain variable domain of TCR clone 21774 (TRAV13-1, TRAJ18)
CAASTSGGSTLGRLYF

SEQ ID NO: 43548 - protein, 11 aa, Homo sapiens
  CDR3 for beta chain variable domain of TCR clone 21774 (TRBV7-2, TRBJ2-5)
CASSFGETQYF

SEQ ID NO: 43549 - protein, 15 aa, Homo sapiens
  CDR3 for alpha chain variable domain of TCR clone 21775 (TRAV17, TRAJ57)
CATGPSRGGSEKLVF

SEQ ID NO: 43550 - protein, 15 aa, Homo sapiens
  CDR3 for beta chain variable domain of TCR clone 21775 (TRBV25-1, TRBJ1-4)
CASSPGDSTNEKLFF

SEQ ID NO: 43551 - protein, 13 aa, Homo sapiens
  CDR3 for alpha chain variable domain of TCR clone 21776 (TRAV36/DV7, TRAJ37)
CAVFSSNTGKLIF

SEQ ID NO: 43552 - protein, 16 aa, Homo sapiens
  CDR3 for beta chain variable domain of TCR clone 21776 (TRBV12-4, TRBJ2-5)
CASSFFVRGRRETQYF

SEQ ID NO: 43553 - protein, 16 aa, Homo sapiens
  CDR3 for alpha chain variable domain of TCR clone 21777 (TRAV21, TRAJ37)
CAVRTAGSSNTGKLIF

SEQ ID NO: 43554 - protein, 13 aa, Homo sapiens
  CDR3 for beta chain variable domain of TCR clone 21777 (TRBV7-9, TRBJ2-5)
CASLPSGRGTQYF

SEQ ID NO: 43555 - protein, 17 aa, Homo sapiens
  CDR3 for alpha chain variable domain of TCR clone 21778 (TRAV3, TRAJ7)
CAVRDMSPLEGTTDSLL

SEQ ID NO: 43556 - protein, 17 aa, Homo sapiens
  CDR3 for beta chain variable domain of TCR clone 21778 (TRBV15, TRBJ1-2)
CATSGREIDVVNYGYTF

SEQ ID NO: 43557 - protein, 13 aa, Homo sapiens
  CDR3 for alpha chain variable domain of TCR clone 21779 (TRAV1-1, TRAJ33)
CASHMDSNYQLIW

SEQ ID NO: 43558 - protein, 18 aa, Homo sapiens
  CDR3 for beta chain variable domain of TCR clone 21779 (TRBV20-1, TRBJ2-2)
CSARVQTAHPSGTGELFF

SEQ ID NO: 43559 - protein, 15 aa, Homo sapiens
  CDR3 for alpha chain variable domain of TCR clone 21780 (TRAV3, TRAJ3)
CAVRDRDSSASKLIF

SEQ ID NO: 43560 - protein, 18 aa, Homo sapiens
  CDR3 for beta chain variable domain of TCR clone 21780 (TRBV25-1, TRBJ1-2)
CASSGLQNGQGLIFGYTF

SEQ ID NO: 43561 - protein, 14 aa, Homo sapiens
  CDR3 for alpha chain variable domain of TCR clone 21781 (TRAV1-2, TRAJ16)
CAVNRFSDGQKLLF

SEQ ID NO: 43562 - protein, 14 aa, Homo sapiens
  CDR3 for beta chain variable domain of TCR clone 21781 (TRBV11-2, TRBJ2-5)
CASRPLAGRETQYF

SEQ ID NO: 43563 - protein, 12 aa, Homo sapiens
  CDR3 for alpha chain variable domain of TCR clone 21782 (TRAV3, TRAJ27)
CAVRDKAGKSTF

SEQ ID NO: 43564 - protein, 14 aa, Homo sapiens
  CDR3 for beta chain variable domain of TCR clone 21782 (TRBV5-1, TRBJ1-2)
CASSVDSTNYGDTF

SEQ ID NO: 43565 - protein, 12 aa, Homo sapiens
  CDR3 for alpha chain variable domain of TCR clone 21783 (TRAV3, TRAJ43)
CAVRDPNNDMCF

SEQ ID NO: 43566 - protein, 15 aa, Homo sapiens
  CDR3 for beta chain variable domain of TCR clone 21783 (TRBV27, TRBJ1-5)
CASSLGTGFDQPQHF

SEQ ID NO: 43567 - protein, 13 aa, Homo sapiens
  CDR3 for alpha chain variable domain of TCR clone 21784 (TRAV13-2, TRAJ48)
CAEMDVGNEKLTF

SEQ ID NO: 43568 - protein, 15 aa, Homo sapiens
  CDR3 for beta chain variable domain of TCR clone 21784 (TRBV7-9, TRBJ1-6)
CASSSPGRGNSPLHF

SEQ ID NO: 43569 - protein, 14 aa, Homo sapiens
  CDR3 for alpha chain variable domain of TCR clone 21785 (TRAV12-3, TRAJ58)
CAMSTETSGSRLTF

SEQ ID NO: 43570 - protein, 13 aa, Homo sapiens
  CDR3 for beta chain variable domain of TCR clone 21785 (TRBV27, TRBJ2-3)
CASSWGRTDTRYF

SEQ ID NO: 43571 - protein, 15 aa, Homo sapiens
  CDR3 for alpha chain variable domain of TCR clone 21786 (TRAV25, TRAJ52)
CAGRPGGTSYGKLTF

SEQ ID NO: 43572 - protein, 17 aa, Homo sapiens
  CDR3 for beta chain variable domain of TCR clone 21786 (TRBV7-8, TRBJ2-6)
CASSGGTGGAGANVLTF

SEQ ID NO: 43573 - protein, 16 aa, Homo sapiens
  CDR3 for alpha chain variable domain of TCR clone 21787 (TRAV26-1, TRAJ13)
CIVRVGNSGGYQKVTF

SEQ ID NO: 43574 - protein, 13 aa, Homo sapiens
  CDR3 for beta chain variable domain of TCR clone 21787 (TRBV14, TRBJ1-2)
CASSEDRRYGYTF

SEQ ID NO: 43575 - protein, 18 aa, Homo sapiens
  CDR3 for alpha chain variable domain of TCR clone 21788 (TRAV12-3, TRAJ52)
CAMSEGGAGGTSYGKLTF

SEQ ID NO: 43576 - protein, 15 aa, Homo sapiens
  CDR3 for beta chain variable domain of TCR clone 21788 (TRBV27, TRBJ1-6)
CASSFDRGLGSPLHF

SEQ ID NO: 43577 - protein, 15 aa, Homo sapiens
  CDR3 for alpha chain variable domain of TCR clone 21789 (TRAV8-3, TRAJ27)
CAVGPSKTNAGKSTF

SEQ ID NO: 43578 - protein, 15 aa, Homo sapiens
  CDR3 for beta chain variable domain of TCR clone 21789 (TRBV7-2, TRBJ2-1)
CASSSGLAGGSEQFF

SEQ ID NO: 43579 - protein, 16 aa, Homo sapiens
  CDR3 for alpha chain variable domain of TCR clone 21790 (TRAV30, TRAJ24)
CGTEIVDADSWGKFQF

SEQ ID NO: 43580 - protein, 15 aa, Homo sapiens
  CDR3 for beta chain variable domain of TCR clone 21790 (TRBV5-1, TRBJ2-7)
CASSLNGGPAREQYF

SEQ ID NO: 43581 - protein, 15 aa, Homo sapiens
  CDR3 for alpha chain variable domain of TCR clone 21791 (TRAV21, TRAJ53)
CATLSSGGSNYKLTF

SEQ ID NO: 43582 - protein, 16 aa, Homo sapiens
  CDR3 for beta chain variable domain of TCR clone 21791 (TRBV9, TRBJ2-1)
CASSVGGGGNYNEQFF

SEQ ID NO: 43583 - protein, 12 aa, Homo sapiens
  CDR3 for alpha chain variable domain of TCR clone 21792 (TRAV8-3, TRAJ20)
CAVGANDYELSF

SEQ ID NO: 43584 - protein, 16 aa, Homo sapiens
  CDR3 for beta chain variable domain of TCR clone 21792 (TRBV19, TRBJ2-2)
CASRSPGTGATGELFS

SEQ ID NO: 43585 - protein, 12 aa, Homo sapiens
  CDR3 for alpha chain variable domain of TCR clone 21793 (TRAV13-1, TRAJ53)
AASGGSNYKLTS

SEQ ID NO: 43586 - protein, 12 aa, Homo sapiens
  CDR3 for beta chain variable domain of TCR clone 21793 (TRBV18, TRBJ1-4)
CASSPSREKLFF

SEQ ID NO: 43587 - protein, 14 aa, Homo sapiens
  CDR3 for alpha chain variable domain of TCR clone 21794 (TRAV26-1, TRAJ21)
CIVRPPYNFNKFYF

SEQ ID NO: 43588 - protein, 14 aa, Homo sapiens
  CDR3 for beta chain variable domain of TCR clone 21794 (TRBV19, TRBJ2-1)
CASPTFVLSGEQFL

SEQ ID NO: 43589 - protein, 15 aa, Homo sapiens
  CDR3 for alpha chain variable domain of TCR clone 21795 (TRAV12-3, TRAJ6)
CAMSATTGGSYIPTF

SEQ ID NO: 43590 - protein, 13 aa, Homo sapiens
  CDR3 for beta chain variable domain of TCR clone 21795 (TRBV12-4, TRBJ1-2)
CASSLRQGKGYTF

SEQ ID NO: 43591 - protein, 10 aa, Homo sapiens
  CDR3 for alpha chain variable domain of TCR clone 21796 (TRAV30, TRAJ48)
CGIGNERLTF

SEQ ID NO: 43592 - protein, 14 aa, Homo sapiens
  CDR3 for beta chain variable domain of TCR clone 21796 (TRBV7-6, TRBJ2-3)
CASSVAGGTDTQYF

SEQ ID NO: 43593 - protein, 14 aa, Homo sapiens
  CDR3 for alpha chain variable domain of TCR clone 21797 (TRAV8-3, TRAJ9)
CAVVYNTGGFKTIF

SEQ ID NO: 43594 - protein, 14 aa, Homo sapiens
  CDR3 for beta chain variable domain of TCR clone 21797 (TRBV7-3, TRBJ2-2)
FASSSGGYTGELFF

SEQ ID NO: 43595 - protein, 16 aa, Homo sapiens
  CDR3 for alpha chain variable domain of TCR clone 21798 (TRAV16, TRAJ4)
CALSRMFSGGYNKLIF

SEQ ID NO: 43596 - protein, 13 aa, Homo sapiens
  CDR3 for beta chain variable domain of TCR clone 21798 (TRBV19, TRBJ1-5)
CASSIGGNQPQHF

SEQ ID NO: 43597 - protein, 13 aa, Homo sapiens
  CDR3 for alpha chain variable domain of TCR clone 21799 (TRAV12-1, TRAJ26)
CVVRRSYGQNFVF

SEQ ID NO: 43598 - protein, 14 aa, Homo sapiens
  CDR3 for beta chain variable domain of TCR clone 21799 (TRBV7-2, TRBJ2-7)
CASRSQGAAYEQYF

SEQ ID NO: 43599 - protein, 14 aa, Homo sapiens
  CDR3 for alpha chain variable domain of TCR clone 21800 (TRAV1-2, TRAJ8)
CAVREDTGFQKLVF

SEQ ID NO: 43600 - protein, 15 aa, Homo sapiens
  CDR3 for beta chain variable domain of TCR clone 21800 (TRBV10-3, TRBJ2-3)
CAISLTSGGTDTQYF

SEQ ID NO: 43601 - protein, 23 aa, Homo sapiens
  CDR3 for alpha chain variable domain of TCR clone 21801 (TRAV26-1, )
CIADNAGNDHIQNPDPAVYQLRD

SEQ ID NO: 43602 - protein, 13 aa, Homo sapiens
  CDR3 for beta chain variable domain of TCR clone 21801 (TRBV20-1, TRBJ1-1)
CSARGGGNTEAFF

SEQ ID NO: 43603 - protein, 16 aa, Homo sapiens
  CDR3 for alpha chain variable domain of TCR clone 21802 (TRAV30, TRAJ24)
CGTEIVDADSWGKFQF

SEQ ID NO: 43604 - protein, 14 aa, Homo sapiens
  CDR3 for beta chain variable domain of TCR clone 21802 (TRBV7-9, TRBJ2-4)
CASSLAMGGNIQYL

SEQ ID NO: 43605 - protein, 14 aa, Homo sapiens
  CDR3 for alpha chain variable domain of TCR clone 21803 (TRAV24, TRAJ42)
CAQNYGGSQGNLIL

SEQ ID NO: 43606 - protein, 15 aa, Homo sapiens
  CDR3 for beta chain variable domain of TCR clone 21803 (TRBV19, TRBJ1-5)
CASSIPGGAGQPQHF

SEQ ID NO: 43607 - protein, 14 aa, Homo sapiens
  CDR3 for alpha chain variable domain of TCR clone 21804 (TRAV17, TRAJ16)
CATADFSDGQKLLF

SEQ ID NO: 43608 - protein, 15 aa, Homo sapiens
  CDR3 for beta chain variable domain of TCR clone 21804 (TRBV18, TRBJ2-1)
CASSPPSASYNEKFF

SEQ ID NO: 43609 - protein, 16 aa, Homo sapiens
  CDR3 for alpha chain variable domain of TCR clone 21805 (TRAV3, TRAJ10)
CAVRDMRAGGGNKLTF

SEQ ID NO: 43610 - protein, 15 aa, Homo sapiens
  CDR3 for beta chain variable domain of TCR clone 21805 (TRBV28, TRBJ2-1)
CASSIIAGGRSEQFF

SEQ ID NO: 43611 - protein, 12 aa, Homo sapiens
  CDR3 for alpha chain variable domain of TCR clone 21806 (TRAV8-3, TRAJ20)
CAVGANDYKLSF

SEQ ID NO: 43612 - protein, 16 aa, Homo sapiens
  CDR3 for beta chain variable domain of TCR clone 21806 (TRBV19, TRBJ2-2)
CASRSPGTWATGELFF

SEQ ID NO: 43613 - protein, 12 aa, Homo sapiens
  CDR3 for alpha chain variable domain of TCR clone 21807 (TRAV21, TRAJ33)
CAKMDSNYQLIW

SEQ ID NO: 43614 - protein, 14 aa, Homo sapiens
  CDR3 for beta chain variable domain of TCR clone 21807 (TRBV2, TRBJ2-7)
CASSLTSGGYELYF

SEQ ID NO: 43615 - protein, 14 aa, Homo sapiens
  CDR3 for alpha chain variable domain of TCR clone 21808 (TRAV29/DV5, TRAJ36)
CASRRKTGANNLFF

SEQ ID NO: 43616 - protein, 14 aa, Homo sapiens
  CDR3 for beta chain variable domain of TCR clone 21808 (TRBV12-5, TRBJ2-5)
CASGSRTHQETQYF

SEQ ID NO: 43617 - protein, 11 aa, Homo sapiens
  CDR3 for alpha chain variable domain of TCR clone 21809 (TRAV3, TRAJ21)
CAVGNFIKFYF

SEQ ID NO: 43618 - protein, 16 aa, Homo sapiens
  CDR3 for beta chain variable domain of TCR clone 21809 (TRBV19, TRBJ2-1)
CASSKAGPSSYNEQFF

SEQ ID NO: 43619 - protein, 14 aa, Homo sapiens
  CDR3 for alpha chain variable domain of TCR clone 21810 (TRAV12-2, TRAJ17)
CAVLFKAAGNKLTF

SEQ ID NO: 43620 - protein, 14 aa, Homo sapiens
  CDR3 for beta chain variable domain of TCR clone 21810 (TRBV19, TRBJ2-1)
CASPTLVLSGEQFF

SEQ ID NO: 43621 - protein, 12 aa, Homo sapiens
  CDR3 for alpha chain variable domain of TCR clone 21811 (TRAV13-2, TRAJ23)
CAERHRGGKLIF

SEQ ID NO: 43622 - protein, 14 aa, Homo sapiens
  CDR3 for beta chain variable domain of TCR clone 21811 (TRBV7-2, TRBJ2-7)
CASSPKTSFYEQYF

SEQ ID NO: 43623 - protein, 14 aa, Homo sapiens
  CDR3 for alpha chain variable domain of TCR clone 21812 (TRAV1-2, TRAJ8)
CAVREDTGFQKLVF

SEQ ID NO: 43624 - protein, 16 aa, Homo sapiens
  CDR3 for beta chain variable domain of TCR clone 21812 (TRBV9, TRBJ2-1)
CASSVGGGGNYNEQFF

SEQ ID NO: 43625 - protein, 12 aa, Homo sapiens
  CDR3 for alpha chain variable domain of TCR clone 21813 (TRAV2, TRAJ9)
CAVGAGGFKTIF

SEQ ID NO: 43626 - protein, 16 aa, Homo sapiens
  CDR3 for beta chain variable domain of TCR clone 21813 (TRBV13, TRBJ2-2)
CASSPRTGEHTGEMFF

SEQ ID NO: 43627 - protein, 15 aa, Homo sapiens
  CDR3 for alpha chain variable domain of TCR clone 21814 (TRAV12-2, TRAJ43)
CAFDMRFGAGARLTV

SEQ ID NO: 43628 - protein, 15 aa, Homo sapiens
  CDR3 for beta chain variable domain of TCR clone 21814 (TRBV5-1, TRBJ2-3)
CASSVTSGSTDTQYF

SEQ ID NO: 43629 - protein, 14 aa, Homo sapiens
  CDR3 for alpha chain variable domain of TCR clone 21815 (TRAV13-2, TRAJ43)
CAEIPTYNNNDMRF

SEQ ID NO: 43630 - protein, 13 aa, Homo sapiens
  CDR3 for beta chain variable domain of TCR clone 21815 (TRBV27, TRBJ2-7)
CASSLTTGYEQYF

SEQ ID NO: 43631 - protein, 13 aa, Homo sapiens
  CDR3 for alpha chain variable domain of TCR clone 21816 (TRAV16, TRAJ21)
CLRLGHNFNKFYF

SEQ ID NO: 43632 - protein, 15 aa, Homo sapiens
  CDR3 for beta chain variable domain of TCR clone 21816 (TRBV19, TRBJ2-1)
CASSIQATSYNEQFF

SEQ ID NO: 43633 - protein, 12 aa, Homo sapiens
  CDR3 for alpha chain variable domain of TCR clone 21817 (TRAV27, TRAJ35)
CAGADFGNVLHR

SEQ ID NO: 43634 - protein, 16 aa, Homo sapiens
  CDR3 for beta chain variable domain of TCR clone 21817 (TRBV6-1, TRBJ2-1)
CASILRQGSSYNEQFF

SEQ ID NO: 43635 - protein, 14 aa, Homo sapiens
  CDR3 for alpha chain variable domain of TCR clone 21818 (TRAV35, TRAJ34)
CAGRGTPTSSSLGL

SEQ ID NO: 43636 - protein, 13 aa, Homo sapiens
  CDR3 for beta chain variable domain of TCR clone 21818 (TRBV19, TRBJ2-7)
CASSIDRTYEQYF

SEQ ID NO: 43637 - protein, 11 aa, Homo sapiens
  CDR3 for alpha chain variable domain of TCR clone 21819 (TRAV1-2, TRAJ20)
CAVANDYELSF

SEQ ID NO: 43638 - protein, 18 aa, Homo sapiens
  CDR3 for beta chain variable domain of TCR clone 21819 (TRBV20-1, TRBJ2-6)
CSAETTPTHGSGANVLTF

SEQ ID NO: 43639 - protein, 19 aa, Homo sapiens
  CDR3 for alpha chain variable domain of TCR clone 21820 (TRAV30, TRAJ54)
CGTEQIRDSGSSGSQKLVF

SEQ ID NO: 43640 - protein, 11 aa, Homo sapiens
  CDR3 for beta chain variable domain of TCR clone 21820 (TRBV25-1, TRBJ2-4)
CQSRDQNIQYF

SEQ ID NO: 43641 - protein, 13 aa, Homo sapiens
  CDR3 for alpha chain variable domain of TCR clone 21821 (TRAV21, TRAJ27)
CAARPGTAGKSTF

SEQ ID NO: 43642 - protein, 14 aa, Homo sapiens
  CDR3 for beta chain variable domain of TCR clone 21821 (TRBV11-2, TRBJ2-7)
CASSLGAGAYEQYF

SEQ ID NO: 43643 - protein, 14 aa, Homo sapiens
  CDR3 for alpha chain variable domain of TCR clone 21822 (TRAV1-2, TRAJ16)
CAVNRFSDGQKLLF

SEQ ID NO: 43644 - protein, 12 aa, Homo sapiens
  CDR3 for beta chain variable domain of TCR clone 21822 (TRBV7-9, TRBJ1-5)
CASSPQGQPQHF

SEQ ID NO: 43645 - protein, 17 aa, Homo sapiens
  CDR3 for alpha chain variable domain of TCR clone 21823 (TRAV3, TRAJ6)
CAVRDGPRAGGSYIPTF

SEQ ID NO: 43646 - protein, 15 aa, Homo sapiens
  CDR3 for beta chain variable domain of TCR clone 21823 (TRBV7-9, TRBJ2-7)
CASSLALAEAYEQYF

SEQ ID NO: 43647 - protein, 18 aa, Homo sapiens
  CDR3 for alpha chain variable domain of TCR clone 21824 (TRAV12-3, TRAJ52)
CAMSVGGAGGTSYGKLTF

SEQ ID NO: 43648 - protein, 15 aa, Homo sapiens
  CDR3 for beta chain variable domain of TCR clone 21824 (TRBV27, TRBJ1-6)
CASSFDRGLGSALHF

SEQ ID NO: 43649 - protein, 13 aa, Homo sapiens
  CDR3 for alpha chain variable domain of TCR clone 21825 (TRAV8-3, TRAJ43)
CAVGPDNNNDMRF

SEQ ID NO: 43650 - protein, 12 aa, Homo sapiens
  CDR3 for beta chain variable domain of TCR clone 21825 (TRBV7-2, TRBJ1-6)
CASSLSSSHLHF

SEQ ID NO: 43651 - protein, 15 aa, Homo sapiens
  CDR3 for alpha chain variable domain of TCR clone 21826 (TRAV38-1, TRAJ37)
CAFIHGSGNTGKLIF

SEQ ID NO: 43652 - protein, 12 aa, Homo sapiens
  CDR3 for beta chain variable domain of TCR clone 21826 (TRBV7-9, TRBJ2-7)
CASSCGSYEQYF

SEQ ID NO: 43653 - protein, 14 aa, Homo sapiens
  CDR3 for alpha chain variable domain of TCR clone 21827 (TRAV29/DV5, TRAJ36)
CAARRKTGANKLFF

SEQ ID NO: 43654 - protein, 14 aa, Homo sapiens
  CDR3 for beta chain variable domain of TCR clone 21827 (TRBV12-5, TRBJ2-5)
CASGSRTHQETQYF

SEQ ID NO: 43655 - protein, 12 aa, Homo sapiens
  CDR3 for alpha chain variable domain of TCR clone 21828 (TRAV3, TRAJ39)
CAVMEWSNMLTF

SEQ ID NO: 43656 - protein, 14 aa, Homo sapiens
  CDR3 for beta chain variable domain of TCR clone 21828 (TRBV7-8, TRBJ2-3)
CASSFPDGQDTQYF

SEQ ID NO: 43657 - protein, 14 aa, Homo sapiens
  CDR3 for alpha chain variable domain of TCR clone 21829 (TRAV12-1, TRAJ12)
CVVTRLDSSYKLIF

SEQ ID NO: 43658 - protein, 13 aa, Homo sapiens
  CDR3 for beta chain variable domain of TCR clone 21829 (TRBV20-1, TRBJ1-1)
CSARGGGNTEAFF

SEQ ID NO: 43659 - protein, 15 aa, Homo sapiens
  CDR3 for alpha chain variable domain of TCR clone 21830 (TRAV3, TRAJ20)
CAVRDIKLSDYKLSF

SEQ ID NO: 43660 - protein, 15 aa, Homo sapiens
  CDR3 for beta chain variable domain of TCR clone 21830 (TRBV7-9, TRBJ1-6)
CASSSPGRGNSPRHF

SEQ ID NO: 43661 - protein, 14 aa, Homo sapiens
  CDR3 for alpha chain variable domain of TCR clone 21831 (TRAV12-3, TRAJ10)
SHLPLTGGGNKLTF

SEQ ID NO: 43662 - protein, 15 aa, Homo sapiens
  CDR3 for beta chain variable domain of TCR clone 21831 (TRBV5-1, TRBJ2-3)
CASSVTSGSTDTQYF

SEQ ID NO: 43663 - protein, 17 aa, Homo sapiens
  CDR3 for alpha chain variable domain of TCR clone 21832 (TRAV23/DV6, TRAJ57)
CAASSTLSQGGSEKLVF

SEQ ID NO: 43664 - protein, 14 aa, Homo sapiens
  CDR3 for beta chain variable domain of TCR clone 21832 (TRBV25-1, TRBJ1-1)
CSSTHLGGNTEAFF

SEQ ID NO: 43665 - protein, 14 aa, Homo sapiens
  CDR3 for alpha chain variable domain of TCR clone 21833 (TRAV2, TRAJ37)
CAVDFTSNTGKLIF

SEQ ID NO: 43666 - protein, 15 aa, Homo sapiens
  CDR3 for beta chain variable domain of TCR clone 21833 (TRBV6-3, TRBJ2-7)
CASSSPGTVFYEQYF

SEQ ID NO: 43667 - protein, 18 aa, Homo sapiens
  CDR3 for alpha chain variable domain of TCR clone 21834 (TRAV26-1, TRAJ23)
CIVRVGLEVWNQGGKLIF

SEQ ID NO: 43668 - protein, 16 aa, Homo sapiens
  CDR3 for beta chain variable domain of TCR clone 21834 (TRBV12-4, TRBJ2-5)
CASSLFVRGRQETQYF

SEQ ID NO: 43669 - protein, 14 aa, Homo sapiens
  CDR3 for alpha chain variable domain of TCR clone 21835 (TRAV12-2, TRAJ11)
CAVNRESGYSTLTS

SEQ ID NO: 43670 - protein, 10 aa, Homo sapiens
  CDR3 for beta chain variable domain of TCR clone 21835 (TRBV20-1, TRBJ2-5)
CSARFETQYF

SEQ ID NO: 43671 - protein, 10 aa, Homo sapiens
  CDR3 for alpha chain variable domain of TCR clone 21836 (TRAV1-2, TRAJ20)
CACNDYKLSF

SEQ ID NO: 43672 - protein, 16 aa, Homo sapiens
  CDR3 for beta chain variable domain of TCR clone 21836 (TRBV20-1, TRBJ2-1)
CSARDLKQGMNNGQFF

SEQ ID NO: 43673 - protein, 16 aa, Homo sapiens
  CDR3 for alpha chain variable domain of TCR clone 21837 (TRAV30, TRAJ24)
CGTEIVDADSWGKFQF

SEQ ID NO: 43674 - protein, 16 aa, Homo sapiens
  CDR3 for beta chain variable domain of TCR clone 21837 (TRBV29-1, TRBJ2-7)
CSVEVVGTSGSYEQYF

SEQ ID NO: 43675 - protein, 19 aa, Homo sapiens
  CDR3 for alpha chain variable domain of TCR clone 21838 (TRAV29/DV5, TRAJ49)
CSVLLCSKLTVDTGNQFYF

SEQ ID NO: 43676 - protein, 16 aa, Homo sapiens
  CDR3 for beta chain variable domain of TCR clone 21838 (TRBV13, TRBJ2-3)
CQQPLQGSGGRNTQYF

SEQ ID NO: 43677 - protein, 16 aa, Homo sapiens
  CDR3 for alpha chain variable domain of TCR clone 21839 (TRAV1-2, TRAJ10)
CAVRGVLTGGGNKLTF

SEQ ID NO: 43678 - protein, 12 aa, Homo sapiens
  CDR3 for beta chain variable domain of TCR clone 21839 (TRBV7-8, TRBJ2-7)
CASSLGDRERYF

SEQ ID NO: 43679 - protein, 13 aa, Homo sapiens
  CDR3 for alpha chain variable domain of TCR clone 21840 (TRAV2, TRAJ40)
CAVVTSGTYKYIF

SEQ ID NO: 43680 - protein, 15 aa, Homo sapiens
  CDR3 for beta chain variable domain of TCR clone 21840 (TRBV11-3, TRBJ2-3)
CASLNDGREGDTQYF

SEQ ID NO: 43681 - protein, 15 aa, Homo sapiens
  CDR3 for alpha chain variable domain of TCR clone 21841 (TRAV20, TRAJ58)
CAVQDLETSGSRLTF

SEQ ID NO: 43682 - protein, 16 aa, Homo sapiens
  CDR3 for beta chain variable domain of TCR clone 21841 (TRBV19, TRBJ2-1)
CASSKAGPSSYNEQFF

SEQ ID NO: 43683 - protein, 14 aa, Homo sapiens
  CDR3 for alpha chain variable domain of TCR clone 21842 (TRAV1-2, TRAJ16)
CAVNLFSDGQKLLF

SEQ ID NO: 43684 - protein, 15 aa, Homo sapiens
  CDR3 for beta chain variable domain of TCR clone 21842 (TRBV20-1, TRBJ1-1)
CSASRGVTGNTEAFF

SEQ ID NO: 43685 - protein, 12 aa, Homo sapiens
  CDR3 for alpha chain variable domain of TCR clone 21843 (TRAV17, TRAJ12)
CATLRSGYKLIF

SEQ ID NO: 43686 - protein, 16 aa, Homo sapiens
  CDR3 for beta chain variable domain of TCR clone 21843 (TRBV28, TRBJ2-7)
CASSLFFETGGPEQYF

SEQ ID NO: 43687 - protein, 14 aa, Homo sapiens
  CDR3 for alpha chain variable domain of TCR clone 21844 (TRAV12-2, TRAJ13)
CAVKKTGGYQKVTF

SEQ ID NO: 43688 - protein, 16 aa, Homo sapiens
  CDR3 for beta chain variable domain of TCR clone 21844 (TRBV27, TRBJ2-2)
CASSFRGLVRTGELFF

SEQ ID NO: 43689 - protein, 15 aa, Homo sapiens
  CDR3 for alpha chain variable domain of TCR clone 21845 (TRAV9-2, TRAJ8)
CALRGLNTGFQKLVF

SEQ ID NO: 43690 - protein, 13 aa, Homo sapiens
  CDR3 for beta chain variable domain of TCR clone 21845 (TRBV20-1, TRBJ1-1)
CSARGGGNTEAFF

SEQ ID NO: 43691 - protein, 15 aa, Homo sapiens
  CDR3 for alpha chain variable domain of TCR clone 21846 (TRAV2, TRAJ9)
CAVEDRGTGGFETIF

SEQ ID NO: 43692 - protein, 14 aa, Homo sapiens
  CDR3 for beta chain variable domain of TCR clone 21846 (TRBV4-1, TRBJ2-2)
CASSQAVNTGELFF

SEQ ID NO: 43693 - protein, 12 aa, Homo sapiens
  CDR3 for alpha chain variable domain of TCR clone 21847 (TRAV13-1, TRAJ24)
CAALGSWGKLQF

SEQ ID NO: 43694 - protein, 17 aa, Homo sapiens
  CDR3 for beta chain variable domain of TCR clone 21847 (TRBV28, TRBJ2-5)
CASSTPEGDALQETQYF

SEQ ID NO: 43695 - protein, 13 aa, Homo sapiens
  CDR3 for alpha chain variable domain of TCR clone 21848 (TRAV2, TRAJ15)
CAVASQAGTALIF

SEQ ID NO: 43696 - protein, 15 aa, Homo sapiens
  CDR3 for beta chain variable domain of TCR clone 21848 (TRBV28, TRBJ2-7)
CASKAGGYTSSTSGR

SEQ ID NO: 43697 - protein, 12 aa, Homo sapiens
  CDR3 for alpha chain variable domain of TCR clone 21849 (TRAV1-1, TRAJ39)
CAVPVVGNMLTF

SEQ ID NO: 43698 - protein, 15 aa, Homo sapiens
  CDR3 for beta chain variable domain of TCR clone 21849 (TRBV19, TRBJ1-6)
CASSTQGAVGSPLLF

SEQ ID NO: 43699 - protein, 15 aa, Homo sapiens
  CDR3 for alpha chain variable domain of TCR clone 21850 (TRAV29/DV5, TRAJ29)
CAASERSPGNTPLVF

SEQ ID NO: 43700 - protein, 17 aa, Homo sapiens
  CDR3 for beta chain variable domain of TCR clone 21850 (TRBV4-1, TRBJ1-4)
CASSQEGPRGVEEKLFF

SEQ ID NO: 43701 - protein, 15 aa, Homo sapiens
  CDR3 for alpha chain variable domain of TCR clone 21851 (TRAV16, TRAJ39)
RALSPSNNAGNMLTF

SEQ ID NO: 43702 - protein, 14 aa, Homo sapiens
  CDR3 for beta chain variable domain of TCR clone 21851 (TRBV7-7, TRBJ2-7)
CASSPGGPTYEQYF

SEQ ID NO: 43703 - protein, 14 aa, Homo sapiens
  CDR3 for alpha chain variable domain of TCR clone 21852 (TRAV27, TRAJ49)
CAGRPEGTGNQFYF

SEQ ID NO: 43704 - protein, 12 aa, Homo sapiens
  CDR3 for beta chain variable domain of TCR clone 21852 (TRBV12-4, TRBJ2-7)
CASSLGGYEQYF

SEQ ID NO: 43705 - protein, 12 aa, Homo sapiens
  CDR3 for alpha chain variable domain of TCR clone 21853 (TRAV2, TRAJ31)
RAVEEGNARLMF

SEQ ID NO: 43706 - protein, 18 aa, Homo sapiens
  CDR3 for beta chain variable domain of TCR clone 21853 (TRBV7-9, TRBJ2-3)
CASSLDLAGLATPDTQYF

SEQ ID NO: 43707 - protein, 14 aa, Homo sapiens
  CDR3 for alpha chain variable domain of TCR clone 21854 (TRAV2, TRAJ37)
CAVDFASNTGKLIF

SEQ ID NO: 43708 - protein, 15 aa, Homo sapiens
  CDR3 for beta chain variable domain of TCR clone 21854 (TRBV20-1, TRBJ1-1)
CSASRGVTGNTEAFF

SEQ ID NO: 43709 - protein, 13 aa, Homo sapiens
  CDR3 for alpha chain variable domain of TCR clone 21855 (TRAV13-2, TRAJ45)
CAERRGGADGLTF

SEQ ID NO: 43710 - protein, 15 aa, Homo sapiens
  CDR3 for beta chain variable domain of TCR clone 21855 (TRBV7-2, TRBJ2-3)
CASSLAGAFIDTQYF

SEQ ID NO: 43711 - protein, 17 aa, Homo sapiens
  CDR3 for alpha chain variable domain of TCR clone 21856 (TRAV13-1, TRAJ31)
CAPRDRLMFGDGTPLVV

SEQ ID NO: 43712 - protein, 12 aa, Homo sapiens
  CDR3 for beta chain variable domain of TCR clone 21856 (TRBV7-9, TRBJ2-7)
CASSLEGYEQYF

SEQ ID NO: 43713 - protein, 12 aa, Homo sapiens
  CDR3 for alpha chain variable domain of TCR clone 21857 (TRAV30, TRAJ43)
CGTEERGNDMRF

SEQ ID NO: 43714 - protein, 13 aa, Homo sapiens
  CDR3 for beta chain variable domain of TCR clone 21857 (TRBV27, TRBJ2-7)
CASSFSQGHEQYF

SEQ ID NO: 43715 - protein, 15 aa, Homo sapiens
  CDR3 for alpha chain variable domain of TCR clone 21858 (TRAV35, TRAJ23)
CAGPLGNNQEGKLIF

SEQ ID NO: 43716 - protein, 14 aa, Homo sapiens
  CDR3 for beta chain variable domain of TCR clone 21858 (TRBV7-9, TRBJ1-1)
CASTPLQSYTEAFF

SEQ ID NO: 43717 - protein, 13 aa, Homo sapiens
  CDR3 for alpha chain variable domain of TCR clone 21859 (TRAV8-3, TRAJ48)
CAVVPFGDEKLTF

SEQ ID NO: 43718 - protein, 15 aa, Homo sapiens
  CDR3 for beta chain variable domain of TCR clone 21859 (TRBV11-2, TRBJ2-1)
CASSSPSTRYNEQFF

SEQ ID NO: 43719 - protein, 14 aa, Homo sapiens
  CDR3 for alpha chain variable domain of TCR clone 21860 (TRAV21, TRAJ21)
CAVKGFGNFNKFYF

SEQ ID NO: 43720 - protein, 13 aa, Homo sapiens
  CDR3 for beta chain variable domain of TCR clone 21860 (TRBV18, TRBJ1-1)
CASSPETRPEAFF

SEQ ID NO: 43721 - protein, 16 aa, Homo sapiens
  CDR3 for alpha chain variable domain of TCR clone 21861 (TRAV30, TRAJ24)
CGTEIVDADSWGKFQF

SEQ ID NO: 43722 - protein, 14 aa, Homo sapiens
  CDR3 for beta chain variable domain of TCR clone 21861 (TRBV12-5, TRBJ2-5)
CASGSRTHQETPYF

SEQ ID NO: 43723 - protein, 12 aa, Homo sapiens
  CDR3 for alpha chain variable domain of TCR clone 21862 (TRAV12-3, TRAJ17)
CAMTLTGNKLTF

SEQ ID NO: 43724 - protein, 12 aa, Homo sapiens
  CDR3 for beta chain variable domain of TCR clone 21862 (TRBV19, TRBJ2-1)
CASSRQGAEQFF

SEQ ID NO: 43725 - protein, 15 aa, Homo sapiens
  CDR3 for alpha chain variable domain of TCR clone 21863 (TRAV12-2, TRAJ43)
CAFDMRFGAGTRLTV

SEQ ID NO: 43726 - protein, 18 aa, Homo sapiens
  CDR3 for beta chain variable domain of TCR clone 21863 (TRBV20-1, TRBJ2-3)
CSASGLAGGPGTTDTQYL

SEQ ID NO: 43727 - protein, 10 aa, Homo sapiens
  CDR3 for alpha chain variable domain of TCR clone 21864 (TRAV23/DV6, TRAJ57)
CAASSTLSQG

SEQ ID NO: 43728 - protein, 14 aa, Homo sapiens
  CDR3 for beta chain variable domain of TCR clone 21864 (TRBV25-1, TRBJ1-1)
YASTHLGGNTEAFF

SEQ ID NO: 43729 - protein, 15 aa, Homo sapiens
  CDR3 for alpha chain variable domain of TCR clone 21865 (TRAV23/DV6, TRAJ37)
CAAGEGPSNTGKLIF

SEQ ID NO: 43730 - protein, 17 aa, Homo sapiens
  CDR3 for beta chain variable domain of TCR clone 21865 (TRBV20-1, TRBJ2-7)
CSATRAGGVAGVEEQYF

SEQ ID NO: 43731 - protein, 15 aa, Homo sapiens
  CDR3 for alpha chain variable domain of TCR clone 21866 (TRAV21, TRAJ24)
SAARSSTDSWGKLQF

SEQ ID NO: 43732 - protein, 13 aa, Homo sapiens
  CDR3 for beta chain variable domain of TCR clone 21866 (TRBV11-2, TRBJ2-5)
CASSSTGEETQYF

SEQ ID NO: 43733 - protein, 17 aa, Homo sapiens
  CDR3 for alpha chain variable domain of TCR clone 21867 (TRAV3, TRAJ38)
CAVRDCLNAGNNRKRIW

SEQ ID NO: 43734 - protein, 14 aa, Homo sapiens
  CDR3 for beta chain variable domain of TCR clone 21867 (TRBV5-5, TRBJ1-5)
CASSGQGVDQPQHF

SEQ ID NO: 43735 - protein, 14 aa, Homo sapiens
  CDR3 for alpha chain variable domain of TCR clone 21868 (TRAV12-2, TRAJ17)
CAVLFKAAGNKLTF

SEQ ID NO: 43736 - protein, 14 aa, Homo sapiens
  CDR3 for beta chain variable domain of TCR clone 21868 (TRBV25-1, TRBJ1-1)
CASTHLGGNTEAFF

SEQ ID NO: 43737 - protein, 11 aa, Homo sapiens
  CDR3 for alpha chain variable domain of TCR clone 21869 (TRAV12-3, TRAJ41)
CAMNAREAPNF

SEQ ID NO: 43738 - protein, 16 aa, Homo sapiens
  CDR3 for beta chain variable domain of TCR clone 21869 (TRBV7-8, TRBJ2-3)
CASSTEGQRETDTQYF

SEQ ID NO: 43739 - protein, 14 aa, Homo sapiens
  CDR3 for alpha chain variable domain of TCR clone 21870 (TRAV9-2, TRAJ39)
CALYIYNAGNMLTF

SEQ ID NO: 43740 - protein, 15 aa, Homo sapiens
  CDR3 for beta chain variable domain of TCR clone 21870 (TRBV12-4, TRBJ1-1)
CASSLAVSRGAEAFF

SEQ ID NO: 43741 - protein, 12 aa, Homo sapiens
  CDR3 for alpha chain variable domain of TCR clone 21871 (TRAV13-1, TRAJ21)
CAAKEGFNKFYF

SEQ ID NO: 43742 - protein, 13 aa, Homo sapiens
  CDR3 for beta chain variable domain of TCR clone 21871 (TRBV10-3, TRBJ2-7)
CASKLAVNYEQYF

SEQ ID NO: 43743 - protein, 16 aa, Homo sapiens
  CDR3 for alpha chain variable domain of TCR clone 21872 (TRAV8-3, TRAJ13)
CAVGAYPSGGYQKVTF

SEQ ID NO: 43744 - protein, 15 aa, Homo sapiens
  CDR3 for beta chain variable domain of TCR clone 21872 (TRBV19, TRBJ1-5)
CASSTVWADNQPQHF

SEQ ID NO: 43745 - protein, 16 aa, Homo sapiens
  CDR3 for alpha chain variable domain of TCR clone 21873 (TRAV30, TRAJ24)
CGTEIVDADSWAKFQF

SEQ ID NO: 43746 - protein, 14 aa, Homo sapiens
  CDR3 for beta chain variable domain of TCR clone 21873 (TRBV12-5, TRBJ2-5)
CASGSRTHQETQYF

SEQ ID NO: 43747 - protein, 15 aa, Homo sapiens
  CDR3 for alpha chain variable domain of TCR clone 21874 (TRAV8-3, TRAJ45)
CASSYSGGGADGLTF

SEQ ID NO: 43748 - protein, 17 aa, Homo sapiens
  CDR3 for beta chain variable domain of TCR clone 21874 (TRBV13, TRBJ2-3)
CASSLSRVAGGRNTQYF

SEQ ID NO: 43749 - protein, 15 aa, Homo sapiens
  CDR3 for alpha chain variable domain of TCR clone 21875 (TRAV27, TRAJ38)
CAARRNAGNNRKLIW

SEQ ID NO: 43750 - protein, 13 aa, Homo sapiens
  CDR3 for beta chain variable domain of TCR clone 21875 (TRBV12-5, TRBJ2-3)
CASGNRQSDTQYF

SEQ ID NO: 43751 - protein, 16 aa, Homo sapiens
  CDR3 for alpha chain variable domain of TCR clone 21876 (TRAV30, TRAJ24)
CGTEIVDADSWGKFQF

SEQ ID NO: 43752 - protein, 14 aa, Homo sapiens
  CDR3 for beta chain variable domain of TCR clone 21876 (TRBV11-2, TRBJ2-3)
CASSRLARTDTQYF

SEQ ID NO: 43753 - protein, 15 aa, Homo sapiens
  CDR3 for alpha chain variable domain of TCR clone 21877 (TRAV27, TRAJ38)
CAGRFNAGNNRKLIW

SEQ ID NO: 43754 - protein, 13 aa, Homo sapiens
  CDR3 for beta chain variable domain of TCR clone 21877 (TRBV12-5, TRBJ2-3)
CASQNRGTDTQYF

SEQ ID NO: 43755 - protein, 15 aa, Homo sapiens
  CDR3 for alpha chain variable domain of TCR clone 21878 (TRAV1-2, TRAJ12)
CADARWMDSSYKLIF

SEQ ID NO: 43756 - protein, 21 aa, Homo sapiens
  CDR3 for beta chain variable domain of TCR clone 21878 (TRBV11-2, TRBJ2-7)
LRTRPCISVPAAVGGLDEQYF

SEQ ID NO: 43757 - protein, 14 aa, Homo sapiens
  CDR3 for alpha chain variable domain of TCR clone 21879 (TRAV17, TRAJ16)
CATADFSDSQKLLF

SEQ ID NO: 43758 - protein, 15 aa, Homo sapiens
  CDR3 for beta chain variable domain of TCR clone 21879 (TRBV18, TRBJ2-1)
CASSPPSASYNEQFF

SEQ ID NO: 43759 - protein, 14 aa, Homo sapiens
  CDR3 for alpha chain variable domain of TCR clone 21880 (TRAV12-2, TRAJ17)
CAVLFKAAGNKLTF

SEQ ID NO: 43760 - protein, 20 aa, Homo sapiens
  CDR3 for beta chain variable domain of TCR clone 21880 (TRBV28, TRBJ2-1)
CASTPIGRSPGLAGGNEQFF

SEQ ID NO: 43761 - protein, 15 aa, Homo sapiens
  CDR3 for alpha chain variable domain of TCR clone 21881 (TRAV26-1, TRAJ29)
CIVRVVGSGNTPLVF

SEQ ID NO: 43762 - protein, 15 aa, Homo sapiens
  CDR3 for beta chain variable domain of TCR clone 21881 (TRBV7-9, TRBJ1-5)
CASSQGHQPNQPQHF

SEQ ID NO: 43763 - protein, 15 aa, Homo sapiens
  CDR3 for alpha chain variable domain of TCR clone 21882 (TRAV13-1, TRAJ17)
CAASIERAAGNKLTF

SEQ ID NO: 43764 - protein, 12 aa, Homo sapiens
  CDR3 for beta chain variable domain of TCR clone 21882 (TRBV5-7, TRBJ1-1)
CASSLGRGKASF

SEQ ID NO: 43765 - protein, 10 aa, Homo sapiens
  CDR3 for alpha chain variable domain of TCR clone 21883 (TRAV23/DV6, TRAJ57)
CAASSTLSQG

SEQ ID NO: 43766 - protein, 14 aa, Homo sapiens
  CDR3 for beta chain variable domain of TCR clone 21883 (TRBV25-1, TRBJ1-1)
CASTPLGGNTEAFF

SEQ ID NO: 43767 - protein, 10 aa, Homo sapiens
  CDR3 for alpha chain variable domain of TCR clone 21884 (TRAV12-2, TRAJ52)
RSTSYGKLTF

SEQ ID NO: 43768 - protein, 12 aa, Homo sapiens
  CDR3 for beta chain variable domain of TCR clone 21884 (TRBV29-1, TRBJ2-3)
CSVTGGADTQYF

SEQ ID NO: 43769 - protein, 15 aa, Homo sapiens
  CDR3 for alpha chain variable domain of TCR clone 21885 (TRAV26-1, TRAJ29)
CIVRVEGSGNTPLVF

SEQ ID NO: 43770 - protein, 14 aa, Homo sapiens
  CDR3 for beta chain variable domain of TCR clone 21885 (TRBV18, TRBJ2-5)
CASSPGVSQDTQYF

SEQ ID NO: 43771 - protein, 16 aa, Homo sapiens
  CDR3 for alpha chain variable domain of TCR clone 21886 (TRAV30, TRAJ24)
CGTEIVDADSWGKFQF

SEQ ID NO: 43772 - protein, 14 aa, Homo sapiens
  CDR3 for beta chain variable domain of TCR clone 21886 (TRBV15, TRBJ2-3)
CATRSGTSTDTQYF

SEQ ID NO: 43773 - protein, 14 aa, Homo sapiens
  CDR3 for alpha chain variable domain of TCR clone 21887 (TRAV17, TRAJ22)
CATSPSVSARQLTF

SEQ ID NO: 43774 - protein, 15 aa, Homo sapiens
  CDR3 for beta chain variable domain of TCR clone 21887 (TRBV4-1, TRBJ2-5)
CASSQWDLYQETQYF

SEQ ID NO: 43775 - protein, 15 aa, Homo sapiens
  CDR3 for alpha chain variable domain of TCR clone 21888 (TRAV17, TRAJ57)
CATGPSQGGSEKLVF

SEQ ID NO: 43776 - protein, 16 aa, Homo sapiens
  CDR3 for beta chain variable domain of TCR clone 21888 (TRBV12-4, TRBJ1-5)
CVSSRPVGGSNQPQHF

SEQ ID NO: 43777 - protein, 14 aa, Homo sapiens
  CDR3 for alpha chain variable domain of TCR clone 21889 (TRAV26-1, TRAJ38)
CIADNAGNNRKLIW

SEQ ID NO: 43778 - protein, 13 aa, Homo sapiens
  CDR3 for beta chain variable domain of TCR clone 21889 (TRBV20-1, TRBJ1-1)
GSARGGGNTEAFF

SEQ ID NO: 43779 - protein, 10 aa, Homo sapiens
  CDR3 for alpha chain variable domain of TCR clone 21890 (TRAV26-1, TRAJ22)
RSGSARQLTF

SEQ ID NO: 43780 - protein, 16 aa, Homo sapiens
  CDR3 for beta chain variable domain of TCR clone 21890 (TRBV24-1, TRBJ2-3)
CATSDPGTGATDTQYF

SEQ ID NO: 43781 - protein, 14 aa, Homo sapiens
  CDR3 for alpha chain variable domain of TCR clone 21891 (TRAV21, TRAJ35)
CAVMPIGFGNVLHC

SEQ ID NO: 43782 - protein, 12 aa, Homo sapiens
  CDR3 for beta chain variable domain of TCR clone 21891 (TRBV7-9, TRBJ2-7)
CASRIKREEQYF

SEQ ID NO: 43783 - protein, 17 aa, Homo sapiens
  CDR3 for alpha chain variable domain of TCR clone 21892 (TRAV13-1, TRAJ52)
CAARSGAGGTSYGKLTF

SEQ ID NO: 43784 - protein, 15 aa, Homo sapiens
  CDR3 for beta chain variable domain of TCR clone 21892 (TRBV2, TRBJ2-1)
CASSELAGSYNEQFF

SEQ ID NO: 43785 - protein, 17 aa, Homo sapiens
  CDR3 for alpha chain variable domain of TCR clone 21893 (TRAV12-3, TRAJ6)
CAMSARGGAGGSYRPTF

SEQ ID NO: 43786 - protein, 12 aa, Homo sapiens
  CDR3 for beta chain variable domain of TCR clone 21893 (TRBV12-4, TRBJ2-3)
CASSTLPDTQYF

SEQ ID NO: 43787 - protein, 15 aa, Homo sapiens
  CDR3 for alpha chain variable domain of TCR clone 21894 (TRAV35, TRAJ50)
CAGQLRKTSYDKVIF

SEQ ID NO: 43788 - protein, 12 aa, Homo sapiens
  CDR3 for beta chain variable domain of TCR clone 21894 (TRBV5-1, TRBJ2-5)
CASSSGLETQYF

SEQ ID NO: 43789 - protein, 14 aa, Homo sapiens
  CDR3 for alpha chain variable domain of TCR clone 21895 (TRAV12-1, TRAJ30)
CVVNIGGRDGKIIF

SEQ ID NO: 43790 - protein, 13 aa, Homo sapiens
  CDR3 for beta chain variable domain of TCR clone 21895 (TRBV12-5, TRBJ2-1)
CASGLGRGNEQFF

SEQ ID NO: 43791 - protein, 14 aa, Homo sapiens
  CDR3 for alpha chain variable domain of TCR clone 21896 (TRAV23/DV6, TRAJ40)
CAASLTPGTYKYIF

SEQ ID NO: 43792 - protein, 14 aa, Homo sapiens
  CDR3 for beta chain variable domain of TCR clone 21896 (TRBV5-1, TRBJ2-3)
CASSRGQGGGTQYF

SEQ ID NO: 43793 - protein, 13 aa, Homo sapiens
  CDR3 for alpha chain variable domain of TCR clone 21897 (TRAV2, TRAJ40)
CAVVTSGTYKSIF

SEQ ID NO: 43794 - protein, 15 aa, Homo sapiens
  CDR3 for beta chain variable domain of TCR clone 21897 (TRBV11-3, TRBJ2-3)
CASLKDGREGDTQYF

SEQ ID NO: 43795 - protein, 12 aa, Homo sapiens
  CDR3 for alpha chain variable domain of TCR clone 21898 (TRAV3, TRAJ20)
CAVRDPDYKLSF

SEQ ID NO: 43796 - protein, 13 aa, Homo sapiens
  CDR3 for beta chain variable domain of TCR clone 21898 (TRBV9, TRBJ2-1)
CASSVGQGGEQFL

SEQ ID NO: 43797 - protein, 15 aa, Homo sapiens
  CDR3 for alpha chain variable domain of TCR clone 21899 (TRAV3, TRAJ4)
CAVRDGTGGYNKLIF

SEQ ID NO: 43798 - protein, 16 aa, Homo sapiens
  CDR3 for beta chain variable domain of TCR clone 21899 (TRBV27, TRBJ2-2)
CASSSSGVSNTGEPFF

SEQ ID NO: 43799 - protein, 14 aa, Homo sapiens
  CDR3 for alpha chain variable domain of TCR clone 21900 (TRAV26-1, TRAJ45)
CIEVTGGGADGLTF

SEQ ID NO: 43800 - protein, 13 aa, Homo sapiens
  CDR3 for beta chain variable domain of TCR clone 21900 (TRBV7-6, TRBJ1-2)
CASSLVADYGYIF

SEQ ID NO: 43801 - protein, 14 aa, Homo sapiens
  CDR3 for alpha chain variable domain of TCR clone 21901 (TRAV9-2, TRAJ39)
CALYIYNAGNMLTF

SEQ ID NO: 43802 - protein, 15 aa, Homo sapiens
  CDR3 for beta chain variable domain of TCR clone 21901 (TRBV7-3, TRBJ2-1)
CASSPTGGGEVEQFF

SEQ ID NO: 43803 - protein, 14 aa, Homo sapiens
  CDR3 for alpha chain variable domain of TCR clone 21902 (TRAV12-2, TRAJ17)
CAVLFKAAGNKLTF

SEQ ID NO: 43804 - protein, 17 aa, Homo sapiens
  CDR3 for beta chain variable domain of TCR clone 21902 (TRBV20-1, TRBJ2-2)
CSASGSGQGELTGELFF

SEQ ID NO: 43805 - protein, 12 aa, Homo sapiens
  CDR3 for alpha chain variable domain of TCR clone 21903 (TRAV17, TRAJ12)
CATLRSSYKLIF

SEQ ID NO: 43806 - protein, 18 aa, Homo sapiens
  CDR3 for beta chain variable domain of TCR clone 21903 (TRBV28, TRBJ2-7)
CASSLFFETGAPSSTSGR

SEQ ID NO: 43807 - protein, 14 aa, Homo sapiens
  CDR3 for alpha chain variable domain of TCR clone 21904 (TRAV1-2, TRAJ16)
CAVNRFPDGQKLLF

SEQ ID NO: 43808 - protein, 16 aa, Homo sapiens
  CDR3 for beta chain variable domain of TCR clone 21904 (TRBV11-2, TRBJ1-2)
CASSLDTGGADYGYTF

SEQ ID NO: 43809 - protein, 13 aa, Homo sapiens
  CDR3 for alpha chain variable domain of TCR clone 21905 (TRAV8-1, TRAJ36)
CAMNSPTGANNLF

SEQ ID NO: 43810 - protein, 15 aa, Homo sapiens
  CDR3 for beta chain variable domain of TCR clone 21905 (TRBV7-2, TRBJ2-3)
CASSLEQGGTDTQYF

SEQ ID NO: 43811 - protein, 15 aa, Homo sapiens
  CDR3 for alpha chain variable domain of TCR clone 21906 (TRAV8-3, TRAJ37)
CAVGARASNTGKLIF

SEQ ID NO: 43812 - protein, 15 aa, Homo sapiens
  CDR3 for beta chain variable domain of TCR clone 21906 (TRBV5-4, TRBJ2-3)
CASSLAGRATDTQYF

SEQ ID NO: 43813 - protein, 13 aa, Homo sapiens
  CDR3 for alpha chain variable domain of TCR clone 21907 (TRAV12-3, TRAJ56)
CAMSFGANSKLTF

SEQ ID NO: 43814 - protein, 12 aa, Homo sapiens
  CDR3 for beta chain variable domain of TCR clone 21907 (TRBV12-4, TRBJ1-4)
CASSGTNEKLFF

SEQ ID NO: 43815 - protein, 16 aa, Homo sapiens
  CDR3 for alpha chain variable domain of TCR clone 21908 (TRAV20, TRAJ22)
CAVQASSSGSARQLTF

SEQ ID NO: 43816 - protein, 13 aa, Homo sapiens
  CDR3 for beta chain variable domain of TCR clone 21908 (TRBV7-2, TRBJ2-5)
CASSQTSVETRYF

SEQ ID NO: 43817 - protein, 14 aa, Homo sapiens
  CDR3 for alpha chain variable domain of TCR clone 21909 (TRAV12-3, TRAJ9)
CAMSPNTGGFKTIL

SEQ ID NO: 43818 - protein, 12 aa, Homo sapiens
  CDR3 for beta chain variable domain of TCR clone 21909 (TRBV19, TRBJ1-5)
CASSIAQQPQHF

SEQ ID NO: 43819 - protein, 13 aa, Homo sapiens
  CDR3 for alpha chain variable domain of TCR clone 21910 (TRAV25, TRAJ23)
CAGVNNQGGKLIF

SEQ ID NO: 43820 - protein, 13 aa, Homo sapiens
  CDR3 for beta chain variable domain of TCR clone 21910 (TRBV18, TRBJ1-1)
CASSGGRNTEAFF

SEQ ID NO: 43821 - protein, 12 aa, Homo sapiens
  CDR3 for alpha chain variable domain of TCR clone 21911 (TRAV12-1, TRAJ40)
CVVYTGTYKYIF

SEQ ID NO: 43822 - protein, 18 aa, Homo sapiens
  CDR3 for beta chain variable domain of TCR clone 21911 (TRBV11-2, TRBJ2-3)
CASSLGGASRGAPNTQYF

SEQ ID NO: 43823 - protein, 14 aa, Homo sapiens
  CDR3 for alpha chain variable domain of TCR clone 21912 (TRAV29/DV5, TRAJ45)
CSASFRGGADGLTF

SEQ ID NO: 43824 - protein, 11 aa, Homo sapiens
  CDR3 for beta chain variable domain of TCR clone 21912 (TRBV11-2, TRBJ2-2)
CASSLPGELFF

SEQ ID NO: 43825 - protein, 13 aa, Homo sapiens
  CDR3 for alpha chain variable domain of TCR clone 21913 (TRAV1-1, TRAJ9)
CTAKNTGGFKTIF

SEQ ID NO: 43826 - protein, 14 aa, Homo sapiens
  CDR3 for beta chain variable domain of TCR clone 21913 (TRBV20-1, TRBJ2-1)
CSAQIGGSANEQFF

SEQ ID NO: 43827 - protein, 14 aa, Homo sapiens
  CDR3 for alpha chain variable domain of TCR clone 21914 (TRAV35, TRAJ33)
CAGSSQDSNYQLIW

SEQ ID NO: 43828 - protein, 15 aa, Homo sapiens
  CDR3 for beta chain variable domain of TCR clone 21914 (TRBV20-1, TRBJ2-7)
CSAESGTSEAYEQYF

SEQ ID NO: 43829 - protein, 14 aa, Homo sapiens
  CDR3 for alpha chain variable domain of TCR clone 21915 (TRAV1-2, TRAJ16)
CAVNRFSDGQKLFF

SEQ ID NO: 43830 - protein, 16 aa, Homo sapiens
  CDR3 for beta chain variable domain of TCR clone 21915 (TRBV3-1, TRBJ2-5)
CASSPGQFNGFGTQYF

SEQ ID NO: 43831 - protein, 11 aa, Homo sapiens
  CDR3 for alpha chain variable domain of TCR clone 21916 (TRAV3, TRAJ17)
PRGAAGNKLTF

SEQ ID NO: 43832 - protein, 16 aa, Homo sapiens
  CDR3 for beta chain variable domain of TCR clone 21916 (TRBV7-6, TRBJ2-1)
CASSAPGSSSYNEQFF

SEQ ID NO: 43833 - protein, 12 aa, Homo sapiens
  CDR3 for alpha chain variable domain of TCR clone 21917 (TRAV2, TRAJ9)
CAVVAGGFKTIF

SEQ ID NO: 43834 - protein, 14 aa, Homo sapiens
  CDR3 for beta chain variable domain of TCR clone 21917 (TRBV6-1, TRBJ1-3)
CASVQGGGGNTIYF

SEQ ID NO: 43835 - protein, 12 aa, Homo sapiens
  CDR3 for alpha chain variable domain of TCR clone 21918 (TRAV2, TRAJ9)
CAEGAGGFKTIF

SEQ ID NO: 43836 - protein, 16 aa, Homo sapiens
  CDR3 for beta chain variable domain of TCR clone 21918 (TRBV13, TRBJ2-2)
CASSPRTGEHTGELFF

SEQ ID NO: 43837 - protein, 14 aa, Homo sapiens
  CDR3 for alpha chain variable domain of TCR clone 21919 (TRAV8-3, TRAJ4)
CAVGAAGGYNKLIV

SEQ ID NO: 43838 - protein, 15 aa, Homo sapiens
  CDR3 for beta chain variable domain of TCR clone 21919 (TRBV6-5, TRBJ2-1)
CASSYDAGAGNEQFF

SEQ ID NO: 43839 - protein, 17 aa, Homo sapiens
  CDR3 for alpha chain variable domain of TCR clone 21920 (TRAV3, TRAJ6)
CAVRDGPRAGGSYIPTF

SEQ ID NO: 43840 - protein, 12 aa, Homo sapiens
  CDR3 for beta chain variable domain of TCR clone 21920 (TRBV11-2, TRBJ2-2)
CAGSLGGGELFF

SEQ ID NO: 43841 - protein, 14 aa, Homo sapiens
  CDR3 for alpha chain variable domain of TCR clone 21921 (TRAV21, TRAJ35)
CAVMPIGFGNVLHC

SEQ ID NO: 43842 - protein, 12 aa, Homo sapiens
  CDR3 for beta chain variable domain of TCR clone 21921 (TRBV7-9, TRBJ2-7)
CASSIEREEQYF

SEQ ID NO: 43843 - protein, 15 aa, Homo sapiens
  CDR3 for alpha chain variable domain of TCR clone 21922 (TRAV3, TRAJ5)
CAVRDLDTGRRAVTF

SEQ ID NO: 43844 - protein, 13 aa, Homo sapiens
  CDR3 for beta chain variable domain of TCR clone 21922 (TRBV12-4, TRBJ2-7)
CASSPTETYEQYF

SEQ ID NO: 43845 - protein, 14 aa, Homo sapiens
  CDR3 for alpha chain variable domain of TCR clone 21923 (TRAV35, TRAJ33)
CAGSSQDSNYQLIW

SEQ ID NO: 43846 - protein, 15 aa, Homo sapiens
  CDR3 for beta chain variable domain of TCR clone 21923 (TRBV20-1, TRBJ2-7)
CSAASGTSGAYEQYF

SEQ ID NO: 43847 - protein, 13 aa, Homo sapiens
  CDR3 for alpha chain variable domain of TCR clone 21924 (TRAV20, TRAJ34)
CAVPSYNTDKLIF

SEQ ID NO: 43848 - protein, 15 aa, Homo sapiens
  CDR3 for beta chain variable domain of TCR clone 21924 (TRBV20-1, TRBJ1-2)
CSAAGEGARIYGYTF

SEQ ID NO: 43849 - protein, 15 aa, Homo sapiens
  CDR3 for alpha chain variable domain of TCR clone 21925 (TRAV21, TRAJ24)
CAARSSTDNWGKLQF

SEQ ID NO: 43850 - protein, 13 aa, Homo sapiens
  CDR3 for beta chain variable domain of TCR clone 21925 (TRBV11-2, TRBJ2-5)
CASSSTGEETQYF

SEQ ID NO: 43851 - protein, 14 aa, Homo sapiens
  CDR3 for alpha chain variable domain of TCR clone 21926 (TRAV8-2, TRAJ23)
CVVSDDNQGGKLTF

SEQ ID NO: 43852 - protein, 13 aa, Homo sapiens
  CDR3 for beta chain variable domain of TCR clone 21926 (TRBV7-7, TRBJ2-2)
CASSLTSAGELFF

SEQ ID NO: 43853 - protein, 17 aa, Homo sapiens
  CDR3 for alpha chain variable domain of TCR clone 21927 (TRAV26-2, TRAJ42)
CTLRDVGYGGSQGNLIF

SEQ ID NO: 43854 - protein, 16 aa, Homo sapiens
  CDR3 for beta chain variable domain of TCR clone 21927 (TRBV12-4, TRBJ2-7)
CASSLIGGTGTYEQYF

SEQ ID NO: 43855 - protein, 13 aa, Homo sapiens
  CDR3 for alpha chain variable domain of TCR clone 21928 (TRAV13-1, TRAJ5)
CAAGDTGRRALTF

SEQ ID NO: 43856 - protein, 12 aa, Homo sapiens
  CDR3 for beta chain variable domain of TCR clone 21928 (TRBV28, TRBJ2-3)
CASSLYRDTQYF

SEQ ID NO: 43857 - protein, 18 aa, Homo sapiens
  CDR3 for alpha chain variable domain of TCR clone 21929 (TRAV13-1, TRAJ52)
CAASKRSAGGTSYGKLTF

SEQ ID NO: 43858 - protein, 12 aa, Homo sapiens
  CDR3 for beta chain variable domain of TCR clone 21929 (TRBV11-2, TRBJ2-2)
CASSLGGGELLF

SEQ ID NO: 43859 - protein, 13 aa, Homo sapiens
  CDR3 for alpha chain variable domain of TCR clone 21930 (TRAV21, TRAJ57)
CAVTQGGSKKLVF

SEQ ID NO: 43860 - protein, 16 aa, Homo sapiens
  CDR3 for beta chain variable domain of TCR clone 21930 (TRBV29-1, TRBJ2-7)
CSVEDAEDGTAYEQYF

SEQ ID NO: 43861 - protein, 14 aa, Homo sapiens
  CDR3 for alpha chain variable domain of TCR clone 21931 (TRAV9-2, TRAJ39)
CALYIYNAGNMLTF

SEQ ID NO: 43862 - protein, 14 aa, Homo sapiens
  CDR3 for beta chain variable domain of TCR clone 21931 (TRBV6-3, TRBJ2-7)
CASSYSTGGDEQYF

SEQ ID NO: 43863 - protein, 13 aa, Homo sapiens
  CDR3 for alpha chain variable domain of TCR clone 21932 (TRAV21, TRAJ20)
CAVGLRVDYKLSF

SEQ ID NO: 43864 - protein, 14 aa, Homo sapiens
  CDR3 for beta chain variable domain of TCR clone 21932 (TRBV6-1, TRBJ1-3)
CASVQGGGGNTIYF

SEQ ID NO: 43865 - protein, 13 aa, Homo sapiens
  CDR3 for alpha chain variable domain of TCR clone 21933 (TRAV24, TRAJ44)
CALLTGTASKLTF

SEQ ID NO: 43866 - protein, 16 aa, Homo sapiens
  CDR3 for beta chain variable domain of TCR clone 21933 (TRBV2, TRBJ2-3)
CASSTSVEGVTDAQYF

SEQ ID NO: 43867 - protein, 12 aa, Homo sapiens
  CDR3 for alpha chain variable domain of TCR clone 21934 (TRAV13-1, TRAJ21)
CAAKEGFNKFYS

SEQ ID NO: 43868 - protein, 14 aa, Homo sapiens
  CDR3 for beta chain variable domain of TCR clone 21934 (TRBV5-4, TRBJ1-1)
CASSLDSRRDEAFF

SEQ ID NO: 43869 - protein, 13 aa, Homo sapiens
  CDR3 for alpha chain variable domain of TCR clone 21935 (TRAV20, TRAJ37)
CAGCSSNTGKLIV

SEQ ID NO: 43870 - protein, 11 aa, Homo sapiens
  CDR3 for beta chain variable domain of TCR clone 21935 (TRBV12-4, TRBJ2-3)
CASTATDTQYF

SEQ ID NO: 43871 - protein, 10 aa, Homo sapiens
  CDR3 for alpha chain variable domain of TCR clone 21936 (TRAV17, TRAJ36)
CATVAGNLFF

SEQ ID NO: 43872 - protein, 12 aa, Homo sapiens
  CDR3 for beta chain variable domain of TCR clone 21936 (TRBV11-2, TRBJ2-4)
CASSSASGSEYL

SEQ ID NO: 43873 - protein, 16 aa, Homo sapiens
  CDR3 for alpha chain variable domain of TCR clone 21937 (TRAV16, TRAJ4)
CALSRMFSGGSNKLIF

SEQ ID NO: 43874 - protein, 16 aa, Homo sapiens
  CDR3 for beta chain variable domain of TCR clone 21937 (TRBV24-1, TRBJ2-3)
CATSDPGTGATDTQYF

SEQ ID NO: 43875 - protein, 15 aa, Homo sapiens
  CDR3 for alpha chain variable domain of TCR clone 21938 (TRAV29/DV5, TRAJ29)
CAASERSSGNTPLVF

SEQ ID NO: 43876 - protein, 17 aa, Homo sapiens
  CDR3 for beta chain variable domain of TCR clone 21938 (TRBV4-1, IGLJ4)
CASSQEGPRGVEEKLFF

SEQ ID NO: 43877 - protein, 14 aa, Homo sapiens
  CDR3 for alpha chain variable domain of TCR clone 21939 (TRAV8-6, TRAJ12)
CAVKAADSSYKLIF

SEQ ID NO: 43878 - protein, 15 aa, Homo sapiens
  CDR3 for beta chain variable domain of TCR clone 21939 (TRBV7-8, TRBJ1-1)
CASSLGDSRNTEAFF

SEQ ID NO: 43879 - protein, 13 aa, Homo sapiens
  CDR3 for alpha chain variable domain of TCR clone 21940 (TRAV8-6, TRAJ50)
CAVIKTSYDKVIF

SEQ ID NO: 43880 - protein, 16 aa, Homo sapiens
  CDR3 for beta chain variable domain of TCR clone 21940 (TRBV7-3, TRBJ2-2)
CASSLKRGTLSGELFF

SEQ ID NO: 43881 - protein, 12 aa, Homo sapiens
  CDR3 for alpha chain variable domain of TCR clone 21941 (TRAV17, TRAJ4)
CATDGGCNKLIF

SEQ ID NO: 43882 - protein, 13 aa, Homo sapiens
  CDR3 for beta chain variable domain of TCR clone 21941 (TRBV29-1, TRBJ2-2)
CSTTGVNTGELFF

SEQ ID NO: 43883 - protein, 14 aa, Homo sapiens
  CDR3 for alpha chain variable domain of TCR clone 21942 (TRAV1-2, TRAJ8)
CAVREDTGFQKLVF

SEQ ID NO: 43884 - protein, 14 aa, Homo sapiens
  CDR3 for beta chain variable domain of TCR clone 21942 (TRBV29-1, TRBJ2-5)
CSVETSGSGGTQYF

SEQ ID NO: 43885 - protein, 17 aa, Homo sapiens
  CDR3 for alpha chain variable domain of TCR clone 21943 (TRAV3, TRAJ12)
CAVRDGGGMDSSYKLIF

SEQ ID NO: 43886 - protein, 14 aa, Homo sapiens
  CDR3 for beta chain variable domain of TCR clone 21943 (TRBV7-9, TRBJ1-2)
CASSRQGANYGYTF

SEQ ID NO: 43887 - protein, 11 aa, Homo sapiens
  CDR3 for alpha chain variable domain of TCR clone 21944 (TRAV12-3, TRAJ43)
CAMSVSNDMRF

SEQ ID NO: 43888 - protein, 13 aa, Homo sapiens
  CDR3 for beta chain variable domain of TCR clone 21944 (TRBV20-1, TRBJ1-1)
CSAPLGGGTEAFC

SEQ ID NO: 43889 - protein, 15 aa, Homo sapiens
  CDR3 for alpha chain variable domain of TCR clone 21945 (TRAV17, TRAJ57)
CATGPSQGGSEKLVF

SEQ ID NO: 43890 - protein, 16 aa, Homo sapiens
  CDR3 for beta chain variable domain of TCR clone 21945 (TRBV12-4, TRBJ1-5)
CASSRPVGGSNQPQHV

SEQ ID NO: 43891 - protein, 12 aa, Homo sapiens
  CDR3 for alpha chain variable domain of TCR clone 21946 (TRAV17, TRAJ12)
CATLRSSYKLIF

SEQ ID NO: 43892 - protein, 16 aa, Homo sapiens
  CDR3 for beta chain variable domain of TCR clone 21946 (TRBV28, TRBJ2-7)
CASSLFFETGGPEHYF

SEQ ID NO: 43893 - protein, 14 aa, Homo sapiens
  CDR3 for alpha chain variable domain of TCR clone 21947 (TRAV12-3, TRAJ10)
SHLPLTGGGNKLTF

SEQ ID NO: 43894 - protein, 15 aa, Homo sapiens
  CDR3 for beta chain variable domain of TCR clone 21947 (TRBV7-9, TRBJ1-6)
CASSSPGRGNSTLHF

SEQ ID NO: 43895 - protein, 13 aa, Homo sapiens
  CDR3 for alpha chain variable domain of TCR clone 21948 (TRAV17, TRAJ9)
CATDYTGGFKTIF

SEQ ID NO: 43896 - protein, 14 aa, Homo sapiens
  CDR3 for beta chain variable domain of TCR clone 21948 (TRBV19, TRBJ2-5)
CASSMTGQQETQYL

SEQ ID NO: 43897 - protein, 14 aa, Homo sapiens
  CDR3 for alpha chain variable domain of TCR clone 21949 (TRAV12-3, TRAJ9)
CAMSPNTGGFKTIF

SEQ ID NO: 43898 - protein, 12 aa, Homo sapiens
  CDR3 for beta chain variable domain of TCR clone 21949 (TRBV19, TRBJ1-5)
CAGSIAQQPQHF

SEQ ID NO: 43899 - protein, 13 aa, Homo sapiens
  CDR3 for alpha chain variable domain of TCR clone 21950 (TRAV20, TRAJ37)
CAGCSSNTGKLIF

SEQ ID NO: 43900 - protein, 15 aa, Homo sapiens
  CDR3 for beta chain variable domain of TCR clone 21950 (TRBV7-3, TRBJ2-1)
CQQLQTSGRYNEQFF

SEQ ID NO: 43901 - protein, 15 aa, Homo sapiens
  CDR3 for alpha chain variable domain of TCR clone 21951 (TRAV3, TRAJ5)
CAVRDLDTGRRALTF

SEQ ID NO: 43902 - protein, 13 aa, Homo sapiens
  CDR3 for beta chain variable domain of TCR clone 21951 (TRBV12-4, TRBJ2-7)
CARSPTETYEQYF

SEQ ID NO: 43903 - protein, 17 aa, Homo sapiens
  CDR3 for alpha chain variable domain of TCR clone 21952 (TRAV23/DV6, TRAJ57)
CAASSTLSQGGSEKLVF

SEQ ID NO: 43904 - protein, 15 aa, Homo sapiens
  CDR3 for beta chain variable domain of TCR clone 21952 (TRBV27, TRBJ1-4)
CASSAQQDLNEKLFF

SEQ ID NO: 43905 - protein, 13 aa, Homo sapiens
  CDR3 for alpha chain variable domain of TCR clone 21953 (TRAV1-2, TRAJ9)
CAALNTGGFKTIF

SEQ ID NO: 43906 - protein, 12 aa, Homo sapiens
  CDR3 for beta chain variable domain of TCR clone 21953 (TRBV2, TRBJ2-1)
CAKREGYNEQFF

SEQ ID NO: 43907 - protein, 12 aa, Homo sapiens
  CDR3 for alpha chain variable domain of TCR clone 21954 (TRAV17, TRAJ4)
CATDGGYNKLIF

SEQ ID NO: 43908 - protein, 13 aa, Homo sapiens
  CDR3 for beta chain variable domain of TCR clone 21954 (TRBV29-1, TRBJ2-2)
CSTTGVNAGELFF

SEQ ID NO: 43909 - protein, 15 aa, Homo sapiens
  CDR3 for alpha chain variable domain of TCR clone 21955 (TRAV25, TRAJ52)
CAGTSGGTSYGKLTF

SEQ ID NO: 43910 - protein, 16 aa, Homo sapiens
  CDR3 for beta chain variable domain of TCR clone 21955 (TRBV15, TRBJ1-2)
CATSRGPRTGGGGYTV

SEQ ID NO: 43911 - protein, 15 aa, Homo sapiens
  CDR3 for alpha chain variable domain of TCR clone 21956 (TRAV17, TRAJ57)
CATGPSQGGSEKLVS

SEQ ID NO: 43912 - protein, 14 aa, Homo sapiens
  CDR3 for beta chain variable domain of TCR clone 21956 (TRBV12-5, TRBJ2-5)
CASGSRTHQETQYF

SEQ ID NO: 43913 - protein, 12 aa, Homo sapiens
  CDR3 for alpha chain variable domain of TCR clone 21957 (TRAV13-1, TRAJ49)
CAASPMGNQLYF

SEQ ID NO: 43914 - protein, 13 aa, Homo sapiens
  CDR3 for beta chain variable domain of TCR clone 21957 (TRBV20-1, TRBJ2-2)
CSASAAGTGELFF

SEQ ID NO: 43915 - protein, 11 aa, Homo sapiens
  CDR3 for alpha chain variable domain of TCR clone 21958 (TRAV12-2, TRAJ30)
CAVGRDDKIIF

SEQ ID NO: 43916 - protein, 14 aa, Homo sapiens
  CDR3 for beta chain variable domain of TCR clone 21958 (TRBV6-1, TRBJ1-3)
CASVQGGGGNTTYF

SEQ ID NO: 43917 - protein, 12 aa, Homo sapiens
  CDR3 for alpha chain variable domain of TCR clone 21959 (TRAV21, TRAJ11)
CAATSGYSTLTF

SEQ ID NO: 43918 - protein, 11 aa, Homo sapiens
  CDR3 for beta chain variable domain of TCR clone 21959 (TRBV29-1, TRBJ2-5)
CSEDRTGTQYF

SEQ ID NO: 43919 - protein, 12 aa, Homo sapiens
  CDR3 for alpha chain variable domain of TCR clone 21960 (TRAV12-3, TRAJ3)
CAIDSSASKIIF

SEQ ID NO: 43920 - protein, 17 aa, Homo sapiens
  CDR3 for beta chain variable domain of TCR clone 21960 (TRBV7-9, TRBJ2-3)
CASSSEEAGAYPDTQYF

SEQ ID NO: 43921 - protein, 15 aa, Homo sapiens
  CDR3 for alpha chain variable domain of TCR clone 21961 (TRAV3, TRAJ22)
CAVGDRGGSARQLTF

SEQ ID NO: 43922 - protein, 16 aa, Homo sapiens
  CDR3 for beta chain variable domain of TCR clone 21961 (TRBV5-4, TRBJ2-3)
CASQQPGAGGADTQYF

SEQ ID NO: 43923 - protein, 15 aa, Homo sapiens
  CDR3 for alpha chain variable domain of TCR clone 21962 (TRAV26-1, TRAJ29)
CIVRVEGSGNTPLVF

SEQ ID NO: 43924 - protein, 15 aa, Homo sapiens
  CDR3 for beta chain variable domain of TCR clone 21962 (TRBV7-9, TRBJ1-5)
CARSQGHQPNQPQHF

SEQ ID NO: 43925 - protein, 16 aa, Homo sapiens
  CDR3 for alpha chain variable domain of TCR clone 21963 (TRAV12-2, TRAJ10)
CAVNRVLTGGGNKLTF

SEQ ID NO: 43926 - protein, 12 aa, Homo sapiens
  CDR3 for beta chain variable domain of TCR clone 21963 (TRBV28, TRBJ2-7)
CASSVSSYEQYF

SEQ ID NO: 43927 - protein, 11 aa, Homo sapiens
  CDR3 for alpha chain variable domain of TCR clone 21964 (TRAV2, TRAJ13)
CASGGYQKVTF

SEQ ID NO: 43928 - protein, 12 aa, Homo sapiens
  CDR3 for beta chain variable domain of TCR clone 21964 (TRBV12-4, TRBJ2-7)
CASSLGGYEQYF

SEQ ID NO: 43929 - protein, 13 aa, Homo sapiens
  CDR3 for alpha chain variable domain of TCR clone 21965 (TRAV27, TRAJ49)
CAPRPYTGNQSYF

SEQ ID NO: 43930 - protein, 16 aa, Homo sapiens
  CDR3 for beta chain variable domain of TCR clone 21965 (TRBV4-1, TRBJ1-2)
CASSQDAGQVLYGYTF

SEQ ID NO: 43931 - protein, 14 aa, Homo sapiens
  CDR3 for alpha chain variable domain of TCR clone 21966 (TRAV38-1, TRAJ40)
CALRPTSGTYKYIF

SEQ ID NO: 43932 - protein, 14 aa, Homo sapiens
  CDR3 for beta chain variable domain of TCR clone 21966 (TRBV25-1, TRBJ1-1)
CASTHLGRNTEAFF

SEQ ID NO: 43933 - protein, 18 aa, Homo sapiens
  CDR3 for alpha chain variable domain of TCR clone 21967 (TRAV21, TRAJ52)
CAVRPSPAGGTSYGKLTF

SEQ ID NO: 43934 - protein, 13 aa, Homo sapiens
  CDR3 for beta chain variable domain of TCR clone 21967 (TRBV7-9, TRBJ2-7)
CASSFAGAYEQYF

SEQ ID NO: 43935 - protein, 12 aa, Homo sapiens
  CDR3 for alpha chain variable domain of TCR clone 21968 (TRAV17, TRAJ12)
CATLRRSYKLIF

SEQ ID NO: 43936 - protein, 16 aa, Homo sapiens
  CDR3 for beta chain variable domain of TCR clone 21968 (TRBV28, TRBJ2-7)
CASSLFFETGGPEQYF

SEQ ID NO: 43937 - protein, 18 aa, Homo sapiens
  CDR3 for alpha chain variable domain of TCR clone 21969 (TRAV21, TRAJ52)
CAVRPSPAGGTSYGNLTF

SEQ ID NO: 43938 - protein, 13 aa, Homo sapiens
  CDR3 for beta chain variable domain of TCR clone 21969 (TRBV7-3, TRBJ1-1)
CASSQDWGAEAFF

SEQ ID NO: 43939 - protein, 12 aa, Homo sapiens
  CDR3 for alpha chain variable domain of TCR clone 21970 (TRAV1-2, TRAJ9)
CAGYTGGFKAIF

SEQ ID NO: 43940 - protein, 15 aa, Homo sapiens
  CDR3 for beta chain variable domain of TCR clone 21970 (TRBV11-2, TRBJ2-1)
CASSPAGQSLNEQFF

SEQ ID NO: 43941 - protein, 13 aa, Homo sapiens
  CDR3 for alpha chain variable domain of TCR clone 21971 (TRAV1-2, TRAJ12)
CAVSMDSSYKLIF

SEQ ID NO: 43942 - protein, 15 aa, Homo sapiens
  CDR3 for beta chain variable domain of TCR clone 21971 (TRBV27, TRBJ2-5)
CASSLMPSGGETQYF

SEQ ID NO: 43943 - protein, 17 aa, Homo sapiens
  CDR3 for alpha chain variable domain of TCR clone 21972 (TRAV3, TRAJ6)
CAVRDGPRAGGSYIPTF

SEQ ID NO: 43944 - protein, 14 aa, Homo sapiens
  CDR3 for beta chain variable domain of TCR clone 21972 (TRBV7-2, TRBJ2-7)
CASSPKTSFYEPYF

SEQ ID NO: 43945 - protein, 10 aa, Homo sapiens
  CDR3 for alpha chain variable domain of TCR clone 21973 (TRAV4, TRAJ28)
SGAGSYQLTF

SEQ ID NO: 43946 - protein, 14 aa, Homo sapiens
  CDR3 for beta chain variable domain of TCR clone 21973 (TRBV7-9, TRBJ2-5)
CASSLDTAQETQYF

SEQ ID NO: 43947 - protein, 12 aa, Homo sapiens
  CDR3 for alpha chain variable domain of TCR clone 21974 (TRAV13-1, TRAJ9)
CASHTGGFKTIL

SEQ ID NO: 43948 - protein, 18 aa, Homo sapiens
  CDR3 for beta chain variable domain of TCR clone 21974 (TRBV11-2, TRBJ2-3)
CASSLGGASRGAPNTQYF

SEQ ID NO: 43949 - protein, 13 aa, Homo sapiens
  CDR3 for alpha chain variable domain of TCR clone 21975 (TRAV27, TRAJ45)
CRSSEGGADGLTF

SEQ ID NO: 43950 - protein, 17 aa, Homo sapiens
  CDR3 for beta chain variable domain of TCR clone 21975 (TRBV11-2, TRBJ2-1)
CASSLYPPGVEYNEQFF

SEQ ID NO: 43951 - protein, 16 aa, Homo sapiens
  CDR3 for alpha chain variable domain of TCR clone 21976 (TRAV3, TRAJ18)
CAVRDGRGSTLGRLYV

SEQ ID NO: 43952 - protein, 15 aa, Homo sapiens
  CDR3 for beta chain variable domain of TCR clone 21976 (TRBV7-9, TRBJ1-6)
CASSSPGRGNSPLHF

SEQ ID NO: 43953 - protein, 17 aa, Homo sapiens
  CDR3 for alpha chain variable domain of TCR clone 21977 (TRAV36/DV7, TRAJ52)
CAVAQRAGGTSYGKLTF

SEQ ID NO: 43954 - protein, 14 aa, Homo sapiens
  CDR3 for beta chain variable domain of TCR clone 21977 (TRBV19, TRBJ2-1)
CASPTFVSSGEQFF

SEQ ID NO: 43955 - protein, 13 aa, Homo sapiens
  CDR3 for alpha chain variable domain of TCR clone 21978 (TRAV12-3, TRAJ5)
CAMIYTGRRALTF

SEQ ID NO: 43956 - protein, 12 aa, Homo sapiens
  CDR3 for beta chain variable domain of TCR clone 21978 (TRBV18, TRBJ1-4)
CASSPSRAKLFF

SEQ ID NO: 43957 - protein, 14 aa, Homo sapiens
  CDR3 for alpha chain variable domain of TCR clone 21979 (TRAV17, TRAJ22)
CATSLSGSARQLTF

SEQ ID NO: 43958 - protein, 15 aa, Homo sapiens
  CDR3 for beta chain variable domain of TCR clone 21979 (TRBV4-1, TRBJ2-5)
CASSQWDLYQETQYF

SEQ ID NO: 43959 - protein, 14 aa, Homo sapiens
  CDR3 for alpha chain variable domain of TCR clone 21980 (TRAV35, TRAJ22)
CAGLRPGSARQLTF

SEQ ID NO: 43960 - protein, 13 aa, Homo sapiens
  CDR3 for beta chain variable domain of TCR clone 21980 (TRBV10-3, TRBJ2-7)
CASKLAVNYEQYF

SEQ ID NO: 43961 - protein, 13 aa, Homo sapiens
  CDR3 for alpha chain variable domain of TCR clone 21981 (TRAV27, TRAJ41)
CAGERNSGYALNF

SEQ ID NO: 43962 - protein, 14 aa, Homo sapiens
  CDR3 for beta chain variable domain of TCR clone 21981 (TRBV7-2, TRBJ1-1)
CASSFLTGTTEAFF

SEQ ID NO: 43963 - protein, 12 aa, Homo sapiens
  CDR3 for alpha chain variable domain of TCR clone 21982 (TRAV13-1, TRAJ53)
AASGGSNYKLTF

SEQ ID NO: 43964 - protein, 15 aa, Homo sapiens
  CDR3 for beta chain variable domain of TCR clone 21982 (TRBV5-1, TRBJ2-1)
CASSPPRTPYNEQFF

SEQ ID NO: 43965 - protein, 14 aa, Homo sapiens
  CDR3 for alpha chain variable domain of TCR clone 21983 (TRAV12-3, TRAJ54)
CAMRIIQGAQKLVF

SEQ ID NO: 43966 - protein, 16 aa, Homo sapiens
  CDR3 for beta chain variable domain of TCR clone 21983 (TRBV28, TRBJ2-1)
CASRAPASGRIGEQFF

SEQ ID NO: 43967 - protein, 12 aa, Homo sapiens
  CDR3 for alpha chain variable domain of TCR clone 21984 (TRAV8-3, TRAJ20)
CAVGANDYKLSF

SEQ ID NO: 43968 - protein, 16 aa, Homo sapiens
  CDR3 for beta chain variable domain of TCR clone 21984 (TRBV19, TRBJ2-2)
CASRSPGTGATGELFF

SEQ ID NO: 43969 - protein, 14 aa, Homo sapiens
  CDR3 for alpha chain variable domain of TCR clone 21985 (TRAV35, TRAJ42)
CAGRYGGSQGNLIF

SEQ ID NO: 43970 - protein, 13 aa, Homo sapiens
  CDR3 for beta chain variable domain of TCR clone 21985 (TRBV7-9, TRBJ1-2)
CASSLKQNYGYTF

SEQ ID NO: 43971 - protein, 14 aa, Homo sapiens
  CDR3 for alpha chain variable domain of TCR clone 21986 (TRAV12-2, TRAJ48)
CAVNAFFGDEKLTF

SEQ ID NO: 43972 - protein, 13 aa, Homo sapiens
  CDR3 for beta chain variable domain of TCR clone 21986 (TRBV28, TRBJ2-7)
CAGAQQGLDEQYF

SEQ ID NO: 43973 - protein, 16 aa, Homo sapiens
  CDR3 for alpha chain variable domain of TCR clone 21987 (TRAV30, TRAJ24)
CGTEIVDADIWGKFQF

SEQ ID NO: 43974 - protein, 15 aa, Homo sapiens
  CDR3 for beta chain variable domain of TCR clone 21987 (TRBV20-1, TRBJ2-7)
CSARDRVSGMDEQYF

SEQ ID NO: 43975 - protein, 18 aa, Homo sapiens
  CDR3 for alpha chain variable domain of TCR clone 21988 (TRAV13-1, TRAJ52)
CAASKRSAGGTSYGKLTF

SEQ ID NO: 43976 - protein, 13 aa, Homo sapiens
  CDR3 for beta chain variable domain of TCR clone 21988 (TRBV12-4, TRBJ1-2)
CACSLRQGKGYTF

SEQ ID NO: 43977 - protein, 15 aa, Homo sapiens
  CDR3 for alpha chain variable domain of TCR clone 21989 (TRAV8-3, TRAJ11)
CAVGPLNSGYSTLTF

SEQ ID NO: 43978 - protein, 16 aa, Homo sapiens
  CDR3 for beta chain variable domain of TCR clone 21989 (TRBV7-9, TRBJ1-2)
CASSLGFSSGEDGYTF

SEQ ID NO: 43979 - protein, 15 aa, Homo sapiens
  CDR3 for alpha chain variable domain of TCR clone 21990 (TRAV35, TRAJ42)
CAGQGYGGSQGNLIF

SEQ ID NO: 43980 - protein, 13 aa, Homo sapiens
  CDR3 for beta chain variable domain of TCR clone 21990 (TRBV7-2, TRBJ1-1)
RASSLVQGAEAFF

SEQ ID NO: 43981 - protein, 15 aa, Homo sapiens
  CDR3 for alpha chain variable domain of TCR clone 21991 (TRAV2, TRAJ9)
CAVEDRGTGGFKTIF

SEQ ID NO: 43982 - protein, 16 aa, Homo sapiens
  CDR3 for beta chain variable domain of TCR clone 21991 (TRBV24-1, TRBJ2-3)
CATSDPGTGATDTQYS

SEQ ID NO: 43983 - protein, 11 aa, Homo sapiens
  CDR3 for alpha chain variable domain of TCR clone 21992 (TRAV1-2, TRAJ20)
CAVANDYKLSS

SEQ ID NO: 43984 - protein, 18 aa, Homo sapiens
  CDR3 for beta chain variable domain of TCR clone 21992 (TRBV20-1, TRBJ2-6)
CSAETTPTHGSGANVLTF

SEQ ID NO: 43985 - protein, 14 aa, Homo sapiens
  CDR3 for alpha chain variable domain of TCR clone 21993 (TRAV1-2, TRAJ8)
CAVREDTGFQKLVF

SEQ ID NO: 43986 - protein, 19 aa, Homo sapiens
  CDR3 for beta chain variable domain of TCR clone 21993 (TRBV23-1, TRBJ2-3)
TVSLRQQPRSTGSTDTQYF

SEQ ID NO: 43987 - protein, 15 aa, Homo sapiens
  CDR3 for alpha chain variable domain of TCR clone 21994 (TRAV21, TRAJ24)
CAARSSTDSWGKLQF

SEQ ID NO: 43988 - protein, 13 aa, Homo sapiens
  CDR3 for beta chain variable domain of TCR clone 21994 (TRBV11-2, TRBJ2-5)
CASSSTGGETQYF

SEQ ID NO: 43989 - protein, 15 aa, Homo sapiens
  CDR3 for alpha chain variable domain of TCR clone 21995 (TRAV3, TRAJ20)
CAVRDIKLSDYKLSF

SEQ ID NO: 43990 - protein, 13 aa, Homo sapiens
  CDR3 for beta chain variable domain of TCR clone 21995 (TRBV10-3, TRBJ2-7)
CASKLAVNYEQYF

SEQ ID NO: 43991 - protein, 13 aa, Homo sapiens
  CDR3 for alpha chain variable domain of TCR clone 21996 (TRAV22, TRAJ29)
CAVGGSGNTPLVF

SEQ ID NO: 43992 - protein, 13 aa, Homo sapiens
  CDR3 for beta chain variable domain of TCR clone 21996 (TRBV4-3, TRBJ1-1)
CASSQAGNTEAFF

SEQ ID NO: 43993 - protein, 15 aa, Homo sapiens
  CDR3 for alpha chain variable domain of TCR clone 21997 (TRAV29/DV5, TRAJ53)
CAASASGGSNYKLTF

SEQ ID NO: 43994 - protein, 16 aa, Homo sapiens
  CDR3 for beta chain variable domain of TCR clone 21997 (TRBV20-1, TRBJ2-5)
CSPGGTSGGYMETQYF

SEQ ID NO: 43995 - protein, 14 aa, Homo sapiens
  CDR3 for alpha chain variable domain of TCR clone 21998 (TRAV16, TRAJ33)
CALSAMDSNYQLIW

SEQ ID NO: 43996 - protein, 12 aa, Homo sapiens
  CDR3 for beta chain variable domain of TCR clone 21998 (TRBV5-1, TRBJ1-2)
CASSQDTYGYSF

SEQ ID NO: 43997 - protein, 18 aa, Homo sapiens
  CDR3 for alpha chain variable domain of TCR clone 21999 (TRAV21, TRAJ52)
CAVRPSPAGGTSYGKLTF

SEQ ID NO: 43998 - protein, 13 aa, Homo sapiens
  CDR3 for beta chain variable domain of TCR clone 21999 (TRBV7-3, TRBJ1-1)
CASSQDWGAEAFI

SEQ ID NO: 43999 - protein, 14 aa, Homo sapiens
  CDR3 for alpha chain variable domain of TCR clone 22000 (TRAV13-1, TRAJ12)
CSNYPMDSSYKLIF

SEQ ID NO: 44000 - protein, 15 aa, Homo sapiens
  CDR3 for beta chain variable domain of TCR clone 22000 (TRBV6-4, TRBJ2-1)
CASSSGTSGYNEQFF

SEQ ID NO: 44001 - protein, 13 aa, Homo sapiens
  CDR3 for alpha chain variable domain of TCR clone 22001 (TRAV1-2, TRAJ9)
CAALNTGGFKTIF

SEQ ID NO: 44002 - protein, 15 aa, Homo sapiens
  CDR3 for beta chain variable domain of TCR clone 22001 (TRBV12-4, TRBJ2-5)
CASSPPTGLQETQYF

SEQ ID NO: 44003 - protein, 14 aa, Homo sapiens
  CDR3 for alpha chain variable domain of TCR clone 22002 (TRAV1-2, TRAJ8)
CAVREDTGFQKLVF

SEQ ID NO: 44004 - protein, 17 aa, Homo sapiens
  CDR3 for beta chain variable domain of TCR clone 22002 (TRBV19, TRBJ1-1)
CASSRGGQALLNTEAFF

SEQ ID NO: 44005 - protein, 13 aa, Homo sapiens
  CDR3 for alpha chain variable domain of TCR clone 22003 (TRAV8-3, TRAJ36)
CAVGATGANNFFF

SEQ ID NO: 44006 - protein, 15 aa, Homo sapiens
  CDR3 for beta chain variable domain of TCR clone 22003 (TRBV7-2, TRBJ1-2)
CASSPRAGWNYGYTF

SEQ ID NO: 44007 - protein, 14 aa, Homo sapiens
  CDR3 for alpha chain variable domain of TCR clone 22004 (TRAV13-1, TRAJ40)
CAASMTSGTYKYIF

SEQ ID NO: 44008 - protein, 15 aa, Homo sapiens
  CDR3 for beta chain variable domain of TCR clone 22004 (TRBV7-3, TRBJ2-1)
CASSPTGGGEVEQSF

SEQ ID NO: 44009 - protein, 14 aa, Homo sapiens
  CDR3 for alpha chain variable domain of TCR clone 22005 (TRAV12-3, TRAJ10)
SHLPLTGGGNKLTF

SEQ ID NO: 44010 - protein, 10 aa, Homo sapiens
  CDR3 for beta chain variable domain of TCR clone 22005 (TRBV6-3, TRBJ2-7)
CASSSPGQFS

SEQ ID NO: 44011 - protein, 12 aa, Homo sapiens
  CDR3 for alpha chain variable domain of TCR clone 22006 (TRAV2, TRAJ37)
CAVAGNTGKLIF

SEQ ID NO: 44012 - protein, 17 aa, Homo sapiens
  CDR3 for beta chain variable domain of TCR clone 22006 (TRBV28, TRBJ2-5)
CASGTPEGDALQETQYF

SEQ ID NO: 44013 - protein, 13 aa, Homo sapiens
  CDR3 for alpha chain variable domain of TCR clone 22007 (TRAV27, TRAJ49)
CAPRPYAGNQFYF

SEQ ID NO: 44014 - protein, 18 aa, Homo sapiens
  CDR3 for beta chain variable domain of TCR clone 22007 (TRBV7-3, TRBJ2-5)
CASSLGGAAQGRWETQYF

SEQ ID NO: 44015 - protein, 14 aa, Homo sapiens
  CDR3 for alpha chain variable domain of TCR clone 22008 (TRAV13-1, TRAJ10)
CAAKEPGGGNKLTF

SEQ ID NO: 44016 - protein, 16 aa, Homo sapiens
  CDR3 for beta chain variable domain of TCR clone 22008 (TRBV5-1, TRBJ2-1)
CASSPWTSGEYNEQFF

SEQ ID NO: 44017 - protein, 13 aa, Homo sapiens
  CDR3 for alpha chain variable domain of TCR clone 22009 (TRAV2, TRAJ20)
CAVEDPSEYRLSF

SEQ ID NO: 44018 - protein, 16 aa, Homo sapiens
  CDR3 for beta chain variable domain of TCR clone 22009 (TRBV25-1, TRBJ2-7)
CASSELTGGGIYEQYF

SEQ ID NO: 44019 - protein, 12 aa, Homo sapiens
  CDR3 for alpha chain variable domain of TCR clone 22010 (TRAV12-1, TRAJ40)
CVVYSGTYKDIF

SEQ ID NO: 44020 - protein, 18 aa, Homo sapiens
  CDR3 for beta chain variable domain of TCR clone 22010 (TRBV11-2, TRBJ2-3)
CASSLGGASRGAPNTQYF

SEQ ID NO: 44021 - protein, 17 aa, Homo sapiens
  CDR3 for alpha chain variable domain of TCR clone 22011 (TRAV38-1, TRAJ28)
CAFMKPTSGAGSYQLTF

SEQ ID NO: 44022 - protein, 15 aa, Homo sapiens
  CDR3 for beta chain variable domain of TCR clone 22011 (TRBV5-1, TRBJ2-4)
CASSLGGGGSYMQYF

SEQ ID NO: 44023 - protein, 14 aa, Homo sapiens
  CDR3 for alpha chain variable domain of TCR clone 22012 (TRAV13-1, TRAJ44)
CAAKATGTASKLTF

SEQ ID NO: 44024 - protein, 15 aa, Homo sapiens
  CDR3 for beta chain variable domain of TCR clone 22012 (TRBV9, TRBJ1-6)
CASSVAGTGDSPLHF

SEQ ID NO: 44025 - protein, 14 aa, Homo sapiens
  CDR3 for alpha chain variable domain of TCR clone 22013 (TRAV8-4, TRAJ13)
CAVTLSGGYKKVTF

SEQ ID NO: 44026 - protein, 14 aa, Homo sapiens
  CDR3 for beta chain variable domain of TCR clone 22013 (TRBV7-2, TRBJ1-2)
CASSQTGSTYGYTF

SEQ ID NO: 44027 - protein, 12 aa, Homo sapiens
  CDR3 for alpha chain variable domain of TCR clone 22014 (TRAV27, TRAJ36)
ASTPAGANNLLF

SEQ ID NO: 44028 - protein, 13 aa, Homo sapiens
  CDR3 for beta chain variable domain of TCR clone 22014 (TRBV7-9, TRBJ2-3)
CASSPGSTDTQYF

SEQ ID NO: 44029 - protein, 16 aa, Homo sapiens
  CDR3 for alpha chain variable domain of TCR clone 22015 (TRAV8-3, TRAJ10)
CAVGPGGTGGGNKLTF

SEQ ID NO: 44030 - protein, 13 aa, Homo sapiens
  CDR3 for beta chain variable domain of TCR clone 22015 (TRBV18, TRBJ1-1)
CASSPGPSGEAFF

SEQ ID NO: 44031 - protein, 12 aa, Homo sapiens
  CDR3 for alpha chain variable domain of TCR clone 22016 (TRAV27, TRAJ35)
CAGADFGNVLHC

SEQ ID NO: 44032 - protein, 16 aa, Homo sapiens
  CDR3 for beta chain variable domain of TCR clone 22016 (TRBV6-1, TRBJ2-1)
CASILRQGSYYNEQFF

SEQ ID NO: 44033 - protein, 16 aa, Homo sapiens
  CDR3 for alpha chain variable domain of TCR clone 22017 (TRAV26-1, TRAJ53)
FIVRVAMGGSNYKLTF

SEQ ID NO: 44034 - protein, 12 aa, Homo sapiens
  CDR3 for beta chain variable domain of TCR clone 22017 (TRBV7-9, TRBJ1-5)
CASSPQGQPQHF

SEQ ID NO: 44035 - protein, 18 aa, Homo sapiens
  CDR3 for alpha chain variable domain of TCR clone 22018 (TRAV26-2, TRAJ45)
CILRVDKYSGGGADGLTF

SEQ ID NO: 44036 - protein, 16 aa, Homo sapiens
  CDR3 for beta chain variable domain of TCR clone 22018 (TRBV2, TRBJ1-4)
CASDLLQGATNEKLFF

SEQ ID NO: 44037 - protein, 12 aa, Homo sapiens
  CDR3 for alpha chain variable domain of TCR clone 22019 (TRAV21, TRAJ24)
GLQLTAGGKLQF

SEQ ID NO: 44038 - protein, 13 aa, Homo sapiens
  CDR3 for beta chain variable domain of TCR clone 22019 (TRBV11-2, TRBJ2-5)
CASSSTGEETQYF

SEQ ID NO: 44039 - protein, 16 aa, Homo sapiens
  CDR3 for alpha chain variable domain of TCR clone 22020 (TRAV30, TRAJ24)
CGTEIVDADSWGKFQF

SEQ ID NO: 44040 - protein, 16 aa, Homo sapiens
  CDR3 for beta chain variable domain of TCR clone 22020 (TRBV5-4, TRBJ2-3)
CASQQPGAGGADTQYF

SEQ ID NO: 44041 - protein, 16 aa, Homo sapiens
  CDR3 for alpha chain variable domain of TCR clone 22021 (TRAV30, TRAJ24)
CGTEIVDADSWGKLQF

SEQ ID NO: 44042 - protein, 12 aa, Homo sapiens
  CDR3 for beta chain variable domain of TCR clone 22021 (TRBV11-2, TRBJ2-2)
CASSLGGGELFF

SEQ ID NO: 44043 - protein, 10 aa, Homo sapiens
  CDR3 for alpha chain variable domain of TCR clone 22022 (TRAV23/DV6, TRAJ57)
CAASSTFSQG

SEQ ID NO: 44044 - protein, 14 aa, Homo sapiens
  CDR3 for beta chain variable domain of TCR clone 22022 (TRBV25-1, TRBJ1-1)
CASTHLGGNTEAFF

SEQ ID NO: 44045 - protein, 14 aa, Homo sapiens
  CDR3 for alpha chain variable domain of TCR clone 22023 (TRAV30, TRAJ33)
CGAVAPRSNYQLIW

SEQ ID NO: 44046 - protein, 16 aa, Homo sapiens
  CDR3 for beta chain variable domain of TCR clone 22023 (TRBV3-1, TRBJ2-5)
CASSPGQFNGFGTQYF

SEQ ID NO: 44047 - protein, 14 aa, Homo sapiens
  CDR3 for alpha chain variable domain of TCR clone 22024 (TRAV9-2, TRAJ39)
CALYIYNAGNMLTF

SEQ ID NO: 44048 - protein, 15 aa, Homo sapiens
  CDR3 for beta chain variable domain of TCR clone 22024 (TRBV20-1, TRBJ1-5)
CSATSDRGLGQPQHF

SEQ ID NO: 44049 - protein, 16 aa, Homo sapiens
  CDR3 for alpha chain variable domain of TCR clone 22025 (TRAV3, TRAJ10)
CAVRDMRAGGGNKLTF

SEQ ID NO: 44050 - protein, 11 aa, Homo sapiens
  CDR3 for beta chain variable domain of TCR clone 22025 (TRBV7-8, TRBJ2-7)
CASSLSLEQYF

SEQ ID NO: 44051 - protein, 13 aa, Homo sapiens
  CDR3 for alpha chain variable domain of TCR clone 22026 (TRAV8-3, TRAJ20)
CAVGRPNDYKLSI

SEQ ID NO: 44052 - protein, 14 aa, Homo sapiens
  CDR3 for beta chain variable domain of TCR clone 22026 (TRBV12-5, TRBJ2-5)
CASGSRTHQETQYF

SEQ ID NO: 44053 - protein, 13 aa, Homo sapiens
  CDR3 for alpha chain variable domain of TCR clone 22027 (TRAV27, TRAJ45)
CRSSGGGADGLTF

SEQ ID NO: 44054 - protein, 10 aa, Homo sapiens
  CDR3 for beta chain variable domain of TCR clone 22027 (TRBV11-2, TRBJ2-1)
PGVEYNEQFF

SEQ ID NO: 44055 - protein, 16 aa, Homo sapiens
  CDR3 for alpha chain variable domain of TCR clone 22028 (TRAV30, TRAJ24)
CGTEIVDADSWGKFQF

SEQ ID NO: 44056 - protein, 11 aa, Homo sapiens
  CDR3 for beta chain variable domain of TCR clone 22028 (TRBV19, TRBJ1-1)
CASSIGSGAFF

SEQ ID NO: 44057 - protein, 14 aa, Homo sapiens
  CDR3 for alpha chain variable domain of TCR clone 22029 (TRAV12-2, TRAJ13)
CAVKKTGGYQKVTF

SEQ ID NO: 44058 - protein, 15 aa, Homo sapiens
  CDR3 for beta chain variable domain of TCR clone 22029 (TRBV27, TRBJ2-1)
SASSNGGGSSNEQFF

SEQ ID NO: 44059 - protein, 12 aa, Homo sapiens
  CDR3 for alpha chain variable domain of TCR clone 22030 (TRAV13-1, TRAJ42)
VNYGGSQGNLIF

SEQ ID NO: 44060 - protein, 12 aa, Homo sapiens
  CDR3 for beta chain variable domain of TCR clone 22030 (TRBV7-9, TRBJ2-7)
RASSLEGYEQYF

SEQ ID NO: 44061 - protein, 10 aa, Homo sapiens
  CDR3 for alpha chain variable domain of TCR clone 22031 (TRAV5, TRAJ34)
CAEDTDKLIF

SEQ ID NO: 44062 - protein, 14 aa, Homo sapiens
  CDR3 for beta chain variable domain of TCR clone 22031 (TRBV20-1, TRBJ2-5)
CSARDGRAGETQYF

SEQ ID NO: 44063 - protein, 12 aa, Homo sapiens
  CDR3 for alpha chain variable domain of TCR clone 22032 (TRAV21, TRAJ30)
CAVMNRDDKTIF

SEQ ID NO: 44064 - protein, 17 aa, Homo sapiens
  CDR3 for beta chain variable domain of TCR clone 22032 (TRBV5-1, TRBJ1-1)
CASRPIRTGGVNTEAFF

SEQ ID NO: 44065 - protein, 14 aa, Homo sapiens
  CDR3 for alpha chain variable domain of TCR clone 22033 (TRAV8-2, TRAJ4)
CVVSPPGGYNKLIF

SEQ ID NO: 44066 - protein, 15 aa, Homo sapiens
  CDR3 for beta chain variable domain of TCR clone 22033 (TRBV4-1, TRBJ1-4)
CASSDTGGTNEKLFF

SEQ ID NO: 44067 - protein, 13 aa, Homo sapiens
  CDR3 for alpha chain variable domain of TCR clone 22034 (TRAV2, TRAJ40)
CAVVNSGTYKYIF

SEQ ID NO: 44068 - protein, 16 aa, Homo sapiens
  CDR3 for beta chain variable domain of TCR clone 22034 (TRBV19, TRBJ2-2)
CASRSPGTGATGELFF

SEQ ID NO: 44069 - protein, 13 aa, Homo sapiens
  CDR3 for alpha chain variable domain of TCR clone 22035 (TRAV17, TRAJ22)
CAHHSGSARQLTF

SEQ ID NO: 44070 - protein, 16 aa, Homo sapiens
  CDR3 for beta chain variable domain of TCR clone 22035 (TRBV4-1, TRBJ1-2)
CASSQDAGQVLYGYAF

SEQ ID NO: 44071 - protein, 14 aa, Homo sapiens
  CDR3 for alpha chain variable domain of TCR clone 22036 (TRAV2, TRAJ9)
CAVEDRSGGFKTIF

SEQ ID NO: 44072 - protein, 15 aa, Homo sapiens
  CDR3 for beta chain variable domain of TCR clone 22036 (TRBV28, TRBJ2-5)
CASSPPWSYQETQYF

SEQ ID NO: 44073 - protein, 13 aa, Homo sapiens
  CDR3 for alpha chain variable domain of TCR clone 22037 (TRAV36/DV7, TRAJ49)
CAGDSNTGNQFYF

SEQ ID NO: 44074 - protein, 12 aa, Homo sapiens
  CDR3 for beta chain variable domain of TCR clone 22037 (TRBV11-3, TRBJ2-2)
CASSLGGGELFF

SEQ ID NO: 44075 - protein, 18 aa, Homo sapiens
  CDR3 for alpha chain variable domain of TCR clone 22038 (TRAV13-1, TRAJ52)
CAAKNPNADGTSYGKLTF

SEQ ID NO: 44076 - protein, 15 aa, Homo sapiens
  CDR3 for beta chain variable domain of TCR clone 22038 (TRBV6-1, TRBJ2-3)
CASSERGGITDTQYF

SEQ ID NO: 44077 - protein, 14 aa, Homo sapiens
  CDR3 for alpha chain variable domain of TCR clone 22039 (TRAV17, TRAJ16)
CATADFSDGHKLLF

SEQ ID NO: 44078 - protein, 12 aa, Homo sapiens
  CDR3 for beta chain variable domain of TCR clone 22039 (TRBV24-1, TRBJ1-1)
CATLYPDTEAFF

SEQ ID NO: 44079 - protein, 12 aa, Homo sapiens
  CDR3 for alpha chain variable domain of TCR clone 22040 (TRAV17, TRAJ12)
CATLRSSYKLIF

SEQ ID NO: 44080 - protein, 16 aa, Homo sapiens
  CDR3 for beta chain variable domain of TCR clone 22040 (TRBV28, TRBJ2-7)
CASILFFETGGPEQYF

SEQ ID NO: 44081 - protein, 17 aa, Homo sapiens
  CDR3 for alpha chain variable domain of TCR clone 22041 (TRAV4, TRAJ18)
CLVGERSVGSTLGGLYF

SEQ ID NO: 44082 - protein, 14 aa, Homo sapiens
  CDR3 for beta chain variable domain of TCR clone 22041 (TRBV6-5, TRBJ1-2)
CASSYDGTGGGYTF

SEQ ID NO: 44083 - protein, 12 aa, Homo sapiens
  CDR3 for alpha chain variable domain of TCR clone 22042 (TRAV8-1, TRAJ31)
RAVINNNARLMF

SEQ ID NO: 44084 - protein, 15 aa, Homo sapiens
  CDR3 for beta chain variable domain of TCR clone 22042 (TRBV20-1, TRBJ2-2)
CSARGGQGNTGELFF

SEQ ID NO: 44085 - protein, 15 aa, Homo sapiens
  CDR3 for alpha chain variable domain of TCR clone 22043 (TRAV8-3, TRAJ45)
CASSYSGGGADGLTF

SEQ ID NO: 44086 - protein, 16 aa, Homo sapiens
  CDR3 for beta chain variable domain of TCR clone 22043 (TRBV19, TRBJ2-1)
CASSKAGPSSYNEQFF

SEQ ID NO: 44087 - protein, 15 aa, Homo sapiens
  CDR3 for alpha chain variable domain of TCR clone 22044 (TRAV26-1, TRAJ29)
CIVRVEGSGNTPLVF

SEQ ID NO: 44088 - protein, 14 aa, Homo sapiens
  CDR3 for beta chain variable domain of TCR clone 22044 (TRBV18, TRBJ2-5)
CASSPGVSQEIQYF

SEQ ID NO: 44089 - protein, 14 aa, Homo sapiens
  CDR3 for alpha chain variable domain of TCR clone 22045 (TRAV14/DV4, TRAJ34)
CAMRGLYNTDKLIF

SEQ ID NO: 44090 - protein, 16 aa, Homo sapiens
  CDR3 for beta chain variable domain of TCR clone 22045 (TRBV12-5, TRBJ2-5)
CASGPRTSGNQETQYF

SEQ ID NO: 44091 - protein, 18 aa, Homo sapiens
  CDR3 for alpha chain variable domain of TCR clone 22046 (TRAV12-3, TRAJ52)
CAMSVGGAGGTSYGKRTF

SEQ ID NO: 44092 - protein, 15 aa, Homo sapiens
  CDR3 for beta chain variable domain of TCR clone 22046 (TRBV27, TRBJ1-6)
CASSFDRGLGSPLHF

SEQ ID NO: 44093 - protein, 12 aa, Homo sapiens
  CDR3 for alpha chain variable domain of TCR clone 22047 (TRAV35, TRAJ42)
CWVSGKPGNLIF

SEQ ID NO: 44094 - protein, 13 aa, Homo sapiens
  CDR3 for beta chain variable domain of TCR clone 22047 (TRBV29-1, TRBJ2-1)
CSVEGGRVNEQFF

SEQ ID NO: 44095 - protein, 14 aa, Homo sapiens
  CDR3 for alpha chain variable domain of TCR clone 22048 (TRAV1-2, TRAJ16)
CAVNRFSDGQKLLV

SEQ ID NO: 44096 - protein, 15 aa, Homo sapiens
  CDR3 for beta chain variable domain of TCR clone 22048 (TRBV9, TRBJ1-6)
CASSVAGTGDSPLHF

SEQ ID NO: 44097 - protein, 12 aa, Homo sapiens
  CDR3 for alpha chain variable domain of TCR clone 22049 (TRAV1-2, TRAJ33)
CAALDSNYQLIW

SEQ ID NO: 44098 - protein, 13 aa, Homo sapiens
  CDR3 for beta chain variable domain of TCR clone 22049 (TRBV7-9, TRBJ1-2)
CASSLKQNYGYTF

SEQ ID NO: 44099 - protein, 13 aa, Homo sapiens
  CDR3 for alpha chain variable domain of TCR clone 22050 (TRAV8-3, TRAJ28)
CAVGAVGSYQLTF

SEQ ID NO: 44100 - protein, 15 aa, Homo sapiens
  CDR3 for beta chain variable domain of TCR clone 22050 (TRBV9, TRBJ1-6)
CASSVAGTGDSPLHF

SEQ ID NO: 44101 - protein, 20 aa, Homo sapiens
  CDR3 for alpha chain variable domain of TCR clone 22051 (TRAV4, )
CLVGPHNYDIQNPDPAVYQL

SEQ ID NO: 44102 - protein, 17 aa, Homo sapiens
  CDR3 for beta chain variable domain of TCR clone 22051 (TRBV24-1, TRBJ2-1)
CATSDVSTSGTYNEQFF

SEQ ID NO: 44103 - protein, 13 aa, Homo sapiens
  CDR3 for alpha chain variable domain of TCR clone 22052 (TRAV12-1, TRAJ26)
CVVRRNYGQNFVF

SEQ ID NO: 44104 - protein, 12 aa, Homo sapiens
  CDR3 for beta chain variable domain of TCR clone 22052 (TRBV11-2, TRBJ2-2)
CASSLGGGELFF

SEQ ID NO: 44105 - protein, 15 aa, Homo sapiens
  CDR3 for alpha chain variable domain of TCR clone 22053 (TRAV2, TRAJ24)
CAVVRLKNSWGKLQF

SEQ ID NO: 44106 - protein, 16 aa, Homo sapiens
  CDR3 for beta chain variable domain of TCR clone 22053 (TRBV7-7, TRBJ2-3)
CASSPGTSGSTDTRYF

SEQ ID NO: 44107 - protein, 13 aa, Homo sapiens
  CDR3 for alpha chain variable domain of TCR clone 22054 (TRAV16, TRAJ54)
CALVVQGAQKLVF

SEQ ID NO: 44108 - protein, 12 aa, Homo sapiens
  CDR3 for beta chain variable domain of TCR clone 22054 (TRBV18, TRBJ2-7)
CASSTAMGEQYF

SEQ ID NO: 44109 - protein, 14 aa, Homo sapiens
  CDR3 for alpha chain variable domain of TCR clone 22055 (TRAV1-2, TRAJ16)
CAVNRFSDGQKLLF

SEQ ID NO: 44110 - protein, 15 aa, Homo sapiens
  CDR3 for beta chain variable domain of TCR clone 22055 (TRBV7-9, TRBJ1-6)
CASSSPGRRNSPLHF

SEQ ID NO: 44111 - protein, 14 aa, Homo sapiens
  CDR3 for alpha chain variable domain of TCR clone 22056 (TRAV26-1, TRAJ38)
CIADNAGNNRKLIW

SEQ ID NO: 44112 - protein, 15 aa, Homo sapiens
  CDR3 for beta chain variable domain of TCR clone 22056 (TRBV10-1, TRBJ2-3)
CASSATSGGFDTQYF

SEQ ID NO: 44113 - protein, 13 aa, Homo sapiens
  CDR3 for alpha chain variable domain of TCR clone 22057 (TRAV8-6, TRAJ49)
CAVITNTGNQFYF

SEQ ID NO: 44114 - protein, 11 aa, Homo sapiens
  CDR3 for beta chain variable domain of TCR clone 22057 (TRBV11-2, TRBJ1-1)
CASSINTEAFF

SEQ ID NO: 44115 - protein, 14 aa, Homo sapiens
  CDR3 for alpha chain variable domain of TCR clone 22058 (TRAV26-1, TRAJ38)
CIADNAGNNRKLIW

SEQ ID NO: 44116 - protein, 13 aa, Homo sapiens
  CDR3 for beta chain variable domain of TCR clone 22058 (TRBV20-1, TRBJ1-1)
CSARGGENTEAFF

SEQ ID NO: 44117 - protein, 17 aa, Homo sapiens
  CDR3 for alpha chain variable domain of TCR clone 22059 (TRAV13-1, TRAJ52)
CAASSGAGGTSYGKLTF

SEQ ID NO: 44118 - protein, 15 aa, Homo sapiens
  CDR3 for beta chain variable domain of TCR clone 22059 (TRBV2, TRBJ2-1)
CAGSELAGSYNEQFF

SEQ ID NO: 44119 - protein, 17 aa, Homo sapiens
  CDR3 for alpha chain variable domain of TCR clone 22060 (TRAV3, TRAJ6)
CAVIDGPRAGGSYIPTF

SEQ ID NO: 44120 - protein, 20 aa, Homo sapiens
  CDR3 for beta chain variable domain of TCR clone 22060 (TRBV28, TRBJ2-1)
CASTPIGRSPGLAGGNEQFF

SEQ ID NO: 44121 - protein, 17 aa, Homo sapiens
  CDR3 for alpha chain variable domain of TCR clone 22061 (TRAV3, TRAJ6)
CAVRDGPRAGGSYIPTS

SEQ ID NO: 44122 - protein, 14 aa, Homo sapiens
  CDR3 for beta chain variable domain of TCR clone 22061 (TRBV7-2, TRBJ2-7)
CASSPKTSFYEQYF

SEQ ID NO: 44123 - protein, 14 aa, Homo sapiens
  CDR3 for alpha chain variable domain of TCR clone 22062 (TRAV2, TRAJ37)
CAVDFTSNTGKLIF

SEQ ID NO: 44124 - protein, 15 aa, Homo sapiens
  CDR3 for beta chain variable domain of TCR clone 22062 (TRBV11-3, TRBJ2-3)
CASLKDGREGDTQYF

SEQ ID NO: 44125 - protein, 14 aa, Homo sapiens
  CDR3 for alpha chain variable domain of TCR clone 22063 (TRAV12-2, TRAJ40)
CAVRIPSGTYKYIF

SEQ ID NO: 44126 - protein, 20 aa, Homo sapiens
  CDR3 for beta chain variable domain of TCR clone 22063 (TRBV28, TRBJ2-1)
CASTPIGRSPGLAGGNEQFF

SEQ ID NO: 44127 - protein, 14 aa, Homo sapiens
  CDR3 for alpha chain variable domain of TCR clone 22064 (TRAV1-2, TRAJ6)
CAVSLSGGSYIPTF

SEQ ID NO: 44128 - protein, 15 aa, Homo sapiens
  CDR3 for beta chain variable domain of TCR clone 22064 (TRBV28, TRBJ2-7)
CASSPGCRGFYEQYF

SEQ ID NO: 44129 - protein, 14 aa, Homo sapiens
  CDR3 for alpha chain variable domain of TCR clone 22065 (TRAV21, TRAJ45)
RAVSSGGGADGLTF

SEQ ID NO: 44130 - protein, 15 aa, Homo sapiens
  CDR3 for beta chain variable domain of TCR clone 22065 (TRBV6-1, TRBJ2-4)
CASSEAVWTINIQYF

SEQ ID NO: 44131 - protein, 14 aa, Homo sapiens
  CDR3 for alpha chain variable domain of TCR clone 22066 (TRAV12-2, TRAJ6)
CASKWGGGSYISTF

SEQ ID NO: 44132 - protein, 13 aa, Homo sapiens
  CDR3 for beta chain variable domain of TCR clone 22066 (TRBV2, TRBJ1-1)
CASSEGGNTEAFF

SEQ ID NO: 44133 - protein, 15 aa, Homo sapiens
  CDR3 for alpha chain variable domain of TCR clone 22067 (TRAV25, TRAJ52)
CAGRPGGTSYGKLTF

SEQ ID NO: 44134 - protein, 17 aa, Homo sapiens
  CDR3 for beta chain variable domain of TCR clone 22067 (TRBV7-8, TRBJ2-6)
CASSAGTGVAGANVLTF

SEQ ID NO: 44135 - protein, 13 aa, Homo sapiens
  CDR3 for alpha chain variable domain of TCR clone 22068 (TRAV27, TRAJ41)
CAGEGNSGYALNS

SEQ ID NO: 44136 - protein, 14 aa, Homo sapiens
  CDR3 for beta chain variable domain of TCR clone 22068 (TRBV7-2, TRBJ1-1)
CASSFLTGTTEAFF

SEQ ID NO: 44137 - protein, 13 aa, Homo sapiens
  CDR3 for alpha chain variable domain of TCR clone 22069 (TRAV17, TRAJ26)
CATVDNYGQNFVF

SEQ ID NO: 44138 - protein, 16 aa, Homo sapiens
  CDR3 for beta chain variable domain of TCR clone 22069 (TRBV2, TRBJ2-1)
CANSVGGSLSYNEQFF

SEQ ID NO: 44139 - protein, 16 aa, Homo sapiens
  CDR3 for alpha chain variable domain of TCR clone 22070 (TRAV1-2, TRAJ10)
CAVRGVLTGGGNKLTF

SEQ ID NO: 44140 - protein, 14 aa, Homo sapiens
  CDR3 for beta chain variable domain of TCR clone 22070 (TRBV12-5, TRBJ2-5)
CASGSRTHQETQYF

SEQ ID NO: 44141 - protein, 11 aa, Homo sapiens
  CDR3 for alpha chain variable domain of TCR clone 22071 (TRAV3, TRAJ17)
PSGAAGNKLTF

SEQ ID NO: 44142 - protein, 16 aa, Homo sapiens
  CDR3 for beta chain variable domain of TCR clone 22071 (TRBV7-6, TRBJ2-1)
CASSAPGPSSYNEQFF

SEQ ID NO: 44143 - protein, 11 aa, Homo sapiens
  CDR3 for alpha chain variable domain of TCR clone 22072 (TRAV3, TRAJ21)
CGVGNFNKFYF

SEQ ID NO: 44144 - protein, 16 aa, Homo sapiens
  CDR3 for beta chain variable domain of TCR clone 22072 (TRBV19, TRBJ2-1)
CASSKAGPSSYNEQFF

SEQ ID NO: 44145 - protein, 13 aa, Homo sapiens
  CDR3 for alpha chain variable domain of TCR clone 22073 (TRAV1-2, TRAJ9)
CAVLNTGGFKTIF

SEQ ID NO: 44146 - protein, 15 aa, Homo sapiens
  CDR3 for beta chain variable domain of TCR clone 22073 (TRBV7-9, TRBJ1-6)
CASSSPGRGNSPLHF

SEQ ID NO: 44147 - protein, 14 aa, Homo sapiens
  CDR3 for alpha chain variable domain of TCR clone 22074 (TRAV17, TRAJ37)
CATDGSSNTGKLIF

SEQ ID NO: 44148 - protein, 13 aa, Homo sapiens
  CDR3 for beta chain variable domain of TCR clone 22074 (TRBV11-2, TRBJ2-1)
CASSVDLVNEQFF

SEQ ID NO: 44149 - protein, 14 aa, Homo sapiens
  CDR3 for alpha chain variable domain of TCR clone 22075 (TRAV12-1, TRAJ30)
CVVNIGGRGDKIIF

SEQ ID NO: 44150 - protein, 13 aa, Homo sapiens
  CDR3 for beta chain variable domain of TCR clone 22075 (TRBV12-5, TRBJ2-1)
CASGLGRGNEQFF

SEQ ID NO: 44151 - protein, 11 aa, Homo sapiens
  CDR3 for alpha chain variable domain of TCR clone 22076 (TRAV2, TRAJ13)
CASGGYQKVTF

SEQ ID NO: 44152 - protein, 16 aa, Homo sapiens
  CDR3 for beta chain variable domain of TCR clone 22076 (TRBV20-1, TRBJ1-4)
CSAPGQGLLTNEKLFF

SEQ ID NO: 44153 - protein, 14 aa, Homo sapiens
  CDR3 for alpha chain variable domain of TCR clone 22077 (TRAV12-3, TRAJ10)
SHLPLTGGGNKLTF

SEQ ID NO: 44154 - protein, 16 aa, Homo sapiens
  CDR3 for beta chain variable domain of TCR clone 22077 (TRBV2, TRBJ2-1)
CASRSPAGGKYNEQFF

SEQ ID NO: 44155 - protein, 16 aa, Homo sapiens
  CDR3 for alpha chain variable domain of TCR clone 22078 (TRAV26-1, TRAJ53)
CIVRVAMGCSNYKLTF

SEQ ID NO: 44156 - protein, 12 aa, Homo sapiens
  CDR3 for beta chain variable domain of TCR clone 22078 (TRBV7-9, TRBJ1-5)
CASSPQGQPQHF

SEQ ID NO: 44157 - protein, 13 aa, Homo sapiens
  CDR3 for alpha chain variable domain of TCR clone 22079 (TRAV13-1, TRAJ21)
CAASIYNFNKFYF

SEQ ID NO: 44158 - protein, 13 aa, Homo sapiens
  CDR3 for beta chain variable domain of TCR clone 22079 (TRBV7-9, TRBJ1-2)
CASSLKQNYGYTF

SEQ ID NO: 44159 - protein, 15 aa, Homo sapiens
  CDR3 for alpha chain variable domain of TCR clone 22080 (TRAV12-3, TRAJ6)
CAMSATTGGSCIPTF

SEQ ID NO: 44160 - protein, 16 aa, Homo sapiens
  CDR3 for beta chain variable domain of TCR clone 22080 (TRBV20-1, TRBJ1-2)
CSASMGQGVANYGYTF

SEQ ID NO: 44161 - protein, 14 aa, Homo sapiens
  CDR3 for alpha chain variable domain of TCR clone 22081 (TRAV13-2, TRAJ40)
CADLEGSGTYKYIF

SEQ ID NO: 44162 - protein, 16 aa, Homo sapiens
  CDR3 for beta chain variable domain of TCR clone 22081 (TRBV11-2, TRBJ2-7)
CASSLAPTGVNYEQYF

SEQ ID NO: 44163 - protein, 14 aa, Homo sapiens
  CDR3 for alpha chain variable domain of TCR clone 22082 (TRAV9-2, TRAJ45)
CALPSRGGADGLTF

SEQ ID NO: 44164 - protein, 14 aa, Homo sapiens
  CDR3 for beta chain variable domain of TCR clone 22082 (TRBV2, TRBJ2-3)
CASSAITGTDTQYF

SEQ ID NO: 44165 - protein, 16 aa, Homo sapiens
  CDR3 for alpha chain variable domain of TCR clone 22083 (TRAV8-2, TRAJ7)
CAVSEGPYYGNNRLAF

SEQ ID NO: 44166 - protein, 15 aa, Homo sapiens
  CDR3 for beta chain variable domain of TCR clone 22083 (TRBV27, TRBJ2-3)
CASSLGLAATDTQYF

SEQ ID NO: 44167 - protein, 14 aa, Homo sapiens
  CDR3 for alpha chain variable domain of TCR clone 22084 (TRAV12-3, TRAJ10)
SHLPLTGGGNKLTF

SEQ ID NO: 44168 - protein, 14 aa, Homo sapiens
  CDR3 for beta chain variable domain of TCR clone 22084 (TRBV7-3, TRBJ2-1)
CASSLAGGTNEQFF

SEQ ID NO: 44169 - protein, 16 aa, Homo sapiens
  CDR3 for alpha chain variable domain of TCR clone 22085 (TRAV30, TRAJ24)
CGTEIVDADSWGKFKF

SEQ ID NO: 44170 - protein, 13 aa, Homo sapiens
  CDR3 for beta chain variable domain of TCR clone 22085 (TRBV18, TRBJ1-2)
CASSASATEGYTF

SEQ ID NO: 44171 - protein, 14 aa, Homo sapiens
  CDR3 for alpha chain variable domain of TCR clone 22086 (TRAV3, TRAJ28)
CAVGRGAGSYQLTF

SEQ ID NO: 44172 - protein, 16 aa, Homo sapiens
  CDR3 for beta chain variable domain of TCR clone 22086 (TRBV4-1, TRBJ2-7)
CASSQEWTSGPLEQYF

SEQ ID NO: 44173 - protein, 16 aa, Homo sapiens
  CDR3 for alpha chain variable domain of TCR clone 22087 (TRAV1-2, TRAJ6)
CAVRDQGTGGSYIPTF

SEQ ID NO: 44174 - protein, 14 aa, Homo sapiens
  CDR3 for beta chain variable domain of TCR clone 22087 (TRBV4-1, TRBJ2-2)
CASSQAVNTGELFF

SEQ ID NO: 44175 - protein, 14 aa, Homo sapiens
  CDR3 for alpha chain variable domain of TCR clone 22088 (TRAV8-3, TRAJ4)
CAVGAAGGYNKLIF

SEQ ID NO: 44176 - protein, 14 aa, Homo sapiens
  CDR3 for beta chain variable domain of TCR clone 22088 (TRBV2, TRBJ1-2)
CASNEGTGPYGYTF

SEQ ID NO: 44177 - protein, 11 aa, Homo sapiens
  CDR3 for alpha chain variable domain of TCR clone 22089 (TRAV4, TRAJ31)
CLVGDNARLMF

SEQ ID NO: 44178 - protein, 16 aa, Homo sapiens
  CDR3 for beta chain variable domain of TCR clone 22089 (TRBV7-2, TRBJ2-5)
CASSSKWLSGKETQYF

SEQ ID NO: 44179 - protein, 17 aa, Homo sapiens
  CDR3 for alpha chain variable domain of TCR clone 22090 (TRAV3, TRAJ38)
CAVRDCLNAGNNHILNP

SEQ ID NO: 44180 - protein, 13 aa, Homo sapiens
  CDR3 for beta chain variable domain of TCR clone 22090 (TRBV23-1, TRBJ1-4)
CASRGKFNEKLFF

SEQ ID NO: 44181 - protein, 15 aa, Homo sapiens
  CDR3 for alpha chain variable domain of TCR clone 22091 (TRAV17, TRAJ57)
CATSPSQGGSEKLVF

SEQ ID NO: 44182 - protein, 16 aa, Homo sapiens
  CDR3 for beta chain variable domain of TCR clone 22091 (TRBV12-4, TRBJ1-5)
CASSRPVGGSNQPQHF

SEQ ID NO: 44183 - protein, 11 aa, Homo sapiens
  CDR3 for alpha chain variable domain of TCR clone 22092 (TRAV2, TRAJ33)
CAVESNYQLIW

SEQ ID NO: 44184 - protein, 15 aa, Homo sapiens
  CDR3 for beta chain variable domain of TCR clone 22092 (TRBV19, TRBJ1-1)
CASTSGQIKNTEAFF

SEQ ID NO: 44185 - protein, 10 aa, Homo sapiens
  CDR3 for alpha chain variable domain of TCR clone 22093 (TRAV30, TRAJ48)
CGIGNEKLTF

SEQ ID NO: 44186 - protein, 12 aa, Homo sapiens
  CDR3 for beta chain variable domain of TCR clone 22093 (TRBV11-2, TRBJ2-2)
CASSLGGGELFF

SEQ ID NO: 44187 - protein, 12 aa, Homo sapiens
  CDR3 for alpha chain variable domain of TCR clone 22094 (TRAV3, TRAJ26)
CAVRDYGQDFVF

SEQ ID NO: 44188 - protein, 16 aa, Homo sapiens
  CDR3 for beta chain variable domain of TCR clone 22094 (TRBV11-2, TRBJ1-2)
CASSPSGREANYGYTF

SEQ ID NO: 44189 - protein, 16 aa, Homo sapiens
  CDR3 for alpha chain variable domain of TCR clone 22095 (TRAV3, TRAJ37)
CAVRGKRSGNTGKLIF

SEQ ID NO: 44190 - protein, 13 aa, Homo sapiens
  CDR3 for beta chain variable domain of TCR clone 22095 (TRBV14, TRBJ2-7)
CASSQDRRYEQYF

SEQ ID NO: 44191 - protein, 12 aa, Homo sapiens
  CDR3 for alpha chain variable domain of TCR clone 22096 (TRAV20, TRAJ33)
CAVRGSNYQLIW

SEQ ID NO: 44192 - protein, 13 aa, Homo sapiens
  CDR3 for beta chain variable domain of TCR clone 22096 (TRBV4-3, TRBJ1-1)
CASSPAGNTEAFF

SEQ ID NO: 44193 - protein, 14 aa, Homo sapiens
  CDR3 for alpha chain variable domain of TCR clone 22097 (TRAV17, TRAJ22)
CATSPYGSARQLTF

SEQ ID NO: 44194 - protein, 15 aa, Homo sapiens
  CDR3 for beta chain variable domain of TCR clone 22097 (TRBV4-1, TRBJ2-5)
CASSQWDLYQETQYF

SEQ ID NO: 44195 - protein, 16 aa, Homo sapiens
  CDR3 for alpha chain variable domain of TCR clone 22098 (TRAV12-2, TRAJ10)
CAVNRVLTGGGNKLTF

SEQ ID NO: 44196 - protein, 12 aa, Homo sapiens
  CDR3 for beta chain variable domain of TCR clone 22098 (TRBV28, TRBJ2-7)
CANSFSSYEQYF

SEQ ID NO: 44197 - protein, 13 aa, Homo sapiens
  CDR3 for alpha chain variable domain of TCR clone 22099 (TRAV26-1, TRAJ33)
CIARVEGNYQLIW

SEQ ID NO: 44198 - protein, 16 aa, Homo sapiens
  CDR3 for beta chain variable domain of TCR clone 22099 (TRBV15, TRBJ2-7)
CATSRDRGRRRGEQYF

SEQ ID NO: 44199 - protein, 13 aa, Homo sapiens
  CDR3 for alpha chain variable domain of TCR clone 22100 (TRAV20, TRAJ40)
CAVPLSGTYKYIF

SEQ ID NO: 44200 - protein, 13 aa, Homo sapiens
  CDR3 for beta chain variable domain of TCR clone 22100 (TRBV15, TRBJ2-5)
CATSQIGEETQYF

SEQ ID NO: 44201 - protein, 11 aa, Homo sapiens
  CDR3 for alpha chain variable domain of TCR clone 22101 (TRAV2, TRAJ33)
CAVDSNYQLIW

SEQ ID NO: 44202 - protein, 15 aa, Homo sapiens
  CDR3 for beta chain variable domain of TCR clone 22101 (TRBV19, TRBJ1-2)
CDSSVGQVLNYGYTF

SEQ ID NO: 44203 - protein, 14 aa, Homo sapiens
  CDR3 for alpha chain variable domain of TCR clone 22102 (TRAV2, TRAJ9)
CAVEDRSGGFKTIF

SEQ ID NO: 44204 - protein, 13 aa, Homo sapiens
  CDR3 for beta chain variable domain of TCR clone 22102 (TRBV12-4, TRBJ1-2)
CASSLRQGKGYTF

SEQ ID NO: 44205 - protein, 11 aa, Homo sapiens
  CDR3 for alpha chain variable domain of TCR clone 22103 (TRAV2, TRAJ21)
CAVFNFNKFYF

SEQ ID NO: 44206 - protein, 14 aa, Homo sapiens
  CDR3 for beta chain variable domain of TCR clone 22103 (TRBV15, TRBJ2-3)
CATRSGTSADTQYF

SEQ ID NO: 44207 - protein, 14 aa, Homo sapiens
  CDR3 for alpha chain variable domain of TCR clone 22104 (TRAV12-3, TRAJ10)
SHLPLTGGGNKLTF

SEQ ID NO: 44208 - protein, 13 aa, Homo sapiens
  CDR3 for beta chain variable domain of TCR clone 22104 (TRBV4-1, TRBJ2-2)
CASGQENTGELFF

SEQ ID NO: 44209 - protein, 14 aa, Homo sapiens
  CDR3 for alpha chain variable domain of TCR clone 22105 (TRAV12-2, TRAJ5)
CAVNSSTGRRALTF

SEQ ID NO: 44210 - protein, 12 aa, Homo sapiens
  CDR3 for beta chain variable domain of TCR clone 22105 (TRBV19, TRBJ1-5)
CASSIAQQPQHF

SEQ ID NO: 44211 - protein, 15 aa, Homo sapiens
  CDR3 for alpha chain variable domain of TCR clone 22106 (TRAV8-6, TRAJ38)
CAVGSNAGNNRKLIW

SEQ ID NO: 44212 - protein, 14 aa, Homo sapiens
  CDR3 for beta chain variable domain of TCR clone 22106 (TRBV14, TRBJ2-1)
CASSQVQGRGEQFF

SEQ ID NO: 44213 - protein, 14 aa, Homo sapiens
  CDR3 for alpha chain variable domain of TCR clone 22107 (TRAV12-2, TRAJ17)
CAVNIKAAGNKLTF

SEQ ID NO: 44214 - protein, 16 aa, Homo sapiens
  CDR3 for beta chain variable domain of TCR clone 22107 (TRBV20-1, TRBJ2-6)
CSASSQGYDGANALTF

SEQ ID NO: 44215 - protein, 12 aa, Homo sapiens
  CDR3 for alpha chain variable domain of TCR clone 22108 (TRAV13-1, TRAJ48)
CAANFGNEKLTF

SEQ ID NO: 44216 - protein, 13 aa, Homo sapiens
  CDR3 for beta chain variable domain of TCR clone 22108 (TRBV10-3, TRBJ2-5)
CAMTSGAGETQYS

SEQ ID NO: 44217 - protein, 13 aa, Homo sapiens
  CDR3 for alpha chain variable domain of TCR clone 22109 (TRAV27, TRAJ42)
CAGARGSQGNLIF

SEQ ID NO: 44218 - protein, 15 aa, Homo sapiens
  CDR3 for beta chain variable domain of TCR clone 22109 (TRBV10-3, TRBJ2-2)
CAIRTDREDAGELFF

SEQ ID NO: 44219 - protein, 14 aa, Homo sapiens
  CDR3 for alpha chain variable domain of TCR clone 22110 (TRAV12-2, TRAJ17)
CAALFKAAGNKLTF

SEQ ID NO: 44220 - protein, 16 aa, Homo sapiens
  CDR3 for beta chain variable domain of TCR clone 22110 (TRBV20-1, TRBJ2-2)
CSASASGIPGVGELFF

SEQ ID NO: 44221 - protein, 13 aa, Homo sapiens
  CDR3 for alpha chain variable domain of TCR clone 22111 (TRAV17, TRAJ22)
CAHHSGSARQLTF

SEQ ID NO: 44222 - protein, 16 aa, Homo sapiens
  CDR3 for beta chain variable domain of TCR clone 22111 (TRBV4-1, TRBJ1-2)
CASSQDAGRVLYGYTF

SEQ ID NO: 44223 - protein, 19 aa, Homo sapiens
  CDR3 for alpha chain variable domain of TCR clone 22112 (TRAV2, TRAJ20)
ILQVREADAAVYRDCKLSF

SEQ ID NO: 44224 - protein, 14 aa, Homo sapiens
  CDR3 for beta chain variable domain of TCR clone 22112 (TRBV5-1, TRBJ2-7)
CASSLTSGGYEQYF

SEQ ID NO: 44225 - protein, 21 aa, Homo sapiens
  CDR3 for alpha chain variable domain of TCR clone 22113 (TRAV12-1, TRAJ20)
SSVIQPPTSVRYIFNDYKLSF

SEQ ID NO: 44226 - protein, 15 aa, Homo sapiens
  CDR3 for beta chain variable domain of TCR clone 22113 (TRBV5-1, TRBJ1-1)
CASSLGEGENTEAFF

SEQ ID NO: 44227 - protein, 14 aa, Homo sapiens
  CDR3 for alpha chain variable domain of TCR clone 22114 (TRAV26-1, TRAJ38)
CIPDNAGNNRKLIW

SEQ ID NO: 44228 - protein, 13 aa, Homo sapiens
  CDR3 for beta chain variable domain of TCR clone 22114 (TRBV20-1, TRBJ1-1)
CSARGGGNTEAFF

SEQ ID NO: 44229 - protein, 11 aa, Homo sapiens
  CDR3 for alpha chain variable domain of TCR clone 22115 (TRAV12-1, TRAJ30)
CVVNGQDKIIF

SEQ ID NO: 44230 - protein, 12 aa, Homo sapiens
  CDR3 for beta chain variable domain of TCR clone 22115 (TRBV27, TRBJ2-2)
CASKLFTGELFV

SEQ ID NO: 44231 - protein, 14 aa, Homo sapiens
  CDR3 for alpha chain variable domain of TCR clone 22116 (TRAV2, TRAJ37)
CAVDFTSNTGKRIF

SEQ ID NO: 44232 - protein, 15 aa, Homo sapiens
  CDR3 for beta chain variable domain of TCR clone 22116 (TRBV20-1, TRBJ1-1)
CSASRGVTGNTEAFF

SEQ ID NO: 44233 - protein, 13 aa, Homo sapiens
  CDR3 for alpha chain variable domain of TCR clone 22117 (TRAV26-2, TRAJ43)
CILRAVNNNDMRF

SEQ ID NO: 44234 - protein, 15 aa, Homo sapiens
  CDR3 for beta chain variable domain of TCR clone 22117 (TRBV7-2, TRBJ2-1)
CVSTHGTGIYNEQFF

SEQ ID NO: 44235 - protein, 16 aa, Homo sapiens
  CDR3 for alpha chain variable domain of TCR clone 22118 (TRAV16, TRAJ4)
CALSRMFSGGYNKLIF

SEQ ID NO: 44236 - protein, 16 aa, Homo sapiens
  CDR3 for beta chain variable domain of TCR clone 22118 (TRBV24-1, TRBJ2-3)
CATSDTGTGATDTQYF

SEQ ID NO: 44237 - protein, 14 aa, Homo sapiens
  CDR3 for alpha chain variable domain of TCR clone 22119 (TRAV14/DV4, TRAJ49)
CAFNRYLTGNQFYF

SEQ ID NO: 44238 - protein, 15 aa, Homo sapiens
  CDR3 for beta chain variable domain of TCR clone 22119 (TRBV28, TRBJ2-5)
CASSSGRTIQETQYF

SEQ ID NO: 44239 - protein, 18 aa, Homo sapiens
  CDR3 for alpha chain variable domain of TCR clone 22120 (TRAV21, TRAJ52)
CAVRPSPAGGTSYGKLTF

SEQ ID NO: 44240 - protein, 17 aa, Homo sapiens
  CDR3 for beta chain variable domain of TCR clone 22120 (TRBV13, TRBJ2-3)
CASCLSRVAGGRNTQYF

SEQ ID NO: 44241 - protein, 17 aa, Homo sapiens
  CDR3 for alpha chain variable domain of TCR clone 22121 (TRAV12-2, TRAJ48)
CASNEKLTFGTGTRLTI

SEQ ID NO: 44242 - protein, 14 aa, Homo sapiens
  CDR3 for beta chain variable domain of TCR clone 22121 (TRBV12-5, TRBJ2-5)
CASGSRTHQETQYF

SEQ ID NO: 44243 - protein, 15 aa, Homo sapiens
  CDR3 for alpha chain variable domain of TCR clone 22122 (TRAV27, TRAJ38)
CAARRNAGNNRKLIW

SEQ ID NO: 44244 - protein, 13 aa, Homo sapiens
  CDR3 for beta chain variable domain of TCR clone 22122 (TRBV12-5, TRBJ2-3)
CASCDRQSDTQYF

SEQ ID NO: 44245 - protein, 15 aa, Homo sapiens
  CDR3 for alpha chain variable domain of TCR clone 22123 (TRAV27, TRAJ38)
CAARRNAGINRKLIW

SEQ ID NO: 44246 - protein, 13 aa, Homo sapiens
  CDR3 for beta chain variable domain of TCR clone 22123 (TRBV12-5, TRBJ2-3)
CASGDRQSDTQYF

SEQ ID NO: 44247 - protein, 14 aa, Homo sapiens
  CDR3 for alpha chain variable domain of TCR clone 22124 (TRAV2, TRAJ21)
CAVEDLNNFNKFYF

SEQ ID NO: 44248 - protein, 11 aa, Homo sapiens
  CDR3 for beta chain variable domain of TCR clone 22124 (TRBV10-3, TRBJ2-1)
CTISDRGLQFF

SEQ ID NO: 44249 - protein, 14 aa, Homo sapiens
  CDR3 for alpha chain variable domain of TCR clone 22125 (TRAV23/DV6, TRAJ17)
CAASIGAAGNKLTF

SEQ ID NO: 44250 - protein, 13 aa, Homo sapiens
  CDR3 for beta chain variable domain of TCR clone 22125 (TRBV20-1, TRBJ2-5)
SAVPGGAGETQYF

SEQ ID NO: 44251 - protein, 13 aa, Homo sapiens
  CDR3 for alpha chain variable domain of TCR clone 22126 (TRAV38-1, TRAJ42)
CARWGGSQGNLIF

SEQ ID NO: 44252 - protein, 17 aa, Homo sapiens
  CDR3 for beta chain variable domain of TCR clone 22126 (TRBV20-1, TRBJ2-1)
CSARDPLAGVWDNEQLF

SEQ ID NO: 44253 - protein, 17 aa, Homo sapiens
  CDR3 for alpha chain variable domain of TCR clone 22127 (TRAV8-6, TRAJ58)
CAVSSWVGETSGSRLTF

SEQ ID NO: 44254 - protein, 14 aa, Homo sapiens
  CDR3 for beta chain variable domain of TCR clone 22127 (TRBV12-5, TRBJ2-5)
CASGSRTHQETQYF

SEQ ID NO: 44255 - protein, 12 aa, Homo sapiens
  CDR3 for alpha chain variable domain of TCR clone 22128 (TRAV27, TRAJ36)
ASTSAGANNLFF

SEQ ID NO: 44256 - protein, 13 aa, Homo sapiens
  CDR3 for beta chain variable domain of TCR clone 22128 (TRBV7-9, TRBJ2-3)
CASSPGSTDTQYF

SEQ ID NO: 44257 - protein, 14 aa, Homo sapiens
  CDR3 for alpha chain variable domain of TCR clone 22129 (TRAV8-4, TRAJ29)
CAVREDSGNTPLVF

SEQ ID NO: 44258 - protein, 17 aa, Homo sapiens
  CDR3 for beta chain variable domain of TCR clone 22129 (TRBV11-2, TRBJ2-1)
CASSLYPPGVEYNEQFF

SEQ ID NO: 44259 - protein, 14 aa, Homo sapiens
  CDR3 for alpha chain variable domain of TCR clone 22130 (TRAV13-1, TRAJ44)
CAAKATGTASKLTL

SEQ ID NO: 44260 - protein, 13 aa, Homo sapiens
  CDR3 for beta chain variable domain of TCR clone 22130 (TRBV5-5, TRBJ1-2)
CASSFWRGEDYTF

SEQ ID NO: 44261 - protein, 13 aa, Homo sapiens
  CDR3 for alpha chain variable domain of TCR clone 22131 (TRAV38-1, TRAJ42)
CARWGGSQGNLIF

SEQ ID NO: 44262 - protein, 17 aa, Homo sapiens
  CDR3 for beta chain variable domain of TCR clone 22131 (TRBV20-1, TRBJ2-1)
CSARDPRAGVWDNEQFF

SEQ ID NO: 44263 - protein, 14 aa, Homo sapiens
  CDR3 for alpha chain variable domain of TCR clone 22132 (TRAV9-2, TRAJ39)
CALYIYNAGNMLTF

SEQ ID NO: 44264 - protein, 17 aa, Homo sapiens
  CDR3 for beta chain variable domain of TCR clone 22132 (TRBV7-3, TRBJ2-5)
CASSLGSGRSGSETQYF

SEQ ID NO: 44265 - protein, 14 aa, Homo sapiens
  CDR3 for alpha chain variable domain of TCR clone 22133 (TRAV8-1, TRAJ34)
CAVNPSYNTDKLIF

SEQ ID NO: 44266 - protein, 16 aa, Homo sapiens
  CDR3 for beta chain variable domain of TCR clone 22133 (TRBV7-2, TRBJ2-6)
CASSLAGRSGANDLTF

SEQ ID NO: 44267 - protein, 12 aa, Homo sapiens
  CDR3 for alpha chain variable domain of TCR clone 22134 (TRAV13-1, TRAJ27)
CAAHTNAGKSTF

SEQ ID NO: 44268 - protein, 16 aa, Homo sapiens
  CDR3 for beta chain variable domain of TCR clone 22134 (TRBV12-4, TRBJ2-5)
CASSFFVRGRQETQYF

SEQ ID NO: 44269 - protein, 14 aa, Homo sapiens
  CDR3 for alpha chain variable domain of TCR clone 22135 (TRAV35, TRAJ33)
CAGSSQDSNYQLIW

SEQ ID NO: 44270 - protein, 15 aa, Homo sapiens
  CDR3 for beta chain variable domain of TCR clone 22135 (TRBV20-1, TRBJ2-7)
CSARDRVSGMDEQYF

SEQ ID NO: 44271 - protein, 15 aa, Homo sapiens
  CDR3 for alpha chain variable domain of TCR clone 22136 (TRAV3, TRAJ5)
CAVRDRKTGRRALTF

SEQ ID NO: 44272 - protein, 15 aa, Homo sapiens
  CDR3 for beta chain variable domain of TCR clone 22136 (TRBV7-8, TRBJ2-1)
CDSSLADSLYNEQFF

SEQ ID NO: 44273 - protein, 12 aa, Homo sapiens
  CDR3 for alpha chain variable domain of TCR clone 22137 (TRAV12-3, TRAJ17)
CAMTLTGNKLTF

SEQ ID NO: 44274 - protein, 13 aa, Homo sapiens
  CDR3 for beta chain variable domain of TCR clone 22137 (TRBV7-9, TRBJ1-2)
CASSLKQDYGYTF

SEQ ID NO: 44275 - protein, 13 aa, Homo sapiens
  CDR3 for alpha chain variable domain of TCR clone 22138 (TRAV8-6, TRAJ13)
CAVRDGGYQKVTF

SEQ ID NO: 44276 - protein, 15 aa, Homo sapiens
  CDR3 for beta chain variable domain of TCR clone 22138 (TRBV7-9, TRBJ2-2)
CVSRPEGTSTGELFF

SEQ ID NO: 44277 - protein, 15 aa, Homo sapiens
  CDR3 for alpha chain variable domain of TCR clone 22139 (TRAV26-1, TRAJ12)
IASSELVDSSYKLIF

SEQ ID NO: 44278 - protein, 11 aa, Homo sapiens
  CDR3 for beta chain variable domain of TCR clone 22139 (TRBV7-9, TRBJ2-3)
CASSPPDTQYF

SEQ ID NO: 44279 - protein, 15 aa, Homo sapiens
  CDR3 for alpha chain variable domain of TCR clone 22140 (TRAV8-3, TRAJ11)
CAVGLLNLGYSTLTF

SEQ ID NO: 44280 - protein, 16 aa, Homo sapiens
  CDR3 for beta chain variable domain of TCR clone 22140 (TRBV7-9, TRBJ1-2)
CASSLGFSSGEDGYTF

SEQ ID NO: 44281 - protein, 13 aa, Homo sapiens
  CDR3 for alpha chain variable domain of TCR clone 22141 (TRAV12-1, TRAJ29)
CVVRNSGNTPLVF

SEQ ID NO: 44282 - protein, 14 aa, Homo sapiens
  CDR3 for beta chain variable domain of TCR clone 22141 (TRBV7-2, TRBJ2-7)
CASRSQGAAYGQYF

SEQ ID NO: 44283 - protein, 16 aa, Homo sapiens
  CDR3 for alpha chain variable domain of TCR clone 22142 (TRAV30, TRAJ49)
SAAQRVGPNTGNQFYF

SEQ ID NO: 44284 - protein, 15 aa, Homo sapiens
  CDR3 for beta chain variable domain of TCR clone 22142 (TRBV2, TRBJ2-1)
CASSELAGSYSEQFF

SEQ ID NO: 44285 - protein, 13 aa, Homo sapiens
  CDR3 for alpha chain variable domain of TCR clone 22143 (TRAV27, TRAJ3)
ASLRGSSASKIIF

SEQ ID NO: 44286 - protein, 15 aa, Homo sapiens
  CDR3 for beta chain variable domain of TCR clone 22143 (TRBV28, TRBJ1-3)
CAGSMGWASGNTIYF

SEQ ID NO: 44287 - protein, 14 aa, Homo sapiens
  CDR3 for alpha chain variable domain of TCR clone 22144 (TRAV13-1, TRAJ13)
CAASRVGGYQKVTF

SEQ ID NO: 44288 - protein, 17 aa, Homo sapiens
  CDR3 for beta chain variable domain of TCR clone 22144 (TRBV15, TRBJ1-5)
CATSRAPPGTRNQTQHF

SEQ ID NO: 44289 - protein, 13 aa, Homo sapiens
  CDR3 for alpha chain variable domain of TCR clone 22145 (TRAV2, TRAJ40)
CAVVTSGTYKYIF

SEQ ID NO: 44290 - protein, 13 aa, Homo sapiens
  CDR3 for beta chain variable domain of TCR clone 22145 (TRBV20-1, TRBJ1-1)
CSARGGGNTEAFF

SEQ ID NO: 44291 - protein, 11 aa, Homo sapiens
  CDR3 for alpha chain variable domain of TCR clone 22146 (TRAV2, TRAJ13)
CASGGYQKVTF

SEQ ID NO: 44292 - protein, 16 aa, Homo sapiens
  CDR3 for beta chain variable domain of TCR clone 22146 (TRBV6-1, TRBJ2-5)
CASSEPLDRGAETQYF

SEQ ID NO: 44293 - protein, 12 aa, Homo sapiens
  CDR3 for alpha chain variable domain of TCR clone 22147 (TRAV12-1, TRAJ40)
SVVYSGTYKYIF

SEQ ID NO: 44294 - protein, 18 aa, Homo sapiens
  CDR3 for beta chain variable domain of TCR clone 22147 (TRBV11-2, TRBJ2-3)
CASSLGGASRGAPNTQYF

SEQ ID NO: 44295 - protein, 17 aa, Homo sapiens
  CDR3 for alpha chain variable domain of TCR clone 22148 (TRAV13-1, TRAJ28)
CAASPPYSGAGSYQLTF

SEQ ID NO: 44296 - protein, 16 aa, Homo sapiens
  CDR3 for beta chain variable domain of TCR clone 22148 (TRBV19, TRBJ2-1)
CASSKAGPSSYNEQFF

SEQ ID NO: 44297 - protein, 13 aa, Homo sapiens
  CDR3 for alpha chain variable domain of TCR clone 22149 (TRAV17, TRAJ9)
CATDYTGGLKTIF

SEQ ID NO: 44298 - protein, 14 aa, Homo sapiens
  CDR3 for beta chain variable domain of TCR clone 22149 (TRBV19, TRBJ2-5)
CASSMTGQQETQYF

SEQ ID NO: 44299 - protein, 15 aa, Homo sapiens
  CDR3 for alpha chain variable domain of TCR clone 22150 (TRAV8-3, TRAJ27)
CAVGPSKTNAGKSTF

SEQ ID NO: 44300 - protein, 14 aa, Homo sapiens
  CDR3 for beta chain variable domain of TCR clone 22150 (TRBV5-1, TRBJ2-7)
CASSRGESLYEQYF

SEQ ID NO: 44301 - protein, 12 aa, Homo sapiens
  CDR3 for alpha chain variable domain of TCR clone 22151 (TRAV8-4, TRAJ43)
CAVSGNNNDMRF

SEQ ID NO: 44302 - protein, 14 aa, Homo sapiens
  CDR3 for beta chain variable domain of TCR clone 22151 (TRBV11-2, TRBJ1-2)
CASSLGTANYGYTF

SEQ ID NO: 44303 - protein, 14 aa, Homo sapiens
  CDR3 for alpha chain variable domain of TCR clone 22152 (TRAV12-3, TRAJ10)
SHLPLTGGGNKLTF

SEQ ID NO: 44304 - protein, 13 aa, Homo sapiens
  CDR3 for beta chain variable domain of TCR clone 22152 (TRBV7-9, TRBJ2-5)
CASLPSGRETQYF

SEQ ID NO: 44305 - protein, 15 aa, Homo sapiens
  CDR3 for alpha chain variable domain of TCR clone 22153 (TRAV21, TRAJ24)
CAARSSTDSCGKLQF

SEQ ID NO: 44306 - protein, 13 aa, Homo sapiens
  CDR3 for beta chain variable domain of TCR clone 22153 (TRBV11-2, TRBJ2-5)
CASSSTGEETQYF

SEQ ID NO: 44307 - protein, 14 aa, Homo sapiens
  CDR3 for alpha chain variable domain of TCR clone 22154 (TRAV12-2, TRAJ13)
CAVKKTGGYQKVTF

SEQ ID NO: 44308 - protein, 15 aa, Homo sapiens
  CDR3 for beta chain variable domain of TCR clone 22154 (TRBV27, TRBJ2-1)
WASSNGGGSSNEQFF

SEQ ID NO: 44309 - protein, 12 aa, Homo sapiens
  CDR3 for alpha chain variable domain of TCR clone 22155 (TRAV1-1, TRAJ39)
RAVPVVGNMLTF

SEQ ID NO: 44310 - protein, 15 aa, Homo sapiens
  CDR3 for beta chain variable domain of TCR clone 22155 (TRBV19, TRBJ1-6)
CASSTQGAVGSPLHF

SEQ ID NO: 44311 - protein, 16 aa, Homo sapiens
  CDR3 for alpha chain variable domain of TCR clone 22156 (TRAV13-2, TRAJ32)
CAENMNYGGATNKLIL

SEQ ID NO: 44312 - protein, 14 aa, Homo sapiens
  CDR3 for beta chain variable domain of TCR clone 22156 (TRBV15, TRBJ2-5)
CATSSTGYQETQYF

SEQ ID NO: 44313 - protein, 13 aa, Homo sapiens
  CDR3 for alpha chain variable domain of TCR clone 22157 (TRAV27, TRAJ49)
CAPRPYTGNQCCF

SEQ ID NO: 44314 - protein, 16 aa, Homo sapiens
  CDR3 for beta chain variable domain of TCR clone 22157 (TRBV4-1, TRBJ1-2)
CASSQDAGQVLYGYTF

SEQ ID NO: 44315 - protein, 11 aa, Homo sapiens
  CDR3 for alpha chain variable domain of TCR clone 22158 (TRAV17, TRAJ9)
CGFTGGFKTIF

SEQ ID NO: 44316 - protein, 14 aa, Homo sapiens
  CDR3 for beta chain variable domain of TCR clone 22158 (TRBV7-9, TRBJ2-2)
CASSLVQDAGELFF

SEQ ID NO: 44317 - protein, 17 aa, Homo sapiens
  CDR3 for alpha chain variable domain of TCR clone 22159 (TRAV3, TRAJ6)
CAVSDGPRAGGSYIPTF

SEQ ID NO: 44318 - protein, 20 aa, Homo sapiens
  CDR3 for beta chain variable domain of TCR clone 22159 (TRBV28, TRBJ2-1)
CASTPIGRSPGLAGGNEQFF

SEQ ID NO: 44319 - protein, 15 aa, Homo sapiens
  CDR3 for alpha chain variable domain of TCR clone 22160 (TRAV3, TRAJ5)
CAVRDLDTGRRALTF

SEQ ID NO: 44320 - protein, 13 aa, Homo sapiens
  CDR3 for beta chain variable domain of TCR clone 22160 (TRBV12-4, TRBJ2-7)
CASSPTETYEQFF

SEQ ID NO: 44321 - protein, 12 aa, Homo sapiens
  CDR3 for alpha chain variable domain of TCR clone 22161 (TRAV13-2, TRAJ23)
CAERHRGGKIIF

SEQ ID NO: 44322 - protein, 16 aa, Homo sapiens
  CDR3 for beta chain variable domain of TCR clone 22161 (TRBV20-1, TRBJ1-4)
CSAPGQGLLTNEKLFF

SEQ ID NO: 44323 - protein, 15 aa, Homo sapiens
  CDR3 for alpha chain variable domain of TCR clone 22162 (TRAV4, TRAJ39)
CLVGPNNNAGNMLTF

SEQ ID NO: 44324 - protein, 13 aa, Homo sapiens
  CDR3 for beta chain variable domain of TCR clone 22162 (TRBV11-2, TRBJ2-5)
CASSSTGEEAQYF

SEQ ID NO: 44325 - protein, 12 aa, Homo sapiens
  CDR3 for alpha chain variable domain of TCR clone 22163 (TRAV13-2, TRAJ8)
CAPWLGFQKLVF

SEQ ID NO: 44326 - protein, 17 aa, Homo sapiens
  CDR3 for beta chain variable domain of TCR clone 22163 (TRBV28, TRBJ2-5)
CASSTPEGDALQETQYF

SEQ ID NO: 44327 - protein, 12 aa, Homo sapiens
  CDR3 for alpha chain variable domain of TCR clone 22164 (TRAV2, TRAJ9)
CAVGAGGFKTIC

SEQ ID NO: 44328 - protein, 16 aa, Homo sapiens
  CDR3 for beta chain variable domain of TCR clone 22164 (TRBV13, TRBJ2-2)
CASSPRTGEHTGELFF

SEQ ID NO: 44329 - protein, 11 aa, Homo sapiens
  CDR3 for alpha chain variable domain of TCR clone 22165 (TRAV12-3, TRAJ43)
CAMSVSNDMRF

SEQ ID NO: 44330 - protein, 13 aa, Homo sapiens
  CDR3 for beta chain variable domain of TCR clone 22165 (TRBV20-1, TRBJ1-1)
QCSTWGGGTEAFF

SEQ ID NO: 44331 - protein, 14 aa, Homo sapiens
  CDR3 for alpha chain variable domain of TCR clone 22166 (TRAV12-2, TRAJ13)
CAVKKTGGYQKVTF

SEQ ID NO: 44332 - protein, 15 aa, Homo sapiens
  CDR3 for beta chain variable domain of TCR clone 22166 (TRBV25-1, TRBJ2-1)
CASSNGGGSSNEQFF

SEQ ID NO: 44333 - protein, 12 aa, Homo sapiens
  CDR3 for alpha chain variable domain of TCR clone 22167 (TRAV13-1, TRAJ21)
CAAKEGFNKFYF

SEQ ID NO: 44334 - protein, 14 aa, Homo sapiens
  CDR3 for beta chain variable domain of TCR clone 22167 (TRBV5-4, TRBJ1-1)
CASSLDSRRDEASF

SEQ ID NO: 44335 - protein, 11 aa, Homo sapiens
  CDR3 for alpha chain variable domain of TCR clone 22168 (TRAV13-2, TRAJ54)
RAVQGAQKLVF

SEQ ID NO: 44336 - protein, 15 aa, Homo sapiens
  CDR3 for beta chain variable domain of TCR clone 22168 (TRBV20-1, TRBJ2-7)
CSAESGTSGAYEQCF

SEQ ID NO: 44337 - protein, 13 aa, Homo sapiens
  CDR3 for alpha chain variable domain of TCR clone 22169 (TRAV8-3, TRAJ44)
CAVVPGTASKLTS

SEQ ID NO: 44338 - protein, 14 aa, Homo sapiens
  CDR3 for beta chain variable domain of TCR clone 22169 (TRBV11-2, TRBJ2-3)
CASSRLARTDTQYF

SEQ ID NO: 44339 - protein, 11 aa, Homo sapiens
  CDR3 for alpha chain variable domain of TCR clone 22170 (TRAV1-1, TRAJ23)
CAVRQGGKLIF

SEQ ID NO: 44340 - protein, 16 aa, Homo sapiens
  CDR3 for beta chain variable domain of TCR clone 22170 (TRBV5-4, TRBJ2-3)
CASQQPGAGGADTQYF

SEQ ID NO: 44341 - protein, 14 aa, Homo sapiens
  CDR3 for alpha chain variable domain of TCR clone 22171 (TRAV12-2, TRAJ40)
YAVKIPSGTYKYIF

SEQ ID NO: 44342 - protein, 14 aa, Homo sapiens
  CDR3 for beta chain variable domain of TCR clone 22171 (TRBV20-1, TRBJ1-1)
CSAQTRIGGTEAFF

SEQ ID NO: 44343 - protein, 12 aa, Homo sapiens
  CDR3 for alpha chain variable domain of TCR clone 22172 (TRAV13-2, TRAJ23)
CAERHRVGKLIF

SEQ ID NO: 44344 - protein, 16 aa, Homo sapiens
  CDR3 for beta chain variable domain of TCR clone 22172 (TRBV20-1, TRBJ1-4)
CSAPGQGLLTNEKLFF

SEQ ID NO: 44345 - protein, 14 aa, Homo sapiens
  CDR3 for alpha chain variable domain of TCR clone 22173 (TRAV38-1, TRAJ29)
CAFITPSGNTPLVF

SEQ ID NO: 44346 - protein, 14 aa, Homo sapiens
  CDR3 for beta chain variable domain of TCR clone 22173 (TRBV18, TRBJ2-7)
CASSPRGGVYEQYF

SEQ ID NO: 44347 - protein, 14 aa, Homo sapiens
  CDR3 for alpha chain variable domain of TCR clone 22174 (TRAV26-1, TRAJ21)
CIVRPPYNFDKFYF

SEQ ID NO: 44348 - protein, 14 aa, Homo sapiens
  CDR3 for beta chain variable domain of TCR clone 22174 (TRBV11-3, TRBJ2-1)
CASSATTSGSIQFF

SEQ ID NO: 44349 - protein, 14 aa, Homo sapiens
  CDR3 for alpha chain variable domain of TCR clone 22175 (TRAV20, TRAJ56)
CAVQFGGANSKLTS

SEQ ID NO: 44350 - protein, 14 aa, Homo sapiens
  CDR3 for beta chain variable domain of TCR clone 22175 (TRBV20-1, TRBJ2-7)
CSAKRGRSSYEQYF

SEQ ID NO: 44351 - protein, 14 aa, Homo sapiens
  CDR3 for alpha chain variable domain of TCR clone 22176 (TRAV1-2, TRAJ16)
CAVNRFSDVQKLLF

SEQ ID NO: 44352 - protein, 11 aa, Homo sapiens
  CDR3 for beta chain variable domain of TCR clone 22176 (TRBV29-1, TRBJ2-5)
CSEDRTGTQYF

SEQ ID NO: 44353 - protein, 12 aa, Homo sapiens
  CDR3 for alpha chain variable domain of TCR clone 22177 (TRAV17, TRAJ4)
CATDGGYNKLIF

SEQ ID NO: 44354 - protein, 13 aa, Homo sapiens
  CDR3 for beta chain variable domain of TCR clone 22177 (TRBV29-1, TRBJ2-2)
CSTTGVNTGELVF

SEQ ID NO: 44355 - protein, 14 aa, Homo sapiens
  CDR3 for alpha chain variable domain of TCR clone 22178 (TRAV2, TRAJ37)
CAVDFTSNTGKLIF

SEQ ID NO: 44356 - protein, 16 aa, Homo sapiens
  CDR3 for beta chain variable domain of TCR clone 22178 (TRBV7-3, TRBJ2-2)
CASSLKRGTLSGELFF

SEQ ID NO: 44357 - protein, 14 aa, Homo sapiens
  CDR3 for alpha chain variable domain of TCR clone 22179 (TRAV38-1, TRAJ40)
CALRPTSGTYKYIF

SEQ ID NO: 44358 - protein, 14 aa, Homo sapiens
  CDR3 for beta chain variable domain of TCR clone 22179 (TRBV25-1, TRBJ1-1)
CASTHLGGNTEAFF

SEQ ID NO: 44359 - protein, 11 aa, Homo sapiens
  CDR3 for alpha chain variable domain of TCR clone 22180 (TRAV2, TRAJ33)
CAVDSNYQLIW

SEQ ID NO: 44360 - protein, 15 aa, Homo sapiens
  CDR3 for beta chain variable domain of TCR clone 22180 (TRBV19, TRBJ1-2)
CASSVGQVLNYGYTS

SEQ ID NO: 44361 - protein, 16 aa, Homo sapiens
  CDR3 for alpha chain variable domain of TCR clone 22181 (TRAV14/DV4, TRAJ20)
CAMREGRSRDDYKLSF

SEQ ID NO: 44362 - protein, 15 aa, Homo sapiens
  CDR3 for beta chain variable domain of TCR clone 22181 (TRBV9, TRBJ1-6)
CASSVAGTGDSPLHF

SEQ ID NO: 44363 - protein, 16 aa, Homo sapiens
  CDR3 for alpha chain variable domain of TCR clone 22182 (TRAV1-2, TRAJ10)
CALRGVLTGGGNKLTF

SEQ ID NO: 44364 - protein, 12 aa, Homo sapiens
  CDR3 for beta chain variable domain of TCR clone 22182 (TRBV7-8, TRBJ2-7)
CASSLGDREQYF

SEQ ID NO: 44365 - protein, 13 aa, Homo sapiens
  CDR3 for alpha chain variable domain of TCR clone 22183 (TRAV27, TRAJ49)
CAPRPYTGNQFYF

SEQ ID NO: 44366 - protein, 16 aa, Homo sapiens
  CDR3 for beta chain variable domain of TCR clone 22183 (TRBV4-1, TRBJ1-2)
YASSQDAGQVLYGYTF

SEQ ID NO: 44367 - protein, 10 aa, Homo sapiens
  CDR3 for alpha chain variable domain of TCR clone 22184 (TRAV23/DV6, TRAJ57)
CAASSTLSQG

SEQ ID NO: 44368 - protein, 14 aa, Homo sapiens
  CDR3 for beta chain variable domain of TCR clone 22184 (TRBV25-1, TRBJ1-1)
CASTHLGGNTGAFF

SEQ ID NO: 44369 - protein, 11 aa, Homo sapiens
  CDR3 for alpha chain variable domain of TCR clone 22185 (TRAV21, TRAJ11)
CAVNGYSTLTF

SEQ ID NO: 44370 - protein, 13 aa, Homo sapiens
  CDR3 for beta chain variable domain of TCR clone 22185 (TRBV7-3, TRBJ1-1)
CASSQDWGAEAFF

SEQ ID NO: 44371 - protein, 14 aa, Homo sapiens
  CDR3 for alpha chain variable domain of TCR clone 22186 (TRAV9-2, TRAJ39)
CALYIYNAGNMLTF

SEQ ID NO: 44372 - protein, 17 aa, Homo sapiens
  CDR3 for beta chain variable domain of TCR clone 22186 (TRBV6-1, TRBJ1-5)
CASSEAEFIRARQPQHF

SEQ ID NO: 44373 - protein, 16 aa, Homo sapiens
  CDR3 for alpha chain variable domain of TCR clone 22187 (TRAV12-3, TRAJ53)
CAMSPGSGGSNYKLTF

SEQ ID NO: 44374 - protein, 13 aa, Homo sapiens
  CDR3 for beta chain variable domain of TCR clone 22187 (TRBV4-2, TRBJ1-1)
CASSQAGNTEAFF

SEQ ID NO: 44375 - protein, 12 aa, Homo sapiens
  CDR3 for alpha chain variable domain of TCR clone 22188 (TRAV8-3, TRAJ20)
WAVGANDYKLSF

SEQ ID NO: 44376 - protein, 16 aa, Homo sapiens
  CDR3 for beta chain variable domain of TCR clone 22188 (TRBV19, TRBJ2-2)
CASRSPGTGATGELFF

SEQ ID NO: 44377 - protein, 15 aa, Homo sapiens
  CDR3 for alpha chain variable domain of TCR clone 22189 (TRAV2, TRAJ9)
CAVEDRGTGGFKTIF

SEQ ID NO: 44378 - protein, 16 aa, Homo sapiens
  CDR3 for beta chain variable domain of TCR clone 22189 (TRBV24-1, TRBJ2-3)
CATSDPGTEATDTQYF

SEQ ID NO: 44379 - protein, 15 aa, Homo sapiens
  CDR3 for alpha chain variable domain of TCR clone 22190 (TRAV8-3, TRAJ23)
CAVGDRYNQGGKLIF

SEQ ID NO: 44380 - protein, 15 aa, Homo sapiens
  CDR3 for beta chain variable domain of TCR clone 22190 (TRBV29-1, TRBJ2-5)
EGSSIYLCSAGTQYF

SEQ ID NO: 44381 - protein, 13 aa, Homo sapiens
  CDR3 for alpha chain variable domain of TCR clone 22191 (TRAV13-1, TRAJ34)
CAVSSYNTDKLIF

SEQ ID NO: 44382 - protein, 13 aa, Homo sapiens
  CDR3 for beta chain variable domain of TCR clone 22191 (TRBV7-9, TRBJ1-2)
CASSLKQNYGYTF

SEQ ID NO: 44383 - protein, 12 aa, Homo sapiens
  CDR3 for alpha chain variable domain of TCR clone 22192 (TRAV8-3, TRAJ26)
CAVDNYGQNFVF

SEQ ID NO: 44384 - protein, 15 aa, Homo sapiens
  CDR3 for beta chain variable domain of TCR clone 22192 (TRBV9, TRBJ2-1)
CASSLAGSSYNEQFF

SEQ ID NO: 44385 - protein, 18 aa, Homo sapiens
  CDR3 for alpha chain variable domain of TCR clone 22193 (TRAV13-1, TRAJ52)
CAAKNPNAGGTSYGRLTF

SEQ ID NO: 44386 - protein, 15 aa, Homo sapiens
  CDR3 for beta chain variable domain of TCR clone 22193 (TRBV6-1, TRBJ2-3)
CASSERGGITDTQYF

SEQ ID NO: 44387 - protein, 15 aa, Homo sapiens
  CDR3 for alpha chain variable domain of TCR clone 22194 (TRAV3, TRAJ36)
CAVRASQTGANNPFF

SEQ ID NO: 44388 - protein, 13 aa, Homo sapiens
  CDR3 for beta chain variable domain of TCR clone 22194 (TRBV10-3, TRBJ1-2)
CAISERDSYGYTF

SEQ ID NO: 44389 - protein, 11 aa, Homo sapiens
  CDR3 for alpha chain variable domain of TCR clone 22195 (TRAV1-2, TRAJ20)
CAVANDYKLSF

SEQ ID NO: 44390 - protein, 18 aa, Homo sapiens
  CDR3 for beta chain variable domain of TCR clone 22195 (TRBV20-1, TRBJ2-6)
CSAETTPTPGSGANVLTF

SEQ ID NO: 44391 - protein, 14 aa, Homo sapiens
  CDR3 for alpha chain variable domain of TCR clone 22196 (TRAV21, TRAJ35)
CAVMPIGFGNVLHR

SEQ ID NO: 44392 - protein, 12 aa, Homo sapiens
  CDR3 for beta chain variable domain of TCR clone 22196 (TRBV7-9, TRBJ2-7)
CASSIKREEQYF

SEQ ID NO: 44393 - protein, 14 aa, Homo sapiens
  CDR3 for alpha chain variable domain of TCR clone 22197 (TRAV8-1, TRAJ6)
CAVNASGGSYIPTF

SEQ ID NO: 44394 - protein, 13 aa, Homo sapiens
  CDR3 for beta chain variable domain of TCR clone 22197 (TRBV2, TRBJ1-5)
CASSQGGSQPQHF

SEQ ID NO: 44395 - protein, 14 aa, Homo sapiens
  CDR3 for alpha chain variable domain of TCR clone 22198 (TRAV4, TRAJ31)
CLVGDRDNNARLMF

SEQ ID NO: 44396 - protein, 13 aa, Homo sapiens
  CDR3 for beta chain variable domain of TCR clone 22198 (TRBV5-1, TRBJ1-1)
CASSLGSDTEAFF

SEQ ID NO: 44397 - protein, 23 aa, Homo sapiens
  CDR3 for alpha chain variable domain of TCR clone 22199 (TRAV26-1, TRAJ38)
CIADNAGNNRIQNPDPAVYQLRD

SEQ ID NO: 44398 - protein, 13 aa, Homo sapiens
  CDR3 for beta chain variable domain of TCR clone 22199 (TRBV20-1, TRBJ1-1)
CSARGGGNTEAFF

SEQ ID NO: 44399 - protein, 14 aa, Homo sapiens
  CDR3 for alpha chain variable domain of TCR clone 22200 (TRAV13-1, TRAJ35)
CAANKGGFGNVLHC

SEQ ID NO: 44400 - protein, 13 aa, Homo sapiens
  CDR3 for beta chain variable domain of TCR clone 22200 (TRBV7-3, TRBJ1-1)
CASSQDWGAEAFF

SEQ ID NO: 44401 - protein, 14 aa, Homo sapiens
  CDR3 for alpha chain variable domain of TCR clone 22201 (TRAV16, TRAJ17)
CALSGRAASNKLTF

SEQ ID NO: 44402 - protein, 15 aa, Homo sapiens
  CDR3 for beta chain variable domain of TCR clone 22201 (TRBV3-1, TRBJ1-2)
CASSPTRLPEGGYTF

SEQ ID NO: 44403 - protein, 10 aa, Homo sapiens
  CDR3 for alpha chain variable domain of TCR clone 22202 (TRAV12-3, TRAJ10)
CAAWTGVETH

SEQ ID NO: 44404 - protein, 17 aa, Homo sapiens
  CDR3 for beta chain variable domain of TCR clone 22202 (TRBV13, TRBJ2-3)
CASSLSRVAGGRNTQYF

SEQ ID NO: 44405 - protein, 13 aa, Homo sapiens
  CDR3 for alpha chain variable domain of TCR clone 22203 (TRAV35, TRAJ42)
CAGFPGSQGNLIF

SEQ ID NO: 44406 - protein, 15 aa, Homo sapiens
  CDR3 for beta chain variable domain of TCR clone 22203 (TRBV20-1, TRBJ2-7)
CSARDRVSGMDEQYF

SEQ ID NO: 44407 - protein, 15 aa, Homo sapiens
  CDR3 for alpha chain variable domain of TCR clone 22204 (TRAV3, TRAJ5)
CAVRDLDTGRRALTF

SEQ ID NO: 44408 - protein, 15 aa, Homo sapiens
  CDR3 for beta chain variable domain of TCR clone 22204 (TRBV20-1, TRBJ2-7)
CSARDRVSGMDEQYF

SEQ ID NO: 44409 - protein, 14 aa, Homo sapiens
  CDR3 for alpha chain variable domain of TCR clone 22205 (TRAV35, TRAJ22)
CAGLRPGSARQLTF

SEQ ID NO: 44410 - protein, 16 aa, Homo sapiens
  CDR3 for beta chain variable domain of TCR clone 22205 (TRBV12-5, TRBJ2-5)
CASGPRTSGNQETQYF

SEQ ID NO: 44411 - protein, 11 aa, Homo sapiens
  CDR3 for alpha chain variable domain of TCR clone 22206 (TRAV4, TRAJ23)
CLVAPGGKLIF

SEQ ID NO: 44412 - protein, 15 aa, Homo sapiens
  CDR3 for beta chain variable domain of TCR clone 22206 (TRBV7-2, TRBJ2-1)
CASSFQADEYSEQFF

SEQ ID NO: 44413 - protein, 14 aa, Homo sapiens
  CDR3 for alpha chain variable domain of TCR clone 22207 (TRAV12-3, TRAJ22)
CAMSLFGSARQLTF

SEQ ID NO: 44414 - protein, 16 aa, Homo sapiens
  CDR3 for beta chain variable domain of TCR clone 22207 (TRBV7-2, TRBJ1-4)
CASSPVGRFDREKLFF

SEQ ID NO: 44415 - protein, 15 aa, Homo sapiens
  CDR3 for alpha chain variable domain of TCR clone 22208 (TRAV26-1, TRAJ42)
CIVRVKGGSQGNPIF

SEQ ID NO: 44416 - protein, 14 aa, Homo sapiens
  CDR3 for beta chain variable domain of TCR clone 22208 (TRBV19, TRBJ2-2)
CATTGHANTGELFF

SEQ ID NO: 44417 - protein, 12 aa, Homo sapiens
  CDR3 for alpha chain variable domain of TCR clone 22209 (TRAV21, TRAJ23)
CAVGPQGGELIF

SEQ ID NO: 44418 - protein, 13 aa, Homo sapiens
  CDR3 for beta chain variable domain of TCR clone 22209 (TRBV20-1, TRBJ2-7)
CSARTGAGYEQYF

SEQ ID NO: 44419 - protein, 13 aa, Homo sapiens
  CDR3 for alpha chain variable domain of TCR clone 22210 (TRAV13-2, TRAJ53)
CAENMGSNYKLTF

SEQ ID NO: 44420 - protein, 13 aa, Homo sapiens
  CDR3 for beta chain variable domain of TCR clone 22210 (TRBV4-1, TRBJ2-2)
CASSQESTGELFF

SEQ ID NO: 44421 - protein, 14 aa, Homo sapiens
  CDR3 for alpha chain variable domain of TCR clone 22211 (TRAV21, TRAJ35)
CAVMPIVFGNVLHC

SEQ ID NO: 44422 - protein, 12 aa, Homo sapiens
  CDR3 for beta chain variable domain of TCR clone 22211 (TRBV7-9, TRBJ2-7)
CASSIKREEQYF

SEQ ID NO: 44423 - protein, 14 aa, Homo sapiens
  CDR3 for alpha chain variable domain of TCR clone 22212 (TRAV1-2, TRAJ16)
CAVNRFSDGQKLLF

SEQ ID NO: 44424 - protein, 14 aa, Homo sapiens
  CDR3 for beta chain variable domain of TCR clone 22212 (TRBV7-6, TRBJ2-1)
CASSLGGGADEQFF

SEQ ID NO: 44425 - protein, 13 aa, Homo sapiens
  CDR3 for alpha chain variable domain of TCR clone 22213 (TRAV21, TRAJ27)
CAARPGIAGKSTF

SEQ ID NO: 44426 - protein, 14 aa, Homo sapiens
  CDR3 for beta chain variable domain of TCR clone 22213 (TRBV7-6, TRBJ2-3)
CASSLGTVTDTQYF

SEQ ID NO: 44427 - protein, 17 aa, Homo sapiens
  CDR3 for alpha chain variable domain of TCR clone 22214 (TRAV13-1, TRAJ31)
CAPRDRLMFGDGTQLVV

SEQ ID NO: 44428 - protein, 12 aa, Homo sapiens
  CDR3 for beta chain variable domain of TCR clone 22214 (TRBV7-9, TRBJ2-7)
CAGSLEGYEQYF

SEQ ID NO: 44429 - protein, 18 aa, Homo sapiens
  CDR3 for alpha chain variable domain of TCR clone 22215 (TRAV13-1, TRAJ52)
CAASKSSAGGTSYGKLTF

SEQ ID NO: 44430 - protein, 13 aa, Homo sapiens
  CDR3 for beta chain variable domain of TCR clone 22215 (TRBV12-4, TRBJ1-2)
CASSLRQGKGYTF

SEQ ID NO: 44431 - protein, 12 aa, Homo sapiens
  CDR3 for alpha chain variable domain of TCR clone 22216 (TRAV8-3, TRAJ20)
CAVGANDYKLSC

SEQ ID NO: 44432 - protein, 16 aa, Homo sapiens
  CDR3 for beta chain variable domain of TCR clone 22216 (TRBV19, TRBJ2-2)
CASRSPGTGATGELFF

SEQ ID NO: 44433 - protein, 12 aa, Homo sapiens
  CDR3 for alpha chain variable domain of TCR clone 22217 (TRAV12-1, TRAJ40)
CVIYSGTYKYIF

SEQ ID NO: 44434 - protein, 18 aa, Homo sapiens
  CDR3 for beta chain variable domain of TCR clone 22217 (TRBV11-2, TRBJ2-3)
CASSLGGASRGAPNTQYF

SEQ ID NO: 44435 - protein, 12 aa, Homo sapiens
  CDR3 for alpha chain variable domain of TCR clone 22218 (TRAV13-2, TRAJ23)
CAERHRGGKLIF

SEQ ID NO: 44436 - protein, 14 aa, Homo sapiens
  CDR3 for beta chain variable domain of TCR clone 22218 (TRBV19, TRBJ2-5)
CASSMTGQQETQYF

SEQ ID NO: 44437 - protein, 11 aa, Homo sapiens
  CDR3 for alpha chain variable domain of TCR clone 22219 (TRAV12-3, TRAJ43)
CAMSVSNDMRF

SEQ ID NO: 44438 - protein, 13 aa, Homo sapiens
  CDR3 for beta chain variable domain of TCR clone 22219 (TRBV20-1, TRBJ1-1)
CSTPLGGGTEAFF

SEQ ID NO: 44439 - protein, 11 aa, Homo sapiens
  CDR3 for alpha chain variable domain of TCR clone 22220 (TRAV2, TRAJ13)
CASGGYQKVTF

SEQ ID NO: 44440 - protein, 16 aa, Homo sapiens
  CDR3 for beta chain variable domain of TCR clone 22220 (TRBV6-1, TRBJ2-5)
CASSETLDGGAETQYF

SEQ ID NO: 44441 - protein, 14 aa, Homo sapiens
  CDR3 for alpha chain variable domain of TCR clone 22221 (TRAV1-2, TRAJ16)
CAVNRFSDGQKLLF

SEQ ID NO: 44442 - protein, 12 aa, Homo sapiens
  CDR3 for beta chain variable domain of TCR clone 22221 (TRBV7-2, TRBJ2-5)
CASSQYQETQYF

SEQ ID NO: 44443 - protein, 14 aa, Homo sapiens
  CDR3 for alpha chain variable domain of TCR clone 22222 (TRAV8-3, TRAJ4)
CAVGAAGGYNKPIF

SEQ ID NO: 44444 - protein, 15 aa, Homo sapiens
  CDR3 for beta chain variable domain of TCR clone 22222 (TRBV6-5, TRBJ2-1)
CASSYDAGAGNEQFF

SEQ ID NO: 44445 - protein, 14 aa, Homo sapiens
  CDR3 for alpha chain variable domain of TCR clone 22223 (TRAV1-2, TRAJ8)
CAVKEDTGFQKLVF

SEQ ID NO: 44446 - protein, 15 aa, Homo sapiens
  CDR3 for beta chain variable domain of TCR clone 22223 (TRBV6-3, TRBJ2-7)
CASSSPGTVFYEQYF

SEQ ID NO: 44447 - protein, 11 aa, Homo sapiens
  CDR3 for alpha chain variable domain of TCR clone 22224 (TRAV1-2, TRAJ20)
CAVANDYKLSF

SEQ ID NO: 44448 - protein, 18 aa, Homo sapiens
  CDR3 for beta chain variable domain of TCR clone 22224 (TRBV20-1, TRBJ2-6)
CSAKTTPTHGSGANVLTF

SEQ ID NO: 44449 - protein, 18 aa, Homo sapiens
  CDR3 for alpha chain variable domain of TCR clone 22225 (TRAV21, TRAJ52)
CAVRPSPAGGTSYGKLTF

SEQ ID NO: 44450 - protein, 15 aa, Homo sapiens
  CDR3 for beta chain variable domain of TCR clone 22225 (TRBV5-1, TRBJ2-1)
CASSPPRAPYNEQFF

SEQ ID NO: 44451 - protein, 15 aa, Homo sapiens
  CDR3 for alpha chain variable domain of TCR clone 22226 (TRAV8-4, TRAJ37)
CAVSTRSGNTGKLIF

SEQ ID NO: 44452 - protein, 20 aa, Homo sapiens
  CDR3 for beta chain variable domain of TCR clone 22226 (TRBV7-8, TRBJ2-2)
CASSHLFPGPTIQITGELFF

SEQ ID NO: 44453 - protein, 11 aa, Homo sapiens
  CDR3 for alpha chain variable domain of TCR clone 22227 (TRAV1-2, TRAJ20)
CAVANDYKLSF

SEQ ID NO: 44454 - protein, 18 aa, Homo sapiens
  CDR3 for beta chain variable domain of TCR clone 22227 (TRBV20-1, TRBJ2-6)
CSAETTPTHGSGANVLSF

SEQ ID NO: 44455 - protein, 16 aa, Homo sapiens
  CDR3 for alpha chain variable domain of TCR clone 22228 (TRAV3, TRAJ37)
CAVRPHGSGNTGTLIF

SEQ ID NO: 44456 - protein, 16 aa, Homo sapiens
  CDR3 for beta chain variable domain of TCR clone 22228 (TRBV9, TRBJ1-2)
CASSVEEKVSPYGYTF

SEQ ID NO: 44457 - protein, 14 aa, Homo sapiens
  CDR3 for alpha chain variable domain of TCR clone 22229 (TRAV26-1, TRAJ38)
CIADNAGNNRKLIW

SEQ ID NO: 44458 - protein, 13 aa, Homo sapiens
  CDR3 for beta chain variable domain of TCR clone 22229 (TRBV20-1, TRBJ1-1)
CSARGGGNTDAFF

SEQ ID NO: 44459 - protein, 11 aa, Homo sapiens
  CDR3 for alpha chain variable domain of TCR clone 22230 (TRAV12-1, TRAJ43)
CVEYDDNDMRF

SEQ ID NO: 44460 - protein, 15 aa, Homo sapiens
  CDR3 for beta chain variable domain of TCR clone 22230 (TRBV18, TRBJ2-5)
CASSPRASEAETQYF

SEQ ID NO: 44461 - protein, 14 aa, Homo sapiens
  CDR3 for alpha chain variable domain of TCR clone 22231 (TRAV38-1, TRAJ29)
CAFIAPSGNTPLVF

SEQ ID NO: 44462 - protein, 14 aa, Homo sapiens
  CDR3 for beta chain variable domain of TCR clone 22231 (TRBV18, TRBJ2-7)
CASSPRGGAYEQYF

SEQ ID NO: 44463 - protein, 11 aa, Homo sapiens
  CDR3 for alpha chain variable domain of TCR clone 22232 (TRAV17, TRAJ9)
CGLTGGFKTIF

SEQ ID NO: 44464 - protein, 12 aa, Homo sapiens
  CDR3 for beta chain variable domain of TCR clone 22232 (TRBV29-1, TRBJ2-3)
CSVTGGADTQYF

SEQ ID NO: 44465 - protein, 19 aa, Homo sapiens
  CDR3 for alpha chain variable domain of TCR clone 22233 (TRAV1-2, TRAJ26)
CPLPLCCERPDNYGQNFVF

SEQ ID NO: 44466 - protein, 15 aa, Homo sapiens
  CDR3 for beta chain variable domain of TCR clone 22233 (TRBV9, TRBJ1-6)
CASSVAGTGDSPLHF

SEQ ID NO: 44467 - protein, 13 aa, Homo sapiens
  CDR3 for alpha chain variable domain of TCR clone 22234 (TRAV3, TRAJ21)
CAVREPDFNKFYF

SEQ ID NO: 44468 - protein, 13 aa, Homo sapiens
  CDR3 for beta chain variable domain of TCR clone 22234 (TRBV9, TRBJ2-1)
CASSPSGGNKQFF

SEQ ID NO: 44469 - protein, 13 aa, Homo sapiens
  CDR3 for alpha chain variable domain of TCR clone 22235 (TRAV41, TRAJ48)
SVPVNFGNEKLTF

SEQ ID NO: 44470 - protein, 15 aa, Homo sapiens
  CDR3 for beta chain variable domain of TCR clone 22235 (TRBV27, TRBJ2-7)
CASSPQREGQREQYF

SEQ ID NO: 44471 - protein, 12 aa, Homo sapiens
  CDR3 for alpha chain variable domain of TCR clone 22236 (TRAV21, TRAJ33)
CAKMDSNYQLIW

SEQ ID NO: 44472 - protein, 14 aa, Homo sapiens
  CDR3 for beta chain variable domain of TCR clone 22236 (TRBV2, TRBJ2-7)
CANSLTSGGYEQYF

SEQ ID NO: 44473 - protein, 19 aa, Homo sapiens
  CDR3 for alpha chain variable domain of TCR clone 22237 (TRAV1-2, TRAJ26)
CLLPLCCERPDNYGQNFVL

SEQ ID NO: 44474 - protein, 11 aa, Homo sapiens
  CDR3 for beta chain variable domain of TCR clone 22237 (TRBV29-1, TRBJ2-5)
CSEDRTGTQYF

SEQ ID NO: 44475 - protein, 18 aa, Homo sapiens
  CDR3 for alpha chain variable domain of TCR clone 22238 (TRAV21, TRAJ52)
CAVRPSPAGGTSYGKLTF

SEQ ID NO: 44476 - protein, 14 aa, Homo sapiens
  CDR3 for beta chain variable domain of TCR clone 22238 (TRBV19, TRBJ2-1)
CARGARSFQWEQFF

SEQ ID NO: 44477 - protein, 13 aa, Homo sapiens
  CDR3 for alpha chain variable domain of TCR clone 22239 (TRAV27, TRAJ3)
ASLRGSSASKIIF

SEQ ID NO: 44478 - protein, 15 aa, Homo sapiens
  CDR3 for beta chain variable domain of TCR clone 22239 (TRBV28, TRBJ1-3)
CASSMGWASGNTIHF

SEQ ID NO: 44479 - protein, 15 aa, Homo sapiens
  CDR3 for alpha chain variable domain of TCR clone 22240 (TRAV3, TRAJ20)
CAVRDIKLSDYKLSF

SEQ ID NO: 44480 - protein, 15 aa, Homo sapiens
  CDR3 for beta chain variable domain of TCR clone 22240 (TRBV7-9, TRBJ1-6)
CASSSPGRGNSSLHF

SEQ ID NO: 44481 - protein, 13 aa, Homo sapiens
  CDR3 for alpha chain variable domain of TCR clone 22241 (TRAV1-2, TRAJ9)
CAALNTGGFKTIF

SEQ ID NO: 44482 - protein, 16 aa, Homo sapiens
  CDR3 for beta chain variable domain of TCR clone 22241 (TRBV5-1, TRBJ1-1)
CASSSGGNSLNTEAFF

SEQ ID NO: 44483 - protein, 14 aa, Homo sapiens
  CDR3 for alpha chain variable domain of TCR clone 22242 (TRAV12-2, TRAJ40)
CAVKIPSGTYKYIF

SEQ ID NO: 44484 - protein, 14 aa, Homo sapiens
  CDR3 for beta chain variable domain of TCR clone 22242 (TRBV20-1, TRBJ1-1)
CSAKTRIGGTEAFF

SEQ ID NO: 44485 - protein, 16 aa, Homo sapiens
  CDR3 for alpha chain variable domain of TCR clone 22243 (TRAV23/DV6, TRAJ9)
CAASIGGNTGGFKTIF

SEQ ID NO: 44486 - protein, 14 aa, Homo sapiens
  CDR3 for beta chain variable domain of TCR clone 22243 (TRBV9, TRBJ2-7)
SASSVGVGSYEQYF

SEQ ID NO: 44487 - protein, 12 aa, Homo sapiens
  CDR3 for alpha chain variable domain of TCR clone 22244 (TRAV12-3, TRAJ4)
CAMTGAGTRLAV

SEQ ID NO: 44488 - protein, 14 aa, Homo sapiens
  CDR3 for beta chain variable domain of TCR clone 22244 (TRBV10-3, TRBJ1-1)
CAISDTDRGVEASF

SEQ ID NO: 44489 - protein, 13 aa, Homo sapiens
  CDR3 for alpha chain variable domain of TCR clone 22245 (TRAV26-2, TRAJ43)
CILRAANNNDMRF

SEQ ID NO: 44490 - protein, 15 aa, Homo sapiens
  CDR3 for beta chain variable domain of TCR clone 22245 (TRBV7-2, TRBJ2-1)
CASTHGTGIYNEQFF

SEQ ID NO: 44491 - protein, 12 aa, Homo sapiens
  CDR3 for alpha chain variable domain of TCR clone 22246 (TRAV1-1, TRAJ39)
CAVPVVGDMLTF

SEQ ID NO: 44492 - protein, 18 aa, Homo sapiens
  CDR3 for beta chain variable domain of TCR clone 22246 (TRBV7-9, TRBJ2-7)
CASSLTTSGSRTWYEQYF

SEQ ID NO: 44493 - protein, 10 aa, Homo sapiens
  CDR3 for alpha chain variable domain of TCR clone 22247 (TRAV16, TRAJ22)
SAMYLRQLTF

SEQ ID NO: 44494 - protein, 15 aa, Homo sapiens
  CDR3 for beta chain variable domain of TCR clone 22247 (TRBV7-9, TRBJ1-6)
CASGSPGRGNSPLHF

SEQ ID NO: 44495 - protein, 12 aa, Homo sapiens
  CDR3 for alpha chain variable domain of TCR clone 22248 (TRAV1-2, TRAJ34)
CAVREGHRQAHL

SEQ ID NO: 44496 - protein, 14 aa, Homo sapiens
  CDR3 for beta chain variable domain of TCR clone 22248 (TRBV6-5, TRBJ2-2)
CASTEGQETGELFF

SEQ ID NO: 44497 - protein, 12 aa, Homo sapiens
  CDR3 for alpha chain variable domain of TCR clone 22249 (TRAV12-2, TRAJ40)
CVVYSGTYKYIF

SEQ ID NO: 44498 - protein, 18 aa, Homo sapiens
  CDR3 for beta chain variable domain of TCR clone 22249 (TRBV11-2, TRBJ2-3)
CASSLGGASRGAPNTQYF

SEQ ID NO: 44499 - protein, 15 aa, Homo sapiens
  CDR3 for alpha chain variable domain of TCR clone 22250 (TRAV8-3, TRAJ27)
CAVGPSKTNAGKSTF

SEQ ID NO: 44500 - protein, 15 aa, Homo sapiens
  CDR3 for beta chain variable domain of TCR clone 22250 (TRBV7-2, TRBJ2-1)
CANSSGLAGGNEQFF

SEQ ID NO: 44501 - protein, 15 aa, Homo sapiens
  CDR3 for alpha chain variable domain of TCR clone 22251 (TRAV12-1, TRAJ45)
CVVLSRGGGADGLTF

SEQ ID NO: 44502 - protein, 15 aa, Homo sapiens
  CDR3 for beta chain variable domain of TCR clone 22251 (TRBV12-5, TRBJ2-5)
CASGSGLAGRETQYF

SEQ ID NO: 44503 - protein, 15 aa, Homo sapiens
  CDR3 for alpha chain variable domain of TCR clone 22252 (TRAV21, TRAJ53)
CATLNSGGSNYKMTF

SEQ ID NO: 44504 - protein, 16 aa, Homo sapiens
  CDR3 for beta chain variable domain of TCR clone 22252 (TRBV9, TRBJ2-1)
CASSVGGGGNYNEQFF

SEQ ID NO: 44505 - protein, 14 aa, Homo sapiens
  CDR3 for alpha chain variable domain of TCR clone 22253 (TRAV12-1, TRAJ17)
CVVNYKAAGNKLTF

SEQ ID NO: 44506 - protein, 17 aa, Homo sapiens
  CDR3 for beta chain variable domain of TCR clone 22253 (TRBV20-1, TRBJ2-1)
YSASSSGLAGSYNEQFF

SEQ ID NO: 44507 - protein, 12 aa, Homo sapiens
  CDR3 for alpha chain variable domain of TCR clone 22254 (TRAV12-3, TRAJ17)
CAMTLTGNKLTF

SEQ ID NO: 44508 - protein, 14 aa, Homo sapiens
  CDR3 for beta chain variable domain of TCR clone 22254 (TRBV19, TRBJ2-2)
CASSGQGIAGELFF

SEQ ID NO: 44509 - protein, 14 aa, Homo sapiens
  CDR3 for alpha chain variable domain of TCR clone 22255 (TRAV35, TRAJ33)
CAGSSQDSNYQLIW

SEQ ID NO: 44510 - protein, 15 aa, Homo sapiens
  CDR3 for beta chain variable domain of TCR clone 22255 (TRBV20-1, TRBJ2-7)
CSAESGTSGAYEQYS

SEQ ID NO: 44511 - protein, 13 aa, Homo sapiens
  CDR3 for alpha chain variable domain of TCR clone 22256 (TRAV27, TRAJ45)
CRSSGGGADGLTF

SEQ ID NO: 44512 - protein, 14 aa, Homo sapiens
  CDR3 for beta chain variable domain of TCR clone 22256 (TRBV7-9, TRBJ2-1)
CASSPRDSLYEQFF

SEQ ID NO: 44513 - protein, 12 aa, Homo sapiens
  CDR3 for alpha chain variable domain of TCR clone 22257 (TRAV3, TRAJ7)
CADLLWEQQTRF

SEQ ID NO: 44514 - protein, 13 aa, Homo sapiens
  CDR3 for beta chain variable domain of TCR clone 22257 (TRBV7-3, TRBJ2-5)
CASSFRGGETQYF

SEQ ID NO: 44515 - protein, 15 aa, Homo sapiens
  CDR3 for alpha chain variable domain of TCR clone 22258 (TRAV3, TRAJ5)
CAVRDRKTGRIALTF

SEQ ID NO: 44516 - protein, 15 aa, Homo sapiens
  CDR3 for beta chain variable domain of TCR clone 22258 (TRBV7-8, TRBJ2-1)
CASSLADSLYNEQFF

SEQ ID NO: 44517 - protein, 15 aa, Homo sapiens
  CDR3 for alpha chain variable domain of TCR clone 22259 (TRAV2, TRAJ15)
CAVEDRGQAGTALIF

SEQ ID NO: 44518 - protein, 13 aa, Homo sapiens
  CDR3 for beta chain variable domain of TCR clone 22259 (TRBV10-2, TRBJ2-7)
CASGASGGYEQYV

SEQ ID NO: 44519 - protein, 15 aa, Homo sapiens
  CDR3 for alpha chain variable domain of TCR clone 22260 (TRAV17, TRAJ57)
CATGPSQGGSEKLVF

SEQ ID NO: 44520 - protein, 16 aa, Homo sapiens
  CDR3 for beta chain variable domain of TCR clone 22260 (TRBV12-4, TRBJ1-5)
CTSSRPVGGSNQPQHF

SEQ ID NO: 44521 - protein, 12 aa, Homo sapiens
  CDR3 for alpha chain variable domain of TCR clone 22261 (TRAV2, TRAJ9)
CAVGAGGFKTIF

SEQ ID NO: 44522 - protein, 16 aa, Homo sapiens
  CDR3 for beta chain variable domain of TCR clone 22261 (TRBV13, TRBJ2-2)
CASSPRTGEHTGELFC

SEQ ID NO: 44523 - protein, 23 aa, Homo sapiens
  CDR3 for alpha chain variable domain of TCR clone 22262 (TRAV26-1, TRAJ38)
CIADNAGNNHIQNPDPAVYQLRD

SEQ ID NO: 44524 - protein, 13 aa, Homo sapiens
  CDR3 for beta chain variable domain of TCR clone 22262 (TRBV20-1, TRBJ1-1)
CSARGGGNTEALF

SEQ ID NO: 44525 - protein, 14 aa, Homo sapiens
  CDR3 for alpha chain variable domain of TCR clone 22263 (TRAV3, TRAJ21)
CAVRDPYNFNKFYF

SEQ ID NO: 44526 - protein, 15 aa, Homo sapiens
  CDR3 for beta chain variable domain of TCR clone 22263 (TRBV19, TRBJ1-2)
CASSVGQVLNYGYTF

SEQ ID NO: 44527 - protein, 15 aa, Homo sapiens
  CDR3 for alpha chain variable domain of TCR clone 22264 (TRAV13-2, TRAJ45)
CAESDSGGGADGLTF

SEQ ID NO: 44528 - protein, 15 aa, Homo sapiens
  CDR3 for beta chain variable domain of TCR clone 22264 (TRBV27, TRBJ2-1)
CASSNGGGSSNEQFF

SEQ ID NO: 44529 - protein, 15 aa, Homo sapiens
  CDR3 for alpha chain variable domain of TCR clone 22265 (TRAV3, TRAJ5)
CAVRDRKTGRRTLTF

SEQ ID NO: 44530 - protein, 15 aa, Homo sapiens
  CDR3 for beta chain variable domain of TCR clone 22265 (TRBV7-8, TRBJ2-1)
CASSLADSLYNEQFF

SEQ ID NO: 44531 - protein, 16 aa, Homo sapiens
  CDR3 for alpha chain variable domain of TCR clone 22266 (TRAV26-1, TRAJ53)
CIVRAAMGGSNYKLTF

SEQ ID NO: 44532 - protein, 12 aa, Homo sapiens
  CDR3 for beta chain variable domain of TCR clone 22266 (TRBV7-9, TRBJ1-5)
CASSPQGQPQHF

SEQ ID NO: 44533 - protein, 14 aa, Homo sapiens
  CDR3 for alpha chain variable domain of TCR clone 22267 (TRAV1-2, TRAJ16)
CAVNRFSDGQKLLF

SEQ ID NO: 44534 - protein, 16 aa, Homo sapiens
  CDR3 for beta chain variable domain of TCR clone 22267 (TRBV12-4, TRBJ2-7)
CASSLIGGTGTYEQYF

SEQ ID NO: 44535 - protein, 14 aa, Homo sapiens
  CDR3 for alpha chain variable domain of TCR clone 22268 (TRAV1-2, TRAJ16)
CAVNRFSDGQKLLF

SEQ ID NO: 44536 - protein, 14 aa, Homo sapiens
  CDR3 for beta chain variable domain of TCR clone 22268 (TRBV9, TRBJ2-7)
CASSVGVGSYEQYF

SEQ ID NO: 44537 - protein, 14 aa, Homo sapiens
  CDR3 for alpha chain variable domain of TCR clone 22269 (TRAV1-2, TRAJ16)
CAVNRFSDGQKLIF

SEQ ID NO: 44538 - protein, 15 aa, Homo sapiens
  CDR3 for beta chain variable domain of TCR clone 22269 (TRBV9, TRBJ1-6)
CASSVAGTGDSPLHF

SEQ ID NO: 44539 - protein, 14 aa, Homo sapiens
  CDR3 for alpha chain variable domain of TCR clone 22270 (TRAV26-1, TRAJ38)
CIDDNAGNNRKLIW

SEQ ID NO: 44540 - protein, 13 aa, Homo sapiens
  CDR3 for beta chain variable domain of TCR clone 22270 (TRBV20-1, TRBJ1-1)
CSARGGGNTEAFF

SEQ ID NO: 44541 - protein, 15 aa, Homo sapiens
  CDR3 for alpha chain variable domain of TCR clone 22271 (TRAV17, TRAJ57)
CATGPSQGGSEKLVF

SEQ ID NO: 44542 - protein, 15 aa, Homo sapiens
  CDR3 for beta chain variable domain of TCR clone 22271 (TRBV20-1, TRBJ2-7)
CSARDRVSGMDEQYF

SEQ ID NO: 44543 - protein, 15 aa, Homo sapiens
  CDR3 for alpha chain variable domain of TCR clone 22272 (TRAV8-3, TRAJ27)
CAVGPSKTNAGKSTF

SEQ ID NO: 44544 - protein, 15 aa, Homo sapiens
  CDR3 for beta chain variable domain of TCR clone 22272 (TRBV7-2, TRBJ2-1)
CTSSSGLAGGNEQFF

SEQ ID NO: 44545 - protein, 12 aa, Homo sapiens
  CDR3 for alpha chain variable domain of TCR clone 22273 (TRAV16, TRAJ10)
CSRTGGGNKITF

SEQ ID NO: 44546 - protein, 15 aa, Homo sapiens
  CDR3 for beta chain variable domain of TCR clone 22273 (TRBV6-3, TRBJ2-7)
CASSSPGTVFYEQYF

SEQ ID NO: 44547 - protein, 14 aa, Homo sapiens
  CDR3 for alpha chain variable domain of TCR clone 22274 (TRAV4, TRAJ9)
CLVGSGTGGFKTIF

SEQ ID NO: 44548 - protein, 14 aa, Homo sapiens
  CDR3 for beta chain variable domain of TCR clone 22274 (TRBV25-1, TRBJ1-1)
CASTHLGGNTEAFF

SEQ ID NO: 44549 - protein, 17 aa, Homo sapiens
  CDR3 for alpha chain variable domain of TCR clone 22275 (TRAV13-1, TRAJ28)
CAASPHTLGLGVTNSLS

SEQ ID NO: 44550 - protein, 12 aa, Homo sapiens
  CDR3 for beta chain variable domain of TCR clone 22275 (TRBV11-2, TRBJ2-2)
CASSLPTGELFF

SEQ ID NO: 44551 - protein, 14 aa, Homo sapiens
  CDR3 for alpha chain variable domain of TCR clone 22276 (TRAV27, TRAJ45)
CAGAQEEVLTDSTL

SEQ ID NO: 44552 - protein, 17 aa, Homo sapiens
  CDR3 for beta chain variable domain of TCR clone 22276 (TRBV11-2, TRBJ2-1)
CASSLYPPGVEYNEQFF

SEQ ID NO: 44553 - protein, 15 aa, Homo sapiens
  CDR3 for alpha chain variable domain of TCR clone 22277 (TRAV8-3, TRAJ45)
CASSYSGGGADGLTF

SEQ ID NO: 44554 - protein, 13 aa, Homo sapiens
  CDR3 for beta chain variable domain of TCR clone 22277 (TRBV10-3, TRBJ2-7)
CASKLAVNDEQYF

SEQ ID NO: 44555 - protein, 18 aa, Homo sapiens
  CDR3 for alpha chain variable domain of TCR clone 22278 (TRAV1-2, TRAJ18)
CAVRDMGDRGSTLGRRYF

SEQ ID NO: 44556 - protein, 16 aa, Homo sapiens
  CDR3 for beta chain variable domain of TCR clone 22278 (TRBV29-1, TRBJ1-2)
CSVEANRDIANYGYTF

SEQ ID NO: 44557 - protein, 11 aa, Homo sapiens
  CDR3 for alpha chain variable domain of TCR clone 22279 (TRAV14/DV4, TRAJ3)
RLGSSASKIIF

SEQ ID NO: 44558 - protein, 12 aa, Homo sapiens
  CDR3 for beta chain variable domain of TCR clone 22279 (TRBV14, TRBJ2-5)
CASSQLKETQYF

SEQ ID NO: 44559 - protein, 13 aa, Homo sapiens
  CDR3 for alpha chain variable domain of TCR clone 22280 (TRAV13-1, TRAJ39)
CAASIVMQATCSP

SEQ ID NO: 44560 - protein, 13 aa, Homo sapiens
  CDR3 for beta chain variable domain of TCR clone 22280 (TRBV20-1, TRBJ1-1)
CSARGGGNTEAFF

SEQ ID NO: 44561 - protein, 12 aa, Homo sapiens
  CDR3 for alpha chain variable domain of TCR clone 22281 (TRAV35, TRAJ49)
CAGWNTGNQFYF

SEQ ID NO: 44562 - protein, 16 aa, Homo sapiens
  CDR3 for beta chain variable domain of TCR clone 22281 (TRBV5-1, TRBJ2-2)
CASSLWDTTNTRELFF

SEQ ID NO: 44563 - protein, 12 aa, Homo sapiens
  CDR3 for alpha chain variable domain of TCR clone 22282 (TRAV3, TRAJ39)
CAVIEWSNMPTF

SEQ ID NO: 44564 - protein, 14 aa, Homo sapiens
  CDR3 for beta chain variable domain of TCR clone 22282 (TRBV7-8, TRBJ2-3)
CASSFPDGQDTQYF

SEQ ID NO: 44565 - protein, 11 aa, Homo sapiens
  CDR3 for alpha chain variable domain of TCR clone 22283 (TRAV2, TRAJ33)
CAVDSNYQLIW

SEQ ID NO: 44566 - protein, 14 aa, Homo sapiens
  CDR3 for beta chain variable domain of TCR clone 22283 (TRBV7-2, TRBJ2-7)
CASSPKTSFYEQYF

SEQ ID NO: 44567 - protein, 12 aa, Homo sapiens
  CDR3 for alpha chain variable domain of TCR clone 22284 (TRAV13-2, TRAJ23)
CAERHRGGKFIF

SEQ ID NO: 44568 - protein, 16 aa, Homo sapiens
  CDR3 for beta chain variable domain of TCR clone 22284 (TRBV20-1, TRBJ1-4)
CSAPGQGLLTNEKLFF

SEQ ID NO: 44569 - protein, 13 aa, Homo sapiens
  CDR3 for alpha chain variable domain of TCR clone 22285 (TRAV29/DV5, TRAJ31)
CAASRNNNARLMF

SEQ ID NO: 44570 - protein, 14 aa, Homo sapiens
  CDR3 for beta chain variable domain of TCR clone 22285 (TRBV12-5, TRBJ2-5)
CASGSRTHQETQYF

SEQ ID NO: 44571 - protein, 16 aa, Homo sapiens
  CDR3 for alpha chain variable domain of TCR clone 22286 (TRAV30, TRAJ24)
CGTEIVDADSWGKFQF

SEQ ID NO: 44572 - protein, 12 aa, Homo sapiens
  CDR3 for beta chain variable domain of TCR clone 22286 (TRBV12-4, TRBJ1-3)
CASSFSGNTIYF

SEQ ID NO: 44573 - protein, 16 aa, Homo sapiens
  CDR3 for alpha chain variable domain of TCR clone 22287 (TRAV14/DV4, TRAJ54)
CAMREGRIQGAQKLVF

SEQ ID NO: 44574 - protein, 17 aa, Homo sapiens
  CDR3 for beta chain variable domain of TCR clone 22287 (TRBV7-6, TRBJ2-1)
CASSHGGGRGSYNEQFF

SEQ ID NO: 44575 - protein, 14 aa, Homo sapiens
  CDR3 for alpha chain variable domain of TCR clone 22288 (TRAV1-2, TRAJ16)
CAVNRVSDGQKLLF

SEQ ID NO: 44576 - protein, 13 aa, Homo sapiens
  CDR3 for beta chain variable domain of TCR clone 22288 (TRBV4-1, TRBJ2-1)
CASSQAGGDEQFF

SEQ ID NO: 44577 - protein, 15 aa, Homo sapiens
  CDR3 for alpha chain variable domain of TCR clone 22289 (TRAV3, TRAJ5)
CAVRDLDTGMRALTF

SEQ ID NO: 44578 - protein, 13 aa, Homo sapiens
  CDR3 for beta chain variable domain of TCR clone 22289 (TRBV12-4, TRBJ2-7)
CASSPTETYEQYF

SEQ ID NO: 44579 - protein, 14 aa, Homo sapiens
  CDR3 for alpha chain variable domain of TCR clone 22290 (TRAV26-1, TRAJ26)
CIVRATFLGQNFVF

SEQ ID NO: 44580 - protein, 16 aa, Homo sapiens
  CDR3 for beta chain variable domain of TCR clone 22290 (TRBV12-4, TRBJ2-7)
CASRSTGAGPSYEQYF

SEQ ID NO: 44581 - protein, 14 aa, Homo sapiens
  CDR3 for alpha chain variable domain of TCR clone 22291 (TRAV12-2, TRAJ40)
CAVKIPLGTYKYIF

SEQ ID NO: 44582 - protein, 14 aa, Homo sapiens
  CDR3 for beta chain variable domain of TCR clone 22291 (TRBV20-1, TRBJ1-1)
CSAQTRIGGTEAFF

SEQ ID NO: 44583 - protein, 17 aa, Homo sapiens
  CDR3 for alpha chain variable domain of TCR clone 22292 (TRAV3, TRAJ6)
CAVRDGPRAGGSYIPTF

SEQ ID NO: 44584 - protein, 14 aa, Homo sapiens
  CDR3 for beta chain variable domain of TCR clone 22292 (TRBV7-2, TRBJ2-7)
CASSPKTSFYEQNF

SEQ ID NO: 44585 - protein, 14 aa, Homo sapiens
  CDR3 for alpha chain variable domain of TCR clone 22293 (TRAV9-2, TRAJ39)
CALYIYNAGNMLTF

SEQ ID NO: 44586 - protein, 14 aa, Homo sapiens
  CDR3 for beta chain variable domain of TCR clone 22293 (TRBV7-9, TRBJ2-2)
CASSLGHRTGELFF

SEQ ID NO: 44587 - protein, 13 aa, Homo sapiens
  CDR3 for alpha chain variable domain of TCR clone 22294 (TRAV12-1, TRAJ16)
CVVNGPDGQKLLF

SEQ ID NO: 44588 - protein, 14 aa, Homo sapiens
  CDR3 for beta chain variable domain of TCR clone 22294 (TRBV12-5, TRBJ2-5)
CASGSRTHQETQYF

SEQ ID NO: 44589 - protein, 15 aa, Homo sapiens
  CDR3 for alpha chain variable domain of TCR clone 22295 (TRAV23/DV6, TRAJ13)
CAAWPGGGGYQKGTF

SEQ ID NO: 44590 - protein, 17 aa, Homo sapiens
  CDR3 for beta chain variable domain of TCR clone 22295 (TRBV19, TRBJ2-7)
CASSISFYDSYPYEQYF

SEQ ID NO: 44591 - protein, 15 aa, Homo sapiens
  CDR3 for alpha chain variable domain of TCR clone 22296 (TRAV3, TRAJ5)
CAVRDRKTGRRALTF

SEQ ID NO: 44592 - protein, 15 aa, Homo sapiens
  CDR3 for beta chain variable domain of TCR clone 22296 (TRBV7-8, TRBJ2-1)
CTSSLADSLYNEQFF

SEQ ID NO: 44593 - protein, 16 aa, Homo sapiens
  CDR3 for alpha chain variable domain of TCR clone 22297 (TRAV8-3, TRAJ13)
CAVGAYPSGGYRKVTF

SEQ ID NO: 44594 - protein, 15 aa, Homo sapiens
  CDR3 for beta chain variable domain of TCR clone 22297 (TRBV19, TRBJ1-5)
CASSIVWADNQPQHF

SEQ ID NO: 44595 - protein, 10 aa, Homo sapiens
  CDR3 for alpha chain variable domain of TCR clone 22298 (TRAV26-1, TRAJ40)
CIAGTYKYIF

SEQ ID NO: 44596 - protein, 15 aa, Homo sapiens
  CDR3 for beta chain variable domain of TCR clone 22298 (TRBV19, TRBJ2-1)
CAGSSPGVPLDEQFF

SEQ ID NO: 44597 - protein, 13 aa, Homo sapiens
  CDR3 for alpha chain variable domain of TCR clone 22299 (TRAV27, TRAJ29)
CAGAHSGNTPLVF

SEQ ID NO: 44598 - protein, 14 aa, Homo sapiens
  CDR3 for beta chain variable domain of TCR clone 22299 (TRBV7-9, TRBJ2-7)
CASSIGQGAGKQYF

SEQ ID NO: 44599 - protein, 15 aa, Homo sapiens
  CDR3 for alpha chain variable domain of TCR clone 22300 (TRAV2, TRAJ22)
CAVPSRGGSARQLTF

SEQ ID NO: 44600 - protein, 11 aa, Homo sapiens
  CDR3 for beta chain variable domain of TCR clone 22300 (TRBV27, TRBJ2-3)
CASSVGDTQYF

SEQ ID NO: 44601 - protein, 15 aa, Homo sapiens
  CDR3 for alpha chain variable domain of TCR clone 22301 (TRAV8-3, TRAJ45)
CGSSYSGGGADGLTF

SEQ ID NO: 44602 - protein, 13 aa, Homo sapiens
  CDR3 for beta chain variable domain of TCR clone 22301 (TRBV10-3, TRBJ2-7)
CASKLAVNYEQYF

SEQ ID NO: 44603 - protein, 14 aa, Homo sapiens
  CDR3 for alpha chain variable domain of TCR clone 22302 (TRAV13-1, TRAJ35)
CAASKGGFGNVLHC

SEQ ID NO: 44604 - protein, 13 aa, Homo sapiens
  CDR3 for beta chain variable domain of TCR clone 22302 (TRBV7-3, TRBJ1-1)
CSSSQDWGAEAFF

SEQ ID NO: 44605 - protein, 15 aa, Homo sapiens
  CDR3 for alpha chain variable domain of TCR clone 22303 (TRAV17, TRAJ57)
CATGPSQGGSEKLVF

SEQ ID NO: 44606 - protein, 16 aa, Homo sapiens
  CDR3 for beta chain variable domain of TCR clone 22303 (TRBV11-2, TRBJ2-7)
CASSPLAGGPRYEQYF

SEQ ID NO: 44607 - protein, 13 aa, Homo sapiens
  CDR3 for alpha chain variable domain of TCR clone 22304 (TRAV2, TRAJ40)
CAVVTSGTYKYIF

SEQ ID NO: 44608 - protein, 11 aa, Homo sapiens
  CDR3 for beta chain variable domain of TCR clone 22304 (TRBV12-4, TRBJ2-3)
CASTATDTQYF

SEQ ID NO: 44609 - protein, 15 aa, Homo sapiens
  CDR3 for alpha chain variable domain of TCR clone 22305 (TRAV3, TRAJ5)
CAVRGRKTGRRALTF

SEQ ID NO: 44610 - protein, 15 aa, Homo sapiens
  CDR3 for beta chain variable domain of TCR clone 22305 (TRBV7-8, TRBJ2-1)
CASSLADSLYNEQFF

SEQ ID NO: 44611 - protein, 16 aa, Homo sapiens
  CDR3 for alpha chain variable domain of TCR clone 22306 (TRAV27, TRAJ13)
CAGAKSDSGGYQKVTL

SEQ ID NO: 44612 - protein, 15 aa, Homo sapiens
  CDR3 for beta chain variable domain of TCR clone 22306 (TRBV29-1, TRBJ2-1)
CSVGRHALFYNEQFF

SEQ ID NO: 44613 - protein, 11 aa, Homo sapiens
  CDR3 for alpha chain variable domain of TCR clone 22307 (TRAV2, TRAJ13)
CASGGYQKVTF

SEQ ID NO: 44614 - protein, 13 aa, Homo sapiens
  CDR3 for beta chain variable domain of TCR clone 22307 (TRBV2, TRBJ1-1)
CARNPTGGFHAFF

SEQ ID NO: 44615 - protein, 14 aa, Homo sapiens
  CDR3 for alpha chain variable domain of TCR clone 22308 (TRAV38-1, TRAJ40)
CALRPTSGTYKYIF

SEQ ID NO: 44616 - protein, 14 aa, Homo sapiens
  CDR3 for beta chain variable domain of TCR clone 22308 (TRBV25-1, TRBJ1-1)
CDSTHLGGNTEAFF

SEQ ID NO: 44617 - protein, 14 aa, Homo sapiens
  CDR3 for alpha chain variable domain of TCR clone 22309 (TRAV35, TRAJ22)
CAGLRPGSARQLAF

SEQ ID NO: 44618 - protein, 15 aa, Homo sapiens
  CDR3 for beta chain variable domain of TCR clone 22309 (TRBV12-4, TRBJ2-5)
CASSPPTGLQETQYF

SEQ ID NO: 44619 - protein, 14 aa, Homo sapiens
  CDR3 for alpha chain variable domain of TCR clone 22310 (TRAV8-3, TRAJ9)
CAVAYNTGGFKTIF

SEQ ID NO: 44620 - protein, 14 aa, Homo sapiens
  CDR3 for beta chain variable domain of TCR clone 22310 (TRBV7-3, TRBJ2-2)
CASSSGGYTGELFF

SEQ ID NO: 44621 - protein, 16 aa, Homo sapiens
  CDR3 for alpha chain variable domain of TCR clone 22311 (TRAV1-2, TRAJ10)
FAVRGVLTGGGNKLTF

SEQ ID NO: 44622 - protein, 12 aa, Homo sapiens
  CDR3 for beta chain variable domain of TCR clone 22311 (TRBV7-8, TRBJ2-7)
CASSLGDREQYF

SEQ ID NO: 44623 - protein, 16 aa, Homo sapiens
  CDR3 for alpha chain variable domain of TCR clone 22312 (TRAV3, TRAJ3)
CAVRDRAKSRASKIIF

SEQ ID NO: 44624 - protein, 13 aa, Homo sapiens
  CDR3 for beta chain variable domain of TCR clone 22312 (TRBV10-3, TRBJ2-7)
CASKLAVNYEQYF

SEQ ID NO: 44625 - protein, 14 aa, Homo sapiens
  CDR3 for alpha chain variable domain of TCR clone 22313 (TRAV9-2, TRAJ39)
CALYIYNAGNMLTF

SEQ ID NO: 44626 - protein, 15 aa, Homo sapiens
  CDR3 for beta chain variable domain of TCR clone 22313 (TRBV7-9, TRBJ1-4)
CASSRTGGFNEKLFF

SEQ ID NO: 44627 - protein, 23 aa, Homo sapiens
  CDR3 for alpha chain variable domain of TCR clone 22314 (TRAV26-1, TRAJ38)
CIADNAGNNHSQNPDPAVYQLRD

SEQ ID NO: 44628 - protein, 13 aa, Homo sapiens
  CDR3 for beta chain variable domain of TCR clone 22314 (TRBV20-1, TRBJ1-1)
CSARGGGNTEAFF

SEQ ID NO: 44629 - protein, 14 aa, Homo sapiens
  CDR3 for alpha chain variable domain of TCR clone 22315 (TRAV26-1, TRAJ38)
CIADTAGNNRKLIW

SEQ ID NO: 44630 - protein, 13 aa, Homo sapiens
  CDR3 for beta chain variable domain of TCR clone 22315 (TRBV20-1, TRBJ1-1)
CSARGGGNTEAFF

SEQ ID NO: 44631 - protein, 13 aa, Homo sapiens
  CDR3 for alpha chain variable domain of TCR clone 22316 (TRAV17, TRAJ9)
CATDYTGGFKTIF

SEQ ID NO: 44632 - protein, 16 aa, Homo sapiens
  CDR3 for beta chain variable domain of TCR clone 22316 (TRBV7-7, TRBJ2-1)
CASSLANGTSYNEQFF

SEQ ID NO: 44633 - protein, 14 aa, Homo sapiens
  CDR3 for alpha chain variable domain of TCR clone 22317 (TRAV13-1, TRAJ44)
CAAKATGTASRLTF

SEQ ID NO: 44634 - protein, 17 aa, Homo sapiens
  CDR3 for beta chain variable domain of TCR clone 22317 (TRBV7-3, TRBJ2-3)
CASSLMKRMRGADTQYF

SEQ ID NO: 44635 - protein, 12 aa, Homo sapiens
  CDR3 for alpha chain variable domain of TCR clone 22318 (TRAV27, TRAJ35)
CAGADFGNALHC

SEQ ID NO: 44636 - protein, 16 aa, Homo sapiens
  CDR3 for beta chain variable domain of TCR clone 22318 (TRBV6-1, TRBJ2-1)
CASILRQGSSYNEQFF

SEQ ID NO: 44637 - protein, 18 aa, Homo sapiens
  CDR3 for alpha chain variable domain of TCR clone 22319 (TRAV21, TRAJ52)
CAVRPSPAGGTSYGKLTF

SEQ ID NO: 44638 - protein, 17 aa, Homo sapiens
  CDR3 for beta chain variable domain of TCR clone 22319 (TRBV13, TRBJ2-3)
CASNLSRVAGGRNTQYF

SEQ ID NO: 44639 - protein, 14 aa, Homo sapiens
  CDR3 for alpha chain variable domain of TCR clone 22320 (TRAV16, TRAJ26)
CALSGCNYGQNFVF

SEQ ID NO: 44640 - protein, 13 aa, Homo sapiens
  CDR3 for beta chain variable domain of TCR clone 22320 (TRBV7-3, TRBJ2-5)
CASSIGFFETQYF

SEQ ID NO: 44641 - protein, 14 aa, Homo sapiens
  CDR3 for alpha chain variable domain of TCR clone 22321 (TRAV8-4, TRAJ54)
CAVSEVLGAQKLVF

SEQ ID NO: 44642 - protein, 17 aa, Homo sapiens
  CDR3 for beta chain variable domain of TCR clone 22321 (TRBV4-1, IGLJ4)
CASSQEGPRGVEEKLFF

SEQ ID NO: 44643 - protein, 10 aa, Homo sapiens
  CDR3 for alpha chain variable domain of TCR clone 22322 (TRAV16, TRAJ22)
SAMYLRQLTF

SEQ ID NO: 44644 - protein, 15 aa, Homo sapiens
  CDR3 for beta chain variable domain of TCR clone 22322 (TRBV7-9, TRBJ1-6)
CASSSPGRGDSPLHF

SEQ ID NO: 44645 - protein, 14 aa, Homo sapiens
  CDR3 for alpha chain variable domain of TCR clone 22323 (TRAV12-2, TRAJ44)
CAVNPAGTASKLTF

SEQ ID NO: 44646 - protein, 13 aa, Homo sapiens
  CDR3 for beta chain variable domain of TCR clone 22323 (TRBV20-1, TRBJ1-6)
CSAPLGVGSHLHF

SEQ ID NO: 44647 - protein, 14 aa, Homo sapiens
  CDR3 for alpha chain variable domain of TCR clone 22324 (TRAV35, TRAJ22)
CAGLRPGSARQLTF

SEQ ID NO: 44648 - protein, 15 aa, Homo sapiens
  CDR3 for beta chain variable domain of TCR clone 22324 (TRBV12-4, TRBJ2-5)
CASSPPTGVQETQYF

SEQ ID NO: 44649 - protein, 20 aa, Homo sapiens
  CDR3 for alpha chain variable domain of TCR clone 22325 (TRAV26-1, TRAJ42)
CCVLLHRQTYYGGSQGNLVF

SEQ ID NO: 44650 - protein, 16 aa, Homo sapiens
  CDR3 for beta chain variable domain of TCR clone 22325 (TRBV7-3, TRBJ2-2)
CASSLKRGTLSGELFF

SEQ ID NO: 44651 - protein, 14 aa, Homo sapiens
  CDR3 for alpha chain variable domain of TCR clone 22326 (TRAV8-6, TRAJ44)
CAVSGTGTASKLTF

SEQ ID NO: 44652 - protein, 15 aa, Homo sapiens
  CDR3 for beta chain variable domain of TCR clone 22326 (TRBV12-4, TRBJ2-5)
CASSLLQGAGETQYF

SEQ ID NO: 44653 - protein, 15 aa, Homo sapiens
  CDR3 for alpha chain variable domain of TCR clone 22327 (TRAV8-3, TRAJ23)
CAVGDRYNQRGKLIF

SEQ ID NO: 44654 - protein, 22 aa, Homo sapiens
  CDR3 for beta chain variable domain of TCR clone 22327 (TRBV29-1, TRBJ2-5)
TVSNMSPEDSSIYLCSAGTQYF

SEQ ID NO: 44655 - protein, 16 aa, Homo sapiens
  CDR3 for alpha chain variable domain of TCR clone 22328 (TRAV8-3, TRAJ13)
CAVGAYPSGGYQKVTF

SEQ ID NO: 44656 - protein, 15 aa, Homo sapiens
  CDR3 for beta chain variable domain of TCR clone 22328 (TRBV19, TRBJ1-5)
CASSIVWADNQAQHF

SEQ ID NO: 44657 - protein, 12 aa, Homo sapiens
  CDR3 for alpha chain variable domain of TCR clone 22329 (TRAV27, TRAJ35)
CAGADFGNVLHC

SEQ ID NO: 44658 - protein, 16 aa, Homo sapiens
  CDR3 for beta chain variable domain of TCR clone 22329 (TRBV6-1, TRBJ2-1)
CASILRQGSSYNGQFF

SEQ ID NO: 44659 - protein, 11 aa, Homo sapiens
  CDR3 for alpha chain variable domain of TCR clone 22330 (TRAV12-1, TRAJ34)
CVVNKGRELIF

SEQ ID NO: 44660 - protein, 12 aa, Homo sapiens
  CDR3 for beta chain variable domain of TCR clone 22330 (TRBV2, TRBJ2-1)
CAYGPPGNEQFL

SEQ ID NO: 44661 - protein, 17 aa, Homo sapiens
  CDR3 for alpha chain variable domain of TCR clone 22331 (TRAV17, TRAJ28)
CATDPRRGGAGSYQPTF

SEQ ID NO: 44662 - protein, 16 aa, Homo sapiens
  CDR3 for beta chain variable domain of TCR clone 22331 (TRBV25-1, TRBJ1-1)
CASSGDRDRGRIEAFF

SEQ ID NO: 44663 - protein, 13 aa, Homo sapiens
  CDR3 for alpha chain variable domain of TCR clone 22332 (TRAV13-1, TRAJ5)
CAASDTGRRALTF

SEQ ID NO: 44664 - protein, 12 aa, Homo sapiens
  CDR3 for beta chain variable domain of TCR clone 22332 (TRBV28, TRBJ2-3)
CASSLCRDTQYF

SEQ ID NO: 44665 - protein, 14 aa, Homo sapiens
  CDR3 for alpha chain variable domain of TCR clone 22333 (TRAV1-2, TRAJ8)
CAVREDTGFQKLVF

SEQ ID NO: 44666 - protein, 17 aa, Homo sapiens
  CDR3 for beta chain variable domain of TCR clone 22333 (TRBV6-5, TRBJ2-3)
CASSYTTGTGRGDTQYF

SEQ ID NO: 44667 - protein, 14 aa, Homo sapiens
  CDR3 for alpha chain variable domain of TCR clone 22334 (TRAV21, TRAJ35)
CAVMPIGFWNVLHC

SEQ ID NO: 44668 - protein, 12 aa, Homo sapiens
  CDR3 for beta chain variable domain of TCR clone 22334 (TRBV7-9, TRBJ2-7)
CASSIKREEQYF

SEQ ID NO: 44669 - protein, 15 aa, Homo sapiens
  CDR3 for alpha chain variable domain of TCR clone 22335 (TRAV26-1, TRAJ29)
YIVRVEGSGNTPLVF

SEQ ID NO: 44670 - protein, 14 aa, Homo sapiens
  CDR3 for beta chain variable domain of TCR clone 22335 (TRBV18, TRBJ2-5)
CASSPGVSQETQYF

SEQ ID NO: 44671 - protein, 14 aa, Homo sapiens
  CDR3 for alpha chain variable domain of TCR clone 22336 (TRAV9-2, TRAJ39)
CALYIYNAGNMLTF

SEQ ID NO: 44672 - protein, 15 aa, Homo sapiens
  CDR3 for beta chain variable domain of TCR clone 22336 (TRBV6-1, TRBJ1-5)
CASSESGVSHQPQHF

SEQ ID NO: 44673 - protein, 18 aa, Homo sapiens
  CDR3 for alpha chain variable domain of TCR clone 22337 (TRAV26-2, TRAJ45)
CILRVGKYSGGGADGLTF

SEQ ID NO: 44674 - protein, 11 aa, Homo sapiens
  CDR3 for beta chain variable domain of TCR clone 22337 (TRBV29-1, TRBJ2-5)
CSEDRTGTQYF

SEQ ID NO: 44675 - protein, 15 aa, Homo sapiens
  CDR3 for alpha chain variable domain of TCR clone 22338 (TRAV26-1, TRAJ22)
CIVRVSFWFCKATDP

SEQ ID NO: 44676 - protein, 13 aa, Homo sapiens
  CDR3 for beta chain variable domain of TCR clone 22338 (TRBV7-9, TRBJ1-2)
CASSLKQNYGYTF

SEQ ID NO: 44677 - protein, 11 aa, Homo sapiens
  CDR3 for alpha chain variable domain of TCR clone 22339 (TRAV1-1, TRAJ23)
CAVRQGGKLIF

SEQ ID NO: 44678 - protein, 14 aa, Homo sapiens
  CDR3 for beta chain variable domain of TCR clone 22339 (TRBV7-2, TRBJ2-7)
CASSPKTSFYEQYF

SEQ ID NO: 44679 - protein, 11 aa, Homo sapiens
  CDR3 for alpha chain variable domain of TCR clone 22340 (TRAV13-1, TRAJ6)
CATLGSYIPTF

SEQ ID NO: 44680 - protein, 12 aa, Homo sapiens
  CDR3 for beta chain variable domain of TCR clone 22340 (TRBV11-3, TRBJ2-1)
CASSPGNNEQFF

SEQ ID NO: 44681 - protein, 13 aa, Homo sapiens
  CDR3 for alpha chain variable domain of TCR clone 22341 (TRAV35, TRAJ33)
CAGQLYGAYQLIW

SEQ ID NO: 44682 - protein, 14 aa, Homo sapiens
  CDR3 for beta chain variable domain of TCR clone 22341 (TRBV7-2, TRBJ1-1)
CASSLGGAGTEAFF

SEQ ID NO: 44683 - protein, 13 aa, Homo sapiens
  CDR3 for alpha chain variable domain of TCR clone 22342 (TRAV20, TRAJ37)
CTGCSSNTGKLIF

SEQ ID NO: 44684 - protein, 11 aa, Homo sapiens
  CDR3 for beta chain variable domain of TCR clone 22342 (TRBV12-4, TRBJ2-3)
CASTATDTQYF

SEQ ID NO: 44685 - protein, 14 aa, Homo sapiens
  CDR3 for alpha chain variable domain of TCR clone 22343 (TRAV20, TRAJ42)
CAAQAGGSQGNLIF

SEQ ID NO: 44686 - protein, 14 aa, Homo sapiens
  CDR3 for beta chain variable domain of TCR clone 22343 (TRBV28, TRBJ1-2)
CASRIQGANYGYTF

SEQ ID NO: 44687 - protein, 16 aa, Homo sapiens
  CDR3 for alpha chain variable domain of TCR clone 22344 (TRAV21, TRAJ37)
CAVRTAGSSNTGKLIF

SEQ ID NO: 44688 - protein, 13 aa, Homo sapiens
  CDR3 for beta chain variable domain of TCR clone 22344 (TRBV7-9, TRBJ2-5)
CASLPSGRENQYF

SEQ ID NO: 44689 - protein, 11 aa, Homo sapiens
  CDR3 for alpha chain variable domain of TCR clone 22345 (TRAV2, TRAJ13)
CASGGYQKGTF

SEQ ID NO: 44690 - protein, 16 aa, Homo sapiens
  CDR3 for beta chain variable domain of TCR clone 22345 (TRBV6-1, TRBJ2-5)
CASSETLDRGAETQYF

SEQ ID NO: 44691 - protein, 17 aa, Homo sapiens
  CDR3 for alpha chain variable domain of TCR clone 22346 (TRAV26-1, TRAJ53)
CIVRVDDSGGSNYKLTF

SEQ ID NO: 44692 - protein, 15 aa, Homo sapiens
  CDR3 for beta chain variable domain of TCR clone 22346 (TRBV20-1, TRBJ2-7)
CSARVPAAYFYEQYL

SEQ ID NO: 44693 - protein, 15 aa, Homo sapiens
  CDR3 for alpha chain variable domain of TCR clone 22347 (TRAV21, TRAJ53)
CATLNSGGSNYKLAF

SEQ ID NO: 44694 - protein, 16 aa, Homo sapiens
  CDR3 for beta chain variable domain of TCR clone 22347 (TRBV9, TRBJ2-1)
CASSVGGGGNYNEQFF

SEQ ID NO: 44695 - protein, 11 aa, Homo sapiens
  CDR3 for alpha chain variable domain of TCR clone 22348 (TRAV13-1, TRAJ39)
CASHAGNMLTF

SEQ ID NO: 44696 - protein, 14 aa, Homo sapiens
  CDR3 for beta chain variable domain of TCR clone 22348 (TRBV19, TRBJ2-1)
CASPTFVLSGEQFF

SEQ ID NO: 44697 - protein, 13 aa, Homo sapiens
  CDR3 for alpha chain variable domain of TCR clone 22349 (TRAV26-1, TRAJ48)
CIVRGVGNEKLTF

SEQ ID NO: 44698 - protein, 20 aa, Homo sapiens
  CDR3 for beta chain variable domain of TCR clone 22349 (TRBV7-8, TRBJ2-2)
CASSHLFPGPTIHITGELFF

SEQ ID NO: 44699 - protein, 14 aa, Homo sapiens
  CDR3 for alpha chain variable domain of TCR clone 22350 (TRAV12-3, TRAJ10)
SHLPLTGGGNKLTF

SEQ ID NO: 44700 - protein, 13 aa, Homo sapiens
  CDR3 for beta chain variable domain of TCR clone 22350 (TRBV9, TRBJ2-1)
CASSPPGGNEQFF

SEQ ID NO: 44701 - protein, 15 aa, Homo sapiens
  CDR3 for alpha chain variable domain of TCR clone 22351 (TRAV12-3, TRAJ6)
CAMSATSGGSYIPTF

SEQ ID NO: 44702 - protein, 17 aa, Homo sapiens
  CDR3 for beta chain variable domain of TCR clone 22351 (TRBV13, TRBJ2-3)
CASSLSRVAGGRNTQYF

SEQ ID NO: 44703 - protein, 13 aa, Homo sapiens
  CDR3 for alpha chain variable domain of TCR clone 22352 (TRAV12-3, TRAJ9)
CAMRNTGGFKTIF

SEQ ID NO: 44704 - protein, 14 aa, Homo sapiens
  CDR3 for beta chain variable domain of TCR clone 22352 (TRBV11-2, TRBJ2-7)
CARSSTGEGYEQYF

SEQ ID NO: 44705 - protein, 14 aa, Homo sapiens
  CDR3 for alpha chain variable domain of TCR clone 22353 (TRAV12-2, TRAJ17)
CAVLFKAAGNKLTF

SEQ ID NO: 44706 - protein, 13 aa, Homo sapiens
  CDR3 for beta chain variable domain of TCR clone 22353 (TRBV7-3, TRBJ1-1)
CASSQDWGAEAFF

SEQ ID NO: 44707 - protein, 14 aa, Homo sapiens
  CDR3 for alpha chain variable domain of TCR clone 22354 (TRAV26-2, TRAJ31)
CILIPGNNNARLVF

SEQ ID NO: 44708 - protein, 16 aa, Homo sapiens
  CDR3 for beta chain variable domain of TCR clone 22354 (TRBV7-3, TRBJ2-1)
CASSLVSGSSNNEQFF

SEQ ID NO: 44709 - protein, 13 aa, Homo sapiens
  CDR3 for alpha chain variable domain of TCR clone 22355 (TRAV8-6, TRAJ49)
CAVITNTGNQFYF

SEQ ID NO: 44710 - protein, 14 aa, Homo sapiens
  CDR3 for beta chain variable domain of TCR clone 22355 (TRBV12-5, TRBJ2-5)
CASGSRTHQETQYF

SEQ ID NO: 44711 - protein, 19 aa, Homo sapiens
  CDR3 for alpha chain variable domain of TCR clone 22356 (TRAV13-1, TRAJ52)
CAASPYQNAGGTSYGKLTL

SEQ ID NO: 44712 - protein, 14 aa, Homo sapiens
  CDR3 for beta chain variable domain of TCR clone 22356 (TRBV19, TRBJ2-7)
CASTVQGRPYEQYF

SEQ ID NO: 44713 - protein, 18 aa, Homo sapiens
  CDR3 for alpha chain variable domain of TCR clone 22357 (TRAV12-3, TRAJ52)
CAMSVGGAGGTSYGKLTF

SEQ ID NO: 44714 - protein, 15 aa, Homo sapiens
  CDR3 for beta chain variable domain of TCR clone 22357 (TRBV27, TRBJ1-6)
CASSCDRGLGSPLHF

SEQ ID NO: 44715 - protein, 14 aa, Homo sapiens
  CDR3 for alpha chain variable domain of TCR clone 22358 (TRAV12-2, TRAJ13)
CAVKKTGGYQKVTF

SEQ ID NO: 44716 - protein, 14 aa, Homo sapiens
  CDR3 for beta chain variable domain of TCR clone 22358 (TRBV7-3, TRBJ2-1)
CASSLAGGTNEQFF

SEQ ID NO: 44717 - protein, 14 aa, Homo sapiens
  CDR3 for alpha chain variable domain of TCR clone 22359 (TRAV13-1, TRAJ35)
CAASKGGFGNVPHC

SEQ ID NO: 44718 - protein, 14 aa, Homo sapiens
  CDR3 for beta chain variable domain of TCR clone 22359 (TRBV4-1, TRBJ2-2)
CASSQAVNTGELFF

SEQ ID NO: 44719 - protein, 16 aa, Homo sapiens
  CDR3 for alpha chain variable domain of TCR clone 22360 (TRAV8-3, TRAJ13)
CAVGAYPSGGYQKVAF

SEQ ID NO: 44720 - protein, 13 aa, Homo sapiens
  CDR3 for beta chain variable domain of TCR clone 22360 (TRBV7-9, TRBJ1-2)
CASSLKQKYGYTF

SEQ ID NO: 44721 - protein, 10 aa, Homo sapiens
  CDR3 for alpha chain variable domain of TCR clone 22361 (TRAV5, TRAJ34)
CAEDTDKPIF

SEQ ID NO: 44722 - protein, 12 aa, Homo sapiens
  CDR3 for beta chain variable domain of TCR clone 22361 (TRBV11-2, TRBJ2-2)
CASSLGGGELFF

SEQ ID NO: 44723 - protein, 12 aa, Homo sapiens
  CDR3 for alpha chain variable domain of TCR clone 22362 (TRAV3, TRAJ20)
CAVRDPDYKLSF

SEQ ID NO: 44724 - protein, 15 aa, Homo sapiens
  CDR3 for beta chain variable domain of TCR clone 22362 (TRBV15, TRBJ1-1)
CATSLQGGRNTEAFF

SEQ ID NO: 44725 - protein, 14 aa, Homo sapiens
  CDR3 for alpha chain variable domain of TCR clone 22363 (TRAV13-1, TRAJ35)
CAASKGGFGNVLHC

SEQ ID NO: 44726 - protein, 13 aa, Homo sapiens
  CDR3 for beta chain variable domain of TCR clone 22363 (TRBV19, TRBJ2-7)
CASSPRQSYEQYF

SEQ ID NO: 44727 - protein, 14 aa, Homo sapiens
  CDR3 for alpha chain variable domain of TCR clone 22364 (TRAV4, TRAJ17)
CLVGDMAAGNKLIF

SEQ ID NO: 44728 - protein, 14 aa, Homo sapiens
  CDR3 for beta chain variable domain of TCR clone 22364 (TRBV7-6, TRBJ2-3)
CASSLGTVTDTQYF

SEQ ID NO: 44729 - protein, 14 aa, Homo sapiens
  CDR3 for alpha chain variable domain of TCR clone 22365 (TRAV13-1, TRAJ5)
CAAHPDTGRRALTF

SEQ ID NO: 44730 - protein, 15 aa, Homo sapiens
  CDR3 for beta chain variable domain of TCR clone 22365 (TRBV7-2, TRBJ2-7)
CASSLKGALTYEQYF

SEQ ID NO: 44731 - protein, 13 aa, Homo sapiens
  CDR3 for alpha chain variable domain of TCR clone 22366 (TRAV8-3, TRAJ28)
CAVGAVWSYQLTF

SEQ ID NO: 44732 - protein, 15 aa, Homo sapiens
  CDR3 for beta chain variable domain of TCR clone 22366 (TRBV7-9, TRBJ1-5)
CASSQGHQPNQPQHF

SEQ ID NO: 44733 - protein, 14 aa, Homo sapiens
  CDR3 for alpha chain variable domain of TCR clone 22367 (TRAV8-4, TRAJ13)
CAVTLSGGYQKVTF

SEQ ID NO: 44734 - protein, 14 aa, Homo sapiens
  CDR3 for beta chain variable domain of TCR clone 22367 (TRBV7-2, TRBJ2-7)
CASSPKTSFYEQYF

SEQ ID NO: 44735 - protein, 14 aa, Homo sapiens
  CDR3 for alpha chain variable domain of TCR clone 22368 (TRAV27, TRAJ45)
CAGAQEEVLTDLPL

SEQ ID NO: 44736 - protein, 17 aa, Homo sapiens
  CDR3 for beta chain variable domain of TCR clone 22368 (TRBV11-2, TRBJ2-1)
CASSLYPPGVEYNEQFF

SEQ ID NO: 44737 - protein, 10 aa, Homo sapiens
  CDR3 for alpha chain variable domain of TCR clone 22369 (TRAV23/DV6, TRAJ57)
CAASSTLSQG

SEQ ID NO: 44738 - protein, 14 aa, Homo sapiens
  CDR3 for beta chain variable domain of TCR clone 22369 (TRBV25-1, TRBJ1-1)
CASTHLWGNTEAFF

SEQ ID NO: 44739 - protein, 15 aa, Homo sapiens
  CDR3 for alpha chain variable domain of TCR clone 22370 (TRAV4, TRAJ39)
CLVGPNKNAGNMLTF

SEQ ID NO: 44740 - protein, 13 aa, Homo sapiens
  CDR3 for beta chain variable domain of TCR clone 22370 (TRBV11-2, TRBJ2-5)
CASSSTGEETQYF

SEQ ID NO: 44741 - protein, 15 aa, Homo sapiens
  CDR3 for alpha chain variable domain of TCR clone 22371 (TRAV26-1, TRAJ29)
CIVRVEGSGNTPLVF

SEQ ID NO: 44742 - protein, 15 aa, Homo sapiens
  CDR3 for beta chain variable domain of TCR clone 22371 (TRBV7-9, TRBJ1-5)
CDSSQGHQPNQPQHF

SEQ ID NO: 44743 - protein, 16 aa, Homo sapiens
  CDR3 for alpha chain variable domain of TCR clone 22372 (TRAV12-2, TRAJ10)
CAVNRVLTGGGNKLTF

SEQ ID NO: 44744 - protein, 12 aa, Homo sapiens
  CDR3 for beta chain variable domain of TCR clone 22372 (TRBV28, TRBJ2-7)
CASSFGSYEQYF

SEQ ID NO: 44745 - protein, 15 aa, Homo sapiens
  CDR3 for alpha chain variable domain of TCR clone 22373 (TRAV25, TRAJ53)
CAATGGGGSNYKLTF

SEQ ID NO: 44746 - protein, 15 aa, Homo sapiens
  CDR3 for beta chain variable domain of TCR clone 22373 (TRBV9, TRBJ2-1)
CASSLAGSSYNEQFF

SEQ ID NO: 44747 - protein, 12 aa, Homo sapiens
  CDR3 for alpha chain variable domain of TCR clone 22374 (TRAV12-3, TRAJ5)
CAMDTGRRALTF

SEQ ID NO: 44748 - protein, 13 aa, Homo sapiens
  CDR3 for beta chain variable domain of TCR clone 22374 (TRBV7-7, TRBJ2-2)
CASSLASAGELFF

SEQ ID NO: 44749 - protein, 14 aa, Homo sapiens
  CDR3 for alpha chain variable domain of TCR clone 22375 (TRAV12-2, TRAJ17)
CAVLFKAAGNKLTF

SEQ ID NO: 44750 - protein, 17 aa, Homo sapiens
  CDR3 for beta chain variable domain of TCR clone 22375 (TRBV20-1, TRBJ2-2)
CSASGSEQGGLTGELFF

SEQ ID NO: 44751 - protein, 13 aa, Homo sapiens
  CDR3 for alpha chain variable domain of TCR clone 22376 (TRAV12-1, TRAJ33)
CGDAPDSNYQLIW

SEQ ID NO: 44752 - protein, 16 aa, Homo sapiens
  CDR3 for beta chain variable domain of TCR clone 22376 (TRBV19, TRBJ2-2)
CASRSPGTGATGELFF

SEQ ID NO: 44753 - protein, 15 aa, Homo sapiens
  CDR3 for alpha chain variable domain of TCR clone 22377 (TRAV25, TRAJ52)
CAGRPGGTSYGKLTF

SEQ ID NO: 44754 - protein, 17 aa, Homo sapiens
  CDR3 for beta chain variable domain of TCR clone 22377 (TRBV7-8, TRBJ2-6)
CARSAGTGGAGANVLTF

SEQ ID NO: 44755 - protein, 14 aa, Homo sapiens
  CDR3 for alpha chain variable domain of TCR clone 22378 (TRAV12-3, TRAJ10)
SHLPLTGGGNKLTF

SEQ ID NO: 44756 - protein, 12 aa, Homo sapiens
  CDR3 for beta chain variable domain of TCR clone 22378 (TRBV2, TRBJ2-1)
CAYGPPGNEQFF

SEQ ID NO: 44757 - protein, 13 aa, Homo sapiens
  CDR3 for alpha chain variable domain of TCR clone 22379 (TRAV27, TRAJ45)
CRSSGGGADGLTF

SEQ ID NO: 44758 - protein, 14 aa, Homo sapiens
  CDR3 for beta chain variable domain of TCR clone 22379 (TRBV12-5, TRBJ2-5)
CASGSRTHQETQYF

SEQ ID NO: 44759 - protein, 15 aa, Homo sapiens
  CDR3 for alpha chain variable domain of TCR clone 22380 (TRAV12-1, TRAJ41)
CVVNGASNSGYALNF

SEQ ID NO: 44760 - protein, 13 aa, Homo sapiens
  CDR3 for beta chain variable domain of TCR clone 22380 (TRBV7-9, TRBJ1-2)
CASSLKQNYGYTF

SEQ ID NO: 44761 - protein, 12 aa, Homo sapiens
  CDR3 for alpha chain variable domain of TCR clone 22381 (TRAV8-3, TRAJ20)
CAVGANDYKLSF

SEQ ID NO: 44762 - protein, 16 aa, Homo sapiens
  CDR3 for beta chain variable domain of TCR clone 22381 (TRBV19, TRBJ2-2)
CACRSPGTGATGELFF

SEQ ID NO: 44763 - protein, 14 aa, Homo sapiens
  CDR3 for alpha chain variable domain of TCR clone 22382 (TRAV23/DV6, TRAJ17)
CAASIGAAGNKPTF

SEQ ID NO: 44764 - protein, 12 aa, Homo sapiens
  CDR3 for beta chain variable domain of TCR clone 22382 (TRBV20-1, TRBJ2-5)
CSAGGAGETQYF

SEQ ID NO: 44765 - protein, 16 aa, Homo sapiens
  CDR3 for alpha chain variable domain of TCR clone 22383 (TRAV3, TRAJ37)
CAARGKGSGNTGKLIF

SEQ ID NO: 44766 - protein, 13 aa, Homo sapiens
  CDR3 for beta chain variable domain of TCR clone 22383 (TRBV14, TRBJ2-7)
CASSQDRRYEQYF

SEQ ID NO: 44767 - protein, 14 aa, Homo sapiens
  CDR3 for alpha chain variable domain of TCR clone 22384 (TRAV1-2, TRAJ16)
CAINRFSDGQKLLF

SEQ ID NO: 44768 - protein, 15 aa, Homo sapiens
  CDR3 for beta chain variable domain of TCR clone 22384 (TRBV9, TRBJ1-6)
CASSVAGTGDSPLHF

SEQ ID NO: 44769 - protein, 14 aa, Homo sapiens
  CDR3 for alpha chain variable domain of TCR clone 22385 (TRAV23/DV6, TRAJ23)
CAAGPYNQGRKLIF

SEQ ID NO: 44770 - protein, 17 aa, Homo sapiens
  CDR3 for beta chain variable domain of TCR clone 22385 (TRBV4-2, TRBJ1-1)
CASSQVATGGMNTEAFF

SEQ ID NO: 44771 - protein, 12 aa, Homo sapiens
  CDR3 for alpha chain variable domain of TCR clone 22386 (TRAV3, TRAJ43)
CAVRDPNNDMRF

SEQ ID NO: 44772 - protein, 15 aa, Homo sapiens
  CDR3 for beta chain variable domain of TCR clone 22386 (TRBV27, TRBJ1-5)
CASSLGTGFGQPQHF

SEQ ID NO: 44773 - protein, 16 aa, Homo sapiens
  CDR3 for alpha chain variable domain of TCR clone 22387 (TRAV23/DV6, TRAJ9)
CAASIGGNTGGFKTIF

SEQ ID NO: 44774 - protein, 16 aa, Homo sapiens
  CDR3 for beta chain variable domain of TCR clone 22387 (TRBV19, TRBJ2-1)
CASSKAGPSSYNEQFF

SEQ ID NO: 44775 - protein, 12 aa, Homo sapiens
  CDR3 for alpha chain variable domain of TCR clone 22388 (TRAV12-2, TRAJ10)
WGVTGGGNKLTF

SEQ ID NO: 44776 - protein, 16 aa, Homo sapiens
  CDR3 for beta chain variable domain of TCR clone 22388 (TRBV6-4, TRBJ1-2)
CASSEAVGDPNYGYTL

SEQ ID NO: 44777 - protein, 15 aa, Homo sapiens
  CDR3 for alpha chain variable domain of TCR clone 22389 (TRAV36/DV7, TRAJ53)
CAVEGSGGSNYKLTF

SEQ ID NO: 44778 - protein, 12 aa, Homo sapiens
  CDR3 for beta chain variable domain of TCR clone 22389 (TRBV11-2, TRBJ2-2)
CASSLGGGELFF

SEQ ID NO: 44779 - protein, 14 aa, Homo sapiens
  CDR3 for alpha chain variable domain of TCR clone 22390 (TRAV12-2, TRAJ11)
CAVNRESGYSTLTL

SEQ ID NO: 44780 - protein, 10 aa, Homo sapiens
  CDR3 for beta chain variable domain of TCR clone 22390 (TRBV20-1, TRBJ2-5)
CSARFETQYF

SEQ ID NO: 44781 - protein, 15 aa, Homo sapiens
  CDR3 for alpha chain variable domain of TCR clone 22391 (TRAV2, TRAJ15)
CAVEDRGQEGTALIF

SEQ ID NO: 44782 - protein, 13 aa, Homo sapiens
  CDR3 for beta chain variable domain of TCR clone 22391 (TRBV10-2, TRBJ2-7)
CASGASGGYEQYF

SEQ ID NO: 44783 - protein, 11 aa, Homo sapiens
  CDR3 for alpha chain variable domain of TCR clone 22392 (TRAV21, TRAJ34)
CAHYNTDKLIF

SEQ ID NO: 44784 - protein, 11 aa, Homo sapiens
  CDR3 for beta chain variable domain of TCR clone 22392 (TRBV29-1, TRBJ2-5)
CSEGRTGTQYF

SEQ ID NO: 44785 - protein, 14 aa, Homo sapiens
  CDR3 for alpha chain variable domain of TCR clone 22393 (TRAV12-3, TRAJ10)
SHLPLTGGGNKLTF

SEQ ID NO: 44786 - protein, 16 aa, Homo sapiens
  CDR3 for beta chain variable domain of TCR clone 22393 (TRBV5-7, TRBJ1-5)
CASSLQQDREYQPQHF

SEQ ID NO: 44787 - protein, 14 aa, Homo sapiens
  CDR3 for alpha chain variable domain of TCR clone 22394 (TRAV1-2, TRAJ16)
CAGNRFSDGQKLLF

SEQ ID NO: 44788 - protein, 15 aa, Homo sapiens
  CDR3 for beta chain variable domain of TCR clone 22394 (TRBV7-9, TRBJ1-6)
CASSSPGRGNSPLHF

SEQ ID NO: 44789 - protein, 12 aa, Homo sapiens
  CDR3 for alpha chain variable domain of TCR clone 22395 (TRAV21, TRAJ3)
CCLYSSASKIIF

SEQ ID NO: 44790 - protein, 16 aa, Homo sapiens
  CDR3 for beta chain variable domain of TCR clone 22395 (TRBV19, TRBJ2-1)
CASSKAGPSSYNEQFF

SEQ ID NO: 44791 - protein, 14 aa, Homo sapiens
  CDR3 for alpha chain variable domain of TCR clone 22396 (TRAV26-1, TRAJ45)
CIVRVVGGADGLTF

SEQ ID NO: 44792 - protein, 16 aa, Homo sapiens
  CDR3 for beta chain variable domain of TCR clone 22396 (TRBV7-9, TRBJ1-1)
CASGLTQVRSNTEAFF

SEQ ID NO: 44793 - protein, 13 aa, Homo sapiens
  CDR3 for alpha chain variable domain of TCR clone 22397 (TRAV8-3, TRAJ28)
CAVGAVGSYQLTF

SEQ ID NO: 44794 - protein, 14 aa, Homo sapiens
  CDR3 for beta chain variable domain of TCR clone 22397 (TRBV7-2, TRBJ2-7)
YASRSQGAAYEQYF

SEQ ID NO: 44795 - protein, 13 aa, Homo sapiens
  CDR3 for alpha chain variable domain of TCR clone 22398 (TRAV12-3, TRAJ7)
CAMSAPGNNRLAF

SEQ ID NO: 44796 - protein, 14 aa, Homo sapiens
  CDR3 for beta chain variable domain of TCR clone 22398 (TRBV13, TRBJ2-5)
CASSLGPRGETQYF

SEQ ID NO: 44797 - protein, 13 aa, Homo sapiens
  CDR3 for alpha chain variable domain of TCR clone 22399 (TRAV13-2, TRAJ13)
CAERPGGYQKVTF

SEQ ID NO: 44798 - protein, 16 aa, Homo sapiens
  CDR3 for beta chain variable domain of TCR clone 22399 (TRBV18, TRBJ2-5)
CASSPPSGGGAKTQYF

SEQ ID NO: 44799 - protein, 13 aa, Homo sapiens
  CDR3 for alpha chain variable domain of TCR clone 22400 (TRAV17, TRAJ26)
CATVDDYGQNFVF

SEQ ID NO: 44800 - protein, 16 aa, Homo sapiens
  CDR3 for beta chain variable domain of TCR clone 22400 (TRBV2, TRBJ2-1)
CASSVGGSLSYNEQFF

SEQ ID NO: 44801 - protein, 14 aa, Homo sapiens
  CDR3 for alpha chain variable domain of TCR clone 22401 (TRAV9-2, TRAJ39)
CALYIYNAGNMLTF

SEQ ID NO: 44802 - protein, 11 aa, Homo sapiens
  CDR3 for beta chain variable domain of TCR clone 22401 (TRBV7-9, TRBJ2-3)
CASSPTDTQYF

SEQ ID NO: 44803 - protein, 23 aa, Homo sapiens
  CDR3 for alpha chain variable domain of TCR clone 22402 (TRAV26-1, TRAJ38)
CIADNAGNNHIQNPDPAVYQLRD

SEQ ID NO: 44804 - protein, 13 aa, Homo sapiens
  CDR3 for beta chain variable domain of TCR clone 22402 (TRBV20-1, TRBJ1-1)
CSARGGGKTEAFF

SEQ ID NO: 44805 - protein, 14 aa, Homo sapiens
  CDR3 for alpha chain variable domain of TCR clone 22403 (TRAV17, TRAJ57)
CATDPQGGSEKLVF

SEQ ID NO: 44806 - protein, 14 aa, Homo sapiens
  CDR3 for beta chain variable domain of TCR clone 22403 (TRBV11-3, TRBJ2-3)
CASSLGGGANTQYF

SEQ ID NO: 44807 - protein, 12 aa, Homo sapiens
  CDR3 for alpha chain variable domain of TCR clone 22404 (TRAV13-1, TRAJ21)
CAAKEGFNKFYF

SEQ ID NO: 44808 - protein, 12 aa, Homo sapiens
  CDR3 for beta chain variable domain of TCR clone 22404 (TRBV27, TRBJ2-5)
CASSPTGETQYF

SEQ ID NO: 44809 - protein, 15 aa, Homo sapiens
  CDR3 for alpha chain variable domain of TCR clone 22405 (TRAV17, TRAJ57)
CATGPSQGVSEKLVF

SEQ ID NO: 44810 - protein, 16 aa, Homo sapiens
  CDR3 for beta chain variable domain of TCR clone 22405 (TRBV12-4, TRBJ1-5)
CASSRPVGGSNQPQHF

SEQ ID NO: 44811 - protein, 16 aa, Homo sapiens
  CDR3 for alpha chain variable domain of TCR clone 22406 (TRAV3, TRAJ37)
CAVRGKGSGNTGKLIF

SEQ ID NO: 44812 - protein, 15 aa, Homo sapiens
  CDR3 for beta chain variable domain of TCR clone 22406 (TRBV7-9, TRBJ1-5)
CASSQGHQPNQPQHF

SEQ ID NO: 44813 - protein, 13 aa, Homo sapiens
  CDR3 for alpha chain variable domain of TCR clone 22407 (TRAV2, TRAJ40)
CAVVTSGTNKYIF

SEQ ID NO: 44814 - protein, 14 aa, Homo sapiens
  CDR3 for beta chain variable domain of TCR clone 22407 (TRBV19, TRBJ2-1)
CASPTFVLSGEQFF

SEQ ID NO: 44815 - protein, 16 aa, Homo sapiens
  CDR3 for alpha chain variable domain of TCR clone 22408 (TRAV21, TRAJ37)
CAVRTASSSNTGKLIF

SEQ ID NO: 44816 - protein, 13 aa, Homo sapiens
  CDR3 for beta chain variable domain of TCR clone 22408 (TRBV7-9, TRBJ2-5)
CASLPSGRETQYF

SEQ ID NO: 44817 - protein, 17 aa, Homo sapiens
  CDR3 for alpha chain variable domain of TCR clone 22409 (TRAV3, TRAJ42)
CAVRDRDYGGSQGNLIF

SEQ ID NO: 44818 - protein, 15 aa, Homo sapiens
  CDR3 for beta chain variable domain of TCR clone 22409 (TRBV6-6, TRBJ2-7)
CASSYSYRGSYEQYF

SEQ ID NO: 44819 - protein, 11 aa, Homo sapiens
  CDR3 for alpha chain variable domain of TCR clone 22410 (TRAV3, TRAJ13)
CAVTSYQKVTF

SEQ ID NO: 44820 - protein, 13 aa, Homo sapiens
  CDR3 for beta chain variable domain of TCR clone 22410 (TRBV7-9, TRBJ1-2)
CASSLKQNYGYTF

SEQ ID NO: 44821 - protein, 15 aa, Homo sapiens
  CDR3 for alpha chain variable domain of TCR clone 22411 (TRAV8-3, TRAJ45)
CASSYSGEGADGLTF

SEQ ID NO: 44822 - protein, 13 aa, Homo sapiens
  CDR3 for beta chain variable domain of TCR clone 22411 (TRBV10-3, TRBJ2-7)
CASKLAVNYEQYF

SEQ ID NO: 44823 - protein, 13 aa, Homo sapiens
  CDR3 for alpha chain variable domain of TCR clone 22412 (TRAV13-2, TRAJ48)
CAEMYFGNEKLTF

SEQ ID NO: 44824 - protein, 15 aa, Homo sapiens
  CDR3 for beta chain variable domain of TCR clone 22412 (TRBV7-9, TRBJ1-6)
CASSSPGRGNSPLHF

SEQ ID NO: 44825 - protein, 14 aa, Homo sapiens
  CDR3 for alpha chain variable domain of TCR clone 22413 (TRAV1-2, TRAJ16)
CAVNRFSDGQKLLF

SEQ ID NO: 44826 - protein, 15 aa, Homo sapiens
  CDR3 for beta chain variable domain of TCR clone 22413 (TRBV7-9, TRBJ1-6)
CASSSPGRGNSALHF

SEQ ID NO: 44827 - protein, 16 aa, Homo sapiens
  CDR3 for alpha chain variable domain of TCR clone 22414 (TRAV20, TRAJ10)
CAVLRGPTGGGNKLTF

SEQ ID NO: 44828 - protein, 18 aa, Homo sapiens
  CDR3 for beta chain variable domain of TCR clone 22414 (TRBV13, TRBJ2-4)
CAIIDQKHSVLRRRDPAL

SEQ ID NO: 44829 - protein, 13 aa, Homo sapiens
  CDR3 for alpha chain variable domain of TCR clone 22415 (TRAV8-2, TRAJ5)
CVVSGAGRRALTF

SEQ ID NO: 44830 - protein, 15 aa, Homo sapiens
  CDR3 for beta chain variable domain of TCR clone 22415 (TRBV11-1, TRBJ2-1)
CASHTGLAGSNEQFF

SEQ ID NO: 44831 - protein, 11 aa, Homo sapiens
  CDR3 for alpha chain variable domain of TCR clone 22416 (TRAV21, TRAJ11)
CAVNGYSTLTS

SEQ ID NO: 44832 - protein, 11 aa, Homo sapiens
  CDR3 for beta chain variable domain of TCR clone 22416 (TRBV19, TRBJ1-1)
CASSIGSEAFF

SEQ ID NO: 44833 - protein, 16 aa, Homo sapiens
  CDR3 for alpha chain variable domain of TCR clone 22417 (TRAV3, TRAJ37)
CAVRPHGSGNTGKLIL

SEQ ID NO: 44834 - protein, 16 aa, Homo sapiens
  CDR3 for beta chain variable domain of TCR clone 22417 (TRBV9, TRBJ1-2)
CASSVEEKVSPYGYTF

SEQ ID NO: 44835 - protein, 14 aa, Homo sapiens
  CDR3 for alpha chain variable domain of TCR clone 22418 (TRAV12-2, TRAJ17)
CAVLFKAAGNKLTF

SEQ ID NO: 44836 - protein, 15 aa, Homo sapiens
  CDR3 for beta chain variable domain of TCR clone 22418 (TRBV6-3, TRBJ2-7)
CASSSPGTVFYEQYF

SEQ ID NO: 44837 - protein, 13 aa, Homo sapiens
  CDR3 for alpha chain variable domain of TCR clone 22419 (TRAV12-2, TRAJ34)
CAVRGYNTDKPIF

SEQ ID NO: 44838 - protein, 15 aa, Homo sapiens
  CDR3 for beta chain variable domain of TCR clone 22419 (TRBV28, TRBJ2-1)
CASRTGAGVIARQFF

SEQ ID NO: 44839 - protein, 14 aa, Homo sapiens
  CDR3 for alpha chain variable domain of TCR clone 22420 (TRAV38-1, TRAJ40)
CALRPTSGTYKYIF

SEQ ID NO: 44840 - protein, 14 aa, Homo sapiens
  CDR3 for beta chain variable domain of TCR clone 22420 (TRBV25-1, TRBJ1-1)
CANTHLGGNTEAFF

SEQ ID NO: 44841 - protein, 15 aa, Homo sapiens
  CDR3 for alpha chain variable domain of TCR clone 22421 (TRAV3, TRAJ5)
CAVRDLDTGRRSLTF

SEQ ID NO: 44842 - protein, 13 aa, Homo sapiens
  CDR3 for beta chain variable domain of TCR clone 22421 (TRBV12-4, TRBJ2-7)
CASSPTETYEQYF

SEQ ID NO: 44843 - protein, 11 aa, Homo sapiens
  CDR3 for alpha chain variable domain of TCR clone 22422 (TRAV39, TRAJ49)
CAVDISTQFSF

SEQ ID NO: 44844 - protein, 11 aa, Homo sapiens
  CDR3 for beta chain variable domain of TCR clone 22422 (TRBV7-8, TRBJ2-7)
CASSLSLEQYF

SEQ ID NO: 44845 - protein, 16 aa, Homo sapiens
  CDR3 for alpha chain variable domain of TCR clone 22423 (TRAV12-3, TRAJ53)
CAMSPGSGGSNYKLTF

SEQ ID NO: 44846 - protein, 11 aa, Homo sapiens
  CDR3 for beta chain variable domain of TCR clone 22423 (TRBV29-1, TRBJ2-5)
CIEDRTGTQYF

SEQ ID NO: 44847 - protein, 13 aa, Homo sapiens
  CDR3 for alpha chain variable domain of TCR clone 22424 (TRAV21, TRAJ20)
CAVGLRVDYKLSF

SEQ ID NO: 44848 - protein, 13 aa, Homo sapiens
  CDR3 for beta chain variable domain of TCR clone 22424 (TRBV19, TRBJ1-2)
CASSVPGQDGYTF

SEQ ID NO: 44849 - protein, 17 aa, Homo sapiens
  CDR3 for alpha chain variable domain of TCR clone 22425 (TRAV8-6, TRAJ58)
CAVSSWVGETSGSRLTF

SEQ ID NO: 44850 - protein, 14 aa, Homo sapiens
  CDR3 for beta chain variable domain of TCR clone 22425 (TRBV4-2, TRBJ2-1)
CASGLDRACNEQFF

SEQ ID NO: 44851 - protein, 17 aa, Homo sapiens
  CDR3 for alpha chain variable domain of TCR clone 22426 (TRAV3, TRAJ42)
CAVRDRDYGGSQGNLIF

SEQ ID NO: 44852 - protein, 13 aa, Homo sapiens
  CDR3 for beta chain variable domain of TCR clone 22426 (TRBV12-5, TRBJ2-3)
CASGDRQSDTQYF

SEQ ID NO: 44853 - protein, 14 aa, Homo sapiens
  CDR3 for alpha chain variable domain of TCR clone 22427 (TRAV9-2, TRAJ15)
CALTSNQAGTALIF

SEQ ID NO: 44854 - protein, 15 aa, Homo sapiens
  CDR3 for beta chain variable domain of TCR clone 22427 (TRBV20-1, TRBJ2-4)
CSVTTGLLAKNIQYF

SEQ ID NO: 44855 - protein, 13 aa, Homo sapiens
  CDR3 for alpha chain variable domain of TCR clone 22428 (TRAV13-2, TRAJ48)
CADMDFGNEKLTF

SEQ ID NO: 44856 - protein, 15 aa, Homo sapiens
  CDR3 for beta chain variable domain of TCR clone 22428 (TRBV7-9, TRBJ1-6)
CASSSPGRGNSPLHF

SEQ ID NO: 44857 - protein, 16 aa, Homo sapiens
  CDR3 for alpha chain variable domain of TCR clone 22429 (TRAV12-3, TRAJ53)
CAMSPGSGGSNYKLTF

SEQ ID NO: 44858 - protein, 20 aa, Homo sapiens
  CDR3 for beta chain variable domain of TCR clone 22429 (TRBV28, TRBJ2-1)
CASTPIGRSPGLAGGNEQFF

SEQ ID NO: 44859 - protein, 17 aa, Homo sapiens
  CDR3 for alpha chain variable domain of TCR clone 22430 (TRAV3, TRAJ6)
CAVRDGPRAGGSYIPTF

SEQ ID NO: 44860 - protein, 14 aa, Homo sapiens
  CDR3 for beta chain variable domain of TCR clone 22430 (TRBV7-2, TRBJ2-7)
CASSPKTSFYEQYI

SEQ ID NO: 44861 - protein, 14 aa, Homo sapiens
  CDR3 for alpha chain variable domain of TCR clone 22431 (TRAV1-2, TRAJ16)
CAVSRFSDGQKLLF

SEQ ID NO: 44862 - protein, 13 aa, Homo sapiens
  CDR3 for beta chain variable domain of TCR clone 22431 (TRBV7-9, TRBJ1-2)
CASSLKQNYGYTF

SEQ ID NO: 44863 - protein, 15 aa, Homo sapiens
  CDR3 for alpha chain variable domain of TCR clone 22432 (TRAV3, TRAJ13)
CAVRVYSGGYQKVTF

SEQ ID NO: 44864 - protein, 15 aa, Homo sapiens
  CDR3 for beta chain variable domain of TCR clone 22432 (TRBV5-7, TRBJ1-2)
RASSLGVAANYGYTF

SEQ ID NO: 44865 - protein, 12 aa, Homo sapiens
  CDR3 for alpha chain variable domain of TCR clone 22433 (TRAV20, TRAJ37)
YALPSNTGKLIF

SEQ ID NO: 44866 - protein, 14 aa, Homo sapiens
  CDR3 for beta chain variable domain of TCR clone 22433 (TRBV19, TRBJ2-1)
CASPTFVLSGEQFF

SEQ ID NO: 44867 - protein, 12 aa, Homo sapiens
  CDR3 for alpha chain variable domain of TCR clone 22434 (TRAV1-1, TRAJ8)
CAGGTGFRKLVF

SEQ ID NO: 44868 - protein, 15 aa, Homo sapiens
  CDR3 for beta chain variable domain of TCR clone 22434 (TRBV7-9, TRBJ1-4)
CASSRTGGFNEKLFF

SEQ ID NO: 44869 - protein, 16 aa, Homo sapiens
  CDR3 for alpha chain variable domain of TCR clone 22435 (TRAV3, TRAJ10)
CAVRDMRAGGGNKLTF

SEQ ID NO: 44870 - protein, 16 aa, Homo sapiens
  CDR3 for beta chain variable domain of TCR clone 22435 (TRBV19, TRBJ2-1)
CASSKAGPSSYNEQFF

SEQ ID NO: 44871 - protein, 14 aa, Homo sapiens
  CDR3 for alpha chain variable domain of TCR clone 22436 (TRAV13-1, TRAJ4)
CAATLPSGYSKLIF

SEQ ID NO: 44872 - protein, 14 aa, Homo sapiens
  CDR3 for beta chain variable domain of TCR clone 22436 (TRBV19, TRBJ2-1)
CASPTFVLSGEQFF

SEQ ID NO: 44873 - protein, 12 aa, Homo sapiens
  CDR3 for alpha chain variable domain of TCR clone 22437 (TRAV20, TRAJ56)
CAVTGANSKMTF

SEQ ID NO: 44874 - protein, 14 aa, Homo sapiens
  CDR3 for beta chain variable domain of TCR clone 22437 (TRBV20-1, TRBJ2-5)
CSALVPGYQETQYF

SEQ ID NO: 44875 - protein, 16 aa, Homo sapiens
  CDR3 for alpha chain variable domain of TCR clone 22438 (TRAV26-1, TRAJ37)
CIVRGGGSGNTGKLIF

SEQ ID NO: 44876 - protein, 17 aa, Homo sapiens
  CDR3 for beta chain variable domain of TCR clone 22438 (TRBV4-1, TRBJ2-7)
CASSRDPLGVRGGEQYF

SEQ ID NO: 44877 - protein, 22 aa, Homo sapiens
  CDR3 for alpha chain variable domain of TCR clone 22439 (TRAV2, TRAJ10)
ILQVREADAAVYYTGGGNKLTF

SEQ ID NO: 44878 - protein, 16 aa, Homo sapiens
  CDR3 for beta chain variable domain of TCR clone 22439 (TRBV29-1, TRBJ2-5)
CSVEDLAGDYQETQYF

SEQ ID NO: 44879 - protein, 13 aa, Homo sapiens
  CDR3 for alpha chain variable domain of TCR clone 22440 (TRAV12-3, TRAJ7)
CAMTPYGNNRLAF

SEQ ID NO: 44880 - protein, 16 aa, Homo sapiens
  CDR3 for beta chain variable domain of TCR clone 22440 (TRBV20-1, TRBJ1-4)
RSARPYGGELNEKLFF

SEQ ID NO: 44881 - protein, 14 aa, Homo sapiens
  CDR3 for alpha chain variable domain of TCR clone 22441 (TRAV1-2, TRAJ8)
CAVREDTGFQKLVF

SEQ ID NO: 44882 - protein, 15 aa, Homo sapiens
  CDR3 for beta chain variable domain of TCR clone 22441 (TRBV11-2, TRBJ1-2)
CASSLEGVQRNGYTF

SEQ ID NO: 44883 - protein, 16 aa, Homo sapiens
  CDR3 for alpha chain variable domain of TCR clone 22442 (TRAV16, TRAJ42)
CARKVNYGGSQGNLIF

SEQ ID NO: 44884 - protein, 15 aa, Homo sapiens
  CDR3 for beta chain variable domain of TCR clone 22442 (TRBV20-1, TRBJ2-7)
CSAREGRDSLYEQYF

SEQ ID NO: 44885 - protein, 12 aa, Homo sapiens
  CDR3 for alpha chain variable domain of TCR clone 22443 (TRAV26-2, TRAJ21)
CILKGNFNKFYF

SEQ ID NO: 44886 - protein, 14 aa, Homo sapiens
  CDR3 for beta chain variable domain of TCR clone 22443 (TRBV7-9, TRBJ1-1)
CASTPLQSYIEAFF

SEQ ID NO: 44887 - protein, 16 aa, Homo sapiens
  CDR3 for alpha chain variable domain of TCR clone 22444 (TRAV4, TRAJ22)
CLVGNLYSGSARQLTF

SEQ ID NO: 44888 - protein, 16 aa, Homo sapiens
  CDR3 for beta chain variable domain of TCR clone 22444 (TRBV7-9, TRBJ2-1)
CASSDVAGGSYNEQFF

SEQ ID NO: 44889 - protein, 22 aa, Homo sapiens
  CDR3 for alpha chain variable domain of TCR clone 22445 (TRAV26-1, TRAJ42)
CIVRPIMEEAKEISSLEKALNS

SEQ ID NO: 44890 - protein, 16 aa, Homo sapiens
  CDR3 for beta chain variable domain of TCR clone 22445 (TRBV7-3, TRBJ2-2)
CASSLKRGTLSGELFF

SEQ ID NO: 44891 - protein, 18 aa, Homo sapiens
  CDR3 for alpha chain variable domain of TCR clone 22446 (TRAV21, TRAJ52)
CAVRPSPARGTSYGKLTF

SEQ ID NO: 44892 - protein, 17 aa, Homo sapiens
  CDR3 for beta chain variable domain of TCR clone 22446 (TRBV13, TRBJ2-3)
CASSLSRVAGGRNTQYF

SEQ ID NO: 44893 - protein, 15 aa, Homo sapiens
  CDR3 for alpha chain variable domain of TCR clone 22447 (TRAV21, TRAJ53)
CATLNSGGSNYKLTF

SEQ ID NO: 44894 - protein, 18 aa, Homo sapiens
  CDR3 for beta chain variable domain of TCR clone 22447 (TRBV11-2, TRBJ2-3)
CASSLGGASRGAPNTQYF

SEQ ID NO: 44895 - protein, 16 aa, Homo sapiens
  CDR3 for alpha chain variable domain of TCR clone 22448 (TRAV3, TRAJ37)
CAVKGKGSGNTGKLIF

SEQ ID NO: 44896 - protein, 13 aa, Homo sapiens
  CDR3 for beta chain variable domain of TCR clone 22448 (TRBV14, TRBJ2-7)
CASSQDRRYEQYF

SEQ ID NO: 44897 - protein, 14 aa, Homo sapiens
  CDR3 for alpha chain variable domain of TCR clone 22449 (TRAV12-1, TRAJ29)
CVVSEGSGNTPLVF

SEQ ID NO: 44898 - protein, 13 aa, Homo sapiens
  CDR3 for beta chain variable domain of TCR clone 22449 (TRBV7-9, TRBJ2-3)
CASSPGSTDTQYF

SEQ ID NO: 44899 - protein, 15 aa, Homo sapiens
  CDR3 for alpha chain variable domain of TCR clone 22450 (TRAV12-1, TRAJ44)
CVADLPTGTASKLTF

SEQ ID NO: 44900 - protein, 13 aa, Homo sapiens
  CDR3 for beta chain variable domain of TCR clone 22450 (TRBV6-5, TRBJ2-5)
CASSPKGGETQYF

SEQ ID NO: 44901 - protein, 15 aa, Homo sapiens
  CDR3 for alpha chain variable domain of TCR clone 22451 (TRAV8-4, TRAJ40)
CAVSSVTSGTYKYIF

SEQ ID NO: 44902 - protein, 13 aa, Homo sapiens
  CDR3 for beta chain variable domain of TCR clone 22451 (TRBV2, TRBJ2-1)
CATSRGTDNEQFF

SEQ ID NO: 44903 - protein, 13 aa, Homo sapiens
  CDR3 for alpha chain variable domain of TCR clone 22452 (TRAV2, TRAJ21)
CAVEDLNFNKFYF

SEQ ID NO: 44904 - protein, 15 aa, Homo sapiens
  CDR3 for beta chain variable domain of TCR clone 22452 (TRBV28, TRBJ2-5)
CASSPGQGSIEAQYF

SEQ ID NO: 44905 - protein, 14 aa, Homo sapiens
  CDR3 for alpha chain variable domain of TCR clone 22453 (TRAV13-1, TRAJ35)
CAASKGGFGNVLHC

SEQ ID NO: 44906 - protein, 14 aa, Homo sapiens
  CDR3 for beta chain variable domain of TCR clone 22453 (TRBV7-6, TRBJ2-3)
CASSLGTVTDTQYF

SEQ ID NO: 44907 - protein, 14 aa, Homo sapiens
  CDR3 for alpha chain variable domain of TCR clone 22454 (TRAV16, TRAJ26)
CSLSSANYGQNFVF

SEQ ID NO: 44908 - protein, 12 aa, Homo sapiens
  CDR3 for beta chain variable domain of TCR clone 22454 (TRBV6-5, TRBJ2-2)
CASRTGTGELFF

SEQ ID NO: 44909 - protein, 13 aa, Homo sapiens
  CDR3 for alpha chain variable domain of TCR clone 22455 (TRAV2, TRAJ24)
CAVTTDSWGKLQV

SEQ ID NO: 44910 - protein, 14 aa, Homo sapiens
  CDR3 for beta chain variable domain of TCR clone 22455 (TRBV13, TRBJ2-5)
CASSLGRGQETQYF

SEQ ID NO: 44911 - protein, 13 aa, Homo sapiens
  CDR3 for alpha chain variable domain of TCR clone 22456 (TRAV1-1, TRAJ23)
CAVVANQGGKLIF

SEQ ID NO: 44912 - protein, 15 aa, Homo sapiens
  CDR3 for beta chain variable domain of TCR clone 22456 (TRBV6-1, TRBJ2-3)
CASSERGGITDTQYF

SEQ ID NO: 44913 - protein, 15 aa, Homo sapiens
  CDR3 for alpha chain variable domain of TCR clone 22457 (TRAV26-1, TRAJ29)
CIVRVEGSGNTPLVF

SEQ ID NO: 44914 - protein, 15 aa, Homo sapiens
  CDR3 for beta chain variable domain of TCR clone 22457 (TRBV7-9, TRBJ1-5)
CASSQGHPPNQPQHF

SEQ ID NO: 44915 - protein, 14 aa, Homo sapiens
  CDR3 for alpha chain variable domain of TCR clone 22458 (TRAV12-2, TRAJ13)
CAVKKTGGYQKVTF

SEQ ID NO: 44916 - protein, 13 aa, Homo sapiens
  CDR3 for beta chain variable domain of TCR clone 22458 (TRBV10-3, TRBJ1-2)
CAISERDSYGYTF

SEQ ID NO: 44917 - protein, 15 aa, Homo sapiens
  CDR3 for alpha chain variable domain of TCR clone 22459 (TRAV21, TRAJ24)
CAARSSTNSWGKLQF

SEQ ID NO: 44918 - protein, 13 aa, Homo sapiens
  CDR3 for beta chain variable domain of TCR clone 22459 (TRBV11-2, TRBJ2-5)
CASSSTGEETQYF

SEQ ID NO: 44919 - protein, 11 aa, Homo sapiens
  CDR3 for alpha chain variable domain of TCR clone 22460 (TRAV12-1, TRAJ21)
CVVNNFNKFYF

SEQ ID NO: 44920 - protein, 14 aa, Homo sapiens
  CDR3 for beta chain variable domain of TCR clone 22460 (TRBV15, TRBJ1-5)
YATSREQSNQPQHF

SEQ ID NO: 44921 - protein, 16 aa, Homo sapiens
  CDR3 for alpha chain variable domain of TCR clone 22461 (TRAV27, TRAJ13)
CAGAKSDSGGYQKVNF

SEQ ID NO: 44922 - protein, 15 aa, Homo sapiens
  CDR3 for beta chain variable domain of TCR clone 22461 (TRBV29-1, TRBJ2-1)
CSVGRHALFYNEQFF

SEQ ID NO: 44923 - protein, 15 aa, Homo sapiens
  CDR3 for alpha chain variable domain of TCR clone 22462 (TRAV26-1, TRAJ22)
CIVRVPFWFCKATDL

SEQ ID NO: 44924 - protein, 13 aa, Homo sapiens
  CDR3 for beta chain variable domain of TCR clone 22462 (TRBV7-9, TRBJ1-2)
CASSLKQNYGYTF

SEQ ID NO: 44925 - protein, 13 aa, Homo sapiens
  CDR3 for alpha chain variable domain of TCR clone 22463 (TRAV13-1, TRAJ6)
CAASSGGSYIPTF

SEQ ID NO: 44926 - protein, 15 aa, Homo sapiens
  CDR3 for beta chain variable domain of TCR clone 22463 (TRBV12-4, TRBJ2-5)
CASSPPTGPQETQYF

SEQ ID NO: 44927 - protein, 14 aa, Homo sapiens
  CDR3 for alpha chain variable domain of TCR clone 22464 (TRAV12-1, TRAJ17)
CVVNYKAAGNKLTF

SEQ ID NO: 44928 - protein, 17 aa, Homo sapiens
  CDR3 for beta chain variable domain of TCR clone 22464 (TRBV20-1, TRBJ2-1)
CSAGSSGLAGSYNEQFF

SEQ ID NO: 44929 - protein, 17 aa, Homo sapiens
  CDR3 for alpha chain variable domain of TCR clone 22465 (TRAV3, TRAJ6)
CAVRDGPRAGGSYIPTF

SEQ ID NO: 44930 - protein, 20 aa, Homo sapiens
  CDR3 for beta chain variable domain of TCR clone 22465 (TRBV28, TRBJ2-1)
CARTPIGRSPGLAGGNEQFF

SEQ ID NO: 44931 - protein, 15 aa, Homo sapiens
  CDR3 for alpha chain variable domain of TCR clone 22466 (TRAV29/DV5, TRAJ24)
CAASGATDSWGKFQF

SEQ ID NO: 44932 - protein, 13 aa, Homo sapiens
  CDR3 for beta chain variable domain of TCR clone 22466 (TRBV7-9, TRBJ1-2)
CASSLKQNYGYTF

SEQ ID NO: 44933 - protein, 15 aa, Homo sapiens
  CDR3 for alpha chain variable domain of TCR clone 22467 (TRAV26-1, TRAJ29)
CIVRVEVSGNTPLVF

SEQ ID NO: 44934 - protein, 14 aa, Homo sapiens
  CDR3 for beta chain variable domain of TCR clone 22467 (TRBV18, TRBJ2-5)
CASSPGVSQETQYF

SEQ ID NO: 44935 - protein, 18 aa, Homo sapiens
  CDR3 for alpha chain variable domain of TCR clone 22468 (TRAV21, TRAJ52)
CAVRPSPAGGTSYGKLTF

SEQ ID NO: 44936 - protein, 17 aa, Homo sapiens
  CDR3 for beta chain variable domain of TCR clone 22468 (TRBV13, TRBJ2-3)
CASSLSREAGGRNTQYF

SEQ ID NO: 44937 - protein, 14 aa, Homo sapiens
  CDR3 for alpha chain variable domain of TCR clone 22469 (TRAV29/DV5, TRAJ36)
CAARRKTGANDLFF

SEQ ID NO: 44938 - protein, 14 aa, Homo sapiens
  CDR3 for beta chain variable domain of TCR clone 22469 (TRBV12-5, TRBJ2-5)
CASGSRTHQETQYF

SEQ ID NO: 44939 - protein, 17 aa, Homo sapiens
  CDR3 for alpha chain variable domain of TCR clone 22470 (TRAV8-6, TRAJ58)
CAVSSWVGEASGSRLTF

SEQ ID NO: 44940 - protein, 14 aa, Homo sapiens
  CDR3 for beta chain variable domain of TCR clone 22470 (TRBV4-2, TRBJ2-1)
CASGLDRAYNEQFF

SEQ ID NO: 44941 - protein, 15 aa, Homo sapiens
  CDR3 for alpha chain variable domain of TCR clone 22471 (TRAV2, TRAJ15)
CAVEDREQAGTALIF

SEQ ID NO: 44942 - protein, 20 aa, Homo sapiens
  CDR3 for beta chain variable domain of TCR clone 22471 (TRBV28, TRBJ2-1)
CASTPIGRSPGLAGGNEQFF

SEQ ID NO: 44943 - protein, 11 aa, Homo sapiens
  CDR3 for alpha chain variable domain of TCR clone 22472 (TRAV1-2, TRAJ20)
CAVASDYKLSF

SEQ ID NO: 44944 - protein, 18 aa, Homo sapiens
  CDR3 for beta chain variable domain of TCR clone 22472 (TRBV20-1, TRBJ2-6)
CSAETTPTHGSGANVLTF

SEQ ID NO: 44945 - protein, 13 aa, Homo sapiens
  CDR3 for alpha chain variable domain of TCR clone 22473 (TRAV27, TRAJ49)
CAPRPYTGNQFYF

SEQ ID NO: 44946 - protein, 16 aa, Homo sapiens
  CDR3 for beta chain variable domain of TCR clone 22473 (TRBV4-1, TRBJ1-2)
CASSQDAGQVLYGYTL

SEQ ID NO: 44947 - protein, 12 aa, Homo sapiens
  CDR3 for alpha chain variable domain of TCR clone 22474 (TRAV12-3, TRAJ17)
CAMTLTGNKLTF

SEQ ID NO: 44948 - protein, 17 aa, Homo sapiens
  CDR3 for beta chain variable domain of TCR clone 22474 (TRBV7-3, TRBJ2-3)
CASSPRGQGYGTDTQYF

SEQ ID NO: 44949 - protein, 15 aa, Homo sapiens
  CDR3 for alpha chain variable domain of TCR clone 22475 (TRAV17, TRAJ57)
YATGPSQGGSEKLVF

SEQ ID NO: 44950 - protein, 16 aa, Homo sapiens
  CDR3 for beta chain variable domain of TCR clone 22475 (TRBV12-4, TRBJ1-5)
CASSRPVGGSNQPQHF

SEQ ID NO: 44951 - protein, 14 aa, Homo sapiens
  CDR3 for alpha chain variable domain of TCR clone 22476 (TRAV12-2, TRAJ13)
CAVKKTGGYQKVTF

SEQ ID NO: 44952 - protein, 15 aa, Homo sapiens
  CDR3 for beta chain variable domain of TCR clone 22476 (TRBV27, TRBJ2-1)
CASSNGGGSFNEQFF

SEQ ID NO: 44953 - protein, 14 aa, Homo sapiens
  CDR3 for alpha chain variable domain of TCR clone 22477 (TRAV12-2, TRAJ48)
CAVNAFFGSEKLTF

SEQ ID NO: 44954 - protein, 13 aa, Homo sapiens
  CDR3 for beta chain variable domain of TCR clone 22477 (TRBV28, TRBJ2-7)
CAGAQQGLDEQYF

SEQ ID NO: 44955 - protein, 13 aa, Homo sapiens
  CDR3 for alpha chain variable domain of TCR clone 22478 (TRAV29/DV5, TRAJ37)
CSEGSGNTGKLIF

SEQ ID NO: 44956 - protein, 14 aa, Homo sapiens
  CDR3 for beta chain variable domain of TCR clone 22478 (TRBV5-1, TRBJ1-1)
CASSLAVGSGEAFF

SEQ ID NO: 44957 - protein, 17 aa, Homo sapiens
  CDR3 for alpha chain variable domain of TCR clone 22479 (TRAV3, TRAJ6)
CAVRDGPRAGGSYIPPF

SEQ ID NO: 44958 - protein, 18 aa, Homo sapiens
  CDR3 for beta chain variable domain of TCR clone 22479 (TRBV7-9, TRBJ2-7)
CASSLTTSGSRTWYEQYF

SEQ ID NO: 44959 - protein, 17 aa, Homo sapiens
  CDR3 for alpha chain variable domain of TCR clone 22480 (TRAV1-2, TRAJ8)
CAVRDPDENTGSQKLVF

SEQ ID NO: 44960 - protein, 16 aa, Homo sapiens
  CDR3 for beta chain variable domain of TCR clone 22480 (TRBV7-9, TRBJ2-2)
CASSGFGGANTGELFF

SEQ ID NO: 44961 - protein, 13 aa, Homo sapiens
  CDR3 for alpha chain variable domain of TCR clone 22481 (TRAV12-1, TRAJ16)
CVVNGPDGQKLLF

SEQ ID NO: 44962 - protein, 13 aa, Homo sapiens
  CDR3 for beta chain variable domain of TCR clone 22481 (TRBV2, TRBJ1-1)
CARNPTGGFHAVF

SEQ ID NO: 44963 - protein, 15 aa, Homo sapiens
  CDR3 for alpha chain variable domain of TCR clone 22482 (TRAV40, TRAJ45)
CLLGDLGGGADGLTF

SEQ ID NO: 44964 - protein, 13 aa, Homo sapiens
  CDR3 for beta chain variable domain of TCR clone 22482 (TRBV7-9, TRBJ1-2)
CASSLKQNYGDTF

SEQ ID NO: 44965 - protein, 13 aa, Homo sapiens
  CDR3 for alpha chain variable domain of TCR clone 22483 (TRAV17, TRAJ40)
RAGALGGTYKYIF

SEQ ID NO: 44966 - protein, 16 aa, Homo sapiens
  CDR3 for beta chain variable domain of TCR clone 22483 (TRBV7-2, TRBJ1-4)
CASSLAPGRRDEKLFF

SEQ ID NO: 44967 - protein, 11 aa, Homo sapiens
  CDR3 for alpha chain variable domain of TCR clone 22484 (TRAV2, TRAJ33)
CAVEINYQLIW

SEQ ID NO: 44968 - protein, 15 aa, Homo sapiens
  CDR3 for beta chain variable domain of TCR clone 22484 (TRBV19, TRBJ1-1)
CASTSGQIQNTEAFF

SEQ ID NO: 44969 - protein, 12 aa, Homo sapiens
  CDR3 for alpha chain variable domain of TCR clone 22485 (TRAV21, TRAJ11)
CAATSGYSNLTF

SEQ ID NO: 44970 - protein, 14 aa, Homo sapiens
  CDR3 for beta chain variable domain of TCR clone 22485 (TRBV20-1, TRBJ2-7)
CSAPELAGVGEQYF

SEQ ID NO: 44971 - protein, 13 aa, Homo sapiens
  CDR3 for alpha chain variable domain of TCR clone 22486 (TRAV2, TRAJ40)
CAVVTSGTYKYIF

SEQ ID NO: 44972 - protein, 14 aa, Homo sapiens
  CDR3 for beta chain variable domain of TCR clone 22486 (TRBV18, TRBJ2-5)
CASSPGVSQETQYF

SEQ ID NO: 44973 - protein, 20 aa, Homo sapiens
  CDR3 for alpha chain variable domain of TCR clone 22487 (TRAV1-1, TRAJ37)
CLLLLRCERYGSGNTGKLIF

SEQ ID NO: 44974 - protein, 14 aa, Homo sapiens
  CDR3 for beta chain variable domain of TCR clone 22487 (TRBV4-1, TRBJ2-2)
CASSQAVNTGELFF

SEQ ID NO: 44975 - protein, 14 aa, Homo sapiens
  CDR3 for alpha chain variable domain of TCR clone 22488 (TRAV13-1, TRAJ44)
CAAKATGTASKLTF

SEQ ID NO: 44976 - protein, 17 aa, Homo sapiens
  CDR3 for beta chain variable domain of TCR clone 22488 (TRBV7-3, TRBJ2-3)
CASSFMKRMRGADTQYF

SEQ ID NO: 44977 - protein, 14 aa, Homo sapiens
  CDR3 for alpha chain variable domain of TCR clone 22489 (TRAV12-2, TRAJ13)
CAVKKTGGYQKVTF

SEQ ID NO: 44978 - protein, 14 aa, Homo sapiens
  CDR3 for beta chain variable domain of TCR clone 22489 (TRBV5-5, TRBJ2-7)
CASSSGQGTYEQYF

SEQ ID NO: 44979 - protein, 12 aa, Homo sapiens
  CDR3 for alpha chain variable domain of TCR clone 22490 (TRAV2, TRAJ9)
CAVGAEGFKTIF

SEQ ID NO: 44980 - protein, 16 aa, Homo sapiens
  CDR3 for beta chain variable domain of TCR clone 22490 (TRBV13, TRBJ2-2)
CASSPRTGEHTGELFF

SEQ ID NO: 44981 - protein, 13 aa, Homo sapiens
  CDR3 for alpha chain variable domain of TCR clone 22491 (TRAV1-2, TRAJ9)
CAVLNTGGFKTIF

SEQ ID NO: 44982 - protein, 14 aa, Homo sapiens
  CDR3 for beta chain variable domain of TCR clone 22491 (TRBV20-1, TRBJ2-3)
CSARGGASTDTQYF

SEQ ID NO: 44983 - protein, 11 aa, Homo sapiens
  CDR3 for alpha chain variable domain of TCR clone 22492 (TRAV1-1, TRAJ23)
CAVRQGGKLIF

SEQ ID NO: 44984 - protein, 20 aa, Homo sapiens
  CDR3 for beta chain variable domain of TCR clone 22492 (TRBV7-8, TRBJ2-2)
CASSHLFPGPTIHITEELFF

SEQ ID NO: 44985 - protein, 16 aa, Homo sapiens
  CDR3 for alpha chain variable domain of TCR clone 22493 (TRAV13-2, TRAJ28)
CAEKSYSGAGSYQLTF

SEQ ID NO: 44986 - protein, 14 aa, Homo sapiens
  CDR3 for beta chain variable domain of TCR clone 22493 (TRBV5-1, TRBJ1-4)
CASSLGDRNEKLFF

SEQ ID NO: 44987 - protein, 15 aa, Homo sapiens
  CDR3 for alpha chain variable domain of TCR clone 22494 (TRAV12-2, TRAJ43)
CAFDMRFGAGTRLTV

SEQ ID NO: 44988 - protein, 18 aa, Homo sapiens
  CDR3 for beta chain variable domain of TCR clone 22494 (TRBV20-1, TRBJ2-3)
CSASGLAGGAGDHRYAVF

SEQ ID NO: 44989 - protein, 16 aa, Homo sapiens
  CDR3 for alpha chain variable domain of TCR clone 22495 (TRAV8-3, TRAJ13)
CAVGAYPSGGHQKVTF

SEQ ID NO: 44990 - protein, 15 aa, Homo sapiens
  CDR3 for beta chain variable domain of TCR clone 22495 (TRBV19, TRBJ1-5)
CASSIVWADNQPQHF

SEQ ID NO: 44991 - protein, 12 aa, Homo sapiens
  CDR3 for alpha chain variable domain of TCR clone 22496 (TRAV12-2, TRAJ8)
CAVNTGFQKLLF

SEQ ID NO: 44992 - protein, 15 aa, Homo sapiens
  CDR3 for beta chain variable domain of TCR clone 22496 (TRBV7-8, TRBJ1-5)
CASSLERRGLEPQHF

SEQ ID NO: 44993 - protein, 15 aa, Homo sapiens
  CDR3 for alpha chain variable domain of TCR clone 22497 (TRAV8-3, TRAJ27)
CAVGPSKTNAGKSTF

SEQ ID NO: 44994 - protein, 15 aa, Homo sapiens
  CDR3 for beta chain variable domain of TCR clone 22497 (TRBV7-2, TRBJ2-1)
CASSFGLAGGNEQFF

SEQ ID NO: 44995 - protein, 14 aa, Homo sapiens
  CDR3 for alpha chain variable domain of TCR clone 22498 (TRAV12-2, TRAJ45)
CAAHSGGGADGLTF

SEQ ID NO: 44996 - protein, 15 aa, Homo sapiens
  CDR3 for beta chain variable domain of TCR clone 22498 (TRBV27, TRBJ2-1)
CASSNGGGSSNEQFF

SEQ ID NO: 44997 - protein, 14 aa, Homo sapiens
  CDR3 for alpha chain variable domain of TCR clone 22499 (TRAV17, TRAJ32)
CATDPGGATNKLIF

SEQ ID NO: 44998 - protein, 14 aa, Homo sapiens
  CDR3 for beta chain variable domain of TCR clone 22499 (TRBV2, TRBJ1-5)
CASSENRGGQTQHF

SEQ ID NO: 44999 - protein, 23 aa, Homo sapiens
  CDR3 for alpha chain variable domain of TCR clone 22500 (TRAV12-2, TRAJ43)
SLLIRDSQPSDSSTYLCAFDMRF

SEQ ID NO: 45000 - protein, 18 aa, Homo sapiens
  CDR3 for beta chain variable domain of TCR clone 22500 (TRBV20-1, TRBJ2-3)
CSASGLAGGPGTTDTQYF

SEQ ID NO: 45001 - protein, 14 aa, Homo sapiens
  CDR3 for alpha chain variable domain of TCR clone 22501 (TRAV8-1, TRAJ5)
CAVRTDTGRRALTF

SEQ ID NO: 45002 - protein, 16 aa, Homo sapiens
  CDR3 for beta chain variable domain of TCR clone 22501 (TRBV20-1, TRBJ1-4)
CSAPGQGLLTNEKLFF

SEQ ID NO: 45003 - protein, 12 aa, Homo sapiens
  CDR3 for alpha chain variable domain of TCR clone 22502 (TRAV3, TRAJ39)
CAVIEWSNMLTF

SEQ ID NO: 45004 - protein, 14 aa, Homo sapiens
  CDR3 for beta chain variable domain of TCR clone 22502 (TRBV7-8, TRBJ2-3)
CASSFPDGQDTQYI

SEQ ID NO: 45005 - protein, 12 aa, Homo sapiens
  CDR3 for alpha chain variable domain of TCR clone 22503 (TRAV8-3, TRAJ26)
CAGDNYGQNFVF

SEQ ID NO: 45006 - protein, 13 aa, Homo sapiens
  CDR3 for beta chain variable domain of TCR clone 22503 (TRBV12-4, TRBJ1-2)
CASSLRQGKGYTF

SEQ ID NO: 45007 - protein, 11 aa, Homo sapiens
  CDR3 for alpha chain variable domain of TCR clone 22504 (TRAV2, TRAJ33)
CAVDSNYQLIW

SEQ ID NO: 45008 - protein, 15 aa, Homo sapiens
  CDR3 for beta chain variable domain of TCR clone 22504 (TRBV19, TRBJ1-2)
CASSVGQALNYGYTF

SEQ ID NO: 45009 - protein, 14 aa, Homo sapiens
  CDR3 for alpha chain variable domain of TCR clone 22505 (TRAV12-2, TRAJ40)
CAVKIPSGTYKYIF

SEQ ID NO: 45010 - protein, 15 aa, Homo sapiens
  CDR3 for beta chain variable domain of TCR clone 22505 (TRBV7-8, TRBJ1-1)
CASSLGDSRNTEAFF

SEQ ID NO: 45011 - protein, 16 aa, Homo sapiens
  CDR3 for alpha chain variable domain of TCR clone 22506 (TRAV30, TRAJ24)
CGTEIVDADSWGKFQL

SEQ ID NO: 45012 - protein, 19 aa, Homo sapiens
  CDR3 for beta chain variable domain of TCR clone 22506 (TRBV25-1, TRBJ2-2)
CAILVYRVDRGRKTGELFF

SEQ ID NO: 45013 - protein, 15 aa, Homo sapiens
  CDR3 for alpha chain variable domain of TCR clone 22507 (TRAV17, TRAJ57)
CATGPSQGGSEKPVF

SEQ ID NO: 45014 - protein, 15 aa, Homo sapiens
  CDR3 for beta chain variable domain of TCR clone 22507 (TRBV9, TRBJ1-6)
CASSVAGTGDSPLHF

SEQ ID NO: 45015 - protein, 16 aa, Homo sapiens
  CDR3 for alpha chain variable domain of TCR clone 22508 (TRAV3, TRAJ10)
CAVRDMRAGGGNKLTF

SEQ ID NO: 45016 - protein, 14 aa, Homo sapiens
  CDR3 for beta chain variable domain of TCR clone 22508 (TRBV12-5, TRBJ2-5)
CASGSRTHQETQYF

SEQ ID NO: 45017 - protein, 18 aa, Homo sapiens
  CDR3 for alpha chain variable domain of TCR clone 22509 (TRAV13-1, TRAJ52)
CAAKNPNAGGTSYGKLTF

SEQ ID NO: 45018 - protein, 15 aa, Homo sapiens
  CDR3 for beta chain variable domain of TCR clone 22509 (TRBV6-1, TRBJ2-3)
CASSERGGITDTQCF

SEQ ID NO: 45019 - protein, 13 aa, Homo sapiens
  CDR3 for alpha chain variable domain of TCR clone 22510 (TRAV1-2, TRAJ9)
CAALNTGGFKTIF

SEQ ID NO: 45020 - protein, 10 aa, Homo sapiens
  CDR3 for beta chain variable domain of TCR clone 22510 (TRBV19, TRBJ1-2)
CASSVPDRMA

SEQ ID NO: 45021 - protein, 15 aa, Homo sapiens
  CDR3 for alpha chain variable domain of TCR clone 22511 (TRAV17, TRAJ57)
CATGPSQGGSEKLVF

SEQ ID NO: 45022 - protein, 16 aa, Homo sapiens
  CDR3 for beta chain variable domain of TCR clone 22511 (TRBV12-4, TRBJ1-5)
CASSRPVGGSNQPRHF

SEQ ID NO: 45023 - protein, 14 aa, Homo sapiens
  CDR3 for alpha chain variable domain of TCR clone 22512 (TRAV13-1, TRAJ44)
CAAKATGTASTLTF

SEQ ID NO: 45024 - protein, 17 aa, Homo sapiens
  CDR3 for beta chain variable domain of TCR clone 22512 (TRBV7-3, TRBJ2-3)
CASSLMKRMRGADTQYF

SEQ ID NO: 45025 - protein, 12 aa, Homo sapiens
  CDR3 for alpha chain variable domain of TCR clone 22513 (TRAV8-6, TRAJ43)
CAVSNNNNDMRF

SEQ ID NO: 45026 - protein, 15 aa, Homo sapiens
  CDR3 for beta chain variable domain of TCR clone 22513 (TRBV7-3, TRBJ2-6)
CASSLGGSGANDLTF

SEQ ID NO: 45027 - protein, 12 aa, Homo sapiens
  CDR3 for alpha chain variable domain of TCR clone 22514 (TRAV1-1, TRAJ8)
CAGGTGFQKLVS

SEQ ID NO: 45028 - protein, 15 aa, Homo sapiens
  CDR3 for beta chain variable domain of TCR clone 22514 (TRBV7-9, TRBJ1-4)
CASSRTGGFNEKLFF

SEQ ID NO: 45029 - protein, 13 aa, Homo sapiens
  CDR3 for alpha chain variable domain of TCR clone 22515 (TRAV12-3, TRAJ9)
CAMRNTGGFKTIF

SEQ ID NO: 45030 - protein, 14 aa, Homo sapiens
  CDR3 for beta chain variable domain of TCR clone 22515 (TRBV11-3, TRBJ2-7)
CASSSTGEGYEQYF

SEQ ID NO: 45031 - protein, 14 aa, Homo sapiens
  CDR3 for alpha chain variable domain of TCR clone 22516 (TRAV12-2, TRAJ13)
CAVKKTGGYQKVTF

SEQ ID NO: 45032 - protein, 15 aa, Homo sapiens
  CDR3 for beta chain variable domain of TCR clone 22516 (TRBV4-1, TRBJ1-4)
CASSDTGGTNEKLFF

SEQ ID NO: 45033 - protein, 11 aa, Homo sapiens
  CDR3 for alpha chain variable domain of TCR clone 22517 (TRAV21, TRAJ34)
CAVTNTDKLIF

SEQ ID NO: 45034 - protein, 14 aa, Homo sapiens
  CDR3 for beta chain variable domain of TCR clone 22517 (TRBV6-1, TRBJ1-3)
CASVQGGGGNTIYF

SEQ ID NO: 45035 - protein, 13 aa, Homo sapiens
  CDR3 for alpha chain variable domain of TCR clone 22518 (TRAV2, TRAJ40)
CAVVTSGTYKYIF

SEQ ID NO: 45036 - protein, 12 aa, Homo sapiens
  CDR3 for beta chain variable domain of TCR clone 22518 (TRBV7-9, TRBJ1-4)
CASSTDREKLFF

SEQ ID NO: 45037 - protein, 17 aa, Homo sapiens
  CDR3 for alpha chain variable domain of TCR clone 22519 (TRAV8-6, TRAJ8)
CAVKEGIENTGFQKLVF

SEQ ID NO: 45038 - protein, 13 aa, Homo sapiens
  CDR3 for beta chain variable domain of TCR clone 22519 (TRBV20-1, TRBJ1-1)
CSARVGGNTEAFF

SEQ ID NO: 45039 - protein, 15 aa, Homo sapiens
  CDR3 for alpha chain variable domain of TCR clone 22520 (TRAV3, TRAJ5)
CTVRDRKTGRRALTF

SEQ ID NO: 45040 - protein, 15 aa, Homo sapiens
  CDR3 for beta chain variable domain of TCR clone 22520 (TRBV7-8, TRBJ2-1)
CASSLADSLYNEQFF

SEQ ID NO: 45041 - protein, 14 aa, Homo sapiens
  CDR3 for alpha chain variable domain of TCR clone 22521 (TRAV3, TRAJ21)
CAVESQANFNKFYF

SEQ ID NO: 45042 - protein, 18 aa, Homo sapiens
  CDR3 for beta chain variable domain of TCR clone 22521 (TRBV7-9, TRBJ2-1)
CASSLAVSGTGGRNEQFF

SEQ ID NO: 45043 - protein, 18 aa, Homo sapiens
  CDR3 for alpha chain variable domain of TCR clone 22522 (TRAV13-1, TRAJ52)
CAAKNPNAGGTSYGKLTF

SEQ ID NO: 45044 - protein, 15 aa, Homo sapiens
  CDR3 for beta chain variable domain of TCR clone 22522 (TRBV6-1, TRBJ2-3)
CASSERGGITETQYF

SEQ ID NO: 45045 - protein, 11 aa, Homo sapiens
  CDR3 for alpha chain variable domain of TCR clone 22523 (TRAV2, TRAJ33)
CAVESNYQLIW

SEQ ID NO: 45046 - protein, 15 aa, Homo sapiens
  CDR3 for beta chain variable domain of TCR clone 22523 (TRBV19, TRBJ1-1)
CTSTSGQIQNTEAFF

SEQ ID NO: 45047 - protein, 14 aa, Homo sapiens
  CDR3 for alpha chain variable domain of TCR clone 22524 (TRAV20, TRAJ42)
CAVQAGGSQRNLIF

SEQ ID NO: 45048 - protein, 14 aa, Homo sapiens
  CDR3 for beta chain variable domain of TCR clone 22524 (TRBV28, TRBJ1-2)
CASRIQGANYGYTF

SEQ ID NO: 45049 - protein, 13 aa, Homo sapiens
  CDR3 for alpha chain variable domain of TCR clone 22525 (TRAV8-2, TRAJ49)
CVVSPSTGNQFYF

SEQ ID NO: 45050 - protein, 14 aa, Homo sapiens
  CDR3 for beta chain variable domain of TCR clone 22525 (TRBV11-2, TRBJ2-7)
CASSRGGGAGEQYF

SEQ ID NO: 45051 - protein, 14 aa, Homo sapiens
  CDR3 for alpha chain variable domain of TCR clone 22526 (TRAV12-3, TRAJ10)
SHLPLTGGGNKLTF

SEQ ID NO: 45052 - protein, 15 aa, Homo sapiens
  CDR3 for beta chain variable domain of TCR clone 22526 (TRBV2, TRBJ2-7)
CASSEGLARSYEQYF

SEQ ID NO: 45053 - protein, 11 aa, Homo sapiens
  CDR3 for alpha chain variable domain of TCR clone 22527 (TRAV13-1, TRAJ49)
CACVGGNQFYF

SEQ ID NO: 45054 - protein, 16 aa, Homo sapiens
  CDR3 for beta chain variable domain of TCR clone 22527 (TRBV11-2, TRBJ2-2)
CASSRRTGNLIGELFF

SEQ ID NO: 45055 - protein, 17 aa, Homo sapiens
  CDR3 for alpha chain variable domain of TCR clone 22528 (TRAV8-6, TRAJ58)
RAVSSWVGETSGSRLTF

SEQ ID NO: 45056 - protein, 14 aa, Homo sapiens
  CDR3 for beta chain variable domain of TCR clone 22528 (TRBV4-2, TRBJ2-1)
CASGLDRAYNEQFF

SEQ ID NO: 45057 - protein, 17 aa, Homo sapiens
  CDR3 for alpha chain variable domain of TCR clone 22529 (TRAV8-1, TRAJ43)
CAVTNDMRFGAGTRLTV

SEQ ID NO: 45058 - protein, 17 aa, Homo sapiens
  CDR3 for beta chain variable domain of TCR clone 22529 (TRBV5-4, TRBJ2-1)
CASSSAGGWGPYNEQFF

SEQ ID NO: 45059 - protein, 13 aa, Homo sapiens
  CDR3 for alpha chain variable domain of TCR clone 22530 (TRAV2, TRAJ40)
CAVVTSGTYKYIC

SEQ ID NO: 45060 - protein, 14 aa, Homo sapiens
  CDR3 for beta chain variable domain of TCR clone 22530 (TRBV19, TRBJ2-1)
CASPTFVLSGEQFF

SEQ ID NO: 45061 - protein, 14 aa, Homo sapiens
  CDR3 for alpha chain variable domain of TCR clone 22531 (TRAV1-2, TRAJ16)
CAVNRFSDGQKLLF

SEQ ID NO: 45062 - protein, 15 aa, Homo sapiens
  CDR3 for beta chain variable domain of TCR clone 22531 (TRBV9, TRBJ1-6)
CASSVAGTGNSPLHF

SEQ ID NO: 45063 - protein, 18 aa, Homo sapiens
  CDR3 for alpha chain variable domain of TCR clone 22532 (TRAV8-3, TRAJ4)
WVRDPTSNDPGGYNKLIF

SEQ ID NO: 45064 - protein, 13 aa, Homo sapiens
  CDR3 for beta chain variable domain of TCR clone 22532 (TRBV20-1, TRBJ1-2)
CSATGIQGSGYAF

SEQ ID NO: 45065 - protein, 14 aa, Homo sapiens
  CDR3 for alpha chain variable domain of TCR clone 22533 (TRAV14/DV4, TRAJ47)
CAMGAEEYGNKLVF

SEQ ID NO: 45066 - protein, 14 aa, Homo sapiens
  CDR3 for beta chain variable domain of TCR clone 22533 (TRBV7-6, TRBJ2-3)
CASSLGTVTDTQYF

SEQ ID NO: 45067 - protein, 15 aa, Homo sapiens
  CDR3 for alpha chain variable domain of TCR clone 22534 (TRAV8-3, TRAJ15)
CAVGAPNQAGTALIL

SEQ ID NO: 45068 - protein, 14 aa, Homo sapiens
  CDR3 for beta chain variable domain of TCR clone 22534 (TRBV20-1, TRBJ2-1)
CSPNDEASYNEQFF

SEQ ID NO: 45069 - protein, 12 aa, Homo sapiens
  CDR3 for alpha chain variable domain of TCR clone 22535 (TRAV9-2, TRAJ40)
CALTLGTYKYIF

SEQ ID NO: 45070 - protein, 16 aa, Homo sapiens
  CDR3 for beta chain variable domain of TCR clone 22535 (TRBV7-7, TRBJ2-2)
CASSPRTGLNTGELFF

SEQ ID NO: 45071 - protein, 14 aa, Homo sapiens
  CDR3 for alpha chain variable domain of TCR clone 22536 (TRAV8-1, TRAJ49)
CASSIANTGNQFYF

SEQ ID NO: 45072 - protein, 19 aa, Homo sapiens
  CDR3 for beta chain variable domain of TCR clone 22536 (TRBV23-1, TRBJ2-3)
TVSLRQQPRSTGSTDTQYF

SEQ ID NO: 45073 - protein, 18 aa, Homo sapiens
  CDR3 for alpha chain variable domain of TCR clone 22537 (TRAV13-1, TRAJ52)
CAASKRSAGGTSYGKLTF

SEQ ID NO: 45074 - protein, 12 aa, Homo sapiens
  CDR3 for beta chain variable domain of TCR clone 22537 (TRBV11-2, TRBJ2-2)
CASSLPTGELFF

SEQ ID NO: 45075 - protein, 14 aa, Homo sapiens
  CDR3 for alpha chain variable domain of TCR clone 22538 (TRAV8-3, TRAJ4)
CAVGAAGGYNKRIF

SEQ ID NO: 45076 - protein, 15 aa, Homo sapiens
  CDR3 for beta chain variable domain of TCR clone 22538 (TRBV6-5, TRBJ2-1)
CASSYDAGAGNEQFF

SEQ ID NO: 45077 - protein, 15 aa, Homo sapiens
  CDR3 for alpha chain variable domain of TCR clone 22539 (TRAV2, TRAJ9)
CSVEDRGTGGFKTIF

SEQ ID NO: 45078 - protein, 16 aa, Homo sapiens
  CDR3 for beta chain variable domain of TCR clone 22539 (TRBV24-1, TRBJ2-3)
CATSDPGTGATDTQYF

SEQ ID NO: 45079 - protein, 16 aa, Homo sapiens
  CDR3 for alpha chain variable domain of TCR clone 22540 (TRAV4, TRAJ22)
CLVGDLYPGSARQLTF

SEQ ID NO: 45080 - protein, 16 aa, Homo sapiens
  CDR3 for beta chain variable domain of TCR clone 22540 (TRBV7-9, TRBJ2-1)
CASSDVAGGSYNEQFF

SEQ ID NO: 45081 - protein, 14 aa, Homo sapiens
  CDR3 for alpha chain variable domain of TCR clone 22541 (TRAV12-3, TRAJ58)
CAMSTETSGSRSTF

SEQ ID NO: 45082 - protein, 12 aa, Homo sapiens
  CDR3 for beta chain variable domain of TCR clone 22541 (TRBV7-8, TRBJ2-7)
CASSLGDREQYF

SEQ ID NO: 45083 - protein, 16 aa, Homo sapiens
  CDR3 for alpha chain variable domain of TCR clone 22542 (TRAV12-3, TRAJ53)
CAMSPGSGGSNYKLTF

SEQ ID NO: 45084 - protein, 18 aa, Homo sapiens
  CDR3 for beta chain variable domain of TCR clone 22542 (TRBV11-2, TRBJ2-3)
CASSLGGASRGAPNTQYF

SEQ ID NO: 45085 - protein, 14 aa, Homo sapiens
  CDR3 for alpha chain variable domain of TCR clone 22543 (TRAV2, TRAJ9)
CAVEDRSGGFKTIF

SEQ ID NO: 45086 - protein, 12 aa, Homo sapiens
  CDR3 for beta chain variable domain of TCR clone 22543 (TRBV12-4, TRBJ2-4)
CASSSSGNMQYF

SEQ ID NO: 45087 - protein, 14 aa, Homo sapiens
  CDR3 for alpha chain variable domain of TCR clone 22544 (TRAV1-2, TRAJ16)
YAVNRFSDGQKLLF

SEQ ID NO: 45088 - protein, 15 aa, Homo sapiens
  CDR3 for beta chain variable domain of TCR clone 22544 (TRBV9, TRBJ1-6)
CASSVAGTGDSPLHF

SEQ ID NO: 45089 - protein, 13 aa, Homo sapiens
  CDR3 for alpha chain variable domain of TCR clone 22545 (TRAV16, TRAJ54)
CALMVQGAQKLVF

SEQ ID NO: 45090 - protein, 12 aa, Homo sapiens
  CDR3 for beta chain variable domain of TCR clone 22545 (TRBV18, TRBJ2-7)
CASSTATGEQYF

SEQ ID NO: 45091 - protein, 13 aa, Homo sapiens
  CDR3 for alpha chain variable domain of TCR clone 22546 (TRAV35, TRAJ44)
CAGLSGTAGKLTF

SEQ ID NO: 45092 - protein, 17 aa, Homo sapiens
  CDR3 for beta chain variable domain of TCR clone 22546 (TRBV7-8, TRBJ1-2)
CASSLRPLQGHLYGYTF

SEQ ID NO: 45093 - protein, 14 aa, Homo sapiens
  CDR3 for alpha chain variable domain of TCR clone 22547 (TRAV12-3, TRAJ29)
CNERRNSGNTPLVF

SEQ ID NO: 45094 - protein, 11 aa, Homo sapiens
  CDR3 for beta chain variable domain of TCR clone 22547 (TRBV7-3, TRBJ2-1)
CASSLNNEQFF

SEQ ID NO: 45095 - protein, 14 aa, Homo sapiens
  CDR3 for alpha chain variable domain of TCR clone 22548 (TRAV13-1, TRAJ35)
CAASKGGFGNVLHC

SEQ ID NO: 45096 - protein, 13 aa, Homo sapiens
  CDR3 for beta chain variable domain of TCR clone 22548 (TRBV7-3, TRBJ1-1)
CASSQDWVAEAFF

SEQ ID NO: 45097 - protein, 17 aa, Homo sapiens
  CDR3 for alpha chain variable domain of TCR clone 22549 (TRAV23/DV6, TRAJ57)
CAASSTLSQGGSEKLVF

SEQ ID NO: 45098 - protein, 14 aa, Homo sapiens
  CDR3 for beta chain variable domain of TCR clone 22549 (TRBV25-1, TRBJ1-1)
CDSTHLGGNTEAFF

SEQ ID NO: 45099 - protein, 12 aa, Homo sapiens
  CDR3 for alpha chain variable domain of TCR clone 22550 (TRAV19, TRAJ23)
CALRAWGGKLIF

SEQ ID NO: 45100 - protein, 13 aa, Homo sapiens
  CDR3 for beta chain variable domain of TCR clone 22550 (TRBV20-1, TRBJ1-1)
CSARGGGNTEAFF

SEQ ID NO: 45101 - protein, 14 aa, Homo sapiens
  CDR3 for alpha chain variable domain of TCR clone 22551 (TRAV2, TRAJ37)
CAVDFSSNTGKLIF

SEQ ID NO: 45102 - protein, 15 aa, Homo sapiens
  CDR3 for beta chain variable domain of TCR clone 22551 (TRBV20-1, TRBJ1-1)
CSASRGVTGNTEAFF

SEQ ID NO: 45103 - protein, 15 aa, Homo sapiens
  CDR3 for alpha chain variable domain of TCR clone 22552 (TRAV25, TRAJ52)
CAGRPGGTSYGKLTF

SEQ ID NO: 45104 - protein, 17 aa, Homo sapiens
  CDR3 for beta chain variable domain of TCR clone 22552 (TRBV7-8, TRBJ2-6)
CASSAGTGGSGANVLTF

SEQ ID NO: 45105 - protein, 13 aa, Homo sapiens
  CDR3 for alpha chain variable domain of TCR clone 22553 (TRAV8-3, TRAJ43)
CAVGPDNNNDMRF

SEQ ID NO: 45106 - protein, 12 aa, Homo sapiens
  CDR3 for beta chain variable domain of TCR clone 22553 (TRBV7-2, TRBJ1-6)
CASSLSSLPLHF

SEQ ID NO: 45107 - protein, 15 aa, Homo sapiens
  CDR3 for alpha chain variable domain of TCR clone 22554 (TRAV8-3, TRAJ45)
CASSYSGGGADGLTF

SEQ ID NO: 45108 - protein, 18 aa, Homo sapiens
  CDR3 for beta chain variable domain of TCR clone 22554 (TRBV18, TRBJ1-3)
CASSPRGGAGPSGNTIYL

SEQ ID NO: 45109 - protein, 14 aa, Homo sapiens
  CDR3 for alpha chain variable domain of TCR clone 22555 (TRAV13-1, TRAJ35)
CAASKGGFGNVLHC

SEQ ID NO: 45110 - protein, 13 aa, Homo sapiens
  CDR3 for beta chain variable domain of TCR clone 22555 (TRBV7-3, TRBJ1-1)
CGSSQDWGAEAFF

SEQ ID NO: 45111 - protein, 13 aa, Homo sapiens
  CDR3 for alpha chain variable domain of TCR clone 22556 (TRAV2, TRAJ40)
CAVVTSGTYKYIF

SEQ ID NO: 45112 - protein, 13 aa, Homo sapiens
  CDR3 for beta chain variable domain of TCR clone 22556 (TRBV19, TRBJ2-1)
CQSTFVLSGEQFF

SEQ ID NO: 45113 - protein, 13 aa, Homo sapiens
  CDR3 for alpha chain variable domain of TCR clone 22557 (TRAV13-1, TRAJ20)
CAARVSDDYKLSF

SEQ ID NO: 45114 - protein, 12 aa, Homo sapiens
  CDR3 for beta chain variable domain of TCR clone 22557 (TRBV20-1, TRBJ2-1)
CSARLGTDEQFF

SEQ ID NO: 45115 - protein, 18 aa, Homo sapiens
  CDR3 for alpha chain variable domain of TCR clone 22558 (TRAV29/DV5, TRAJ52)
CAAGFRGAGGTSYGKLTF

SEQ ID NO: 45116 - protein, 16 aa, Homo sapiens
  CDR3 for beta chain variable domain of TCR clone 22558 (TRBV7-3, TRBJ2-2)
CASSSKRGTLSGELFF

SEQ ID NO: 45117 - protein, 13 aa, Homo sapiens
  CDR3 for alpha chain variable domain of TCR clone 22559 (TRAV12-2, TRAJ50)
CAVIVTSYDKVIF

SEQ ID NO: 45118 - protein, 12 aa, Homo sapiens
  CDR3 for beta chain variable domain of TCR clone 22559 (TRBV20-1, TRBJ1-2)
CSAPGFNYGYTF

SEQ ID NO: 45119 - protein, 14 aa, Homo sapiens
  CDR3 for alpha chain variable domain of TCR clone 22560 (TRAV1-2, TRAJ16)
CAVNRFSDGQELLF

SEQ ID NO: 45120 - protein, 16 aa, Homo sapiens
  CDR3 for beta chain variable domain of TCR clone 22560 (TRBV7-3, TRBJ2-3)
CASSLSGYRPEDTQYF

SEQ ID NO: 45121 - protein, 16 aa, Homo sapiens
  CDR3 for alpha chain variable domain of TCR clone 22561 (TRAV3, TRAJ21)
CAVRDIERGNFSKFYF

SEQ ID NO: 45122 - protein, 13 aa, Homo sapiens
  CDR3 for beta chain variable domain of TCR clone 22561 (TRBV27, TRBJ2-7)
CASSLTTGYEQYF

SEQ ID NO: 45123 - protein, 16 aa, Homo sapiens
  CDR3 for alpha chain variable domain of TCR clone 22562 (TRAV12-2, TRAJ43)
CAGDDMRFGAGTRLTV

SEQ ID NO: 45124 - protein, 16 aa, Homo sapiens
  CDR3 for beta chain variable domain of TCR clone 22562 (TRBV2, TRBJ2-4)
CASSEAPGGEQNIQYF

SEQ ID NO: 45125 - protein, 12 aa, Homo sapiens
  CDR3 for alpha chain variable domain of TCR clone 22563 (TRAV13-1, TRAJ21)
CSAKEGFNKFYF

SEQ ID NO: 45126 - protein, 14 aa, Homo sapiens
  CDR3 for beta chain variable domain of TCR clone 22563 (TRBV5-4, TRBJ1-1)
CASSLDSRRDEAFF

SEQ ID NO: 45127 - protein, 12 aa, Homo sapiens
  CDR3 for alpha chain variable domain of TCR clone 22564 (TRAV13-1, TRAJ36)
WRGGAGANNLFF

SEQ ID NO: 45128 - protein, 16 aa, Homo sapiens
  CDR3 for beta chain variable domain of TCR clone 22564 (TRBV7-9, TRBJ2-5)
CASRLKIGTRKETQYF

SEQ ID NO: 45129 - protein, 14 aa, Homo sapiens
  CDR3 for alpha chain variable domain of TCR clone 22565 (TRAV13-1, TRAJ35)
CAASKGGFGNVLHC

SEQ ID NO: 45130 - protein, 15 aa, Homo sapiens
  CDR3 for beta chain variable domain of TCR clone 22565 (TRBV7-3, TRBJ1-1)
CASSQDWGAEAFLDK

SEQ ID NO: 45131 - protein, 15 aa, Homo sapiens
  CDR3 for alpha chain variable domain of TCR clone 22566 (TRAV25, TRAJ52)
CAGTSGGTSYGKLTF

SEQ ID NO: 45132 - protein, 16 aa, Homo sapiens
  CDR3 for beta chain variable domain of TCR clone 22566 (TRBV15, TRBJ1-2)
CATSRGPRTGGGGYSF

SEQ ID NO: 45133 - protein, 18 aa, Homo sapiens
  CDR3 for alpha chain variable domain of TCR clone 22567 (TRAV12-3, TRAJ52)
CAMSGGGAGGTSYGKLTF

SEQ ID NO: 45134 - protein, 15 aa, Homo sapiens
  CDR3 for beta chain variable domain of TCR clone 22567 (TRBV27, TRBJ1-6)
CASSFDRGLGSPLHF

SEQ ID NO: 45135 - protein, 13 aa, Homo sapiens
  CDR3 for alpha chain variable domain of TCR clone 22568 (TRAV2, TRAJ15)
CAVASQAGTALIF

SEQ ID NO: 45136 - protein, 14 aa, Homo sapiens
  CDR3 for beta chain variable domain of TCR clone 22568 (TRBV7-2, TRBJ2-7)
CASSPKTSFYEQYF

SEQ ID NO: 45137 - protein, 13 aa, Homo sapiens
  CDR3 for alpha chain variable domain of TCR clone 22569 (TRAV3, TRAJ21)
CAVREPDFNKFYF

SEQ ID NO: 45138 - protein, 13 aa, Homo sapiens
  CDR3 for beta chain variable domain of TCR clone 22569 (TRBV7-3, TRBJ1-1)
CASSQDWGAEAFF

SEQ ID NO: 45139 - protein, 10 aa, Homo sapiens
  CDR3 for alpha chain variable domain of TCR clone 22570 (TRAV23/DV6, TRAJ43)
CAAAVAALEQ

SEQ ID NO: 45140 - protein, 13 aa, Homo sapiens
  CDR3 for beta chain variable domain of TCR clone 22570 (TRBV12-4, TRBJ1-2)
CANSLRQGKGYTF

SEQ ID NO: 45141 - protein, 13 aa, Homo sapiens
  CDR3 for alpha chain variable domain of TCR clone 22571 (TRAV25, TRAJ10)
CAGRTGGGNKLTF

SEQ ID NO: 45142 - protein, 15 aa, Homo sapiens
  CDR3 for beta chain variable domain of TCR clone 22571 (TRBV19, TRBJ2-1)
CASSSPGVPLDEQFL

SEQ ID NO: 45143 - protein, 16 aa, Homo sapiens
  CDR3 for alpha chain variable domain of TCR clone 22572 (TRAV8-4, TRAJ52)
CAVRKGGGTSYGKLTF

SEQ ID NO: 45144 - protein, 14 aa, Homo sapiens
  CDR3 for beta chain variable domain of TCR clone 22572 (TRBV5-1, TRBJ2-3)
CASKQGGPTDTQYF

SEQ ID NO: 45145 - protein, 17 aa, Homo sapiens
  CDR3 for alpha chain variable domain of TCR clone 22573 (TRAV3, TRAJ6)
CAVRDGPRAGGSYIPTF

SEQ ID NO: 45146 - protein, 15 aa, Homo sapiens
  CDR3 for beta chain variable domain of TCR clone 22573 (TRBV2, TRBJ2-7)
CASSEGLARSYEQYF

SEQ ID NO: 45147 - protein, 13 aa, Homo sapiens
  CDR3 for alpha chain variable domain of TCR clone 22574 (TRAV30, TRAJ34)
CGTVGYNTDKLVF

SEQ ID NO: 45148 - protein, 16 aa, Homo sapiens
  CDR3 for beta chain variable domain of TCR clone 22574 (TRBV7-9, TRBJ1-2)
CASSLGFSSGEDGYTF

SEQ ID NO: 45149 - protein, 15 aa, Homo sapiens
  CDR3 for alpha chain variable domain of TCR clone 22575 (TRAV27, TRAJ38)
CAARRNAGNNRKLIW

SEQ ID NO: 45150 - protein, 13 aa, Homo sapiens
  CDR3 for beta chain variable domain of TCR clone 22575 (TRBV12-5, TRBJ2-3)
CASGDRQSNTQYF

SEQ ID NO: 45151 - protein, 11 aa, Homo sapiens
  CDR3 for alpha chain variable domain of TCR clone 22576 (TRAV1-2, TRAJ40)
CAVPGTYNYIF

SEQ ID NO: 45152 - protein, 16 aa, Homo sapiens
  CDR3 for beta chain variable domain of TCR clone 22576 (TRBV29-1, TRBJ2-7)
CSVEVVGTSGSYEQYF

SEQ ID NO: 45153 - protein, 16 aa, Homo sapiens
  CDR3 for alpha chain variable domain of TCR clone 22577 (TRAV1-2, TRAJ10)
CAVRGVLTGGGNKLTF

SEQ ID NO: 45154 - protein, 12 aa, Homo sapiens
  CDR3 for beta chain variable domain of TCR clone 22577 (TRBV7-8, TRBJ2-7)
CARSLGDREQYF

SEQ ID NO: 45155 - protein, 16 aa, Homo sapiens
  CDR3 for alpha chain variable domain of TCR clone 22578 (TRAV3, TRAJ6)
CAVRDGVGRRKLHTYI

SEQ ID NO: 45156 - protein, 15 aa, Homo sapiens
  CDR3 for beta chain variable domain of TCR clone 22578 (TRBV9, TRBJ2-1)
CASSLAGSSYNEQFF

SEQ ID NO: 45157 - protein, 14 aa, Homo sapiens
  CDR3 for alpha chain variable domain of TCR clone 22579 (TRAV12-1, TRAJ12)
CVVTRMDSSYKLIF

SEQ ID NO: 45158 - protein, 13 aa, Homo sapiens
  CDR3 for beta chain variable domain of TCR clone 22579 (TRBV20-1, TRBJ1-1)
CSARGGGNTGAFF

SEQ ID NO: 45159 - protein, 13 aa, Homo sapiens
  CDR3 for alpha chain variable domain of TCR clone 22580 (TRAV21, TRAJ27)
CAARPGNAGKSTF

SEQ ID NO: 45160 - protein, 14 aa, Homo sapiens
  CDR3 for beta chain variable domain of TCR clone 22580 (TRBV7-6, TRBJ2-3)
CASSLGTVTDTQDF

SEQ ID NO: 45161 - protein, 14 aa, Homo sapiens
  CDR3 for alpha chain variable domain of TCR clone 22581 (TRAV13-1, TRAJ10)
CAAKEPGGGNKLTF

SEQ ID NO: 45162 - protein, 12 aa, Homo sapiens
  CDR3 for beta chain variable domain of TCR clone 22581 (TRBV7-8, TRBJ2-7)
CASSLGDREQYF

SEQ ID NO: 45163 - protein, 10 aa, Homo sapiens
  CDR3 for alpha chain variable domain of TCR clone 22582 (TRAV23/DV6, TRAJ31)
CARGGARLMF

SEQ ID NO: 45164 - protein, 14 aa, Homo sapiens
  CDR3 for beta chain variable domain of TCR clone 22582 (TRBV7-8, TRBJ1-2)
CASSPDSLPYGYTF

SEQ ID NO: 45165 - protein, 13 aa, Homo sapiens
  CDR3 for alpha chain variable domain of TCR clone 22583 (TRAV26-1, )
CIVSHRVEGFWNQ

SEQ ID NO: 45166 - protein, 14 aa, Homo sapiens
  CDR3 for beta chain variable domain of TCR clone 22583 (TRBV20-1, TRBJ2-7)
CSAWTALSPYEQYF

SEQ ID NO: 45167 - protein, 15 aa, Homo sapiens
  CDR3 for alpha chain variable domain of TCR clone 22584 (TRAV8-3, TRAJ27)
CAAGPSKTNAGKSTF

SEQ ID NO: 45168 - protein, 15 aa, Homo sapiens
  CDR3 for beta chain variable domain of TCR clone 22584 (TRBV7-2, TRBJ2-1)
CASSSGLAGGNEQFF

SEQ ID NO: 45169 - protein, 12 aa, Homo sapiens
  CDR3 for alpha chain variable domain of TCR clone 22585 (TRAV12-3, TRAJ17)
CAMTLTGNKLTF

SEQ ID NO: 45170 - protein, 12 aa, Homo sapiens
  CDR3 for beta chain variable domain of TCR clone 22585 (TRBV7-9, TRBJ2-7)
CASSFGSYEQYF

SEQ ID NO: 45171 - protein, 14 aa, Homo sapiens
  CDR3 for alpha chain variable domain of TCR clone 22586 (TRAV17, TRAJ39)
CATDPVCAGNMLTF

SEQ ID NO: 45172 - protein, 15 aa, Homo sapiens
  CDR3 for beta chain variable domain of TCR clone 22586 (TRBV13, TRBJ1-5)
CASSFGQGGVQPQHF

SEQ ID NO: 45173 - protein, 14 aa, Homo sapiens
  CDR3 for alpha chain variable domain of TCR clone 22587 (TRAV12-2, TRAJ40)
CAVKIPTGTYKYIF

SEQ ID NO: 45174 - protein, 14 aa, Homo sapiens
  CDR3 for beta chain variable domain of TCR clone 22587 (TRBV20-1, TRBJ1-1)
CSAQTRIGGTEAFF

SEQ ID NO: 45175 - protein, 23 aa, Homo sapiens
  CDR3 for alpha chain variable domain of TCR clone 22588 (TRAV26-1, )
CIADNAGKNHIQNPDPAVYQLRD

SEQ ID NO: 45176 - protein, 13 aa, Homo sapiens
  CDR3 for beta chain variable domain of TCR clone 22588 (TRBV20-1, TRBJ1-1)
CSARGGGNTEAFF

SEQ ID NO: 45177 - protein, 14 aa, Homo sapiens
  CDR3 for alpha chain variable domain of TCR clone 22589 (TRAV35, TRAJ33)
CAGSSQDSNYHLIW

SEQ ID NO: 45178 - protein, 15 aa, Homo sapiens
  CDR3 for beta chain variable domain of TCR clone 22589 (TRBV20-1, TRBJ2-7)
CSAESGTSGAYEQYF

SEQ ID NO: 45179 - protein, 13 aa, Homo sapiens
  CDR3 for alpha chain variable domain of TCR clone 22590 (TRAV3, TRAJ20)
CAVRPLNDYKPSF

SEQ ID NO: 45180 - protein, 12 aa, Homo sapiens
  CDR3 for beta chain variable domain of TCR clone 22590 (TRBV6-1, TRBJ2-1)
CATYGLNNEQFF

SEQ ID NO: 45181 - protein, 11 aa, Homo sapiens
  CDR3 for alpha chain variable domain of TCR clone 22591 (TRAV3, TRAJ21)
RAVGNFNKLYF

SEQ ID NO: 45182 - protein, 16 aa, Homo sapiens
  CDR3 for beta chain variable domain of TCR clone 22591 (TRBV19, TRBJ2-1)
CASSKAGPSSYNEQFF

SEQ ID NO: 45183 - protein, 15 aa, Homo sapiens
  CDR3 for alpha chain variable domain of TCR clone 22592 (TRAV8-6, TRAJ49)
CAVSEGPDTGNQFYF

SEQ ID NO: 45184 - protein, 13 aa, Homo sapiens
  CDR3 for beta chain variable domain of TCR clone 22592 (TRBV20-1, TRBJ2-7)
CSASRSSSYEQYF

SEQ ID NO: 45185 - protein, 14 aa, Homo sapiens
  CDR3 for alpha chain variable domain of TCR clone 22593 (TRAV12-2, TRAJ13)
CAVKKTGGYQKVSF

SEQ ID NO: 45186 - protein, 15 aa, Homo sapiens
  CDR3 for beta chain variable domain of TCR clone 22593 (TRBV27, TRBJ2-1)
CASSNGGGSSNEQFF

SEQ ID NO: 45187 - protein, 16 aa, Homo sapiens
  CDR3 for alpha chain variable domain of TCR clone 22594 (TRAV38-1, TRAJ32)
CASMKGGGGATNKLIF

SEQ ID NO: 45188 - protein, 13 aa, Homo sapiens
  CDR3 for beta chain variable domain of TCR clone 22594 (TRBV20-1, TRBJ2-5)
CSAREAFQETQYF

SEQ ID NO: 45189 - protein, 12 aa, Homo sapiens
  CDR3 for alpha chain variable domain of TCR clone 22595 (TRAV4, TRAJ6)
CLAPGGSYIPTF

SEQ ID NO: 45190 - protein, 14 aa, Homo sapiens
  CDR3 for beta chain variable domain of TCR clone 22595 (TRBV20-1, TRBJ2-3)
RTSGGPGTTDTQYF

SEQ ID NO: 45191 - protein, 14 aa, Homo sapiens
  CDR3 for alpha chain variable domain of TCR clone 22596 (TRAV17, TRAJ16)
CATADLSDGQKLLF

SEQ ID NO: 45192 - protein, 12 aa, Homo sapiens
  CDR3 for beta chain variable domain of TCR clone 22596 (TRBV24-1, TRBJ1-1)
CATLYPDTEAFF

SEQ ID NO: 45193 - protein, 12 aa, Homo sapiens
  CDR3 for alpha chain variable domain of TCR clone 22597 (TRAV12-3, TRAJ17)
CAMTLTGNKLTF

SEQ ID NO: 45194 - protein, 15 aa, Homo sapiens
  CDR3 for beta chain variable domain of TCR clone 22597 (TRBV28, TRBJ2-5)
CASSPPWSYQETQYF

SEQ ID NO: 45195 - protein, 12 aa, Homo sapiens
  CDR3 for alpha chain variable domain of TCR clone 22598 (TRAV36/DV7, TRAJ54)
CAVVRGAQKLVF

SEQ ID NO: 45196 - protein, 14 aa, Homo sapiens
  CDR3 for beta chain variable domain of TCR clone 22598 (TRBV7-3, TRBJ1-1)
CASRLKGGNTEAFF

SEQ ID NO: 45197 - protein, 14 aa, Homo sapiens
  CDR3 for alpha chain variable domain of TCR clone 22599 (TRAV38-1, TRAJ45)
CSYYSGGGADGLTF

SEQ ID NO: 45198 - protein, 20 aa, Homo sapiens
  CDR3 for beta chain variable domain of TCR clone 22599 (TRBV28, TRBJ2-1)
CASTPIGRSPGLAGGNEQFF

SEQ ID NO: 45199 - protein, 11 aa, Homo sapiens
  CDR3 for alpha chain variable domain of TCR clone 22600 (TRAV2, TRAJ13)
CASGGHQKVTF

SEQ ID NO: 45200 - protein, 16 aa, Homo sapiens
  CDR3 for beta chain variable domain of TCR clone 22600 (TRBV6-1, TRBJ2-5)
CASSETLDRGAETQYF

SEQ ID NO: 45201 - protein, 12 aa, Homo sapiens
  CDR3 for alpha chain variable domain of TCR clone 22601 (TRAV12-3, TRAJ4)
CAMTGAGTRLAV

SEQ ID NO: 45202 - protein, 14 aa, Homo sapiens
  CDR3 for beta chain variable domain of TCR clone 22601 (TRBV10-3, TRBJ1-1)
CASSDTDRGVEAFF

SEQ ID NO: 45203 - protein, 14 aa, Homo sapiens
  CDR3 for alpha chain variable domain of TCR clone 22602 (TRAV13-2, TRAJ17)
CAENSKAAGNKLTF

SEQ ID NO: 45204 - protein, 11 aa, Homo sapiens
  CDR3 for beta chain variable domain of TCR clone 22602 (TRBV6-3, TRBJ2-3)
CATGQADTQYL

SEQ ID NO: 45205 - protein, 12 aa, Homo sapiens
  CDR3 for alpha chain variable domain of TCR clone 22603 (TRAV21, TRAJ31)
CVLAGNNARLLF

SEQ ID NO: 45206 - protein, 16 aa, Homo sapiens
  CDR3 for beta chain variable domain of TCR clone 22603 (TRBV27, TRBJ2-5)
CASSFGPGGTKETQYF

SEQ ID NO: 45207 - protein, 14 aa, Homo sapiens
  CDR3 for alpha chain variable domain of TCR clone 22604 (TRAV17, TRAJ57)
CATDPQGGSEKLVF

SEQ ID NO: 45208 - protein, 15 aa, Homo sapiens
  CDR3 for beta chain variable domain of TCR clone 22604 (TRBV7-9, TRBJ1-6)
CASSSPGRGNSPLHF

SEQ ID NO: 45209 - protein, 15 aa, Homo sapiens
  CDR3 for alpha chain variable domain of TCR clone 22605 (TRAV26-1, TRAJ44)
CIVRANTGTASKLTF

SEQ ID NO: 45210 - protein, 16 aa, Homo sapiens
  CDR3 for beta chain variable domain of TCR clone 22605 (TRBV7-7, TRBJ2-1)
WASSLASGTSYNEQFF

SEQ ID NO: 45211 - protein, 15 aa, Homo sapiens
  CDR3 for alpha chain variable domain of TCR clone 22606 (TRAV26-1, TRAJ22)
CIVRVSFWFCKATDL

SEQ ID NO: 45212 - protein, 13 aa, Homo sapiens
  CDR3 for beta chain variable domain of TCR clone 22606 (TRBV7-9, TRBJ1-2)
YASSLKQNYGYTF

SEQ ID NO: 45213 - protein, 13 aa, Homo sapiens
  CDR3 for alpha chain variable domain of TCR clone 22607 (TRAV2, TRAJ21)
CAVEDLNFNKFYF

SEQ ID NO: 45214 - protein, 15 aa, Homo sapiens
  CDR3 for beta chain variable domain of TCR clone 22607 (TRBV28, TRBJ2-5)
CASSPGQGSIGTQYF

SEQ ID NO: 45215 - protein, 10 aa, Homo sapiens
  CDR3 for alpha chain variable domain of TCR clone 22608 (TRAV12-2, TRAJ53)
ILSSNYKLTF

SEQ ID NO: 45216 - protein, 13 aa, Homo sapiens
  CDR3 for beta chain variable domain of TCR clone 22608 (TRBV7-7, TRBJ2-3)
CASSLSRADTQYF

SEQ ID NO: 45217 - protein, 15 aa, Homo sapiens
  CDR3 for alpha chain variable domain of TCR clone 22609 (TRAV12-1, TRAJ42)
CVVTRDGGSQGNLIF

SEQ ID NO: 45218 - protein, 14 aa, Homo sapiens
  CDR3 for beta chain variable domain of TCR clone 22609 (TRBV11-2, TRBJ2-3)
CASSLGGGANTRYF

SEQ ID NO: 45219 - protein, 11 aa, Homo sapiens
  CDR3 for alpha chain variable domain of TCR clone 22610 (TRAV12-2, TRAJ31)
CAILNNARLMF

SEQ ID NO: 45220 - protein, 16 aa, Homo sapiens
  CDR3 for beta chain variable domain of TCR clone 22610 (TRBV13, TRBJ2-2)
CASSPRTGEHIGELFF

SEQ ID NO: 45221 - protein, 11 aa, Homo sapiens
  CDR3 for alpha chain variable domain of TCR clone 22611 (TRAV2, TRAJ33)
CAVESNYQLIW

SEQ ID NO: 45222 - protein, 18 aa, Homo sapiens
  CDR3 for beta chain variable domain of TCR clone 22611 (TRBV11-2, TRBJ2-3)
CASSLGGASRGAPNTQYF

SEQ ID NO: 45223 - protein, 15 aa, Homo sapiens
  CDR3 for alpha chain variable domain of TCR clone 22612 (TRAV12-1, TRAJ44)
CVVFVNTGTASKLTF

SEQ ID NO: 45224 - protein, 15 aa, Homo sapiens
  CDR3 for beta chain variable domain of TCR clone 22612 (TRBV11-2, TRBJ2-2)
CASSSDRVNAGELFF

SEQ ID NO: 45225 - protein, 20 aa, Homo sapiens
  CDR3 for alpha chain variable domain of TCR clone 22613 (TRAV12-1, TRAJ42)
SSVIQPPTSVKGGSQGNLIF

SEQ ID NO: 45226 - protein, 18 aa, Homo sapiens
  CDR3 for beta chain variable domain of TCR clone 22613 (TRBV11-2, TRBJ2-3)
CASSLGGAARGAPNTQYF

SEQ ID NO: 45227 - protein, 14 aa, Homo sapiens
  CDR3 for alpha chain variable domain of TCR clone 22614 (TRAV1-2, TRAJ16)
CAVNRFSDGQKLLF

SEQ ID NO: 45228 - protein, 14 aa, Homo sapiens
  CDR3 for beta chain variable domain of TCR clone 22614 (TRBV19, TRBJ2-7)
CASTVQGRPYEQYF

SEQ ID NO: 45229 - protein, 14 aa, Homo sapiens
  CDR3 for alpha chain variable domain of TCR clone 22615 (TRAV8-3, TRAJ6)
CTVGASGGSYIPTF

SEQ ID NO: 45230 - protein, 17 aa, Homo sapiens
  CDR3 for beta chain variable domain of TCR clone 22615 (TRBV18, TRBJ2-2)
CASSPSDPWQNTGELFF

SEQ ID NO: 45231 - protein, 13 aa, Homo sapiens
  CDR3 for alpha chain variable domain of TCR clone 22616 (TRAV8-3, TRAJ28)
CAVGAVGSYRLTF

SEQ ID NO: 45232 - protein, 14 aa, Homo sapiens
  CDR3 for beta chain variable domain of TCR clone 22616 (TRBV7-2, TRBJ2-7)
CASRSQGAAYEQYF

SEQ ID NO: 45233 - protein, 17 aa, Homo sapiens
  CDR3 for alpha chain variable domain of TCR clone 22617 (TRAV3, TRAJ12)
CAVRDGGRMDSSYKLIF

SEQ ID NO: 45234 - protein, 12 aa, Homo sapiens
  CDR3 for beta chain variable domain of TCR clone 22617 (TRBV5-1, TRBJ1-2)
CASSQDTYGYTF

SEQ ID NO: 45235 - protein, 15 aa, Homo sapiens
  CDR3 for alpha chain variable domain of TCR clone 22618 (TRAV8-3, TRAJ11)
CAAGLLNSGYSTLTF

SEQ ID NO: 45236 - protein, 16 aa, Homo sapiens
  CDR3 for beta chain variable domain of TCR clone 22618 (TRBV7-9, TRBJ1-2)
CASSLGFSSGEDGYTF

SEQ ID NO: 45237 - protein, 14 aa, Homo sapiens
  CDR3 for alpha chain variable domain of TCR clone 22619 (TRAV12-2, TRAJ13)
CAVKKTGGYQKVTF

SEQ ID NO: 45238 - protein, 11 aa, Homo sapiens
  CDR3 for beta chain variable domain of TCR clone 22619 (TRBV19, TRBJ1-1)
CASSIGSEAFF

SEQ ID NO: 45239 - protein, 14 aa, Homo sapiens
  CDR3 for alpha chain variable domain of TCR clone 22620 (TRAV1-2, TRAJ8)
CAVRGDTGFQKLVF

SEQ ID NO: 45240 - protein, 17 aa, Homo sapiens
  CDR3 for beta chain variable domain of TCR clone 22620 (TRBV11-2, TRBJ2-1)
CASSLYPPGVEYNEQFF

SEQ ID NO: 45241 - protein, 15 aa, Homo sapiens
  CDR3 for alpha chain variable domain of TCR clone 22621 (TRAV12-1, TRAJ44)
CVVFVNTGTASKLTF

SEQ ID NO: 45242 - protein, 17 aa, Homo sapiens
  CDR3 for beta chain variable domain of TCR clone 22621 (TRBV7-8, TRBJ2-6)
CASSAGTGGAGANILTF

SEQ ID NO: 45243 - protein, 14 aa, Homo sapiens
  CDR3 for alpha chain variable domain of TCR clone 22622 (TRAV13-1, TRAJ35)
CAASKGGFGNVLHC

SEQ ID NO: 45244 - protein, 14 aa, Homo sapiens
  CDR3 for beta chain variable domain of TCR clone 22622 (TRBV4-1, TRBJ2-2)
CASSQAVNTGELFF

SEQ ID NO: 45245 - protein, 17 aa, Homo sapiens
  CDR3 for alpha chain variable domain of TCR clone 22623 (TRAV13-1, TRAJ52)
CAASSGAGGTSYGKLTF

SEQ ID NO: 45246 - protein, 15 aa, Homo sapiens
  CDR3 for beta chain variable domain of TCR clone 22623 (TRBV2, TRBJ2-1)
RASSELAGSYNEQFF

SEQ ID NO: 45247 - protein, 19 aa, Homo sapiens
  CDR3 for alpha chain variable domain of TCR clone 22624 (TRAV26-1, TRAJ50)
CCVLLHRQNPKTSYDKVIF

SEQ ID NO: 45248 - protein, 17 aa, Homo sapiens
  CDR3 for beta chain variable domain of TCR clone 22624 (TRBV4-1, TRBJ1-4)
CASSQEGPRGVGEKLFF

SEQ ID NO: 45249 - protein, 14 aa, Homo sapiens
  CDR3 for alpha chain variable domain of TCR clone 22625 (TRAV12-2, TRAJ45)
CALPERGGADGLTF

SEQ ID NO: 45250 - protein, 14 aa, Homo sapiens
  CDR3 for beta chain variable domain of TCR clone 22625 (TRBV18, TRBJ1-5)
CASSPGNSNQTQHF

SEQ ID NO: 45251 - protein, 12 aa, Homo sapiens
  CDR3 for alpha chain variable domain of TCR clone 22626 (TRAV21, TRAJ11)
CAATSGYSTLTF

SEQ ID NO: 45252 - protein, 14 aa, Homo sapiens
  CDR3 for beta chain variable domain of TCR clone 22626 (TRBV20-1, TRBJ2-7)
CSAPELAGVGKQYF

SEQ ID NO: 45253 - protein, 14 aa, Homo sapiens
  CDR3 for alpha chain variable domain of TCR clone 22627 (TRAV39, TRAJ29)
CAVPRNSGNTPLVF

SEQ ID NO: 45254 - protein, 12 aa, Homo sapiens
  CDR3 for beta chain variable domain of TCR clone 22627 (TRBV10-2, TRBJ2-7)
CASSGTGYEQYF

SEQ ID NO: 45255 - protein, 13 aa, Homo sapiens
  CDR3 for alpha chain variable domain of TCR clone 22628 (TRAV12-1, TRAJ16)
CVVNEPDGQKLLF

SEQ ID NO: 45256 - protein, 13 aa, Homo sapiens
  CDR3 for beta chain variable domain of TCR clone 22628 (TRBV2, TRBJ1-1)
CARNPTGGFHAFF

SEQ ID NO: 45257 - protein, 15 aa, Homo sapiens
  CDR3 for alpha chain variable domain of TCR clone 22629 (TRAV34, TRAJ38)
CGADFTPGNNRKLIW

SEQ ID NO: 45258 - protein, 15 aa, Homo sapiens
  CDR3 for beta chain variable domain of TCR clone 22629 (TRBV7-3, TRBJ2-2)
CASSETGQGTGELFF

SEQ ID NO: 45259 - protein, 11 aa, Homo sapiens
  CDR3 for alpha chain variable domain of TCR clone 22630 (TRAV4, TRAJ23)
CLVAPGGKPIF

SEQ ID NO: 45260 - protein, 15 aa, Homo sapiens
  CDR3 for beta chain variable domain of TCR clone 22630 (TRBV7-2, TRBJ2-1)
CASSFQADEYNEQFF

SEQ ID NO: 45261 - protein, 13 aa, Homo sapiens
  CDR3 for alpha chain variable domain of TCR clone 22631 (TRAV8-6, TRAJ49)
CAVITNTGNQFYF

SEQ ID NO: 45262 - protein, 14 aa, Homo sapiens
  CDR3 for beta chain variable domain of TCR clone 22631 (TRBV5-1, TRBJ2-7)
CASSRGESLYEQYL

SEQ ID NO: 45263 - protein, 18 aa, Homo sapiens
  CDR3 for alpha chain variable domain of TCR clone 22632 (TRAV13-1, TRAJ52)
CAAKNPNAGGTSYGKLTF

SEQ ID NO: 45264 - protein, 14 aa, Homo sapiens
  CDR3 for beta chain variable domain of TCR clone 22632 (TRBV7-6, TRBJ2-3)
CASSLGTVTDTQYF

SEQ ID NO: 45265 - protein, 11 aa, Homo sapiens
  CDR3 for alpha chain variable domain of TCR clone 22633 (TRAV21, TRAJ48)
CAVDGNGKLTF

SEQ ID NO: 45266 - protein, 16 aa, Homo sapiens
  CDR3 for beta chain variable domain of TCR clone 22633 (TRBV12-4, TRBJ1-5)
CASSSGPRGSNQPQHF

SEQ ID NO: 45267 - protein, 14 aa, Homo sapiens
  CDR3 for alpha chain variable domain of TCR clone 22634 (TRAV12-2, TRAJ44)
CAVNPAGTASKPTF

SEQ ID NO: 45268 - protein, 13 aa, Homo sapiens
  CDR3 for beta chain variable domain of TCR clone 22634 (TRBV20-1, TRBJ1-6)
CSAPLGVGSPLHF

SEQ ID NO: 45269 - protein, 13 aa, Homo sapiens
  CDR3 for alpha chain variable domain of TCR clone 22635 (TRAV21, TRAJ20)
CAVGLRVDYKLSF

SEQ ID NO: 45270 - protein, 15 aa, Homo sapiens
  CDR3 for beta chain variable domain of TCR clone 22635 (TRBV29-1, TRBJ2-1)
CSVPTGLELYNEQFF

SEQ ID NO: 45271 - protein, 14 aa, Homo sapiens
  CDR3 for alpha chain variable domain of TCR clone 22636 (TRAV26-1, TRAJ34)
CIVRVAYNTDKLIF

SEQ ID NO: 45272 - protein, 15 aa, Homo sapiens
  CDR3 for beta chain variable domain of TCR clone 22636 (TRBV20-1, TRBJ2-7)
GSARVPAAYFYEQYF

SEQ ID NO: 45273 - protein, 15 aa, Homo sapiens
  CDR3 for alpha chain variable domain of TCR clone 22637 (TRAV3, TRAJ5)
CAVRDLDTGRRALTF

SEQ ID NO: 45274 - protein, 13 aa, Homo sapiens
  CDR3 for beta chain variable domain of TCR clone 22637 (TRBV12-4, TRBJ2-7)
CASSPTETYEHYF

SEQ ID NO: 45275 - protein, 14 aa, Homo sapiens
  CDR3 for alpha chain variable domain of TCR clone 22638 (TRAV12-3, TRAJ10)
SHLPLTGGGNKLTF

SEQ ID NO: 45276 - protein, 14 aa, Homo sapiens
  CDR3 for beta chain variable domain of TCR clone 22638 (TRBV6-1, TRBJ1-3)
CASMQGGGGNTIYF

SEQ ID NO: 45277 - protein, 17 aa, Homo sapiens
  CDR3 for alpha chain variable domain of TCR clone 22639 (TRAV23/DV6, TRAJ53)
CATSKLGSGGSNYKLTF

SEQ ID NO: 45278 - protein, 14 aa, Homo sapiens
  CDR3 for beta chain variable domain of TCR clone 22639 (TRBV7-9, TRBJ2-3)
CASSLEQGTNTQYF

SEQ ID NO: 45279 - protein, 14 aa, Homo sapiens
  CDR3 for alpha chain variable domain of TCR clone 22640 (TRAV26-1, TRAJ39)
CIVRGSRAGNMLTF

SEQ ID NO: 45280 - protein, 15 aa, Homo sapiens
  CDR3 for beta chain variable domain of TCR clone 22640 (TRBV7-9, TRBJ1-5)
CASSQGHQPNQPQHF

SEQ ID NO: 45281 - protein, 23 aa, Homo sapiens
  CDR3 for alpha chain variable domain of TCR clone 22641 (TRAV1-1, TRAJ11)
LLQELQMKDSASYFCAGYSTLTF

SEQ ID NO: 45282 - protein, 15 aa, Homo sapiens
  CDR3 for beta chain variable domain of TCR clone 22641 (TRBV6-5, TRBJ2-1)
CASRGDFDSYNGQFF

SEQ ID NO: 45283 - protein, 13 aa, Homo sapiens
  CDR3 for alpha chain variable domain of TCR clone 22642 (TRAV13-1, TRAJ21)
CAASIYNFNKFYF

SEQ ID NO: 45284 - protein, 15 aa, Homo sapiens
  CDR3 for beta chain variable domain of TCR clone 22642 (TRBV10-2, TRBJ2-6)
CASSEQGTGANVLTF

SEQ ID NO: 45285 - protein, 14 aa, Homo sapiens
  CDR3 for alpha chain variable domain of TCR clone 22643 (TRAV12-3, TRAJ54)
CAMRGIQGAQKLVF

SEQ ID NO: 45286 - protein, 14 aa, Homo sapiens
  CDR3 for beta chain variable domain of TCR clone 22643 (TRBV5-4, TRBJ1-1)
CASSLDSRRDEAFF

SEQ ID NO: 45287 - protein, 16 aa, Homo sapiens
  CDR3 for alpha chain variable domain of TCR clone 22644 (TRAV3, TRAJ37)
CAVRGKGFGNTGKLIF

SEQ ID NO: 45288 - protein, 13 aa, Homo sapiens
  CDR3 for beta chain variable domain of TCR clone 22644 (TRBV14, TRBJ2-7)
CASSQDRRYEQYF

SEQ ID NO: 45289 - protein, 15 aa, Homo sapiens
  CDR3 for alpha chain variable domain of TCR clone 22645 (TRAV26-1, TRAJ29)
CIVRVEGSGNTPLVF

SEQ ID NO: 45290 - protein, 14 aa, Homo sapiens
  CDR3 for beta chain variable domain of TCR clone 22645 (TRBV18, TRBJ2-5)
CASSPGLSQETQYF

SEQ ID NO: 45291 - protein, 13 aa, Homo sapiens
  CDR3 for alpha chain variable domain of TCR clone 22646 (TRAV12-3, TRAJ33)
CAMSVNSNYQSIW

SEQ ID NO: 45292 - protein, 13 aa, Homo sapiens
  CDR3 for beta chain variable domain of TCR clone 22646 (TRBV7-2, TRBJ2-2)
CASSLAVTGELFF

SEQ ID NO: 45293 - protein, 15 aa, Homo sapiens
  CDR3 for alpha chain variable domain of TCR clone 22647 (TRAV17, TRAJ57)
CATGPSHGGSEKLVF

SEQ ID NO: 45294 - protein, 14 aa, Homo sapiens
  CDR3 for beta chain variable domain of TCR clone 22647 (TRBV12-5, TRBJ2-5)
CASGSRTHQETQYF

SEQ ID NO: 45295 - protein, 11 aa, Homo sapiens
  CDR3 for alpha chain variable domain of TCR clone 22648 (TRAV3, TRAJ21)
CAVGNFNKFYF

SEQ ID NO: 45296 - protein, 16 aa, Homo sapiens
  CDR3 for beta chain variable domain of TCR clone 22648 (TRBV19, TRBJ2-1)
CASSMAGPSSYNEQFF

SEQ ID NO: 45297 - protein, 13 aa, Homo sapiens
  CDR3 for alpha chain variable domain of TCR clone 22649 (TRAV2, TRAJ40)
CAVVTSGTYKYIF

SEQ ID NO: 45298 - protein, 19 aa, Homo sapiens
  CDR3 for beta chain variable domain of TCR clone 22649 (TRBV18, TRBJ1-3)
CASSPLSRTGMSSGNTIYF

SEQ ID NO: 45299 - protein, 18 aa, Homo sapiens
  CDR3 for alpha chain variable domain of TCR clone 22650 (TRAV17, TRAJ45)
CATSLDLYSGGGADGLTF

SEQ ID NO: 45300 - protein, 15 aa, Homo sapiens
  CDR3 for beta chain variable domain of TCR clone 22650 (TRBV7-2, TRBJ2-7)
CASSTPGLTRGEQYF

SEQ ID NO: 45301 - protein, 14 aa, Homo sapiens
  CDR3 for alpha chain variable domain of TCR clone 22651 (TRAV16, TRAJ33)
CALSAMDSNYQLIW

SEQ ID NO: 45302 - protein, 14 aa, Homo sapiens
  CDR3 for beta chain variable domain of TCR clone 22651 (TRBV6-1, TRBJ1-3)
CASVQGGGGNTIYF

SEQ ID NO: 45303 - protein, 14 aa, Homo sapiens
  CDR3 for alpha chain variable domain of TCR clone 22652 (TRAV20, TRAJ56)
CAVQFGGANSKLTF

SEQ ID NO: 45304 - protein, 14 aa, Homo sapiens
  CDR3 for beta chain variable domain of TCR clone 22652 (TRBV7-2, TRBJ1-1)
RASSFLTGTTEAFF

SEQ ID NO: 45305 - protein, 14 aa, Homo sapiens
  CDR3 for alpha chain variable domain of TCR clone 22653 (TRAV20, TRAJ29)
CAVQAWGGNTPLVF

SEQ ID NO: 45306 - protein, 15 aa, Homo sapiens
  CDR3 for beta chain variable domain of TCR clone 22653 (TRBV29-1, TRBJ2-7)
CSVEFFDRGSYEQYF

SEQ ID NO: 45307 - protein, 15 aa, Homo sapiens
  CDR3 for alpha chain variable domain of TCR clone 22654 (TRAV4, TRAJ39)
CLVGPNNNAGNMLTF

SEQ ID NO: 45308 - protein, 13 aa, Homo sapiens
  CDR3 for beta chain variable domain of TCR clone 22654 (TRBV7-3, TRBJ1-1)
CASSQDWGAEAFF

SEQ ID NO: 45309 - protein, 14 aa, Homo sapiens
  CDR3 for alpha chain variable domain of TCR clone 22655 (TRAV26-1, TRAJ38)
CIADNAGNNRKLIW

SEQ ID NO: 45310 - protein, 13 aa, Homo sapiens
  CDR3 for beta chain variable domain of TCR clone 22655 (TRBV12-4, TRBJ1-2)
CASSLRQGKGYTF

SEQ ID NO: 45311 - protein, 12 aa, Homo sapiens
  CDR3 for alpha chain variable domain of TCR clone 22656 (TRAV12-3, TRAJ42)
CAPGGSQGNLIF

SEQ ID NO: 45312 - protein, 13 aa, Homo sapiens
  CDR3 for beta chain variable domain of TCR clone 22656 (TRBV5-7, TRBJ2-6)
CASTASGANVLTF

SEQ ID NO: 45313 - protein, 12 aa, Homo sapiens
  CDR3 for alpha chain variable domain of TCR clone 22657 (TRAV1-1, TRAJ8)
CAGGTGFQKLVF

SEQ ID NO: 45314 - protein, 15 aa, Homo sapiens
  CDR3 for beta chain variable domain of TCR clone 22657 (TRBV7-9, TRBJ1-4)
CASSRTGGFNEKLFV

SEQ ID NO: 45315 - protein, 15 aa, Homo sapiens
  CDR3 for alpha chain variable domain of TCR clone 22658 (TRAV8-3, TRAJ27)
CAVGPSKTNAGKSTF

SEQ ID NO: 45316 - protein, 15 aa, Homo sapiens
  CDR3 for beta chain variable domain of TCR clone 22658 (TRBV7-2, TRBJ2-1)
CASSSRLAGGNEQFF

SEQ ID NO: 45317 - protein, 12 aa, Homo sapiens
  CDR3 for alpha chain variable domain of TCR clone 22659 (TRAV36/DV7, TRAJ54)
CAVVRGVQKLVF

SEQ ID NO: 45318 - protein, 14 aa, Homo sapiens
  CDR3 for beta chain variable domain of TCR clone 22659 (TRBV7-3, TRBJ1-1)
CASSLKGGNTEAFF

SEQ ID NO: 45319 - protein, 11 aa, Homo sapiens
  CDR3 for alpha chain variable domain of TCR clone 22660 (TRAV21, TRAJ11)
CAVNGYSTLTF

SEQ ID NO: 45320 - protein, 11 aa, Homo sapiens
  CDR3 for beta chain variable domain of TCR clone 22660 (TRBV19, TRBJ1-1)
CASSVGSEAFF

SEQ ID NO: 45321 - protein, 16 aa, Homo sapiens
  CDR3 for alpha chain variable domain of TCR clone 22661 (TRAV21, TRAJ52)
CAVTNAGGTRYGKLTF

SEQ ID NO: 45322 - protein, 13 aa, Homo sapiens
  CDR3 for beta chain variable domain of TCR clone 22661 (TRBV20-1, TRBJ2-3)
CSARLAGTDTQYF

SEQ ID NO: 45323 - protein, 11 aa, Homo sapiens
  CDR3 for alpha chain variable domain of TCR clone 22662 (TRAV12-2, TRAJ31)
CAVTRWARLMF

SEQ ID NO: 45324 - protein, 15 aa, Homo sapiens
  CDR3 for beta chain variable domain of TCR clone 22662 (TRBV19, TRBJ2-7)
CASSIGGGPVNEQYF

SEQ ID NO: 45325 - protein, 15 aa, Homo sapiens
  CDR3 for alpha chain variable domain of TCR clone 22663 (TRAV25, TRAJ52)
CAGTSGGTSYGKLTF

SEQ ID NO: 45326 - protein, 13 aa, Homo sapiens
  CDR3 for beta chain variable domain of TCR clone 22663 (TRBV18, TRBJ1-1)
CASSGGRNTEAFF

SEQ ID NO: 45327 - protein, 13 aa, Homo sapiens
  CDR3 for alpha chain variable domain of TCR clone 22664 (TRAV36/DV7, TRAJ7)
CAGTRYGNNRLAL

SEQ ID NO: 45328 - protein, 15 aa, Homo sapiens
  CDR3 for beta chain variable domain of TCR clone 22664 (TRBV11-3, TRBJ2-7)
CASSPGPASSYEQYF

SEQ ID NO: 45329 - protein, 14 aa, Homo sapiens
  CDR3 for alpha chain variable domain of TCR clone 22665 (TRAV12-1, TRAJ17)
CVVNYKAAGNKLTF

SEQ ID NO: 45330 - protein, 17 aa, Homo sapiens
  CDR3 for beta chain variable domain of TCR clone 22665 (TRBV20-1, TRBJ2-1)
CSASSAGLAGSYNEQFF

SEQ ID NO: 45331 - protein, 12 aa, Homo sapiens
  CDR3 for alpha chain variable domain of TCR clone 22666 (TRAV13-1, TRAJ48)
CAANFGNEKSTF

SEQ ID NO: 45332 - protein, 13 aa, Homo sapiens
  CDR3 for beta chain variable domain of TCR clone 22666 (TRBV7-3, TRBJ1-1)
CASSQDWGAEAFF

SEQ ID NO: 45333 - protein, 15 aa, Homo sapiens
  CDR3 for alpha chain variable domain of TCR clone 22667 (TRAV17, TRAJ52)
CATEAGGTSYGKLTF

SEQ ID NO: 45334 - protein, 14 aa, Homo sapiens
  CDR3 for beta chain variable domain of TCR clone 22667 (TRBV28, TRBJ1-5)
CASSLGVLVKPQHL

SEQ ID NO: 45335 - protein, 12 aa, Homo sapiens
  CDR3 for alpha chain variable domain of TCR clone 22668 (TRAV12-1, TRAJ40)
CVFYSGNYKYIF

SEQ ID NO: 45336 - protein, 18 aa, Homo sapiens
  CDR3 for beta chain variable domain of TCR clone 22668 (TRBV12-4, TRBJ2-2)
CASSLVAGTRGRTGELFF

SEQ ID NO: 45337 - protein, 15 aa, Homo sapiens
  CDR3 for alpha chain variable domain of TCR clone 22669 (TRAV3, TRAJ22)
CAVRDRGGSARQLTF

SEQ ID NO: 45338 - protein, 13 aa, Homo sapiens
  CDR3 for beta chain variable domain of TCR clone 22669 (TRBV4-2, TRBJ1-1)
CASSQAGNTEAFF

SEQ ID NO: 45339 - protein, 10 aa, Homo sapiens
  CDR3 for alpha chain variable domain of TCR clone 22670 (TRAV16, TRAJ22)
SAMYLRQLTF

SEQ ID NO: 45340 - protein, 15 aa, Homo sapiens
  CDR3 for beta chain variable domain of TCR clone 22670 (TRBV7-9, TRBJ1-6)
CASSSPGHGNSPLHF

SEQ ID NO: 45341 - protein, 11 aa, Homo sapiens
  CDR3 for alpha chain variable domain of TCR clone 22671 (TRAV21, TRAJ34)
CAHYNTDKLIF

SEQ ID NO: 45342 - protein, 14 aa, Homo sapiens
  CDR3 for beta chain variable domain of TCR clone 22671 (TRBV25-1, TRBJ1-1)
CASTHLGGNTEAFF

SEQ ID NO: 45343 - protein, 14 aa, Homo sapiens
  CDR3 for alpha chain variable domain of TCR clone 22672 (TRAV1-2, TRAJ16)
CAVNRFSDGQKLLF

SEQ ID NO: 45344 - protein, 16 aa, Homo sapiens
  CDR3 for beta chain variable domain of TCR clone 22672 (TRBV6-6, TRBJ1-5)
CASSYSTLVGNQPQHF

SEQ ID NO: 45345 - protein, 11 aa, Homo sapiens
  CDR3 for alpha chain variable domain of TCR clone 22673 (TRAV16, TRAJ33)
CALHSNYQLIC

SEQ ID NO: 45346 - protein, 15 aa, Homo sapiens
  CDR3 for beta chain variable domain of TCR clone 22673 (TRBV4-1, TRBJ2-7)
CASSQQGQGFDEQYF

SEQ ID NO: 45347 - protein, 14 aa, Homo sapiens
  CDR3 for alpha chain variable domain of TCR clone 22674 (TRAV1-2, TRAJ16)
CAVNRFSDGQKLLF

SEQ ID NO: 45348 - protein, 14 aa, Homo sapiens
  CDR3 for beta chain variable domain of TCR clone 22674 (TRBV7-9, TRBJ2-2)
CASSGLADTGELFF

SEQ ID NO: 45349 - protein, 17 aa, Homo sapiens
  CDR3 for alpha chain variable domain of TCR clone 22675 (TRAV21, TRAJ40)
CAVRPQSGTSGTYRYIF

SEQ ID NO: 45350 - protein, 13 aa, Homo sapiens
  CDR3 for beta chain variable domain of TCR clone 22675 (TRBV12-4, TRBJ2-7)
CASSPSRDTPRSF

SEQ ID NO: 45351 - protein, 14 aa, Homo sapiens
  CDR3 for alpha chain variable domain of TCR clone 22676 (TRAV12-1, TRAJ17)
CVVNYKAAGNKLTF

SEQ ID NO: 45352 - protein, 17 aa, Homo sapiens
  CDR3 for beta chain variable domain of TCR clone 22676 (TRBV20-1, TRBJ2-1)
CRASSSGLAGSYNEQFF

SEQ ID NO: 45353 - protein, 17 aa, Homo sapiens
  CDR3 for alpha chain variable domain of TCR clone 22677 (TRAV3, TRAJ42)
CAVKDRDYGGSQGNLIF

SEQ ID NO: 45354 - protein, 14 aa, Homo sapiens
  CDR3 for beta chain variable domain of TCR clone 22677 (TRBV7-2, TRBJ2-5)
CASSPRGSSETQYF

SEQ ID NO: 45355 - protein, 14 aa, Homo sapiens
  CDR3 for alpha chain variable domain of TCR clone 22678 (TRAV17, TRAJ22)
CATSPSGSARQLTF

SEQ ID NO: 45356 - protein, 15 aa, Homo sapiens
  CDR3 for beta chain variable domain of TCR clone 22678 (TRBV4-1, TRBJ2-5)
CASSQWYLYQETQYF

SEQ ID NO: 45357 - protein, 13 aa, Homo sapiens
  CDR3 for alpha chain variable domain of TCR clone 22679 (TRAV8-4, TRAJ5)
CAVLDTGRRALTF

SEQ ID NO: 45358 - protein, 12 aa, Homo sapiens
  CDR3 for beta chain variable domain of TCR clone 22679 (TRBV7-9, TRBJ1-6)
CASSASESPLHF

SEQ ID NO: 45359 - protein, 11 aa, Homo sapiens
  CDR3 for alpha chain variable domain of TCR clone 22680 (TRAV17, TRAJ9)
CATTGGFKNIF

SEQ ID NO: 45360 - protein, 14 aa, Homo sapiens
  CDR3 for beta chain variable domain of TCR clone 22680 (TRBV7-9, TRBJ2-2)
CASSGLADTGELFF

SEQ ID NO: 45361 - protein, 12 aa, Homo sapiens
  CDR3 for alpha chain variable domain of TCR clone 22681 (TRAV2, TRAJ9)
CAVRAGGFKTIF

SEQ ID NO: 45362 - protein, 16 aa, Homo sapiens
  CDR3 for beta chain variable domain of TCR clone 22681 (TRBV13, TRBJ2-2)
CASSPRTGEHTGELFF

SEQ ID NO: 45363 - protein, 15 aa, Homo sapiens
  CDR3 for alpha chain variable domain of TCR clone 22682 (TRAV27, TRAJ38)
CAARRNAGNNRKLIW

SEQ ID NO: 45364 - protein, 13 aa, Homo sapiens
  CDR3 for beta chain variable domain of TCR clone 22682 (TRBV12-5, TRBJ2-3)
CASGDRQLDTQYF

SEQ ID NO: 45365 - protein, 17 aa, Homo sapiens
  CDR3 for alpha chain variable domain of TCR clone 22683 (TRAV3, TRAJ6)
CAVRDGPRAGGSYIPQF

SEQ ID NO: 45366 - protein, 14 aa, Homo sapiens
  CDR3 for beta chain variable domain of TCR clone 22683 (TRBV7-2, TRBJ2-7)
CASSPKTSFYEQYF

SEQ ID NO: 45367 - protein, 13 aa, Homo sapiens
  CDR3 for alpha chain variable domain of TCR clone 22684 (TRAV8-3, TRAJ4)
WVFYSGGYNKPIF

SEQ ID NO: 45368 - protein, 14 aa, Homo sapiens
  CDR3 for beta chain variable domain of TCR clone 22684 (TRBV7-9, TRBJ2-3)
CASSLEDGTDTQYF

SEQ ID NO: 45369 - protein, 11 aa, Homo sapiens
  CDR3 for alpha chain variable domain of TCR clone 22685 (TRAV13-1, TRAJ15)
CAATPGTALIF

SEQ ID NO: 45370 - protein, 16 aa, Homo sapiens
  CDR3 for beta chain variable domain of TCR clone 22685 (TRBV13, TRBJ2-3)
CQQPLQGSGGRNTQYF

SEQ ID NO: 45371 - protein, 13 aa, Homo sapiens
  CDR3 for alpha chain variable domain of TCR clone 22686 (TRAV12-2, TRAJ20)
CAVYPSNDYKLSF

SEQ ID NO: 45372 - protein, 17 aa, Homo sapiens
  CDR3 for beta chain variable domain of TCR clone 22686 (TRBV11-2, TRBJ2-1)
CASSLYPPGVEYNEQFF

SEQ ID NO: 45373 - protein, 15 aa, Homo sapiens
  CDR3 for alpha chain variable domain of TCR clone 22687 (TRAV13-2, TRAJ40)
CAEDRSRQGTYKYIF

SEQ ID NO: 45374 - protein, 15 aa, Homo sapiens
  CDR3 for beta chain variable domain of TCR clone 22687 (TRBV19, TRBJ2-1)
CASSMGWNSNNEQFF

SEQ ID NO: 45375 - protein, 12 aa, Homo sapiens
  CDR3 for alpha chain variable domain of TCR clone 22688 (TRAV21, TRAJ3)
CCFYSSASKIIF

SEQ ID NO: 45376 - protein, 16 aa, Homo sapiens
  CDR3 for beta chain variable domain of TCR clone 22688 (TRBV19, TRBJ2-1)
CASGKAGPSSYNEQFF

SEQ ID NO: 45377 - protein, 13 aa, Homo sapiens
  CDR3 for alpha chain variable domain of TCR clone 22689 (TRAV20, TRAJ54)
CAVQAGGAQKLVF

SEQ ID NO: 45378 - protein, 14 aa, Homo sapiens
  CDR3 for beta chain variable domain of TCR clone 22689 (TRBV20-1, TRBJ2-7)
CGAKTGTGGYEQYF

SEQ ID NO: 45379 - protein, 16 aa, Homo sapiens
  CDR3 for alpha chain variable domain of TCR clone 22690 (TRAV23/DV6, TRAJ9)
CAASIGGNTGGFKTIF

SEQ ID NO: 45380 - protein, 15 aa, Homo sapiens
  CDR3 for beta chain variable domain of TCR clone 22690 (TRBV20-1, TRBJ1-1)
CSASRGVTGNTEAFF

SEQ ID NO: 45381 - protein, 12 aa, Homo sapiens
  CDR3 for alpha chain variable domain of TCR clone 22691 (TRAV13-1, TRAJ21)
CAAKEGFNKFYF

SEQ ID NO: 45382 - protein, 10 aa, Homo sapiens
  CDR3 for beta chain variable domain of TCR clone 22691 (TRBV2, TRBJ2-5)
CASSAATQYF

SEQ ID NO: 45383 - protein, 13 aa, Homo sapiens
  CDR3 for alpha chain variable domain of TCR clone 22692 (TRAV27, TRAJ45)
CRSSGGGADGLTF

SEQ ID NO: 45384 - protein, 17 aa, Homo sapiens
  CDR3 for beta chain variable domain of TCR clone 22692 (TRBV11-2, TRBJ2-1)
CASSLYPPGIEYNEQFF

SEQ ID NO: 45385 - protein, 17 aa, Homo sapiens
  CDR3 for alpha chain variable domain of TCR clone 22693 (TRAV2, TRAJ36)
CAVEDRGNWGKQPLPWD

SEQ ID NO: 45386 - protein, 14 aa, Homo sapiens
  CDR3 for beta chain variable domain of TCR clone 22693 (TRBV7-9, TRBJ2-5)
CASSLDTAQETQYF

SEQ ID NO: 45387 - protein, 17 aa, Homo sapiens
  CDR3 for alpha chain variable domain of TCR clone 22694 (TRAV26-1, TRAJ53)
CIVRVDDSGGSNYKLAF

SEQ ID NO: 45388 - protein, 15 aa, Homo sapiens
  CDR3 for beta chain variable domain of TCR clone 22694 (TRBV20-1, TRBJ2-7)
CSARVPAAYFYEQYF

SEQ ID NO: 45389 - protein, 16 aa, Homo sapiens
  CDR3 for alpha chain variable domain of TCR clone 22695 (TRAV27, TRAJ13)
CAGAKSDSGGYQKVTF

SEQ ID NO: 45390 - protein, 15 aa, Homo sapiens
  CDR3 for beta chain variable domain of TCR clone 22695 (TRBV29-1, TRBJ2-1)
CGVGRHALFYNEQFF

SEQ ID NO: 45391 - protein, 15 aa, Homo sapiens
  CDR3 for alpha chain variable domain of TCR clone 22696 (TRAV34, TRAJ38)
CGADFTPGNNRKLIW

SEQ ID NO: 45392 - protein, 16 aa, Homo sapiens
  CDR3 for beta chain variable domain of TCR clone 22696 (TRBV12-5, TRBJ2-5)
CASGPRTSGNQETLYF

SEQ ID NO: 45393 - protein, 17 aa, Homo sapiens
  CDR3 for alpha chain variable domain of TCR clone 22697 (TRAV4, TRAJ13)
CLVGVQGSSGGYQEVTF

SEQ ID NO: 45394 - protein, 18 aa, Homo sapiens
  CDR3 for beta chain variable domain of TCR clone 22697 (TRBV15, TRBJ2-3)
CATSRDGARSWDTDTQYF

SEQ ID NO: 45395 - protein, 10 aa, Homo sapiens
  CDR3 for alpha chain variable domain of TCR clone 22698 (TRAV1-2, TRAJ23)
CAAWAGKLIF

SEQ ID NO: 45396 - protein, 14 aa, Homo sapiens
  CDR3 for beta chain variable domain of TCR clone 22698 (TRBV20-1, TRBJ2-7)
CSAKTGTGGYEQCF

SEQ ID NO: 45397 - protein, 11 aa, Homo sapiens
  CDR3 for alpha chain variable domain of TCR clone 22699 (TRAV12-2, TRAJ43)
CASPIGNDMRF

SEQ ID NO: 45398 - protein, 13 aa, Homo sapiens
  CDR3 for beta chain variable domain of TCR clone 22699 (TRBV7-3, TRBJ1-2)
CASSLKRGYGYTL

SEQ ID NO: 45399 - protein, 14 aa, Homo sapiens
  CDR3 for alpha chain variable domain of TCR clone 22700 (TRAV12-2, TRAJ40)
CAVKIPSGTYKYIF

SEQ ID NO: 45400 - protein, 17 aa, Homo sapiens
  CDR3 for beta chain variable domain of TCR clone 22700 (TRBV7-8, TRBJ2-6)
CASSAGTGGAGANDLTF

SEQ ID NO: 45401 - protein, 16 aa, Homo sapiens
  CDR3 for alpha chain variable domain of TCR clone 22701 (TRAV3, TRAJ37)
CAVRGKGSGNTGQLIF

SEQ ID NO: 45402 - protein, 13 aa, Homo sapiens
  CDR3 for beta chain variable domain of TCR clone 22701 (TRBV14, TRBJ2-7)
CASSQDRRYEQYF

SEQ ID NO: 45403 - protein, 12 aa, Homo sapiens
  CDR3 for alpha chain variable domain of TCR clone 22702 (TRAV12-2, TRAJ16)
CAVNLDGQKLLF

SEQ ID NO: 45404 - protein, 12 aa, Homo sapiens
  CDR3 for beta chain variable domain of TCR clone 22702 (TRBV5-6, TRBJ2-7)
CASSVQGGEQYF

SEQ ID NO: 45405 - protein, 12 aa, Homo sapiens
  CDR3 for alpha chain variable domain of TCR clone 22703 (TRAV2, TRAJ40)
CCGYLRTYKYIF

SEQ ID NO: 45406 - protein, 14 aa, Homo sapiens
  CDR3 for beta chain variable domain of TCR clone 22703 (TRBV19, TRBJ2-1)
CASPTFVLSGEQFF

SEQ ID NO: 45407 - protein, 12 aa, Homo sapiens
  CDR3 for alpha chain variable domain of TCR clone 22704 (TRAV2, TRAJ10)
CASTGGGNKLNF

SEQ ID NO: 45408 - protein, 14 aa, Homo sapiens
  CDR3 for beta chain variable domain of TCR clone 22704 (TRBV7-2, TRBJ2-2)
CASRGQGAAGELFF

SEQ ID NO: 45409 - protein, 14 aa, Homo sapiens
  CDR3 for alpha chain variable domain of TCR clone 22705 (TRAV8-3, TRAJ23)
CAVIIYNQGGKLIF

SEQ ID NO: 45410 - protein, 15 aa, Homo sapiens
  CDR3 for beta chain variable domain of TCR clone 22705 (TRBV18, TRBJ2-1)
RASSPPSASYNEQFF

SEQ ID NO: 45411 - protein, 14 aa, Homo sapiens
  CDR3 for alpha chain variable domain of TCR clone 22706 (TRAV3, TRAJ9)
CAVRLNTGGFKTIF

SEQ ID NO: 45412 - protein, 15 aa, Homo sapiens
  CDR3 for beta chain variable domain of TCR clone 22706 (TRBV7-2, TRBJ2-1)
CASSLASGRVSEQFF

SEQ ID NO: 45413 - protein, 12 aa, Homo sapiens
  CDR3 for alpha chain variable domain of TCR clone 22707 (TRAV22, TRAJ29)
CCGGSGNTPLVF

SEQ ID NO: 45414 - protein, 13 aa, Homo sapiens
  CDR3 for beta chain variable domain of TCR clone 22707 (TRBV4-2, TRBJ1-1)
CASSQAGNTEAFF

SEQ ID NO: 45415 - protein, 13 aa, Homo sapiens
  CDR3 for alpha chain variable domain of TCR clone 22708 (TRAV20, TRAJ34)
CAVSSYNTDKLIF

SEQ ID NO: 45416 - protein, 13 aa, Homo sapiens
  CDR3 for beta chain variable domain of TCR clone 22708 (TRBV7-9, TRBJ1-2)
CASSLKQNYGDTF

SEQ ID NO: 45417 - protein, 16 aa, Homo sapiens
  CDR3 for alpha chain variable domain of TCR clone 22709 (TRAV3, TRAJ21)
CAVRDIERGNFNKFYF

SEQ ID NO: 45418 - protein, 17 aa, Homo sapiens
  CDR3 for beta chain variable domain of TCR clone 22709 (TRBV13, TRBJ2-3)
CASSLSRVAGGRNTQYF

SEQ ID NO: 45419 - protein, 17 aa, Homo sapiens
  CDR3 for alpha chain variable domain of TCR clone 22710 (TRAV23/DV6, TRAJ57)
CAASSTLSHGGSEKLVF

SEQ ID NO: 45420 - protein, 14 aa, Homo sapiens
  CDR3 for beta chain variable domain of TCR clone 22710 (TRBV25-1, TRBJ1-1)
CASTHLGGNTEAFF

SEQ ID NO: 45421 - protein, 13 aa, Homo sapiens
  CDR3 for alpha chain variable domain of TCR clone 22711 (TRAV21, TRAJ27)
CAARPGNAGKSTF

SEQ ID NO: 45422 - protein, 17 aa, Homo sapiens
  CDR3 for beta chain variable domain of TCR clone 22711 (TRBV7-6, TRBJ2-1)
HASLCQQLGGGADEQFF

SEQ ID NO: 45423 - protein, 13 aa, Homo sapiens
  CDR3 for alpha chain variable domain of TCR clone 22712 (TRAV12-3, TRAJ47)
CAMRKEYGNKLVF

SEQ ID NO: 45424 - protein, 16 aa, Homo sapiens
  CDR3 for beta chain variable domain of TCR clone 22712 (TRBV3-1, TRBJ2-6)
CASSLTWVSGANVLTF

SEQ ID NO: 45425 - protein, 14 aa, Homo sapiens
  CDR3 for alpha chain variable domain of TCR clone 22713 (TRAV8-3, TRAJ4)
CAVGAAGGYIKLIF

SEQ ID NO: 45426 - protein, 15 aa, Homo sapiens
  CDR3 for beta chain variable domain of TCR clone 22713 (TRBV6-5, TRBJ2-1)
CASSYDAGAGNEQFF

SEQ ID NO: 45427 - protein, 12 aa, Homo sapiens
  CDR3 for alpha chain variable domain of TCR clone 22714 (TRAV36/DV7, TRAJ54)
CAVVRGAQKLVF

SEQ ID NO: 45428 - protein, 14 aa, Homo sapiens
  CDR3 for beta chain variable domain of TCR clone 22714 (TRBV7-3, TRBJ1-1)
CASSLKEGNTEAFF

SEQ ID NO: 45429 - protein, 12 aa, Homo sapiens
  CDR3 for alpha chain variable domain of TCR clone 22715 (TRAV13-1, TRAJ21)
CAAKEGFNKFYF

SEQ ID NO: 45430 - protein, 12 aa, Homo sapiens
  CDR3 for beta chain variable domain of TCR clone 22715 (TRBV5-7, TRBJ1-1)
CASSLGRGKAFF

SEQ ID NO: 45431 - protein, 14 aa, Homo sapiens
  CDR3 for alpha chain variable domain of TCR clone 22716 (TRAV35, TRAJ22)
CAGLRPGSARQLTF

SEQ ID NO: 45432 - protein, 15 aa, Homo sapiens
  CDR3 for beta chain variable domain of TCR clone 22716 (TRBV12-4, TRBJ2-5)
FASSPPTGLQETQYF

SEQ ID NO: 45433 - protein, 12 aa, Homo sapiens
  CDR3 for alpha chain variable domain of TCR clone 22717 (TRAV8-3, TRAJ26)
CAGDNYVQNFVF

SEQ ID NO: 45434 - protein, 15 aa, Homo sapiens
  CDR3 for beta chain variable domain of TCR clone 22717 (TRBV9, TRBJ2-1)
CASSLAGSSYNEQFF

SEQ ID NO: 45435 - protein, 15 aa, Homo sapiens
  CDR3 for alpha chain variable domain of TCR clone 22718 (TRAV3, TRAJ22)
CAVRDRGGSARQLTF

SEQ ID NO: 45436 - protein, 16 aa, Homo sapiens
  CDR3 for beta chain variable domain of TCR clone 22718 (TRBV5-4, TRBJ2-3)
CASQQPGAGGADTQYS

SEQ ID NO: 45437 - protein, 13 aa, Homo sapiens
  CDR3 for alpha chain variable domain of TCR clone 22719 (TRAV12-1, TRAJ22)
CVVPSGSARQLTF

SEQ ID NO: 45438 - protein, 15 aa, Homo sapiens
  CDR3 for beta chain variable domain of TCR clone 22719 (TRBV11-3, TRBJ2-7)
CASSPGPASSYEQYS

SEQ ID NO: 45439 - protein, 19 aa, Homo sapiens
  CDR3 for alpha chain variable domain of TCR clone 22720 (TRAV26-1, TRAJ52)
CIVRAHRNAGGTSYGKLTF

SEQ ID NO: 45440 - protein, 15 aa, Homo sapiens
  CDR3 for beta chain variable domain of TCR clone 22720 (TRBV29-1, TRBJ2-1)
CSGRDRKSPYNEQFF

SEQ ID NO: 45441 - protein, 15 aa, Homo sapiens
  CDR3 for alpha chain variable domain of TCR clone 22721 (TRAV8-3, TRAJ27)
CAVGPSKTNAGKSTV

SEQ ID NO: 45442 - protein, 15 aa, Homo sapiens
  CDR3 for beta chain variable domain of TCR clone 22721 (TRBV7-2, TRBJ2-1)
CASSSGLAGGNEQFF

SEQ ID NO: 45443 - protein, 12 aa, Homo sapiens
  CDR3 for alpha chain variable domain of TCR clone 22722 (TRAV3, TRAJ20)
CAVRDPDYKLSF

SEQ ID NO: 45444 - protein, 12 aa, Homo sapiens
  CDR3 for beta chain variable domain of TCR clone 22722 (TRBV11-2, TRBJ2-2)
CASSLGGGELFF

SEQ ID NO: 45445 - protein, 14 aa, Homo sapiens
  CDR3 for alpha chain variable domain of TCR clone 22723 (TRAV35, TRAJ33)
CAGSSQDSNYQLIW

SEQ ID NO: 45446 - protein, 15 aa, Homo sapiens
  CDR3 for beta chain variable domain of TCR clone 22723 (TRBV20-1, TRBJ2-7)
CSAESGSSGAYEQYF

SEQ ID NO: 45447 - protein, 16 aa, Homo sapiens
  CDR3 for alpha chain variable domain of TCR clone 22724 (TRAV4, TRAJ9)
CLVGDPNRPGGFKTTF

SEQ ID NO: 45448 - protein, 16 aa, Homo sapiens
  CDR3 for beta chain variable domain of TCR clone 22724 (TRBV28, TRBJ1-4)
CASSPPYRGRSEKLFF

SEQ ID NO: 45449 - protein, 14 aa, Homo sapiens
  CDR3 for alpha chain variable domain of TCR clone 22725 (TRAV13-1, TRAJ44)
CAAKATGTASKLNF

SEQ ID NO: 45450 - protein, 17 aa, Homo sapiens
  CDR3 for beta chain variable domain of TCR clone 22725 (TRBV7-3, TRBJ2-3)
CASSLMKRMRGADTQYF

SEQ ID NO: 45451 - protein, 12 aa, Homo sapiens
  CDR3 for alpha chain variable domain of TCR clone 22726 (TRAV12-1, TRAJ40)
CVVYSGTYKYIF

SEQ ID NO: 45452 - protein, 13 aa, Homo sapiens
  CDR3 for beta chain variable domain of TCR clone 22726 (TRBV2, TRBJ2-7)
CASSVGGSGEQYF

SEQ ID NO: 45453 - protein, 13 aa, Homo sapiens
  CDR3 for alpha chain variable domain of TCR clone 22727 (TRAV2, TRAJ15)
CAVASQAGTALIF

SEQ ID NO: 45454 - protein, 14 aa, Homo sapiens
  CDR3 for beta chain variable domain of TCR clone 22727 (TRBV4-1, TRBJ2-2)
CASSQAVNTGELFF

SEQ ID NO: 45455 - protein, 17 aa, Homo sapiens
  CDR3 for alpha chain variable domain of TCR clone 22728 (TRAV3, TRAJ6)
CAVRDGPRAGGSYIPTF

SEQ ID NO: 45456 - protein, 13 aa, Homo sapiens
  CDR3 for beta chain variable domain of TCR clone 22728 (TRBV10-3, TRBJ1-2)
CAISERDSYGYTF

SEQ ID NO: 45457 - protein, 17 aa, Homo sapiens
  CDR3 for alpha chain variable domain of TCR clone 22729 (TRAV12-3, TRAJ6)
CAMSARGGAGGSYIPTF

SEQ ID NO: 45458 - protein, 12 aa, Homo sapiens
  CDR3 for beta chain variable domain of TCR clone 22729 (TRBV12-4, TRBJ2-3)
CASSTLPDTQYS

SEQ ID NO: 45459 - protein, 13 aa, Homo sapiens
  CDR3 for alpha chain variable domain of TCR clone 22730 (TRAV23/DV6, TRAJ10)
ASVLTGGGNKLTF

SEQ ID NO: 45460 - protein, 13 aa, Homo sapiens
  CDR3 for beta chain variable domain of TCR clone 22730 (TRBV11-1, TRBJ1-2)
CASVGSRGYGYTF

SEQ ID NO: 45461 - protein, 10 aa, Homo sapiens
  CDR3 for alpha chain variable domain of TCR clone 22731 (TRAV1-2, TRAJ31)
CVSEDARLMF

SEQ ID NO: 45462 - protein, 14 aa, Homo sapiens
  CDR3 for beta chain variable domain of TCR clone 22731 (TRBV19, TRBJ2-1)
CASPTFALSGEQFF

SEQ ID NO: 45463 - protein, 14 aa, Homo sapiens
  CDR3 for alpha chain variable domain of TCR clone 22732 (TRAV16, TRAJ31)
CALSGRNNNARLMF

SEQ ID NO: 45464 - protein, 12 aa, Homo sapiens
  CDR3 for beta chain variable domain of TCR clone 22732 (TRBV11-2, TRBJ1-2)
CASSREGDGYTL

SEQ ID NO: 45465 - protein, 14 aa, Homo sapiens
  CDR3 for alpha chain variable domain of TCR clone 22733 (TRAV13-1, TRAJ44)
CAAKATGTASKLTF

SEQ ID NO: 45466 - protein, 17 aa, Homo sapiens
  CDR3 for beta chain variable domain of TCR clone 22733 (TRBV7-3, TRBJ2-3)
LASSLMKRMRGADTQYF

SEQ ID NO: 45467 - protein, 13 aa, Homo sapiens
  CDR3 for alpha chain variable domain of TCR clone 22734 (TRAV8-3, TRAJ36)
CAVGATGANNLFF

SEQ ID NO: 45468 - protein, 15 aa, Homo sapiens
  CDR3 for beta chain variable domain of TCR clone 22734 (TRBV7-2, TRBJ1-2)
CASSPRAVWNYGYTF

SEQ ID NO: 45469 - protein, 10 aa, Homo sapiens
  CDR3 for alpha chain variable domain of TCR clone 22735 (TRAV23/DV6, TRAJ57)
CAASSTLSQG

SEQ ID NO: 45470 - protein, 15 aa, Homo sapiens
  CDR3 for beta chain variable domain of TCR clone 22735 (TRBV25-1, TRBJ1-4)
CASSPGDSTNEKLFF

SEQ ID NO: 45471 - protein, 13 aa, Homo sapiens
  CDR3 for alpha chain variable domain of TCR clone 22736 (TRAV13-2, TRAJ8)
CAFMNTGFQKLVF

SEQ ID NO: 45472 - protein, 17 aa, Homo sapiens
  CDR3 for beta chain variable domain of TCR clone 22736 (TRBV28, TRBJ2-1)
CASSSARQALTYNEQLF

SEQ ID NO: 45473 - protein, 14 aa, Homo sapiens
  CDR3 for alpha chain variable domain of TCR clone 22737 (TRAV35, TRAJ22)
CAGLRPGSARQLTF

SEQ ID NO: 45474 - protein, 15 aa, Homo sapiens
  CDR3 for beta chain variable domain of TCR clone 22737 (TRBV12-4, TRBJ2-5)
CASSPPTGLQENQYF

SEQ ID NO: 45475 - protein, 15 aa, Homo sapiens
  CDR3 for alpha chain variable domain of TCR clone 22738 (TRAV17, TRAJ57)
CATGPSQGGYEKLVF

SEQ ID NO: 45476 - protein, 16 aa, Homo sapiens
  CDR3 for beta chain variable domain of TCR clone 22738 (TRBV12-4, TRBJ1-5)
CASSRPVGGSNQPQHF

SEQ ID NO: 45477 - protein, 12 aa, Homo sapiens
  CDR3 for alpha chain variable domain of TCR clone 22739 (TRAV16, TRAJ34)
CAHSYNTDKLIF

SEQ ID NO: 45478 - protein, 14 aa, Homo sapiens
  CDR3 for beta chain variable domain of TCR clone 22739 (TRBV11-2, TRBJ1-3)
CASSPRTGGNTIYF

SEQ ID NO: 45479 - protein, 14 aa, Homo sapiens
  CDR3 for alpha chain variable domain of TCR clone 22740 (TRAV29/DV5, TRAJ36)
CAARRKTGANNLFF

SEQ ID NO: 45480 - protein, 16 aa, Homo sapiens
  CDR3 for beta chain variable domain of TCR clone 22740 (TRBV29-1, TRBJ2-7)
CSVEVVGTSGSYEQYF

SEQ ID NO: 45481 - protein, 16 aa, Homo sapiens
  CDR3 for alpha chain variable domain of TCR clone 22741 (TRAV30, TRAJ24)
CGTEIVDADSWGKFQF

SEQ ID NO: 45482 - protein, 15 aa, Homo sapiens
  CDR3 for beta chain variable domain of TCR clone 22741 (TRBV27, TRBJ1-6)
CASSFDRGLGSPLHF

SEQ ID NO: 45483 - protein, 14 aa, Homo sapiens
  CDR3 for alpha chain variable domain of TCR clone 22742 (TRAV1-2, TRAJ6)
CAVGLSGGSYIPTF

SEQ ID NO: 45484 - protein, 15 aa, Homo sapiens
  CDR3 for beta chain variable domain of TCR clone 22742 (TRBV28, TRBJ2-7)
CASSPGGRGFYEQYF

SEQ ID NO: 45485 - protein, 14 aa, Homo sapiens
  CDR3 for alpha chain variable domain of TCR clone 22743 (TRAV2, TRAJ37)
CAVDFTSNTGKLIF

SEQ ID NO: 45486 - protein, 14 aa, Homo sapiens
  CDR3 for beta chain variable domain of TCR clone 22743 (TRBV4-2, TRBJ2-1)
CASGLDRAYNEQFF

SEQ ID NO: 45487 - protein, 11 aa, Homo sapiens
  CDR3 for alpha chain variable domain of TCR clone 22744 (TRAV2, TRAJ13)
CASGGYQKVTF

SEQ ID NO: 45488 - protein, 16 aa, Homo sapiens
  CDR3 for beta chain variable domain of TCR clone 22744 (TRBV6-1, TRBJ2-5)
CASSETLYRGAETQYF

SEQ ID NO: 45489 - protein, 14 aa, Homo sapiens
  CDR3 for alpha chain variable domain of TCR clone 22745 (TRAV12-3, TRAJ10)
SHLPLTGGGNKLTF

SEQ ID NO: 45490 - protein, 15 aa, Homo sapiens
  CDR3 for beta chain variable domain of TCR clone 22745 (TRBV11-2, TRBJ1-3)
CASSLDGTVGNTVYF

SEQ ID NO: 45491 - protein, 14 aa, Homo sapiens
  CDR3 for alpha chain variable domain of TCR clone 22746 (TRAV16, TRAJ33)
CALSAMDSNYQLIW

SEQ ID NO: 45492 - protein, 12 aa, Homo sapiens
  CDR3 for beta chain variable domain of TCR clone 22746 (TRBV5-1, TRBJ1-2)
CAGSQDTYGYTF

SEQ ID NO: 45493 - protein, 23 aa, Homo sapiens
  CDR3 for alpha chain variable domain of TCR clone 22747 (TRAV12-2, TRAJ43)
SLLIRDSQPSDPATYLCAFDMRF

SEQ ID NO: 45494 - protein, 18 aa, Homo sapiens
  CDR3 for beta chain variable domain of TCR clone 22747 (TRBV20-1, TRBJ2-3)
CSASGLAGGPGTTDTQYF

SEQ ID NO: 45495 - protein, 12 aa, Homo sapiens
  CDR3 for alpha chain variable domain of TCR clone 22748 (TRAV17, TRAJ12)
CATLRSSYKLIF

SEQ ID NO: 45496 - protein, 16 aa, Homo sapiens
  CDR3 for beta chain variable domain of TCR clone 22748 (TRBV28, TRBJ2-7)
CASSLFFEIGGPEQYF

SEQ ID NO: 45497 - protein, 12 aa, Homo sapiens
  CDR3 for alpha chain variable domain of TCR clone 22749 (TRAV3, TRAJ43)
CAVRDPNNDMRF

SEQ ID NO: 45498 - protein, 15 aa, Homo sapiens
  CDR3 for beta chain variable domain of TCR clone 22749 (TRBV27, TRBJ1-5)
CASSLGTGLDQPQHF

SEQ ID NO: 45499 - protein, 17 aa, Homo sapiens
  CDR3 for alpha chain variable domain of TCR clone 22750 (TRAV3, TRAJ42)
CAGRDRDYGGSQGNLIF

SEQ ID NO: 45500 - protein, 15 aa, Homo sapiens
  CDR3 for beta chain variable domain of TCR clone 22750 (TRBV6-6, TRBJ2-7)
CASSYSYGGSYEQYF

SEQ ID NO: 45501 - protein, 12 aa, Homo sapiens
  CDR3 for alpha chain variable domain of TCR clone 22751 (TRAV21, TRAJ33)
CAKMDNNYQLIW

SEQ ID NO: 45502 - protein, 14 aa, Homo sapiens
  CDR3 for beta chain variable domain of TCR clone 22751 (TRBV2, TRBJ2-7)
CASSLTSGGYEQYF

SEQ ID NO: 45503 - protein, 16 aa, Homo sapiens
  CDR3 for alpha chain variable domain of TCR clone 22752 (TRAV35, TRAJ28)
CAGQKCSGAGSYQLTF

SEQ ID NO: 45504 - protein, 16 aa, Homo sapiens
  CDR3 for beta chain variable domain of TCR clone 22752 (TRBV7-3, TRBJ2-2)
CASSLKRGTLSGELFF

SEQ ID NO: 45505 - protein, 17 aa, Homo sapiens
  CDR3 for alpha chain variable domain of TCR clone 22753 (TRAV19, TRAJ58)
CALRGLRVGTSGSRLTF

SEQ ID NO: 45506 - protein, 11 aa, Homo sapiens
  CDR3 for beta chain variable domain of TCR clone 22753 (TRBV25-1, TRBJ2-4)
CQSRDQNIQYF

SEQ ID NO: 45507 - protein, 16 aa, Homo sapiens
  CDR3 for alpha chain variable domain of TCR clone 22754 (TRAV3, TRAJ37)
CAVRGKGSGNTGRLIF

SEQ ID NO: 45508 - protein, 13 aa, Homo sapiens
  CDR3 for beta chain variable domain of TCR clone 22754 (TRBV14, TRBJ2-7)
CASSQDRRYEQYF

SEQ ID NO: 45509 - protein, 16 aa, Homo sapiens
  CDR3 for alpha chain variable domain of TCR clone 22755 (TRAV8-3, TRAJ13)
CAVGAYPSGGYQKVTF

SEQ ID NO: 45510 - protein, 15 aa, Homo sapiens
  CDR3 for beta chain variable domain of TCR clone 22755 (TRBV19, TRBJ1-5)
CASSIVWADNQPQRF

SEQ ID NO: 45511 - protein, 15 aa, Homo sapiens
  CDR3 for alpha chain variable domain of TCR clone 22756 (TRAV34, TRAJ38)
CGADFTPGNNRKLMW

SEQ ID NO: 45512 - protein, 16 aa, Homo sapiens
  CDR3 for beta chain variable domain of TCR clone 22756 (TRBV12-5, TRBJ2-5)
CASGPRTSGNQETQYF

SEQ ID NO: 45513 - protein, 11 aa, Homo sapiens
  CDR3 for alpha chain variable domain of TCR clone 22757 (TRAV3, TRAJ21)
CAVGNFNKFYF

SEQ ID NO: 45514 - protein, 16 aa, Homo sapiens
  CDR3 for beta chain variable domain of TCR clone 22757 (TRBV7-9, TRBJ1-2)
CASSLGFSSGEDGYTF

SEQ ID NO: 45515 - protein, 12 aa, Homo sapiens
  CDR3 for alpha chain variable domain of TCR clone 22758 (TRAV2, TRAJ32)
CAVGGATNKLIF

SEQ ID NO: 45516 - protein, 15 aa, Homo sapiens
  CDR3 for beta chain variable domain of TCR clone 22758 (TRBV7-2, TRBJ2-1)
CASSSRTSREDEQLF

SEQ ID NO: 45517 - protein, 23 aa, Homo sapiens
  CDR3 for alpha chain variable domain of TCR clone 22759 (TRAV3, TRAJ38)
CAVRDCLNAGNNHIQNPDPAVYQ

SEQ ID NO: 45518 - protein, 13 aa, Homo sapiens
  CDR3 for beta chain variable domain of TCR clone 22759 (TRBV23-1, TRBJ1-4)
CASRGKFNEKLFF

SEQ ID NO: 45519 - protein, 14 aa, Homo sapiens
  CDR3 for alpha chain variable domain of TCR clone 22760 (TRAV8-2, TRAJ4)
CVVSPSGGYNKLIF

SEQ ID NO: 45520 - protein, 15 aa, Homo sapiens
  CDR3 for beta chain variable domain of TCR clone 22760 (TRBV4-1, TRBJ1-4)
CASSDTGGTNEKLFV

SEQ ID NO: 45521 - protein, 14 aa, Homo sapiens
  CDR3 for alpha chain variable domain of TCR clone 22761 (TRAV1-2, TRAJ16)
CAVNRFSDGQKLLF

SEQ ID NO: 45522 - protein, 16 aa, Homo sapiens
  CDR3 for beta chain variable domain of TCR clone 22761 (TRBV19, TRBJ2-1)
CASSSKGTRSYNEQFF

SEQ ID NO: 45523 - protein, 18 aa, Homo sapiens
  CDR3 for alpha chain variable domain of TCR clone 22762 (TRAV21, TRAJ52)
CAVRPSPAGGTSYGKLTF

SEQ ID NO: 45524 - protein, 12 aa, Homo sapiens
  CDR3 for beta chain variable domain of TCR clone 22762 (TRBV12-5, TRBJ2-5)
CASGQGVETQYF

SEQ ID NO: 45525 - protein, 14 aa, Homo sapiens
  CDR3 for alpha chain variable domain of TCR clone 22763 (TRAV13-1, TRAJ22)
CAASYSGSARQLTF

SEQ ID NO: 45526 - protein, 13 aa, Homo sapiens
  CDR3 for beta chain variable domain of TCR clone 22763 (TRBV6-3, TRBJ1-2)
CASSLTGDYGYTL

SEQ ID NO: 45527 - protein, 16 aa, Homo sapiens
  CDR3 for alpha chain variable domain of TCR clone 22764 (TRAV30, TRAJ24)
CGTEIVDADSWGKFQF

SEQ ID NO: 45528 - protein, 14 aa, Homo sapiens
  CDR3 for beta chain variable domain of TCR clone 22764 (TRBV12-5, TRBJ2-5)
CASGSRPHQETQYF

SEQ ID NO: 45529 - protein, 11 aa, Homo sapiens
  CDR3 for alpha chain variable domain of TCR clone 22765 (TRAV1-1, TRAJ23)
CAVRQGGKLIF

SEQ ID NO: 45530 - protein, 20 aa, Homo sapiens
  CDR3 for beta chain variable domain of TCR clone 22765 (TRBV7-8, TRBJ2-2)
CASSHLFPVPTIHITGELFF

SEQ ID NO: 45531 - protein, 12 aa, Homo sapiens
  CDR3 for alpha chain variable domain of TCR clone 22766 (TRAV21, TRAJ11)
CAATSGYSTLTF

SEQ ID NO: 45532 - protein, 14 aa, Homo sapiens
  CDR3 for beta chain variable domain of TCR clone 22766 (TRBV20-1, TRBJ2-7)
CSAPELAGVGERYF

SEQ ID NO: 45533 - protein, 15 aa, Homo sapiens
  CDR3 for alpha chain variable domain of TCR clone 22767 (TRAV12-2, TRAJ53)
CAGNGGGGSNYKLTF

SEQ ID NO: 45534 - protein, 17 aa, Homo sapiens
  CDR3 for beta chain variable domain of TCR clone 22767 (TRBV7-3, TRBJ2-3)
CASSLMKRMRGADTQYF

SEQ ID NO: 45535 - protein, 13 aa, Homo sapiens
  CDR3 for alpha chain variable domain of TCR clone 22768 (TRAV27, TRAJ45)
CRSSGGGADGLTF

SEQ ID NO: 45536 - protein, 17 aa, Homo sapiens
  CDR3 for beta chain variable domain of TCR clone 22768 (TRBV11-2, TRBJ2-1)
CASSLYPSGVEYNEQFF

SEQ ID NO: 45537 - protein, 13 aa, Homo sapiens
  CDR3 for alpha chain variable domain of TCR clone 22769 (TRAV13-2, TRAJ48)
CAEMDFGNEKLTF

SEQ ID NO: 45538 - protein, 16 aa, Homo sapiens
  CDR3 for beta chain variable domain of TCR clone 22769 (TRBV6-1, TRBJ2-1)
CASILRQGSSYNEQFF

SEQ ID NO: 45539 - protein, 18 aa, Homo sapiens
  CDR3 for alpha chain variable domain of TCR clone 22770 (TRAV26-2, TRAJ54)
CILRDVEVGIQGAQKLVL

SEQ ID NO: 45540 - protein, 17 aa, Homo sapiens
  CDR3 for beta chain variable domain of TCR clone 22770 (TRBV20-1, TRBJ1-5)
CSASLSPGQGGNQPQHF

SEQ ID NO: 45541 - protein, 11 aa, Homo sapiens
  CDR3 for alpha chain variable domain of TCR clone 22771 (TRAV1-2, TRAJ20)
CDVANDYKLSF

SEQ ID NO: 45542 - protein, 18 aa, Homo sapiens
  CDR3 for beta chain variable domain of TCR clone 22771 (TRBV20-1, TRBJ2-6)
CSAETTPTHGSGANVLTF

SEQ ID NO: 45543 - protein, 11 aa, Homo sapiens
  CDR3 for alpha chain variable domain of TCR clone 22772 (TRAV3, TRAJ21)
CAVGNFNKFYF

SEQ ID NO: 45544 - protein, 14 aa, Homo sapiens
  CDR3 for beta chain variable domain of TCR clone 22772 (TRBV7-2, TRBJ2-7)
CASRSQGAAYEQYF

SEQ ID NO: 45545 - protein, 14 aa, Homo sapiens
  CDR3 for alpha chain variable domain of TCR clone 22773 (TRAV26-1, TRAJ34)
CIVRVAYNTDKLIF

SEQ ID NO: 45546 - protein, 13 aa, Homo sapiens
  CDR3 for beta chain variable domain of TCR clone 22773 (TRBV7-9, TRBJ1-2)
CASSLKQNYGYTF

SEQ ID NO: 45547 - protein, 14 aa, Homo sapiens
  CDR3 for alpha chain variable domain of TCR clone 22774 (TRAV12-2, TRAJ17)
CAVLFKAAGNKLTF

SEQ ID NO: 45548 - protein, 17 aa, Homo sapiens
  CDR3 for beta chain variable domain of TCR clone 22774 (TRBV20-1, TRBJ2-2)
CSASGSGQGGLTGELFF

SEQ ID NO: 45549 - protein, 10 aa, Homo sapiens
  CDR3 for alpha chain variable domain of TCR clone 22775 (TRAV38-2/DV8, TRAJ40)
CASGTYKYIF

SEQ ID NO: 45550 - protein, 14 aa, Homo sapiens
  CDR3 for beta chain variable domain of TCR clone 22775 (TRBV7-9, TRBJ2-1)
CASSPWDSLYEQFF

SEQ ID NO: 45551 - protein, 14 aa, Homo sapiens
  CDR3 for alpha chain variable domain of TCR clone 22776 (TRAV12-2, TRAJ44)
CAVNPAGTASRLTF

SEQ ID NO: 45552 - protein, 13 aa, Homo sapiens
  CDR3 for beta chain variable domain of TCR clone 22776 (TRBV20-1, TRBJ1-6)
CSAPLGVGSPLHF

SEQ ID NO: 45553 - protein, 17 aa, Homo sapiens
  CDR3 for alpha chain variable domain of TCR clone 22777 (TRAV4, TRAJ13)
CLVGVQGSSGGYQKGTF

SEQ ID NO: 45554 - protein, 18 aa, Homo sapiens
  CDR3 for beta chain variable domain of TCR clone 22777 (TRBV15, TRBJ2-3)
CATSRDGARSWDTDTQYF

SEQ ID NO: 45555 - protein, 14 aa, Homo sapiens
  CDR3 for alpha chain variable domain of TCR clone 22778 (TRAV3, TRAJ9)
CAVRLNTGGFTTIF

SEQ ID NO: 45556 - protein, 15 aa, Homo sapiens
  CDR3 for beta chain variable domain of TCR clone 22778 (TRBV7-2, TRBJ2-1)
CASSLASGRVNEQFF

SEQ ID NO: 45557 - protein, 14 aa, Homo sapiens
  CDR3 for alpha chain variable domain of TCR clone 22779 (TRAV8-4, TRAJ9)
CAVRIDTGGFKTIF

SEQ ID NO: 45558 - protein, 15 aa, Homo sapiens
  CDR3 for beta chain variable domain of TCR clone 22779 (TRBV10-2, TRBJ2-6)
CASSEQGTGANVLTF

SEQ ID NO: 45559 - protein, 15 aa, Homo sapiens
  CDR3 for alpha chain variable domain of TCR clone 22780 (TRAV17, TRAJ57)
CATGPSQGGSEKLVF

SEQ ID NO: 45560 - protein, 16 aa, Homo sapiens
  CDR3 for beta chain variable domain of TCR clone 22780 (TRBV12-4, TRBJ1-5)
CASSRPVGGSNQPQRF

SEQ ID NO: 45561 - protein, 14 aa, Homo sapiens
  CDR3 for alpha chain variable domain of TCR clone 22781 (TRAV12-2, TRAJ40)
CAVKIPSGTYKYIF

SEQ ID NO: 45562 - protein, 13 aa, Homo sapiens
  CDR3 for beta chain variable domain of TCR clone 22781 (TRBV20-1, TRBJ1-3)
CSARVQGRDTMYF

SEQ ID NO: 45563 - protein, 14 aa, Homo sapiens
  CDR3 for alpha chain variable domain of TCR clone 22782 (TRAV13-2, TRAJ32)
CAENYGGATNKLIF

SEQ ID NO: 45564 - protein, 15 aa, Homo sapiens
  CDR3 for beta chain variable domain of TCR clone 22782 (TRBV12-4, TRBJ2-5)
YASTLNSGRGETQYF

SEQ ID NO: 45565 - protein, 12 aa, Homo sapiens
  CDR3 for alpha chain variable domain of TCR clone 22783 (TRAV13-2, TRAJ23)
CAERHRGGKLIY

SEQ ID NO: 45566 - protein, 16 aa, Homo sapiens
  CDR3 for beta chain variable domain of TCR clone 22783 (TRBV20-1, TRBJ1-4)
CSAPGQGLLTNEKLFF

SEQ ID NO: 45567 - protein, 13 aa, Homo sapiens
  CDR3 for alpha chain variable domain of TCR clone 22784 (TRAV12-3, TRAJ33)
CAMSVNSNYQLIW

SEQ ID NO: 45568 - protein, 13 aa, Homo sapiens
  CDR3 for beta chain variable domain of TCR clone 22784 (TRBV7-2, TRBJ2-2)
CASSLAVAGELFF

SEQ ID NO: 45569 - protein, 17 aa, Homo sapiens
  CDR3 for alpha chain variable domain of TCR clone 22785 (TRAV4, TRAJ13)
CLVGVQGSSGGYQKVTF

SEQ ID NO: 45570 - protein, 14 aa, Homo sapiens
  CDR3 for beta chain variable domain of TCR clone 22785 (TRBV25-1, TRBJ1-1)
CASTHLGGNTEAFF

SEQ ID NO: 45571 - protein, 18 aa, Homo sapiens
  CDR3 for alpha chain variable domain of TCR clone 22786 (TRAV26-1, TRAJ23)
CIVRVGLEVRNQGGKLIF

SEQ ID NO: 45572 - protein, 16 aa, Homo sapiens
  CDR3 for beta chain variable domain of TCR clone 22786 (TRBV12-4, TRBJ2-5)
CASSFFVRGRQETQYF

SEQ ID NO: 45573 - protein, 11 aa, Homo sapiens
  CDR3 for alpha chain variable domain of TCR clone 22787 (TRAV1-2, TRAJ20)
CAVANEYKLSF

SEQ ID NO: 45574 - protein, 18 aa, Homo sapiens
  CDR3 for beta chain variable domain of TCR clone 22787 (TRBV20-1, TRBJ2-6)
CSAETTPTHGSGANVLTF

SEQ ID NO: 45575 - protein, 13 aa, Homo sapiens
  CDR3 for alpha chain variable domain of TCR clone 22788 (TRAV13-1, TRAJ21)
CAASIYNFNKFYF

SEQ ID NO: 45576 - protein, 16 aa, Homo sapiens
  CDR3 for beta chain variable domain of TCR clone 22788 (TRBV7-3, TRBJ2-2)
CASSLKRGTLSGELFF

SEQ ID NO: 45577 - protein, 13 aa, Homo sapiens
  CDR3 for alpha chain variable domain of TCR clone 22789 (TRAV2, TRAJ40)
CAVVTSGTCKYIF

SEQ ID NO: 45578 - protein, 15 aa, Homo sapiens
  CDR3 for beta chain variable domain of TCR clone 22789 (TRBV11-3, TRBJ2-3)
CASLKDGREGDTQYF

SEQ ID NO: 45579 - protein, 10 aa, Homo sapiens
  CDR3 for alpha chain variable domain of TCR clone 22790 (TRAV23/DV6, TRAJ57)
CAASSTLFQG

SEQ ID NO: 45580 - protein, 14 aa, Homo sapiens
  CDR3 for beta chain variable domain of TCR clone 22790 (TRBV25-1, TRBJ1-1)
CASTHLGGNTEAFF

SEQ ID NO: 45581 - protein, 15 aa, Homo sapiens
  CDR3 for alpha chain variable domain of TCR clone 22791 (TRAV17, TRAJ57)
CATGPSQGGYEKLVF

SEQ ID NO: 45582 - protein, 14 aa, Homo sapiens
  CDR3 for beta chain variable domain of TCR clone 22791 (TRBV12-5, TRBJ2-5)
CASGSRTHQETQYF

SEQ ID NO: 45583 - protein, 12 aa, Homo sapiens
  CDR3 for alpha chain variable domain of TCR clone 22792 (TRAV12-1, TRAJ23)
CVVDIPGGKLIF

SEQ ID NO: 45584 - protein, 15 aa, Homo sapiens
  CDR3 for beta chain variable domain of TCR clone 22792 (TRBV7-2, TRBJ2-7)
CASSLVSSGSYEQYF

SEQ ID NO: 45585 - protein, 10 aa, Homo sapiens
  CDR3 for alpha chain variable domain of TCR clone 22793 (TRAV12-3, TRAJ49)
CAMNDDQFYF

SEQ ID NO: 45586 - protein, 12 aa, Homo sapiens
  CDR3 for beta chain variable domain of TCR clone 22793 (TRBV28, TRBJ2-3)
CASSLYRDTQYF

SEQ ID NO: 45587 - protein, 16 aa, Homo sapiens
  CDR3 for alpha chain variable domain of TCR clone 22794 (TRAV12-1, TRAJ12)
CVVNTLLMDSSYKLTF

SEQ ID NO: 45588 - protein, 13 aa, Homo sapiens
  CDR3 for beta chain variable domain of TCR clone 22794 (TRBV11-2, TRBJ2-1)
CASSSEAYNEQFF

SEQ ID NO: 45589 - protein, 11 aa, Homo sapiens
  CDR3 for alpha chain variable domain of TCR clone 22795 (TRAV1-2, TRAJ20)
CAVANDYKLSF

SEQ ID NO: 45590 - protein, 18 aa, Homo sapiens
  CDR3 for beta chain variable domain of TCR clone 22795 (TRBV20-1, TRBJ2-6)
CGAETTPTHGSGANVLTF

SEQ ID NO: 45591 - protein, 14 aa, Homo sapiens
  CDR3 for alpha chain variable domain of TCR clone 22796 (TRAV25, TRAJ35)
CARRMEGFGNVLHF

SEQ ID NO: 45592 - protein, 13 aa, Homo sapiens
  CDR3 for beta chain variable domain of TCR clone 22796 (TRBV7-2, TRBJ1-4)
CASSLAGLEKLFF

SEQ ID NO: 45593 - protein, 15 aa, Homo sapiens
  CDR3 for alpha chain variable domain of TCR clone 22797 (TRAV25, TRAJ52)
CAGRPGGTSYGKLTF

SEQ ID NO: 45594 - protein, 17 aa, Homo sapiens
  CDR3 for beta chain variable domain of TCR clone 22797 (TRBV7-8, TRBJ2-6)
CASSAGTGGARANVLTF

SEQ ID NO: 45595 - protein, 13 aa, Homo sapiens
  CDR3 for alpha chain variable domain of TCR clone 22798 (TRAV27, TRAJ42)
CAGARGSQGNLIF

SEQ ID NO: 45596 - protein, 15 aa, Homo sapiens
  CDR3 for beta chain variable domain of TCR clone 22798 (TRBV10-3, TRBJ2-2)
CAIRSDREDTGELFF

SEQ ID NO: 45597 - protein, 14 aa, Homo sapiens
  CDR3 for alpha chain variable domain of TCR clone 22799 (TRAV12-2, TRAJ5)
CAVNRSTGRRALTF

SEQ ID NO: 45598 - protein, 12 aa, Homo sapiens
  CDR3 for beta chain variable domain of TCR clone 22799 (TRBV19, TRBJ1-5)
CASSIARQPQHF

SEQ ID NO: 45599 - protein, 12 aa, Homo sapiens
  CDR3 for alpha chain variable domain of TCR clone 22800 (TRAV17, TRAJ12)
CATLRSSYKLIF

SEQ ID NO: 45600 - protein, 16 aa, Homo sapiens
  CDR3 for beta chain variable domain of TCR clone 22800 (TRBV28, TRBJ2-7)
CASSLFSETGGPEQYF

SEQ ID NO: 45601 - protein, 15 aa, Homo sapiens
  CDR3 for alpha chain variable domain of TCR clone 22801 (TRAV20, TRAJ4)
CAVEGSSGGCNKLIF

SEQ ID NO: 45602 - protein, 14 aa, Homo sapiens
  CDR3 for beta chain variable domain of TCR clone 22801 (TRBV7-8, TRBJ2-7)
CASTLGGALGEQYF

SEQ ID NO: 45603 - protein, 12 aa, Homo sapiens
  CDR3 for alpha chain variable domain of TCR clone 22802 (TRAV12-3, TRAJ17)
CAMTLTGNKLTF

SEQ ID NO: 45604 - protein, 13 aa, Homo sapiens
  CDR3 for beta chain variable domain of TCR clone 22802 (TRBV6-1, TRBJ1-1)
CASSRQGNTEAFF

SEQ ID NO: 45605 - protein, 18 aa, Homo sapiens
  CDR3 for alpha chain variable domain of TCR clone 22803 (TRAV13-1, TRAJ52)
CAASKRSAGGTSYGKLTF

SEQ ID NO: 45606 - protein, 13 aa, Homo sapiens
  CDR3 for beta chain variable domain of TCR clone 22803 (TRBV7-9, TRBJ1-2)
CASSLKQNYGYTF

SEQ ID NO: 45607 - protein, 17 aa, Homo sapiens
  CDR3 for alpha chain variable domain of TCR clone 22804 (TRAV3, TRAJ6)
CAVRDGPRAGGSYIPTF

SEQ ID NO: 45608 - protein, 13 aa, Homo sapiens
  CDR3 for beta chain variable domain of TCR clone 22804 (TRBV7-3, TRBJ2-5)
CASSFRGGETQYF

SEQ ID NO: 45609 - protein, 16 aa, Homo sapiens
  CDR3 for alpha chain variable domain of TCR clone 22805 (TRAV4, TRAJ18)
CCVLLIGGPTLGRLYF

SEQ ID NO: 45610 - protein, 12 aa, Homo sapiens
  CDR3 for beta chain variable domain of TCR clone 22805 (TRBV6-3, TRBJ2-7)
CASSLTPYEQYF

SEQ ID NO: 45611 - protein, 15 aa, Homo sapiens
  CDR3 for alpha chain variable domain of TCR clone 22806 (TRAV12-2, TRAJ53)
CAVNGGGGSNYKLTF

SEQ ID NO: 45612 - protein, 15 aa, Homo sapiens
  CDR3 for beta chain variable domain of TCR clone 22806 (TRBV7-2, TRBJ2-1)
CASSFDPGRRNEQFF

SEQ ID NO: 45613 - protein, 14 aa, Homo sapiens
  CDR3 for alpha chain variable domain of TCR clone 22807 (TRAV8-4, TRAJ9)
CAVRINTGGFKTIF

SEQ ID NO: 45614 - protein, 15 aa, Homo sapiens
  CDR3 for beta chain variable domain of TCR clone 22807 (TRBV12-4, TRBJ2-5)
CASSPPTGLQETQYF

SEQ ID NO: 45615 - protein, 13 aa, Homo sapiens
  CDR3 for alpha chain variable domain of TCR clone 22808 (TRAV3, TRAJ29)
CAVRDIIDTPLVF

SEQ ID NO: 45616 - protein, 14 aa, Homo sapiens
  CDR3 for beta chain variable domain of TCR clone 22808 (TRBV27, TRBJ2-1)
CAGSATGGYNEQFF

SEQ ID NO: 45617 - protein, 15 aa, Homo sapiens
  CDR3 for alpha chain variable domain of TCR clone 22809 (TRAV1-1, TRAJ20)
CAVRDNVANDYKLSF

SEQ ID NO: 45618 - protein, 17 aa, Homo sapiens
  CDR3 for beta chain variable domain of TCR clone 22809 (TRBV7-2, TRBJ2-3)
CASSLAGGLAGTAGQYF

SEQ ID NO: 45619 - protein, 13 aa, Homo sapiens
  CDR3 for alpha chain variable domain of TCR clone 22810 (TRAV8-3, TRAJ44)
CAVVPGTASKLTF

SEQ ID NO: 45620 - protein, 14 aa, Homo sapiens
  CDR3 for beta chain variable domain of TCR clone 22810 (TRBV11-3, TRBJ2-3)
CASSRLARTDTQYF

SEQ ID NO: 45621 - protein, 15 aa, Homo sapiens
  CDR3 for alpha chain variable domain of TCR clone 22811 (TRAV17, TRAJ16)
CAAALRFSDGQKLLF

SEQ ID NO: 45622 - protein, 15 aa, Homo sapiens
  CDR3 for beta chain variable domain of TCR clone 22811 (TRBV20-1, TRBJ1-1)
CSASRGVTGNTEAFF

SEQ ID NO: 45623 - protein, 23 aa, Homo sapiens
  CDR3 for alpha chain variable domain of TCR clone 22812 (TRAV1-1, TRAJ11)
LLQELQMKDSASYFCAGYGTLTF

SEQ ID NO: 45624 - protein, 15 aa, Homo sapiens
  CDR3 for beta chain variable domain of TCR clone 22812 (TRBV6-5, TRBJ2-1)
CASRGDFDSYNEQFF

SEQ ID NO: 45625 - protein, 12 aa, Homo sapiens
  CDR3 for alpha chain variable domain of TCR clone 22813 (TRAV2, TRAJ9)
CAVGAGGFKTIF

SEQ ID NO: 45626 - protein, 16 aa, Homo sapiens
  CDR3 for beta chain variable domain of TCR clone 22813 (TRBV13, TRBJ2-2)
CTSSPRTGEHTGELFF

SEQ ID NO: 45627 - protein, 14 aa, Homo sapiens
  CDR3 for alpha chain variable domain of TCR clone 22814 (TRAV12-3, TRAJ9)
CAMSPNTGGFKPIF

SEQ ID NO: 45628 - protein, 12 aa, Homo sapiens
  CDR3 for beta chain variable domain of TCR clone 22814 (TRBV19, TRBJ1-5)
CASSIAQQPQHF

SEQ ID NO: 45629 - protein, 13 aa, Homo sapiens
  CDR3 for alpha chain variable domain of TCR clone 22815 (TRAV1-1, TRAJ9)
CASKNTGGFKTIF

SEQ ID NO: 45630 - protein, 14 aa, Homo sapiens
  CDR3 for beta chain variable domain of TCR clone 22815 (TRBV20-1, TRBJ2-1)
CSAQIGGSANEQFF

SEQ ID NO: 45631 - protein, 23 aa, Homo sapiens
  CDR3 for alpha chain variable domain of TCR clone 22816 (TRAV26-1, TRAJ38)
CITDNAGNNHIQNPDPAVYQLRD

SEQ ID NO: 45632 - protein, 13 aa, Homo sapiens
  CDR3 for beta chain variable domain of TCR clone 22816 (TRBV20-1, TRBJ1-1)
CSARGGGNTEAFF

SEQ ID NO: 45633 - protein, 12 aa, Homo sapiens
  CDR3 for alpha chain variable domain of TCR clone 22817 (TRAV17, TRAJ4)
CATDGGYNKLIF

SEQ ID NO: 45634 - protein, 13 aa, Homo sapiens
  CDR3 for beta chain variable domain of TCR clone 22817 (TRBV29-1, TRBJ2-2)
CSTTGVNTGELFL

SEQ ID NO: 45635 - protein, 10 aa, Homo sapiens
  CDR3 for alpha chain variable domain of TCR clone 22818 (TRAV30, TRAJ48)
CGIGNEKLTF

SEQ ID NO: 45636 - protein, 13 aa, Homo sapiens
  CDR3 for beta chain variable domain of TCR clone 22818 (TRBV2, TRBJ1-1)
CASSVLMNTEAFF

SEQ ID NO: 45637 - protein, 13 aa, Homo sapiens
  CDR3 for alpha chain variable domain of TCR clone 22819 (TRAV35, TRAJ57)
CAGSQGGSGKLVF

SEQ ID NO: 45638 - protein, 15 aa, Homo sapiens
  CDR3 for beta chain variable domain of TCR clone 22819 (TRBV20-1, TRBJ2-7)
CSARDRVSGMDEQYF

SEQ ID NO: 45639 - protein, 18 aa, Homo sapiens
  CDR3 for alpha chain variable domain of TCR clone 22820 (TRAV12-2, TRAJ52)
CAMSVGGAGGTSYGKLTF

SEQ ID NO: 45640 - protein, 17 aa, Homo sapiens
  CDR3 for beta chain variable domain of TCR clone 22820 (TRBV13, TRBJ2-3)
CASSLSRVAGGRNTQYF

SEQ ID NO: 45641 - protein, 10 aa, Homo sapiens
  CDR3 for alpha chain variable domain of TCR clone 22821 (TRAV23/DV6, TRAJ57)
CAASSTLSQG

SEQ ID NO: 45642 - protein, 17 aa, Homo sapiens
  CDR3 for beta chain variable domain of TCR clone 22821 (TRBV13, TRBJ2-3)
CASSLSRVAGGRNTQYF

SEQ ID NO: 45643 - protein, 12 aa, Homo sapiens
  CDR3 for alpha chain variable domain of TCR clone 22822 (TRAV12-3, TRAJ40)
CAMSSGNYKYIF

SEQ ID NO: 45644 - protein, 15 aa, Homo sapiens
  CDR3 for beta chain variable domain of TCR clone 22822 (TRBV7-3, TRBJ2-2)
CASSETGQGTGELFF

SEQ ID NO: 45645 - protein, 17 aa, Homo sapiens
  CDR3 for alpha chain variable domain of TCR clone 22823 (TRAV13-1, TRAJ52)
CAASSGAGGTRYGKLTF

SEQ ID NO: 45646 - protein, 15 aa, Homo sapiens
  CDR3 for beta chain variable domain of TCR clone 22823 (TRBV2, TRBJ2-1)
CASSELAGSYNEQFF

SEQ ID NO: 45647 - protein, 15 aa, Homo sapiens
  CDR3 for alpha chain variable domain of TCR clone 22824 (TRAV12-3, TRAJ6)
CAMSATTGGSNIPTF

SEQ ID NO: 45648 - protein, 16 aa, Homo sapiens
  CDR3 for beta chain variable domain of TCR clone 22824 (TRBV20-1, TRBJ1-2)
CSASMGQGVANYGYTF

SEQ ID NO: 45649 - protein, 15 aa, Homo sapiens
  CDR3 for alpha chain variable domain of TCR clone 22825 (TRAV25, TRAJ53)
CPTSTSGGSNYKLTF

SEQ ID NO: 45650 - protein, 14 aa, Homo sapiens
  CDR3 for beta chain variable domain of TCR clone 22825 (TRBV11-2, TRBJ2-3)
CASSRLARTDTQYF

SEQ ID NO: 45651 - protein, 15 aa, Homo sapiens
  CDR3 for alpha chain variable domain of TCR clone 22826 (TRAV20, TRAJ6)
CAVRLQSGGSYIPTF

SEQ ID NO: 45652 - protein, 17 aa, Homo sapiens
  CDR3 for beta chain variable domain of TCR clone 22826 (TRBV20-1, TRBJ2-1)
CSASSSGLAGSYNEQFF

SEQ ID NO: 45653 - protein, 15 aa, Homo sapiens
  CDR3 for alpha chain variable domain of TCR clone 22827 (TRAV35, TRAJ40)
CAGQLGTSGTYKYIF

SEQ ID NO: 45654 - protein, 14 aa, Homo sapiens
  CDR3 for beta chain variable domain of TCR clone 22827 (TRBV7-3, TRBJ2-1)
CASSSAGGTNEQFF

SEQ ID NO: 45655 - protein, 14 aa, Homo sapiens
  CDR3 for alpha chain variable domain of TCR clone 22828 (TRAV20, TRAJ42)
CAVQAGGSQGNLIF

SEQ ID NO: 45656 - protein, 14 aa, Homo sapiens
  CDR3 for beta chain variable domain of TCR clone 22828 (TRBV28, TRBJ1-2)
SASRIQGANYGYTF

SEQ ID NO: 45657 - protein, 10 aa, Homo sapiens
  CDR3 for alpha chain variable domain of TCR clone 22829 (TRAV16, TRAJ22)
SAMYLRQLTF

SEQ ID NO: 45658 - protein, 15 aa, Homo sapiens
  CDR3 for beta chain variable domain of TCR clone 22829 (TRBV7-9, TRBJ1-6)
CAGSSPGRGNSPLHF

SEQ ID NO: 45659 - protein, 13 aa, Homo sapiens
  CDR3 for alpha chain variable domain of TCR clone 22830 (TRAV3, TRAJ27)
YAVRPLGAGKSTF

SEQ ID NO: 45660 - protein, 13 aa, Homo sapiens
  CDR3 for beta chain variable domain of TCR clone 22830 (TRBV7-9, TRBJ2-3)
CASSPGSTDTQYF

SEQ ID NO: 45661 - protein, 12 aa, Homo sapiens
  CDR3 for alpha chain variable domain of TCR clone 22831 (TRAV2, TRAJ40)
CCVTSGTYKYIF

SEQ ID NO: 45662 - protein, 14 aa, Homo sapiens
  CDR3 for beta chain variable domain of TCR clone 22831 (TRBV19, TRBJ2-1)
CASPTFVLSGEQFF

SEQ ID NO: 45663 - protein, 14 aa, Homo sapiens
  CDR3 for alpha chain variable domain of TCR clone 22832 (TRAV30, TRAJ33)
CGTVAPRSNYQLIW

SEQ ID NO: 45664 - protein, 16 aa, Homo sapiens
  CDR3 for beta chain variable domain of TCR clone 22832 (TRBV3-1, TRBJ2-5)
CASNPGQFNGFGTQYF

SEQ ID NO: 45665 - protein, 14 aa, Homo sapiens
  CDR3 for alpha chain variable domain of TCR clone 22833 (TRAV35, TRAJ33)
CAGSSQDSNYQLIW

SEQ ID NO: 45666 - protein, 15 aa, Homo sapiens
  CDR3 for beta chain variable domain of TCR clone 22833 (TRBV20-1, TRBJ2-7)
CSAKSGTSGAYEQYF

SEQ ID NO: 45667 - protein, 11 aa, Homo sapiens
  CDR3 for alpha chain variable domain of TCR clone 22834 (TRAV1-1, TRAJ23)
CAVRQGGKLIS

SEQ ID NO: 45668 - protein, 13 aa, Homo sapiens
  CDR3 for beta chain variable domain of TCR clone 22834 (TRBV11-2, TRBJ2-5)
CASSRGPSETQYF

SEQ ID NO: 45669 - protein, 11 aa, Homo sapiens
  CDR3 for alpha chain variable domain of TCR clone 22835 (TRAV12-1, TRAJ30)
CVVNGQDKIIF

SEQ ID NO: 45670 - protein, 12 aa, Homo sapiens
  CDR3 for beta chain variable domain of TCR clone 22835 (TRBV11-2, TRBJ2-2)
CASSLGGGELFF

SEQ ID NO: 45671 - protein, 12 aa, Homo sapiens
  CDR3 for alpha chain variable domain of TCR clone 22836 (TRAV12-3, TRAJ10)
CAPAGGGNKLTF

SEQ ID NO: 45672 - protein, 18 aa, Homo sapiens
  CDR3 for beta chain variable domain of TCR clone 22836 (TRBV6-3, TRBJ2-5)
CASSYWPSGRGAQETQYF

SEQ ID NO: 45673 - protein, 12 aa, Homo sapiens
  CDR3 for alpha chain variable domain of TCR clone 22837 (TRAV3, TRAJ26)
CAVRDYGQNFVS

SEQ ID NO: 45674 - protein, 16 aa, Homo sapiens
  CDR3 for beta chain variable domain of TCR clone 22837 (TRBV11-2, TRBJ1-2)
CASSPSGREANYGYTF

SEQ ID NO: 45675 - protein, 12 aa, Homo sapiens
  CDR3 for alpha chain variable domain of TCR clone 22838 (TRAV12-3, TRAJ17)
CAMTPTGNKLTF

SEQ ID NO: 45676 - protein, 13 aa, Homo sapiens
  CDR3 for beta chain variable domain of TCR clone 22838 (TRBV7-9, TRBJ1-2)
CASSLKQNYGYTF

SEQ ID NO: 45677 - protein, 15 aa, Homo sapiens
  CDR3 for alpha chain variable domain of TCR clone 22839 (TRAV17, TRAJ16)
CATALRFSDGQKLLF

SEQ ID NO: 45678 - protein, 15 aa, Homo sapiens
  CDR3 for beta chain variable domain of TCR clone 22839 (TRBV20-1, TRBJ1-1)
CSASRGVTGNTEALF

SEQ ID NO: 45679 - protein, 13 aa, Homo sapiens
  CDR3 for alpha chain variable domain of TCR clone 22840 (TRAV29/DV5, TRAJ31)
CAASRNNNARLMF

SEQ ID NO: 45680 - protein, 14 aa, Homo sapiens
  CDR3 for beta chain variable domain of TCR clone 22840 (TRBV18, TRBJ2-5)
CASSPPGHQETQYF

SEQ ID NO: 45681 - protein, 13 aa, Homo sapiens
  CDR3 for alpha chain variable domain of TCR clone 22841 (TRAV12-1, TRAJ16)
CVVNGPDGQKPLF

SEQ ID NO: 45682 - protein, 13 aa, Homo sapiens
  CDR3 for beta chain variable domain of TCR clone 22841 (TRBV2, TRBJ1-1)
CARNPTGGFHAFF

SEQ ID NO: 45683 - protein, 13 aa, Homo sapiens
  CDR3 for alpha chain variable domain of TCR clone 22842 (TRAV20, TRAJ37)
CAGCFSNTGKLIF

SEQ ID NO: 45684 - protein, 11 aa, Homo sapiens
  CDR3 for beta chain variable domain of TCR clone 22842 (TRBV12-4, TRBJ2-3)
CASTATDTQYF

SEQ ID NO: 45685 - protein, 17 aa, Homo sapiens
  CDR3 for alpha chain variable domain of TCR clone 22843 (TRAV13-1, TRAJ52)
CSASSGAGGTSYGKLTF

SEQ ID NO: 45686 - protein, 15 aa, Homo sapiens
  CDR3 for beta chain variable domain of TCR clone 22843 (TRBV2, TRBJ2-1)
CASSELAGSYNEQFF

SEQ ID NO: 45687 - protein, 14 aa, Homo sapiens
  CDR3 for alpha chain variable domain of TCR clone 22844 (TRAV4, TRAJ9)
CLVGSGTGGFKTIF

SEQ ID NO: 45688 - protein, 15 aa, Homo sapiens
  CDR3 for beta chain variable domain of TCR clone 22844 (TRBV7-2, TRBJ2-1)
CASSLASGRVDEQFF

SEQ ID NO: 45689 - protein, 13 aa, Homo sapiens
  CDR3 for alpha chain variable domain of TCR clone 22845 (TRAV8-3, TRAJ28)
CAVGAVGSYQLTF

SEQ ID NO: 45690 - protein, 14 aa, Homo sapiens
  CDR3 for beta chain variable domain of TCR clone 22845 (TRBV7-2, TRBJ2-7)
CASRSQGEAYEQYF

SEQ ID NO: 45691 - protein, 14 aa, Homo sapiens
  CDR3 for alpha chain variable domain of TCR clone 22846 (TRAV35, TRAJ33)
CAGSSQDSNYQLIW

SEQ ID NO: 45692 - protein, 15 aa, Homo sapiens
  CDR3 for beta chain variable domain of TCR clone 22846 (TRBV20-1, TRBJ2-7)
CSAESGTSGVYEQYF

SEQ ID NO: 45693 - protein, 15 aa, Homo sapiens
  CDR3 for alpha chain variable domain of TCR clone 22847 (TRAV8-2, TRAJ40)
CVVLGTTSGTYKYIF

SEQ ID NO: 45694 - protein, 16 aa, Homo sapiens
  CDR3 for beta chain variable domain of TCR clone 22847 (TRBV7-3, TRBJ2-1)
CASSVEGYRSYNEQFF

SEQ ID NO: 45695 - protein, 13 aa, Homo sapiens
  CDR3 for alpha chain variable domain of TCR clone 22848 (TRAV8-6, TRAJ21)
CAVSPSSLNKFYF

SEQ ID NO: 45696 - protein, 14 aa, Homo sapiens
  CDR3 for beta chain variable domain of TCR clone 22848 (TRBV7-9, TRBJ2-5)
CASSLDTAQGTQYF

SEQ ID NO: 45697 - protein, 18 aa, Homo sapiens
  CDR3 for alpha chain variable domain of TCR clone 22849 (TRAV12-3, TRAJ52)
CATSVGGAGGTSYGKLTF

SEQ ID NO: 45698 - protein, 15 aa, Homo sapiens
  CDR3 for beta chain variable domain of TCR clone 22849 (TRBV27, TRBJ1-6)
CASSFDRGLGSPLHF

SEQ ID NO: 45699 - protein, 17 aa, Homo sapiens
  CDR3 for alpha chain variable domain of TCR clone 22850 (TRAV26-1, TRAJ53)
FIVRVDDSGGSNYKLTF

SEQ ID NO: 45700 - protein, 15 aa, Homo sapiens
  CDR3 for beta chain variable domain of TCR clone 22850 (TRBV20-1, TRBJ2-7)
CSARVPAAYFYEQYF

SEQ ID NO: 45701 - protein, 13 aa, Homo sapiens
  CDR3 for alpha chain variable domain of TCR clone 22851 (TRAV26-2, TRAJ43)
CILRAVNNNDMRF

SEQ ID NO: 45702 - protein, 13 aa, Homo sapiens
  CDR3 for beta chain variable domain of TCR clone 22851 (TRBV20-1, TRBJ2-2)
CSASAAGTGELFF

SEQ ID NO: 45703 - protein, 15 aa, Homo sapiens
  CDR3 for alpha chain variable domain of TCR clone 22852 (TRAV26-1, TRAJ44)
CIVRATTGTASKLTF

SEQ ID NO: 45704 - protein, 16 aa, Homo sapiens
  CDR3 for beta chain variable domain of TCR clone 22852 (TRBV7-7, TRBJ2-1)
CASSLASGTSYNEQFF

SEQ ID NO: 45705 - protein, 16 aa, Homo sapiens
  CDR3 for alpha chain variable domain of TCR clone 22853 (TRAV4, TRAJ9)
CLVGDPNRPGGFKAIF

SEQ ID NO: 45706 - protein, 16 aa, Homo sapiens
  CDR3 for beta chain variable domain of TCR clone 22853 (TRBV28, TRBJ1-4)
CASSPPYRGRSEKLFF

SEQ ID NO: 45707 - protein, 13 aa, Homo sapiens
  CDR3 for alpha chain variable domain of TCR clone 22854 (TRAV12-3, TRAJ20)
CAMSATNDYKLSF

SEQ ID NO: 45708 - protein, 16 aa, Homo sapiens
  CDR3 for beta chain variable domain of TCR clone 22854 (TRBV18, TRBJ2-7)
CASSPYRDGQAYEQYF

SEQ ID NO: 45709 - protein, 14 aa, Homo sapiens
  CDR3 for alpha chain variable domain of TCR clone 22855 (TRAV12-1, TRAJ30)
CVVNIGGRDDKIIF

SEQ ID NO: 45710 - protein, 13 aa, Homo sapiens
  CDR3 for beta chain variable domain of TCR clone 22855 (TRBV10-3, TRBJ2-7)
CASKLAVNYEQYF

SEQ ID NO: 45711 - protein, 13 aa, Homo sapiens
  CDR3 for alpha chain variable domain of TCR clone 22856 (TRAV8-3, TRAJ48)
CCGCNFGSEKLTF

SEQ ID NO: 45712 - protein, 12 aa, Homo sapiens
  CDR3 for beta chain variable domain of TCR clone 22856 (TRBV7-2, TRBJ2-5)
CASSQYQETQYF

SEQ ID NO: 45713 - protein, 14 aa, Homo sapiens
  CDR3 for alpha chain variable domain of TCR clone 22857 (TRAV29/DV5, TRAJ56)
CAATFTGANSKLTF

SEQ ID NO: 45714 - protein, 14 aa, Homo sapiens
  CDR3 for beta chain variable domain of TCR clone 22857 (TRBV28, TRBJ1-1)
CASSFLRENTEAFF

SEQ ID NO: 45715 - protein, 15 aa, Homo sapiens
  CDR3 for alpha chain variable domain of TCR clone 22858 (TRAV26-1, TRAJ29)
CIVRFEGSGNTPLVF

SEQ ID NO: 45716 - protein, 14 aa, Homo sapiens
  CDR3 for beta chain variable domain of TCR clone 22858 (TRBV18, TRBJ2-5)
CASSPGVSQETQYF

SEQ ID NO: 45717 - protein, 12 aa, Homo sapiens
  CDR3 for alpha chain variable domain of TCR clone 22859 (TRAV2, TRAJ5)
CALDPGRRALTF

SEQ ID NO: 45718 - protein, 15 aa, Homo sapiens
  CDR3 for beta chain variable domain of TCR clone 22859 (TRBV10-3, TRBJ2-1)
CAISDVQDRAYEQFF

SEQ ID NO: 45719 - protein, 10 aa, Homo sapiens
  CDR3 for alpha chain variable domain of TCR clone 22860 (TRAV1-2, TRAJ31)
CVSEDARLMF

SEQ ID NO: 45720 - protein, 14 aa, Homo sapiens
  CDR3 for beta chain variable domain of TCR clone 22860 (TRBV19, TRBJ2-1)
CASPTFVLSGEQLF

SEQ ID NO: 45721 - protein, 15 aa, Homo sapiens
  CDR3 for alpha chain variable domain of TCR clone 22861 (TRAV12-2, TRAJ48)
CAAQLSNFGNEKLTF

SEQ ID NO: 45722 - protein, 14 aa, Homo sapiens
  CDR3 for beta chain variable domain of TCR clone 22861 (TRBV20-1, TRBJ1-1)
CSAQTRIGGTEAFF

SEQ ID NO: 45723 - protein, 12 aa, Homo sapiens
  CDR3 for alpha chain variable domain of TCR clone 22862 (TRAV21, TRAJ13)
PGPSGGYRKVTF

SEQ ID NO: 45724 - protein, 15 aa, Homo sapiens
  CDR3 for beta chain variable domain of TCR clone 22862 (TRBV7-9, TRBJ1-6)
CASSSPGRGNSPLHF

SEQ ID NO: 45725 - protein, 13 aa, Homo sapiens
  CDR3 for alpha chain variable domain of TCR clone 22863 (TRAV17, TRAJ9)
CATDYTGGFKTIF

SEQ ID NO: 45726 - protein, 14 aa, Homo sapiens
  CDR3 for beta chain variable domain of TCR clone 22863 (TRBV19, TRBJ2-5)
CASSMTGQRETQYF

SEQ ID NO: 45727 - protein, 14 aa, Homo sapiens
  CDR3 for alpha chain variable domain of TCR clone 22864 (TRAV14/DV4, TRAJ26)
CTMREGTYGQNFVF

SEQ ID NO: 45728 - protein, 16 aa, Homo sapiens
  CDR3 for beta chain variable domain of TCR clone 22864 (TRBV9, TRBJ1-2)
CASSVEEKVSPYGYTF

SEQ ID NO: 45729 - protein, 14 aa, Homo sapiens
  CDR3 for alpha chain variable domain of TCR clone 22865 (TRAV35, TRAJ22)
CAGLRPGSARQLTF

SEQ ID NO: 45730 - protein, 13 aa, Homo sapiens
  CDR3 for beta chain variable domain of TCR clone 22865 (TRBV12-5, TRBJ2-3)
CASGDRQSDTQYF

SEQ ID NO: 45731 - protein, 15 aa, Homo sapiens
  CDR3 for alpha chain variable domain of TCR clone 22866 (TRAV21, TRAJ37)
CTVRPTLSNTGKLIF

SEQ ID NO: 45732 - protein, 16 aa, Homo sapiens
  CDR3 for beta chain variable domain of TCR clone 22866 (TRBV24-1, TRBJ2-3)
CATSDRRQDLTDTQYF

SEQ ID NO: 45733 - protein, 10 aa, Homo sapiens
  CDR3 for alpha chain variable domain of TCR clone 22867 (TRAV21, TRAJ31)
CAVDNARLMF

SEQ ID NO: 45734 - protein, 13 aa, Homo sapiens
  CDR3 for beta chain variable domain of TCR clone 22867 (TRBV4-1, TRBJ1-1)
CTSSRKMNTEAFF

SEQ ID NO: 45735 - protein, 14 aa, Homo sapiens
  CDR3 for alpha chain variable domain of TCR clone 22868 (TRAV26-1, TRAJ38)
CIADNAGNNRKLIW

SEQ ID NO: 45736 - protein, 14 aa, Homo sapiens
  CDR3 for beta chain variable domain of TCR clone 22868 (TRBV18, TRBJ2-5)
CASSPGVSQETQYF

SEQ ID NO: 45737 - protein, 14 aa, Homo sapiens
  CDR3 for alpha chain variable domain of TCR clone 22869 (TRAV29/DV5, TRAJ36)
CAARRKTGENNLFF

SEQ ID NO: 45738 - protein, 14 aa, Homo sapiens
  CDR3 for beta chain variable domain of TCR clone 22869 (TRBV12-5, TRBJ2-5)
CASGSRTHQETQYF

SEQ ID NO: 45739 - protein, 15 aa, Homo sapiens
  CDR3 for alpha chain variable domain of TCR clone 22870 (TRAV8-3, TRAJ45)
CASSYSGGGADGLTF

SEQ ID NO: 45740 - protein, 13 aa, Homo sapiens
  CDR3 for beta chain variable domain of TCR clone 22870 (TRBV10-3, TRBJ2-7)
CASKLSVNYEQYF

SEQ ID NO: 45741 - protein, 12 aa, Homo sapiens
  CDR3 for alpha chain variable domain of TCR clone 22871 (TRAV12-3, TRAJ20)
CAMVRGDYKLSF

SEQ ID NO: 45742 - protein, 12 aa, Homo sapiens
  CDR3 for beta chain variable domain of TCR clone 22871 (TRBV11-2, TRBJ2-2)
CASSLGGGELFF

SEQ ID NO: 45743 - protein, 13 aa, Homo sapiens
  CDR3 for alpha chain variable domain of TCR clone 22872 (TRAV8-3, TRAJ28)
CAVGAFGSYQLTF

SEQ ID NO: 45744 - protein, 15 aa, Homo sapiens
  CDR3 for beta chain variable domain of TCR clone 22872 (TRBV7-9, TRBJ1-5)
CASSQGHQPNQPQHF

SEQ ID NO: 45745 - protein, 18 aa, Homo sapiens
  CDR3 for alpha chain variable domain of TCR clone 22873 (TRAV29/DV5, TRAJ52)
CAAGFRGAGGTSYGKLTF

SEQ ID NO: 45746 - protein, 16 aa, Homo sapiens
  CDR3 for beta chain variable domain of TCR clone 22873 (TRBV7-3, TRBJ2-2)
CASSLKRGTVSGELFF

SEQ ID NO: 45747 - protein, 15 aa, Homo sapiens
  CDR3 for alpha chain variable domain of TCR clone 22874 (TRAV12-2, TRAJ53)
CAVNGGGGRNYKLTF

SEQ ID NO: 45748 - protein, 13 aa, Homo sapiens
  CDR3 for beta chain variable domain of TCR clone 22874 (TRBV3-1, TRBJ1-1)
CASSPGVITEAFF

SEQ ID NO: 45749 - protein, 15 aa, Homo sapiens
  CDR3 for alpha chain variable domain of TCR clone 22875 (TRAV25, TRAJ52)
CAGRPGGTSYGKLTF

SEQ ID NO: 45750 - protein, 17 aa, Homo sapiens
  CDR3 for beta chain variable domain of TCR clone 22875 (TRBV7-8, TRBJ2-6)
CASSAGTGGAGASVLTF

SEQ ID NO: 45751 - protein, 12 aa, Homo sapiens
  CDR3 for alpha chain variable domain of TCR clone 22876 (TRAV8-3, TRAJ20)
CAVGANDYKLSF

SEQ ID NO: 45752 - protein, 16 aa, Homo sapiens
  CDR3 for beta chain variable domain of TCR clone 22876 (TRBV19, TRBJ2-2)
SASRSPGTGATGELFF

SEQ ID NO: 45753 - protein, 11 aa, Homo sapiens
  CDR3 for alpha chain variable domain of TCR clone 22877 (TRAV3, TRAJ21)
CAVGNINKFYF

SEQ ID NO: 45754 - protein, 16 aa, Homo sapiens
  CDR3 for beta chain variable domain of TCR clone 22877 (TRBV19, TRBJ2-1)
CASSKAGPSSYNEQFF

SEQ ID NO: 45755 - protein, 12 aa, Homo sapiens
  CDR3 for alpha chain variable domain of TCR clone 22878 (TRAV12-3, TRAJ17)
CAMTLTGNKLTF

SEQ ID NO: 45756 - protein, 17 aa, Homo sapiens
  CDR3 for beta chain variable domain of TCR clone 22878 (TRBV11-2, TRBJ2-1)
CASSLCPPGVEYNEQFF

SEQ ID NO: 45757 - protein, 14 aa, Homo sapiens
  CDR3 for alpha chain variable domain of TCR clone 22879 (TRAV21, TRAJ35)
CAVMPIGFGNVLHC

SEQ ID NO: 45758 - protein, 12 aa, Homo sapiens
  CDR3 for beta chain variable domain of TCR clone 22879 (TRBV7-9, TRBJ2-7)
CASSIKREEQYV

SEQ ID NO: 45759 - protein, 13 aa, Homo sapiens
  CDR3 for alpha chain variable domain of TCR clone 22880 (TRAV1-1, TRAJ31)
CASYLNNNARLMF

SEQ ID NO: 45760 - protein, 13 aa, Homo sapiens
  CDR3 for beta chain variable domain of TCR clone 22880 (TRBV15, TRBJ1-6)
CATSGGLNSPLLF

SEQ ID NO: 45761 - protein, 14 aa, Homo sapiens
  CDR3 for alpha chain variable domain of TCR clone 22881 (TRAV1-2, TRAJ16)
CAVNRFSDGQKLLF

SEQ ID NO: 45762 - protein, 15 aa, Homo sapiens
  CDR3 for beta chain variable domain of TCR clone 22881 (TRBV3-1, TRBJ2-2)
CASSQDWTRAGELFF

SEQ ID NO: 45763 - protein, 15 aa, Homo sapiens
  CDR3 for alpha chain variable domain of TCR clone 22882 (TRAV26-1, TRAJ29)
CIVSVEGSGNTPLVF

SEQ ID NO: 45764 - protein, 14 aa, Homo sapiens
  CDR3 for beta chain variable domain of TCR clone 22882 (TRBV18, TRBJ2-5)
CASSPGVSQETQYF

SEQ ID NO: 45765 - protein, 14 aa, Homo sapiens
  CDR3 for alpha chain variable domain of TCR clone 22883 (TRAV12-3, TRAJ42)
CAMNYGGSQGNLIF

SEQ ID NO: 45766 - protein, 15 aa, Homo sapiens
  CDR3 for beta chain variable domain of TCR clone 22883 (TRBV5-7, TRBJ1-5)
CASSYGKLWDQHQHF

SEQ ID NO: 45767 - protein, 15 aa, Homo sapiens
  CDR3 for alpha chain variable domain of TCR clone 22884 (TRAV2, TRAJ15)
CAVEDRGQAGTALVF

SEQ ID NO: 45768 - protein, 13 aa, Homo sapiens
  CDR3 for beta chain variable domain of TCR clone 22884 (TRBV10-2, TRBJ2-7)
CASGASGGYEQYF

SEQ ID NO: 45769 - protein, 13 aa, Homo sapiens
  CDR3 for alpha chain variable domain of TCR clone 22885 (TRAV20, TRAJ37)
CAGCSSNTGKLIF

SEQ ID NO: 45770 - protein, 11 aa, Homo sapiens
  CDR3 for beta chain variable domain of TCR clone 22885 (TRBV12-4, TRBJ2-3)
YASTATDTQYF

SEQ ID NO: 45771 - protein, 12 aa, Homo sapiens
  CDR3 for alpha chain variable domain of TCR clone 22886 (TRAV3, TRAJ20)
CAVRDGDYKLGF

SEQ ID NO: 45772 - protein, 13 aa, Homo sapiens
  CDR3 for beta chain variable domain of TCR clone 22886 (TRBV9, TRBJ2-1)
CASSVGQGGEQFF

SEQ ID NO: 45773 - protein, 15 aa, Homo sapiens
  CDR3 for alpha chain variable domain of TCR clone 22887 (TRAV26-1, TRAJ29)
CIVRVEGSGNTPLVF

SEQ ID NO: 45774 - protein, 14 aa, Homo sapiens
  CDR3 for beta chain variable domain of TCR clone 22887 (TRBV18, TRBJ2-5)
CGSSPGVSQETQYF

SEQ ID NO: 45775 - protein, 14 aa, Homo sapiens
  CDR3 for alpha chain variable domain of TCR clone 22888 (TRAV12-2, TRAJ24)
CAVTPADSWGKLQF

SEQ ID NO: 45776 - protein, 12 aa, Homo sapiens
  CDR3 for beta chain variable domain of TCR clone 22888 (TRBV3-1, TRBJ2-1)
CASGQGSSGQFF

SEQ ID NO: 45777 - protein, 16 aa, Homo sapiens
  CDR3 for alpha chain variable domain of TCR clone 22889 (TRAV30, TRAJ24)
CGTEIVDADSWGKFQF

SEQ ID NO: 45778 - protein, 11 aa, Homo sapiens
  CDR3 for beta chain variable domain of TCR clone 22889 (TRBV6-3, TRBJ2-3)
CATGQADTQYF

SEQ ID NO: 45779 - protein, 13 aa, Homo sapiens
  CDR3 for alpha chain variable domain of TCR clone 22890 (TRAV2, TRAJ40)
CAVVTSGTYKYIF

SEQ ID NO: 45780 - protein, 15 aa, Homo sapiens
  CDR3 for beta chain variable domain of TCR clone 22890 (TRBV11-3, TRBJ2-3)
CASLKDGREWDTQYF

SEQ ID NO: 45781 - protein, 14 aa, Homo sapiens
  CDR3 for alpha chain variable domain of TCR clone 22891 (TRAV17, TRAJ32)
CATDPGGATNELIF

SEQ ID NO: 45782 - protein, 14 aa, Homo sapiens
  CDR3 for beta chain variable domain of TCR clone 22891 (TRBV2, TRBJ1-5)
CASSENRGGQPQHF

SEQ ID NO: 45783 - protein, 15 aa, Homo sapiens
  CDR3 for alpha chain variable domain of TCR clone 22892 (TRAV2, TRAJ9)
CAVEDRGTGGFKTIF

SEQ ID NO: 45784 - protein, 16 aa, Homo sapiens
  CDR3 for beta chain variable domain of TCR clone 22892 (TRBV24-1, TRBJ2-3)
CATSDPGTGATDTQHF

SEQ ID NO: 45785 - protein, 15 aa, Homo sapiens
  CDR3 for alpha chain variable domain of TCR clone 22893 (TRAV35, TRAJ42)
CAGQGYGGSQGNLIS

SEQ ID NO: 45786 - protein, 13 aa, Homo sapiens
  CDR3 for beta chain variable domain of TCR clone 22893 (TRBV7-2, TRBJ1-1)
CASSLVQGAEAFF

SEQ ID NO: 45787 - protein, 15 aa, Homo sapiens
  CDR3 for alpha chain variable domain of TCR clone 22894 (TRAV23/DV6, TRAJ18)
CAARYGGSTLGRLYF

SEQ ID NO: 45788 - protein, 13 aa, Homo sapiens
  CDR3 for beta chain variable domain of TCR clone 22894 (TRBV7-2, TRBJ2-7)
CASSSPSGSEQYF

SEQ ID NO: 45789 - protein, 14 aa, Homo sapiens
  CDR3 for alpha chain variable domain of TCR clone 22895 (TRAV8-3, TRAJ30)
CAVGDMNRDDKIIF

SEQ ID NO: 45790 - protein, 16 aa, Homo sapiens
  CDR3 for beta chain variable domain of TCR clone 22895 (TRBV29-1, TRBJ2-7)
CSVEGAEDGTAYEQYF

SEQ ID NO: 45791 - protein, 14 aa, Homo sapiens
  CDR3 for alpha chain variable domain of TCR clone 22896 (TRAV13-1, TRAJ35)
CAASKGGFGNVVHC

SEQ ID NO: 45792 - protein, 13 aa, Homo sapiens
  CDR3 for beta chain variable domain of TCR clone 22896 (TRBV7-3, TRBJ1-1)
CASSQDWGAEAFF

SEQ ID NO: 45793 - protein, 13 aa, Homo sapiens
  CDR3 for alpha chain variable domain of TCR clone 22897 (TRAV8-3, TRAJ43)
CAVGPDNNNDMRF

SEQ ID NO: 45794 - protein, 12 aa, Homo sapiens
  CDR3 for beta chain variable domain of TCR clone 22897 (TRBV7-2, TRBJ1-6)
CASSLSSSPLLF

SEQ ID NO: 45795 - protein, 17 aa, Homo sapiens
  CDR3 for alpha chain variable domain of TCR clone 22898 (TRAV29/DV5, TRAJ42)
CAASAGNYGGSQGNLIF

SEQ ID NO: 45796 - protein, 14 aa, Homo sapiens
  CDR3 for beta chain variable domain of TCR clone 22898 (TRBV20-1, TRBJ2-3)
CSARSGVSTDTQYF

SEQ ID NO: 45797 - protein, 13 aa, Homo sapiens
  CDR3 for alpha chain variable domain of TCR clone 22899 (TRAV3, TRAJ29)
CAVRDIIETPLVF

SEQ ID NO: 45798 - protein, 14 aa, Homo sapiens
  CDR3 for beta chain variable domain of TCR clone 22899 (TRBV27, TRBJ2-1)
CASSATGGYNEQFF

SEQ ID NO: 45799 - protein, 12 aa, Homo sapiens
  CDR3 for alpha chain variable domain of TCR clone 22900 (TRAV4, TRAJ26)
CLVGDYGQNFVF

SEQ ID NO: 45800 - protein, 16 aa, Homo sapiens
  CDR3 for beta chain variable domain of TCR clone 22900 (TRBV7-2, TRBJ1-2)
YASSSNQDRRGHGYTF

SEQ ID NO: 45801 - protein, 19 aa, Homo sapiens
  CDR3 for alpha chain variable domain of TCR clone 22901 (TRAV3, TRAJ6)
CAVRDRNPSRSGGSYIPTF

SEQ ID NO: 45802 - protein, 15 aa, Homo sapiens
  CDR3 for beta chain variable domain of TCR clone 22901 (TRBV18, TRBJ2-7)
CASSPTVMDSYEQYF

SEQ ID NO: 45803 - protein, 14 aa, Homo sapiens
  CDR3 for alpha chain variable domain of TCR clone 22902 (TRAV21, TRAJ45)
CAVSSGGGADGLAF

SEQ ID NO: 45804 - protein, 15 aa, Homo sapiens
  CDR3 for beta chain variable domain of TCR clone 22902 (TRBV6-1, TRBJ2-4)
CASSEAVWTINIQYF

SEQ ID NO: 45805 - protein, 18 aa, Homo sapiens
  CDR3 for alpha chain variable domain of TCR clone 22903 (TRAV12-3, TRAJ52)
CAMSVGGAGGTSYGKLTF

SEQ ID NO: 45806 - protein, 14 aa, Homo sapiens
  CDR3 for beta chain variable domain of TCR clone 22903 (TRBV7-2, TRBJ2-7)
CASRSQGAAYEQHF

SEQ ID NO: 45807 - protein, 14 aa, Homo sapiens
  CDR3 for alpha chain variable domain of TCR clone 22904 (TRAV2, TRAJ37)
CADDFTSNTGKLIF

SEQ ID NO: 45808 - protein, 15 aa, Homo sapiens
  CDR3 for beta chain variable domain of TCR clone 22904 (TRBV20-1, TRBJ1-1)
CSASRGVTGNTEAFF

SEQ ID NO: 45809 - protein, 15 aa, Homo sapiens
  CDR3 for alpha chain variable domain of TCR clone 22905 (TRAV17, TRAJ57)
CATGPSQGGSEKLVF

SEQ ID NO: 45810 - protein, 16 aa, Homo sapiens
  CDR3 for beta chain variable domain of TCR clone 22905 (TRBV12-4, TRBJ1-5)
CASSRPVGGSNQPQHC

SEQ ID NO: 45811 - protein, 12 aa, Homo sapiens
  CDR3 for alpha chain variable domain of TCR clone 22906 (TRAV3, TRAJ20)
CAVRDGDYKLSF

SEQ ID NO: 45812 - protein, 13 aa, Homo sapiens
  CDR3 for beta chain variable domain of TCR clone 22906 (TRBV4-2, TRBJ1-1)
CASSQAGNTEAFF

SEQ ID NO: 45813 - protein, 13 aa, Homo sapiens
  CDR3 for alpha chain variable domain of TCR clone 22907 (TRAV17, TRAJ9)
RATDYTGGFKTIF

SEQ ID NO: 45814 - protein, 16 aa, Homo sapiens
  CDR3 for beta chain variable domain of TCR clone 22907 (TRBV7-7, TRBJ2-1)
CASSLASGTSYNEQFF

SEQ ID NO: 45815 - protein, 13 aa, Homo sapiens
  CDR3 for alpha chain variable domain of TCR clone 22908 (TRAV29/DV5, TRAJ44)
CAASTGPASKLTF

SEQ ID NO: 45816 - protein, 13 aa, Homo sapiens
  CDR3 for beta chain variable domain of TCR clone 22908 (TRBV19, TRBJ2-7)
CASRKAGGSEQYF

SEQ ID NO: 45817 - protein, 15 aa, Homo sapiens
  CDR3 for alpha chain variable domain of TCR clone 22909 (TRAV8-3, TRAJ11)
CAVGLLNSGYSTLTF

SEQ ID NO: 45818 - protein, 19 aa, Homo sapiens
  CDR3 for beta chain variable domain of TCR clone 22909 (TRBV7-9, TRBJ1-2)
EKSRLLSDRFSSGEDGYTF

SEQ ID NO: 45819 - protein, 12 aa, Homo sapiens
  CDR3 for alpha chain variable domain of TCR clone 22910 (TRAV8-3, TRAJ26)
CAGDNYGQNFFF

SEQ ID NO: 45820 - protein, 12 aa, Homo sapiens
  CDR3 for beta chain variable domain of TCR clone 22910 (TRBV11-2, TRBJ2-2)
CASSLGGGELFF

SEQ ID NO: 45821 - protein, 15 aa, Homo sapiens
  CDR3 for alpha chain variable domain of TCR clone 22911 (TRAV26-1, TRAJ29)
CIVRVEGSGNTPHVF

SEQ ID NO: 45822 - protein, 15 aa, Homo sapiens
  CDR3 for beta chain variable domain of TCR clone 22911 (TRBV7-9, TRBJ1-5)
CASSQGHQPNQPQHF

SEQ ID NO: 45823 - protein, 14 aa, Homo sapiens
  CDR3 for alpha chain variable domain of TCR clone 22912 (TRAV17, TRAJ56)
CATVPAGADSKLTF

SEQ ID NO: 45824 - protein, 13 aa, Homo sapiens
  CDR3 for beta chain variable domain of TCR clone 22912 (TRBV12-4, TRBJ2-2)
CASSITGSGELFF

SEQ ID NO: 45825 - protein, 15 aa, Homo sapiens
  CDR3 for alpha chain variable domain of TCR clone 22913 (TRAV25, TRAJ52)
CAGRPGGTSYGKLTF

SEQ ID NO: 45826 - protein, 17 aa, Homo sapiens
  CDR3 for beta chain variable domain of TCR clone 22913 (TRBV7-8, TRBJ2-6)
CASSAGTEGAGANVLTF

SEQ ID NO: 45827 - protein, 15 aa, Homo sapiens
  CDR3 for alpha chain variable domain of TCR clone 22914 (TRAV4, TRAJ39)
CLVGPNNNAGNILTF

SEQ ID NO: 45828 - protein, 13 aa, Homo sapiens
  CDR3 for beta chain variable domain of TCR clone 22914 (TRBV11-2, TRBJ2-5)
CASSSTGEETQYF

SEQ ID NO: 45829 - protein, 20 aa, Homo sapiens
  CDR3 for alpha chain variable domain of TCR clone 22915 (TRAV26-1, TRAJ42)
CCVLLHRQTYYGGSQGNLIF

SEQ ID NO: 45830 - protein, 16 aa, Homo sapiens
  CDR3 for beta chain variable domain of TCR clone 22915 (TRBV7-3, TRBJ2-2)
CASSLKRGTVSGELFF

SEQ ID NO: 45831 - protein, 16 aa, Homo sapiens
  CDR3 for alpha chain variable domain of TCR clone 22916 (TRAV38-1, TRAJ32)
CAFMKGGGGATKKLIF

SEQ ID NO: 45832 - protein, 13 aa, Homo sapiens
  CDR3 for beta chain variable domain of TCR clone 22916 (TRBV20-1, TRBJ2-5)
CSAREAFQETQYF

SEQ ID NO: 45833 - protein, 20 aa, Homo sapiens
  CDR3 for alpha chain variable domain of TCR clone 22917 (TRAV25, TRAJ21)
TATQTTDVGTYPLSFNKFYF

SEQ ID NO: 45834 - protein, 15 aa, Homo sapiens
  CDR3 for beta chain variable domain of TCR clone 22917 (TRBV20-1, TRBJ2-7)
CSARDRVSGMDEQYF

SEQ ID NO: 45835 - protein, 11 aa, Homo sapiens
  CDR3 for alpha chain variable domain of TCR clone 22918 (TRAV17, TRAJ9)
CGFTGGFETIF

SEQ ID NO: 45836 - protein, 14 aa, Homo sapiens
  CDR3 for beta chain variable domain of TCR clone 22918 (TRBV7-9, TRBJ2-2)
CASSLVQDTGELFF

SEQ ID NO: 45837 - protein, 14 aa, Homo sapiens
  CDR3 for alpha chain variable domain of TCR clone 22919 (TRAV38-1, TRAJ40)
CALRPTSGNYKYIF

SEQ ID NO: 45838 - protein, 14 aa, Homo sapiens
  CDR3 for beta chain variable domain of TCR clone 22919 (TRBV25-1, TRBJ1-1)
CASTHLGGNTEAFF

SEQ ID NO: 45839 - protein, 12 aa, Homo sapiens
  CDR3 for alpha chain variable domain of TCR clone 22920 (TRAV12-3, TRAJ17)
CAMTLTGNKLTF

SEQ ID NO: 45840 - protein, 18 aa, Homo sapiens
  CDR3 for beta chain variable domain of TCR clone 22920 (TRBV4-3, TRBJ1-6)
CASSQETPASSYNSPLLF

SEQ ID NO: 45841 - protein, 11 aa, Homo sapiens
  CDR3 for alpha chain variable domain of TCR clone 22921 (TRAV3, TRAJ21)
CAVGNFNKFYF

SEQ ID NO: 45842 - protein, 15 aa, Homo sapiens
  CDR3 for beta chain variable domain of TCR clone 22921 (TRBV19, TRBJ1-6)
CASSTQGAVGSPLHF

SEQ ID NO: 45843 - protein, 14 aa, Homo sapiens
  CDR3 for alpha chain variable domain of TCR clone 22922 (TRAV23/DV6, TRAJ6)
CAAGRSGGSYIPTF

SEQ ID NO: 45844 - protein, 17 aa, Homo sapiens
  CDR3 for beta chain variable domain of TCR clone 22922 (TRBV20-1, TRBJ2-1)
CSASASGLAGSYNEQFF

SEQ ID NO: 45845 - protein, 14 aa, Homo sapiens
  CDR3 for alpha chain variable domain of TCR clone 22923 (TRAV12-1, TRAJ9)
CVVTGYTGGFKTIL

SEQ ID NO: 45846 - protein, 13 aa, Homo sapiens
  CDR3 for beta chain variable domain of TCR clone 22923 (TRBV20-1, TRBJ1-1)
CSARAGGNTEAFF

SEQ ID NO: 45847 - protein, 12 aa, Homo sapiens
  CDR3 for alpha chain variable domain of TCR clone 22924 (TRAV12-3, TRAJ42)
CAPGGSQGNLIF

SEQ ID NO: 45848 - protein, 13 aa, Homo sapiens
  CDR3 for beta chain variable domain of TCR clone 22924 (TRBV5-7, TRBJ2-6)
CASTSSGANGLTF

SEQ ID NO: 45849 - protein, 10 aa, Homo sapiens
  CDR3 for alpha chain variable domain of TCR clone 22925 (TRAV3, TRAJ30)
CAVREVEIIF

SEQ ID NO: 45850 - protein, 12 aa, Homo sapiens
  CDR3 for beta chain variable domain of TCR clone 22925 (TRBV20-1, TRBJ2-3)
CSADGAGDTQYF

SEQ ID NO: 45851 - protein, 12 aa, Homo sapiens
  CDR3 for alpha chain variable domain of TCR clone 22926 (TRAV12-3, TRAJ17)
CAMTLTGNKLTF

SEQ ID NO: 45852 - protein, 17 aa, Homo sapiens
  CDR3 for beta chain variable domain of TCR clone 22926 (TRBV28, TRBJ2-5)
CASSTPEGDALQETQYF

SEQ ID NO: 45853 - protein, 23 aa, Homo sapiens
  CDR3 for alpha chain variable domain of TCR clone 22927 (TRAV26-1, TRAJ38)
CIADNAGNNHIQNPDPALYQLRD

SEQ ID NO: 45854 - protein, 13 aa, Homo sapiens
  CDR3 for beta chain variable domain of TCR clone 22927 (TRBV20-1, TRBJ1-1)
CSARGGGNTEAFF

SEQ ID NO: 45855 - protein, 13 aa, Homo sapiens
  CDR3 for alpha chain variable domain of TCR clone 22928 (TRAV12-2, TRAJ15)
CAVFNQAGTALIF

SEQ ID NO: 45856 - protein, 14 aa, Homo sapiens
  CDR3 for beta chain variable domain of TCR clone 22928 (TRBV7-8, TRBJ1-5)
CQRPGGGADQPQHF

SEQ ID NO: 45857 - protein, 12 aa, Homo sapiens
  CDR3 for alpha chain variable domain of TCR clone 22929 (TRAV16, TRAJ10)
CSRTGGGNKLTF

SEQ ID NO: 45858 - protein, 13 aa, Homo sapiens
  CDR3 for beta chain variable domain of TCR clone 22929 (TRBV19, TRBJ1-2)
CASSVPGQDGYTF

SEQ ID NO: 45859 - protein, 14 aa, Homo sapiens
  CDR3 for alpha chain variable domain of TCR clone 22930 (TRAV3, TRAJ17)
CAVRDAAAGNKLTF

SEQ ID NO: 45860 - protein, 16 aa, Homo sapiens
  CDR3 for beta chain variable domain of TCR clone 22930 (TRBV28, TRBJ1-5)
CASSLTGQGWNQPQHF

SEQ ID NO: 45861 - protein, 21 aa, Homo sapiens
  CDR3 for alpha chain variable domain of TCR clone 22931 (TRAV26-1, TRAJ56)
CCVLLHRQSRAYTGANSKLTF

SEQ ID NO: 45862 - protein, 12 aa, Homo sapiens
  CDR3 for beta chain variable domain of TCR clone 22931 (TRBV6-5, TRBJ2-5)
CASSEGSETQYF

SEQ ID NO: 45863 - protein, 15 aa, Homo sapiens
  CDR3 for alpha chain variable domain of TCR clone 22932 (TRAV12-2, TRAJ53)
CAVSGGGGSNYKLTF

SEQ ID NO: 45864 - protein, 13 aa, Homo sapiens
  CDR3 for beta chain variable domain of TCR clone 22932 (TRBV3-1, TRBJ1-1)
CASSPGVITEAFF

SEQ ID NO: 45865 - protein, 13 aa, Homo sapiens
  CDR3 for alpha chain variable domain of TCR clone 22933 (TRAV12-2, TRAJ10)
CAVPTGGGNKLTF

SEQ ID NO: 45866 - protein, 13 aa, Homo sapiens
  CDR3 for beta chain variable domain of TCR clone 22933 (TRBV12-4, TRBJ1-2)
CASSLRQGKGYTF

SEQ ID NO: 45867 - protein, 12 aa, Homo sapiens
  CDR3 for alpha chain variable domain of TCR clone 22934 (TRAV1-2, TRAJ24)
CAVGGSWGKFQF

SEQ ID NO: 45868 - protein, 13 aa, Homo sapiens
  CDR3 for beta chain variable domain of TCR clone 22934 (TRBV4-1, TRBJ2-2)
CASSQENTGELFF

SEQ ID NO: 45869 - protein, 13 aa, Homo sapiens
  CDR3 for alpha chain variable domain of TCR clone 22935 (TRAV2, TRAJ40)
CAVVTSGTYKYIF

SEQ ID NO: 45870 - protein, 13 aa, Homo sapiens
  CDR3 for beta chain variable domain of TCR clone 22935 (TRBV19, TRBJ2-1)
CQSDFVLSGEQFF

SEQ ID NO: 45871 - protein, 14 aa, Homo sapiens
  CDR3 for alpha chain variable domain of TCR clone 22936 (TRAV12-3, TRAJ10)
SHLPLTGGGNKLTF

SEQ ID NO: 45872 - protein, 15 aa, Homo sapiens
  CDR3 for beta chain variable domain of TCR clone 22936 (TRBV10-2, TRBJ2-6)
CASSEQGTGANDLTF

SEQ ID NO: 45873 - protein, 16 aa, Homo sapiens
  CDR3 for alpha chain variable domain of TCR clone 22937 (TRAV3, TRAJ37)
CSVRPHGSGNTGKLIF

SEQ ID NO: 45874 - protein, 16 aa, Homo sapiens
  CDR3 for beta chain variable domain of TCR clone 22937 (TRBV9, TRBJ1-2)
CASSVEEKVSPYGYTF

SEQ ID NO: 45875 - protein, 20 aa, Homo sapiens
  CDR3 for alpha chain variable domain of TCR clone 22938 (TRAV12-1, TRAJ42)
SSVIQPPTSVKGESQGNLIF

SEQ ID NO: 45876 - protein, 18 aa, Homo sapiens
  CDR3 for beta chain variable domain of TCR clone 22938 (TRBV11-2, TRBJ2-3)
CASSLGGASRGAPNTQYF

SEQ ID NO: 45877 - protein, 14 aa, Homo sapiens
  CDR3 for alpha chain variable domain of TCR clone 22939 (TRAV1-2, TRAJ8)
CAVGEDTGFQKLVF

SEQ ID NO: 45878 - protein, 15 aa, Homo sapiens
  CDR3 for beta chain variable domain of TCR clone 22939 (TRBV10-3, TRBJ1-1)
CAISEAGTGGTEAFF

SEQ ID NO: 45879 - protein, 14 aa, Homo sapiens
  CDR3 for alpha chain variable domain of TCR clone 22940 (TRAV29/DV5, TRAJ45)
CAASFRGGADGLTF

SEQ ID NO: 45880 - protein, 11 aa, Homo sapiens
  CDR3 for beta chain variable domain of TCR clone 22940 (TRBV11-2, TRBJ2-2)
CASGLPGELFF

SEQ ID NO: 45881 - protein, 16 aa, Homo sapiens
  CDR3 for alpha chain variable domain of TCR clone 22941 (TRAV12-2, TRAJ53)
CAMSPGSGGSNYKLTF

SEQ ID NO: 45882 - protein, 15 aa, Homo sapiens
  CDR3 for beta chain variable domain of TCR clone 22941 (TRBV27, TRBJ2-1)
CASSNGGGSSNEQFF

SEQ ID NO: 45883 - protein, 10 aa, Homo sapiens
  CDR3 for alpha chain variable domain of TCR clone 22942 (TRAV27, TRAJ28)
RGAGSYQLTF

SEQ ID NO: 45884 - protein, 13 aa, Homo sapiens
  CDR3 for beta chain variable domain of TCR clone 22942 (TRBV7-3, TRBJ2-3)
CASSLRGSQTQYF

SEQ ID NO: 45885 - protein, 17 aa, Homo sapiens
  CDR3 for alpha chain variable domain of TCR clone 22943 (TRAV26-1, TRAJ37)
CIVRVITVSSNTGKLIF

SEQ ID NO: 45886 - protein, 13 aa, Homo sapiens
  CDR3 for beta chain variable domain of TCR clone 22943 (TRBV7-2, TRBJ2-2)
CASSSVRAGELFF

SEQ ID NO: 45887 - protein, 15 aa, Homo sapiens
  CDR3 for alpha chain variable domain of TCR clone 22944 (TRAV13-2, TRAJ10)
CAENRDTGGGNKLTF

SEQ ID NO: 45888 - protein, 15 aa, Homo sapiens
  CDR3 for beta chain variable domain of TCR clone 22944 (TRBV20-1, TRBJ2-7)
CSARDRVSGMDEQYF

SEQ ID NO: 45889 - protein, 15 aa, Homo sapiens
  CDR3 for alpha chain variable domain of TCR clone 22945 (TRAV26-1, TRAJ29)
CIDRVEGSGNTPLVF

SEQ ID NO: 45890 - protein, 14 aa, Homo sapiens
  CDR3 for beta chain variable domain of TCR clone 22945 (TRBV18, TRBJ2-5)
CASSPGVSQETQYF

SEQ ID NO: 45891 - protein, 15 aa, Homo sapiens
  CDR3 for alpha chain variable domain of TCR clone 22946 (TRAV12-2, TRAJ53)
CAVNGGGGSNYKMTF

SEQ ID NO: 45892 - protein, 17 aa, Homo sapiens
  CDR3 for beta chain variable domain of TCR clone 22946 (TRBV7-3, TRBJ2-3)
CASSLMKRMRGADTQYF

SEQ ID NO: 45893 - protein, 14 aa, Homo sapiens
  CDR3 for alpha chain variable domain of TCR clone 22947 (TRAV1-2, TRAJ8)
CAVREDTGFQRLVF

SEQ ID NO: 45894 - protein, 15 aa, Homo sapiens
  CDR3 for beta chain variable domain of TCR clone 22947 (TRBV20-1, TRBJ2-7)
CSARDRVSGMDEQYF

SEQ ID NO: 45895 - protein, 14 aa, Homo sapiens
  CDR3 for alpha chain variable domain of TCR clone 22948 (TRAV12-2, TRAJ13)
CAVKKTGGYQKVTF

SEQ ID NO: 45896 - protein, 16 aa, Homo sapiens
  CDR3 for beta chain variable domain of TCR clone 22948 (TRBV9, TRBJ2-1)
CASSVMGLAGYNEQFF

SEQ ID NO: 45897 - protein, 15 aa, Homo sapiens
  CDR3 for alpha chain variable domain of TCR clone 22949 (TRAV3, TRAJ5)
CAVRDRKTGRRALTC

SEQ ID NO: 45898 - protein, 15 aa, Homo sapiens
  CDR3 for beta chain variable domain of TCR clone 22949 (TRBV7-8, TRBJ2-1)
CASSLADSLYNEQFF

SEQ ID NO: 45899 - protein, 12 aa, Homo sapiens
  CDR3 for alpha chain variable domain of TCR clone 22950 (TRAV8-3, TRAJ26)
CAGDNYGQNFVF

SEQ ID NO: 45900 - protein, 15 aa, Homo sapiens
  CDR3 for beta chain variable domain of TCR clone 22950 (TRBV9, TRBJ2-1)
RASSLAGSSYNEQFF

SEQ ID NO: 45901 - protein, 12 aa, Homo sapiens
  CDR3 for alpha chain variable domain of TCR clone 22951 (TRAV12-2, TRAJ10)
WGVTGGGNKLTF

SEQ ID NO: 45902 - protein, 20 aa, Homo sapiens
  CDR3 for beta chain variable domain of TCR clone 22951 (TRBV7-8, TRBJ2-2)
CASSHLFPGPTIHITGELFF

SEQ ID NO: 45903 - protein, 14 aa, Homo sapiens
  CDR3 for alpha chain variable domain of TCR clone 22952 (TRAV1-2, TRAJ16)
CAVNRFSDGQKLLF

SEQ ID NO: 45904 - protein, 15 aa, Homo sapiens
  CDR3 for beta chain variable domain of TCR clone 22952 (TRBV7-9, TRBJ1-6)
CASSSSGRGNSPLHF

SEQ ID NO: 45905 - protein, 15 aa, Homo sapiens
  CDR3 for alpha chain variable domain of TCR clone 22953 (TRAV17, TRAJ57)
CATGPSQGGSEKLVF

SEQ ID NO: 45906 - protein, 16 aa, Homo sapiens
  CDR3 for beta chain variable domain of TCR clone 22953 (TRBV12-4, TRBJ1-5)
CASSRPVGGFNQPQHF

SEQ ID NO: 45907 - protein, 11 aa, Homo sapiens
  CDR3 for alpha chain variable domain of TCR clone 22954 (TRAV17, TRAJ43)
CATPRSNDMRF

SEQ ID NO: 45908 - protein, 15 aa, Homo sapiens
  CDR3 for beta chain variable domain of TCR clone 22954 (TRBV11-2, TRBJ2-1)
CASSLGTSGLNEKFF

SEQ ID NO: 45909 - protein, 14 aa, Homo sapiens
  CDR3 for alpha chain variable domain of TCR clone 22955 (TRAV1-1, TRAJ27)
CAVIYNTNSGKSTF

SEQ ID NO: 45910 - protein, 15 aa, Homo sapiens
  CDR3 for beta chain variable domain of TCR clone 22955 (TRBV7-2, TRBJ2-1)
CASSSGLAGGNEQFF

SEQ ID NO: 45911 - protein, 18 aa, Homo sapiens
  CDR3 for alpha chain variable domain of TCR clone 22956 (TRAV26-2, TRAJ45)
CILRLWGYSGGGADGRTF

SEQ ID NO: 45912 - protein, 17 aa, Homo sapiens
  CDR3 for beta chain variable domain of TCR clone 22956 (TRBV28, TRBJ2-3)
CASSPTPAGGRVDTQYF

SEQ ID NO: 45913 - protein, 15 aa, Homo sapiens
  CDR3 for alpha chain variable domain of TCR clone 22957 (TRAV21, TRAJ24)
CAARSSTDSWGKLQF

SEQ ID NO: 45914 - protein, 15 aa, Homo sapiens
  CDR3 for beta chain variable domain of TCR clone 22957 (TRBV20-1, TRBJ1-1)
CSASRGVTGNTEAFF

SEQ ID NO: 45915 - protein, 10 aa, Homo sapiens
  CDR3 for alpha chain variable domain of TCR clone 22958 (TRAV30, TRAJ48)
CGIGNEKLTF

SEQ ID NO: 45916 - protein, 15 aa, Homo sapiens
  CDR3 for beta chain variable domain of TCR clone 22958 (TRBV28, TRBJ2-3)
CASRKTGTAYNEQFF

SEQ ID NO: 45917 - protein, 12 aa, Homo sapiens
  CDR3 for alpha chain variable domain of TCR clone 22959 (TRAV13-2, TRAJ23)
CAERHRGGKLIF

SEQ ID NO: 45918 - protein, 20 aa, Homo sapiens
  CDR3 for beta chain variable domain of TCR clone 22959 (TRBV7-8, TRBJ2-2)
CASSHLFPGPTIHITGELFF

SEQ ID NO: 45919 - protein, 17 aa, Homo sapiens
  CDR3 for alpha chain variable domain of TCR clone 22960 (TRAV26-1, TRAJ53)
CIVRVGDSGGSNYKLTF

SEQ ID NO: 45920 - protein, 15 aa, Homo sapiens
  CDR3 for beta chain variable domain of TCR clone 22960 (TRBV20-1, TRBJ2-7)
CSARVPAAYFYEQYF

SEQ ID NO: 45921 - protein, 15 aa, Homo sapiens
  CDR3 for alpha chain variable domain of TCR clone 22961 (TRAV8-3, TRAJ45)
RASSHSGGGADGLTF

SEQ ID NO: 45922 - protein, 13 aa, Homo sapiens
  CDR3 for beta chain variable domain of TCR clone 22961 (TRBV10-3, TRBJ2-7)
CASKLAVNYEQYF

SEQ ID NO: 45923 - protein, 13 aa, Homo sapiens
  CDR3 for alpha chain variable domain of TCR clone 22962 (TRAV29/DV5, TRAJ31)
CAASRNNNARPMF

SEQ ID NO: 45924 - protein, 12 aa, Homo sapiens
  CDR3 for beta chain variable domain of TCR clone 22962 (TRBV14, TRBJ2-5)
CASSQLKETQYF

SEQ ID NO: 45925 - protein, 13 aa, Homo sapiens
  CDR3 for alpha chain variable domain of TCR clone 22963 (TRAV12-2, TRAJ20)
CAVYPSNDYKLSF

SEQ ID NO: 45926 - protein, 15 aa, Homo sapiens
  CDR3 for beta chain variable domain of TCR clone 22963 (TRBV27, TRBJ2-5)
CASSLYTRGGETQYF

SEQ ID NO: 45927 - protein, 14 aa, Homo sapiens
  CDR3 for alpha chain variable domain of TCR clone 22964 (TRAV21, TRAJ35)
CAVMPIGFGNVLHC

SEQ ID NO: 45928 - protein, 12 aa, Homo sapiens
  CDR3 for beta chain variable domain of TCR clone 22964 (TRBV7-9, TRBJ2-7)
CASSITREEQYF

SEQ ID NO: 45929 - protein, 10 aa, Homo sapiens
  CDR3 for alpha chain variable domain of TCR clone 22965 (TRAV23/DV6, TRAJ57)
CAASSTLYQG

SEQ ID NO: 45930 - protein, 14 aa, Homo sapiens
  CDR3 for beta chain variable domain of TCR clone 22965 (TRBV25-1, TRBJ1-1)
CASTHLGGNTEAFF

SEQ ID NO: 45931 - protein, 14 aa, Homo sapiens
  CDR3 for alpha chain variable domain of TCR clone 22966 (TRAV1-2, TRAJ8)
CAVRDPPGFQKLVF

SEQ ID NO: 45932 - protein, 14 aa, Homo sapiens
  CDR3 for beta chain variable domain of TCR clone 22966 (TRBV5-1, TRBJ2-7)
CASSRGESLYEQYF

SEQ ID NO: 45933 - protein, 14 aa, Homo sapiens
  CDR3 for alpha chain variable domain of TCR clone 22967 (TRAV12-1, TRAJ17)
CVVNYKAAGNKLTF

SEQ ID NO: 45934 - protein, 15 aa, Homo sapiens
  CDR3 for beta chain variable domain of TCR clone 22967 (TRBV7-2, TRBJ2-1)
CASTYGTGIYNEQFF

SEQ ID NO: 45935 - protein, 12 aa, Homo sapiens
  CDR3 for alpha chain variable domain of TCR clone 22968 (TRAV13-2, TRAJ23)
CAERHRGGKLIF

SEQ ID NO: 45936 - protein, 12 aa, Homo sapiens
  CDR3 for beta chain variable domain of TCR clone 22968 (TRBV7-8, TRBJ2-7)
CASSLGDREQYF

SEQ ID NO: 45937 - protein, 12 aa, Homo sapiens
  CDR3 for alpha chain variable domain of TCR clone 22969 (TRAV13-1, TRAJ21)
CAVKEGFNKFYF

SEQ ID NO: 45938 - protein, 14 aa, Homo sapiens
  CDR3 for beta chain variable domain of TCR clone 22969 (TRBV5-4, TRBJ1-1)
CASSLDSRRDEAFF

SEQ ID NO: 45939 - protein, 15 aa, Homo sapiens
  CDR3 for alpha chain variable domain of TCR clone 22970 (TRAV26-1, TRAJ29)
CIVRVEGSGNTPLVF

SEQ ID NO: 45940 - protein, 14 aa, Homo sapiens
  CDR3 for beta chain variable domain of TCR clone 22970 (TRBV18, TRBJ2-5)
CASSPGVSQETQHF

SEQ ID NO: 45941 - protein, 17 aa, Homo sapiens
  CDR3 for alpha chain variable domain of TCR clone 22971 (TRAV8-2, )
CVVNIQNPDPAVYQLRD

SEQ ID NO: 45942 - protein, 14 aa, Homo sapiens
  CDR3 for beta chain variable domain of TCR clone 22971 (TRBV12-4, TRBJ1-1)
CASSLGTGGTEAFF

SEQ ID NO: 45943 - protein, 12 aa, Homo sapiens
  CDR3 for alpha chain variable domain of TCR clone 22972 (TRAV12-3, TRAJ17)
CAMTLTGNKLTF

SEQ ID NO: 45944 - protein, 13 aa, Homo sapiens
  CDR3 for beta chain variable domain of TCR clone 22972 (TRBV12-4, TRBJ2-7)
CASSPTETYEQYF

SEQ ID NO: 45945 - protein, 11 aa, Homo sapiens
  CDR3 for alpha chain variable domain of TCR clone 22973 (TRAV3, TRAJ21)
CAVGNFNKFYF

SEQ ID NO: 45946 - protein, 16 aa, Homo sapiens
  CDR3 for beta chain variable domain of TCR clone 22973 (TRBV19, TRBJ2-1)
CASSKAGPSTYNEQFF

SEQ ID NO: 45947 - protein, 14 aa, Homo sapiens
  CDR3 for alpha chain variable domain of TCR clone 22974 (TRAV20, TRAJ42)
CAVRAGGSQGNLIF

SEQ ID NO: 45948 - protein, 14 aa, Homo sapiens
  CDR3 for beta chain variable domain of TCR clone 22974 (TRBV28, TRBJ1-2)
CASRIQGANYGYTF

SEQ ID NO: 45949 - protein, 15 aa, Homo sapiens
  CDR3 for alpha chain variable domain of TCR clone 22975 (TRAV26-1, TRAJ29)
CIVRVEGSGNTPLVF

SEQ ID NO: 45950 - protein, 16 aa, Homo sapiens
  CDR3 for beta chain variable domain of TCR clone 22975 (TRBV12-5, TRBJ2-5)
CASGPRTSGNQETQYF

SEQ ID NO: 45951 - protein, 12 aa, Homo sapiens
  CDR3 for alpha chain variable domain of TCR clone 22976 (TRAV21, TRAJ33)
CAKMDSNYQLVW

SEQ ID NO: 45952 - protein, 14 aa, Homo sapiens
  CDR3 for beta chain variable domain of TCR clone 22976 (TRBV2, TRBJ2-7)
CASSLTSGGYEQYF

SEQ ID NO: 45953 - protein, 15 aa, Homo sapiens
  CDR3 for alpha chain variable domain of TCR clone 22977 (TRAV27, TRAJ38)
CAGRFNAGNNRKLSW

SEQ ID NO: 45954 - protein, 13 aa, Homo sapiens
  CDR3 for beta chain variable domain of TCR clone 22977 (TRBV12-5, TRBJ2-3)
CASQNRGTDTQYF

SEQ ID NO: 45955 - protein, 13 aa, Homo sapiens
  CDR3 for alpha chain variable domain of TCR clone 22978 (TRAV8-3, TRAJ43)
CAVGPDNNNDMRF

SEQ ID NO: 45956 - protein, 12 aa, Homo sapiens
  CDR3 for beta chain variable domain of TCR clone 22978 (TRBV7-2, TRBJ1-6)
CASSLSSPPLHF

SEQ ID NO: 45957 - protein, 16 aa, Homo sapiens
  CDR3 for alpha chain variable domain of TCR clone 22979 (TRAV30, TRAJ24)
CGTEIVDADSWGKFQF

SEQ ID NO: 45958 - protein, 15 aa, Homo sapiens
  CDR3 for beta chain variable domain of TCR clone 22979 (TRBV7-9, TRBJ1-4)
CASSVRTGGNEKLFF

SEQ ID NO: 45959 - protein, 13 aa, Homo sapiens
  CDR3 for alpha chain variable domain of TCR clone 22980 (TRAV22, TRAJ29)
CAVGGSGNTPLVF

SEQ ID NO: 45960 - protein, 13 aa, Homo sapiens
  CDR3 for beta chain variable domain of TCR clone 22980 (TRBV4-2, TRBJ1-1)
CASGQAGNTEAFF

SEQ ID NO: 45961 - protein, 14 aa, Homo sapiens
  CDR3 for alpha chain variable domain of TCR clone 22981 (TRAV12-3, TRAJ9)
CAMSPNTGGFKTIS

SEQ ID NO: 45962 - protein, 12 aa, Homo sapiens
  CDR3 for beta chain variable domain of TCR clone 22981 (TRBV19, TRBJ1-5)
CASSIAQQPQHF

SEQ ID NO: 45963 - protein, 14 aa, Homo sapiens
  CDR3 for alpha chain variable domain of TCR clone 22982 (TRAV26-1, TRAJ39)
CIVRGSRAGTMLTF

SEQ ID NO: 45964 - protein, 15 aa, Homo sapiens
  CDR3 for beta chain variable domain of TCR clone 22982 (TRBV7-9, TRBJ1-5)
CASSQGHQPNQPQHF

SEQ ID NO: 45965 - protein, 13 aa, Homo sapiens
  CDR3 for alpha chain variable domain of TCR clone 22983 (TRAV8-3, TRAJ28)
CAVGAVGSYQLTF

SEQ ID NO: 45966 - protein, 14 aa, Homo sapiens
  CDR3 for beta chain variable domain of TCR clone 22983 (TRBV7-2, TRBJ2-7)
RASRSQGAAYEQYF

SEQ ID NO: 45967 - protein, 14 aa, Homo sapiens
  CDR3 for alpha chain variable domain of TCR clone 22984 (TRAV35, TRAJ22)
CAGLRPGSARQLTF

SEQ ID NO: 45968 - protein, 15 aa, Homo sapiens
  CDR3 for beta chain variable domain of TCR clone 22984 (TRBV12-4, TRBJ2-5)
CASSLPTGLQETQYF

SEQ ID NO: 45969 - protein, 12 aa, Homo sapiens
  CDR3 for alpha chain variable domain of TCR clone 22985 (TRAV8-3, TRAJ20)
CAVGASDYELSF

SEQ ID NO: 45970 - protein, 16 aa, Homo sapiens
  CDR3 for beta chain variable domain of TCR clone 22985 (TRBV19, TRBJ2-2)
CASRSPGTGATGELFF

SEQ ID NO: 45971 - protein, 14 aa, Homo sapiens
  CDR3 for alpha chain variable domain of TCR clone 22986 (TRAV35, TRAJ40)
CAGSTTSGTYKYIF

SEQ ID NO: 45972 - protein, 13 aa, Homo sapiens
  CDR3 for beta chain variable domain of TCR clone 22986 (TRBV20-1, TRBJ1-6)
CSAPVGVGSPLHF

SEQ ID NO: 45973 - protein, 17 aa, Homo sapiens
  CDR3 for alpha chain variable domain of TCR clone 22987 (TRAV3, TRAJ6)
CAVSRRTDTGGSYIPTF

SEQ ID NO: 45974 - protein, 18 aa, Homo sapiens
  CDR3 for beta chain variable domain of TCR clone 22987 (TRBV7-2, TRBJ2-3)
RASSLETSRGRKADTQYF

SEQ ID NO: 45975 - protein, 14 aa, Homo sapiens
  CDR3 for alpha chain variable domain of TCR clone 22988 (TRAV26-1, TRAJ46)
CIVRVGKEKQRRQA

SEQ ID NO: 45976 - protein, 16 aa, Homo sapiens
  CDR3 for beta chain variable domain of TCR clone 22988 (TRBV27, TRBJ2-2)
CASSFRGLVRTGELFF

SEQ ID NO: 45977 - protein, 14 aa, Homo sapiens
  CDR3 for alpha chain variable domain of TCR clone 22989 (TRAV8-2, TRAJ11)
CVVREKSGYSTLTF

SEQ ID NO: 45978 - protein, 16 aa, Homo sapiens
  CDR3 for beta chain variable domain of TCR clone 22989 (TRBV28, TRBJ2-1)
CASSSPEYPRDNEQFF

SEQ ID NO: 45979 - protein, 15 aa, Homo sapiens
  CDR3 for alpha chain variable domain of TCR clone 22990 (TRAV26-1, TRAJ29)
CIVRVEGSGNTPLVF

SEQ ID NO: 45980 - protein, 14 aa, Homo sapiens
  CDR3 for beta chain variable domain of TCR clone 22990 (TRBV18, TRBJ2-5)
CASSPGVSHETQYF

SEQ ID NO: 45981 - protein, 14 aa, Homo sapiens
  CDR3 for alpha chain variable domain of TCR clone 22991 (TRAV38-1, TRAJ40)
CALRPTSGTYKHIF

SEQ ID NO: 45982 - protein, 14 aa, Homo sapiens
  CDR3 for beta chain variable domain of TCR clone 22991 (TRBV25-1, TRBJ1-1)
CASTHLGGNTEAFF

SEQ ID NO: 45983 - protein, 14 aa, Homo sapiens
  CDR3 for alpha chain variable domain of TCR clone 22992 (TRAV26-1, TRAJ34)
CIVRVAYNTDKLIF

SEQ ID NO: 45984 - protein, 13 aa, Homo sapiens
  CDR3 for beta chain variable domain of TCR clone 22992 (TRBV7-3, TRBJ1-1)
CASSQDWGAEAFF

SEQ ID NO: 45985 - protein, 12 aa, Homo sapiens
  CDR3 for alpha chain variable domain of TCR clone 22993 (TRAV8-3, TRAJ26)
CAGDNYGQNFVF

SEQ ID NO: 45986 - protein, 14 aa, Homo sapiens
  CDR3 for beta chain variable domain of TCR clone 22993 (TRBV4-2, TRBJ2-1)
CASGLDRAYNEQFF

SEQ ID NO: 45987 - protein, 13 aa, Homo sapiens
  CDR3 for alpha chain variable domain of TCR clone 22994 (TRAV4, TRAJ42)
CLVGGGSQGNLIL

SEQ ID NO: 45988 - protein, 16 aa, Homo sapiens
  CDR3 for beta chain variable domain of TCR clone 22994 (TRBV5-1, TRBJ2-3)
CASSLQGRVGADTQYF

SEQ ID NO: 45989 - protein, 14 aa, Homo sapiens
  CDR3 for alpha chain variable domain of TCR clone 22995 (TRAV1-2, TRAJ16)
CAVNRFSDGQRLLF

SEQ ID NO: 45990 - protein, 13 aa, Homo sapiens
  CDR3 for beta chain variable domain of TCR clone 22995 (TRBV4-1, TRBJ2-1)
CASSQAGGDEQFF

SEQ ID NO: 45991 - protein, 23 aa, Homo sapiens
  CDR3 for alpha chain variable domain of TCR clone 22996 (TRAV8-3, TRAJ6)
CAVGGEEATYLHLEEEPALLLIR

SEQ ID NO: 45992 - protein, 14 aa, Homo sapiens
  CDR3 for beta chain variable domain of TCR clone 22996 (TRBV5-1, TRBJ2-7)
CASSRGESLYEQYF

SEQ ID NO: 45993 - protein, 13 aa, Homo sapiens
  CDR3 for alpha chain variable domain of TCR clone 22997 (TRAV17, TRAJ40)
CATRSPGTYKYIF

SEQ ID NO: 45994 - protein, 13 aa, Homo sapiens
  CDR3 for beta chain variable domain of TCR clone 22997 (TRBV2, TRBJ1-5)
CATAGPGNQPQHL

SEQ ID NO: 45995 - protein, 15 aa, Homo sapiens
  CDR3 for alpha chain variable domain of TCR clone 22998 (TRAV25, TRAJ52)
CAGRPGGTRYGKLTF

SEQ ID NO: 45996 - protein, 17 aa, Homo sapiens
  CDR3 for beta chain variable domain of TCR clone 22998 (TRBV7-8, TRBJ2-6)
CASSAGTGGAGANVLTF

SEQ ID NO: 45997 - protein, 13 aa, Homo sapiens
  CDR3 for alpha chain variable domain of TCR clone 22999 (TRAV21, TRAJ20)
CAVGLRVDHKLSF

SEQ ID NO: 45998 - protein, 13 aa, Homo sapiens
  CDR3 for beta chain variable domain of TCR clone 22999 (TRBV6-1, TRBJ1-1)
CASSRQGNTEAFF

SEQ ID NO: 45999 - protein, 18 aa, Homo sapiens
  CDR3 for alpha chain variable domain of TCR clone 23000 (TRAV26-2, TRAJ45)
CTLRVDKYSGGGADGLTF

SEQ ID NO: 46000 - protein, 16 aa, Homo sapiens
  CDR3 for beta chain variable domain of TCR clone 23000 (TRBV2, TRBJ1-4)
CASNLLQGATNEKLFF

SEQ ID NO: 46001 - protein, 18 aa, Homo sapiens
  CDR3 for alpha chain variable domain of TCR clone 23001 (TRAV12-3, TRAJ52)
CAMSVGGTGGTSYGKLTF

SEQ ID NO: 46002 - protein, 15 aa, Homo sapiens
  CDR3 for beta chain variable domain of TCR clone 23001 (TRBV27, TRBJ1-6)
CASSFDRGLGSPLHF

SEQ ID NO: 46003 - protein, 14 aa, Homo sapiens
  CDR3 for alpha chain variable domain of TCR clone 23002 (TRAV1-2, TRAJ8)
CAVREDTGFQKLVF

SEQ ID NO: 46004 - protein, 14 aa, Homo sapiens
  CDR3 for beta chain variable domain of TCR clone 23002 (TRBV7-3, TRBJ1-1)
CASSLKGGNTEAFF

SEQ ID NO: 46005 - protein, 15 aa, Homo sapiens
  CDR3 for alpha chain variable domain of TCR clone 23003 (TRAV21, TRAJ53)
CATLTSGGSNYKLTF

SEQ ID NO: 46006 - protein, 16 aa, Homo sapiens
  CDR3 for beta chain variable domain of TCR clone 23003 (TRBV9, TRBJ2-1)
CASSVGGGGNYNEQFF

SEQ ID NO: 46007 - protein, 16 aa, Homo sapiens
  CDR3 for alpha chain variable domain of TCR clone 23004 (TRAV3, TRAJ3)
CAVRDRAKSSASKIIF

SEQ ID NO: 46008 - protein, 13 aa, Homo sapiens
  CDR3 for beta chain variable domain of TCR clone 23004 (TRBV10-3, TRBJ2-7)
CASKLAVNYKQYF

SEQ ID NO: 46009 - protein, 14 aa, Homo sapiens
  CDR3 for alpha chain variable domain of TCR clone 23005 (TRAV12-2, TRAJ5)
CAVNRSTGRRALTF

SEQ ID NO: 46010 - protein, 12 aa, Homo sapiens
  CDR3 for beta chain variable domain of TCR clone 23005 (TRBV19, TRBJ1-5)
FASSIAQQPQHF

SEQ ID NO: 46011 - protein, 18 aa, Homo sapiens
  CDR3 for alpha chain variable domain of TCR clone 23006 (TRAV12-3, TRAJ52)
CAMSRTNAGGTSYGKLTF

SEQ ID NO: 46012 - protein, 17 aa, Homo sapiens
  CDR3 for beta chain variable domain of TCR clone 23006 (TRBV7-3, TRBJ2-3)
CASSLMKRMRGAETQYF

SEQ ID NO: 46013 - protein, 14 aa, Homo sapiens
  CDR3 for alpha chain variable domain of TCR clone 23007 (TRAV13-2, TRAJ17)
CAEDSKAAGNKLTF

SEQ ID NO: 46014 - protein, 11 aa, Homo sapiens
  CDR3 for beta chain variable domain of TCR clone 23007 (TRBV6-3, TRBJ2-3)
CATGQADTQYF

SEQ ID NO: 46015 - protein, 14 aa, Homo sapiens
  CDR3 for alpha chain variable domain of TCR clone 23008 (TRAV1-2, TRAJ16)
CAVNRFSDGQKLLL

SEQ ID NO: 46016 - protein, 16 aa, Homo sapiens
  CDR3 for beta chain variable domain of TCR clone 23008 (TRBV12-5, TRBJ2-5)
CASGPRTSGNQETQYF

SEQ ID NO: 46017 - protein, 15 aa, Homo sapiens
  CDR3 for alpha chain variable domain of TCR clone 23009 (TRAV8-3, TRAJ45)
CASSYSGGGADGLTF

SEQ ID NO: 46018 - protein, 11 aa, Homo sapiens
  CDR3 for beta chain variable domain of TCR clone 23009 (TRBV11-2, TRBJ2-2)
CASSLPGELFF

SEQ ID NO: 46019 - protein, 12 aa, Homo sapiens
  CDR3 for alpha chain variable domain of TCR clone 23010 (TRAV17, TRAJ4)
CATDGGYNKPIF

SEQ ID NO: 46020 - protein, 13 aa, Homo sapiens
  CDR3 for beta chain variable domain of TCR clone 23010 (TRBV29-1, TRBJ2-2)
CSTTGVNTGELFF

SEQ ID NO: 46021 - protein, 10 aa, Homo sapiens
  CDR3 for alpha chain variable domain of TCR clone 23011 (TRAV13-2, TRAJ20)
CAENICRLQA

SEQ ID NO: 46022 - protein, 15 aa, Homo sapiens
  CDR3 for beta chain variable domain of TCR clone 23011 (TRBV27, TRBJ2-5)
CASSLYPRGGETQYF

SEQ ID NO: 46023 - protein, 18 aa, Homo sapiens
  CDR3 for alpha chain variable domain of TCR clone 23012 (TRAV21, TRAJ52)
CAVRPSPAGGTSYGKLTF

SEQ ID NO: 46024 - protein, 13 aa, Homo sapiens
  CDR3 for beta chain variable domain of TCR clone 23012 (TRBV7-3, TRBJ1-1)
CASSQGWGAEAFF

SEQ ID NO: 46025 - protein, 13 aa, Homo sapiens
  CDR3 for alpha chain variable domain of TCR clone 23013 (TRAV13-2, TRAJ53)
CAENMGSNYKLTF

SEQ ID NO: 46026 - protein, 13 aa, Homo sapiens
  CDR3 for beta chain variable domain of TCR clone 23013 (TRBV4-1, TRBJ2-2)
CASSRENTGELFF

SEQ ID NO: 46027 - protein, 10 aa, Homo sapiens
  CDR3 for alpha chain variable domain of TCR clone 23014 (TRAV19, TRAJ45)
PGGGADGLTF

SEQ ID NO: 46028 - protein, 12 aa, Homo sapiens
  CDR3 for beta chain variable domain of TCR clone 23014 (TRBV29-1, TRBJ2-3)
CSVTGGADTQYF

SEQ ID NO: 46029 - protein, 15 aa, Homo sapiens
  CDR3 for alpha chain variable domain of TCR clone 23015 (TRAV13-1, TRAJ52)
SYYNAGGTSYGKLTF

SEQ ID NO: 46030 - protein, 11 aa, Homo sapiens
  CDR3 for beta chain variable domain of TCR clone 23015 (TRBV12-4, TRBJ2-2)
CASRSAGELFF

SEQ ID NO: 46031 - protein, 13 aa, Homo sapiens
  CDR3 for alpha chain variable domain of TCR clone 23016 (TRAV12-3, TRAJ7)
CAMTPYGNNRLAF

SEQ ID NO: 46032 - protein, 16 aa, Homo sapiens
  CDR3 for beta chain variable domain of TCR clone 23016 (TRBV20-1, TRBJ1-4)
CSARTYGGELNEKLFF

SEQ ID NO: 46033 - protein, 15 aa, Homo sapiens
  CDR3 for alpha chain variable domain of TCR clone 23017 (TRAV21, TRAJ32)
CAVNSYGGATNKLIL

SEQ ID NO: 46034 - protein, 18 aa, Homo sapiens
  CDR3 for beta chain variable domain of TCR clone 23017 (TRBV7-9, TRBJ2-1)
CASSTGLAEGSSYNEQFF

SEQ ID NO: 46035 - protein, 17 aa, Homo sapiens
  CDR3 for alpha chain variable domain of TCR clone 23018 (TRAV1-2, TRAJ6)
CAVRDGPRAGGSYIPTF

SEQ ID NO: 46036 - protein, 14 aa, Homo sapiens
  CDR3 for beta chain variable domain of TCR clone 23018 (TRBV7-2, TRBJ2-7)
CASSPKTSFYEQYF

SEQ ID NO: 46037 - protein, 11 aa, Homo sapiens
  CDR3 for alpha chain variable domain of TCR clone 23019 (TRAV35, TRAJ12)
RRMDGSYKLIF

SEQ ID NO: 46038 - protein, 14 aa, Homo sapiens
  CDR3 for beta chain variable domain of TCR clone 23019 (TRBV19, TRBJ1-1)
CASSPNRGDTEAFF

SEQ ID NO: 46039 - protein, 13 aa, Homo sapiens
  CDR3 for alpha chain variable domain of TCR clone 23020 (TRAV35, TRAJ42)
CAGFPGSQGNLIF

SEQ ID NO: 46040 - protein, 13 aa, Homo sapiens
  CDR3 for beta chain variable domain of TCR clone 23020 (TRBV29-1, TRBJ2-1)
CSVEGGRVNEQLF

SEQ ID NO: 46041 - protein, 14 aa, Homo sapiens
  CDR3 for alpha chain variable domain of TCR clone 23021 (TRAV29/DV5, TRAJ45)
CAASFRGGADGLTF

SEQ ID NO: 46042 - protein, 15 aa, Homo sapiens
  CDR3 for beta chain variable domain of TCR clone 23021 (TRBV27, TRBJ2-1)
CASSNGGGSSNEQFF

SEQ ID NO: 46043 - protein, 16 aa, Homo sapiens
  CDR3 for alpha chain variable domain of TCR clone 23022 (TRAV3, TRAJ21)
CAVRDIERGDFNKFYF

SEQ ID NO: 46044 - protein, 13 aa, Homo sapiens
  CDR3 for beta chain variable domain of TCR clone 23022 (TRBV27, TRBJ2-7)
CASSLTTGYEQYF

SEQ ID NO: 46045 - protein, 13 aa, Homo sapiens
  CDR3 for alpha chain variable domain of TCR clone 23023 (TRAV26-2, TRAJ43)
CILRAVNNNDMRF

SEQ ID NO: 46046 - protein, 15 aa, Homo sapiens
  CDR3 for beta chain variable domain of TCR clone 23023 (TRBV7-2, TRBJ2-1)
CASTHGTGIYNGQFF

SEQ ID NO: 46047 - protein, 12 aa, Homo sapiens
  CDR3 for alpha chain variable domain of TCR clone 23024 (TRAV21, TRAJ33)
CAKMDSNYQLIW

SEQ ID NO: 46048 - protein, 14 aa, Homo sapiens
  CDR3 for beta chain variable domain of TCR clone 23024 (TRBV7-2, TRBJ2-7)
CASSPKTSFYEQYF

SEQ ID NO: 46049 - protein, 14 aa, Homo sapiens
  CDR3 for alpha chain variable domain of TCR clone 23025 (TRAV26-1, TRAJ38)
CIADNAGNNRKLIW

SEQ ID NO: 46050 - protein, 16 aa, Homo sapiens
  CDR3 for beta chain variable domain of TCR clone 23025 (TRBV7-3, TRBJ2-2)
CASSLKRGTLSGELFF

SEQ ID NO: 46051 - protein, 16 aa, Homo sapiens
  CDR3 for alpha chain variable domain of TCR clone 23026 (TRAV21, TRAJ37)
CAVRTAGSSTTGKLIF

SEQ ID NO: 46052 - protein, 13 aa, Homo sapiens
  CDR3 for beta chain variable domain of TCR clone 23026 (TRBV7-9, TRBJ2-5)
CASLPSGRETQYF

SEQ ID NO: 46053 - protein, 11 aa, Homo sapiens
  CDR3 for alpha chain variable domain of TCR clone 23027 (TRAV12-3, TRAJ27)
CAMADAGKSTF

SEQ ID NO: 46054 - protein, 13 aa, Homo sapiens
  CDR3 for beta chain variable domain of TCR clone 23027 (TRBV20-1, TRBJ1-1)
CSARVGGNTEAFF

SEQ ID NO: 46055 - protein, 14 aa, Homo sapiens
  CDR3 for alpha chain variable domain of TCR clone 23028 (TRAV12-2, TRAJ13)
CAVKKTGGYQKVTF

SEQ ID NO: 46056 - protein, 17 aa, Homo sapiens
  CDR3 for beta chain variable domain of TCR clone 23028 (TRBV13, TRBJ2-3)
CASGLSRVAGGRNTQYF

SEQ ID NO: 46057 - protein, 15 aa, Homo sapiens
  CDR3 for alpha chain variable domain of TCR clone 23029 (TRAV26-1, TRAJ29)
CIVRVEGSGNTPLIF

SEQ ID NO: 46058 - protein, 14 aa, Homo sapiens
  CDR3 for beta chain variable domain of TCR clone 23029 (TRBV18, TRBJ2-5)
CASSPGVSQETQYF

SEQ ID NO: 46059 - protein, 14 aa, Homo sapiens
  CDR3 for alpha chain variable domain of TCR clone 23030 (TRAV26-1, TRAJ39)
CIVRGSRAGNMRTF

SEQ ID NO: 46060 - protein, 15 aa, Homo sapiens
  CDR3 for beta chain variable domain of TCR clone 23030 (TRBV7-9, TRBJ1-5)
CASSQGHQPNQPQHF

SEQ ID NO: 46061 - protein, 15 aa, Homo sapiens
  CDR3 for alpha chain variable domain of TCR clone 23031 (TRAV26-2, TRAJ39)
CSLGGNNNAGNMLTF

SEQ ID NO: 46062 - protein, 15 aa, Homo sapiens
  CDR3 for beta chain variable domain of TCR clone 23031 (TRBV5-4, TRBJ1-1)
CASSSLGWANTEAFF

SEQ ID NO: 46063 - protein, 16 aa, Homo sapiens
  CDR3 for alpha chain variable domain of TCR clone 23032 (TRAV14/DV4, TRAJ53)
CAMREGGGGSNYKLTF

SEQ ID NO: 46064 - protein, 15 aa, Homo sapiens
  CDR3 for beta chain variable domain of TCR clone 23032 (TRBV11-3, TRBJ2-3)
CASLKDGREGDTQYF

SEQ ID NO: 46065 - protein, 20 aa, Homo sapiens
  CDR3 for alpha chain variable domain of TCR clone 23033 (TRAV26-1, TRAJ42)
CRVLLHRQTYYGGSQGNLIF

SEQ ID NO: 46066 - protein, 16 aa, Homo sapiens
  CDR3 for beta chain variable domain of TCR clone 23033 (TRBV7-3, TRBJ2-2)
CASSLKRGTLSGELFF

SEQ ID NO: 46067 - protein, 13 aa, Homo sapiens
  CDR3 for alpha chain variable domain of TCR clone 23034 (TRAV35, TRAJ42)
CAGFPGSRGNLIF

SEQ ID NO: 46068 - protein, 13 aa, Homo sapiens
  CDR3 for beta chain variable domain of TCR clone 23034 (TRBV29-1, TRBJ2-1)
CSVEGGRVNEQFF

SEQ ID NO: 46069 - protein, 11 aa, Homo sapiens
  CDR3 for alpha chain variable domain of TCR clone 23035 (TRAV2, TRAJ13)
CASGGYQKVTF

SEQ ID NO: 46070 - protein, 14 aa, Homo sapiens
  CDR3 for beta chain variable domain of TCR clone 23035 (TRBV7-3, TRBJ2-2)
CASSSGGYTGELFF

SEQ ID NO: 46071 - protein, 13 aa, Homo sapiens
  CDR3 for alpha chain variable domain of TCR clone 23036 (TRAV36/DV7, TRAJ33)
CAVDMDSNYQLIC

SEQ ID NO: 46072 - protein, 16 aa, Homo sapiens
  CDR3 for beta chain variable domain of TCR clone 23036 (TRBV15, TRBJ2-3)
CATRLSGGRAPDTQYF

SEQ ID NO: 46073 - protein, 12 aa, Homo sapiens
  CDR3 for alpha chain variable domain of TCR clone 23037 (TRAV1-1, TRAJ8)
CAGGTGFQKLVF

SEQ ID NO: 46074 - protein, 15 aa, Homo sapiens
  CDR3 for beta chain variable domain of TCR clone 23037 (TRBV7-9, TRBJ1-4)
CASSRTGGFNEKLVF

SEQ ID NO: 46075 - protein, 14 aa, Homo sapiens
  CDR3 for alpha chain variable domain of TCR clone 23038 (TRAV1-2, TRAJ16)
CAVNRFLDGQKLLF

SEQ ID NO: 46076 - protein, 16 aa, Homo sapiens
  CDR3 for beta chain variable domain of TCR clone 23038 (TRBV20-1, TRBJ1-4)
CSAPGQGLLTNEKLFF

SEQ ID NO: 46077 - protein, 16 aa, Homo sapiens
  CDR3 for alpha chain variable domain of TCR clone 23039 (TRAV26-1, TRAJ37)
CIVRGDGPGNTGKLIF

SEQ ID NO: 46078 - protein, 17 aa, Homo sapiens
  CDR3 for beta chain variable domain of TCR clone 23039 (TRBV4-1, TRBJ2-7)
CASSRDPLGVRGGEQYF

SEQ ID NO: 46079 - protein, 16 aa, Homo sapiens
  CDR3 for alpha chain variable domain of TCR clone 23040 (TRAV3, TRAJ23)
CAVKIGIYNQGGKLIF

SEQ ID NO: 46080 - protein, 17 aa, Homo sapiens
  CDR3 for beta chain variable domain of TCR clone 23040 (TRBV10-3, TRBJ2-6)
CAISGSTAPSGANVLTF

SEQ ID NO: 46081 - protein, 14 aa, Homo sapiens
  CDR3 for alpha chain variable domain of TCR clone 23041 (TRAV29/DV5, TRAJ36)
CAARRKTGANNLFF

SEQ ID NO: 46082 - protein, 13 aa, Homo sapiens
  CDR3 for beta chain variable domain of TCR clone 23041 (TRBV7-2, TRBJ2-5)
CASSQTSVETQYF

SEQ ID NO: 46083 - protein, 15 aa, Homo sapiens
  CDR3 for alpha chain variable domain of TCR clone 23042 (TRAV26-1, TRAJ29)
CIVRVEGSGNTPLVF

SEQ ID NO: 46084 - protein, 15 aa, Homo sapiens
  CDR3 for beta chain variable domain of TCR clone 23042 (TRBV7-9, TRBJ1-5)
CACSQGHQPNQPQHF

SEQ ID NO: 46085 - protein, 15 aa, Homo sapiens
  CDR3 for alpha chain variable domain of TCR clone 23043 (TRAV26-1, TRAJ29)
CIVSVEGSGNTPLVF

SEQ ID NO: 46086 - protein, 15 aa, Homo sapiens
  CDR3 for beta chain variable domain of TCR clone 23043 (TRBV7-9, TRBJ1-5)
CASSQGHQPNQPQHF

SEQ ID NO: 46087 - protein, 13 aa, Homo sapiens
  CDR3 for alpha chain variable domain of TCR clone 23044 (TRAV12-1, TRAJ16)
CVVNGPDGQKLLL

SEQ ID NO: 46088 - protein, 13 aa, Homo sapiens
  CDR3 for beta chain variable domain of TCR clone 23044 (TRBV2, TRBJ1-1)
CARNPTGGFHAFF

SEQ ID NO: 46089 - protein, 16 aa, Homo sapiens
  CDR3 for alpha chain variable domain of TCR clone 23045 (TRAV21, TRAJ17)
CAVRPGEEAAGNKLTL

SEQ ID NO: 46090 - protein, 16 aa, Homo sapiens
  CDR3 for beta chain variable domain of TCR clone 23045 (TRBV2, TRBJ2-7)
CASSEPWTGPSYEQYF

SEQ ID NO: 46091 - protein, 15 aa, Homo sapiens
  CDR3 for alpha chain variable domain of TCR clone 23046 (TRAV12-3, TRAJ11)
CAMSEENSGYSTLTF

SEQ ID NO: 46092 - protein, 16 aa, Homo sapiens
  CDR3 for beta chain variable domain of TCR clone 23046 (TRBV20-1, TRBJ1-4)
CSAPGQGLLTNEKLFF

SEQ ID NO: 46093 - protein, 13 aa, Homo sapiens
  CDR3 for alpha chain variable domain of TCR clone 23047 (TRAV8-3, TRAJ28)
CAVGAVGSYQLTF

SEQ ID NO: 46094 - protein, 15 aa, Homo sapiens
  CDR3 for beta chain variable domain of TCR clone 23047 (TRBV7-9, TRBJ1-5)
CASSQGHQPNKPQHF

SEQ ID NO: 46095 - protein, 16 aa, Homo sapiens
  CDR3 for alpha chain variable domain of TCR clone 23048 (TRAV3, TRAJ10)
CAVRDMRAGGGNKLTF

SEQ ID NO: 46096 - protein, 12 aa, Homo sapiens
  CDR3 for beta chain variable domain of TCR clone 23048 (TRBV7-8, TRBJ2-7)
CASSLGDREQYF

SEQ ID NO: 46097 - protein, 14 aa, Homo sapiens
  CDR3 for alpha chain variable domain of TCR clone 23049 (TRAV13-1, TRAJ35)
CAASKGGFGNVLHC

SEQ ID NO: 46098 - protein, 14 aa, Homo sapiens
  CDR3 for beta chain variable domain of TCR clone 23049 (TRBV25-1, TRBJ1-1)
CASTHLGGNTEAFF

SEQ ID NO: 46099 - protein, 15 aa, Homo sapiens
  CDR3 for alpha chain variable domain of TCR clone 23050 (TRAV19, TRAJ8)
CALSGPNTGFQKLVF

SEQ ID NO: 46100 - protein, 14 aa, Homo sapiens
  CDR3 for beta chain variable domain of TCR clone 23050 (TRBV11-2, TRBJ2-7)
CASSLGAGSYEQYF

SEQ ID NO: 46101 - protein, 17 aa, Homo sapiens
  CDR3 for alpha chain variable domain of TCR clone 23051 (TRAV3, TRAJ42)
CAVRDRDYGGSQGNLIF

SEQ ID NO: 46102 - protein, 16 aa, Homo sapiens
  CDR3 for beta chain variable domain of TCR clone 23051 (TRBV19, TRBJ2-1)
CASSKAGPSSYNEQFF

SEQ ID NO: 46103 - protein, 12 aa, Homo sapiens
  CDR3 for alpha chain variable domain of TCR clone 23052 (TRAV21, TRAJ33)
CAKMDSNYQLIW

SEQ ID NO: 46104 - protein, 18 aa, Homo sapiens
  CDR3 for beta chain variable domain of TCR clone 23052 (TRBV15, TRBJ2-3)
CATSRDGARSWDTDTQHF

SEQ ID NO: 46105 - protein, 17 aa, Homo sapiens
  CDR3 for alpha chain variable domain of TCR clone 23053 (TRAV13-1, TRAJ31)
CAPRDRRMFGDGTQLVV

SEQ ID NO: 46106 - protein, 12 aa, Homo sapiens
  CDR3 for beta chain variable domain of TCR clone 23053 (TRBV7-9, TRBJ2-7)
CASSLEGYEQYF

SEQ ID NO: 46107 - protein, 14 aa, Homo sapiens
  CDR3 for alpha chain variable domain of TCR clone 23054 (TRAV13-1, TRAJ44)
CAAKATGTAGKLTF

SEQ ID NO: 46108 - protein, 13 aa, Homo sapiens
  CDR3 for beta chain variable domain of TCR clone 23054 (TRBV5-5, TRBJ1-2)
CASSFWRGEDYTF

SEQ ID NO: 46109 - protein, 15 aa, Homo sapiens
  CDR3 for alpha chain variable domain of TCR clone 23055 (TRAV8-4, TRAJ44)
CAVSSDTGTASKLTF

SEQ ID NO: 46110 - protein, 14 aa, Homo sapiens
  CDR3 for beta chain variable domain of TCR clone 23055 (TRBV5-1, TRBJ1-1)
CASRAQGAMTEAFF

SEQ ID NO: 46111 - protein, 15 aa, Homo sapiens
  CDR3 for alpha chain variable domain of TCR clone 23056 (TRAV8-3, TRAJ45)
CASSYSGGGADGLTF

SEQ ID NO: 46112 - protein, 11 aa, Homo sapiens
  CDR3 for beta chain variable domain of TCR clone 23056 (TRBV29-1, TRBJ2-5)
CSEDRTGTQYF

SEQ ID NO: 46113 - protein, 14 aa, Homo sapiens
  CDR3 for alpha chain variable domain of TCR clone 23057 (TRAV13-1, TRAJ20)
CAARPGSNDYKLSF

SEQ ID NO: 46114 - protein, 16 aa, Homo sapiens
  CDR3 for beta chain variable domain of TCR clone 23057 (TRBV20-1, TRBJ1-4)
CSAPGQGLLTNEKLFF

SEQ ID NO: 46115 - protein, 12 aa, Homo sapiens
  CDR3 for alpha chain variable domain of TCR clone 23058 (TRAV12-1, TRAJ40)
CVVYSGTYIYIF

SEQ ID NO: 46116 - protein, 18 aa, Homo sapiens
  CDR3 for beta chain variable domain of TCR clone 23058 (TRBV11-2, TRBJ2-3)
CASSLGGASRGAPNTQYF

SEQ ID NO: 46117 - protein, 15 aa, Homo sapiens
  CDR3 for alpha chain variable domain of TCR clone 23059 (TRAV8-3, TRAJ11)
CAVGLLNSGYSTLTF

SEQ ID NO: 46118 - protein, 14 aa, Homo sapiens
  CDR3 for beta chain variable domain of TCR clone 23059 (TRBV19, TRBJ2-1)
CASPTFVLSGEQFF

SEQ ID NO: 46119 - protein, 14 aa, Homo sapiens
  CDR3 for alpha chain variable domain of TCR clone 23060 (TRAV8-4, TRAJ13)
CAVTLSGGYQKVTF

SEQ ID NO: 46120 - protein, 13 aa, Homo sapiens
  CDR3 for beta chain variable domain of TCR clone 23060 (TRBV7-9, TRBJ1-2)
CASSLKQNYGYTF

SEQ ID NO: 46121 - protein, 14 aa, Homo sapiens
  CDR3 for alpha chain variable domain of TCR clone 23061 (TRAV9-2, TRAJ39)
CALYIYNAGNMLTF

SEQ ID NO: 46122 - protein, 15 aa, Homo sapiens
  CDR3 for beta chain variable domain of TCR clone 23061 (TRBV10-2, TRBJ2-6)
CASSEQGTGANVLTF

SEQ ID NO: 46123 - protein, 13 aa, Homo sapiens
  CDR3 for alpha chain variable domain of TCR clone 23062 (TRAV1-2, TRAJ9)
CAALNTGGFKTIF

SEQ ID NO: 46124 - protein, 13 aa, Homo sapiens
  CDR3 for beta chain variable domain of TCR clone 23062 (TRBV19, TRBJ1-2)
CASSVPAQDGYTF

SEQ ID NO: 46125 - protein, 12 aa, Homo sapiens
  CDR3 for alpha chain variable domain of TCR clone 23063 (TRAV12-3, TRAJ17)
CAMTLTGNKLTF

SEQ ID NO: 46126 - protein, 18 aa, Homo sapiens
  CDR3 for beta chain variable domain of TCR clone 23063 (TRBV7-2, TRBJ2-3)
CASSLKREGSGITDTQYF

SEQ ID NO: 46127 - protein, 12 aa, Homo sapiens
  CDR3 for alpha chain variable domain of TCR clone 23064 (TRAV26-2, TRAJ21)
CILKGNFNKFYF

SEQ ID NO: 46128 - protein, 14 aa, Homo sapiens
  CDR3 for beta chain variable domain of TCR clone 23064 (TRBV7-9, TRBJ1-1)
CTSTPLQSYTEAFF

SEQ ID NO: 46129 - protein, 11 aa, Homo sapiens
  CDR3 for alpha chain variable domain of TCR clone 23065 (TRAV35, TRAJ30)
CAPGGDDKIIF

SEQ ID NO: 46130 - protein, 14 aa, Homo sapiens
  CDR3 for beta chain variable domain of TCR clone 23065 (TRBV7-6, TRBJ2-1)
WASSLGGGADEQFF

SEQ ID NO: 46131 - protein, 14 aa, Homo sapiens
  CDR3 for alpha chain variable domain of TCR clone 23066 (TRAV14/DV4, TRAJ54)
CAMREAPGAQKLVF

SEQ ID NO: 46132 - protein, 15 aa, Homo sapiens
  CDR3 for beta chain variable domain of TCR clone 23066 (TRBV5-1, TRBJ2-7)
RASSLNGGPAREQYF

SEQ ID NO: 46133 - protein, 14 aa, Homo sapiens
  CDR3 for alpha chain variable domain of TCR clone 23067 (TRAV1-2, TRAJ16)
CAVNRFSDGQKLLF

SEQ ID NO: 46134 - protein, 16 aa, Homo sapiens
  CDR3 for beta chain variable domain of TCR clone 23067 (TRBV12-5, TRBJ2-5)
CAGGPRTSGNQETQYF

SEQ ID NO: 46135 - protein, 14 aa, Homo sapiens
  CDR3 for alpha chain variable domain of TCR clone 23068 (TRAV12-2, TRAJ24)
CAVTPADSWGKLQF

SEQ ID NO: 46136 - protein, 12 aa, Homo sapiens
  CDR3 for beta chain variable domain of TCR clone 23068 (TRBV3-1, TRBJ2-1)
CASSRGSSGQFF

SEQ ID NO: 46137 - protein, 19 aa, Homo sapiens
  CDR3 for alpha chain variable domain of TCR clone 23069 (TRAV2, TRAJ32)
CAFNPPESGWCYKQAHLWN

SEQ ID NO: 46138 - protein, 12 aa, Homo sapiens
  CDR3 for beta chain variable domain of TCR clone 23069 (TRBV20-1, TRBJ2-7)
CSAITPTKEQYF

SEQ ID NO: 46139 - protein, 10 aa, Homo sapiens
  CDR3 for alpha chain variable domain of TCR clone 23070 (TRAV8-4, TRAJ43)
CAVSADDMRF

SEQ ID NO: 46140 - protein, 11 aa, Homo sapiens
  CDR3 for beta chain variable domain of TCR clone 23070 (TRBV6-3, TRBJ2-3)
CATGQADTQYF

SEQ ID NO: 46141 - protein, 16 aa, Homo sapiens
  CDR3 for alpha chain variable domain of TCR clone 23071 (TRAV38-1, TRAJ37)
CAFKGDGFSNTGKLIF

SEQ ID NO: 46142 - protein, 13 aa, Homo sapiens
  CDR3 for beta chain variable domain of TCR clone 23071 (TRBV12-4, TRBJ2-5)
CASSLFRRETQYF

SEQ ID NO: 46143 - protein, 13 aa, Homo sapiens
  CDR3 for alpha chain variable domain of TCR clone 23072 (TRAV22, TRAJ29)
CAVGGSGKTPLVF

SEQ ID NO: 46144 - protein, 13 aa, Homo sapiens
  CDR3 for beta chain variable domain of TCR clone 23072 (TRBV4-2, TRBJ1-1)
CASSQAGNTEAFF

SEQ ID NO: 46145 - protein, 11 aa, Homo sapiens
  CDR3 for alpha chain variable domain of TCR clone 23073 (TRAV2, TRAJ33)
CAVDGNYQLIW

SEQ ID NO: 46146 - protein, 15 aa, Homo sapiens
  CDR3 for beta chain variable domain of TCR clone 23073 (TRBV19, TRBJ1-2)
CASSVGQVLNYGYTF

SEQ ID NO: 46147 - protein, 15 aa, Homo sapiens
  CDR3 for alpha chain variable domain of TCR clone 23074 (TRAV12-2, TRAJ53)
CAVNGGGGSNYKLTF

SEQ ID NO: 46148 - protein, 17 aa, Homo sapiens
  CDR3 for beta chain variable domain of TCR clone 23074 (TRBV7-3, TRBJ2-3)
CASSLMKRMRGVDTQYF

SEQ ID NO: 46149 - protein, 16 aa, Homo sapiens
  CDR3 for alpha chain variable domain of TCR clone 23075 (TRAV26-1, TRAJ53)
CIVRVAMGGSNYKLTF

SEQ ID NO: 46150 - protein, 12 aa, Homo sapiens
  CDR3 for beta chain variable domain of TCR clone 23075 (TRBV7-9, TRBJ1-5)
CASSPQGQPQHS

SEQ ID NO: 46151 - protein, 16 aa, Homo sapiens
  CDR3 for alpha chain variable domain of TCR clone 23076 (TRAV13-1, TRAJ48)
CAASIFGNFGNEKLTF

SEQ ID NO: 46152 - protein, 12 aa, Homo sapiens
  CDR3 for beta chain variable domain of TCR clone 23076 (TRBV14, TRBJ2-4)
CASSNLKSMQYF

SEQ ID NO: 46153 - protein, 13 aa, Homo sapiens
  CDR3 for alpha chain variable domain of TCR clone 23077 (TRAV29/DV5, TRAJ33)
CAASVESNYQLIW

SEQ ID NO: 46154 - protein, 17 aa, Homo sapiens
  CDR3 for beta chain variable domain of TCR clone 23077 (TRBV28, TRBJ2-5)
CASSTPEGDALQETQYF

SEQ ID NO: 46155 - protein, 14 aa, Homo sapiens
  CDR3 for alpha chain variable domain of TCR clone 23078 (TRAV17, TRAJ34)
CATDSLEGTDKLIF

SEQ ID NO: 46156 - protein, 13 aa, Homo sapiens
  CDR3 for beta chain variable domain of TCR clone 23078 (TRBV11-2, TRBJ2-7)
CASSGTRPYEQYL

SEQ ID NO: 46157 - protein, 15 aa, Homo sapiens
  CDR3 for alpha chain variable domain of TCR clone 23079 (TRAV17, TRAJ57)
CATGPSQGGCEKLVF

SEQ ID NO: 46158 - protein, 16 aa, Homo sapiens
  CDR3 for beta chain variable domain of TCR clone 23079 (TRBV12-4, TRBJ1-5)
CASSRPVGGSNQPQHF

SEQ ID NO: 46159 - protein, 11 aa, Homo sapiens
  CDR3 for alpha chain variable domain of TCR clone 23080 (TRAV12-3, TRAJ43)
CAMSVSNDMRF

SEQ ID NO: 46160 - protein, 14 aa, Homo sapiens
  CDR3 for beta chain variable domain of TCR clone 23080 (TRBV25-1, TRBJ1-1)
CASTHLGGNTEAFF

SEQ ID NO: 46161 - protein, 16 aa, Homo sapiens
  CDR3 for alpha chain variable domain of TCR clone 23081 (TRAV27, TRAJ52)
CAGAPAGGTSYGKLTF

SEQ ID NO: 46162 - protein, 12 aa, Homo sapiens
  CDR3 for beta chain variable domain of TCR clone 23081 (TRBV27, TRBJ2-1)
CASRGFYDEQFF

SEQ ID NO: 46163 - protein, 12 aa, Homo sapiens
  CDR3 for alpha chain variable domain of TCR clone 23082 (TRAV27, TRAJ36)
CAGMTGANNLFF

SEQ ID NO: 46164 - protein, 14 aa, Homo sapiens
  CDR3 for beta chain variable domain of TCR clone 23082 (TRBV12-4, TRBJ2-3)
CASSLVPSTDTQYF

SEQ ID NO: 46165 - protein, 14 aa, Homo sapiens
  CDR3 for alpha chain variable domain of TCR clone 23083 (TRAV12-3, TRAJ9)
CAMSPNTGGFKTIF

SEQ ID NO: 46166 - protein, 12 aa, Homo sapiens
  CDR3 for beta chain variable domain of TCR clone 23083 (TRBV19, TRBJ1-5)
CASSIAQQPRHF

SEQ ID NO: 46167 - protein, 14 aa, Homo sapiens
  CDR3 for alpha chain variable domain of TCR clone 23084 (TRAV12-2, TRAJ40)
CAVKIPSGTYKYIF

SEQ ID NO: 46168 - protein, 15 aa, Homo sapiens
  CDR3 for beta chain variable domain of TCR clone 23084 (TRBV27, TRBJ2-1)
CASSNGGGSSNEQFF

SEQ ID NO: 46169 - protein, 14 aa, Homo sapiens
  CDR3 for alpha chain variable domain of TCR clone 23085 (TRAV8-3, TRAJ9)
CAVVYNTGGFKTIL

SEQ ID NO: 46170 - protein, 14 aa, Homo sapiens
  CDR3 for beta chain variable domain of TCR clone 23085 (TRBV7-3, TRBJ2-2)
CASSSGGYTGELFF

SEQ ID NO: 46171 - protein, 12 aa, Homo sapiens
  CDR3 for alpha chain variable domain of TCR clone 23086 (TRAV12-1, TRAJ40)
CVVYSGTYKYIF

SEQ ID NO: 46172 - protein, 13 aa, Homo sapiens
  CDR3 for beta chain variable domain of TCR clone 23086 (TRBV12-5, TRBJ2-3)
CASGDRQSDTQYF

SEQ ID NO: 46173 - protein, 14 aa, Homo sapiens
  CDR3 for alpha chain variable domain of TCR clone 23087 (TRAV12-2, TRAJ13)
CAVKKTGGYQKVTF

SEQ ID NO: 46174 - protein, 16 aa, Homo sapiens
  CDR3 for beta chain variable domain of TCR clone 23087 (TRBV11-2, TRBJ2-7)
CASSPTTGGVSYEQYF

SEQ ID NO: 46175 - protein, 13 aa, Homo sapiens
  CDR3 for alpha chain variable domain of TCR clone 23088 (TRAV12-3, TRAJ13)
CAMSSGGYQKVTF

SEQ ID NO: 46176 - protein, 12 aa, Homo sapiens
  CDR3 for beta chain variable domain of TCR clone 23088 (TRBV11-2, TRBJ2-2)
CASSLGGGELFF

SEQ ID NO: 46177 - protein, 10 aa, Homo sapiens
  CDR3 for alpha chain variable domain of TCR clone 23089 (TRAV23/DV6, TRAJ31)
CARGGARPMF

SEQ ID NO: 46178 - protein, 14 aa, Homo sapiens
  CDR3 for beta chain variable domain of TCR clone 23089 (TRBV7-8, TRBJ1-2)
CASSPDSLSYGYTF

SEQ ID NO: 46179 - protein, 13 aa, Homo sapiens
  CDR3 for alpha chain variable domain of TCR clone 23090 (TRAV27, TRAJ27)
CAGGVTNAGKSTF

SEQ ID NO: 46180 - protein, 13 aa, Homo sapiens
  CDR3 for beta chain variable domain of TCR clone 23090 (TRBV20-1, TRBJ1-2)
CSASLGVGYGYTF

SEQ ID NO: 46181 - protein, 16 aa, Homo sapiens
  CDR3 for alpha chain variable domain of TCR clone 23091 (TRAV3, TRAJ10)
CAVRDMRAGGGNKLTF

SEQ ID NO: 46182 - protein, 13 aa, Homo sapiens
  CDR3 for beta chain variable domain of TCR clone 23091 (TRBV6-1, TRBJ1-1)
CASSRQGDTEAFF

SEQ ID NO: 46183 - protein, 14 aa, Homo sapiens
  CDR3 for alpha chain variable domain of TCR clone 23092 (TRAV1-1, TRAJ27)
CAVIYNTNAGKSTF

SEQ ID NO: 46184 - protein, 12 aa, Homo sapiens
  CDR3 for beta chain variable domain of TCR clone 23092 (TRBV11-2, TRBJ2-2)
CASSLGGGELFF

SEQ ID NO: 46185 - protein, 16 aa, Homo sapiens
  CDR3 for alpha chain variable domain of TCR clone 23093 (TRAV16, TRAJ52)
CALSGVGGTSYGRLTF

SEQ ID NO: 46186 - protein, 14 aa, Homo sapiens
  CDR3 for beta chain variable domain of TCR clone 23093 (TRBV19, TRBJ1-2)
CASSLQGQAYGYTF

SEQ ID NO: 46187 - protein, 14 aa, Homo sapiens
  CDR3 for alpha chain variable domain of TCR clone 23094 (TRAV4, TRAJ9)
CLVGSGTGGFKTIF

SEQ ID NO: 46188 - protein, 14 aa, Homo sapiens
  CDR3 for beta chain variable domain of TCR clone 23094 (TRBV7-9, TRBJ2-4)
CASSLAMGGNSQYF

SEQ ID NO: 46189 - protein, 12 aa, Homo sapiens
  CDR3 for alpha chain variable domain of TCR clone 23095 (TRAV1-1, TRAJ15)
CAVGQAGTALIF

SEQ ID NO: 46190 - protein, 13 aa, Homo sapiens
  CDR3 for beta chain variable domain of TCR clone 23095 (TRBV10-3, TRBJ1-1)
CAIIPEGGTEAFF

SEQ ID NO: 46191 - protein, 15 aa, Homo sapiens
  CDR3 for alpha chain variable domain of TCR clone 23096 (TRAV34, TRAJ38)
CGADFTPGNNRKLIW

SEQ ID NO: 46192 - protein, 16 aa, Homo sapiens
  CDR3 for beta chain variable domain of TCR clone 23096 (TRBV13, TRBJ2-2)
CASSPRTGEHTGELFF

SEQ ID NO: 46193 - protein, 11 aa, Homo sapiens
  CDR3 for alpha chain variable domain of TCR clone 23097 (TRAV1-1, TRAJ23)
CAVRQGGKLIF

SEQ ID NO: 46194 - protein, 20 aa, Homo sapiens
  CDR3 for beta chain variable domain of TCR clone 23097 (TRBV7-8, TRBJ2-2)
CASSHLFHGPTIHITGELFF

SEQ ID NO: 46195 - protein, 11 aa, Homo sapiens
  CDR3 for alpha chain variable domain of TCR clone 23098 (TRAV13-1, TRAJ6)
CATLGSYVPTF

SEQ ID NO: 46196 - protein, 12 aa, Homo sapiens
  CDR3 for beta chain variable domain of TCR clone 23098 (TRBV11-2, TRBJ2-1)
CASSPGNNEQFF

SEQ ID NO: 46197 - protein, 11 aa, Homo sapiens
  CDR3 for alpha chain variable domain of TCR clone 23099 (TRAV17, TRAJ43)
CATPRSNDMRF

SEQ ID NO: 46198 - protein, 15 aa, Homo sapiens
  CDR3 for beta chain variable domain of TCR clone 23099 (TRBV11-2, TRBJ2-1)
CASSLGTSGLSEQFF

SEQ ID NO: 46199 - protein, 14 aa, Homo sapiens
  CDR3 for alpha chain variable domain of TCR clone 23100 (TRAV8-3, TRAJ9)
CAVVYNTGGFTTIF

SEQ ID NO: 46200 - protein, 14 aa, Homo sapiens
  CDR3 for beta chain variable domain of TCR clone 23100 (TRBV7-3, TRBJ2-2)
CASSSGGYTGELFF

SEQ ID NO: 46201 - protein, 18 aa, Homo sapiens
  CDR3 for alpha chain variable domain of TCR clone 23101 (TRAV12-3, TRAJ52)
RAMSVGGAGGTSYGKLTF

SEQ ID NO: 46202 - protein, 15 aa, Homo sapiens
  CDR3 for beta chain variable domain of TCR clone 23101 (TRBV27, TRBJ1-6)
CASSFDRGLGSPLHF

SEQ ID NO: 46203 - protein, 12 aa, Homo sapiens
  CDR3 for alpha chain variable domain of TCR clone 23102 (TRAV1-1, TRAJ43)
CAPRVSSNDIRF

SEQ ID NO: 46204 - protein, 15 aa, Homo sapiens
  CDR3 for beta chain variable domain of TCR clone 23102 (TRBV5-1, TRBJ2-7)
CASSLGDFTTYEQYF

SEQ ID NO: 46205 - protein, 13 aa, Homo sapiens
  CDR3 for alpha chain variable domain of TCR clone 23103 (TRAV16, TRAJ31)
CALSAHNNARLMF

SEQ ID NO: 46206 - protein, 17 aa, Homo sapiens
  CDR3 for beta chain variable domain of TCR clone 23103 (TRBV12-4, TRBJ2-1)
CASSPGLAGGRIDEQFF

SEQ ID NO: 46207 - protein, 14 aa, Homo sapiens
  CDR3 for alpha chain variable domain of TCR clone 23104 (TRAV17, TRAJ16)
CATADFSDGQKLLS

SEQ ID NO: 46208 - protein, 15 aa, Homo sapiens
  CDR3 for beta chain variable domain of TCR clone 23104 (TRBV18, TRBJ2-1)
CASSPPSASYNEQFF

SEQ ID NO: 46209 - protein, 16 aa, Homo sapiens
  CDR3 for alpha chain variable domain of TCR clone 23105 (TRAV16, TRAJ4)
CALSRMFSGGYNKLIF

SEQ ID NO: 46210 - protein, 13 aa, Homo sapiens
  CDR3 for beta chain variable domain of TCR clone 23105 (TRBV7-9, TRBJ1-2)
CASSLKQNYGYTF

SEQ ID NO: 46211 - protein, 14 aa, Homo sapiens
  CDR3 for alpha chain variable domain of TCR clone 23106 (TRAV35, TRAJ33)
CAGSSQDSNYQLIW

SEQ ID NO: 46212 - protein, 15 aa, Homo sapiens
  CDR3 for beta chain variable domain of TCR clone 23106 (TRBV5-1, TRBJ1-4)
LAPAAWKDGNEKLFF

SEQ ID NO: 46213 - protein, 14 aa, Homo sapiens
  CDR3 for alpha chain variable domain of TCR clone 23107 (TRAV13-2, TRAJ43)
CAEIPTYNNNDMRF

SEQ ID NO: 46214 - protein, 15 aa, Homo sapiens
  CDR3 for beta chain variable domain of TCR clone 23107 (TRBV7-9, TRBJ2-2)
CASRPLDTFPGELFF

SEQ ID NO: 46215 - protein, 16 aa, Homo sapiens
  CDR3 for alpha chain variable domain of TCR clone 23108 (TRAV26-1, )
CIDIQNPGPAVYQLRD

SEQ ID NO: 46216 - protein, 19 aa, Homo sapiens
  CDR3 for beta chain variable domain of TCR clone 23108 (TRBV19, TRBJ2-5)
CASSIGQVTDFFLGETQYF

SEQ ID NO: 46217 - protein, 14 aa, Homo sapiens
  CDR3 for alpha chain variable domain of TCR clone 23109 (TRAV8-1, TRAJ5)
CAVRTDTGGRALTF

SEQ ID NO: 46218 - protein, 14 aa, Homo sapiens
  CDR3 for beta chain variable domain of TCR clone 23109 (TRBV7-8, TRBJ2-3)
CASSFPDGQDTQYF

SEQ ID NO: 46219 - protein, 18 aa, Homo sapiens
  CDR3 for alpha chain variable domain of TCR clone 23110 (TRAV9-2, TRAJ52)
CALSRHNAGGTSYGKLTF

SEQ ID NO: 46220 - protein, 14 aa, Homo sapiens
  CDR3 for beta chain variable domain of TCR clone 23110 (TRBV7-2, TRBJ1-1)
CASSFLTGTTEAFF

SEQ ID NO: 46221 - protein, 10 aa, Homo sapiens
  CDR3 for alpha chain variable domain of TCR clone 23111 (TRAV12-1, TRAJ43)
CVVHNNDIRF

SEQ ID NO: 46222 - protein, 13 aa, Homo sapiens
  CDR3 for beta chain variable domain of TCR clone 23111 (TRBV12-4, TRBJ1-2)
CASSSGLTVISTF

SEQ ID NO: 46223 - protein, 14 aa, Homo sapiens
  CDR3 for alpha chain variable domain of TCR clone 23112 (TRAV12-2, TRAJ44)
CAVSPAGTASKLTF

SEQ ID NO: 46224 - protein, 13 aa, Homo sapiens
  CDR3 for beta chain variable domain of TCR clone 23112 (TRBV20-1, TRBJ1-6)
CSAPLGVGSPLHF

SEQ ID NO: 46225 - protein, 15 aa, Homo sapiens
  CDR3 for alpha chain variable domain of TCR clone 23113 (TRAV25, TRAJ53)
CAATGGGGSNYKLTL

SEQ ID NO: 46226 - protein, 19 aa, Homo sapiens
  CDR3 for beta chain variable domain of TCR clone 23113 (TRBV7-2, TRBJ2-3)
CASSFLSRNWGGGTDTQYF

SEQ ID NO: 46227 - protein, 13 aa, Homo sapiens
  CDR3 for alpha chain variable domain of TCR clone 23114 (TRAV29/DV5, TRAJ31)
CAASRNNNARLMF

SEQ ID NO: 46228 - protein, 15 aa, Homo sapiens
  CDR3 for beta chain variable domain of TCR clone 23114 (TRBV6-3, TRBJ2-7)
CASSSPGTVFYEQYF

SEQ ID NO: 46229 - protein, 12 aa, Homo sapiens
  CDR3 for alpha chain variable domain of TCR clone 23115 (TRAV13-1, TRAJ53)
CAAGGSNYKLTF

SEQ ID NO: 46230 - protein, 20 aa, Homo sapiens
  CDR3 for beta chain variable domain of TCR clone 23115 (TRBV7-8, TRBJ2-2)
CASSHLFPGPTIHITGELFF

SEQ ID NO: 46231 - protein, 14 aa, Homo sapiens
  CDR3 for alpha chain variable domain of TCR clone 23116 (TRAV12-2, TRAJ17)
CAVNIKAAGNKPTF

SEQ ID NO: 46232 - protein, 16 aa, Homo sapiens
  CDR3 for beta chain variable domain of TCR clone 23116 (TRBV20-1, TRBJ2-6)
CSASSQGYDGANVLTF

SEQ ID NO: 46233 - protein, 13 aa, Homo sapiens
  CDR3 for alpha chain variable domain of TCR clone 23117 (TRAV27, TRAJ45)
CRSSGGGADGLTF

SEQ ID NO: 46234 - protein, 17 aa, Homo sapiens
  CDR3 for beta chain variable domain of TCR clone 23117 (TRBV11-2, TRBJ2-1)
CASSLYPPGVEHNEQFF

SEQ ID NO: 46235 - protein, 14 aa, Homo sapiens
  CDR3 for alpha chain variable domain of TCR clone 23118 (TRAV26-1, TRAJ38)
CIADNAGNNRKLIW

SEQ ID NO: 46236 - protein, 14 aa, Homo sapiens
  CDR3 for beta chain variable domain of TCR clone 23118 (TRBV12-5, TRBJ2-5)
CASGSRTHQETQYF

SEQ ID NO: 46237 - protein, 14 aa, Homo sapiens
  CDR3 for alpha chain variable domain of TCR clone 23119 (TRAV13-1, TRAJ44)
CAAKATGTASKLTF

SEQ ID NO: 46238 - protein, 17 aa, Homo sapiens
  CDR3 for beta chain variable domain of TCR clone 23119 (TRBV7-3, TRBJ2-3)
RASSFMKRMRGADTQYF

SEQ ID NO: 46239 - protein, 12 aa, Homo sapiens
  CDR3 for alpha chain variable domain of TCR clone 23120 (TRAV23/DV6, TRAJ58)
CAARLLRGETSG

SEQ ID NO: 46240 - protein, 13 aa, Homo sapiens
  CDR3 for beta chain variable domain of TCR clone 23120 (TRBV6-4, TRBJ1-5)
CASSADLNQPQHF

SEQ ID NO: 46241 - protein, 15 aa, Homo sapiens
  CDR3 for alpha chain variable domain of TCR clone 23121 (TRAV2, TRAJ37)
CTVGDGSSNTGKLIF

SEQ ID NO: 46242 - protein, 13 aa, Homo sapiens
  CDR3 for beta chain variable domain of TCR clone 23121 (TRBV20-1, TRBJ2-7)
CSAQTGLSYEQYF

SEQ ID NO: 46243 - protein, 23 aa, Homo sapiens
  CDR3 for alpha chain variable domain of TCR clone 23122 (TRAV26-1, TRAJ38)
CIADNAGNNHIQNPDPAVYQLRD

SEQ ID NO: 46244 - protein, 13 aa, Homo sapiens
  CDR3 for beta chain variable domain of TCR clone 23122 (TRBV7-9, TRBJ1-2)
CASSLKQNYGYTF

SEQ ID NO: 46245 - protein, 14 aa, Homo sapiens
  CDR3 for alpha chain variable domain of TCR clone 23123 (TRAV1-2, TRAJ6)
CAVSLSGGSYIPTF

SEQ ID NO: 46246 - protein, 15 aa, Homo sapiens
  CDR3 for beta chain variable domain of TCR clone 23123 (TRBV28, TRBJ2-7)
CASSPGDRGFYEQYF

SEQ ID NO: 46247 - protein, 11 aa, Homo sapiens
  CDR3 for alpha chain variable domain of TCR clone 23124 (TRAV13-1, TRAJ49)
CACVGGNQSYF

SEQ ID NO: 46248 - protein, 16 aa, Homo sapiens
  CDR3 for beta chain variable domain of TCR clone 23124 (TRBV11-2, TRBJ2-2)
CASSLRTGNLIGELFF

SEQ ID NO: 46249 - protein, 11 aa, Homo sapiens
  CDR3 for alpha chain variable domain of TCR clone 23125 (TRAV26-1, TRAJ37)
CIVRVGRKLIF

SEQ ID NO: 46250 - protein, 16 aa, Homo sapiens
  CDR3 for beta chain variable domain of TCR clone 23125 (TRBV12-5, TRBJ2-5)
CASGPRTSGNQETQYF

SEQ ID NO: 46251 - protein, 10 aa, Homo sapiens
  CDR3 for alpha chain variable domain of TCR clone 23126 (TRAV13-1, TRAJ26)
CAPYGQNFVF

SEQ ID NO: 46252 - protein, 15 aa, Homo sapiens
  CDR3 for beta chain variable domain of TCR clone 23126 (TRBV28, TRBJ2-3)
CASSQELGGADTQYF

SEQ ID NO: 46253 - protein, 14 aa, Homo sapiens
  CDR3 for alpha chain variable domain of TCR clone 23127 (TRAV35, TRAJ33)
CAGSSQDSNYQVIW

SEQ ID NO: 46254 - protein, 15 aa, Homo sapiens
  CDR3 for beta chain variable domain of TCR clone 23127 (TRBV20-1, TRBJ2-7)
CSAESGTSGAYEQYF

SEQ ID NO: 46255 - protein, 17 aa, Homo sapiens
  CDR3 for alpha chain variable domain of TCR clone 23128 (TRAV3, TRAJ42)
CAVRDRDYGGSQGNHIF

SEQ ID NO: 46256 - protein, 15 aa, Homo sapiens
  CDR3 for beta chain variable domain of TCR clone 23128 (TRBV6-6, TRBJ2-7)
CASSYSYGGSYEQYF

SEQ ID NO: 46257 - protein, 13 aa, Homo sapiens
  CDR3 for alpha chain variable domain of TCR clone 23129 (TRAV12-1, TRAJ6)
CVVFPGGSYIPTF

SEQ ID NO: 46258 - protein, 14 aa, Homo sapiens
  CDR3 for beta chain variable domain of TCR clone 23129 (TRBV20-1, TRBJ1-3)
CSAGPTGAGNTIYF

SEQ ID NO: 46259 - protein, 16 aa, Homo sapiens
  CDR3 for alpha chain variable domain of TCR clone 23130 (TRAV4, TRAJ18)
CCVLLIGGSTLGRLYF

SEQ ID NO: 46260 - protein, 14 aa, Homo sapiens
  CDR3 for beta chain variable domain of TCR clone 23130 (TRBV19, TRBJ2-1)
CASPTFVLSGEQFF

SEQ ID NO: 46261 - protein, 14 aa, Homo sapiens
  CDR3 for alpha chain variable domain of TCR clone 23131 (TRAV8-4, TRAJ13)
CALTLSGGYQKVTF

SEQ ID NO: 46262 - protein, 14 aa, Homo sapiens
  CDR3 for beta chain variable domain of TCR clone 23131 (TRBV7-2, TRBJ1-2)
CASSQTGSTYGYTF

SEQ ID NO: 46263 - protein, 13 aa, Homo sapiens
  CDR3 for alpha chain variable domain of TCR clone 23132 (TRAV1-1, TRAJ9)
CAVKNTGGFKTIF

SEQ ID NO: 46264 - protein, 14 aa, Homo sapiens
  CDR3 for beta chain variable domain of TCR clone 23132 (TRBV20-1, TRBJ2-1)
CSAQIGGSANEQFF

SEQ ID NO: 46265 - protein, 15 aa, Homo sapiens
  CDR3 for alpha chain variable domain of TCR clone 23133 (TRAV12-3, TRAJ10)
CASYILTGGGNKLTF

SEQ ID NO: 46266 - protein, 15 aa, Homo sapiens
  CDR3 for beta chain variable domain of TCR clone 23133 (TRBV7-2, TRBJ1-6)
CASSLGPDSGMPLHF

SEQ ID NO: 46267 - protein, 13 aa, Homo sapiens
  CDR3 for alpha chain variable domain of TCR clone 23134 (TRAV3, TRAJ27)
CAVRPLGAGKSTF

SEQ ID NO: 46268 - protein, 15 aa, Homo sapiens
  CDR3 for beta chain variable domain of TCR clone 23134 (TRBV9, TRBJ1-6)
CASSVSGTGDSPLHF

SEQ ID NO: 46269 - protein, 13 aa, Homo sapiens
  CDR3 for alpha chain variable domain of TCR clone 23135 (TRAV22, TRAJ29)
CAVGGSGNTPLVF

SEQ ID NO: 46270 - protein, 13 aa, Homo sapiens
  CDR3 for beta chain variable domain of TCR clone 23135 (TRBV4-2, TRBJ1-1)
CASSQAGNTEALF

SEQ ID NO: 46271 - protein, 13 aa, Homo sapiens
  CDR3 for alpha chain variable domain of TCR clone 23136 (TRAV12-1, TRAJ6)
CVVFPGGSYVPTF

SEQ ID NO: 46272 - protein, 14 aa, Homo sapiens
  CDR3 for beta chain variable domain of TCR clone 23136 (TRBV20-1, TRBJ1-3)
CSASPTGAGNTIYF

SEQ ID NO: 46273 - protein, 13 aa, Homo sapiens
  CDR3 for alpha chain variable domain of TCR clone 23137 (TRAV3, TRAJ27)
CAVRPLGAGKSTF

SEQ ID NO: 46274 - protein, 12 aa, Homo sapiens
  CDR3 for beta chain variable domain of TCR clone 23137 (TRBV7-9, TRBJ2-7)
CATRTDAYEQHF

SEQ ID NO: 46275 - protein, 15 aa, Homo sapiens
  CDR3 for alpha chain variable domain of TCR clone 23138 (TRAV12-1, TRAJ44)
CVADLPTGTASNLTF

SEQ ID NO: 46276 - protein, 13 aa, Homo sapiens
  CDR3 for beta chain variable domain of TCR clone 23138 (TRBV6-5, TRBJ2-5)
CASSPQGGETQYF

SEQ ID NO: 46277 - protein, 14 aa, Homo sapiens
  CDR3 for alpha chain variable domain of TCR clone 23139 (TRAV12-3, TRAJ9)
CATSPNTGGFKTIF

SEQ ID NO: 46278 - protein, 12 aa, Homo sapiens
  CDR3 for beta chain variable domain of TCR clone 23139 (TRBV19, TRBJ1-5)
CASSIAQQPQHF

SEQ ID NO: 46279 - protein, 12 aa, Homo sapiens
  CDR3 for alpha chain variable domain of TCR clone 23140 (TRAV2, TRAJ31)
CAVADNNARLMF

SEQ ID NO: 46280 - protein, 16 aa, Homo sapiens
  CDR3 for beta chain variable domain of TCR clone 23140 (TRBV10-3, TRBJ2-1)
CAISGVGDGGGGEQFF

SEQ ID NO: 46281 - protein, 15 aa, Homo sapiens
  CDR3 for alpha chain variable domain of TCR clone 23141 (TRAV3, TRAJ47)
CAVRDLGEYGNKLVF

SEQ ID NO: 46282 - protein, 14 aa, Homo sapiens
  CDR3 for beta chain variable domain of TCR clone 23141 (TRBV13, TRBJ2-5)
CASSLERVGETQYF

SEQ ID NO: 46283 - protein, 16 aa, Homo sapiens
  CDR3 for alpha chain variable domain of TCR clone 23142 (TRAV21, TRAJ45)
CAVEAPRGDQEEVLTD

SEQ ID NO: 46284 - protein, 10 aa, Homo sapiens
  CDR3 for beta chain variable domain of TCR clone 23142 (TRBV4-1, TRBJ2-7)
SRGDRHEQYF

SEQ ID NO: 46285 - protein, 15 aa, Homo sapiens
  CDR3 for alpha chain variable domain of TCR clone 23143 (TRAV3, TRAJ47)
CAVRDIGEYGNKLVF

SEQ ID NO: 46286 - protein, 14 aa, Homo sapiens
  CDR3 for beta chain variable domain of TCR clone 23143 (TRBV13, TRBJ2-5)
CASSLEWVGETQYF

SEQ ID NO: 46287 - protein, 14 aa, Homo sapiens
  CDR3 for alpha chain variable domain of TCR clone 23144 (TRAV1-2, TRAJ16)
CVVNRFSDGQKLLF

SEQ ID NO: 46288 - protein, 14 aa, Homo sapiens
  CDR3 for beta chain variable domain of TCR clone 23144 (TRBV19, TRBJ2-1)
CASPTFVLSGEQFF

SEQ ID NO: 46289 - protein, 13 aa, Homo sapiens
  CDR3 for alpha chain variable domain of TCR clone 23145 (TRAV3, TRAJ21)
CAVGNFNKFYLDL

SEQ ID NO: 46290 - protein, 16 aa, Homo sapiens
  CDR3 for beta chain variable domain of TCR clone 23145 (TRBV19, TRBJ2-1)
CASSKAGPSSYNEQFF

SEQ ID NO: 46291 - protein, 17 aa, Homo sapiens
  CDR3 for alpha chain variable domain of TCR clone 23146 (TRAV13-1, TRAJ31)
CAPRDRLMFGDGTQLVL

SEQ ID NO: 46292 - protein, 12 aa, Homo sapiens
  CDR3 for beta chain variable domain of TCR clone 23146 (TRBV7-9, TRBJ2-7)
CASSLEGYEQYF

SEQ ID NO: 46293 - protein, 16 aa, Homo sapiens
  CDR3 for alpha chain variable domain of TCR clone 23147 (TRAV30, TRAJ24)
CGTEIVDADSWGRFQF

SEQ ID NO: 46294 - protein, 14 aa, Homo sapiens
  CDR3 for beta chain variable domain of TCR clone 23147 (TRBV11-2, TRBJ2-7)
CASSLGAGAYEQYF

SEQ ID NO: 46295 - protein, 13 aa, Homo sapiens
  CDR3 for alpha chain variable domain of TCR clone 23148 (TRAV3, TRAJ27)
CAVRPLGAGKSTF

SEQ ID NO: 46296 - protein, 13 aa, Homo sapiens
  CDR3 for beta chain variable domain of TCR clone 23148 (TRBV7-9, TRBJ2-3)
CASSPGSIDTQYF

SEQ ID NO: 46297 - protein, 17 aa, Homo sapiens
  CDR3 for alpha chain variable domain of TCR clone 23149 (TRAV4, TRAJ42)
CLVGVLNYGGSQGNLTF

SEQ ID NO: 46298 - protein, 12 aa, Homo sapiens
  CDR3 for beta chain variable domain of TCR clone 23149 (TRBV20-1, TRBJ2-1)
CSAQYTYNEQFF

SEQ ID NO: 46299 - protein, 13 aa, Homo sapiens
  CDR3 for alpha chain variable domain of TCR clone 23150 (TRAV8-3, TRAJ28)
CAVGAVGSYQLTF

SEQ ID NO: 46300 - protein, 14 aa, Homo sapiens
  CDR3 for beta chain variable domain of TCR clone 23150 (TRBV19, TRBJ2-1)
CASPTFVLSGEQFF

SEQ ID NO: 46301 - protein, 18 aa, Homo sapiens
  CDR3 for alpha chain variable domain of TCR clone 23151 (TRAV12-3, TRAJ52)
CAMSVGGAGGTSYGKLTF

SEQ ID NO: 46302 - protein, 13 aa, Homo sapiens
  CDR3 for beta chain variable domain of TCR clone 23151 (TRBV7-3, TRBJ1-1)
CASSQDWGAEAFF

SEQ ID NO: 46303 - protein, 15 aa, Homo sapiens
  CDR3 for alpha chain variable domain of TCR clone 23152 (TRAV26-1, TRAJ29)
CIFRVEGSGNTPLVF

SEQ ID NO: 46304 - protein, 14 aa, Homo sapiens
  CDR3 for beta chain variable domain of TCR clone 23152 (TRBV18, TRBJ2-5)
CASSPGVSQETQYF

SEQ ID NO: 46305 - protein, 13 aa, Homo sapiens
  CDR3 for alpha chain variable domain of TCR clone 23153 (TRAV2, TRAJ40)
CAVVTSGTYKYIF

SEQ ID NO: 46306 - protein, 15 aa, Homo sapiens
  CDR3 for beta chain variable domain of TCR clone 23153 (TRBV11-3, TRBJ2-3)
CASLKDGREVDTQYF

SEQ ID NO: 46307 - protein, 14 aa, Homo sapiens
  CDR3 for alpha chain variable domain of TCR clone 23154 (TRAV20, TRAJ56)
CAVQFGGANSKLTF

SEQ ID NO: 46308 - protein, 14 aa, Homo sapiens
  CDR3 for beta chain variable domain of TCR clone 23154 (TRBV20-1, TRBJ2-7)
CSAKRGRSSYEQYC

SEQ ID NO: 46309 - protein, 15 aa, Homo sapiens
  CDR3 for alpha chain variable domain of TCR clone 23155 (TRAV3, TRAJ5)
CAVRDLDTGRRALTV

SEQ ID NO: 46310 - protein, 13 aa, Homo sapiens
  CDR3 for beta chain variable domain of TCR clone 23155 (TRBV12-4, TRBJ2-7)
CASSPTETYEQYF

SEQ ID NO: 46311 - protein, 11 aa, Homo sapiens
  CDR3 for alpha chain variable domain of TCR clone 23156 (TRAV21, TRAJ39)
LLVNAGNMLTF

SEQ ID NO: 46312 - protein, 16 aa, Homo sapiens
  CDR3 for beta chain variable domain of TCR clone 23156 (TRBV9, TRBJ2-7)
CASSVGLGGGTYEQYL

SEQ ID NO: 46313 - protein, 12 aa, Homo sapiens
  CDR3 for alpha chain variable domain of TCR clone 23157 (TRAV12-3, TRAJ17)
CAMTLTGNKLTF

SEQ ID NO: 46314 - protein, 16 aa, Homo sapiens
  CDR3 for beta chain variable domain of TCR clone 23157 (TRBV19, TRBJ2-1)
CASSKAGPSSYNEQLF

SEQ ID NO: 46315 - protein, 15 aa, Homo sapiens
  CDR3 for alpha chain variable domain of TCR clone 23158 (TRAV3, TRAJ32)
CAVSSYGGATNKPIF

SEQ ID NO: 46316 - protein, 13 aa, Homo sapiens
  CDR3 for beta chain variable domain of TCR clone 23158 (TRBV20-1, TRBJ2-7)
CSARPSTNYEQYF

SEQ ID NO: 46317 - protein, 16 aa, Homo sapiens
  CDR3 for alpha chain variable domain of TCR clone 23159 (TRAV16, TRAJ4)
CVLSRMFSGGYNKLIF

SEQ ID NO: 46318 - protein, 16 aa, Homo sapiens
  CDR3 for beta chain variable domain of TCR clone 23159 (TRBV24-1, TRBJ2-3)
CATSDPGTGATDTQYF

SEQ ID NO: 46319 - protein, 14 aa, Homo sapiens
  CDR3 for alpha chain variable domain of TCR clone 23160 (TRAV8-2, TRAJ4)
CVVSPSGGYNKLIF

SEQ ID NO: 46320 - protein, 12 aa, Homo sapiens
  CDR3 for beta chain variable domain of TCR clone 23160 (TRBV11-2, TRBJ2-2)
CASSLGGGELFF

SEQ ID NO: 46321 - protein, 17 aa, Homo sapiens
  CDR3 for alpha chain variable domain of TCR clone 23161 (TRAV3, TRAJ42)
CAVRDRDYGGSQGNPIF

SEQ ID NO: 46322 - protein, 12 aa, Homo sapiens
  CDR3 for beta chain variable domain of TCR clone 23161 (TRBV11-2, TRBJ2-1)
CASSPGNNEQFF

SEQ ID NO: 46323 - protein, 16 aa, Homo sapiens
  CDR3 for alpha chain variable domain of TCR clone 23162 (TRAV26-1, TRAJ37)
CIVRGDGSGNTGKLIF

SEQ ID NO: 46324 - protein, 15 aa, Homo sapiens
  CDR3 for beta chain variable domain of TCR clone 23162 (TRBV6-3, TRBJ2-7)
CASSSPGTVFYEQYF

SEQ ID NO: 46325 - protein, 12 aa, Homo sapiens
  CDR3 for alpha chain variable domain of TCR clone 23163 (TRAV38-2/DV8, TRAJ48)
CALLSGNEKLTF

SEQ ID NO: 46326 - protein, 13 aa, Homo sapiens
  CDR3 for beta chain variable domain of TCR clone 23163 (TRBV7-6, TRBJ2-7)
CASSLDHTHEQYF

SEQ ID NO: 46327 - protein, 14 aa, Homo sapiens
  CDR3 for alpha chain variable domain of TCR clone 23164 (TRAV8-2, TRAJ4)
CVVSPSSGYNKLIF

SEQ ID NO: 46328 - protein, 15 aa, Homo sapiens
  CDR3 for beta chain variable domain of TCR clone 23164 (TRBV4-1, TRBJ1-4)
CASSDTGGTNEKLFF

SEQ ID NO: 46329 - protein, 11 aa, Homo sapiens
  CDR3 for alpha chain variable domain of TCR clone 23165 (TRAV2, TRAJ13)
CASGGYQKVTF

SEQ ID NO: 46330 - protein, 13 aa, Homo sapiens
  CDR3 for beta chain variable domain of TCR clone 23165 (TRBV24-1, TRBJ2-3)
CATSAGGTDTQYF

SEQ ID NO: 46331 - protein, 17 aa, Homo sapiens
  CDR3 for alpha chain variable domain of TCR clone 23166 (TRAV3, TRAJ38)
CAVRDCLNAGNNRKLIW

SEQ ID NO: 46332 - protein, 13 aa, Homo sapiens
  CDR3 for beta chain variable domain of TCR clone 23166 (TRBV23-1, TRBJ1-4)
CASRGKFNDKLFF

SEQ ID NO: 46333 - protein, 11 aa, Homo sapiens
  CDR3 for alpha chain variable domain of TCR clone 23167 (TRAV12-2, TRAJ31)
CAVTRWARLMF

SEQ ID NO: 46334 - protein, 15 aa, Homo sapiens
  CDR3 for beta chain variable domain of TCR clone 23167 (TRBV19, TRBJ2-7)
CASSIGGGLANEQYF

SEQ ID NO: 46335 - protein, 11 aa, Homo sapiens
  CDR3 for alpha chain variable domain of TCR clone 23168 (TRAV2, TRAJ13)
CASGGYQKVTF

SEQ ID NO: 46336 - protein, 16 aa, Homo sapiens
  CDR3 for beta chain variable domain of TCR clone 23168 (TRBV6-1, TRBJ2-5)
CASSETLDRGAETKYF

SEQ ID NO: 46337 - protein, 12 aa, Homo sapiens
  CDR3 for alpha chain variable domain of TCR clone 23169 (TRAV21, TRAJ33)
CAKMDSNHQLIW

SEQ ID NO: 46338 - protein, 14 aa, Homo sapiens
  CDR3 for beta chain variable domain of TCR clone 23169 (TRBV2, TRBJ2-7)
CASSLTSGGYEQYF

SEQ ID NO: 46339 - protein, 15 aa, Homo sapiens
  CDR3 for alpha chain variable domain of TCR clone 23170 (TRAV21, TRAJ24)
CAARSSTDSWEKLQF

SEQ ID NO: 46340 - protein, 13 aa, Homo sapiens
  CDR3 for beta chain variable domain of TCR clone 23170 (TRBV11-2, TRBJ2-5)
CASSSTGEETQYF

SEQ ID NO: 46341 - protein, 15 aa, Homo sapiens
  CDR3 for alpha chain variable domain of TCR clone 23171 (TRAV3, TRAJ5)
CAVRDRNTGRRALTF

SEQ ID NO: 46342 - protein, 15 aa, Homo sapiens
  CDR3 for beta chain variable domain of TCR clone 23171 (TRBV7-8, TRBJ2-1)
CASSLADSLYNEQFF

SEQ ID NO: 46343 - protein, 11 aa, Homo sapiens
  CDR3 for alpha chain variable domain of TCR clone 23172 (TRAV1-1, TRAJ23)
CAVRQGGKLIF

SEQ ID NO: 46344 - protein, 20 aa, Homo sapiens
  CDR3 for beta chain variable domain of TCR clone 23172 (TRBV11-2, TRBJ1-6)
CASSLVFATGGSVHPSTLGT

SEQ ID NO: 46345 - protein, 14 aa, Homo sapiens
  CDR3 for alpha chain variable domain of TCR clone 23173 (TRAV3, TRAJ7)
CAVREEEREQQARF

SEQ ID NO: 46346 - protein, 12 aa, Homo sapiens
  CDR3 for beta chain variable domain of TCR clone 23173 (TRBV7-8, TRBJ2-7)
CASSLGDREQYF

SEQ ID NO: 46347 - protein, 13 aa, Homo sapiens
  CDR3 for alpha chain variable domain of TCR clone 23174 (TRAV13-1, TRAJ52)
CAASKRSAGGTSY

SEQ ID NO: 46348 - protein, 13 aa, Homo sapiens
  CDR3 for beta chain variable domain of TCR clone 23174 (TRBV12-4, TRBJ1-2)
CASSLRQGKGYTF

SEQ ID NO: 46349 - protein, 13 aa, Homo sapiens
  CDR3 for alpha chain variable domain of TCR clone 23175 (TRAV12-2, TRAJ42)
CAVKRGSQGNLIF

SEQ ID NO: 46350 - protein, 12 aa, Homo sapiens
  CDR3 for beta chain variable domain of TCR clone 23175 (TRBV5-6, TRBJ1-2)
CASSLVQNGYTF

SEQ ID NO: 46351 - protein, 14 aa, Homo sapiens
  CDR3 for alpha chain variable domain of TCR clone 23176 (TRAV12-1, TRAJ3)
CVVSPGSSASKIIF

SEQ ID NO: 46352 - protein, 14 aa, Homo sapiens
  CDR3 for beta chain variable domain of TCR clone 23176 (TRBV20-1, TRBJ2-3)
CSARGGTSTDTQYF

SEQ ID NO: 46353 - protein, 16 aa, Homo sapiens
  CDR3 for alpha chain variable domain of TCR clone 23177 (TRAV3, TRAJ10)
CAVRDMRAGGGNKLTF

SEQ ID NO: 46354 - protein, 14 aa, Homo sapiens
  CDR3 for beta chain variable domain of TCR clone 23177 (TRBV25-1, TRBJ1-1)
CTSTHLGGNTEAFF

SEQ ID NO: 46355 - protein, 13 aa, Homo sapiens
  CDR3 for alpha chain variable domain of TCR clone 23178 (TRAV14/DV4, TRAJ20)
CAMRESNDYKLSF

SEQ ID NO: 46356 - protein, 15 aa, Homo sapiens
  CDR3 for beta chain variable domain of TCR clone 23178 (TRBV7-9, TRBJ1-1)
CASSRPGTANAEASF

SEQ ID NO: 46357 - protein, 15 aa, Homo sapiens
  CDR3 for alpha chain variable domain of TCR clone 23179 (TRAV12-1, TRAJ4)
CVVNPFSGGYNKLVF

SEQ ID NO: 46358 - protein, 13 aa, Homo sapiens
  CDR3 for beta chain variable domain of TCR clone 23179 (TRBV20-1, TRBJ1-2)
CSARGTADYGYTF

SEQ ID NO: 46359 - protein, 18 aa, Homo sapiens
  CDR3 for alpha chain variable domain of TCR clone 23180 (TRAV21, TRAJ52)
CAVRPSPAGGTSYGKLTF

SEQ ID NO: 46360 - protein, 14 aa, Homo sapiens
  CDR3 for beta chain variable domain of TCR clone 23180 (TRBV5-4, TRBJ1-1)
CASSLDSRRDEAFF

SEQ ID NO: 46361 - protein, 15 aa, Homo sapiens
  CDR3 for alpha chain variable domain of TCR clone 23181 (TRAV17, TRAJ57)
CATGPSQDGSEKLVF

SEQ ID NO: 46362 - protein, 16 aa, Homo sapiens
  CDR3 for beta chain variable domain of TCR clone 23181 (TRBV12-4, TRBJ1-5)
CASSRPVGGSNQPQHF

SEQ ID NO: 46363 - protein, 23 aa, Homo sapiens
  CDR3 for alpha chain variable domain of TCR clone 23182 (TRAV26-1, TRAJ38)
CIADNAGNNHIQNPDPAVYQLRD

SEQ ID NO: 46364 - protein, 13 aa, Homo sapiens
  CDR3 for beta chain variable domain of TCR clone 23182 (TRBV20-1, TRBJ1-1)
CSARGGGNIEAFF

SEQ ID NO: 46365 - protein, 14 aa, Homo sapiens
  CDR3 for alpha chain variable domain of TCR clone 23183 (TRAV21, TRAJ35)
CAVMPIGFGNVLHC

SEQ ID NO: 46366 - protein, 12 aa, Homo sapiens
  CDR3 for beta chain variable domain of TCR clone 23183 (TRBV7-9, TRBJ2-7)
CDSSIKREEQYF

SEQ ID NO: 46367 - protein, 14 aa, Homo sapiens
  CDR3 for alpha chain variable domain of TCR clone 23184 (TRAV35, TRAJ22)
CAGLRPGSARQLTF

SEQ ID NO: 46368 - protein, 13 aa, Homo sapiens
  CDR3 for beta chain variable domain of TCR clone 23184 (TRBV7-3, TRBJ1-1)
CASSQDWGAEAFF

SEQ ID NO: 46369 - protein, 15 aa, Homo sapiens
  CDR3 for alpha chain variable domain of TCR clone 23185 (TRAV12-1, TRAJ44)
CVVDTPQGTASKLTF

SEQ ID NO: 46370 - protein, 13 aa, Homo sapiens
  CDR3 for beta chain variable domain of TCR clone 23185 (TRBV27, TRBJ2-1)
CASSSGSYSEQFF

SEQ ID NO: 46371 - protein, 16 aa, Homo sapiens
  CDR3 for alpha chain variable domain of TCR clone 23186 (TRAV3, TRAJ4)
CAVRPSPSGCYNKLIF

SEQ ID NO: 46372 - protein, 12 aa, Homo sapiens
  CDR3 for beta chain variable domain of TCR clone 23186 (TRBV7-9, TRBJ2-7)
CASSQGVYEQYF

SEQ ID NO: 46373 - protein, 12 aa, Homo sapiens
  CDR3 for alpha chain variable domain of TCR clone 23187 (TRAV12-3, TRAJ17)
CAMTLTGNKLTF

SEQ ID NO: 46374 - protein, 12 aa, Homo sapiens
  CDR3 for beta chain variable domain of TCR clone 23187 (TRBV24-1, TRBJ1-1)
CATLYPDTEAFF

SEQ ID NO: 46375 - protein, 21 aa, Homo sapiens
  CDR3 for alpha chain variable domain of TCR clone 23188 (TRAV35, TRAJ52)
CWAGHADGPNAGGTSYGKLTF

SEQ ID NO: 46376 - protein, 12 aa, Homo sapiens
  CDR3 for beta chain variable domain of TCR clone 23188 (TRBV5-1, TRBJ2-7)
CASSFRGYEQYF

SEQ ID NO: 46377 - protein, 11 aa, Homo sapiens
  CDR3 for alpha chain variable domain of TCR clone 23189 (TRAV1-2, TRAJ20)
CAVANDYKLSF

SEQ ID NO: 46378 - protein, 18 aa, Homo sapiens
  CDR3 for beta chain variable domain of TCR clone 23189 (TRBV20-1, TRBJ2-6)
CSAETTPTYGSGANVLTF

SEQ ID NO: 46379 - protein, 16 aa, Homo sapiens
  CDR3 for alpha chain variable domain of TCR clone 23190 (TRAV1-2, TRAJ10)
HAVRGVLTGGGNKFTF

SEQ ID NO: 46380 - protein, 12 aa, Homo sapiens
  CDR3 for beta chain variable domain of TCR clone 23190 (TRBV7-8, TRBJ2-7)
CASSLGDREQYF

SEQ ID NO: 46381 - protein, 14 aa, Homo sapiens
  CDR3 for alpha chain variable domain of TCR clone 23191 (TRAV26-1, TRAJ39)
CIVRGSRAGNMLTF

SEQ ID NO: 46382 - protein, 15 aa, Homo sapiens
  CDR3 for beta chain variable domain of TCR clone 23191 (TRBV7-9, TRBJ1-5)
CASSQGHQPNQPQHC

SEQ ID NO: 46383 - protein, 17 aa, Homo sapiens
  CDR3 for alpha chain variable domain of TCR clone 23192 (TRAV8-6, TRAJ58)
CAVSPWVGETSGSRLTF

SEQ ID NO: 46384 - protein, 14 aa, Homo sapiens
  CDR3 for beta chain variable domain of TCR clone 23192 (TRBV4-2, TRBJ2-1)
CASGLDRAYNEQFF

SEQ ID NO: 46385 - protein, 11 aa, Homo sapiens
  CDR3 for alpha chain variable domain of TCR clone 23193 (TRAV21, TRAJ34)
CAPLYTDKLIF

SEQ ID NO: 46386 - protein, 16 aa, Homo sapiens
  CDR3 for beta chain variable domain of TCR clone 23193 (TRBV5-1, TRBJ2-3)
CASSLAGDRGTDTQYF

SEQ ID NO: 46387 - protein, 15 aa, Homo sapiens
  CDR3 for alpha chain variable domain of TCR clone 23194 (TRAV26-1, TRAJ29)
CIVRVEGSGNTPLVF

SEQ ID NO: 46388 - protein, 15 aa, Homo sapiens
  CDR3 for beta chain variable domain of TCR clone 23194 (TRBV7-9, TRBJ1-5)
CASSQGHQPNQPQRF

SEQ ID NO: 46389 - protein, 16 aa, Homo sapiens
  CDR3 for alpha chain variable domain of TCR clone 23195 (TRAV3, TRAJ21)
CAVRDIERGNFNKFYF

SEQ ID NO: 46390 - protein, 13 aa, Homo sapiens
  CDR3 for beta chain variable domain of TCR clone 23195 (TRBV27, TRBJ2-7)
CASSLTTGYGQYF

SEQ ID NO: 46391 - protein, 13 aa, Homo sapiens
  CDR3 for alpha chain variable domain of TCR clone 23196 (TRAV20, TRAJ26)
CAVPTSYGQNFVF

SEQ ID NO: 46392 - protein, 16 aa, Homo sapiens
  CDR3 for beta chain variable domain of TCR clone 23196 (TRBV28, TRBJ2-7)
CASSSPQGRDVYGQYF

SEQ ID NO: 46393 - protein, 12 aa, Homo sapiens
  CDR3 for alpha chain variable domain of TCR clone 23197 (TRAV13-1, TRAJ48)
CAANFGNEKLTL

SEQ ID NO: 46394 - protein, 14 aa, Homo sapiens
  CDR3 for beta chain variable domain of TCR clone 23197 (TRBV7-2, TRBJ2-7)
CASSPKTSFYEQYF

SEQ ID NO: 46395 - protein, 12 aa, Homo sapiens
  CDR3 for alpha chain variable domain of TCR clone 23198 (TRAV8-3, TRAJ34)
WASGYNTDKLIS

SEQ ID NO: 46396 - protein, 13 aa, Homo sapiens
  CDR3 for beta chain variable domain of TCR clone 23198 (TRBV6-4, TRBJ2-3)
CASSVSWADTQYF

SEQ ID NO: 46397 - protein, 14 aa, Homo sapiens
  CDR3 for alpha chain variable domain of TCR clone 23199 (TRAV1-2, TRAJ8)
CAVREDTGFQKLVF

SEQ ID NO: 46398 - protein, 16 aa, Homo sapiens
  CDR3 for beta chain variable domain of TCR clone 23199 (TRBV7-3, TRBJ2-2)
CASSLKRGTLSGELFI

SEQ ID NO: 46399 - protein, 14 aa, Homo sapiens
  CDR3 for alpha chain variable domain of TCR clone 23200 (TRAV1-2, TRAJ8)
CAVREDTGFQKLVF

SEQ ID NO: 46400 - protein, 13 aa, Homo sapiens
  CDR3 for beta chain variable domain of TCR clone 23200 (TRBV19, TRBJ1-2)
CASSQGQVYGYTF

SEQ ID NO: 46401 - protein, 12 aa, Homo sapiens
  CDR3 for alpha chain variable domain of TCR clone 23201 (TRAV8-3, TRAJ20)
CAVGANDYKLSF

SEQ ID NO: 46402 - protein, 16 aa, Homo sapiens
  CDR3 for beta chain variable domain of TCR clone 23201 (TRBV19, TRBJ2-2)
CASRSPGTRATGELFF

SEQ ID NO: 46403 - protein, 16 aa, Homo sapiens
  CDR3 for alpha chain variable domain of TCR clone 23202 (TRAV4, TRAJ22)
CLVGDLYSGSERQLTF

SEQ ID NO: 46404 - protein, 16 aa, Homo sapiens
  CDR3 for beta chain variable domain of TCR clone 23202 (TRBV7-9, TRBJ2-1)
CASSDVAGGSYNEQFF

SEQ ID NO: 46405 - protein, 18 aa, Homo sapiens
  CDR3 for alpha chain variable domain of TCR clone 23203 (TRAV26-1, TRAJ52)
CIVRVVGAGGTSYGKLTF

SEQ ID NO: 46406 - protein, 13 aa, Homo sapiens
  CDR3 for beta chain variable domain of TCR clone 23203 (TRBV7-3, TRBJ1-2)
CASSLKRGYGYTF

SEQ ID NO: 46407 - protein, 14 aa, Homo sapiens
  CDR3 for alpha chain variable domain of TCR clone 23204 (TRAV1-2, TRAJ16)
CAVNRFSDGQKLLF

SEQ ID NO: 46408 - protein, 15 aa, Homo sapiens
  CDR3 for beta chain variable domain of TCR clone 23204 (TRBV9, TRBJ1-6)
CASSLAGTGDSPLHF

SEQ ID NO: 46409 - protein, 15 aa, Homo sapiens
  CDR3 for alpha chain variable domain of TCR clone 23205 (TRAV29/DV5, TRAJ24)
CAASGATASWGKFQF

SEQ ID NO: 46410 - protein, 12 aa, Homo sapiens
  CDR3 for beta chain variable domain of TCR clone 23205 (TRBV11-2, TRBJ2-2)
CASSLPTGELFF

SEQ ID NO: 46411 - protein, 14 aa, Homo sapiens
  CDR3 for alpha chain variable domain of TCR clone 23206 (TRAV4, TRAJ39)
CLVGPNNNAGNMLT

SEQ ID NO: 46412 - protein, 16 aa, Homo sapiens
  CDR3 for beta chain variable domain of TCR clone 23206 (TRBV27, TRBJ2-2)
CASSFRGLVRTGELFF

SEQ ID NO: 46413 - protein, 16 aa, Homo sapiens
  CDR3 for alpha chain variable domain of TCR clone 23207 (TRAV12-2, TRAJ45)
CAVIFLSGGGADGLTF

SEQ ID NO: 46414 - protein, 19 aa, Homo sapiens
  CDR3 for beta chain variable domain of TCR clone 23207 (TRBV28, TRBJ2-4)
CASSFQPGGPAHSKNMQYF

SEQ ID NO: 46415 - protein, 14 aa, Homo sapiens
  CDR3 for alpha chain variable domain of TCR clone 23208 (TRAV8-2, TRAJ4)
CVVSPSGVYNKLIF

SEQ ID NO: 46416 - protein, 15 aa, Homo sapiens
  CDR3 for beta chain variable domain of TCR clone 23208 (TRBV4-1, TRBJ1-4)
CASSDTGGTNEKLFF

SEQ ID NO: 46417 - protein, 14 aa, Homo sapiens
  CDR3 for alpha chain variable domain of TCR clone 23209 (TRAV21, TRAJ35)
CAVMPIGFGNVLLC

SEQ ID NO: 46418 - protein, 12 aa, Homo sapiens
  CDR3 for beta chain variable domain of TCR clone 23209 (TRBV7-9, TRBJ2-7)
CASSIKREEQYF

SEQ ID NO: 46419 - protein, 16 aa, Homo sapiens
  CDR3 for alpha chain variable domain of TCR clone 23210 (TRAV16, TRAJ52)
CALSGVGGTSYGKLTF

SEQ ID NO: 46420 - protein, 14 aa, Homo sapiens
  CDR3 for beta chain variable domain of TCR clone 23210 (TRBV19, TRBJ1-2)
CASSLQGQAYGCTF

SEQ ID NO: 46421 - protein, 14 aa, Homo sapiens
  CDR3 for alpha chain variable domain of TCR clone 23211 (TRAV4, TRAJ9)
CLVGSGTGGFKTIF

SEQ ID NO: 46422 - protein, 13 aa, Homo sapiens
  CDR3 for beta chain variable domain of TCR clone 23211 (TRBV7-9, TRBJ1-2)
CASSLKQNYGYTF

SEQ ID NO: 46423 - protein, 14 aa, Homo sapiens
  CDR3 for alpha chain variable domain of TCR clone 23212 (TRAV17, TRAJ12)
CATDEKDSSYKLIL

SEQ ID NO: 46424 - protein, 16 aa, Homo sapiens
  CDR3 for beta chain variable domain of TCR clone 23212 (TRBV11-2, TRBJ2-1)
CASSPRLAGVYNEQFF

SEQ ID NO: 46425 - protein, 13 aa, Homo sapiens
  CDR3 for alpha chain variable domain of TCR clone 23213 (TRAV13-1, TRAJ37)
CAARSGNTGKLIF

SEQ ID NO: 46426 - protein, 14 aa, Homo sapiens
  CDR3 for beta chain variable domain of TCR clone 23213 (TRBV12-4, TRBJ2-3)
CASSLGQGTDTQYL

SEQ ID NO: 46427 - protein, 14 aa, Homo sapiens
  CDR3 for alpha chain variable domain of TCR clone 23214 (TRAV29/DV5, TRAJ36)
CAARRKTGANNRFF

SEQ ID NO: 46428 - protein, 14 aa, Homo sapiens
  CDR3 for beta chain variable domain of TCR clone 23214 (TRBV12-5, TRBJ2-5)
CASGSRTHQETQYF

SEQ ID NO: 46429 - protein, 15 aa, Homo sapiens
  CDR3 for alpha chain variable domain of TCR clone 23215 (TRAV12-1, TRAJ44)
CVADLPTGTARKLTF

SEQ ID NO: 46430 - protein, 13 aa, Homo sapiens
  CDR3 for beta chain variable domain of TCR clone 23215 (TRBV6-5, TRBJ2-5)
CASSPQGGETQYF

SEQ ID NO: 46431 - protein, 15 aa, Homo sapiens
  CDR3 for alpha chain variable domain of TCR clone 23216 (TRAV3, TRAJ4)
CAVRDGTGGYNKLSF

SEQ ID NO: 46432 - protein, 16 aa, Homo sapiens
  CDR3 for beta chain variable domain of TCR clone 23216 (TRBV27, TRBJ2-2)
CASSSSGVSNTGELFF

SEQ ID NO: 46433 - protein, 13 aa, Homo sapiens
  CDR3 for alpha chain variable domain of TCR clone 23217 (TRAV21, TRAJ20)
CAVGLRVDYKLSF

SEQ ID NO: 46434 - protein, 13 aa, Homo sapiens
  CDR3 for beta chain variable domain of TCR clone 23217 (TRBV6-1, TRBJ1-1)
CASSRQGDTEAFF

SEQ ID NO: 46435 - protein, 14 aa, Homo sapiens
  CDR3 for alpha chain variable domain of TCR clone 23218 (TRAV29/DV5, TRAJ36)
CAARRKTGANNLFF

SEQ ID NO: 46436 - protein, 14 aa, Homo sapiens
  CDR3 for beta chain variable domain of TCR clone 23218 (TRBV12-5, TRBJ2-5)
CAGGSRTHQETQYF

SEQ ID NO: 46437 - protein, 10 aa, Homo sapiens
  CDR3 for alpha chain variable domain of TCR clone 23219 (TRAV30, TRAJ48)
CGIGNEKLTS

SEQ ID NO: 46438 - protein, 14 aa, Homo sapiens
  CDR3 for beta chain variable domain of TCR clone 23219 (TRBV7-6, TRBJ2-3)
CASSVAGGTDTQYF

SEQ ID NO: 46439 - protein, 12 aa, Homo sapiens
  CDR3 for alpha chain variable domain of TCR clone 23220 (TRAV12-3, TRAJ17)
CAMTLTGNKLTF

SEQ ID NO: 46440 - protein, 15 aa, Homo sapiens
  CDR3 for beta chain variable domain of TCR clone 23220 (TRBV20-1, TRBJ2-7)
CSAESGTSGAYEQYF

SEQ ID NO: 46441 - protein, 22 aa, Homo sapiens
  CDR3 for alpha chain variable domain of TCR clone 23221 (TRAV8-2, TRAJ45)
HLTKPSAHMSDAAEYSADGLTF

SEQ ID NO: 46442 - protein, 13 aa, Homo sapiens
  CDR3 for beta chain variable domain of TCR clone 23221 (TRBV7-3, TRBJ2-1)
CASSPVAYNEQLF

SEQ ID NO: 46443 - protein, 13 aa, Homo sapiens
  CDR3 for alpha chain variable domain of TCR clone 23222 (TRAV27, TRAJ45)
CRSSGGGADGLTF

SEQ ID NO: 46444 - protein, 17 aa, Homo sapiens
  CDR3 for beta chain variable domain of TCR clone 23222 (TRBV11-2, TRBJ2-1)
CASSVYPPGVEYNEQFF

SEQ ID NO: 46445 - protein, 14 aa, Homo sapiens
  CDR3 for alpha chain variable domain of TCR clone 23223 (TRAV35, TRAJ22)
CDGLRPGSARQLTF

SEQ ID NO: 46446 - protein, 15 aa, Homo sapiens
  CDR3 for beta chain variable domain of TCR clone 23223 (TRBV12-4, TRBJ2-5)
CASSPPTGLQETQYF

SEQ ID NO: 46447 - protein, 15 aa, Homo sapiens
  CDR3 for alpha chain variable domain of TCR clone 23224 (TRAV8-3, TRAJ27)
CAVGPSKTNVGKSTF

SEQ ID NO: 46448 - protein, 15 aa, Homo sapiens
  CDR3 for beta chain variable domain of TCR clone 23224 (TRBV7-2, TRBJ2-1)
CASSSGLAGGNEQFF

SEQ ID NO: 46449 - protein, 16 aa, Homo sapiens
  CDR3 for alpha chain variable domain of TCR clone 23225 (TRAV3, TRAJ37)
CAVRGKGSGNTGKLIF

SEQ ID NO: 46450 - protein, 13 aa, Homo sapiens
  CDR3 for beta chain variable domain of TCR clone 23225 (TRBV14, TRBJ2-7)
CASNQDRRYEQYF

SEQ ID NO: 46451 - protein, 16 aa, Homo sapiens
  CDR3 for alpha chain variable domain of TCR clone 23226 (TRAV30, TRAJ24)
CGTEIVGADSWGKFQF

SEQ ID NO: 46452 - protein, 12 aa, Homo sapiens
  CDR3 for beta chain variable domain of TCR clone 23226 (TRBV11-2, TRBJ2-2)
CASSLGGGELFF

SEQ ID NO: 46453 - protein, 16 aa, Homo sapiens
  CDR3 for alpha chain variable domain of TCR clone 23227 (TRAV30, TRAJ24)
CGTEIVDADSWGKFKF

SEQ ID NO: 46454 - protein, 15 aa, Homo sapiens
  CDR3 for beta chain variable domain of TCR clone 23227 (TRBV7-9, TRBJ1-4)
CASSARTGGNEKLFF

SEQ ID NO: 46455 - protein, 12 aa, Homo sapiens
  CDR3 for alpha chain variable domain of TCR clone 23228 (TRAV13-1, TRAJ21)
CAAKEGFNKFYF

SEQ ID NO: 46456 - protein, 14 aa, Homo sapiens
  CDR3 for beta chain variable domain of TCR clone 23228 (TRBV5-4, TRBJ1-1)
CTSSLDSRRDEAFF

SEQ ID NO: 46457 - protein, 14 aa, Homo sapiens
  CDR3 for alpha chain variable domain of TCR clone 23229 (TRAV1-2, TRAJ16)
CAVNRLSDGQKLLF

SEQ ID NO: 46458 - protein, 13 aa, Homo sapiens
  CDR3 for beta chain variable domain of TCR clone 23229 (TRBV7-9, TRBJ1-2)
CASSLKQNYGYTF

SEQ ID NO: 46459 - protein, 12 aa, Homo sapiens
  CDR3 for alpha chain variable domain of TCR clone 23230 (TRAV12-2, TRAJ9)
CAVYNGGFKTIF

SEQ ID NO: 46460 - protein, 15 aa, Homo sapiens
  CDR3 for beta chain variable domain of TCR clone 23230 (TRBV6-3, TRBJ2-7)
CASSSPGTVFYEQYF

SEQ ID NO: 46461 - protein, 14 aa, Homo sapiens
  CDR3 for alpha chain variable domain of TCR clone 23231 (TRAV12-3, TRAJ10)
SHLSLTGGGNKLTF

SEQ ID NO: 46462 - protein, 14 aa, Homo sapiens
  CDR3 for beta chain variable domain of TCR clone 23231 (TRBV6-1, TRBJ1-3)
CASVQGGGGNTIYF

SEQ ID NO: 46463 - protein, 12 aa, Homo sapiens
  CDR3 for alpha chain variable domain of TCR clone 23232 (TRAV36/DV7, TRAJ54)
CAVVRVAQKLVF

SEQ ID NO: 46464 - protein, 14 aa, Homo sapiens
  CDR3 for beta chain variable domain of TCR clone 23232 (TRBV7-3, TRBJ1-1)
CASSLKGGNTEAFF

SEQ ID NO: 46465 - protein, 11 aa, Homo sapiens
  CDR3 for alpha chain variable domain of TCR clone 23233 (TRAV1-2, TRAJ40)
CDVPGTYKYIF

SEQ ID NO: 46466 - protein, 16 aa, Homo sapiens
  CDR3 for beta chain variable domain of TCR clone 23233 (TRBV29-1, TRBJ2-7)
CSVEVVGTSGSYEQYF

SEQ ID NO: 46467 - protein, 15 aa, Homo sapiens
  CDR3 for alpha chain variable domain of TCR clone 23234 (TRAV12-1, TRAJ40)
CVVNMHFPGTYKYIF

SEQ ID NO: 46468 - protein, 15 aa, Homo sapiens
  CDR3 for beta chain variable domain of TCR clone 23234 (TRBV5-1, TRBJ2-7)
CASSLMTSGSNEQYF

SEQ ID NO: 46469 - protein, 18 aa, Homo sapiens
  CDR3 for alpha chain variable domain of TCR clone 23235 (TRAV13-1, TRAJ52)
CAASKRSTGGTSYGKLTF

SEQ ID NO: 46470 - protein, 13 aa, Homo sapiens
  CDR3 for beta chain variable domain of TCR clone 23235 (TRBV12-4, TRBJ1-2)
CASSLRQGKGYTF

SEQ ID NO: 46471 - protein, 14 aa, Homo sapiens
  CDR3 for alpha chain variable domain of TCR clone 23236 (TRAV1-2, TRAJ8)
CAVREDIGFQKLVF

SEQ ID NO: 46472 - protein, 12 aa, Homo sapiens
  CDR3 for beta chain variable domain of TCR clone 23236 (TRBV11-2, TRBJ2-2)
CASSLGGGELFF

SEQ ID NO: 46473 - protein, 17 aa, Homo sapiens
  CDR3 for alpha chain variable domain of TCR clone 23237 (TRAV13-1, TRAJ28)
CAASPPYSGAGSYQLTF

SEQ ID NO: 46474 - protein, 14 aa, Homo sapiens
  CDR3 for beta chain variable domain of TCR clone 23237 (TRBV12-5, TRBJ2-5)
CASGSRTHQETQYF

SEQ ID NO: 46475 - protein, 12 aa, Homo sapiens
  CDR3 for alpha chain variable domain of TCR clone 23238 (TRAV30, TRAJ43)
CGTEERGNDMRF

SEQ ID NO: 46476 - protein, 13 aa, Homo sapiens
  CDR3 for beta chain variable domain of TCR clone 23238 (TRBV11-1, TRBJ2-7)
CASSFSQGYEQYF

SEQ ID NO: 46477 - protein, 14 aa, Homo sapiens
  CDR3 for alpha chain variable domain of TCR clone 23239 (TRAV8-4, TRAJ13)
CAVTLSGGYHKVTF

SEQ ID NO: 46478 - protein, 14 aa, Homo sapiens
  CDR3 for beta chain variable domain of TCR clone 23239 (TRBV7-2, TRBJ1-2)
CASSQTGSTYGYTF

SEQ ID NO: 46479 - protein, 11 aa, Homo sapiens
  CDR3 for alpha chain variable domain of TCR clone 23240 (TRAV17, TRAJ9)
CATTGGFKTIF

SEQ ID NO: 46480 - protein, 12 aa, Homo sapiens
  CDR3 for beta chain variable domain of TCR clone 23240 (TRBV11-2, TRBJ2-2)
CASSLGGGELFF

SEQ ID NO: 46481 - protein, 17 aa, Homo sapiens
  CDR3 for alpha chain variable domain of TCR clone 23241 (TRAV26-1, TRAJ47)
CIVPSLLYMEYGNRLVF

SEQ ID NO: 46482 - protein, 14 aa, Homo sapiens
  CDR3 for beta chain variable domain of TCR clone 23241 (TRBV7-3, TRBJ1-5)
RASSFSGCNQPQHF

SEQ ID NO: 46483 - protein, 15 aa, Homo sapiens
  CDR3 for alpha chain variable domain of TCR clone 23242 (TRAV29/DV5, TRAJ24)
CAASGATDSWGQFQF

SEQ ID NO: 46484 - protein, 12 aa, Homo sapiens
  CDR3 for beta chain variable domain of TCR clone 23242 (TRBV11-2, TRBJ2-2)
CASSLPTGELFF

SEQ ID NO: 46485 - protein, 10 aa, Homo sapiens
  CDR3 for alpha chain variable domain of TCR clone 23243 (TRAV8-4, TRAJ39)
CAVAGNMLTF

SEQ ID NO: 46486 - protein, 16 aa, Homo sapiens
  CDR3 for beta chain variable domain of TCR clone 23243 (TRBV20-1, TRBJ1-4)
CSAPGQGLLTNEKLFF

SEQ ID NO: 46487 - protein, 14 aa, Homo sapiens
  CDR3 for alpha chain variable domain of TCR clone 23244 (TRAV1-2, TRAJ16)
CAVNRSSDGQKLLF

SEQ ID NO: 46488 - protein, 14 aa, Homo sapiens
  CDR3 for beta chain variable domain of TCR clone 23244 (TRBV19, TRBJ2-1)
CASPTFVLSGEQFF

SEQ ID NO: 46489 - protein, 14 aa, Homo sapiens
  CDR3 for alpha chain variable domain of TCR clone 23245 (TRAV27, TRAJ23)
CAGLSYNQGGKLIF

SEQ ID NO: 46490 - protein, 15 aa, Homo sapiens
  CDR3 for beta chain variable domain of TCR clone 23245 (TRBV20-1, TRBJ2-7)
CSARDRVFGMDEQYF

SEQ ID NO: 46491 - protein, 15 aa, Homo sapiens
  CDR3 for alpha chain variable domain of TCR clone 23246 (TRAV26-2, TRAJ50)
CILRDGETSYDKVIF

SEQ ID NO: 46492 - protein, 12 aa, Homo sapiens
  CDR3 for beta chain variable domain of TCR clone 23246 (TRBV5-7, TRBJ1-2)
CASSDGPYGYTF

SEQ ID NO: 46493 - protein, 12 aa, Homo sapiens
  CDR3 for alpha chain variable domain of TCR clone 23247 (TRAV13-1, TRAJ9)
CASHTGGLKTIF

SEQ ID NO: 46494 - protein, 13 aa, Homo sapiens
  CDR3 for beta chain variable domain of TCR clone 23247 (TRBV12-4, TRBJ1-2)
CASSSGSKDGYTF

SEQ ID NO: 46495 - protein, 12 aa, Homo sapiens
  CDR3 for alpha chain variable domain of TCR clone 23248 (TRAV2, TRAJ31)
CAVEDNNARLMF

SEQ ID NO: 46496 - protein, 16 aa, Homo sapiens
  CDR3 for beta chain variable domain of TCR clone 23248 (TRBV10-3, TRBJ2-1)
CAIGGVGDGGGGEQFF

SEQ ID NO: 46497 - protein, 15 aa, Homo sapiens
  CDR3 for alpha chain variable domain of TCR clone 23249 (TRAV8-3, TRAJ45)
CASSYSGGGAGGLTF

SEQ ID NO: 46498 - protein, 17 aa, Homo sapiens
  CDR3 for beta chain variable domain of TCR clone 23249 (TRBV7-8, TRBJ1-2)
CASSLRPLQGHLYGYTF

SEQ ID NO: 46499 - protein, 11 aa, Homo sapiens
  CDR3 for alpha chain variable domain of TCR clone 23250 (TRAV4, TRAJ23)
CLVAPGGKLIF

SEQ ID NO: 46500 - protein, 15 aa, Homo sapiens
  CDR3 for beta chain variable domain of TCR clone 23250 (TRBV7-2, TRBJ2-1)
CAGSFQADEYNEQFF

SEQ ID NO: 46501 - protein, 14 aa, Homo sapiens
  CDR3 for alpha chain variable domain of TCR clone 23251 (TRAV38-1, TRAJ40)
CALRPTSRTYKYIF

SEQ ID NO: 46502 - protein, 14 aa, Homo sapiens
  CDR3 for beta chain variable domain of TCR clone 23251 (TRBV25-1, TRBJ1-1)
CASTHLGGNTEAFF

SEQ ID NO: 46503 - protein, 12 aa, Homo sapiens
  CDR3 for alpha chain variable domain of TCR clone 23252 (TRAV1-2, TRAJ29)
CAVPSGNTLLVF

SEQ ID NO: 46504 - protein, 14 aa, Homo sapiens
  CDR3 for beta chain variable domain of TCR clone 23252 (TRBV18, TRBJ2-5)
CASSPGVSQETQYF

SEQ ID NO: 46505 - protein, 14 aa, Homo sapiens
  CDR3 for alpha chain variable domain of TCR clone 23253 (TRAV35, TRAJ28)
CAGRRGGWELPTHF

SEQ ID NO: 46506 - protein, 13 aa, Homo sapiens
  CDR3 for beta chain variable domain of TCR clone 23253 (TRBV9, TRBJ2-1)
CASSPSGGSEQFF

SEQ ID NO: 46507 - protein, 16 aa, Homo sapiens
  CDR3 for alpha chain variable domain of TCR clone 23254 (TRAV30, TRAJ24)
CGAEIVDADSWGKFQF

SEQ ID NO: 46508 - protein, 13 aa, Homo sapiens
  CDR3 for beta chain variable domain of TCR clone 23254 (TRBV10-3, TRBJ2-7)
CASKLAVNYEQYF

SEQ ID NO: 46509 - protein, 14 aa, Homo sapiens
  CDR3 for alpha chain variable domain of TCR clone 23255 (TRAV12-3, TRAJ10)
SHLPLTGGGNKLTF

SEQ ID NO: 46510 - protein, 14 aa, Homo sapiens
  CDR3 for beta chain variable domain of TCR clone 23255 (TRBV2, TRBJ2-7)
CASSLTSGGYEQYF

SEQ ID NO: 46511 - protein, 17 aa, Homo sapiens
  CDR3 for alpha chain variable domain of TCR clone 23256 (TRAV3, TRAJ12)
CAVRDGGRMDSSYKLIS

SEQ ID NO: 46512 - protein, 14 aa, Homo sapiens
  CDR3 for beta chain variable domain of TCR clone 23256 (TRBV7-9, TRBJ1-2)
CASSRQGANYGYTF

SEQ ID NO: 46513 - protein, 14 aa, Homo sapiens
  CDR3 for alpha chain variable domain of TCR clone 23257 (TRAV12-1, TRAJ23)
CVVIVYNQGGKLIF

SEQ ID NO: 46514 - protein, 15 aa, Homo sapiens
  CDR3 for beta chain variable domain of TCR clone 23257 (TRBV20-1, TRBJ1-5)
CSAKPPGQGPQTQHF

SEQ ID NO: 46515 - protein, 14 aa, Homo sapiens
  CDR3 for alpha chain variable domain of TCR clone 23258 (TRAV8-4, TRAJ13)
CAVTLSGGHQKVTF

SEQ ID NO: 46516 - protein, 14 aa, Homo sapiens
  CDR3 for beta chain variable domain of TCR clone 23258 (TRBV7-2, TRBJ1-2)
CASSQTGSTYGYTF

SEQ ID NO: 46517 - protein, 12 aa, Homo sapiens
  CDR3 for alpha chain variable domain of TCR clone 23259 (TRAV13-1, TRAJ21)
CAAKEGFNKFYF

SEQ ID NO: 46518 - protein, 15 aa, Homo sapiens
  CDR3 for beta chain variable domain of TCR clone 23259 (TRBV11-3, TRBJ2-3)
CASLKDGREGDTQYF

SEQ ID NO: 46519 - protein, 18 aa, Homo sapiens
  CDR3 for alpha chain variable domain of TCR clone 23260 (TRAV26-2, TRAJ45)
CILKVDKYSGGGADGLTF

SEQ ID NO: 46520 - protein, 14 aa, Homo sapiens
  CDR3 for beta chain variable domain of TCR clone 23260 (TRBV7-2, TRBJ2-7)
CASRSQGAAYEQYF

SEQ ID NO: 46521 - protein, 10 aa, Homo sapiens
  CDR3 for alpha chain variable domain of TCR clone 23261 (TRAV21, TRAJ31)
CAVDNARLMF

SEQ ID NO: 46522 - protein, 13 aa, Homo sapiens
  CDR3 for beta chain variable domain of TCR clone 23261 (TRBV4-1, TRBJ1-1)
CASSRKMNTEALF

SEQ ID NO: 46523 - protein, 11 aa, Homo sapiens
  CDR3 for alpha chain variable domain of TCR clone 23262 (TRAV2, TRAJ13)
CASGGYQKVTF

SEQ ID NO: 46524 - protein, 11 aa, Homo sapiens
  CDR3 for beta chain variable domain of TCR clone 23262 (TRBV12-4, TRBJ2-3)
CASTATDTQYF

SEQ ID NO: 46525 - protein, 14 aa, Homo sapiens
  CDR3 for alpha chain variable domain of TCR clone 23263 (TRAV12-3, TRAJ10)
SHLPLTGGGNKLTF

SEQ ID NO: 46526 - protein, 13 aa, Homo sapiens
  CDR3 for beta chain variable domain of TCR clone 23263 (TRBV11-2, TRBJ2-5)
CASSRGPSETQYF

SEQ ID NO: 46527 - protein, 12 aa, Homo sapiens
  CDR3 for alpha chain variable domain of TCR clone 23264 (TRAV13-1, TRAJ27)
CAAHTNAGNSTF

SEQ ID NO: 46528 - protein, 14 aa, Homo sapiens
  CDR3 for beta chain variable domain of TCR clone 23264 (TRBV19, TRBJ2-2)
CASSGQGIAGELFF

SEQ ID NO: 46529 - protein, 11 aa, Homo sapiens
  CDR3 for alpha chain variable domain of TCR clone 23265 (TRAV4, TRAJ31)
FLVGDNARLMF

SEQ ID NO: 46530 - protein, 16 aa, Homo sapiens
  CDR3 for beta chain variable domain of TCR clone 23265 (TRBV7-2, TRBJ2-5)
CASSSKWLSGQETQYF

SEQ ID NO: 46531 - protein, 23 aa, Homo sapiens
  CDR3 for alpha chain variable domain of TCR clone 23266 (TRAV1-1, TRAJ11)
LLQELQMRDSASYFCAGYSTLTF

SEQ ID NO: 46532 - protein, 15 aa, Homo sapiens
  CDR3 for beta chain variable domain of TCR clone 23266 (TRBV6-5, TRBJ2-1)
CASRGDFDSYNEQFF

SEQ ID NO: 46533 - protein, 14 aa, Homo sapiens
  CDR3 for alpha chain variable domain of TCR clone 23267 (TRAV2, TRAJ22)
CAVGRGGSARQLTF

SEQ ID NO: 46534 - protein, 12 aa, Homo sapiens
  CDR3 for beta chain variable domain of TCR clone 23267 (TRBV19, TRBJ2-1)
CASSTQDTEQFF

SEQ ID NO: 46535 - protein, 13 aa, Homo sapiens
  CDR3 for alpha chain variable domain of TCR clone 23268 (TRAV17, TRAJ5)
CATDARGRRALTF

SEQ ID NO: 46536 - protein, 13 aa, Homo sapiens
  CDR3 for beta chain variable domain of TCR clone 23268 (TRBV12-4, TRBJ2-3)
CASSLGAVDTQYF

SEQ ID NO: 46537 - protein, 12 aa, Homo sapiens
  CDR3 for alpha chain variable domain of TCR clone 23269 (TRAV29/DV5, TRAJ49)
CAATDTGNQFYL

SEQ ID NO: 46538 - protein, 12 aa, Homo sapiens
  CDR3 for beta chain variable domain of TCR clone 23269 (TRBV12-4, TRBJ2-7)
CASSLGGYEQYF

SEQ ID NO: 46539 - protein, 16 aa, Homo sapiens
  CDR3 for alpha chain variable domain of TCR clone 23270 (TRAV3, TRAJ10)
CAVRDMRAGGGNKLTF

SEQ ID NO: 46540 - protein, 14 aa, Homo sapiens
  CDR3 for beta chain variable domain of TCR clone 23270 (TRBV20-1, TRBJ2-7)
CSAKRGRSSYEQYF

SEQ ID NO: 46541 - protein, 14 aa, Homo sapiens
  CDR3 for alpha chain variable domain of TCR clone 23271 (TRAV12-2, TRAJ13)
CAVKKTGGYQKVTF

SEQ ID NO: 46542 - protein, 19 aa, Homo sapiens
  CDR3 for beta chain variable domain of TCR clone 23271 (TRBV28, TRBJ2-1)
CASSFSIRGSGRTRYEQFF

SEQ ID NO: 46543 - protein, 14 aa, Homo sapiens
  CDR3 for alpha chain variable domain of TCR clone 23272 (TRAV20, TRAJ56)
CAVQFGGTNSKLTF

SEQ ID NO: 46544 - protein, 14 aa, Homo sapiens
  CDR3 for beta chain variable domain of TCR clone 23272 (TRBV20-1, TRBJ2-7)
CSAKRGRSSYEQYF

SEQ ID NO: 46545 - protein, 17 aa, Homo sapiens
  CDR3 for alpha chain variable domain of TCR clone 23273 (TRAV3, TRAJ6)
CAVRDGPRAGGSYIPTI

SEQ ID NO: 46546 - protein, 14 aa, Homo sapiens
  CDR3 for beta chain variable domain of TCR clone 23273 (TRBV7-2, TRBJ2-7)
CASSPKTSFYEQYF

SEQ ID NO: 46547 - protein, 14 aa, Homo sapiens
  CDR3 for alpha chain variable domain of TCR clone 23274 (TRAV2, TRAJ9)
CAVEDRSGGFKTIF

SEQ ID NO: 46548 - protein, 12 aa, Homo sapiens
  CDR3 for beta chain variable domain of TCR clone 23274 (TRBV7-8, TRBJ2-7)
CASSLGDREQYF

SEQ ID NO: 46549 - protein, 12 aa, Homo sapiens
  CDR3 for alpha chain variable domain of TCR clone 23275 (TRAV12-1, TRAJ40)
CVVYSGTYKYIF

SEQ ID NO: 46550 - protein, 13 aa, Homo sapiens
  CDR3 for beta chain variable domain of TCR clone 23275 (TRBV7-3, TRBJ1-1)
CASSQDWGAEAFF

SEQ ID NO: 46551 - protein, 12 aa, Homo sapiens
  CDR3 for alpha chain variable domain of TCR clone 23276 (TRAV23/DV6, TRAJ30)
CAASKGGDKIIF

SEQ ID NO: 46552 - protein, 15 aa, Homo sapiens
  CDR3 for beta chain variable domain of TCR clone 23276 (TRBV29-1, TRBJ2-1)
CSGRDRKSSYNEQFF

SEQ ID NO: 46553 - protein, 13 aa, Homo sapiens
  CDR3 for alpha chain variable domain of TCR clone 23277 (TRAV3, TRAJ27)
CAVRPLGPGKSTF

SEQ ID NO: 46554 - protein, 13 aa, Homo sapiens
  CDR3 for beta chain variable domain of TCR clone 23277 (TRBV7-9, TRBJ2-3)
CASSPGSTDTQYF

SEQ ID NO: 46555 - protein, 10 aa, Homo sapiens
  CDR3 for alpha chain variable domain of TCR clone 23278 (TRAV23/DV6, TRAJ43)
CAATVAALEQ

SEQ ID NO: 46556 - protein, 15 aa, Homo sapiens
  CDR3 for beta chain variable domain of TCR clone 23278 (TRBV20-1, TRBJ1-1)
CSASRGVTGNTEAFF

SEQ ID NO: 46557 - protein, 13 aa, Homo sapiens
  CDR3 for alpha chain variable domain of TCR clone 23279 (TRAV8-4, TRAJ10)
CAAFTGGGNKLTF

SEQ ID NO: 46558 - protein, 15 aa, Homo sapiens
  CDR3 for beta chain variable domain of TCR clone 23279 (TRBV2, TRBJ2-3)
CAGSDFEKATDTQYF

SEQ ID NO: 46559 - protein, 13 aa, Homo sapiens
  CDR3 for alpha chain variable domain of TCR clone 23280 (TRAV17, TRAJ9)
CATDYTGGFKTIF

SEQ ID NO: 46560 - protein, 16 aa, Homo sapiens
  CDR3 for beta chain variable domain of TCR clone 23280 (TRBV7-7, TRBJ2-1)
CASSLASGTFYNEQFF

SEQ ID NO: 46561 - protein, 23 aa, Homo sapiens
  CDR3 for alpha chain variable domain of TCR clone 23281 (TRAV26-1, TRAJ38)
CIADNAGNNHIQDPDPAVYQLRD

SEQ ID NO: 46562 - protein, 13 aa, Homo sapiens
  CDR3 for beta chain variable domain of TCR clone 23281 (TRBV20-1, TRBJ1-1)
CSARGGGNTEAFF

SEQ ID NO: 46563 - protein, 11 aa, Homo sapiens
  CDR3 for alpha chain variable domain of TCR clone 23282 (TRAV23/DV6, TRAJ48)
CSPRWGEKLTF

SEQ ID NO: 46564 - protein, 13 aa, Homo sapiens
  CDR3 for beta chain variable domain of TCR clone 23282 (TRBV12-4, TRBJ2-5)
CASSPGTEETQYF

SEQ ID NO: 46565 - protein, 11 aa, Homo sapiens
  CDR3 for alpha chain variable domain of TCR clone 23283 (TRAV3, TRAJ21)
CAAGNFNKFYF

SEQ ID NO: 46566 - protein, 16 aa, Homo sapiens
  CDR3 for beta chain variable domain of TCR clone 23283 (TRBV19, TRBJ2-1)
CASSKAGPSSYNGQFF

SEQ ID NO: 46567 - protein, 18 aa, Homo sapiens
  CDR3 for alpha chain variable domain of TCR clone 23284 (TRAV13-1, TRAJ52)
CAAKNPNAGGTSYGKLTF

SEQ ID NO: 46568 - protein, 12 aa, Homo sapiens
  CDR3 for beta chain variable domain of TCR clone 23284 (TRBV11-2, TRBJ2-1)
CASSPGNNEQFF

SEQ ID NO: 46569 - protein, 22 aa, Homo sapiens
  CDR3 for alpha chain variable domain of TCR clone 23285 (TRAV26-1, TRAJ42)
CIVRPIMDEAKEISSLEKALNS

SEQ ID NO: 46570 - protein, 16 aa, Homo sapiens
  CDR3 for beta chain variable domain of TCR clone 23285 (TRBV7-3, TRBJ2-2)
CASSLKRGTLSGELFF

SEQ ID NO: 46571 - protein, 12 aa, Homo sapiens
  CDR3 for alpha chain variable domain of TCR clone 23286 (TRAV13-1, TRAJ49)
CAARPMGNQFYF

SEQ ID NO: 46572 - protein, 13 aa, Homo sapiens
  CDR3 for beta chain variable domain of TCR clone 23286 (TRBV20-1, TRBJ2-2)
CSASAAGTGELFF

SEQ ID NO: 46573 - protein, 14 aa, Homo sapiens
  CDR3 for alpha chain variable domain of TCR clone 23287 (TRAV19, TRAJ22)
CALSDSGSARQLTF

SEQ ID NO: 46574 - protein, 14 aa, Homo sapiens
  CDR3 for beta chain variable domain of TCR clone 23287 (TRBV20-1, TRBJ2-1)
CSAHPGLPYNEQFF

SEQ ID NO: 46575 - protein, 14 aa, Homo sapiens
  CDR3 for alpha chain variable domain of TCR clone 23288 (TRAV1-2, TRAJ16)
CAVNRFSDGQKLLF

SEQ ID NO: 46576 - protein, 15 aa, Homo sapiens
  CDR3 for beta chain variable domain of TCR clone 23288 (TRBV9, TRBJ1-6)
CASSVAGTRDSPLHF

SEQ ID NO: 46577 - protein, 13 aa, Homo sapiens
  CDR3 for alpha chain variable domain of TCR clone 23289 (TRAV2, TRAJ15)
CAVASQAGTALIF

SEQ ID NO: 46578 - protein, 15 aa, Homo sapiens
  CDR3 for beta chain variable domain of TCR clone 23289 (TRBV7-2, TRBJ2-1)
CASSSGLAGGNEQFF

SEQ ID NO: 46579 - protein, 15 aa, Homo sapiens
  CDR3 for alpha chain variable domain of TCR clone 23290 (TRAV3, TRAJ22)
CAVRDRGGSARQLTF

SEQ ID NO: 46580 - protein, 13 aa, Homo sapiens
  CDR3 for beta chain variable domain of TCR clone 23290 (TRBV7-3, TRBJ2-5)
CASSFRGGETQYF

SEQ ID NO: 46581 - protein, 14 aa, Homo sapiens
  CDR3 for alpha chain variable domain of TCR clone 23291 (TRAV8-3, TRAJ9)
FAVVYNTGGFKTIF

SEQ ID NO: 46582 - protein, 14 aa, Homo sapiens
  CDR3 for beta chain variable domain of TCR clone 23291 (TRBV7-3, TRBJ2-2)
CASSSGGYTGELFF

SEQ ID NO: 46583 - protein, 18 aa, Homo sapiens
  CDR3 for alpha chain variable domain of TCR clone 23292 (TRAV9-2, TRAJ52)
CALSRHNAGGTSYGKLTF

SEQ ID NO: 46584 - protein, 13 aa, Homo sapiens
  CDR3 for beta chain variable domain of TCR clone 23292 (TRBV9, TRBJ2-1)
CASSVGQGGEQFF

SEQ ID NO: 46585 - protein, 15 aa, Homo sapiens
  CDR3 for alpha chain variable domain of TCR clone 23293 (TRAV21, TRAJ24)
CAARSSTDSWGKLQF

SEQ ID NO: 46586 - protein, 14 aa, Homo sapiens
  CDR3 for beta chain variable domain of TCR clone 23293 (TRBV11-3, TRBJ2-5)
CASSRTGGIETQYF

SEQ ID NO: 46587 - protein, 13 aa, Homo sapiens
  CDR3 for alpha chain variable domain of TCR clone 23294 (TRAV29/DV5, TRAJ31)
CAASRNNNARLMF

SEQ ID NO: 46588 - protein, 14 aa, Homo sapiens
  CDR3 for beta chain variable domain of TCR clone 23294 (TRBV7-2, TRBJ2-7)
CASSPMTSFYEQYF

SEQ ID NO: 46589 - protein, 16 aa, Homo sapiens
  CDR3 for alpha chain variable domain of TCR clone 23295 (TRAV3, TRAJ37)
CAVRPHGSGNTGKLIF

SEQ ID NO: 46590 - protein, 16 aa, Homo sapiens
  CDR3 for beta chain variable domain of TCR clone 23295 (TRBV9, TRBJ1-2)
CASSVEEKVSPYGYNF

SEQ ID NO: 46591 - protein, 14 aa, Homo sapiens
  CDR3 for alpha chain variable domain of TCR clone 23296 (TRAV12-2, TRAJ13)
CAVKKTGGYQKVTF

SEQ ID NO: 46592 - protein, 14 aa, Homo sapiens
  CDR3 for beta chain variable domain of TCR clone 23296 (TRBV12-5, TRBJ2-5)
CASGSQTHQETQYF

SEQ ID NO: 46593 - protein, 14 aa, Homo sapiens
  CDR3 for alpha chain variable domain of TCR clone 23297 (TRAV1-2, TRAJ16)
CAANRFSDGQKLLF

SEQ ID NO: 46594 - protein, 12 aa, Homo sapiens
  CDR3 for beta chain variable domain of TCR clone 23297 (TRBV6-5, TRBJ2-5)
CASSEGSETQYF

SEQ ID NO: 46595 - protein, 13 aa, Homo sapiens
  CDR3 for alpha chain variable domain of TCR clone 23298 (TRAV1-2, TRAJ9)
CAALNTGGFKTIC

SEQ ID NO: 46596 - protein, 13 aa, Homo sapiens
  CDR3 for beta chain variable domain of TCR clone 23298 (TRBV19, TRBJ1-2)
CASSVPGQDGYTF

SEQ ID NO: 46597 - protein, 10 aa, Homo sapiens
  CDR3 for alpha chain variable domain of TCR clone 23299 (TRAV12-3, TRAJ49)
CAMNDDQFYF

SEQ ID NO: 46598 - protein, 13 aa, Homo sapiens
  CDR3 for beta chain variable domain of TCR clone 23299 (TRBV12-4, TRBJ1-1)
CASSPETGFEAFF

SEQ ID NO: 46599 - protein, 20 aa, Homo sapiens
  CDR3 for alpha chain variable domain of TCR clone 23300 (TRAV26-1, TRAJ42)
CRVLLRRQTYYGGSQGNLIF

SEQ ID NO: 46600 - protein, 16 aa, Homo sapiens
  CDR3 for beta chain variable domain of TCR clone 23300 (TRBV7-3, TRBJ2-2)
CASSLKRGTLSGELFF

SEQ ID NO: 46601 - protein, 14 aa, Homo sapiens
  CDR3 for alpha chain variable domain of TCR clone 23301 (TRAV35, TRAJ38)
CAHCGAGNNRKLIW

SEQ ID NO: 46602 - protein, 14 aa, Homo sapiens
  CDR3 for beta chain variable domain of TCR clone 23301 (TRBV19, TRBJ2-1)
CASPTFVLSGEQFF

SEQ ID NO: 46603 - protein, 18 aa, Homo sapiens
  CDR3 for alpha chain variable domain of TCR clone 23302 (TRAV29/DV5, TRAJ52)
CAAGFRGAGGTSYGKLTF

SEQ ID NO: 46604 - protein, 16 aa, Homo sapiens
  CDR3 for beta chain variable domain of TCR clone 23302 (TRBV7-3, TRBJ2-2)
CASSVKRGTLSGELFF

SEQ ID NO: 46605 - protein, 14 aa, Homo sapiens
  CDR3 for alpha chain variable domain of TCR clone 23303 (TRAV1-2, TRAJ16)
CAVNRFSDGQKLLF

SEQ ID NO: 46606 - protein, 14 aa, Homo sapiens
  CDR3 for beta chain variable domain of TCR clone 23303 (TRBV28, TRBJ1-1)
CASSESGRGTEAFF

SEQ ID NO: 46607 - protein, 18 aa, Homo sapiens
  CDR3 for alpha chain variable domain of TCR clone 23304 (TRAV12-3, TRAJ52)
CAMSRTNAGGTSYGKLTF

SEQ ID NO: 46608 - protein, 17 aa, Homo sapiens
  CDR3 for beta chain variable domain of TCR clone 23304 (TRBV7-3, TRBJ2-3)
CASSLMKRMRGAGTQYF

SEQ ID NO: 46609 - protein, 15 aa, Homo sapiens
  CDR3 for alpha chain variable domain of TCR clone 23305 (TRAV3, TRAJ47)
CAVRDIGEYGNKLVF

SEQ ID NO: 46610 - protein, 14 aa, Homo sapiens
  CDR3 for beta chain variable domain of TCR clone 23305 (TRBV13, TRBJ2-5)
CASSLERAGETQYF

SEQ ID NO: 46611 - protein, 14 aa, Homo sapiens
  CDR3 for alpha chain variable domain of TCR clone 23306 (TRAV16, TRAJ8)
CALLLNTGLQKLVF

SEQ ID NO: 46612 - protein, 15 aa, Homo sapiens
  CDR3 for beta chain variable domain of TCR clone 23306 (TRBV7-7, TRBJ2-2)
CATSKLAKNTGELFF

SEQ ID NO: 46613 - protein, 14 aa, Homo sapiens
  CDR3 for alpha chain variable domain of TCR clone 23307 (TRAV29/DV5, TRAJ36)
CAARRKTGANNLFF

SEQ ID NO: 46614 - protein, 14 aa, Homo sapiens
  CDR3 for beta chain variable domain of TCR clone 23307 (TRBV12-5, TRBJ2-5)
CASGSRTQQETQYF

SEQ ID NO: 46615 - protein, 14 aa, Homo sapiens
  CDR3 for alpha chain variable domain of TCR clone 23308 (TRAV38-1, TRAJ40)
CALRPTSGTYKYIF

SEQ ID NO: 46616 - protein, 14 aa, Homo sapiens
  CDR3 for beta chain variable domain of TCR clone 23308 (TRBV25-1, TRBJ1-1)
CASTHLGENTEAFF

SEQ ID NO: 46617 - protein, 11 aa, Homo sapiens
  CDR3 for alpha chain variable domain of TCR clone 23309 (TRAV1-2, TRAJ20)
CAVANDYKLSF

SEQ ID NO: 46618 - protein, 15 aa, Homo sapiens
  CDR3 for beta chain variable domain of TCR clone 23309 (TRBV9, TRBJ1-6)
CASSVAGTGDSPLHF

SEQ ID NO: 46619 - protein, 14 aa, Homo sapiens
  CDR3 for alpha chain variable domain of TCR clone 23310 (TRAV3, TRAJ27)
CAVRDDTNAGKSTF

SEQ ID NO: 46620 - protein, 13 aa, Homo sapiens
  CDR3 for beta chain variable domain of TCR clone 23310 (TRBV5-4, TRBJ2-1)
CASSLQGPREQFF

SEQ ID NO: 46621 - protein, 14 aa, Homo sapiens
  CDR3 for alpha chain variable domain of TCR clone 23311 (TRAV35, TRAJ13)
CAGSPSGGYQKVTF

SEQ ID NO: 46622 - protein, 13 aa, Homo sapiens
  CDR3 for beta chain variable domain of TCR clone 23311 (TRBV29-1, TRBJ1-1)
CSDGDSRNTEAFF

SEQ ID NO: 46623 - protein, 13 aa, Homo sapiens
  CDR3 for alpha chain variable domain of TCR clone 23312 (TRAV12-3, TRAJ43)
CAMIRPNNNDMRF

SEQ ID NO: 46624 - protein, 12 aa, Homo sapiens
  CDR3 for beta chain variable domain of TCR clone 23312 (TRBV11-2, TRBJ2-5)
CASSLGQEAQYF

SEQ ID NO: 46625 - protein, 14 aa, Homo sapiens
  CDR3 for alpha chain variable domain of TCR clone 23313 (TRAV21, TRAJ35)
CAVMPIGFGNVLHC

SEQ ID NO: 46626 - protein, 12 aa, Homo sapiens
  CDR3 for beta chain variable domain of TCR clone 23313 (TRBV7-9, TRBJ2-7)
CASSMKREEQYF

SEQ ID NO: 46627 - protein, 13 aa, Homo sapiens
  CDR3 for alpha chain variable domain of TCR clone 23314 (TRAV8-3, TRAJ28)
CAVGAVGSYQLTF

SEQ ID NO: 46628 - protein, 16 aa, Homo sapiens
  CDR3 for beta chain variable domain of TCR clone 23314 (TRBV12-5, TRBJ2-5)
CASGPRTSGNQETQYF

SEQ ID NO: 46629 - protein, 13 aa, Homo sapiens
  CDR3 for alpha chain variable domain of TCR clone 23315 (TRAV12-3, TRAJ43)
CAMIRPNNNDMRL

SEQ ID NO: 46630 - protein, 12 aa, Homo sapiens
  CDR3 for beta chain variable domain of TCR clone 23315 (TRBV11-2, TRBJ2-5)
CASSLGQETQYF

SEQ ID NO: 46631 - protein, 13 aa, Homo sapiens
  CDR3 for alpha chain variable domain of TCR clone 23316 (TRAV17, TRAJ9)
CATDYTGGFKTIF

SEQ ID NO: 46632 - protein, 16 aa, Homo sapiens
  CDR3 for beta chain variable domain of TCR clone 23316 (TRBV7-7, TRBJ2-1)
CASSFASGTSYNEQFF

SEQ ID NO: 46633 - protein, 17 aa, Homo sapiens
  CDR3 for alpha chain variable domain of TCR clone 23317 (TRAV23/DV6, TRAJ57)
CAASSTLSQGGSEKLVS

SEQ ID NO: 46634 - protein, 14 aa, Homo sapiens
  CDR3 for beta chain variable domain of TCR clone 23317 (TRBV25-1, TRBJ1-1)
CASTHLGGNTEAFF

SEQ ID NO: 46635 - protein, 14 aa, Homo sapiens
  CDR3 for alpha chain variable domain of TCR clone 23318 (TRAV13-1, TRAJ35)
CAASKGGFGNVLHC

SEQ ID NO: 46636 - protein, 14 aa, Homo sapiens
  CDR3 for beta chain variable domain of TCR clone 23318 (TRBV6-1, TRBJ1-3)
CASVQGGGGNTIYF

SEQ ID NO: 46637 - protein, 12 aa, Homo sapiens
  CDR3 for alpha chain variable domain of TCR clone 23319 (TRAV1-1, TRAJ8)
CAGGTGFQKLVF

SEQ ID NO: 46638 - protein, 12 aa, Homo sapiens
  CDR3 for beta chain variable domain of TCR clone 23319 (TRBV7-8, TRBJ2-7)
CASSLGDREQYF

SEQ ID NO: 46639 - protein, 14 aa, Homo sapiens
  CDR3 for alpha chain variable domain of TCR clone 23320 (TRAV1-2, TRAJ8)
CAVREDTGFQKLVF

SEQ ID NO: 46640 - protein, 15 aa, Homo sapiens
  CDR3 for beta chain variable domain of TCR clone 23320 (TRBV6-3, TRBJ2-7)
CASSCPGTVFYEQYF

SEQ ID NO: 46641 - protein, 14 aa, Homo sapiens
  CDR3 for alpha chain variable domain of TCR clone 23321 (TRAV12-2, TRAJ45)
CAVYSGGGADGLTF

SEQ ID NO: 46642 - protein, 15 aa, Homo sapiens
  CDR3 for beta chain variable domain of TCR clone 23321 (TRBV7-2, TRBJ2-1)
CASSLASGRVNEQFF

SEQ ID NO: 46643 - protein, 13 aa, Homo sapiens
  CDR3 for alpha chain variable domain of TCR clone 23322 (TRAV13-2, TRAJ53)
CAENMGSNCKLTF

SEQ ID NO: 46644 - protein, 13 aa, Homo sapiens
  CDR3 for beta chain variable domain of TCR clone 23322 (TRBV4-1, TRBJ2-2)
CASSQENTGELFF

SEQ ID NO: 46645 - protein, 13 aa, Homo sapiens
  CDR3 for alpha chain variable domain of TCR clone 23323 (TRAV23/DV6, TRAJ34)
CAAIENNTDKPIF

SEQ ID NO: 46646 - protein, 13 aa, Homo sapiens
  CDR3 for beta chain variable domain of TCR clone 23323 (TRBV29-1, TRBJ2-7)
CSVGPSGGYEQYF

SEQ ID NO: 46647 - protein, 14 aa, Homo sapiens
  CDR3 for alpha chain variable domain of TCR clone 23324 (TRAV38-1, TRAJ40)
CALRPTSGPYKYIF

SEQ ID NO: 46648 - protein, 14 aa, Homo sapiens
  CDR3 for beta chain variable domain of TCR clone 23324 (TRBV25-1, TRBJ1-1)
CASTHLGGNTEAFF

SEQ ID NO: 46649 - protein, 18 aa, Homo sapiens
  CDR3 for alpha chain variable domain of TCR clone 23325 (TRAV26-2, TRAJ45)
YILRLWGYSGGGADGLTF

SEQ ID NO: 46650 - protein, 17 aa, Homo sapiens
  CDR3 for beta chain variable domain of TCR clone 23325 (TRBV28, TRBJ2-3)
CASSPTPAGGRVDTQYF

SEQ ID NO: 46651 - protein, 20 aa, Homo sapiens
  CDR3 for alpha chain variable domain of TCR clone 23326 (TRAV12-1, TRAJ42)
SSVIQPPTSVKGGSRGNLIF

SEQ ID NO: 46652 - protein, 18 aa, Homo sapiens
  CDR3 for beta chain variable domain of TCR clone 23326 (TRBV11-2, TRBJ2-3)
CASSLGGASRGAPNTQYF

SEQ ID NO: 46653 - protein, 12 aa, Homo sapiens
  CDR3 for alpha chain variable domain of TCR clone 23327 (TRAV17, TRAJ12)
CATLRISYKLIF

SEQ ID NO: 46654 - protein, 16 aa, Homo sapiens
  CDR3 for beta chain variable domain of TCR clone 23327 (TRBV28, TRBJ2-7)
CASSLFFETGGPEQYF

SEQ ID NO: 46655 - protein, 23 aa, Homo sapiens
  CDR3 for alpha chain variable domain of TCR clone 23328 (TRAV26-1, TRAJ38)
CIADNAGNNHIQNPDPAVYQLRD

SEQ ID NO: 46656 - protein, 13 aa, Homo sapiens
  CDR3 for beta chain variable domain of TCR clone 23328 (TRBV20-1, TRBJ1-1)
CSAKGGGNTEAFF

SEQ ID NO: 46657 - protein, 15 aa, Homo sapiens
  CDR3 for alpha chain variable domain of TCR clone 23329 (TRAV3, TRAJ20)
CAVRDIKLSDYKLSF

SEQ ID NO: 46658 - protein, 15 aa, Homo sapiens
  CDR3 for beta chain variable domain of TCR clone 23329 (TRBV7-9, TRBJ1-6)
CASSSTGRGNSPLHF

SEQ ID NO: 46659 - protein, 15 aa, Homo sapiens
  CDR3 for alpha chain variable domain of TCR clone 23330 (TRAV3, TRAJ40)
CAVRDVTSGTYKYIF

SEQ ID NO: 46660 - protein, 13 aa, Homo sapiens
  CDR3 for beta chain variable domain of TCR clone 23330 (TRBV7-9, TRBJ1-2)
CASSLKQNYGYTL

SEQ ID NO: 46661 - protein, 16 aa, Homo sapiens
  CDR3 for alpha chain variable domain of TCR clone 23331 (TRAV20, TRAJ22)
CAVQASSSGSARQLTF

SEQ ID NO: 46662 - protein, 13 aa, Homo sapiens
  CDR3 for beta chain variable domain of TCR clone 23331 (TRBV7-2, TRBJ2-5)
RASSQTSVETQYF

SEQ ID NO: 46663 - protein, 12 aa, Homo sapiens
  CDR3 for alpha chain variable domain of TCR clone 23332 (TRAV17, TRAJ57)
CATDGGSEKMVF

SEQ ID NO: 46664 - protein, 13 aa, Homo sapiens
  CDR3 for beta chain variable domain of TCR clone 23332 (TRBV7-9, TRBJ2-7)
CASSFAGAYEQYF

SEQ ID NO: 46665 - protein, 13 aa, Homo sapiens
  CDR3 for alpha chain variable domain of TCR clone 23333 (TRAV8-3, TRAJ28)
CAVGAVGSYQLTF

SEQ ID NO: 46666 - protein, 14 aa, Homo sapiens
  CDR3 for beta chain variable domain of TCR clone 23333 (TRBV7-2, TRBJ2-7)
CASRSQGAAYEQHF

SEQ ID NO: 46667 - protein, 11 aa, Homo sapiens
  CDR3 for alpha chain variable domain of TCR clone 23334 (TRAV17, TRAJ36)
CAPTGANNFFF

SEQ ID NO: 46668 - protein, 12 aa, Homo sapiens
  CDR3 for beta chain variable domain of TCR clone 23334 (TRBV29-1, TRBJ2-3)
CSVTGGADTQYF

SEQ ID NO: 46669 - protein, 15 aa, Homo sapiens
  CDR3 for alpha chain variable domain of TCR clone 23335 (TRAV3, TRAJ5)
CAVRDLDTGRRALTF

SEQ ID NO: 46670 - protein, 20 aa, Homo sapiens
  CDR3 for beta chain variable domain of TCR clone 23335 (TRBV7-8, TRBJ2-2)
CASSHLFPGPTIHITGELFF

SEQ ID NO: 46671 - protein, 16 aa, Homo sapiens
  CDR3 for alpha chain variable domain of TCR clone 23336 (TRAV20, TRAJ22)
CAVQASSSGSARQLTF

SEQ ID NO: 46672 - protein, 17 aa, Homo sapiens
  CDR3 for beta chain variable domain of TCR clone 23336 (TRBV7-2, TRBJ2-5)
CASSQTSVETSTSGQAR

SEQ ID NO: 46673 - protein, 13 aa, Homo sapiens
  CDR3 for alpha chain variable domain of TCR clone 23337 (TRAV27, TRAJ49)
CAPRPYTGHQFYF

SEQ ID NO: 46674 - protein, 16 aa, Homo sapiens
  CDR3 for beta chain variable domain of TCR clone 23337 (TRBV4-1, TRBJ1-2)
CASSQDAGQVLYGYTF

SEQ ID NO: 46675 - protein, 16 aa, Homo sapiens
  CDR3 for alpha chain variable domain of TCR clone 23338 (TRAV3, TRAJ37)
CAVRPHGSGNTGKLIF

SEQ ID NO: 46676 - protein, 16 aa, Homo sapiens
  CDR3 for beta chain variable domain of TCR clone 23338 (TRBV12-5, TRBJ2-5)
CASGPRTSGNQETQYF

SEQ ID NO: 46677 - protein, 14 aa, Homo sapiens
  CDR3 for alpha chain variable domain of TCR clone 23339 (TRAV22, TRAJ57)
CAVELQGGSEKLVF

SEQ ID NO: 46678 - protein, 15 aa, Homo sapiens
  CDR3 for beta chain variable domain of TCR clone 23339 (TRBV7-2, TRBJ2-3)
CASSSTGLETDTQYF

SEQ ID NO: 46679 - protein, 17 aa, Homo sapiens
  CDR3 for alpha chain variable domain of TCR clone 23340 (TRAV3, TRAJ38)
CAVGDCLNAGNNRKLIW

SEQ ID NO: 46680 - protein, 14 aa, Homo sapiens
  CDR3 for beta chain variable domain of TCR clone 23340 (TRBV5-5, TRBJ1-5)
CASSGQGVDQPQHF

SEQ ID NO: 46681 - protein, 19 aa, Homo sapiens
  CDR3 for alpha chain variable domain of TCR clone 23341 (TRAV8-4, TRAJ3)
CAVTGENLVQQCFQDNLLI

SEQ ID NO: 46682 - protein, 16 aa, Homo sapiens
  CDR3 for beta chain variable domain of TCR clone 23341 (TRBV4-2, TRBJ1-1)
CASSQAGFGMNTEAFF

SEQ ID NO: 46683 - protein, 12 aa, Homo sapiens
  CDR3 for alpha chain variable domain of TCR clone 23342 (TRAV13-1, TRAJ21)
CAAKEGFNKFYF

SEQ ID NO: 46684 - protein, 14 aa, Homo sapiens
  CDR3 for beta chain variable domain of TCR clone 23342 (TRBV4-1, TRBJ2-2)
CASSQAVNTGELFF

SEQ ID NO: 46685 - protein, 14 aa, Homo sapiens
  CDR3 for alpha chain variable domain of TCR clone 23343 (TRAV38-1, TRAJ45)
CAYYSGGGADGLTC

SEQ ID NO: 46686 - protein, 20 aa, Homo sapiens
  CDR3 for beta chain variable domain of TCR clone 23343 (TRBV28, TRBJ2-1)
CASTPIGRSPGLAGGNEQFF

SEQ ID NO: 46687 - protein, 14 aa, Homo sapiens
  CDR3 for alpha chain variable domain of TCR clone 23344 (TRAV13-1, TRAJ35)
CAASKGGFGNVLHC

SEQ ID NO: 46688 - protein, 13 aa, Homo sapiens
  CDR3 for beta chain variable domain of TCR clone 23344 (TRBV7-3, TRBJ1-1)
CASSQDLGAEAFF

SEQ ID NO: 46689 - protein, 15 aa, Homo sapiens
  CDR3 for alpha chain variable domain of TCR clone 23345 (TRAV26-1, TRAJ29)
CIVRVEGSGNTPLVF

SEQ ID NO: 46690 - protein, 14 aa, Homo sapiens
  CDR3 for beta chain variable domain of TCR clone 23345 (TRBV18, TRBJ2-5)
CASSPGVFQETQYF

SEQ ID NO: 46691 - protein, 15 aa, Homo sapiens
  CDR3 for alpha chain variable domain of TCR clone 23346 (TRAV29/DV5, TRAJ42)
CAAKTDGGSQGNLIF

SEQ ID NO: 46692 - protein, 14 aa, Homo sapiens
  CDR3 for beta chain variable domain of TCR clone 23346 (TRBV20-1, TRBJ1-1)
CSAQTRIGGTEAFF

SEQ ID NO: 46693 - protein, 17 aa, Homo sapiens
  CDR3 for alpha chain variable domain of TCR clone 23347 (TRAV27, TRAJ42)
CAEGVIYYGGSQGNLIF

SEQ ID NO: 46694 - protein, 14 aa, Homo sapiens
  CDR3 for beta chain variable domain of TCR clone 23347 (TRBV6-6, TRBJ2-3)
CASRLQREADTQYF

SEQ ID NO: 46695 - protein, 12 aa, Homo sapiens
  CDR3 for alpha chain variable domain of TCR clone 23348 (TRAV3, TRAJ20)
CAVRDPDYKLSF

SEQ ID NO: 46696 - protein, 13 aa, Homo sapiens
  CDR3 for beta chain variable domain of TCR clone 23348 (TRBV9, TRBJ2-1)
CASSAGQGGEQFF

SEQ ID NO: 46697 - protein, 11 aa, Homo sapiens
  CDR3 for alpha chain variable domain of TCR clone 23349 (TRAV1-1, TRAJ23)
CAVRQGGKLIF

SEQ ID NO: 46698 - protein, 20 aa, Homo sapiens
  CDR3 for beta chain variable domain of TCR clone 23349 (TRBV7-8, TRBJ2-2)
CASSHLFPGLTIHITGELFF

SEQ ID NO: 46699 - protein, 11 aa, Homo sapiens
  CDR3 for alpha chain variable domain of TCR clone 23350 (TRAV1-1, TRAJ23)
CAVRQGGKLIF

SEQ ID NO: 46700 - protein, 20 aa, Homo sapiens
  CDR3 for beta chain variable domain of TCR clone 23350 (TRBV7-8, TRBJ2-2)
RASSHLFPGPTIHITGELFF

SEQ ID NO: 46701 - protein, 16 aa, Homo sapiens
  CDR3 for alpha chain variable domain of TCR clone 23351 (TRAV3, TRAJ28)
CAVLPRSGAGRYQLTF

SEQ ID NO: 46702 - protein, 13 aa, Homo sapiens
  CDR3 for beta chain variable domain of TCR clone 23351 (TRBV12-4, TRBJ2-5)
CASRLAVQETQYF

SEQ ID NO: 46703 - protein, 18 aa, Homo sapiens
  CDR3 for alpha chain variable domain of TCR clone 23352 (TRAV2, TRAJ20)
LQVREADAAVYRDCKLSF

SEQ ID NO: 46704 - protein, 13 aa, Homo sapiens
  CDR3 for beta chain variable domain of TCR clone 23352 (TRBV15, TRBJ1-6)
CATSGGLNSPLHF

SEQ ID NO: 46705 - protein, 13 aa, Homo sapiens
  CDR3 for alpha chain variable domain of TCR clone 23353 (TRAV23/DV6, TRAJ22)
CAPYSGSARQLTF

SEQ ID NO: 46706 - protein, 15 aa, Homo sapiens
  CDR3 for beta chain variable domain of TCR clone 23353 (TRBV11-2, TRBJ1-6)
CASSLDPWAVSPPHF

SEQ ID NO: 46707 - protein, 14 aa, Homo sapiens
  CDR3 for alpha chain variable domain of TCR clone 23354 (TRAV12-2, TRAJ40)
CAVKIPSGTYKYIF

SEQ ID NO: 46708 - protein, 14 aa, Homo sapiens
  CDR3 for beta chain variable domain of TCR clone 23354 (TRBV4-2, TRBJ2-1)
CASGLDRAYNEQFF

SEQ ID NO: 46709 - protein, 14 aa, Homo sapiens
  CDR3 for alpha chain variable domain of TCR clone 23355 (TRAV3, TRAJ22)
CAVRDYGYARQLTF

SEQ ID NO: 46710 - protein, 13 aa, Homo sapiens
  CDR3 for beta chain variable domain of TCR clone 23355 (TRBV11-2, TRBJ2-5)
CASGHGAKETQYF

SEQ ID NO: 46711 - protein, 13 aa, Homo sapiens
  CDR3 for alpha chain variable domain of TCR clone 23356 (TRAV38-1, TRAJ49)
CAFMKYTGNQFYF

SEQ ID NO: 46712 - protein, 15 aa, Homo sapiens
  CDR3 for beta chain variable domain of TCR clone 23356 (TRBV5-1, TRBJ1-1)
FAPAASYRGGGEAFF

SEQ ID NO: 46713 - protein, 18 aa, Homo sapiens
  CDR3 for alpha chain variable domain of TCR clone 23357 (TRAV21, TRAJ52)
CAVRPSPAGGTSYGKLTF

SEQ ID NO: 46714 - protein, 13 aa, Homo sapiens
  CDR3 for beta chain variable domain of TCR clone 23357 (TRBV19, TRBJ2-1)
CASKVGAGGEQFF

SEQ ID NO: 46715 - protein, 18 aa, Homo sapiens
  CDR3 for alpha chain variable domain of TCR clone 23358 (TRAV12-3, TRAJ52)
CAMSRTNAGGTSYGKLKF

SEQ ID NO: 46716 - protein, 17 aa, Homo sapiens
  CDR3 for beta chain variable domain of TCR clone 23358 (TRBV7-3, TRBJ2-3)
CASSLMKRMRGADTQYF

SEQ ID NO: 46717 - protein, 17 aa, Homo sapiens
  CDR3 for alpha chain variable domain of TCR clone 23359 (TRAV13-1, TRAJ52)
CAASSGAGCTSYGKLTF

SEQ ID NO: 46718 - protein, 15 aa, Homo sapiens
  CDR3 for beta chain variable domain of TCR clone 23359 (TRBV7-8, TRBJ2-7)
CASSLRHFEAYEQYF

SEQ ID NO: 46719 - protein, 13 aa, Homo sapiens
  CDR3 for alpha chain variable domain of TCR clone 23360 (TRAV2, TRAJ40)
CAVVTSGTYKYIF

SEQ ID NO: 46720 - protein, 14 aa, Homo sapiens
  CDR3 for beta chain variable domain of TCR clone 23360 (TRBV20-1, TRBJ1-1)
CSAQTRIGGTEAFF

SEQ ID NO: 46721 - protein, 15 aa, Homo sapiens
  CDR3 for alpha chain variable domain of TCR clone 23361 (TRAV8-3, TRAJ11)
CAVGLLNSGYSTLTF

SEQ ID NO: 46722 - protein, 16 aa, Homo sapiens
  CDR3 for beta chain variable domain of TCR clone 23361 (TRBV7-9, TRBJ1-2)
CASSLGFSSGEDGYTV

SEQ ID NO: 46723 - protein, 16 aa, Homo sapiens
  CDR3 for alpha chain variable domain of TCR clone 23362 (TRAV35, TRAJ28)
CAGQRYSGAGSHQLTF

SEQ ID NO: 46724 - protein, 13 aa, Homo sapiens
  CDR3 for beta chain variable domain of TCR clone 23362 (TRBV19, TRBJ1-2)
CASSQGQVYGYTF

SEQ ID NO: 46725 - protein, 14 aa, Homo sapiens
  CDR3 for alpha chain variable domain of TCR clone 23363 (TRAV9-2, TRAJ39)
YALYIYNAGNMLTF

SEQ ID NO: 46726 - protein, 12 aa, Homo sapiens
  CDR3 for beta chain variable domain of TCR clone 23363 (TRBV7-2, TRBJ2-5)
CASSQYQETQYF

SEQ ID NO: 46727 - protein, 14 aa, Homo sapiens
  CDR3 for alpha chain variable domain of TCR clone 23364 (TRAV13-1, TRAJ3)
CAASKSSSAPKIIF

SEQ ID NO: 46728 - protein, 13 aa, Homo sapiens
  CDR3 for beta chain variable domain of TCR clone 23364 (TRBV25-1, TRBJ2-5)
CASSESGRETQYF

SEQ ID NO: 46729 - protein, 16 aa, Homo sapiens
  CDR3 for alpha chain variable domain of TCR clone 23365 (TRAV12-2, TRAJ40)
CVVIRGGTSGTYKYIF

SEQ ID NO: 46730 - protein, 14 aa, Homo sapiens
  CDR3 for beta chain variable domain of TCR clone 23365 (TRBV20-1, TRBJ2-5)
CSARDGRAGETQYF

SEQ ID NO: 46731 - protein, 11 aa, Homo sapiens
  CDR3 for alpha chain variable domain of TCR clone 23366 (TRAV1-2, TRAJ40)
CAVPGTYKYIF

SEQ ID NO: 46732 - protein, 13 aa, Homo sapiens
  CDR3 for beta chain variable domain of TCR clone 23366 (TRBV7-9, TRBJ1-2)
CASSLKQNYGYTF

SEQ ID NO: 46733 - protein, 12 aa, Homo sapiens
  CDR3 for alpha chain variable domain of TCR clone 23367 (TRAV12-3, TRAJ17)
CAMTLTGNKLTF

SEQ ID NO: 46734 - protein, 17 aa, Homo sapiens
  CDR3 for beta chain variable domain of TCR clone 23367 (TRBV20-1, TRBJ2-7)
CSARDRSLGWTSSTSGR

SEQ ID NO: 46735 - protein, 18 aa, Homo sapiens
  CDR3 for alpha chain variable domain of TCR clone 23368 (TRAV21, TRAJ52)
CAVRPSPAGGTSYGKLTF

SEQ ID NO: 46736 - protein, 13 aa, Homo sapiens
  CDR3 for beta chain variable domain of TCR clone 23368 (TRBV7-3, TRBJ1-1)
CASSQDWGDEAFF

SEQ ID NO: 46737 - protein, 16 aa, Homo sapiens
  CDR3 for alpha chain variable domain of TCR clone 23369 (TRAV16, TRAJ52)
CALGAAGGTSYGKLTF

SEQ ID NO: 46738 - protein, 12 aa, Homo sapiens
  CDR3 for beta chain variable domain of TCR clone 23369 (TRBV12-4, TRBJ1-3)
CASSFSGNTIYF

SEQ ID NO: 46739 - protein, 15 aa, Homo sapiens
  CDR3 for alpha chain variable domain of TCR clone 23370 (TRAV8-3, TRAJ40)
CAAPSLGSGTCRYIF

SEQ ID NO: 46740 - protein, 16 aa, Homo sapiens
  CDR3 for beta chain variable domain of TCR clone 23370 (TRBV7-3, TRBJ2-3)
CASSLSGYRPEDTQYF

SEQ ID NO: 46741 - protein, 11 aa, Homo sapiens
  CDR3 for alpha chain variable domain of TCR clone 23371 (TRAV2, TRAJ13)
CASGGYQKVTF

SEQ ID NO: 46742 - protein, 14 aa, Homo sapiens
  CDR3 for beta chain variable domain of TCR clone 23371 (TRBV4-2, TRBJ2-1)
CASGLDRAYNEQFF

SEQ ID NO: 46743 - protein, 16 aa, Homo sapiens
  CDR3 for alpha chain variable domain of TCR clone 23372 (TRAV27, TRAJ52)
CAGAGAGGTSDGKLTF

SEQ ID NO: 46744 - protein, 17 aa, Homo sapiens
  CDR3 for beta chain variable domain of TCR clone 23372 (TRBV24-1, TRBJ2-3)
CATSDLPSGEDTDTQYF

SEQ ID NO: 46745 - protein, 11 aa, Homo sapiens
  CDR3 for alpha chain variable domain of TCR clone 23373 (TRAV3, TRAJ21)
CAVGNFNKFYF

SEQ ID NO: 46746 - protein, 14 aa, Homo sapiens
  CDR3 for beta chain variable domain of TCR clone 23373 (TRBV7-8, TRBJ2-3)
CASSLEAGTDTQYF

SEQ ID NO: 46747 - protein, 12 aa, Homo sapiens
  CDR3 for alpha chain variable domain of TCR clone 23374 (TRAV2, TRAJ33)
CAFMYSNYQLIW

SEQ ID NO: 46748 - protein, 16 aa, Homo sapiens
  CDR3 for beta chain variable domain of TCR clone 23374 (TRBV2, TRBJ2-7)
CASSEPWTGPSYEQYF

SEQ ID NO: 46749 - protein, 13 aa, Homo sapiens
  CDR3 for alpha chain variable domain of TCR clone 23375 (TRAV1-2, TRAJ9)
CAALNTGGFKTIF

SEQ ID NO: 46750 - protein, 19 aa, Homo sapiens
  CDR3 for beta chain variable domain of TCR clone 23375 (TRBV25-1, TRBJ2-2)
CAILVYRVDRGRKTGELFF

SEQ ID NO: 46751 - protein, 11 aa, Homo sapiens
  CDR3 for alpha chain variable domain of TCR clone 23376 (TRAV1-2, TRAJ31)
CAVNNNARLMF

SEQ ID NO: 46752 - protein, 13 aa, Homo sapiens
  CDR3 for beta chain variable domain of TCR clone 23376 (TRBV7-9, TRBJ1-2)
CASSLKQNYGYTF

SEQ ID NO: 46753 - protein, 14 aa, Homo sapiens
  CDR3 for alpha chain variable domain of TCR clone 23377 (TRAV3, TRAJ9)
CAVRLNTVGFKTIF

SEQ ID NO: 46754 - protein, 15 aa, Homo sapiens
  CDR3 for beta chain variable domain of TCR clone 23377 (TRBV7-2, TRBJ2-1)
CASSLASGRVNEQFF

SEQ ID NO: 46755 - protein, 16 aa, Homo sapiens
  CDR3 for alpha chain variable domain of TCR clone 23378 (TRAV16, TRAJ4)
CALSRMFSGGYNKLIF

SEQ ID NO: 46756 - protein, 15 aa, Homo sapiens
  CDR3 for beta chain variable domain of TCR clone 23378 (TRBV27, TRBJ2-1)
CASSNGGGSSNEQFF

SEQ ID NO: 46757 - protein, 11 aa, Homo sapiens
  CDR3 for alpha chain variable domain of TCR clone 23379 (TRAV1-2, TRAJ20)
CAVANDYKLSF

SEQ ID NO: 46758 - protein, 17 aa, Homo sapiens
  CDR3 for beta chain variable domain of TCR clone 23379 (TRBV11-2, TRBJ2-1)
CASSLYPPGVEYNEQFF

SEQ ID NO: 46759 - protein, 11 aa, Homo sapiens
  CDR3 for alpha chain variable domain of TCR clone 23380 (TRAV13-1, TRAJ20)
CAAPMALQAQL

SEQ ID NO: 46760 - protein, 14 aa, Homo sapiens
  CDR3 for beta chain variable domain of TCR clone 23380 (TRBV28, TRBJ2-5)
CASTGAGGVETQYF

SEQ ID NO: 46761 - protein, 11 aa, Homo sapiens
  CDR3 for alpha chain variable domain of TCR clone 23381 (TRAV17, TRAJ9)
CATTGGFKPIF

SEQ ID NO: 46762 - protein, 14 aa, Homo sapiens
  CDR3 for beta chain variable domain of TCR clone 23381 (TRBV7-9, TRBJ2-2)
CASSGLADTGELFF

SEQ ID NO: 46763 - protein, 15 aa, Homo sapiens
  CDR3 for alpha chain variable domain of TCR clone 23382 (TRAV3, TRAJ5)
CAVRDRKPGRRALTF

SEQ ID NO: 46764 - protein, 15 aa, Homo sapiens
  CDR3 for beta chain variable domain of TCR clone 23382 (TRBV7-8, TRBJ2-1)
CASSLADSLYNEQFF

SEQ ID NO: 46765 - protein, 14 aa, Homo sapiens
  CDR3 for alpha chain variable domain of TCR clone 23383 (TRAV1-1, TRAJ27)
CAVIYNTNAGKSTF

SEQ ID NO: 46766 - protein, 15 aa, Homo sapiens
  CDR3 for beta chain variable domain of TCR clone 23383 (TRBV7-2, TRBJ2-1)
CASSSGRAGGNEQFF

SEQ ID NO: 46767 - protein, 11 aa, Homo sapiens
  CDR3 for alpha chain variable domain of TCR clone 23384 (TRAV17, TRAJ9)
CATTGGFKTNF

SEQ ID NO: 46768 - protein, 14 aa, Homo sapiens
  CDR3 for beta chain variable domain of TCR clone 23384 (TRBV7-9, TRBJ2-2)
CASSGLADTGELFF

SEQ ID NO: 46769 - protein, 16 aa, Homo sapiens
  CDR3 for alpha chain variable domain of TCR clone 23385 (TRAV4, TRAJ5)
CLVGPDHGHGQESTYF

SEQ ID NO: 46770 - protein, 13 aa, Homo sapiens
  CDR3 for beta chain variable domain of TCR clone 23385 (TRBV4-2, TRBJ1-2)
CASSLSASGGYTF

SEQ ID NO: 46771 - protein, 14 aa, Homo sapiens
  CDR3 for alpha chain variable domain of TCR clone 23386 (TRAV8-4, TRAJ13)
CAVTLSGGYQKATF

SEQ ID NO: 46772 - protein, 14 aa, Homo sapiens
  CDR3 for beta chain variable domain of TCR clone 23386 (TRBV7-2, TRBJ1-2)
CASSQTGSTYGYTF

SEQ ID NO: 46773 - protein, 11 aa, Homo sapiens
  CDR3 for alpha chain variable domain of TCR clone 23387 (TRAV1-2, TRAJ20)
CAVANDYKLSF

SEQ ID NO: 46774 - protein, 13 aa, Homo sapiens
  CDR3 for beta chain variable domain of TCR clone 23387 (TRBV7-3, TRBJ1-1)
CAGSQDWGAEAFF

SEQ ID NO: 46775 - protein, 17 aa, Homo sapiens
  CDR3 for alpha chain variable domain of TCR clone 23388 (TRAV8-6, TRAJ58)
CAVSSWVGETSGSRLTV

SEQ ID NO: 46776 - protein, 14 aa, Homo sapiens
  CDR3 for beta chain variable domain of TCR clone 23388 (TRBV4-2, TRBJ2-1)
CASGLDRAYNEQFF

SEQ ID NO: 46777 - protein, 10 aa, Homo sapiens
  CDR3 for alpha chain variable domain of TCR clone 23389 (TRAV23/DV6, TRAJ57)
CAASATLSQG

SEQ ID NO: 46778 - protein, 14 aa, Homo sapiens
  CDR3 for beta chain variable domain of TCR clone 23389 (TRBV25-1, TRBJ1-1)
CASTHLGGNTEAFF

SEQ ID NO: 46779 - protein, 14 aa, Homo sapiens
  CDR3 for alpha chain variable domain of TCR clone 23390 (TRAV17, TRAJ39)
CATDPVRAGNMLTF

SEQ ID NO: 46780 - protein, 15 aa, Homo sapiens
  CDR3 for beta chain variable domain of TCR clone 23390 (TRBV13, TRBJ1-5)
CASSFGQGGVQHQHF

SEQ ID NO: 46781 - protein, 13 aa, Homo sapiens
  CDR3 for alpha chain variable domain of TCR clone 23391 (TRAV16, TRAJ9)
CALSDTGGFKTIF

SEQ ID NO: 46782 - protein, 14 aa, Homo sapiens
  CDR3 for beta chain variable domain of TCR clone 23391 (TRBV5-1, TRBJ2-1)
CASSLEGPVYEQFF

SEQ ID NO: 46783 - protein, 12 aa, Homo sapiens
  CDR3 for alpha chain variable domain of TCR clone 23392 (TRAV10, TRAJ43)
CVVVRVGNDMRS

SEQ ID NO: 46784 - protein, 15 aa, Homo sapiens
  CDR3 for beta chain variable domain of TCR clone 23392 (TRBV2, TRBJ2-7)
CASSEGLARSYEQYF

SEQ ID NO: 46785 - protein, 11 aa, Homo sapiens
  CDR3 for alpha chain variable domain of TCR clone 23393 (TRAV12-1, TRAJ34)
CVMNKGRELIF

SEQ ID NO: 46786 - protein, 12 aa, Homo sapiens
  CDR3 for beta chain variable domain of TCR clone 23393 (TRBV2, TRBJ2-1)
CAYGPPGNEQFF

SEQ ID NO: 46787 - protein, 11 aa, Homo sapiens
  CDR3 for alpha chain variable domain of TCR clone 23394 (TRAV1-2, TRAJ20)
CAVANAYKLSF

SEQ ID NO: 46788 - protein, 18 aa, Homo sapiens
  CDR3 for beta chain variable domain of TCR clone 23394 (TRBV20-1, TRBJ2-6)
CSAETTPTHGSGANVLTF

SEQ ID NO: 46789 - protein, 13 aa, Homo sapiens
  CDR3 for alpha chain variable domain of TCR clone 23395 (TRAV8-3, TRAJ28)
FAVGAVGSYQLTF

SEQ ID NO: 46790 - protein, 15 aa, Homo sapiens
  CDR3 for beta chain variable domain of TCR clone 23395 (TRBV7-9, TRBJ1-5)
CASSQGHQPNQPQHF

SEQ ID NO: 46791 - protein, 15 aa, Homo sapiens
  CDR3 for alpha chain variable domain of TCR clone 23396 (TRAV25, TRAJ53)
CPTSNSGGSNYKLTF

SEQ ID NO: 46792 - protein, 14 aa, Homo sapiens
  CDR3 for beta chain variable domain of TCR clone 23396 (TRBV11-2, TRBJ2-3)
RASSRLARTDTQYF

SEQ ID NO: 46793 - protein, 14 aa, Homo sapiens
  CDR3 for alpha chain variable domain of TCR clone 23397 (TRAV12-2, TRAJ17)
CAVNIKAAGSKLTF

SEQ ID NO: 46794 - protein, 16 aa, Homo sapiens
  CDR3 for beta chain variable domain of TCR clone 23397 (TRBV20-1, TRBJ2-6)
CSASSQGYDGANVLTF

SEQ ID NO: 46795 - protein, 17 aa, Homo sapiens
  CDR3 for alpha chain variable domain of TCR clone 23398 (TRAV3, TRAJ6)
CAVRDGPRAGGSYIPTF

SEQ ID NO: 46796 - protein, 12 aa, Homo sapiens
  CDR3 for beta chain variable domain of TCR clone 23398 (TRBV12-4, TRBJ2-7)
CASSLGGYEQYF

SEQ ID NO: 46797 - protein, 13 aa, Homo sapiens
  CDR3 for alpha chain variable domain of TCR clone 23399 (TRAV8-3, TRAJ4)
WVFYSGGYNKLIF

SEQ ID NO: 46798 - protein, 14 aa, Homo sapiens
  CDR3 for beta chain variable domain of TCR clone 23399 (TRBV7-9, TRBJ2-3)
CASSSEDGTDTQYF

SEQ ID NO: 46799 - protein, 19 aa, Homo sapiens
  CDR3 for alpha chain variable domain of TCR clone 23400 (TRAV3, TRAJ6)
CAVRDRNPSRSGGSYIPTF

SEQ ID NO: 46800 - protein, 15 aa, Homo sapiens
  CDR3 for beta chain variable domain of TCR clone 23400 (TRBV18, TRBJ2-7)
CASSPTSMDSYEQYF

SEQ ID NO: 46801 - protein, 14 aa, Homo sapiens
  CDR3 for alpha chain variable domain of TCR clone 23401 (TRAV12-2, TRAJ13)
CAVKKTGGYQKVTF

SEQ ID NO: 46802 - protein, 14 aa, Homo sapiens
  CDR3 for beta chain variable domain of TCR clone 23401 (TRBV7-2, TRBJ2-7)
CASSPKTSSYEQYF

SEQ ID NO: 46803 - protein, 15 aa, Homo sapiens
  CDR3 for alpha chain variable domain of TCR clone 23402 (TRAV17, TRAJ29)
TSVLRTHSGNTPLVF

SEQ ID NO: 46804 - protein, 13 aa, Homo sapiens
  CDR3 for beta chain variable domain of TCR clone 23402 (TRBV5-7, TRBJ2-6)
CASTSSGANVLTF

SEQ ID NO: 46805 - protein, 14 aa, Homo sapiens
  CDR3 for alpha chain variable domain of TCR clone 23403 (TRAV12-2, TRAJ40)
CAVKIPSGTYKYIF

SEQ ID NO: 46806 - protein, 13 aa, Homo sapiens
  CDR3 for beta chain variable domain of TCR clone 23403 (TRBV7-2, TRBJ2-2)
CASSLAVTGELFF

SEQ ID NO: 46807 - protein, 15 aa, Homo sapiens
  CDR3 for alpha chain variable domain of TCR clone 23404 (TRAV17, TRAJ35)
CATAFVIGFGNVLHF

SEQ ID NO: 46808 - protein, 16 aa, Homo sapiens
  CDR3 for beta chain variable domain of TCR clone 23404 (TRBV11-2, TRBJ2-7)
CASSPLAGGPRYEQYF

SEQ ID NO: 46809 - protein, 14 aa, Homo sapiens
  CDR3 for alpha chain variable domain of TCR clone 23405 (TRAV16, TRAJ8)
CALLLNAGFQKLVF

SEQ ID NO: 46810 - protein, 15 aa, Homo sapiens
  CDR3 for beta chain variable domain of TCR clone 23405 (TRBV7-7, TRBJ2-2)
CATSKLAKNTGELFF

SEQ ID NO: 46811 - protein, 12 aa, Homo sapiens
  CDR3 for alpha chain variable domain of TCR clone 23406 (TRAV12-1, TRAJ40)
CVVYSGTYKCIF

SEQ ID NO: 46812 - protein, 18 aa, Homo sapiens
  CDR3 for beta chain variable domain of TCR clone 23406 (TRBV11-2, TRBJ2-3)
CASSLGGASRGAPNTQYF

SEQ ID NO: 46813 - protein, 16 aa, Homo sapiens
  CDR3 for alpha chain variable domain of TCR clone 23407 (TRAV30, TRAJ24)
CGTEIVDADSWGKFQF

SEQ ID NO: 46814 - protein, 16 aa, Homo sapiens
  CDR3 for beta chain variable domain of TCR clone 23407 (TRBV28, TRBJ2-7)
CASSSSGTSGSYEQYF

SEQ ID NO: 46815 - protein, 15 aa, Homo sapiens
  CDR3 for alpha chain variable domain of TCR clone 23408 (TRAV26-1, TRAJ29)
CIVRVEGSGNTPLVF

SEQ ID NO: 46816 - protein, 13 aa, Homo sapiens
  CDR3 for beta chain variable domain of TCR clone 23408 (TRBV18, TRBJ2-5)
CQLTWVSQETQYF

SEQ ID NO: 46817 - protein, 16 aa, Homo sapiens
  CDR3 for alpha chain variable domain of TCR clone 23409 (TRAV14/DV4, TRAJ53)
CAMREGGGGSNYKLTF

SEQ ID NO: 46818 - protein, 16 aa, Homo sapiens
  CDR3 for beta chain variable domain of TCR clone 23409 (TRBV12-5, TRBJ2-5)
CASGPRTSGNQETQYF

SEQ ID NO: 46819 - protein, 14 aa, Homo sapiens
  CDR3 for alpha chain variable domain of TCR clone 23410 (TRAV12-2, TRAJ45)
CAPPERGGADGLTF

SEQ ID NO: 46820 - protein, 14 aa, Homo sapiens
  CDR3 for beta chain variable domain of TCR clone 23410 (TRBV18, TRBJ1-5)
CASSPGNSNQPQHF

SEQ ID NO: 46821 - protein, 14 aa, Homo sapiens
  CDR3 for alpha chain variable domain of TCR clone 23411 (TRAV13-1, TRAJ35)
CAACKGGFGNVLHC

SEQ ID NO: 46822 - protein, 13 aa, Homo sapiens
  CDR3 for beta chain variable domain of TCR clone 23411 (TRBV7-3, TRBJ1-1)
CASSQDWGAEAFF

SEQ ID NO: 46823 - protein, 18 aa, Homo sapiens
  CDR3 for alpha chain variable domain of TCR clone 23412 (TRAV13-1, TRAJ52)
CAAKNPNAGGTIYGKLTF

SEQ ID NO: 46824 - protein, 15 aa, Homo sapiens
  CDR3 for beta chain variable domain of TCR clone 23412 (TRBV6-1, TRBJ2-3)
CASSERGGITDTQYF

SEQ ID NO: 46825 - protein, 14 aa, Homo sapiens
  CDR3 for alpha chain variable domain of TCR clone 23413 (TRAV14/DV4, TRAJ23)
CAMRYYNQGGKLIF

SEQ ID NO: 46826 - protein, 17 aa, Homo sapiens
  CDR3 for beta chain variable domain of TCR clone 23413 (TRBV7-2, TRBJ2-2)
CASSPRGAGEGTGELFL

SEQ ID NO: 46827 - protein, 11 aa, Homo sapiens
  CDR3 for alpha chain variable domain of TCR clone 23414 (TRAV3, TRAJ13)
CDVTSYQKVTF

SEQ ID NO: 46828 - protein, 15 aa, Homo sapiens
  CDR3 for beta chain variable domain of TCR clone 23414 (TRBV7-9, TRBJ2-7)
CASSSSGLAVYEQYF

SEQ ID NO: 46829 - protein, 11 aa, Homo sapiens
  CDR3 for alpha chain variable domain of TCR clone 23415 (TRAV2, TRAJ33)
CAVESNYQLIW

SEQ ID NO: 46830 - protein, 15 aa, Homo sapiens
  CDR3 for beta chain variable domain of TCR clone 23415 (TRBV28, TRBJ2-1)
CASSIIAGGRSEQFF

SEQ ID NO: 46831 - protein, 12 aa, Homo sapiens
  CDR3 for alpha chain variable domain of TCR clone 23416 (TRAV12-3, TRAJ17)
CAMTLTGNKLTF

SEQ ID NO: 46832 - protein, 12 aa, Homo sapiens
  CDR3 for beta chain variable domain of TCR clone 23416 (TRBV5-1, TRBJ2-7)
CASSLDSYEQYF

SEQ ID NO: 46833 - protein, 10 aa, Homo sapiens
  CDR3 for alpha chain variable domain of TCR clone 23417 (TRAV23/DV6, TRAJ57)
CAASSTLSQG

SEQ ID NO: 46834 - protein, 14 aa, Homo sapiens
  CDR3 for beta chain variable domain of TCR clone 23417 (TRBV25-1, TRBJ1-1)
CASTQLGGNTEAFF

SEQ ID NO: 46835 - protein, 13 aa, Homo sapiens
  CDR3 for alpha chain variable domain of TCR clone 23418 (TRAV35, TRAJ44)
CAGLSGTASKLTF

SEQ ID NO: 46836 - protein, 14 aa, Homo sapiens
  CDR3 for beta chain variable domain of TCR clone 23418 (TRBV2, TRBJ2-1)
CASRAYGIYNEQFF

SEQ ID NO: 46837 - protein, 12 aa, Homo sapiens
  CDR3 for alpha chain variable domain of TCR clone 23419 (TRAV16, TRAJ49)
CALNEGGNKFYF

SEQ ID NO: 46838 - protein, 14 aa, Homo sapiens
  CDR3 for beta chain variable domain of TCR clone 23419 (TRBV7-9, TRBJ2-1)
CASRPTGLRNEQFF

SEQ ID NO: 46839 - protein, 12 aa, Homo sapiens
  CDR3 for alpha chain variable domain of TCR clone 23420 (TRAV21, TRAJ33)
CAKMDSNYQLLW

SEQ ID NO: 46840 - protein, 14 aa, Homo sapiens
  CDR3 for beta chain variable domain of TCR clone 23420 (TRBV2, TRBJ2-7)
CASSLTSGGYEQYF

SEQ ID NO: 46841 - protein, 14 aa, Homo sapiens
  CDR3 for alpha chain variable domain of TCR clone 23421 (TRAV1-2, TRAJ16)
CAVNRFSDGQKLLF

SEQ ID NO: 46842 - protein, 15 aa, Homo sapiens
  CDR3 for beta chain variable domain of TCR clone 23421 (TRBV19, TRBJ2-3)
CAAGDTNAPNDTQYF

SEQ ID NO: 46843 - protein, 11 aa, Homo sapiens
  CDR3 for alpha chain variable domain of TCR clone 23422 (TRAV3, TRAJ21)
CAVGNFNKFYF

SEQ ID NO: 46844 - protein, 15 aa, Homo sapiens
  CDR3 for beta chain variable domain of TCR clone 23422 (TRBV6-5, TRBJ2-1)
CASSYDAGAGNEQFF

SEQ ID NO: 46845 - protein, 17 aa, Homo sapiens
  CDR3 for alpha chain variable domain of TCR clone 23423 (TRAV23/DV6, TRAJ57)
CAASSTLSQGGSEKLVF

SEQ ID NO: 46846 - protein, 14 aa, Homo sapiens
  CDR3 for beta chain variable domain of TCR clone 23423 (TRBV25-1, TRBJ1-1)
CASTRLGGNTEAFF

SEQ ID NO: 46847 - protein, 13 aa, Homo sapiens
  CDR3 for alpha chain variable domain of TCR clone 23424 (TRAV23/DV6, TRAJ58)
CAASEIGGSRLTF

SEQ ID NO: 46848 - protein, 14 aa, Homo sapiens
  CDR3 for beta chain variable domain of TCR clone 23424 (TRBV28, TRBJ2-5)
CASSRPAGGETQYF

SEQ ID NO: 46849 - protein, 13 aa, Homo sapiens
  CDR3 for alpha chain variable domain of TCR clone 23425 (TRAV13-1, TRAJ23)
CAASSYQGGKLIF

SEQ ID NO: 46850 - protein, 16 aa, Homo sapiens
  CDR3 for beta chain variable domain of TCR clone 23425 (TRBV20-1, TRBJ2-1)
CSANPRLAGTYNEQLF

SEQ ID NO: 46851 - protein, 16 aa, Homo sapiens
  CDR3 for alpha chain variable domain of TCR clone 23426 (TRAV30, TRAJ24)
GGTEIVDADSWGKFQF

SEQ ID NO: 46852 - protein, 14 aa, Homo sapiens
  CDR3 for beta chain variable domain of TCR clone 23426 (TRBV12-5, TRBJ2-5)
CASGSRTHQETQYF

SEQ ID NO: 46853 - protein, 14 aa, Homo sapiens
  CDR3 for alpha chain variable domain of TCR clone 23427 (TRAV16, TRAJ17)
CALSGRSAGNKLTF

SEQ ID NO: 46854 - protein, 15 aa, Homo sapiens
  CDR3 for beta chain variable domain of TCR clone 23427 (TRBV3-1, TRBJ1-2)
CASSPTRLPEGGYTF

SEQ ID NO: 46855 - protein, 12 aa, Homo sapiens
  CDR3 for alpha chain variable domain of TCR clone 23428 (TRAV13-2, TRAJ23)
CAERHRGGKLIF

SEQ ID NO: 46856 - protein, 16 aa, Homo sapiens
  CDR3 for beta chain variable domain of TCR clone 23428 (TRBV20-1, TRBJ1-4)
CSAPGQGSLTNEKLFF

SEQ ID NO: 46857 - protein, 14 aa, Homo sapiens
  CDR3 for alpha chain variable domain of TCR clone 23429 (TRAV13-1, TRAJ22)
GAASNGGSARQLTF

SEQ ID NO: 46858 - protein, 14 aa, Homo sapiens
  CDR3 for beta chain variable domain of TCR clone 23429 (TRBV18, TRBJ2-2)
CASSPGQNTGELFF

SEQ ID NO: 46859 - protein, 13 aa, Homo sapiens
  CDR3 for alpha chain variable domain of TCR clone 23430 (TRAV30, TRAJ24)
CGTVTDSWGKLQF

SEQ ID NO: 46860 - protein, 14 aa, Homo sapiens
  CDR3 for beta chain variable domain of TCR clone 23430 (TRBV6-3, TRBJ2-2)
CASTYTPGTGELFF

SEQ ID NO: 46861 - protein, 16 aa, Homo sapiens
  CDR3 for alpha chain variable domain of TCR clone 23431 (TRAV26-1, TRAJ33)
CIVPFWGEDSSYQLIW

SEQ ID NO: 46862 - protein, 14 aa, Homo sapiens
  CDR3 for beta chain variable domain of TCR clone 23431 (TRBV6-3, TRBJ1-1)
CASSYHSKNTEAFF

SEQ ID NO: 46863 - protein, 15 aa, Homo sapiens
  CDR3 for alpha chain variable domain of TCR clone 23432 (TRAV3, TRAJ47)
CAVRDIGEYGNKLVS

SEQ ID NO: 46864 - protein, 14 aa, Homo sapiens
  CDR3 for beta chain variable domain of TCR clone 23432 (TRBV13, TRBJ2-5)
CASSLERVGETQYF

SEQ ID NO: 46865 - protein, 13 aa, Homo sapiens
  CDR3 for alpha chain variable domain of TCR clone 23433 (TRAV21, TRAJ27)
CAARPGNAGKSTF

SEQ ID NO: 46866 - protein, 13 aa, Homo sapiens
  CDR3 for beta chain variable domain of TCR clone 23433 (TRBV7-6, TRBJ2-3)
CSSLGTVTDTQYF

SEQ ID NO: 46867 - protein, 14 aa, Homo sapiens
  CDR3 for alpha chain variable domain of TCR clone 23434 (TRAV12-2, TRAJ9)
CAGNMEGGGFKTIF

SEQ ID NO: 46868 - protein, 14 aa, Homo sapiens
  CDR3 for beta chain variable domain of TCR clone 23434 (TRBV2, TRBJ2-5)
CASSEVLAQETQYF

SEQ ID NO: 46869 - protein, 15 aa, Homo sapiens
  CDR3 for alpha chain variable domain of TCR clone 23435 (TRAV27, TRAJ38)
CAARRNAGNNRKLIW

SEQ ID NO: 46870 - protein, 13 aa, Homo sapiens
  CDR3 for beta chain variable domain of TCR clone 23435 (TRBV7-3, TRBJ2-1)
CASSLDSHNEQFF

SEQ ID NO: 46871 - protein, 11 aa, Homo sapiens
  CDR3 for alpha chain variable domain of TCR clone 23436 (TRAV2, TRAJ33)
CAVDSNYQLIW

SEQ ID NO: 46872 - protein, 15 aa, Homo sapiens
  CDR3 for beta chain variable domain of TCR clone 23436 (TRBV19, TRBJ1-2)
CPSSVGQVLNYGYTF

SEQ ID NO: 46873 - protein, 15 aa, Homo sapiens
  CDR3 for alpha chain variable domain of TCR clone 23437 (TRAV38-1, TRAJ57)
CAFMDSQGGSEKLVF

SEQ ID NO: 46874 - protein, 15 aa, Homo sapiens
  CDR3 for beta chain variable domain of TCR clone 23437 (TRBV10-3, TRBJ2-1)
CHPGGGRGDYNEQFF

SEQ ID NO: 46875 - protein, 15 aa, Homo sapiens
  CDR3 for alpha chain variable domain of TCR clone 23438 (TRAV26-1, TRAJ44)
CIVRASTGTASKLTF

SEQ ID NO: 46876 - protein, 16 aa, Homo sapiens
  CDR3 for beta chain variable domain of TCR clone 23438 (TRBV7-7, TRBJ2-1)
CASSLASGTSYNEQFF

SEQ ID NO: 46877 - protein, 12 aa, Homo sapiens
  CDR3 for alpha chain variable domain of TCR clone 23439 (TRAV21, TRAJ33)
FAKMDSNYQLIW

SEQ ID NO: 46878 - protein, 14 aa, Homo sapiens
  CDR3 for beta chain variable domain of TCR clone 23439 (TRBV2, TRBJ2-7)
CASSLTSGGYEQYF

SEQ ID NO: 46879 - protein, 13 aa, Homo sapiens
  CDR3 for alpha chain variable domain of TCR clone 23440 (TRAV17, TRAJ6)
CATGFGGSYIPTF

SEQ ID NO: 46880 - protein, 14 aa, Homo sapiens
  CDR3 for beta chain variable domain of TCR clone 23440 (TRBV5-1, TRBJ2-5)
CASSFGGSQEAQYF

SEQ ID NO: 46881 - protein, 15 aa, Homo sapiens
  CDR3 for alpha chain variable domain of TCR clone 23441 (TRAV38-2/DV8, TRAJ45)
CAYWDSGGGADGLTF

SEQ ID NO: 46882 - protein, 15 aa, Homo sapiens
  CDR3 for beta chain variable domain of TCR clone 23441 (TRBV19, TRBJ1-1)
CSSPTRFWPGTEAFF

SEQ ID NO: 46883 - protein, 14 aa, Homo sapiens
  CDR3 for alpha chain variable domain of TCR clone 23442 (TRAV8-2, TRAJ4)
CVVSPSGGYNKLIF

SEQ ID NO: 46884 - protein, 16 aa, Homo sapiens
  CDR3 for beta chain variable domain of TCR clone 23442 (TRBV12-5, TRBJ2-5)
CASGPRTSGNQETQYF

SEQ ID NO: 46885 - protein, 14 aa, Homo sapiens
  CDR3 for alpha chain variable domain of TCR clone 23443 (TRAV1-2, TRAJ16)
CAVNRFSYGQKLLF

SEQ ID NO: 46886 - protein, 16 aa, Homo sapiens
  CDR3 for beta chain variable domain of TCR clone 23443 (TRBV7-3, TRBJ2-2)
CASSLKRGTLSGELFF

SEQ ID NO: 46887 - protein, 16 aa, Homo sapiens
  CDR3 for alpha chain variable domain of TCR clone 23444 (TRAV30, TRAJ24)
CGTKIVDADSWGKFQF

SEQ ID NO: 46888 - protein, 12 aa, Homo sapiens
  CDR3 for beta chain variable domain of TCR clone 23444 (TRBV11-2, TRBJ2-2)
CASSLGGGELFF

SEQ ID NO: 46889 - protein, 15 aa, Homo sapiens
  CDR3 for alpha chain variable domain of TCR clone 23445 (TRAV3, TRAJ20)
CAVRDIKLSAYKLSF

SEQ ID NO: 46890 - protein, 15 aa, Homo sapiens
  CDR3 for beta chain variable domain of TCR clone 23445 (TRBV7-9, TRBJ1-6)
CASSSPGRGNSPLHF

SEQ ID NO: 46891 - protein, 14 aa, Homo sapiens
  CDR3 for alpha chain variable domain of TCR clone 23446 (TRAV3, TRAJ36)
CAVRDGTGANNPFF

SEQ ID NO: 46892 - protein, 16 aa, Homo sapiens
  CDR3 for beta chain variable domain of TCR clone 23446 (TRBV7-3, TRBJ2-5)
CASIQPGGSVQETQYF

SEQ ID NO: 46893 - protein, 10 aa, Homo sapiens
  CDR3 for alpha chain variable domain of TCR clone 23447 (TRAV13-1, )
CAASGPRRTQ

SEQ ID NO: 46894 - protein, 16 aa, Homo sapiens
  CDR3 for beta chain variable domain of TCR clone 23447 (TRBV18, TRBJ2-3)
CASSPPAGGPRKYAVF

SEQ ID NO: 46895 - protein, 13 aa, Homo sapiens
  CDR3 for alpha chain variable domain of TCR clone 23448 (TRAV13-2, TRAJ13)
CAERPGGHQKVTF

SEQ ID NO: 46896 - protein, 14 aa, Homo sapiens
  CDR3 for beta chain variable domain of TCR clone 23448 (TRBV23-1, TRBJ2-5)
CASSFLRSQETQYF

SEQ ID NO: 46897 - protein, 19 aa, Homo sapiens
  CDR3 for alpha chain variable domain of TCR clone 23449 (TRAV1-2, TRAJ26)
CLLPLCCERPDNYGQNFVF

SEQ ID NO: 46898 - protein, 14 aa, Homo sapiens
  CDR3 for beta chain variable domain of TCR clone 23449 (TRBV4-2, TRBJ2-1)
CASGLDRAYNEQFF

SEQ ID NO: 46899 - protein, 16 aa, Homo sapiens
  CDR3 for alpha chain variable domain of TCR clone 23450 (TRAV3, TRAJ21)
CAVSDIERGNFNKFYF

SEQ ID NO: 46900 - protein, 13 aa, Homo sapiens
  CDR3 for beta chain variable domain of TCR clone 23450 (TRBV27, TRBJ2-7)
CASSLTTGYEQYF

SEQ ID NO: 46901 - protein, 12 aa, Homo sapiens
  CDR3 for alpha chain variable domain of TCR clone 23451 (TRAV38-1, TRAJ34)
CAFMKETDKLIF

SEQ ID NO: 46902 - protein, 17 aa, Homo sapiens
  CDR3 for beta chain variable domain of TCR clone 23451 (TRBV7-8, TRBJ2-6)
CASSAGTGGAGADVLTF

SEQ ID NO: 46903 - protein, 18 aa, Homo sapiens
  CDR3 for alpha chain variable domain of TCR clone 23452 (TRAV8-4, TRAJ52)
CAVTRANAGGTSYGKLSF

SEQ ID NO: 46904 - protein, 20 aa, Homo sapiens
  CDR3 for beta chain variable domain of TCR clone 23452 (TRBV19, TRBJ2-1)
CASSISRTVTSTRLNNEQFF

SEQ ID NO: 46905 - protein, 14 aa, Homo sapiens
  CDR3 for alpha chain variable domain of TCR clone 23453 (TRAV1-2, TRAJ16)
CAVNRFSDGQKLLF

SEQ ID NO: 46906 - protein, 15 aa, Homo sapiens
  CDR3 for beta chain variable domain of TCR clone 23453 (TRBV4-1, TRBJ2-7)
CASSQQGQGFDEQYF

SEQ ID NO: 46907 - protein, 14 aa, Homo sapiens
  CDR3 for alpha chain variable domain of TCR clone 23454 (TRAV12-2, TRAJ17)
CAVLFKAARNKLTF

SEQ ID NO: 46908 - protein, 17 aa, Homo sapiens
  CDR3 for beta chain variable domain of TCR clone 23454 (TRBV20-1, TRBJ2-2)
CSASGSGQGGLTGELFF

SEQ ID NO: 46909 - protein, 14 aa, Homo sapiens
  CDR3 for alpha chain variable domain of TCR clone 23455 (TRAV12-2, TRAJ13)
CAVKKTGGYQKVTF

SEQ ID NO: 46910 - protein, 13 aa, Homo sapiens
  CDR3 for beta chain variable domain of TCR clone 23455 (TRBV10-3, TRBJ2-7)
CASKLAVNYEQYL

SEQ ID NO: 46911 - protein, 15 aa, Homo sapiens
  CDR3 for alpha chain variable domain of TCR clone 23456 (TRAV3, TRAJ4)
CAVRDGTGGYNKLIF

SEQ ID NO: 46912 - protein, 16 aa, Homo sapiens
  CDR3 for beta chain variable domain of TCR clone 23456 (TRBV27, TRBJ2-2)
CASSSSGVSNTGELFL

SEQ ID NO: 46913 - protein, 13 aa, Homo sapiens
  CDR3 for alpha chain variable domain of TCR clone 23457 (TRAV1-1, TRAJ9)
CAAKHTGGFKTIF

SEQ ID NO: 46914 - protein, 14 aa, Homo sapiens
  CDR3 for beta chain variable domain of TCR clone 23457 (TRBV20-1, TRBJ2-1)
CSAQIGGSANEQFF

SEQ ID NO: 46915 - protein, 18 aa, Homo sapiens
  CDR3 for alpha chain variable domain of TCR clone 23458 (TRAV12-3, TRAJ52)
CAMSVGGAGGTSYGKLTF

SEQ ID NO: 46916 - protein, 14 aa, Homo sapiens
  CDR3 for beta chain variable domain of TCR clone 23458 (TRBV25-1, TRBJ1-1)
CASTHLGGNTEAFF

SEQ ID NO: 46917 - protein, 11 aa, Homo sapiens
  CDR3 for alpha chain variable domain of TCR clone 23459 (TRAV13-1, TRAJ6)
CATLGSYIPTF

SEQ ID NO: 46918 - protein, 13 aa, Homo sapiens
  CDR3 for beta chain variable domain of TCR clone 23459 (TRBV6-6, TRBJ2-1)
CAGSLHQGDEQFF

SEQ ID NO: 46919 - protein, 16 aa, Homo sapiens
  CDR3 for alpha chain variable domain of TCR clone 23460 (TRAV30, TRAJ24)
CGTEVVDADSWGKSQF

SEQ ID NO: 46920 - protein, 14 aa, Homo sapiens
  CDR3 for beta chain variable domain of TCR clone 23460 (TRBV12-5, TRBJ2-5)
CASGSRTHQETQYF

SEQ ID NO: 46921 - protein, 12 aa, Homo sapiens
  CDR3 for alpha chain variable domain of TCR clone 23461 (TRAV12-1, TRAJ40)
CVFYSGTYKYIF

SEQ ID NO: 46922 - protein, 18 aa, Homo sapiens
  CDR3 for beta chain variable domain of TCR clone 23461 (TRBV12-4, TRBJ2-2)
CASSFVAGTRGRTGELFF

SEQ ID NO: 46923 - protein, 14 aa, Homo sapiens
  CDR3 for alpha chain variable domain of TCR clone 23462 (TRAV4, TRAJ20)
CLAGRRSNDYKLSF

SEQ ID NO: 46924 - protein, 18 aa, Homo sapiens
  CDR3 for beta chain variable domain of TCR clone 23462 (TRBV2, TRBJ2-5)
CASSGDPQGRGAQETQYF

SEQ ID NO: 46925 - protein, 12 aa, Homo sapiens
  CDR3 for alpha chain variable domain of TCR clone 23463 (TRAV30, TRAJ43)
CGTEERGNDMRF

SEQ ID NO: 46926 - protein, 13 aa, Homo sapiens
  CDR3 for beta chain variable domain of TCR clone 23463 (TRBV27, TRBJ2-7)
CASSSSQGYEQYF

SEQ ID NO: 46927 - protein, 15 aa, Homo sapiens
  CDR3 for alpha chain variable domain of TCR clone 23464 (TRAV8-3, TRAJ45)
CASSYSGGGADGLTF

SEQ ID NO: 46928 - protein, 13 aa, Homo sapiens
  CDR3 for beta chain variable domain of TCR clone 23464 (TRBV10-3, TRBJ2-7)
SASKLAVNYEQYF

SEQ ID NO: 46929 - protein, 11 aa, Homo sapiens
  CDR3 for alpha chain variable domain of TCR clone 23465 (TRAV2, TRAJ21)
CAVVNFNKFYF

SEQ ID NO: 46930 - protein, 14 aa, Homo sapiens
  CDR3 for beta chain variable domain of TCR clone 23465 (TRBV15, TRBJ2-3)
CATRSGTSTDTQYF

SEQ ID NO: 46931 - protein, 14 aa, Homo sapiens
  CDR3 for alpha chain variable domain of TCR clone 23466 (TRAV12-2, TRAJ40)
CAVKIPSGTYKYIF

SEQ ID NO: 46932 - protein, 19 aa, Homo sapiens
  CDR3 for beta chain variable domain of TCR clone 23466 (TRBV7-2, TRBJ2-3)
CASSFLSRNWGGGTDTQYF

SEQ ID NO: 46933 - protein, 12 aa, Homo sapiens
  CDR3 for alpha chain variable domain of TCR clone 23467 (TRAV12-3, TRAJ17)
CAMTLTGNKLTF

SEQ ID NO: 46934 - protein, 13 aa, Homo sapiens
  CDR3 for beta chain variable domain of TCR clone 23467 (TRBV7-9, TRBJ1-2)
CASGLKQNYGYTF

SEQ ID NO: 46935 - protein, 13 aa, Homo sapiens
  CDR3 for alpha chain variable domain of TCR clone 23468 (TRAV14/DV4, TRAJ4)
CAMKAGGYNKLIF

SEQ ID NO: 46936 - protein, 15 aa, Homo sapiens
  CDR3 for beta chain variable domain of TCR clone 23468 (TRBV9, TRBJ1-6)
CASSVAGTGDSPLHF

SEQ ID NO: 46937 - protein, 13 aa, Homo sapiens
  CDR3 for alpha chain variable domain of TCR clone 23469 (TRAV8-3, TRAJ36)
CAVCATGANNLFF

SEQ ID NO: 46938 - protein, 15 aa, Homo sapiens
  CDR3 for beta chain variable domain of TCR clone 23469 (TRBV7-2, TRBJ1-2)
CASSPRAGWNYGYTF

SEQ ID NO: 46939 - protein, 12 aa, Homo sapiens
  CDR3 for alpha chain variable domain of TCR clone 23470 (TRAV17, TRAJ12)
CATLRSSYNLIF

SEQ ID NO: 46940 - protein, 16 aa, Homo sapiens
  CDR3 for beta chain variable domain of TCR clone 23470 (TRBV28, TRBJ2-7)
CASSLFFETGGPEQYF

SEQ ID NO: 46941 - protein, 14 aa, Homo sapiens
  CDR3 for alpha chain variable domain of TCR clone 23471 (TRAV12-3, TRAJ10)
SHLPLTGGGNKLTF

SEQ ID NO: 46942 - protein, 14 aa, Homo sapiens
  CDR3 for beta chain variable domain of TCR clone 23471 (TRBV7-2, TRBJ2-2)
CASSLDSNTGELFF

SEQ ID NO: 46943 - protein, 13 aa, Homo sapiens
  CDR3 for alpha chain variable domain of TCR clone 23472 (TRAV8-3, TRAJ43)
CAVGPDNNNDMRF

SEQ ID NO: 46944 - protein, 14 aa, Homo sapiens
  CDR3 for beta chain variable domain of TCR clone 23472 (TRBV19, TRBJ2-1)
CASPTFVLSGGQFF

SEQ ID NO: 46945 - protein, 14 aa, Homo sapiens
  CDR3 for alpha chain variable domain of TCR clone 23473 (TRAV13-1, TRAJ26)
CAASSAHYGQNFVL

SEQ ID NO: 46946 - protein, 17 aa, Homo sapiens
  CDR3 for beta chain variable domain of TCR clone 23473 (TRBV25-1, TRBJ2-5)
CASSRRGGRGGQETQYF

SEQ ID NO: 46947 - protein, 16 aa, Homo sapiens
  CDR3 for alpha chain variable domain of TCR clone 23474 (TRAV8-3, TRAJ10)
CAVGPILTGGGNKLTF

SEQ ID NO: 46948 - protein, 16 aa, Homo sapiens
  CDR3 for beta chain variable domain of TCR clone 23474 (TRBV7-2, TRBJ2-5)
CASSSKWLSGKETQYF

SEQ ID NO: 46949 - protein, 14 aa, Homo sapiens
  CDR3 for alpha chain variable domain of TCR clone 23475 (TRAV8-3, TRAJ4)
CAVGAAGGYNKLIF

SEQ ID NO: 46950 - protein, 14 aa, Homo sapiens
  CDR3 for beta chain variable domain of TCR clone 23475 (TRBV6-1, TRBJ1-3)
CASVQGGGGNTIYF

SEQ ID NO: 46951 - protein, 15 aa, Homo sapiens
  CDR3 for alpha chain variable domain of TCR clone 23476 (TRAV12-1, TRAJ42)
CVVTRGGGSQGNLIF

SEQ ID NO: 46952 - protein, 14 aa, Homo sapiens
  CDR3 for beta chain variable domain of TCR clone 23476 (TRBV11-2, TRBJ2-3)
CASSLGGGANTQYF

SEQ ID NO: 46953 - protein, 12 aa, Homo sapiens
  CDR3 for alpha chain variable domain of TCR clone 23477 (TRAV2, TRAJ33)
CAVPDSSYQLIW

SEQ ID NO: 46954 - protein, 15 aa, Homo sapiens
  CDR3 for beta chain variable domain of TCR clone 23477 (TRBV15, TRBJ1-5)
CATSRDPVSNQPQHF

SEQ ID NO: 46955 - protein, 14 aa, Homo sapiens
  CDR3 for alpha chain variable domain of TCR clone 23478 (TRAV12-1, TRAJ3)
CGAARYSSASKIIF

SEQ ID NO: 46956 - protein, 15 aa, Homo sapiens
  CDR3 for beta chain variable domain of TCR clone 23478 (TRBV7-2, TRBJ2-6)
CASSREGSGVNVLTF

SEQ ID NO: 46957 - protein, 14 aa, Homo sapiens
  CDR3 for alpha chain variable domain of TCR clone 23479 (TRAV38-1, TRAJ35)
CAFLTIGFGNVLHF

SEQ ID NO: 46958 - protein, 17 aa, Homo sapiens
  CDR3 for beta chain variable domain of TCR clone 23479 (TRBV28, TRBJ1-1)
CASSGDLRTESNTEAFF

SEQ ID NO: 46959 - protein, 14 aa, Homo sapiens
  CDR3 for alpha chain variable domain of TCR clone 23480 (TRAV1-1, TRAJ27)
CAVIYNTNAGKSTS

SEQ ID NO: 46960 - protein, 15 aa, Homo sapiens
  CDR3 for beta chain variable domain of TCR clone 23480 (TRBV7-2, TRBJ2-1)
CASSSGLAGGNEQFF

SEQ ID NO: 46961 - protein, 14 aa, Homo sapiens
  CDR3 for alpha chain variable domain of TCR clone 23481 (TRAV8-3, TRAJ4)
CAVGAAGGYNKLIF

SEQ ID NO: 46962 - protein, 15 aa, Homo sapiens
  CDR3 for beta chain variable domain of TCR clone 23481 (TRBV7-9, TRBJ1-6)
CASSSPGRGNSPLHF

SEQ ID NO: 46963 - protein, 15 aa, Homo sapiens
  CDR3 for alpha chain variable domain of TCR clone 23482 (TRAV26-1, TRAJ29)
CIVRVEGSGNTPLVF

SEQ ID NO: 46964 - protein, 14 aa, Homo sapiens
  CDR3 for beta chain variable domain of TCR clone 23482 (TRBV18, TRBJ2-5)
CASLPGVSQETQYF

SEQ ID NO: 46965 - protein, 17 aa, Homo sapiens
  CDR3 for alpha chain variable domain of TCR clone 23483 (TRAV3, TRAJ38)
CAVRDCLNAGNNRKLIW

SEQ ID NO: 46966 - protein, 13 aa, Homo sapiens
  CDR3 for beta chain variable domain of TCR clone 23483 (TRBV23-1, TRBJ1-4)
RASRGKFNEKLFF

SEQ ID NO: 46967 - protein, 13 aa, Homo sapiens
  CDR3 for alpha chain variable domain of TCR clone 23484 (TRAV30, TRAJ24)
CGTVTDSWGKLQF

SEQ ID NO: 46968 - protein, 15 aa, Homo sapiens
  CDR3 for beta chain variable domain of TCR clone 23484 (TRBV25-1, TRBJ1-4)
YASSPGDSTNEKLFF

SEQ ID NO: 46969 - protein, 17 aa, Homo sapiens
  CDR3 for alpha chain variable domain of TCR clone 23485 (TRAV3, TRAJ12)
CAVRDGGRMDSSYKLIF

SEQ ID NO: 46970 - protein, 15 aa, Homo sapiens
  CDR3 for beta chain variable domain of TCR clone 23485 (TRBV20-1, TRBJ2-7)
CSARDRVSGMDEQYF

SEQ ID NO: 46971 - protein, 13 aa, Homo sapiens
  CDR3 for alpha chain variable domain of TCR clone 23486 (TRAV3, TRAJ21)
CAVREPDFNKFYF

SEQ ID NO: 46972 - protein, 13 aa, Homo sapiens
  CDR3 for beta chain variable domain of TCR clone 23486 (TRBV9, TRBJ2-1)
CASSPSGGNEQFL

SEQ ID NO: 46973 - protein, 14 aa, Homo sapiens
  CDR3 for alpha chain variable domain of TCR clone 23487 (TRAV1-2, TRAJ16)
CAVNRFSDGQKLLF

SEQ ID NO: 46974 - protein, 13 aa, Homo sapiens
  CDR3 for beta chain variable domain of TCR clone 23487 (TRBV27, TRBJ2-7)
CASSLTTGYEQYF

SEQ ID NO: 46975 - protein, 14 aa, Homo sapiens
  CDR3 for alpha chain variable domain of TCR clone 23488 (TRAV1-1, TRAJ27)
CAVIYNTNEGKSTF

SEQ ID NO: 46976 - protein, 15 aa, Homo sapiens
  CDR3 for beta chain variable domain of TCR clone 23488 (TRBV7-2, TRBJ2-1)
CASSSGLAGGNEQFF

SEQ ID NO: 46977 - protein, 13 aa, Homo sapiens
  CDR3 for alpha chain variable domain of TCR clone 23489 (TRAV21, TRAJ27)
CAALNTNAGKSTF

SEQ ID NO: 46978 - protein, 14 aa, Homo sapiens
  CDR3 for beta chain variable domain of TCR clone 23489 (TRBV27, TRBJ1-1)
CASGLLSGLSEAFF

SEQ ID NO: 46979 - protein, 15 aa, Homo sapiens
  CDR3 for alpha chain variable domain of TCR clone 23490 (TRAV21, TRAJ53)
CATLNSGGSNYKLTL

SEQ ID NO: 46980 - protein, 16 aa, Homo sapiens
  CDR3 for beta chain variable domain of TCR clone 23490 (TRBV9, TRBJ2-1)
CASSVGGGGNYNEQFF

SEQ ID NO: 46981 - protein, 11 aa, Homo sapiens
  CDR3 for alpha chain variable domain of TCR clone 23491 (TRAV12-3, TRAJ49)
CAMSSGNQFYF

SEQ ID NO: 46982 - protein, 17 aa, Homo sapiens
  CDR3 for beta chain variable domain of TCR clone 23491 (TRBV5-7, TRBJ2-7)
CASSLWRVLAGSYEQYL

SEQ ID NO: 46983 - protein, 12 aa, Homo sapiens
  CDR3 for alpha chain variable domain of TCR clone 23492 (TRAV12-3, TRAJ17)
CAMTLTGNKLTF

SEQ ID NO: 46984 - protein, 18 aa, Homo sapiens
  CDR3 for beta chain variable domain of TCR clone 23492 (TRBV4-1, TRBJ1-5)
CASSQDPRGQGLNQPQHF

SEQ ID NO: 46985 - protein, 13 aa, Homo sapiens
  CDR3 for alpha chain variable domain of TCR clone 23493 (TRAV8-3, TRAJ28)
CAVGAGGSYQLTF

SEQ ID NO: 46986 - protein, 14 aa, Homo sapiens
  CDR3 for beta chain variable domain of TCR clone 23493 (TRBV7-2, TRBJ2-7)
CASRSQGAAYEQYF

SEQ ID NO: 46987 - protein, 14 aa, Homo sapiens
  CDR3 for alpha chain variable domain of TCR clone 23494 (TRAV1-1, TRAJ27)
CAVIYNTNAGKSTF

SEQ ID NO: 46988 - protein, 15 aa, Homo sapiens
  CDR3 for beta chain variable domain of TCR clone 23494 (TRBV7-2, TRBJ2-1)
CASSAGLAGGNEQFF

SEQ ID NO: 46989 - protein, 15 aa, Homo sapiens
  CDR3 for alpha chain variable domain of TCR clone 23495 (TRAV12-1, TRAJ44)
CVVFVNTGTASKLTS

SEQ ID NO: 46990 - protein, 17 aa, Homo sapiens
  CDR3 for beta chain variable domain of TCR clone 23495 (TRBV7-8, TRBJ2-6)
CASSAGTGGAGANVLTF

SEQ ID NO: 46991 - protein, 13 aa, Homo sapiens
  CDR3 for alpha chain variable domain of TCR clone 23496 (TRAV8-3, TRAJ36)
CAVGATGANNLFF

SEQ ID NO: 46992 - protein, 15 aa, Homo sapiens
  CDR3 for beta chain variable domain of TCR clone 23496 (TRBV7-2, TRBJ1-2)
CASSTRAGWNYGYTF

SEQ ID NO: 46993 - protein, 17 aa, Homo sapiens
  CDR3 for alpha chain variable domain of TCR clone 23497 (TRAV3, TRAJ42)
CAVRDRYYGGSQGNLIF

SEQ ID NO: 46994 - protein, 15 aa, Homo sapiens
  CDR3 for beta chain variable domain of TCR clone 23497 (TRBV6-6, TRBJ2-7)
CASSYSYGGSYEQYF

SEQ ID NO: 46995 - protein, 16 aa, Homo sapiens
  CDR3 for alpha chain variable domain of TCR clone 23498 (TRAV27, TRAJ13)
CAGAKRDSGGYQKVTF

SEQ ID NO: 46996 - protein, 15 aa, Homo sapiens
  CDR3 for beta chain variable domain of TCR clone 23498 (TRBV29-1, TRBJ2-1)
CSVGRHALFYNEQFF

SEQ ID NO: 46997 - protein, 13 aa, Homo sapiens
  CDR3 for alpha chain variable domain of TCR clone 23499 (TRAV3, TRAJ21)
CAVREPDFNKFYF

SEQ ID NO: 46998 - protein, 17 aa, Homo sapiens
  CDR3 for beta chain variable domain of TCR clone 23499 (TRBV13, TRBJ2-3)
CASSLSRVAGGRNTQYF

SEQ ID NO: 46999 - protein, 13 aa, Homo sapiens
  CDR3 for alpha chain variable domain of TCR clone 23500 (TRAV12-1, TRAJ40)
CVVPTSGTYKYIF

SEQ ID NO: 47000 - protein, 16 aa, Homo sapiens
  CDR3 for beta chain variable domain of TCR clone 23500 (TRBV7-9, TRBJ1-2)
CASSSGFSSGEDGYTF

SEQ ID NO: 47001 - protein, 14 aa, Homo sapiens
  CDR3 for alpha chain variable domain of TCR clone 23501 (TRAV38-1, TRAJ45)
CAYYSGGGADGLTF

SEQ ID NO: 47002 - protein, 20 aa, Homo sapiens
  CDR3 for beta chain variable domain of TCR clone 23501 (TRBV28, TRBJ2-1)
CASTPIGRSPGLVGGNEQFF

SEQ ID NO: 47003 - protein, 16 aa, Homo sapiens
  CDR3 for alpha chain variable domain of TCR clone 23502 (TRAV3, TRAJ21)
CAVRDIERGNFNKFYS

SEQ ID NO: 47004 - protein, 13 aa, Homo sapiens
  CDR3 for beta chain variable domain of TCR clone 23502 (TRBV27, TRBJ2-7)
CASSLTTGYEQYF

SEQ ID NO: 47005 - protein, 15 aa, Homo sapiens
  CDR3 for alpha chain variable domain of TCR clone 23503 (TRAV20, TRAJ6)
CAVRLQSGGSYIPTF

SEQ ID NO: 47006 - protein, 13 aa, Homo sapiens
  CDR3 for beta chain variable domain of TCR clone 23503 (TRBV12-4, TRBJ2-7)
CQQRFGGLYEQYF

SEQ ID NO: 47007 - protein, 13 aa, Homo sapiens
  CDR3 for alpha chain variable domain of TCR clone 23504 (TRAV13-1, TRAJ39)
CAASIWAGNMLTF

SEQ ID NO: 47008 - protein, 17 aa, Homo sapiens
  CDR3 for beta chain variable domain of TCR clone 23504 (TRBV7-9, TRBJ1-1)
CASSLLERGALKLSLDK

SEQ ID NO: 47009 - protein, 16 aa, Homo sapiens
  CDR3 for alpha chain variable domain of TCR clone 23505 (TRAV3, TRAJ10)
CAVRDMRAGGGNKLTF

SEQ ID NO: 47010 - protein, 16 aa, Homo sapiens
  CDR3 for beta chain variable domain of TCR clone 23505 (TRBV7-3, TRBJ2-2)
CASSLKRGTLSGELFF

SEQ ID NO: 47011 - protein, 12 aa, Homo sapiens
  CDR3 for alpha chain variable domain of TCR clone 23506 (TRAV26-2, TRAJ21)
CILKGNFNEFYF

SEQ ID NO: 47012 - protein, 14 aa, Homo sapiens
  CDR3 for beta chain variable domain of TCR clone 23506 (TRBV7-9, TRBJ1-1)
CASTPLQSYTEAFF

SEQ ID NO: 47013 - protein, 14 aa, Homo sapiens
  CDR3 for alpha chain variable domain of TCR clone 23507 (TRAV13-1, TRAJ44)
CAAKATGPASKLTF

SEQ ID NO: 47014 - protein, 13 aa, Homo sapiens
  CDR3 for beta chain variable domain of TCR clone 23507 (TRBV5-5, TRBJ1-2)
CASSFWRGEDYTF

SEQ ID NO: 47015 - protein, 14 aa, Homo sapiens
  CDR3 for alpha chain variable domain of TCR clone 23508 (TRAV21, TRAJ35)
CAVMPIGFGNVLHC

SEQ ID NO: 47016 - protein, 12 aa, Homo sapiens
  CDR3 for beta chain variable domain of TCR clone 23508 (TRBV7-9, TRBJ2-7)
CASNIKREEQYF

SEQ ID NO: 47017 - protein, 13 aa, Homo sapiens
  CDR3 for alpha chain variable domain of TCR clone 23509 (TRAV2, TRAJ40)
CAVVTSGTDKYIF

SEQ ID NO: 47018 - protein, 15 aa, Homo sapiens
  CDR3 for beta chain variable domain of TCR clone 23509 (TRBV11-3, TRBJ2-3)
CASLKDGREGDTQYF

SEQ ID NO: 47019 - protein, 14 aa, Homo sapiens
  CDR3 for alpha chain variable domain of TCR clone 23510 (TRAV16, TRAJ33)
CALSAMDRNYQLIW

SEQ ID NO: 47020 - protein, 12 aa, Homo sapiens
  CDR3 for beta chain variable domain of TCR clone 23510 (TRBV5-1, TRBJ1-2)
CASSQDTYGYTF

SEQ ID NO: 47021 - protein, 10 aa, Homo sapiens
  CDR3 for alpha chain variable domain of TCR clone 23511 (TRAV9-2, TRAJ49)
CALTGDQFYF

SEQ ID NO: 47022 - protein, 16 aa, Homo sapiens
  CDR3 for beta chain variable domain of TCR clone 23511 (TRBV19, TRBJ2-3)
CASSPGAASRTDTQYF

SEQ ID NO: 47023 - protein, 15 aa, Homo sapiens
  CDR3 for alpha chain variable domain of TCR clone 23512 (TRAV23/DV6, TRAJ13)
CAAWPGGGGYQTVTF

SEQ ID NO: 47024 - protein, 17 aa, Homo sapiens
  CDR3 for beta chain variable domain of TCR clone 23512 (TRBV19, TRBJ2-7)
CASSISFYDSYPYEQYF

SEQ ID NO: 47025 - protein, 17 aa, Homo sapiens
  CDR3 for alpha chain variable domain of TCR clone 23513 (TRAV13-1, TRAJ52)
CAAGRNAGGTSYGKLTL

SEQ ID NO: 47026 - protein, 13 aa, Homo sapiens
  CDR3 for beta chain variable domain of TCR clone 23513 (TRBV7-2, TRBJ1-1)
CASNLKGAKVAFF

SEQ ID NO: 47027 - protein, 14 aa, Homo sapiens
  CDR3 for alpha chain variable domain of TCR clone 23514 (TRAV20, TRAJ20)
CAVRRGDNDYKLSF

SEQ ID NO: 47028 - protein, 13 aa, Homo sapiens
  CDR3 for beta chain variable domain of TCR clone 23514 (TRBV19, TRBJ2-5)
CASSETAPETQYF

SEQ ID NO: 47029 - protein, 12 aa, Homo sapiens
  CDR3 for alpha chain variable domain of TCR clone 23515 (TRAV12-2, TRAJ16)
CAVNLDGQELLF

SEQ ID NO: 47030 - protein, 12 aa, Homo sapiens
  CDR3 for beta chain variable domain of TCR clone 23515 (TRBV5-7, TRBJ2-7)
CASSVQGGEQYF

SEQ ID NO: 47031 - protein, 14 aa, Homo sapiens
  CDR3 for alpha chain variable domain of TCR clone 23516 (TRAV8-4, TRAJ9)
CAVRINTGGFKTIF

SEQ ID NO: 47032 - protein, 15 aa, Homo sapiens
  CDR3 for beta chain variable domain of TCR clone 23516 (TRBV10-2, TRBJ2-6)
CASGEQGTGANVLTF

SEQ ID NO: 47033 - protein, 17 aa, Homo sapiens
  CDR3 for alpha chain variable domain of TCR clone 23517 (TRAV4, TRAJ42)
CLVGVRNYGGSQGNLIF

SEQ ID NO: 47034 - protein, 12 aa, Homo sapiens
  CDR3 for beta chain variable domain of TCR clone 23517 (TRBV20-1, TRBJ2-1)
CSAQYTYNEQFF

SEQ ID NO: 47035 - protein, 13 aa, Homo sapiens
  CDR3 for alpha chain variable domain of TCR clone 23518 (TRAV36/DV7, TRAJ37)
CAVFSSNTGKLIF

SEQ ID NO: 47036 - protein, 16 aa, Homo sapiens
  CDR3 for beta chain variable domain of TCR clone 23518 (TRBV19, TRBJ2-1)
CASSKAGPSSYNEQFF

SEQ ID NO: 47037 - protein, 13 aa, Homo sapiens
  CDR3 for alpha chain variable domain of TCR clone 23519 (TRAV13-1, TRAJ5)
CAASDTCRRALTF

SEQ ID NO: 47038 - protein, 12 aa, Homo sapiens
  CDR3 for beta chain variable domain of TCR clone 23519 (TRBV28, TRBJ2-3)
CASSLYRDTQYF

SEQ ID NO: 47039 - protein, 18 aa, Homo sapiens
  CDR3 for alpha chain variable domain of TCR clone 23520 (TRAV13-1, TRAJ52)
CAASKRSAGGTSYGKLTF

SEQ ID NO: 47040 - protein, 14 aa, Homo sapiens
  CDR3 for beta chain variable domain of TCR clone 23520 (TRBV5-8, TRBJ2-3)
CASSLGQGTDTQYF

SEQ ID NO: 47041 - protein, 11 aa, Homo sapiens
  CDR3 for alpha chain variable domain of TCR clone 23521 (TRAV1-2, TRAJ40)
CAVPGTYEYIF

SEQ ID NO: 47042 - protein, 16 aa, Homo sapiens
  CDR3 for beta chain variable domain of TCR clone 23521 (TRBV29-1, TRBJ2-7)
CSVEVVGTSGSYEQYF

SEQ ID NO: 47043 - protein, 15 aa, Homo sapiens
  CDR3 for alpha chain variable domain of TCR clone 23522 (TRAV14/DV4, TRAJ10)
CAMRELTGGGNKLTF

SEQ ID NO: 47044 - protein, 18 aa, Homo sapiens
  CDR3 for beta chain variable domain of TCR clone 23522 (TRBV7-9, TRBJ2-7)
CASSLTTSGSRTWYGQYF

SEQ ID NO: 47045 - protein, 15 aa, Homo sapiens
  CDR3 for alpha chain variable domain of TCR clone 23523 (TRAV25, TRAJ52)
CAGRPGGTSYGKLTF

SEQ ID NO: 47046 - protein, 13 aa, Homo sapiens
  CDR3 for beta chain variable domain of TCR clone 23523 (TRBV7-9, TRBJ1-2)
CASSLKQNYGYTF

SEQ ID NO: 47047 - protein, 14 aa, Homo sapiens
  CDR3 for alpha chain variable domain of TCR clone 23524 (TRAV29/DV5, TRAJ45)
CAASFRGGADGLTI

SEQ ID NO: 47048 - protein, 11 aa, Homo sapiens
  CDR3 for beta chain variable domain of TCR clone 23524 (TRBV11-2, TRBJ2-2)
CASSLPGELFF

SEQ ID NO: 47049 - protein, 12 aa, Homo sapiens
  CDR3 for alpha chain variable domain of TCR clone 23525 (TRAV12-1, TRAJ40)
CVVYSGTYKYIF

SEQ ID NO: 47050 - protein, 13 aa, Homo sapiens
  CDR3 for beta chain variable domain of TCR clone 23525 (TRBV27, TRBJ1-1)
CASSLSIGAEAFF

SEQ ID NO: 47051 - protein, 14 aa, Homo sapiens
  CDR3 for alpha chain variable domain of TCR clone 23526 (TRAV12-3, TRAJ10)
SHLPLTGGGNKLTF

SEQ ID NO: 47052 - protein, 14 aa, Homo sapiens
  CDR3 for beta chain variable domain of TCR clone 23526 (TRBV6-1, TRBJ1-3)
CASVQGGGGSTIYF

SEQ ID NO: 47053 - protein, 18 aa, Homo sapiens
  CDR3 for alpha chain variable domain of TCR clone 23527 (TRAV29/DV5, TRAJ52)
CAAGFRGAGGTSYGKLTF

SEQ ID NO: 47054 - protein, 14 aa, Homo sapiens
  CDR3 for beta chain variable domain of TCR clone 23527 (TRBV27, TRBJ2-2)
CASRPGVNTGELFF

SEQ ID NO: 47055 - protein, 17 aa, Homo sapiens
  CDR3 for alpha chain variable domain of TCR clone 23528 (TRAV23/DV6, TRAJ57)
CAASSTLSQGGSEKLVF

SEQ ID NO: 47056 - protein, 14 aa, Homo sapiens
  CDR3 for beta chain variable domain of TCR clone 23528 (TRBV12-5, TRBJ2-5)
CASGSRTHQETQYF

SEQ ID NO: 47057 - protein, 21 aa, Homo sapiens
  CDR3 for alpha chain variable domain of TCR clone 23529 (TRAV1-1, TRAJ6)
CLLLLRCEGLERTGGSYIPTF

SEQ ID NO: 47058 - protein, 13 aa, Homo sapiens
  CDR3 for beta chain variable domain of TCR clone 23529 (TRBV10-2, TRBJ2-7)
CASGASGGYEQYF

SEQ ID NO: 47059 - protein, 14 aa, Homo sapiens
  CDR3 for alpha chain variable domain of TCR clone 23530 (TRAV13-1, TRAJ35)
CAASKRGFGNVLHC

SEQ ID NO: 47060 - protein, 13 aa, Homo sapiens
  CDR3 for beta chain variable domain of TCR clone 23530 (TRBV7-3, TRBJ1-1)
CASSQDWGAEAFF

SEQ ID NO: 47061 - protein, 15 aa, Homo sapiens
  CDR3 for alpha chain variable domain of TCR clone 23531 (TRAV8-3, TRAJ45)
CASSYSGGGADGLTF

SEQ ID NO: 47062 - protein, 13 aa, Homo sapiens
  CDR3 for beta chain variable domain of TCR clone 23531 (TRBV10-3, TRBJ2-7)
CASKLAVNYEQFF

SEQ ID NO: 47063 - protein, 12 aa, Homo sapiens
  CDR3 for alpha chain variable domain of TCR clone 23532 (TRAV21, TRAJ33)
CAKMDSNYQLIW

SEQ ID NO: 47064 - protein, 14 aa, Homo sapiens
  CDR3 for beta chain variable domain of TCR clone 23532 (TRBV2, TRBJ2-7)
CASSLTSGGYEHYF

SEQ ID NO: 47065 - protein, 14 aa, Homo sapiens
  CDR3 for alpha chain variable domain of TCR clone 23533 (TRAV1-2, TRAJ16)
CAVNRFSDGQKLLF

SEQ ID NO: 47066 - protein, 13 aa, Homo sapiens
  CDR3 for beta chain variable domain of TCR clone 23533 (TRBV7-8, TRBJ2-7)
CASSLTGGREQYF

SEQ ID NO: 47067 - protein, 14 aa, Homo sapiens
  CDR3 for alpha chain variable domain of TCR clone 23534 (TRAV29/DV5, TRAJ45)
CAASFRGGADGLTF

SEQ ID NO: 47068 - protein, 11 aa, Homo sapiens
  CDR3 for beta chain variable domain of TCR clone 23534 (TRBV11-2, TRBJ2-2)
CASSLPRELFF

SEQ ID NO: 47069 - protein, 14 aa, Homo sapiens
  CDR3 for alpha chain variable domain of TCR clone 23535 (TRAV12-3, TRAJ9)
CAMSPNTGGFKTIF

SEQ ID NO: 47070 - protein, 12 aa, Homo sapiens
  CDR3 for beta chain variable domain of TCR clone 23535 (TRBV19, TRBJ1-5)
CASSIALQPQHF

SEQ ID NO: 47071 - protein, 14 aa, Homo sapiens
  CDR3 for alpha chain variable domain of TCR clone 23536 (TRAV1-2, TRAJ16)
CAVNRFSDGQKLLF

SEQ ID NO: 47072 - protein, 15 aa, Homo sapiens
  CDR3 for beta chain variable domain of TCR clone 23536 (TRBV9, TRBJ1-6)
CASSVAGTGDSLLHF

SEQ ID NO: 47073 - protein, 14 aa, Homo sapiens
  CDR3 for alpha chain variable domain of TCR clone 23537 (TRAV1-2, TRAJ16)
CAVNRFSDGQKLLF

SEQ ID NO: 47074 - protein, 15 aa, Homo sapiens
  CDR3 for beta chain variable domain of TCR clone 23537 (TRBV6-4, TRBJ2-1)
CASSDSTGGYNEQFF

SEQ ID NO: 47075 - protein, 14 aa, Homo sapiens
  CDR3 for alpha chain variable domain of TCR clone 23538 (TRAV1-1, TRAJ27)
CAVIDNTNAGKSTF

SEQ ID NO: 47076 - protein, 15 aa, Homo sapiens
  CDR3 for beta chain variable domain of TCR clone 23538 (TRBV7-2, TRBJ2-1)
CASSSGLAGGNEQFF

SEQ ID NO: 47077 - protein, 13 aa, Homo sapiens
  CDR3 for alpha chain variable domain of TCR clone 23539 (TRAV13-1, TRAJ5)
CAARVTGRRALTF

SEQ ID NO: 47078 - protein, 15 aa, Homo sapiens
  CDR3 for beta chain variable domain of TCR clone 23539 (TRBV7-9, TRBJ2-7)
CASSPGGGVTYEQYF

SEQ ID NO: 47079 - protein, 14 aa, Homo sapiens
  CDR3 for alpha chain variable domain of TCR clone 23540 (TRAV12-2, TRAJ5)
CAVNRSTGRRALTF

SEQ ID NO: 47080 - protein, 12 aa, Homo sapiens
  CDR3 for beta chain variable domain of TCR clone 23540 (TRBV19, TRBJ1-5)
CASSMAQQPQHF

SEQ ID NO: 47081 - protein, 12 aa, Homo sapiens
  CDR3 for alpha chain variable domain of TCR clone 23541 (TRAV17, TRAJ57)
CATDVGSEKLVF

SEQ ID NO: 47082 - protein, 13 aa, Homo sapiens
  CDR3 for beta chain variable domain of TCR clone 23541 (TRBV7-9, TRBJ2-7)
CASSFAGAYEQYF

SEQ ID NO: 47083 - protein, 14 aa, Homo sapiens
  CDR3 for alpha chain variable domain of TCR clone 23542 (TRAV26-1, TRAJ45)
CIEVTGGGADGLTF

SEQ ID NO: 47084 - protein, 13 aa, Homo sapiens
  CDR3 for beta chain variable domain of TCR clone 23542 (TRBV7-6, TRBJ1-2)
CASGLVADYGYTF

SEQ ID NO: 47085 - protein, 15 aa, Homo sapiens
  CDR3 for alpha chain variable domain of TCR clone 23543 (TRAV38-1, TRAJ37)
CAFIFGSGNPGKLIF

SEQ ID NO: 47086 - protein, 12 aa, Homo sapiens
  CDR3 for beta chain variable domain of TCR clone 23543 (TRBV7-9, TRBJ2-7)
CASSLEGYEQYF

SEQ ID NO: 47087 - protein, 13 aa, Homo sapiens
  CDR3 for alpha chain variable domain of TCR clone 23544 (TRAV26-2, TRAJ43)
CILRAVNNNDMRF

SEQ ID NO: 47088 - protein, 15 aa, Homo sapiens
  CDR3 for beta chain variable domain of TCR clone 23544 (TRBV7-2, TRBJ2-1)
CASTHGTGIHNEQFF

SEQ ID NO: 47089 - protein, 13 aa, Homo sapiens
  CDR3 for alpha chain variable domain of TCR clone 23545 (TRAV13-1, TRAJ6)
CAASKGGSYMPTF

SEQ ID NO: 47090 - protein, 14 aa, Homo sapiens
  CDR3 for beta chain variable domain of TCR clone 23545 (TRBV7-2, TRBJ2-1)
CASSLGVGYNEQFF

SEQ ID NO: 47091 - protein, 11 aa, Homo sapiens
  CDR3 for alpha chain variable domain of TCR clone 23546 (TRAV23/DV6, TRAJ4)
APAGVYNKLIF

SEQ ID NO: 47092 - protein, 17 aa, Homo sapiens
  CDR3 for beta chain variable domain of TCR clone 23546 (TRBV20-1, TRBJ2-1)
CSAPDRGAGVAYNEQFF

SEQ ID NO: 47093 - protein, 18 aa, Homo sapiens
  CDR3 for alpha chain variable domain of TCR clone 23547 (TRAV12-3, TRAJ52)
CAMSVGGASGTSYGKLTF

SEQ ID NO: 47094 - protein, 15 aa, Homo sapiens
  CDR3 for beta chain variable domain of TCR clone 23547 (TRBV27, TRBJ1-6)
CASSFDRGLGSPLHF

SEQ ID NO: 47095 - protein, 11 aa, Homo sapiens
  CDR3 for alpha chain variable domain of TCR clone 23548 (TRAV27, TRAJ47)
SIVEYGSKLVF

SEQ ID NO: 47096 - protein, 18 aa, Homo sapiens
  CDR3 for beta chain variable domain of TCR clone 23548 (TRBV2, TRBJ2-1)
CASRGLAGGPRTYNEQFF

SEQ ID NO: 47097 - protein, 13 aa, Homo sapiens
  CDR3 for alpha chain variable domain of TCR clone 23549 (TRAV21, TRAJ57)
CAVTQGGSEKLVF

SEQ ID NO: 47098 - protein, 15 aa, Homo sapiens
  CDR3 for beta chain variable domain of TCR clone 23549 (TRBV20-1, TRBJ2-7)
CSARDRVSGMDEQYF

SEQ ID NO: 47099 - protein, 11 aa, Homo sapiens
  CDR3 for alpha chain variable domain of TCR clone 23550 (TRAV13-1, TRAJ34)
CAASKADKLIF

SEQ ID NO: 47100 - protein, 15 aa, Homo sapiens
  CDR3 for beta chain variable domain of TCR clone 23550 (TRBV5-4, TRBJ2-5)
CASSLAGGAKETQYF

SEQ ID NO: 47101 - protein, 14 aa, Homo sapiens
  CDR3 for alpha chain variable domain of TCR clone 23551 (TRAV8-3, TRAJ9)
CAVVCNTGGFKTIF

SEQ ID NO: 47102 - protein, 14 aa, Homo sapiens
  CDR3 for beta chain variable domain of TCR clone 23551 (TRBV7-3, TRBJ2-2)
CASSSGGYTGELFF

SEQ ID NO: 47103 - protein, 11 aa, Homo sapiens
  CDR3 for alpha chain variable domain of TCR clone 23552 (TRAV26-1, TRAJ27)
CIDPNASKSTF

SEQ ID NO: 47104 - protein, 18 aa, Homo sapiens
  CDR3 for beta chain variable domain of TCR clone 23552 (TRBV7-9, TRBJ2-6)
CASSFPGAGISGANVLTF

SEQ ID NO: 47105 - protein, 14 aa, Homo sapiens
  CDR3 for alpha chain variable domain of TCR clone 23553 (TRAV12-1, TRAJ12)
CVVTRMDSSYNLIF

SEQ ID NO: 47106 - protein, 13 aa, Homo sapiens
  CDR3 for beta chain variable domain of TCR clone 23553 (TRBV20-1, TRBJ1-1)
CSARGGGNTEAFF

SEQ ID NO: 47107 - protein, 11 aa, Homo sapiens
  CDR3 for alpha chain variable domain of TCR clone 23554 (TRAV12-1, TRAJ30)
CVVNGQDKIIF

SEQ ID NO: 47108 - protein, 12 aa, Homo sapiens
  CDR3 for beta chain variable domain of TCR clone 23554 (TRBV27, TRBJ2-2)
CASKLCTGELFF

SEQ ID NO: 47109 - protein, 18 aa, Homo sapiens
  CDR3 for alpha chain variable domain of TCR clone 23555 (TRAV13-1, TRAJ52)
CAASKRSAGGTSYGKLTF

SEQ ID NO: 47110 - protein, 14 aa, Homo sapiens
  CDR3 for beta chain variable domain of TCR clone 23555 (TRBV7-6, TRBJ2-3)
CASSLGTVTDTQYF

SEQ ID NO: 47111 - protein, 14 aa, Homo sapiens
  CDR3 for alpha chain variable domain of TCR clone 23556 (TRAV27, )
CADIQNPDPAVYQL

SEQ ID NO: 47112 - protein, 13 aa, Homo sapiens
  CDR3 for beta chain variable domain of TCR clone 23556 (TRBV28, TRBJ2-5)
CASSSRNQETQYF

SEQ ID NO: 47113 - protein, 14 aa, Homo sapiens
  CDR3 for alpha chain variable domain of TCR clone 23557 (TRAV26-1, TRAJ34)
CIVRVAYNTDKLIF

SEQ ID NO: 47114 - protein, 13 aa, Homo sapiens
  CDR3 for beta chain variable domain of TCR clone 23557 (TRBV7-3, TRBJ2-1)
CASSLDSYNEHFF

SEQ ID NO: 47115 - protein, 15 aa, Homo sapiens
  CDR3 for alpha chain variable domain of TCR clone 23558 (TRAV26-1, TRAJ56)
CIVRVDNGANSKLTF

SEQ ID NO: 47116 - protein, 15 aa, Homo sapiens
  CDR3 for beta chain variable domain of TCR clone 23558 (TRBV20-1, TRBJ2-7)
CSARDPTEVGHERYF

SEQ ID NO: 47117 - protein, 14 aa, Homo sapiens
  CDR3 for alpha chain variable domain of TCR clone 23559 (TRAV1-2, TRAJ16)
CAVNRFSDGQKLLF

SEQ ID NO: 47118 - protein, 13 aa, Homo sapiens
  CDR3 for beta chain variable domain of TCR clone 23559 (TRBV7-9, TRBJ1-2)
CASSLKQNYGYSF

SEQ ID NO: 47119 - protein, 12 aa, Homo sapiens
  CDR3 for alpha chain variable domain of TCR clone 23560 (TRAV6, TRAJ9)
CALHTGGFKTIF

SEQ ID NO: 47120 - protein, 14 aa, Homo sapiens
  CDR3 for beta chain variable domain of TCR clone 23560 (TRBV7-9, TRBJ2-1)
CASSQGQAEAKQFF

SEQ ID NO: 47121 - protein, 14 aa, Homo sapiens
  CDR3 for alpha chain variable domain of TCR clone 23561 (TRAV26-1, TRAJ45)
CIEVTGGGADGLTF

SEQ ID NO: 47122 - protein, 13 aa, Homo sapiens
  CDR3 for beta chain variable domain of TCR clone 23561 (TRBV7-6, TRBJ1-2)
CASSLVAGYGYTF

SEQ ID NO: 47123 - protein, 11 aa, Homo sapiens
  CDR3 for alpha chain variable domain of TCR clone 23562 (TRAV1-2, TRAJ40)
CAVPGTSKYIF

SEQ ID NO: 47124 - protein, 16 aa, Homo sapiens
  CDR3 for beta chain variable domain of TCR clone 23562 (TRBV29-1, TRBJ2-7)
CSVEVVGTSGSYEQYF

SEQ ID NO: 47125 - protein, 12 aa, Homo sapiens
  CDR3 for alpha chain variable domain of TCR clone 23563 (TRAV12-3, TRAJ5)
CAMGTGRRALTF

SEQ ID NO: 47126 - protein, 13 aa, Homo sapiens
  CDR3 for beta chain variable domain of TCR clone 23563 (TRBV7-7, TRBJ2-2)
CASSLTSAGELFF

SEQ ID NO: 47127 - protein, 13 aa, Homo sapiens
  CDR3 for alpha chain variable domain of TCR clone 23564 (TRAV13-1, TRAJ21)
CAASIYNFNKFYF

SEQ ID NO: 47128 - protein, 13 aa, Homo sapiens
  CDR3 for beta chain variable domain of TCR clone 23564 (TRBV27, TRBJ1-4)
CASSLVGDEKLFF

SEQ ID NO: 47129 - protein, 13 aa, Homo sapiens
  CDR3 for alpha chain variable domain of TCR clone 23565 (TRAV13-1, TRAJ40)
CAAISPGTYKYIF

SEQ ID NO: 47130 - protein, 15 aa, Homo sapiens
  CDR3 for beta chain variable domain of TCR clone 23565 (TRBV9, TRBJ1-6)
CASSVAGTGDSPLHF

SEQ ID NO: 47131 - protein, 14 aa, Homo sapiens
  CDR3 for alpha chain variable domain of TCR clone 23566 (TRAV12-2, TRAJ13)
CAVKKSGGYQKVTF

SEQ ID NO: 47132 - protein, 15 aa, Homo sapiens
  CDR3 for beta chain variable domain of TCR clone 23566 (TRBV27, TRBJ2-1)
CASSNGGGSSNEQFF

SEQ ID NO: 47133 - protein, 14 aa, Homo sapiens
  CDR3 for alpha chain variable domain of TCR clone 23567 (TRAV1-2, TRAJ16)
CAVNRFSDGQKLLF

SEQ ID NO: 47134 - protein, 13 aa, Homo sapiens
  CDR3 for beta chain variable domain of TCR clone 23567 (TRBV6-4, TRBJ1-5)
CASSADLNQPQHF

SEQ ID NO: 47135 - protein, 13 aa, Homo sapiens
  CDR3 for alpha chain variable domain of TCR clone 23568 (TRAV27, TRAJ17)
CAGAATAGNKITF

SEQ ID NO: 47136 - protein, 15 aa, Homo sapiens
  CDR3 for beta chain variable domain of TCR clone 23568 (TRBV5-1, TRBJ2-3)
CASRNQAGSTDTQYF

SEQ ID NO: 47137 - protein, 14 aa, Homo sapiens
  CDR3 for alpha chain variable domain of TCR clone 23569 (TRAV2, TRAJ37)
CAVDFTSNSGKLIF

SEQ ID NO: 47138 - protein, 15 aa, Homo sapiens
  CDR3 for beta chain variable domain of TCR clone 23569 (TRBV20-1, TRBJ1-1)
CSASRGVTGNTEAFF

SEQ ID NO: 47139 - protein, 15 aa, Homo sapiens
  CDR3 for alpha chain variable domain of TCR clone 23570 (TRAV3, TRAJ5)
CAVRDLDTGRRALTF

SEQ ID NO: 47140 - protein, 16 aa, Homo sapiens
  CDR3 for beta chain variable domain of TCR clone 23570 (TRBV7-3, TRBJ2-2)
CASSLKRGTLSGELFF

SEQ ID NO: 47141 - protein, 14 aa, Homo sapiens
  CDR3 for alpha chain variable domain of TCR clone 23571 (TRAV26-1, TRAJ45)
CIVRVVRGADGLTF

SEQ ID NO: 47142 - protein, 16 aa, Homo sapiens
  CDR3 for beta chain variable domain of TCR clone 23571 (TRBV7-9, TRBJ1-1)
CASSLTQVRSNTEAFF

SEQ ID NO: 47143 - protein, 10 aa, Homo sapiens
  CDR3 for alpha chain variable domain of TCR clone 23572 (TRAV1-2, TRAJ31)
CVSEDARLMF

SEQ ID NO: 47144 - protein, 14 aa, Homo sapiens
  CDR3 for beta chain variable domain of TCR clone 23572 (TRBV19, TRBJ2-1)
CASPTFVLSGEQSF

SEQ ID NO: 47145 - protein, 12 aa, Homo sapiens
  CDR3 for alpha chain variable domain of TCR clone 23573 (TRAV30, TRAJ43)
CGTEERGNDMRF

SEQ ID NO: 47146 - protein, 14 aa, Homo sapiens
  CDR3 for beta chain variable domain of TCR clone 23573 (TRBV7-2, TRBJ2-7)
RASSPKTSFYEQYF

SEQ ID NO: 47147 - protein, 15 aa, Homo sapiens
  CDR3 for alpha chain variable domain of TCR clone 23574 (TRAV26-1, TRAJ40)
CIVRVTTSGTYKYIF

SEQ ID NO: 47148 - protein, 12 aa, Homo sapiens
  CDR3 for beta chain variable domain of TCR clone 23574 (TRBV7-9, TRBJ1-4)
CASSTDREKLFL

SEQ ID NO: 47149 - protein, 17 aa, Homo sapiens
  CDR3 for alpha chain variable domain of TCR clone 23575 (TRAV3, TRAJ6)
CAVRDGPRAGGSYIPTF

SEQ ID NO: 47150 - protein, 14 aa, Homo sapiens
  CDR3 for beta chain variable domain of TCR clone 23575 (TRBV20-1, TRBJ1-1)
CSAQTRIGGTEAFF

SEQ ID NO: 47151 - protein, 14 aa, Homo sapiens
  CDR3 for alpha chain variable domain of TCR clone 23576 (TRAV16, TRAJ39)
CALSKNNAGNMLTF

SEQ ID NO: 47152 - protein, 15 aa, Homo sapiens
  CDR3 for beta chain variable domain of TCR clone 23576 (TRBV23-1, TRBJ1-2)
CASSNTGGGLLWLHL

SEQ ID NO: 47153 - protein, 14 aa, Homo sapiens
  CDR3 for alpha chain variable domain of TCR clone 23577 (TRAV12-3, TRAJ41)
CAMSAGNSGYALNF

SEQ ID NO: 47154 - protein, 11 aa, Homo sapiens
  CDR3 for beta chain variable domain of TCR clone 23577 (TRBV7-2, TRBJ2-3)
CASSASDTQYF

SEQ ID NO: 47155 - protein, 13 aa, Homo sapiens
  CDR3 for alpha chain variable domain of TCR clone 23578 (TRAV35, TRAJ42)
CAGFPGSQGNLTF

SEQ ID NO: 47156 - protein, 14 aa, Homo sapiens
  CDR3 for beta chain variable domain of TCR clone 23578 (TRBV19, TRBJ2-1)
CASPTFVLSGEQFF

SEQ ID NO: 47157 - protein, 15 aa, Homo sapiens
  CDR3 for alpha chain variable domain of TCR clone 23579 (TRAV26-1, TRAJ29)
CIVRVEGSGNTPLVF

SEQ ID NO: 47158 - protein, 14 aa, Homo sapiens
  CDR3 for beta chain variable domain of TCR clone 23579 (TRBV7-2, TRBJ2-7)
CASRSQGAAYEQYF

SEQ ID NO: 47159 - protein, 15 aa, Homo sapiens
  CDR3 for alpha chain variable domain of TCR clone 23580 (TRAV8-3, TRAJ6)
CAVGPLGGGGYIPTF

SEQ ID NO: 47160 - protein, 14 aa, Homo sapiens
  CDR3 for beta chain variable domain of TCR clone 23580 (TRBV19, TRBJ2-2)
CASSTGQGAGELFF

SEQ ID NO: 47161 - protein, 13 aa, Homo sapiens
  CDR3 for alpha chain variable domain of TCR clone 23581 (TRAV2, TRAJ40)
CAVVTSGNYKYIF

SEQ ID NO: 47162 - protein, 15 aa, Homo sapiens
  CDR3 for beta chain variable domain of TCR clone 23581 (TRBV11-3, TRBJ2-3)
CASLKDGREGDTQYF

SEQ ID NO: 47163 - protein, 10 aa, Homo sapiens
  CDR3 for alpha chain variable domain of TCR clone 23582 (TRAV23/DV6, TRAJ57)
CAASSTLSQG

SEQ ID NO: 47164 - protein, 14 aa, Homo sapiens
  CDR3 for beta chain variable domain of TCR clone 23582 (TRBV25-1, TRBJ1-1)
CASTHMGGNTEAFF

SEQ ID NO: 47165 - protein, 13 aa, Homo sapiens
  CDR3 for alpha chain variable domain of TCR clone 23583 (TRAV2, TRAJ40)
CAVVTSGTYKYNF

SEQ ID NO: 47166 - protein, 15 aa, Homo sapiens
  CDR3 for beta chain variable domain of TCR clone 23583 (TRBV11-3, TRBJ2-3)
CASLKDGREGDTQYF

SEQ ID NO: 47167 - protein, 14 aa, Homo sapiens
  CDR3 for alpha chain variable domain of TCR clone 23584 (TRAV35, TRAJ22)
CTGLRPGSARQLTF

SEQ ID NO: 47168 - protein, 15 aa, Homo sapiens
  CDR3 for beta chain variable domain of TCR clone 23584 (TRBV12-4, TRBJ2-5)
CASSPPTGLQETQYF

SEQ ID NO: 47169 - protein, 13 aa, Homo sapiens
  CDR3 for alpha chain variable domain of TCR clone 23585 (TRAV1-2, TRAJ9)
CAAFNTGGFKTIF

SEQ ID NO: 47170 - protein, 13 aa, Homo sapiens
  CDR3 for beta chain variable domain of TCR clone 23585 (TRBV19, TRBJ1-2)
CASSVPGQDGYTF

SEQ ID NO: 47171 - protein, 13 aa, Homo sapiens
  CDR3 for alpha chain variable domain of TCR clone 23586 (TRAV13-1, TRAJ21)
CAASIFNFNKFYF

SEQ ID NO: 47172 - protein, 16 aa, Homo sapiens
  CDR3 for beta chain variable domain of TCR clone 23586 (TRBV20-1, TRBJ1-4)
CSAPGQGLLTNEKLFF

SEQ ID NO: 47173 - protein, 12 aa, Homo sapiens
  CDR3 for alpha chain variable domain of TCR clone 23587 (TRAV3, TRAJ43)
CAVRDPNNDMRF

SEQ ID NO: 47174 - protein, 12 aa, Homo sapiens
  CDR3 for beta chain variable domain of TCR clone 23587 (TRBV6-3, TRBJ2-3)
CASRAGGRTQYF

SEQ ID NO: 47175 - protein, 13 aa, Homo sapiens
  CDR3 for alpha chain variable domain of TCR clone 23588 (TRAV8-3, TRAJ28)
CAVGAVGSYQLTF

SEQ ID NO: 47176 - protein, 13 aa, Homo sapiens
  CDR3 for beta chain variable domain of TCR clone 23588 (TRBV10-3, TRBJ2-7)
CASKLAVNYEQYF

SEQ ID NO: 47177 - protein, 21 aa, Homo sapiens
  CDR3 for alpha chain variable domain of TCR clone 23589 (TRAV8-3, TRAJ32)
CAVEVVLQTSSSLELALCLLP

SEQ ID NO: 47178 - protein, 15 aa, Homo sapiens
  CDR3 for beta chain variable domain of TCR clone 23589 (TRBV7-2, TRBJ2-1)
CASSSRTSREDEQFF

SEQ ID NO: 47179 - protein, 18 aa, Homo sapiens
  CDR3 for alpha chain variable domain of TCR clone 23590 (TRAV12-3, TRAJ52)
CAMSVGGAGGTSYGKLTF

SEQ ID NO: 47180 - protein, 15 aa, Homo sapiens
  CDR3 for beta chain variable domain of TCR clone 23590 (TRBV27, TRBJ1-6)
CASSLDRGLGSPLHF

SEQ ID NO: 47181 - protein, 14 aa, Homo sapiens
  CDR3 for alpha chain variable domain of TCR clone 23591 (TRAV12-3, TRAJ10)
SHLPLTGGGNKLTF

SEQ ID NO: 47182 - protein, 13 aa, Homo sapiens
  CDR3 for beta chain variable domain of TCR clone 23591 (TRBV5-5, TRBJ1-2)
CASSFWRGEDYTF

SEQ ID NO: 47183 - protein, 15 aa, Homo sapiens
  CDR3 for alpha chain variable domain of TCR clone 23592 (TRAV27, TRAJ38)
CAGRFNAGNNRKRIW

SEQ ID NO: 47184 - protein, 13 aa, Homo sapiens
  CDR3 for beta chain variable domain of TCR clone 23592 (TRBV12-5, TRBJ2-3)
CASQNRGTDTQYF

SEQ ID NO: 47185 - protein, 13 aa, Homo sapiens
  CDR3 for alpha chain variable domain of TCR clone 23593 (TRAV9-2, TRAJ49)
CALIQIGGNQFYF

SEQ ID NO: 47186 - protein, 17 aa, Homo sapiens
  CDR3 for beta chain variable domain of TCR clone 23593 (TRBV7-8, TRBJ2-6)
CASSAGTGGAGANVLTF

SEQ ID NO: 47187 - protein, 16 aa, Homo sapiens
  CDR3 for alpha chain variable domain of TCR clone 23594 (TRAV30, TRAJ24)
RGTEIVDADSWGKFQF

SEQ ID NO: 47188 - protein, 18 aa, Homo sapiens
  CDR3 for beta chain variable domain of TCR clone 23594 (TRBV7-9, TRBJ2-7)
CASSLTTSGSRTWYEQYF

SEQ ID NO: 47189 - protein, 15 aa, Homo sapiens
  CDR3 for alpha chain variable domain of TCR clone 23595 (TRAV2, TRAJ9)
CAVEDRGTGVFKTIF

SEQ ID NO: 47190 - protein, 13 aa, Homo sapiens
  CDR3 for beta chain variable domain of TCR clone 23595 (TRBV19, TRBJ1-2)
CASSVPGQDGYTF

SEQ ID NO: 47191 - protein, 15 aa, Homo sapiens
  CDR3 for alpha chain variable domain of TCR clone 23596 (TRAV12-3, TRAJ6)
CAMSATSGGSYIPTF

SEQ ID NO: 47192 - protein, 13 aa, Homo sapiens
  CDR3 for beta chain variable domain of TCR clone 23596 (TRBV7-9, TRBJ1-2)
CASSLKQNYGYTL

SEQ ID NO: 47193 - protein, 11 aa, Homo sapiens
  CDR3 for alpha chain variable domain of TCR clone 23597 (TRAV2, TRAJ23)
CAVETRGKLIF

SEQ ID NO: 47194 - protein, 17 aa, Homo sapiens
  CDR3 for beta chain variable domain of TCR clone 23597 (TRBV20-1, TRBJ2-1)
CSASSSGLAGSHNEQFF

SEQ ID NO: 47195 - protein, 15 aa, Homo sapiens
  CDR3 for alpha chain variable domain of TCR clone 23598 (TRAV29/DV5, TRAJ29)
CAVSERSSGNTPLVF

SEQ ID NO: 47196 - protein, 17 aa, Homo sapiens
  CDR3 for beta chain variable domain of TCR clone 23598 (TRBV4-1, TRBJ1-4)
CASSQEGPRGVEEKLFF

SEQ ID NO: 47197 - protein, 13 aa, Homo sapiens
  CDR3 for alpha chain variable domain of TCR clone 23599 (TRAV12-1, TRAJ39)
CVVPQRAGNMLTF

SEQ ID NO: 47198 - protein, 13 aa, Homo sapiens
  CDR3 for beta chain variable domain of TCR clone 23599 (TRBV27, TRBJ1-1)
CASSLSIGAEAFF

SEQ ID NO: 47199 - protein, 14 aa, Homo sapiens
  CDR3 for alpha chain variable domain of TCR clone 23600 (TRAV12-2, TRAJ13)
CAVKKTGGYQKVTY

SEQ ID NO: 47200 - protein, 15 aa, Homo sapiens
  CDR3 for beta chain variable domain of TCR clone 23600 (TRBV27, TRBJ2-1)
CASSNGGGSSNEQFF

SEQ ID NO: 47201 - protein, 11 aa, Homo sapiens
  CDR3 for alpha chain variable domain of TCR clone 23601 (TRAV1-2, TRAJ20)
CAVANYYKLSF

SEQ ID NO: 47202 - protein, 18 aa, Homo sapiens
  CDR3 for beta chain variable domain of TCR clone 23601 (TRBV20-1, TRBJ2-6)
CSAETTPTHGSGANVLTF

SEQ ID NO: 47203 - protein, 12 aa, Homo sapiens
  CDR3 for alpha chain variable domain of TCR clone 23602 (TRAV12-3, TRAJ40)
CAVSSGTYKYIF

SEQ ID NO: 47204 - protein, 15 aa, Homo sapiens
  CDR3 for beta chain variable domain of TCR clone 23602 (TRBV7-9, TRBJ2-7)
CASSPGGGLTYDQYF

SEQ ID NO: 47205 - protein, 16 aa, Homo sapiens
  CDR3 for alpha chain variable domain of TCR clone 23603 (TRAV23/DV6, TRAJ9)
CAASIGGNTGGFKTIF

SEQ ID NO: 47206 - protein, 14 aa, Homo sapiens
  CDR3 for beta chain variable domain of TCR clone 23603 (TRBV9, TRBJ2-7)
CASSVGVGSYEQYL

SEQ ID NO: 47207 - protein, 12 aa, Homo sapiens
  CDR3 for alpha chain variable domain of TCR clone 23604 (TRAV12-2, TRAJ44)
CADTGTASELTF

SEQ ID NO: 47208 - protein, 17 aa, Homo sapiens
  CDR3 for beta chain variable domain of TCR clone 23604 (TRBV20-1, TRBJ1-1)
CSARGTGGSYGNTGAFF

SEQ ID NO: 47209 - protein, 13 aa, Homo sapiens
  CDR3 for alpha chain variable domain of TCR clone 23605 (TRAV26-2, TRAJ43)
CILRAVNNNDMRF

SEQ ID NO: 47210 - protein, 15 aa, Homo sapiens
  CDR3 for beta chain variable domain of TCR clone 23605 (TRBV7-2, TRBJ2-1)
CASTHGTGTYNEQFF

SEQ ID NO: 47211 - protein, 15 aa, Homo sapiens
  CDR3 for alpha chain variable domain of TCR clone 23606 (TRAV8-3, TRAJ27)
CAVGPSKTNAGKSTF

SEQ ID NO: 47212 - protein, 15 aa, Homo sapiens
  CDR3 for beta chain variable domain of TCR clone 23606 (TRBV7-2, TRBJ2-1)
CASRSGLAGGNEQFF

SEQ ID NO: 47213 - protein, 14 aa, Homo sapiens
  CDR3 for alpha chain variable domain of TCR clone 23607 (TRAV1-2, TRAJ16)
CAVNRFSDGQKLLF

SEQ ID NO: 47214 - protein, 14 aa, Homo sapiens
  CDR3 for beta chain variable domain of TCR clone 23607 (TRBV7-9, TRBJ1-2)
CASSRQGANYGYTF

SEQ ID NO: 47215 - protein, 12 aa, Homo sapiens
  CDR3 for alpha chain variable domain of TCR clone 23608 (TRAV8-3, TRAJ26)
CAGDNYGQNFVF

SEQ ID NO: 47216 - protein, 17 aa, Homo sapiens
  CDR3 for beta chain variable domain of TCR clone 23608 (TRBV11-2, TRBJ2-1)
CASSLYPPGVEYNEQFF

SEQ ID NO: 47217 - protein, 13 aa, Homo sapiens
  CDR3 for alpha chain variable domain of TCR clone 23609 (TRAV8-3, TRAJ28)
CAVGAVGSYQLTF

SEQ ID NO: 47218 - protein, 14 aa, Homo sapiens
  CDR3 for beta chain variable domain of TCR clone 23609 (TRBV7-2, TRBJ2-7)
CASRSQGAAYEQYV

SEQ ID NO: 47219 - protein, 11 aa, Homo sapiens
  CDR3 for alpha chain variable domain of TCR clone 23610 (TRAV2, TRAJ13)
CASGGYQKVTF

SEQ ID NO: 47220 - protein, 16 aa, Homo sapiens
  CDR3 for beta chain variable domain of TCR clone 23610 (TRBV6-1, TRBJ2-5)
CASSETLDRGADTQYF

SEQ ID NO: 47221 - protein, 15 aa, Homo sapiens
  CDR3 for alpha chain variable domain of TCR clone 23611 (TRAV2, TRAJ9)
CAVEDRGTGGFKTIF

SEQ ID NO: 47222 - protein, 16 aa, Homo sapiens
  CDR3 for beta chain variable domain of TCR clone 23611 (TRBV24-1, TRBJ2-3)
RATSDPGTGATDTQYF

SEQ ID NO: 47223 - protein, 14 aa, Homo sapiens
  CDR3 for alpha chain variable domain of TCR clone 23612 (TRAV3, TRAJ40)
CAVRDRRGTYKYIF

SEQ ID NO: 47224 - protein, 15 aa, Homo sapiens
  CDR3 for beta chain variable domain of TCR clone 23612 (TRBV11-1, TRBJ1-3)
CASTDPRAFGNTMYF

SEQ ID NO: 47225 - protein, 18 aa, Homo sapiens
  CDR3 for alpha chain variable domain of TCR clone 23613 (TRAV13-1, TRAJ52)
CAAKNLNAGGTSYGKLTF

SEQ ID NO: 47226 - protein, 15 aa, Homo sapiens
  CDR3 for beta chain variable domain of TCR clone 23613 (TRBV6-1, TRBJ2-3)
CASSERGGITDTQYF

SEQ ID NO: 47227 - protein, 11 aa, Homo sapiens
  CDR3 for alpha chain variable domain of TCR clone 23614 (TRAV12-2, TRAJ54)
CAVEGAQRLVF

SEQ ID NO: 47228 - protein, 17 aa, Homo sapiens
  CDR3 for beta chain variable domain of TCR clone 23614 (TRBV18, TRBJ1-3)
CASSPYPTGPSGNTIYF

SEQ ID NO: 47229 - protein, 14 aa, Homo sapiens
  CDR3 for alpha chain variable domain of TCR clone 23615 (TRAV38-1, TRAJ45)
CAYYSGGGADGLTF

SEQ ID NO: 47230 - protein, 20 aa, Homo sapiens
  CDR3 for beta chain variable domain of TCR clone 23615 (TRBV28, TRBJ2-1)
CAITPIGRSPGLAGGNEQFF

SEQ ID NO: 47231 - protein, 12 aa, Homo sapiens
  CDR3 for alpha chain variable domain of TCR clone 23616 (TRAV21, TRAJ33)
CAKMDSNYQLIL

SEQ ID NO: 47232 - protein, 14 aa, Homo sapiens
  CDR3 for beta chain variable domain of TCR clone 23616 (TRBV2, TRBJ2-7)
CASSLTSGGYEQYF

SEQ ID NO: 47233 - protein, 14 aa, Homo sapiens
  CDR3 for alpha chain variable domain of TCR clone 23617 (TRAV12-2, TRAJ40)
CAVKIPSGTYKYIF

SEQ ID NO: 47234 - protein, 13 aa, Homo sapiens
  CDR3 for beta chain variable domain of TCR clone 23617 (TRBV6-1, TRBJ1-1)
CASSRQGNTEAFF

SEQ ID NO: 47235 - protein, 15 aa, Homo sapiens
  CDR3 for alpha chain variable domain of TCR clone 23618 (TRAV9-2, TRAJ57)
CALRPNQGGSEKLVF

SEQ ID NO: 47236 - protein, 12 aa, Homo sapiens
  CDR3 for beta chain variable domain of TCR clone 23618 (TRBV14, TRBJ2-7)
CASSRLKGEQYF

SEQ ID NO: 47237 - protein, 16 aa, Homo sapiens
  CDR3 for alpha chain variable domain of TCR clone 23619 (TRAV36/DV7, TRAJ33)
WRPGNKVQDSNYQLIW

SEQ ID NO: 47238 - protein, 15 aa, Homo sapiens
  CDR3 for beta chain variable domain of TCR clone 23619 (TRBV29-1, TRBJ2-1)
CSVGGHALFYNEQFF

SEQ ID NO: 47239 - protein, 14 aa, Homo sapiens
  CDR3 for alpha chain variable domain of TCR clone 23620 (TRAV13-1, TRAJ35)
CAASKGGFGMCCIA

SEQ ID NO: 47240 - protein, 13 aa, Homo sapiens
  CDR3 for beta chain variable domain of TCR clone 23620 (TRBV7-3, TRBJ1-1)
CASSQDWGAEAFF

SEQ ID NO: 47241 - protein, 17 aa, Homo sapiens
  CDR3 for alpha chain variable domain of TCR clone 23621 (TRAV26-1, TRAJ28)
CIVRVPDSGAGSYQLTF

SEQ ID NO: 47242 - protein, 17 aa, Homo sapiens
  CDR3 for beta chain variable domain of TCR clone 23621 (TRBV28, TRBJ2-7)
CASSPRPAGGKSYEQYF

SEQ ID NO: 47243 - protein, 15 aa, Homo sapiens
  CDR3 for alpha chain variable domain of TCR clone 23622 (TRAV26-1, TRAJ40)
CIVRAVPSGTYKYIF

SEQ ID NO: 47244 - protein, 14 aa, Homo sapiens
  CDR3 for beta chain variable domain of TCR clone 23622 (TRBV5-1, TRBJ2-1)
CASSRGESLYEQYF

SEQ ID NO: 47245 - protein, 14 aa, Homo sapiens
  CDR3 for alpha chain variable domain of TCR clone 23623 (TRAV17, TRAJ16)
CATADFSDGQKLLF

SEQ ID NO: 47246 - protein, 15 aa, Homo sapiens
  CDR3 for beta chain variable domain of TCR clone 23623 (TRBV18, TRBJ2-1)
CASSSPSASYNEQLF

SEQ ID NO: 47247 - protein, 13 aa, Homo sapiens
  CDR3 for alpha chain variable domain of TCR clone 23624 (TRAV29/DV5, TRAJ40)
CAATYSGTYKYIF

SEQ ID NO: 47248 - protein, 14 aa, Homo sapiens
  CDR3 for beta chain variable domain of TCR clone 23624 (TRBV24-1, TRBJ2-3)
CATSATGSTDTQYF

SEQ ID NO: 47249 - protein, 13 aa, Homo sapiens
  CDR3 for alpha chain variable domain of TCR clone 23625 (TRAV17, TRAJ9)
CATDYTGGFKTIF

SEQ ID NO: 47250 - protein, 16 aa, Homo sapiens
  CDR3 for beta chain variable domain of TCR clone 23625 (TRBV7-7, TRBJ2-1)
CASRLASGTSYNEQFF

SEQ ID NO: 47251 - protein, 16 aa, Homo sapiens
  CDR3 for alpha chain variable domain of TCR clone 23626 (TRAV16, TRAJ4)
CALSRMFSGGYNKLIF

SEQ ID NO: 47252 - protein, 16 aa, Homo sapiens
  CDR3 for beta chain variable domain of TCR clone 23626 (TRBV7-3, TRBJ2-1)
CASSLEGYRSYNEQFF

SEQ ID NO: 47253 - protein, 13 aa, Homo sapiens
  CDR3 for alpha chain variable domain of TCR clone 23627 (TRAV2, TRAJ15)
CAVASQAGTALIF

SEQ ID NO: 47254 - protein, 16 aa, Homo sapiens
  CDR3 for beta chain variable domain of TCR clone 23627 (TRBV5-1, TRBJ1-1)
CASSSGGNFLNTEAFF

SEQ ID NO: 47255 - protein, 11 aa, Homo sapiens
  CDR3 for alpha chain variable domain of TCR clone 23628 (TRAV4, TRAJ31)
CLVGDNARLMF

SEQ ID NO: 47256 - protein, 16 aa, Homo sapiens
  CDR3 for beta chain variable domain of TCR clone 23628 (TRBV7-2, TRBJ2-5)
CASSSKWSSGQETQYF

SEQ ID NO: 47257 - protein, 16 aa, Homo sapiens
  CDR3 for alpha chain variable domain of TCR clone 23629 (TRAV14/DV4, TRAJ21)
CAMREGPENNFNKFYF

SEQ ID NO: 47258 - protein, 12 aa, Homo sapiens
  CDR3 for beta chain variable domain of TCR clone 23629 (TRBV29-1, TRBJ2-2)
CSVDKCTGELFF

SEQ ID NO: 47259 - protein, 18 aa, Homo sapiens
  CDR3 for alpha chain variable domain of TCR clone 23630 (TRAV9-2, TRAJ52)
CALSQHNAGGTSYGKLTF

SEQ ID NO: 47260 - protein, 13 aa, Homo sapiens
  CDR3 for beta chain variable domain of TCR clone 23630 (TRBV7-9, TRBJ1-2)
CASSLKQNYGYTF

SEQ ID NO: 47261 - protein, 15 aa, Homo sapiens
  CDR3 for alpha chain variable domain of TCR clone 23631 (TRAV3, TRAJ9)
RAVRDINTGGFKTIF

SEQ ID NO: 47262 - protein, 13 aa, Homo sapiens
  CDR3 for beta chain variable domain of TCR clone 23631 (TRBV19, TRBJ2-7)
CASSIPSVREQYF

SEQ ID NO: 47263 - protein, 15 aa, Homo sapiens
  CDR3 for alpha chain variable domain of TCR clone 23632 (TRAV23/DV6, TRAJ32)
CAASKMGGATNKLIF

SEQ ID NO: 47264 - protein, 12 aa, Homo sapiens
  CDR3 for beta chain variable domain of TCR clone 23632 (TRBV3-1, TRBJ1-1)
CASSHQDREAFF

SEQ ID NO: 47265 - protein, 13 aa, Homo sapiens
  CDR3 for alpha chain variable domain of TCR clone 23633 (TRAV4, TRAJ42)
CLVGGGSQGNLIF

SEQ ID NO: 47266 - protein, 16 aa, Homo sapiens
  CDR3 for beta chain variable domain of TCR clone 23633 (TRBV5-1, TRBJ2-3)
CASSLQGRVGAATQYF

SEQ ID NO: 47267 - protein, 14 aa, Homo sapiens
  CDR3 for alpha chain variable domain of TCR clone 23634 (TRAV2, TRAJ37)
CAVDFTSNTGKLIF

SEQ ID NO: 47268 - protein, 15 aa, Homo sapiens
  CDR3 for beta chain variable domain of TCR clone 23634 (TRBV20-1, TRBJ1-1)
CSASLGVTGNTEAFF

SEQ ID NO: 47269 - protein, 11 aa, Homo sapiens
  CDR3 for alpha chain variable domain of TCR clone 23635 (TRAV2, TRAJ13)
CASGGYQKVTF

SEQ ID NO: 47270 - protein, 16 aa, Homo sapiens
  CDR3 for beta chain variable domain of TCR clone 23635 (TRBV6-1, TRBJ2-5)
CASSETLDRGTETQYF

SEQ ID NO: 47271 - protein, 15 aa, Homo sapiens
  CDR3 for alpha chain variable domain of TCR clone 23636 (TRAV35, TRAJ40)
CAGQLGTSVTYKYIF

SEQ ID NO: 47272 - protein, 14 aa, Homo sapiens
  CDR3 for beta chain variable domain of TCR clone 23636 (TRBV7-3, TRBJ2-1)
CASSLAGGTNEQFF

SEQ ID NO: 47273 - protein, 14 aa, Homo sapiens
  CDR3 for alpha chain variable domain of TCR clone 23637 (TRAV12-2, TRAJ13)
CAVKKTGGYQKVTF

SEQ ID NO: 47274 - protein, 11 aa, Homo sapiens
  CDR3 for beta chain variable domain of TCR clone 23637 (TRBV7-8, TRBJ2-7)
CASSLSLEQYF

SEQ ID NO: 47275 - protein, 14 aa, Homo sapiens
  CDR3 for alpha chain variable domain of TCR clone 23638 (TRAV13-1, TRAJ40)
CAASMTSGTYKYNF

SEQ ID NO: 47276 - protein, 15 aa, Homo sapiens
  CDR3 for beta chain variable domain of TCR clone 23638 (TRBV7-3, TRBJ2-1)
CASSPTGGGEVEQFF

SEQ ID NO: 47277 - protein, 14 aa, Homo sapiens
  CDR3 for alpha chain variable domain of TCR clone 23639 (TRAV29/DV5, TRAJ45)
CAASFRGGADGLTF

SEQ ID NO: 47278 - protein, 14 aa, Homo sapiens
  CDR3 for beta chain variable domain of TCR clone 23639 (TRBV19, TRBJ2-1)
CASPTFVLSGEQFF

SEQ ID NO: 47279 - protein, 18 aa, Homo sapiens
  CDR3 for alpha chain variable domain of TCR clone 23640 (TRAV12-3, TRAJ52)
CAMSVGGAGGTSYGKLTF

SEQ ID NO: 47280 - protein, 13 aa, Homo sapiens
  CDR3 for beta chain variable domain of TCR clone 23640 (TRBV10-3, TRBJ2-7)
CASKLAVNYEQYF

SEQ ID NO: 47281 - protein, 15 aa, Homo sapiens
  CDR3 for alpha chain variable domain of TCR clone 23641 (TRAV21, TRAJ24)
CAARSSTESWGKLQF

SEQ ID NO: 47282 - protein, 13 aa, Homo sapiens
  CDR3 for beta chain variable domain of TCR clone 23641 (TRBV11-2, TRBJ2-5)
CASSSTGEETQYF

SEQ ID NO: 47283 - protein, 14 aa, Homo sapiens
  CDR3 for alpha chain variable domain of TCR clone 23642 (TRAV38-1, TRAJ40)
CALRPTSGTYKYIF

SEQ ID NO: 47284 - protein, 17 aa, Homo sapiens
  CDR3 for beta chain variable domain of TCR clone 23642 (TRBV11-2, TRBJ2-1)
CASSLYPPGVEYNEQFF

SEQ ID NO: 47285 - protein, 22 aa, Homo sapiens
  CDR3 for alpha chain variable domain of TCR clone 23643 (TRAV8-3, TRAJ32)
CAVEVVLQPSSSLELALCLLSS

SEQ ID NO: 47286 - protein, 12 aa, Homo sapiens
  CDR3 for beta chain variable domain of TCR clone 23643 (TRBV7-8, TRBJ2-7)
CASSLGDREQYF

SEQ ID NO: 47287 - protein, 13 aa, Homo sapiens
  CDR3 for alpha chain variable domain of TCR clone 23644 (TRAV26-1, TRAJ35)
CIVSRRVGEMLHC

SEQ ID NO: 47288 - protein, 17 aa, Homo sapiens
  CDR3 for beta chain variable domain of TCR clone 23644 (TRBV7-9, TRBJ2-7)
CASSFDGSRGGAYEQYF

SEQ ID NO: 47289 - protein, 14 aa, Homo sapiens
  CDR3 for alpha chain variable domain of TCR clone 23645 (TRAV20, TRAJ56)
CAVQFGGANSKLTF

SEQ ID NO: 47290 - protein, 14 aa, Homo sapiens
  CDR3 for beta chain variable domain of TCR clone 23645 (TRBV20-1, TRBJ2-7)
CSAKRGRSSHEQYF

SEQ ID NO: 47291 - protein, 14 aa, Homo sapiens
  CDR3 for alpha chain variable domain of TCR clone 23646 (TRAV23/DV6, TRAJ9)
CAASIGGKYWRLQN

SEQ ID NO: 47292 - protein, 14 aa, Homo sapiens
  CDR3 for beta chain variable domain of TCR clone 23646 (TRBV9, TRBJ2-7)
CASSVGVGSYEQYF

SEQ ID NO: 47293 - protein, 16 aa, Homo sapiens
  CDR3 for alpha chain variable domain of TCR clone 23647 (TRAV4, TRAJ22)
CLVGDRYSGSARQLTF

SEQ ID NO: 47294 - protein, 16 aa, Homo sapiens
  CDR3 for beta chain variable domain of TCR clone 23647 (TRBV7-9, TRBJ2-1)
CASSDVAGGSYNEQFF

SEQ ID NO: 47295 - protein, 10 aa, Homo sapiens
  CDR3 for alpha chain variable domain of TCR clone 23648 (TRAV12-3, TRAJ49)
SAMNDDQFYF

SEQ ID NO: 47296 - protein, 13 aa, Homo sapiens
  CDR3 for beta chain variable domain of TCR clone 23648 (TRBV12-4, TRBJ1-1)
CASSPGTGFEAFF

SEQ ID NO: 47297 - protein, 13 aa, Homo sapiens
  CDR3 for alpha chain variable domain of TCR clone 23649 (TRAV13-2, TRAJ53)
CAENMGSNYKLTF

SEQ ID NO: 47298 - protein, 13 aa, Homo sapiens
  CDR3 for beta chain variable domain of TCR clone 23649 (TRBV4-1, TRBJ2-2)
CASSQENTGELFL

SEQ ID NO: 47299 - protein, 11 aa, Homo sapiens
  CDR3 for alpha chain variable domain of TCR clone 23650 (TRAV4, TRAJ20)
CLVGDKVTTTS

SEQ ID NO: 47300 - protein, 13 aa, Homo sapiens
  CDR3 for beta chain variable domain of TCR clone 23650 (TRBV10-3, TRBJ2-7)
CASRLAVNYEQYF

SEQ ID NO: 47301 - protein, 16 aa, Homo sapiens
  CDR3 for alpha chain variable domain of TCR clone 23651 (TRAV26-1, TRAJ53)
CIVRVAMGGSKYKLTF

SEQ ID NO: 47302 - protein, 12 aa, Homo sapiens
  CDR3 for beta chain variable domain of TCR clone 23651 (TRBV7-9, TRBJ1-5)
CASSPQGQPQHF

SEQ ID NO: 47303 - protein, 11 aa, Homo sapiens
  CDR3 for alpha chain variable domain of TCR clone 23652 (TRAV21, TRAJ20)
CAARDDYKLSF

SEQ ID NO: 47304 - protein, 14 aa, Homo sapiens
  CDR3 for beta chain variable domain of TCR clone 23652 (TRBV12-4, TRBJ1-1)
CASSFSQMNTEAFF

SEQ ID NO: 47305 - protein, 14 aa, Homo sapiens
  CDR3 for alpha chain variable domain of TCR clone 23653 (TRAV26-1, TRAJ45)
CIEVTGGGADGLTF

SEQ ID NO: 47306 - protein, 13 aa, Homo sapiens
  CDR3 for beta chain variable domain of TCR clone 23653 (TRBV7-9, TRBJ1-2)
CASSLKQNYGYTF

SEQ ID NO: 47307 - protein, 16 aa, Homo sapiens
  CDR3 for alpha chain variable domain of TCR clone 23654 (TRAV3, TRAJ10)
CAVRDMRAGRGNKLTF

SEQ ID NO: 47308 - protein, 15 aa, Homo sapiens
  CDR3 for beta chain variable domain of TCR clone 23654 (TRBV9, TRBJ1-6)
CASSVAGTGDSPLHF

SEQ ID NO: 47309 - protein, 14 aa, Homo sapiens
  CDR3 for alpha chain variable domain of TCR clone 23655 (TRAV12-2, TRAJ13)
CAVKKTGGYQKVTF

SEQ ID NO: 47310 - protein, 15 aa, Homo sapiens
  CDR3 for beta chain variable domain of TCR clone 23655 (TRBV7-9, TRBJ1-4)
CASSARTGGNEKLFF

SEQ ID NO: 47311 - protein, 15 aa, Homo sapiens
  CDR3 for alpha chain variable domain of TCR clone 23656 (TRAV8-4, TRAJ3)
CAVTGENLVQQCFQE

SEQ ID NO: 47312 - protein, 16 aa, Homo sapiens
  CDR3 for beta chain variable domain of TCR clone 23656 (TRBV4-2, TRBJ1-1)
CASSQAGFGMNTEAFF

SEQ ID NO: 47313 - protein, 17 aa, Homo sapiens
  CDR3 for alpha chain variable domain of TCR clone 23657 (TRAV38-2/DV8, TRAJ38)
CAYRSARGAGNNRKLLW

SEQ ID NO: 47314 - protein, 13 aa, Homo sapiens
  CDR3 for beta chain variable domain of TCR clone 23657 (TRBV6-5, TRBJ2-1)
CASRGRVGNEQFF

SEQ ID NO: 47315 - protein, 13 aa, Homo sapiens
  CDR3 for alpha chain variable domain of TCR clone 23658 (TRAV12-3, TRAJ43)
CAMIRPNNNDMRF

SEQ ID NO: 47316 - protein, 12 aa, Homo sapiens
  CDR3 for beta chain variable domain of TCR clone 23658 (TRBV11-3, TRBJ2-5)
CASSLGQETQYF

SEQ ID NO: 47317 - protein, 16 aa, Homo sapiens
  CDR3 for alpha chain variable domain of TCR clone 23659 (TRAV3, TRAJ37)
CAVRPHDSGNTGKLIF

SEQ ID NO: 47318 - protein, 16 aa, Homo sapiens
  CDR3 for beta chain variable domain of TCR clone 23659 (TRBV9, TRBJ1-2)
CASSVEEKVSPYGYTF

SEQ ID NO: 47319 - protein, 15 aa, Homo sapiens
  CDR3 for alpha chain variable domain of TCR clone 23660 (TRAV38-1, TRAJ37)
CAFIFGSGNTGKLIF

SEQ ID NO: 47320 - protein, 12 aa, Homo sapiens
  CDR3 for beta chain variable domain of TCR clone 23660 (TRBV7-9, TRBJ2-7)
CASSLEGYEQYL

SEQ ID NO: 47321 - protein, 13 aa, Homo sapiens
  CDR3 for alpha chain variable domain of TCR clone 23661 (TRAV2, TRAJ21)
CAMEDLNFNKFYF

SEQ ID NO: 47322 - protein, 15 aa, Homo sapiens
  CDR3 for beta chain variable domain of TCR clone 23661 (TRBV28, TRBJ2-5)
CASSPGQGSIETQYF

SEQ ID NO: 47323 - protein, 16 aa, Homo sapiens
  CDR3 for alpha chain variable domain of TCR clone 23662 (TRAV12-2, TRAJ18)
CAVTTDRGPTLGRLYF

SEQ ID NO: 47324 - protein, 14 aa, Homo sapiens
  CDR3 for beta chain variable domain of TCR clone 23662 (TRBV4-2, TRBJ1-5)
CASSQDSINQPQHF

SEQ ID NO: 47325 - protein, 14 aa, Homo sapiens
  CDR3 for alpha chain variable domain of TCR clone 23663 (TRAV26-1, TRAJ39)
CIVRGSRAGNVLTF

SEQ ID NO: 47326 - protein, 15 aa, Homo sapiens
  CDR3 for beta chain variable domain of TCR clone 23663 (TRBV7-9, TRBJ1-5)
CASSQGHQPNQPQHF

SEQ ID NO: 47327 - protein, 11 aa, Homo sapiens
  CDR3 for alpha chain variable domain of TCR clone 23664 (TRAV1-2, TRAJ31)
CAVNNNARLMF

SEQ ID NO: 47328 - protein, 15 aa, Homo sapiens
  CDR3 for beta chain variable domain of TCR clone 23664 (TRBV28, TRBJ2-1)
CASSIIAGGISEQFF

SEQ ID NO: 47329 - protein, 13 aa, Homo sapiens
  CDR3 for alpha chain variable domain of TCR clone 23665 (TRAV27, TRAJ42)
CAGARGSQGNLIF

SEQ ID NO: 47330 - protein, 15 aa, Homo sapiens
  CDR3 for beta chain variable domain of TCR clone 23665 (TRBV10-3, TRBJ2-2)
CAIRTDREDTGELFL

SEQ ID NO: 47331 - protein, 13 aa, Homo sapiens
  CDR3 for alpha chain variable domain of TCR clone 23666 (TRAV13-2, TRAJ48)
CAEMDFGNEKLTF

SEQ ID NO: 47332 - protein, 15 aa, Homo sapiens
  CDR3 for beta chain variable domain of TCR clone 23666 (TRBV7-9, TRBJ1-6)
CASSSPGRGNSALHF

SEQ ID NO: 47333 - protein, 16 aa, Homo sapiens
  CDR3 for alpha chain variable domain of TCR clone 23667 (TRAV26-1, TRAJ53)
CIARVAMGGSNYKLTF

SEQ ID NO: 47334 - protein, 12 aa, Homo sapiens
  CDR3 for beta chain variable domain of TCR clone 23667 (TRBV7-9, TRBJ1-5)
CASSPQGQPQHF

SEQ ID NO: 47335 - protein, 15 aa, Homo sapiens
  CDR3 for alpha chain variable domain of TCR clone 23668 (TRAV12-3, TRAJ6)
CAMSATSGGSYIPTF

SEQ ID NO: 47336 - protein, 11 aa, Homo sapiens
  CDR3 for beta chain variable domain of TCR clone 23668 (TRBV20-1, TRBJ1-5)
CSAQGDQPQHL

SEQ ID NO: 47337 - protein, 18 aa, Homo sapiens
  CDR3 for alpha chain variable domain of TCR clone 23669 (TRAV12-3, TRAJ28)
CAMSARGYSGAGSYQLTF

SEQ ID NO: 47338 - protein, 20 aa, Homo sapiens
  CDR3 for beta chain variable domain of TCR clone 23669 (TRBV11-1, TRBJ2-6)
CASSAEFQPGMSSGANVLTF

SEQ ID NO: 47339 - protein, 13 aa, Homo sapiens
  CDR3 for alpha chain variable domain of TCR clone 23670 (TRAV13-1, TRAJ5)
CAASDTGRRALTF

SEQ ID NO: 47340 - protein, 19 aa, Homo sapiens
  CDR3 for beta chain variable domain of TCR clone 23670 (TRBV19, TRBJ1-4)
CASSPLGQLDGLANEKLFF

SEQ ID NO: 47341 - protein, 15 aa, Homo sapiens
  CDR3 for alpha chain variable domain of TCR clone 23671 (TRAV26-1, TRAJ44)
CIVRANTGTASKLTF

SEQ ID NO: 47342 - protein, 16 aa, Homo sapiens
  CDR3 for beta chain variable domain of TCR clone 23671 (TRBV7-7, TRBJ2-1)
CASRLASGTSYNEQFF

SEQ ID NO: 47343 - protein, 18 aa, Homo sapiens
  CDR3 for alpha chain variable domain of TCR clone 23672 (TRAV13-1, TRAJ52)
CAAKNPNAGGTSYGKLTF

SEQ ID NO: 47344 - protein, 15 aa, Homo sapiens
  CDR3 for beta chain variable domain of TCR clone 23672 (TRBV6-1, TRBJ2-3)
CAGSERGGITDTQYF

SEQ ID NO: 47345 - protein, 12 aa, Homo sapiens
  CDR3 for alpha chain variable domain of TCR clone 23673 (TRAV16, TRAJ10)
CSRTGGGNKLTF

SEQ ID NO: 47346 - protein, 17 aa, Homo sapiens
  CDR3 for beta chain variable domain of TCR clone 23673 (TRBV13, TRBJ2-3)
CASSLSRVAGGRNTQYF

SEQ ID NO: 47347 - protein, 14 aa, Homo sapiens
  CDR3 for alpha chain variable domain of TCR clone 23674 (TRAV20, TRAJ29)
RAVQAWVGNTPLVF

SEQ ID NO: 47348 - protein, 15 aa, Homo sapiens
  CDR3 for beta chain variable domain of TCR clone 23674 (TRBV29-1, TRBJ2-7)
CSVEFFDRGSYEQYF

SEQ ID NO: 47349 - protein, 13 aa, Homo sapiens
  CDR3 for alpha chain variable domain of TCR clone 23675 (TRAV26-2, TRAJ43)
CILRAVNNNDMRF

SEQ ID NO: 47350 - protein, 15 aa, Homo sapiens
  CDR3 for beta chain variable domain of TCR clone 23675 (TRBV7-2, TRBJ2-1)
CASTHGTGIYNEQFV

SEQ ID NO: 47351 - protein, 15 aa, Homo sapiens
  CDR3 for alpha chain variable domain of TCR clone 23676 (TRAV12-3, TRAJ6)
CVMSATTGGSYIPTF

SEQ ID NO: 47352 - protein, 16 aa, Homo sapiens
  CDR3 for beta chain variable domain of TCR clone 23676 (TRBV20-1, TRBJ1-2)
CSASMGQGVANYGYTF

SEQ ID NO: 47353 - protein, 16 aa, Homo sapiens
  CDR3 for alpha chain variable domain of TCR clone 23677 (TRAV3, TRAJ37)
CAVRGKGSGNTGKLIF

SEQ ID NO: 47354 - protein, 16 aa, Homo sapiens
  CDR3 for beta chain variable domain of TCR clone 23677 (TRBV7-3, TRBJ2-2)
CASSLKRGTLSGELFF

SEQ ID NO: 47355 - protein, 13 aa, Homo sapiens
  CDR3 for alpha chain variable domain of TCR clone 23678 (TRAV1-2, TRAJ9)
CAALNTGGFKTIF

SEQ ID NO: 47356 - protein, 14 aa, Homo sapiens
  CDR3 for beta chain variable domain of TCR clone 23678 (TRBV7-6, TRBJ2-3)
CASSLGTVTDTQYF

SEQ ID NO: 47357 - protein, 11 aa, Homo sapiens
  CDR3 for alpha chain variable domain of TCR clone 23679 (TRAV2, TRAJ13)
CASGGYQKVTF

SEQ ID NO: 47358 - protein, 16 aa, Homo sapiens
  CDR3 for beta chain variable domain of TCR clone 23679 (TRBV6-1, TRBJ2-5)
CASSETLNRGAETQYF

SEQ ID NO: 47359 - protein, 15 aa, Homo sapiens
  CDR3 for alpha chain variable domain of TCR clone 23680 (TRAV3, TRAJ5)
CAVRDLDTGRRAFTF

SEQ ID NO: 47360 - protein, 13 aa, Homo sapiens
  CDR3 for beta chain variable domain of TCR clone 23680 (TRBV12-4, TRBJ2-7)
CASSPTETYEQYF

SEQ ID NO: 47361 - protein, 16 aa, Homo sapiens
  CDR3 for alpha chain variable domain of TCR clone 23681 (TRAV16, TRAJ4)
RALSRMFSGGYNKLIF

SEQ ID NO: 47362 - protein, 16 aa, Homo sapiens
  CDR3 for beta chain variable domain of TCR clone 23681 (TRBV24-1, TRBJ2-3)
CATSDPGTGATDTQYF

SEQ ID NO: 47363 - protein, 13 aa, Homo sapiens
  CDR3 for alpha chain variable domain of TCR clone 23682 (TRAV2, TRAJ40)
CAVVTSGTYKYIF

SEQ ID NO: 47364 - protein, 14 aa, Homo sapiens
  CDR3 for beta chain variable domain of TCR clone 23682 (TRBV18, TRBJ2-7)
CASSPRGGAYEQYF

SEQ ID NO: 47365 - protein, 15 aa, Homo sapiens
  CDR3 for alpha chain variable domain of TCR clone 23683 (TRAV17, TRAJ57)
CATGPSQGGSEKLVF

SEQ ID NO: 47366 - protein, 16 aa, Homo sapiens
  CDR3 for beta chain variable domain of TCR clone 23683 (TRBV12-4, TRBJ1-5)
CASSRPVGGSNQPQQF

SEQ ID NO: 47367 - protein, 14 aa, Homo sapiens
  CDR3 for alpha chain variable domain of TCR clone 23684 (TRAV17, TRAJ16)
CATADFSDGQKLLF

SEQ ID NO: 47368 - protein, 15 aa, Homo sapiens
  CDR3 for beta chain variable domain of TCR clone 23684 (TRBV18, TRBJ2-1)
CASSPQSASYNEQFF

SEQ ID NO: 47369 - protein, 12 aa, Homo sapiens
  CDR3 for alpha chain variable domain of TCR clone 23685 (TRAV26-2, TRAJ21)
CILKGNFNKFYF

SEQ ID NO: 47370 - protein, 14 aa, Homo sapiens
  CDR3 for beta chain variable domain of TCR clone 23685 (TRBV7-9, TRBJ1-1)
CASTPLQSHTEAFF

SEQ ID NO: 47371 - protein, 13 aa, Homo sapiens
  CDR3 for alpha chain variable domain of TCR clone 23686 (TRAV27, TRAJ45)
CRSSGGGADGLTF

SEQ ID NO: 47372 - protein, 13 aa, Homo sapiens
  CDR3 for beta chain variable domain of TCR clone 23686 (TRBV7-9, TRBJ1-2)
CASSLKQNYGYTF

SEQ ID NO: 47373 - protein, 14 aa, Homo sapiens
  CDR3 for alpha chain variable domain of TCR clone 23687 (TRAV38-1, TRAJ39)
CAFAYNNAGNMLTF

SEQ ID NO: 47374 - protein, 15 aa, Homo sapiens
  CDR3 for beta chain variable domain of TCR clone 23687 (TRBV19, TRBJ2-6)
CASSTGPSGANVLTF

SEQ ID NO: 47375 - protein, 13 aa, Homo sapiens
  CDR3 for alpha chain variable domain of TCR clone 23688 (TRAV20, TRAJ54)
CAVQAGGAQKLVF

SEQ ID NO: 47376 - protein, 14 aa, Homo sapiens
  CDR3 for beta chain variable domain of TCR clone 23688 (TRBV20-1, TRBJ2-7)
CSAKAGTGGYEQYF

SEQ ID NO: 47377 - protein, 13 aa, Homo sapiens
  CDR3 for alpha chain variable domain of TCR clone 23689 (TRAV13-1, TRAJ21)
CAARIYNFNKFYF

SEQ ID NO: 47378 - protein, 13 aa, Homo sapiens
  CDR3 for beta chain variable domain of TCR clone 23689 (TRBV27, TRBJ1-4)
CASSLMGDEKLFF

SEQ ID NO: 47379 - protein, 15 aa, Homo sapiens
  CDR3 for alpha chain variable domain of TCR clone 23690 (TRAV21, TRAJ24)
CATRSSTDSWGKLQF

SEQ ID NO: 47380 - protein, 13 aa, Homo sapiens
  CDR3 for beta chain variable domain of TCR clone 23690 (TRBV11-2, TRBJ2-5)
CASSSTGEETQYF

SEQ ID NO: 47381 - protein, 15 aa, Homo sapiens
  CDR3 for alpha chain variable domain of TCR clone 23691 (TRAV8-4, TRAJ36)
CAVRKSWTGANNPFF

SEQ ID NO: 47382 - protein, 17 aa, Homo sapiens
  CDR3 for beta chain variable domain of TCR clone 23691 (TRBV3-1, TRBJ2-2)
CASSQDSQGPNTGELFF

SEQ ID NO: 47383 - protein, 14 aa, Homo sapiens
  CDR3 for alpha chain variable domain of TCR clone 23692 (TRAV38-1, TRAJ29)
CAFITPSGNTPLVF

SEQ ID NO: 47384 - protein, 14 aa, Homo sapiens
  CDR3 for beta chain variable domain of TCR clone 23692 (TRBV18, TRBJ2-7)
CDSSPRGGAYEQYF

SEQ ID NO: 47385 - protein, 13 aa, Homo sapiens
  CDR3 for alpha chain variable domain of TCR clone 23693 (TRAV12-3, TRAJ33)
CAMSVNSNYQLTW

SEQ ID NO: 47386 - protein, 13 aa, Homo sapiens
  CDR3 for beta chain variable domain of TCR clone 23693 (TRBV7-2, TRBJ2-2)
CASSLAVTGELFF

SEQ ID NO: 47387 - protein, 15 aa, Homo sapiens
  CDR3 for alpha chain variable domain of TCR clone 23694 (TRAV12-1, TRAJ44)
CVVDTPQGTAGKLTF

SEQ ID NO: 47388 - protein, 13 aa, Homo sapiens
  CDR3 for beta chain variable domain of TCR clone 23694 (TRBV27, TRBJ2-1)
CASSSGSYNEQFF

SEQ ID NO: 47389 - protein, 21 aa, Homo sapiens
  CDR3 for alpha chain variable domain of TCR clone 23695 (TRAV1-1, TRAJ6)
CLLLLRCERLERTGGSYIPTF

SEQ ID NO: 47390 - protein, 13 aa, Homo sapiens
  CDR3 for beta chain variable domain of TCR clone 23695 (TRBV10-2, TRBJ2-7)
CASGASGGYGQYF

SEQ ID NO: 47391 - protein, 10 aa, Homo sapiens
  CDR3 for alpha chain variable domain of TCR clone 23696 (TRAV12-1, TRAJ37)
GSSNTGKLIF

SEQ ID NO: 47392 - protein, 14 aa, Homo sapiens
  CDR3 for beta chain variable domain of TCR clone 23696 (TRBV7-2, TRBJ2-7)
CASSPKTSFYEQYF

SEQ ID NO: 47393 - protein, 15 aa, Homo sapiens
  CDR3 for alpha chain variable domain of TCR clone 23697 (TRAV17, TRAJ23)
CATDAADNQGGKLIF

SEQ ID NO: 47394 - protein, 12 aa, Homo sapiens
  CDR3 for beta chain variable domain of TCR clone 23697 (TRBV2, TRBJ2-1)
CAKREGYNEQFF

SEQ ID NO: 47395 - protein, 16 aa, Homo sapiens
  CDR3 for alpha chain variable domain of TCR clone 23698 (TRAV30, TRAJ24)
CGTGIVDADSWGKFQF

SEQ ID NO: 47396 - protein, 15 aa, Homo sapiens
  CDR3 for beta chain variable domain of TCR clone 23698 (TRBV27, TRBJ2-1)
CASSNGGGSSNEQFF

SEQ ID NO: 47397 - protein, 11 aa, Homo sapiens
  CDR3 for alpha chain variable domain of TCR clone 23699 (TRAV21, TRAJ11)
CAVNGYNTLTF

SEQ ID NO: 47398 - protein, 11 aa, Homo sapiens
  CDR3 for beta chain variable domain of TCR clone 23699 (TRBV19, TRBJ1-1)
CASSIGSEAFF

SEQ ID NO: 47399 - protein, 12 aa, Homo sapiens
  CDR3 for alpha chain variable domain of TCR clone 23700 (TRAV13-1, TRAJ3)
CAATGVQQCFQD

SEQ ID NO: 47400 - protein, 16 aa, Homo sapiens
  CDR3 for beta chain variable domain of TCR clone 23700 (TRBV7-3, TRBJ2-2)
CASSSKRGTLSGELFF

SEQ ID NO: 47401 - protein, 14 aa, Homo sapiens
  CDR3 for alpha chain variable domain of TCR clone 23701 (TRAV13-1, TRAJ44)
CAAKATGTASKLTF

SEQ ID NO: 47402 - protein, 17 aa, Homo sapiens
  CDR3 for beta chain variable domain of TCR clone 23701 (TRBV7-3, TRBJ2-3)
RASSLMKRMRGAGTQYF

SEQ ID NO: 47403 - protein, 13 aa, Homo sapiens
  CDR3 for alpha chain variable domain of TCR clone 23702 (TRAV20, TRAJ37)
CAGCSSNTGKRIF

SEQ ID NO: 47404 - protein, 11 aa, Homo sapiens
  CDR3 for beta chain variable domain of TCR clone 23702 (TRBV12-4, TRBJ2-3)
CASTATDTQYF

SEQ ID NO: 47405 - protein, 12 aa, Homo sapiens
  CDR3 for alpha chain variable domain of TCR clone 23703 (TRAV12-1, TRAJ40)
YVVYSGTYKYIF

SEQ ID NO: 47406 - protein, 18 aa, Homo sapiens
  CDR3 for beta chain variable domain of TCR clone 23703 (TRBV11-2, TRBJ2-3)
CASSLGGASRGAPNTQYF

SEQ ID NO: 47407 - protein, 11 aa, Homo sapiens
  CDR3 for alpha chain variable domain of TCR clone 23704 (TRAV12-3, TRAJ27)
CAMANAGKSTF

SEQ ID NO: 47408 - protein, 13 aa, Homo sapiens
  CDR3 for beta chain variable domain of TCR clone 23704 (TRBV20-1, TRBJ1-1)
CSARVGGDTEAFF

SEQ ID NO: 47409 - protein, 14 aa, Homo sapiens
  CDR3 for alpha chain variable domain of TCR clone 23705 (TRAV35, TRAJ22)
CAGLRPGSARQLTF

SEQ ID NO: 47410 - protein, 15 aa, Homo sapiens
  CDR3 for beta chain variable domain of TCR clone 23705 (TRBV12-4, TRBJ2-5)
CASSPPIGLQETQYF

SEQ ID NO: 47411 - protein, 14 aa, Homo sapiens
  CDR3 for alpha chain variable domain of TCR clone 23706 (TRAV21, TRAJ15)
CAVSLNQAGTALIF

SEQ ID NO: 47412 - protein, 11 aa, Homo sapiens
  CDR3 for beta chain variable domain of TCR clone 23706 (TRBV20-1, TRBJ2-7)
CSAMTSYEQYF

SEQ ID NO: 47413 - protein, 14 aa, Homo sapiens
  CDR3 for alpha chain variable domain of TCR clone 23707 (TRAV38-1, TRAJ40)
CALRPTSGIYKYIF

SEQ ID NO: 47414 - protein, 14 aa, Homo sapiens
  CDR3 for beta chain variable domain of TCR clone 23707 (TRBV25-1, TRBJ1-1)
CASTHLGGNTEAFF

SEQ ID NO: 47415 - protein, 12 aa, Homo sapiens
  CDR3 for alpha chain variable domain of TCR clone 23708 (TRAV12-1, TRAJ34)
CVVTFNTDKLIF

SEQ ID NO: 47416 - protein, 14 aa, Homo sapiens
  CDR3 for beta chain variable domain of TCR clone 23708 (TRBV19, TRBJ1-1)
CAGLRTGLNTEAFF

SEQ ID NO: 47417 - protein, 14 aa, Homo sapiens
  CDR3 for alpha chain variable domain of TCR clone 23709 (TRAV12-1, TRAJ17)
RVVNYKAAGNKLTF

SEQ ID NO: 47418 - protein, 14 aa, Homo sapiens
  CDR3 for beta chain variable domain of TCR clone 23709 (TRBV7-8, TRBJ2-3)
CASSLEAGTDTQYF

SEQ ID NO: 47419 - protein, 12 aa, Homo sapiens
  CDR3 for alpha chain variable domain of TCR clone 23710 (TRAV16, TRAJ10)
CSRTGGGNKLIF

SEQ ID NO: 47420 - protein, 15 aa, Homo sapiens
  CDR3 for beta chain variable domain of TCR clone 23710 (TRBV6-3, TRBJ2-7)
CASSSPGTVFYEQYF

SEQ ID NO: 47421 - protein, 16 aa, Homo sapiens
  CDR3 for alpha chain variable domain of TCR clone 23711 (TRAV30, TRAJ24)
CGTEIVDADSWGKFQF

SEQ ID NO: 47422 - protein, 15 aa, Homo sapiens
  CDR3 for beta chain variable domain of TCR clone 23711 (TRBV20-1, TRBJ2-7)
CSAGDRVSGMDEQYF

SEQ ID NO: 47423 - protein, 14 aa, Homo sapiens
  CDR3 for alpha chain variable domain of TCR clone 23712 (TRAV13-1, TRAJ44)
CAAKATGTASKLTF

SEQ ID NO: 47424 - protein, 14 aa, Homo sapiens
  CDR3 for beta chain variable domain of TCR clone 23712 (TRBV19, TRBJ2-2)
CASSALHRSGELFF

SEQ ID NO: 47425 - protein, 14 aa, Homo sapiens
  CDR3 for alpha chain variable domain of TCR clone 23713 (TRAV13-1, TRAJ35)
CAASKGGFGNVLHC

SEQ ID NO: 47426 - protein, 18 aa, Homo sapiens
  CDR3 for beta chain variable domain of TCR clone 23713 (TRBV11-2, TRBJ2-3)
CASSLGGASRGAPNTQYF

SEQ ID NO: 47427 - protein, 12 aa, Homo sapiens
  CDR3 for alpha chain variable domain of TCR clone 23714 (TRAV21, TRAJ49)
CAVNDGGNQFYF

SEQ ID NO: 47428 - protein, 13 aa, Homo sapiens
  CDR3 for beta chain variable domain of TCR clone 23714 (TRBV18, TRBJ2-7)
CQLTPGGSYEQYF

SEQ ID NO: 47429 - protein, 13 aa, Homo sapiens
  CDR3 for alpha chain variable domain of TCR clone 23715 (TRAV21, TRAJ57)
CAVTQGGSEKLVC

SEQ ID NO: 47430 - protein, 16 aa, Homo sapiens
  CDR3 for beta chain variable domain of TCR clone 23715 (TRBV29-1, TRBJ2-7)
CSVEDAEDGTAYEQYF

SEQ ID NO: 47431 - protein, 12 aa, Homo sapiens
  CDR3 for alpha chain variable domain of TCR clone 23716 (TRAV2, TRAJ34)
CAVEGNTDKLIF

SEQ ID NO: 47432 - protein, 14 aa, Homo sapiens
  CDR3 for beta chain variable domain of TCR clone 23716 (TRBV7-9, TRBJ2-1)
CASSDNSGYNEQFF

SEQ ID NO: 47433 - protein, 15 aa, Homo sapiens
  CDR3 for alpha chain variable domain of TCR clone 23717 (TRAV17, TRAJ57)
CATGSSQGGSEKLVF

SEQ ID NO: 47434 - protein, 16 aa, Homo sapiens
  CDR3 for beta chain variable domain of TCR clone 23717 (TRBV12-4, TRBJ1-5)
CASSRPVGGSNQPQHF

SEQ ID NO: 47435 - protein, 17 aa, Homo sapiens
  CDR3 for alpha chain variable domain of TCR clone 23718 (TRAV23/DV6, TRAJ57)
FAASSTLSQGGSEKLVF

SEQ ID NO: 47436 - protein, 14 aa, Homo sapiens
  CDR3 for beta chain variable domain of TCR clone 23718 (TRBV25-1, TRBJ1-1)
CASTHLGGNTEAFF

SEQ ID NO: 47437 - protein, 12 aa, Homo sapiens
  CDR3 for alpha chain variable domain of TCR clone 23719 (TRAV12-1, TRAJ40)
CVVYSGTYKYIL

SEQ ID NO: 47438 - protein, 17 aa, Homo sapiens
  CDR3 for beta chain variable domain of TCR clone 23719 (TRBV11-3, TRBJ1-5)
CASSPLTGLRGNQPQHF

SEQ ID NO: 47439 - protein, 11 aa, Homo sapiens
  CDR3 for alpha chain variable domain of TCR clone 23720 (TRAV1-1, TRAJ23)
CAVRQGGKLIF

SEQ ID NO: 47440 - protein, 20 aa, Homo sapiens
  CDR3 for beta chain variable domain of TCR clone 23720 (TRBV7-8, TRBJ2-2)
CASSHLFPGPTIHISGELFF

SEQ ID NO: 47441 - protein, 14 aa, Homo sapiens
  CDR3 for alpha chain variable domain of TCR clone 23721 (TRAV29/DV5, TRAJ36)
CAARRTTGANNLFF

SEQ ID NO: 47442 - protein, 14 aa, Homo sapiens
  CDR3 for beta chain variable domain of TCR clone 23721 (TRBV12-5, TRBJ2-5)
CASGSRTHQETQYF

SEQ ID NO: 47443 - protein, 16 aa, Homo sapiens
  CDR3 for alpha chain variable domain of TCR clone 23722 (TRAV30, TRAJ24)
CGTEIVDADSWGKFQF

SEQ ID NO: 47444 - protein, 15 aa, Homo sapiens
  CDR3 for beta chain variable domain of TCR clone 23722 (TRBV4-1, TRBJ2-5)
CASSQWDLYQETQYF

SEQ ID NO: 47445 - protein, 13 aa, Homo sapiens
  CDR3 for alpha chain variable domain of TCR clone 23723 (TRAV8-2, TRAJ9)
CVVFNTGGFKTIF

SEQ ID NO: 47446 - protein, 15 aa, Homo sapiens
  CDR3 for beta chain variable domain of TCR clone 23723 (TRBV7-2, TRBJ2-1)
CASSSGLAGGNEQFF

SEQ ID NO: 47447 - protein, 18 aa, Homo sapiens
  CDR3 for alpha chain variable domain of TCR clone 23724 (TRAV14/DV4, TRAJ57)
CNERGLRRTQGGSEKLVF

SEQ ID NO: 47448 - protein, 13 aa, Homo sapiens
  CDR3 for beta chain variable domain of TCR clone 23724 (TRBV29-1, TRBJ2-1)
CSVEGGRVNEQFF

SEQ ID NO: 47449 - protein, 14 aa, Homo sapiens
  CDR3 for alpha chain variable domain of TCR clone 23725 (TRAV35, TRAJ22)
CAGLRPGSARQLTF

SEQ ID NO: 47450 - protein, 15 aa, Homo sapiens
  CDR3 for beta chain variable domain of TCR clone 23725 (TRBV12-4, TRBJ2-5)
CASSPPTGLQETQYC

SEQ ID NO: 47451 - protein, 14 aa, Homo sapiens
  CDR3 for alpha chain variable domain of TCR clone 23726 (TRAV8-2, TRAJ4)
CVVSPSGGYNKLIF

SEQ ID NO: 47452 - protein, 15 aa, Homo sapiens
  CDR3 for beta chain variable domain of TCR clone 23726 (TRBV4-1, TRBJ1-4)
CANSDTGGTNEKLFF

SEQ ID NO: 47453 - protein, 12 aa, Homo sapiens
  CDR3 for alpha chain variable domain of TCR clone 23727 (TRAV17, TRAJ20)
CATQANDYKLSF

SEQ ID NO: 47454 - protein, 12 aa, Homo sapiens
  CDR3 for beta chain variable domain of TCR clone 23727 (TRBV6-1, TRBJ1-1)
CASNAPTAEAFF

SEQ ID NO: 47455 - protein, 15 aa, Homo sapiens
  CDR3 for alpha chain variable domain of TCR clone 23728 (TRAV4, TRAJ39)
CLVGPNNNAGNMLTF

SEQ ID NO: 47456 - protein, 13 aa, Homo sapiens
  CDR3 for beta chain variable domain of TCR clone 23728 (TRBV11-2, TRBJ2-5)
CASSSTGEGTQYF

SEQ ID NO: 47457 - protein, 13 aa, Homo sapiens
  CDR3 for alpha chain variable domain of TCR clone 23729 (TRAV1-2, TRAJ9)
CAALNTGGFKTIF

SEQ ID NO: 47458 - protein, 14 aa, Homo sapiens
  CDR3 for beta chain variable domain of TCR clone 23729 (TRBV13, TRBJ2-3)
CASSPGSPTDTQYF

SEQ ID NO: 47459 - protein, 15 aa, Homo sapiens
  CDR3 for alpha chain variable domain of TCR clone 23730 (TRAV38-2/DV8, TRAJ32)
CAYRRYGGATNKLIF

SEQ ID NO: 47460 - protein, 13 aa, Homo sapiens
  CDR3 for beta chain variable domain of TCR clone 23730 (TRBV20-1, TRBJ2-7)
CSARGRGAYEQYF

SEQ ID NO: 47461 - protein, 14 aa, Homo sapiens
  CDR3 for alpha chain variable domain of TCR clone 23731 (TRAV1-2, TRAJ16)
CAVNRFSDGQKLLF

SEQ ID NO: 47462 - protein, 14 aa, Homo sapiens
  CDR3 for beta chain variable domain of TCR clone 23731 (TRBV7-8, TRBJ2-7)
CASSQTQGADKQYF

SEQ ID NO: 47463 - protein, 11 aa, Homo sapiens
  CDR3 for alpha chain variable domain of TCR clone 23732 (TRAV12-1, TRAJ30)
CVVNGQDKIIF

SEQ ID NO: 47464 - protein, 12 aa, Homo sapiens
  CDR3 for beta chain variable domain of TCR clone 23732 (TRBV27, TRBJ2-2)
CASKRFTGELFF

SEQ ID NO: 47465 - protein, 11 aa, Homo sapiens
  CDR3 for alpha chain variable domain of TCR clone 23733 (TRAV23/DV6, TRAJ56)
CAAPANSKLTF

SEQ ID NO: 47466 - protein, 14 aa, Homo sapiens
  CDR3 for beta chain variable domain of TCR clone 23733 (TRBV19, TRBJ2-1)
CASPTFVLSGEQFF

SEQ ID NO: 47467 - protein, 15 aa, Homo sapiens
  CDR3 for alpha chain variable domain of TCR clone 23734 (TRAV3, TRAJ5)
CAVRDLDTARRALTF

SEQ ID NO: 47468 - protein, 13 aa, Homo sapiens
  CDR3 for beta chain variable domain of TCR clone 23734 (TRBV12-4, TRBJ2-7)
CASSPTETYEQYF

SEQ ID NO: 47469 - protein, 14 aa, Homo sapiens
  CDR3 for alpha chain variable domain of TCR clone 23735 (TRAV35, TRAJ39)
CAGQLGNAGNMLTF

SEQ ID NO: 47470 - protein, 20 aa, Homo sapiens
  CDR3 for beta chain variable domain of TCR clone 23735 (TRBV5-1, TRBJ2-3)
CASSLWLAGAITTRTDTQYF

SEQ ID NO: 47471 - protein, 13 aa, Homo sapiens
  CDR3 for alpha chain variable domain of TCR clone 23736 (TRAV3, TRAJ36)
CAVRDTGANNLFF

SEQ ID NO: 47472 - protein, 15 aa, Homo sapiens
  CDR3 for beta chain variable domain of TCR clone 23736 (TRBV24-1, TRBJ2-1)
CATSGPGGFYNEQFF

SEQ ID NO: 47473 - protein, 17 aa, Homo sapiens
  CDR3 for alpha chain variable domain of TCR clone 23737 (TRAV3, TRAJ42)
CAVRDRDYGGSQGTLIF

SEQ ID NO: 47474 - protein, 15 aa, Homo sapiens
  CDR3 for beta chain variable domain of TCR clone 23737 (TRBV6-6, TRBJ2-7)
CASSYSYGGSYEQYF

SEQ ID NO: 47475 - protein, 13 aa, Homo sapiens
  CDR3 for alpha chain variable domain of TCR clone 23738 (TRAV8-3, TRAJ28)
CAVGAVGSYQLTF

SEQ ID NO: 47476 - protein, 14 aa, Homo sapiens
  CDR3 for beta chain variable domain of TCR clone 23738 (TRBV7-2, TRBJ2-7)
CASRSQGAAYEQYC

SEQ ID NO: 47477 - protein, 12 aa, Homo sapiens
  CDR3 for alpha chain variable domain of TCR clone 23739 (TRAV2, TRAJ9)
CAVGAGGFKTIF

SEQ ID NO: 47478 - protein, 16 aa, Homo sapiens
  CDR3 for beta chain variable domain of TCR clone 23739 (TRBV13, TRBJ2-2)
CASSPRIGEHTGELFF

SEQ ID NO: 47479 - protein, 14 aa, Homo sapiens
  CDR3 for alpha chain variable domain of TCR clone 23740 (TRAV8-4, TRAJ13)
CAVTLSGGYQKVTF

SEQ ID NO: 47480 - protein, 14 aa, Homo sapiens
  CDR3 for beta chain variable domain of TCR clone 23740 (TRBV19, TRBJ2-1)
CASPTFVLSGEQFF

SEQ ID NO: 47481 - protein, 18 aa, Homo sapiens
  CDR3 for alpha chain variable domain of TCR clone 23741 (TRAV13-1, TRAJ52)
RAAKNPNAGGTSYGKLTF

SEQ ID NO: 47482 - protein, 18 aa, Homo sapiens
  CDR3 for beta chain variable domain of TCR clone 23741 (TRBV12-4, TRBJ2-4)
CASSRTGAVDVAKNIQYF

SEQ ID NO: 47483 - protein, 12 aa, Homo sapiens
  CDR3 for alpha chain variable domain of TCR clone 23742 (TRAV12-3, TRAJ17)
CAMTLTGNKLTF

SEQ ID NO: 47484 - protein, 18 aa, Homo sapiens
  CDR3 for beta chain variable domain of TCR clone 23742 (TRBV12-4, TRBJ2-2)
CASSLVAGTRGRTGELFF

SEQ ID NO: 47485 - protein, 14 aa, Homo sapiens
  CDR3 for alpha chain variable domain of TCR clone 23743 (TRAV12-3, TRAJ58)
CATSTETSGSRLTF

SEQ ID NO: 47486 - protein, 13 aa, Homo sapiens
  CDR3 for beta chain variable domain of TCR clone 23743 (TRBV27, TRBJ2-3)
CASSWGRTDTQYF

SEQ ID NO: 47487 - protein, 17 aa, Homo sapiens
  CDR3 for alpha chain variable domain of TCR clone 23744 (TRAV4, TRAJ42)
CLVGVLNYGGSQGNLIF

SEQ ID NO: 47488 - protein, 12 aa, Homo sapiens
  CDR3 for beta chain variable domain of TCR clone 23744 (TRBV20-1, TRBJ2-1)
CSAQYTHNEQFF

SEQ ID NO: 47489 - protein, 12 aa, Homo sapiens
  CDR3 for alpha chain variable domain of TCR clone 23745 (TRAV13-2, TRAJ23)
CAERHRGRKLIF

SEQ ID NO: 47490 - protein, 13 aa, Homo sapiens
  CDR3 for beta chain variable domain of TCR clone 23745 (TRBV2, TRBJ1-6)
CADSGSYNSPLHF

SEQ ID NO: 47491 - protein, 12 aa, Homo sapiens
  CDR3 for alpha chain variable domain of TCR clone 23746 (TRAV12-2, TRAJ10)
WGVTGGGDKLTF

SEQ ID NO: 47492 - protein, 14 aa, Homo sapiens
  CDR3 for beta chain variable domain of TCR clone 23746 (TRBV27, TRBJ2-7)
CASATGTERREQYF

SEQ ID NO: 47493 - protein, 14 aa, Homo sapiens
  CDR3 for alpha chain variable domain of TCR clone 23747 (TRAV12-2, TRAJ17)
CAVLFKAAGNKLTF

SEQ ID NO: 47494 - protein, 17 aa, Homo sapiens
  CDR3 for beta chain variable domain of TCR clone 23747 (TRBV20-1, TRBJ2-2)
CSASGSGQGGLTGELFC

SEQ ID NO: 47495 - protein, 14 aa, Homo sapiens
  CDR3 for alpha chain variable domain of TCR clone 23748 (TRAV17, TRAJ54)
CATDANQGAQKPVF

SEQ ID NO: 47496 - protein, 12 aa, Homo sapiens
  CDR3 for beta chain variable domain of TCR clone 23748 (TRBV6-3, TRBJ2-1)
CASSGSYNEQFF

SEQ ID NO: 47497 - protein, 15 aa, Homo sapiens
  CDR3 for alpha chain variable domain of TCR clone 23749 (TRAV23/DV6, TRAJ30)
CAASSQESRDDKIIF

SEQ ID NO: 47498 - protein, 17 aa, Homo sapiens
  CDR3 for beta chain variable domain of TCR clone 23749 (TRBV4-3, TRBJ2-1)
CASSQFSSGRASGEQSF

SEQ ID NO: 47499 - protein, 16 aa, Homo sapiens
  CDR3 for alpha chain variable domain of TCR clone 23750 (TRAV3, TRAJ23)
CTVKIGIYNQGGKLIF

SEQ ID NO: 47500 - protein, 17 aa, Homo sapiens
  CDR3 for beta chain variable domain of TCR clone 23750 (TRBV10-3, TRBJ2-6)
CAISESTAPSGANVLTF

SEQ ID NO: 47501 - protein, 13 aa, Homo sapiens
  CDR3 for alpha chain variable domain of TCR clone 23751 (TRAV12-3, TRAJ7)
CAMSASGNNRLAF

SEQ ID NO: 47502 - protein, 14 aa, Homo sapiens
  CDR3 for beta chain variable domain of TCR clone 23751 (TRBV13, TRBJ2-5)
CASSLGPRGENQYF

SEQ ID NO: 47503 - protein, 14 aa, Homo sapiens
  CDR3 for alpha chain variable domain of TCR clone 23752 (TRAV4, TRAJ26)
CLVGPHNYGQNSVF

SEQ ID NO: 47504 - protein, 17 aa, Homo sapiens
  CDR3 for beta chain variable domain of TCR clone 23752 (TRBV24-1, TRBJ2-1)
CATSDVSTSGTYNEQFF

SEQ ID NO: 47505 - protein, 18 aa, Homo sapiens
  CDR3 for alpha chain variable domain of TCR clone 23753 (TRAV26-1, TRAJ22)
CIVRVALISSGSARQPTF

SEQ ID NO: 47506 - protein, 13 aa, Homo sapiens
  CDR3 for beta chain variable domain of TCR clone 23753 (TRBV13, TRBJ2-5)
CASSPEVGETQYF

SEQ ID NO: 47507 - protein, 13 aa, Homo sapiens
  CDR3 for alpha chain variable domain of TCR clone 23754 (TRAV1-2, TRAJ9)
CAVLNTGCFKTIF

SEQ ID NO: 47508 - protein, 14 aa, Homo sapiens
  CDR3 for beta chain variable domain of TCR clone 23754 (TRBV20-1, TRBJ2-3)
CSARGGTSTDTQYF

SEQ ID NO: 47509 - protein, 11 aa, Homo sapiens
  CDR3 for alpha chain variable domain of TCR clone 23755 (TRAV21, TRAJ48)
CAVDGNEKLTF

SEQ ID NO: 47510 - protein, 16 aa, Homo sapiens
  CDR3 for beta chain variable domain of TCR clone 23755 (TRBV12-4, TRBJ1-5)
CASSSGPRGSNQTQHF

SEQ ID NO: 47511 - protein, 15 aa, Homo sapiens
  CDR3 for alpha chain variable domain of TCR clone 23756 (TRAV3, TRAJ20)
CAVRDIKLSDSKLSF

SEQ ID NO: 47512 - protein, 15 aa, Homo sapiens
  CDR3 for beta chain variable domain of TCR clone 23756 (TRBV7-9, TRBJ1-6)
CASSSPGRGNSPLHF

SEQ ID NO: 47513 - protein, 13 aa, Homo sapiens
  CDR3 for alpha chain variable domain of TCR clone 23757 (TRAV1-1, TRAJ9)
CAAKNTGGFKTVF

SEQ ID NO: 47514 - protein, 14 aa, Homo sapiens
  CDR3 for beta chain variable domain of TCR clone 23757 (TRBV20-1, TRBJ2-1)
CSAQIGGSANEQFF

SEQ ID NO: 47515 - protein, 15 aa, Homo sapiens
  CDR3 for alpha chain variable domain of TCR clone 23758 (TRAV26-1, TRAJ29)
CIVRVEGSGNTPLVF

SEQ ID NO: 47516 - protein, 14 aa, Homo sapiens
  CDR3 for beta chain variable domain of TCR clone 23758 (TRBV18, TRBJ2-5)
YASSPGVSQETQYF

SEQ ID NO: 47517 - protein, 14 aa, Homo sapiens
  CDR3 for alpha chain variable domain of TCR clone 23759 (TRAV20, TRAJ22)
CAVQVSGSARQLTS

SEQ ID NO: 47518 - protein, 13 aa, Homo sapiens
  CDR3 for beta chain variable domain of TCR clone 23759 (TRBV20-1, TRBJ2-5)
CSAREGGKETQYF

SEQ ID NO: 47519 - protein, 10 aa, Homo sapiens
  CDR3 for alpha chain variable domain of TCR clone 23760 (TRAV9-2, TRAJ43)
CALRMNDMRF

SEQ ID NO: 47520 - protein, 15 aa, Homo sapiens
  CDR3 for beta chain variable domain of TCR clone 23760 (TRBV11-3, TRBJ2-2)
CASSYFSTGTGELFF

SEQ ID NO: 47521 - protein, 12 aa, Homo sapiens
  CDR3 for alpha chain variable domain of TCR clone 23761 (TRAV30, TRAJ43)
CGTEERGNDMRF

SEQ ID NO: 47522 - protein, 13 aa, Homo sapiens
  CDR3 for beta chain variable domain of TCR clone 23761 (TRBV27, TRBJ2-7)
RASSFSQGYEQYF

SEQ ID NO: 47523 - protein, 16 aa, Homo sapiens
  CDR3 for alpha chain variable domain of TCR clone 23762 (TRAV14/DV4, TRAJ17)
CAMREAGRAAGNKLTF

SEQ ID NO: 47524 - protein, 16 aa, Homo sapiens
  CDR3 for beta chain variable domain of TCR clone 23762 (TRBV14, TRBJ2-2)
CASSRSLGDDTGELFF

SEQ ID NO: 47525 - protein, 15 aa, Homo sapiens
  CDR3 for alpha chain variable domain of TCR clone 23763 (TRAV12-2, TRAJ53)
CAVNGGGGSNYKLTF

SEQ ID NO: 47526 - protein, 13 aa, Homo sapiens
  CDR3 for beta chain variable domain of TCR clone 23763 (TRBV3-1, TRBJ1-1)
CAGSPGVITEAFF

SEQ ID NO: 47527 - protein, 12 aa, Homo sapiens
  CDR3 for alpha chain variable domain of TCR clone 23764 (TRAV13-2, TRAJ23)
CAERHRGGKLIF

SEQ ID NO: 47528 - protein, 16 aa, Homo sapiens
  CDR3 for beta chain variable domain of TCR clone 23764 (TRBV20-1, TRBJ1-4)
CSATGQGLLTNEKLFF

SEQ ID NO: 47529 - protein, 16 aa, Homo sapiens
  CDR3 for alpha chain variable domain of TCR clone 23765 (TRAV16, TRAJ4)
CALSRMFPGGYNKLIF

SEQ ID NO: 47530 - protein, 16 aa, Homo sapiens
  CDR3 for beta chain variable domain of TCR clone 23765 (TRBV24-1, TRBJ2-3)
CATSDPGTGATDTQYF

SEQ ID NO: 47531 - protein, 12 aa, Homo sapiens
  CDR3 for alpha chain variable domain of TCR clone 23766 (TRAV13-1, TRAJ21)
CTTTINFNKFYF

SEQ ID NO: 47532 - protein, 14 aa, Homo sapiens
  CDR3 for beta chain variable domain of TCR clone 23766 (TRBV7-2, TRBJ2-7)
CASSPKTSFYEQYF

SEQ ID NO: 47533 - protein, 13 aa, Homo sapiens
  CDR3 for alpha chain variable domain of TCR clone 23767 (TRAV13-1, TRAJ5)
CAARVTGRRALTF

SEQ ID NO: 47534 - protein, 15 aa, Homo sapiens
  CDR3 for beta chain variable domain of TCR clone 23767 (TRBV7-9, TRBJ2-7)
CASGPGGGLTYEQYF

SEQ ID NO: 47535 - protein, 14 aa, Homo sapiens
  CDR3 for alpha chain variable domain of TCR clone 23768 (TRAV9-2, TRAJ39)
CALYIYNAGNMLTF

SEQ ID NO: 47536 - protein, 15 aa, Homo sapiens
  CDR3 for beta chain variable domain of TCR clone 23768 (TRBV12-5, TRBJ2-2)
CASGRLGGNTGELFF

SEQ ID NO: 47537 - protein, 16 aa, Homo sapiens
  CDR3 for alpha chain variable domain of TCR clone 23769 (TRAV22, TRAJ45)
FAVERGKRGGADGLTF

SEQ ID NO: 47538 - protein, 13 aa, Homo sapiens
  CDR3 for beta chain variable domain of TCR clone 23769 (TRBV27, TRBJ1-1)
CASSLSIGAEAFF

SEQ ID NO: 47539 - protein, 18 aa, Homo sapiens
  CDR3 for alpha chain variable domain of TCR clone 23770 (TRAV13-1, TRAJ52)
CAAKNPNAGGTSYGKLTF

SEQ ID NO: 47540 - protein, 11 aa, Homo sapiens
  CDR3 for beta chain variable domain of TCR clone 23770 (TRBV11-2, TRBJ2-2)
CASSLPGELFF

SEQ ID NO: 47541 - protein, 12 aa, Homo sapiens
  CDR3 for alpha chain variable domain of TCR clone 23771 (TRAV17, TRAJ12)
CATLRSSYKLIF

SEQ ID NO: 47542 - protein, 16 aa, Homo sapiens
  CDR3 for beta chain variable domain of TCR clone 23771 (TRBV28, TRBJ2-7)
CASSVFFETGGPEQYF

SEQ ID NO: 47543 - protein, 11 aa, Homo sapiens
  CDR3 for alpha chain variable domain of TCR clone 23772 (TRAV2, TRAJ33)
CAVDSNYQLIW

SEQ ID NO: 47544 - protein, 13 aa, Homo sapiens
  CDR3 for beta chain variable domain of TCR clone 23772 (TRBV19, TRBJ1-2)
CASSVPGQDGYTF

SEQ ID NO: 47545 - protein, 14 aa, Homo sapiens
  CDR3 for alpha chain variable domain of TCR clone 23773 (TRAV12-1, TRAJ12)
CVVTRMDRSYKLIF

SEQ ID NO: 47546 - protein, 13 aa, Homo sapiens
  CDR3 for beta chain variable domain of TCR clone 23773 (TRBV20-1, TRBJ1-1)
CSARGGGNTEAFF

SEQ ID NO: 47547 - protein, 12 aa, Homo sapiens
  CDR3 for alpha chain variable domain of TCR clone 23774 (TRAV1-1, TRAJ8)
CAGGTGFQKLVF

SEQ ID NO: 47548 - protein, 15 aa, Homo sapiens
  CDR3 for beta chain variable domain of TCR clone 23774 (TRBV7-9, TRBJ1-4)
CASSRTGGSNEKLFF

SEQ ID NO: 47549 - protein, 14 aa, Homo sapiens
  CDR3 for alpha chain variable domain of TCR clone 23775 (TRAV26-1, TRAJ38)
CTADNAGNNRKLIW

SEQ ID NO: 47550 - protein, 13 aa, Homo sapiens
  CDR3 for beta chain variable domain of TCR clone 23775 (TRBV20-1, TRBJ1-1)
CSARGGGNTEAFF

SEQ ID NO: 47551 - protein, 16 aa, Homo sapiens
  CDR3 for alpha chain variable domain of TCR clone 23776 (TRAV26-2, TRAJ48)
CILRPPFNSGNEKLTF

SEQ ID NO: 47552 - protein, 15 aa, Homo sapiens
  CDR3 for beta chain variable domain of TCR clone 23776 (TRBV20-1, TRBJ2-3)
CSARVEGTYTDTQYF

SEQ ID NO: 47553 - protein, 15 aa, Homo sapiens
  CDR3 for alpha chain variable domain of TCR clone 23777 (TRAV26-1, TRAJ22)
CIVRVSFWFCKANDL

SEQ ID NO: 47554 - protein, 13 aa, Homo sapiens
  CDR3 for beta chain variable domain of TCR clone 23777 (TRBV7-9, TRBJ1-2)
CASSLKQNYGYTF

SEQ ID NO: 47555 - protein, 14 aa, Homo sapiens
  CDR3 for alpha chain variable domain of TCR clone 23778 (TRAV8-4, TRAJ9)
CAVRRNTGGFKTIF

SEQ ID NO: 47556 - protein, 15 aa, Homo sapiens
  CDR3 for beta chain variable domain of TCR clone 23778 (TRBV10-2, TRBJ2-6)
CASSEQGTGANVLTF

SEQ ID NO: 47557 - protein, 20 aa, Homo sapiens
  CDR3 for alpha chain variable domain of TCR clone 23779 (TRAV12-1, TRAJ42)
SSVIQPPTSVKGGSQGNLIF

SEQ ID NO: 47558 - protein, 12 aa, Homo sapiens
  CDR3 for beta chain variable domain of TCR clone 23779 (TRBV11-2, TRBJ2-3)
GASRGAPNTQYF

SEQ ID NO: 47559 - protein, 13 aa, Homo sapiens
  CDR3 for alpha chain variable domain of TCR clone 23780 (TRAV13-1, TRAJ5)
CAASDTGRRALTI

SEQ ID NO: 47560 - protein, 12 aa, Homo sapiens
  CDR3 for beta chain variable domain of TCR clone 23780 (TRBV28, TRBJ2-3)
CASSLYRDTQYF

SEQ ID NO: 47561 - protein, 14 aa, Homo sapiens
  CDR3 for alpha chain variable domain of TCR clone 23781 (TRAV12-2, TRAJ15)
CAPHTGQAGTALIF

SEQ ID NO: 47562 - protein, 17 aa, Homo sapiens
  CDR3 for beta chain variable domain of TCR clone 23781 (TRBV5-5, TRBJ1-2)
CASSLGSLGGQSEGYTF

SEQ ID NO: 47563 - protein, 13 aa, Homo sapiens
  CDR3 for alpha chain variable domain of TCR clone 23782 (TRAV20, TRAJ37)
CAGCSSNTGKLIF

SEQ ID NO: 47564 - protein, 11 aa, Homo sapiens
  CDR3 for beta chain variable domain of TCR clone 23782 (TRBV12-4, TRBJ2-3)
CASTASDTQYF

SEQ ID NO: 47565 - protein, 16 aa, Homo sapiens
  CDR3 for alpha chain variable domain of TCR clone 23783 (TRAV13-2, TRAJ17)
CAENKGGEAAGNKLTF

SEQ ID NO: 47566 - protein, 12 aa, Homo sapiens
  CDR3 for beta chain variable domain of TCR clone 23783 (TRBV11-2, TRBJ2-1)
CASSPGNNEQFF

SEQ ID NO: 47567 - protein, 16 aa, Homo sapiens
  CDR3 for alpha chain variable domain of TCR clone 23784 (TRAV12-3, TRAJ53)
CAMSPGSGGSNYKLTF

SEQ ID NO: 47568 - protein, 11 aa, Homo sapiens
  CDR3 for beta chain variable domain of TCR clone 23784 (TRBV29-1, TRBJ2-5)
CSEDRTGTQYY

SEQ ID NO: 47569 - protein, 12 aa, Homo sapiens
  CDR3 for alpha chain variable domain of TCR clone 23785 (TRAV8-1, TRAJ26)
CAVNSYGQNFVF

SEQ ID NO: 47570 - protein, 15 aa, Homo sapiens
  CDR3 for beta chain variable domain of TCR clone 23785 (TRBV20-1, TRBJ1-1)
CSASWDRFLNTEAFF

SEQ ID NO: 47571 - protein, 17 aa, Homo sapiens
  CDR3 for alpha chain variable domain of TCR clone 23786 (TRAV3, TRAJ6)
CAVRDGPRAGGSYIPTF

SEQ ID NO: 47572 - protein, 16 aa, Homo sapiens
  CDR3 for beta chain variable domain of TCR clone 23786 (TRBV6-1, TRBJ2-5)
CASSETLDRGAETQYF

SEQ ID NO: 47573 - protein, 16 aa, Homo sapiens
  CDR3 for alpha chain variable domain of TCR clone 23787 (TRAV12-1, TRAJ15)
CVVSPAGQPGRNCSDL

SEQ ID NO: 47574 - protein, 13 aa, Homo sapiens
  CDR3 for beta chain variable domain of TCR clone 23787 (TRBV7-2, TRBJ2-4)
CASSREHANIQYF

SEQ ID NO: 47575 - protein, 12 aa, Homo sapiens
  CDR3 for alpha chain variable domain of TCR clone 23788 (TRAV27, TRAJ35)
CAGADFGNVLHC

SEQ ID NO: 47576 - protein, 16 aa, Homo sapiens
  CDR3 for beta chain variable domain of TCR clone 23788 (TRBV6-1, TRBJ2-1)
CASILRQGSAYNEQFF

SEQ ID NO: 47577 - protein, 13 aa, Homo sapiens
  CDR3 for alpha chain variable domain of TCR clone 23789 (TRAV26-2, TRAJ43)
CTLRAVNNNDMRF

SEQ ID NO: 47578 - protein, 15 aa, Homo sapiens
  CDR3 for beta chain variable domain of TCR clone 23789 (TRBV7-2, TRBJ2-1)
CASTHGTGIYNEQFF

SEQ ID NO: 47579 - protein, 14 aa, Homo sapiens
  CDR3 for alpha chain variable domain of TCR clone 23790 (TRAV13-1, TRAJ35)
CAASKGGFGNVLHC

SEQ ID NO: 47580 - protein, 13 aa, Homo sapiens
  CDR3 for beta chain variable domain of TCR clone 23790 (TRBV7-3, TRBJ1-1)
WASSQDWGAEAFF

SEQ ID NO: 47581 - protein, 12 aa, Homo sapiens
  CDR3 for alpha chain variable domain of TCR clone 23791 (TRAV23/DV6, TRAJ30)
CAASKGDGKIIF

SEQ ID NO: 47582 - protein, 18 aa, Homo sapiens
  CDR3 for beta chain variable domain of TCR clone 23791 (TRBV10-3, TRBJ2-3)
CAISESRVGPMRGDTQYF

SEQ ID NO: 47583 - protein, 17 aa, Homo sapiens
  CDR3 for alpha chain variable domain of TCR clone 23792 (TRAV26-1, TRAJ53)
CIVRVDDSGGSHYKLTF

SEQ ID NO: 47584 - protein, 15 aa, Homo sapiens
  CDR3 for beta chain variable domain of TCR clone 23792 (TRBV20-1, TRBJ2-7)
CSARVPAAYFYEQYF

SEQ ID NO: 47585 - protein, 12 aa, Homo sapiens
  CDR3 for alpha chain variable domain of TCR clone 23793 (TRAV13-1, TRAJ21)
CAAKEGFNKFYF

SEQ ID NO: 47586 - protein, 13 aa, Homo sapiens
  CDR3 for beta chain variable domain of TCR clone 23793 (TRBV4-2, TRBJ1-1)
CASSQAGNTEAFF

SEQ ID NO: 47587 - protein, 15 aa, Homo sapiens
  CDR3 for alpha chain variable domain of TCR clone 23794 (TRAV21, TRAJ53)
CATLNSGGGNYKLTF

SEQ ID NO: 47588 - protein, 16 aa, Homo sapiens
  CDR3 for beta chain variable domain of TCR clone 23794 (TRBV9, TRBJ2-1)
CASSVGGGGNYNEQFF

SEQ ID NO: 47589 - protein, 15 aa, Homo sapiens
  CDR3 for alpha chain variable domain of TCR clone 23795 (TRAV3, TRAJ5)
CAVRVLDTGRRALTF

SEQ ID NO: 47590 - protein, 13 aa, Homo sapiens
  CDR3 for beta chain variable domain of TCR clone 23795 (TRBV12-4, TRBJ2-7)
CASSPTETYEQYF

SEQ ID NO: 47591 - protein, 13 aa, Homo sapiens
  CDR3 for alpha chain variable domain of TCR clone 23796 (TRAV29/DV5, TRAJ31)
CAASRNNNARLMF

SEQ ID NO: 47592 - protein, 13 aa, Homo sapiens
  CDR3 for beta chain variable domain of TCR clone 23796 (TRBV6-1, TRBJ1-1)
CASSRQGNTEAFF

SEQ ID NO: 47593 - protein, 14 aa, Homo sapiens
  CDR3 for alpha chain variable domain of TCR clone 23797 (TRAV23/DV6, TRAJ22)
CAASRSGSARQLTF

SEQ ID NO: 47594 - protein, 15 aa, Homo sapiens
  CDR3 for beta chain variable domain of TCR clone 23797 (TRBV12-4, TRBJ1-1)
CASTLTEGAGSEAFF

SEQ ID NO: 47595 - protein, 14 aa, Homo sapiens
  CDR3 for alpha chain variable domain of TCR clone 23798 (TRAV35, TRAJ22)
CAGLRPGSARHLTF

SEQ ID NO: 47596 - protein, 15 aa, Homo sapiens
  CDR3 for beta chain variable domain of TCR clone 23798 (TRBV12-4, TRBJ2-5)
CASSPPTGLQETQYF

SEQ ID NO: 47597 - protein, 15 aa, Homo sapiens
  CDR3 for alpha chain variable domain of TCR clone 23799 (TRAV26-1, TRAJ29)
CIVRVEGSGNTPLVF

SEQ ID NO: 47598 - protein, 15 aa, Homo sapiens
  CDR3 for beta chain variable domain of TCR clone 23799 (TRBV7-9, TRBJ1-5)
CASSLGHQPNQPQHF

SEQ ID NO: 47599 - protein, 15 aa, Homo sapiens
  CDR3 for alpha chain variable domain of TCR clone 23800 (TRAV17, TRAJ52)
CATEAGGTSYGKPTF

SEQ ID NO: 47600 - protein, 14 aa, Homo sapiens
  CDR3 for beta chain variable domain of TCR clone 23800 (TRBV28, TRBJ1-5)
CASSLGVLVKPQHF

SEQ ID NO: 47601 - protein, 14 aa, Homo sapiens
  CDR3 for alpha chain variable domain of TCR clone 23801 (TRAV1-2, TRAJ16)
CAVNRFSDGQKLLF

SEQ ID NO: 47602 - protein, 17 aa, Homo sapiens
  CDR3 for beta chain variable domain of TCR clone 23801 (TRBV7-3, TRBJ2-3)
CASSLMRRMRGADTQYF

SEQ ID NO: 47603 - protein, 15 aa, Homo sapiens
  CDR3 for alpha chain variable domain of TCR clone 23802 (TRAV26-1, TRAJ48)
CIARWSWFGNEKLTF

SEQ ID NO: 47604 - protein, 12 aa, Homo sapiens
  CDR3 for beta chain variable domain of TCR clone 23802 (TRBV19, TRBJ2-5)
CASSISEETQHF

SEQ ID NO: 47605 - protein, 12 aa, Homo sapiens
  CDR3 for alpha chain variable domain of TCR clone 23803 (TRAV8-3, TRAJ26)
CAGDYYGQNFVF

SEQ ID NO: 47606 - protein, 15 aa, Homo sapiens
  CDR3 for beta chain variable domain of TCR clone 23803 (TRBV9, TRBJ2-1)
CASSLAGSSYNEQFF

SEQ ID NO: 47607 - protein, 13 aa, Homo sapiens
  CDR3 for alpha chain variable domain of TCR clone 23804 (TRAV20, TRAJ37)
CAGCSSNTGKLIF

SEQ ID NO: 47608 - protein, 11 aa, Homo sapiens
  CDR3 for beta chain variable domain of TCR clone 23804 (TRBV12-4, TRBJ2-3)
CVSTATDTQYF

SEQ ID NO: 47609 - protein, 14 aa, Homo sapiens
  CDR3 for alpha chain variable domain of TCR clone 23805 (TRAV8-4, TRAJ54)
CAVSEVLGAQKLVF

SEQ ID NO: 47610 - protein, 13 aa, Homo sapiens
  CDR3 for beta chain variable domain of TCR clone 23805 (TRBV27, TRBJ2-7)
YASSFVSSYEQYF

SEQ ID NO: 47611 - protein, 13 aa, Homo sapiens
  CDR3 for alpha chain variable domain of TCR clone 23806 (TRAV6, TRAJ20)
CALAVSNDYKLSF

SEQ ID NO: 47612 - protein, 16 aa, Homo sapiens
  CDR3 for beta chain variable domain of TCR clone 23806 (TRBV7-9, TRBJ2-1)
CASSYVAGGSYNEQFF

SEQ ID NO: 47613 - protein, 14 aa, Homo sapiens
  CDR3 for alpha chain variable domain of TCR clone 23807 (TRAV16, TRAJ33)
CALSAMDSNYQLIW

SEQ ID NO: 47614 - protein, 14 aa, Homo sapiens
  CDR3 for beta chain variable domain of TCR clone 23807 (TRBV7-2, TRBJ2-7)
CASSPKTSFYEQYF

SEQ ID NO: 47615 - protein, 16 aa, Homo sapiens
  CDR3 for alpha chain variable domain of TCR clone 23808 (TRAV3, TRAJ5)
CAVRNLVDTGRRALTF

SEQ ID NO: 47616 - protein, 16 aa, Homo sapiens
  CDR3 for beta chain variable domain of TCR clone 23808 (TRBV4-2, TRBJ2-7)
CASSQEGLANSYEQYF

SEQ ID NO: 47617 - protein, 13 aa, Homo sapiens
  CDR3 for alpha chain variable domain of TCR clone 23809 (TRAV3, TRAJ27)
CAVRPLGAGKSTF

SEQ ID NO: 47618 - protein, 13 aa, Homo sapiens
  CDR3 for beta chain variable domain of TCR clone 23809 (TRBV7-9, TRBJ2-3)
CVSSPGSTDTQYF

SEQ ID NO: 47619 - protein, 11 aa, Homo sapiens
  CDR3 for alpha chain variable domain of TCR clone 23810 (TRAV12-1, TRAJ30)
CVVNGQDKIIF

SEQ ID NO: 47620 - protein, 12 aa, Homo sapiens
  CDR3 for beta chain variable domain of TCR clone 23810 (TRBV27, TRBJ2-2)
CASKLVTGELFF

SEQ ID NO: 47621 - protein, 16 aa, Homo sapiens
  CDR3 for alpha chain variable domain of TCR clone 23811 (TRAV17, TRAJ28)
CATASVSGAGRYQLTF

SEQ ID NO: 47622 - protein, 11 aa, Homo sapiens
  CDR3 for beta chain variable domain of TCR clone 23811 (TRBV7-9, TRBJ2-5)
CASSLGETQYF

SEQ ID NO: 47623 - protein, 16 aa, Homo sapiens
  CDR3 for alpha chain variable domain of TCR clone 23812 (TRAV14/DV4, TRAJ12)
CAMREVLMDSSYKLIF

SEQ ID NO: 47624 - protein, 14 aa, Homo sapiens
  CDR3 for beta chain variable domain of TCR clone 23812 (TRBV18, TRBJ2-5)
CASSPGVSQETQYF

SEQ ID NO: 47625 - protein, 14 aa, Homo sapiens
  CDR3 for alpha chain variable domain of TCR clone 23813 (TRAV16, TRAJ15)
CALSFNQAGTALIF

SEQ ID NO: 47626 - protein, 16 aa, Homo sapiens
  CDR3 for beta chain variable domain of TCR clone 23813 (TRBV9, TRBJ2-7)
CSSSAGPDRSPYEQYF

SEQ ID NO: 47627 - protein, 16 aa, Homo sapiens
  CDR3 for alpha chain variable domain of TCR clone 23814 (TRAV38-1, TRAJ32)
CAFMKGGGGATNKLIF

SEQ ID NO: 47628 - protein, 13 aa, Homo sapiens
  CDR3 for beta chain variable domain of TCR clone 23814 (TRBV20-1, TRBJ2-5)
CSARETFQETQYF

SEQ ID NO: 47629 - protein, 12 aa, Homo sapiens
  CDR3 for alpha chain variable domain of TCR clone 23815 (TRAV8-6, TRAJ57)
CAVQGGSEKLVF

SEQ ID NO: 47630 - protein, 11 aa, Homo sapiens
  CDR3 for beta chain variable domain of TCR clone 23815 (TRBV19, TRBJ1-1)
SASSIGSEAFF

SEQ ID NO: 47631 - protein, 16 aa, Homo sapiens
  CDR3 for alpha chain variable domain of TCR clone 23816 (TRAV17, TRAJ22)
CATGPSSSGSARQLTF

SEQ ID NO: 47632 - protein, 13 aa, Homo sapiens
  CDR3 for beta chain variable domain of TCR clone 23816 (TRBV11-2, TRBJ2-1)
CASSLGLAGGRFF

SEQ ID NO: 47633 - protein, 12 aa, Homo sapiens
  CDR3 for alpha chain variable domain of TCR clone 23817 (TRAV1-2, TRAJ33)
CAALDSNYQLIW

SEQ ID NO: 47634 - protein, 14 aa, Homo sapiens
  CDR3 for beta chain variable domain of TCR clone 23817 (TRBV12-5, TRBJ2-5)
CASGSRTHQETQYF

SEQ ID NO: 47635 - protein, 14 aa, Homo sapiens
  CDR3 for alpha chain variable domain of TCR clone 23818 (TRAV17, TRAJ39)
CATDPVRAGNLLTF

SEQ ID NO: 47636 - protein, 15 aa, Homo sapiens
  CDR3 for beta chain variable domain of TCR clone 23818 (TRBV13, TRBJ1-5)
CASSFGQGGVQPQHF

SEQ ID NO: 47637 - protein, 13 aa, Homo sapiens
  CDR3 for alpha chain variable domain of TCR clone 23819 (TRAV20, TRAJ37)
CAGCSSNTGKLIF

SEQ ID NO: 47638 - protein, 11 aa, Homo sapiens
  CDR3 for beta chain variable domain of TCR clone 23819 (TRBV12-4, TRBJ2-3)
CDSTATDTQYF

SEQ ID NO: 47639 - protein, 12 aa, Homo sapiens
  CDR3 for alpha chain variable domain of TCR clone 23820 (TRAV13-1, TRAJ21)
CAAKEGFNKFYF

SEQ ID NO: 47640 - protein, 14 aa, Homo sapiens
  CDR3 for beta chain variable domain of TCR clone 23820 (TRBV5-4, TRBJ1-1)
CASSLGSRRDEAFF

SEQ ID NO: 47641 - protein, 14 aa, Homo sapiens
  CDR3 for alpha chain variable domain of TCR clone 23821 (TRAV20, TRAJ9)
CAVQASTGGFKTIF

SEQ ID NO: 47642 - protein, 14 aa, Homo sapiens
  CDR3 for beta chain variable domain of TCR clone 23821 (TRBV7-9, TRBJ2-5)
CASSLAPDQETQYF

SEQ ID NO: 47643 - protein, 11 aa, Homo sapiens
  CDR3 for alpha chain variable domain of TCR clone 23822 (TRAV2, TRAJ13)
CASGGYQQVTF

SEQ ID NO: 47644 - protein, 16 aa, Homo sapiens
  CDR3 for beta chain variable domain of TCR clone 23822 (TRBV6-1, TRBJ2-5)
CASSETLDRGAETQYF

SEQ ID NO: 47645 - protein, 12 aa, Homo sapiens
  CDR3 for alpha chain variable domain of TCR clone 23823 (TRAV12-1, TRAJ40)
CVVYSATYKYIF

SEQ ID NO: 47646 - protein, 18 aa, Homo sapiens
  CDR3 for beta chain variable domain of TCR clone 23823 (TRBV11-2, TRBJ2-3)
CASSLGGASRGAPNTQYF

SEQ ID NO: 47647 - protein, 11 aa, Homo sapiens
  CDR3 for alpha chain variable domain of TCR clone 23824 (TRAV2, TRAJ13)
CASGGYQKVTF

SEQ ID NO: 47648 - protein, 18 aa, Homo sapiens
  CDR3 for beta chain variable domain of TCR clone 23824 (TRBV12-4, TRBJ2-2)
CASRPFGAGALNTGELFS

SEQ ID NO: 47649 - protein, 12 aa, Homo sapiens
  CDR3 for alpha chain variable domain of TCR clone 23825 (TRAV16, TRAJ10)
CSRTGGGNKLTF

SEQ ID NO: 47650 - protein, 15 aa, Homo sapiens
  CDR3 for beta chain variable domain of TCR clone 23825 (TRBV6-3, TRBJ2-7)
RASSSPGTVFYEQYF

SEQ ID NO: 47651 - protein, 17 aa, Homo sapiens
  CDR3 for alpha chain variable domain of TCR clone 23826 (TRAV23/DV6, TRAJ57)
CAASSTLSQGGSEKLVF

SEQ ID NO: 47652 - protein, 14 aa, Homo sapiens
  CDR3 for beta chain variable domain of TCR clone 23826 (TRBV25-1, TRBJ1-1)
CASTHLGGNTGAFF

SEQ ID NO: 47653 - protein, 18 aa, Homo sapiens
  CDR3 for alpha chain variable domain of TCR clone 23827 (TRAV21, TRAJ52)
CAVRPSPAGGTSYGKLTY

SEQ ID NO: 47654 - protein, 17 aa, Homo sapiens
  CDR3 for beta chain variable domain of TCR clone 23827 (TRBV13, TRBJ2-3)
CASSLSRVAGGRNTQYF

SEQ ID NO: 47655 - protein, 17 aa, Homo sapiens
  CDR3 for alpha chain variable domain of TCR clone 23828 (TRAV13-1, TRAJ52)
CAASSGAGGTSYGKLTF

SEQ ID NO: 47656 - protein, 11 aa, Homo sapiens
  CDR3 for beta chain variable domain of TCR clone 23828 (TRBV29-1, TRBJ2-5)
CSEDRTGTQYF

SEQ ID NO: 47657 - protein, 14 aa, Homo sapiens
  CDR3 for alpha chain variable domain of TCR clone 23829 (TRAV12-3, TRAJ42)
CAMNYGGSQGNPIF

SEQ ID NO: 47658 - protein, 15 aa, Homo sapiens
  CDR3 for beta chain variable domain of TCR clone 23829 (TRBV5-7, TRBJ1-5)
CASSYGKLWDQPQHF

SEQ ID NO: 47659 - protein, 13 aa, Homo sapiens
  CDR3 for alpha chain variable domain of TCR clone 23830 (TRAV2, TRAJ23)
CAVMGNQGGKLIF

SEQ ID NO: 47660 - protein, 15 aa, Homo sapiens
  CDR3 for beta chain variable domain of TCR clone 23830 (TRBV11-2, TRBJ2-1)
CASSSSTISCNEQFF

SEQ ID NO: 47661 - protein, 12 aa, Homo sapiens
  CDR3 for alpha chain variable domain of TCR clone 23831 (TRAV3, TRAJ39)
CAVIEWGNMLTF

SEQ ID NO: 47662 - protein, 14 aa, Homo sapiens
  CDR3 for beta chain variable domain of TCR clone 23831 (TRBV7-8, TRBJ2-3)
CASSFPDGQDTQYF

SEQ ID NO: 47663 - protein, 14 aa, Homo sapiens
  CDR3 for alpha chain variable domain of TCR clone 23832 (TRAV1-2, TRAJ16)
CAFNRFSDGQKLLF

SEQ ID NO: 47664 - protein, 13 aa, Homo sapiens
  CDR3 for beta chain variable domain of TCR clone 23832 (TRBV4-1, TRBJ2-1)
CASSQAGGDEQFF

SEQ ID NO: 47665 - protein, 11 aa, Homo sapiens
  CDR3 for alpha chain variable domain of TCR clone 23833 (TRAV2, TRAJ33)
CAVDSNYQLIW

SEQ ID NO: 47666 - protein, 15 aa, Homo sapiens
  CDR3 for beta chain variable domain of TCR clone 23833 (TRBV19, TRBJ1-2)
RASSVGQVLNYGYTF

SEQ ID NO: 47667 - protein, 13 aa, Homo sapiens
  CDR3 for alpha chain variable domain of TCR clone 23834 (TRAV3, TRAJ15)
CAARDQAGTALIF

SEQ ID NO: 47668 - protein, 15 aa, Homo sapiens
  CDR3 for beta chain variable domain of TCR clone 23834 (TRBV11-1, TRBJ2-7)
CASSLNYGASYEQYF

SEQ ID NO: 47669 - protein, 11 aa, Homo sapiens
  CDR3 for alpha chain variable domain of TCR clone 23835 (TRAV24, TRAJ41)
CAFIQAYALNF

SEQ ID NO: 47670 - protein, 17 aa, Homo sapiens
  CDR3 for beta chain variable domain of TCR clone 23835 (TRBV4-3, TRBJ2-1)
CASSQELAIVSSNEQFF

SEQ ID NO: 47671 - protein, 13 aa, Homo sapiens
  CDR3 for alpha chain variable domain of TCR clone 23836 (TRAV2, TRAJ40)
CAVVTSGTYKYIF

SEQ ID NO: 47672 - protein, 16 aa, Homo sapiens
  CDR3 for beta chain variable domain of TCR clone 23836 (TRBV29-1, TRBJ1-2)
CSVEANRDIASYGYTF

SEQ ID NO: 47673 - protein, 14 aa, Homo sapiens
  CDR3 for alpha chain variable domain of TCR clone 23837 (TRAV12-1, TRAJ17)
CVVNYKSAGNKLTF

SEQ ID NO: 47674 - protein, 17 aa, Homo sapiens
  CDR3 for beta chain variable domain of TCR clone 23837 (TRBV20-1, TRBJ2-1)
CSASSSGLAGSYNEQFF

SEQ ID NO: 47675 - protein, 14 aa, Homo sapiens
  CDR3 for alpha chain variable domain of TCR clone 23838 (TRAV8-4, TRAJ13)
CAVTLSGGYQKVTF

SEQ ID NO: 47676 - protein, 13 aa, Homo sapiens
  CDR3 for beta chain variable domain of TCR clone 23838 (TRBV7-3, TRBJ1-1)
CASSQDWGAEAFF

SEQ ID NO: 47677 - protein, 18 aa, Homo sapiens
  CDR3 for alpha chain variable domain of TCR clone 23839 (TRAV12-3, TRAJ52)
CAMSRTNAGGTSYGKLTF

SEQ ID NO: 47678 - protein, 17 aa, Homo sapiens
  CDR3 for beta chain variable domain of TCR clone 23839 (TRBV7-3, TRBJ2-3)
CASSLMERMRGADTQYF

SEQ ID NO: 47679 - protein, 17 aa, Homo sapiens
  CDR3 for alpha chain variable domain of TCR clone 23840 (TRAV3, TRAJ42)
CAVRDRDYGGSQGNLIF

SEQ ID NO: 47680 - protein, 14 aa, Homo sapiens
  CDR3 for beta chain variable domain of TCR clone 23840 (TRBV4-2, TRBJ2-1)
CASGLDRAYNEQFF

SEQ ID NO: 47681 - protein, 16 aa, Homo sapiens
  CDR3 for alpha chain variable domain of TCR clone 23841 (TRAV12-2, TRAJ53)
CAMSPGSGGSNYKLTF

SEQ ID NO: 47682 - protein, 11 aa, Homo sapiens
  CDR3 for beta chain variable domain of TCR clone 23841 (TRBV29-1, TRBJ2-5)
CSEDRTGTQYF

SEQ ID NO: 47683 - protein, 11 aa, Homo sapiens
  CDR3 for alpha chain variable domain of TCR clone 23842 (TRAV17, TRAJ31)
SATSNNARLMF

SEQ ID NO: 47684 - protein, 14 aa, Homo sapiens
  CDR3 for beta chain variable domain of TCR clone 23842 (TRBV18, TRBJ2-7)
CASSPRGGAYEQYF

SEQ ID NO: 47685 - protein, 13 aa, Homo sapiens
  CDR3 for alpha chain variable domain of TCR clone 23843 (TRAV8-3, TRAJ28)
CAVGAAGSYQLTF

SEQ ID NO: 47686 - protein, 14 aa, Homo sapiens
  CDR3 for beta chain variable domain of TCR clone 23843 (TRBV7-2, TRBJ2-7)
CASRSQGAAYEQYF

SEQ ID NO: 47687 - protein, 16 aa, Homo sapiens
  CDR3 for alpha chain variable domain of TCR clone 23844 (TRAV16, TRAJ52)
CALSAAGGTSYGKLTF

SEQ ID NO: 47688 - protein, 17 aa, Homo sapiens
  CDR3 for beta chain variable domain of TCR clone 23844 (TRBV11-2, TRBJ2-1)
CASSLYPPGVEYNEQLF

SEQ ID NO: 47689 - protein, 14 aa, Homo sapiens
  CDR3 for alpha chain variable domain of TCR clone 23845 (TRAV35, TRAJ22)
CAGLRPGSARQLTF

SEQ ID NO: 47690 - protein, 11 aa, Homo sapiens
  CDR3 for beta chain variable domain of TCR clone 23845 (TRBV29-1, TRBJ2-5)
CSEDRTGTQYF

SEQ ID NO: 47691 - protein, 12 aa, Homo sapiens
  CDR3 for alpha chain variable domain of TCR clone 23846 (TRAV12-3, TRAJ20)
CAMVRGDYKLSF

SEQ ID NO: 47692 - protein, 13 aa, Homo sapiens
  CDR3 for beta chain variable domain of TCR clone 23846 (TRBV7-9, TRBJ1-2)
CASSLKQNYGYTF

SEQ ID NO: 47693 - protein, 15 aa, Homo sapiens
  CDR3 for alpha chain variable domain of TCR clone 23847 (TRAV21, TRAJ53)
CATLNSGGSNYKLTF

SEQ ID NO: 47694 - protein, 20 aa, Homo sapiens
  CDR3 for beta chain variable domain of TCR clone 23847 (TRBV7-8, TRBJ2-2)
CASSHLFPGPTIHITGELFF

SEQ ID NO: 47695 - protein, 14 aa, Homo sapiens
  CDR3 for alpha chain variable domain of TCR clone 23848 (TRAV4, TRAJ26)
CLVGPHNYGQNFVF

SEQ ID NO: 47696 - protein, 17 aa, Homo sapiens
  CDR3 for beta chain variable domain of TCR clone 23848 (TRBV24-1, TRBJ2-1)
CATSDVSTSGTYNEQSF

SEQ ID NO: 47697 - protein, 16 aa, Homo sapiens
  CDR3 for alpha chain variable domain of TCR clone 23849 (TRAV4, TRAJ22)
CLVGVLYSGSARQLTF

SEQ ID NO: 47698 - protein, 16 aa, Homo sapiens
  CDR3 for beta chain variable domain of TCR clone 23849 (TRBV7-9, TRBJ2-1)
CASSDVAGGSYNEQFF

SEQ ID NO: 47699 - protein, 17 aa, Homo sapiens
  CDR3 for alpha chain variable domain of TCR clone 23850 (TRAV13-1, TRAJ52)
CAASSGAGGTSYGKLPF

SEQ ID NO: 47700 - protein, 15 aa, Homo sapiens
  CDR3 for beta chain variable domain of TCR clone 23850 (TRBV2, TRBJ2-1)
CASSELAGSYNEQFF

SEQ ID NO: 47701 - protein, 14 aa, Homo sapiens
  CDR3 for alpha chain variable domain of TCR clone 23851 (TRAV13-1, TRAJ44)
CAAKATGTASKLTF

SEQ ID NO: 47702 - protein, 14 aa, Homo sapiens
  CDR3 for beta chain variable domain of TCR clone 23851 (TRBV19, TRBJ2-2)
CASSTLHRPGELFF

SEQ ID NO: 47703 - protein, 13 aa, Homo sapiens
  CDR3 for alpha chain variable domain of TCR clone 23852 (TRAV17, TRAJ9)
CATDYTGGFKTIF

SEQ ID NO: 47704 - protein, 16 aa, Homo sapiens
  CDR3 for beta chain variable domain of TCR clone 23852 (TRBV7-7, TRBJ2-1)
CASGLASGTSYNEQFF

SEQ ID NO: 47705 - protein, 14 aa, Homo sapiens
  CDR3 for alpha chain variable domain of TCR clone 23853 (TRAV35, TRAJ33)
CAGSSQDSNSQLIW

SEQ ID NO: 47706 - protein, 15 aa, Homo sapiens
  CDR3 for beta chain variable domain of TCR clone 23853 (TRBV20-1, TRBJ2-7)
CSAESGTSGAYEQYF

SEQ ID NO: 47707 - protein, 16 aa, Homo sapiens
  CDR3 for alpha chain variable domain of TCR clone 23854 (TRAV12-3, TRAJ53)
CAMSPGSGGRNYKLTF

SEQ ID NO: 47708 - protein, 16 aa, Homo sapiens
  CDR3 for beta chain variable domain of TCR clone 23854 (TRBV4-2, TRBJ1-1)
CASSQAGFGMNTEAFF

SEQ ID NO: 47709 - protein, 12 aa, Homo sapiens
  CDR3 for alpha chain variable domain of TCR clone 23855 (TRAV21, TRAJ33)
CAKMDSNYQLIW

SEQ ID NO: 47710 - protein, 14 aa, Homo sapiens
  CDR3 for beta chain variable domain of TCR clone 23855 (TRBV2, TRBJ2-7)
CASSLTSGGHEQYF

SEQ ID NO: 47711 - protein, 15 aa, Homo sapiens
  CDR3 for alpha chain variable domain of TCR clone 23856 (TRAV3, TRAJ5)
CAVRDLDTGRRALTF

SEQ ID NO: 47712 - protein, 13 aa, Homo sapiens
  CDR3 for beta chain variable domain of TCR clone 23856 (TRBV12-4, TRBJ2-7)
YASSPTETYEQYF

SEQ ID NO: 47713 - protein, 12 aa, Homo sapiens
  CDR3 for alpha chain variable domain of TCR clone 23857 (TRAV21, TRAJ33)
CAKMDSNYQLIW

SEQ ID NO: 47714 - protein, 14 aa, Homo sapiens
  CDR3 for beta chain variable domain of TCR clone 23857 (TRBV2, TRBJ2-7)
CASSLTSGGYEQYV

SEQ ID NO: 47715 - protein, 14 aa, Homo sapiens
  CDR3 for alpha chain variable domain of TCR clone 23858 (TRAV17, TRAJ22)
CATSPSGSARQLTF

SEQ ID NO: 47716 - protein, 15 aa, Homo sapiens
  CDR3 for beta chain variable domain of TCR clone 23858 (TRBV4-1, TRBJ2-5)
CASSQWDLYKETQYF

SEQ ID NO: 47717 - protein, 11 aa, Homo sapiens
  CDR3 for alpha chain variable domain of TCR clone 23859 (TRAV17, TRAJ31)
CATFNNARLMF

SEQ ID NO: 47718 - protein, 16 aa, Homo sapiens
  CDR3 for beta chain variable domain of TCR clone 23859 (TRBV7-8, TRBJ2-4)
CASSAERTLAKNIQYF

SEQ ID NO: 47719 - protein, 13 aa, Homo sapiens
  CDR3 for alpha chain variable domain of TCR clone 23860 (TRAV21, TRAJ20)
CAVGLRVDYKLSF

SEQ ID NO: 47720 - protein, 11 aa, Homo sapiens
  CDR3 for beta chain variable domain of TCR clone 23860 (TRBV25-1, TRBJ2-1)
CATTRIPEQFF

SEQ ID NO: 47721 - protein, 16 aa, Homo sapiens
  CDR3 for alpha chain variable domain of TCR clone 23861 (TRAV3, TRAJ21)
CAVRDIERGNFNKYYF

SEQ ID NO: 47722 - protein, 13 aa, Homo sapiens
  CDR3 for beta chain variable domain of TCR clone 23861 (TRBV27, TRBJ2-7)
CASSLTTGYEQYF

SEQ ID NO: 47723 - protein, 14 aa, Homo sapiens
  CDR3 for alpha chain variable domain of TCR clone 23862 (TRAV21, TRAJ35)
CAVMQIGFGNVLHC

SEQ ID NO: 47724 - protein, 12 aa, Homo sapiens
  CDR3 for beta chain variable domain of TCR clone 23862 (TRBV7-9, TRBJ2-7)
CASSIKREEQYF

SEQ ID NO: 47725 - protein, 15 aa, Homo sapiens
  CDR3 for alpha chain variable domain of TCR clone 23863 (TRAV8-3, TRAJ32)
CAVEVVLQTSSSLEL

SEQ ID NO: 47726 - protein, 12 aa, Homo sapiens
  CDR3 for beta chain variable domain of TCR clone 23863 (TRBV7-8, TRBJ2-7)
CASSLGDREQYF

SEQ ID NO: 47727 - protein, 13 aa, Homo sapiens
  CDR3 for alpha chain variable domain of TCR clone 23864 (TRAV12-3, TRAJ13)
CAMSSGGYQKVTL

SEQ ID NO: 47728 - protein, 13 aa, Homo sapiens
  CDR3 for beta chain variable domain of TCR clone 23864 (TRBV20-1, TRBJ1-1)
CSAPPGGHTEAFF

SEQ ID NO: 47729 - protein, 15 aa, Homo sapiens
  CDR3 for alpha chain variable domain of TCR clone 23865 (TRAV34, TRAJ38)
CGADFTPGNNRKLIW

SEQ ID NO: 47730 - protein, 16 aa, Homo sapiens
  CDR3 for beta chain variable domain of TCR clone 23865 (TRBV12-5, TRBJ2-5)
CASGPRTSGNQEAQYF

SEQ ID NO: 47731 - protein, 15 aa, Homo sapiens
  CDR3 for alpha chain variable domain of TCR clone 23866 (TRAV26-2, TRAJ13)
CILRDLSGGYQKVTF

SEQ ID NO: 47732 - protein, 15 aa, Homo sapiens
  CDR3 for beta chain variable domain of TCR clone 23866 (TRBV28, TRBJ2-5)
CASSPPWSYQETQCF

SEQ ID NO: 47733 - protein, 15 aa, Homo sapiens
  CDR3 for alpha chain variable domain of TCR clone 23867 (TRAV2, TRAJ9)
CAVAALNTGGFKTIF

SEQ ID NO: 47734 - protein, 17 aa, Homo sapiens
  CDR3 for beta chain variable domain of TCR clone 23867 (TRBV11-2, TRBJ2-1)
CASSLYPPGVEYNEQFF

SEQ ID NO: 47735 - protein, 19 aa, Homo sapiens
  CDR3 for alpha chain variable domain of TCR clone 23868 (TRAV27, TRAJ53)
ASTSVQSRNRGGSNYKLTF

SEQ ID NO: 47736 - protein, 14 aa, Homo sapiens
  CDR3 for beta chain variable domain of TCR clone 23868 (TRBV11-1, TRBJ2-7)
CASTFAVPSYEQYF

SEQ ID NO: 47737 - protein, 13 aa, Homo sapiens
  CDR3 for alpha chain variable domain of TCR clone 23869 (TRAV13-2, TRAJ49)
CAETLHGGNQFYF

SEQ ID NO: 47738 - protein, 13 aa, Homo sapiens
  CDR3 for beta chain variable domain of TCR clone 23869 (TRBV27, TRBJ2-7)
CASSSPSAHEQYF

SEQ ID NO: 47739 - protein, 15 aa, Homo sapiens
  CDR3 for alpha chain variable domain of TCR clone 23870 (TRAV17, TRAJ13)
CATDAGSGGYQKVTF

SEQ ID NO: 47740 - protein, 17 aa, Homo sapiens
  CDR3 for beta chain variable domain of TCR clone 23870 (TRBV11-2, TRBJ2-1)
CASSLYPPGVEYNEQFL

SEQ ID NO: 47741 - protein, 16 aa, Homo sapiens
  CDR3 for alpha chain variable domain of TCR clone 23871 (TRAV16, TRAJ4)
CALSRMFSGGYNKLIF

SEQ ID NO: 47742 - protein, 17 aa, Homo sapiens
  CDR3 for beta chain variable domain of TCR clone 23871 (TRBV13, TRBJ2-3)
CASSLSRVAGGRNTQYF

SEQ ID NO: 47743 - protein, 16 aa, Homo sapiens
  CDR3 for alpha chain variable domain of TCR clone 23872 (TRAV13-1, TRAJ37)
CSASSLGSSNTGKLIF

SEQ ID NO: 47744 - protein, 12 aa, Homo sapiens
  CDR3 for beta chain variable domain of TCR clone 23872 (TRBV6-1, TRBJ2-5)
CASSEGRETQYF

SEQ ID NO: 47745 - protein, 13 aa, Homo sapiens
  CDR3 for alpha chain variable domain of TCR clone 23873 (TRAV21, TRAJ56)
CAVRTGANSKLTF

SEQ ID NO: 47746 - protein, 15 aa, Homo sapiens
  CDR3 for beta chain variable domain of TCR clone 23873 (TRBV7-9, TRBJ1-1)
CASSHRGTVNTEAFS

SEQ ID NO: 47747 - protein, 14 aa, Homo sapiens
  CDR3 for alpha chain variable domain of TCR clone 23874 (TRAV1-2, TRAJ16)
CAVNRFSDGQKLLF

SEQ ID NO: 47748 - protein, 13 aa, Homo sapiens
  CDR3 for beta chain variable domain of TCR clone 23874 (TRBV4-1, TRBJ2-7)
CASSQGQAYEQYF

SEQ ID NO: 47749 - protein, 12 aa, Homo sapiens
  CDR3 for alpha chain variable domain of TCR clone 23875 (TRAV16, TRAJ21)
CALLGNFNKFYF

SEQ ID NO: 47750 - protein, 15 aa, Homo sapiens
  CDR3 for beta chain variable domain of TCR clone 23875 (TRBV3-1, TRBJ2-2)
CASSQEVRETGELFF

SEQ ID NO: 47751 - protein, 14 aa, Homo sapiens
  CDR3 for alpha chain variable domain of TCR clone 23876 (TRAV1-2, TRAJ29)
CAVRELTSATLLVF

SEQ ID NO: 47752 - protein, 14 aa, Homo sapiens
  CDR3 for beta chain variable domain of TCR clone 23876 (TRBV3-1, TRBJ2-5)
CASSQGPDQETQYF

SEQ ID NO: 47753 - protein, 14 aa, Homo sapiens
  CDR3 for alpha chain variable domain of TCR clone 23877 (TRAV20, TRAJ56)
SAVQFGGANSKLTF

SEQ ID NO: 47754 - protein, 14 aa, Homo sapiens
  CDR3 for beta chain variable domain of TCR clone 23877 (TRBV20-1, TRBJ2-7)
CSAKRGRSSYEQYF

SEQ ID NO: 47755 - protein, 16 aa, Homo sapiens
  CDR3 for alpha chain variable domain of TCR clone 23878 (TRAV16, TRAJ4)
CALSRMFSGGYNKLIF

SEQ ID NO: 47756 - protein, 16 aa, Homo sapiens
  CDR3 for beta chain variable domain of TCR clone 23878 (TRBV24-1, TRBJ2-3)
CATSDPGTGATNTQYF

SEQ ID NO: 47757 - protein, 14 aa, Homo sapiens
  CDR3 for alpha chain variable domain of TCR clone 23879 (TRAV8-3, TRAJ9)
CAVVYNTGGLKTIF

SEQ ID NO: 47758 - protein, 14 aa, Homo sapiens
  CDR3 for beta chain variable domain of TCR clone 23879 (TRBV7-3, TRBJ2-2)
CASSSGGYTGELFF

SEQ ID NO: 47759 - protein, 14 aa, Homo sapiens
  CDR3 for alpha chain variable domain of TCR clone 23880 (TRAV13-1, TRAJ44)
CAAKATGTASKLTF

SEQ ID NO: 47760 - protein, 17 aa, Homo sapiens
  CDR3 for beta chain variable domain of TCR clone 23880 (TRBV7-3, TRBJ2-3)
CASSLMKRMRGADTRYF

SEQ ID NO: 47761 - protein, 16 aa, Homo sapiens
  CDR3 for alpha chain variable domain of TCR clone 23881 (TRAV3, TRAJ21)
CAVRDIERGNLNKFYF

SEQ ID NO: 47762 - protein, 16 aa, Homo sapiens
  CDR3 for beta chain variable domain of TCR clone 23881 (TRBV12-4, TRBJ1-5)
CASSRPVGGSNQPQHF

SEQ ID NO: 47763 - protein, 14 aa, Homo sapiens
  CDR3 for alpha chain variable domain of TCR clone 23882 (TRAV13-1, TRAJ24)
CAASRTDSWGKLQF

SEQ ID NO: 47764 - protein, 14 aa, Homo sapiens
  CDR3 for beta chain variable domain of TCR clone 23882 (TRBV25-1, TRBJ1-1)
CASTRLGGNTEAFF

SEQ ID NO: 47765 - protein, 12 aa, Homo sapiens
  CDR3 for alpha chain variable domain of TCR clone 23883 (TRAV8-3, TRAJ26)
CAGDNYGQNFVF

SEQ ID NO: 47766 - protein, 14 aa, Homo sapiens
  CDR3 for beta chain variable domain of TCR clone 23883 (TRBV25-1, TRBJ1-1)
CASTHLGGNTEAFF

SEQ ID NO: 47767 - protein, 13 aa, Homo sapiens
  CDR3 for alpha chain variable domain of TCR clone 23884 (TRAV26-1, TRAJ34)
CIVRPWTTDKLIF

SEQ ID NO: 47768 - protein, 14 aa, Homo sapiens
  CDR3 for beta chain variable domain of TCR clone 23884 (TRBV7-2, TRBJ2-7)
CASRSQGAAYEQYF

SEQ ID NO: 47769 - protein, 14 aa, Homo sapiens
  CDR3 for alpha chain variable domain of TCR clone 23885 (TRAV8-2, TRAJ4)
CVVSPSGGYSKLIF

SEQ ID NO: 47770 - protein, 15 aa, Homo sapiens
  CDR3 for beta chain variable domain of TCR clone 23885 (TRBV4-1, TRBJ1-4)
CASSDTGGTNEKLFF

SEQ ID NO: 47771 - protein, 16 aa, Homo sapiens
  CDR3 for alpha chain variable domain of TCR clone 23886 (TRAV3, TRAJ37)
RAVRPHGSGNTGKLIF

SEQ ID NO: 47772 - protein, 16 aa, Homo sapiens
  CDR3 for beta chain variable domain of TCR clone 23886 (TRBV9, TRBJ1-2)
CASSVEEKVSPYGYTF

SEQ ID NO: 47773 - protein, 14 aa, Homo sapiens
  CDR3 for alpha chain variable domain of TCR clone 23887 (TRAV8-1, TRAJ36)
CAVNSPTGANSLFF

SEQ ID NO: 47774 - protein, 15 aa, Homo sapiens
  CDR3 for beta chain variable domain of TCR clone 23887 (TRBV7-2, TRBJ2-3)
CASSLEQGGTDTQYF

SEQ ID NO: 47775 - protein, 13 aa, Homo sapiens
  CDR3 for alpha chain variable domain of TCR clone 23888 (TRAV35, TRAJ22)
CWLRPGSARQLTF

SEQ ID NO: 47776 - protein, 15 aa, Homo sapiens
  CDR3 for beta chain variable domain of TCR clone 23888 (TRBV12-4, TRBJ2-5)
CASSPPTGLQETQYF

SEQ ID NO: 47777 - protein, 12 aa, Homo sapiens
  CDR3 for alpha chain variable domain of TCR clone 23889 (TRAV21, TRAJ11)
CAATSGYSTLTF

SEQ ID NO: 47778 - protein, 14 aa, Homo sapiens
  CDR3 for beta chain variable domain of TCR clone 23889 (TRBV20-1, TRBJ2-7)
CSAPELAGVGEQCF

SEQ ID NO: 47779 - protein, 14 aa, Homo sapiens
  CDR3 for alpha chain variable domain of TCR clone 23890 (TRAV12-3, TRAJ42)
CAMNYGGSQGNLIF

SEQ ID NO: 47780 - protein, 14 aa, Homo sapiens
  CDR3 for beta chain variable domain of TCR clone 23890 (TRBV4-1, TRBJ2-2)
CASSQAVNTGELFF

SEQ ID NO: 47781 - protein, 14 aa, Homo sapiens
  CDR3 for alpha chain variable domain of TCR clone 23891 (TRAV26-1, TRAJ39)
CIVRGSKAGNMLTF

SEQ ID NO: 47782 - protein, 15 aa, Homo sapiens
  CDR3 for beta chain variable domain of TCR clone 23891 (TRBV7-9, TRBJ1-5)
CASSQGHQPNQPQHF

SEQ ID NO: 47783 - protein, 11 aa, Homo sapiens
  CDR3 for alpha chain variable domain of TCR clone 23892 (TRAV1-2, TRAJ20)
CAVANDSKLSF

SEQ ID NO: 47784 - protein, 18 aa, Homo sapiens
  CDR3 for beta chain variable domain of TCR clone 23892 (TRBV20-1, TRBJ2-6)
CSAETTPTHGSGANVLTF

SEQ ID NO: 47785 - protein, 14 aa, Homo sapiens
  CDR3 for alpha chain variable domain of TCR clone 23893 (TRAV35, TRAJ13)
CAGSPSGGCQKVTF

SEQ ID NO: 47786 - protein, 13 aa, Homo sapiens
  CDR3 for beta chain variable domain of TCR clone 23893 (TRBV29-1, TRBJ1-1)
CSVGDSRNTEAFF

SEQ ID NO: 47787 - protein, 17 aa, Homo sapiens
  CDR3 for alpha chain variable domain of TCR clone 23894 (TRAV23/DV6, TRAJ57)
CASSSTLSQGGSEKLVF

SEQ ID NO: 47788 - protein, 14 aa, Homo sapiens
  CDR3 for beta chain variable domain of TCR clone 23894 (TRBV25-1, TRBJ1-1)
CASTHLGGNTEAFF

SEQ ID NO: 47789 - protein, 15 aa, Homo sapiens
  CDR3 for alpha chain variable domain of TCR clone 23895 (TRAV21, TRAJ24)
CAARSSTDCWGKLQF

SEQ ID NO: 47790 - protein, 15 aa, Homo sapiens
  CDR3 for beta chain variable domain of TCR clone 23895 (TRBV5-1, TRBJ2-1)
CASSPPRAPYNEQFF

SEQ ID NO: 47791 - protein, 14 aa, Homo sapiens
  CDR3 for alpha chain variable domain of TCR clone 23896 (TRAV1-2, TRAJ16)
CAVNRFSDGQKLLF

SEQ ID NO: 47792 - protein, 15 aa, Homo sapiens
  CDR3 for beta chain variable domain of TCR clone 23896 (TRBV7-9, TRBJ1-6)
CASSSPGRGNSPLYF

SEQ ID NO: 47793 - protein, 17 aa, Homo sapiens
  CDR3 for alpha chain variable domain of TCR clone 23897 (TRAV26-1, TRAJ37)
CIVRVITVSSNTGKLIF

SEQ ID NO: 47794 - protein, 13 aa, Homo sapiens
  CDR3 for beta chain variable domain of TCR clone 23897 (TRBV7-9, TRBJ1-2)
CASSLKQNYGYTF

SEQ ID NO: 47795 - protein, 12 aa, Homo sapiens
  CDR3 for alpha chain variable domain of TCR clone 23898 (TRAV12-1, TRAJ40)
CVVYSGTYKYIF

SEQ ID NO: 47796 - protein, 18 aa, Homo sapiens
  CDR3 for beta chain variable domain of TCR clone 23898 (TRBV11-2, TRBJ2-3)
CASSLGRASRGAPNTQYF

SEQ ID NO: 47797 - protein, 13 aa, Homo sapiens
  CDR3 for alpha chain variable domain of TCR clone 23899 (TRAV12-1, TRAJ22)
CVASGGSARQLTF

SEQ ID NO: 47798 - protein, 12 aa, Homo sapiens
  CDR3 for beta chain variable domain of TCR clone 23899 (TRBV29-1, TRBJ2-3)
CSVTGGAGTQYF

SEQ ID NO: 47799 - protein, 15 aa, Homo sapiens
  CDR3 for alpha chain variable domain of TCR clone 23900 (TRAV12-1, TRAJ44)
CVVFVDTGTASKLTF

SEQ ID NO: 47800 - protein, 17 aa, Homo sapiens
  CDR3 for beta chain variable domain of TCR clone 23900 (TRBV7-8, TRBJ2-6)
CASSAGTGGAGANVLTF

SEQ ID NO: 47801 - protein, 16 aa, Homo sapiens
  CDR3 for alpha chain variable domain of TCR clone 23901 (TRAV3, TRAJ37)
CAVRGKGSSNTGKLIF

SEQ ID NO: 47802 - protein, 13 aa, Homo sapiens
  CDR3 for beta chain variable domain of TCR clone 23901 (TRBV14, TRBJ2-7)
CASSQDRRYEQYF

SEQ ID NO: 47803 - protein, 14 aa, Homo sapiens
  CDR3 for alpha chain variable domain of TCR clone 23902 (TRAV8-1, TRAJ9)
CAVNAWTGGFKTIF

SEQ ID NO: 47804 - protein, 16 aa, Homo sapiens
  CDR3 for beta chain variable domain of TCR clone 23902 (TRBV28, TRBJ2-2)
CAGSLEGGSNTGELFF

SEQ ID NO: 47805 - protein, 17 aa, Homo sapiens
  CDR3 for alpha chain variable domain of TCR clone 23903 (TRAV26-1, TRAJ28)
CIVRVPDSGAGSYQLTL

SEQ ID NO: 47806 - protein, 17 aa, Homo sapiens
  CDR3 for beta chain variable domain of TCR clone 23903 (TRBV28, TRBJ2-7)
CASSPLPAGGKSYEQYF

SEQ ID NO: 47807 - protein, 17 aa, Homo sapiens
  CDR3 for alpha chain variable domain of TCR clone 23904 (TRAV8-3, TRAJ8)
CAVGPNEHRLSETCIWN

SEQ ID NO: 47808 - protein, 13 aa, Homo sapiens
  CDR3 for beta chain variable domain of TCR clone 23904 (TRBV10-2, TRBJ2-3)
CASSESGDHTQYF

SEQ ID NO: 47809 - protein, 16 aa, Homo sapiens
  CDR3 for alpha chain variable domain of TCR clone 23905 (TRAV3, TRAJ21)
CAVRDTERGNFNKFYF

SEQ ID NO: 47810 - protein, 13 aa, Homo sapiens
  CDR3 for beta chain variable domain of TCR clone 23905 (TRBV27, TRBJ2-7)
CASSLTTGYEQYF

SEQ ID NO: 47811 - protein, 13 aa, Homo sapiens
  CDR3 for alpha chain variable domain of TCR clone 23906 (TRAV27, TRAJ49)
CAPRPYTGNQFYF

SEQ ID NO: 47812 - protein, 16 aa, Homo sapiens
  CDR3 for beta chain variable domain of TCR clone 23906 (TRBV4-1, TRBJ1-2)
CASSRDAGQVLYGYTF

SEQ ID NO: 47813 - protein, 13 aa, Homo sapiens
  CDR3 for alpha chain variable domain of TCR clone 23907 (TRAV22, TRAJ29)
CAVGGSGNTPLVF

SEQ ID NO: 47814 - protein, 13 aa, Homo sapiens
  CDR3 for beta chain variable domain of TCR clone 23907 (TRBV4-2, TRBJ1-1)
CASSQAGDTEAFF

SEQ ID NO: 47815 - protein, 14 aa, Homo sapiens
  CDR3 for alpha chain variable domain of TCR clone 23908 (TRAV12-1, TRAJ30)
CVVNIGGRDDKIIF

SEQ ID NO: 47816 - protein, 14 aa, Homo sapiens
  CDR3 for beta chain variable domain of TCR clone 23908 (TRBV7-6, TRBJ2-3)
CASSLGTVTDTQYL

SEQ ID NO: 47817 - protein, 16 aa, Homo sapiens
  CDR3 for alpha chain variable domain of TCR clone 23909 (TRAV12-3, TRAJ53)
CAMSPGSGGSNYRLTF

SEQ ID NO: 47818 - protein, 16 aa, Homo sapiens
  CDR3 for beta chain variable domain of TCR clone 23909 (TRBV4-2, TRBJ1-1)
CASSQAGFGMNTEAFF

SEQ ID NO: 47819 - protein, 16 aa, Homo sapiens
  CDR3 for alpha chain variable domain of TCR clone 23910 (TRAV30, TRAJ24)
CGTETVDADSWGKFQF

SEQ ID NO: 47820 - protein, 12 aa, Homo sapiens
  CDR3 for beta chain variable domain of TCR clone 23910 (TRBV11-2, TRBJ2-2)
CASSLGGGELFF

SEQ ID NO: 47821 - protein, 12 aa, Homo sapiens
  CDR3 for alpha chain variable domain of TCR clone 23911 (TRAV17, TRAJ57)
CAMDGGSEKLVF

SEQ ID NO: 47822 - protein, 13 aa, Homo sapiens
  CDR3 for beta chain variable domain of TCR clone 23911 (TRBV7-9, TRBJ2-7)
CASSFAGAYEQYF

SEQ ID NO: 47823 - protein, 12 aa, Homo sapiens
  CDR3 for alpha chain variable domain of TCR clone 23912 (TRAV12-2, TRAJ8)
CAVNTGFQKLVF

SEQ ID NO: 47824 - protein, 15 aa, Homo sapiens
  CDR3 for beta chain variable domain of TCR clone 23912 (TRBV7-8, TRBJ1-5)
CASSLERRGLETQHF

SEQ ID NO: 47825 - protein, 11 aa, Homo sapiens
  CDR3 for alpha chain variable domain of TCR clone 23913 (TRAV2, TRAJ23)
CAVETRGKLIF

SEQ ID NO: 47826 - protein, 14 aa, Homo sapiens
  CDR3 for beta chain variable domain of TCR clone 23913 (TRBV2, TRBJ2-3)
CASSGGQNTDTQYF

SEQ ID NO: 47827 - protein, 16 aa, Homo sapiens
  CDR3 for alpha chain variable domain of TCR clone 23914 (TRAV30, TRAJ24)
CGTEIVDADSWGKFQL

SEQ ID NO: 47828 - protein, 15 aa, Homo sapiens
  CDR3 for beta chain variable domain of TCR clone 23914 (TRBV20-1, TRBJ2-7)
CSARDRVSGMDEQYF

SEQ ID NO: 47829 - protein, 14 aa, Homo sapiens
  CDR3 for alpha chain variable domain of TCR clone 23915 (TRAV1-2, TRAJ8)
CAVREDTGFQKLVL

SEQ ID NO: 47830 - protein, 17 aa, Homo sapiens
  CDR3 for beta chain variable domain of TCR clone 23915 (TRBV11-2, TRBJ2-1)
CASSLYPPGVEYNEQFF

SEQ ID NO: 47831 - protein, 14 aa, Homo sapiens
  CDR3 for alpha chain variable domain of TCR clone 23916 (TRAV8-3, TRAJ35)
CAVVPQGFGNVLHC

SEQ ID NO: 47832 - protein, 15 aa, Homo sapiens
  CDR3 for beta chain variable domain of TCR clone 23916 (TRBV6-1, TRBJ2-2)
CASSAGQGYTGELSF

SEQ ID NO: 47833 - protein, 11 aa, Homo sapiens
  CDR3 for alpha chain variable domain of TCR clone 23917 (TRAV1-1, TRAJ23)
CAVRQEGKLIF

SEQ ID NO: 47834 - protein, 20 aa, Homo sapiens
  CDR3 for beta chain variable domain of TCR clone 23917 (TRBV7-8, TRBJ2-2)
CASSHLFPGPTIHITGELFF

SEQ ID NO: 47835 - protein, 10 aa, Homo sapiens
  CDR3 for alpha chain variable domain of TCR clone 23918 (TRAV23/DV6, TRAJ31)
CARGGASLMF

SEQ ID NO: 47836 - protein, 14 aa, Homo sapiens
  CDR3 for beta chain variable domain of TCR clone 23918 (TRBV7-8, TRBJ1-2)
CASSPDSLSYGYTF

SEQ ID NO: 47837 - protein, 16 aa, Homo sapiens
  CDR3 for alpha chain variable domain of TCR clone 23919 (TRAV8-3, TRAJ13)
CAVGAYPSGGYQKGTF

SEQ ID NO: 47838 - protein, 15 aa, Homo sapiens
  CDR3 for beta chain variable domain of TCR clone 23919 (TRBV19, TRBJ1-5)
CASSIVWADNQPQHF

SEQ ID NO: 47839 - protein, 16 aa, Homo sapiens
  CDR3 for alpha chain variable domain of TCR clone 23920 (TRAV12-3, TRAJ53)
CAMSPGSGGSNYKLTF

SEQ ID NO: 47840 - protein, 14 aa, Homo sapiens
  CDR3 for beta chain variable domain of TCR clone 23920 (TRBV12-4, TRBJ1-1)
CASSLGTGGTEAFF

SEQ ID NO: 47841 - protein, 12 aa, Homo sapiens
  CDR3 for alpha chain variable domain of TCR clone 23921 (TRAV12-1, TRAJ40)
CVVYSGTYKHIF

SEQ ID NO: 47842 - protein, 18 aa, Homo sapiens
  CDR3 for beta chain variable domain of TCR clone 23921 (TRBV11-2, TRBJ2-3)
CASSLGGASRGAPNTQYF

SEQ ID NO: 47843 - protein, 23 aa, Homo sapiens
  CDR3 for alpha chain variable domain of TCR clone 23922 (TRAV26-1, TRAJ38)
CIVDNAGNNHIQNPDPAVYQLRD

SEQ ID NO: 47844 - protein, 13 aa, Homo sapiens
  CDR3 for beta chain variable domain of TCR clone 23922 (TRBV20-1, TRBJ1-1)
CSARGGGNTEAFF

SEQ ID NO: 47845 - protein, 16 aa, Homo sapiens
  CDR3 for alpha chain variable domain of TCR clone 23923 (TRAV3, TRAJ18)
CAVRDGRGSTLGRLYF

SEQ ID NO: 47846 - protein, 16 aa, Homo sapiens
  CDR3 for beta chain variable domain of TCR clone 23923 (TRBV12-4, TRBJ2-1)
CASSAVGQGNGDEQFF

SEQ ID NO: 47847 - protein, 16 aa, Homo sapiens
  CDR3 for alpha chain variable domain of TCR clone 23924 (TRAV4, TRAJ22)
CLVGDLYFGSARQLTF

SEQ ID NO: 47848 - protein, 16 aa, Homo sapiens
  CDR3 for beta chain variable domain of TCR clone 23924 (TRBV7-9, TRBJ2-1)
CASSDVAGGSYNEQFF

SEQ ID NO: 47849 - protein, 13 aa, Homo sapiens
  CDR3 for alpha chain variable domain of TCR clone 23925 (TRAV26-1, TRAJ34)
CIVRPWITDKLIF

SEQ ID NO: 47850 - protein, 13 aa, Homo sapiens
  CDR3 for beta chain variable domain of TCR clone 23925 (TRBV5-1, TRBJ2-1)
CASSVGSYNEQFF

SEQ ID NO: 47851 - protein, 14 aa, Homo sapiens
  CDR3 for alpha chain variable domain of TCR clone 23926 (TRAV34, TRAJ44)
CGADGTGIASKLTF

SEQ ID NO: 47852 - protein, 17 aa, Homo sapiens
  CDR3 for beta chain variable domain of TCR clone 23926 (TRBV11-2, TRBJ2-1)
CASSLYPPGVEYNEQFF

SEQ ID NO: 47853 - protein, 13 aa, Homo sapiens
  CDR3 for alpha chain variable domain of TCR clone 23927 (TRAV25, TRAJ10)
CAGRAGGGNKLTF

SEQ ID NO: 47854 - protein, 15 aa, Homo sapiens
  CDR3 for beta chain variable domain of TCR clone 23927 (TRBV19, TRBJ2-1)
CASSSPGVPLDEQFF

SEQ ID NO: 47855 - protein, 13 aa, Homo sapiens
  CDR3 for alpha chain variable domain of TCR clone 23928 (TRAV21, TRAJ57)
CAVPQGGSEKLVF

SEQ ID NO: 47856 - protein, 16 aa, Homo sapiens
  CDR3 for beta chain variable domain of TCR clone 23928 (TRBV29-1, TRBJ2-7)
CSVEDAEDGTAYEQYF

SEQ ID NO: 47857 - protein, 14 aa, Homo sapiens
  CDR3 for alpha chain variable domain of TCR clone 23929 (TRAV26-1, TRAJ34)
CIVRVAYNTDNLIF

SEQ ID NO: 47858 - protein, 15 aa, Homo sapiens
  CDR3 for beta chain variable domain of TCR clone 23929 (TRBV20-1, TRBJ2-7)
CSARVPAAYFYEQYF

SEQ ID NO: 47859 - protein, 14 aa, Homo sapiens
  CDR3 for alpha chain variable domain of TCR clone 23930 (TRAV1-2, TRAJ8)
CAVREDTGFQKLVF

SEQ ID NO: 47860 - protein, 15 aa, Homo sapiens
  CDR3 for beta chain variable domain of TCR clone 23930 (TRBV6-3, TRBJ2-7)
CASCSPGTVFYEQYF

SEQ ID NO: 47861 - protein, 13 aa, Homo sapiens
  CDR3 for alpha chain variable domain of TCR clone 23931 (TRAV13-1, TRAJ6)
CAASKGGSYIPTF

SEQ ID NO: 47862 - protein, 15 aa, Homo sapiens
  CDR3 for beta chain variable domain of TCR clone 23931 (TRBV12-4, TRBJ1-1)
CASSGRTGMNTEALF

SEQ ID NO: 47863 - protein, 12 aa, Homo sapiens
  CDR3 for alpha chain variable domain of TCR clone 23932 (TRAV21, TRAJ11)
CAATPGYSTLTF

SEQ ID NO: 47864 - protein, 16 aa, Homo sapiens
  CDR3 for beta chain variable domain of TCR clone 23932 (TRBV28, TRBJ2-2)
CASSLEGGSNTGELFF

SEQ ID NO: 47865 - protein, 12 aa, Homo sapiens
  CDR3 for alpha chain variable domain of TCR clone 23933 (TRAV17, TRAJ57)
CATDGGSEKLVV

SEQ ID NO: 47866 - protein, 13 aa, Homo sapiens
  CDR3 for beta chain variable domain of TCR clone 23933 (TRBV7-9, TRBJ2-7)
CASSFAGAYEQYF

SEQ ID NO: 47867 - protein, 14 aa, Homo sapiens
  CDR3 for alpha chain variable domain of TCR clone 23934 (TRAV12-1, TRAJ23)
CVVIVYNQGGKLIL

SEQ ID NO: 47868 - protein, 15 aa, Homo sapiens
  CDR3 for beta chain variable domain of TCR clone 23934 (TRBV20-1, TRBJ1-5)
CSAKPPGQGPQPQHF

SEQ ID NO: 47869 - protein, 14 aa, Homo sapiens
  CDR3 for alpha chain variable domain of TCR clone 23935 (TRAV26-1, TRAJ39)
CIVSGSRAGNMLTF

SEQ ID NO: 47870 - protein, 15 aa, Homo sapiens
  CDR3 for beta chain variable domain of TCR clone 23935 (TRBV7-9, TRBJ1-5)
CASSQGHQPNQPQHF

SEQ ID NO: 47871 - protein, 14 aa, Homo sapiens
  CDR3 for alpha chain variable domain of TCR clone 23936 (TRAV17, TRAJ57)
CATDPQGGSEKLVF

SEQ ID NO: 47872 - protein, 18 aa, Homo sapiens
  CDR3 for beta chain variable domain of TCR clone 23936 (TRBV6-6, TRBJ1-3)
CASSYSKWDSIPGNTIYF

SEQ ID NO: 47873 - protein, 13 aa, Homo sapiens
  CDR3 for alpha chain variable domain of TCR clone 23937 (TRAV12-3, TRAJ33)
CAMSVNSNYQLIW

SEQ ID NO: 47874 - protein, 12 aa, Homo sapiens
  CDR3 for beta chain variable domain of TCR clone 23937 (TRBV14, TRBJ1-1)
CASSQLKGLAFF

SEQ ID NO: 47875 - protein, 16 aa, Homo sapiens
  CDR3 for alpha chain variable domain of TCR clone 23938 (TRAV3, TRAJ37)
CAVRPHGSGNTGKLIF

SEQ ID NO: 47876 - protein, 14 aa, Homo sapiens
  CDR3 for beta chain variable domain of TCR clone 23938 (TRBV19, TRBJ2-1)
CASPTFVLSGEQFF

SEQ ID NO: 47877 - protein, 14 aa, Homo sapiens
  CDR3 for alpha chain variable domain of TCR clone 23939 (TRAV12-2, TRAJ13)
CAVKKTGGYQKVTF

SEQ ID NO: 47878 - protein, 15 aa, Homo sapiens
  CDR3 for beta chain variable domain of TCR clone 23939 (TRBV27, TRBJ2-1)
CASSNGGGTSNEQFF

SEQ ID NO: 47879 - protein, 15 aa, Homo sapiens
  CDR3 for alpha chain variable domain of TCR clone 23940 (TRAV26-1, TRAJ22)
CIVRVSFWFSKATDL

SEQ ID NO: 47880 - protein, 13 aa, Homo sapiens
  CDR3 for beta chain variable domain of TCR clone 23940 (TRBV7-9, TRBJ1-2)
CASSLKQNYGYTF

SEQ ID NO: 47881 - protein, 12 aa, Homo sapiens
  CDR3 for alpha chain variable domain of TCR clone 23941 (TRAV21, TRAJ13)
PGPSGGYQKVTF

SEQ ID NO: 47882 - protein, 15 aa, Homo sapiens
  CDR3 for beta chain variable domain of TCR clone 23941 (TRBV7-9, TRBJ1-6)
CASSSPGRGNSTLHF

SEQ ID NO: 47883 - protein, 12 aa, Homo sapiens
  CDR3 for alpha chain variable domain of TCR clone 23942 (TRAV8-3, TRAJ20)
CAVGGGDYKPSF

SEQ ID NO: 47884 - protein, 14 aa, Homo sapiens
  CDR3 for beta chain variable domain of TCR clone 23942 (TRBV5-1, TRBJ2-7)
CASSRGESLYEQYF

SEQ ID NO: 47885 - protein, 14 aa, Homo sapiens
  CDR3 for alpha chain variable domain of TCR clone 23943 (TRAV26-1, TRAJ39)
CIVRGSRAGNLLTF

SEQ ID NO: 47886 - protein, 15 aa, Homo sapiens
  CDR3 for beta chain variable domain of TCR clone 23943 (TRBV7-9, TRBJ1-5)
CASSQGHQPNQPQHF

SEQ ID NO: 47887 - protein, 14 aa, Homo sapiens
  CDR3 for alpha chain variable domain of TCR clone 23944 (TRAV13-2, TRAJ22)
CADGTLGSARQLTF

SEQ ID NO: 47888 - protein, 16 aa, Homo sapiens
  CDR3 for beta chain variable domain of TCR clone 23944 (TRBV19, TRBJ2-1)
CASSSKGTRSYNEQSF

SEQ ID NO: 47889 - protein, 14 aa, Homo sapiens
  CDR3 for alpha chain variable domain of TCR clone 23945 (TRAV12-2, TRAJ17)
CAVLFKAPGNKLTF

SEQ ID NO: 47890 - protein, 17 aa, Homo sapiens
  CDR3 for beta chain variable domain of TCR clone 23945 (TRBV20-1, TRBJ2-2)
CSASGSGQGGLTGELFF

SEQ ID NO: 47891 - protein, 19 aa, Homo sapiens
  CDR3 for alpha chain variable domain of TCR clone 23946 (TRAV3, TRAJ6)
CAVRDRNPSRSGGSYIHTF

SEQ ID NO: 47892 - protein, 15 aa, Homo sapiens
  CDR3 for beta chain variable domain of TCR clone 23946 (TRBV18, TRBJ2-7)
CASSPTFMDSYEQYF

SEQ ID NO: 47893 - protein, 12 aa, Homo sapiens
  CDR3 for alpha chain variable domain of TCR clone 23947 (TRAV16, TRAJ10)
CAFTGGGNKLTF

SEQ ID NO: 47894 - protein, 16 aa, Homo sapiens
  CDR3 for beta chain variable domain of TCR clone 23947 (TRBV19, TRBJ2-1)
CASSKAGPSSYNEQFF

SEQ ID NO: 47895 - protein, 14 aa, Homo sapiens
  CDR3 for alpha chain variable domain of TCR clone 23948 (TRAV35, TRAJ22)
CAGLRPGSARQLTF

SEQ ID NO: 47896 - protein, 15 aa, Homo sapiens
  CDR3 for beta chain variable domain of TCR clone 23948 (TRBV12-4, TRBJ2-5)
CASSPPTGLQETQHF

SEQ ID NO: 47897 - protein, 13 aa, Homo sapiens
  CDR3 for alpha chain variable domain of TCR clone 23949 (TRAV13-1, TRAJ5)
CAASDTGRGALTF

SEQ ID NO: 47898 - protein, 12 aa, Homo sapiens
  CDR3 for beta chain variable domain of TCR clone 23949 (TRBV28, TRBJ2-3)
CASSLYRDTQYF

SEQ ID NO: 47899 - protein, 13 aa, Homo sapiens
  CDR3 for alpha chain variable domain of TCR clone 23950 (TRAV8-3, TRAJ36)
CAVGATGANNLFF

SEQ ID NO: 47900 - protein, 15 aa, Homo sapiens
  CDR3 for beta chain variable domain of TCR clone 23950 (TRBV7-9, TRBJ1-6)
CASSSPGRGNSPLHF

SEQ ID NO: 47901 - protein, 16 aa, Homo sapiens
  CDR3 for alpha chain variable domain of TCR clone 23951 (TRAV22, TRAJ45)
CAVERGKRGGADGLTF

SEQ ID NO: 47902 - protein, 13 aa, Homo sapiens
  CDR3 for beta chain variable domain of TCR clone 23951 (TRBV24-1, TRBJ1-1)
CATSDLNSVEAFF

SEQ ID NO: 47903 - protein, 12 aa, Homo sapiens
  CDR3 for alpha chain variable domain of TCR clone 23952 (TRAV12-1, TRAJ40)
CVVPSGTYKYIF

SEQ ID NO: 47904 - protein, 15 aa, Homo sapiens
  CDR3 for beta chain variable domain of TCR clone 23952 (TRBV12-4, TRBJ2-1)
CASSPLSGGNNEQFF

SEQ ID NO: 47905 - protein, 12 aa, Homo sapiens
  CDR3 for alpha chain variable domain of TCR clone 23953 (TRAV17, TRAJ20)
CATDSNDYRLSF

SEQ ID NO: 47906 - protein, 16 aa, Homo sapiens
  CDR3 for beta chain variable domain of TCR clone 23953 (TRBV7-2, TRBJ1-2)
CASSSNQDRRGHGYTF

SEQ ID NO: 47907 - protein, 14 aa, Homo sapiens
  CDR3 for alpha chain variable domain of TCR clone 23954 (TRAV8-3, TRAJ4)
CAVGAAGGYNNLIF

SEQ ID NO: 47908 - protein, 15 aa, Homo sapiens
  CDR3 for beta chain variable domain of TCR clone 23954 (TRBV6-5, TRBJ2-1)
CASSYDAGAGNEQFF

SEQ ID NO: 47909 - protein, 12 aa, Homo sapiens
  CDR3 for alpha chain variable domain of TCR clone 23955 (TRAV12-3, TRAJ29)
CAMTLGNTPLVF

SEQ ID NO: 47910 - protein, 14 aa, Homo sapiens
  CDR3 for beta chain variable domain of TCR clone 23955 (TRBV6-5, TRBJ2-5)
CASCSTSFWETQYF

SEQ ID NO: 47911 - protein, 10 aa, Homo sapiens
  CDR3 for alpha chain variable domain of TCR clone 23956 (TRAV21, TRAJ43)
CAVRIGDMRF

SEQ ID NO: 47912 - protein, 13 aa, Homo sapiens
  CDR3 for beta chain variable domain of TCR clone 23956 (TRBV20-1, TRBJ2-7)
CSAPGLADYEQYL

SEQ ID NO: 47913 - protein, 12 aa, Homo sapiens
  CDR3 for alpha chain variable domain of TCR clone 23957 (TRAV1-2, TRAJ33)
CAALDSDYQLIW

SEQ ID NO: 47914 - protein, 14 aa, Homo sapiens
  CDR3 for beta chain variable domain of TCR clone 23957 (TRBV20-1, TRBJ2-1)
CSAQIGGSANEQFF

SEQ ID NO: 47915 - protein, 12 aa, Homo sapiens
  CDR3 for alpha chain variable domain of TCR clone 23958 (TRAV38-2/DV8, TRAJ48)
CALLSGNEKLTF

SEQ ID NO: 47916 - protein, 15 aa, Homo sapiens
  CDR3 for beta chain variable domain of TCR clone 23958 (TRBV6-1, TRBJ2-1)
RASSELRGQYNEQFF

SEQ ID NO: 47917 - protein, 15 aa, Homo sapiens
  CDR3 for alpha chain variable domain of TCR clone 23959 (TRAV3, TRAJ4)
CAVRDGTGGYNKLIF

SEQ ID NO: 47918 - protein, 16 aa, Homo sapiens
  CDR3 for beta chain variable domain of TCR clone 23959 (TRBV27, TRBJ2-2)
CASSSSGVPNTGELFF

SEQ ID NO: 47919 - protein, 15 aa, Homo sapiens
  CDR3 for alpha chain variable domain of TCR clone 23960 (TRAV21, TRAJ53)
CATLNSGGSNYKLTF

SEQ ID NO: 47920 - protein, 13 aa, Homo sapiens
  CDR3 for beta chain variable domain of TCR clone 23960 (TRBV19, TRBJ1-2)
CASSVPGQDGYTF

SEQ ID NO: 47921 - protein, 14 aa, Homo sapiens
  CDR3 for alpha chain variable domain of TCR clone 23961 (TRAV17, TRAJ22)
CATSPSGSARQLTF

SEQ ID NO: 47922 - protein, 15 aa, Homo sapiens
  CDR3 for beta chain variable domain of TCR clone 23961 (TRBV4-1, TRBJ2-5)
CASSQWDLYQEAQYF

SEQ ID NO: 47923 - protein, 15 aa, Homo sapiens
  CDR3 for alpha chain variable domain of TCR clone 23962 (TRAV2, TRAJ9)
CAVEDRGTGGFKTIF

SEQ ID NO: 47924 - protein, 15 aa, Homo sapiens
  CDR3 for beta chain variable domain of TCR clone 23962 (TRBV6-3, TRBJ2-7)
CASSSPGTVFYEQYF

SEQ ID NO: 47925 - protein, 17 aa, Homo sapiens
  CDR3 for alpha chain variable domain of TCR clone 23963 (TRAV36/DV7, TRAJ52)
CAVAQRAGGTSYGKLTF

SEQ ID NO: 47926 - protein, 15 aa, Homo sapiens
  CDR3 for beta chain variable domain of TCR clone 23963 (TRBV6-5, TRBJ1-2)
CASSYSQAFNYGYAF

SEQ ID NO: 47927 - protein, 14 aa, Homo sapiens
  CDR3 for alpha chain variable domain of TCR clone 23964 (TRAV16, TRAJ37)
CALDISGNTGKLIF

SEQ ID NO: 47928 - protein, 14 aa, Homo sapiens
  CDR3 for beta chain variable domain of TCR clone 23964 (TRBV7-6, TRBJ2-7)
CASSLRQGADEQYF

SEQ ID NO: 47929 - protein, 13 aa, Homo sapiens
  CDR3 for alpha chain variable domain of TCR clone 23965 (TRAV13-1, TRAJ20)
RAARVSNDYKLSF

SEQ ID NO: 47930 - protein, 12 aa, Homo sapiens
  CDR3 for beta chain variable domain of TCR clone 23965 (TRBV20-1, TRBJ2-1)
CSARLGTDEQFF

SEQ ID NO: 47931 - protein, 14 aa, Homo sapiens
  CDR3 for alpha chain variable domain of TCR clone 23966 (TRAV30, TRAJ26)
CGTEIVSYGQNSVF

SEQ ID NO: 47932 - protein, 13 aa, Homo sapiens
  CDR3 for beta chain variable domain of TCR clone 23966 (TRBV19, TRBJ1-3)
CASRLSLGNTIYF

SEQ ID NO: 47933 - protein, 13 aa, Homo sapiens
  CDR3 for alpha chain variable domain of TCR clone 23967 (TRAV8-4, TRAJ10)
CAAFTGGGNKPTF

SEQ ID NO: 47934 - protein, 15 aa, Homo sapiens
  CDR3 for beta chain variable domain of TCR clone 23967 (TRBV2, TRBJ2-3)
CASSDFEKATDTQYF

SEQ ID NO: 47935 - protein, 17 aa, Homo sapiens
  CDR3 for alpha chain variable domain of TCR clone 23968 (TRAV13-1, TRAJ31)
CAPRDRLMFGDGTQLVV

SEQ ID NO: 47936 - protein, 12 aa, Homo sapiens
  CDR3 for beta chain variable domain of TCR clone 23968 (TRBV7-9, TRBJ2-7)
CASSLEGHEQYF

SEQ ID NO: 47937 - protein, 10 aa, Homo sapiens
  CDR3 for alpha chain variable domain of TCR clone 23969 (TRAV1-2, TRAJ20)
CACNDYKLSF

SEQ ID NO: 47938 - protein, 16 aa, Homo sapiens
  CDR3 for beta chain variable domain of TCR clone 23969 (TRBV20-1, TRBJ2-1)
RSARDLKQGMNNEQFF

SEQ ID NO: 47939 - protein, 16 aa, Homo sapiens
  CDR3 for alpha chain variable domain of TCR clone 23970 (TRAV30, TRAJ24)
CGTEIVDADSWGKFQF

SEQ ID NO: 47940 - protein, 14 aa, Homo sapiens
  CDR3 for beta chain variable domain of TCR clone 23970 (TRBV9, TRBJ2-4)
CASSPSGTSGLQYF

SEQ ID NO: 47941 - protein, 14 aa, Homo sapiens
  CDR3 for alpha chain variable domain of TCR clone 23971 (TRAV35, TRAJ13)
CAGSPSGGYQKVTF

SEQ ID NO: 47942 - protein, 13 aa, Homo sapiens
  CDR3 for beta chain variable domain of TCR clone 23971 (TRBV29-1, TRBJ1-1)
CSVGDSRNTEAVF

SEQ ID NO: 47943 - protein, 16 aa, Homo sapiens
  CDR3 for alpha chain variable domain of TCR clone 23972 (TRAV8-2, TRAJ48)
CVVSDVSNFGNEKLTF

SEQ ID NO: 47944 - protein, 16 aa, Homo sapiens
  CDR3 for beta chain variable domain of TCR clone 23972 (TRBV6-5, TRBJ2-1)
CASSYSLSGGYNEQFF

SEQ ID NO: 47945 - protein, 14 aa, Homo sapiens
  CDR3 for alpha chain variable domain of TCR clone 23973 (TRAV2, TRAJ37)
CAVDFTSNTGKLIF

SEQ ID NO: 47946 - protein, 15 aa, Homo sapiens
  CDR3 for beta chain variable domain of TCR clone 23973 (TRBV27, TRBJ2-1)
CASSNGGGSSNEQFF

SEQ ID NO: 47947 - protein, 17 aa, Homo sapiens
  CDR3 for alpha chain variable domain of TCR clone 23974 (TRAV23/DV6, TRAJ57)
CAASSTLSQGGTEKLVF

SEQ ID NO: 47948 - protein, 14 aa, Homo sapiens
  CDR3 for beta chain variable domain of TCR clone 23974 (TRBV25-1, TRBJ1-1)
CASTHLGGNTEAFF

SEQ ID NO: 47949 - protein, 15 aa, Homo sapiens
  CDR3 for alpha chain variable domain of TCR clone 23975 (TRAV12-2, TRAJ43)
CAFDMRFGAGTRLTV

SEQ ID NO: 47950 - protein, 18 aa, Homo sapiens
  CDR3 for beta chain variable domain of TCR clone 23975 (TRBV20-1, TRBJ2-3)
CSASGLAGGPGITDTQYF

SEQ ID NO: 47951 - protein, 16 aa, Homo sapiens
  CDR3 for alpha chain variable domain of TCR clone 23976 (TRAV12-3, TRAJ53)
CAMSPGSGGSNYKLTF

SEQ ID NO: 47952 - protein, 11 aa, Homo sapiens
  CDR3 for beta chain variable domain of TCR clone 23976 (TRBV29-1, TRBJ2-5)
SSEDRTGTQYF

SEQ ID NO: 47953 - protein, 15 aa, Homo sapiens
  CDR3 for alpha chain variable domain of TCR clone 23977 (TRAV3, TRAJ22)
CAARDRGGSARQLTF

SEQ ID NO: 47954 - protein, 16 aa, Homo sapiens
  CDR3 for beta chain variable domain of TCR clone 23977 (TRBV5-4, TRBJ2-3)
CASQQPGAGGADTQYF

SEQ ID NO: 47955 - protein, 13 aa, Homo sapiens
  CDR3 for alpha chain variable domain of TCR clone 23978 (TRAV38-1, TRAJ42)
CARCGGSQGNLIF

SEQ ID NO: 47956 - protein, 17 aa, Homo sapiens
  CDR3 for beta chain variable domain of TCR clone 23978 (TRBV20-1, TRBJ2-1)
CSARDPLAGVWDNEQFF

SEQ ID NO: 47957 - protein, 15 aa, Homo sapiens
  CDR3 for alpha chain variable domain of TCR clone 23979 (TRAV27, TRAJ38)
CAARRNAGNNRKLIW

SEQ ID NO: 47958 - protein, 13 aa, Homo sapiens
  CDR3 for beta chain variable domain of TCR clone 23979 (TRBV12-5, TRBJ2-3)
CASGDRQTDTQYF

SEQ ID NO: 47959 - protein, 11 aa, Homo sapiens
  CDR3 for alpha chain variable domain of TCR clone 23980 (TRAV2, TRAJ33)
CAVDSNYQLIW

SEQ ID NO: 47960 - protein, 15 aa, Homo sapiens
  CDR3 for beta chain variable domain of TCR clone 23980 (TRBV19, TRBJ1-2)
CAGSVGQVLNYGYTF

SEQ ID NO: 47961 - protein, 11 aa, Homo sapiens
  CDR3 for alpha chain variable domain of TCR clone 23981 (TRAV1-1, TRAJ23)
CAVRQGGKLIF

SEQ ID NO: 47962 - protein, 16 aa, Homo sapiens
  CDR3 for beta chain variable domain of TCR clone 23981 (TRBV7-3, TRBJ2-2)
CASSLKRGTLSGELFF

SEQ ID NO: 47963 - protein, 15 aa, Homo sapiens
  CDR3 for alpha chain variable domain of TCR clone 23982 (TRAV17, TRAJ23)
CATDAEDNQGGKLIF

SEQ ID NO: 47964 - protein, 12 aa, Homo sapiens
  CDR3 for beta chain variable domain of TCR clone 23982 (TRBV2, TRBJ2-1)
CAKREGYNVQFF

SEQ ID NO: 47965 - protein, 13 aa, Homo sapiens
  CDR3 for alpha chain variable domain of TCR clone 23983 (TRAV38-2/DV8, TRAJ34)
CAYRNYNTDKLIL

SEQ ID NO: 47966 - protein, 15 aa, Homo sapiens
  CDR3 for beta chain variable domain of TCR clone 23983 (TRBV20-1, TRBJ2-5)
CSAEGTGGLQETQYF

SEQ ID NO: 47967 - protein, 16 aa, Homo sapiens
  CDR3 for alpha chain variable domain of TCR clone 23984 (TRAV27, TRAJ34)
CAGGGVGDYNTDKLIF

SEQ ID NO: 47968 - protein, 15 aa, Homo sapiens
  CDR3 for beta chain variable domain of TCR clone 23984 (TRBV9, TRBJ1-4)
CASSVGGSTNEKLFF

SEQ ID NO: 47969 - protein, 15 aa, Homo sapiens
  CDR3 for alpha chain variable domain of TCR clone 23985 (TRAV2, TRAJ9)
CAVEDRGTGGFKTNF

SEQ ID NO: 47970 - protein, 16 aa, Homo sapiens
  CDR3 for beta chain variable domain of TCR clone 23985 (TRBV24-1, TRBJ2-3)
CATSDPGTGATDTQYF

SEQ ID NO: 47971 - protein, 14 aa, Homo sapiens
  CDR3 for alpha chain variable domain of TCR clone 23986 (TRAV9-2, TRAJ39)
CALYIYNAGNMLTF

SEQ ID NO: 47972 - protein, 14 aa, Homo sapiens
  CDR3 for beta chain variable domain of TCR clone 23986 (TRBV7-2, TRBJ1-1)
CASSFLTGTTEAFF

SEQ ID NO: 47973 - protein, 14 aa, Homo sapiens
  CDR3 for alpha chain variable domain of TCR clone 23987 (TRAV16, TRAJ33)
FALSAMDSNYQLIW

SEQ ID NO: 47974 - protein, 16 aa, Homo sapiens
  CDR3 for beta chain variable domain of TCR clone 23987 (TRBV25-1, TRBJ2-7)
CASSELTGGGIYEQYF

SEQ ID NO: 47975 - protein, 17 aa, Homo sapiens
  CDR3 for alpha chain variable domain of TCR clone 23988 (TRAV17, TRAJ7)
CATLGRLAFGKGNQVVV

SEQ ID NO: 47976 - protein, 13 aa, Homo sapiens
  CDR3 for beta chain variable domain of TCR clone 23988 (TRBV12-4, TRBJ2-7)
CASSVERVREQYF

SEQ ID NO: 47977 - protein, 10 aa, Homo sapiens
  CDR3 for alpha chain variable domain of TCR clone 23989 (TRAV23/DV6, TRAJ57)
CASSSTLSQG

SEQ ID NO: 47978 - protein, 14 aa, Homo sapiens
  CDR3 for beta chain variable domain of TCR clone 23989 (TRBV25-1, TRBJ1-1)
CASTHLGGNTEAFF

SEQ ID NO: 47979 - protein, 13 aa, Homo sapiens
  CDR3 for alpha chain variable domain of TCR clone 23990 (TRAV27, TRAJ45)
CRSLGGGADGLTF

SEQ ID NO: 47980 - protein, 17 aa, Homo sapiens
  CDR3 for beta chain variable domain of TCR clone 23990 (TRBV11-2, TRBJ2-1)
CASSLYPPGVEYNEQFF

SEQ ID NO: 47981 - protein, 23 aa, Homo sapiens
  CDR3 for alpha chain variable domain of TCR clone 23991 (TRAV10, TRAJ34)
CVVSGKHRQAHLWDWDQITSLSK

SEQ ID NO: 47982 - protein, 14 aa, Homo sapiens
  CDR3 for beta chain variable domain of TCR clone 23991 (TRBV19, TRBJ2-1)
CASPTFVLSGEQFF

SEQ ID NO: 47983 - protein, 11 aa, Homo sapiens
  CDR3 for alpha chain variable domain of TCR clone 23992 (TRAV1-2, TRAJ20)
CAVANDYKLSF

SEQ ID NO: 47984 - protein, 18 aa, Homo sapiens
  CDR3 for beta chain variable domain of TCR clone 23992 (TRBV20-1, TRBJ2-6)
CSAETTPTHGSEANVLTF

SEQ ID NO: 47985 - protein, 13 aa, Homo sapiens
  CDR3 for alpha chain variable domain of TCR clone 23993 (TRAV1-2, TRAJ9)
CAALNTGGFKTIF

SEQ ID NO: 47986 - protein, 13 aa, Homo sapiens
  CDR3 for beta chain variable domain of TCR clone 23993 (TRBV19, TRBJ1-2)
CASRVPGQDGYTF

SEQ ID NO: 47987 - protein, 17 aa, Homo sapiens
  CDR3 for alpha chain variable domain of TCR clone 23994 (TRAV13-1, TRAJ28)
CAASPPYSVAGSYQLTF

SEQ ID NO: 47988 - protein, 15 aa, Homo sapiens
  CDR3 for beta chain variable domain of TCR clone 23994 (TRBV6-3, TRBJ2-2)
CASSFLATLTGELFF

SEQ ID NO: 47989 - protein, 11 aa, Homo sapiens
  CDR3 for alpha chain variable domain of TCR clone 23995 (TRAV1-2, TRAJ20)
CAVANDYKLSF

SEQ ID NO: 47990 - protein, 18 aa, Homo sapiens
  CDR3 for beta chain variable domain of TCR clone 23995 (TRBV20-1, TRBJ2-6)
CSAETTPTHGSGANILTF

SEQ ID NO: 47991 - protein, 15 aa, Homo sapiens
  CDR3 for alpha chain variable domain of TCR clone 23996 (TRAV21, TRAJ53)
CATLNSGGSNYKLTF

SEQ ID NO: 47992 - protein, 16 aa, Homo sapiens
  CDR3 for beta chain variable domain of TCR clone 23996 (TRBV9, TRBJ2-1)
CAGSVGGGGNYNEQFF

SEQ ID NO: 47993 - protein, 13 aa, Homo sapiens
  CDR3 for alpha chain variable domain of TCR clone 23997 (TRAV21, TRAJ27)
CAARPGNARKSTF

SEQ ID NO: 47994 - protein, 14 aa, Homo sapiens
  CDR3 for beta chain variable domain of TCR clone 23997 (TRBV7-6, TRBJ2-3)
CASSLGTVTDTQYF

SEQ ID NO: 47995 - protein, 14 aa, Homo sapiens
  CDR3 for alpha chain variable domain of TCR clone 23998 (TRAV26-1, TRAJ45)
CIEVTGGGDDGLTF

SEQ ID NO: 47996 - protein, 13 aa, Homo sapiens
  CDR3 for beta chain variable domain of TCR clone 23998 (TRBV7-6, TRBJ1-2)
CASSLVADYGYTF

SEQ ID NO: 47997 - protein, 14 aa, Homo sapiens
  CDR3 for alpha chain variable domain of TCR clone 23999 (TRAV1-2, TRAJ16)
CAVNRFSDGQKLLF

SEQ ID NO: 47998 - protein, 15 aa, Homo sapiens
  CDR3 for beta chain variable domain of TCR clone 23999 (TRBV6-1, TRBJ2-1)
CASSELRGQYNEQFF

SEQ ID NO: 47999 - protein, 17 aa, Homo sapiens
  CDR3 for alpha chain variable domain of TCR clone 24000 (TRAV3, TRAJ6)
CAVRDGPRAGGSYIPTF

SEQ ID NO: 48000 - protein, 15 aa, Homo sapiens
  CDR3 for beta chain variable domain of TCR clone 24000 (TRBV7-9, TRBJ1-1)
CASSLLEQGGTEAFF

SEQ ID NO: 48001 - protein, 16 aa, Homo sapiens
  CDR3 for alpha chain variable domain of TCR clone 24001 (TRAV20, TRAJ22)
CAVQASSSGSARQRTF

SEQ ID NO: 48002 - protein, 13 aa, Homo sapiens
  CDR3 for beta chain variable domain of TCR clone 24001 (TRBV7-2, TRBJ2-5)
CASSQTSVETQYF

SEQ ID NO: 48003 - protein, 13 aa, Homo sapiens
  CDR3 for alpha chain variable domain of TCR clone 24002 (TRAV24, TRAJ44)
CALLTGTASKLTF

SEQ ID NO: 48004 - protein, 13 aa, Homo sapiens
  CDR3 for beta chain variable domain of TCR clone 24002 (TRBV19, TRBJ1-3)
CASRLSLGNTIYF

SEQ ID NO: 48005 - protein, 13 aa, Homo sapiens
  CDR3 for alpha chain variable domain of TCR clone 24003 (TRAV22, TRAJ29)
CAVGGPGNTPLVF

SEQ ID NO: 48006 - protein, 13 aa, Homo sapiens
  CDR3 for beta chain variable domain of TCR clone 24003 (TRBV4-2, TRBJ1-1)
CASSQAGNTEAFF

SEQ ID NO: 48007 - protein, 14 aa, Homo sapiens
  CDR3 for alpha chain variable domain of TCR clone 24004 (TRAV13-1, TRAJ44)
CAAKATGPASKLTF

SEQ ID NO: 48008 - protein, 17 aa, Homo sapiens
  CDR3 for beta chain variable domain of TCR clone 24004 (TRBV7-3, TRBJ2-3)
RASSLMKRMRGADTQYF

SEQ ID NO: 48009 - protein, 12 aa, Homo sapiens
  CDR3 for alpha chain variable domain of TCR clone 24005 (TRAV2, TRAJ10)
CASTGGGNKLTF

SEQ ID NO: 48010 - protein, 14 aa, Homo sapiens
  CDR3 for beta chain variable domain of TCR clone 24005 (TRBV7-2, TRBJ2-2)
CASRGQGAAGELVF

SEQ ID NO: 48011 - protein, 12 aa, Homo sapiens
  CDR3 for alpha chain variable domain of TCR clone 24006 (TRAV12-1, TRAJ40)
CVFYSGTYKYIF

SEQ ID NO: 48012 - protein, 18 aa, Homo sapiens
  CDR3 for beta chain variable domain of TCR clone 24006 (TRBV12-4, TRBJ2-2)
CASSLVAGTRGWTGELFF

SEQ ID NO: 48013 - protein, 13 aa, Homo sapiens
  CDR3 for alpha chain variable domain of TCR clone 24007 (TRAV8-3, TRAJ36)
CAVGAAGANNLFF

SEQ ID NO: 48014 - protein, 15 aa, Homo sapiens
  CDR3 for beta chain variable domain of TCR clone 24007 (TRBV7-2, TRBJ1-2)
CASSPRAGWNYGYTF

SEQ ID NO: 48015 - protein, 14 aa, Homo sapiens
  CDR3 for alpha chain variable domain of TCR clone 24008 (TRAV12-3, TRAJ10)
SHLPLTGGGNKLTF

SEQ ID NO: 48016 - protein, 15 aa, Homo sapiens
  CDR3 for beta chain variable domain of TCR clone 24008 (TRBV27, TRBJ2-1)
CASSNGGGSSNEQLF

SEQ ID NO: 48017 - protein, 14 aa, Homo sapiens
  CDR3 for alpha chain variable domain of TCR clone 24009 (TRAV3, TRAJ21)
CAVRDKYNFNRFYF

SEQ ID NO: 48018 - protein, 14 aa, Homo sapiens
  CDR3 for beta chain variable domain of TCR clone 24009 (TRBV27, TRBJ2-3)
CASRDSPITDTQYF

SEQ ID NO: 48019 - protein, 16 aa, Homo sapiens
  CDR3 for alpha chain variable domain of TCR clone 24010 (TRAV3, TRAJ21)
CAVRDIERVNFNKFYF

SEQ ID NO: 48020 - protein, 13 aa, Homo sapiens
  CDR3 for beta chain variable domain of TCR clone 24010 (TRBV27, TRBJ2-7)
CASSLTTGYEQYF

SEQ ID NO: 48021 - protein, 14 aa, Homo sapiens
  CDR3 for alpha chain variable domain of TCR clone 24011 (TRAV26-1, TRAJ39)
CIVRGSMAGNMLTF

SEQ ID NO: 48022 - protein, 15 aa, Homo sapiens
  CDR3 for beta chain variable domain of TCR clone 24011 (TRBV7-9, TRBJ1-5)
CASSQGHQPNQPQHF

SEQ ID NO: 48023 - protein, 10 aa, Homo sapiens
  CDR3 for alpha chain variable domain of TCR clone 24012 (TRAV12-3, TRAJ49)
CAMNDDQFCF

SEQ ID NO: 48024 - protein, 13 aa, Homo sapiens
  CDR3 for beta chain variable domain of TCR clone 24012 (TRBV12-4, TRBJ1-1)
CASSPGTGFEAFF

SEQ ID NO: 48025 - protein, 16 aa, Homo sapiens
  CDR3 for alpha chain variable domain of TCR clone 24013 (TRAV12-2, TRAJ45)
CAVIFLSGGGADGLTF

SEQ ID NO: 48026 - protein, 19 aa, Homo sapiens
  CDR3 for beta chain variable domain of TCR clone 24013 (TRBV28, TRBJ2-4)
CASSLQPGGPAHSKNIQYF

SEQ ID NO: 48027 - protein, 12 aa, Homo sapiens
  CDR3 for alpha chain variable domain of TCR clone 24014 (TRAV21, TRAJ31)
CAVWGNNARPMF

SEQ ID NO: 48028 - protein, 16 aa, Homo sapiens
  CDR3 for beta chain variable domain of TCR clone 24014 (TRBV27, TRBJ2-5)
CASSYGPGGQKETQYF

SEQ ID NO: 48029 - protein, 14 aa, Homo sapiens
  CDR3 for alpha chain variable domain of TCR clone 24015 (TRAV12-2, TRAJ13)
CAVKKTGGYQKVTF

SEQ ID NO: 48030 - protein, 14 aa, Homo sapiens
  CDR3 for beta chain variable domain of TCR clone 24015 (TRBV2, TRBJ2-7)
CASSLTSGGYEQYF

SEQ ID NO: 48031 - protein, 12 aa, Homo sapiens
  CDR3 for alpha chain variable domain of TCR clone 24016 (TRAV12-3, TRAJ20)
CAMVRGDYKLSF

SEQ ID NO: 48032 - protein, 14 aa, Homo sapiens
  CDR3 for beta chain variable domain of TCR clone 24016 (TRBV5-5, TRBJ1-5)
CASSGQGVDQPRHF

SEQ ID NO: 48033 - protein, 17 aa, Homo sapiens
  CDR3 for alpha chain variable domain of TCR clone 24017 (TRAV26-1, TRAJ53)
CIVRVDDSGGSNYKPTF

SEQ ID NO: 48034 - protein, 15 aa, Homo sapiens
  CDR3 for beta chain variable domain of TCR clone 24017 (TRBV20-1, TRBJ2-7)
CSARVPAAYFYEQYF

SEQ ID NO: 48035 - protein, 15 aa, Homo sapiens
  CDR3 for alpha chain variable domain of TCR clone 24018 (TRAV17, TRAJ13)
CATDAGSGGYQKVTF

SEQ ID NO: 48036 - protein, 17 aa, Homo sapiens
  CDR3 for beta chain variable domain of TCR clone 24018 (TRBV11-2, TRBJ2-1)
CASSLYPPGVKYNEQFF

SEQ ID NO: 48037 - protein, 15 aa, Homo sapiens
  CDR3 for alpha chain variable domain of TCR clone 24019 (TRAV20, TRAJ43)
CAVQAGKSSNNDMRF

SEQ ID NO: 48038 - protein, 14 aa, Homo sapiens
  CDR3 for beta chain variable domain of TCR clone 24019 (TRBV27, TRBJ2-1)
CASRHLGRGKEQFF

SEQ ID NO: 48039 - protein, 13 aa, Homo sapiens
  CDR3 for alpha chain variable domain of TCR clone 24020 (TRAV8-3, TRAJ28)
CVVGAVGSYQLTF

SEQ ID NO: 48040 - protein, 14 aa, Homo sapiens
  CDR3 for beta chain variable domain of TCR clone 24020 (TRBV7-2, TRBJ2-7)
CASRSQGAAYEQYF

SEQ ID NO: 48041 - protein, 16 aa, Homo sapiens
  CDR3 for alpha chain variable domain of TCR clone 24021 (TRAV3, TRAJ21)
CAVRDIERGNFNKFYF

SEQ ID NO: 48042 - protein, 17 aa, Homo sapiens
  CDR3 for beta chain variable domain of TCR clone 24021 (TRBV11-2, TRBJ2-1)
CASSLYPPGVEYNEQFF

SEQ ID NO: 48043 - protein, 14 aa, Homo sapiens
  CDR3 for alpha chain variable domain of TCR clone 24022 (TRAV13-1, TRAJ9)
CAASALTGGLKTIF

SEQ ID NO: 48044 - protein, 13 aa, Homo sapiens
  CDR3 for beta chain variable domain of TCR clone 24022 (TRBV20-1, TRBJ1-1)
CSAGTVGNTEAFF

SEQ ID NO: 48045 - protein, 13 aa, Homo sapiens
  CDR3 for alpha chain variable domain of TCR clone 24023 (TRAV17, TRAJ9)
CATDYTGGFKTIF

SEQ ID NO: 48046 - protein, 14 aa, Homo sapiens
  CDR3 for beta chain variable domain of TCR clone 24023 (TRBV19, TRBJ2-5)
CASSMAGQQETQYF

SEQ ID NO: 48047 - protein, 16 aa, Homo sapiens
  CDR3 for alpha chain variable domain of TCR clone 24024 (TRAV14/DV4, TRAJ52)
CAMRYAGGTSYGKLTF

SEQ ID NO: 48048 - protein, 13 aa, Homo sapiens
  CDR3 for beta chain variable domain of TCR clone 24024 (TRBV7-3, TRBJ1-1)
CASSQDWGAEAFF

SEQ ID NO: 48049 - protein, 16 aa, Homo sapiens
  CDR3 for alpha chain variable domain of TCR clone 24025 (TRAV3, TRAJ3)
CAVRDRAKSSASTIIF

SEQ ID NO: 48050 - protein, 16 aa, Homo sapiens
  CDR3 for beta chain variable domain of TCR clone 24025 (TRBV20-1, TRBJ2-4)
CSATSLAELAKNIQYF

SEQ ID NO: 48051 - protein, 13 aa, Homo sapiens
  CDR3 for alpha chain variable domain of TCR clone 24026 (TRAV23/DV6, TRAJ3)
CAATTFALGGAVL

SEQ ID NO: 48052 - protein, 15 aa, Homo sapiens
  CDR3 for beta chain variable domain of TCR clone 24026 (TRBV19, TRBJ1-6)
CASSTQGAVGSPLHF

SEQ ID NO: 48053 - protein, 14 aa, Homo sapiens
  CDR3 for alpha chain variable domain of TCR clone 24027 (TRAV35, TRAJ42)
CAWRYGGSQGNLIF

SEQ ID NO: 48054 - protein, 15 aa, Homo sapiens
  CDR3 for beta chain variable domain of TCR clone 24027 (TRBV7-9, TRBJ2-1)
CASSLGWGRANEQFF

SEQ ID NO: 48055 - protein, 14 aa, Homo sapiens
  CDR3 for alpha chain variable domain of TCR clone 24028 (TRAV12-2, TRAJ13)
CAVKKTGGYQKVTF

SEQ ID NO: 48056 - protein, 16 aa, Homo sapiens
  CDR3 for beta chain variable domain of TCR clone 24028 (TRBV6-1, TRBJ2-5)
CASSFFVRGRQETQYF

SEQ ID NO: 48057 - protein, 21 aa, Homo sapiens
  CDR3 for alpha chain variable domain of TCR clone 24029 (TRAV12-1, TRAJ32)
SPVIQPPTSMNYGGATNKLIF

SEQ ID NO: 48058 - protein, 15 aa, Homo sapiens
  CDR3 for beta chain variable domain of TCR clone 24029 (TRBV7-9, TRBJ2-2)
CASGPLDTFPGELFF

SEQ ID NO: 48059 - protein, 14 aa, Homo sapiens
  CDR3 for alpha chain variable domain of TCR clone 24030 (TRAV27, TRAJ36)
CAGPPKRGANNLFF

SEQ ID NO: 48060 - protein, 15 aa, Homo sapiens
  CDR3 for beta chain variable domain of TCR clone 24030 (TRBV18, TRBJ2-7)
CARSPASTPNYEQYF

SEQ ID NO: 48061 - protein, 12 aa, Homo sapiens
  CDR3 for alpha chain variable domain of TCR clone 24031 (TRAV21, TRAJ33)
CVKMDSNYQLIW

SEQ ID NO: 48062 - protein, 14 aa, Homo sapiens
  CDR3 for beta chain variable domain of TCR clone 24031 (TRBV2, TRBJ2-7)
CASSLTSGGYEQYF

SEQ ID NO: 48063 - protein, 16 aa, Homo sapiens
  CDR3 for alpha chain variable domain of TCR clone 24032 (TRAV17, TRAJ22)
CATGPTSSGSARQLTF

SEQ ID NO: 48064 - protein, 13 aa, Homo sapiens
  CDR3 for beta chain variable domain of TCR clone 24032 (TRBV11-2, TRBJ2-1)
CASSLGLAGGRFF

SEQ ID NO: 48065 - protein, 13 aa, Homo sapiens
  CDR3 for alpha chain variable domain of TCR clone 24033 (TRAV3, TRAJ27)
CAVRPLDAGKSTF

SEQ ID NO: 48066 - protein, 13 aa, Homo sapiens
  CDR3 for beta chain variable domain of TCR clone 24033 (TRBV7-9, TRBJ2-3)
CASSPGSTDTQYF

SEQ ID NO: 48067 - protein, 12 aa, Homo sapiens
  CDR3 for alpha chain variable domain of TCR clone 24034 (TRAV13-1, TRAJ21)
CTAKEGFNKFYF

SEQ ID NO: 48068 - protein, 15 aa, Homo sapiens
  CDR3 for beta chain variable domain of TCR clone 24034 (TRBV20-1, TRBJ2-7)
CSARDRVSGMDEQYF

SEQ ID NO: 48069 - protein, 16 aa, Homo sapiens
  CDR3 for alpha chain variable domain of TCR clone 24035 (TRAV26-1, TRAJ52)
CIVSSAGGTSYGKLTF

SEQ ID NO: 48070 - protein, 16 aa, Homo sapiens
  CDR3 for beta chain variable domain of TCR clone 24035 (TRBV5-1, TRBJ2-1)
CASSLEGRGLYNEQFF

SEQ ID NO: 48071 - protein, 14 aa, Homo sapiens
  CDR3 for alpha chain variable domain of TCR clone 24036 (TRAV1-2, TRAJ16)
CAVNRFSDGQKLLF

SEQ ID NO: 48072 - protein, 16 aa, Homo sapiens
  CDR3 for beta chain variable domain of TCR clone 24036 (TRBV29-1, TRBJ2-7)
CSVEDAEDGTAYEQYF

SEQ ID NO: 48073 - protein, 14 aa, Homo sapiens
  CDR3 for alpha chain variable domain of TCR clone 24037 (TRAV1-2, TRAJ16)
CAVNRFSDGQKLLF

SEQ ID NO: 48074 - protein, 15 aa, Homo sapiens
  CDR3 for beta chain variable domain of TCR clone 24037 (TRBV27, TRBJ2-5)
CASSLYPRGGETQYF

SEQ ID NO: 48075 - protein, 18 aa, Homo sapiens
  CDR3 for alpha chain variable domain of TCR clone 24038 (TRAV26-2, TRAJ54)
CILRDVEAGIQGAQKLVF

SEQ ID NO: 48076 - protein, 16 aa, Homo sapiens
  CDR3 for beta chain variable domain of TCR clone 24038 (TRBV6-1, TRBJ2-5)
CASSETLDRGAETQYF

SEQ ID NO: 48077 - protein, 14 aa, Homo sapiens
  CDR3 for alpha chain variable domain of TCR clone 24039 (TRAV1-2, TRAJ16)
CAVNRFSDGQKLLF

SEQ ID NO: 48078 - protein, 15 aa, Homo sapiens
  CDR3 for beta chain variable domain of TCR clone 24039 (TRBV9, TRBJ1-6)
CASSIAGTGDSPLHF

SEQ ID NO: 48079 - protein, 16 aa, Homo sapiens
  CDR3 for alpha chain variable domain of TCR clone 24040 (TRAV4, TRAJ22)
CLVGDLYSGSARQLTF

SEQ ID NO: 48080 - protein, 16 aa, Homo sapiens
  CDR3 for beta chain variable domain of TCR clone 24040 (TRBV7-9, TRBJ2-1)
CASSDVAGGSCNEQFF

SEQ ID NO: 48081 - protein, 13 aa, Homo sapiens
  CDR3 for alpha chain variable domain of TCR clone 24041 (TRAV17, TRAJ9)
CATDYTGGFKTIF

SEQ ID NO: 48082 - protein, 14 aa, Homo sapiens
  CDR3 for beta chain variable domain of TCR clone 24041 (TRBV19, TRBJ2-5)
CASGMTGQQETQYF

SEQ ID NO: 48083 - protein, 13 aa, Homo sapiens
  CDR3 for alpha chain variable domain of TCR clone 24042 (TRAV8-3, TRAJ28)
CAVCAVGSYQLTF

SEQ ID NO: 48084 - protein, 14 aa, Homo sapiens
  CDR3 for beta chain variable domain of TCR clone 24042 (TRBV7-2, TRBJ2-7)
CASRSQGAAYEQYF

SEQ ID NO: 48085 - protein, 15 aa, Homo sapiens
  CDR3 for alpha chain variable domain of TCR clone 24043 (TRAV2, TRAJ28)
CAVPYSGAGSYQLTF

SEQ ID NO: 48086 - protein, 17 aa, Homo sapiens
  CDR3 for beta chain variable domain of TCR clone 24043 (TRBV20-1, TRBJ2-4)
CSARDWASGGRENSQYF

SEQ ID NO: 48087 - protein, 13 aa, Homo sapiens
  CDR3 for alpha chain variable domain of TCR clone 24044 (TRAV3, TRAJ21)
CAVREPDFNKFYF

SEQ ID NO: 48088 - protein, 12 aa, Homo sapiens
  CDR3 for beta chain variable domain of TCR clone 24044 (TRBV11-2, TRBJ2-3)
GASRGAPNTQYF

SEQ ID NO: 48089 - protein, 14 aa, Homo sapiens
  CDR3 for alpha chain variable domain of TCR clone 24045 (TRAV1-2, TRAJ16)
SAVNRFSDGQKLLF

SEQ ID NO: 48090 - protein, 15 aa, Homo sapiens
  CDR3 for beta chain variable domain of TCR clone 24045 (TRBV9, TRBJ1-6)
CASSVAGTGDSPLHF

SEQ ID NO: 48091 - protein, 12 aa, Homo sapiens
  CDR3 for alpha chain variable domain of TCR clone 24046 (TRAV21, TRAJ11)
CSATSGYSTLTF

SEQ ID NO: 48092 - protein, 14 aa, Homo sapiens
  CDR3 for beta chain variable domain of TCR clone 24046 (TRBV20-1, TRBJ2-7)
CSAPELAGVGEQYF

SEQ ID NO: 48093 - protein, 14 aa, Homo sapiens
  CDR3 for alpha chain variable domain of TCR clone 24047 (TRAV9-2, TRAJ39)
CALYIYNAGNMLTF

SEQ ID NO: 48094 - protein, 12 aa, Homo sapiens
  CDR3 for beta chain variable domain of TCR clone 24047 (TRBV6-3, TRBJ2-7)
CASSLTPYEQYF

SEQ ID NO: 48095 - protein, 11 aa, Homo sapiens
  CDR3 for alpha chain variable domain of TCR clone 24048 (TRAV1-2, TRAJ31)
CAVNNNARLMF

SEQ ID NO: 48096 - protein, 15 aa, Homo sapiens
  CDR3 for beta chain variable domain of TCR clone 24048 (TRBV28, TRBJ2-1)
CASSTIAGGRSEQFF

SEQ ID NO: 48097 - protein, 12 aa, Homo sapiens
  CDR3 for alpha chain variable domain of TCR clone 24049 (TRAV12-3, TRAJ40)
CAMSSGTYKCIF

SEQ ID NO: 48098 - protein, 15 aa, Homo sapiens
  CDR3 for beta chain variable domain of TCR clone 24049 (TRBV7-3, TRBJ2-2)
CASSETGQGTGELFF

SEQ ID NO: 48099 - protein, 11 aa, Homo sapiens
  CDR3 for alpha chain variable domain of TCR clone 24050 (TRAV1-1, TRAJ23)
CAVRQGGKLIF

SEQ ID NO: 48100 - protein, 20 aa, Homo sapiens
  CDR3 for beta chain variable domain of TCR clone 24050 (TRBV7-8, TRBJ2-2)
CASSHLFPGPSIHITGELFF

SEQ ID NO: 48101 - protein, 18 aa, Homo sapiens
  CDR3 for alpha chain variable domain of TCR clone 24051 (TRAV26-1, TRAJ22)
CIVRVALISSGSARQLTF

SEQ ID NO: 48102 - protein, 13 aa, Homo sapiens
  CDR3 for beta chain variable domain of TCR clone 24051 (TRBV13, TRBJ2-5)
CASSPEVGETQYS

SEQ ID NO: 48103 - protein, 17 aa, Homo sapiens
  CDR3 for alpha chain variable domain of TCR clone 24052 (TRAV3, TRAJ6)
CAVRDGPRAGGSYIPTF

SEQ ID NO: 48104 - protein, 13 aa, Homo sapiens
  CDR3 for beta chain variable domain of TCR clone 24052 (TRBV12-4, TRBJ1-2)
CASSLRQGKGYTF

SEQ ID NO: 48105 - protein, 14 aa, Homo sapiens
  CDR3 for alpha chain variable domain of TCR clone 24053 (TRAV1-2, TRAJ16)
CAVNRFSDGQKLLF

SEQ ID NO: 48106 - protein, 13 aa, Homo sapiens
  CDR3 for beta chain variable domain of TCR clone 24053 (TRBV7-3, TRBJ2-1)
CASSLDSYNEQFF

SEQ ID NO: 48107 - protein, 18 aa, Homo sapiens
  CDR3 for alpha chain variable domain of TCR clone 24054 (TRAV21, TRAJ52)
CAVRPSPAGGTSYGKLTF

SEQ ID NO: 48108 - protein, 11 aa, Homo sapiens
  CDR3 for beta chain variable domain of TCR clone 24054 (TRBV7-8, TRBJ2-7)
CASSLSLEQYF

SEQ ID NO: 48109 - protein, 14 aa, Homo sapiens
  CDR3 for alpha chain variable domain of TCR clone 24055 (TRAV4, TRAJ32)
CLVNYGGATNKLIF

SEQ ID NO: 48110 - protein, 14 aa, Homo sapiens
  CDR3 for beta chain variable domain of TCR clone 24055 (TRBV15, TRBJ2-5)
CATSGGTRTETQYL

SEQ ID NO: 48111 - protein, 13 aa, Homo sapiens
  CDR3 for alpha chain variable domain of TCR clone 24056 (TRAV8-3, TRAJ28)
CAVDAVGSYQLTF

SEQ ID NO: 48112 - protein, 15 aa, Homo sapiens
  CDR3 for beta chain variable domain of TCR clone 24056 (TRBV7-9, TRBJ1-5)
CASSQGHQPNQPQHF

SEQ ID NO: 48113 - protein, 15 aa, Homo sapiens
  CDR3 for alpha chain variable domain of TCR clone 24057 (TRAV35, TRAJ40)
CAGQLGTSRTYKYIF

SEQ ID NO: 48114 - protein, 14 aa, Homo sapiens
  CDR3 for beta chain variable domain of TCR clone 24057 (TRBV7-3, TRBJ2-1)
CASSLAGGTNEQFF

SEQ ID NO: 48115 - protein, 14 aa, Homo sapiens
  CDR3 for alpha chain variable domain of TCR clone 24058 (TRAV29/DV5, TRAJ45)
CAASFRGGADGLTF

SEQ ID NO: 48116 - protein, 11 aa, Homo sapiens
  CDR3 for beta chain variable domain of TCR clone 24058 (TRBV11-2, TRBJ2-2)
CASSLPGGLFF

SEQ ID NO: 48117 - protein, 18 aa, Homo sapiens
  CDR3 for alpha chain variable domain of TCR clone 24059 (TRAV21, TRAJ52)
CAVSPSPAGGTSYGKLTF

SEQ ID NO: 48118 - protein, 15 aa, Homo sapiens
  CDR3 for beta chain variable domain of TCR clone 24059 (TRBV7-9, TRBJ2-7)
CASSSSGLAVYEQYF

SEQ ID NO: 48119 - protein, 21 aa, Homo sapiens
  CDR3 for alpha chain variable domain of TCR clone 24060 (TRAV9-2, )
CALIQIGDIQNPDPAVYQLRD

SEQ ID NO: 48120 - protein, 16 aa, Homo sapiens
  CDR3 for beta chain variable domain of TCR clone 24060 (TRBV19, TRBJ2-1)
CASSKAGPSSYNEQFF

SEQ ID NO: 48121 - protein, 15 aa, Homo sapiens
  CDR3 for alpha chain variable domain of TCR clone 24061 (TRAV26-1, TRAJ44)
CIVRANTGTASKLTF

SEQ ID NO: 48122 - protein, 16 aa, Homo sapiens
  CDR3 for beta chain variable domain of TCR clone 24061 (TRBV7-7, TRBJ2-1)
CASSLASGTSHNEQFF

SEQ ID NO: 48123 - protein, 13 aa, Homo sapiens
  CDR3 for alpha chain variable domain of TCR clone 24062 (TRAV1-1, TRAJ9)
CAAKNTGCFKTIF

SEQ ID NO: 48124 - protein, 14 aa, Homo sapiens
  CDR3 for beta chain variable domain of TCR clone 24062 (TRBV20-1, TRBJ2-1)
CSAQIGGSANEQFF

SEQ ID NO: 48125 - protein, 13 aa, Homo sapiens
  CDR3 for alpha chain variable domain of TCR clone 24063 (TRAV8-3, TRAJ28)
CAVGAVGSCQLTF

SEQ ID NO: 48126 - protein, 15 aa, Homo sapiens
  CDR3 for beta chain variable domain of TCR clone 24063 (TRBV7-9, TRBJ1-5)
CASSQGHQPNQPQHF

SEQ ID NO: 48127 - protein, 16 aa, Homo sapiens
  CDR3 for alpha chain variable domain of TCR clone 24064 (TRAV8-3, TRAJ13)
CAVGAYPSGGYQTVTF

SEQ ID NO: 48128 - protein, 15 aa, Homo sapiens
  CDR3 for beta chain variable domain of TCR clone 24064 (TRBV19, TRBJ1-5)
CASSIVWADNQPQHF

SEQ ID NO: 48129 - protein, 13 aa, Homo sapiens
  CDR3 for alpha chain variable domain of TCR clone 24065 (TRAV8-3, TRAJ44)
CAVVPGTASKLTF

SEQ ID NO: 48130 - protein, 14 aa, Homo sapiens
  CDR3 for beta chain variable domain of TCR clone 24065 (TRBV11-2, TRBJ2-3)
RASSRLARTDTQYF

SEQ ID NO: 48131 - protein, 15 aa, Homo sapiens
  CDR3 for alpha chain variable domain of TCR clone 24066 (TRAV38-1, TRAJ54)
CAFNYLIQGAQKLVF

SEQ ID NO: 48132 - protein, 14 aa, Homo sapiens
  CDR3 for beta chain variable domain of TCR clone 24066 (TRBV7-8, TRBJ2-1)
CASSFFGGRNEQFF

SEQ ID NO: 48133 - protein, 12 aa, Homo sapiens
  CDR3 for alpha chain variable domain of TCR clone 24067 (TRAV30, TRAJ43)
CGTEERGNDMRL

SEQ ID NO: 48134 - protein, 13 aa, Homo sapiens
  CDR3 for beta chain variable domain of TCR clone 24067 (TRBV27, TRBJ2-7)
CASSFSQGYEQYF

SEQ ID NO: 48135 - protein, 14 aa, Homo sapiens
  CDR3 for alpha chain variable domain of TCR clone 24068 (TRAV26-1, TRAJ38)
CIADNAGNNRKLIW

SEQ ID NO: 48136 - protein, 15 aa, Homo sapiens
  CDR3 for beta chain variable domain of TCR clone 24068 (TRBV27, TRBJ2-1)
CASSNGGGSSNEQFF

SEQ ID NO: 48137 - protein, 23 aa, Homo sapiens
  CDR3 for alpha chain variable domain of TCR clone 24069 (TRAV13-2, TRAJ6)
YAEEVHQEEATYLHLEEEPALLF

SEQ ID NO: 48138 - protein, 13 aa, Homo sapiens
  CDR3 for beta chain variable domain of TCR clone 24069 (TRBV9, TRBJ2-7)
CASSVAEYYEQYF

SEQ ID NO: 48139 - protein, 17 aa, Homo sapiens
  CDR3 for alpha chain variable domain of TCR clone 24070 (TRAV3, TRAJ6)
CAVRDGPRAGGSYIPTF

SEQ ID NO: 48140 - protein, 16 aa, Homo sapiens
  CDR3 for beta chain variable domain of TCR clone 24070 (TRBV7-9, TRBJ1-2)
CASSLGFSSGEDGYTF

SEQ ID NO: 48141 - protein, 12 aa, Homo sapiens
  CDR3 for alpha chain variable domain of TCR clone 24071 (TRAV3, TRAJ43)
CAVRDPNNDMRF

SEQ ID NO: 48142 - protein, 15 aa, Homo sapiens
  CDR3 for beta chain variable domain of TCR clone 24071 (TRBV27, TRBJ1-5)
CASSLGAGFDQPQHF

SEQ ID NO: 48143 - protein, 14 aa, Homo sapiens
  CDR3 for alpha chain variable domain of TCR clone 24072 (TRAV12-3, TRAJ35)
CAMSLIGFGNVLHC

SEQ ID NO: 48144 - protein, 12 aa, Homo sapiens
  CDR3 for beta chain variable domain of TCR clone 24072 (TRBV12-4, TRBJ1-1)
CASSLAGHEAFF

SEQ ID NO: 48145 - protein, 14 aa, Homo sapiens
  CDR3 for alpha chain variable domain of TCR clone 24073 (TRAV13-1, TRAJ44)
CAAKATGTASKLTF

SEQ ID NO: 48146 - protein, 17 aa, Homo sapiens
  CDR3 for beta chain variable domain of TCR clone 24073 (TRBV7-3, TRBJ2-3)
RASGLMKRMRGADTQYF

SEQ ID NO: 48147 - protein, 13 aa, Homo sapiens
  CDR3 for alpha chain variable domain of TCR clone 24074 (TRAV12-2, TRAJ40)
CAVKRTGTYKYIF

SEQ ID NO: 48148 - protein, 13 aa, Homo sapiens
  CDR3 for beta chain variable domain of TCR clone 24074 (TRBV7-9, TRBJ1-2)
CASSLKQNYGYTF

SEQ ID NO: 48149 - protein, 13 aa, Homo sapiens
  CDR3 for alpha chain variable domain of TCR clone 24075 (TRAV8-3, TRAJ36)
CAVGATGANNLFF

SEQ ID NO: 48150 - protein, 13 aa, Homo sapiens
  CDR3 for beta chain variable domain of TCR clone 24075 (TRBV7-3, TRBJ1-1)
CASSQDWGAEAFF

SEQ ID NO: 48151 - protein, 13 aa, Homo sapiens
  CDR3 for alpha chain variable domain of TCR clone 24076 (TRAV17, TRAJ9)
CATDYTGCFKTIF

SEQ ID NO: 48152 - protein, 16 aa, Homo sapiens
  CDR3 for beta chain variable domain of TCR clone 24076 (TRBV7-7, TRBJ2-1)
CASSLASGTSYNEQFF

SEQ ID NO: 48153 - protein, 15 aa, Homo sapiens
  CDR3 for alpha chain variable domain of TCR clone 24077 (TRAV12-2, TRAJ53)
CAVNGGGGSNYKLTF

SEQ ID NO: 48154 - protein, 17 aa, Homo sapiens
  CDR3 for beta chain variable domain of TCR clone 24077 (TRBV7-3, TRBJ2-3)
CASSFMKRMRGADTQYF

SEQ ID NO: 48155 - protein, 14 aa, Homo sapiens
  CDR3 for alpha chain variable domain of TCR clone 24078 (TRAV35, TRAJ33)
CAGSSQDSNYQLIW

SEQ ID NO: 48156 - protein, 15 aa, Homo sapiens
  CDR3 for beta chain variable domain of TCR clone 24078 (TRBV20-1, TRBJ2-7)
CSAESGTSGACEQYF

SEQ ID NO: 48157 - protein, 14 aa, Homo sapiens
  CDR3 for alpha chain variable domain of TCR clone 24079 (TRAV17, TRAJ16)
CATADFSDGQQLLF

SEQ ID NO: 48158 - protein, 12 aa, Homo sapiens
  CDR3 for beta chain variable domain of TCR clone 24079 (TRBV24-1, TRBJ1-1)
CATLYPDTEAFF

SEQ ID NO: 48159 - protein, 10 aa, Homo sapiens
  CDR3 for alpha chain variable domain of TCR clone 24080 (TRAV1-2, TRAJ20)
CALNDYELSF

SEQ ID NO: 48160 - protein, 16 aa, Homo sapiens
  CDR3 for beta chain variable domain of TCR clone 24080 (TRBV20-1, TRBJ1-1)
CSARALTQGMNTEAFF

SEQ ID NO: 48161 - protein, 14 aa, Homo sapiens
  CDR3 for alpha chain variable domain of TCR clone 24081 (TRAV12-2, TRAJ13)
CAVKKTGGYQKVTF

SEQ ID NO: 48162 - protein, 13 aa, Homo sapiens
  CDR3 for beta chain variable domain of TCR clone 24081 (TRBV20-1, TRBJ1-1)
CSARLGQGTEASF

SEQ ID NO: 48163 - protein, 17 aa, Homo sapiens
  CDR3 for alpha chain variable domain of TCR clone 24082 (TRAV13-1, TRAJ52)
CAASSGAGGTNYGKLTF

SEQ ID NO: 48164 - protein, 15 aa, Homo sapiens
  CDR3 for beta chain variable domain of TCR clone 24082 (TRBV2, TRBJ2-1)
CASSELAGSYNEQFF

SEQ ID NO: 48165 - protein, 14 aa, Homo sapiens
  CDR3 for alpha chain variable domain of TCR clone 24083 (TRAV35, TRAJ33)
CAGSSQDSNCQLIW

SEQ ID NO: 48166 - protein, 15 aa, Homo sapiens
  CDR3 for beta chain variable domain of TCR clone 24083 (TRBV20-1, TRBJ2-7)
CSAESGTSGAYEQYF

SEQ ID NO: 48167 - protein, 11 aa, Homo sapiens
  CDR3 for alpha chain variable domain of TCR clone 24084 (TRAV2, TRAJ33)
CSVDSNYQLIW

SEQ ID NO: 48168 - protein, 15 aa, Homo sapiens
  CDR3 for beta chain variable domain of TCR clone 24084 (TRBV19, TRBJ1-2)
CASSVGQVLNYGYTF

SEQ ID NO: 48169 - protein, 17 aa, Homo sapiens
  CDR3 for alpha chain variable domain of TCR clone 24085 (TRAV12-2, TRAJ39)
CAVNNMLTFGGGTRLMV

SEQ ID NO: 48170 - protein, 16 aa, Homo sapiens
  CDR3 for beta chain variable domain of TCR clone 24085 (TRBV5-3, TRBJ2-2)
CARSFGTGTNTGELFF

SEQ ID NO: 48171 - protein, 17 aa, Homo sapiens
  CDR3 for alpha chain variable domain of TCR clone 24086 (TRAV26-2, TRAJ42)
CILRDVGYGGSQGNLIF

SEQ ID NO: 48172 - protein, 16 aa, Homo sapiens
  CDR3 for beta chain variable domain of TCR clone 24086 (TRBV12-4, TRBJ2-7)
CASSLIGGTGTYEQYV

SEQ ID NO: 48173 - protein, 12 aa, Homo sapiens
  CDR3 for alpha chain variable domain of TCR clone 24087 (TRAV2, TRAJ10)
CASTGGGNKLTF

SEQ ID NO: 48174 - protein, 14 aa, Homo sapiens
  CDR3 for beta chain variable domain of TCR clone 24087 (TRBV7-2, TRBJ2-2)
CASGGQGAAGELFF

SEQ ID NO: 48175 - protein, 12 aa, Homo sapiens
  CDR3 for alpha chain variable domain of TCR clone 24088 (TRAV17, TRAJ4)
CATDGGYNKLIF

SEQ ID NO: 48176 - protein, 13 aa, Homo sapiens
  CDR3 for beta chain variable domain of TCR clone 24088 (TRBV29-1, TRBJ2-2)
CRTTGVNTGELFF

SEQ ID NO: 48177 - protein, 14 aa, Homo sapiens
  CDR3 for alpha chain variable domain of TCR clone 24089 (TRAV1-2, TRAJ16)
CAVNRFSDGQKLLF

SEQ ID NO: 48178 - protein, 16 aa, Homo sapiens
  CDR3 for beta chain variable domain of TCR clone 24089 (TRBV27, TRBJ2-2)
CASSLSGFWVTGELFF

SEQ ID NO: 48179 - protein, 13 aa, Homo sapiens
  CDR3 for alpha chain variable domain of TCR clone 24090 (TRAV13-1, TRAJ39)
CAASIVMQATCSP

SEQ ID NO: 48180 - protein, 16 aa, Homo sapiens
  CDR3 for beta chain variable domain of TCR clone 24090 (TRBV7-2, TRBJ2-3)
CASSLVALYSTDTQYF

SEQ ID NO: 48181 - protein, 14 aa, Homo sapiens
  CDR3 for alpha chain variable domain of TCR clone 24091 (TRAV17, TRAJ31)
CATVLRNNNARLMF

SEQ ID NO: 48182 - protein, 14 aa, Homo sapiens
  CDR3 for beta chain variable domain of TCR clone 24091 (TRBV12-4, TRBJ2-5)
CASSLWQKQGTQYF

SEQ ID NO: 48183 - protein, 14 aa, Homo sapiens
  CDR3 for alpha chain variable domain of TCR clone 24092 (TRAV12-3, TRAJ20)
CAMSARRGDYKPSF

SEQ ID NO: 48184 - protein, 14 aa, Homo sapiens
  CDR3 for beta chain variable domain of TCR clone 24092 (TRBV7-3, TRBJ2-3)
CASSPSARTDTQYF

SEQ ID NO: 48185 - protein, 12 aa, Homo sapiens
  CDR3 for alpha chain variable domain of TCR clone 24093 (TRAV21, TRAJ11)
CAATSGYSTFTF

SEQ ID NO: 48186 - protein, 14 aa, Homo sapiens
  CDR3 for beta chain variable domain of TCR clone 24093 (TRBV20-1, TRBJ2-7)
CSAPELAGVGEQYF

SEQ ID NO: 48187 - protein, 14 aa, Homo sapiens
  CDR3 for alpha chain variable domain of TCR clone 24094 (TRAV13-2, TRAJ6)
CAESTSGGSYIPTF

SEQ ID NO: 48188 - protein, 15 aa, Homo sapiens
  CDR3 for beta chain variable domain of TCR clone 24094 (TRBV20-1, TRBJ2-3)
CSTTPVMLGTDTQYF

SEQ ID NO: 48189 - protein, 11 aa, Homo sapiens
  CDR3 for alpha chain variable domain of TCR clone 24095 (TRAV29/DV5, TRAJ34)
CAASPLDKLIF

SEQ ID NO: 48190 - protein, 15 aa, Homo sapiens
  CDR3 for beta chain variable domain of TCR clone 24095 (TRBV11-2, TRBJ2-5)
CASSPRSGGLETQYF

SEQ ID NO: 48191 - protein, 11 aa, Homo sapiens
  CDR3 for alpha chain variable domain of TCR clone 24096 (TRAV12-1, TRAJ8)
CVVAGFQKLVF

SEQ ID NO: 48192 - protein, 14 aa, Homo sapiens
  CDR3 for beta chain variable domain of TCR clone 24096 (TRBV19, TRBJ2-1)
CASGKSTQYNEQFF

SEQ ID NO: 48193 - protein, 13 aa, Homo sapiens
  CDR3 for alpha chain variable domain of TCR clone 24097 (TRAV8-3, TRAJ48)
CAVVPFGNEKLTF

SEQ ID NO: 48194 - protein, 15 aa, Homo sapiens
  CDR3 for beta chain variable domain of TCR clone 24097 (TRBV11-2, TRBJ2-1)
CASSSPSTRYNEQSF

SEQ ID NO: 48195 - protein, 13 aa, Homo sapiens
  CDR3 for alpha chain variable domain of TCR clone 24098 (TRAV12-3, TRAJ9)
RAMRNTGGFKTIF

SEQ ID NO: 48196 - protein, 14 aa, Homo sapiens
  CDR3 for beta chain variable domain of TCR clone 24098 (TRBV11-2, TRBJ2-7)
CASSSTGEGYEQYF

SEQ ID NO: 48197 - protein, 13 aa, Homo sapiens
  CDR3 for alpha chain variable domain of TCR clone 24099 (TRAV26-1, TRAJ33)
CIVRVGGNYQLIW

SEQ ID NO: 48198 - protein, 16 aa, Homo sapiens
  CDR3 for beta chain variable domain of TCR clone 24099 (TRBV15, TRBJ2-7)
CATSRDRGRRRGEQYF

SEQ ID NO: 48199 - protein, 14 aa, Homo sapiens
  CDR3 for alpha chain variable domain of TCR clone 24100 (TRAV26-1, TRAJ39)
CIVRGSRAGNMLTF

SEQ ID NO: 48200 - protein, 15 aa, Homo sapiens
  CDR3 for beta chain variable domain of TCR clone 24100 (TRBV7-9, TRBJ1-5)
CASSQGHQPNQAQHF

SEQ ID NO: 48201 - protein, 13 aa, Homo sapiens
  CDR3 for alpha chain variable domain of TCR clone 24101 (TRAV17, TRAJ4)
CATKSGGYNKLIF

SEQ ID NO: 48202 - protein, 14 aa, Homo sapiens
  CDR3 for beta chain variable domain of TCR clone 24101 (TRBV20-1, TRBJ1-5)
CSARDDRGNQPQHL

SEQ ID NO: 48203 - protein, 16 aa, Homo sapiens
  CDR3 for alpha chain variable domain of TCR clone 24102 (TRAV12-3, TRAJ53)
CAMSPGSGGSNYKLTF

SEQ ID NO: 48204 - protein, 15 aa, Homo sapiens
  CDR3 for beta chain variable domain of TCR clone 24102 (TRBV25-1, TRBJ1-4)
FASSKRIATNEKLFF

SEQ ID NO: 48205 - protein, 14 aa, Homo sapiens
  CDR3 for alpha chain variable domain of TCR clone 24103 (TRAV26-1, TRAJ39)
CIVKGSRAGNMLTF

SEQ ID NO: 48206 - protein, 15 aa, Homo sapiens
  CDR3 for beta chain variable domain of TCR clone 24103 (TRBV7-9, TRBJ1-5)
CASSQGHQPNQPQHF

SEQ ID NO: 48207 - protein, 13 aa, Homo sapiens
  CDR3 for alpha chain variable domain of TCR clone 24104 (TRAV1-1, TRAJ9)
CAAKNTGGFKAIF

SEQ ID NO: 48208 - protein, 12 aa, Homo sapiens
  CDR3 for beta chain variable domain of TCR clone 24104 (TRBV11-2, TRBJ2-2)
CASSLGGGELFF

SEQ ID NO: 48209 - protein, 14 aa, Homo sapiens
  CDR3 for alpha chain variable domain of TCR clone 24105 (TRAV1-2, TRAJ8)
CAVREDTGFQKLVF

SEQ ID NO: 48210 - protein, 13 aa, Homo sapiens
  CDR3 for beta chain variable domain of TCR clone 24105 (TRBV12-4, TRBJ2-7)
CASSPTETYEQYF

SEQ ID NO: 48211 - protein, 14 aa, Homo sapiens
  CDR3 for alpha chain variable domain of TCR clone 24106 (TRAV12-1, TRAJ17)
CVVNYKAAGNKLTF

SEQ ID NO: 48212 - protein, 14 aa, Homo sapiens
  CDR3 for beta chain variable domain of TCR clone 24106 (TRBV4-1, TRBJ2-2)
CASSQAVNTGELFF

SEQ ID NO: 48213 - protein, 12 aa, Homo sapiens
  CDR3 for alpha chain variable domain of TCR clone 24107 (TRAV2, TRAJ31)
CAVEDNNARLMF

SEQ ID NO: 48214 - protein, 16 aa, Homo sapiens
  CDR3 for beta chain variable domain of TCR clone 24107 (TRBV10-3, TRBJ2-1)
CAINGVGDGGGGEQFF

SEQ ID NO: 48215 - protein, 23 aa, Homo sapiens
  CDR3 for alpha chain variable domain of TCR clone 24108 (TRAV26-1, TRAJ38)
CIADNAGNNHIQNPDPAVYQLRD

SEQ ID NO: 48216 - protein, 13 aa, Homo sapiens
  CDR3 for beta chain variable domain of TCR clone 24108 (TRBV20-1, TRBJ1-1)
CSARGGGNAEAFF

SEQ ID NO: 48217 - protein, 14 aa, Homo sapiens
  CDR3 for alpha chain variable domain of TCR clone 24109 (TRAV20, TRAJ56)
CAVQFGGANRKLTF

SEQ ID NO: 48218 - protein, 14 aa, Homo sapiens
  CDR3 for beta chain variable domain of TCR clone 24109 (TRBV20-1, TRBJ2-7)
CSAKRGRSSYEQYF

SEQ ID NO: 48219 - protein, 13 aa, Homo sapiens
  CDR3 for alpha chain variable domain of TCR clone 24110 (TRAV1-2, TRAJ9)
CAALNTGGFKTIF

SEQ ID NO: 48220 - protein, 13 aa, Homo sapiens
  CDR3 for beta chain variable domain of TCR clone 24110 (TRBV27, TRBJ1-1)
CASSLSIGAEAFF

SEQ ID NO: 48221 - protein, 15 aa, Homo sapiens
  CDR3 for alpha chain variable domain of TCR clone 24111 (TRAV3, TRAJ5)
CAVRDRKTGRRALTL

SEQ ID NO: 48222 - protein, 15 aa, Homo sapiens
  CDR3 for beta chain variable domain of TCR clone 24111 (TRBV7-8, TRBJ2-1)
CASSLADSLYNEQFF

SEQ ID NO: 48223 - protein, 12 aa, Homo sapiens
  CDR3 for alpha chain variable domain of TCR clone 24112 (TRAV12-3, TRAJ17)
CAMTLTGDKLTF

SEQ ID NO: 48224 - protein, 13 aa, Homo sapiens
  CDR3 for beta chain variable domain of TCR clone 24112 (TRBV7-9, TRBJ1-2)
CASSLKQNYGYTF

SEQ ID NO: 48225 - protein, 15 aa, Homo sapiens
  CDR3 for alpha chain variable domain of TCR clone 24113 (TRAV3, TRAJ5)
SAVRDRKTGRRALTF

SEQ ID NO: 48226 - protein, 15 aa, Homo sapiens
  CDR3 for beta chain variable domain of TCR clone 24113 (TRBV7-8, TRBJ2-1)
CASSLADSLYNEQFF

SEQ ID NO: 48227 - protein, 12 aa, Homo sapiens
  CDR3 for alpha chain variable domain of TCR clone 24114 (TRAV17, TRAJ12)
CATLRSSYKLIF

SEQ ID NO: 48228 - protein, 15 aa, Homo sapiens
  CDR3 for beta chain variable domain of TCR clone 24114 (TRBV6-5, TRBJ2-7)
CASSASGRWSYEQYF

SEQ ID NO: 48229 - protein, 15 aa, Homo sapiens
  CDR3 for alpha chain variable domain of TCR clone 24115 (TRAV12-1, TRAJ44)
CVVFANTGTASKLTF

SEQ ID NO: 48230 - protein, 17 aa, Homo sapiens
  CDR3 for beta chain variable domain of TCR clone 24115 (TRBV7-8, TRBJ2-6)
CASSAGTGGAGANVLTF

SEQ ID NO: 48231 - protein, 14 aa, Homo sapiens
  CDR3 for alpha chain variable domain of TCR clone 24116 (TRAV38-1, TRAJ45)
CSSHSGGGADGLTF

SEQ ID NO: 48232 - protein, 13 aa, Homo sapiens
  CDR3 for beta chain variable domain of TCR clone 24116 (TRBV10-3, TRBJ1-2)
CAISERDSYGYTF

SEQ ID NO: 48233 - protein, 12 aa, Homo sapiens
  CDR3 for alpha chain variable domain of TCR clone 24117 (TRAV13-1, TRAJ21)
CAAKEGFNKFYF

SEQ ID NO: 48234 - protein, 14 aa, Homo sapiens
  CDR3 for beta chain variable domain of TCR clone 24117 (TRBV5-4, TRBJ1-1)
CASSVDSRRDEAFF

SEQ ID NO: 48235 - protein, 14 aa, Homo sapiens
  CDR3 for alpha chain variable domain of TCR clone 24118 (TRAV1-2, TRAJ16)
CAVNRFSDGQKLLF

SEQ ID NO: 48236 - protein, 16 aa, Homo sapiens
  CDR3 for beta chain variable domain of TCR clone 24118 (TRBV6-1, TRBJ1-3)
CASVQGGVETPYILER

SEQ ID NO: 48237 - protein, 14 aa, Homo sapiens
  CDR3 for alpha chain variable domain of TCR clone 24119 (TRAV1-2, TRAJ16)
CAVNRFSDGQKLLF

SEQ ID NO: 48238 - protein, 13 aa, Homo sapiens
  CDR3 for beta chain variable domain of TCR clone 24119 (TRBV7-9, TRBJ1-2)
CASSVKQNYGYTF

SEQ ID NO: 48239 - protein, 14 aa, Homo sapiens
  CDR3 for alpha chain variable domain of TCR clone 24120 (TRAV12-1, TRAJ17)
CVVNYKAAGNKLTF

SEQ ID NO: 48240 - protein, 17 aa, Homo sapiens
  CDR3 for beta chain variable domain of TCR clone 24120 (TRBV20-1, TRBJ2-1)
CSASSSGLAGSDNEQFF

SEQ ID NO: 48241 - protein, 15 aa, Homo sapiens
  CDR3 for alpha chain variable domain of TCR clone 24121 (TRAV26-1, TRAJ44)
CIVRVGTGTASKLTF

SEQ ID NO: 48242 - protein, 15 aa, Homo sapiens
  CDR3 for beta chain variable domain of TCR clone 24121 (TRBV7-6, TRBJ2-1)
CASSSLAGEGNEQFF

SEQ ID NO: 48243 - protein, 14 aa, Homo sapiens
  CDR3 for alpha chain variable domain of TCR clone 24122 (TRAV16, TRAJ33)
CALSAMDSNYQLIW

SEQ ID NO: 48244 - protein, 12 aa, Homo sapiens
  CDR3 for beta chain variable domain of TCR clone 24122 (TRBV5-1, TRBJ1-2)
YASSQDTYGYTF

SEQ ID NO: 48245 - protein, 14 aa, Homo sapiens
  CDR3 for alpha chain variable domain of TCR clone 24123 (TRAV38-1, TRAJ40)
CALRPTSGTYKYIF

SEQ ID NO: 48246 - protein, 14 aa, Homo sapiens
  CDR3 for beta chain variable domain of TCR clone 24123 (TRBV6-1, TRBJ1-3)
CASVQGGGGNTIYF

SEQ ID NO: 48247 - protein, 14 aa, Homo sapiens
  CDR3 for alpha chain variable domain of TCR clone 24124 (TRAV29/DV5, TRAJ45)
CAASFRGGADGLTF

SEQ ID NO: 48248 - protein, 11 aa, Homo sapiens
  CDR3 for beta chain variable domain of TCR clone 24124 (TRBV11-3, TRBJ2-2)
CASSLPGELFF

SEQ ID NO: 48249 - protein, 13 aa, Homo sapiens
  CDR3 for alpha chain variable domain of TCR clone 24125 (TRAV27, TRAJ41)
CAVRTQIPDIQNP

SEQ ID NO: 48250 - protein, 16 aa, Homo sapiens
  CDR3 for beta chain variable domain of TCR clone 24125 (TRBV5-1, TRBJ2-3)
CASSLGLAVYTDTQYF

SEQ ID NO: 48251 - protein, 17 aa, Homo sapiens
  CDR3 for alpha chain variable domain of TCR clone 24126 (TRAV3, TRAJ42)
CAVRDSDYGGSQGNLIF

SEQ ID NO: 48252 - protein, 15 aa, Homo sapiens
  CDR3 for beta chain variable domain of TCR clone 24126 (TRBV6-6, TRBJ2-7)
CASSYSYGGSYEQYF

SEQ ID NO: 48253 - protein, 12 aa, Homo sapiens
  CDR3 for alpha chain variable domain of TCR clone 24127 (TRAV26-2, TRAJ21)
CILKGNFNKLYF

SEQ ID NO: 48254 - protein, 14 aa, Homo sapiens
  CDR3 for beta chain variable domain of TCR clone 24127 (TRBV7-9, TRBJ1-1)
CASTPLQSYTEAFF

SEQ ID NO: 48255 - protein, 17 aa, Homo sapiens
  CDR3 for alpha chain variable domain of TCR clone 24128 (TRAV13-1, TRAJ31)
CEPRDRLMFGDGTQLVV

SEQ ID NO: 48256 - protein, 12 aa, Homo sapiens
  CDR3 for beta chain variable domain of TCR clone 24128 (TRBV7-9, TRBJ2-7)
CASSLEGYEQYF

SEQ ID NO: 48257 - protein, 17 aa, Homo sapiens
  CDR3 for alpha chain variable domain of TCR clone 24129 (TRAV3, TRAJ6)
CAVRDGPRAGGSYIPTF

SEQ ID NO: 48258 - protein, 20 aa, Homo sapiens
  CDR3 for beta chain variable domain of TCR clone 24129 (TRBV28, TRBJ2-1)
CASTPIGRSPGLAGGNGQFF

SEQ ID NO: 48259 - protein, 11 aa, Homo sapiens
  CDR3 for alpha chain variable domain of TCR clone 24130 (TRAV12-3, TRAJ27)
CAMANAGKSTF

SEQ ID NO: 48260 - protein, 15 aa, Homo sapiens
  CDR3 for beta chain variable domain of TCR clone 24130 (TRBV20-1, TRBJ2-7)
CSARDRVSGMDEQYF

SEQ ID NO: 48261 - protein, 15 aa, Homo sapiens
  CDR3 for alpha chain variable domain of TCR clone 24131 (TRAV8-2, TRAJ40)
CVVLGTTSGTYKYIL

SEQ ID NO: 48262 - protein, 16 aa, Homo sapiens
  CDR3 for beta chain variable domain of TCR clone 24131 (TRBV7-3, TRBJ2-1)
CASSLEGYRSYNEQFF

SEQ ID NO: 48263 - protein, 15 aa, Homo sapiens
  CDR3 for alpha chain variable domain of TCR clone 24132 (TRAV4, TRAJ17)
CLVGDIGAAGNKLAF

SEQ ID NO: 48264 - protein, 14 aa, Homo sapiens
  CDR3 for beta chain variable domain of TCR clone 24132 (TRBV6-3, TRBJ2-7)
CASSYSVRVYEQYF

SEQ ID NO: 48265 - protein, 18 aa, Homo sapiens
  CDR3 for alpha chain variable domain of TCR clone 24133 (TRAV26-1, TRAJ23)
CIVRVGLEVWNQGGKLIL

SEQ ID NO: 48266 - protein, 16 aa, Homo sapiens
  CDR3 for beta chain variable domain of TCR clone 24133 (TRBV12-4, TRBJ2-5)
CASSFFVRGRQETQYF

SEQ ID NO: 48267 - protein, 15 aa, Homo sapiens
  CDR3 for alpha chain variable domain of TCR clone 24134 (TRAV26-1, TRAJ29)
CIVRVEGSGNTPLVF

SEQ ID NO: 48268 - protein, 14 aa, Homo sapiens
  CDR3 for beta chain variable domain of TCR clone 24134 (TRBV18, TRBJ2-5)
CASSPGGSQETQYF

SEQ ID NO: 48269 - protein, 13 aa, Homo sapiens
  CDR3 for alpha chain variable domain of TCR clone 24135 (TRAV17, TRAJ9)
CATDYTGGFKTIF

SEQ ID NO: 48270 - protein, 16 aa, Homo sapiens
  CDR3 for beta chain variable domain of TCR clone 24135 (TRBV7-7, TRBJ2-1)
CASSLASGTSYNERFF

SEQ ID NO: 48271 - protein, 11 aa, Homo sapiens
  CDR3 for alpha chain variable domain of TCR clone 24136 (TRAV1-2, TRAJ40)
CAVPGTYKYIL

SEQ ID NO: 48272 - protein, 16 aa, Homo sapiens
  CDR3 for beta chain variable domain of TCR clone 24136 (TRBV29-1, TRBJ2-7)
CSVEVVGTSGSYEQYF

SEQ ID NO: 48273 - protein, 14 aa, Homo sapiens
  CDR3 for alpha chain variable domain of TCR clone 24137 (TRAV23/DV6, TRAJ4)
CAANLSGGYNKLIF

SEQ ID NO: 48274 - protein, 17 aa, Homo sapiens
  CDR3 for beta chain variable domain of TCR clone 24137 (TRBV4-1, TRBJ1-3)
CASSPQRGIRFGNTMYF

SEQ ID NO: 48275 - protein, 11 aa, Homo sapiens
  CDR3 for alpha chain variable domain of TCR clone 24138 (TRAV2, TRAJ33)
CAVESNYQLIW

SEQ ID NO: 48276 - protein, 15 aa, Homo sapiens
  CDR3 for beta chain variable domain of TCR clone 24138 (TRBV19, TRBJ1-1)
CASTSGQIQNTEAFC

SEQ ID NO: 48277 - protein, 16 aa, Homo sapiens
  CDR3 for alpha chain variable domain of TCR clone 24139 (TRAV30, TRAJ24)
CSTEIVDADSWGKFQF

SEQ ID NO: 48278 - protein, 12 aa, Homo sapiens
  CDR3 for beta chain variable domain of TCR clone 24139 (TRBV11-2, TRBJ2-2)
CASSLGGGELFF

SEQ ID NO: 48279 - protein, 17 aa, Homo sapiens
  CDR3 for alpha chain variable domain of TCR clone 24140 (TRAV38-1, TRAJ45)
CAFMRSHSGEGADGLTF

SEQ ID NO: 48280 - protein, 15 aa, Homo sapiens
  CDR3 for beta chain variable domain of TCR clone 24140 (TRBV7-2, TRBJ2-3)
CASSLVVRGPDTQYF

SEQ ID NO: 48281 - protein, 14 aa, Homo sapiens
  CDR3 for alpha chain variable domain of TCR clone 24141 (TRAV17, TRAJ6)
CATNPAGGSYIPTL

SEQ ID NO: 48282 - protein, 15 aa, Homo sapiens
  CDR3 for beta chain variable domain of TCR clone 24141 (TRBV2, TRBJ2-5)
CASSGTVAAGETQYF

SEQ ID NO: 48283 - protein, 14 aa, Homo sapiens
  CDR3 for alpha chain variable domain of TCR clone 24142 (TRAV1-2, TRAJ8)
CAVREDTGFQKLVS

SEQ ID NO: 48284 - protein, 17 aa, Homo sapiens
  CDR3 for beta chain variable domain of TCR clone 24142 (TRBV13, TRBJ2-3)
CASSLSRVAGGRNTQYF

SEQ ID NO: 48285 - protein, 16 aa, Homo sapiens
  CDR3 for alpha chain variable domain of TCR clone 24143 (TRAV3, TRAJ37)
CAVRPHGSGNTGKLIF

SEQ ID NO: 48286 - protein, 16 aa, Homo sapiens
  CDR3 for beta chain variable domain of TCR clone 24143 (TRBV9, TRBJ1-2)
CAGSVEEKVSPYGYTF

SEQ ID NO: 48287 - protein, 14 aa, Homo sapiens
  CDR3 for alpha chain variable domain of TCR clone 24144 (TRAV1-2, TRAJ8)
CAVREDTGFQKLVF

SEQ ID NO: 48288 - protein, 14 aa, Homo sapiens
  CDR3 for beta chain variable domain of TCR clone 24144 (TRBV7-8, TRBJ2-3)
CASSFPDGQDTQYF

SEQ ID NO: 48289 - protein, 13 aa, Homo sapiens
  CDR3 for alpha chain variable domain of TCR clone 24145 (TRAV27, TRAJ3)
ASLRGSSASKIIF

SEQ ID NO: 48290 - protein, 15 aa, Homo sapiens
  CDR3 for beta chain variable domain of TCR clone 24145 (TRBV28, TRBJ1-3)
CASSMGWASGNTIYV

SEQ ID NO: 48291 - protein, 12 aa, Homo sapiens
  CDR3 for alpha chain variable domain of TCR clone 24146 (TRAV21, TRAJ31)
CAVSPARGRLMF

SEQ ID NO: 48292 - protein, 14 aa, Homo sapiens
  CDR3 for beta chain variable domain of TCR clone 24146 (TRBV28, TRBJ2-7)
CASSLLRISYEQYF

SEQ ID NO: 48293 - protein, 13 aa, Homo sapiens
  CDR3 for alpha chain variable domain of TCR clone 24147 (TRAV20, TRAJ34)
CAVRSYNTDKLIF

SEQ ID NO: 48294 - protein, 12 aa, Homo sapiens
  CDR3 for beta chain variable domain of TCR clone 24147 (TRBV11-2, TRBJ2-1)
CASSPGNNEQSF

SEQ ID NO: 48295 - protein, 12 aa, Homo sapiens
  CDR3 for alpha chain variable domain of TCR clone 24148 (TRAV12-2, TRAJ10)
WGVTGGGNKLTF

SEQ ID NO: 48296 - protein, 14 aa, Homo sapiens
  CDR3 for beta chain variable domain of TCR clone 24148 (TRBV27, TRBJ2-7)
CAGATGTERREQYF

SEQ ID NO: 48297 - protein, 12 aa, Homo sapiens
  CDR3 for alpha chain variable domain of TCR clone 24149 (TRAV9-2, TRAJ20)
CALHSNDYKLSF

SEQ ID NO: 48298 - protein, 13 aa, Homo sapiens
  CDR3 for beta chain variable domain of TCR clone 24149 (TRBV6-3, TRBJ2-7)
CASSTDLAGEQYF

SEQ ID NO: 48299 - protein, 16 aa, Homo sapiens
  CDR3 for alpha chain variable domain of TCR clone 24150 (TRAV3, TRAJ3)
CAVRDRAKSSASKIIF

SEQ ID NO: 48300 - protein, 16 aa, Homo sapiens
  CDR3 for beta chain variable domain of TCR clone 24150 (TRBV20-1, TRBJ2-4)
CSATSLAELAKNTQYF

SEQ ID NO: 48301 - protein, 14 aa, Homo sapiens
  CDR3 for alpha chain variable domain of TCR clone 24151 (TRAV12-2, TRAJ13)
CAVKKTGGYQKVTF

SEQ ID NO: 48302 - protein, 15 aa, Homo sapiens
  CDR3 for beta chain variable domain of TCR clone 24151 (TRBV19, TRBJ1-5)
CASSIVWADNQPQHF

SEQ ID NO: 48303 - protein, 11 aa, Homo sapiens
  CDR3 for alpha chain variable domain of TCR clone 24152 (TRAV1-1, TRAJ23)
CAVRQGGKLIF

SEQ ID NO: 48304 - protein, 20 aa, Homo sapiens
  CDR3 for beta chain variable domain of TCR clone 24152 (TRBV7-8, TRBJ2-2)
CASGHLFPGPTVHITGELFF

SEQ ID NO: 48305 - protein, 14 aa, Homo sapiens
  CDR3 for alpha chain variable domain of TCR clone 24153 (TRAV13-1, TRAJ44)
CAAKATGTASKLTF

SEQ ID NO: 48306 - protein, 16 aa, Homo sapiens
  CDR3 for beta chain variable domain of TCR clone 24153 (TRBV12-5, TRBJ2-5)
CASGPRTSGNQETQYF

SEQ ID NO: 48307 - protein, 13 aa, Homo sapiens
  CDR3 for alpha chain variable domain of TCR clone 24154 (TRAV12-3, TRAJ49)
CAMIPTGWAQFYF

SEQ ID NO: 48308 - protein, 10 aa, Homo sapiens
  CDR3 for beta chain variable domain of TCR clone 24154 (TRBV5-1, TRBJ1-5)
CASSLAGGHQ

SEQ ID NO: 48309 - protein, 18 aa, Homo sapiens
  CDR3 for alpha chain variable domain of TCR clone 24155 (TRAV12-3, TRAJ52)
CAMSVGGAGGTSYGKLTF

SEQ ID NO: 48310 - protein, 15 aa, Homo sapiens
  CDR3 for beta chain variable domain of TCR clone 24155 (TRBV27, TRBJ2-1)
CASSNGGGSSNEQFF

SEQ ID NO: 48311 - protein, 16 aa, Homo sapiens
  CDR3 for alpha chain variable domain of TCR clone 24156 (TRAV3, TRAJ37)
CAVRVRGSGNTGKLIF

SEQ ID NO: 48312 - protein, 13 aa, Homo sapiens
  CDR3 for beta chain variable domain of TCR clone 24156 (TRBV14, TRBJ2-1)
CASSQDRRDEQFF

SEQ ID NO: 48313 - protein, 13 aa, Homo sapiens
  CDR3 for alpha chain variable domain of TCR clone 24157 (TRAV21, TRAJ20)
CAAGLRVDYKLSF

SEQ ID NO: 48314 - protein, 13 aa, Homo sapiens
  CDR3 for beta chain variable domain of TCR clone 24157 (TRBV6-1, TRBJ1-1)
CASSRQGNTEAFF

SEQ ID NO: 48315 - protein, 13 aa, Homo sapiens
  CDR3 for alpha chain variable domain of TCR clone 24158 (TRAV26-2, TRAJ43)
CILRAVNNNDMRF

SEQ ID NO: 48316 - protein, 15 aa, Homo sapiens
  CDR3 for beta chain variable domain of TCR clone 24158 (TRBV7-2, TRBJ2-1)
CASTHGTGIYSEQFF

SEQ ID NO: 48317 - protein, 14 aa, Homo sapiens
  CDR3 for alpha chain variable domain of TCR clone 24159 (TRAV1-2, TRAJ16)
CAVSRFSDGQKLLF

SEQ ID NO: 48318 - protein, 14 aa, Homo sapiens
  CDR3 for beta chain variable domain of TCR clone 24159 (TRBV13, TRBJ2-5)
CASSLGRGQETQYF

SEQ ID NO: 48319 - protein, 12 aa, Homo sapiens
  CDR3 for alpha chain variable domain of TCR clone 24160 (TRAV2, TRAJ9)
CAVGAGGFKPIF

SEQ ID NO: 48320 - protein, 16 aa, Homo sapiens
  CDR3 for beta chain variable domain of TCR clone 24160 (TRBV13, TRBJ2-2)
CASSPRTGEHTGELFF

SEQ ID NO: 48321 - protein, 12 aa, Homo sapiens
  CDR3 for alpha chain variable domain of TCR clone 24161 (TRAV21, TRAJ11)
CVATSGYSTLTF

SEQ ID NO: 48322 - protein, 18 aa, Homo sapiens
  CDR3 for beta chain variable domain of TCR clone 24161 (TRBV28, TRBJ1-3)
CASSPPGTVTSSGNTIYF

SEQ ID NO: 48323 - protein, 12 aa, Homo sapiens
  CDR3 for alpha chain variable domain of TCR clone 24162 (TRAV12-2, TRAJ24)
CAVTPADSWGEI

SEQ ID NO: 48324 - protein, 12 aa, Homo sapiens
  CDR3 for beta chain variable domain of TCR clone 24162 (TRBV3-1, TRBJ2-1)
CASSQGSSGQFF

SEQ ID NO: 48325 - protein, 11 aa, Homo sapiens
  CDR3 for alpha chain variable domain of TCR clone 24163 (TRAV17, TRAJ9)
CATTGGCKTIF

SEQ ID NO: 48326 - protein, 14 aa, Homo sapiens
  CDR3 for beta chain variable domain of TCR clone 24163 (TRBV7-9, TRBJ2-2)
CASSGLADTGELFF

SEQ ID NO: 48327 - protein, 12 aa, Homo sapiens
  CDR3 for alpha chain variable domain of TCR clone 24164 (TRAV1-2, TRAJ33)
CAALDSNYQLIW

SEQ ID NO: 48328 - protein, 17 aa, Homo sapiens
  CDR3 for beta chain variable domain of TCR clone 24164 (TRBV4-1, TRBJ2-2)
CASSHPHDGSKVGELFF

SEQ ID NO: 48329 - protein, 11 aa, Homo sapiens
  CDR3 for alpha chain variable domain of TCR clone 24165 (TRAV17, TRAJ36)
CAPTGANNLFF

SEQ ID NO: 48330 - protein, 12 aa, Homo sapiens
  CDR3 for beta chain variable domain of TCR clone 24165 (TRBV29-1, TRBJ2-3)
CGVTGGADTQYF

SEQ ID NO: 48331 - protein, 14 aa, Homo sapiens
  CDR3 for alpha chain variable domain of TCR clone 24166 (TRAV8-2, TRAJ11)
CVVSEKSGYSTLTF

SEQ ID NO: 48332 - protein, 13 aa, Homo sapiens
  CDR3 for beta chain variable domain of TCR clone 24166 (TRBV7-9, TRBJ1-2)
CASSLKQNYGYTF

SEQ ID NO: 48333 - protein, 12 aa, Homo sapiens
  CDR3 for alpha chain variable domain of TCR clone 24167 (TRAV17, TRAJ39)
CATGAAGNMLTF

SEQ ID NO: 48334 - protein, 14 aa, Homo sapiens
  CDR3 for beta chain variable domain of TCR clone 24167 (TRBV7-9, TRBJ1-2)
CAGSRQGANYGYTF

SEQ ID NO: 48335 - protein, 14 aa, Homo sapiens
  CDR3 for alpha chain variable domain of TCR clone 24168 (TRAV1-2, TRAJ8)
CAVREDTGFQKLVF

SEQ ID NO: 48336 - protein, 19 aa, Homo sapiens
  CDR3 for beta chain variable domain of TCR clone 24168 (TRBV28, TRBJ2-7)
CASSYSGTSRLGWVYEQYF

SEQ ID NO: 48337 - protein, 15 aa, Homo sapiens
  CDR3 for alpha chain variable domain of TCR clone 24169 (TRAV3, TRAJ5)
CAVRDLDTGRRALTF

SEQ ID NO: 48338 - protein, 14 aa, Homo sapiens
  CDR3 for beta chain variable domain of TCR clone 24169 (TRBV6-1, TRBJ1-3)
CASVQGGGGNTIYF

SEQ ID NO: 48339 - protein, 13 aa, Homo sapiens
  CDR3 for alpha chain variable domain of TCR clone 24170 (TRAV29/DV5, TRAJ31)
CAASRNNNARLMF

SEQ ID NO: 48340 - protein, 13 aa, Homo sapiens
  CDR3 for beta chain variable domain of TCR clone 24170 (TRBV14, TRBJ1-1)
CASSREFGTEAFF

SEQ ID NO: 48341 - protein, 13 aa, Homo sapiens
  CDR3 for alpha chain variable domain of TCR clone 24171 (TRAV27, TRAJ41)
CAGEENSGYALNF

SEQ ID NO: 48342 - protein, 14 aa, Homo sapiens
  CDR3 for beta chain variable domain of TCR clone 24171 (TRBV7-2, TRBJ1-1)
CASSFLTGTAEAFF

SEQ ID NO: 48343 - protein, 13 aa, Homo sapiens
  CDR3 for alpha chain variable domain of TCR clone 24172 (TRAV36/DV7, TRAJ49)
CAVEANTGNQFYF

SEQ ID NO: 48344 - protein, 14 aa, Homo sapiens
  CDR3 for beta chain variable domain of TCR clone 24172 (TRBV20-1, TRBJ2-5)
CSASSRRAAETQYF

SEQ ID NO: 48345 - protein, 15 aa, Homo sapiens
  CDR3 for alpha chain variable domain of TCR clone 24173 (TRAV14/DV4, TRAJ10)
CAMRELTGGGNKLTF

SEQ ID NO: 48346 - protein, 18 aa, Homo sapiens
  CDR3 for beta chain variable domain of TCR clone 24173 (TRBV7-9, TRBJ2-7)
CASSLTTSGSRTRYEQYF

SEQ ID NO: 48347 - protein, 13 aa, Homo sapiens
  CDR3 for alpha chain variable domain of TCR clone 24174 (TRAV1-1, TRAJ9)
CAAKNTGGFKTIF

SEQ ID NO: 48348 - protein, 14 aa, Homo sapiens
  CDR3 for beta chain variable domain of TCR clone 24174 (TRBV20-1, TRBJ2-1)
CSAQIGVSANEQFF

SEQ ID NO: 48349 - protein, 12 aa, Homo sapiens
  CDR3 for alpha chain variable domain of TCR clone 24175 (TRAV13-1, TRAJ21)
CAAKEGFNKFYF

SEQ ID NO: 48350 - protein, 14 aa, Homo sapiens
  CDR3 for beta chain variable domain of TCR clone 24175 (TRBV7-2, TRBJ2-7)
CASRSQGAAYEQYF

SEQ ID NO: 48351 - protein, 13 aa, Homo sapiens
  CDR3 for alpha chain variable domain of TCR clone 24176 (TRAV13-1, TRAJ21)
CAASIYNFNKFYF

SEQ ID NO: 48352 - protein, 13 aa, Homo sapiens
  CDR3 for beta chain variable domain of TCR clone 24176 (TRBV19, TRBJ1-2)
CASSVPGQDGYTF

SEQ ID NO: 48353 - protein, 11 aa, Homo sapiens
  CDR3 for alpha chain variable domain of TCR clone 24177 (TRAV3, TRAJ21)
CAVGNFNKFYF

SEQ ID NO: 48354 - protein, 13 aa, Homo sapiens
  CDR3 for beta chain variable domain of TCR clone 24177 (TRBV12-4, TRBJ1-2)
CASSLRQGKGYTF

SEQ ID NO: 48355 - protein, 12 aa, Homo sapiens
  CDR3 for alpha chain variable domain of TCR clone 24178 (TRAV1-1, TRAJ39)
CAVPVVGNMLTF

SEQ ID NO: 48356 - protein, 16 aa, Homo sapiens
  CDR3 for beta chain variable domain of TCR clone 24178 (TRBV19, TRBJ2-3)
CASSPGAASRTDTQYF

SEQ ID NO: 48357 - protein, 14 aa, Homo sapiens
  CDR3 for alpha chain variable domain of TCR clone 24179 (TRAV3, TRAJ21)
CAVRDKYNFNKFYF

SEQ ID NO: 48358 - protein, 14 aa, Homo sapiens
  CDR3 for beta chain variable domain of TCR clone 24179 (TRBV27, TRBJ2-3)
CASRDSTITDTQYF

SEQ ID NO: 48359 - protein, 12 aa, Homo sapiens
  CDR3 for alpha chain variable domain of TCR clone 24180 (TRAV8-3, TRAJ20)
CAVGANDYKLSF

SEQ ID NO: 48360 - protein, 16 aa, Homo sapiens
  CDR3 for beta chain variable domain of TCR clone 24180 (TRBV19, TRBJ2-2)
CASRSPGTGAAGELFF

SEQ ID NO: 48361 - protein, 14 aa, Homo sapiens
  CDR3 for alpha chain variable domain of TCR clone 24181 (TRAV13-1, TRAJ44)
CAAKATGTASKLTF

SEQ ID NO: 48362 - protein, 13 aa, Homo sapiens
  CDR3 for beta chain variable domain of TCR clone 24181 (TRBV5-5, TRBJ1-2)
RASSFWRGEDYTF

SEQ ID NO: 48363 - protein, 23 aa, Homo sapiens
  CDR3 for alpha chain variable domain of TCR clone 24182 (TRAV3, TRAJ38)
CAVRDCLNAGNNHIQNPDPAVYQ

SEQ ID NO: 48364 - protein, 15 aa, Homo sapiens
  CDR3 for beta chain variable domain of TCR clone 24182 (TRBV6-5, TRBJ2-1)
CASSYDAGAGNEQFF

SEQ ID NO: 48365 - protein, 15 aa, Homo sapiens
  CDR3 for alpha chain variable domain of TCR clone 24183 (TRAV21, TRAJ24)
CAARSSTDSWGKFQF

SEQ ID NO: 48366 - protein, 13 aa, Homo sapiens
  CDR3 for beta chain variable domain of TCR clone 24183 (TRBV11-2, TRBJ2-5)
CASSSTGEETQYF

SEQ ID NO: 48367 - protein, 14 aa, Homo sapiens
  CDR3 for alpha chain variable domain of TCR clone 24184 (TRAV12-2, TRAJ40)
CAVKIPSGTYKYIF

SEQ ID NO: 48368 - protein, 17 aa, Homo sapiens
  CDR3 for beta chain variable domain of TCR clone 24184 (TRBV11-2, TRBJ2-1)
CASSLCPPGVEYNEQFF

SEQ ID NO: 48369 - protein, 15 aa, Homo sapiens
  CDR3 for alpha chain variable domain of TCR clone 24185 (TRAV23/DV6, TRAJ18)
CVARYRGSTLGRLYF

SEQ ID NO: 48370 - protein, 13 aa, Homo sapiens
  CDR3 for beta chain variable domain of TCR clone 24185 (TRBV7-2, TRBJ2-7)
CASSSPSGSEQYF

SEQ ID NO: 48371 - protein, 16 aa, Homo sapiens
  CDR3 for alpha chain variable domain of TCR clone 24186 (TRAV12-3, TRAJ53)
CAMSPGSGGSNYKLTF

SEQ ID NO: 48372 - protein, 16 aa, Homo sapiens
  CDR3 for beta chain variable domain of TCR clone 24186 (TRBV6-1, TRBJ2-5)
CASSETLDRGAETQYF

SEQ ID NO: 48373 - protein, 11 aa, Homo sapiens
  CDR3 for alpha chain variable domain of TCR clone 24187 (TRAV2, TRAJ33)
CAVDSNYQLIW

SEQ ID NO: 48374 - protein, 17 aa, Homo sapiens
  CDR3 for beta chain variable domain of TCR clone 24187 (TRBV12-4, TRBJ2-3)
CASSGPGLAGGADTQYF

SEQ ID NO: 48375 - protein, 14 aa, Homo sapiens
  CDR3 for alpha chain variable domain of TCR clone 24188 (TRAV38-1, TRAJ45)
CASHSGGGADGLTF

SEQ ID NO: 48376 - protein, 13 aa, Homo sapiens
  CDR3 for beta chain variable domain of TCR clone 24188 (TRBV10-3, TRBJ1-2)
CAISERGSYGYTF

SEQ ID NO: 48377 - protein, 14 aa, Homo sapiens
  CDR3 for alpha chain variable domain of TCR clone 24189 (TRAV1-2, TRAJ8)
CAVREDTGSQKLVF

SEQ ID NO: 48378 - protein, 16 aa, Homo sapiens
  CDR3 for beta chain variable domain of TCR clone 24189 (TRBV7-6, TRBJ2-6)
CASSLPGLSGANVLTF

SEQ ID NO: 48379 - protein, 17 aa, Homo sapiens
  CDR3 for alpha chain variable domain of TCR clone 24190 (TRAV3, TRAJ12)
CAVRDGGRMDSSYKLIF

SEQ ID NO: 48380 - protein, 13 aa, Homo sapiens
  CDR3 for beta chain variable domain of TCR clone 24190 (TRBV15, TRBJ1-6)
CATSEGLNSPLHF

SEQ ID NO: 48381 - protein, 12 aa, Homo sapiens
  CDR3 for alpha chain variable domain of TCR clone 24191 (TRAV8-4, TRAJ48)
CAVSFGNEKLTF

SEQ ID NO: 48382 - protein, 14 aa, Homo sapiens
  CDR3 for beta chain variable domain of TCR clone 24191 (TRBV11-3, TRBJ2-7)
CASSPGWGTYEQYF

SEQ ID NO: 48383 - protein, 11 aa, Homo sapiens
  CDR3 for alpha chain variable domain of TCR clone 24192 (TRAV12-3, TRAJ27)
CAMANAGKSTF

SEQ ID NO: 48384 - protein, 12 aa, Homo sapiens
  CDR3 for beta chain variable domain of TCR clone 24192 (TRBV11-2, TRBJ2-2)
RASSLGGGELFF

SEQ ID NO: 48385 - protein, 14 aa, Homo sapiens
  CDR3 for alpha chain variable domain of TCR clone 24193 (TRAV16, TRAJ17)
CALSGRAAGNKLTF

SEQ ID NO: 48386 - protein, 17 aa, Homo sapiens
  CDR3 for beta chain variable domain of TCR clone 24193 (TRBV18, TRBJ2-6)
CASSPRQGAVGANVLTS

SEQ ID NO: 48387 - protein, 14 aa, Homo sapiens
  CDR3 for alpha chain variable domain of TCR clone 24194 (TRAV38-1, TRAJ45)
CAYYSGGGADGLTF

SEQ ID NO: 48388 - protein, 13 aa, Homo sapiens
  CDR3 for beta chain variable domain of TCR clone 24194 (TRBV29-1, TRBJ1-1)
CSVGDSRNTEAFF

SEQ ID NO: 48389 - protein, 11 aa, Homo sapiens
  CDR3 for alpha chain variable domain of TCR clone 24195 (TRAV2, TRAJ13)
CASGGYQKVTF

SEQ ID NO: 48390 - protein, 13 aa, Homo sapiens
  CDR3 for beta chain variable domain of TCR clone 24195 (TRBV7-2, TRBJ2-2)
CASSLAVTGELFF

SEQ ID NO: 48391 - protein, 20 aa, Homo sapiens
  CDR3 for alpha chain variable domain of TCR clone 24196 (TRAV12-1, TRAJ42)
SSVIRPPTSVKGGSQGNLIF

SEQ ID NO: 48392 - protein, 18 aa, Homo sapiens
  CDR3 for beta chain variable domain of TCR clone 24196 (TRBV11-2, TRBJ2-3)
CASSLGGASRGAPNTQYF

SEQ ID NO: 48393 - protein, 14 aa, Homo sapiens
  CDR3 for alpha chain variable domain of TCR clone 24197 (TRAV1-2, TRAJ8)
CAVREDTGFQKLVF

SEQ ID NO: 48394 - protein, 21 aa, Homo sapiens
  CDR3 for beta chain variable domain of TCR clone 24197 (TRBV11-2, TRBJ1-1)
LRTRPCISVPIRGDMNTEAFF

SEQ ID NO: 48395 - protein, 16 aa, Homo sapiens
  CDR3 for alpha chain variable domain of TCR clone 24198 (TRAV3, TRAJ5)
CAVRNLMDTGRRALTF

SEQ ID NO: 48396 - protein, 16 aa, Homo sapiens
  CDR3 for beta chain variable domain of TCR clone 24198 (TRBV4-2, TRBJ2-7)
CASSQEGPANSYEQYF

SEQ ID NO: 48397 - protein, 16 aa, Homo sapiens
  CDR3 for alpha chain variable domain of TCR clone 24199 (TRAV16, TRAJ52)
CALSGVGGTSYGKLTS

SEQ ID NO: 48398 - protein, 14 aa, Homo sapiens
  CDR3 for beta chain variable domain of TCR clone 24199 (TRBV19, TRBJ1-2)
CASSLQGQAYGYTF

SEQ ID NO: 48399 - protein, 15 aa, Homo sapiens
  CDR3 for alpha chain variable domain of TCR clone 24200 (TRAV27, TRAJ38)
CAARRNAGNNRKLIW

SEQ ID NO: 48400 - protein, 16 aa, Homo sapiens
  CDR3 for beta chain variable domain of TCR clone 24200 (TRBV19, TRBJ2-1)
CASSKAGPSSYNEQFF

SEQ ID NO: 48401 - protein, 17 aa, Homo sapiens
  CDR3 for alpha chain variable domain of TCR clone 24201 (TRAV3, TRAJ42)
CAVRDRDYGGSQGNLLF

SEQ ID NO: 48402 - protein, 15 aa, Homo sapiens
  CDR3 for beta chain variable domain of TCR clone 24201 (TRBV6-6, TRBJ2-7)
CASSYSYGGSYEQYF

SEQ ID NO: 48403 - protein, 11 aa, Homo sapiens
  CDR3 for alpha chain variable domain of TCR clone 24202 (TRAV21, TRAJ4)
HVSGGYNKLIF

SEQ ID NO: 48404 - protein, 13 aa, Homo sapiens
  CDR3 for beta chain variable domain of TCR clone 24202 (TRBV7-3, TRBJ2-5)
CASSVTAGETQYF

SEQ ID NO: 48405 - protein, 12 aa, Homo sapiens
  CDR3 for alpha chain variable domain of TCR clone 24203 (TRAV12-3, TRAJ42)
CAPGGSQGNLIF

SEQ ID NO: 48406 - protein, 13 aa, Homo sapiens
  CDR3 for beta chain variable domain of TCR clone 24203 (TRBV5-7, TRBJ2-6)
CASTSGGANVLTF

SEQ ID NO: 48407 - protein, 14 aa, Homo sapiens
  CDR3 for alpha chain variable domain of TCR clone 24204 (TRAV16, TRAJ33)
CALSAMDSNYQLIW

SEQ ID NO: 48408 - protein, 12 aa, Homo sapiens
  CDR3 for beta chain variable domain of TCR clone 24204 (TRBV5-1, TRBJ1-2)
CANSQDTYGYTF

SEQ ID NO: 48409 - protein, 12 aa, Homo sapiens
  CDR3 for alpha chain variable domain of TCR clone 24205 (TRAV8-3, TRAJ26)
CAGDNYCQNFVF

SEQ ID NO: 48410 - protein, 15 aa, Homo sapiens
  CDR3 for beta chain variable domain of TCR clone 24205 (TRBV9, TRBJ2-1)
CASSLAGSSYNEQFF

SEQ ID NO: 48411 - protein, 13 aa, Homo sapiens
  CDR3 for alpha chain variable domain of TCR clone 24206 (TRAV27, TRAJ49)
CAPRPYTGNQFYF

SEQ ID NO: 48412 - protein, 16 aa, Homo sapiens
  CDR3 for beta chain variable domain of TCR clone 24206 (TRBV4-1, TRBJ1-2)
CASSQDAGQVLYGYTF

SEQ ID NO: 48413 - protein, 18 aa, Homo sapiens
  CDR3 for alpha chain variable domain of TCR clone 24207 (TRAV1-2, TRAJ18)
CAVRDMGDRGSTLGRLYF

SEQ ID NO: 48414 - protein, 16 aa, Homo sapiens
  CDR3 for beta chain variable domain of TCR clone 24207 (TRBV29-1, TRBJ1-2)
CSVEANRDIANYGDTF

SEQ ID NO: 48415 - protein, 14 aa, Homo sapiens
  CDR3 for alpha chain variable domain of TCR clone 24208 (TRAV8-4, TRAJ13)
CAVTLSGGCQKVTF

SEQ ID NO: 48416 - protein, 14 aa, Homo sapiens
  CDR3 for beta chain variable domain of TCR clone 24208 (TRBV7-2, TRBJ1-2)
CASSQTGSTYGYTF

SEQ ID NO: 48417 - protein, 13 aa, Homo sapiens
  CDR3 for alpha chain variable domain of TCR clone 24209 (TRAV21, TRAJ11)
CAVPNSGYSTLTF

SEQ ID NO: 48418 - protein, 13 aa, Homo sapiens
  CDR3 for beta chain variable domain of TCR clone 24209 (TRBV3-1, TRBJ2-7)
CASSLRDGYGQYF

SEQ ID NO: 48419 - protein, 14 aa, Homo sapiens
  CDR3 for alpha chain variable domain of TCR clone 24210 (TRAV26-1, TRAJ38)
RIADNAGNNRKLIW

SEQ ID NO: 48420 - protein, 17 aa, Homo sapiens
  CDR3 for beta chain variable domain of TCR clone 24210 (TRBV7-9, TRBJ2-3)
CASSPTVAGDLTDTQYF

SEQ ID NO: 48421 - protein, 13 aa, Homo sapiens
  CDR3 for alpha chain variable domain of TCR clone 24211 (TRAV12-3, TRAJ13)
CAMTSGGYQKVTL

SEQ ID NO: 48422 - protein, 13 aa, Homo sapiens
  CDR3 for beta chain variable domain of TCR clone 24211 (TRBV20-1, TRBJ2-2)
CSALSGGAGELFF

SEQ ID NO: 48423 - protein, 14 aa, Homo sapiens
  CDR3 for alpha chain variable domain of TCR clone 24212 (TRAV17, TRAJ12)
CATDEKDSSYKLIF

SEQ ID NO: 48424 - protein, 16 aa, Homo sapiens
  CDR3 for beta chain variable domain of TCR clone 24212 (TRBV11-3, TRBJ2-1)
CASSPRLAGVYNEQFF

SEQ ID NO: 48425 - protein, 12 aa, Homo sapiens
  CDR3 for alpha chain variable domain of TCR clone 24213 (TRAV35, TRAJ40)
CAGRAGTYKYIF

SEQ ID NO: 48426 - protein, 14 aa, Homo sapiens
  CDR3 for beta chain variable domain of TCR clone 24213 (TRBV7-2, TRBJ1-3)
CASSRGGTGNTMYF

SEQ ID NO: 48427 - protein, 16 aa, Homo sapiens
  CDR3 for alpha chain variable domain of TCR clone 24214 (TRAV12-3, TRAJ58)
CAMTDTEETSGSRLTF

SEQ ID NO: 48428 - protein, 14 aa, Homo sapiens
  CDR3 for beta chain variable domain of TCR clone 24214 (TRBV23-1, TRBJ2-7)
CASSRRLDSGQGYV

SEQ ID NO: 48429 - protein, 13 aa, Homo sapiens
  CDR3 for alpha chain variable domain of TCR clone 24215 (TRAV8-3, TRAJ43)
CAVVPYNNNDMRF

SEQ ID NO: 48430 - protein, 15 aa, Homo sapiens
  CDR3 for beta chain variable domain of TCR clone 24215 (TRBV5-1, TRBJ2-1)
CASSPPRAPYNKQFF

SEQ ID NO: 48431 - protein, 16 aa, Homo sapiens
  CDR3 for alpha chain variable domain of TCR clone 24216 (TRAV27, TRAJ52)
CAGAGAGGTSNGKLTF

SEQ ID NO: 48432 - protein, 17 aa, Homo sapiens
  CDR3 for beta chain variable domain of TCR clone 24216 (TRBV24-1, TRBJ2-3)
CATSDLPSGEDTDTQYF

SEQ ID NO: 48433 - protein, 15 aa, Homo sapiens
  CDR3 for alpha chain variable domain of TCR clone 24217 (TRAV12-1, TRAJ42)
CVVTRDGGSQGNLIL

SEQ ID NO: 48434 - protein, 14 aa, Homo sapiens
  CDR3 for beta chain variable domain of TCR clone 24217 (TRBV11-2, TRBJ2-3)
CASSLGGGANTQYF

SEQ ID NO: 48435 - protein, 11 aa, Homo sapiens
  CDR3 for alpha chain variable domain of TCR clone 24218 (TRAV3, TRAJ13)
CAVTSYQKVTF

SEQ ID NO: 48436 - protein, 15 aa, Homo sapiens
  CDR3 for beta chain variable domain of TCR clone 24218 (TRBV7-9, TRBJ2-7)
CASSSAGLAVYEQYF

SEQ ID NO: 48437 - protein, 18 aa, Homo sapiens
  CDR3 for alpha chain variable domain of TCR clone 24219 (TRAV13-1, TRAJ52)
CAAKNPNAGGTSYGKLTF

SEQ ID NO: 48438 - protein, 15 aa, Homo sapiens
  CDR3 for beta chain variable domain of TCR clone 24219 (TRBV6-1, TRBJ2-3)
CASSECGGITDTQYF

SEQ ID NO: 48439 - protein, 15 aa, Homo sapiens
  CDR3 for alpha chain variable domain of TCR clone 24220 (TRAV13-2, TRAJ10)
CAENKIGGGGNKLTF

SEQ ID NO: 48440 - protein, 13 aa, Homo sapiens
  CDR3 for beta chain variable domain of TCR clone 24220 (TRBV7-6, TRBJ1-2)
CASSLVADYGYTF

SEQ ID NO: 48441 - protein, 13 aa, Homo sapiens
  CDR3 for alpha chain variable domain of TCR clone 24221 (TRAV21, TRAJ27)
CAARPGNAAKSTF

SEQ ID NO: 48442 - protein, 14 aa, Homo sapiens
  CDR3 for beta chain variable domain of TCR clone 24221 (TRBV7-6, TRBJ2-3)
CASSLGTVTDTQYF

SEQ ID NO: 48443 - protein, 16 aa, Homo sapiens
  CDR3 for alpha chain variable domain of TCR clone 24222 (TRAV3, TRAJ37)
CAVRVRGSGNPGKLIF

SEQ ID NO: 48444 - protein, 11 aa, Homo sapiens
  CDR3 for beta chain variable domain of TCR clone 24222 (TRBV11-2, TRBJ2-2)
CASSLPGELFF

SEQ ID NO: 48445 - protein, 11 aa, Homo sapiens
  CDR3 for alpha chain variable domain of TCR clone 24223 (TRAV1-1, TRAJ23)
CAVRQGGKLIF

SEQ ID NO: 48446 - protein, 16 aa, Homo sapiens
  CDR3 for beta chain variable domain of TCR clone 24223 (TRBV19, TRBJ2-2)
CASRSPGTGATGELFF

SEQ ID NO: 48447 - protein, 13 aa, Homo sapiens
  CDR3 for alpha chain variable domain of TCR clone 24224 (TRAV1-2, TRAJ9)
CAVLNTVGFKTIF

SEQ ID NO: 48448 - protein, 14 aa, Homo sapiens
  CDR3 for beta chain variable domain of TCR clone 24224 (TRBV20-1, TRBJ2-3)
CSARGGTSTDTQYF

SEQ ID NO: 48449 - protein, 12 aa, Homo sapiens
  CDR3 for alpha chain variable domain of TCR clone 24225 (TRAV29/DV5, TRAJ49)
CAATDTGNQFSF

SEQ ID NO: 48450 - protein, 19 aa, Homo sapiens
  CDR3 for beta chain variable domain of TCR clone 24225 (TRBV25-1, TRBJ2-2)
CAILVYRVDRGRKTGELFF

SEQ ID NO: 48451 - protein, 12 aa, Homo sapiens
  CDR3 for alpha chain variable domain of TCR clone 24226 (TRAV8-6, TRAJ43)
CAVSNNNNDIRF

SEQ ID NO: 48452 - protein, 15 aa, Homo sapiens
  CDR3 for beta chain variable domain of TCR clone 24226 (TRBV7-3, TRBJ2-6)
CASSLGGSGANVLTF

SEQ ID NO: 48453 - protein, 15 aa, Homo sapiens
  CDR3 for alpha chain variable domain of TCR clone 24227 (TRAV17, TRAJ56)
CATEPFTGANSELTF

SEQ ID NO: 48454 - protein, 15 aa, Homo sapiens
  CDR3 for beta chain variable domain of TCR clone 24227 (TRBV28, TRBJ1-5)
CASSRTGGYVQPQHF

SEQ ID NO: 48455 - protein, 18 aa, Homo sapiens
  CDR3 for alpha chain variable domain of TCR clone 24228 (TRAV13-1, TRAJ52)
CAASKRSAGGTSYGKLTF

SEQ ID NO: 48456 - protein, 15 aa, Homo sapiens
  CDR3 for beta chain variable domain of TCR clone 24228 (TRBV4-1, TRBJ1-4)
CASSDTGGTNEKLFF

SEQ ID NO: 48457 - protein, 15 aa, Homo sapiens
  CDR3 for alpha chain variable domain of TCR clone 24229 (TRAV26-2, TRAJ13)
CILRDLSGGYQKVTS

SEQ ID NO: 48458 - protein, 11 aa, Homo sapiens
  CDR3 for beta chain variable domain of TCR clone 24229 (TRBV7-9, TRBJ2-5)
CASSLSATQYF

SEQ ID NO: 48459 - protein, 16 aa, Homo sapiens
  CDR3 for alpha chain variable domain of TCR clone 24230 (TRAV1-2, TRAJ16)
CAVNRFSDGRSCSLQG

SEQ ID NO: 48460 - protein, 15 aa, Homo sapiens
  CDR3 for beta chain variable domain of TCR clone 24230 (TRBV9, TRBJ1-6)
CASSVAGTGDSPLHF

SEQ ID NO: 48461 - protein, 16 aa, Homo sapiens
  CDR3 for alpha chain variable domain of TCR clone 24231 (TRAV3, TRAJ18)
CAVGDGRGSTLGRLYF

SEQ ID NO: 48462 - protein, 15 aa, Homo sapiens
  CDR3 for beta chain variable domain of TCR clone 24231 (TRBV7-9, TRBJ1-6)
CASSSPGRGNSPLHF

SEQ ID NO: 48463 - protein, 15 aa, Homo sapiens
  CDR3 for alpha chain variable domain of TCR clone 24232 (TRAV38-1, TRAJ37)
CAFIFGPGNTGKLIF

SEQ ID NO: 48464 - protein, 12 aa, Homo sapiens
  CDR3 for beta chain variable domain of TCR clone 24232 (TRBV7-9, TRBJ2-7)
CASSLEGYEQYF

SEQ ID NO: 48465 - protein, 13 aa, Homo sapiens
  CDR3 for alpha chain variable domain of TCR clone 24233 (TRAV13-2, TRAJ21)
CAERLYNFNKFYF

SEQ ID NO: 48466 - protein, 14 aa, Homo sapiens
  CDR3 for beta chain variable domain of TCR clone 24233 (TRBV5-5, TRBJ1-4)
CASSLEGEAEKLFF

SEQ ID NO: 48467 - protein, 13 aa, Homo sapiens
  CDR3 for alpha chain variable domain of TCR clone 24234 (TRAV21, TRAJ20)
CAVGLRVDYKLSF

SEQ ID NO: 48468 - protein, 13 aa, Homo sapiens
  CDR3 for beta chain variable domain of TCR clone 24234 (TRBV10-3, TRBJ2-7)
CASKLAVNYEQYF

SEQ ID NO: 48469 - protein, 14 aa, Homo sapiens
  CDR3 for alpha chain variable domain of TCR clone 24235 (TRAV4, TRAJ43)
CLVGPMYNNNDMRF

SEQ ID NO: 48470 - protein, 21 aa, Homo sapiens
  CDR3 for beta chain variable domain of TCR clone 24235 (TRBV11-1, TRBJ2-1)
CASSARGRLRPEGPSYNEQFF

SEQ ID NO: 48471 - protein, 12 aa, Homo sapiens
  CDR3 for alpha chain variable domain of TCR clone 24236 (TRAV13-1, TRAJ21)
CAAKEGFNKFYF

SEQ ID NO: 48472 - protein, 14 aa, Homo sapiens
  CDR3 for beta chain variable domain of TCR clone 24236 (TRBV7-2, TRBJ2-5)
CASSLAGGGETQYF

SEQ ID NO: 48473 - protein, 16 aa, Homo sapiens
  CDR3 for alpha chain variable domain of TCR clone 24237 (TRAV1-2, TRAJ10)
CAVRGVLTGGGNKLTF

SEQ ID NO: 48474 - protein, 12 aa, Homo sapiens
  CDR3 for beta chain variable domain of TCR clone 24237 (TRBV7-8, TRBJ2-7)
CASSLRDREQYF

SEQ ID NO: 48475 - protein, 14 aa, Homo sapiens
  CDR3 for alpha chain variable domain of TCR clone 24238 (TRAV1-2, TRAJ8)
CAVREDTGFQKPVF

SEQ ID NO: 48476 - protein, 17 aa, Homo sapiens
  CDR3 for beta chain variable domain of TCR clone 24238 (TRBV11-2, TRBJ2-1)
CASSLYPPGVEYNEQFF

SEQ ID NO: 48477 - protein, 15 aa, Homo sapiens
  CDR3 for alpha chain variable domain of TCR clone 24239 (TRAV2, TRAJ22)
CAVPSRGGSARQLTF

SEQ ID NO: 48478 - protein, 11 aa, Homo sapiens
  CDR3 for beta chain variable domain of TCR clone 24239 (TRBV27, TRBJ2-3)
CAGSLGDTQYF

SEQ ID NO: 48479 - protein, 14 aa, Homo sapiens
  CDR3 for alpha chain variable domain of TCR clone 24240 (TRAV8-3, TRAJ4)
CAVGASGGYNKLIF

SEQ ID NO: 48480 - protein, 16 aa, Homo sapiens
  CDR3 for beta chain variable domain of TCR clone 24240 (TRBV4-3, TRBJ2-2)
CASSHLQGSGTGKLFF

SEQ ID NO: 48481 - protein, 14 aa, Homo sapiens
  CDR3 for alpha chain variable domain of TCR clone 24241 (TRAV26-1, TRAJ39)
CIVRGSRAGNRLTF

SEQ ID NO: 48482 - protein, 15 aa, Homo sapiens
  CDR3 for beta chain variable domain of TCR clone 24241 (TRBV7-9, TRBJ1-5)
CASSQGHQPNQPQHF

SEQ ID NO: 48483 - protein, 15 aa, Homo sapiens
  CDR3 for alpha chain variable domain of TCR clone 24242 (TRAV3, TRAJ5)
CAVRDRKTGRRALTF

SEQ ID NO: 48484 - protein, 15 aa, Homo sapiens
  CDR3 for beta chain variable domain of TCR clone 24242 (TRBV7-8, TRBJ2-1)
CASSLADSVYNEQFF

SEQ ID NO: 48485 - protein, 12 aa, Homo sapiens
  CDR3 for alpha chain variable domain of TCR clone 24243 (TRAV16, TRAJ9)
CALSSGGFKTIL

SEQ ID NO: 48486 - protein, 14 aa, Homo sapiens
  CDR3 for beta chain variable domain of TCR clone 24243 (TRBV7-9, TRBJ2-1)
CASSLAGPYNEQFF

SEQ ID NO: 48487 - protein, 12 aa, Homo sapiens
  CDR3 for alpha chain variable domain of TCR clone 24244 (TRAV16, TRAJ10)
CSRTGGGNKLTF

SEQ ID NO: 48488 - protein, 15 aa, Homo sapiens
  CDR3 for beta chain variable domain of TCR clone 24244 (TRBV6-3, TRBJ2-7)
CASNSPGTVFYEQYF

SEQ ID NO: 48489 - protein, 13 aa, Homo sapiens
  CDR3 for alpha chain variable domain of TCR clone 24245 (TRAV8-3, TRAJ36)
CAVGATGANSLFF

SEQ ID NO: 48490 - protein, 15 aa, Homo sapiens
  CDR3 for beta chain variable domain of TCR clone 24245 (TRBV7-2, TRBJ1-2)
CASSPRAGWNYGYTF

SEQ ID NO: 48491 - protein, 14 aa, Homo sapiens
  CDR3 for alpha chain variable domain of TCR clone 24246 (TRAV1-2, TRAJ16)
CTVNRFSDGQKLLF

SEQ ID NO: 48492 - protein, 15 aa, Homo sapiens
  CDR3 for beta chain variable domain of TCR clone 24246 (TRBV7-9, TRBJ1-6)
CASSSPGRGNSPLHF

SEQ ID NO: 48493 - protein, 15 aa, Homo sapiens
  CDR3 for alpha chain variable domain of TCR clone 24247 (TRAV3, TRAJ22)
CAVRDRGGSARQLTF

SEQ ID NO: 48494 - protein, 15 aa, Homo sapiens
  CDR3 for beta chain variable domain of TCR clone 24247 (TRBV20-1, TRBJ1-5)
CSAREGGYSNQPQHF

SEQ ID NO: 48495 - protein, 14 aa, Homo sapiens
  CDR3 for alpha chain variable domain of TCR clone 24248 (TRAV38-1, TRAJ29)
CAFITPSGNTPLVF

SEQ ID NO: 48496 - protein, 13 aa, Homo sapiens
  CDR3 for beta chain variable domain of TCR clone 24248 (TRBV10-3, TRBJ2-7)
CASKLAVNYEQYF

SEQ ID NO: 48497 - protein, 15 aa, Homo sapiens
  CDR3 for alpha chain variable domain of TCR clone 24249 (TRAV3, TRAJ20)
CAVRDIKLSYYKLSF

SEQ ID NO: 48498 - protein, 15 aa, Homo sapiens
  CDR3 for beta chain variable domain of TCR clone 24249 (TRBV7-9, TRBJ1-6)
CASSSPGRGNSPLHF

SEQ ID NO: 48499 - protein, 10 aa, Homo sapiens
  CDR3 for alpha chain variable domain of TCR clone 24250 (TRAV8-3, TRAJ27)
CAVGPSKTNA

SEQ ID NO: 48500 - protein, 15 aa, Homo sapiens
  CDR3 for beta chain variable domain of TCR clone 24250 (TRBV7-2, TRBJ2-1)
CASSSGLAGGNEQFF

SEQ ID NO: 48501 - protein, 14 aa, Homo sapiens
  CDR3 for alpha chain variable domain of TCR clone 24251 (TRAV1-2, TRAJ16)
CAVNRFSDGQKLLF

SEQ ID NO: 48502 - protein, 15 aa, Homo sapiens
  CDR3 for beta chain variable domain of TCR clone 24251 (TRBV9, TRBJ1-6)
CDSSVAGTGDSPLHF

SEQ ID NO: 48503 - protein, 16 aa, Homo sapiens
  CDR3 for alpha chain variable domain of TCR clone 24252 (TRAV4, TRAJ22)
CLVGDLYSGSARQLTL

SEQ ID NO: 48504 - protein, 16 aa, Homo sapiens
  CDR3 for beta chain variable domain of TCR clone 24252 (TRBV7-9, TRBJ2-3)
CASSPWREVGTDTQYF

SEQ ID NO: 48505 - protein, 18 aa, Homo sapiens
  CDR3 for alpha chain variable domain of TCR clone 24253 (TRAV13-1, TRAJ52)
CAASKRSASGTSYGKLTF

SEQ ID NO: 48506 - protein, 13 aa, Homo sapiens
  CDR3 for beta chain variable domain of TCR clone 24253 (TRBV12-4, TRBJ1-2)
CASSLRQGKGYTF

SEQ ID NO: 48507 - protein, 14 aa, Homo sapiens
  CDR3 for alpha chain variable domain of TCR clone 24254 (TRAV12-3, TRAJ10)
SHLPLTGGGNKLTF

SEQ ID NO: 48508 - protein, 15 aa, Homo sapiens
  CDR3 for beta chain variable domain of TCR clone 24254 (TRBV4-1, TRBJ1-4)
RASSDTGGTNEKLFF

SEQ ID NO: 48509 - protein, 13 aa, Homo sapiens
  CDR3 for alpha chain variable domain of TCR clone 24255 (TRAV8-3, TRAJ48)
CAVVSFGNEKLTF

SEQ ID NO: 48510 - protein, 15 aa, Homo sapiens
  CDR3 for beta chain variable domain of TCR clone 24255 (TRBV11-2, TRBJ2-1)
CASSSPSTRYNEQFF

SEQ ID NO: 48511 - protein, 11 aa, Homo sapiens
  CDR3 for alpha chain variable domain of TCR clone 24256 (TRAV4, TRAJ23)
CLVAPGGKLIF

SEQ ID NO: 48512 - protein, 15 aa, Homo sapiens
  CDR3 for beta chain variable domain of TCR clone 24256 (TRBV7-8, TRBJ2-1)
CASSFQADEYNEQFF

SEQ ID NO: 48513 - protein, 13 aa, Homo sapiens
  CDR3 for alpha chain variable domain of TCR clone 24257 (TRAV12-3, TRAJ13)
CAMTSGGYQKVTF

SEQ ID NO: 48514 - protein, 13 aa, Homo sapiens
  CDR3 for beta chain variable domain of TCR clone 24257 (TRBV7-2, TRBJ2-2)
CASSLAVTGELFF

SEQ ID NO: 48515 - protein, 23 aa, Homo sapiens
  CDR3 for alpha chain variable domain of TCR clone 24258 (TRAV26-1, )
CIADNAVNNHIQNPDPAVYQLRD

SEQ ID NO: 48516 - protein, 13 aa, Homo sapiens
  CDR3 for beta chain variable domain of TCR clone 24258 (TRBV20-1, TRBJ1-1)
CSARGGGNTEAFF

SEQ ID NO: 48517 - protein, 14 aa, Homo sapiens
  CDR3 for alpha chain variable domain of TCR clone 24259 (TRAV12-3, TRAJ5)
CAMTWDTGRRALTF

SEQ ID NO: 48518 - protein, 13 aa, Homo sapiens
  CDR3 for beta chain variable domain of TCR clone 24259 (TRBV11-2, TRBJ1-5)
CASSSGGNQPQHF

SEQ ID NO: 48519 - protein, 13 aa, Homo sapiens
  CDR3 for alpha chain variable domain of TCR clone 24260 (TRAV13-1, TRAJ5)
CAASYTGRRALTF

SEQ ID NO: 48520 - protein, 12 aa, Homo sapiens
  CDR3 for beta chain variable domain of TCR clone 24260 (TRBV28, TRBJ2-3)
CASSLYRDTQYF

SEQ ID NO: 48521 - protein, 11 aa, Homo sapiens
  CDR3 for alpha chain variable domain of TCR clone 24261 (TRAV13-1, TRAJ39)
CASHAGNMLTF

SEQ ID NO: 48522 - protein, 14 aa, Homo sapiens
  CDR3 for beta chain variable domain of TCR clone 24261 (TRBV11-2, TRBJ1-5)
CASSLDRGRQPQHL

SEQ ID NO: 48523 - protein, 14 aa, Homo sapiens
  CDR3 for alpha chain variable domain of TCR clone 24262 (TRAV1-2, TRAJ16)
CAVNRFPDGQKLLF

SEQ ID NO: 48524 - protein, 13 aa, Homo sapiens
  CDR3 for beta chain variable domain of TCR clone 24262 (TRBV7-9, TRBJ1-2)
CASSLKQNYGYTF

SEQ ID NO: 48525 - protein, 14 aa, Homo sapiens
  CDR3 for alpha chain variable domain of TCR clone 24263 (TRAV1-2, TRAJ16)
CAVNRFSDGQKLLF

SEQ ID NO: 48526 - protein, 15 aa, Homo sapiens
  CDR3 for beta chain variable domain of TCR clone 24263 (TRBV6-6, TRBJ2-7)
CASNYSYGGSYEQYF

SEQ ID NO: 48527 - protein, 16 aa, Homo sapiens
  CDR3 for alpha chain variable domain of TCR clone 24264 (TRAV1-2, TRAJ10)
CAVRGVLTGGGNKLTF

SEQ ID NO: 48528 - protein, 13 aa, Homo sapiens
  CDR3 for beta chain variable domain of TCR clone 24264 (TRBV12-4, TRBJ1-5)
CASSPDRAQPQHF

SEQ ID NO: 48529 - protein, 11 aa, Homo sapiens
  CDR3 for alpha chain variable domain of TCR clone 24265 (TRAV2, TRAJ33)
CAVESNFQLIW

SEQ ID NO: 48530 - protein, 15 aa, Homo sapiens
  CDR3 for beta chain variable domain of TCR clone 24265 (TRBV19, TRBJ1-1)
CASTSGQIQNTEAFF

SEQ ID NO: 48531 - protein, 18 aa, Homo sapiens
  CDR3 for alpha chain variable domain of TCR clone 24266 (TRAV30, TRAJ29)
RSLLLWHRAFSGNTPLVF

SEQ ID NO: 48532 - protein, 15 aa, Homo sapiens
  CDR3 for beta chain variable domain of TCR clone 24266 (TRBV5-1, TRBJ2-2)
CASSLFGQNTGELFF

SEQ ID NO: 48533 - protein, 16 aa, Homo sapiens
  CDR3 for alpha chain variable domain of TCR clone 24267 (TRAV30, TRAJ24)
CGTEIVDADSWGKFQF

SEQ ID NO: 48534 - protein, 14 aa, Homo sapiens
  CDR3 for beta chain variable domain of TCR clone 24267 (TRBV12-5, TRBJ2-5)
CASGSRTHPETQYF

SEQ ID NO: 48535 - protein, 13 aa, Homo sapiens
  CDR3 for alpha chain variable domain of TCR clone 24268 (TRAV2, TRAJ15)
CAVASQAGTALIF

SEQ ID NO: 48536 - protein, 15 aa, Homo sapiens
  CDR3 for beta chain variable domain of TCR clone 24268 (TRBV6-3, TRBJ2-7)
CASSSPGTVFYEQYF

SEQ ID NO: 48537 - protein, 11 aa, Homo sapiens
  CDR3 for alpha chain variable domain of TCR clone 24269 (TRAV1-1, TRAJ23)
CAVRQGGKLIF

SEQ ID NO: 48538 - protein, 20 aa, Homo sapiens
  CDR3 for beta chain variable domain of TCR clone 24269 (TRBV7-8, TRBJ2-2)
CASSHLFPGPTNHITGELFF

SEQ ID NO: 48539 - protein, 14 aa, Homo sapiens
  CDR3 for alpha chain variable domain of TCR clone 24270 (TRAV13-1, TRAJ35)
CAASKGGFGNVLHC

SEQ ID NO: 48540 - protein, 13 aa, Homo sapiens
  CDR3 for beta chain variable domain of TCR clone 24270 (TRBV7-3, TRBJ1-1)
GASSQDWGAEAFF

SEQ ID NO: 48541 - protein, 13 aa, Homo sapiens
  CDR3 for alpha chain variable domain of TCR clone 24271 (TRAV17, TRAJ9)
CATDYTGGFKTIF

SEQ ID NO: 48542 - protein, 13 aa, Homo sapiens
  CDR3 for beta chain variable domain of TCR clone 24271 (TRBV7-9, TRBJ1-2)
RASSLKQNYGYTF

SEQ ID NO: 48543 - protein, 15 aa, Homo sapiens
  CDR3 for alpha chain variable domain of TCR clone 24272 (TRAV40, TRAJ45)
CLLGDLGGGADGLTF

SEQ ID NO: 48544 - protein, 13 aa, Homo sapiens
  CDR3 for beta chain variable domain of TCR clone 24272 (TRBV7-9, TRBJ1-2)
CASSLKQSYGYTF

SEQ ID NO: 48545 - protein, 14 aa, Homo sapiens
  CDR3 for alpha chain variable domain of TCR clone 24273 (TRAV12-2, TRAJ17)
CAVLFKAAGNKLTF

SEQ ID NO: 48546 - protein, 17 aa, Homo sapiens
  CDR3 for beta chain variable domain of TCR clone 24273 (TRBV20-1, TRBJ2-2)
CSASGSGQVGLTGELFF

SEQ ID NO: 48547 - protein, 17 aa, Homo sapiens
  CDR3 for alpha chain variable domain of TCR clone 24274 (TRAV8-6, TRAJ58)
CAVSSRVGETSGSRLTF

SEQ ID NO: 48548 - protein, 14 aa, Homo sapiens
  CDR3 for beta chain variable domain of TCR clone 24274 (TRBV4-2, TRBJ2-1)
CASGLDRAYNEQFF

SEQ ID NO: 48549 - protein, 15 aa, Homo sapiens
  CDR3 for alpha chain variable domain of TCR clone 24275 (TRAV26-1, TRAJ52)
CIVSDLGTSYGKLTF

SEQ ID NO: 48550 - protein, 12 aa, Homo sapiens
  CDR3 for beta chain variable domain of TCR clone 24275 (TRBV5-1, TRBJ2-2)
CASSPNTGELFF

SEQ ID NO: 48551 - protein, 15 aa, Homo sapiens
  CDR3 for alpha chain variable domain of TCR clone 24276 (TRAV2, TRAJ9)
CAVEDRGTGGFKTIF

SEQ ID NO: 48552 - protein, 15 aa, Homo sapiens
  CDR3 for beta chain variable domain of TCR clone 24276 (TRBV4-1, TRBJ1-4)
CASSDTGGTNEKLFF

SEQ ID NO: 48553 - protein, 14 aa, Homo sapiens
  CDR3 for alpha chain variable domain of TCR clone 24277 (TRAV26-1, TRAJ38)
CIADNAGNNRKLIW

SEQ ID NO: 48554 - protein, 13 aa, Homo sapiens
  CDR3 for beta chain variable domain of TCR clone 24277 (TRBV24-1, TRBJ2-2)
CATSDWSTGELFF

SEQ ID NO: 48555 - protein, 16 aa, Homo sapiens
  CDR3 for alpha chain variable domain of TCR clone 24278 (TRAV12-3, TRAJ53)
CAMSPGSGGSNYKLKF

SEQ ID NO: 48556 - protein, 16 aa, Homo sapiens
  CDR3 for beta chain variable domain of TCR clone 24278 (TRBV4-2, TRBJ1-1)
CASSQAGFGMNTEAFF

SEQ ID NO: 48557 - protein, 14 aa, Homo sapiens
  CDR3 for alpha chain variable domain of TCR clone 24279 (TRAV1-2, TRAJ16)
CAVNRFSDGQKLLF

SEQ ID NO: 48558 - protein, 10 aa, Homo sapiens
  CDR3 for beta chain variable domain of TCR clone 24279 (TRBV28, TRBJ1-2)
CASSSDRAVF

SEQ ID NO: 48559 - protein, 13 aa, Homo sapiens
  CDR3 for alpha chain variable domain of TCR clone 24280 (TRAV3, TRAJ27)
CAVRPLGAVKSTF

SEQ ID NO: 48560 - protein, 13 aa, Homo sapiens
  CDR3 for beta chain variable domain of TCR clone 24280 (TRBV7-9, TRBJ2-3)
CASSPGSTDTQYF

SEQ ID NO: 48561 - protein, 14 aa, Homo sapiens
  CDR3 for alpha chain variable domain of TCR clone 24281 (TRAV13-2, TRAJ41)
CAERPDWAGYALNF

SEQ ID NO: 48562 - protein, 14 aa, Homo sapiens
  CDR3 for beta chain variable domain of TCR clone 24281 (TRBV12-5, TRBJ2-5)
CASGSRTHQETQYF

SEQ ID NO: 48563 - protein, 14 aa, Homo sapiens
  CDR3 for alpha chain variable domain of TCR clone 24282 (TRAV38-1, TRAJ29)
CAFITLSGNTPLVF

SEQ ID NO: 48564 - protein, 14 aa, Homo sapiens
  CDR3 for beta chain variable domain of TCR clone 24282 (TRBV18, TRBJ2-7)
CASSPRGGAYEQYF

SEQ ID NO: 48565 - protein, 12 aa, Homo sapiens
  CDR3 for alpha chain variable domain of TCR clone 24283 (TRAV8-3, TRAJ27)
CAVGAEAGKSTF

SEQ ID NO: 48566 - protein, 14 aa, Homo sapiens
  CDR3 for beta chain variable domain of TCR clone 24283 (TRBV2, TRBJ2-1)
CARRLIVGHDEQFF

SEQ ID NO: 48567 - protein, 13 aa, Homo sapiens
  CDR3 for alpha chain variable domain of TCR clone 24284 (TRAV13-2, TRAJ48)
CAEMDFGNEKLTF

SEQ ID NO: 48568 - protein, 15 aa, Homo sapiens
  CDR3 for beta chain variable domain of TCR clone 24284 (TRBV7-9, TRBJ1-6)
CASSSLGRGNSPLHF

SEQ ID NO: 48569 - protein, 16 aa, Homo sapiens
  CDR3 for alpha chain variable domain of TCR clone 24285 (TRAV8-4, TRAJ16)
CAVSPVGRWPEAALRK

SEQ ID NO: 48570 - protein, 15 aa, Homo sapiens
  CDR3 for beta chain variable domain of TCR clone 24285 (TRBV11-3, TRBJ2-7)
CASSPGPASSYEQYF

SEQ ID NO: 48571 - protein, 18 aa, Homo sapiens
  CDR3 for alpha chain variable domain of TCR clone 24286 (TRAV26-2, TRAJ45)
CILRLWGDSGGGADGLTF

SEQ ID NO: 48572 - protein, 17 aa, Homo sapiens
  CDR3 for beta chain variable domain of TCR clone 24286 (TRBV28, TRBJ2-3)
CASSPTPAGGRVDTQYF

SEQ ID NO: 48573 - protein, 17 aa, Homo sapiens
  CDR3 for alpha chain variable domain of TCR clone 24287 (TRAV3, TRAJ38)
CAVRDCLSAGNNRKLIW

SEQ ID NO: 48574 - protein, 14 aa, Homo sapiens
  CDR3 for beta chain variable domain of TCR clone 24287 (TRBV5-5, TRBJ1-5)
CASSGQGVDQPQHF

SEQ ID NO: 48575 - protein, 11 aa, Homo sapiens
  CDR3 for alpha chain variable domain of TCR clone 24288 (TRAV3, TRAJ49)
CAPITGNQFYF

SEQ ID NO: 48576 - protein, 17 aa, Homo sapiens
  CDR3 for beta chain variable domain of TCR clone 24288 (TRBV3-1, TRBJ2-5)
CASSQDTLAGGGETQYF

SEQ ID NO: 48577 - protein, 16 aa, Homo sapiens
  CDR3 for alpha chain variable domain of TCR clone 24289 (TRAV29/DV5, TRAJ39)
CAASLLFNNAGNMLTF

SEQ ID NO: 48578 - protein, 16 aa, Homo sapiens
  CDR3 for beta chain variable domain of TCR clone 24289 (TRBV19, TRBJ2-6)
CACSMSGLSGANVLTF

SEQ ID NO: 48579 - protein, 13 aa, Homo sapiens
  CDR3 for alpha chain variable domain of TCR clone 24290 (TRAV8-1, TRAJ34)
CAVRPYNTDKLIF

SEQ ID NO: 48580 - protein, 15 aa, Homo sapiens
  CDR3 for beta chain variable domain of TCR clone 24290 (TRBV7-9, TRBJ1-3)
CASSLRSGSGNTMYF

SEQ ID NO: 48581 - protein, 12 aa, Homo sapiens
  CDR3 for alpha chain variable domain of TCR clone 24291 (TRAV16, TRAJ9)
CALRAGGFKTIF

SEQ ID NO: 48582 - protein, 13 aa, Homo sapiens
  CDR3 for beta chain variable domain of TCR clone 24291 (TRBV4-3, TRBJ1-1)
RASSQVEGSMAFF

SEQ ID NO: 48583 - protein, 14 aa, Homo sapiens
  CDR3 for alpha chain variable domain of TCR clone 24292 (TRAV22, TRAJ37)
CASPYSGNTGKLIF

SEQ ID NO: 48584 - protein, 13 aa, Homo sapiens
  CDR3 for beta chain variable domain of TCR clone 24292 (TRBV20-1, TRBJ2-1)
CSAHGSSYNEQFF

SEQ ID NO: 48585 - protein, 12 aa, Homo sapiens
  CDR3 for alpha chain variable domain of TCR clone 24293 (TRAV3, TRAJ43)
CAVRDPNNDMRL

SEQ ID NO: 48586 - protein, 15 aa, Homo sapiens
  CDR3 for beta chain variable domain of TCR clone 24293 (TRBV6-5, TRBJ2-1)
CASSYDAGAGNEQFF

SEQ ID NO: 48587 - protein, 13 aa, Homo sapiens
  CDR3 for alpha chain variable domain of TCR clone 24294 (TRAV4, TRAJ42)
CLVGGGSQGNLIF

SEQ ID NO: 48588 - protein, 16 aa, Homo sapiens
  CDR3 for beta chain variable domain of TCR clone 24294 (TRBV5-1, TRBJ2-3)
CASSWQGRVGADTQYF

SEQ ID NO: 48589 - protein, 11 aa, Homo sapiens
  CDR3 for alpha chain variable domain of TCR clone 24295 (TRAV17, TRAJ9)
CGFTGCFKTIF

SEQ ID NO: 48590 - protein, 14 aa, Homo sapiens
  CDR3 for beta chain variable domain of TCR clone 24295 (TRBV7-9, TRBJ2-2)
CASSLVQDTGELFF

SEQ ID NO: 48591 - protein, 16 aa, Homo sapiens
  CDR3 for alpha chain variable domain of TCR clone 24296 (TRAV1-2, TRAJ10)
CAVRGVLTGGGNKLIF

SEQ ID NO: 48592 - protein, 12 aa, Homo sapiens
  CDR3 for beta chain variable domain of TCR clone 24296 (TRBV7-8, TRBJ2-7)
CASSLGDREQYF

SEQ ID NO: 48593 - protein, 13 aa, Homo sapiens
  CDR3 for alpha chain variable domain of TCR clone 24297 (TRAV17, TRAJ9)
CATDYTGGFKTIF

SEQ ID NO: 48594 - protein, 16 aa, Homo sapiens
  CDR3 for beta chain variable domain of TCR clone 24297 (TRBV7-7, TRBJ2-1)
CASSVASGTSYNEQFF

SEQ ID NO: 48595 - protein, 12 aa, Homo sapiens
  CDR3 for alpha chain variable domain of TCR clone 24298 (TRAV14/DV4, TRAJ23)
CAMSLRRGKLIF

SEQ ID NO: 48596 - protein, 14 aa, Homo sapiens
  CDR3 for beta chain variable domain of TCR clone 24298 (TRBV6-6, TRBJ2-5)
CASTLGSDMQTQYF

SEQ ID NO: 48597 - protein, 14 aa, Homo sapiens
  CDR3 for alpha chain variable domain of TCR clone 24299 (TRAV26-1, TRAJ21)
CIVRPPYNFNKFYF

SEQ ID NO: 48598 - protein, 14 aa, Homo sapiens
  CDR3 for beta chain variable domain of TCR clone 24299 (TRBV11-3, TRBJ2-1)
CASSATTSGSSQFF

SEQ ID NO: 48599 - protein, 16 aa, Homo sapiens
  CDR3 for alpha chain variable domain of TCR clone 24300 (TRAV3, TRAJ18)
CAVRDGRGSTLGRLYF

SEQ ID NO: 48600 - protein, 15 aa, Homo sapiens
  CDR3 for beta chain variable domain of TCR clone 24300 (TRBV7-9, TRBJ1-6)
CASSSPGRGNSPLHF

SEQ ID NO: 48601 - protein, 12 aa, Homo sapiens
  CDR3 for alpha chain variable domain of TCR clone 24301 (TRAV35, TRAJ39)
LAPNNAGNMLTL

SEQ ID NO: 48602 - protein, 16 aa, Homo sapiens
  CDR3 for beta chain variable domain of TCR clone 24301 (TRBV2, TRBJ2-3)
CASSTSVEGVTDTQYF

SEQ ID NO: 48603 - protein, 14 aa, Homo sapiens
  CDR3 for alpha chain variable domain of TCR clone 24302 (TRAV16, TRAJ15)
FALSGPQAGTALIF

SEQ ID NO: 48604 - protein, 12 aa, Homo sapiens
  CDR3 for beta chain variable domain of TCR clone 24302 (TRBV18, TRBJ2-5)
CASSPSKETQYF

SEQ ID NO: 48605 - protein, 16 aa, Homo sapiens
  CDR3 for alpha chain variable domain of TCR clone 24303 (TRAV12-3, TRAJ53)
CAMSPGSGGSNYKLNF

SEQ ID NO: 48606 - protein, 11 aa, Homo sapiens
  CDR3 for beta chain variable domain of TCR clone 24303 (TRBV29-1, TRBJ2-5)
CSEDRTGTQYF

SEQ ID NO: 48607 - protein, 12 aa, Homo sapiens
  CDR3 for alpha chain variable domain of TCR clone 24304 (TRAV12-3, TRAJ40)
CAMSSGAYKYIF

SEQ ID NO: 48608 - protein, 15 aa, Homo sapiens
  CDR3 for beta chain variable domain of TCR clone 24304 (TRBV7-3, TRBJ2-2)
CASSETGQGTGELFF

SEQ ID NO: 48609 - protein, 13 aa, Homo sapiens
  CDR3 for alpha chain variable domain of TCR clone 24305 (TRAV13-1, TRAJ35)
CAASLGFGNVLHC

SEQ ID NO: 48610 - protein, 15 aa, Homo sapiens
  CDR3 for beta chain variable domain of TCR clone 24305 (TRBV20-1, TRBJ2-7)
CSARDWVSGMDEQYF

SEQ ID NO: 48611 - protein, 14 aa, Homo sapiens
  CDR3 for alpha chain variable domain of TCR clone 24306 (TRAV17, TRAJ53)
CATARGGSNYKLTF

SEQ ID NO: 48612 - protein, 13 aa, Homo sapiens
  CDR3 for beta chain variable domain of TCR clone 24306 (TRBV30, TRBJ1-1)
CAWSRMLFPEAFF

SEQ ID NO: 48613 - protein, 15 aa, Homo sapiens
  CDR3 for alpha chain variable domain of TCR clone 24307 (TRAV38-1, TRAJ37)
CAFIHCSGNTGKLIF

SEQ ID NO: 48614 - protein, 12 aa, Homo sapiens
  CDR3 for beta chain variable domain of TCR clone 24307 (TRBV7-9, TRBJ2-7)
CASSFGSYEQYF

SEQ ID NO: 48615 - protein, 16 aa, Homo sapiens
  CDR3 for alpha chain variable domain of TCR clone 24308 (TRAV16, TRAJ4)
CALSRMFSGGYNKLIF

SEQ ID NO: 48616 - protein, 16 aa, Homo sapiens
  CDR3 for beta chain variable domain of TCR clone 24308 (TRBV12-5, TRBJ2-5)
CASGPRTSGNQETQYF

SEQ ID NO: 48617 - protein, 14 aa, Homo sapiens
  CDR3 for alpha chain variable domain of TCR clone 24309 (TRAV16, TRAJ33)
CALSAMDSNYQLVW

SEQ ID NO: 48618 - protein, 12 aa, Homo sapiens
  CDR3 for beta chain variable domain of TCR clone 24309 (TRBV5-1, TRBJ1-2)
CASSQDTYGYTF

SEQ ID NO: 48619 - protein, 13 aa, Homo sapiens
  CDR3 for alpha chain variable domain of TCR clone 24310 (TRAV21, TRAJ27)
CAALNTNAGKSTF

SEQ ID NO: 48620 - protein, 14 aa, Homo sapiens
  CDR3 for beta chain variable domain of TCR clone 24310 (TRBV27, TRBJ1-1)
CASSLVSGLSEAFF

SEQ ID NO: 48621 - protein, 13 aa, Homo sapiens
  CDR3 for alpha chain variable domain of TCR clone 24311 (TRAV3, TRAJ27)
CAVRPLGAGKSTF

SEQ ID NO: 48622 - protein, 13 aa, Homo sapiens
  CDR3 for beta chain variable domain of TCR clone 24311 (TRBV7-9, TRBJ2-3)
CARSPGSTDTQYF

SEQ ID NO: 48623 - protein, 11 aa, Homo sapiens
  CDR3 for alpha chain variable domain of TCR clone 24312 (TRAV17, TRAJ31)
CATSNNARLMF

SEQ ID NO: 48624 - protein, 14 aa, Homo sapiens
  CDR3 for beta chain variable domain of TCR clone 24312 (TRBV18, TRBJ2-7)
CASSPRGGAYEQYL

SEQ ID NO: 48625 - protein, 12 aa, Homo sapiens
  CDR3 for alpha chain variable domain of TCR clone 24313 (TRAV1-1, TRAJ8)
CAGGTGFQKLVF

SEQ ID NO: 48626 - protein, 15 aa, Homo sapiens
  CDR3 for beta chain variable domain of TCR clone 24313 (TRBV7-9, TRBJ1-4)
CASSRTGGFDEKLFF

SEQ ID NO: 48627 - protein, 13 aa, Homo sapiens
  CDR3 for alpha chain variable domain of TCR clone 24314 (TRAV12-2, TRAJ20)
CAVYPSNDYKLSF

SEQ ID NO: 48628 - protein, 14 aa, Homo sapiens
  CDR3 for beta chain variable domain of TCR clone 24314 (TRBV12-5, TRBJ2-5)
CASGSRTHQETQYF

SEQ ID NO: 48629 - protein, 14 aa, Homo sapiens
  CDR3 for alpha chain variable domain of TCR clone 24315 (TRAV1-2, TRAJ8)
CAVREDAGFQKLVF

SEQ ID NO: 48630 - protein, 14 aa, Homo sapiens
  CDR3 for beta chain variable domain of TCR clone 24315 (TRBV11-2, TRBJ1-1)
CASSTQRGRTEAFF

SEQ ID NO: 48631 - protein, 14 aa, Homo sapiens
  CDR3 for alpha chain variable domain of TCR clone 24316 (TRAV13-2, TRAJ43)
CAEIPTYNNNEMRF

SEQ ID NO: 48632 - protein, 15 aa, Homo sapiens
  CDR3 for beta chain variable domain of TCR clone 24316 (TRBV7-9, TRBJ2-2)
CASGPLDTFPGELFF

SEQ ID NO: 48633 - protein, 12 aa, Homo sapiens
  CDR3 for alpha chain variable domain of TCR clone 24317 (TRAV12-3, TRAJ17)
CAMTLTGNKLTF

SEQ ID NO: 48634 - protein, 17 aa, Homo sapiens
  CDR3 for beta chain variable domain of TCR clone 24317 (TRBV4-1, TRBJ2-7)
CASSRDPLGVRGGEQYF

SEQ ID NO: 48635 - protein, 10 aa, Homo sapiens
  CDR3 for alpha chain variable domain of TCR clone 24318 (TRAV23/DV6, TRAJ43)
CAAAVAALEQ

SEQ ID NO: 48636 - protein, 16 aa, Homo sapiens
  CDR3 for beta chain variable domain of TCR clone 24318 (TRBV18, TRBJ1-2)
GASSPPERVTIYGYTF

SEQ ID NO: 48637 - protein, 15 aa, Homo sapiens
  CDR3 for alpha chain variable domain of TCR clone 24319 (TRAV21, TRAJ24)
CAARSSTDSWGKLQF

SEQ ID NO: 48638 - protein, 14 aa, Homo sapiens
  CDR3 for beta chain variable domain of TCR clone 24319 (TRBV11-2, TRBJ2-5)
CASSRTGGIETQCF

SEQ ID NO: 48639 - protein, 13 aa, Homo sapiens
  CDR3 for alpha chain variable domain of TCR clone 24320 (TRAV12-3, TRAJ13)
CAMSSGGYQKVTF

SEQ ID NO: 48640 - protein, 13 aa, Homo sapiens
  CDR3 for beta chain variable domain of TCR clone 24320 (TRBV20-1, TRBJ1-1)
RSAPPGGHTEAFF

SEQ ID NO: 48641 - protein, 17 aa, Homo sapiens
  CDR3 for alpha chain variable domain of TCR clone 24321 (TRAV8-6, TRAJ58)
CAVSSWVGENSGSRLTF

SEQ ID NO: 48642 - protein, 14 aa, Homo sapiens
  CDR3 for beta chain variable domain of TCR clone 24321 (TRBV4-2, TRBJ2-1)
CASGLDRAYNEQFF

SEQ ID NO: 48643 - protein, 13 aa, Homo sapiens
  CDR3 for alpha chain variable domain of TCR clone 24322 (TRAV3, TRAJ29)
CAVRDIIDKPLVF

SEQ ID NO: 48644 - protein, 14 aa, Homo sapiens
  CDR3 for beta chain variable domain of TCR clone 24322 (TRBV27, TRBJ2-1)
CASSATGGYNEQFF

SEQ ID NO: 48645 - protein, 12 aa, Homo sapiens
  CDR3 for alpha chain variable domain of TCR clone 24323 (TRAV2, TRAJ9)
CAVGAGGFKTIF

SEQ ID NO: 48646 - protein, 16 aa, Homo sapiens
  CDR3 for beta chain variable domain of TCR clone 24323 (TRBV13, TRBJ2-2)
CARSPRTGEHTGELFF

SEQ ID NO: 48647 - protein, 15 aa, Homo sapiens
  CDR3 for alpha chain variable domain of TCR clone 24324 (TRAV13-1, TRAJ44)
CAASRGGGTASKLTF

SEQ ID NO: 48648 - protein, 14 aa, Homo sapiens
  CDR3 for beta chain variable domain of TCR clone 24324 (TRBV7-2, TRBJ2-5)
CASSPRGSSETRYF

SEQ ID NO: 48649 - protein, 17 aa, Homo sapiens
  CDR3 for alpha chain variable domain of TCR clone 24325 (TRAV23/DV6, TRAJ57)
CAASSTLSQGGSEKLVF

SEQ ID NO: 48650 - protein, 14 aa, Homo sapiens
  CDR3 for beta chain variable domain of TCR clone 24325 (TRBV25-1, TRBJ1-1)
CASTHLGGNAEAFF

SEQ ID NO: 48651 - protein, 16 aa, Homo sapiens
  CDR3 for alpha chain variable domain of TCR clone 24326 (TRAV26-1, TRAJ37)
CIVGGDGSGNTGKLIF

SEQ ID NO: 48652 - protein, 17 aa, Homo sapiens
  CDR3 for beta chain variable domain of TCR clone 24326 (TRBV4-1, TRBJ2-7)
CASSRDPLGVRGGEQYF

SEQ ID NO: 48653 - protein, 14 aa, Homo sapiens
  CDR3 for alpha chain variable domain of TCR clone 24327 (TRAV17, TRAJ54)
CATDANQGAQKLGF

SEQ ID NO: 48654 - protein, 12 aa, Homo sapiens
  CDR3 for beta chain variable domain of TCR clone 24327 (TRBV6-3, TRBJ2-1)
CASSGSYNEQFF

SEQ ID NO: 48655 - protein, 12 aa, Homo sapiens
  CDR3 for alpha chain variable domain of TCR clone 24328 (TRAV35, TRAJ49)
CAGWNTGNQFYF

SEQ ID NO: 48656 - protein, 13 aa, Homo sapiens
  CDR3 for beta chain variable domain of TCR clone 24328 (TRBV2, TRBJ1-4)
CASSERAGEKLFF

SEQ ID NO: 48657 - protein, 17 aa, Homo sapiens
  CDR3 for alpha chain variable domain of TCR clone 24329 (TRAV13-1, TRAJ52)
CAASSGAGGTSYGKLTF

SEQ ID NO: 48658 - protein, 15 aa, Homo sapiens
  CDR3 for beta chain variable domain of TCR clone 24329 (TRBV2, TRBJ2-1)
CASSEPAGSYNEQFF

SEQ ID NO: 48659 - protein, 14 aa, Homo sapiens
  CDR3 for alpha chain variable domain of TCR clone 24330 (TRAV1-2, TRAJ16)
CAVNRFSDGQKLLS

SEQ ID NO: 48660 - protein, 13 aa, Homo sapiens
  CDR3 for beta chain variable domain of TCR clone 24330 (TRBV19, TRBJ1-2)
CASSVPGQDGYTF

SEQ ID NO: 48661 - protein, 14 aa, Homo sapiens
  CDR3 for alpha chain variable domain of TCR clone 24331 (TRAV8-2, TRAJ11)
CVVSEKSGYSTLTF

SEQ ID NO: 48662 - protein, 16 aa, Homo sapiens
  CDR3 for beta chain variable domain of TCR clone 24331 (TRBV28, TRBJ2-1)
CASSSPEYPRDNEQLF

SEQ ID NO: 48663 - protein, 16 aa, Homo sapiens
  CDR3 for alpha chain variable domain of TCR clone 24332 (TRAV3, TRAJ18)
CAVREGRGSTLGRLYF

SEQ ID NO: 48664 - protein, 15 aa, Homo sapiens
  CDR3 for beta chain variable domain of TCR clone 24332 (TRBV7-9, TRBJ1-6)
CASSSPGRGNSPLHF

SEQ ID NO: 48665 - protein, 14 aa, Homo sapiens
  CDR3 for alpha chain variable domain of TCR clone 24333 (TRAV21, TRAJ15)
CAVSLNQAGTALIF

SEQ ID NO: 48666 - protein, 15 aa, Homo sapiens
  CDR3 for beta chain variable domain of TCR clone 24333 (TRBV6-3, TRBJ2-7)
CASSSPGTVFYEQYF

SEQ ID NO: 48667 - protein, 14 aa, Homo sapiens
  CDR3 for alpha chain variable domain of TCR clone 24334 (TRAV12-2, TRAJ13)
CAVKKTGGYQKVTF

SEQ ID NO: 48668 - protein, 15 aa, Homo sapiens
  CDR3 for beta chain variable domain of TCR clone 24334 (TRBV27, TRBJ2-1)
CASSNGGGSSNVQFF

SEQ ID NO: 48669 - protein, 14 aa, Homo sapiens
  CDR3 for alpha chain variable domain of TCR clone 24335 (TRAV12-3, TRAJ10)
SHLPLTGGGNKLTF

SEQ ID NO: 48670 - protein, 15 aa, Homo sapiens
  CDR3 for beta chain variable domain of TCR clone 24335 (TRBV19, TRBJ1-1)
CASTSGQIQNTEAFF

SEQ ID NO: 48671 - protein, 14 aa, Homo sapiens
  CDR3 for alpha chain variable domain of TCR clone 24336 (TRAV17, TRAJ56)
CATVPAGANSKLTF

SEQ ID NO: 48672 - protein, 16 aa, Homo sapiens
  CDR3 for beta chain variable domain of TCR clone 24336 (TRBV20-1, TRBJ1-4)
CSAPGQGLLTNEKLFF

SEQ ID NO: 48673 - protein, 11 aa, Homo sapiens
  CDR3 for alpha chain variable domain of TCR clone 24337 (TRAV12-1, TRAJ8)
CVVTGFQKLVF

SEQ ID NO: 48674 - protein, 14 aa, Homo sapiens
  CDR3 for beta chain variable domain of TCR clone 24337 (TRBV19, TRBJ2-1)
CASGKATQYNEQFF

SEQ ID NO: 48675 - protein, 16 aa, Homo sapiens
  CDR3 for alpha chain variable domain of TCR clone 24338 (TRAV3, TRAJ10)
CAVRDMSAGGGNKLTF

SEQ ID NO: 48676 - protein, 17 aa, Homo sapiens
  CDR3 for beta chain variable domain of TCR clone 24338 (TRBV28, TRBJ2-5)
CASSTPEGDALQETQYF

SEQ ID NO: 48677 - protein, 16 aa, Homo sapiens
  CDR3 for alpha chain variable domain of TCR clone 24339 (TRAV26-2, TRAJ45)
CTTASPIGGGADGLTF

SEQ ID NO: 48678 - protein, 20 aa, Homo sapiens
  CDR3 for beta chain variable domain of TCR clone 24339 (TRBV28, TRBJ2-1)
WASTPIGRSPGLAGGNEQFF

SEQ ID NO: 48679 - protein, 13 aa, Homo sapiens
  CDR3 for alpha chain variable domain of TCR clone 24340 (TRAV13-2, TRAJ53)
CAENMGSSYKLTF

SEQ ID NO: 48680 - protein, 13 aa, Homo sapiens
  CDR3 for beta chain variable domain of TCR clone 24340 (TRBV4-1, TRBJ2-2)
CASSQENTGELFF

SEQ ID NO: 48681 - protein, 14 aa, Homo sapiens
  CDR3 for alpha chain variable domain of TCR clone 24341 (TRAV21, TRAJ35)
CSVMPIGFGNVLHC

SEQ ID NO: 48682 - protein, 12 aa, Homo sapiens
  CDR3 for beta chain variable domain of TCR clone 24341 (TRBV7-9, TRBJ2-7)
CASSIKREEQYF

SEQ ID NO: 48683 - protein, 13 aa, Homo sapiens
  CDR3 for alpha chain variable domain of TCR clone 24342 (TRAV21, TRAJ20)
CAVGLRVDYKLSF

SEQ ID NO: 48684 - protein, 13 aa, Homo sapiens
  CDR3 for beta chain variable domain of TCR clone 24342 (TRBV6-1, TRBJ1-1)
CASSRQGNTEAFS

SEQ ID NO: 48685 - protein, 18 aa, Homo sapiens
  CDR3 for alpha chain variable domain of TCR clone 24343 (TRAV12-3, TRAJ52)
CAMSVGGAGGTSYGKMTF

SEQ ID NO: 48686 - protein, 15 aa, Homo sapiens
  CDR3 for beta chain variable domain of TCR clone 24343 (TRBV27, TRBJ1-6)
CASSFDRGLGSPLHF

SEQ ID NO: 48687 - protein, 12 aa, Homo sapiens
  CDR3 for alpha chain variable domain of TCR clone 24344 (TRAV13-1, TRAJ9)
CASHTGGFKTIF

SEQ ID NO: 48688 - protein, 13 aa, Homo sapiens
  CDR3 for beta chain variable domain of TCR clone 24344 (TRBV27, TRBJ2-7)
CASSFSQGYEQYF

SEQ ID NO: 48689 - protein, 14 aa, Homo sapiens
  CDR3 for alpha chain variable domain of TCR clone 24345 (TRAV9-2, TRAJ39)
CALYIYNAGNMLTF

SEQ ID NO: 48690 - protein, 15 aa, Homo sapiens
  CDR3 for beta chain variable domain of TCR clone 24345 (TRBV28, TRBJ2-7)
CASSPGGRGFYEQYF

SEQ ID NO: 48691 - protein, 12 aa, Homo sapiens
  CDR3 for alpha chain variable domain of TCR clone 24346 (TRAV38-2/DV8, TRAJ48)
CALLSGNEKLIF

SEQ ID NO: 48692 - protein, 15 aa, Homo sapiens
  CDR3 for beta chain variable domain of TCR clone 24346 (TRBV6-1, TRBJ2-1)
CASSELRGQYNEQFF

SEQ ID NO: 48693 - protein, 13 aa, Homo sapiens
  CDR3 for alpha chain variable domain of TCR clone 24347 (TRAV17, TRAJ9)
CVTDYTGGFKTIF

SEQ ID NO: 48694 - protein, 16 aa, Homo sapiens
  CDR3 for beta chain variable domain of TCR clone 24347 (TRBV7-7, TRBJ2-1)
CASSLASGTSYNEQFF

SEQ ID NO: 48695 - protein, 13 aa, Homo sapiens
  CDR3 for alpha chain variable domain of TCR clone 24348 (TRAV3, TRAJ30)
CAVRDGGDDKIIF

SEQ ID NO: 48696 - protein, 14 aa, Homo sapiens
  CDR3 for beta chain variable domain of TCR clone 24348 (TRBV5-1, TRBJ1-1)
CASSRTTGDTEAFF

SEQ ID NO: 48697 - protein, 15 aa, Homo sapiens
  CDR3 for alpha chain variable domain of TCR clone 24349 (TRAV21, TRAJ45)
RAVSYSGGGADGLTF

SEQ ID NO: 48698 - protein, 13 aa, Homo sapiens
  CDR3 for beta chain variable domain of TCR clone 24349 (TRBV20-1, TRBJ2-5)
CSAATELQETQYF

SEQ ID NO: 48699 - protein, 13 aa, Homo sapiens
  CDR3 for alpha chain variable domain of TCR clone 24350 (TRAV21, TRAJ27)
CAARPGNAGKSTF

SEQ ID NO: 48700 - protein, 13 aa, Homo sapiens
  CDR3 for beta chain variable domain of TCR clone 24350 (TRBV4-2, TRBJ1-1)
CASSQAGNTEAFF

SEQ ID NO: 48701 - protein, 18 aa, Homo sapiens
  CDR3 for alpha chain variable domain of TCR clone 24351 (TRAV29/DV5, TRAJ52)
CAAGFRGAVGTSYGKLTF

SEQ ID NO: 48702 - protein, 16 aa, Homo sapiens
  CDR3 for beta chain variable domain of TCR clone 24351 (TRBV7-3, TRBJ2-2)
CASSLKRGTLSGELFF

SEQ ID NO: 48703 - protein, 12 aa, Homo sapiens
  CDR3 for alpha chain variable domain of TCR clone 24352 (TRAV12-3, TRAJ17)
CAMTLTGNKLTF

SEQ ID NO: 48704 - protein, 15 aa, Homo sapiens
  CDR3 for beta chain variable domain of TCR clone 24352 (TRBV7-9, TRBJ1-4)
CASSARTGGNEKLFF

SEQ ID NO: 48705 - protein, 15 aa, Homo sapiens
  CDR3 for alpha chain variable domain of TCR clone 24353 (TRAV12-3, TRAJ27)
CAMRAYNTNAGKSTF

SEQ ID NO: 48706 - protein, 13 aa, Homo sapiens
  CDR3 for beta chain variable domain of TCR clone 24353 (TRBV11-2, TRBJ2-5)
CASSRGPSETQYL

SEQ ID NO: 48707 - protein, 17 aa, Homo sapiens
  CDR3 for alpha chain variable domain of TCR clone 24354 (TRAV26-2, TRAJ42)
CILRDVGYGGSQGNIIF

SEQ ID NO: 48708 - protein, 16 aa, Homo sapiens
  CDR3 for beta chain variable domain of TCR clone 24354 (TRBV12-4, TRBJ2-7)
CASSLIGGTGTYEQYF

SEQ ID NO: 48709 - protein, 13 aa, Homo sapiens
  CDR3 for alpha chain variable domain of TCR clone 24355 (TRAV17, TRAJ5)
RAPMDTGRRALTF

SEQ ID NO: 48710 - protein, 15 aa, Homo sapiens
  CDR3 for beta chain variable domain of TCR clone 24355 (TRBV6-6, TRBJ2-5)
CASSPGGGLEETQYF

SEQ ID NO: 48711 - protein, 17 aa, Homo sapiens
  CDR3 for alpha chain variable domain of TCR clone 24356 (TRAV3, TRAJ38)
CAVRDCLNAGNNRKLIW

SEQ ID NO: 48712 - protein, 15 aa, Homo sapiens
  CDR3 for beta chain variable domain of TCR clone 24356 (TRBV27, TRBJ2-1)
CASSNGGGSSNEQFF

SEQ ID NO: 48713 - protein, 13 aa, Homo sapiens
  CDR3 for alpha chain variable domain of TCR clone 24357 (TRAV38-2/DV8, TRAJ34)
CAYRNYNTDKLIF

SEQ ID NO: 48714 - protein, 13 aa, Homo sapiens
  CDR3 for beta chain variable domain of TCR clone 24357 (TRBV12-5, TRBJ2-3)
CASGDRQSDTQYF

SEQ ID NO: 48715 - protein, 17 aa, Homo sapiens
  CDR3 for alpha chain variable domain of TCR clone 24358 (TRAV16, TRAJ37)
CAFWPKNGSSNTGKLIF

SEQ ID NO: 48716 - protein, 20 aa, Homo sapiens
  CDR3 for beta chain variable domain of TCR clone 24358 (TRBV7-8, TRBJ2-2)
CASSHLFPGPTIHITGELFF

SEQ ID NO: 48717 - protein, 18 aa, Homo sapiens
  CDR3 for alpha chain variable domain of TCR clone 24359 (TRAV12-3, TRAJ52)
CAMSVGGAGGTSNGKLTF

SEQ ID NO: 48718 - protein, 15 aa, Homo sapiens
  CDR3 for beta chain variable domain of TCR clone 24359 (TRBV27, TRBJ1-6)
CASSFDRGLGSPLHF

SEQ ID NO: 48719 - protein, 12 aa, Homo sapiens
  CDR3 for alpha chain variable domain of TCR clone 24360 (TRAV12-3, TRAJ17)
CAMTLTGNKLTF

SEQ ID NO: 48720 - protein, 15 aa, Homo sapiens
  CDR3 for beta chain variable domain of TCR clone 24360 (TRBV4-1, TRBJ2-5)
CASSQWDLYQETQYF

SEQ ID NO: 48721 - protein, 17 aa, Homo sapiens
  CDR3 for alpha chain variable domain of TCR clone 24361 (TRAV23/DV6, TRAJ57)
CAASSTLSQGGSAKLVF

SEQ ID NO: 48722 - protein, 14 aa, Homo sapiens
  CDR3 for beta chain variable domain of TCR clone 24361 (TRBV25-1, TRBJ1-1)
CASTHLGGNTEAFF

SEQ ID NO: 48723 - protein, 18 aa, Homo sapiens
  CDR3 for alpha chain variable domain of TCR clone 24362 (TRAV9-2, TRAJ52)
CALRRHNAGGTSYGKLTF

SEQ ID NO: 48724 - protein, 13 aa, Homo sapiens
  CDR3 for beta chain variable domain of TCR clone 24362 (TRBV7-9, TRBJ1-2)
CASSLKQNYGYTF

SEQ ID NO: 48725 - protein, 13 aa, Homo sapiens
  CDR3 for alpha chain variable domain of TCR clone 24363 (TRAV12-1, TRAJ6)
CVVFPGGSYIPTF

SEQ ID NO: 48726 - protein, 14 aa, Homo sapiens
  CDR3 for beta chain variable domain of TCR clone 24363 (TRBV20-1, TRBJ1-3)
RSASPTGAGNTIYF

SEQ ID NO: 48727 - protein, 14 aa, Homo sapiens
  CDR3 for alpha chain variable domain of TCR clone 24364 (TRAV1-2, TRAJ8)
CAVREDTGFQKLVL

SEQ ID NO: 48728 - protein, 16 aa, Homo sapiens
  CDR3 for beta chain variable domain of TCR clone 24364 (TRBV12-5, TRBJ2-5)
CASGPRTSGNQETQYF

SEQ ID NO: 48729 - protein, 13 aa, Homo sapiens
  CDR3 for alpha chain variable domain of TCR clone 24365 (TRAV12-3, TRAJ7)
CAMSASGNDRLAF

SEQ ID NO: 48730 - protein, 14 aa, Homo sapiens
  CDR3 for beta chain variable domain of TCR clone 24365 (TRBV13, TRBJ2-5)
CASSLGPRGETQYF

SEQ ID NO: 48731 - protein, 13 aa, Homo sapiens
  CDR3 for alpha chain variable domain of TCR clone 24366 (TRAV12-3, TRAJ56)
CALATGANSKLTF

SEQ ID NO: 48732 - protein, 12 aa, Homo sapiens
  CDR3 for beta chain variable domain of TCR clone 24366 (TRBV12-4, TRBJ1-3)
CASSFSGNTIYF

SEQ ID NO: 48733 - protein, 12 aa, Homo sapiens
  CDR3 for alpha chain variable domain of TCR clone 24367 (TRAV8-3, TRAJ20)
CAVGANDYKLSF

SEQ ID NO: 48734 - protein, 16 aa, Homo sapiens
  CDR3 for beta chain variable domain of TCR clone 24367 (TRBV19, TRBJ2-2)
CASRSPGTGVTGELFF

SEQ ID NO: 48735 - protein, 13 aa, Homo sapiens
  CDR3 for alpha chain variable domain of TCR clone 24368 (TRAV12-3, TRAJ7)
CAMSASGNNRLAF

SEQ ID NO: 48736 - protein, 14 aa, Homo sapiens
  CDR3 for beta chain variable domain of TCR clone 24368 (TRBV13, TRBJ2-5)
CASSLGPRGETQCF

SEQ ID NO: 48737 - protein, 16 aa, Homo sapiens
  CDR3 for alpha chain variable domain of TCR clone 24369 (TRAV8-4, TRAJ5)
CAVSPLTGTGRRALTF

SEQ ID NO: 48738 - protein, 14 aa, Homo sapiens
  CDR3 for beta chain variable domain of TCR clone 24369 (TRBV19, TRBJ1-6)
CASSTDGWNSPLHF

SEQ ID NO: 48739 - protein, 12 aa, Homo sapiens
  CDR3 for alpha chain variable domain of TCR clone 24370 (TRAV12-3, TRAJ17)
CAMTLTGNKLTF

SEQ ID NO: 48740 - protein, 15 aa, Homo sapiens
  CDR3 for beta chain variable domain of TCR clone 24370 (TRBV28, TRBJ2-7)
CASSPGGRGFYEQYF

SEQ ID NO: 48741 - protein, 12 aa, Homo sapiens
  CDR3 for alpha chain variable domain of TCR clone 24371 (TRAV16, TRAJ56)
CAPTGANSKLTF

SEQ ID NO: 48742 - protein, 17 aa, Homo sapiens
  CDR3 for beta chain variable domain of TCR clone 24371 (TRBV27, TRBJ2-6)
CASSLTGFASGPNVLTF

SEQ ID NO: 48743 - protein, 16 aa, Homo sapiens
  CDR3 for alpha chain variable domain of TCR clone 24372 (TRAV8-3, TRAJ10)
CAVGPILTGGGNKLTF

SEQ ID NO: 48744 - protein, 16 aa, Homo sapiens
  CDR3 for beta chain variable domain of TCR clone 24372 (TRBV7-2, TRBJ2-5)
CASSSKWLGGQETQYF

SEQ ID NO: 48745 - protein, 14 aa, Homo sapiens
  CDR3 for alpha chain variable domain of TCR clone 24373 (TRAV8-2, TRAJ4)
CVVRPSGGYNKLIF

SEQ ID NO: 48746 - protein, 15 aa, Homo sapiens
  CDR3 for beta chain variable domain of TCR clone 24373 (TRBV4-1, TRBJ1-4)
CASSDTGGTNEKLFF

SEQ ID NO: 48747 - protein, 16 aa, Homo sapiens
  CDR3 for alpha chain variable domain of TCR clone 24374 (TRAV14/DV4, TRAJ53)
CAMREGGGGSNYKLTF

SEQ ID NO: 48748 - protein, 15 aa, Homo sapiens
  CDR3 for beta chain variable domain of TCR clone 24374 (TRBV20-1, TRBJ2-2)
CSAIPGHSNTGELFF

SEQ ID NO: 48749 - protein, 13 aa, Homo sapiens
  CDR3 for alpha chain variable domain of TCR clone 24375 (TRAV20, TRAJ21)
CAVGGYNFNKFYF

SEQ ID NO: 48750 - protein, 14 aa, Homo sapiens
  CDR3 for beta chain variable domain of TCR clone 24375 (TRBV3-1, TRBJ2-5)
CASSQGPDQETQYF

SEQ ID NO: 48751 - protein, 19 aa, Homo sapiens
  CDR3 for alpha chain variable domain of TCR clone 24376 (TRAV3, TRAJ6)
RAVRDRNPSRSGGSYIPTF

SEQ ID NO: 48752 - protein, 15 aa, Homo sapiens
  CDR3 for beta chain variable domain of TCR clone 24376 (TRBV18, TRBJ2-7)
CASSPTFMDSYEQYF

SEQ ID NO: 48753 - protein, 16 aa, Homo sapiens
  CDR3 for alpha chain variable domain of TCR clone 24377 (TRAV17, TRAJ52)
CATSNAGGTSYGKLSF

SEQ ID NO: 48754 - protein, 13 aa, Homo sapiens
  CDR3 for beta chain variable domain of TCR clone 24377 (TRBV27, TRBJ1-6)
CASSLVLVSPLHF

SEQ ID NO: 48755 - protein, 13 aa, Homo sapiens
  CDR3 for alpha chain variable domain of TCR clone 24378 (TRAV27, TRAJ56)
CAGKPGADSKLTF

SEQ ID NO: 48756 - protein, 15 aa, Homo sapiens
  CDR3 for beta chain variable domain of TCR clone 24378 (TRBV6-1, TRBJ2-3)
CASSERWDSTDTQYF

SEQ ID NO: 48757 - protein, 12 aa, Homo sapiens
  CDR3 for alpha chain variable domain of TCR clone 24379 (TRAV1-1, TRAJ9)
CAVDTGGFKTIF

SEQ ID NO: 48758 - protein, 14 aa, Homo sapiens
  CDR3 for beta chain variable domain of TCR clone 24379 (TRBV7-8, TRBJ2-5)
CAGSATGGQETQYF

SEQ ID NO: 48759 - protein, 13 aa, Homo sapiens
  CDR3 for alpha chain variable domain of TCR clone 24380 (TRAV20, TRAJ37)
CAGCSSNTGKLIF

SEQ ID NO: 48760 - protein, 18 aa, Homo sapiens
  CDR3 for beta chain variable domain of TCR clone 24380 (TRBV11-2, TRBJ2-3)
CASSLGGASRGAPNTQYF

SEQ ID NO: 48761 - protein, 13 aa, Homo sapiens
  CDR3 for alpha chain variable domain of TCR clone 24381 (TRAV8-3, TRAJ36)
CAVGATGANNLFF

SEQ ID NO: 48762 - protein, 15 aa, Homo sapiens
  CDR3 for beta chain variable domain of TCR clone 24381 (TRBV7-2, TRBJ1-2)
CASSPRAGWNYGYTL

SEQ ID NO: 48763 - protein, 14 aa, Homo sapiens
  CDR3 for alpha chain variable domain of TCR clone 24382 (TRAV21, TRAJ35)
CAVMPIGFGNVLHC

SEQ ID NO: 48764 - protein, 12 aa, Homo sapiens
  CDR3 for beta chain variable domain of TCR clone 24382 (TRBV7-9, TRBJ2-7)
CASSIKREEQFF

SEQ ID NO: 48765 - protein, 12 aa, Homo sapiens
  CDR3 for alpha chain variable domain of TCR clone 24383 (TRAV21, TRAJ11)
CAATSGCSTLTF

SEQ ID NO: 48766 - protein, 14 aa, Homo sapiens
  CDR3 for beta chain variable domain of TCR clone 24383 (TRBV20-1, TRBJ2-7)
CSAPELAGVGEQYF

SEQ ID NO: 48767 - protein, 16 aa, Homo sapiens
  CDR3 for alpha chain variable domain of TCR clone 24384 (TRAV6, TRAJ11)
CALAPPPNSGYSTLTF

SEQ ID NO: 48768 - protein, 17 aa, Homo sapiens
  CDR3 for beta chain variable domain of TCR clone 24384 (TRBV6-5, TRBJ2-3)
CASSYTTSGQVGDTQYF

SEQ ID NO: 48769 - protein, 16 aa, Homo sapiens
  CDR3 for alpha chain variable domain of TCR clone 24385 (TRAV30, TRAJ24)
CGTEIVDADSWGKFQF

SEQ ID NO: 48770 - protein, 13 aa, Homo sapiens
  CDR3 for beta chain variable domain of TCR clone 24385 (TRBV27, TRBJ1-1)
CASSLSIGAEAFF

SEQ ID NO: 48771 - protein, 14 aa, Homo sapiens
  CDR3 for alpha chain variable domain of TCR clone 24386 (TRAV38-1, TRAJ29)
CAFITPSGNTPLVF

SEQ ID NO: 48772 - protein, 14 aa, Homo sapiens
  CDR3 for beta chain variable domain of TCR clone 24386 (TRBV18, TRBJ2-7)
CASSPRGGAHEQYF

SEQ ID NO: 48773 - protein, 11 aa, Homo sapiens
  CDR3 for alpha chain variable domain of TCR clone 24387 (TRAV4, TRAJ31)
CLVGLNARLMF

SEQ ID NO: 48774 - protein, 16 aa, Homo sapiens
  CDR3 for beta chain variable domain of TCR clone 24387 (TRBV15, TRBJ2-6)
CATSVNGGFLANDLTF

SEQ ID NO: 48775 - protein, 12 aa, Homo sapiens
  CDR3 for alpha chain variable domain of TCR clone 24388 (TRAV13-2, TRAJ23)
CAERHRGGKLIF

SEQ ID NO: 48776 - protein, 13 aa, Homo sapiens
  CDR3 for beta chain variable domain of TCR clone 24388 (TRBV7-3, TRBJ2-5)
CASSFRGGETQYF

SEQ ID NO: 48777 - protein, 13 aa, Homo sapiens
  CDR3 for alpha chain variable domain of TCR clone 24389 (TRAV1-2, TRAJ9)
SAALNTGGFKTIF

SEQ ID NO: 48778 - protein, 13 aa, Homo sapiens
  CDR3 for beta chain variable domain of TCR clone 24389 (TRBV19, TRBJ1-2)
CASSVPGQDGYTF

SEQ ID NO: 48779 - protein, 11 aa, Homo sapiens
  CDR3 for alpha chain variable domain of TCR clone 24390 (TRAV17, TRAJ43)
CATPRSNDMRF

SEQ ID NO: 48780 - protein, 14 aa, Homo sapiens
  CDR3 for beta chain variable domain of TCR clone 24390 (TRBV6-3, TRBJ2-7)
CASGGGLPASEQYF

SEQ ID NO: 48781 - protein, 10 aa, Homo sapiens
  CDR3 for alpha chain variable domain of TCR clone 24391 (TRAV12-1, TRAJ37)
ARGNTGKLIF

SEQ ID NO: 48782 - protein, 15 aa, Homo sapiens
  CDR3 for beta chain variable domain of TCR clone 24391 (TRBV7-2, TRBJ2-3)
CASSLEQGGADTQYF

SEQ ID NO: 48783 - protein, 13 aa, Homo sapiens
  CDR3 for alpha chain variable domain of TCR clone 24392 (TRAV13-1, TRAJ6)
CAASSGGSYIPTF

SEQ ID NO: 48784 - protein, 14 aa, Homo sapiens
  CDR3 for beta chain variable domain of TCR clone 24392 (TRBV20-1, TRBJ2-4)
CSAVAGGPGNMQYF

SEQ ID NO: 48785 - protein, 11 aa, Homo sapiens
  CDR3 for alpha chain variable domain of TCR clone 24393 (TRAV1-1, TRAJ23)
CAVRQGGKLIF

SEQ ID NO: 48786 - protein, 13 aa, Homo sapiens
  CDR3 for beta chain variable domain of TCR clone 24393 (TRBV20-1, TRBJ2-5)
CSAREAFQETQYF

SEQ ID NO: 48787 - protein, 23 aa, Homo sapiens
  CDR3 for alpha chain variable domain of TCR clone 24394 (TRAV12-2, TRAJ36)
SLLIRDSQPSDSATLERANNLFF

SEQ ID NO: 48788 - protein, 14 aa, Homo sapiens
  CDR3 for beta chain variable domain of TCR clone 24394 (TRBV19, TRBJ2-1)
CASPTFVLSGEQFF

SEQ ID NO: 48789 - protein, 17 aa, Homo sapiens
  CDR3 for alpha chain variable domain of TCR clone 24395 (TRAV26-1, TRAJ53)
CIVRVDDSGGSNYKLTF

SEQ ID NO: 48790 - protein, 12 aa, Homo sapiens
  CDR3 for beta chain variable domain of TCR clone 24395 (TRBV12-4, TRBJ2-7)
YASSLGGYEQYF

SEQ ID NO: 48791 - protein, 12 aa, Homo sapiens
  CDR3 for alpha chain variable domain of TCR clone 24396 (TRAV17, TRAJ39)
CATGAAGNMLTF

SEQ ID NO: 48792 - protein, 14 aa, Homo sapiens
  CDR3 for beta chain variable domain of TCR clone 24396 (TRBV7-9, TRBJ1-2)
CVSSRQGANYGYTF

SEQ ID NO: 48793 - protein, 14 aa, Homo sapiens
  CDR3 for alpha chain variable domain of TCR clone 24397 (TRAV38-1, TRAJ45)
CAYYSGGGADGLTF

SEQ ID NO: 48794 - protein, 14 aa, Homo sapiens
  CDR3 for beta chain variable domain of TCR clone 24397 (TRBV19, TRBJ2-1)
CASPTFVLSGEQFF

SEQ ID NO: 48795 - protein, 15 aa, Homo sapiens
  CDR3 for alpha chain variable domain of TCR clone 24398 (TRAV3, TRAJ22)
CAVRDRGSSARQLTF

SEQ ID NO: 48796 - protein, 16 aa, Homo sapiens
  CDR3 for beta chain variable domain of TCR clone 24398 (TRBV5-4, TRBJ2-3)
CASQQPGAGGADTQYF

SEQ ID NO: 48797 - protein, 14 aa, Homo sapiens
  CDR3 for alpha chain variable domain of TCR clone 24399 (TRAV38-1, TRAJ40)
CALRPTSGTYKYIF

SEQ ID NO: 48798 - protein, 14 aa, Homo sapiens
  CDR3 for beta chain variable domain of TCR clone 24399 (TRBV25-1, TRBJ1-1)
YASTHLGGNTEAFF

SEQ ID NO: 48799 - protein, 16 aa, Homo sapiens
  CDR3 for alpha chain variable domain of TCR clone 24400 (TRAV30, TRAJ24)
CGTEIVDADSWGKFQF

SEQ ID NO: 48800 - protein, 18 aa, Homo sapiens
  CDR3 for beta chain variable domain of TCR clone 24400 (TRBV12-5, TRBJ2-5)
CASGSRTHQETVLRARHA

SEQ ID NO: 48801 - protein, 14 aa, Homo sapiens
  CDR3 for alpha chain variable domain of TCR clone 24401 (TRAV21, TRAJ35)
CAVMPIGFGNVLHC

SEQ ID NO: 48802 - protein, 12 aa, Homo sapiens
  CDR3 for beta chain variable domain of TCR clone 24401 (TRBV7-9, TRBJ2-7)
CASSIKREERYF

SEQ ID NO: 48803 - protein, 16 aa, Homo sapiens
  CDR3 for alpha chain variable domain of TCR clone 24402 (TRAV26-1, TRAJ37)
CIARGDGSGNTGKLIF

SEQ ID NO: 48804 - protein, 17 aa, Homo sapiens
  CDR3 for beta chain variable domain of TCR clone 24402 (TRBV4-1, TRBJ2-7)
CASSRDPLGVRGGEQYF

SEQ ID NO: 48805 - protein, 14 aa, Homo sapiens
  CDR3 for alpha chain variable domain of TCR clone 24403 (TRAV26-1, TRAJ34)
CIVGVAYNTDKLIF

SEQ ID NO: 48806 - protein, 15 aa, Homo sapiens
  CDR3 for beta chain variable domain of TCR clone 24403 (TRBV20-1, TRBJ2-7)
CSARVPAAYFYEQYF

SEQ ID NO: 48807 - protein, 12 aa, Homo sapiens
  CDR3 for alpha chain variable domain of TCR clone 24404 (TRAV13-1, TRAJ15)
CAASQAGTALIF

SEQ ID NO: 48808 - protein, 18 aa, Homo sapiens
  CDR3 for beta chain variable domain of TCR clone 24404 (TRBV7-9, TRBJ2-3)
CASSLPSNGQISTDTQYF

SEQ ID NO: 48809 - protein, 11 aa, Homo sapiens
  CDR3 for alpha chain variable domain of TCR clone 24405 (TRAV2, TRAJ13)
CASGGYQKVTF

SEQ ID NO: 48810 - protein, 16 aa, Homo sapiens
  CDR3 for beta chain variable domain of TCR clone 24405 (TRBV2, TRBJ2-1)
CASSVGGSLSYNGQFF

SEQ ID NO: 48811 - protein, 15 aa, Homo sapiens
  CDR3 for alpha chain variable domain of TCR clone 24406 (TRAV12-1, TRAJ42)
CVVTRDGGSQGNLIF

SEQ ID NO: 48812 - protein, 14 aa, Homo sapiens
  CDR3 for beta chain variable domain of TCR clone 24406 (TRBV11-2, TRBJ2-3)
CASSLGGGANTQYS

SEQ ID NO: 48813 - protein, 17 aa, Homo sapiens
  CDR3 for alpha chain variable domain of TCR clone 24407 (TRAV3, TRAJ6)
CAVRDGPRAGGSYIPTF

SEQ ID NO: 48814 - protein, 14 aa, Homo sapiens
  CDR3 for beta chain variable domain of TCR clone 24407 (TRBV2, TRBJ2-7)
CASSLTSGGYEQYF

SEQ ID NO: 48815 - protein, 14 aa, Homo sapiens
  CDR3 for alpha chain variable domain of TCR clone 24408 (TRAV1-2, TRAJ16)
CAVNRFSDGQKLLF

SEQ ID NO: 48816 - protein, 15 aa, Homo sapiens
  CDR3 for beta chain variable domain of TCR clone 24408 (TRBV9, TRBJ1-6)
CASSVAGTWDSPLHF

SEQ ID NO: 48817 - protein, 15 aa, Homo sapiens
  CDR3 for alpha chain variable domain of TCR clone 24409 (TRAV17, TRAJ54)
CATTRSEQGAQKLVF

SEQ ID NO: 48818 - protein, 16 aa, Homo sapiens
  CDR3 for beta chain variable domain of TCR clone 24409 (TRBV12-4, TRBJ2-3)
CASSWRLAETTDTQYF

SEQ ID NO: 48819 - protein, 15 aa, Homo sapiens
  CDR3 for alpha chain variable domain of TCR clone 24410 (TRAV3, TRAJ3)
CAVRDRDSSASKIIF

SEQ ID NO: 48820 - protein, 16 aa, Homo sapiens
  CDR3 for beta chain variable domain of TCR clone 24410 (TRBV19, TRBJ2-1)
CASSKAGPSSYNEQFF

SEQ ID NO: 48821 - protein, 14 aa, Homo sapiens
  CDR3 for alpha chain variable domain of TCR clone 24411 (TRAV16, TRAJ31)
CALSGRNNNARLMF

SEQ ID NO: 48822 - protein, 16 aa, Homo sapiens
  CDR3 for beta chain variable domain of TCR clone 24411 (TRBV13, TRBJ2-2)
CASSPRTGEHTGELFF

SEQ ID NO: 48823 - protein, 13 aa, Homo sapiens
  CDR3 for alpha chain variable domain of TCR clone 24412 (TRAV12-1, TRAJ16)
CVVNGPDGQKLLF

SEQ ID NO: 48824 - protein, 13 aa, Homo sapiens
  CDR3 for beta chain variable domain of TCR clone 24412 (TRBV2, TRBJ1-1)
CARNPTGGFHAFL

SEQ ID NO: 48825 - protein, 14 aa, Homo sapiens
  CDR3 for alpha chain variable domain of TCR clone 24413 (TRAV13-1, TRAJ28)
CAASKGAGSYQLTF

SEQ ID NO: 48826 - protein, 16 aa, Homo sapiens
  CDR3 for beta chain variable domain of TCR clone 24413 (TRBV4-2, TRBJ2-3)
CASSQDGARGGGEAVF

SEQ ID NO: 48827 - protein, 11 aa, Homo sapiens
  CDR3 for alpha chain variable domain of TCR clone 24414 (TRAV2, TRAJ33)
CAVDSNYQLTW

SEQ ID NO: 48828 - protein, 15 aa, Homo sapiens
  CDR3 for beta chain variable domain of TCR clone 24414 (TRBV19, TRBJ1-2)
CASSVGQVLNYGYTF

SEQ ID NO: 48829 - protein, 14 aa, Homo sapiens
  CDR3 for alpha chain variable domain of TCR clone 24415 (TRAV12-2, TRAJ5)
CAVNRSTGRRALTF

SEQ ID NO: 48830 - protein, 12 aa, Homo sapiens
  CDR3 for beta chain variable domain of TCR clone 24415 (TRBV19, TRBJ1-5)
CASSIAQPPQHF

SEQ ID NO: 48831 - protein, 16 aa, Homo sapiens
  CDR3 for alpha chain variable domain of TCR clone 24416 (TRAV12-3, TRAJ53)
CAMSPGSGGSNYKLTF

SEQ ID NO: 48832 - protein, 13 aa, Homo sapiens
  CDR3 for beta chain variable domain of TCR clone 24416 (TRBV3-1, TRBJ1-1)
CASSPGVITEAFF

SEQ ID NO: 48833 - protein, 14 aa, Homo sapiens
  CDR3 for alpha chain variable domain of TCR clone 24417 (TRAV16, TRAJ39)
CALSKNNAGNTLTF

SEQ ID NO: 48834 - protein, 16 aa, Homo sapiens
  CDR3 for beta chain variable domain of TCR clone 24417 (TRBV6-6, TRBJ2-1)
CASSYSFSGSYNEQFF

SEQ ID NO: 48835 - protein, 12 aa, Homo sapiens
  CDR3 for alpha chain variable domain of TCR clone 24418 (TRAV12-3, TRAJ17)
CAMTLTGNRLTF

SEQ ID NO: 48836 - protein, 15 aa, Homo sapiens
  CDR3 for beta chain variable domain of TCR clone 24418 (TRBV5-1, TRBJ2-3)
CASSVTSGSTDTQYF

SEQ ID NO: 48837 - protein, 13 aa, Homo sapiens
  CDR3 for alpha chain variable domain of TCR clone 24419 (TRAV20, TRAJ34)
CTVSSYNTDKLIF

SEQ ID NO: 48838 - protein, 13 aa, Homo sapiens
  CDR3 for beta chain variable domain of TCR clone 24419 (TRBV7-9, TRBJ1-2)
CASSLKQNYGYTF

SEQ ID NO: 48839 - protein, 15 aa, Homo sapiens
  CDR3 for alpha chain variable domain of TCR clone 24420 (TRAV35, TRAJ40)
CAGQLGTSGTYEYIF

SEQ ID NO: 48840 - protein, 14 aa, Homo sapiens
  CDR3 for beta chain variable domain of TCR clone 24420 (TRBV7-3, TRBJ2-1)
CASSLAGGTNEQFF

SEQ ID NO: 48841 - protein, 13 aa, Homo sapiens
  CDR3 for alpha chain variable domain of TCR clone 24421 (TRAV22, TRAJ29)
CAVGGSGDTPLVF

SEQ ID NO: 48842 - protein, 13 aa, Homo sapiens
  CDR3 for beta chain variable domain of TCR clone 24421 (TRBV4-2, TRBJ1-1)
CASSQAGNTEAFF

SEQ ID NO: 48843 - protein, 12 aa, Homo sapiens
  CDR3 for alpha chain variable domain of TCR clone 24422 (TRAV2, TRAJ31)
CAVEDNNARLML

SEQ ID NO: 48844 - protein, 16 aa, Homo sapiens
  CDR3 for beta chain variable domain of TCR clone 24422 (TRBV10-3, TRBJ2-1)
CAISGVGDGGGGEQFF

SEQ ID NO: 48845 - protein, 16 aa, Homo sapiens
  CDR3 for alpha chain variable domain of TCR clone 24423 (TRAV30, TRAJ24)
CGTEIVDADSWGKFQF

SEQ ID NO: 48846 - protein, 14 aa, Homo sapiens
  CDR3 for beta chain variable domain of TCR clone 24423 (TRBV5-4, TRBJ1-1)
CASSLDSRRDEAFF

SEQ ID NO: 48847 - protein, 13 aa, Homo sapiens
  CDR3 for alpha chain variable domain of TCR clone 24424 (TRAV8-3, TRAJ36)
CAVGATGANNLFI

SEQ ID NO: 48848 - protein, 15 aa, Homo sapiens
  CDR3 for beta chain variable domain of TCR clone 24424 (TRBV7-2, TRBJ1-2)
CASSPRAGWNYGYTF

SEQ ID NO: 48849 - protein, 14 aa, Homo sapiens
  CDR3 for alpha chain variable domain of TCR clone 24425 (TRAV12-1, TRAJ17)
CVVNYKAAGNKLTL

SEQ ID NO: 48850 - protein, 13 aa, Homo sapiens
  CDR3 for beta chain variable domain of TCR clone 24425 (TRBV19, TRBJ2-7)
CASRKAGGSEQYF

SEQ ID NO: 48851 - protein, 14 aa, Homo sapiens
  CDR3 for alpha chain variable domain of TCR clone 24426 (TRAV17, TRAJ31)
CATVLRNNNARLMF

SEQ ID NO: 48852 - protein, 13 aa, Homo sapiens
  CDR3 for beta chain variable domain of TCR clone 24426 (TRBV27, TRBJ1-1)
CASSLSIGAEAFF

SEQ ID NO: 48853 - protein, 15 aa, Homo sapiens
  CDR3 for alpha chain variable domain of TCR clone 24427 (TRAV17, TRAJ57)
CATGPSQGGSEKLVV

SEQ ID NO: 48854 - protein, 14 aa, Homo sapiens
  CDR3 for beta chain variable domain of TCR clone 24427 (TRBV12-5, TRBJ2-5)
CASGSRTHQETQYF

SEQ ID NO: 48855 - protein, 13 aa, Homo sapiens
  CDR3 for alpha chain variable domain of TCR clone 24428 (TRAV3, TRAJ36)
CAVRDAGANNLFF

SEQ ID NO: 48856 - protein, 15 aa, Homo sapiens
  CDR3 for beta chain variable domain of TCR clone 24428 (TRBV24-1, TRBJ2-1)
CATSGSGGFYNEQFF

SEQ ID NO: 48857 - protein, 12 aa, Homo sapiens
  CDR3 for alpha chain variable domain of TCR clone 24429 (TRAV21, TRAJ33)
CAKMDSNYQLFW

SEQ ID NO: 48858 - protein, 14 aa, Homo sapiens
  CDR3 for beta chain variable domain of TCR clone 24429 (TRBV2, TRBJ2-7)
CASSLTSGGYEQYF

SEQ ID NO: 48859 - protein, 18 aa, Homo sapiens
  CDR3 for alpha chain variable domain of TCR clone 24430 (TRAV13-1, TRAJ52)
CAASKRSAGGTSYGKLTC

SEQ ID NO: 48860 - protein, 13 aa, Homo sapiens
  CDR3 for beta chain variable domain of TCR clone 24430 (TRBV12-4, TRBJ1-2)
CASSLRQGKGYTF

SEQ ID NO: 48861 - protein, 12 aa, Homo sapiens
  CDR3 for alpha chain variable domain of TCR clone 24431 (TRAV12-3, TRAJ17)
CAMTLTGNKLTF

SEQ ID NO: 48862 - protein, 15 aa, Homo sapiens
  CDR3 for beta chain variable domain of TCR clone 24431 (TRBV6-1, TRBJ2-3)
CASSERGGITDTQYF

SEQ ID NO: 48863 - protein, 14 aa, Homo sapiens
  CDR3 for alpha chain variable domain of TCR clone 24432 (TRAV27, TRAJ23)
CAGLSYNQGGKLIF

SEQ ID NO: 48864 - protein, 14 aa, Homo sapiens
  CDR3 for beta chain variable domain of TCR clone 24432 (TRBV19, TRBJ2-1)
CARGARSFQWEQFF

SEQ ID NO: 48865 - protein, 15 aa, Homo sapiens
  CDR3 for alpha chain variable domain of TCR clone 24433 (TRAV21, TRAJ32)
CAVNSYGGATNKLVF

SEQ ID NO: 48866 - protein, 18 aa, Homo sapiens
  CDR3 for beta chain variable domain of TCR clone 24433 (TRBV7-9, TRBJ2-1)
CASSTGLAEGSSYNEQFF

SEQ ID NO: 48867 - protein, 13 aa, Homo sapiens
  CDR3 for alpha chain variable domain of TCR clone 24434 (TRAV12-1, TRAJ16)
CVVNGPDGQKLLF

SEQ ID NO: 48868 - protein, 13 aa, Homo sapiens
  CDR3 for beta chain variable domain of TCR clone 24434 (TRBV2, TRBJ1-1)
RARNPTGGFHAFF

SEQ ID NO: 48869 - protein, 11 aa, Homo sapiens
  CDR3 for alpha chain variable domain of TCR clone 24435 (TRAV9-2, TRAJ7)
CALSGNNRLAF

SEQ ID NO: 48870 - protein, 15 aa, Homo sapiens
  CDR3 for beta chain variable domain of TCR clone 24435 (TRBV20-1, TRBJ1-5)
CSARVGRVVSQPQHF

SEQ ID NO: 48871 - protein, 15 aa, Homo sapiens
  CDR3 for alpha chain variable domain of TCR clone 24436 (TRAV34, TRAJ38)
CGADFTPGNNRKLIW

SEQ ID NO: 48872 - protein, 16 aa, Homo sapiens
  CDR3 for beta chain variable domain of TCR clone 24436 (TRBV12-5, TRBJ2-5)
CASGPRTSGDQETQYF

SEQ ID NO: 48873 - protein, 11 aa, Homo sapiens
  CDR3 for alpha chain variable domain of TCR clone 24437 (TRAV1-1, TRAJ23)
CAVRQGGKLIF

SEQ ID NO: 48874 - protein, 17 aa, Homo sapiens
  CDR3 for beta chain variable domain of TCR clone 24437 (TRBV7-3, TRBJ2-3)
CASSLMKRMRGADTQYF

SEQ ID NO: 48875 - protein, 11 aa, Homo sapiens
  CDR3 for alpha chain variable domain of TCR clone 24438 (TRAV1-2, TRAJ40)
CAVPGTYKYIF

SEQ ID NO: 48876 - protein, 16 aa, Homo sapiens
  CDR3 for beta chain variable domain of TCR clone 24438 (TRBV29-1, TRBJ2-7)
CSAEVVGTSGSYEQYF

SEQ ID NO: 48877 - protein, 11 aa, Homo sapiens
  CDR3 for alpha chain variable domain of TCR clone 24439 (TRAV1-1, TRAJ23)
CAVRQGGKLNF

SEQ ID NO: 48878 - protein, 20 aa, Homo sapiens
  CDR3 for beta chain variable domain of TCR clone 24439 (TRBV7-8, TRBJ2-2)
CASSHLFPGPTIHITGELFF

SEQ ID NO: 48879 - protein, 14 aa, Homo sapiens
  CDR3 for alpha chain variable domain of TCR clone 24440 (TRAV1-1, TRAJ27)
CAVIYNANAGKSTF

SEQ ID NO: 48880 - protein, 15 aa, Homo sapiens
  CDR3 for beta chain variable domain of TCR clone 24440 (TRBV7-2, TRBJ2-1)
CASSSGLAGGNEQFF

SEQ ID NO: 48881 - protein, 15 aa, Homo sapiens
  CDR3 for alpha chain variable domain of TCR clone 24441 (TRAV34, TRAJ38)
CGADFTPGNNRKPIW

SEQ ID NO: 48882 - protein, 16 aa, Homo sapiens
  CDR3 for beta chain variable domain of TCR clone 24441 (TRBV12-5, TRBJ2-5)
CASGPRTSGNQETQYF

SEQ ID NO: 48883 - protein, 13 aa, Homo sapiens
  CDR3 for alpha chain variable domain of TCR clone 24442 (TRAV2, TRAJ40)
CAVVTSGTYKYIY

SEQ ID NO: 48884 - protein, 14 aa, Homo sapiens
  CDR3 for beta chain variable domain of TCR clone 24442 (TRBV19, TRBJ2-1)
CASPTFVLSGEQFF

SEQ ID NO: 48885 - protein, 13 aa, Homo sapiens
  CDR3 for alpha chain variable domain of TCR clone 24443 (TRAV12-2, TRAJ39)
CAVNNNAGSMLTF

SEQ ID NO: 48886 - protein, 13 aa, Homo sapiens
  CDR3 for beta chain variable domain of TCR clone 24443 (TRBV2, TRBJ1-5)
CATAGPGNQPQHF

SEQ ID NO: 48887 - protein, 14 aa, Homo sapiens
  CDR3 for alpha chain variable domain of TCR clone 24444 (TRAV13-1, TRAJ44)
CAAKATGTASKLTF

SEQ ID NO: 48888 - protein, 17 aa, Homo sapiens
  CDR3 for beta chain variable domain of TCR clone 24444 (TRBV7-8, TRBJ2-6)
CASSAGTGGAGANVLTF

SEQ ID NO: 48889 - protein, 11 aa, Homo sapiens
  CDR3 for alpha chain variable domain of TCR clone 24445 (TRAV1-2, TRAJ20)
CAVANDYKLSF

SEQ ID NO: 48890 - protein, 18 aa, Homo sapiens
  CDR3 for beta chain variable domain of TCR clone 24445 (TRBV20-1, TRBJ2-6)
CSAETTPTHGPGANVLTF

SEQ ID NO: 48891 - protein, 13 aa, Homo sapiens
  CDR3 for alpha chain variable domain of TCR clone 24446 (TRAV27, TRAJ41)
CAGEGNSGYALNF

SEQ ID NO: 48892 - protein, 14 aa, Homo sapiens
  CDR3 for beta chain variable domain of TCR clone 24446 (TRBV7-2, TRBJ1-1)
CASSVLTGTTEAFF

SEQ ID NO: 48893 - protein, 14 aa, Homo sapiens
  CDR3 for alpha chain variable domain of TCR clone 24447 (TRAV1-2, TRAJ8)
CAVREDTGFQKLVF

SEQ ID NO: 48894 - protein, 13 aa, Homo sapiens
  CDR3 for beta chain variable domain of TCR clone 24447 (TRBV29-1, TRBJ2-1)
CSVEGGRVNEQFF

SEQ ID NO: 48895 - protein, 14 aa, Homo sapiens
  CDR3 for alpha chain variable domain of TCR clone 24448 (TRAV35, TRAJ13)
CAGSPSGGYRKVTF

SEQ ID NO: 48896 - protein, 13 aa, Homo sapiens
  CDR3 for beta chain variable domain of TCR clone 24448 (TRBV29-1, TRBJ1-1)
CSVGDSRNTEAFF

SEQ ID NO: 48897 - protein, 13 aa, Homo sapiens
  CDR3 for alpha chain variable domain of TCR clone 24449 (TRAV2, TRAJ40)
FAVVTSGTYKYIF

SEQ ID NO: 48898 - protein, 15 aa, Homo sapiens
  CDR3 for beta chain variable domain of TCR clone 24449 (TRBV11-3, TRBJ2-3)
CASLKDGREGDTQYF

SEQ ID NO: 48899 - protein, 14 aa, Homo sapiens
  CDR3 for alpha chain variable domain of TCR clone 24450 (TRAV12-2, TRAJ40)
CAVKIPSGTYKYIF

SEQ ID NO: 48900 - protein, 14 aa, Homo sapiens
  CDR3 for beta chain variable domain of TCR clone 24450 (TRBV20-1, TRBJ1-1)
CSTQTRIGGTEAFF

SEQ ID NO: 48901 - protein, 14 aa, Homo sapiens
  CDR3 for alpha chain variable domain of TCR clone 24451 (TRAV12-2, TRAJ13)
CAVKKTGGYQKVTF

SEQ ID NO: 48902 - protein, 17 aa, Homo sapiens
  CDR3 for beta chain variable domain of TCR clone 24451 (TRBV5-1, TRBJ2-5)
CASSLLGLAANQETQYF

SEQ ID NO: 48903 - protein, 14 aa, Homo sapiens
  CDR3 for alpha chain variable domain of TCR clone 24452 (TRAV1-2, TRAJ16)
CAVNRFSDGQKLLF

SEQ ID NO: 48904 - protein, 15 aa, Homo sapiens
  CDR3 for beta chain variable domain of TCR clone 24452 (TRBV7-9, TRBJ1-6)
CASSSPGLGNSPLHF

SEQ ID NO: 48905 - protein, 14 aa, Homo sapiens
  CDR3 for alpha chain variable domain of TCR clone 24453 (TRAV9-2, TRAJ39)
CALYIYNAGNMLTF

SEQ ID NO: 48906 - protein, 15 aa, Homo sapiens
  CDR3 for beta chain variable domain of TCR clone 24453 (TRBV19, TRBJ1-2)
CASSVGQVLNYGYTF

SEQ ID NO: 48907 - protein, 15 aa, Homo sapiens
  CDR3 for alpha chain variable domain of TCR clone 24454 (TRAV3, TRAJ22)
CAVRDRGGSARQLTF

SEQ ID NO: 48908 - protein, 16 aa, Homo sapiens
  CDR3 for beta chain variable domain of TCR clone 24454 (TRBV5-4, TRBJ2-3)
CASRQPGAGGADTQYF

SEQ ID NO: 48909 - protein, 14 aa, Homo sapiens
  CDR3 for alpha chain variable domain of TCR clone 24455 (TRAV17, TRAJ23)
CATASYNQGGKLIF

SEQ ID NO: 48910 - protein, 16 aa, Homo sapiens
  CDR3 for beta chain variable domain of TCR clone 24455 (TRBV12-4, TRBJ1-5)
CASSRPVGGSNRPQHF

SEQ ID NO: 48911 - protein, 18 aa, Homo sapiens
  CDR3 for alpha chain variable domain of TCR clone 24456 (TRAV21, TRAJ52)
CAVRPSPAGGTSYGKVTF

SEQ ID NO: 48912 - protein, 17 aa, Homo sapiens
  CDR3 for beta chain variable domain of TCR clone 24456 (TRBV13, TRBJ2-3)
CASSLSRVAGGRNTQYF

SEQ ID NO: 48913 - protein, 17 aa, Homo sapiens
  CDR3 for alpha chain variable domain of TCR clone 24457 (TRAV12-3, TRAJ6)
CAVSARGGAGGSYIPTF

SEQ ID NO: 48914 - protein, 12 aa, Homo sapiens
  CDR3 for beta chain variable domain of TCR clone 24457 (TRBV12-4, TRBJ2-3)
CASSTLPDTQYF

SEQ ID NO: 48915 - protein, 10 aa, Homo sapiens
  CDR3 for alpha chain variable domain of TCR clone 24458 (TRAV23/DV6, TRAJ57)
CAASSTLSQG

SEQ ID NO: 48916 - protein, 14 aa, Homo sapiens
  CDR3 for beta chain variable domain of TCR clone 24458 (TRBV25-1, TRBJ1-1)
CASTHLGGKTEAFF

SEQ ID NO: 48917 - protein, 12 aa, Homo sapiens
  CDR3 for alpha chain variable domain of TCR clone 24459 (TRAV8-6, TRAJ57)
CAVQGGSEKLVF

SEQ ID NO: 48918 - protein, 16 aa, Homo sapiens
  CDR3 for beta chain variable domain of TCR clone 24459 (TRBV5-1, TRBJ2-3)
CASSLTSGTSGGTQYF

SEQ ID NO: 48919 - protein, 14 aa, Homo sapiens
  CDR3 for alpha chain variable domain of TCR clone 24460 (TRAV13-1, TRAJ35)
CAASKGGFGNVLHC

SEQ ID NO: 48920 - protein, 15 aa, Homo sapiens
  CDR3 for beta chain variable domain of TCR clone 24460 (TRBV20-1, TRBJ2-2)
CSARDTRLNTGELFF

SEQ ID NO: 48921 - protein, 13 aa, Homo sapiens
  CDR3 for alpha chain variable domain of TCR clone 24461 (TRAV13-1, TRAJ39)
CSKYSNAGNMLTF

SEQ ID NO: 48922 - protein, 15 aa, Homo sapiens
  CDR3 for beta chain variable domain of TCR clone 24461 (TRBV7-9, TRBJ1-4)
CASSRTGGFNEKLFF

SEQ ID NO: 48923 - protein, 16 aa, Homo sapiens
  CDR3 for alpha chain variable domain of TCR clone 24462 (TRAV1-2, TRAJ10)
CAVRGVLMGGGNKLTF

SEQ ID NO: 48924 - protein, 12 aa, Homo sapiens
  CDR3 for beta chain variable domain of TCR clone 24462 (TRBV7-8, TRBJ2-7)
CASSLGDREQYF

SEQ ID NO: 48925 - protein, 14 aa, Homo sapiens
  CDR3 for alpha chain variable domain of TCR clone 24463 (TRAV20, TRAJ56)
CDVQFGGANSKLTF

SEQ ID NO: 48926 - protein, 14 aa, Homo sapiens
  CDR3 for beta chain variable domain of TCR clone 24463 (TRBV20-1, TRBJ2-7)
CSAKRGRSSYEQYF

SEQ ID NO: 48927 - protein, 10 aa, Homo sapiens
  CDR3 for alpha chain variable domain of TCR clone 24464 (TRAV1-2, TRAJ31)
CASEDARLMF

SEQ ID NO: 48928 - protein, 14 aa, Homo sapiens
  CDR3 for beta chain variable domain of TCR clone 24464 (TRBV19, TRBJ2-1)
CASPTFVLSGEQFF

SEQ ID NO: 48929 - protein, 12 aa, Homo sapiens
  CDR3 for alpha chain variable domain of TCR clone 24465 (TRAV21, TRAJ23)
CAVGPQGGKLTF

SEQ ID NO: 48930 - protein, 13 aa, Homo sapiens
  CDR3 for beta chain variable domain of TCR clone 24465 (TRBV20-1, TRBJ2-7)
CSARTGAGYEQYF

SEQ ID NO: 48931 - protein, 11 aa, Homo sapiens
  CDR3 for alpha chain variable domain of TCR clone 24466 (TRAV3, TRAJ21)
CAVGNFNKFYF

SEQ ID NO: 48932 - protein, 16 aa, Homo sapiens
  CDR3 for beta chain variable domain of TCR clone 24466 (TRBV7-3, TRBJ2-1)
CASSLEGYRSYNEQFF

SEQ ID NO: 48933 - protein, 13 aa, Homo sapiens
  CDR3 for alpha chain variable domain of TCR clone 24467 (TRAV21, TRAJ57)
CAVTQGGSEKLVF

SEQ ID NO: 48934 - protein, 16 aa, Homo sapiens
  CDR3 for beta chain variable domain of TCR clone 24467 (TRBV29-1, TRBJ2-7)
CSVEDAEDGKAYEQYF

SEQ ID NO: 48935 - protein, 15 aa, Homo sapiens
  CDR3 for alpha chain variable domain of TCR clone 24468 (TRAV26-1, TRAJ44)
CIVRANTGTASKLNF

SEQ ID NO: 48936 - protein, 16 aa, Homo sapiens
  CDR3 for beta chain variable domain of TCR clone 24468 (TRBV7-7, TRBJ2-1)
CASSLASGTSYNEQFF

SEQ ID NO: 48937 - protein, 18 aa, Homo sapiens
  CDR3 for alpha chain variable domain of TCR clone 24469 (TRAV13-1, TRAJ52)
CAAKKPNAGGTSYGKLTF

SEQ ID NO: 48938 - protein, 15 aa, Homo sapiens
  CDR3 for beta chain variable domain of TCR clone 24469 (TRBV6-1, TRBJ2-3)
CASSERGGITDTQYF

SEQ ID NO: 48939 - protein, 14 aa, Homo sapiens
  CDR3 for alpha chain variable domain of TCR clone 24470 (TRAV13-1, TRAJ44)
CAAKATGTASKLTF

SEQ ID NO: 48940 - protein, 13 aa, Homo sapiens
  CDR3 for beta chain variable domain of TCR clone 24470 (TRBV10-3, TRBJ2-7)
CASKLAVNYEQYF

SEQ ID NO: 48941 - protein, 18 aa, Homo sapiens
  CDR3 for alpha chain variable domain of TCR clone 24471 (TRAV12-3, TRAJ52)
CAMSVGGAGGTSYGNLTF

SEQ ID NO: 48942 - protein, 15 aa, Homo sapiens
  CDR3 for beta chain variable domain of TCR clone 24471 (TRBV27, TRBJ1-6)
CASSFDRGLGSPLHF

SEQ ID NO: 48943 - protein, 16 aa, Homo sapiens
  CDR3 for alpha chain variable domain of TCR clone 24472 (TRAV3, TRAJ18)
CAVRDGRGPTLGRLYF

SEQ ID NO: 48944 - protein, 15 aa, Homo sapiens
  CDR3 for beta chain variable domain of TCR clone 24472 (TRBV7-9, TRBJ1-6)
CASSSPGRGNSPLHF

SEQ ID NO: 48945 - protein, 12 aa, Homo sapiens
  CDR3 for alpha chain variable domain of TCR clone 24473 (TRAV8-3, TRAJ26)
CAGDNYGQTFVF

SEQ ID NO: 48946 - protein, 15 aa, Homo sapiens
  CDR3 for beta chain variable domain of TCR clone 24473 (TRBV9, TRBJ2-1)
CASSLAGSSYNEQFF

SEQ ID NO: 48947 - protein, 14 aa, Homo sapiens
  CDR3 for alpha chain variable domain of TCR clone 24474 (TRAV12-2, TRAJ49)
CAVNPRTPVTSSIL

SEQ ID NO: 48948 - protein, 19 aa, Homo sapiens
  CDR3 for beta chain variable domain of TCR clone 24474 (TRBV12-5, TRBJ2-2)
CASGLGQGTMFANTGELFF

SEQ ID NO: 48949 - protein, 18 aa, Homo sapiens
  CDR3 for alpha chain variable domain of TCR clone 24475 (TRAV26-1, TRAJ23)
CIVRVGLEVWNPGGKLIF

SEQ ID NO: 48950 - protein, 16 aa, Homo sapiens
  CDR3 for beta chain variable domain of TCR clone 24475 (TRBV12-4, TRBJ2-5)
CASSFFVRGRQETQYF

SEQ ID NO: 48951 - protein, 16 aa, Homo sapiens
  CDR3 for alpha chain variable domain of TCR clone 24476 (TRAV3, TRAJ21)
CAVRDIERGSFNKFYF

SEQ ID NO: 48952 - protein, 14 aa, Homo sapiens
  CDR3 for beta chain variable domain of TCR clone 24476 (TRBV7-3, TRBJ2-3)
CASSPSARTDTQYF

SEQ ID NO: 48953 - protein, 17 aa, Homo sapiens
  CDR3 for alpha chain variable domain of TCR clone 24477 (TRAV8-1, TRAJ43)
CAVTNDMRFGAGTRLTV

SEQ ID NO: 48954 - protein, 12 aa, Homo sapiens
  CDR3 for beta chain variable domain of TCR clone 24477 (TRBV4-1, TRBJ2-3)
CASSQGTDTQYF

SEQ ID NO: 48955 - protein, 14 aa, Homo sapiens
  CDR3 for alpha chain variable domain of TCR clone 24478 (TRAV1-2, TRAJ16)
CAVNRFSDGQKLLF

SEQ ID NO: 48956 - protein, 13 aa, Homo sapiens
  CDR3 for beta chain variable domain of TCR clone 24478 (TRBV28, TRBJ2-5)
CASSFAGGETQYF

SEQ ID NO: 48957 - protein, 14 aa, Homo sapiens
  CDR3 for alpha chain variable domain of TCR clone 24479 (TRAV29/DV5, TRAJ36)
CAARRKTGANNLFF

SEQ ID NO: 48958 - protein, 14 aa, Homo sapiens
  CDR3 for beta chain variable domain of TCR clone 24479 (TRBV12-5, TRBJ2-5)
CASGSRTHQETQCF

SEQ ID NO: 48959 - protein, 13 aa, Homo sapiens
  CDR3 for alpha chain variable domain of TCR clone 24480 (TRAV12-2, TRAJ37)
CAGGSGNTGKLIF

SEQ ID NO: 48960 - protein, 14 aa, Homo sapiens
  CDR3 for beta chain variable domain of TCR clone 24480 (TRBV6-1, TRBJ2-6)
CASQQGAGANVLTS

SEQ ID NO: 48961 - protein, 14 aa, Homo sapiens
  CDR3 for alpha chain variable domain of TCR clone 24481 (TRAV14/DV4, TRAJ42)
CPRGSLRSQGNLIF

SEQ ID NO: 48962 - protein, 20 aa, Homo sapiens
  CDR3 for beta chain variable domain of TCR clone 24481 (TRBV28, TRBJ2-1)
CASTPIGRSPGLAGGNEQFF

SEQ ID NO: 48963 - protein, 16 aa, Homo sapiens
  CDR3 for alpha chain variable domain of TCR clone 24482 (TRAV23/DV6, TRAJ9)
CAASIGGNTGGFKTNF

SEQ ID NO: 48964 - protein, 14 aa, Homo sapiens
  CDR3 for beta chain variable domain of TCR clone 24482 (TRBV9, TRBJ2-7)
CASSVGVGSYEQYF

SEQ ID NO: 48965 - protein, 15 aa, Homo sapiens
  CDR3 for alpha chain variable domain of TCR clone 24483 (TRAV39, TRAJ30)
CAVDPWRNRDDKIIF

SEQ ID NO: 48966 - protein, 14 aa, Homo sapiens
  CDR3 for beta chain variable domain of TCR clone 24483 (TRBV7-2, TRBJ2-7)
CASSFLGRVYEQYF

SEQ ID NO: 48967 - protein, 12 aa, Homo sapiens
  CDR3 for alpha chain variable domain of TCR clone 24484 (TRAV13-1, TRAJ15)
CAASQAGTALIL

SEQ ID NO: 48968 - protein, 18 aa, Homo sapiens
  CDR3 for beta chain variable domain of TCR clone 24484 (TRBV7-9, TRBJ2-3)
CASSLPINGQISTDTQYF

SEQ ID NO: 48969 - protein, 17 aa, Homo sapiens
  CDR3 for alpha chain variable domain of TCR clone 24485 (TRAV3, TRAJ38)
CAVRDCLNACNNRKLIW

SEQ ID NO: 48970 - protein, 14 aa, Homo sapiens
  CDR3 for beta chain variable domain of TCR clone 24485 (TRBV5-5, TRBJ1-5)
CASSGQGVDQPQHF

SEQ ID NO: 48971 - protein, 11 aa, Homo sapiens
  CDR3 for alpha chain variable domain of TCR clone 24486 (TRAV12-1, TRAJ34)
CVVNKGRELIF

SEQ ID NO: 48972 - protein, 12 aa, Homo sapiens
  CDR3 for beta chain variable domain of TCR clone 24486 (TRBV2, TRBJ2-1)
CAYGPPGNERFF

SEQ ID NO: 48973 - protein, 16 aa, Homo sapiens
  CDR3 for alpha chain variable domain of TCR clone 24487 (TRAV30, TRAJ24)
CGTEIVDADSWGKFQF

SEQ ID NO: 48974 - protein, 14 aa, Homo sapiens
  CDR3 for beta chain variable domain of TCR clone 24487 (TRBV7-9, TRBJ1-1)
CASTPLQSYTEAFF

SEQ ID NO: 48975 - protein, 15 aa, Homo sapiens
  CDR3 for alpha chain variable domain of TCR clone 24488 (TRAV34, TRAJ38)
CGADFTPGNNRKLIW

SEQ ID NO: 48976 - protein, 16 aa, Homo sapiens
  CDR3 for beta chain variable domain of TCR clone 24488 (TRBV12-5, TRBJ2-5)
CASGPWTSGNQETQYF

SEQ ID NO: 48977 - protein, 13 aa, Homo sapiens
  CDR3 for alpha chain variable domain of TCR clone 24489 (TRAV13-2, TRAJ48)
CAEMDFGNEKLTF

SEQ ID NO: 48978 - protein, 15 aa, Homo sapiens
  CDR3 for beta chain variable domain of TCR clone 24489 (TRBV7-9, TRBJ1-6)
CASSSPVRGNSPLHF

SEQ ID NO: 48979 - protein, 18 aa, Homo sapiens
  CDR3 for alpha chain variable domain of TCR clone 24490 (TRAV21, TRAJ52)
CAVRPSPAGGTSYGKLTV

SEQ ID NO: 48980 - protein, 17 aa, Homo sapiens
  CDR3 for beta chain variable domain of TCR clone 24490 (TRBV13, TRBJ2-3)
CASSLSRVAGGRNTQYF

SEQ ID NO: 48981 - protein, 16 aa, Homo sapiens
  CDR3 for alpha chain variable domain of TCR clone 24491 (TRAV16, TRAJ4)
CDLSRMFSGGYNKLIF

SEQ ID NO: 48982 - protein, 16 aa, Homo sapiens
  CDR3 for beta chain variable domain of TCR clone 24491 (TRBV24-1, TRBJ2-3)
CATSDPGTGATDTQYF

SEQ ID NO: 48983 - protein, 14 aa, Homo sapiens
  CDR3 for alpha chain variable domain of TCR clone 24492 (TRAV1-2, TRAJ8)
CAVREDTGLQKLVF

SEQ ID NO: 48984 - protein, 14 aa, Homo sapiens
  CDR3 for beta chain variable domain of TCR clone 24492 (TRBV7-6, TRBJ2-3)
CASSLGTVTDTQYF

SEQ ID NO: 48985 - protein, 13 aa, Homo sapiens
  CDR3 for alpha chain variable domain of TCR clone 24493 (TRAV26-1, TRAJ48)
CIVRVVGDEKLAF

SEQ ID NO: 48986 - protein, 19 aa, Homo sapiens
  CDR3 for beta chain variable domain of TCR clone 24493 (TRBV11-3, TRBJ2-2)
CASSTRPGAKTTNTGELFF

SEQ ID NO: 48987 - protein, 15 aa, Homo sapiens
  CDR3 for alpha chain variable domain of TCR clone 24494 (TRAV8-3, TRAJ45)
CASSYSGGGADGLTF

SEQ ID NO: 48988 - protein, 16 aa, Homo sapiens
  CDR3 for beta chain variable domain of TCR clone 24494 (TRBV20-1, TRBJ2-2)
GSASASGIPGAGELFF

SEQ ID NO: 48989 - protein, 15 aa, Homo sapiens
  CDR3 for alpha chain variable domain of TCR clone 24495 (TRAV3, TRAJ5)
CAVRDLDMGRRALTF

SEQ ID NO: 48990 - protein, 13 aa, Homo sapiens
  CDR3 for beta chain variable domain of TCR clone 24495 (TRBV12-4, TRBJ2-7)
CASSPTETYEQYF

SEQ ID NO: 48991 - protein, 12 aa, Homo sapiens
  CDR3 for alpha chain variable domain of TCR clone 24496 (TRAV13-2, TRAJ23)
CAERHSGGKLIF

SEQ ID NO: 48992 - protein, 16 aa, Homo sapiens
  CDR3 for beta chain variable domain of TCR clone 24496 (TRBV20-1, TRBJ1-4)
CSAPGQGLLTNEKLFF

SEQ ID NO: 48993 - protein, 16 aa, Homo sapiens
  CDR3 for alpha chain variable domain of TCR clone 24497 (TRAV20, TRAJ28)
CAVRDPSGAGSYQLTF

SEQ ID NO: 48994 - protein, 15 aa, Homo sapiens
  CDR3 for beta chain variable domain of TCR clone 24497 (TRBV25-1, TRBJ1-4)
CASSPGDSTNEKLFF

SEQ ID NO: 48995 - protein, 12 aa, Homo sapiens
  CDR3 for alpha chain variable domain of TCR clone 24498 (TRAV13-1, TRAJ21)
CAAKEGFNKFYF

SEQ ID NO: 48996 - protein, 14 aa, Homo sapiens
  CDR3 for beta chain variable domain of TCR clone 24498 (TRBV5-4, TRBJ1-1)
CASSLDSRRDEDFF

SEQ ID NO: 48997 - protein, 12 aa, Homo sapiens
  CDR3 for alpha chain variable domain of TCR clone 24499 (TRAV21, TRAJ11)
CAATSVYSTLTF

SEQ ID NO: 48998 - protein, 14 aa, Homo sapiens
  CDR3 for beta chain variable domain of TCR clone 24499 (TRBV20-1, TRBJ2-7)
CSAPELAGVGEQYF

SEQ ID NO: 48999 - protein, 15 aa, Homo sapiens
  CDR3 for alpha chain variable domain of TCR clone 24500 (TRAV27, TRAJ38)
CAGRFNAGNNRKLIW

SEQ ID NO: 49000 - protein, 13 aa, Homo sapiens
  CDR3 for beta chain variable domain of TCR clone 24500 (TRBV12-5, TRBJ2-3)
CASQNRGTDTQYL

SEQ ID NO: 49001 - protein, 12 aa, Homo sapiens
  CDR3 for alpha chain variable domain of TCR clone 24501 (TRAV12-2, TRAJ10)
WGVTGGGNKLTF

SEQ ID NO: 49002 - protein, 14 aa, Homo sapiens
  CDR3 for beta chain variable domain of TCR clone 24501 (TRBV19, TRBJ2-1)
CASPTFVLSGEQFF

SEQ ID NO: 49003 - protein, 16 aa, Homo sapiens
  CDR3 for alpha chain variable domain of TCR clone 24502 (TRAV1-2, TRAJ10)
CAVRGVLTGGGNKLTF

SEQ ID NO: 49004 - protein, 18 aa, Homo sapiens
  CDR3 for beta chain variable domain of TCR clone 24502 (TRBV11-2, TRBJ2-3)
CASSLGGASRGAPNTQYF

SEQ ID NO: 49005 - protein, 15 aa, Homo sapiens
  CDR3 for alpha chain variable domain of TCR clone 24503 (TRAV3, TRAJ20)
CAVRDIELSDYKLSF

SEQ ID NO: 49006 - protein, 15 aa, Homo sapiens
  CDR3 for beta chain variable domain of TCR clone 24503 (TRBV7-9, TRBJ1-6)
CASSSPGRGNSPLHF

SEQ ID NO: 49007 - protein, 15 aa, Homo sapiens
  CDR3 for alpha chain variable domain of TCR clone 24504 (TRAV26-1, TRAJ15)
CIVRAANQAGTALIF

SEQ ID NO: 49008 - protein, 15 aa, Homo sapiens
  CDR3 for beta chain variable domain of TCR clone 24504 (TRBV20-1, TRBJ1-1)
RSARSAATSNTEAFF

SEQ ID NO: 49009 - protein, 13 aa, Homo sapiens
  CDR3 for alpha chain variable domain of TCR clone 24505 (TRAV27, TRAJ41)
CAGEGNSGYALNF

SEQ ID NO: 49010 - protein, 14 aa, Homo sapiens
  CDR3 for beta chain variable domain of TCR clone 24505 (TRBV7-2, TRBJ1-1)
CASSFLTGTTEAFL

SEQ ID NO: 49011 - protein, 15 aa, Homo sapiens
  CDR3 for alpha chain variable domain of TCR clone 24506 (TRAV3, TRAJ22)
CAVSDRGGSARQLTF

SEQ ID NO: 49012 - protein, 16 aa, Homo sapiens
  CDR3 for beta chain variable domain of TCR clone 24506 (TRBV5-4, TRBJ2-3)
CASQQPGAGGADTQYF

SEQ ID NO: 49013 - protein, 15 aa, Homo sapiens
  CDR3 for alpha chain variable domain of TCR clone 24507 (TRAV26-1, TRAJ44)
CIVRANTGTASKLTF

SEQ ID NO: 49014 - protein, 16 aa, Homo sapiens
  CDR3 for beta chain variable domain of TCR clone 24507 (TRBV7-7, TRBJ2-1)
CARSLASGTSYNEQFF

SEQ ID NO: 49015 - protein, 11 aa, Homo sapiens
  CDR3 for alpha chain variable domain of TCR clone 24508 (TRAV1-2, TRAJ31)
CAVNNNGRLMF

SEQ ID NO: 49016 - protein, 15 aa, Homo sapiens
  CDR3 for beta chain variable domain of TCR clone 24508 (TRBV28, TRBJ2-1)
CASSIIAGGRSEQFF

SEQ ID NO: 49017 - protein, 11 aa, Homo sapiens
  CDR3 for alpha chain variable domain of TCR clone 24509 (TRAV1-2, TRAJ40)
CAVTGTYKYIF

SEQ ID NO: 49018 - protein, 16 aa, Homo sapiens
  CDR3 for beta chain variable domain of TCR clone 24509 (TRBV29-1, TRBJ2-7)
CSVEVVGTSGSYEQYF

SEQ ID NO: 49019 - protein, 15 aa, Homo sapiens
  CDR3 for alpha chain variable domain of TCR clone 24510 (TRAV29/DV5, TRAJ28)
CAAGYSGAGSYQLTF

SEQ ID NO: 49020 - protein, 17 aa, Homo sapiens
  CDR3 for beta chain variable domain of TCR clone 24510 (TRBV20-1, TRBJ2-1)
CSASSSGLAGSYNEQFF

SEQ ID NO: 49021 - protein, 14 aa, Homo sapiens
  CDR3 for alpha chain variable domain of TCR clone 24511 (TRAV27, TRAJ23)
CAGAFDNHGGKLIF

SEQ ID NO: 49022 - protein, 15 aa, Homo sapiens
  CDR3 for beta chain variable domain of TCR clone 24511 (TRBV7-3, TRBJ2-7)
CASSLTGQGKYEQYF

SEQ ID NO: 49023 - protein, 13 aa, Homo sapiens
  CDR3 for alpha chain variable domain of TCR clone 24512 (TRAV8-4, TRAJ47)
CAVTALYGNKLVF

SEQ ID NO: 49024 - protein, 19 aa, Homo sapiens
  CDR3 for beta chain variable domain of TCR clone 24512 (TRBV25-1, TRBJ2-2)
CAILVYRVDRGRKTGELFF

SEQ ID NO: 49025 - protein, 13 aa, Homo sapiens
  CDR3 for alpha chain variable domain of TCR clone 24513 (TRAV13-1, TRAJ39)
CAASIWAGNMLTF

SEQ ID NO: 49026 - protein, 15 aa, Homo sapiens
  CDR3 for beta chain variable domain of TCR clone 24513 (TRBV6-3, TRBJ2-7)
CASSSPGTVFYEQYF

SEQ ID NO: 49027 - protein, 15 aa, Homo sapiens
  CDR3 for alpha chain variable domain of TCR clone 24514 (TRAV23/DV6, TRAJ18)
CAARYRGSTLGRLYF

SEQ ID NO: 49028 - protein, 13 aa, Homo sapiens
  CDR3 for beta chain variable domain of TCR clone 24514 (TRBV7-2, TRBJ2-7)
CASSSTSGSEQYF

SEQ ID NO: 49029 - protein, 15 aa, Homo sapiens
  CDR3 for alpha chain variable domain of TCR clone 24515 (TRAV26-1, TRAJ44)
CIVRANTGPASKLTF

SEQ ID NO: 49030 - protein, 16 aa, Homo sapiens
  CDR3 for beta chain variable domain of TCR clone 24515 (TRBV7-7, TRBJ2-1)
CASSLASGTSYNEQFF

SEQ ID NO: 49031 - protein, 13 aa, Homo sapiens
  CDR3 for alpha chain variable domain of TCR clone 24516 (TRAV8-6, TRAJ49)
CAVITNTGNQSYF

SEQ ID NO: 49032 - protein, 14 aa, Homo sapiens
  CDR3 for beta chain variable domain of TCR clone 24516 (TRBV5-1, TRBJ2-7)
CASSRGESLYEQYF

SEQ ID NO: 49033 - protein, 13 aa, Homo sapiens
  CDR3 for alpha chain variable domain of TCR clone 24517 (TRAV2, TRAJ15)
CAVASQAGTALIF

SEQ ID NO: 49034 - protein, 14 aa, Homo sapiens
  CDR3 for beta chain variable domain of TCR clone 24517 (TRBV7-8, TRBJ2-3)
CASSLEAGTDTQYF

SEQ ID NO: 49035 - protein, 12 aa, Homo sapiens
  CDR3 for alpha chain variable domain of TCR clone 24518 (TRAV21, TRAJ3)
CCFYSSSSKIIF

SEQ ID NO: 49036 - protein, 16 aa, Homo sapiens
  CDR3 for beta chain variable domain of TCR clone 24518 (TRBV19, TRBJ2-1)
CASSKAGPSSYNEQFF

SEQ ID NO: 49037 - protein, 14 aa, Homo sapiens
  CDR3 for alpha chain variable domain of TCR clone 24519 (TRAV16, TRAJ15)
CALSFNQAGTALIF

SEQ ID NO: 49038 - protein, 13 aa, Homo sapiens
  CDR3 for beta chain variable domain of TCR clone 24519 (TRBV19, TRBJ2-2)
CASRTLGTGELFF

SEQ ID NO: 49039 - protein, 15 aa, Homo sapiens
  CDR3 for alpha chain variable domain of TCR clone 24520 (TRAV25, TRAJ52)
CSGRPGGTSYGKLTF

SEQ ID NO: 49040 - protein, 17 aa, Homo sapiens
  CDR3 for beta chain variable domain of TCR clone 24520 (TRBV7-8, TRBJ2-6)
CASSAGTGGAGANVLTF

SEQ ID NO: 49041 - protein, 12 aa, Homo sapiens
  CDR3 for alpha chain variable domain of TCR clone 24521 (TRAV21, TRAJ33)
CAKMASNYQLIW

SEQ ID NO: 49042 - protein, 14 aa, Homo sapiens
  CDR3 for beta chain variable domain of TCR clone 24521 (TRBV2, TRBJ2-7)
CASSLTSGGYEQYF

SEQ ID NO: 49043 - protein, 17 aa, Homo sapiens
  CDR3 for alpha chain variable domain of TCR clone 24522 (TRAV36/DV7, TRAJ52)
CAVAQRAGGTSYGKLTF

SEQ ID NO: 49044 - protein, 22 aa, Homo sapiens
  CDR3 for beta chain variable domain of TCR clone 24522 (TRBV6-1, TRBJ1-3)
CASVQGGGWKHHIFWRGKLAHC

SEQ ID NO: 49045 - protein, 17 aa, Homo sapiens
  CDR3 for alpha chain variable domain of TCR clone 24523 (TRAV13-1, TRAJ31)
CAPRDRLMFGDGTQLVV

SEQ ID NO: 49046 - protein, 13 aa, Homo sapiens
  CDR3 for beta chain variable domain of TCR clone 24523 (TRBV7-3, TRBJ1-1)
CASSQDWGAEAFF

SEQ ID NO: 49047 - protein, 14 aa, Homo sapiens
  CDR3 for alpha chain variable domain of TCR clone 24524 (TRAV26-1, TRAJ38)
CIADKAGNNRKLIW

SEQ ID NO: 49048 - protein, 13 aa, Homo sapiens
  CDR3 for beta chain variable domain of TCR clone 24524 (TRBV20-1, TRBJ1-1)
CSARGGGNTEAFF

SEQ ID NO: 49049 - protein, 11 aa, Homo sapiens
  CDR3 for alpha chain variable domain of TCR clone 24525 (TRAV1-2, TRAJ20)
CAVANDYKLSF

SEQ ID NO: 49050 - protein, 18 aa, Homo sapiens
  CDR3 for beta chain variable domain of TCR clone 24525 (TRBV20-1, TRBJ2-6)
CSDETTPTHGSGANVLTF

SEQ ID NO: 49051 - protein, 15 aa, Homo sapiens
  CDR3 for alpha chain variable domain of TCR clone 24526 (TRAV3, TRAJ22)
CAVRDRGGSARQLTF

SEQ ID NO: 49052 - protein, 11 aa, Homo sapiens
  CDR3 for beta chain variable domain of TCR clone 24526 (TRBV11-2, TRBJ2-2)
CASSLPGELFF

SEQ ID NO: 49053 - protein, 14 aa, Homo sapiens
  CDR3 for alpha chain variable domain of TCR clone 24527 (TRAV1-2, TRAJ8)
CAVGEDTGFQKLVF

SEQ ID NO: 49054 - protein, 15 aa, Homo sapiens
  CDR3 for beta chain variable domain of TCR clone 24527 (TRBV7-9, TRBJ1-4)
CASSARTGGNEKLFF

SEQ ID NO: 49055 - protein, 14 aa, Homo sapiens
  CDR3 for alpha chain variable domain of TCR clone 24528 (TRAV12-3, TRAJ10)
SHLPLTGGGNKLTF

SEQ ID NO: 49056 - protein, 13 aa, Homo sapiens
  CDR3 for beta chain variable domain of TCR clone 24528 (TRBV7-9, TRBJ2-3)
CASSPGSTDTRYF

SEQ ID NO: 49057 - protein, 15 aa, Homo sapiens
  CDR3 for alpha chain variable domain of TCR clone 24529 (TRAV17, TRAJ56)
CATDANTGANSKLTF

SEQ ID NO: 49058 - protein, 14 aa, Homo sapiens
  CDR3 for beta chain variable domain of TCR clone 24529 (TRBV19, TRBJ1-5)
CASSLGTGGQHQHF

SEQ ID NO: 49059 - protein, 12 aa, Homo sapiens
  CDR3 for alpha chain variable domain of TCR clone 24530 (TRAV38-1, TRAJ47)
CAFEAYGNKLVF

SEQ ID NO: 49060 - protein, 14 aa, Homo sapiens
  CDR3 for beta chain variable domain of TCR clone 24530 (TRBV12-5, TRBJ2-5)
CASGSRTHQETQYF

SEQ ID NO: 49061 - protein, 15 aa, Homo sapiens
  CDR3 for alpha chain variable domain of TCR clone 24531 (TRAV17, TRAJ57)
CATGPSQGGSEKLVF

SEQ ID NO: 49062 - protein, 16 aa, Homo sapiens
  CDR3 for beta chain variable domain of TCR clone 24531 (TRBV12-4, TRBJ1-5)
CASSRTVGGSNQPQHF

SEQ ID NO: 49063 - protein, 19 aa, Homo sapiens
  CDR3 for alpha chain variable domain of TCR clone 24532 (TRAV26-1, TRAJ52)
CIVRAHRNAGGTSYGKLTF

SEQ ID NO: 49064 - protein, 15 aa, Homo sapiens
  CDR3 for beta chain variable domain of TCR clone 24532 (TRBV12-4, TRBJ2-5)
CASSPPTGLQETQHF

SEQ ID NO: 49065 - protein, 16 aa, Homo sapiens
  CDR3 for alpha chain variable domain of TCR clone 24533 (TRAV3, TRAJ21)
CAVRDIERGNFNKFYF

SEQ ID NO: 49066 - protein, 14 aa, Homo sapiens
  CDR3 for beta chain variable domain of TCR clone 24533 (TRBV19, TRBJ2-1)
CASPTFVLSGEQFF

SEQ ID NO: 49067 - protein, 15 aa, Homo sapiens
  CDR3 for alpha chain variable domain of TCR clone 24534 (TRAV8-3, TRAJ27)
CAVGPSKTNAGQSTF

SEQ ID NO: 49068 - protein, 15 aa, Homo sapiens
  CDR3 for beta chain variable domain of TCR clone 24534 (TRBV7-2, TRBJ2-1)
CASSSGLAGGNEQFF

SEQ ID NO: 49069 - protein, 14 aa, Homo sapiens
  CDR3 for alpha chain variable domain of TCR clone 24535 (TRAV3, TRAJ7)
CAVREEEREQQTRV

SEQ ID NO: 49070 - protein, 12 aa, Homo sapiens
  CDR3 for beta chain variable domain of TCR clone 24535 (TRBV7-8, TRBJ2-7)
CASSLGDREQYF

SEQ ID NO: 49071 - protein, 15 aa, Homo sapiens
  CDR3 for alpha chain variable domain of TCR clone 24536 (TRAV25, TRAJ53)
CPTSNSGGSNYKLKF

SEQ ID NO: 49072 - protein, 14 aa, Homo sapiens
  CDR3 for beta chain variable domain of TCR clone 24536 (TRBV11-2, TRBJ2-3)
CASSRLARTDTQYF

SEQ ID NO: 49073 - protein, 14 aa, Homo sapiens
  CDR3 for alpha chain variable domain of TCR clone 24537 (TRAV1-2, TRAJ16)
CAVNRFSDGQKLLF

SEQ ID NO: 49074 - protein, 15 aa, Homo sapiens
  CDR3 for beta chain variable domain of TCR clone 24537 (TRBV9, TRBJ1-6)
CASSVTGTGDSPLHF

SEQ ID NO: 49075 - protein, 14 aa, Homo sapiens
  CDR3 for alpha chain variable domain of TCR clone 24538 (TRAV8-4, TRAJ9)
CAVRINTGGFKTIF

SEQ ID NO: 49076 - protein, 15 aa, Homo sapiens
  CDR3 for beta chain variable domain of TCR clone 24538 (TRBV10-2, TRBJ2-6)
CASSEQGTGANVLTL

SEQ ID NO: 49077 - protein, 15 aa, Homo sapiens
  CDR3 for alpha chain variable domain of TCR clone 24539 (TRAV3, TRAJ45)
CAVRTPRGGADGLTF

SEQ ID NO: 49078 - protein, 16 aa, Homo sapiens
  CDR3 for beta chain variable domain of TCR clone 24539 (TRBV6-1, TRBJ2-2)
CASSFGQGANTGELFF

SEQ ID NO: 49079 - protein, 14 aa, Homo sapiens
  CDR3 for alpha chain variable domain of TCR clone 24540 (TRAV12-2, TRAJ13)
CAVKKTGGYQKVTF

SEQ ID NO: 49080 - protein, 16 aa, Homo sapiens
  CDR3 for beta chain variable domain of TCR clone 24540 (TRBV7-7, TRBJ2-1)
CASSLASGTSYNEQFF

SEQ ID NO: 49081 - protein, 12 aa, Homo sapiens
  CDR3 for alpha chain variable domain of TCR clone 24541 (TRAV12-3, TRAJ4)
CAMTGAGTRLAV

SEQ ID NO: 49082 - protein, 14 aa, Homo sapiens
  CDR3 for beta chain variable domain of TCR clone 24541 (TRBV10-3, TRBJ1-1)
CAISDTDRGVEAFL

SEQ ID NO: 49083 - protein, 15 aa, Homo sapiens
  CDR3 for alpha chain variable domain of TCR clone 24542 (TRAV27, TRAJ38)
CAARRNAGNNRKLIW

SEQ ID NO: 49084 - protein, 15 aa, Homo sapiens
  CDR3 for beta chain variable domain of TCR clone 24542 (TRBV4-1, TRBJ1-4)
CASSDTGGTNEKLFF

SEQ ID NO: 49085 - protein, 12 aa, Homo sapiens
  CDR3 for alpha chain variable domain of TCR clone 24543 (TRAV17, TRAJ4)
CATDGVYNKLIF

SEQ ID NO: 49086 - protein, 13 aa, Homo sapiens
  CDR3 for beta chain variable domain of TCR clone 24543 (TRBV29-1, TRBJ2-2)
CSTTGVNTGELFF

SEQ ID NO: 49087 - protein, 11 aa, Homo sapiens
  CDR3 for alpha chain variable domain of TCR clone 24544 (TRAV4, TRAJ23)
CLVAPGGKLTF

SEQ ID NO: 49088 - protein, 15 aa, Homo sapiens
  CDR3 for beta chain variable domain of TCR clone 24544 (TRBV7-2, TRBJ2-1)
CASSFQADEYNEQFF

SEQ ID NO: 49089 - protein, 15 aa, Homo sapiens
  CDR3 for alpha chain variable domain of TCR clone 24545 (TRAV12-2, TRAJ53)
CAVNGGGGSNYKLTF

SEQ ID NO: 49090 - protein, 15 aa, Homo sapiens
  CDR3 for beta chain variable domain of TCR clone 24545 (TRBV9, TRBJ1-6)
CASSVAGTGDSPLHF

SEQ ID NO: 49091 - protein, 11 aa, Homo sapiens
  CDR3 for alpha chain variable domain of TCR clone 24546 (TRAV21, TRAJ41)
CAVRSGYALNF

SEQ ID NO: 49092 - protein, 13 aa, Homo sapiens
  CDR3 for beta chain variable domain of TCR clone 24546 (TRBV7-9, TRBJ1-2)
CASSLKQNYGYAF

SEQ ID NO: 49093 - protein, 15 aa, Homo sapiens
  CDR3 for alpha chain variable domain of TCR clone 24547 (TRAV4, TRAJ39)
CLVGPNNNAGNMLTF

SEQ ID NO: 49094 - protein, 13 aa, Homo sapiens
  CDR3 for beta chain variable domain of TCR clone 24547 (TRBV7-9, TRBJ1-2)
CASSLKQNYGYTF

SEQ ID NO: 49095 - protein, 12 aa, Homo sapiens
  CDR3 for alpha chain variable domain of TCR clone 24548 (TRAV12-1, TRAJ40)
CVVYSGTYKYIF

SEQ ID NO: 49096 - protein, 17 aa, Homo sapiens
  CDR3 for beta chain variable domain of TCR clone 24548 (TRBV11-2, TRBJ2-3)
CQQLGGASRGAPNTQYF

SEQ ID NO: 49097 - protein, 14 aa, Homo sapiens
  CDR3 for alpha chain variable domain of TCR clone 24549 (TRAV12-3, TRAJ10)
SHLPLTGGGNKLTF

SEQ ID NO: 49098 - protein, 14 aa, Homo sapiens
  CDR3 for beta chain variable domain of TCR clone 24549 (TRBV7-3, TRBJ2-2)
CASSSGGYTGELFF

SEQ ID NO: 49099 - protein, 14 aa, Homo sapiens
  CDR3 for alpha chain variable domain of TCR clone 24550 (TRAV1-2, TRAJ16)
CAVNRFSDGQKLLF

SEQ ID NO: 49100 - protein, 13 aa, Homo sapiens
  CDR3 for beta chain variable domain of TCR clone 24550 (TRBV6-1, TRBJ1-1)
CASSRQGNTEAFL

SEQ ID NO: 49101 - protein, 14 aa, Homo sapiens
  CDR3 for alpha chain variable domain of TCR clone 24551 (TRAV38-1, TRAJ29)
CAFITPSGNTPLVF

SEQ ID NO: 49102 - protein, 14 aa, Homo sapiens
  CDR3 for beta chain variable domain of TCR clone 24551 (TRBV18, TRBJ2-7)
CASSPRGGAYEQYL

SEQ ID NO: 49103 - protein, 14 aa, Homo sapiens
  CDR3 for alpha chain variable domain of TCR clone 24552 (TRAV2, TRAJ37)
CAVDFTSNTGKLIF

SEQ ID NO: 49104 - protein, 15 aa, Homo sapiens
  CDR3 for beta chain variable domain of TCR clone 24552 (TRBV20-1, TRBJ1-1)
CSASRGVTGNNEAFF

SEQ ID NO: 49105 - protein, 13 aa, Homo sapiens
  CDR3 for alpha chain variable domain of TCR clone 24553 (TRAV13-2, TRAJ13)
CAERPGGYQEVTF

SEQ ID NO: 49106 - protein, 15 aa, Homo sapiens
  CDR3 for beta chain variable domain of TCR clone 24553 (TRBV11-3, TRBJ2-7)
CASSPGPASSYEQYF

SEQ ID NO: 49107 - protein, 15 aa, Homo sapiens
  CDR3 for alpha chain variable domain of TCR clone 24554 (TRAV26-1, TRAJ22)
CIVRVSFWVCKATDL

SEQ ID NO: 49108 - protein, 13 aa, Homo sapiens
  CDR3 for beta chain variable domain of TCR clone 24554 (TRBV7-9, TRBJ1-2)
CASSLKQNYGYTF

SEQ ID NO: 49109 - protein, 12 aa, Homo sapiens
  CDR3 for alpha chain variable domain of TCR clone 24555 (TRAV2, TRAJ34)
CAVESNTDKLIF

SEQ ID NO: 49110 - protein, 14 aa, Homo sapiens
  CDR3 for beta chain variable domain of TCR clone 24555 (TRBV7-9, TRBJ2-1)
CASSDNSGYNEQFF

SEQ ID NO: 49111 - protein, 12 aa, Homo sapiens
  CDR3 for alpha chain variable domain of TCR clone 24556 (TRAV13-1, TRAJ27)
CAAHTNAGKSTF

SEQ ID NO: 49112 - protein, 14 aa, Homo sapiens
  CDR3 for beta chain variable domain of TCR clone 24556 (TRBV19, TRBJ2-2)
CVSSGQGIAGELFF

SEQ ID NO: 49113 - protein, 12 aa, Homo sapiens
  CDR3 for alpha chain variable domain of TCR clone 24557 (TRAV12-2, TRAJ3)
CAVWSSAPKIIF

SEQ ID NO: 49114 - protein, 12 aa, Homo sapiens
  CDR3 for beta chain variable domain of TCR clone 24557 (TRBV11-2, TRBJ2-1)
CASSPGNNEQFF

SEQ ID NO: 49115 - protein, 13 aa, Homo sapiens
  CDR3 for alpha chain variable domain of TCR clone 24558 (TRAV1-1, TRAJ9)
CAAKNTGGFKTIF

SEQ ID NO: 49116 - protein, 14 aa, Homo sapiens
  CDR3 for beta chain variable domain of TCR clone 24558 (TRBV20-1, TRBJ2-1)
CSAQIGGYANEQFF

SEQ ID NO: 49117 - protein, 15 aa, Homo sapiens
  CDR3 for alpha chain variable domain of TCR clone 24559 (TRAV8-3, TRAJ45)
CASSYSGGGGDGLTF

SEQ ID NO: 49118 - protein, 13 aa, Homo sapiens
  CDR3 for beta chain variable domain of TCR clone 24559 (TRBV10-3, TRBJ2-7)
CASKLAVNYEQYF

SEQ ID NO: 49119 - protein, 13 aa, Homo sapiens
  CDR3 for alpha chain variable domain of TCR clone 24560 (TRAV12-2, TRAJ20)
CAVYPSNDYKLSF

SEQ ID NO: 49120 - protein, 15 aa, Homo sapiens
  CDR3 for beta chain variable domain of TCR clone 24560 (TRBV27, TRBJ2-5)
RASSLYPRGGETQYF

SEQ ID NO: 49121 - protein, 12 aa, Homo sapiens
  CDR3 for alpha chain variable domain of TCR clone 24561 (TRAV3, TRAJ20)
CAVRDPDYKLSF

SEQ ID NO: 49122 - protein, 14 aa, Homo sapiens
  CDR3 for beta chain variable domain of TCR clone 24561 (TRBV4-2, TRBJ2-1)
CASGLDRAYNGQFF

SEQ ID NO: 49123 - protein, 16 aa, Homo sapiens
  CDR3 for alpha chain variable domain of TCR clone 24562 (TRAV17, TRAJ17)
CATALQEEAAGNKLTF

SEQ ID NO: 49124 - protein, 15 aa, Homo sapiens
  CDR3 for beta chain variable domain of TCR clone 24562 (TRBV9, TRBJ1-6)
CASSVAGTGDSPLHF

SEQ ID NO: 49125 - protein, 15 aa, Homo sapiens
  CDR3 for alpha chain variable domain of TCR clone 24563 (TRAV3, TRAJ5)
CAVRDRKTGRRAPTF

SEQ ID NO: 49126 - protein, 15 aa, Homo sapiens
  CDR3 for beta chain variable domain of TCR clone 24563 (TRBV7-8, TRBJ2-1)
CASSLADSLYNEQFF

SEQ ID NO: 49127 - protein, 12 aa, Homo sapiens
  CDR3 for alpha chain variable domain of TCR clone 24564 (TRAV3, TRAJ20)
CAVRDPDYKLSF

SEQ ID NO: 49128 - protein, 16 aa, Homo sapiens
  CDR3 for beta chain variable domain of TCR clone 24564 (TRBV12-5, TRBJ2-5)
CASGPRTSGNQETQYF

SEQ ID NO: 49129 - protein, 13 aa, Homo sapiens
  CDR3 for alpha chain variable domain of TCR clone 24565 (TRAV3, TRAJ21)
CAVREPDFNKFYF

SEQ ID NO: 49130 - protein, 11 aa, Homo sapiens
  CDR3 for beta chain variable domain of TCR clone 24565 (TRBV11-2, TRBJ1-1)
CASSINTEAFF

SEQ ID NO: 49131 - protein, 13 aa, Homo sapiens
  CDR3 for alpha chain variable domain of TCR clone 24566 (TRAV21, TRAJ37)
CAGSSGNTGKLIF

SEQ ID NO: 49132 - protein, 13 aa, Homo sapiens
  CDR3 for beta chain variable domain of TCR clone 24566 (TRBV7-6, TRBJ2-3)
CASSLRSDNTQYF

SEQ ID NO: 49133 - protein, 14 aa, Homo sapiens
  CDR3 for alpha chain variable domain of TCR clone 24567 (TRAV13-2, TRAJ26)
CAENLGNYGQNFVF

SEQ ID NO: 49134 - protein, 14 aa, Homo sapiens
  CDR3 for beta chain variable domain of TCR clone 24567 (TRBV4-1, TRBJ2-2)
CASSQAVNTGELFF

SEQ ID NO: 49135 - protein, 13 aa, Homo sapiens
  CDR3 for alpha chain variable domain of TCR clone 24568 (TRAV17, TRAJ26)
CATVDNYGPNFVF

SEQ ID NO: 49136 - protein, 16 aa, Homo sapiens
  CDR3 for beta chain variable domain of TCR clone 24568 (TRBV2, TRBJ2-1)
CASSVGGSLSYNEQFF

SEQ ID NO: 49137 - protein, 12 aa, Homo sapiens
  CDR3 for alpha chain variable domain of TCR clone 24569 (TRAV17, TRAJ39)
CATGAAGNMLTL

SEQ ID NO: 49138 - protein, 14 aa, Homo sapiens
  CDR3 for beta chain variable domain of TCR clone 24569 (TRBV7-9, TRBJ1-2)
CASSRQGANYGYTF

SEQ ID NO: 49139 - protein, 13 aa, Homo sapiens
  CDR3 for alpha chain variable domain of TCR clone 24570 (TRAV13-1, TRAJ11)
CAAVLAGYSTLTF

SEQ ID NO: 49140 - protein, 17 aa, Homo sapiens
  CDR3 for beta chain variable domain of TCR clone 24570 (TRBV25-1, TRBJ2-7)
CASSDARVVFSSYGQYF

SEQ ID NO: 49141 - protein, 14 aa, Homo sapiens
  CDR3 for alpha chain variable domain of TCR clone 24571 (TRAV17, TRAJ32)
CATDPGGATNKLIF

SEQ ID NO: 49142 - protein, 14 aa, Homo sapiens
  CDR3 for beta chain variable domain of TCR clone 24571 (TRBV2, TRBJ1-5)
CASSESRGGQPQHF

SEQ ID NO: 49143 - protein, 14 aa, Homo sapiens
  CDR3 for alpha chain variable domain of TCR clone 24572 (TRAV26-1, TRAJ34)
CIVRVAYNTDKLIF

SEQ ID NO: 49144 - protein, 15 aa, Homo sapiens
  CDR3 for beta chain variable domain of TCR clone 24572 (TRBV20-1, TRBJ2-7)
CSARVPAAYFCEQYF

SEQ ID NO: 49145 - protein, 16 aa, Homo sapiens
  CDR3 for alpha chain variable domain of TCR clone 24573 (TRAV4, TRAJ22)
CLVGDLYSGSARQLTF

SEQ ID NO: 49146 - protein, 17 aa, Homo sapiens
  CDR3 for beta chain variable domain of TCR clone 24573 (TRBV13, TRBJ2-3)
CASSLSRVAGGRNTQYF

SEQ ID NO: 49147 - protein, 14 aa, Homo sapiens
  CDR3 for alpha chain variable domain of TCR clone 24574 (TRAV12-1, TRAJ17)
CVVNYKAAGNKLTF

SEQ ID NO: 49148 - protein, 17 aa, Homo sapiens
  CDR3 for beta chain variable domain of TCR clone 24574 (TRBV20-1, TRBJ2-1)
CSDSSSGLAGSYNEQFF

SEQ ID NO: 49149 - protein, 12 aa, Homo sapiens
  CDR3 for alpha chain variable domain of TCR clone 24575 (TRAV16, TRAJ12)
RAHGDSSYKLIF

SEQ ID NO: 49150 - protein, 12 aa, Homo sapiens
  CDR3 for beta chain variable domain of TCR clone 24575 (TRBV28, TRBJ2-1)
CASSRLVGEQFF

SEQ ID NO: 49151 - protein, 15 aa, Homo sapiens
  CDR3 for alpha chain variable domain of TCR clone 24576 (TRAV2, TRAJ15)
CAVEERGQAGTALIF

SEQ ID NO: 49152 - protein, 13 aa, Homo sapiens
  CDR3 for beta chain variable domain of TCR clone 24576 (TRBV10-2, TRBJ2-7)
CASGASGGYEQYF

SEQ ID NO: 49153 - protein, 12 aa, Homo sapiens
  CDR3 for alpha chain variable domain of TCR clone 24577 (TRAV12-3, TRAJ17)
CAMTLTGNKLTF

SEQ ID NO: 49154 - protein, 15 aa, Homo sapiens
  CDR3 for beta chain variable domain of TCR clone 24577 (TRBV7-2, TRBJ2-7)
CASSLKGALTYEQYF

SEQ ID NO: 49155 - protein, 15 aa, Homo sapiens
  CDR3 for alpha chain variable domain of TCR clone 24578 (TRAV26-1, TRAJ29)
CIVRVEGSGNTPLVF

SEQ ID NO: 49156 - protein, 16 aa, Homo sapiens
  CDR3 for beta chain variable domain of TCR clone 24578 (TRBV5-1, TRBJ1-1)
CASSSGGNSLNTEAFF

SEQ ID NO: 49157 - protein, 17 aa, Homo sapiens
  CDR3 for alpha chain variable domain of TCR clone 24579 (TRAV19, TRAJ28)
CALSEASSGAGSYQLTF

SEQ ID NO: 49158 - protein, 15 aa, Homo sapiens
  CDR3 for beta chain variable domain of TCR clone 24579 (TRBV6-3, TRBJ2-7)
CASSSPGTVFYEQYF

SEQ ID NO: 49159 - protein, 11 aa, Homo sapiens
  CDR3 for alpha chain variable domain of TCR clone 24580 (TRAV12-1, TRAJ30)
CVVNGQDKIIF

SEQ ID NO: 49160 - protein, 15 aa, Homo sapiens
  CDR3 for beta chain variable domain of TCR clone 24580 (TRBV11-3, TRBJ1-1)
CASSLGGPGDTEAFF

SEQ ID NO: 49161 - protein, 13 aa, Homo sapiens
  CDR3 for alpha chain variable domain of TCR clone 24581 (TRAV12-1, TRAJ31)
CVVSMNNNARLMF

SEQ ID NO: 49162 - protein, 15 aa, Homo sapiens
  CDR3 for beta chain variable domain of TCR clone 24581 (TRBV4-1, TRBJ1-2)
CASSQGQGAAYGYTF

SEQ ID NO: 49163 - protein, 15 aa, Homo sapiens
  CDR3 for alpha chain variable domain of TCR clone 24582 (TRAV12-2, TRAJ53)
CAVNGGGGSNYKLTF

SEQ ID NO: 49164 - protein, 14 aa, Homo sapiens
  CDR3 for beta chain variable domain of TCR clone 24582 (TRBV25-1, TRBJ1-1)
CASTHLGGNTEAFF

SEQ ID NO: 49165 - protein, 18 aa, Homo sapiens
  CDR3 for alpha chain variable domain of TCR clone 24583 (TRAV21, TRAJ52)
CAVRPSPAGGTSYGKLTF

SEQ ID NO: 49166 - protein, 17 aa, Homo sapiens
  CDR3 for beta chain variable domain of TCR clone 24583 (TRBV13, TRBJ2-3)
YASSLSRVAGGRNTQYF

SEQ ID NO: 49167 - protein, 14 aa, Homo sapiens
  CDR3 for alpha chain variable domain of TCR clone 24584 (TRAV16, TRAJ15)
CALSGPQAGTALLF

SEQ ID NO: 49168 - protein, 12 aa, Homo sapiens
  CDR3 for beta chain variable domain of TCR clone 24584 (TRBV18, TRBJ2-5)
CASSPSKETQYF

SEQ ID NO: 49169 - protein, 15 aa, Homo sapiens
  CDR3 for alpha chain variable domain of TCR clone 24585 (TRAV13-1, TRAJ11)
CAASNRNSGYSTLTF

SEQ ID NO: 49170 - protein, 15 aa, Homo sapiens
  CDR3 for beta chain variable domain of TCR clone 24585 (TRBV6-3, TRBJ2-7)
CASSSPGTVFYEQYF

SEQ ID NO: 49171 - protein, 14 aa, Homo sapiens
  CDR3 for alpha chain variable domain of TCR clone 24586 (TRAV3, TRAJ9)
CAVRLDTGGFKTIF

SEQ ID NO: 49172 - protein, 15 aa, Homo sapiens
  CDR3 for beta chain variable domain of TCR clone 24586 (TRBV7-2, TRBJ2-1)
CASSLASGRVNEQFF

SEQ ID NO: 49173 - protein, 13 aa, Homo sapiens
  CDR3 for alpha chain variable domain of TCR clone 24587 (TRAV13-1, TRAJ42)
QANYGGSQGNLIF

SEQ ID NO: 49174 - protein, 15 aa, Homo sapiens
  CDR3 for beta chain variable domain of TCR clone 24587 (TRBV20-1, TRBJ2-1)
CSASSAGSSYNEQFF

SEQ ID NO: 49175 - protein, 13 aa, Homo sapiens
  CDR3 for alpha chain variable domain of TCR clone 24588 (TRAV12-1, TRAJ26)
CVVRRNYGQNFVF

SEQ ID NO: 49176 - protein, 11 aa, Homo sapiens
  CDR3 for beta chain variable domain of TCR clone 24588 (TRBV27, TRBJ2-3)
CASSLGDTQYF

SEQ ID NO: 49177 - protein, 14 aa, Homo sapiens
  CDR3 for alpha chain variable domain of TCR clone 24589 (TRAV25, TRAJ6)
CAGRESGGSYIPTF

SEQ ID NO: 49178 - protein, 14 aa, Homo sapiens
  CDR3 for beta chain variable domain of TCR clone 24589 (TRBV7-6, TRBJ2-3)
CASSLGTVTDTQYF

SEQ ID NO: 49179 - protein, 11 aa, Homo sapiens
  CDR3 for alpha chain variable domain of TCR clone 24590 (TRAV2, TRAJ13)
CASGGYQKVTF

SEQ ID NO: 49180 - protein, 13 aa, Homo sapiens
  CDR3 for beta chain variable domain of TCR clone 24590 (TRBV3-1, TRBJ1-1)
CASRGAMNTEAFF

SEQ ID NO: 49181 - protein, 10 aa, Homo sapiens
  CDR3 for alpha chain variable domain of TCR clone 24591 (TRAV30, TRAJ48)
CGIGNEKLTF

SEQ ID NO: 49182 - protein, 14 aa, Homo sapiens
  CDR3 for beta chain variable domain of TCR clone 24591 (TRBV7-8, TRBJ2-3)
CASSLEAGTDTQYF

SEQ ID NO: 49183 - protein, 13 aa, Homo sapiens
  CDR3 for alpha chain variable domain of TCR clone 24592 (TRAV19, TRAJ57)
CALLQGGSEKLVF

SEQ ID NO: 49184 - protein, 14 aa, Homo sapiens
  CDR3 for beta chain variable domain of TCR clone 24592 (TRBV7-3, TRBJ2-3)
CASSSTGVADTQYF

SEQ ID NO: 49185 - protein, 15 aa, Homo sapiens
  CDR3 for alpha chain variable domain of TCR clone 24593 (TRAV12-3, TRAJ6)
CAMSATTGGSYIPTF

SEQ ID NO: 49186 - protein, 14 aa, Homo sapiens
  CDR3 for beta chain variable domain of TCR clone 24593 (TRBV7-8, TRBJ2-3)
CASSLEAGTDTQYF

SEQ ID NO: 49187 - protein, 15 aa, Homo sapiens
  CDR3 for alpha chain variable domain of TCR clone 24594 (TRAV8-3, TRAJ27)
CAVGPSKTNAGKSTF

SEQ ID NO: 49188 - protein, 14 aa, Homo sapiens
  CDR3 for beta chain variable domain of TCR clone 24594 (TRBV20-1, TRBJ1-1)
CSAQTRIGGTEAFF

SEQ ID NO: 49189 - protein, 14 aa, Homo sapiens
  CDR3 for alpha chain variable domain of TCR clone 24595 (TRAV22, TRAJ28)
CAVASGAGSYQLTF

SEQ ID NO: 49190 - protein, 12 aa, Homo sapiens
  CDR3 for beta chain variable domain of TCR clone 24595 (TRBV10-2, TRBJ2-5)
CASSGGGKTQYF

SEQ ID NO: 49191 - protein, 11 aa, Homo sapiens
  CDR3 for alpha chain variable domain of TCR clone 24596 (TRAV1-2, TRAJ20)
CAVANDYKLSF

SEQ ID NO: 49192 - protein, 13 aa, Homo sapiens
  CDR3 for beta chain variable domain of TCR clone 24596 (TRBV27, TRBJ2-7)
CASSFVSSYEQYF

SEQ ID NO: 49193 - protein, 15 aa, Homo sapiens
  CDR3 for alpha chain variable domain of TCR clone 24597 (TRAV8-4, TRAJ48)
CAVSAAYFGNEKLTF

SEQ ID NO: 49194 - protein, 15 aa, Homo sapiens
  CDR3 for beta chain variable domain of TCR clone 24597 (TRBV4-2, TRBJ1-2)
CASSQRTGGRDGYTF

SEQ ID NO: 49195 - protein, 10 aa, Homo sapiens
  CDR3 for alpha chain variable domain of TCR clone 24598 (TRAV23/DV6, TRAJ43)
CAAAVAALEQ

SEQ ID NO: 49196 - protein, 13 aa, Homo sapiens
  CDR3 for beta chain variable domain of TCR clone 24598 (TRBV12-4, TRBJ1-2)
CASSLRQGKGYAF

SEQ ID NO: 49197 - protein, 16 aa, Homo sapiens
  CDR3 for alpha chain variable domain of TCR clone 24599 (TRAV4, TRAJ22)
FLVGDLYSGSARQLTF

SEQ ID NO: 49198 - protein, 16 aa, Homo sapiens
  CDR3 for beta chain variable domain of TCR clone 24599 (TRBV7-9, TRBJ2-1)
CASSDVAGGSYNEQFF

SEQ ID NO: 49199 - protein, 15 aa, Homo sapiens
  CDR3 for alpha chain variable domain of TCR clone 24600 (TRAV3, TRAJ5)
CAVRDLDTGRRALTF

SEQ ID NO: 49200 - protein, 14 aa, Homo sapiens
  CDR3 for beta chain variable domain of TCR clone 24600 (TRBV7-2, TRBJ2-7)
CASRSQGAAYEQYF

SEQ ID NO: 49201 - protein, 16 aa, Homo sapiens
  CDR3 for alpha chain variable domain of TCR clone 24601 (TRAV12-3, TRAJ53)
CAMSPGSGGSNYKLTF

SEQ ID NO: 49202 - protein, 15 aa, Homo sapiens
  CDR3 for beta chain variable domain of TCR clone 24601 (TRBV7-9, TRBJ1-5)
CASSQGHQPNQPQHF

SEQ ID NO: 49203 - protein, 13 aa, Homo sapiens
  CDR3 for alpha chain variable domain of TCR clone 24602 (TRAV23/DV6, TRAJ8)
CSKQGTGFQKLVF

SEQ ID NO: 49204 - protein, 15 aa, Homo sapiens
  CDR3 for beta chain variable domain of TCR clone 24602 (TRBV28, TRBJ2-3)
CASSPDRQGANTQYF

SEQ ID NO: 49205 - protein, 13 aa, Homo sapiens
  CDR3 for alpha chain variable domain of TCR clone 24603 (TRAV13-2, TRAJ13)
CAGRPGGYQKVTF

SEQ ID NO: 49206 - protein, 15 aa, Homo sapiens
  CDR3 for beta chain variable domain of TCR clone 24603 (TRBV11-3, TRBJ2-7)
CASSPGPASSYEQYF

SEQ ID NO: 49207 - protein, 14 aa, Homo sapiens
  CDR3 for alpha chain variable domain of TCR clone 24604 (TRAV26-1, TRAJ34)
CIVRVAYNTDQLIF

SEQ ID NO: 49208 - protein, 15 aa, Homo sapiens
  CDR3 for beta chain variable domain of TCR clone 24604 (TRBV20-1, TRBJ2-7)
CSARVPAAYFYEQYF

SEQ ID NO: 49209 - protein, 17 aa, Homo sapiens
  CDR3 for alpha chain variable domain of TCR clone 24605 (TRAV3, TRAJ6)
CAVRDGPRAGGSYIPTF

SEQ ID NO: 49210 - protein, 18 aa, Homo sapiens
  CDR3 for beta chain variable domain of TCR clone 24605 (TRBV7-2, TRBJ2-7)
CASSLAQGLRDSSYEQYF

SEQ ID NO: 49211 - protein, 16 aa, Homo sapiens
  CDR3 for alpha chain variable domain of TCR clone 24606 (TRAV30, TRAJ24)
CGTEIVDADSWGKFQY

SEQ ID NO: 49212 - protein, 14 aa, Homo sapiens
  CDR3 for beta chain variable domain of TCR clone 24606 (TRBV12-5, TRBJ2-5)
CASGSRTHQETQYF

SEQ ID NO: 49213 - protein, 15 aa, Homo sapiens
  CDR3 for alpha chain variable domain of TCR clone 24607 (TRAV8-3, TRAJ11)
CAVGLLNSGYITLTF

SEQ ID NO: 49214 - protein, 16 aa, Homo sapiens
  CDR3 for beta chain variable domain of TCR clone 24607 (TRBV7-9, TRBJ1-2)
CASSLGFSSGEDGYTF

SEQ ID NO: 49215 - protein, 13 aa, Homo sapiens
  CDR3 for alpha chain variable domain of TCR clone 24608 (TRAV20, TRAJ37)
CAGCSSNTGKLIF

SEQ ID NO: 49216 - protein, 21 aa, Homo sapiens
  CDR3 for beta chain variable domain of TCR clone 24608 (TRBV4-2, TRBJ2-3)
PCSQKTRPCTSVPAAPDTQYF

SEQ ID NO: 49217 - protein, 13 aa, Homo sapiens
  CDR3 for alpha chain variable domain of TCR clone 24609 (TRAV1-2, TRAJ40)
CAVVTSGTYKYIF

SEQ ID NO: 49218 - protein, 14 aa, Homo sapiens
  CDR3 for beta chain variable domain of TCR clone 24609 (TRBV19, TRBJ2-1)
CASPTFVLSGEQFF

SEQ ID NO: 49219 - protein, 13 aa, Homo sapiens
  CDR3 for alpha chain variable domain of TCR clone 24610 (TRAV8-3, TRAJ48)
CAVVPFGNEKLTF

SEQ ID NO: 49220 - protein, 14 aa, Homo sapiens
  CDR3 for beta chain variable domain of TCR clone 24610 (TRBV18, TRBJ2-7)
CASSPRGGAYEQYL

SEQ ID NO: 49221 - protein, 15 aa, Homo sapiens
  CDR3 for alpha chain variable domain of TCR clone 24611 (TRAV12-2, TRAJ53)
CAVNGGGGSNYNLTF

SEQ ID NO: 49222 - protein, 17 aa, Homo sapiens
  CDR3 for beta chain variable domain of TCR clone 24611 (TRBV7-3, TRBJ2-3)
CASSLMKRMRGADTQYF

SEQ ID NO: 49223 - protein, 15 aa, Homo sapiens
  CDR3 for alpha chain variable domain of TCR clone 24612 (TRAV13-1, TRAJ44)
CAARRGGGTASKLTF

SEQ ID NO: 49224 - protein, 14 aa, Homo sapiens
  CDR3 for beta chain variable domain of TCR clone 24612 (TRBV7-2, TRBJ2-5)
CASSPRGSSETQYF

SEQ ID NO: 49225 - protein, 11 aa, Homo sapiens
  CDR3 for alpha chain variable domain of TCR clone 24613 (TRAV2, TRAJ33)
CAVESNYQLIW

SEQ ID NO: 49226 - protein, 13 aa, Homo sapiens
  CDR3 for beta chain variable domain of TCR clone 24613 (TRBV7-3, TRBJ1-1)
CASSQDWGAEAFF

SEQ ID NO: 49227 - protein, 13 aa, Homo sapiens
  CDR3 for alpha chain variable domain of TCR clone 24614 (TRAV16, TRAJ26)
CITVLCPGQNFVF

SEQ ID NO: 49228 - protein, 12 aa, Homo sapiens
  CDR3 for beta chain variable domain of TCR clone 24614 (TRBV11-2, TRBJ2-1)
CASSPGNNEQFF

SEQ ID NO: 49229 - protein, 14 aa, Homo sapiens
  CDR3 for alpha chain variable domain of TCR clone 24615 (TRAV9-2, TRAJ39)
CALYIYNAGNMLTF

SEQ ID NO: 49230 - protein, 14 aa, Homo sapiens
  CDR3 for beta chain variable domain of TCR clone 24615 (TRBV7-8, TRBJ2-3)
CASSLEAGTDTQYF

SEQ ID NO: 49231 - protein, 17 aa, Homo sapiens
  CDR3 for alpha chain variable domain of TCR clone 24616 (TRAV3, TRAJ42)
CAVRDRDYGGSQGNLIF

SEQ ID NO: 49232 - protein, 17 aa, Homo sapiens
  CDR3 for beta chain variable domain of TCR clone 24616 (TRBV7-8, TRBJ2-6)
CASSAGTGGAGANVLTF

SEQ ID NO: 49233 - protein, 12 aa, Homo sapiens
  CDR3 for alpha chain variable domain of TCR clone 24617 (TRAV13-1, TRAJ40)
CAAIAYLRNLQI

SEQ ID NO: 49234 - protein, 13 aa, Homo sapiens
  CDR3 for beta chain variable domain of TCR clone 24617 (TRBV3-1, TRBJ2-3)
CASSQGGGDTQYF

SEQ ID NO: 49235 - protein, 13 aa, Homo sapiens
  CDR3 for alpha chain variable domain of TCR clone 24618 (TRAV21, TRAJ27)
YAARPGNAGKSTF

SEQ ID NO: 49236 - protein, 14 aa, Homo sapiens
  CDR3 for beta chain variable domain of TCR clone 24618 (TRBV7-6, TRBJ2-3)
CASSLGTVTDTQYF

SEQ ID NO: 49237 - protein, 14 aa, Homo sapiens
  CDR3 for alpha chain variable domain of TCR clone 24619 (TRAV12-2, TRAJ40)
CAAKIPSGTYKCIL

SEQ ID NO: 49238 - protein, 14 aa, Homo sapiens
  CDR3 for beta chain variable domain of TCR clone 24619 (TRBV20-1, TRBJ1-1)
CSAQTRIGGTEAFF

SEQ ID NO: 49239 - protein, 12 aa, Homo sapiens
  CDR3 for alpha chain variable domain of TCR clone 24620 (TRAV17, TRAJ30)
CVPERRDDEIIF

SEQ ID NO: 49240 - protein, 14 aa, Homo sapiens
  CDR3 for beta chain variable domain of TCR clone 24620 (TRBV7-7, TRBJ2-2)
CASSRDRSTGELFF

SEQ ID NO: 49241 - protein, 15 aa, Homo sapiens
  CDR3 for alpha chain variable domain of TCR clone 24621 (TRAV13-2, TRAJ45)
CAEHHSGGGADGLTF

SEQ ID NO: 49242 - protein, 15 aa, Homo sapiens
  CDR3 for beta chain variable domain of TCR clone 24621 (TRBV7-2, TRBJ2-7)
CASSLAPGSAYEQYF

SEQ ID NO: 49243 - protein, 15 aa, Homo sapiens
  CDR3 for alpha chain variable domain of TCR clone 24622 (TRAV29/DV5, TRAJ24)
CAASGATDSWGKFKF

SEQ ID NO: 49244 - protein, 12 aa, Homo sapiens
  CDR3 for beta chain variable domain of TCR clone 24622 (TRBV11-2, TRBJ2-2)
CASSLPTGELFF

SEQ ID NO: 49245 - protein, 14 aa, Homo sapiens
  CDR3 for alpha chain variable domain of TCR clone 24623 (TRAV16, TRAJ37)
CALDISGDTGKLIF

SEQ ID NO: 49246 - protein, 14 aa, Homo sapiens
  CDR3 for beta chain variable domain of TCR clone 24623 (TRBV7-6, TRBJ2-7)
CASSFRQGADEQYF

SEQ ID NO: 49247 - protein, 15 aa, Homo sapiens
  CDR3 for alpha chain variable domain of TCR clone 24624 (TRAV8-3, TRAJ45)
CASSYSGGGADGLTF

SEQ ID NO: 49248 - protein, 13 aa, Homo sapiens
  CDR3 for beta chain variable domain of TCR clone 24624 (TRBV10-3, TRBJ2-7)
CASKLAGNYEQYF

SEQ ID NO: 49249 - protein, 14 aa, Homo sapiens
  CDR3 for alpha chain variable domain of TCR clone 24625 (TRAV12-2, TRAJ17)
CAVLFKAVGNKLTF

SEQ ID NO: 49250 - protein, 17 aa, Homo sapiens
  CDR3 for beta chain variable domain of TCR clone 24625 (TRBV20-1, TRBJ2-2)
CSASGSGQGGLTGELFF

SEQ ID NO: 49251 - protein, 13 aa, Homo sapiens
  CDR3 for alpha chain variable domain of TCR clone 24626 (TRAV1-2, TRAJ9)
CATLNTGGFKTIF

SEQ ID NO: 49252 - protein, 20 aa, Homo sapiens
  CDR3 for beta chain variable domain of TCR clone 24626 (TRBV28, TRBJ2-1)
CASTPIGRSPGLAGGNEQFF

SEQ ID NO: 49253 - protein, 14 aa, Homo sapiens
  CDR3 for alpha chain variable domain of TCR clone 24627 (TRAV1-2, TRAJ16)
CAVNRFSDGQKLLF

SEQ ID NO: 49254 - protein, 13 aa, Homo sapiens
  CDR3 for beta chain variable domain of TCR clone 24627 (TRBV7-9, TRBJ1-2)
CASSLKQDYGYTF

SEQ ID NO: 49255 - protein, 14 aa, Homo sapiens
  CDR3 for alpha chain variable domain of TCR clone 24628 (TRAV12-2, TRAJ13)
CAVKKTGGYQKVTF

SEQ ID NO: 49256 - protein, 13 aa, Homo sapiens
  CDR3 for beta chain variable domain of TCR clone 24628 (TRBV6-1, TRBJ1-2)
CASSELTGYGYTF

SEQ ID NO: 49257 - protein, 16 aa, Homo sapiens
  CDR3 for alpha chain variable domain of TCR clone 24629 (TRAV3, TRAJ37)
CAVRGKGSGNTGKLVF

SEQ ID NO: 49258 - protein, 13 aa, Homo sapiens
  CDR3 for beta chain variable domain of TCR clone 24629 (TRBV14, TRBJ2-7)
CASSQDRRYEQYF

SEQ ID NO: 49259 - protein, 17 aa, Homo sapiens
  CDR3 for alpha chain variable domain of TCR clone 24630 (TRAV3, TRAJ6)
CAVRDGPRAGGSYTPTF

SEQ ID NO: 49260 - protein, 17 aa, Homo sapiens
  CDR3 for beta chain variable domain of TCR clone 24630 (TRBV27, TRBJ2-6)
CASSLTGFASGANVLTF

SEQ ID NO: 49261 - protein, 18 aa, Homo sapiens
  CDR3 for alpha chain variable domain of TCR clone 24631 (TRAV21, TRAJ52)
CAVRPSPAGGTSHGKLTF

SEQ ID NO: 49262 - protein, 15 aa, Homo sapiens
  CDR3 for beta chain variable domain of TCR clone 24631 (TRBV7-9, TRBJ2-7)
CASSSSGLAVYEQYF

SEQ ID NO: 49263 - protein, 15 aa, Homo sapiens
  CDR3 for alpha chain variable domain of TCR clone 24632 (TRAV25, TRAJ52)
CAGRPGGTSYGKLTF

SEQ ID NO: 49264 - protein, 17 aa, Homo sapiens
  CDR3 for beta chain variable domain of TCR clone 24632 (TRBV7-8, TRBJ2-6)
CASSAGTGGAGTNVLTF

SEQ ID NO: 49265 - protein, 14 aa, Homo sapiens
  CDR3 for alpha chain variable domain of TCR clone 24633 (TRAV13-1, TRAJ40)
CAASMTSGTYKYIF

SEQ ID NO: 49266 - protein, 15 aa, Homo sapiens
  CDR3 for beta chain variable domain of TCR clone 24633 (TRBV7-3, TRBJ2-1)
CASSPAGGGEVEQFF

SEQ ID NO: 49267 - protein, 17 aa, Homo sapiens
  CDR3 for alpha chain variable domain of TCR clone 24634 (TRAV3, TRAJ6)
FAVRDGPRAGGSYIPTF

SEQ ID NO: 49268 - protein, 20 aa, Homo sapiens
  CDR3 for beta chain variable domain of TCR clone 24634 (TRBV28, TRBJ2-1)
CASTPIGRSPGLAGGNEQFF

SEQ ID NO: 49269 - protein, 15 aa, Homo sapiens
  CDR3 for alpha chain variable domain of TCR clone 24635 (TRAV8-3, TRAJ11)
CAVGLLNSGYSILTF

SEQ ID NO: 49270 - protein, 16 aa, Homo sapiens
  CDR3 for beta chain variable domain of TCR clone 24635 (TRBV7-9, TRBJ1-2)
CASSLGFSSGEDGYTF

SEQ ID NO: 49271 - protein, 13 aa, Homo sapiens
  CDR3 for alpha chain variable domain of TCR clone 24636 (TRAV8-3, TRAJ36)
CAVGATGANNLFF

SEQ ID NO: 49272 - protein, 15 aa, Homo sapiens
  CDR3 for beta chain variable domain of TCR clone 24636 (TRBV7-2, TRBJ1-2)
CASSPKAGWNYGYTF

SEQ ID NO: 49273 - protein, 18 aa, Homo sapiens
  CDR3 for alpha chain variable domain of TCR clone 24637 (TRAV21, TRAJ22)
CAVRLFFWFCKATDLLIW

SEQ ID NO: 49274 - protein, 14 aa, Homo sapiens
  CDR3 for beta chain variable domain of TCR clone 24637 (TRBV19, TRBJ1-5)
CASRAPDSFLSQHF

SEQ ID NO: 49275 - protein, 22 aa, Homo sapiens
  CDR3 for alpha chain variable domain of TCR clone 24638 (TRAV23/DV6, TRAJ10)
CAASIGTHGRRKQTHLWDRHSA

SEQ ID NO: 49276 - protein, 13 aa, Homo sapiens
  CDR3 for beta chain variable domain of TCR clone 24638 (TRBV11-1, TRBJ1-2)
CASVGSWGYGYTF

SEQ ID NO: 49277 - protein, 14 aa, Homo sapiens
  CDR3 for alpha chain variable domain of TCR clone 24639 (TRAV1-2, TRAJ8)
CAVREDTGFQKLVF

SEQ ID NO: 49278 - protein, 10 aa, Homo sapiens
  CDR3 for beta chain variable domain of TCR clone 24639 (TRBV6-3, TRBJ2-7)
CASSPPGQFS

SEQ ID NO: 49279 - protein, 18 aa, Homo sapiens
  CDR3 for alpha chain variable domain of TCR clone 24640 (TRAV26-1, TRAJ27)
CIVRPSFNYNTNAGKSTF

SEQ ID NO: 49280 - protein, 14 aa, Homo sapiens
  CDR3 for beta chain variable domain of TCR clone 24640 (TRBV10-3, TRBJ1-6)
CAISVDGDESPPHF

SEQ ID NO: 49281 - protein, 14 aa, Homo sapiens
  CDR3 for alpha chain variable domain of TCR clone 24641 (TRAV12-2, TRAJ40)
CAVKIPSGTYKYIF

SEQ ID NO: 49282 - protein, 16 aa, Homo sapiens
  CDR3 for beta chain variable domain of TCR clone 24641 (TRBV13, TRBJ2-2)
CASSPRTGEHTGELFF

SEQ ID NO: 49283 - protein, 13 aa, Homo sapiens
  CDR3 for alpha chain variable domain of TCR clone 24642 (TRAV8-3, TRAJ6)
CAARRGGSYIPTF

SEQ ID NO: 49284 - protein, 15 aa, Homo sapiens
  CDR3 for beta chain variable domain of TCR clone 24642 (TRBV4-1, TRBJ2-3)
CASSNLAGGRGTQYF

SEQ ID NO: 49285 - protein, 14 aa, Homo sapiens
  CDR3 for alpha chain variable domain of TCR clone 24643 (TRAV16, TRAJ17)
CSLSGRAAGNKLTF

SEQ ID NO: 49286 - protein, 15 aa, Homo sapiens
  CDR3 for beta chain variable domain of TCR clone 24643 (TRBV3-1, TRBJ1-2)
CASSPTRLPEGGYTF

SEQ ID NO: 49287 - protein, 11 aa, Homo sapiens
  CDR3 for alpha chain variable domain of TCR clone 24644 (TRAV13-2, TRAJ50)
CAENLNDKVIF

SEQ ID NO: 49288 - protein, 13 aa, Homo sapiens
  CDR3 for beta chain variable domain of TCR clone 24644 (TRBV11-2, TRBJ2-7)
CASSTSRSLEQYF

SEQ ID NO: 49289 - protein, 23 aa, Homo sapiens
  CDR3 for alpha chain variable domain of TCR clone 24645 (TRAV26-1, TRAJ38)
CIADNAGNNHIQKPDPAVYQLRD

SEQ ID NO: 49290 - protein, 13 aa, Homo sapiens
  CDR3 for beta chain variable domain of TCR clone 24645 (TRBV20-1, TRBJ1-1)
CSARGGGNTEAFF

SEQ ID NO: 49291 - protein, 13 aa, Homo sapiens
  CDR3 for alpha chain variable domain of TCR clone 24646 (TRAV8-3, TRAJ36)
CAVGATGANNLFF

SEQ ID NO: 49292 - protein, 14 aa, Homo sapiens
  CDR3 for beta chain variable domain of TCR clone 24646 (TRBV19, TRBJ2-1)
CASPTFVLSGEQFF

SEQ ID NO: 49293 - protein, 14 aa, Homo sapiens
  CDR3 for alpha chain variable domain of TCR clone 24647 (TRAV30, TRAJ33)
RGTVAPRSNYQLIW

SEQ ID NO: 49294 - protein, 14 aa, Homo sapiens
  CDR3 for beta chain variable domain of TCR clone 24647 (TRBV13, TRBJ1-1)
CASTVITVNTEAFF

SEQ ID NO: 49295 - protein, 16 aa, Homo sapiens
  CDR3 for alpha chain variable domain of TCR clone 24648 (TRAV1-2, TRAJ10)
CAVRGVLTEGGNKLTF

SEQ ID NO: 49296 - protein, 12 aa, Homo sapiens
  CDR3 for beta chain variable domain of TCR clone 24648 (TRBV7-8, TRBJ2-7)
CASSLGDREQYF

SEQ ID NO: 49297 - protein, 13 aa, Homo sapiens
  CDR3 for alpha chain variable domain of TCR clone 24649 (TRAV3, TRAJ21)
CAAREPDFNKFYF

SEQ ID NO: 49298 - protein, 13 aa, Homo sapiens
  CDR3 for beta chain variable domain of TCR clone 24649 (TRBV9, TRBJ2-1)
CASSPSGGNEQFF

SEQ ID NO: 49299 - protein, 13 aa, Homo sapiens
  CDR3 for alpha chain variable domain of TCR clone 24650 (TRAV2, TRAJ40)
CAVVTSGTYKYIF

SEQ ID NO: 49300 - protein, 15 aa, Homo sapiens
  CDR3 for beta chain variable domain of TCR clone 24650 (TRBV11-3, TRBJ2-3)
CASLKDEREGDTQYF

SEQ ID NO: 49301 - protein, 10 aa, Homo sapiens
  CDR3 for alpha chain variable domain of TCR clone 24651 (TRAV8-4, TRAJ43)
CAVSADGMRF

SEQ ID NO: 49302 - protein, 15 aa, Homo sapiens
  CDR3 for beta chain variable domain of TCR clone 24651 (TRBV5-1, TRBJ2-3)
CASSVTSGSTDTQYF

SEQ ID NO: 49303 - protein, 15 aa, Homo sapiens
  CDR3 for alpha chain variable domain of TCR clone 24652 (TRAV8-3, TRAJ15)
CAVGAPNQAGTALIF

SEQ ID NO: 49304 - protein, 14 aa, Homo sapiens
  CDR3 for beta chain variable domain of TCR clone 24652 (TRBV20-1, TRBJ2-1)
CSPNDEASYNEQFS

SEQ ID NO: 49305 - protein, 17 aa, Homo sapiens
  CDR3 for alpha chain variable domain of TCR clone 24653 (TRAV3, TRAJ6)
CAVRDGPRAGGSNIPTF

SEQ ID NO: 49306 - protein, 20 aa, Homo sapiens
  CDR3 for beta chain variable domain of TCR clone 24653 (TRBV28, TRBJ2-1)
CASTPIGRSPGLAGGNEQFF

SEQ ID NO: 49307 - protein, 14 aa, Homo sapiens
  CDR3 for alpha chain variable domain of TCR clone 24654 (TRAV12-2, TRAJ45)
CALPERGGAAGLTF

SEQ ID NO: 49308 - protein, 14 aa, Homo sapiens
  CDR3 for beta chain variable domain of TCR clone 24654 (TRBV18, TRBJ1-5)
CASSPGNSNQPQHF

SEQ ID NO: 49309 - protein, 17 aa, Homo sapiens
  CDR3 for alpha chain variable domain of TCR clone 24655 (TRAV3, TRAJ6)
CAVRDGPRAGGSYIPTF

SEQ ID NO: 49310 - protein, 15 aa, Homo sapiens
  CDR3 for beta chain variable domain of TCR clone 24655 (TRBV2, TRBJ2-1)
CASSELAGSYNEQFF

SEQ ID NO: 49311 - protein, 16 aa, Homo sapiens
  CDR3 for alpha chain variable domain of TCR clone 24656 (TRAV26-2, TRAJ57)
CILRDVGSGGSEKLGF

SEQ ID NO: 49312 - protein, 13 aa, Homo sapiens
  CDR3 for beta chain variable domain of TCR clone 24656 (TRBV18, TRBJ2-3)
CASSPGVTDTQYF

SEQ ID NO: 49313 - protein, 12 aa, Homo sapiens
  CDR3 for alpha chain variable domain of TCR clone 24657 (TRAV13-1, TRAJ53)
AASGGSNYKLTF

SEQ ID NO: 49314 - protein, 12 aa, Homo sapiens
  CDR3 for beta chain variable domain of TCR clone 24657 (TRBV12-4, TRBJ1-3)
CASSFSGNTIYF

SEQ ID NO: 49315 - protein, 13 aa, Homo sapiens
  CDR3 for alpha chain variable domain of TCR clone 24658 (TRAV21, TRAJ15)
CAVANQAGTALIF

SEQ ID NO: 49316 - protein, 14 aa, Homo sapiens
  CDR3 for beta chain variable domain of TCR clone 24658 (TRBV27, TRBJ2-2)
CASSLGVATGELFF

SEQ ID NO: 49317 - protein, 15 aa, Homo sapiens
  CDR3 for alpha chain variable domain of TCR clone 24659 (TRAV26-1, TRAJ22)
CIVRVSFWFCKATDL

SEQ ID NO: 49318 - protein, 13 aa, Homo sapiens
  CDR3 for beta chain variable domain of TCR clone 24659 (TRBV7-9, TRBJ1-2)
CASSLKQKYGYTF

SEQ ID NO: 49319 - protein, 11 aa, Homo sapiens
  CDR3 for alpha chain variable domain of TCR clone 24660 (TRAV3, TRAJ21)
CAVGNFSKFYF

SEQ ID NO: 49320 - protein, 15 aa, Homo sapiens
  CDR3 for beta chain variable domain of TCR clone 24660 (TRBV29-1, TRBJ2-1)
CSVEGGPASYNEQFF

SEQ ID NO: 49321 - protein, 14 aa, Homo sapiens
  CDR3 for alpha chain variable domain of TCR clone 24661 (TRAV13-1, TRAJ35)
CAASKGGFGNVLHC

SEQ ID NO: 49322 - protein, 14 aa, Homo sapiens
  CDR3 for beta chain variable domain of TCR clone 24661 (TRBV19, TRBJ2-5)
CASSMTGQQETQYF

SEQ ID NO: 49323 - protein, 14 aa, Homo sapiens
  CDR3 for alpha chain variable domain of TCR clone 24662 (TRAV8-3, TRAJ39)
CAVGANNAGNMLAF

SEQ ID NO: 49324 - protein, 13 aa, Homo sapiens
  CDR3 for beta chain variable domain of TCR clone 24662 (TRBV3-1, TRBJ2-5)
CASSPVLSETQYF

SEQ ID NO: 49325 - protein, 16 aa, Homo sapiens
  CDR3 for alpha chain variable domain of TCR clone 24663 (TRAV30, TRAJ24)
CGTEIVDADSWGKFQF

SEQ ID NO: 49326 - protein, 17 aa, Homo sapiens
  CDR3 for beta chain variable domain of TCR clone 24663 (TRBV20-1, TRBJ2-1)
CSAPPRLAGTGYNEQFF

SEQ ID NO: 49327 - protein, 15 aa, Homo sapiens
  CDR3 for alpha chain variable domain of TCR clone 24664 (TRAV13-1, TRAJ52)
CAATSPRTSYGKLTF

SEQ ID NO: 49328 - protein, 14 aa, Homo sapiens
  CDR3 for beta chain variable domain of TCR clone 24664 (TRBV12-5, TRBJ2-5)
CASGSRTHQETQYF

SEQ ID NO: 49329 - protein, 14 aa, Homo sapiens
  CDR3 for alpha chain variable domain of TCR clone 24665 (TRAV2, TRAJ29)
CAVESYSGNTPLDF

SEQ ID NO: 49330 - protein, 15 aa, Homo sapiens
  CDR3 for beta chain variable domain of TCR clone 24665 (TRBV19, TRBJ2-5)
CASSIARARGETQYF

SEQ ID NO: 49331 - protein, 14 aa, Homo sapiens
  CDR3 for alpha chain variable domain of TCR clone 24666 (TRAV1-2, TRAJ16)
CAVNRFSDGQKLLF

SEQ ID NO: 49332 - protein, 14 aa, Homo sapiens
  CDR3 for beta chain variable domain of TCR clone 24666 (TRBV7-2, TRBJ2-5)
CASSPRGSSETQYF

SEQ ID NO: 49333 - protein, 11 aa, Homo sapiens
  CDR3 for alpha chain variable domain of TCR clone 24667 (TRAV17, TRAJ9)
CGFTGGFKTIF

SEQ ID NO: 49334 - protein, 14 aa, Homo sapiens
  CDR3 for beta chain variable domain of TCR clone 24667 (TRBV7-9, TRBJ2-2)
CASSLVQDTGELFC

SEQ ID NO: 49335 - protein, 16 aa, Homo sapiens
  CDR3 for alpha chain variable domain of TCR clone 24668 (TRAV26-1, TRAJ32)
CIVRTNYGGATNELIF

SEQ ID NO: 49336 - protein, 14 aa, Homo sapiens
  CDR3 for beta chain variable domain of TCR clone 24668 (TRBV6-1, TRBJ1-3)
CASVQGGGGNTIYF

SEQ ID NO: 49337 - protein, 14 aa, Homo sapiens
  CDR3 for alpha chain variable domain of TCR clone 24669 (TRAV17, TRAJ11)
CATEGESGYSTLTF

SEQ ID NO: 49338 - protein, 11 aa, Homo sapiens
  CDR3 for beta chain variable domain of TCR clone 24669 (TRBV19, TRBJ1-1)
CASSIGSEAFF

SEQ ID NO: 49339 - protein, 14 aa, Homo sapiens
  CDR3 for alpha chain variable domain of TCR clone 24670 (TRAV6, TRAJ39)
CALPNNNAGNMLTF

SEQ ID NO: 49340 - protein, 17 aa, Homo sapiens
  CDR3 for beta chain variable domain of TCR clone 24670 (TRBV18, TRBJ2-3)
CASSSRGPASSTDTQYL

SEQ ID NO: 49341 - protein, 14 aa, Homo sapiens
  CDR3 for alpha chain variable domain of TCR clone 24671 (TRAV4, TRAJ9)
CLVGSGTGGFKTIF

SEQ ID NO: 49342 - protein, 14 aa, Homo sapiens
  CDR3 for beta chain variable domain of TCR clone 24671 (TRBV7-9, TRBJ2-4)
CASSLAMGGNMQYF

SEQ ID NO: 49343 - protein, 11 aa, Homo sapiens
  CDR3 for alpha chain variable domain of TCR clone 24672 (TRAV1-2, TRAJ20)
CAVANEYKLSF

SEQ ID NO: 49344 - protein, 15 aa, Homo sapiens
  CDR3 for beta chain variable domain of TCR clone 24672 (TRBV2, TRBJ2-1)
CASSELAGSYNEQFF

SEQ ID NO: 49345 - protein, 17 aa, Homo sapiens
  CDR3 for alpha chain variable domain of TCR clone 24673 (TRAV3, TRAJ6)
CAVRDGPRAGGSSIPPF

SEQ ID NO: 49346 - protein, 14 aa, Homo sapiens
  CDR3 for beta chain variable domain of TCR clone 24673 (TRBV7-2, TRBJ2-7)
CASSPKTSFYEQYF

SEQ ID NO: 49347 - protein, 15 aa, Homo sapiens
  CDR3 for alpha chain variable domain of TCR clone 24674 (TRAV27, TRAJ38)
CAGRFNAGNNRKLLW

SEQ ID NO: 49348 - protein, 13 aa, Homo sapiens
  CDR3 for beta chain variable domain of TCR clone 24674 (TRBV12-5, TRBJ2-3)
CASQNRGTDTQYF

SEQ ID NO: 49349 - protein, 15 aa, Homo sapiens
  CDR3 for alpha chain variable domain of TCR clone 24675 (TRAV35, TRAJ40)
CAGQLGTSGTYKYIF

SEQ ID NO: 49350 - protein, 14 aa, Homo sapiens
  CDR3 for beta chain variable domain of TCR clone 24675 (TRBV7-3, TRBJ2-1)
CASSLAGGTNEQLF

SEQ ID NO: 49351 - protein, 12 aa, Homo sapiens
  CDR3 for alpha chain variable domain of TCR clone 24676 (TRAV2, TRAJ10)
CDSTGGGNKLTF

SEQ ID NO: 49352 - protein, 14 aa, Homo sapiens
  CDR3 for beta chain variable domain of TCR clone 24676 (TRBV7-2, TRBJ2-2)
CASRGQGAAGELFF

SEQ ID NO: 49353 - protein, 16 aa, Homo sapiens
  CDR3 for alpha chain variable domain of TCR clone 24677 (TRAV26-1, TRAJ37)
CIVRGDGSGNTGKLIF

SEQ ID NO: 49354 - protein, 17 aa, Homo sapiens
  CDR3 for beta chain variable domain of TCR clone 24677 (TRBV4-1, TRBJ2-7)
CASSRDPLGVRGGGQYF

SEQ ID NO: 49355 - protein, 12 aa, Homo sapiens
  CDR3 for alpha chain variable domain of TCR clone 24678 (TRAV35, TRAJ49)
CAGWNTGNQVYF

SEQ ID NO: 49356 - protein, 16 aa, Homo sapiens
  CDR3 for beta chain variable domain of TCR clone 24678 (TRBV5-1, TRBJ2-2)
CASSLWDTTNTGELFF

SEQ ID NO: 49357 - protein, 13 aa, Homo sapiens
  CDR3 for alpha chain variable domain of TCR clone 24679 (TRAV3, TRAJ27)
CAVRPLGEGKSTF

SEQ ID NO: 49358 - protein, 13 aa, Homo sapiens
  CDR3 for beta chain variable domain of TCR clone 24679 (TRBV7-9, TRBJ2-3)
CASSPGSTDTQYF

SEQ ID NO: 49359 - protein, 10 aa, Homo sapiens
  CDR3 for alpha chain variable domain of TCR clone 24680 (TRAV12-3, TRAJ49)
CAMNDDQIYF

SEQ ID NO: 49360 - protein, 13 aa, Homo sapiens
  CDR3 for beta chain variable domain of TCR clone 24680 (TRBV12-4, TRBJ1-1)
CASSPGTGFEAFF

SEQ ID NO: 49361 - protein, 13 aa, Homo sapiens
  CDR3 for alpha chain variable domain of TCR clone 24681 (TRAV35, TRAJ48)
CAGREFGNEKLTF

SEQ ID NO: 49362 - protein, 14 aa, Homo sapiens
  CDR3 for beta chain variable domain of TCR clone 24681 (TRBV19, TRBJ2-1)
FASPTFVLSGEQFF

SEQ ID NO: 49363 - protein, 13 aa, Homo sapiens
  CDR3 for alpha chain variable domain of TCR clone 24682 (TRAV13-1, TRAJ39)
CAASIWAGNMLTF

SEQ ID NO: 49364 - protein, 13 aa, Homo sapiens
  CDR3 for beta chain variable domain of TCR clone 24682 (TRBV7-9, TRBJ1-2)
CASSLKQNYGYTF

SEQ ID NO: 49365 - protein, 12 aa, Homo sapiens
  CDR3 for alpha chain variable domain of TCR clone 24683 (TRAV13-1, TRAJ15)
CAASQAETALIF

SEQ ID NO: 49366 - protein, 13 aa, Homo sapiens
  CDR3 for beta chain variable domain of TCR clone 24683 (TRBV10-3, TRBJ1-2)
CAISERDSYGYTF

SEQ ID NO: 49367 - protein, 13 aa, Homo sapiens
  CDR3 for alpha chain variable domain of TCR clone 24684 (TRAV1-1, TRAJ23)
CAVVANQGGKLVF

SEQ ID NO: 49368 - protein, 12 aa, Homo sapiens
  CDR3 for beta chain variable domain of TCR clone 24684 (TRBV5-7, TRBJ1-1)
CASSLGRGKAFF

SEQ ID NO: 49369 - protein, 14 aa, Homo sapiens
  CDR3 for alpha chain variable domain of TCR clone 24685 (TRAV29/DV5, TRAJ45)
CAASFRVGADGLTF

SEQ ID NO: 49370 - protein, 11 aa, Homo sapiens
  CDR3 for beta chain variable domain of TCR clone 24685 (TRBV11-2, TRBJ2-2)
CASSLPGELFF

SEQ ID NO: 49371 - protein, 13 aa, Homo sapiens
  CDR3 for alpha chain variable domain of TCR clone 24686 (TRAV13-1, TRAJ5)
CAAEHTGRRALTF

SEQ ID NO: 49372 - protein, 15 aa, Homo sapiens
  CDR3 for beta chain variable domain of TCR clone 24686 (TRBV6-1, TRBJ2-1)
CASSGLRGQYNEQFF

SEQ ID NO: 49373 - protein, 16 aa, Homo sapiens
  CDR3 for alpha chain variable domain of TCR clone 24687 (TRAV3, TRAJ37)
CAVRPHGSGNTGKLIF

SEQ ID NO: 49374 - protein, 14 aa, Homo sapiens
  CDR3 for beta chain variable domain of TCR clone 24687 (TRBV12-5, TRBJ2-5)
CASGSRTHQETQYF

SEQ ID NO: 49375 - protein, 14 aa, Homo sapiens
  CDR3 for alpha chain variable domain of TCR clone 24688 (TRAV1-2, TRAJ16)
CAVNRFSDGQKLLF

SEQ ID NO: 49376 - protein, 13 aa, Homo sapiens
  CDR3 for beta chain variable domain of TCR clone 24688 (TRBV7-9, TRBJ2-5)
CASLPSGRETQYF

SEQ ID NO: 49377 - protein, 16 aa, Homo sapiens
  CDR3 for alpha chain variable domain of TCR clone 24689 (TRAV14/DV4, TRAJ9)
CAMREGSYTGGFKTIF

SEQ ID NO: 49378 - protein, 15 aa, Homo sapiens
  CDR3 for beta chain variable domain of TCR clone 24689 (TRBV7-9, TRBJ1-1)
CASSDSLGENTEAFF

SEQ ID NO: 49379 - protein, 11 aa, Homo sapiens
  CDR3 for alpha chain variable domain of TCR clone 24690 (TRAV3, TRAJ13)
CALTSYQKVTF

SEQ ID NO: 49380 - protein, 15 aa, Homo sapiens
  CDR3 for beta chain variable domain of TCR clone 24690 (TRBV7-9, TRBJ2-7)
CASSSSGLAVYEQYF

SEQ ID NO: 49381 - protein, 13 aa, Homo sapiens
  CDR3 for alpha chain variable domain of TCR clone 24691 (TRAV13-2, TRAJ48)
CAEMDFGNEKLTF

SEQ ID NO: 49382 - protein, 15 aa, Homo sapiens
  CDR3 for beta chain variable domain of TCR clone 24691 (TRBV7-9, TRBJ1-6)
CASSSPGLGNSPLHF

SEQ ID NO: 49383 - protein, 15 aa, Homo sapiens
  CDR3 for alpha chain variable domain of TCR clone 24692 (TRAV2, TRAJ9)
CAVEDRGTGGFKTIF

SEQ ID NO: 49384 - protein, 16 aa, Homo sapiens
  CDR3 for beta chain variable domain of TCR clone 24692 (TRBV24-1, TRBJ2-3)
CATSDHGTGATDTQYF

SEQ ID NO: 49385 - protein, 16 aa, Homo sapiens
  CDR3 for alpha chain variable domain of TCR clone 24693 (TRAV3, TRAJ4)
CAVRAFFSGGYNKLIF

SEQ ID NO: 49386 - protein, 15 aa, Homo sapiens
  CDR3 for beta chain variable domain of TCR clone 24693 (TRBV28, TRBJ2-1)
CASSIIAGGRSEQFF

SEQ ID NO: 49387 - protein, 14 aa, Homo sapiens
  CDR3 for alpha chain variable domain of TCR clone 24694 (TRAV12-2, TRAJ45)
CALPERGGADGLTL

SEQ ID NO: 49388 - protein, 14 aa, Homo sapiens
  CDR3 for beta chain variable domain of TCR clone 24694 (TRBV18, TRBJ1-5)
CASSPGNSNQPQHF

SEQ ID NO: 49389 - protein, 11 aa, Homo sapiens
  CDR3 for alpha chain variable domain of TCR clone 24695 (TRAV35, TRAJ12)
RRMDSRYKLIF

SEQ ID NO: 49390 - protein, 14 aa, Homo sapiens
  CDR3 for beta chain variable domain of TCR clone 24695 (TRBV19, TRBJ1-1)
CASSPNRGDTEAFF

SEQ ID NO: 49391 - protein, 13 aa, Homo sapiens
  CDR3 for alpha chain variable domain of TCR clone 24696 (TRAV17, TRAJ9)
CATAITGGFKTIF

SEQ ID NO: 49392 - protein, 15 aa, Homo sapiens
  CDR3 for beta chain variable domain of TCR clone 24696 (TRBV15, TRBJ2-1)
CHQQKPSGGYNEQFF

SEQ ID NO: 49393 - protein, 12 aa, Homo sapiens
  CDR3 for alpha chain variable domain of TCR clone 24697 (TRAV12-3, TRAJ17)
CAMTLTGNKLTF

SEQ ID NO: 49394 - protein, 13 aa, Homo sapiens
  CDR3 for beta chain variable domain of TCR clone 24697 (TRBV14, TRBJ2-7)
CASSQDRRYEQYF

SEQ ID NO: 49395 - protein, 14 aa, Homo sapiens
  CDR3 for alpha chain variable domain of TCR clone 24698 (TRAV12-2, TRAJ44)
CAVNPAGTASKLTL

SEQ ID NO: 49396 - protein, 13 aa, Homo sapiens
  CDR3 for beta chain variable domain of TCR clone 24698 (TRBV20-1, TRBJ1-6)
CSAPLGVGSPLHF

SEQ ID NO: 49397 - protein, 13 aa, Homo sapiens
  CDR3 for alpha chain variable domain of TCR clone 24699 (TRAV8-3, TRAJ36)
CAVGATGANNLFF

SEQ ID NO: 49398 - protein, 15 aa, Homo sapiens
  CDR3 for beta chain variable domain of TCR clone 24699 (TRBV7-2, TRBJ1-2)
CASSPRAGWNYSYTF

SEQ ID NO: 49399 - protein, 14 aa, Homo sapiens
  CDR3 for alpha chain variable domain of TCR clone 24700 (TRAV38-1, TRAJ40)
CALRPTSGTYKYIF

SEQ ID NO: 49400 - protein, 14 aa, Homo sapiens
  CDR3 for beta chain variable domain of TCR clone 24700 (TRBV20-1, TRBJ1-1)
CSAQTRIGGTEAFF

SEQ ID NO: 49401 - protein, 14 aa, Homo sapiens
  CDR3 for alpha chain variable domain of TCR clone 24701 (TRAV1-2, TRAJ16)
CAVNRFSDGQKLLF

SEQ ID NO: 49402 - protein, 17 aa, Homo sapiens
  CDR3 for beta chain variable domain of TCR clone 24701 (TRBV20-1, TRBJ2-1)
CSAPPRLAGTRYNEQFF

SEQ ID NO: 49403 - protein, 13 aa, Homo sapiens
  CDR3 for alpha chain variable domain of TCR clone 24702 (TRAV12-3, TRAJ5)
CAMIYTDRRALTF

SEQ ID NO: 49404 - protein, 12 aa, Homo sapiens
  CDR3 for beta chain variable domain of TCR clone 24702 (TRBV18, TRBJ1-4)
CASSPSREKLFF

SEQ ID NO: 49405 - protein, 14 aa, Homo sapiens
  CDR3 for alpha chain variable domain of TCR clone 24703 (TRAV23/DV6, TRAJ4)
CAANLSGGYNKLLF

SEQ ID NO: 49406 - protein, 11 aa, Homo sapiens
  CDR3 for beta chain variable domain of TCR clone 24703 (TRBV7-9, TRBJ2-3)
CASSPTDTQYF

SEQ ID NO: 49407 - protein, 15 aa, Homo sapiens
  CDR3 for alpha chain variable domain of TCR clone 24704 (TRAV12-2, TRAJ53)
CAVNGGGGSNYKLTF

SEQ ID NO: 49408 - protein, 18 aa, Homo sapiens
  CDR3 for beta chain variable domain of TCR clone 24704 (TRBV6-6, TRBJ1-3)
CASSYSKWDSISGNTIYF

SEQ ID NO: 49409 - protein, 13 aa, Homo sapiens
  CDR3 for alpha chain variable domain of TCR clone 24705 (TRAV3, TRAJ21)
CAVRETDFNKFYF

SEQ ID NO: 49410 - protein, 13 aa, Homo sapiens
  CDR3 for beta chain variable domain of TCR clone 24705 (TRBV9, TRBJ2-1)
CASSPSGGNEQFF

SEQ ID NO: 49411 - protein, 13 aa, Homo sapiens
  CDR3 for alpha chain variable domain of TCR clone 24706 (TRAV20, TRAJ37)
CAGCSSNTGKLIF

SEQ ID NO: 49412 - protein, 11 aa, Homo sapiens
  CDR3 for beta chain variable domain of TCR clone 24706 (TRBV12-4, TRBJ2-3)
CACTATDTQYF

SEQ ID NO: 49413 - protein, 10 aa, Homo sapiens
  CDR3 for alpha chain variable domain of TCR clone 24707 (TRAV12-3, TRAJ49)
CAMKDDQFYF

SEQ ID NO: 49414 - protein, 13 aa, Homo sapiens
  CDR3 for beta chain variable domain of TCR clone 24707 (TRBV12-4, TRBJ1-1)
CASSPGTGFEAFF

SEQ ID NO: 49415 - protein, 13 aa, Homo sapiens
  CDR3 for alpha chain variable domain of TCR clone 24708 (TRAV27, TRAJ57)
CRSAQGGAEKLVF

SEQ ID NO: 49416 - protein, 11 aa, Homo sapiens
  CDR3 for beta chain variable domain of TCR clone 24708 (TRBV11-2, TRBJ1-1)
CASSINTEAFF

SEQ ID NO: 49417 - protein, 16 aa, Homo sapiens
  CDR3 for alpha chain variable domain of TCR clone 24709 (TRAV16, TRAJ4)
CALSRMFSGGYNKLIF

SEQ ID NO: 49418 - protein, 17 aa, Homo sapiens
  CDR3 for beta chain variable domain of TCR clone 24709 (TRBV11-2, TRBJ2-1)
CASSLYPPGVEYNEQFF

SEQ ID NO: 49419 - protein, 15 aa, Homo sapiens
  CDR3 for alpha chain variable domain of TCR clone 24710 (TRAV8-3, TRAJ20)
CAVEAKGSNDYKLSF

SEQ ID NO: 49420 - protein, 12 aa, Homo sapiens
  CDR3 for beta chain variable domain of TCR clone 24710 (TRBV7-2, TRBJ1-2)
CASRDSTYGYTF

SEQ ID NO: 49421 - protein, 13 aa, Homo sapiens
  CDR3 for alpha chain variable domain of TCR clone 24711 (TRAV8-6, TRAJ16)
CAASRWVGQKLLF

SEQ ID NO: 49422 - protein, 15 aa, Homo sapiens
  CDR3 for beta chain variable domain of TCR clone 24711 (TRBV12-4, TRBJ2-1)
CASSLSTGVSNEQFF

SEQ ID NO: 49423 - protein, 12 aa, Homo sapiens
  CDR3 for alpha chain variable domain of TCR clone 24712 (TRAV16, TRAJ22)
CALEASARQLTF

SEQ ID NO: 49424 - protein, 14 aa, Homo sapiens
  CDR3 for beta chain variable domain of TCR clone 24712 (TRBV11-2, TRBJ2-3)
CASSSIASTDTQYF

SEQ ID NO: 49425 - protein, 13 aa, Homo sapiens
  CDR3 for alpha chain variable domain of TCR clone 24713 (TRAV2, TRAJ5)
CAVPDTGRRALTF

SEQ ID NO: 49426 - protein, 13 aa, Homo sapiens
  CDR3 for beta chain variable domain of TCR clone 24713 (TRBV20-1, TRBJ1-1)
CSARGGGNTEAFF

SEQ ID NO: 49427 - protein, 10 aa, Homo sapiens
  CDR3 for alpha chain variable domain of TCR clone 24714 (TRAV23/DV6, TRAJ57)
CVASSTLSQG

SEQ ID NO: 49428 - protein, 14 aa, Homo sapiens
  CDR3 for beta chain variable domain of TCR clone 24714 (TRBV25-1, TRBJ1-1)
CASTHLGGNTEAFF

SEQ ID NO: 49429 - protein, 12 aa, Homo sapiens
  CDR3 for alpha chain variable domain of TCR clone 24715 (TRAV27, TRAJ35)
CAGADSGNVLHC

SEQ ID NO: 49430 - protein, 16 aa, Homo sapiens
  CDR3 for beta chain variable domain of TCR clone 24715 (TRBV6-1, TRBJ2-1)
CASILRQGSSYNEQFF

SEQ ID NO: 49431 - protein, 10 aa, Homo sapiens
  CDR3 for alpha chain variable domain of TCR clone 24716 (TRAV12-3, TRAJ49)
CAMNDNQFYF

SEQ ID NO: 49432 - protein, 13 aa, Homo sapiens
  CDR3 for beta chain variable domain of TCR clone 24716 (TRBV12-4, TRBJ1-1)
CASSPGTGFEAFF

SEQ ID NO: 49433 - protein, 16 aa, Homo sapiens
  CDR3 for alpha chain variable domain of TCR clone 24717 (TRAV26-1, TRAJ53)
CIVRVARGGSNYKLTF

SEQ ID NO: 49434 - protein, 12 aa, Homo sapiens
  CDR3 for beta chain variable domain of TCR clone 24717 (TRBV7-9, TRBJ1-5)
CASSPQGQPQHF

SEQ ID NO: 49435 - protein, 15 aa, Homo sapiens
  CDR3 for alpha chain variable domain of TCR clone 24718 (TRAV27, TRAJ38)
CTGRFNAGNNRKLIW

SEQ ID NO: 49436 - protein, 13 aa, Homo sapiens
  CDR3 for beta chain variable domain of TCR clone 24718 (TRBV20-1, TRBJ2-1)
TSGALPPGNEQFF

SEQ ID NO: 49437 - protein, 14 aa, Homo sapiens
  CDR3 for alpha chain variable domain of TCR clone 24719 (TRAV12-2, TRAJ53)
CAVKGGGSNYKLTF

SEQ ID NO: 49438 - protein, 17 aa, Homo sapiens
  CDR3 for beta chain variable domain of TCR clone 24719 (TRBV7-2, TRBJ1-4)
CASSFKAGPTTDEKLFF

SEQ ID NO: 49439 - protein, 16 aa, Homo sapiens
  CDR3 for alpha chain variable domain of TCR clone 24720 (TRAV21, TRAJ37)
CAVRTAGYSNTGKLIF

SEQ ID NO: 49440 - protein, 13 aa, Homo sapiens
  CDR3 for beta chain variable domain of TCR clone 24720 (TRBV7-9, TRBJ2-5)
CASLPSGRETQYF

SEQ ID NO: 49441 - protein, 16 aa, Homo sapiens
  CDR3 for alpha chain variable domain of TCR clone 24721 (TRAV16, TRAJ42)
CARKMNYGGSQGSLIF

SEQ ID NO: 49442 - protein, 14 aa, Homo sapiens
  CDR3 for beta chain variable domain of TCR clone 24721 (TRBV14, TRBJ2-3)
CQQPDDRDTDTQYF

SEQ ID NO: 49443 - protein, 17 aa, Homo sapiens
  CDR3 for alpha chain variable domain of TCR clone 24722 (TRAV13-1, TRAJ31)
CAPIDRLMFGDGTQLVV

SEQ ID NO: 49444 - protein, 12 aa, Homo sapiens
  CDR3 for beta chain variable domain of TCR clone 24722 (TRBV7-9, TRBJ2-7)
CASSLEGYEQYF

SEQ ID NO: 49445 - protein, 12 aa, Homo sapiens
  CDR3 for alpha chain variable domain of TCR clone 24723 (TRAV27, TRAJ41)
CAGRNSGYALNL

SEQ ID NO: 49446 - protein, 13 aa, Homo sapiens
  CDR3 for beta chain variable domain of TCR clone 24723 (TRBV12-4, TRBJ1-1)
CASSPGTGFEAFF

SEQ ID NO: 49447 - protein, 12 aa, Homo sapiens
  CDR3 for alpha chain variable domain of TCR clone 24724 (TRAV12-3, TRAJ40)
RAMSSGTYKYIF

SEQ ID NO: 49448 - protein, 15 aa, Homo sapiens
  CDR3 for beta chain variable domain of TCR clone 24724 (TRBV7-3, TRBJ2-2)
CASSETGQGTGELFF

SEQ ID NO: 49449 - protein, 12 aa, Homo sapiens
  CDR3 for alpha chain variable domain of TCR clone 24725 (TRAV12-1, TRAJ40)
CVFYSGTYKYIF

SEQ ID NO: 49450 - protein, 18 aa, Homo sapiens
  CDR3 for beta chain variable domain of TCR clone 24725 (TRBV12-4, TRBJ2-2)
CASSLVAGTRGRTGELFL

SEQ ID NO: 49451 - protein, 17 aa, Homo sapiens
  CDR3 for alpha chain variable domain of TCR clone 24726 (TRAV3, TRAJ38)
CAVRDCLNAGNNRKLIW

SEQ ID NO: 49452 - protein, 17 aa, Homo sapiens
  CDR3 for beta chain variable domain of TCR clone 24726 (TRBV11-2, TRBJ2-1)
CASSLYPPGVEYNEQFF

SEQ ID NO: 49453 - protein, 15 aa, Homo sapiens
  CDR3 for alpha chain variable domain of TCR clone 24727 (TRAV8-3, TRAJ27)
CAVGPSKTNAGKSTF

SEQ ID NO: 49454 - protein, 15 aa, Homo sapiens
  CDR3 for beta chain variable domain of TCR clone 24727 (TRBV7-2, TRBJ2-1)
CASSSGLAGGNEQFV

SEQ ID NO: 49455 - protein, 13 aa, Homo sapiens
  CDR3 for alpha chain variable domain of TCR clone 24728 (TRAV27, TRAJ3)
ASLRGSSASKIIF

SEQ ID NO: 49456 - protein, 15 aa, Homo sapiens
  CDR3 for beta chain variable domain of TCR clone 24728 (TRBV28, TRBJ1-3)
CASSMGWASGSTIYF

SEQ ID NO: 49457 - protein, 12 aa, Homo sapiens
  CDR3 for alpha chain variable domain of TCR clone 24729 (TRAV17, TRAJ20)
CATQSNDYKRNF

SEQ ID NO: 49458 - protein, 13 aa, Homo sapiens
  CDR3 for beta chain variable domain of TCR clone 24729 (TRBV10-3, TRBJ1-1)
CAIIPEGGTEAFF

SEQ ID NO: 49459 - protein, 14 aa, Homo sapiens
  CDR3 for alpha chain variable domain of TCR clone 24730 (TRAV23/DV6, TRAJ40)
CAASLTSGTSKYIF

SEQ ID NO: 49460 - protein, 14 aa, Homo sapiens
  CDR3 for beta chain variable domain of TCR clone 24730 (TRBV5-1, TRBJ2-3)
CASSRGQGGGTQYF

SEQ ID NO: 49461 - protein, 13 aa, Homo sapiens
  CDR3 for alpha chain variable domain of TCR clone 24731 (TRAV2, TRAJ40)
CAVVTSGTYKYIF

SEQ ID NO: 49462 - protein, 15 aa, Homo sapiens
  CDR3 for beta chain variable domain of TCR clone 24731 (TRBV11-3, TRBJ2-3)
CDSLKDGREGDTQYF

SEQ ID NO: 49463 - protein, 15 aa, Homo sapiens
  CDR3 for alpha chain variable domain of TCR clone 24732 (TRAV13-1, TRAJ43)
CAVTPELGGNNDMRF

SEQ ID NO: 49464 - protein, 15 aa, Homo sapiens
  CDR3 for beta chain variable domain of TCR clone 24732 (TRBV10-2, TRBJ2-6)
CASSEQGTGANVLTF

SEQ ID NO: 49465 - protein, 13 aa, Homo sapiens
  CDR3 for alpha chain variable domain of TCR clone 24733 (TRAV1-2, TRAJ9)
CAALNTGGFKTIF

SEQ ID NO: 49466 - protein, 14 aa, Homo sapiens
  CDR3 for beta chain variable domain of TCR clone 24733 (TRBV18, TRBJ2-7)
CASSPRGGAYEQYF

SEQ ID NO: 49467 - protein, 12 aa, Homo sapiens
  CDR3 for alpha chain variable domain of TCR clone 24734 (TRAV8-3, TRAJ26)
CAGDNYGQNFVF

SEQ ID NO: 49468 - protein, 15 aa, Homo sapiens
  CDR3 for beta chain variable domain of TCR clone 24734 (TRBV9, TRBJ2-1)
CASSLAGSSYNEQSF

SEQ ID NO: 49469 - protein, 16 aa, Homo sapiens
  CDR3 for alpha chain variable domain of TCR clone 24735 (TRAV12-3, TRAJ53)
CAMSPGSGGSNYKLTF

SEQ ID NO: 49470 - protein, 16 aa, Homo sapiens
  CDR3 for beta chain variable domain of TCR clone 24735 (TRBV29-1, TRBJ2-5)
SAARTERDPVLRARHA

SEQ ID NO: 49471 - protein, 14 aa, Homo sapiens
  CDR3 for alpha chain variable domain of TCR clone 24736 (TRAV13-1, TRAJ35)
CAASKGGFGNVLHC

SEQ ID NO: 49472 - protein, 13 aa, Homo sapiens
  CDR3 for beta chain variable domain of TCR clone 24736 (TRBV7-3, TRBJ1-1)
CAISQDWGAEAFF

SEQ ID NO: 49473 - protein, 15 aa, Homo sapiens
  CDR3 for alpha chain variable domain of TCR clone 24737 (TRAV9-2, TRAJ44)
CALSDGPGTASKLTF

SEQ ID NO: 49474 - protein, 18 aa, Homo sapiens
  CDR3 for beta chain variable domain of TCR clone 24737 (TRBV4-1, TRBJ1-4)
CASSPRTGGAWTNEKLFF

SEQ ID NO: 49475 - protein, 12 aa, Homo sapiens
  CDR3 for alpha chain variable domain of TCR clone 24738 (TRAV12-1, TRAJ40)
CVVYSGTYKYIF

SEQ ID NO: 49476 - protein, 17 aa, Homo sapiens
  CDR3 for beta chain variable domain of TCR clone 24738 (TRBV13, TRBJ2-3)
CASSLSRVAGGRNTQYF

SEQ ID NO: 49477 - protein, 12 aa, Homo sapiens
  CDR3 for alpha chain variable domain of TCR clone 24739 (TRAV13-1, TRAJ21)
CAAKEGFNNFYF

SEQ ID NO: 49478 - protein, 14 aa, Homo sapiens
  CDR3 for beta chain variable domain of TCR clone 24739 (TRBV5-4, TRBJ1-1)
CASSLDSRRDEAFF

SEQ ID NO: 49479 - protein, 12 aa, Homo sapiens
  CDR3 for alpha chain variable domain of TCR clone 24740 (TRAV21, TRAJ49)
CAVRNTGNQFYF

SEQ ID NO: 49480 - protein, 12 aa, Homo sapiens
  CDR3 for beta chain variable domain of TCR clone 24740 (TRBV7-9, TRBJ2-7)
CATRTDAHEQYF

SEQ ID NO: 49481 - protein, 12 aa, Homo sapiens
  CDR3 for alpha chain variable domain of TCR clone 24741 (TRAV8-3, TRAJ26)
CAGDNYGQNFVS

SEQ ID NO: 49482 - protein, 12 aa, Homo sapiens
  CDR3 for beta chain variable domain of TCR clone 24741 (TRBV11-2, TRBJ2-1)
CASSPGNNEQFF

SEQ ID NO: 49483 - protein, 17 aa, Homo sapiens
  CDR3 for alpha chain variable domain of TCR clone 24742 (TRAV1-2, TRAJ22)
CLLPLCCEPGSARQLTF

SEQ ID NO: 49484 - protein, 13 aa, Homo sapiens
  CDR3 for beta chain variable domain of TCR clone 24742 (TRBV19, TRBJ1-2)
CASSVPGQDGYTF

SEQ ID NO: 49485 - protein, 15 aa, Homo sapiens
  CDR3 for alpha chain variable domain of TCR clone 24743 (TRAV8-3, TRAJ27)
CAVGPYKTNAGKSTF

SEQ ID NO: 49486 - protein, 15 aa, Homo sapiens
  CDR3 for beta chain variable domain of TCR clone 24743 (TRBV7-2, TRBJ2-1)
CASSSGLAGGNEQFF

SEQ ID NO: 49487 - protein, 12 aa, Homo sapiens
  CDR3 for alpha chain variable domain of TCR clone 24744 (TRAV12-3, TRAJ17)
CAMTLTGNKLTF

SEQ ID NO: 49488 - protein, 13 aa, Homo sapiens
  CDR3 for beta chain variable domain of TCR clone 24744 (TRBV24-1, TRBJ2-1)
CATSAGPYNEQFF

SEQ ID NO: 49489 - protein, 16 aa, Homo sapiens
  CDR3 for alpha chain variable domain of TCR clone 24745 (TRAV30, TRAJ24)
CGTEIVDADSWGKFQF

SEQ ID NO: 49490 - protein, 15 aa, Homo sapiens
  CDR3 for beta chain variable domain of TCR clone 24745 (TRBV11-2, TRBJ2-2)
CASRGLAANTGELFF

SEQ ID NO: 49491 - protein, 16 aa, Homo sapiens
  CDR3 for alpha chain variable domain of TCR clone 24746 (TRAV3, TRAJ37)
CAVRGKGSGNTGKLIF

SEQ ID NO: 49492 - protein, 13 aa, Homo sapiens
  CDR3 for beta chain variable domain of TCR clone 24746 (TRBV14, TRBJ2-7)
CASSHDRRYEQYF

SEQ ID NO: 49493 - protein, 14 aa, Homo sapiens
  CDR3 for alpha chain variable domain of TCR clone 24747 (TRAV1-2, TRAJ16)
CAVNRFSDGQKLLL

SEQ ID NO: 49494 - protein, 11 aa, Homo sapiens
  CDR3 for beta chain variable domain of TCR clone 24747 (TRBV7-9, TRBJ2-3)
CASSPTDTQYF

SEQ ID NO: 49495 - protein, 15 aa, Homo sapiens
  CDR3 for alpha chain variable domain of TCR clone 24748 (TRAV26-1, TRAJ22)
CIVRVSFWFCKATDL

SEQ ID NO: 49496 - protein, 13 aa, Homo sapiens
  CDR3 for beta chain variable domain of TCR clone 24748 (TRBV7-9, TRBJ1-2)
CASSLKQNYGYNF

SEQ ID NO: 49497 - protein, 14 aa, Homo sapiens
  CDR3 for alpha chain variable domain of TCR clone 24749 (TRAV1-1, TRAJ23)
CAVSIYNQGGKLIF

SEQ ID NO: 49498 - protein, 15 aa, Homo sapiens
  CDR3 for beta chain variable domain of TCR clone 24749 (TRBV19, TRBJ1-2)
CASSVGQVLNYGYTF

SEQ ID NO: 49499 - protein, 12 aa, Homo sapiens
  CDR3 for alpha chain variable domain of TCR clone 24750 (TRAV17, TRAJ53)
CATGGSNYKLTF

SEQ ID NO: 49500 - protein, 19 aa, Homo sapiens
  CDR3 for beta chain variable domain of TCR clone 24750 (TRBV5-1, TRBJ2-3)
CASSLWTSGGITTPDTQYF

SEQ ID NO: 49501 - protein, 13 aa, Homo sapiens
  CDR3 for alpha chain variable domain of TCR clone 24751 (TRAV8-6, TRAJ49)
CAVITNTGNQFYF

SEQ ID NO: 49502 - protein, 15 aa, Homo sapiens
  CDR3 for beta chain variable domain of TCR clone 24751 (TRBV20-1, TRBJ2-7)
CSARDRVSGMDEQYF

SEQ ID NO: 49503 - protein, 15 aa, Homo sapiens
  CDR3 for alpha chain variable domain of TCR clone 24752 (TRAV8-4, TRAJ31)
CAVSGEGNNNARLMF

SEQ ID NO: 49504 - protein, 16 aa, Homo sapiens
  CDR3 for beta chain variable domain of TCR clone 24752 (TRBV4-1, TRBJ1-2)
CASSQEGSSGIYGYTF

SEQ ID NO: 49505 - protein, 16 aa, Homo sapiens
  CDR3 for alpha chain variable domain of TCR clone 24753 (TRAV3, TRAJ3)
CAVRDRAKSSASKIIF

SEQ ID NO: 49506 - protein, 13 aa, Homo sapiens
  CDR3 for beta chain variable domain of TCR clone 24753 (TRBV10-3, TRBJ2-7)
CASKLAVNYEQYL

SEQ ID NO: 49507 - protein, 10 aa, Homo sapiens
  CDR3 for alpha chain variable domain of TCR clone 24754 (TRAV12-3, TRAJ49)
CAMNDDQFYF

SEQ ID NO: 49508 - protein, 12 aa, Homo sapiens
  CDR3 for beta chain variable domain of TCR clone 24754 (TRBV12-4, TRBJ1-1)
CQQSGDRLWAFF

SEQ ID NO: 49509 - protein, 14 aa, Homo sapiens
  CDR3 for alpha chain variable domain of TCR clone 24755 (TRAV38-1, TRAJ45)
CAYYSGGGADGLTF

SEQ ID NO: 49510 - protein, 20 aa, Homo sapiens
  CDR3 for beta chain variable domain of TCR clone 24755 (TRBV28, TRBJ2-1)
CANTPIGRSPGLAGGNEQFF

SEQ ID NO: 49511 - protein, 18 aa, Homo sapiens
  CDR3 for alpha chain variable domain of TCR clone 24756 (TRAV12-3, TRAJ52)
CAMSRTNAGGTSYGKLTF

SEQ ID NO: 49512 - protein, 17 aa, Homo sapiens
  CDR3 for beta chain variable domain of TCR clone 24756 (TRBV7-3, TRBJ2-3)
CASSLMKRMRVADTQYF

SEQ ID NO: 49513 - protein, 12 aa, Homo sapiens
  CDR3 for alpha chain variable domain of TCR clone 24757 (TRAV12-3, TRAJ5)
CAMDAGRRALTF

SEQ ID NO: 49514 - protein, 13 aa, Homo sapiens
  CDR3 for beta chain variable domain of TCR clone 24757 (TRBV7-7, TRBJ2-2)
CASSLTSAGELFF

SEQ ID NO: 49515 - protein, 12 aa, Homo sapiens
  CDR3 for alpha chain variable domain of TCR clone 24758 (TRAV4, TRAJ26)
CLVGDYGQNFVF

SEQ ID NO: 49516 - protein, 16 aa, Homo sapiens
  CDR3 for beta chain variable domain of TCR clone 24758 (TRBV7-2, TRBJ1-2)
CTSSSNQDRRGHGYTF

SEQ ID NO: 49517 - protein, 15 aa, Homo sapiens
  CDR3 for alpha chain variable domain of TCR clone 24759 (TRAV12-2, TRAJ53)
CAVNGGGGSNYKLTF

SEQ ID NO: 49518 - protein, 15 aa, Homo sapiens
  CDR3 for beta chain variable domain of TCR clone 24759 (TRBV7-9, TRBJ1-6)
CASSSPGRGNSPLHF

SEQ ID NO: 49519 - protein, 14 aa, Homo sapiens
  CDR3 for alpha chain variable domain of TCR clone 24760 (TRAV12-3, TRAJ10)
SHLPLTGGGNKLTF

SEQ ID NO: 49520 - protein, 15 aa, Homo sapiens
  CDR3 for beta chain variable domain of TCR clone 24760 (TRBV20-1, TRBJ2-7)
CSAESGTSGAYEQYF

SEQ ID NO: 49521 - protein, 15 aa, Homo sapiens
  CDR3 for alpha chain variable domain of TCR clone 24761 (TRAV8-1, TRAJ6)
CAVNTPPRRKLHTYI

SEQ ID NO: 49522 - protein, 14 aa, Homo sapiens
  CDR3 for beta chain variable domain of TCR clone 24761 (TRBV12-4, TRBJ2-1)
CASSLGQGASEQFF

SEQ ID NO: 49523 - protein, 11 aa, Homo sapiens
  CDR3 for alpha chain variable domain of TCR clone 24762 (TRAV23/DV6, TRAJ48)
CAPRWGEKLTF

SEQ ID NO: 49524 - protein, 13 aa, Homo sapiens
  CDR3 for beta chain variable domain of TCR clone 24762 (TRBV12-4, TRBJ2-5)
CASSPGTEEAQYF

SEQ ID NO: 49525 - protein, 14 aa, Homo sapiens
  CDR3 for alpha chain variable domain of TCR clone 24763 (TRAV12-3, TRAJ10)
SHLPLTGGGNKLTF

SEQ ID NO: 49526 - protein, 13 aa, Homo sapiens
  CDR3 for beta chain variable domain of TCR clone 24763 (TRBV10-3, TRBJ1-2)
CAISERDSYGYTF

SEQ ID NO: 49527 - protein, 16 aa, Homo sapiens
  CDR3 for alpha chain variable domain of TCR clone 24764 (TRAV12-3, TRAJ53)
CAMSPGSGGSNYKLRF

SEQ ID NO: 49528 - protein, 11 aa, Homo sapiens
  CDR3 for beta chain variable domain of TCR clone 24764 (TRBV29-1, TRBJ2-5)
CSEDRTGTQYF

SEQ ID NO: 49529 - protein, 14 aa, Homo sapiens
  CDR3 for alpha chain variable domain of TCR clone 24765 (TRAV20, TRAJ56)
CAVQFDGANSKLTF

SEQ ID NO: 49530 - protein, 14 aa, Homo sapiens
  CDR3 for beta chain variable domain of TCR clone 24765 (TRBV20-1, TRBJ2-7)
CSAKRGRSSYEQYF

SEQ ID NO: 49531 - protein, 16 aa, Homo sapiens
  CDR3 for alpha chain variable domain of TCR clone 24766 (TRAV27, TRAJ13)
CAGAKSDSGGYQKVTF

SEQ ID NO: 49532 - protein, 15 aa, Homo sapiens
  CDR3 for beta chain variable domain of TCR clone 24766 (TRBV29-1, TRBJ2-1)
CSVGRHALCYNEQFF

SEQ ID NO: 49533 - protein, 16 aa, Homo sapiens
  CDR3 for alpha chain variable domain of TCR clone 24767 (TRAV30, TRAJ24)
CGTEIVDADSWGKFQF

SEQ ID NO: 49534 - protein, 12 aa, Homo sapiens
  CDR3 for beta chain variable domain of TCR clone 24767 (TRBV7-9, TRBJ1-5)
CASSPQGQPQHF

SEQ ID NO: 49535 - protein, 14 aa, Homo sapiens
  CDR3 for alpha chain variable domain of TCR clone 24768 (TRAV26-1, TRAJ48)
CIVRVNFGNEKLTF

SEQ ID NO: 49536 - protein, 13 aa, Homo sapiens
  CDR3 for beta chain variable domain of TCR clone 24768 (TRBV9, TRBJ2-1)
CASSPSGGNEQFF

SEQ ID NO: 49537 - protein, 14 aa, Homo sapiens
  CDR3 for alpha chain variable domain of TCR clone 24769 (TRAV12-2, TRAJ39)
CAVTPNNAGNMLTF

SEQ ID NO: 49538 - protein, 13 aa, Homo sapiens
  CDR3 for beta chain variable domain of TCR clone 24769 (TRBV7-9, TRBJ2-5)
CASSRGTKETQYF

SEQ ID NO: 49539 - protein, 18 aa, Homo sapiens
  CDR3 for alpha chain variable domain of TCR clone 24770 (TRAV13-1, TRAJ52)
CAASKRSAGGTSYGKLTF

SEQ ID NO: 49540 - protein, 13 aa, Homo sapiens
  CDR3 for beta chain variable domain of TCR clone 24770 (TRBV12-4, TRBJ1-2)
CASSIRQGKGYTF

SEQ ID NO: 49541 - protein, 15 aa, Homo sapiens
  CDR3 for alpha chain variable domain of TCR clone 24771 (TRAV12-2, TRAJ43)
CAFDMRFGAGTRLTV

SEQ ID NO: 49542 - protein, 18 aa, Homo sapiens
  CDR3 for beta chain variable domain of TCR clone 24771 (TRBV20-1, TRBJ2-3)
CSASGIAGGPGTTDTQYF

SEQ ID NO: 49543 - protein, 15 aa, Homo sapiens
  CDR3 for alpha chain variable domain of TCR clone 24772 (TRAV23/DV6, TRAJ18)
CAAGYRGSTLGRLYF

SEQ ID NO: 49544 - protein, 13 aa, Homo sapiens
  CDR3 for beta chain variable domain of TCR clone 24772 (TRBV7-2, TRBJ2-7)
CASSSPSGSEQYF

SEQ ID NO: 49545 - protein, 10 aa, Homo sapiens
  CDR3 for alpha chain variable domain of TCR clone 24773 (TRAV12-3, TRAJ49)
CAMNDDQFYF

SEQ ID NO: 49546 - protein, 13 aa, Homo sapiens
  CDR3 for beta chain variable domain of TCR clone 24773 (TRBV12-4, TRBJ1-1)
CANSPGTGFEAFF

SEQ ID NO: 49547 - protein, 13 aa, Homo sapiens
  CDR3 for alpha chain variable domain of TCR clone 24774 (TRAV13-1, TRAJ5)
CAAMVTGRRALTF

SEQ ID NO: 49548 - protein, 15 aa, Homo sapiens
  CDR3 for beta chain variable domain of TCR clone 24774 (TRBV7-9, TRBJ2-7)
CASSPGGGLTYEQYF

SEQ ID NO: 49549 - protein, 12 aa, Homo sapiens
  CDR3 for alpha chain variable domain of TCR clone 24775 (TRAV29/DV5, TRAJ15)
CASNQAGTALIF

SEQ ID NO: 49550 - protein, 15 aa, Homo sapiens
  CDR3 for beta chain variable domain of TCR clone 24775 (TRBV7-6, TRBJ2-5)
CASSSGLAGVETQYF

SEQ ID NO: 49551 - protein, 15 aa, Homo sapiens
  CDR3 for alpha chain variable domain of TCR clone 24776 (TRAV17, TRAJ23)
CATDAEDNQGGKLIF

SEQ ID NO: 49552 - protein, 12 aa, Homo sapiens
  CDR3 for beta chain variable domain of TCR clone 24776 (TRBV2, TRBJ2-1)
CAKREGYNGQFF

SEQ ID NO: 49553 - protein, 15 aa, Homo sapiens
  CDR3 for alpha chain variable domain of TCR clone 24777 (TRAV26-1, TRAJ9)
CIVRESNTGGFKTIF

SEQ ID NO: 49554 - protein, 11 aa, Homo sapiens
  CDR3 for beta chain variable domain of TCR clone 24777 (TRBV7-6, TRBJ2-5)
CASSFQGTQYF

SEQ ID NO: 49555 - protein, 12 aa, Homo sapiens
  CDR3 for alpha chain variable domain of TCR clone 24778 (TRAV2, TRAJ9)
CAVGAGGFKTIF

SEQ ID NO: 49556 - protein, 20 aa, Homo sapiens
  CDR3 for beta chain variable domain of TCR clone 24778 (TRBV7-8, TRBJ2-2)
CASSHLFPGPTIHITGELFF

SEQ ID NO: 49557 - protein, 11 aa, Homo sapiens
  CDR3 for alpha chain variable domain of TCR clone 24779 (TRAV2, TRAJ13)
CASGGYQKVTF

SEQ ID NO: 49558 - protein, 16 aa, Homo sapiens
  CDR3 for beta chain variable domain of TCR clone 24779 (TRBV6-1, TRBJ2-5)
CASSETLDRRAETQYF

SEQ ID NO: 49559 - protein, 14 aa, Homo sapiens
  CDR3 for alpha chain variable domain of TCR clone 24780 (TRAV3, TRAJ33)
CAVRDMGSNYQLIW

SEQ ID NO: 49560 - protein, 19 aa, Homo sapiens
  CDR3 for beta chain variable domain of TCR clone 24780 (TRBV7-3, TRBJ1-2)
CASSFPQGNDGELWLHLRF

SEQ ID NO: 49561 - protein, 16 aa, Homo sapiens
  CDR3 for alpha chain variable domain of TCR clone 24781 (TRAV30, TRAJ24)
CGTEIVDADSWGKFQF

SEQ ID NO: 49562 - protein, 13 aa, Homo sapiens
  CDR3 for beta chain variable domain of TCR clone 24781 (TRBV12-4, TRBJ2-7)
CASSPTETYEQYF

SEQ ID NO: 49563 - protein, 13 aa, Homo sapiens
  CDR3 for alpha chain variable domain of TCR clone 24782 (TRAV12-3, TRAJ54)
CAMSVQGAQRLVF

SEQ ID NO: 49564 - protein, 13 aa, Homo sapiens
  CDR3 for beta chain variable domain of TCR clone 24782 (TRBV2, TRBJ1-6)
CADSGSYNSPLHF

SEQ ID NO: 49565 - protein, 17 aa, Homo sapiens
  CDR3 for alpha chain variable domain of TCR clone 24783 (TRAV3, TRAJ6)
CAVRDGPRAGGSYIPTF

SEQ ID NO: 49566 - protein, 14 aa, Homo sapiens
  CDR3 for beta chain variable domain of TCR clone 24783 (TRBV7-2, TRBJ2-7)
CGSSPKTSFYEQYF

SEQ ID NO: 49567 - protein, 13 aa, Homo sapiens
  CDR3 for alpha chain variable domain of TCR clone 24784 (TRAV27, TRAJ45)
CRSSGGGADGLTF

SEQ ID NO: 49568 - protein, 17 aa, Homo sapiens
  CDR3 for beta chain variable domain of TCR clone 24784 (TRBV11-2, TRBJ2-1)
CASSLYLPGVEYNEQFF

SEQ ID NO: 49569 - protein, 23 aa, Homo sapiens
  CDR3 for alpha chain variable domain of TCR clone 24785 (TRAV26-1, TRAJ38)
CIADNAGNNHIQNPDPAVYQLRD

SEQ ID NO: 49570 - protein, 14 aa, Homo sapiens
  CDR3 for beta chain variable domain of TCR clone 24785 (TRBV7-3, TRBJ1-1)
CASSLKGGNTEALF

SEQ ID NO: 49571 - protein, 17 aa, Homo sapiens
  CDR3 for alpha chain variable domain of TCR clone 24786 (TRAV12-2, TRAJ4)
CAVNVRPVSGGYNKLTF

SEQ ID NO: 49572 - protein, 17 aa, Homo sapiens
  CDR3 for beta chain variable domain of TCR clone 24786 (TRBV6-3, TRBJ2-1)
CASSYSSGTRGLDEQFF

SEQ ID NO: 49573 - protein, 16 aa, Homo sapiens
  CDR3 for alpha chain variable domain of TCR clone 24787 (TRAV27, TRAJ13)
CAGAKSDSGGYQKVTF

SEQ ID NO: 49574 - protein, 15 aa, Homo sapiens
  CDR3 for beta chain variable domain of TCR clone 24787 (TRBV29-1, TRBJ2-1)
CSVGRHALSYNEQFF

SEQ ID NO: 49575 - protein, 13 aa, Homo sapiens
  CDR3 for alpha chain variable domain of TCR clone 24788 (TRAV21, TRAJ27)
CAARPGNAGRSTF

SEQ ID NO: 49576 - protein, 14 aa, Homo sapiens
  CDR3 for beta chain variable domain of TCR clone 24788 (TRBV11-2, TRBJ2-7)
CASSLGAGAYEQYF

SEQ ID NO: 49577 - protein, 18 aa, Homo sapiens
  CDR3 for alpha chain variable domain of TCR clone 24789 (TRAV23/DV6, )
CAEPDIQNPDPAVYQLRD

SEQ ID NO: 49578 - protein, 13 aa, Homo sapiens
  CDR3 for beta chain variable domain of TCR clone 24789 (TRBV19, TRBJ1-2)
CASSVPGQDGYTF

SEQ ID NO: 49579 - protein, 17 aa, Homo sapiens
  CDR3 for alpha chain variable domain of TCR clone 24790 (TRAV23/DV6, TRAJ57)
CAASSTLSQGGSEKLIF

SEQ ID NO: 49580 - protein, 14 aa, Homo sapiens
  CDR3 for beta chain variable domain of TCR clone 24790 (TRBV25-1, TRBJ1-1)
CASTHLGGNTEAFF

SEQ ID NO: 49581 - protein, 13 aa, Homo sapiens
  CDR3 for alpha chain variable domain of TCR clone 24791 (TRAV1-2, TRAJ9)
CAALNTGGFKTIF

SEQ ID NO: 49582 - protein, 16 aa, Homo sapiens
  CDR3 for beta chain variable domain of TCR clone 24791 (TRBV19, TRBJ2-2)
CASRSPGTGATGELFF

SEQ ID NO: 49583 - protein, 14 aa, Homo sapiens
  CDR3 for alpha chain variable domain of TCR clone 24792 (TRAV12-2, TRAJ17)
CAVNIKAAGNKLTF

SEQ ID NO: 49584 - protein, 12 aa, Homo sapiens
  CDR3 for beta chain variable domain of TCR clone 24792 (TRBV11-2, TRBJ2-2)
CASSLGGGELFF

SEQ ID NO: 49585 - protein, 12 aa, Homo sapiens
  CDR3 for alpha chain variable domain of TCR clone 24793 (TRAV13-2, TRAJ23)
CAERHRGGKLIF

SEQ ID NO: 49586 - protein, 13 aa, Homo sapiens
  CDR3 for beta chain variable domain of TCR clone 24793 (TRBV4-2, TRBJ1-1)
CASSQAGNTEAFF

SEQ ID NO: 49587 - protein, 14 aa, Homo sapiens
  CDR3 for alpha chain variable domain of TCR clone 24794 (TRAV12-2, TRAJ13)
CAVKKTGGYQKVTF

SEQ ID NO: 49588 - protein, 12 aa, Homo sapiens
  CDR3 for beta chain variable domain of TCR clone 24794 (TRBV5-1, TRBJ1-2)
CASSQDTYGYTF

SEQ ID NO: 49589 - protein, 15 aa, Homo sapiens
  CDR3 for alpha chain variable domain of TCR clone 24795 (TRAV12-1, TRAJ44)
CVADLPTSTASKLTF

SEQ ID NO: 49590 - protein, 13 aa, Homo sapiens
  CDR3 for beta chain variable domain of TCR clone 24795 (TRBV6-5, TRBJ2-5)
CASSPQGGETQYF

SEQ ID NO: 49591 - protein, 13 aa, Homo sapiens
  CDR3 for alpha chain variable domain of TCR clone 24796 (TRAV12-2, TRAJ52)
CAAHGTNYGKLTF

SEQ ID NO: 49592 - protein, 15 aa, Homo sapiens
  CDR3 for beta chain variable domain of TCR clone 24796 (TRBV10-3, TRBJ2-7)
CAISTFSGVKGEQYF

SEQ ID NO: 49593 - protein, 13 aa, Homo sapiens
  CDR3 for alpha chain variable domain of TCR clone 24797 (TRAV27, TRAJ42)
CAGARGSQGNPIF

SEQ ID NO: 49594 - protein, 14 aa, Homo sapiens
  CDR3 for beta chain variable domain of TCR clone 24797 (TRBV20-1, TRBJ1-1)
CSAQTRIGGTEAFF

SEQ ID NO: 49595 - protein, 13 aa, Homo sapiens
  CDR3 for alpha chain variable domain of TCR clone 24798 (TRAV3, TRAJ21)
CAVGNFNKFTLDL

SEQ ID NO: 49596 - protein, 15 aa, Homo sapiens
  CDR3 for beta chain variable domain of TCR clone 24798 (TRBV15, TRBJ2-2)
CATSGTGGRVGELFF

SEQ ID NO: 49597 - protein, 12 aa, Homo sapiens
  CDR3 for alpha chain variable domain of TCR clone 24799 (TRAV27, TRAJ36)
ASTPAGANNLSF

SEQ ID NO: 49598 - protein, 13 aa, Homo sapiens
  CDR3 for beta chain variable domain of TCR clone 24799 (TRBV7-9, TRBJ2-3)
CASSPGSTDTQYF

SEQ ID NO: 49599 - protein, 15 aa, Homo sapiens
  CDR3 for alpha chain variable domain of TCR clone 24800 (TRAV12-2, TRAJ43)
CAFDMRFGARTRLTV

SEQ ID NO: 49600 - protein, 18 aa, Homo sapiens
  CDR3 for beta chain variable domain of TCR clone 24800 (TRBV20-1, TRBJ2-3)
CSASGLAGGPGTTDTQYF

SEQ ID NO: 49601 - protein, 15 aa, Homo sapiens
  CDR3 for alpha chain variable domain of TCR clone 24801 (TRAV8-6, TRAJ10)
CAVSSKGGGGNKLTF

SEQ ID NO: 49602 - protein, 15 aa, Homo sapiens
  CDR3 for beta chain variable domain of TCR clone 24801 (TRBV28, TRBJ1-2)
CASSSHSITNYGYTF

SEQ ID NO: 49603 - protein, 14 aa, Homo sapiens
  CDR3 for alpha chain variable domain of TCR clone 24802 (TRAV25, )
CADIQNPDPAVYQL

SEQ ID NO: 49604 - protein, 15 aa, Homo sapiens
  CDR3 for beta chain variable domain of TCR clone 24802 (TRBV28, TRBJ1-4)
CASSVSGSGLEKLFF

SEQ ID NO: 49605 - protein, 12 aa, Homo sapiens
  CDR3 for alpha chain variable domain of TCR clone 24803 (TRAV12-1, TRAJ40)
CVVYSGTYKYIF

SEQ ID NO: 49606 - protein, 16 aa, Homo sapiens
  CDR3 for beta chain variable domain of TCR clone 24803 (TRBV7-3, TRBJ2-2)
CASSLKRGTLSGELFF

SEQ ID NO: 49607 - protein, 16 aa, Homo sapiens
  CDR3 for alpha chain variable domain of TCR clone 24804 (TRAV3, TRAJ21)
CAVRDIERGKFNKFYF

SEQ ID NO: 49608 - protein, 13 aa, Homo sapiens
  CDR3 for beta chain variable domain of TCR clone 24804 (TRBV27, TRBJ2-7)
CASSLTTGYEQYF

SEQ ID NO: 49609 - protein, 15 aa, Homo sapiens
  CDR3 for alpha chain variable domain of TCR clone 24805 (TRAV3, TRAJ11)
CAVRVNEFRIQHPHL

SEQ ID NO: 49610 - protein, 16 aa, Homo sapiens
  CDR3 for beta chain variable domain of TCR clone 24805 (TRBV9, TRBJ2-3)
CASSGTSGKDTDTQYF

SEQ ID NO: 49611 - protein, 15 aa, Homo sapiens
  CDR3 for alpha chain variable domain of TCR clone 24806 (TRAV12-3, TRAJ6)
CAMSATTGGSYIPTF

SEQ ID NO: 49612 - protein, 16 aa, Homo sapiens
  CDR3 for beta chain variable domain of TCR clone 24806 (TRBV20-1, TRBJ1-2)
CSASMGQGVANYDYTF

SEQ ID NO: 49613 - protein, 14 aa, Homo sapiens
  CDR3 for alpha chain variable domain of TCR clone 24807 (TRAV12-2, TRAJ45)
CALPDRGGADGLTF

SEQ ID NO: 49614 - protein, 14 aa, Homo sapiens
  CDR3 for beta chain variable domain of TCR clone 24807 (TRBV18, TRBJ1-5)
CASSPGNSNQPQHF

SEQ ID NO: 49615 - protein, 13 aa, Homo sapiens
  CDR3 for alpha chain variable domain of TCR clone 24808 (TRAV16, TRAJ48)
CSPLNFGNEKLTS

SEQ ID NO: 49616 - protein, 11 aa, Homo sapiens
  CDR3 for beta chain variable domain of TCR clone 24808 (TRBV7-9, TRBJ2-3)
CASSPTDTQYF

SEQ ID NO: 49617 - protein, 11 aa, Homo sapiens
  CDR3 for alpha chain variable domain of TCR clone 24809 (TRAV2, TRAJ13)
CASGGYQKVTF

SEQ ID NO: 49618 - protein, 16 aa, Homo sapiens
  CDR3 for beta chain variable domain of TCR clone 24809 (TRBV5-4, TRBJ2-3)
CASQQPGAGGADTQYF

SEQ ID NO: 49619 - protein, 15 aa, Homo sapiens
  CDR3 for alpha chain variable domain of TCR clone 24810 (TRAV35, TRAJ20)
CAGQLVGSNDYKLSF

SEQ ID NO: 49620 - protein, 13 aa, Homo sapiens
  CDR3 for beta chain variable domain of TCR clone 24810 (TRBV19, TRBJ2-7)
CASSKTGTNEQYF

SEQ ID NO: 49621 - protein, 17 aa, Homo sapiens
  CDR3 for alpha chain variable domain of TCR clone 24811 (TRAV12-3, TRAJ6)
CAMSARGGAGGGYIPTF

SEQ ID NO: 49622 - protein, 12 aa, Homo sapiens
  CDR3 for beta chain variable domain of TCR clone 24811 (TRBV12-4, TRBJ2-3)
CASSTLPDTQYF

SEQ ID NO: 49623 - protein, 13 aa, Homo sapiens
  CDR3 for alpha chain variable domain of TCR clone 24812 (TRAV29/DV5, TRAJ31)
CAASRNNNARLML

SEQ ID NO: 49624 - protein, 12 aa, Homo sapiens
  CDR3 for beta chain variable domain of TCR clone 24812 (TRBV14, TRBJ1-1)
CASSQLKGLAFF

SEQ ID NO: 49625 - protein, 13 aa, Homo sapiens
  CDR3 for alpha chain variable domain of TCR clone 24813 (TRAV20, TRAJ29)
CAVQAVGNTPLVF

SEQ ID NO: 49626 - protein, 15 aa, Homo sapiens
  CDR3 for beta chain variable domain of TCR clone 24813 (TRBV10-2, TRBJ2-5)
CASRGSGGPQETQCF

SEQ ID NO: 49627 - protein, 13 aa, Homo sapiens
  CDR3 for alpha chain variable domain of TCR clone 24814 (TRAV12-1, TRAJ40)
CVVPTSGTYKYIF

SEQ ID NO: 49628 - protein, 18 aa, Homo sapiens
  CDR3 for beta chain variable domain of TCR clone 24814 (TRBV7-6, TRBJ2-1)
CASSPRTSGMSSYNEQSF

SEQ ID NO: 49629 - protein, 16 aa, Homo sapiens
  CDR3 for alpha chain variable domain of TCR clone 24815 (TRAV12-3, TRAJ53)
RAMSPGSGGSNYRLTF

SEQ ID NO: 49630 - protein, 14 aa, Homo sapiens
  CDR3 for beta chain variable domain of TCR clone 24815 (TRBV2, TRBJ2-7)
CASSLTSGGYEQYF

SEQ ID NO: 49631 - protein, 15 aa, Homo sapiens
  CDR3 for alpha chain variable domain of TCR clone 24816 (TRAV12-2, TRAJ53)
CAVNGGGGSNYKLTF

SEQ ID NO: 49632 - protein, 17 aa, Homo sapiens
  CDR3 for beta chain variable domain of TCR clone 24816 (TRBV7-3, TRBJ2-3)
RASSSMKRMRGADTQYF

SEQ ID NO: 49633 - protein, 14 aa, Homo sapiens
  CDR3 for alpha chain variable domain of TCR clone 24817 (TRAV8-2, TRAJ4)
CVVSPSGGYNKLIF

SEQ ID NO: 49634 - protein, 15 aa, Homo sapiens
  CDR3 for beta chain variable domain of TCR clone 24817 (TRBV4-1, TRBJ1-4)
CASGDTGGTNEKLFF

SEQ ID NO: 49635 - protein, 11 aa, Homo sapiens
  CDR3 for alpha chain variable domain of TCR clone 24818 (TRAV21, TRAJ11)
CAVNGYSTLTF

SEQ ID NO: 49636 - protein, 11 aa, Homo sapiens
  CDR3 for beta chain variable domain of TCR clone 24818 (TRBV19, TRBJ1-1)
CASSIGNEAFF

SEQ ID NO: 49637 - protein, 14 aa, Homo sapiens
  CDR3 for alpha chain variable domain of TCR clone 24819 (TRAV26-1, TRAJ40)
CIVRLLSGTYKYIF

SEQ ID NO: 49638 - protein, 22 aa, Homo sapiens
  CDR3 for beta chain variable domain of TCR clone 24819 (TRBV15, TRBJ2-7)
AWGTQPCTCVPPAETGGYEQYF

SEQ ID NO: 49639 - protein, 13 aa, Homo sapiens
  CDR3 for alpha chain variable domain of TCR clone 24820 (TRAV12-2, TRAJ20)
CAVYPSNDYKPSF

SEQ ID NO: 49640 - protein, 15 aa, Homo sapiens
  CDR3 for beta chain variable domain of TCR clone 24820 (TRBV18, TRBJ1-2)
CASSPGNGLGYGYTF

SEQ ID NO: 49641 - protein, 13 aa, Homo sapiens
  CDR3 for alpha chain variable domain of TCR clone 24821 (TRAV3, TRAJ27)
CAVRPLGAGKSTF

SEQ ID NO: 49642 - protein, 13 aa, Homo sapiens
  CDR3 for beta chain variable domain of TCR clone 24821 (TRBV7-9, TRBJ2-3)
CASSAGSTDTQYF

SEQ ID NO: 49643 - protein, 14 aa, Homo sapiens
  CDR3 for alpha chain variable domain of TCR clone 24822 (TRAV1-1, TRAJ27)
CAVIYNTNAGKSTF

SEQ ID NO: 49644 - protein, 15 aa, Homo sapiens
  CDR3 for beta chain variable domain of TCR clone 24822 (TRBV7-2, TRBJ2-1)
CASSSGLVGGNEQFF

SEQ ID NO: 49645 - protein, 14 aa, Homo sapiens
  CDR3 for alpha chain variable domain of TCR clone 24823 (TRAV13-1, TRAJ40)
CAASMTSGTYKYIF

SEQ ID NO: 49646 - protein, 15 aa, Homo sapiens
  CDR3 for beta chain variable domain of TCR clone 24823 (TRBV7-3, TRBJ2-1)
CASSPTGGGEVEQLF

SEQ ID NO: 49647 - protein, 13 aa, Homo sapiens
  CDR3 for alpha chain variable domain of TCR clone 24824 (TRAV27, TRAJ49)
CAPRPYTGNKFYF

SEQ ID NO: 49648 - protein, 16 aa, Homo sapiens
  CDR3 for beta chain variable domain of TCR clone 24824 (TRBV4-1, TRBJ1-2)
CASSQDAGQVLYGYTF

SEQ ID NO: 49649 - protein, 10 aa, Homo sapiens
  CDR3 for alpha chain variable domain of TCR clone 24825 (TRAV26-1, TRAJ40)
YIAGTYKYIF

SEQ ID NO: 49650 - protein, 15 aa, Homo sapiens
  CDR3 for beta chain variable domain of TCR clone 24825 (TRBV19, TRBJ2-1)
CASSSPGVPLDEQFF

SEQ ID NO: 49651 - protein, 13 aa, Homo sapiens
  CDR3 for alpha chain variable domain of TCR clone 24826 (TRAV27, TRAJ17)
CAGAASAGNKLTF

SEQ ID NO: 49652 - protein, 15 aa, Homo sapiens
  CDR3 for beta chain variable domain of TCR clone 24826 (TRBV5-1, TRBJ2-3)
CASRNQAGSTDTQYF

SEQ ID NO: 49653 - protein, 18 aa, Homo sapiens
  CDR3 for alpha chain variable domain of TCR clone 24827 (TRAV13-1, TRAJ45)
CAAPPQEYSGGGADGLTF

SEQ ID NO: 49654 - protein, 12 aa, Homo sapiens
  CDR3 for beta chain variable domain of TCR clone 24827 (TRBV11-2, TRBJ2-2)
CASSLGGGELFF

SEQ ID NO: 49655 - protein, 15 aa, Homo sapiens
  CDR3 for alpha chain variable domain of TCR clone 24828 (TRAV12-2, TRAJ43)
CAFEMRFGAGTRLTV

SEQ ID NO: 49656 - protein, 18 aa, Homo sapiens
  CDR3 for beta chain variable domain of TCR clone 24828 (TRBV20-1, TRBJ2-3)
CSASGLAGGPGTTDTQYF

SEQ ID NO: 49657 - protein, 14 aa, Homo sapiens
  CDR3 for alpha chain variable domain of TCR clone 24829 (TRAV12-1, TRAJ17)
CVVNYKAAGNKLTF

SEQ ID NO: 49658 - protein, 17 aa, Homo sapiens
  CDR3 for beta chain variable domain of TCR clone 24829 (TRBV20-1, TRBJ2-1)
CSASSSGLAGSCNEQFF

SEQ ID NO: 49659 - protein, 14 aa, Homo sapiens
  CDR3 for alpha chain variable domain of TCR clone 24830 (TRAV38-1, TRAJ45)
CASHSGGGADGLTF

SEQ ID NO: 49660 - protein, 13 aa, Homo sapiens
  CDR3 for beta chain variable domain of TCR clone 24830 (TRBV10-3, TRBJ1-2)
CAISERDSYGCTF

SEQ ID NO: 49661 - protein, 15 aa, Homo sapiens
  CDR3 for alpha chain variable domain of TCR clone 24831 (TRAV12-2, TRAJ53)
CAVNGGGGSNYKLTF

SEQ ID NO: 49662 - protein, 17 aa, Homo sapiens
  CDR3 for beta chain variable domain of TCR clone 24831 (TRBV11-2, TRBJ2-1)
CASSLYPPGVEYNEQFF

SEQ ID NO: 49663 - protein, 15 aa, Homo sapiens
  CDR3 for alpha chain variable domain of TCR clone 24832 (TRAV12-3, TRAJ6)
RAMSATTGGSYIPTF

SEQ ID NO: 49664 - protein, 15 aa, Homo sapiens
  CDR3 for beta chain variable domain of TCR clone 24832 (TRBV28, TRBJ2-5)
CASSPPWSYQETQYF

SEQ ID NO: 49665 - protein, 15 aa, Homo sapiens
  CDR3 for alpha chain variable domain of TCR clone 24833 (TRAV12-2, TRAJ53)
CAVNGGGGSNYKLTF

SEQ ID NO: 49666 - protein, 17 aa, Homo sapiens
  CDR3 for beta chain variable domain of TCR clone 24833 (TRBV20-1, TRBJ2-2)
CSASGSGQGGLTGELFF

SEQ ID NO: 49667 - protein, 16 aa, Homo sapiens
  CDR3 for alpha chain variable domain of TCR clone 24834 (TRAV26-1, TRAJ53)
CIVRVAMGGSNDKLTF

SEQ ID NO: 49668 - protein, 12 aa, Homo sapiens
  CDR3 for beta chain variable domain of TCR clone 24834 (TRBV7-9, TRBJ1-5)
CASSPQGQPQHF

SEQ ID NO: 49669 - protein, 11 aa, Homo sapiens
  CDR3 for alpha chain variable domain of TCR clone 24835 (TRAV16, TRAJ33)
CALHSNYQLIW

SEQ ID NO: 49670 - protein, 13 aa, Homo sapiens
  CDR3 for beta chain variable domain of TCR clone 24835 (TRBV27, TRBJ2-7)
CASSFVSSYEQYF

SEQ ID NO: 49671 - protein, 11 aa, Homo sapiens
  CDR3 for alpha chain variable domain of TCR clone 24836 (TRAV3, TRAJ21)
CAVGNFNKFYF

SEQ ID NO: 49672 - protein, 15 aa, Homo sapiens
  CDR3 for beta chain variable domain of TCR clone 24836 (TRBV11-2, TRBJ2-2)
CASSSDRVNAGELFF

SEQ ID NO: 49673 - protein, 15 aa, Homo sapiens
  CDR3 for alpha chain variable domain of TCR clone 24837 (TRAV2, TRAJ11)
CAVGGRNSEYSTLTF

SEQ ID NO: 49674 - protein, 14 aa, Homo sapiens
  CDR3 for beta chain variable domain of TCR clone 24837 (TRBV12-4, TRBJ1-1)
CASSPIRRTGEAFF

SEQ ID NO: 49675 - protein, 14 aa, Homo sapiens
  CDR3 for alpha chain variable domain of TCR clone 24838 (TRAV26-1, TRAJ38)
CIADNAGNNRKLIW

SEQ ID NO: 49676 - protein, 13 aa, Homo sapiens
  CDR3 for beta chain variable domain of TCR clone 24838 (TRBV20-1, TRBJ1-1)
CSARGGGNTESFF

SEQ ID NO: 49677 - protein, 15 aa, Homo sapiens
  CDR3 for alpha chain variable domain of TCR clone 24839 (TRAV2, TRAJ9)
CAVEDRGTGGFKTIF

SEQ ID NO: 49678 - protein, 13 aa, Homo sapiens
  CDR3 for beta chain variable domain of TCR clone 24839 (TRBV4-2, TRBJ1-1)
CASSQAGNTEAFF

SEQ ID NO: 49679 - protein, 15 aa, Homo sapiens
  CDR3 for alpha chain variable domain of TCR clone 24840 (TRAV8-1, TRAJ6)
CAVNAGAGESYIPTF

SEQ ID NO: 49680 - protein, 14 aa, Homo sapiens
  CDR3 for beta chain variable domain of TCR clone 24840 (TRBV25-1, TRBJ1-6)
CASSLSADISPLHF

SEQ ID NO: 49681 - protein, 15 aa, Homo sapiens
  CDR3 for alpha chain variable domain of TCR clone 24841 (TRAV3, TRAJ4)
CAQNMFSGGYNKLIL

SEQ ID NO: 49682 - protein, 16 aa, Homo sapiens
  CDR3 for beta chain variable domain of TCR clone 24841 (TRBV3-1, TRBJ1-6)
CASSQEFQGSYSPLHF

SEQ ID NO: 49683 - protein, 15 aa, Homo sapiens
  CDR3 for alpha chain variable domain of TCR clone 24842 (TRAV35, TRAJ40)
CAWQLGTSGTYKYIF

SEQ ID NO: 49684 - protein, 14 aa, Homo sapiens
  CDR3 for beta chain variable domain of TCR clone 24842 (TRBV7-3, TRBJ2-1)
CASSLAGGTNEQFF

SEQ ID NO: 49685 - protein, 18 aa, Homo sapiens
  CDR3 for alpha chain variable domain of TCR clone 24843 (TRAV13-1, TRAJ52)
CAAKNPNAGGTSYGKLTF

SEQ ID NO: 49686 - protein, 20 aa, Homo sapiens
  CDR3 for beta chain variable domain of TCR clone 24843 (TRBV7-8, TRBJ2-2)
CASSHLFPGPTIHITGELFF

SEQ ID NO: 49687 - protein, 15 aa, Homo sapiens
  CDR3 for alpha chain variable domain of TCR clone 24844 (TRAV26-2, TRAJ45)
CILRDRVDREEVLTD

SEQ ID NO: 49688 - protein, 15 aa, Homo sapiens
  CDR3 for beta chain variable domain of TCR clone 24844 (TRBV7-6, TRBJ2-5)
CASSKPTGPQETQYF

SEQ ID NO: 49689 - protein, 14 aa, Homo sapiens
  CDR3 for alpha chain variable domain of TCR clone 24845 (TRAV27, TRAJ36)
CAGPPKRGANNLFF

SEQ ID NO: 49690 - protein, 15 aa, Homo sapiens
  CDR3 for beta chain variable domain of TCR clone 24845 (TRBV18, TRBJ2-7)
CASSPAPTPNYEQYF

SEQ ID NO: 49691 - protein, 11 aa, Homo sapiens
  CDR3 for alpha chain variable domain of TCR clone 24846 (TRAV4, TRAJ31)
CLMGLNARLMF

SEQ ID NO: 49692 - protein, 16 aa, Homo sapiens
  CDR3 for beta chain variable domain of TCR clone 24846 (TRBV15, TRBJ2-6)
CATSVNGGFLANVLTF

SEQ ID NO: 49693 - protein, 15 aa, Homo sapiens
  CDR3 for alpha chain variable domain of TCR clone 24847 (TRAV17, TRAJ16)
CATALRFSDGQKLLL

SEQ ID NO: 49694 - protein, 15 aa, Homo sapiens
  CDR3 for beta chain variable domain of TCR clone 24847 (TRBV20-1, TRBJ1-1)
CSASRGVTGNTEAFF

SEQ ID NO: 49695 - protein, 15 aa, Homo sapiens
  CDR3 for alpha chain variable domain of TCR clone 24848 (TRAV35, TRAJ40)
CAGQLGTSGTYKYIF

SEQ ID NO: 49696 - protein, 13 aa, Homo sapiens
  CDR3 for beta chain variable domain of TCR clone 24848 (TRBV7-9, TRBJ1-2)
CASSLKQNYGYTF

SEQ ID NO: 49697 - protein, 14 aa, Homo sapiens
  CDR3 for alpha chain variable domain of TCR clone 24849 (TRAV26-1, TRAJ38)
CIADNAGNNRKLLW

SEQ ID NO: 49698 - protein, 13 aa, Homo sapiens
  CDR3 for beta chain variable domain of TCR clone 24849 (TRBV7-9, TRBJ1-2)
CASSLKQNYGYTF

SEQ ID NO: 49699 - protein, 13 aa, Homo sapiens
  CDR3 for alpha chain variable domain of TCR clone 24850 (TRAV8-6, TRAJ21)
CAVSPSSLNKFYF

SEQ ID NO: 49700 - protein, 14 aa, Homo sapiens
  CDR3 for beta chain variable domain of TCR clone 24850 (TRBV7-9, TRBJ2-5)
CASSLGTAQETQYF

SEQ ID NO: 49701 - protein, 14 aa, Homo sapiens
  CDR3 for alpha chain variable domain of TCR clone 24851 (TRAV4, TRAJ32)
CLVNYGGTTNKLIF

SEQ ID NO: 49702 - protein, 14 aa, Homo sapiens
  CDR3 for beta chain variable domain of TCR clone 24851 (TRBV15, TRBJ2-5)
CATSGGTRTETQYF

SEQ ID NO: 49703 - protein, 14 aa, Homo sapiens
  CDR3 for alpha chain variable domain of TCR clone 24852 (TRAV12-1, TRAJ17)
CVVNPKAAGNKLTF

SEQ ID NO: 49704 - protein, 16 aa, Homo sapiens
  CDR3 for beta chain variable domain of TCR clone 24852 (TRBV20-1, TRBJ2-1)
CSASASGYSPYNEQFF

SEQ ID NO: 49705 - protein, 16 aa, Homo sapiens
  CDR3 for alpha chain variable domain of TCR clone 24853 (TRAV3, TRAJ10)
CAVRDMRAGGGNKLTF

SEQ ID NO: 49706 - protein, 17 aa, Homo sapiens
  CDR3 for beta chain variable domain of TCR clone 24853 (TRBV20-1, TRBJ2-1)
CSASSSGLAGSYNEQFF

SEQ ID NO: 49707 - protein, 14 aa, Homo sapiens
  CDR3 for alpha chain variable domain of TCR clone 24854 (TRAV2, TRAJ37)
CAFDFTSNTGKLIF

SEQ ID NO: 49708 - protein, 15 aa, Homo sapiens
  CDR3 for beta chain variable domain of TCR clone 24854 (TRBV20-1, TRBJ1-1)
CSASRGVTGNTEAFF

SEQ ID NO: 49709 - protein, 16 aa, Homo sapiens
  CDR3 for alpha chain variable domain of TCR clone 24855 (TRAV21, TRAJ37)
CAVRTTGSSNTGKLIF

SEQ ID NO: 49710 - protein, 13 aa, Homo sapiens
  CDR3 for beta chain variable domain of TCR clone 24855 (TRBV7-9, TRBJ2-5)
CASLPSGRETQYF

SEQ ID NO: 49711 - protein, 16 aa, Homo sapiens
  CDR3 for alpha chain variable domain of TCR clone 24856 (TRAV21, TRAJ17)
CAVRPGEEAAGNKLTF

SEQ ID NO: 49712 - protein, 16 aa, Homo sapiens
  CDR3 for beta chain variable domain of TCR clone 24856 (TRBV2, TRBJ2-7)
CASSDPWTGPSYEQYF

SEQ ID NO: 49713 - protein, 17 aa, Homo sapiens
  CDR3 for alpha chain variable domain of TCR clone 24857 (TRAV3, TRAJ38)
CAVRDCLNAGNNRKPIW

SEQ ID NO: 49714 - protein, 13 aa, Homo sapiens
  CDR3 for beta chain variable domain of TCR clone 24857 (TRBV23-1, TRBJ1-4)
CASRGKFNEKLFF

SEQ ID NO: 49715 - protein, 15 aa, Homo sapiens
  CDR3 for alpha chain variable domain of TCR clone 24858 (TRAV27, TRAJ38)
CAARRNAGNNRKVIW

SEQ ID NO: 49716 - protein, 13 aa, Homo sapiens
  CDR3 for beta chain variable domain of TCR clone 24858 (TRBV12-5, TRBJ2-3)
CASGDRQSDTQYF

SEQ ID NO: 49717 - protein, 12 aa, Homo sapiens
  CDR3 for alpha chain variable domain of TCR clone 24859 (TRAV12-2, TRAJ8)
CAVNTGFQQLVF

SEQ ID NO: 49718 - protein, 15 aa, Homo sapiens
  CDR3 for beta chain variable domain of TCR clone 24859 (TRBV7-8, TRBJ1-5)
CASSLERRGLEPQHF

SEQ ID NO: 49719 - protein, 16 aa, Homo sapiens
  CDR3 for alpha chain variable domain of TCR clone 24860 (TRAV12-2, TRAJ32)
CAVNMNYGGATNKLIF

SEQ ID NO: 49720 - protein, 14 aa, Homo sapiens
  CDR3 for beta chain variable domain of TCR clone 24860 (TRBV7-2, TRBJ2-7)
CASSPKTSFYEQYF

SEQ ID NO: 49721 - protein, 17 aa, Homo sapiens
  CDR3 for alpha chain variable domain of TCR clone 24861 (TRAV17, TRAJ28)
CATDAVYSGAGSYQLTF

SEQ ID NO: 49722 - protein, 16 aa, Homo sapiens
  CDR3 for beta chain variable domain of TCR clone 24861 (TRBV6-1, TRBJ2-5)
RASSETLDRGAETQYF

SEQ ID NO: 49723 - protein, 19 aa, Homo sapiens
  CDR3 for alpha chain variable domain of TCR clone 24862 (TRAV25, TRAJ20)
TATQTTDVGILPHDYRLSF

SEQ ID NO: 49724 - protein, 15 aa, Homo sapiens
  CDR3 for beta chain variable domain of TCR clone 24862 (TRBV6-6, TRBJ1-5)
CASSSIQGTNQPQHF

SEQ ID NO: 49725 - protein, 14 aa, Homo sapiens
  CDR3 for alpha chain variable domain of TCR clone 24863 (TRAV12-2, TRAJ48)
CAVNAFSGNEKLTF

SEQ ID NO: 49726 - protein, 13 aa, Homo sapiens
  CDR3 for beta chain variable domain of TCR clone 24863 (TRBV28, TRBJ2-7)
CAGAQQGLDEQYF

SEQ ID NO: 49727 - protein, 15 aa, Homo sapiens
  CDR3 for alpha chain variable domain of TCR clone 24864 (TRAV2, TRAJ9)
CAVEDRGTGGFKTIF

SEQ ID NO: 49728 - protein, 16 aa, Homo sapiens
  CDR3 for beta chain variable domain of TCR clone 24864 (TRBV24-1, TRBJ2-3)
CSTSDPGTGATDTQYF

SEQ ID NO: 49729 - protein, 14 aa, Homo sapiens
  CDR3 for alpha chain variable domain of TCR clone 24865 (TRAV29/DV5, TRAJ36)
CAARRKTVANNLFF

SEQ ID NO: 49730 - protein, 14 aa, Homo sapiens
  CDR3 for beta chain variable domain of TCR clone 24865 (TRBV12-5, TRBJ2-5)
CASGSRTHQETQYF

SEQ ID NO: 49731 - protein, 12 aa, Homo sapiens
  CDR3 for alpha chain variable domain of TCR clone 24866 (TRAV3, TRAJ27)
CAVRDKAGKPTF

SEQ ID NO: 49732 - protein, 14 aa, Homo sapiens
  CDR3 for beta chain variable domain of TCR clone 24866 (TRBV5-1, TRBJ1-2)
CASSVDSTNYGYTF

SEQ ID NO: 49733 - protein, 15 aa, Homo sapiens
  CDR3 for alpha chain variable domain of TCR clone 24867 (TRAV8-3, TRAJ40)
CAAPSLGSGTYKYIF

SEQ ID NO: 49734 - protein, 16 aa, Homo sapiens
  CDR3 for beta chain variable domain of TCR clone 24867 (TRBV7-3, TRBJ2-3)
CASSVSGYRPEDTQYF

SEQ ID NO: 49735 - protein, 13 aa, Homo sapiens
  CDR3 for alpha chain variable domain of TCR clone 24868 (TRAV12-2, TRAJ20)
CAVYPSTDYKLSF

SEQ ID NO: 49736 - protein, 15 aa, Homo sapiens
  CDR3 for beta chain variable domain of TCR clone 24868 (TRBV27, TRBJ2-5)
CASSLYPRGGETQYF

SEQ ID NO: 49737 - protein, 14 aa, Homo sapiens
  CDR3 for alpha chain variable domain of TCR clone 24869 (TRAV12-3, TRAJ40)
CAVKIPSGTYKYIF

SEQ ID NO: 49738 - protein, 14 aa, Homo sapiens
  CDR3 for beta chain variable domain of TCR clone 24869 (TRBV20-1, TRBJ1-1)
CSAQTRIGGTEAFF

SEQ ID NO: 49739 - protein, 17 aa, Homo sapiens
  CDR3 for alpha chain variable domain of TCR clone 24870 (TRAV26-1, TRAJ11)
CIVRVGRSNSGYSTLTF

SEQ ID NO: 49740 - protein, 15 aa, Homo sapiens
  CDR3 for beta chain variable domain of TCR clone 24870 (TRBV27, TRBJ2-5)
CASSLIPSGGETQYF

SEQ ID NO: 49741 - protein, 11 aa, Homo sapiens
  CDR3 for alpha chain variable domain of TCR clone 24871 (TRAV21, TRAJ34)
CAPLDTDKLIF

SEQ ID NO: 49742 - protein, 16 aa, Homo sapiens
  CDR3 for beta chain variable domain of TCR clone 24871 (TRBV5-1, TRBJ2-3)
RASSLAGDRGTDTQYF

SEQ ID NO: 49743 - protein, 23 aa, Homo sapiens
  CDR3 for alpha chain variable domain of TCR clone 24872 (TRAV9-2, TRAJ38)
CALSNAGNNHIQNPDPAVYQLRD

SEQ ID NO: 49744 - protein, 13 aa, Homo sapiens
  CDR3 for beta chain variable domain of TCR clone 24872 (TRBV19, TRBJ2-7)
CASSIDRTYEQYF

SEQ ID NO: 49745 - protein, 14 aa, Homo sapiens
  CDR3 for alpha chain variable domain of TCR clone 24873 (TRAV8-4, TRAJ37)
CAVSEPSNTGKLIF

SEQ ID NO: 49746 - protein, 14 aa, Homo sapiens
  CDR3 for beta chain variable domain of TCR clone 24873 (TRBV28, TRBJ2-1)
CAIHRTGARTEQSF

SEQ ID NO: 49747 - protein, 14 aa, Homo sapiens
  CDR3 for alpha chain variable domain of TCR clone 24874 (TRAV13-1, TRAJ9)
CAASALTGGFKTIF

SEQ ID NO: 49748 - protein, 16 aa, Homo sapiens
  CDR3 for beta chain variable domain of TCR clone 24874 (TRBV7-3, TRBJ2-2)
CASSLKRGTLSGELFF

SEQ ID NO: 49749 - protein, 12 aa, Homo sapiens
  CDR3 for alpha chain variable domain of TCR clone 24875 (TRAV17, TRAJ57)
CATDGGSEKLVF

SEQ ID NO: 49750 - protein, 13 aa, Homo sapiens
  CDR3 for beta chain variable domain of TCR clone 24875 (TRBV7-9, TRBJ1-2)
CASSLKQNYGYTF

SEQ ID NO: 49751 - protein, 14 aa, Homo sapiens
  CDR3 for alpha chain variable domain of TCR clone 24876 (TRAV20, TRAJ56)
CAVQFGGANSKLTF

SEQ ID NO: 49752 - protein, 14 aa, Homo sapiens
  CDR3 for beta chain variable domain of TCR clone 24876 (TRBV20-1, TRBJ2-7)
CSAKRGRSSYEHYF

SEQ ID NO: 49753 - protein, 12 aa, Homo sapiens
  CDR3 for alpha chain variable domain of TCR clone 24877 (TRAV4, TRAJ5)
RTMDTGRRALTF

SEQ ID NO: 49754 - protein, 15 aa, Homo sapiens
  CDR3 for beta chain variable domain of TCR clone 24877 (TRBV27, TRBJ2-5)
CASSLIPSGGETQYF

SEQ ID NO: 49755 - protein, 11 aa, Homo sapiens
  CDR3 for alpha chain variable domain of TCR clone 24878 (TRAV16, TRAJ31)
CALFNNARLMF

SEQ ID NO: 49756 - protein, 13 aa, Homo sapiens
  CDR3 for beta chain variable domain of TCR clone 24878 (TRBV10-3, TRBJ2-7)
CASKLAVNYEQYF

SEQ ID NO: 49757 - protein, 12 aa, Homo sapiens
  CDR3 for alpha chain variable domain of TCR clone 24879 (TRAV2, TRAJ9)
CAVGAGGFKTIF

SEQ ID NO: 49758 - protein, 13 aa, Homo sapiens
  CDR3 for beta chain variable domain of TCR clone 24879 (TRBV12-5, TRBJ2-3)
CASGDRQSDTQYF

SEQ ID NO: 49759 - protein, 13 aa, Homo sapiens
  CDR3 for alpha chain variable domain of TCR clone 24880 (TRAV27, TRAJ41)
CAGEGNSGYALNF

SEQ ID NO: 49760 - protein, 14 aa, Homo sapiens
  CDR3 for beta chain variable domain of TCR clone 24880 (TRBV7-2, TRBJ2-7)
CASSPKTSFYEQYF

SEQ ID NO: 49761 - protein, 13 aa, Homo sapiens
  CDR3 for alpha chain variable domain of TCR clone 24881 (TRAV21, TRAJ20)
CAVGLRVDYKLSF

SEQ ID NO: 49762 - protein, 12 aa, Homo sapiens
  CDR3 for beta chain variable domain of TCR clone 24881 (TRBV11-2, TRBJ2-2)
CASSLPTGELFF

SEQ ID NO: 49763 - protein, 12 aa, Homo sapiens
  CDR3 for alpha chain variable domain of TCR clone 24882 (TRAV16, TRAJ26)
CALRGYGQNFVF

SEQ ID NO: 49764 - protein, 14 aa, Homo sapiens
  CDR3 for beta chain variable domain of TCR clone 24882 (TRBV10-3, TRBJ2-1)
CAISSDLAYNEQFF

SEQ ID NO: 49765 - protein, 10 aa, Homo sapiens
  CDR3 for alpha chain variable domain of TCR clone 24883 (TRAV13-1, TRAJ6)
CYLGSYIPTF

SEQ ID NO: 49766 - protein, 12 aa, Homo sapiens
  CDR3 for beta chain variable domain of TCR clone 24883 (TRBV11-2, TRBJ2-1)
CASSPGNNEQFF

SEQ ID NO: 49767 - protein, 12 aa, Homo sapiens
  CDR3 for alpha chain variable domain of TCR clone 24884 (TRAV20, TRAJ56)
CAVTGANIKLTF

SEQ ID NO: 49768 - protein, 14 aa, Homo sapiens
  CDR3 for beta chain variable domain of TCR clone 24884 (TRBV20-1, TRBJ2-5)
CSALVPGYQETQYF

SEQ ID NO: 49769 - protein, 17 aa, Homo sapiens
  CDR3 for alpha chain variable domain of TCR clone 24885 (TRAV3, TRAJ6)
CAVRDGPRAGGSYIPTF

SEQ ID NO: 49770 - protein, 16 aa, Homo sapiens
  CDR3 for beta chain variable domain of TCR clone 24885 (TRBV7-3, TRBJ2-3)
CASSLSGYRPEDTQYF

SEQ ID NO: 49771 - protein, 16 aa, Homo sapiens
  CDR3 for alpha chain variable domain of TCR clone 24886 (TRAV3, TRAJ32)
CAVRENYGGATNKLVF

SEQ ID NO: 49772 - protein, 12 aa, Homo sapiens
  CDR3 for beta chain variable domain of TCR clone 24886 (TRBV20-1, TRBJ1-2)
CSVTPEGYGYTF

SEQ ID NO: 49773 - protein, 13 aa, Homo sapiens
  CDR3 for alpha chain variable domain of TCR clone 24887 (TRAV3, TRAJ8)
CAVRFTGFQKLVF

SEQ ID NO: 49774 - protein, 15 aa, Homo sapiens
  CDR3 for beta chain variable domain of TCR clone 24887 (TRBV20-1, TRBJ2-7)
CSARNRVSGMDEQYF

SEQ ID NO: 49775 - protein, 14 aa, Homo sapiens
  CDR3 for alpha chain variable domain of TCR clone 24888 (TRAV26-1, TRAJ34)
CIVRVAYNTDKLIF

SEQ ID NO: 49776 - protein, 15 aa, Homo sapiens
  CDR3 for beta chain variable domain of TCR clone 24888 (TRBV20-1, TRBJ2-7)
CSARVPAAYFYEQYF

SEQ ID NO: 49777 - protein, 10 aa, Homo sapiens
  CDR3 for alpha chain variable domain of TCR clone 24889 (TRAV13-2, TRAJ24)
TTDSWGKLQF

SEQ ID NO: 49778 - protein, 12 aa, Homo sapiens
  CDR3 for beta chain variable domain of TCR clone 24889 (TRBV11-2, TRBJ2-2)
CASSLPTGELFF

SEQ ID NO: 49779 - protein, 10 aa, Homo sapiens
  CDR3 for alpha chain variable domain of TCR clone 24890 (TRAV23/DV6, TRAJ57)
CAASSTLSQG

SEQ ID NO: 49780 - protein, 14 aa, Homo sapiens
  CDR3 for beta chain variable domain of TCR clone 24890 (TRBV25-1, TRBJ1-1)
CASPHLGGNTEAFF

SEQ ID NO: 49781 - protein, 15 aa, Homo sapiens
  CDR3 for alpha chain variable domain of TCR clone 24891 (TRAV10, TRAJ6)
CVVGPRTGGSYIPTF

SEQ ID NO: 49782 - protein, 15 aa, Homo sapiens
  CDR3 for beta chain variable domain of TCR clone 24891 (TRBV20-1, TRBJ2-7)
CSARDRVSGMDEQYF

SEQ ID NO: 49783 - protein, 12 aa, Homo sapiens
  CDR3 for alpha chain variable domain of TCR clone 24892 (TRAV3, TRAJ20)
CVVRDPDYKLSF

SEQ ID NO: 49784 - protein, 14 aa, Homo sapiens
  CDR3 for beta chain variable domain of TCR clone 24892 (TRBV4-2, TRBJ2-1)
CASGLDRAYNEQFF

SEQ ID NO: 49785 - protein, 13 aa, Homo sapiens
  CDR3 for alpha chain variable domain of TCR clone 24893 (TRAV27, TRAJ41)
CAGEGNSGYALNF

SEQ ID NO: 49786 - protein, 15 aa, Homo sapiens
  CDR3 for beta chain variable domain of TCR clone 24893 (TRBV20-1, TRBJ2-7)
CSARDRVSGMDEQYF

SEQ ID NO: 49787 - protein, 14 aa, Homo sapiens
  CDR3 for alpha chain variable domain of TCR clone 24894 (TRAV1-2, TRAJ8)
CAVREDTGFQKLVF

SEQ ID NO: 49788 - protein, 15 aa, Homo sapiens
  CDR3 for beta chain variable domain of TCR clone 24894 (TRBV6-3, TRBJ2-7)
CASSSPGSVFYEQYF

SEQ ID NO: 49789 - protein, 18 aa, Homo sapiens
  CDR3 for alpha chain variable domain of TCR clone 24895 (TRAV26-1, TRAJ27)
CIVRPSFNYNTNAGKSTF

SEQ ID NO: 49790 - protein, 14 aa, Homo sapiens
  CDR3 for beta chain variable domain of TCR clone 24895 (TRBV10-3, TRBJ1-6)
CAISVDGDESPLYF

SEQ ID NO: 49791 - protein, 13 aa, Homo sapiens
  CDR3 for alpha chain variable domain of TCR clone 24896 (TRAV1-2, TRAJ9)
CATLNTGGFKTIF

SEQ ID NO: 49792 - protein, 13 aa, Homo sapiens
  CDR3 for beta chain variable domain of TCR clone 24896 (TRBV19, TRBJ1-2)
CASSVPGQDGYTF

SEQ ID NO: 49793 - protein, 14 aa, Homo sapiens
  CDR3 for alpha chain variable domain of TCR clone 24897 (TRAV38-1, TRAJ40)
CALRPTSGTYKYIF

SEQ ID NO: 49794 - protein, 12 aa, Homo sapiens
  CDR3 for beta chain variable domain of TCR clone 24897 (TRBV11-2, TRBJ2-2)
CASSLGGGELFF

SEQ ID NO: 49795 - protein, 13 aa, Homo sapiens
  CDR3 for alpha chain variable domain of TCR clone 24898 (TRAV17, TRAJ9)
CATDCTGGFKTIF

SEQ ID NO: 49796 - protein, 14 aa, Homo sapiens
  CDR3 for beta chain variable domain of TCR clone 24898 (TRBV19, TRBJ2-5)
CASSMTGQQETQYF

SEQ ID NO: 49797 - protein, 13 aa, Homo sapiens
  CDR3 for alpha chain variable domain of TCR clone 24899 (TRAV21, TRAJ57)
CAVIEGGSGKLVF

SEQ ID NO: 49798 - protein, 15 aa, Homo sapiens
  CDR3 for beta chain variable domain of TCR clone 24899 (TRBV10-3, TRBJ2-5)
CAISEFGRGQETQYF

SEQ ID NO: 49799 - protein, 12 aa, Homo sapiens
  CDR3 for alpha chain variable domain of TCR clone 24900 (TRAV3, TRAJ20)
CAVRDPDYKLSF

SEQ ID NO: 49800 - protein, 14 aa, Homo sapiens
  CDR3 for beta chain variable domain of TCR clone 24900 (TRBV25-1, TRBJ1-1)
CASTHLGGNTEAFF

SEQ ID NO: 49801 - protein, 12 aa, Homo sapiens
  CDR3 for alpha chain variable domain of TCR clone 24901 (TRAV13-1, TRAJ49)
CAASPMGNQFYF

SEQ ID NO: 49802 - protein, 13 aa, Homo sapiens
  CDR3 for beta chain variable domain of TCR clone 24901 (TRBV20-1, TRBJ2-2)
CSASAEGTGELFF

SEQ ID NO: 49803 - protein, 16 aa, Homo sapiens
  CDR3 for alpha chain variable domain of TCR clone 24902 (TRAV16, TRAJ4)
CALCRMFSGGYNKLIF

SEQ ID NO: 49804 - protein, 16 aa, Homo sapiens
  CDR3 for beta chain variable domain of TCR clone 24902 (TRBV24-1, TRBJ2-3)
CATSDPGTGATDTQYF

SEQ ID NO: 49805 - protein, 13 aa, Homo sapiens
  CDR3 for alpha chain variable domain of TCR clone 24903 (TRAV35, TRAJ42)
CAGFPGSQGNIIF

SEQ ID NO: 49806 - protein, 14 aa, Homo sapiens
  CDR3 for beta chain variable domain of TCR clone 24903 (TRBV19, TRBJ2-1)
CASPTFVLSGEQFF

SEQ ID NO: 49807 - protein, 16 aa, Homo sapiens
  CDR3 for alpha chain variable domain of TCR clone 24904 (TRAV3, TRAJ37)
CAVRPHGSGNTGKLIF

SEQ ID NO: 49808 - protein, 16 aa, Homo sapiens
  CDR3 for beta chain variable domain of TCR clone 24904 (TRBV9, TRBJ1-2)
CASSVEEKVTPYGYTF

SEQ ID NO: 49809 - protein, 14 aa, Homo sapiens
  CDR3 for alpha chain variable domain of TCR clone 24905 (TRAV1-2, TRAJ16)
CAVNRFSDGQKLLF

SEQ ID NO: 49810 - protein, 16 aa, Homo sapiens
  CDR3 for beta chain variable domain of TCR clone 24905 (TRBV28, TRBJ1-4)
CASSPPYRGRSEKLFF

SEQ ID NO: 49811 - protein, 13 aa, Homo sapiens
  CDR3 for alpha chain variable domain of TCR clone 24906 (TRAV8-3, TRAJ28)
CAVGAVGSYQLTF

SEQ ID NO: 49812 - protein, 15 aa, Homo sapiens
  CDR3 for beta chain variable domain of TCR clone 24906 (TRBV7-9, TRBJ1-5)
CASSQGHQHNQPQHF

SEQ ID NO: 49813 - protein, 16 aa, Homo sapiens
  CDR3 for alpha chain variable domain of TCR clone 24907 (TRAV3, TRAJ37)
CAVRPHGSGNTGNLIF

SEQ ID NO: 49814 - protein, 16 aa, Homo sapiens
  CDR3 for beta chain variable domain of TCR clone 24907 (TRBV9, TRBJ1-2)
CASSVEEKVSPYGYTF

SEQ ID NO: 49815 - protein, 18 aa, Homo sapiens
  CDR3 for alpha chain variable domain of TCR clone 24908 (TRAV29/DV5, TRAJ52)
CAAGFRGAGGTSYGKLKF

SEQ ID NO: 49816 - protein, 16 aa, Homo sapiens
  CDR3 for beta chain variable domain of TCR clone 24908 (TRBV7-3, TRBJ2-2)
CASSLKRGTLSGELFF

SEQ ID NO: 49817 - protein, 14 aa, Homo sapiens
  CDR3 for alpha chain variable domain of TCR clone 24909 (TRAV29/DV5, TRAJ48)
CAAMALFGNEKLTF

SEQ ID NO: 49818 - protein, 17 aa, Homo sapiens
  CDR3 for beta chain variable domain of TCR clone 24909 (TRBV20-1, TRBJ2-1)
CSASSSGLAGSYNEQFF

SEQ ID NO: 49819 - protein, 14 aa, Homo sapiens
  CDR3 for alpha chain variable domain of TCR clone 24910 (TRAV35, TRAJ50)
CAGHRKTYYDKVIF

SEQ ID NO: 49820 - protein, 13 aa, Homo sapiens
  CDR3 for beta chain variable domain of TCR clone 24910 (TRBV7-7, TRBJ2-3)
CASSLSRADTQDF

SEQ ID NO: 49821 - protein, 12 aa, Homo sapiens
  CDR3 for alpha chain variable domain of TCR clone 24911 (TRAV39, TRAJ34)
CAVPYNTDKLIF

SEQ ID NO: 49822 - protein, 10 aa, Homo sapiens
  CDR3 for beta chain variable domain of TCR clone 24911 (TRBV2, TRBJ2-7)
CASSVYEQYF

SEQ ID NO: 49823 - protein, 14 aa, Homo sapiens
  CDR3 for alpha chain variable domain of TCR clone 24912 (TRAV12-2, TRAJ44)
CTVNPAGTASKLTF

SEQ ID NO: 49824 - protein, 13 aa, Homo sapiens
  CDR3 for beta chain variable domain of TCR clone 24912 (TRBV20-1, TRBJ1-6)
CSAPLGVGSPLHF

SEQ ID NO: 49825 - protein, 14 aa, Homo sapiens
  CDR3 for alpha chain variable domain of TCR clone 24913 (TRAV26-1, TRAJ39)
CIVRGSSAGNMLTF

SEQ ID NO: 49826 - protein, 15 aa, Homo sapiens
  CDR3 for beta chain variable domain of TCR clone 24913 (TRBV7-9, TRBJ1-5)
CASSQGHQPNQPQHF

SEQ ID NO: 49827 - protein, 14 aa, Homo sapiens
  CDR3 for alpha chain variable domain of TCR clone 24914 (TRAV13-1, TRAJ35)
FAASKGGFGNVLHC

SEQ ID NO: 49828 - protein, 15 aa, Homo sapiens
  CDR3 for beta chain variable domain of TCR clone 24914 (TRBV28, TRBJ2-1)
CASSGLAEVDNEQFF

SEQ ID NO: 49829 - protein, 16 aa, Homo sapiens
  CDR3 for alpha chain variable domain of TCR clone 24915 (TRAV12-1, TRAJ13)
CVVNLEVSGGYQKVTF

SEQ ID NO: 49830 - protein, 16 aa, Homo sapiens
  CDR3 for beta chain variable domain of TCR clone 24915 (TRBV24-1, TRBJ2-6)
CATSDRRASGANVLTL

SEQ ID NO: 49831 - protein, 12 aa, Homo sapiens
  CDR3 for alpha chain variable domain of TCR clone 24916 (TRAV13-1, TRAJ21)
CAAKEGFSKFYF

SEQ ID NO: 49832 - protein, 14 aa, Homo sapiens
  CDR3 for beta chain variable domain of TCR clone 24916 (TRBV5-4, TRBJ1-1)
CASSLDSRRDEAFF

SEQ ID NO: 49833 - protein, 13 aa, Homo sapiens
  CDR3 for alpha chain variable domain of TCR clone 24917 (TRAV17, TRAJ26)
CATVDNYGQNFVF

SEQ ID NO: 49834 - protein, 13 aa, Homo sapiens
  CDR3 for beta chain variable domain of TCR clone 24917 (TRBV18, TRBJ2-5)
CASSLQGQETQYF

SEQ ID NO: 49835 - protein, 14 aa, Homo sapiens
  CDR3 for alpha chain variable domain of TCR clone 24918 (TRAV40, TRAJ31)
CLLGDQNNNARLMF

SEQ ID NO: 49836 - protein, 15 aa, Homo sapiens
  CDR3 for beta chain variable domain of TCR clone 24918 (TRBV20-1, TRBJ2-1)
CSATSSGTSGGEQFF

SEQ ID NO: 49837 - protein, 14 aa, Homo sapiens
  CDR3 for alpha chain variable domain of TCR clone 24919 (TRAV12-3, TRAJ10)
SHLPLTGGGNKLTF

SEQ ID NO: 49838 - protein, 18 aa, Homo sapiens
  CDR3 for beta chain variable domain of TCR clone 24919 (TRBV25-1, TRBJ1-2)
CASSGLQNGQGLIFGYTF

SEQ ID NO: 49839 - protein, 17 aa, Homo sapiens
  CDR3 for alpha chain variable domain of TCR clone 24920 (TRAV3, TRAJ6)
CAVRDGPRAGGSYIPTF

SEQ ID NO: 49840 - protein, 15 aa, Homo sapiens
  CDR3 for beta chain variable domain of TCR clone 24920 (TRBV7-2, TRBJ2-1)
CASTHGTGIYNEQFF

SEQ ID NO: 49841 - protein, 12 aa, Homo sapiens
  CDR3 for alpha chain variable domain of TCR clone 24921 (TRAV8-3, TRAJ20)
CAVGANDYKLSF

SEQ ID NO: 49842 - protein, 16 aa, Homo sapiens
  CDR3 for beta chain variable domain of TCR clone 24921 (TRBV19, TRBJ2-2)
CAIRSPGTGATGELFF

SEQ ID NO: 49843 - protein, 18 aa, Homo sapiens
  CDR3 for alpha chain variable domain of TCR clone 24922 (TRAV21, TRAJ52)
CAVRPSPAGGTSYGKLTF

SEQ ID NO: 49844 - protein, 14 aa, Homo sapiens
  CDR3 for beta chain variable domain of TCR clone 24922 (TRBV5-1, TRBJ2-7)
CASSRGESLYEQYF

SEQ ID NO: 49845 - protein, 15 aa, Homo sapiens
  CDR3 for alpha chain variable domain of TCR clone 24923 (TRAV8-3, TRAJ15)
CAVGSPNQAGTALIF

SEQ ID NO: 49846 - protein, 14 aa, Homo sapiens
  CDR3 for beta chain variable domain of TCR clone 24923 (TRBV20-1, TRBJ2-1)
CSPNDEASYNEQFF

SEQ ID NO: 49847 - protein, 14 aa, Homo sapiens
  CDR3 for alpha chain variable domain of TCR clone 24924 (TRAV21, TRAJ45)
CAVSSGGGADGLTF

SEQ ID NO: 49848 - protein, 12 aa, Homo sapiens
  CDR3 for beta chain variable domain of TCR clone 24924 (TRBV11-2, TRBJ2-2)
CASSLGGGELFF

SEQ ID NO: 49849 - protein, 17 aa, Homo sapiens
  CDR3 for alpha chain variable domain of TCR clone 24925 (TRAV3, TRAJ38)
CAVRDCLNAGNNRKLLW

SEQ ID NO: 49850 - protein, 14 aa, Homo sapiens
  CDR3 for beta chain variable domain of TCR clone 24925 (TRBV5-5, TRBJ1-5)
CASSGQGVDQPQHF

SEQ ID NO: 49851 - protein, 16 aa, Homo sapiens
  CDR3 for alpha chain variable domain of TCR clone 24926 (TRAV8-1, TRAJ39)
CAVNAPSYNAGNMLTF

SEQ ID NO: 49852 - protein, 15 aa, Homo sapiens
  CDR3 for beta chain variable domain of TCR clone 24926 (TRBV4-1, TRBJ2-3)
CASRSTRAGTDTQYF

SEQ ID NO: 49853 - protein, 11 aa, Homo sapiens
  CDR3 for alpha chain variable domain of TCR clone 24927 (TRAV12-2, TRAJ49)
CALQGGNQFYF

SEQ ID NO: 49854 - protein, 14 aa, Homo sapiens
  CDR3 for beta chain variable domain of TCR clone 24927 (TRBV7-2, TRBJ2-7)
CVSSPKTSFYEQYF

SEQ ID NO: 49855 - protein, 14 aa, Homo sapiens
  CDR3 for alpha chain variable domain of TCR clone 24928 (TRAV29/DV5, TRAJ36)
CAACRKTGANNLFF

SEQ ID NO: 49856 - protein, 14 aa, Homo sapiens
  CDR3 for beta chain variable domain of TCR clone 24928 (TRBV12-5, TRBJ2-5)
CASGSRTHQETQYF

SEQ ID NO: 49857 - protein, 13 aa, Homo sapiens
  CDR3 for alpha chain variable domain of TCR clone 24929 (TRAV21, TRAJ27)
CAALNTNAGKSTF

SEQ ID NO: 49858 - protein, 14 aa, Homo sapiens
  CDR3 for beta chain variable domain of TCR clone 24929 (TRBV7-3, TRBJ1-1)
CASSLKGGNTEAFF

SEQ ID NO: 49859 - protein, 13 aa, Homo sapiens
  CDR3 for alpha chain variable domain of TCR clone 24930 (TRAV12-2, TRAJ52)
CAVSGTSYGKLTL

SEQ ID NO: 49860 - protein, 17 aa, Homo sapiens
  CDR3 for beta chain variable domain of TCR clone 24930 (TRBV11-2, TRBJ2-1)
CASSLYPPGVEYNEQFF

SEQ ID NO: 49861 - protein, 13 aa, Homo sapiens
  CDR3 for alpha chain variable domain of TCR clone 24931 (TRAV3, TRAJ28)
CCERGAGSYQLTF

SEQ ID NO: 49862 - protein, 16 aa, Homo sapiens
  CDR3 for beta chain variable domain of TCR clone 24931 (TRBV4-1, TRBJ2-7)
CASSQEWTSGPLEQYF

SEQ ID NO: 49863 - protein, 13 aa, Homo sapiens
  CDR3 for alpha chain variable domain of TCR clone 24932 (TRAV17, TRAJ26)
CATVDNYGKNFVF

SEQ ID NO: 49864 - protein, 16 aa, Homo sapiens
  CDR3 for beta chain variable domain of TCR clone 24932 (TRBV2, TRBJ2-1)
CASSVGGSLSYNEQFF

SEQ ID NO: 49865 - protein, 14 aa, Homo sapiens
  CDR3 for alpha chain variable domain of TCR clone 24933 (TRAV1-2, TRAJ8)
CAVREDTGFQKLVF

SEQ ID NO: 49866 - protein, 16 aa, Homo sapiens
  CDR3 for beta chain variable domain of TCR clone 24933 (TRBV10-3, TRBJ2-1)
CAISGVGDGGGGEQFF

SEQ ID NO: 49867 - protein, 15 aa, Homo sapiens
  CDR3 for alpha chain variable domain of TCR clone 24934 (TRAV3, TRAJ45)
CAVRTPWGGADGITF

SEQ ID NO: 49868 - protein, 16 aa, Homo sapiens
  CDR3 for beta chain variable domain of TCR clone 24934 (TRBV6-1, TRBJ2-2)
CASSFGQGANTGELFF

SEQ ID NO: 49869 - protein, 13 aa, Homo sapiens
  CDR3 for alpha chain variable domain of TCR clone 24935 (TRAV12-3, TRAJ9)
CAMRNTGGLKTIF

SEQ ID NO: 49870 - protein, 14 aa, Homo sapiens
  CDR3 for beta chain variable domain of TCR clone 24935 (TRBV11-2, TRBJ2-7)
CASSSTGEGYEQYF

SEQ ID NO: 49871 - protein, 14 aa, Homo sapiens
  CDR3 for alpha chain variable domain of TCR clone 24936 (TRAV21, TRAJ15)
CAVSLNQAGTALIL

SEQ ID NO: 49872 - protein, 11 aa, Homo sapiens
  CDR3 for beta chain variable domain of TCR clone 24936 (TRBV20-1, TRBJ2-7)
CSARTSYEQYF

SEQ ID NO: 49873 - protein, 14 aa, Homo sapiens
  CDR3 for alpha chain variable domain of TCR clone 24937 (TRAV8-3, TRAJ4)
CAVGAAGGYNKLIF

SEQ ID NO: 49874 - protein, 14 aa, Homo sapiens
  CDR3 for beta chain variable domain of TCR clone 24937 (TRBV11-2, TRBJ1-2)
CASSLYRGNYGYTF

SEQ ID NO: 49875 - protein, 18 aa, Homo sapiens
  CDR3 for alpha chain variable domain of TCR clone 24938 (TRAV21, TRAJ52)
CAVRPSPAGGTSYGKLTF

SEQ ID NO: 49876 - protein, 13 aa, Homo sapiens
  CDR3 for beta chain variable domain of TCR clone 24938 (TRBV4-1, TRBJ2-2)
CASSQENTGELFF

SEQ ID NO: 49877 - protein, 17 aa, Homo sapiens
  CDR3 for alpha chain variable domain of TCR clone 24939 (TRAV26-1, TRAJ37)
CTVRVITVSSNTGKLIF

SEQ ID NO: 49878 - protein, 15 aa, Homo sapiens
  CDR3 for beta chain variable domain of TCR clone 24939 (TRBV10-1, TRBJ2-3)
CASSATSGGFDTQYF

SEQ ID NO: 49879 - protein, 18 aa, Homo sapiens
  CDR3 for alpha chain variable domain of TCR clone 24940 (TRAV21, TRAJ52)
CAVRPSPAGGTSYGKLTF

SEQ ID NO: 49880 - protein, 12 aa, Homo sapiens
  CDR3 for beta chain variable domain of TCR clone 24940 (TRBV11-2, TRBJ2-2)
CASSLPTGELFF

SEQ ID NO: 49881 - protein, 14 aa, Homo sapiens
  CDR3 for alpha chain variable domain of TCR clone 24941 (TRAV1-2, TRAJ16)
CAVNRFSGGQKLLF

SEQ ID NO: 49882 - protein, 16 aa, Homo sapiens
  CDR3 for beta chain variable domain of TCR clone 24941 (TRBV9, TRBJ2-1)
CASSVGGGGNYNEQFS

SEQ ID NO: 49883 - protein, 13 aa, Homo sapiens
  CDR3 for alpha chain variable domain of TCR clone 24942 (TRAV3, TRAJ15)
CAVRDQSGTALIF

SEQ ID NO: 49884 - protein, 15 aa, Homo sapiens
  CDR3 for beta chain variable domain of TCR clone 24942 (TRBV11-1, TRBJ2-7)
CASSLNYGASYEQYF

SEQ ID NO: 49885 - protein, 14 aa, Homo sapiens
  CDR3 for alpha chain variable domain of TCR clone 24943 (TRAV12-2, TRAJ13)
CAVKKTGGYLKVTF

SEQ ID NO: 49886 - protein, 15 aa, Homo sapiens
  CDR3 for beta chain variable domain of TCR clone 24943 (TRBV27, TRBJ2-1)
CASSNGGGSSNEQFF

SEQ ID NO: 49887 - protein, 14 aa, Homo sapiens
  CDR3 for alpha chain variable domain of TCR clone 24944 (TRAV1-2, TRAJ16)
YAVNRFSDGQKLLF

SEQ ID NO: 49888 - protein, 13 aa, Homo sapiens
  CDR3 for beta chain variable domain of TCR clone 24944 (TRBV7-9, TRBJ1-2)
CASSLKQNYGYTF

SEQ ID NO: 49889 - protein, 14 aa, Homo sapiens
  CDR3 for alpha chain variable domain of TCR clone 24945 (TRAV12-2, TRAJ53)
CAVKGGGSNYKLKF

SEQ ID NO: 49890 - protein, 14 aa, Homo sapiens
  CDR3 for beta chain variable domain of TCR clone 24945 (TRBV7-7, TRBJ2-2)
CATRQDSDTGELFF

SEQ ID NO: 49891 - protein, 14 aa, Homo sapiens
  CDR3 for alpha chain variable domain of TCR clone 24946 (TRAV35, TRAJ40)
CAGSTTSGTYKYIF

SEQ ID NO: 49892 - protein, 11 aa, Homo sapiens
  CDR3 for beta chain variable domain of TCR clone 24946 (TRBV11-2, TRBJ2-2)
CASSLPGELFF

SEQ ID NO: 49893 - protein, 13 aa, Homo sapiens
  CDR3 for alpha chain variable domain of TCR clone 24947 (TRAV12-1, TRAJ6)
CVVLPGGSYIPTF

SEQ ID NO: 49894 - protein, 14 aa, Homo sapiens
  CDR3 for beta chain variable domain of TCR clone 24947 (TRBV20-1, TRBJ1-3)
CSASPTGAGNTIYF

SEQ ID NO: 49895 - protein, 17 aa, Homo sapiens
  CDR3 for alpha chain variable domain of TCR clone 24948 (TRAV13-1, TRAJ52)
CAASSGAGGTSYGKLTF

SEQ ID NO: 49896 - protein, 15 aa, Homo sapiens
  CDR3 for beta chain variable domain of TCR clone 24948 (TRBV3-1, TRBJ2-7)
CASSQEWTGSYEQYF

SEQ ID NO: 49897 - protein, 16 aa, Homo sapiens
  CDR3 for alpha chain variable domain of TCR clone 24949 (TRAV4, TRAJ22)
RLVGDLYSGSARQLTF

SEQ ID NO: 49898 - protein, 16 aa, Homo sapiens
  CDR3 for beta chain variable domain of TCR clone 24949 (TRBV7-9, TRBJ2-1)
CASSDVAGGSYNEQFF

SEQ ID NO: 49899 - protein, 13 aa, Homo sapiens
  CDR3 for alpha chain variable domain of TCR clone 24950 (TRAV38-1, TRAJ42)
CARWGGSHGNLIF

SEQ ID NO: 49900 - protein, 17 aa, Homo sapiens
  CDR3 for beta chain variable domain of TCR clone 24950 (TRBV20-1, TRBJ2-1)
CSARDPLAGVWDNEQFF

SEQ ID NO: 49901 - protein, 18 aa, Homo sapiens
  CDR3 for alpha chain variable domain of TCR clone 24951 (TRAV21, TRAJ52)
CAVRPSPAGGTSYGKLTF

SEQ ID NO: 49902 - protein, 15 aa, Homo sapiens
  CDR3 for beta chain variable domain of TCR clone 24951 (TRBV29-1, TRBJ2-1)
CSVGRHALFYNEQFF

SEQ ID NO: 49903 - protein, 15 aa, Homo sapiens
  CDR3 for alpha chain variable domain of TCR clone 24952 (TRAV3, TRAJ22)
CSVRDRGGSARQLTF

SEQ ID NO: 49904 - protein, 16 aa, Homo sapiens
  CDR3 for beta chain variable domain of TCR clone 24952 (TRBV5-4, TRBJ2-3)
CASQQPGAGGADTQYF

SEQ ID NO: 49905 - protein, 11 aa, Homo sapiens
  CDR3 for alpha chain variable domain of TCR clone 24953 (TRAV1-2, TRAJ20)
CAVSNDYKLSF

SEQ ID NO: 49906 - protein, 16 aa, Homo sapiens
  CDR3 for beta chain variable domain of TCR clone 24953 (TRBV29-1, TRBJ2-6)
CSVEDITCSGANVLTF

SEQ ID NO: 49907 - protein, 13 aa, Homo sapiens
  CDR3 for alpha chain variable domain of TCR clone 24954 (TRAV12-3, TRAJ7)
CAMSASGNSRLAF

SEQ ID NO: 49908 - protein, 14 aa, Homo sapiens
  CDR3 for beta chain variable domain of TCR clone 24954 (TRBV13, TRBJ2-5)
CASSLGPRGETQYF

SEQ ID NO: 49909 - protein, 13 aa, Homo sapiens
  CDR3 for alpha chain variable domain of TCR clone 24955 (TRAV20, TRAJ42)
CAVQGGSQGNLIF

SEQ ID NO: 49910 - protein, 15 aa, Homo sapiens
  CDR3 for beta chain variable domain of TCR clone 24955 (TRBV10-1, TRBJ2-1)
CTSSEWRGTYNEQFF

SEQ ID NO: 49911 - protein, 16 aa, Homo sapiens
  CDR3 for alpha chain variable domain of TCR clone 24956 (TRAV30, TRAJ24)
CGTEIVDADSWGKFQF

SEQ ID NO: 49912 - protein, 13 aa, Homo sapiens
  CDR3 for beta chain variable domain of TCR clone 24956 (TRBV7-7, TRBJ2-3)
CASSLSRADTQYF

SEQ ID NO: 49913 - protein, 11 aa, Homo sapiens
  CDR3 for alpha chain variable domain of TCR clone 24957 (TRAV12-3, TRAJ27)
CAMATAGKSTF

SEQ ID NO: 49914 - protein, 13 aa, Homo sapiens
  CDR3 for beta chain variable domain of TCR clone 24957 (TRBV20-1, TRBJ1-1)
CSARVGGNTEAFF

SEQ ID NO: 49915 - protein, 11 aa, Homo sapiens
  CDR3 for alpha chain variable domain of TCR clone 24958 (TRAV2, TRAJ13)
CASGGYQKVTF

SEQ ID NO: 49916 - protein, 16 aa, Homo sapiens
  CDR3 for beta chain variable domain of TCR clone 24958 (TRBV6-1, TRBJ2-5)
RASSETLDRGAETQYF

SEQ ID NO: 49917 - protein, 16 aa, Homo sapiens
  CDR3 for alpha chain variable domain of TCR clone 24959 (TRAV16, TRAJ52)
CALSAAGGASYGKLTF

SEQ ID NO: 49918 - protein, 12 aa, Homo sapiens
  CDR3 for beta chain variable domain of TCR clone 24959 (TRBV12-4, TRBJ1-3)
CASSFSGNTIYF

SEQ ID NO: 49919 - protein, 14 aa, Homo sapiens
  CDR3 for alpha chain variable domain of TCR clone 24960 (TRAV12-2, TRAJ40)
CAVKIPSGTYKYIF

SEQ ID NO: 49920 - protein, 14 aa, Homo sapiens
  CDR3 for beta chain variable domain of TCR clone 24960 (TRBV20-1, TRBJ1-1)
CSAQIRIGGTEAFF

SEQ ID NO: 49921 - protein, 16 aa, Homo sapiens
  CDR3 for alpha chain variable domain of TCR clone 24961 (TRAV27, TRAJ13)
CAGAKSDSGGYQKVTF

SEQ ID NO: 49922 - protein, 15 aa, Homo sapiens
  CDR3 for beta chain variable domain of TCR clone 24961 (TRBV29-1, TRBJ2-1)
CSVGRHALVYNEQFF

SEQ ID NO: 49923 - protein, 12 aa, Homo sapiens
  CDR3 for alpha chain variable domain of TCR clone 24962 (TRAV3, TRAJ20)
CAVRDPDYKLSF

SEQ ID NO: 49924 - protein, 16 aa, Homo sapiens
  CDR3 for beta chain variable domain of TCR clone 24962 (TRBV13, TRBJ2-2)
CASSPRTGEHTGELFF

SEQ ID NO: 49925 - protein, 14 aa, Homo sapiens
  CDR3 for alpha chain variable domain of TCR clone 24963 (TRAV26-1, TRAJ39)
CIVRGSREGNMLTF

SEQ ID NO: 49926 - protein, 15 aa, Homo sapiens
  CDR3 for beta chain variable domain of TCR clone 24963 (TRBV7-9, TRBJ1-5)
CASSQGHQPNQPQHF

SEQ ID NO: 49927 - protein, 15 aa, Homo sapiens
  CDR3 for alpha chain variable domain of TCR clone 24964 (TRAV3, TRAJ5)
CAVRDLDTGRRALTF

SEQ ID NO: 49928 - protein, 12 aa, Homo sapiens
  CDR3 for beta chain variable domain of TCR clone 24964 (TRBV7-8, TRBJ2-7)
CASSLGDREQYF

SEQ ID NO: 49929 - protein, 17 aa, Homo sapiens
  CDR3 for alpha chain variable domain of TCR clone 24965 (TRAV13-1, TRAJ52)
CAASSGAGGTSYGKLTF

SEQ ID NO: 49930 - protein, 14 aa, Homo sapiens
  CDR3 for beta chain variable domain of TCR clone 24965 (TRBV2, TRBJ2-1)
CSSELAGSYNEQFF

SEQ ID NO: 49931 - protein, 13 aa, Homo sapiens
  CDR3 for alpha chain variable domain of TCR clone 24966 (TRAV1-2, TRAJ9)
CAALNTGGFKTIF

SEQ ID NO: 49932 - protein, 13 aa, Homo sapiens
  CDR3 for beta chain variable domain of TCR clone 24966 (TRBV19, TRBJ1-2)
YASSVPGQDGYTF

SEQ ID NO: 49933 - protein, 12 aa, Homo sapiens
  CDR3 for alpha chain variable domain of TCR clone 24967 (TRAV13-2, TRAJ23)
CAERHRGGKLIF

SEQ ID NO: 49934 - protein, 16 aa, Homo sapiens
  CDR3 for beta chain variable domain of TCR clone 24967 (TRBV20-1, TRBJ1-4)
CSAPGQGLLTNEKLFF

SEQ ID NO: 49935 - protein, 14 aa, Homo sapiens
  CDR3 for alpha chain variable domain of TCR clone 24968 (TRAV8-4, TRAJ9)
CAVRINTGGCKTIF

SEQ ID NO: 49936 - protein, 15 aa, Homo sapiens
  CDR3 for beta chain variable domain of TCR clone 24968 (TRBV10-2, TRBJ2-6)
CASSEQGTGANVLTF

SEQ ID NO: 49937 - protein, 17 aa, Homo sapiens
  CDR3 for alpha chain variable domain of TCR clone 24969 (TRAV13-1, TRAJ31)
CAPRDRLIFGDGTQLVV

SEQ ID NO: 49938 - protein, 12 aa, Homo sapiens
  CDR3 for beta chain variable domain of TCR clone 24969 (TRBV7-9, TRBJ2-7)
CASSLEGYEQYF

SEQ ID NO: 49939 - protein, 12 aa, Homo sapiens
  CDR3 for alpha chain variable domain of TCR clone 24970 (TRAV21, TRAJ33)
CAKMDSNYQLTW

SEQ ID NO: 49940 - protein, 14 aa, Homo sapiens
  CDR3 for beta chain variable domain of TCR clone 24970 (TRBV2, TRBJ2-7)
CASSLTSGGYEQYF

SEQ ID NO: 49941 - protein, 16 aa, Homo sapiens
  CDR3 for alpha chain variable domain of TCR clone 24971 (TRAV27, TRAJ52)
CAGAPAGGTSCGKLTF

SEQ ID NO: 49942 - protein, 12 aa, Homo sapiens
  CDR3 for beta chain variable domain of TCR clone 24971 (TRBV27, TRBJ2-1)
CASRGFYNEQFF

SEQ ID NO: 49943 - protein, 12 aa, Homo sapiens
  CDR3 for alpha chain variable domain of TCR clone 24972 (TRAV13-1, TRAJ21)
CAAKEGFNKFYF

SEQ ID NO: 49944 - protein, 14 aa, Homo sapiens
  CDR3 for beta chain variable domain of TCR clone 24972 (TRBV5-4, TRBJ1-1)
CASSLVSRRDEAFF

SEQ ID NO: 49945 - protein, 12 aa, Homo sapiens
  CDR3 for alpha chain variable domain of TCR clone 24973 (TRAV1-1, TRAJ8)
CAGGTGFQKLVF

SEQ ID NO: 49946 - protein, 15 aa, Homo sapiens
  CDR3 for beta chain variable domain of TCR clone 24973 (TRBV7-9, TRAJ31)
CASSRTGGFNEKLFF

SEQ ID NO: 49947 - protein, 10 aa, Homo sapiens
  CDR3 for alpha chain variable domain of TCR clone 24974 (TRAV1-2, TRAJ23)
CAGQGGKLIF

SEQ ID NO: 49948 - protein, 16 aa, Homo sapiens
  CDR3 for beta chain variable domain of TCR clone 24974 (TRBV11-2, TRBJ1-1)
CASSLRQVGEHSKAFF

SEQ ID NO: 49949 - protein, 17 aa, Homo sapiens
  CDR3 for alpha chain variable domain of TCR clone 24975 (TRAV3, TRAJ6)
CAVRDGPRAGGSYVPTF

SEQ ID NO: 49950 - protein, 20 aa, Homo sapiens
  CDR3 for beta chain variable domain of TCR clone 24975 (TRBV28, TRBJ2-1)
CASTPIGRSPGLAGGNEQFF

SEQ ID NO: 49951 - protein, 14 aa, Homo sapiens
  CDR3 for alpha chain variable domain of TCR clone 24976 (TRAV1-2, TRAJ8)
CAVREDTGFQKLAF

SEQ ID NO: 49952 - protein, 15 aa, Homo sapiens
  CDR3 for beta chain variable domain of TCR clone 24976 (TRBV19, TRBJ2-1)
CASSTGTSSYNEQFF

SEQ ID NO: 49953 - protein, 21 aa, Homo sapiens
  CDR3 for alpha chain variable domain of TCR clone 24977 (TRAV1-1, TRAJ6)
CLLLLRCERLERAGGSYIPTF

SEQ ID NO: 49954 - protein, 13 aa, Homo sapiens
  CDR3 for beta chain variable domain of TCR clone 24977 (TRBV10-2, TRBJ2-7)
CASGASGGYEQYF

SEQ ID NO: 49955 - protein, 15 aa, Homo sapiens
  CDR3 for alpha chain variable domain of TCR clone 24978 (TRAV3, TRAJ5)
CAVRDLDTGRRALTF

SEQ ID NO: 49956 - protein, 15 aa, Homo sapiens
  CDR3 for beta chain variable domain of TCR clone 24978 (TRBV13, TRBJ1-5)
CASSFGQGGVQPQHF

SEQ ID NO: 49957 - protein, 15 aa, Homo sapiens
  CDR3 for alpha chain variable domain of TCR clone 24979 (TRAV23/DV6, TRAJ16)
CAASPWFSDGQKLLF

SEQ ID NO: 49958 - protein, 13 aa, Homo sapiens
  CDR3 for beta chain variable domain of TCR clone 24979 (TRBV11-3, TRBJ2-3)
CASRPVLGDTQYF

SEQ ID NO: 49959 - protein, 15 aa, Homo sapiens
  CDR3 for alpha chain variable domain of TCR clone 24980 (TRAV17, TRAJ22)
CATVAPSGSARQLTF

SEQ ID NO: 49960 - protein, 16 aa, Homo sapiens
  CDR3 for beta chain variable domain of TCR clone 24980 (TRBV10-3, TRBJ2-7)
CAISADFAGRPYEQYF

SEQ ID NO: 49961 - protein, 16 aa, Homo sapiens
  CDR3 for alpha chain variable domain of TCR clone 24981 (TRAV12-3, TRAJ53)
CAMSPGSGGSNYKLTF

SEQ ID NO: 49962 - protein, 16 aa, Homo sapiens
  CDR3 for beta chain variable domain of TCR clone 24981 (TRBV29-1, TRBJ2-5)
SAARTERGPVLRARHA

SEQ ID NO: 49963 - protein, 13 aa, Homo sapiens
  CDR3 for alpha chain variable domain of TCR clone 24982 (TRAV8-1, TRAJ33)
CAVKLGSNYQLIW

SEQ ID NO: 49964 - protein, 13 aa, Homo sapiens
  CDR3 for beta chain variable domain of TCR clone 24982 (TRBV20-1, TRBJ2-2)
CSASAAGTGELFF

SEQ ID NO: 49965 - protein, 10 aa, Homo sapiens
  CDR3 for alpha chain variable domain of TCR clone 24983 (TRAV26-1, TRAJ40)
CIAGTYKYIF

SEQ ID NO: 49966 - protein, 15 aa, Homo sapiens
  CDR3 for beta chain variable domain of TCR clone 24983 (TRBV19, TRBJ2-1)
CASSSPGVPLDEQFL

SEQ ID NO: 49967 - protein, 13 aa, Homo sapiens
  CDR3 for alpha chain variable domain of TCR clone 24984 (TRAV8-3, TRAJ28)
CAVGAVGSYHLTF

SEQ ID NO: 49968 - protein, 14 aa, Homo sapiens
  CDR3 for beta chain variable domain of TCR clone 24984 (TRBV7-2, TRBJ2-7)
CASRSQGAAYEQYF

SEQ ID NO: 49969 - protein, 15 aa, Homo sapiens
  CDR3 for alpha chain variable domain of TCR clone 24985 (TRAV38-1, TRAJ37)
CAFIHGSGNTGNLIF

SEQ ID NO: 49970 - protein, 12 aa, Homo sapiens
  CDR3 for beta chain variable domain of TCR clone 24985 (TRBV7-9, TRBJ2-7)
CASSFGSYEQYF

SEQ ID NO: 49971 - protein, 13 aa, Homo sapiens
  CDR3 for alpha chain variable domain of TCR clone 24986 (TRAV12-3, TRAJ9)
CAMRNTGGFKTIF

SEQ ID NO: 49972 - protein, 14 aa, Homo sapiens
  CDR3 for beta chain variable domain of TCR clone 24986 (TRBV11-2, TRBJ2-7)
CASSATGEGYEQYF

SEQ ID NO: 49973 - protein, 15 aa, Homo sapiens
  CDR3 for alpha chain variable domain of TCR clone 24987 (TRAV26-1, TRAJ22)
CIVRVSFLFCKATDL

SEQ ID NO: 49974 - protein, 13 aa, Homo sapiens
  CDR3 for beta chain variable domain of TCR clone 24987 (TRBV7-9, TRBJ1-2)
CASSLKQNYGYTF

SEQ ID NO: 49975 - protein, 12 aa, Homo sapiens
  CDR3 for alpha chain variable domain of TCR clone 24988 (TRAV12-3, TRAJ17)
CAMTLTGNKLTF

SEQ ID NO: 49976 - protein, 14 aa, Homo sapiens
  CDR3 for beta chain variable domain of TCR clone 24988 (TRBV7-6, TRBJ2-1)
CASSLGGGADEQFF

SEQ ID NO: 49977 - protein, 14 aa, Homo sapiens
  CDR3 for alpha chain variable domain of TCR clone 24989 (TRAV12-2, TRAJ13)
CAVKKTGGYQKVTF

SEQ ID NO: 49978 - protein, 15 aa, Homo sapiens
  CDR3 for beta chain variable domain of TCR clone 24989 (TRBV27, TRBJ2-1)
CAGSNGGGSSNEQFL

SEQ ID NO: 49979 - protein, 15 aa, Homo sapiens
  CDR3 for alpha chain variable domain of TCR clone 24990 (TRAV8-2, TRAJ40)
CVGLGTTSGTYKYIF

SEQ ID NO: 49980 - protein, 16 aa, Homo sapiens
  CDR3 for beta chain variable domain of TCR clone 24990 (TRBV7-3, TRBJ2-1)
CASSLEGYRSYNEQFF

SEQ ID NO: 49981 - protein, 11 aa, Homo sapiens
  CDR3 for alpha chain variable domain of TCR clone 24991 (TRAV35, TRAJ34)
CWARNTDKLIF

SEQ ID NO: 49982 - protein, 14 aa, Homo sapiens
  CDR3 for beta chain variable domain of TCR clone 24991 (TRBV19, TRBJ2-1)
CASPTFVLSGEQFF

SEQ ID NO: 49983 - protein, 12 aa, Homo sapiens
  CDR3 for alpha chain variable domain of TCR clone 24992 (TRAV8-3, TRAJ40)
CAVTSGTYKYIF

SEQ ID NO: 49984 - protein, 14 aa, Homo sapiens
  CDR3 for beta chain variable domain of TCR clone 24992 (TRBV12-4, TRBJ2-3)
YASSGQGSTDTQYF

SEQ ID NO: 49985 - protein, 13 aa, Homo sapiens
  CDR3 for alpha chain variable domain of TCR clone 24993 (TRAV12-3, TRAJ7)
CAMTPYGNNRLAL

SEQ ID NO: 49986 - protein, 16 aa, Homo sapiens
  CDR3 for beta chain variable domain of TCR clone 24993 (TRBV20-1, TRBJ1-4)
CSARPYGGELNEKLFF

SEQ ID NO: 49987 - protein, 15 aa, Homo sapiens
  CDR3 for alpha chain variable domain of TCR clone 24994 (TRAV25, TRAJ10)
CAGKVLTGGGNKLTF

SEQ ID NO: 49988 - protein, 14 aa, Homo sapiens
  CDR3 for beta chain variable domain of TCR clone 24994 (TRBV5-1, TRBJ1-5)
CASSLGGSNQPQHF

SEQ ID NO: 49989 - protein, 14 aa, Homo sapiens
  CDR3 for alpha chain variable domain of TCR clone 24995 (TRAV8-3, TRAJ12)
CAVGARDSSYKLIF

SEQ ID NO: 49990 - protein, 15 aa, Homo sapiens
  CDR3 for beta chain variable domain of TCR clone 24995 (TRBV19, TRBJ1-2)
CASSVGQVLNYGYTF

SEQ ID NO: 49991 - protein, 13 aa, Homo sapiens
  CDR3 for alpha chain variable domain of TCR clone 24996 (TRAV21, TRAJ36)
CAMIKTGANNLFF

SEQ ID NO: 49992 - protein, 13 aa, Homo sapiens
  CDR3 for beta chain variable domain of TCR clone 24996 (TRBV29-1, TRBJ2-3)
CSATRGGRDTQYF

SEQ ID NO: 49993 - protein, 16 aa, Homo sapiens
  CDR3 for alpha chain variable domain of TCR clone 24997 (TRAV3, TRAJ4)
CAVRPSPSGGYNKLIF

SEQ ID NO: 49994 - protein, 12 aa, Homo sapiens
  CDR3 for beta chain variable domain of TCR clone 24997 (TRBV7-9, TRBJ2-7)
CASSQGIYEQYF

SEQ ID NO: 49995 - protein, 14 aa, Homo sapiens
  CDR3 for alpha chain variable domain of TCR clone 24998 (TRAV1-2, TRAJ8)
CAVREDTGFQKLVF

SEQ ID NO: 49996 - protein, 16 aa, Homo sapiens
  CDR3 for beta chain variable domain of TCR clone 24998 (TRBV12-4, TRBJ1-5)
CASSRPVGGSNQTQHF

SEQ ID NO: 49997 - protein, 11 aa, Homo sapiens
  CDR3 for alpha chain variable domain of TCR clone 24999 (TRAV21, TRAJ39)
LLVNAGNMLTF

SEQ ID NO: 49998 - protein, 12 aa, Homo sapiens
  CDR3 for beta chain variable domain of TCR clone 24999 (TRBV12-4, TRBJ2-7)
CASSLGGYEQYF

SEQ ID NO: 49999 - protein, 13 aa, Homo sapiens
  CDR3 for alpha chain variable domain of TCR clone 25000 (TRAV2, TRAJ40)
CAVVTSGTYKYIF

SEQ ID NO: 50000 - protein, 15 aa, Homo sapiens
  CDR3 for beta chain variable domain of TCR clone 25000 (TRBV19, TRBJ1-2)
CASSVGQVLNYGYTF

SEQ ID NO: 50001 - protein, 14 aa, Homo sapiens
  CDR3 for alpha chain variable domain of TCR clone 25001 (TRAV29/DV5, TRAJ36)
CAARRKTGANNLFF

SEQ ID NO: 50002 - protein, 15 aa, Homo sapiens
  CDR3 for beta chain variable domain of TCR clone 25001 (TRBV7-9, TRBJ1-6)
CASSSPGRGNSPLHF

SEQ ID NO: 50003 - protein, 14 aa, Homo sapiens
  CDR3 for alpha chain variable domain of TCR clone 25002 (TRAV3, TRAJ9)
CAVRLNTGGFKTIF

SEQ ID NO: 50004 - protein, 15 aa, Homo sapiens
  CDR3 for beta chain variable domain of TCR clone 25002 (TRBV7-2, TRBJ2-1)
CASSLTSGRVNEQFF

SEQ ID NO: 50005 - protein, 14 aa, Homo sapiens
  CDR3 for alpha chain variable domain of TCR clone 25003 (TRAV12-3, TRAJ53)
CGATSGGSNYKLTF

SEQ ID NO: 50006 - protein, 13 aa, Homo sapiens
  CDR3 for beta chain variable domain of TCR clone 25003 (TRBV19, TRBJ1-5)
CASSTQDGQHQHF

SEQ ID NO: 50007 - protein, 14 aa, Homo sapiens
  CDR3 for alpha chain variable domain of TCR clone 25004 (TRAV12-2, TRAJ44)
CAVNPASTASKLTF

SEQ ID NO: 50008 - protein, 13 aa, Homo sapiens
  CDR3 for beta chain variable domain of TCR clone 25004 (TRBV20-1, TRBJ1-6)
CSAPLGVGSPLHF

SEQ ID NO: 50009 - protein, 14 aa, Homo sapiens
  CDR3 for alpha chain variable domain of TCR clone 25005 (TRAV13-1, TRAJ13)
CAASRVGGYKKVTF

SEQ ID NO: 50010 - protein, 17 aa, Homo sapiens
  CDR3 for beta chain variable domain of TCR clone 25005 (TRBV15, TRBJ1-5)
CATSRAPPGTRNQPQHF

SEQ ID NO: 50011 - protein, 16 aa, Homo sapiens
  CDR3 for alpha chain variable domain of TCR clone 25006 (TRAV1-2, TRAJ10)
CAMRGVLTGGGNKLTF

SEQ ID NO: 50012 - protein, 12 aa, Homo sapiens
  CDR3 for beta chain variable domain of TCR clone 25006 (TRBV7-8, TRBJ2-7)
CASSLGDREQYF

SEQ ID NO: 50013 - protein, 14 aa, Homo sapiens
  CDR3 for alpha chain variable domain of TCR clone 25007 (TRAV38-2/DV8, TRAJ23)
CAYRSQNQGGKLIF

SEQ ID NO: 50014 - protein, 17 aa, Homo sapiens
  CDR3 for beta chain variable domain of TCR clone 25007 (TRBV11-2, TRBJ2-1)
CASSLYPPGVEYNERFF

SEQ ID NO: 50015 - protein, 11 aa, Homo sapiens
  CDR3 for alpha chain variable domain of TCR clone 25008 (TRAV12-3, TRAJ20)
CAMSYDYKPSF

SEQ ID NO: 50016 - protein, 14 aa, Homo sapiens
  CDR3 for beta chain variable domain of TCR clone 25008 (TRBV7-2, TRBJ2-7)
CASSPKTSFYEQYF

SEQ ID NO: 50017 - protein, 14 aa, Homo sapiens
  CDR3 for alpha chain variable domain of TCR clone 25009 (TRAV1-2, TRAJ8)
CAVREDTGFQKLVF

SEQ ID NO: 50018 - protein, 14 aa, Homo sapiens
  CDR3 for beta chain variable domain of TCR clone 25009 (TRBV20-1, TRBJ2-1)
CSAQIGGSANEQFF

SEQ ID NO: 50019 - protein, 13 aa, Homo sapiens
  CDR3 for alpha chain variable domain of TCR clone 25010 (TRAV13-2, TRAJ48)
CAEMDFGNEKLTF

SEQ ID NO: 50020 - protein, 15 aa, Homo sapiens
  CDR3 for beta chain variable domain of TCR clone 25010 (TRBV7-9, TRBJ1-6)
CASRSPGRGNSPLHF

SEQ ID NO: 50021 - protein, 14 aa, Homo sapiens
  CDR3 for alpha chain variable domain of TCR clone 25011 (TRAV1-2, TRAJ16)
CAVNRFSDGQRLLF

SEQ ID NO: 50022 - protein, 14 aa, Homo sapiens
  CDR3 for beta chain variable domain of TCR clone 25011 (TRBV19, TRBJ2-1)
CASPTFVLSGEQFF

SEQ ID NO: 50023 - protein, 16 aa, Homo sapiens
  CDR3 for alpha chain variable domain of TCR clone 25012 (TRAV26-1, TRAJ53)
CIVRVAMGGSNYKLTF

SEQ ID NO: 50024 - protein, 12 aa, Homo sapiens
  CDR3 for beta chain variable domain of TCR clone 25012 (TRBV7-9, TRBJ1-5)
CACSPQGQPQHF

SEQ ID NO: 50025 - protein, 16 aa, Homo sapiens
  CDR3 for alpha chain variable domain of TCR clone 25013 (TRAV12-1, TRAJ48)
CVVNTFREFGNEKLTF

SEQ ID NO: 50026 - protein, 17 aa, Homo sapiens
  CDR3 for beta chain variable domain of TCR clone 25013 (TRBV13, TRBJ2-3)
CASSLSRVAGGRNTQYS

SEQ ID NO: 50027 - protein, 14 aa, Homo sapiens
  CDR3 for alpha chain variable domain of TCR clone 25014 (TRAV8-4, TRAJ13)
CAVTLSGGYQKVTF

SEQ ID NO: 50028 - protein, 14 aa, Homo sapiens
  CDR3 for beta chain variable domain of TCR clone 25014 (TRBV7-2, TRBJ1-2)
CASSQAGSTYGYTF

SEQ ID NO: 50029 - protein, 13 aa, Homo sapiens
  CDR3 for alpha chain variable domain of TCR clone 25015 (TRAV2, TRAJ12)
CAVGTDSSYKLIF

SEQ ID NO: 50030 - protein, 13 aa, Homo sapiens
  CDR3 for beta chain variable domain of TCR clone 25015 (TRBV20-1, TRBJ2-1)
CSARSSPRDEQFF

SEQ ID NO: 50031 - protein, 15 aa, Homo sapiens
  CDR3 for alpha chain variable domain of TCR clone 25016 (TRAV17, TRAJ37)
CATDHGSSNTDKLIF

SEQ ID NO: 50032 - protein, 14 aa, Homo sapiens
  CDR3 for beta chain variable domain of TCR clone 25016 (TRBV7-2, TRBJ2-3)
CASSRTSGADTQYF

SEQ ID NO: 50033 - protein, 14 aa, Homo sapiens
  CDR3 for alpha chain variable domain of TCR clone 25017 (TRAV26-1, TRAJ45)
FIEVTGGGADGLTF

SEQ ID NO: 50034 - protein, 13 aa, Homo sapiens
  CDR3 for beta chain variable domain of TCR clone 25017 (TRBV7-6, TRBJ1-2)
CASSLVADYGYTF

SEQ ID NO: 50035 - protein, 18 aa, Homo sapiens
  CDR3 for alpha chain variable domain of TCR clone 25018 (TRAV21, TRAJ52)
CAVRPSPAGGTSYGKLTF

SEQ ID NO: 50036 - protein, 14 aa, Homo sapiens
  CDR3 for beta chain variable domain of TCR clone 25018 (TRBV11-2, TRBJ2-5)
CASSRTGGIETQYF

SEQ ID NO: 50037 - protein, 14 aa, Homo sapiens
  CDR3 for alpha chain variable domain of TCR clone 25019 (TRAV3, TRAJ37)
CAVKESGNTGKLIF

SEQ ID NO: 50038 - protein, 16 aa, Homo sapiens
  CDR3 for beta chain variable domain of TCR clone 25019 (TRBV19, TRBJ1-1)
CASSPTRFWPGTEAFF

SEQ ID NO: 50039 - protein, 14 aa, Homo sapiens
  CDR3 for alpha chain variable domain of TCR clone 25020 (TRAV1-2, TRAJ8)
CAVREDTGFQKLVF

SEQ ID NO: 50040 - protein, 15 aa, Homo sapiens
  CDR3 for beta chain variable domain of TCR clone 25020 (TRBV6-3, TRBJ2-7)
CASSSPGTVFYEQYF

SEQ ID NO: 50041 - protein, 13 aa, Homo sapiens
  CDR3 for alpha chain variable domain of TCR clone 25021 (TRAV8-3, TRAJ48)
CAVVPFGNGKLTF

SEQ ID NO: 50042 - protein, 15 aa, Homo sapiens
  CDR3 for beta chain variable domain of TCR clone 25021 (TRBV11-2, TRBJ2-1)
CASSSPSTRYNEQFF

SEQ ID NO: 50043 - protein, 13 aa, Homo sapiens
  CDR3 for alpha chain variable domain of TCR clone 25022 (TRAV12-3, TRAJ43)
CAMVRPNNNDMRF

SEQ ID NO: 50044 - protein, 12 aa, Homo sapiens
  CDR3 for beta chain variable domain of TCR clone 25022 (TRBV11-2, TRBJ2-5)
CASSLGQETQYF

SEQ ID NO: 50045 - protein, 14 aa, Homo sapiens
  CDR3 for alpha chain variable domain of TCR clone 25023 (TRAV2, TRAJ9)
CAVEDRSGGSKTIF

SEQ ID NO: 50046 - protein, 14 aa, Homo sapiens
  CDR3 for beta chain variable domain of TCR clone 25023 (TRBV5-1, TRBJ2-3)
CASSLFGPTDTQYF

SEQ ID NO: 50047 - protein, 17 aa, Homo sapiens
  CDR3 for alpha chain variable domain of TCR clone 25024 (TRAV3, TRAJ42)
CAVRDRDYGGSQGNLIF

SEQ ID NO: 50048 - protein, 14 aa, Homo sapiens
  CDR3 for beta chain variable domain of TCR clone 25024 (TRBV19, TRBJ2-5)
CVSSMTGQQETQYF

SEQ ID NO: 50049 - protein, 14 aa, Homo sapiens
  CDR3 for alpha chain variable domain of TCR clone 25025 (TRAV26-1, TRAJ34)
CIVRVAYNTDKLIF

SEQ ID NO: 50050 - protein, 15 aa, Homo sapiens
  CDR3 for beta chain variable domain of TCR clone 25025 (TRBV20-1, TRBJ2-7)
CSARVPDAYFYEQYF

SEQ ID NO: 50051 - protein, 17 aa, Homo sapiens
  CDR3 for alpha chain variable domain of TCR clone 25026 (TRAV3, TRAJ38)
CAVRDCLNAGNNSKLIW

SEQ ID NO: 50052 - protein, 14 aa, Homo sapiens
  CDR3 for beta chain variable domain of TCR clone 25026 (TRBV5-5, TRBJ1-5)
CASSGQGVDQPQHF

SEQ ID NO: 50053 - protein, 14 aa, Homo sapiens
  CDR3 for alpha chain variable domain of TCR clone 25027 (TRAV12-2, TRAJ40)
CAVKIPSGTYKYIF

SEQ ID NO: 50054 - protein, 15 aa, Homo sapiens
  CDR3 for beta chain variable domain of TCR clone 25027 (TRBV12-4, TRBJ2-5)
CASSPPTGLQETQYF

SEQ ID NO: 50055 - protein, 15 aa, Homo sapiens
  CDR3 for alpha chain variable domain of TCR clone 25028 (TRAV21, TRAJ24)
CAARSSTDSWGKLQC

SEQ ID NO: 50056 - protein, 13 aa, Homo sapiens
  CDR3 for beta chain variable domain of TCR clone 25028 (TRBV11-2, TRBJ2-5)
CASSSTGEETQYF

SEQ ID NO: 50057 - protein, 14 aa, Homo sapiens
  CDR3 for alpha chain variable domain of TCR clone 25029 (TRAV12-2, TRAJ53)
CAMKGGGSNYKLTF

SEQ ID NO: 50058 - protein, 14 aa, Homo sapiens
  CDR3 for beta chain variable domain of TCR clone 25029 (TRBV7-7, TRBJ2-2)
CATRQDSDTGELFF

SEQ ID NO: 50059 - protein, 15 aa, Homo sapiens
  CDR3 for alpha chain variable domain of TCR clone 25030 (TRAV3, TRAJ22)
CAVRDRGGSARQRTF

SEQ ID NO: 50060 - protein, 16 aa, Homo sapiens
  CDR3 for beta chain variable domain of TCR clone 25030 (TRBV5-4, TRBJ2-3)
CASQQPGAGGADTQYF

SEQ ID NO: 50061 - protein, 15 aa, Homo sapiens
  CDR3 for alpha chain variable domain of TCR clone 25031 (TRAV8-3, TRAJ45)
CASSYSGGGADGLTF

SEQ ID NO: 50062 - protein, 13 aa, Homo sapiens
  CDR3 for beta chain variable domain of TCR clone 25031 (TRBV10-3, TRBJ2-7)
YASKLAVNYEQYF

SEQ ID NO: 50063 - protein, 16 aa, Homo sapiens
  CDR3 for alpha chain variable domain of TCR clone 25032 (TRAV16, TRAJ52)
CALSSAGGTSYGKLTF

SEQ ID NO: 50064 - protein, 12 aa, Homo sapiens
  CDR3 for beta chain variable domain of TCR clone 25032 (TRBV12-4, TRBJ1-3)
CASSFSGNTIYF

SEQ ID NO: 50065 - protein, 12 aa, Homo sapiens
  CDR3 for alpha chain variable domain of TCR clone 25033 (TRAV21, TRAJ33)
CAKMDSNYQLIW

SEQ ID NO: 50066 - protein, 14 aa, Homo sapiens
  CDR3 for beta chain variable domain of TCR clone 25033 (TRBV2, TRBJ2-7)
CASSLTSGCYEQYF

SEQ ID NO: 50067 - protein, 15 aa, Homo sapiens
  CDR3 for alpha chain variable domain of TCR clone 25034 (TRAV26-1, TRAJ44)
CIARANTGTASKLTF

SEQ ID NO: 50068 - protein, 16 aa, Homo sapiens
  CDR3 for beta chain variable domain of TCR clone 25034 (TRBV7-7, TRBJ2-1)
CASSLASGTSYNEQFF

SEQ ID NO: 50069 - protein, 16 aa, Homo sapiens
  CDR3 for alpha chain variable domain of TCR clone 25035 (TRAV30, TRAJ24)
CGTEIVDADSWGKFQF

SEQ ID NO: 50070 - protein, 16 aa, Homo sapiens
  CDR3 for beta chain variable domain of TCR clone 25035 (TRBV20-1, TRBJ1-2)
CSASMGQGVANYGYTF

SEQ ID NO: 50071 - protein, 14 aa, Homo sapiens
  CDR3 for alpha chain variable domain of TCR clone 25036 (TRAV12-3, TRAJ22)
CAMSLFGSARQLTF

SEQ ID NO: 50072 - protein, 11 aa, Homo sapiens
  CDR3 for beta chain variable domain of TCR clone 25036 (TRBV12-4, TRBJ2-2)
CASSAAGELFF

SEQ ID NO: 50073 - protein, 18 aa, Homo sapiens
  CDR3 for alpha chain variable domain of TCR clone 25037 (TRAV26-1, TRAJ23)
CIVRVGLEVWSQGGKLIF

SEQ ID NO: 50074 - protein, 15 aa, Homo sapiens
  CDR3 for beta chain variable domain of TCR clone 25037 (TRBV10-3, TRBJ2-3)
CAISDWDRDTDTQYF

SEQ ID NO: 50075 - protein, 11 aa, Homo sapiens
  CDR3 for alpha chain variable domain of TCR clone 25038 (TRAV3, TRAJ17)
PRGAAGNTLTF

SEQ ID NO: 50076 - protein, 16 aa, Homo sapiens
  CDR3 for beta chain variable domain of TCR clone 25038 (TRBV7-6, TRBJ2-1)
CASSAPGPSSYNEQFF

SEQ ID NO: 50077 - protein, 17 aa, Homo sapiens
  CDR3 for alpha chain variable domain of TCR clone 25039 (TRAV3, TRAJ6)
CAVRDGPRAGGRYIPTF

SEQ ID NO: 50078 - protein, 16 aa, Homo sapiens
  CDR3 for beta chain variable domain of TCR clone 25039 (TRBV7-8, TRBJ2-3)
CASSTEGQRETDTQYF

SEQ ID NO: 50079 - protein, 13 aa, Homo sapiens
  CDR3 for alpha chain variable domain of TCR clone 25040 (TRAV8-6, TRAJ49)
CAVITNTGNQFYF

SEQ ID NO: 50080 - protein, 16 aa, Homo sapiens
  CDR3 for beta chain variable domain of TCR clone 25040 (TRBV2, TRBJ2-3)
CASSTSVEGVTDTQYF

SEQ ID NO: 50081 - protein, 14 aa, Homo sapiens
  CDR3 for alpha chain variable domain of TCR clone 25041 (TRAV13-2, TRAJ10)
CAETFTGGGNKLTF

SEQ ID NO: 50082 - protein, 16 aa, Homo sapiens
  CDR3 for beta chain variable domain of TCR clone 25041 (TRBV18, TRBJ2-7)
CASSTRSQGISYEQYF

SEQ ID NO: 50083 - protein, 18 aa, Homo sapiens
  CDR3 for alpha chain variable domain of TCR clone 25042 (TRAV29/DV5, TRAJ52)
CAAGFRGAGGTSYGKLTF

SEQ ID NO: 50084 - protein, 16 aa, Homo sapiens
  CDR3 for beta chain variable domain of TCR clone 25042 (TRBV7-3, TRBJ2-2)
CASSLKRGTLSGEPFF

SEQ ID NO: 50085 - protein, 13 aa, Homo sapiens
  CDR3 for alpha chain variable domain of TCR clone 25043 (TRAV30, TRAJ34)
CGTVGYNTDKLIF

SEQ ID NO: 50086 - protein, 16 aa, Homo sapiens
  CDR3 for beta chain variable domain of TCR clone 25043 (TRBV7-9, TRBJ1-2)
CASSLGFSSGEDGYSF

SEQ ID NO: 50087 - protein, 10 aa, Homo sapiens
  CDR3 for alpha chain variable domain of TCR clone 25044 (TRAV21, TRAJ31)
CAVDNARLMF

SEQ ID NO: 50088 - protein, 13 aa, Homo sapiens
  CDR3 for beta chain variable domain of TCR clone 25044 (TRBV4-1, TRBJ1-1)
RASSRKMNTEAFF

SEQ ID NO: 50089 - protein, 16 aa, Homo sapiens
  CDR3 for alpha chain variable domain of TCR clone 25045 (TRAV21, TRAJ52)
CAVTNAGGTSYGKLTF

SEQ ID NO: 50090 - protein, 17 aa, Homo sapiens
  CDR3 for beta chain variable domain of TCR clone 25045 (TRBV28, TRBJ2-5)
CASSRQGGLAGAETQYS

SEQ ID NO: 50091 - protein, 16 aa, Homo sapiens
  CDR3 for alpha chain variable domain of TCR clone 25046 (TRAV4, TRAJ22)
CLVGDLYSGSARQMTF

SEQ ID NO: 50092 - protein, 16 aa, Homo sapiens
  CDR3 for beta chain variable domain of TCR clone 25046 (TRBV7-9, TRBJ2-1)
CASSDVAGGSYNEQFF

SEQ ID NO: 50093 - protein, 12 aa, Homo sapiens
  CDR3 for alpha chain variable domain of TCR clone 25047 (TRAV4, TRAJ26)
CLVGDYVQNFVF

SEQ ID NO: 50094 - protein, 16 aa, Homo sapiens
  CDR3 for beta chain variable domain of TCR clone 25047 (TRBV7-2, TRBJ1-2)
CASSSNQDRRGHGYTF

SEQ ID NO: 50095 - protein, 15 aa, Homo sapiens
  CDR3 for alpha chain variable domain of TCR clone 25048 (TRAV12-3, TRAJ6)
CAMSATTGGSYIPTF

SEQ ID NO: 50096 - protein, 14 aa, Homo sapiens
  CDR3 for beta chain variable domain of TCR clone 25048 (TRBV6-1, TRBJ1-3)
CASVQGGGGNTIYF

SEQ ID NO: 50097 - protein, 10 aa, Homo sapiens
  CDR3 for alpha chain variable domain of TCR clone 25049 (TRAV38-1, TRAJ34)
CASMDDKLIF

SEQ ID NO: 50098 - protein, 14 aa, Homo sapiens
  CDR3 for beta chain variable domain of TCR clone 25049 (TRBV7-2, TRBJ2-2)
CASSLNSNTGELFF

SEQ ID NO: 50099 - protein, 14 aa, Homo sapiens
  CDR3 for alpha chain variable domain of TCR clone 25050 (TRAV26-1, TRAJ39)
CIVRCSRAGNMLTF

SEQ ID NO: 50100 - protein, 14 aa, Homo sapiens
  CDR3 for beta chain variable domain of TCR clone 25050 (TRBV25-1, TRBJ1-1)
CASTHLGGNTEAFF

SEQ ID NO: 50101 - protein, 13 aa, Homo sapiens
  CDR3 for alpha chain variable domain of TCR clone 25051 (TRAV16, TRAJ26)
CALLDNYGQNFVF

SEQ ID NO: 50102 - protein, 13 aa, Homo sapiens
  CDR3 for beta chain variable domain of TCR clone 25051 (TRBV7-9, TRBJ1-2)
CASSLKQNYGYTF

SEQ ID NO: 50103 - protein, 12 aa, Homo sapiens
  CDR3 for alpha chain variable domain of TCR clone 25052 (TRAV12-1, TRAJ40)
CVFHSGTYKYIF

SEQ ID NO: 50104 - protein, 18 aa, Homo sapiens
  CDR3 for beta chain variable domain of TCR clone 25052 (TRBV12-4, TRBJ2-2)
CASSLVAGTRGRTGELFF

SEQ ID NO: 50105 - protein, 15 aa, Homo sapiens
  CDR3 for alpha chain variable domain of TCR clone 25053 (TRAV26-1, TRAJ48)
CIARWSWVGNEKLTF

SEQ ID NO: 50106 - protein, 12 aa, Homo sapiens
  CDR3 for beta chain variable domain of TCR clone 25053 (TRBV19, TRBJ2-5)
CASSISEETQYF

SEQ ID NO: 50107 - protein, 15 aa, Homo sapiens
  CDR3 for alpha chain variable domain of TCR clone 25054 (TRAV12-1, TRAJ45)
CVVLSGGGGADGLTF

SEQ ID NO: 50108 - protein, 12 aa, Homo sapiens
  CDR3 for beta chain variable domain of TCR clone 25054 (TRBV11-2, TRBJ2-2)
CASSLGGGELFF

SEQ ID NO: 50109 - protein, 16 aa, Homo sapiens
  CDR3 for alpha chain variable domain of TCR clone 25055 (TRAV8-4, TRAJ13)
CAVTLSGVTRKLPLEL

SEQ ID NO: 50110 - protein, 14 aa, Homo sapiens
  CDR3 for beta chain variable domain of TCR clone 25055 (TRBV7-2, TRBJ1-2)
CASSQTGSTYGYTF

SEQ ID NO: 50111 - protein, 13 aa, Homo sapiens
  CDR3 for alpha chain variable domain of TCR clone 25056 (TRAV21, TRAJ27)
CAARPGYAGKSTF

SEQ ID NO: 50112 - protein, 14 aa, Homo sapiens
  CDR3 for beta chain variable domain of TCR clone 25056 (TRBV7-6, TRBJ2-3)
CASSLGTVTDTQYF

SEQ ID NO: 50113 - protein, 14 aa, Homo sapiens
  CDR3 for alpha chain variable domain of TCR clone 25057 (TRAV35, TRAJ22)
CAGLRPGSARQLIF

SEQ ID NO: 50114 - protein, 15 aa, Homo sapiens
  CDR3 for beta chain variable domain of TCR clone 25057 (TRBV12-4, TRBJ2-5)
CASSPPTGLQETQYF

SEQ ID NO: 50115 - protein, 13 aa, Homo sapiens
  CDR3 for alpha chain variable domain of TCR clone 25058 (TRAV25, TRAJ54)
CAGTIQGAQKLVF

SEQ ID NO: 50116 - protein, 15 aa, Homo sapiens
  CDR3 for beta chain variable domain of TCR clone 25058 (TRBV19, TRBJ1-5)
YASSILTGENQPQHF

SEQ ID NO: 50117 - protein, 14 aa, Homo sapiens
  CDR3 for alpha chain variable domain of TCR clone 25059 (TRAV35, TRAJ22)
CAGLRPGSARQLTF

SEQ ID NO: 50118 - protein, 15 aa, Homo sapiens
  CDR3 for beta chain variable domain of TCR clone 25059 (TRBV12-4, TRBJ2-5)
CASSPPTGLEETQYF

SEQ ID NO: 50119 - protein, 15 aa, Homo sapiens
  CDR3 for alpha chain variable domain of TCR clone 25060 (TRAV38-1, TRAJ37)
CAFIHGSGNTGKLIF

SEQ ID NO: 50120 - protein, 12 aa, Homo sapiens
  CDR3 for beta chain variable domain of TCR clone 25060 (TRBV7-9, TRBJ2-7)
CASSLGSYEQYF

SEQ ID NO: 50121 - protein, 13 aa, Homo sapiens
  CDR3 for alpha chain variable domain of TCR clone 25061 (TRAV2, TRAJ29)
CAAGNSGSTPLVF

SEQ ID NO: 50122 - protein, 16 aa, Homo sapiens
  CDR3 for beta chain variable domain of TCR clone 25061 (TRBV7-9, TRBJ1-2)
CASSPGGGAINYGYTF

SEQ ID NO: 50123 - protein, 13 aa, Homo sapiens
  CDR3 for alpha chain variable domain of TCR clone 25062 (TRAV12-1, TRAJ16)
CVVNGPDGQKLLF

SEQ ID NO: 50124 - protein, 13 aa, Homo sapiens
  CDR3 for beta chain variable domain of TCR clone 25062 (TRBV2, TRBJ1-1)
CARNPTGGYHAFF

SEQ ID NO: 50125 - protein, 15 aa, Homo sapiens
  CDR3 for alpha chain variable domain of TCR clone 25063 (TRAV25, TRAJ52)
CAGRPGCTSYGKLTF

SEQ ID NO: 50126 - protein, 17 aa, Homo sapiens
  CDR3 for beta chain variable domain of TCR clone 25063 (TRBV7-8, TRBJ2-6)
CASSAGTGGAGANVLTF

SEQ ID NO: 50127 - protein, 14 aa, Homo sapiens
  CDR3 for alpha chain variable domain of TCR clone 25064 (TRAV14/DV4, TRAJ57)
CAMREEGGSEKLVF

SEQ ID NO: 50128 - protein, 14 aa, Homo sapiens
  CDR3 for beta chain variable domain of TCR clone 25064 (TRBV12-4, TRBJ2-5)
CASSFGDRGETQYF

SEQ ID NO: 50129 - protein, 12 aa, Homo sapiens
  CDR3 for alpha chain variable domain of TCR clone 25065 (TRAV8-3, TRAJ20)
SAVGANDYKLSF

SEQ ID NO: 50130 - protein, 16 aa, Homo sapiens
  CDR3 for beta chain variable domain of TCR clone 25065 (TRBV19, TRBJ2-2)
CASRSPGTGATGELFF

SEQ ID NO: 50131 - protein, 14 aa, Homo sapiens
  CDR3 for alpha chain variable domain of TCR clone 25066 (TRAV29/DV5, TRAJ44)
CAQQHTGTASKLTF

SEQ ID NO: 50132 - protein, 15 aa, Homo sapiens
  CDR3 for beta chain variable domain of TCR clone 25066 (TRBV18, TRBJ2-2)
CASSKTPYGAGELFF

SEQ ID NO: 50133 - protein, 22 aa, Homo sapiens
  CDR3 for alpha chain variable domain of TCR clone 25067 (TRAV27, TRAJ41)
CAVRTQIPDIQNPDPAVYQLID

SEQ ID NO: 50134 - protein, 16 aa, Homo sapiens
  CDR3 for beta chain variable domain of TCR clone 25067 (TRBV5-1, TRBJ2-3)
CASSLGLAVYTDTQYF

SEQ ID NO: 50135 - protein, 15 aa, Homo sapiens
  CDR3 for alpha chain variable domain of TCR clone 25068 (TRAV25, TRAJ52)
GAGRPGGTSYGKLTF

SEQ ID NO: 50136 - protein, 17 aa, Homo sapiens
  CDR3 for beta chain variable domain of TCR clone 25068 (TRBV7-8, TRBJ2-6)
CASSAGTGGAGANVLTF

SEQ ID NO: 50137 - protein, 21 aa, Homo sapiens
  CDR3 for alpha chain variable domain of TCR clone 25069 (TRAV1-1, TRAJ6)
CLLLLRCERLERTGGSYIPTF

SEQ ID NO: 50138 - protein, 13 aa, Homo sapiens
  CDR3 for beta chain variable domain of TCR clone 25069 (TRBV10-2, TRBJ2-7)
CAGGASGGYEQYF

SEQ ID NO: 50139 - protein, 13 aa, Homo sapiens
  CDR3 for alpha chain variable domain of TCR clone 25070 (TRAV13-1, TRAJ39)
CSKYSNAGNMLTF

SEQ ID NO: 50140 - protein, 15 aa, Homo sapiens
  CDR3 for beta chain variable domain of TCR clone 25070 (TRBV20-1, TRBJ2-7)
CSARDRVSGMDEQYF

SEQ ID NO: 50141 - protein, 17 aa, Homo sapiens
  CDR3 for alpha chain variable domain of TCR clone 25071 (TRAV3, TRAJ6)
CAVRYGPRAGGSYIPTF

SEQ ID NO: 50142 - protein, 20 aa, Homo sapiens
  CDR3 for beta chain variable domain of TCR clone 25071 (TRBV28, TRBJ2-1)
CASTPIGRSPGLAGGNEQFF

SEQ ID NO: 50143 - protein, 15 aa, Homo sapiens
  CDR3 for alpha chain variable domain of TCR clone 25072 (TRAV3, TRAJ22)
CAVRDRGGSSRQLTF

SEQ ID NO: 50144 - protein, 16 aa, Homo sapiens
  CDR3 for beta chain variable domain of TCR clone 25072 (TRBV5-4, TRBJ2-3)
CASQQPGAGGADTQYF

SEQ ID NO: 50145 - protein, 13 aa, Homo sapiens
  CDR3 for alpha chain variable domain of TCR clone 25073 (TRAV35, TRAJ36)
CAGPRIGANNLLF

SEQ ID NO: 50146 - protein, 15 aa, Homo sapiens
  CDR3 for beta chain variable domain of TCR clone 25073 (TRBV28, TRBJ2-5)
CASSPPWSYQETQYF

SEQ ID NO: 50147 - protein, 14 aa, Homo sapiens
  CDR3 for alpha chain variable domain of TCR clone 25074 (TRAV1-2, TRAJ16)
CAVNRFSDGQKLLI

SEQ ID NO: 50148 - protein, 15 aa, Homo sapiens
  CDR3 for beta chain variable domain of TCR clone 25074 (TRBV7-9, TRBJ1-6)
CASSSPGRGNSPLHF

SEQ ID NO: 50149 - protein, 13 aa, Homo sapiens
  CDR3 for alpha chain variable domain of TCR clone 25075 (TRAV21, TRAJ20)
CAVGVFADYKLSF

SEQ ID NO: 50150 - protein, 15 aa, Homo sapiens
  CDR3 for beta chain variable domain of TCR clone 25075 (TRBV7-9, TRBJ1-6)
CASSSPGRGNSPLHF

SEQ ID NO: 50151 - protein, 12 aa, Homo sapiens
  CDR3 for alpha chain variable domain of TCR clone 25076 (TRAV12-3, TRAJ17)
CAMTLTGNKLTF

SEQ ID NO: 50152 - protein, 12 aa, Homo sapiens
  CDR3 for beta chain variable domain of TCR clone 25076 (TRBV7-3, TRBJ2-1)
CASSFINNEQFF

SEQ ID NO: 50153 - protein, 18 aa, Homo sapiens
  CDR3 for alpha chain variable domain of TCR clone 25077 (TRAV21, TRAJ52)
CAVRPSPAGGTSYGKLTF

SEQ ID NO: 50154 - protein, 14 aa, Homo sapiens
  CDR3 for beta chain variable domain of TCR clone 25077 (TRBV4-1, TRBJ2-2)
CASSQAVNTGELLF

SEQ ID NO: 50155 - protein, 14 aa, Homo sapiens
  CDR3 for alpha chain variable domain of TCR clone 25078 (TRAV12-3, TRAJ10)
SHLPLTGGGNKLTF

SEQ ID NO: 50156 - protein, 19 aa, Homo sapiens
  CDR3 for beta chain variable domain of TCR clone 25078 (TRBV19, TRBJ2-5)
CASSIGQVTDFFLGETQYF

SEQ ID NO: 50157 - protein, 14 aa, Homo sapiens
  CDR3 for alpha chain variable domain of TCR clone 25079 (TRAV1-2, TRAJ16)
CAVNRFSDGQKPLF

SEQ ID NO: 50158 - protein, 16 aa, Homo sapiens
  CDR3 for beta chain variable domain of TCR clone 25079 (TRBV12-5, TRBJ2-5)
CASGPRTSGNQETQYF

SEQ ID NO: 50159 - protein, 12 aa, Homo sapiens
  CDR3 for alpha chain variable domain of TCR clone 25080 (TRAV35, TRAJ39)
LAPNNAGNILTF

SEQ ID NO: 50160 - protein, 16 aa, Homo sapiens
  CDR3 for beta chain variable domain of TCR clone 25080 (TRBV2, TRBJ2-3)
CASSTSVEGVTDTQYF

SEQ ID NO: 50161 - protein, 10 aa, Homo sapiens
  CDR3 for alpha chain variable domain of TCR clone 25081 (TRAV12-3, TRAJ49)
CVMNDDQFYF

SEQ ID NO: 50162 - protein, 13 aa, Homo sapiens
  CDR3 for beta chain variable domain of TCR clone 25081 (TRBV12-4, TRBJ1-1)
CASSPGTGFEAFF

SEQ ID NO: 50163 - protein, 16 aa, Homo sapiens
  CDR3 for alpha chain variable domain of TCR clone 25082 (TRAV8-3, TRAJ13)
CAVGAYPSGGYQKVTF

SEQ ID NO: 50164 - protein, 15 aa, Homo sapiens
  CDR3 for beta chain variable domain of TCR clone 25082 (TRBV19, TRBJ1-5)
CASSIVWVDNQPQHF

SEQ ID NO: 50165 - protein, 13 aa, Homo sapiens
  CDR3 for alpha chain variable domain of TCR clone 25083 (TRAV12-1, TRAJ31)
CVVNTNNNARLMF

SEQ ID NO: 50166 - protein, 15 aa, Homo sapiens
  CDR3 for beta chain variable domain of TCR clone 25083 (TRBV4-1, TRBJ1-2)
CASSQGQGAAYGYTF

SEQ ID NO: 50167 - protein, 11 aa, Homo sapiens
  CDR3 for alpha chain variable domain of TCR clone 25084 (TRAV13-1, TRAJ39)
FASHAGNMLTF

SEQ ID NO: 50168 - protein, 18 aa, Homo sapiens
  CDR3 for beta chain variable domain of TCR clone 25084 (TRBV12-4, TRBJ2-2)
CASSRSGGAIPNTGELFF

SEQ ID NO: 50169 - protein, 14 aa, Homo sapiens
  CDR3 for alpha chain variable domain of TCR clone 25085 (TRAV1-2, TRAJ16)
CAVNRFSDGQKLLF

SEQ ID NO: 50170 - protein, 14 aa, Homo sapiens
  CDR3 for beta chain variable domain of TCR clone 25085 (TRBV7-2, TRBJ2-7)
CASSPKTSFYGQYF

SEQ ID NO: 50171 - protein, 16 aa, Homo sapiens
  CDR3 for alpha chain variable domain of TCR clone 25086 (TRAV3, TRAJ18)
CAVRDGRGSTLGRLYF

SEQ ID NO: 50172 - protein, 15 aa, Homo sapiens
  CDR3 for beta chain variable domain of TCR clone 25086 (TRBV7-9, TRBJ1-6)
CASSSPGCGNSPLHF

SEQ ID NO: 50173 - protein, 14 aa, Homo sapiens
  CDR3 for alpha chain variable domain of TCR clone 25087 (TRAV1-1, TRAJ23)
CAVSTYNQGGKLIF

SEQ ID NO: 50174 - protein, 15 aa, Homo sapiens
  CDR3 for beta chain variable domain of TCR clone 25087 (TRBV5-8, TRBJ2-2)
CASSLDRGATGELFF

SEQ ID NO: 50175 - protein, 12 aa, Homo sapiens
  CDR3 for alpha chain variable domain of TCR clone 25088 (TRAV26-1, TRAJ36)
CIVRVRADNLFF

SEQ ID NO: 50176 - protein, 13 aa, Homo sapiens
  CDR3 for beta chain variable domain of TCR clone 25088 (TRBV11-2, TRBJ2-5)
CARSRGPSETQYF

SEQ ID NO: 50177 - protein, 14 aa, Homo sapiens
  CDR3 for alpha chain variable domain of TCR clone 25089 (TRAV12-2, TRAJ13)
CAVKKTGGYQKVTF

SEQ ID NO: 50178 - protein, 15 aa, Homo sapiens
  CDR3 for beta chain variable domain of TCR clone 25089 (TRBV27, TRBJ2-3)
CASSNGGGSSNEQFF

SEQ ID NO: 50179 - protein, 14 aa, Homo sapiens
  CDR3 for alpha chain variable domain of TCR clone 25090 (TRAV1-2, TRAJ8)
CAVREDTGFQKLVF

SEQ ID NO: 50180 - protein, 13 aa, Homo sapiens
  CDR3 for beta chain variable domain of TCR clone 25090 (TRBV20-1, TRBJ1-1)
CSAPLGGGTEAFF

SEQ ID NO: 50181 - protein, 15 aa, Homo sapiens
  CDR3 for alpha chain variable domain of TCR clone 25091 (TRAV3, TRAJ3)
CAVRDRDSSASKIIF

SEQ ID NO: 50182 - protein, 18 aa, Homo sapiens
  CDR3 for beta chain variable domain of TCR clone 25091 (TRBV25-1, TRBJ1-2)
CASSGLQNGQGSIFGYTF

SEQ ID NO: 50183 - protein, 15 aa, Homo sapiens
  CDR3 for alpha chain variable domain of TCR clone 25092 (TRAV3, TRAJ45)
CAVRTPWGGADGLTF

SEQ ID NO: 50184 - protein, 16 aa, Homo sapiens
  CDR3 for beta chain variable domain of TCR clone 25092 (TRBV6-1, TRBJ2-2)
CASSCGQGANTGELFF

SEQ ID NO: 50185 - protein, 14 aa, Homo sapiens
  CDR3 for alpha chain variable domain of TCR clone 25093 (TRAV12-2, TRAJ5)
CAVNRSTGRRALTF

SEQ ID NO: 50186 - protein, 12 aa, Homo sapiens
  CDR3 for beta chain variable domain of TCR clone 25093 (TRBV19, TRBJ1-5)
CASSIAQQPQHL

SEQ ID NO: 50187 - protein, 14 aa, Homo sapiens
  CDR3 for alpha chain variable domain of TCR clone 25094 (TRAV2, TRAJ29)
CAGPFQYGNTPLVF

SEQ ID NO: 50188 - protein, 11 aa, Homo sapiens
  CDR3 for beta chain variable domain of TCR clone 25094 (TRBV29-1, TRBJ2-5)
CSEDRTGTQCF

SEQ ID NO: 50189 - protein, 16 aa, Homo sapiens
  CDR3 for alpha chain variable domain of TCR clone 25095 (TRAV30, TRAJ24)
CGTEIVDADSWGKFQF

SEQ ID NO: 50190 - protein, 16 aa, Homo sapiens
  CDR3 for beta chain variable domain of TCR clone 25095 (TRBV19, TRBJ2-3)
CASSPGAASRTDTQYF

SEQ ID NO: 50191 - protein, 15 aa, Homo sapiens
  CDR3 for alpha chain variable domain of TCR clone 25096 (TRAV3, TRAJ5)
CAVRDRKTGRRALTS

SEQ ID NO: 50192 - protein, 15 aa, Homo sapiens
  CDR3 for beta chain variable domain of TCR clone 25096 (TRBV7-9, TRBJ2-2)
CASGPLDTFPGELFF

SEQ ID NO: 50193 - protein, 13 aa, Homo sapiens
  CDR3 for alpha chain variable domain of TCR clone 25097 (TRAV22, TRAJ29)
CAVGGSGNTPLVF

SEQ ID NO: 50194 - protein, 18 aa, Homo sapiens
  CDR3 for beta chain variable domain of TCR clone 25097 (TRBV10-3, TRBJ2-3)
CAIGESRVGPMRGDTQYF

SEQ ID NO: 50195 - protein, 16 aa, Homo sapiens
  CDR3 for alpha chain variable domain of TCR clone 25098 (TRAV26-1, TRAJ46)
CIVRVGKEKQRRQADF

SEQ ID NO: 50196 - protein, 16 aa, Homo sapiens
  CDR3 for beta chain variable domain of TCR clone 25098 (TRBV27, TRBJ2-2)
CASSFRGLVRTGELFF

SEQ ID NO: 50197 - protein, 13 aa, Homo sapiens
  CDR3 for alpha chain variable domain of TCR clone 25099 (TRAV35, TRAJ42)
CAVFPGSQGNLIF

SEQ ID NO: 50198 - protein, 13 aa, Homo sapiens
  CDR3 for beta chain variable domain of TCR clone 25099 (TRBV29-1, TRBJ2-1)
CSVEGGRVNEQFF

SEQ ID NO: 50199 - protein, 14 aa, Homo sapiens
  CDR3 for alpha chain variable domain of TCR clone 25100 (TRAV13-2, TRAJ43)
CAEITTYNNNDMRF

SEQ ID NO: 50200 - protein, 15 aa, Homo sapiens
  CDR3 for beta chain variable domain of TCR clone 25100 (TRBV7-9, TRBJ2-2)
CASGPLDTFPGELFF

SEQ ID NO: 50201 - protein, 14 aa, Homo sapiens
  CDR3 for alpha chain variable domain of TCR clone 25101 (TRAV12-3, TRAJ47)
CAMSVREYGNKLVF

SEQ ID NO: 50202 - protein, 15 aa, Homo sapiens
  CDR3 for beta chain variable domain of TCR clone 25101 (TRBV20-1, TRBJ2-2)
CSARDTRLNTGELFS

SEQ ID NO: 50203 - protein, 12 aa, Homo sapiens
  CDR3 for alpha chain variable domain of TCR clone 25102 (TRAV9-2, TRAJ36)
CALKKGANNLFF

SEQ ID NO: 50204 - protein, 15 aa, Homo sapiens
  CDR3 for beta chain variable domain of TCR clone 25102 (TRBV6-5, TRBJ1-2)
CASSYSQAFNYGYTF

SEQ ID NO: 50205 - protein, 13 aa, Homo sapiens
  CDR3 for alpha chain variable domain of TCR clone 25103 (TRAV21, TRAJ27)
RAARPGNAGKSTF

SEQ ID NO: 50206 - protein, 14 aa, Homo sapiens
  CDR3 for beta chain variable domain of TCR clone 25103 (TRBV11-2, TRBJ2-7)
CASSLGAGAYEQYF

SEQ ID NO: 50207 - protein, 14 aa, Homo sapiens
  CDR3 for alpha chain variable domain of TCR clone 25104 (TRAV29/DV5, TRAJ32)
CAAAYGGATNKLTF

SEQ ID NO: 50208 - protein, 15 aa, Homo sapiens
  CDR3 for beta chain variable domain of TCR clone 25104 (TRBV27, TRBJ2-7)
CASSTAGTGSYEQYF

SEQ ID NO: 50209 - protein, 15 aa, Homo sapiens
  CDR3 for alpha chain variable domain of TCR clone 25105 (TRAV26-1, TRAJ44)
CIVRANTGNASKLTF

SEQ ID NO: 50210 - protein, 16 aa, Homo sapiens
  CDR3 for beta chain variable domain of TCR clone 25105 (TRBV7-7, TRBJ2-1)
CASSLASGTSYNEQFF

SEQ ID NO: 50211 - protein, 12 aa, Homo sapiens
  CDR3 for alpha chain variable domain of TCR clone 25106 (TRAV12-2, TRAJ10)
WGVTGGGNKLTF

SEQ ID NO: 50212 - protein, 15 aa, Homo sapiens
  CDR3 for beta chain variable domain of TCR clone 25106 (TRBV20-1, TRBJ2-7)
YSARDRVSGMDEQYF

SEQ ID NO: 50213 - protein, 15 aa, Homo sapiens
  CDR3 for alpha chain variable domain of TCR clone 25107 (TRAV8-3, TRAJ11)
CAVGLLNSGYSTFTF

SEQ ID NO: 50214 - protein, 16 aa, Homo sapiens
  CDR3 for beta chain variable domain of TCR clone 25107 (TRBV7-9, TRBJ1-2)
CASSLGFSSGEDGYTF

SEQ ID NO: 50215 - protein, 12 aa, Homo sapiens
  CDR3 for alpha chain variable domain of TCR clone 25108 (TRAV4, TRAJ26)
CLVGDYGQNFVF

SEQ ID NO: 50216 - protein, 16 aa, Homo sapiens
  CDR3 for beta chain variable domain of TCR clone 25108 (TRBV7-2, TRBJ1-2)
CASSSNQDRRGHGYTV

SEQ ID NO: 50217 - protein, 15 aa, Homo sapiens
  CDR3 for alpha chain variable domain of TCR clone 25109 (TRAV12-3, TRAJ6)
CAMSATTGGSDIPTF

SEQ ID NO: 50218 - protein, 16 aa, Homo sapiens
  CDR3 for beta chain variable domain of TCR clone 25109 (TRBV20-1, TRBJ1-2)
CSASMGQGVANYGYTF

SEQ ID NO: 50219 - protein, 15 aa, Homo sapiens
  CDR3 for alpha chain variable domain of TCR clone 25110 (TRAV3, TRAJ5)
CAVRDSKTGRRALTF

SEQ ID NO: 50220 - protein, 15 aa, Homo sapiens
  CDR3 for beta chain variable domain of TCR clone 25110 (TRBV7-8, TRBJ2-1)
CASSLADSLYNEQFF

SEQ ID NO: 50221 - protein, 12 aa, Homo sapiens
  CDR3 for alpha chain variable domain of TCR clone 25111 (TRAV20, TRAJ39)
CAVGNAGNMPTF

SEQ ID NO: 50222 - protein, 16 aa, Homo sapiens
  CDR3 for beta chain variable domain of TCR clone 25111 (TRBV15, TRBJ1-2)
CATSRGPRTGGGGYTF

SEQ ID NO: 50223 - protein, 13 aa, Homo sapiens
  CDR3 for alpha chain variable domain of TCR clone 25112 (TRAV13-2, TRAJ15)
CAERPQAGTALIF

SEQ ID NO: 50224 - protein, 15 aa, Homo sapiens
  CDR3 for beta chain variable domain of TCR clone 25112 (TRBV11-2, TRBJ2-7)
CAGRFPGTGGYEQYF

SEQ ID NO: 50225 - protein, 14 aa, Homo sapiens
  CDR3 for alpha chain variable domain of TCR clone 25113 (TRAV8-3, TRAJ4)
CAVGAAGCYNKLIF

SEQ ID NO: 50226 - protein, 15 aa, Homo sapiens
  CDR3 for beta chain variable domain of TCR clone 25113 (TRBV6-5, TRBJ2-1)
CASSYDAGAGNEQFF

SEQ ID NO: 50227 - protein, 16 aa, Homo sapiens
  CDR3 for alpha chain variable domain of TCR clone 25114 (TRAV8-4, TRAJ16)
CAVSPVGRWPEAALCK

SEQ ID NO: 50228 - protein, 15 aa, Homo sapiens
  CDR3 for beta chain variable domain of TCR clone 25114 (TRBV7-3, TRBJ1-6)
CASSLGRGAGSPLHF

SEQ ID NO: 50229 - protein, 12 aa, Homo sapiens
  CDR3 for alpha chain variable domain of TCR clone 25115 (TRAV12-3, TRAJ40)
CAMSSGTYTYIF

SEQ ID NO: 50230 - protein, 15 aa, Homo sapiens
  CDR3 for beta chain variable domain of TCR clone 25115 (TRBV7-3, TRBJ2-2)
CASSETGQGTGELFF

SEQ ID NO: 50231 - protein, 15 aa, Homo sapiens
  CDR3 for alpha chain variable domain of TCR clone 25116 (TRAV12-2, TRAJ53)
CAVNGGGGSNYKLTF

SEQ ID NO: 50232 - protein, 14 aa, Homo sapiens
  CDR3 for beta chain variable domain of TCR clone 25116 (TRBV19, TRBJ2-2)
CASSTLHRSGGLFF

SEQ ID NO: 50233 - protein, 12 aa, Homo sapiens
  CDR3 for alpha chain variable domain of TCR clone 25117 (TRAV27, TRAJ13)
CAGVRGCQKVTF

SEQ ID NO: 50234 - protein, 16 aa, Homo sapiens
  CDR3 for beta chain variable domain of TCR clone 25117 (TRBV28, TRBJ2-1)
CASSSSYSGSLNEQFF

SEQ ID NO: 50235 - protein, 15 aa, Homo sapiens
  CDR3 for alpha chain variable domain of TCR clone 25118 (TRAV38-1, TRAJ37)
CAFINGSGNTGKLIF

SEQ ID NO: 50236 - protein, 12 aa, Homo sapiens
  CDR3 for beta chain variable domain of TCR clone 25118 (TRBV7-9, TRBJ2-7)
CASSFGSYEQYF

SEQ ID NO: 50237 - protein, 15 aa, Homo sapiens
  CDR3 for alpha chain variable domain of TCR clone 25119 (TRAV12-2, TRAJ43)
CAFDTRFGAGTRLTV

SEQ ID NO: 50238 - protein, 18 aa, Homo sapiens
  CDR3 for beta chain variable domain of TCR clone 25119 (TRBV20-1, TRBJ2-3)
CSASGLAGGPGTTDTQYF

SEQ ID NO: 50239 - protein, 17 aa, Homo sapiens
  CDR3 for alpha chain variable domain of TCR clone 25120 (TRAV13-1, TRAJ52)
CAASSGSGGTSYGKLTF

SEQ ID NO: 50240 - protein, 15 aa, Homo sapiens
  CDR3 for beta chain variable domain of TCR clone 25120 (TRBV2, TRBJ2-1)
CASSELAGSYNEQFF

SEQ ID NO: 50241 - protein, 13 aa, Homo sapiens
  CDR3 for alpha chain variable domain of TCR clone 25121 (TRAV2, TRAJ40)
CAVVTSGTYKYIF

SEQ ID NO: 50242 - protein, 12 aa, Homo sapiens
  CDR3 for beta chain variable domain of TCR clone 25121 (TRBV29-1, TRBJ2-3)
CSVTGGADTQYF

SEQ ID NO: 50243 - protein, 16 aa, Homo sapiens
  CDR3 for alpha chain variable domain of TCR clone 25122 (TRAV1-2, TRAJ10)
CAVRGVLTGGGNKLTF

SEQ ID NO: 50244 - protein, 14 aa, Homo sapiens
  CDR3 for beta chain variable domain of TCR clone 25122 (TRBV7-2, TRBJ2-7)
CASRSQGAAYEQYF

SEQ ID NO: 50245 - protein, 15 aa, Homo sapiens
  CDR3 for alpha chain variable domain of TCR clone 25123 (TRAV26-1, TRAJ22)
CIVRISFWFCKATDL

SEQ ID NO: 50246 - protein, 13 aa, Homo sapiens
  CDR3 for beta chain variable domain of TCR clone 25123 (TRBV7-9, TRBJ1-2)
CASSLKQNYGYTF

SEQ ID NO: 50247 - protein, 11 aa, Homo sapiens
  CDR3 for alpha chain variable domain of TCR clone 25124 (TRAV1-2, TRAJ20)
CAVANDYKLSF

SEQ ID NO: 50248 - protein, 18 aa, Homo sapiens
  CDR3 for beta chain variable domain of TCR clone 25124 (TRBV20-1, TRBJ2-6)
CSAETTQTHGSGANVLTF

SEQ ID NO: 50249 - protein, 14 aa, Homo sapiens
  CDR3 for alpha chain variable domain of TCR clone 25125 (TRAV26-1, TRAJ38)
CIAANAGNNRKLIW

SEQ ID NO: 50250 - protein, 14 aa, Homo sapiens
  CDR3 for beta chain variable domain of TCR clone 25125 (TRBV4-1, TRBJ2-2)
CASSQAVNTGELFF

SEQ ID NO: 50251 - protein, 13 aa, Homo sapiens
  CDR3 for alpha chain variable domain of TCR clone 25126 (TRAV27, TRAJ6)
CAGGTRGSYIPTF

SEQ ID NO: 50252 - protein, 13 aa, Homo sapiens
  CDR3 for beta chain variable domain of TCR clone 25126 (TRBV4-1, TRBJ2-5)
YASSLTRGETQYF

SEQ ID NO: 50253 - protein, 17 aa, Homo sapiens
  CDR3 for alpha chain variable domain of TCR clone 25127 (TRAV4, TRAJ42)
CLVGVLHYGGSQGNLIF

SEQ ID NO: 50254 - protein, 12 aa, Homo sapiens
  CDR3 for beta chain variable domain of TCR clone 25127 (TRBV20-1, TRBJ2-1)
CSAQYTYNEQFF

SEQ ID NO: 50255 - protein, 11 aa, Homo sapiens
  CDR3 for alpha chain variable domain of TCR clone 25128 (TRAV12-3, TRAJ43)
CAMSVSNDMRF

SEQ ID NO: 50256 - protein, 13 aa, Homo sapiens
  CDR3 for beta chain variable domain of TCR clone 25128 (TRBV20-1, TRBJ1-1)
CSVPLGGGTEAFF

SEQ ID NO: 50257 - protein, 15 aa, Homo sapiens
  CDR3 for alpha chain variable domain of TCR clone 25129 (TRAV26-1, TRAJ22)
CIVRVSFWFCKATDL

SEQ ID NO: 50258 - protein, 13 aa, Homo sapiens
  CDR3 for beta chain variable domain of TCR clone 25129 (TRBV7-9, TRBJ1-2)
CASNLKQNYGYTF

SEQ ID NO: 50259 - protein, 14 aa, Homo sapiens
  CDR3 for alpha chain variable domain of TCR clone 25130 (TRAV12-3, TRAJ10)
SHLPLTGGGNKLTF

SEQ ID NO: 50260 - protein, 14 aa, Homo sapiens
  CDR3 for beta chain variable domain of TCR clone 25130 (TRBV11-2, TRBJ2-3)
CASSRLARTDTQYF

SEQ ID NO: 50261 - protein, 14 aa, Homo sapiens
  CDR3 for alpha chain variable domain of TCR clone 25131 (TRAV1-2, TRAJ8)
CAVREDTGFQKLVF

SEQ ID NO: 50262 - protein, 15 aa, Homo sapiens
  CDR3 for beta chain variable domain of TCR clone 25131 (TRBV6-3, TRBJ2-7)
CASSSPGIVFYEQYF

SEQ ID NO: 50263 - protein, 10 aa, Homo sapiens
  CDR3 for alpha chain variable domain of TCR clone 25132 (TRAV21, TRAJ31)
CALDNARLMF

SEQ ID NO: 50264 - protein, 13 aa, Homo sapiens
  CDR3 for beta chain variable domain of TCR clone 25132 (TRBV4-1, TRBJ1-1)
CASSRKMNTEAFF

SEQ ID NO: 50265 - protein, 14 aa, Homo sapiens
  CDR3 for alpha chain variable domain of TCR clone 25133 (TRAV9-2, TRAJ39)
CALYIYNAGNMLTF

SEQ ID NO: 50266 - protein, 12 aa, Homo sapiens
  CDR3 for beta chain variable domain of TCR clone 25133 (TRBV9, TRBJ2-2)
CASSLVTGELFF

SEQ ID NO: 50267 - protein, 11 aa, Homo sapiens
  CDR3 for alpha chain variable domain of TCR clone 25134 (TRAV2, TRAJ33)
CAVECNYQLIW

SEQ ID NO: 50268 - protein, 15 aa, Homo sapiens
  CDR3 for beta chain variable domain of TCR clone 25134 (TRBV19, TRBJ1-1)
CASTSGQIQNTEAFF

SEQ ID NO: 50269 - protein, 14 aa, Homo sapiens
  CDR3 for alpha chain variable domain of TCR clone 25135 (TRAV1-2, TRAJ16)
CAVNRFSDGQKLLF

SEQ ID NO: 50270 - protein, 15 aa, Homo sapiens
  CDR3 for beta chain variable domain of TCR clone 25135 (TRBV18, TRBJ1-5)
CASSPSDRSNQPQHF

SEQ ID NO: 50271 - protein, 14 aa, Homo sapiens
  CDR3 for alpha chain variable domain of TCR clone 25136 (TRAV13-1, TRAJ35)
CAASKGVFGNVLHC

SEQ ID NO: 50272 - protein, 13 aa, Homo sapiens
  CDR3 for beta chain variable domain of TCR clone 25136 (TRBV7-3, TRBJ1-1)
CASSQDWGAEAFF

SEQ ID NO: 50273 - protein, 14 aa, Homo sapiens
  CDR3 for alpha chain variable domain of TCR clone 25137 (TRAV12-3, TRAJ58)
CAMSTETSGSRSTF

SEQ ID NO: 50274 - protein, 13 aa, Homo sapiens
  CDR3 for beta chain variable domain of TCR clone 25137 (TRBV27, TRBJ2-3)
CASSWGRTDTQYF

SEQ ID NO: 50275 - protein, 12 aa, Homo sapiens
  CDR3 for alpha chain variable domain of TCR clone 25138 (TRAV17, TRAJ4)
CATDGGYNNLIF

SEQ ID NO: 50276 - protein, 13 aa, Homo sapiens
  CDR3 for beta chain variable domain of TCR clone 25138 (TRBV29-1, TRBJ2-2)
CSTTGVNTGELFF

SEQ ID NO: 50277 - protein, 14 aa, Homo sapiens
  CDR3 for alpha chain variable domain of TCR clone 25139 (TRAV12-3, TRAJ42)
CAMNYGGSQGNLIF

SEQ ID NO: 50278 - protein, 16 aa, Homo sapiens
  CDR3 for beta chain variable domain of TCR clone 25139 (TRBV19, TRBJ2-1)
CASSKAGPSSYNEQFF

SEQ ID NO: 50279 - protein, 14 aa, Homo sapiens
  CDR3 for alpha chain variable domain of TCR clone 25140 (TRAV12-1, TRAJ23)
CVVIVYNQGGKLIF

SEQ ID NO: 50280 - protein, 15 aa, Homo sapiens
  CDR3 for beta chain variable domain of TCR clone 25140 (TRBV20-1, TRBJ1-5)
CSAEPPGQGPQPQHF

SEQ ID NO: 50281 - protein, 18 aa, Homo sapiens
  CDR3 for alpha chain variable domain of TCR clone 25141 (TRAV21, TRAJ52)
CAVRPSPAGGTSYGKLTF

SEQ ID NO: 50282 - protein, 17 aa, Homo sapiens
  CDR3 for beta chain variable domain of TCR clone 25141 (TRBV13, TRBJ2-3)
CASSLSRLAGGRNTQYF

SEQ ID NO: 50283 - protein, 13 aa, Homo sapiens
  CDR3 for alpha chain variable domain of TCR clone 25142 (TRAV8-6, TRAJ49)
CAVITNTGNQFYF

SEQ ID NO: 50284 - protein, 20 aa, Homo sapiens
  CDR3 for beta chain variable domain of TCR clone 25142 (TRBV7-8, TRBJ2-2)
CASSHLFPGPTIHITGELFF

SEQ ID NO: 50285 - protein, 12 aa, Homo sapiens
  CDR3 for alpha chain variable domain of TCR clone 25143 (TRAV35, TRAJ39)
LAPNDAGNMLTF

SEQ ID NO: 50286 - protein, 16 aa, Homo sapiens
  CDR3 for beta chain variable domain of TCR clone 25143 (TRBV2, TRBJ2-3)
CASSTSVEGVTDTQYF

SEQ ID NO: 50287 - protein, 13 aa, Homo sapiens
  CDR3 for alpha chain variable domain of TCR clone 25144 (TRAV21, TRAJ57)
CAVTQGGSEKLVF

SEQ ID NO: 50288 - protein, 16 aa, Homo sapiens
  CDR3 for beta chain variable domain of TCR clone 25144 (TRBV29-1, TRBJ2-7)
CSVEDAEDSTAYEQYF

SEQ ID NO: 50289 - protein, 12 aa, Homo sapiens
  CDR3 for alpha chain variable domain of TCR clone 25145 (TRAV13-2, TRAJ23)
CAERHRGGRLIF

SEQ ID NO: 50290 - protein, 13 aa, Homo sapiens
  CDR3 for beta chain variable domain of TCR clone 25145 (TRBV7-9, TRBJ1-2)
CASSLKQNYGYTF

SEQ ID NO: 50291 - protein, 14 aa, Homo sapiens
  CDR3 for alpha chain variable domain of TCR clone 25146 (TRAV13-1, TRAJ35)
CAASKGGFGNVLHC

SEQ ID NO: 50292 - protein, 13 aa, Homo sapiens
  CDR3 for beta chain variable domain of TCR clone 25146 (TRBV7-3, TRBJ1-1)
CASSQDWGAETFF

SEQ ID NO: 50293 - protein, 13 aa, Homo sapiens
  CDR3 for alpha chain variable domain of TCR clone 25147 (TRAV21, TRAJ20)
CAVGLSVDYKLSF

SEQ ID NO: 50294 - protein, 13 aa, Homo sapiens
  CDR3 for beta chain variable domain of TCR clone 25147 (TRBV6-1, TRBJ1-1)
CASSRQGNTEAFF

SEQ ID NO: 50295 - protein, 14 aa, Homo sapiens
  CDR3 for alpha chain variable domain of TCR clone 25148 (TRAV17, TRAJ54)
CATDANQGAQKLVS

SEQ ID NO: 50296 - protein, 12 aa, Homo sapiens
  CDR3 for beta chain variable domain of TCR clone 25148 (TRBV6-3, TRBJ2-1)
CASSGSYNEQFF

SEQ ID NO: 50297 - protein, 14 aa, Homo sapiens
  CDR3 for alpha chain variable domain of TCR clone 25149 (TRAV38-1, TRAJ45)
CASHSGGGADGLTF

SEQ ID NO: 50298 - protein, 13 aa, Homo sapiens
  CDR3 for beta chain variable domain of TCR clone 25149 (TRBV10-3, TRBJ1-2)
CANSERDSYGYTF

SEQ ID NO: 50299 - protein, 11 aa, Homo sapiens
  CDR3 for alpha chain variable domain of TCR clone 25150 (TRAV2, TRAJ33)
CAVESNYQLIW

SEQ ID NO: 50300 - protein, 11 aa, Homo sapiens
  CDR3 for beta chain variable domain of TCR clone 25150 (TRBV11-2, TRBJ2-2)
CASSLPGELFF

SEQ ID NO: 50301 - protein, 17 aa, Homo sapiens
  CDR3 for alpha chain variable domain of TCR clone 25151 (TRAV8-6, TRAJ8)
CAVKEGIENTGFQKLVF

SEQ ID NO: 50302 - protein, 14 aa, Homo sapiens
  CDR3 for beta chain variable domain of TCR clone 25151 (TRBV19, TRBJ1-4)
CASKDWPGGLFLAV

SEQ ID NO: 50303 - protein, 15 aa, Homo sapiens
  CDR3 for alpha chain variable domain of TCR clone 25152 (TRAV29/DV5, TRAJ29)
CAASERSSGNTPLVF

SEQ ID NO: 50304 - protein, 19 aa, Homo sapiens
  CDR3 for beta chain variable domain of TCR clone 25152 (TRBV4-1, TRBJ1-4)
CASSQEGPRGVEEKLFLAV

SEQ ID NO: 50305 - protein, 14 aa, Homo sapiens
  CDR3 for alpha chain variable domain of TCR clone 25153 (TRAV29/DV5, TRAJ20)
CAATIRSNDYKPSF

SEQ ID NO: 50306 - protein, 15 aa, Homo sapiens
  CDR3 for beta chain variable domain of TCR clone 25153 (TRBV20-1, TRBJ2-1)
CSASSAGSSYNEQFF

SEQ ID NO: 50307 - protein, 14 aa, Homo sapiens
  CDR3 for alpha chain variable domain of TCR clone 25154 (TRAV1-2, TRAJ8)
CAVREDTGFQKLVF

SEQ ID NO: 50308 - protein, 22 aa, Homo sapiens
  CDR3 for beta chain variable domain of TCR clone 25154 (TRBV6-1, TRBJ1-3)
CASVQGGGWKHHIFWRGKLAHC

SEQ ID NO: 50309 - protein, 13 aa, Homo sapiens
  CDR3 for alpha chain variable domain of TCR clone 25155 (TRAV2, TRAJ16)
CAVEFGDGQKLLF

SEQ ID NO: 50310 - protein, 14 aa, Homo sapiens
  CDR3 for beta chain variable domain of TCR clone 25155 (TRBV6-3, TRBJ2-5)
CASSYSLREKAQYF

SEQ ID NO: 50311 - protein, 15 aa, Homo sapiens
  CDR3 for alpha chain variable domain of TCR clone 25156 (TRAV3, TRAJ5)
CAVRDRKTGSRALTF

SEQ ID NO: 50312 - protein, 15 aa, Homo sapiens
  CDR3 for beta chain variable domain of TCR clone 25156 (TRBV7-8, TRBJ2-1)
CASSLADSLYNEQFF

SEQ ID NO: 50313 - protein, 12 aa, Homo sapiens
  CDR3 for alpha chain variable domain of TCR clone 25157 (TRAV12-1, TRAJ40)
CVVSPGTYKYIF

SEQ ID NO: 50314 - protein, 14 aa, Homo sapiens
  CDR3 for beta chain variable domain of TCR clone 25157 (TRBV20-1, TRBJ2-2)
CSAPDTANTGELFF

SEQ ID NO: 50315 - protein, 15 aa, Homo sapiens
  CDR3 for alpha chain variable domain of TCR clone 25158 (TRAV23/DV6, TRAJ18)
CAARYRGATLGRLYF

SEQ ID NO: 50316 - protein, 13 aa, Homo sapiens
  CDR3 for beta chain variable domain of TCR clone 25158 (TRBV7-2, TRBJ2-7)
CASSSPSGSEQYF

SEQ ID NO: 50317 - protein, 15 aa, Homo sapiens
  CDR3 for alpha chain variable domain of TCR clone 25159 (TRAV26-1, TRAJ29)
CIVRVEGSGNTPLVF

SEQ ID NO: 50318 - protein, 14 aa, Homo sapiens
  CDR3 for beta chain variable domain of TCR clone 25159 (TRBV18, TRBJ2-5)
CASSPWVSQETQYF

SEQ ID NO: 50319 - protein, 13 aa, Homo sapiens
  CDR3 for alpha chain variable domain of TCR clone 25160 (TRAV3, TRAJ21)
CAVREPDFNKFYF

SEQ ID NO: 50320 - protein, 13 aa, Homo sapiens
  CDR3 for beta chain variable domain of TCR clone 25160 (TRBV12-4, TRBJ1-2)
CASSLRQGKGYTF

SEQ ID NO: 50321 - protein, 14 aa, Homo sapiens
  CDR3 for alpha chain variable domain of TCR clone 25161 (TRAV8-2, TRAJ4)
CVVIPSGGYNKLIF

SEQ ID NO: 50322 - protein, 15 aa, Homo sapiens
  CDR3 for beta chain variable domain of TCR clone 25161 (TRBV4-1, TRBJ1-4)
CASSDTGGTNEKLFF

SEQ ID NO: 50323 - protein, 13 aa, Homo sapiens
  CDR3 for alpha chain variable domain of TCR clone 25162 (TRAV27, TRAJ3)
ASLRGSSASKIIF

SEQ ID NO: 50324 - protein, 15 aa, Homo sapiens
  CDR3 for beta chain variable domain of TCR clone 25162 (TRBV28, TRBJ1-3)
CTSSMGWASGNTIYF

SEQ ID NO: 50325 - protein, 13 aa, Homo sapiens
  CDR3 for alpha chain variable domain of TCR clone 25163 (TRAV17, TRAJ5)
CAPMDTGRRAFTF

SEQ ID NO: 50326 - protein, 15 aa, Homo sapiens
  CDR3 for beta chain variable domain of TCR clone 25163 (TRBV6-6, TRBJ2-5)
CASSPGGGLEETQYF

SEQ ID NO: 50327 - protein, 15 aa, Homo sapiens
  CDR3 for alpha chain variable domain of TCR clone 25164 (TRAV12-2, TRAJ53)
CAVNGGGGSNYKLTF

SEQ ID NO: 50328 - protein, 15 aa, Homo sapiens
  CDR3 for beta chain variable domain of TCR clone 25164 (TRBV19, TRBJ1-1)
CASTSGQIQNTEAFF

SEQ ID NO: 50329 - protein, 12 aa, Homo sapiens
  CDR3 for alpha chain variable domain of TCR clone 25165 (TRAV12-1, TRAJ16)
CVVFRDGQKLLF

SEQ ID NO: 50330 - protein, 15 aa, Homo sapiens
  CDR3 for beta chain variable domain of TCR clone 25165 (TRBV24-1, TRBJ1-3)
CATSDHGESGNTIYF

SEQ ID NO: 50331 - protein, 17 aa, Homo sapiens
  CDR3 for alpha chain variable domain of TCR clone 25166 (TRAV26-1, TRAJ53)
CIVRVDDSGGSNDKLTF

SEQ ID NO: 50332 - protein, 15 aa, Homo sapiens
  CDR3 for beta chain variable domain of TCR clone 25166 (TRBV20-1, TRBJ2-7)
CSARVPAAYFYEQYF

SEQ ID NO: 50333 - protein, 16 aa, Homo sapiens
  CDR3 for alpha chain variable domain of TCR clone 25167 (TRAV16, TRAJ57)
FAPYLITQGGSEKLVF

SEQ ID NO: 50334 - protein, 17 aa, Homo sapiens
  CDR3 for beta chain variable domain of TCR clone 25167 (TRBV24-1, TRBJ2-4)
CATSDAEARGVRNIQYF

SEQ ID NO: 50335 - protein, 14 aa, Homo sapiens
  CDR3 for alpha chain variable domain of TCR clone 25168 (TRAV13-1, TRAJ26)
CAAPKDPDGQNFVF

SEQ ID NO: 50336 - protein, 15 aa, Homo sapiens
  CDR3 for beta chain variable domain of TCR clone 25168 (TRBV28, TRBJ2-5)
CASSFRQGALETQYF

SEQ ID NO: 50337 - protein, 12 aa, Homo sapiens
  CDR3 for alpha chain variable domain of TCR clone 25169 (TRAV2, TRAJ9)
CAVGAGGFKTIF

SEQ ID NO: 50338 - protein, 16 aa, Homo sapiens
  CDR3 for beta chain variable domain of TCR clone 25169 (TRBV13, TRBJ2-2)
RASSPRTGEHTGELFF

SEQ ID NO: 50339 - protein, 13 aa, Homo sapiens
  CDR3 for alpha chain variable domain of TCR clone 25170 (TRAV8-3, TRAJ36)
CAVGATGANNLSF

SEQ ID NO: 50340 - protein, 17 aa, Homo sapiens
  CDR3 for beta chain variable domain of TCR clone 25170 (TRBV4-2, TRBJ1-1)
CASTQFGGGSGNTEAFF

SEQ ID NO: 50341 - protein, 13 aa, Homo sapiens
  CDR3 for alpha chain variable domain of TCR clone 25171 (TRAV2, TRAJ15)
CAVASQAGTALIF

SEQ ID NO: 50342 - protein, 15 aa, Homo sapiens
  CDR3 for beta chain variable domain of TCR clone 25171 (TRBV4-1, TRBJ1-4)
CASSDTGGTNEKLFF

SEQ ID NO: 50343 - protein, 15 aa, Homo sapiens
  CDR3 for alpha chain variable domain of TCR clone 25172 (TRAV35, TRAJ50)
CAGQLRKTSYDKVIF

SEQ ID NO: 50344 - protein, 12 aa, Homo sapiens
  CDR3 for beta chain variable domain of TCR clone 25172 (TRBV5-1, TRBJ2-5)
CASSLGLEAQYF

SEQ ID NO: 50345 - protein, 13 aa, Homo sapiens
  CDR3 for alpha chain variable domain of TCR clone 25173 (TRAV36/DV7, TRAJ54)
CAVLIQGAQKLVF

SEQ ID NO: 50346 - protein, 13 aa, Homo sapiens
  CDR3 for beta chain variable domain of TCR clone 25173 (TRBV29-1, TRBJ2-4)
CSVGEGTKNSQYF

SEQ ID NO: 50347 - protein, 14 aa, Homo sapiens
  CDR3 for alpha chain variable domain of TCR clone 25174 (TRAV12-3, TRAJ10)
SHLPLTRGGNKLTF

SEQ ID NO: 50348 - protein, 11 aa, Homo sapiens
  CDR3 for beta chain variable domain of TCR clone 25174 (TRBV20-1, TRBJ2-5)
CSADRAETQYF

SEQ ID NO: 50349 - protein, 12 aa, Homo sapiens
  CDR3 for alpha chain variable domain of TCR clone 25175 (TRAV2, TRAJ15)
CAVAQAGTALIF

SEQ ID NO: 50350 - protein, 16 aa, Homo sapiens
  CDR3 for beta chain variable domain of TCR clone 25175 (TRBV7-9, TRBJ2-1)
CASSDVAGGSYNEQFF

SEQ ID NO: 50351 - protein, 11 aa, Homo sapiens
  CDR3 for alpha chain variable domain of TCR clone 25176 (TRAV16, TRAJ33)
CDLHSNYQLIW

SEQ ID NO: 50352 - protein, 15 aa, Homo sapiens
  CDR3 for beta chain variable domain of TCR clone 25176 (TRBV4-1, TRBJ2-7)
CASSQQGQGFDEQYF

SEQ ID NO: 50353 - protein, 16 aa, Homo sapiens
  CDR3 for alpha chain variable domain of TCR clone 25177 (TRAV1-2, TRAJ10)
CAVRGVLTGGGNKLTF

SEQ ID NO: 50354 - protein, 12 aa, Homo sapiens
  CDR3 for beta chain variable domain of TCR clone 25177 (TRBV7-8, TRBJ2-7)
CASSLGDREHYF

SEQ ID NO: 50355 - protein, 14 aa, Homo sapiens
  CDR3 for alpha chain variable domain of TCR clone 25178 (TRAV8-1, TRAJ5)
CAVRTDTGRGALTF

SEQ ID NO: 50356 - protein, 14 aa, Homo sapiens
  CDR3 for beta chain variable domain of TCR clone 25178 (TRBV5-5, TRBJ1-2)
CASSLDPYNYGYTF

SEQ ID NO: 50357 - protein, 12 aa, Homo sapiens
  CDR3 for alpha chain variable domain of TCR clone 25179 (TRAV29/DV5, TRAJ49)
RAATDTGNQFYF

SEQ ID NO: 50358 - protein, 12 aa, Homo sapiens
  CDR3 for beta chain variable domain of TCR clone 25179 (TRBV12-4, TRBJ2-7)
CASSLGGYEQYF

SEQ ID NO: 50359 - protein, 12 aa, Homo sapiens
  CDR3 for alpha chain variable domain of TCR clone 25180 (TRAV3, TRAJ20)
CAVRDGDYKLSF

SEQ ID NO: 50360 - protein, 14 aa, Homo sapiens
  CDR3 for beta chain variable domain of TCR clone 25180 (TRBV7-3, TRBJ2-1)
CASSLAGGTNEQFF

SEQ ID NO: 50361 - protein, 11 aa, Homo sapiens
  CDR3 for alpha chain variable domain of TCR clone 25181 (TRAV1-2, TRAJ40)
CAVPGTYKYIF

SEQ ID NO: 50362 - protein, 18 aa, Homo sapiens
  CDR3 for beta chain variable domain of TCR clone 25181 (TRBV11-2, TRBJ2-3)
CASSLGGASRGAPNTQYF

SEQ ID NO: 50363 - protein, 13 aa, Homo sapiens
  CDR3 for alpha chain variable domain of TCR clone 25182 (TRAV1-2, TRAJ9)
CAALNTGGFKTIF

SEQ ID NO: 50364 - protein, 11 aa, Homo sapiens
  CDR3 for beta chain variable domain of TCR clone 25182 (TRBV29-1, TRBJ2-5)
CSEDRTGTQYF

SEQ ID NO: 50365 - protein, 12 aa, Homo sapiens
  CDR3 for alpha chain variable domain of TCR clone 25183 (TRAV12-3, TRAJ17)
CAMTLTGNKLTF

SEQ ID NO: 50366 - protein, 15 aa, Homo sapiens
  CDR3 for beta chain variable domain of TCR clone 25183 (TRBV19, TRBJ2-4)
CASRGPRRGENIQYF

SEQ ID NO: 50367 - protein, 18 aa, Homo sapiens
  CDR3 for alpha chain variable domain of TCR clone 25184 (TRAV27, TRAJ13)
ASTSVQELEFWGYQKVTF

SEQ ID NO: 50368 - protein, 12 aa, Homo sapiens
  CDR3 for beta chain variable domain of TCR clone 25184 (TRBV14, TRBJ2-5)
CASSQLKETQYF

SEQ ID NO: 50369 - protein, 14 aa, Homo sapiens
  CDR3 for alpha chain variable domain of TCR clone 25185 (TRAV26-1, TRAJ38)
CIADNDGNNRKLIW

SEQ ID NO: 50370 - protein, 13 aa, Homo sapiens
  CDR3 for beta chain variable domain of TCR clone 25185 (TRBV20-1, TRBJ1-1)
CSARGGGNTEAFF

SEQ ID NO: 50371 - protein, 11 aa, Homo sapiens
  CDR3 for alpha chain variable domain of TCR clone 25186 (TRAV12-3, TRAJ43)
CAMGVSNDMRF

SEQ ID NO: 50372 - protein, 13 aa, Homo sapiens
  CDR3 for beta chain variable domain of TCR clone 25186 (TRBV20-1, TRBJ1-1)
CSAPLGGGTEAFF

SEQ ID NO: 50373 - protein, 14 aa, Homo sapiens
  CDR3 for alpha chain variable domain of TCR clone 25187 (TRAV13-1, TRAJ35)
CAASKGGFGNVLHC

SEQ ID NO: 50374 - protein, 13 aa, Homo sapiens
  CDR3 for beta chain variable domain of TCR clone 25187 (TRBV5-1, TRBJ1-1)
CASSADWDTEAFF

SEQ ID NO: 50375 - protein, 13 aa, Homo sapiens
  CDR3 for alpha chain variable domain of TCR clone 25188 (TRAV39, TRAJ40)
CAVYTSGTYKYIF

SEQ ID NO: 50376 - protein, 17 aa, Homo sapiens
  CDR3 for beta chain variable domain of TCR clone 25188 (TRBV6-3, TRBJ2-2)
CASSYAGQGINTGELFF

SEQ ID NO: 50377 - protein, 16 aa, Homo sapiens
  CDR3 for alpha chain variable domain of TCR clone 25189 (TRAV30, TRAJ24)
CGTEIVDADSWGKFQF

SEQ ID NO: 50378 - protein, 15 aa, Homo sapiens
  CDR3 for beta chain variable domain of TCR clone 25189 (TRBV7-2, TRBJ2-1)
CASTHGTGIYNEQFF

SEQ ID NO: 50379 - protein, 14 aa, Homo sapiens
  CDR3 for alpha chain variable domain of TCR clone 25190 (TRAV26-1, TRAJ38)
CIADNAGNNRKLIW

SEQ ID NO: 50380 - protein, 13 aa, Homo sapiens
  CDR3 for beta chain variable domain of TCR clone 25190 (TRBV20-1, TRBJ1-1)
CSAKGGGNTEAFF

SEQ ID NO: 50381 - protein, 19 aa, Homo sapiens
  CDR3 for alpha chain variable domain of TCR clone 25191 (TRAV25, TRAJ43)
TATQTTDVGTYFRAVFMRF

SEQ ID NO: 50382 - protein, 13 aa, Homo sapiens
  CDR3 for beta chain variable domain of TCR clone 25191 (TRBV7-9, TRBJ1-2)
CASSLKQNYGYTF

SEQ ID NO: 50383 - protein, 16 aa, Homo sapiens
  CDR3 for alpha chain variable domain of TCR clone 25192 (TRAV14/DV4, TRAJ20)
CAMREGRSRDDYKLSF

SEQ ID NO: 50384 - protein, 14 aa, Homo sapiens
  CDR3 for beta chain variable domain of TCR clone 25192 (TRBV7-3, TRBJ2-2)
CASSSGGYTGELFF

SEQ ID NO: 50385 - protein, 10 aa, Homo sapiens
  CDR3 for alpha chain variable domain of TCR clone 25193 (TRAV8-4, TRAJ43)
CAVSADDMRF

SEQ ID NO: 50386 - protein, 15 aa, Homo sapiens
  CDR3 for beta chain variable domain of TCR clone 25193 (TRBV5-1, TRBJ2-3)
CASSVTSGSTDAQYF

SEQ ID NO: 50387 - protein, 15 aa, Homo sapiens
  CDR3 for alpha chain variable domain of TCR clone 25194 (TRAV8-3, TRAJ27)
CVVGPSKTNAGKSTF

SEQ ID NO: 50388 - protein, 15 aa, Homo sapiens
  CDR3 for beta chain variable domain of TCR clone 25194 (TRBV7-2, TRBJ2-1)
CASSSGLAGGNEQFF

SEQ ID NO: 50389 - protein, 12 aa, Homo sapiens
  CDR3 for alpha chain variable domain of TCR clone 25195 (TRAV13-1, TRAJ27)
CAAHTNAGKSTS

SEQ ID NO: 50390 - protein, 14 aa, Homo sapiens
  CDR3 for beta chain variable domain of TCR clone 25195 (TRBV19, TRBJ2-2)
CASSGQGIAGELFF

SEQ ID NO: 50391 - protein, 10 aa, Homo sapiens
  CDR3 for alpha chain variable domain of TCR clone 25196 (TRAV2, TRAJ34)
CAVANDKLIF

SEQ ID NO: 50392 - protein, 15 aa, Homo sapiens
  CDR3 for beta chain variable domain of TCR clone 25196 (TRBV3-1, TRBJ2-2)
CASSQDWTRAGELFF

SEQ ID NO: 50393 - protein, 13 aa, Homo sapiens
  CDR3 for alpha chain variable domain of TCR clone 25197 (TRAV2, TRAJ21)
CAVEDLNFNKFYF

SEQ ID NO: 50394 - protein, 13 aa, Homo sapiens
  CDR3 for beta chain variable domain of TCR clone 25197 (TRBV19, TRBJ1-1)
RASSPSNGSEAFF

SEQ ID NO: 50395 - protein, 14 aa, Homo sapiens
  CDR3 for alpha chain variable domain of TCR clone 25198 (TRAV29/DV5, TRAJ45)
CAASFSGGADGLTF

SEQ ID NO: 50396 - protein, 11 aa, Homo sapiens
  CDR3 for beta chain variable domain of TCR clone 25198 (TRBV11-2, TRBJ2-2)
CASSLPGELFF

SEQ ID NO: 50397 - protein, 12 aa, Homo sapiens
  CDR3 for alpha chain variable domain of TCR clone 25199 (TRAV21, TRAJ3)
CCFYSSASKIIF

SEQ ID NO: 50398 - protein, 16 aa, Homo sapiens
  CDR3 for beta chain variable domain of TCR clone 25199 (TRBV19, TRBJ2-1)
CASSRAGPSSYNEQFF

SEQ ID NO: 50399 - protein, 15 aa, Homo sapiens
  CDR3 for alpha chain variable domain of TCR clone 25200 (TRAV8-3, TRAJ45)
CASSYSGGGADGLTF

SEQ ID NO: 50400 - protein, 20 aa, Homo sapiens
  CDR3 for beta chain variable domain of TCR clone 25200 (TRBV7-8, TRBJ2-2)
CASSHLFPGPTIHITGELFF

SEQ ID NO: 50401 - protein, 13 aa, Homo sapiens
  CDR3 for alpha chain variable domain of TCR clone 25201 (TRAV2, TRAJ15)
CAVASQAGTALIF

SEQ ID NO: 50402 - protein, 16 aa, Homo sapiens
  CDR3 for beta chain variable domain of TCR clone 25201 (TRBV5-1, TRBJ1-1)
CASSSGGNSLNTEAVF

SEQ ID NO: 50403 - protein, 19 aa, Homo sapiens
  CDR3 for alpha chain variable domain of TCR clone 25202 (TRAV3, TRAJ6)
CAVRDRNPSRSGGSDIPTF

SEQ ID NO: 50404 - protein, 15 aa, Homo sapiens
  CDR3 for beta chain variable domain of TCR clone 25202 (TRBV18, TRBJ2-7)
CASSPTFMDSYEQYF

SEQ ID NO: 50405 - protein, 17 aa, Homo sapiens
  CDR3 for alpha chain variable domain of TCR clone 25203 (TRAV13-1, TRAJ52)
CAASSGAGGTSYGKLTF

SEQ ID NO: 50406 - protein, 15 aa, Homo sapiens
  CDR3 for beta chain variable domain of TCR clone 25203 (TRBV2, TRBJ2-1)
CASSELAGSYDEQFF

SEQ ID NO: 50407 - protein, 16 aa, Homo sapiens
  CDR3 for alpha chain variable domain of TCR clone 25204 (TRAV17, TRAJ52)
CATSNAGGTSYGKLTF

SEQ ID NO: 50408 - protein, 13 aa, Homo sapiens
  CDR3 for beta chain variable domain of TCR clone 25204 (TRBV27, TRBJ1-6)
CASSLVLASPLHF

SEQ ID NO: 50409 - protein, 14 aa, Homo sapiens
  CDR3 for alpha chain variable domain of TCR clone 25205 (TRAV12-2, TRAJ4)
CAEDLSGGYNQLIL

SEQ ID NO: 50410 - protein, 13 aa, Homo sapiens
  CDR3 for beta chain variable domain of TCR clone 25205 (TRBV7-9, TRBJ1-2)
CASSLKQSYGYTF

SEQ ID NO: 50411 - protein, 16 aa, Homo sapiens
  CDR3 for alpha chain variable domain of TCR clone 25206 (TRAV14/DV4, TRAJ20)
CAMREGRSRDDYKLSF

SEQ ID NO: 50412 - protein, 14 aa, Homo sapiens
  CDR3 for beta chain variable domain of TCR clone 25206 (TRBV19, TRBJ2-1)
CASPTFVLSGEQFF

SEQ ID NO: 50413 - protein, 12 aa, Homo sapiens
  CDR3 for alpha chain variable domain of TCR clone 25207 (TRAV13-2, TRAJ23)
CAKRHRGGKLIF

SEQ ID NO: 50414 - protein, 15 aa, Homo sapiens
  CDR3 for beta chain variable domain of TCR clone 25207 (TRBV7-9, TRBJ1-6)
CASSSPGRGNSPLHF

SEQ ID NO: 50415 - protein, 16 aa, Homo sapiens
  CDR3 for alpha chain variable domain of TCR clone 25208 (TRAV30, TRAJ24)
CGTEIVDADSWGKFKF

SEQ ID NO: 50416 - protein, 14 aa, Homo sapiens
  CDR3 for beta chain variable domain of TCR clone 25208 (TRBV7-9, TRBJ2-4)
CASSLAMGGNIQYF

SEQ ID NO: 50417 - protein, 11 aa, Homo sapiens
  CDR3 for alpha chain variable domain of TCR clone 25209 (TRAV2, TRAJ13)
CASGGYQKVTF

SEQ ID NO: 50418 - protein, 15 aa, Homo sapiens
  CDR3 for beta chain variable domain of TCR clone 25209 (TRBV28, TRBJ2-1)
CASSIIAGGRSEQFF

SEQ ID NO: 50419 - protein, 12 aa, Homo sapiens
  CDR3 for alpha chain variable domain of TCR clone 25210 (TRAV35, TRAJ39)
LAPNNAGNMLTF

SEQ ID NO: 50420 - protein, 16 aa, Homo sapiens
  CDR3 for beta chain variable domain of TCR clone 25210 (TRBV2, TRBJ2-3)
CASSASVEGVTDTQYF

SEQ ID NO: 50421 - protein, 12 aa, Homo sapiens
  CDR3 for alpha chain variable domain of TCR clone 25211 (TRAV12-3, TRAJ17)
CAMTLTGNKLTF

SEQ ID NO: 50422 - protein, 16 aa, Homo sapiens
  CDR3 for beta chain variable domain of TCR clone 25211 (TRBV20-1, TRBJ2-1)
CSARDSLGAVYNEQFF

SEQ ID NO: 50423 - protein, 16 aa, Homo sapiens
  CDR3 for alpha chain variable domain of TCR clone 25212 (TRAV1-2, TRAJ10)
CAVRGVLTGGGNKLTF

SEQ ID NO: 50424 - protein, 14 aa, Homo sapiens
  CDR3 for beta chain variable domain of TCR clone 25212 (TRBV19, TRBJ2-2)
CASTVTANTGELFF

SEQ ID NO: 50425 - protein, 14 aa, Homo sapiens
  CDR3 for alpha chain variable domain of TCR clone 25213 (TRAV12-2, TRAJ40)
CAVKIPSGTYKYIF

SEQ ID NO: 50426 - protein, 17 aa, Homo sapiens
  CDR3 for beta chain variable domain of TCR clone 25213 (TRBV20-1, TRBJ2-2)
CSASGSGQGGLTGELFF

SEQ ID NO: 50427 - protein, 13 aa, Homo sapiens
  CDR3 for alpha chain variable domain of TCR clone 25214 (TRAV12-2, TRAJ39)
CAVNNNAGNMLTF

SEQ ID NO: 50428 - protein, 13 aa, Homo sapiens
  CDR3 for beta chain variable domain of TCR clone 25214 (TRBV2, TRBJ1-5)
CATAGPGNQPQNF

SEQ ID NO: 50429 - protein, 14 aa, Homo sapiens
  CDR3 for alpha chain variable domain of TCR clone 25215 (TRAV12-2, TRAJ36)
CAVKISTGANNLFF

SEQ ID NO: 50430 - protein, 14 aa, Homo sapiens
  CDR3 for beta chain variable domain of TCR clone 25215 (TRBV25-1, TRBJ1-2)
CASSDTTGVVGYAF

SEQ ID NO: 50431 - protein, 13 aa, Homo sapiens
  CDR3 for alpha chain variable domain of TCR clone 25216 (TRAV1-2, TRAJ9)
CAALNTGGFKTNF

SEQ ID NO: 50432 - protein, 13 aa, Homo sapiens
  CDR3 for beta chain variable domain of TCR clone 25216 (TRBV19, TRBJ1-2)
CASSVPGQDGYTF

SEQ ID NO: 50433 - protein, 16 aa, Homo sapiens
  CDR3 for alpha chain variable domain of TCR clone 25217 (TRAV38-1, TRAJ37)
CAFKGDGSSDTGKLIF

SEQ ID NO: 50434 - protein, 13 aa, Homo sapiens
  CDR3 for beta chain variable domain of TCR clone 25217 (TRBV12-4, TRBJ2-5)
CASSLFRRETQYF

SEQ ID NO: 50435 - protein, 11 aa, Homo sapiens
  CDR3 for alpha chain variable domain of TCR clone 25218 (TRAV17, TRAJ31)
CATDRTARPMF

SEQ ID NO: 50436 - protein, 14 aa, Homo sapiens
  CDR3 for beta chain variable domain of TCR clone 25218 (TRBV4-1, TRBJ2-2)
CASSQAVNTGELFF

SEQ ID NO: 50437 - protein, 11 aa, Homo sapiens
  CDR3 for alpha chain variable domain of TCR clone 25219 (TRAV2, TRAJ33)
CAVESNYQLIW

SEQ ID NO: 50438 - protein, 15 aa, Homo sapiens
  CDR3 for beta chain variable domain of TCR clone 25219 (TRBV19, TRBJ1-1)
GASTSGQIQNTEAFF

SEQ ID NO: 50439 - protein, 15 aa, Homo sapiens
  CDR3 for alpha chain variable domain of TCR clone 25220 (TRAV25, TRAJ52)
CAGRPGGTSYGKRTF

SEQ ID NO: 50440 - protein, 17 aa, Homo sapiens
  CDR3 for beta chain variable domain of TCR clone 25220 (TRBV7-8, TRBJ2-6)
CASSAGTGGAGANVLTF

SEQ ID NO: 50441 - protein, 15 aa, Homo sapiens
  CDR3 for alpha chain variable domain of TCR clone 25221 (TRAV3, TRAJ5)
CAVRDLDTGRRTLTF

SEQ ID NO: 50442 - protein, 13 aa, Homo sapiens
  CDR3 for beta chain variable domain of TCR clone 25221 (TRBV12-4, TRBJ2-7)
CASSPTETYEQYF

SEQ ID NO: 50443 - protein, 12 aa, Homo sapiens
  CDR3 for alpha chain variable domain of TCR clone 25222 (TRAV29/DV5, TRAJ49)
CAATDTGNQFYF

SEQ ID NO: 50444 - protein, 19 aa, Homo sapiens
  CDR3 for beta chain variable domain of TCR clone 25222 (TRBV25-1, TRBJ2-2)
CAILVYRVDRGRKTGELLF

SEQ ID NO: 50445 - protein, 15 aa, Homo sapiens
  CDR3 for alpha chain variable domain of TCR clone 25223 (TRAV35, TRAJ28)
CWAEILWGWSYQLTF

SEQ ID NO: 50446 - protein, 13 aa, Homo sapiens
  CDR3 for beta chain variable domain of TCR clone 25223 (TRBV19, TRBJ1-2)
CASSQGQVYGYTF

SEQ ID NO: 50447 - protein, 12 aa, Homo sapiens
  CDR3 for alpha chain variable domain of TCR clone 25224 (TRAV12-3, TRAJ40)
CAMSSGTYKYIF

SEQ ID NO: 50448 - protein, 15 aa, Homo sapiens
  CDR3 for beta chain variable domain of TCR clone 25224 (TRBV7-3, TRBJ2-2)
CASSETGQGTGELLF

SEQ ID NO: 50449 - protein, 15 aa, Homo sapiens
  CDR3 for alpha chain variable domain of TCR clone 25225 (TRAV21, TRAJ53)
CATLNSGGSNYKLTF

SEQ ID NO: 50450 - protein, 15 aa, Homo sapiens
  CDR3 for beta chain variable domain of TCR clone 25225 (TRBV7-9, TRBJ1-6)
CASSSPGRGNSPLHF

SEQ ID NO: 50451 - protein, 15 aa, Homo sapiens
  CDR3 for alpha chain variable domain of TCR clone 25226 (TRAV8-2, TRAJ42)
CVVSSYGGSQGNLIF

SEQ ID NO: 50452 - protein, 15 aa, Homo sapiens
  CDR3 for beta chain variable domain of TCR clone 25226 (TRBV7-2, TRBJ1-2)
CASSLVSGGDYGYTF

SEQ ID NO: 50453 - protein, 11 aa, Homo sapiens
  CDR3 for alpha chain variable domain of TCR clone 25227 (TRAV12-1, TRAJ34)
CVVNKGRELIL

SEQ ID NO: 50454 - protein, 12 aa, Homo sapiens
  CDR3 for beta chain variable domain of TCR clone 25227 (TRBV2, TRBJ2-1)
CAYGPPGNEQFF

SEQ ID NO: 50455 - protein, 14 aa, Homo sapiens
  CDR3 for alpha chain variable domain of TCR clone 25228 (TRAV38-2/DV8, TRAJ23)
CAYRKPNQGGKLIF

SEQ ID NO: 50456 - protein, 13 aa, Homo sapiens
  CDR3 for beta chain variable domain of TCR clone 25228 (TRBV12-4, TRBJ1-3)
CASSLASGNTIYF

SEQ ID NO: 50457 - protein, 16 aa, Homo sapiens
  CDR3 for alpha chain variable domain of TCR clone 25229 (TRAV30, TRAJ24)
RGTEIVDADSWGKFQF

SEQ ID NO: 50458 - protein, 12 aa, Homo sapiens
  CDR3 for beta chain variable domain of TCR clone 25229 (TRBV11-2, TRBJ2-2)
CASSLGGGELFF

SEQ ID NO: 50459 - protein, 13 aa, Homo sapiens
  CDR3 for alpha chain variable domain of TCR clone 25230 (TRAV21, TRAJ57)
CAVTQGGSEKLVF

SEQ ID NO: 50460 - protein, 17 aa, Homo sapiens
  CDR3 for beta chain variable domain of TCR clone 25230 (TRBV11-2, TRBJ2-1)
CASSLYPPGVEYNEQFF

SEQ ID NO: 50461 - protein, 13 aa, Homo sapiens
  CDR3 for alpha chain variable domain of TCR clone 25231 (TRAV38-1, TRAJ42)
CARWGGSQGNLTF

SEQ ID NO: 50462 - protein, 17 aa, Homo sapiens
  CDR3 for beta chain variable domain of TCR clone 25231 (TRBV20-1, TRBJ2-1)
CSARDPLAGVWDNEQFF

SEQ ID NO: 50463 - protein, 15 aa, Homo sapiens
  CDR3 for alpha chain variable domain of TCR clone 25232 (TRAV8-3, TRAJ11)
CAVGLLNSGYSTLTF

SEQ ID NO: 50464 - protein, 16 aa, Homo sapiens
  CDR3 for beta chain variable domain of TCR clone 25232 (TRBV7-9, TRBJ1-2)
CASSLGFSSGGDGYTF

SEQ ID NO: 50465 - protein, 13 aa, Homo sapiens
  CDR3 for alpha chain variable domain of TCR clone 25233 (TRAV2, TRAJ40)
CAVVTSGTYKYIF

SEQ ID NO: 50466 - protein, 19 aa, Homo sapiens
  CDR3 for beta chain variable domain of TCR clone 25233 (TRBV19, TRBJ2-5)
CASSIGQVTDFFLGETQYF

SEQ ID NO: 50467 - protein, 15 aa, Homo sapiens
  CDR3 for alpha chain variable domain of TCR clone 25234 (TRAV25, TRAJ10)
CAGPLLAGGGNKLTF

SEQ ID NO: 50468 - protein, 15 aa, Homo sapiens
  CDR3 for beta chain variable domain of TCR clone 25234 (TRBV12-5, TRBJ2-2)
CASGRLGGNTGELFF

SEQ ID NO: 50469 - protein, 14 aa, Homo sapiens
  CDR3 for alpha chain variable domain of TCR clone 25235 (TRAV26-1, TRAJ21)
CIVRPPYNFNKFYF

SEQ ID NO: 50470 - protein, 14 aa, Homo sapiens
  CDR3 for beta chain variable domain of TCR clone 25235 (TRBV11-3, TRBJ2-1)
CASSATTSGSIQFL

SEQ ID NO: 50471 - protein, 15 aa, Homo sapiens
  CDR3 for alpha chain variable domain of TCR clone 25236 (TRAV21, TRAJ37)
CVVRPTLSNTGKLIF

SEQ ID NO: 50472 - protein, 16 aa, Homo sapiens
  CDR3 for beta chain variable domain of TCR clone 25236 (TRBV24-1, TRBJ2-3)
CATSDRRQDLTDTQYF

SEQ ID NO: 50473 - protein, 12 aa, Homo sapiens
  CDR3 for alpha chain variable domain of TCR clone 25237 (TRAV13-1, TRAJ53)
AASGGSNYKLTF

SEQ ID NO: 50474 - protein, 15 aa, Homo sapiens
  CDR3 for beta chain variable domain of TCR clone 25237 (TRBV5-1, TRBJ2-1)
CASSPPRAPYNEQFS

SEQ ID NO: 50475 - protein, 11 aa, Homo sapiens
  CDR3 for alpha chain variable domain of TCR clone 25238 (TRAV23/DV6, TRAJ49)
CAVALVTSSIL

SEQ ID NO: 50476 - protein, 14 aa, Homo sapiens
  CDR3 for beta chain variable domain of TCR clone 25238 (TRBV19, TRBJ2-1)
CASPTFVLSGEQFF

SEQ ID NO: 50477 - protein, 12 aa, Homo sapiens
  CDR3 for alpha chain variable domain of TCR clone 25239 (TRAV12-3, TRAJ40)
CAMSSGTYKYIF

SEQ ID NO: 50478 - protein, 15 aa, Homo sapiens
  CDR3 for beta chain variable domain of TCR clone 25239 (TRBV7-3, TRBJ2-2)
CASSETGQGTGGLFF

SEQ ID NO: 50479 - protein, 12 aa, Homo sapiens
  CDR3 for alpha chain variable domain of TCR clone 25240 (TRAV13-1, TRAJ9)
CASHTGGFKTIF

SEQ ID NO: 50480 - protein, 13 aa, Homo sapiens
  CDR3 for beta chain variable domain of TCR clone 25240 (TRBV12-4, TRBJ1-2)
CASSSGSKGGYTF

SEQ ID NO: 50481 - protein, 15 aa, Homo sapiens
  CDR3 for alpha chain variable domain of TCR clone 25241 (TRAV27, TRAJ38)
CAARRNAGNNRELIW

SEQ ID NO: 50482 - protein, 13 aa, Homo sapiens
  CDR3 for beta chain variable domain of TCR clone 25241 (TRBV12-5, TRBJ2-3)
CASGDRQSDTQYF

SEQ ID NO: 50483 - protein, 20 aa, Homo sapiens
  CDR3 for alpha chain variable domain of TCR clone 25242 (TRAV25, TRAJ21)
TATQTTDVGTYPLSFNKFYF

SEQ ID NO: 50484 - protein, 15 aa, Homo sapiens
  CDR3 for beta chain variable domain of TCR clone 25242 (TRBV5-1, TRBJ1-1)
CASSSTTGTNTEAFF

SEQ ID NO: 50485 - protein, 13 aa, Homo sapiens
  CDR3 for alpha chain variable domain of TCR clone 25243 (TRAV17, TRAJ22)
CAHHSGSARQLTF

SEQ ID NO: 50486 - protein, 16 aa, Homo sapiens
  CDR3 for beta chain variable domain of TCR clone 25243 (TRBV4-1, TRBJ1-2)
CASSQDAGQVLYGDTF

SEQ ID NO: 50487 - protein, 14 aa, Homo sapiens
  CDR3 for alpha chain variable domain of TCR clone 25244 (TRAV8-6, TRAJ29)
CAVSRASGNTPLVF

SEQ ID NO: 50488 - protein, 14 aa, Homo sapiens
  CDR3 for beta chain variable domain of TCR clone 25244 (TRBV5-4, TRBJ1-1)
CASSLDSRRDEAFF

SEQ ID NO: 50489 - protein, 15 aa, Homo sapiens
  CDR3 for alpha chain variable domain of TCR clone 25245 (TRAV12-1, TRAJ42)
CVVKTGGGSQGNLIF

SEQ ID NO: 50490 - protein, 18 aa, Homo sapiens
  CDR3 for beta chain variable domain of TCR clone 25245 (TRBV5-1, TRBJ1-4)
CASSIRRGTRGGVEKLFF

SEQ ID NO: 50491 - protein, 15 aa, Homo sapiens
  CDR3 for alpha chain variable domain of TCR clone 25246 (TRAV17, TRAJ57)
CATGPSQGGSEKLVF

SEQ ID NO: 50492 - protein, 16 aa, Homo sapiens
  CDR3 for beta chain variable domain of TCR clone 25246 (TRBV19, TRBJ2-1)
CASSKAGPSSYNEQFF

SEQ ID NO: 50493 - protein, 13 aa, Homo sapiens
  CDR3 for alpha chain variable domain of TCR clone 25247 (TRAV21, TRAJ27)
CAARPGNAGKSTF

SEQ ID NO: 50494 - protein, 14 aa, Homo sapiens
  CDR3 for beta chain variable domain of TCR clone 25247 (TRBV7-6, TRBJ2-3)
CASSLGTVTDTQYF

SEQ ID NO: 50495 - protein, 11 aa, Homo sapiens
  CDR3 for alpha chain variable domain of TCR clone 25248 (TRAV2, TRAJ23)
CAVETRGKLTF

SEQ ID NO: 50496 - protein, 14 aa, Homo sapiens
  CDR3 for beta chain variable domain of TCR clone 25248 (TRBV2, TRBJ2-3)
CASSEGQNTDTQYF

SEQ ID NO: 50497 - protein, 11 aa, Homo sapiens
  CDR3 for alpha chain variable domain of TCR clone 25249 (TRAV12-2, TRAJ49)
CAVHTGNQFYF

SEQ ID NO: 50498 - protein, 15 aa, Homo sapiens
  CDR3 for beta chain variable domain of TCR clone 25249 (TRBV9, TRBJ1-6)
CASSVAGTGDSPLHF

SEQ ID NO: 50499 - protein, 14 aa, Homo sapiens
  CDR3 for alpha chain variable domain of TCR clone 25250 (TRAV12-2, TRAJ17)
CAVLFKAAGNKLTF

SEQ ID NO: 50500 - protein, 17 aa, Homo sapiens
  CDR3 for beta chain variable domain of TCR clone 25250 (TRBV20-1, TRBJ2-2)
CSASGSGQGGLPGELFF

SEQ ID NO: 50501 - protein, 14 aa, Homo sapiens
  CDR3 for alpha chain variable domain of TCR clone 25251 (TRAV13-2, TRAJ11)
CAETGNSGYSTLTF

SEQ ID NO: 50502 - protein, 12 aa, Homo sapiens
  CDR3 for beta chain variable domain of TCR clone 25251 (TRBV12-5, TRBJ2-5)
CASGQGVETQYF

SEQ ID NO: 50503 - protein, 10 aa, Homo sapiens
  CDR3 for alpha chain variable domain of TCR clone 25252 (TRAV21, TRAJ43)
RAVRIGDMRF

SEQ ID NO: 50504 - protein, 13 aa, Homo sapiens
  CDR3 for beta chain variable domain of TCR clone 25252 (TRBV20-1, TRBJ2-7)
CSAPGLADYEQYF

SEQ ID NO: 50505 - protein, 14 aa, Homo sapiens
  CDR3 for alpha chain variable domain of TCR clone 25253 (TRAV19, TRAJ29)
CALSDLSGNTPLVF

SEQ ID NO: 50506 - protein, 16 aa, Homo sapiens
  CDR3 for beta chain variable domain of TCR clone 25253 (TRBV7-2, TRBJ2-1)
CASSLRWGRENNEQFF

SEQ ID NO: 50507 - protein, 13 aa, Homo sapiens
  CDR3 for alpha chain variable domain of TCR clone 25254 (TRAV8-3, TRAJ31)
CAVGARNNARLMF

SEQ ID NO: 50508 - protein, 14 aa, Homo sapiens
  CDR3 for beta chain variable domain of TCR clone 25254 (TRBV12-5, TRBJ2-5)
CASGSRTHQGTQYF

SEQ ID NO: 50509 - protein, 12 aa, Homo sapiens
  CDR3 for alpha chain variable domain of TCR clone 25255 (TRAV12-1, TRAJ6)
CVVSERSYIPTF

SEQ ID NO: 50510 - protein, 16 aa, Homo sapiens
  CDR3 for beta chain variable domain of TCR clone 25255 (TRBV7-3, TRBJ2-1)
CISVPAAYGLAGAQFF

SEQ ID NO: 50511 - protein, 14 aa, Homo sapiens
  CDR3 for alpha chain variable domain of TCR clone 25256 (TRAV12-2, TRAJ13)
CAVKKTGGYQKVTF

SEQ ID NO: 50512 - protein, 13 aa, Homo sapiens
  CDR3 for beta chain variable domain of TCR clone 25256 (TRBV19, TRBJ1-2)
CASSVPGQDGCTF

SEQ ID NO: 50513 - protein, 12 aa, Homo sapiens
  CDR3 for alpha chain variable domain of TCR clone 25257 (TRAV26-2, TRAJ21)
CILKGNFNKFYF

SEQ ID NO: 50514 - protein, 14 aa, Homo sapiens
  CDR3 for beta chain variable domain of TCR clone 25257 (TRBV7-9, TRBJ1-1)
CAGTPLQSYTEAFF

SEQ ID NO: 50515 - protein, 13 aa, Homo sapiens
  CDR3 for alpha chain variable domain of TCR clone 25258 (TRAV20, TRAJ37)
CAGCSSNTGKLIF

SEQ ID NO: 50516 - protein, 11 aa, Homo sapiens
  CDR3 for beta chain variable domain of TCR clone 25258 (TRBV12-4, TRBJ2-3)
CASSATDTQYF

SEQ ID NO: 50517 - protein, 17 aa, Homo sapiens
  CDR3 for alpha chain variable domain of TCR clone 25259 (TRAV23/DV6, TRAJ58)
CAARLLRGETSGSRLTF

SEQ ID NO: 50518 - protein, 13 aa, Homo sapiens
  CDR3 for beta chain variable domain of TCR clone 25259 (TRBV11-2, TRBJ2-5)
CASSRGPSETQYF

SEQ ID NO: 50519 - protein, 14 aa, Homo sapiens
  CDR3 for alpha chain variable domain of TCR clone 25260 (TRAV26-1, TRAJ38)
CIADNAGNNRKLIW

SEQ ID NO: 50520 - protein, 13 aa, Homo sapiens
  CDR3 for beta chain variable domain of TCR clone 25260 (TRBV7-9, TRBJ1-2)
CASSLKQNYGHTF

SEQ ID NO: 50521 - protein, 17 aa, Homo sapiens
  CDR3 for alpha chain variable domain of TCR clone 25261 (TRAV3, TRAJ6)
CAVRDGPRAGGSYIPTF

SEQ ID NO: 50522 - protein, 20 aa, Homo sapiens
  CDR3 for beta chain variable domain of TCR clone 25261 (TRBV28, TRBJ2-1)
CASTPIGRSPGLAVGNEQFF

SEQ ID NO: 50523 - protein, 14 aa, Homo sapiens
  CDR3 for alpha chain variable domain of TCR clone 25262 (TRAV29/DV5, TRAJ36)
CAARRKTGANNLFF

SEQ ID NO: 50524 - protein, 14 aa, Homo sapiens
  CDR3 for beta chain variable domain of TCR clone 25262 (TRBV12-5, TRBJ2-5)
CASGSRTHQETQFF

SEQ ID NO: 50525 - protein, 15 aa, Homo sapiens
  CDR3 for alpha chain variable domain of TCR clone 25263 (TRAV17, TRAJ57)
CATGPSQGGSEKLVF

SEQ ID NO: 50526 - protein, 14 aa, Homo sapiens
  CDR3 for beta chain variable domain of TCR clone 25263 (TRBV12-5, TRBJ2-5)
CASGSRTHQETHYF

SEQ ID NO: 50527 - protein, 14 aa, Homo sapiens
  CDR3 for alpha chain variable domain of TCR clone 25264 (TRAV26-1, TRAJ34)
CIVRVAYNTDKLIF

SEQ ID NO: 50528 - protein, 12 aa, Homo sapiens
  CDR3 for beta chain variable domain of TCR clone 25264 (TRBV12-4, TRBJ2-7)
YASSLGGYEQYF

SEQ ID NO: 50529 - protein, 15 aa, Homo sapiens
  CDR3 for alpha chain variable domain of TCR clone 25265 (TRAV25, TRAJ52)
CAGRPGGTSYEKLTF

SEQ ID NO: 50530 - protein, 17 aa, Homo sapiens
  CDR3 for beta chain variable domain of TCR clone 25265 (TRBV7-8, TRBJ2-6)
CASSAGTGGAGANVLTF

SEQ ID NO: 50531 - protein, 14 aa, Homo sapiens
  CDR3 for alpha chain variable domain of TCR clone 25266 (TRAV1-2, TRAJ16)
RAVNRFSDGQKLLF

SEQ ID NO: 50532 - protein, 13 aa, Homo sapiens
  CDR3 for beta chain variable domain of TCR clone 25266 (TRBV19, TRBJ2-7)
CASRKAGGSEQYF

SEQ ID NO: 50533 - protein, 12 aa, Homo sapiens
  CDR3 for alpha chain variable domain of TCR clone 25267 (TRAV12-3, TRAJ20)
CAMVRGDYKPSF

SEQ ID NO: 50534 - protein, 14 aa, Homo sapiens
  CDR3 for beta chain variable domain of TCR clone 25267 (TRBV5-5, TRBJ1-5)
CASSGQGVDQPQHF

SEQ ID NO: 50535 - protein, 14 aa, Homo sapiens
  CDR3 for alpha chain variable domain of TCR clone 25268 (TRAV1-2, TRAJ8)
CAVREDTGFQKLVF

SEQ ID NO: 50536 - protein, 13 aa, Homo sapiens
  CDR3 for beta chain variable domain of TCR clone 25268 (TRBV7-3, TRBJ2-1)
CASSVDSYNEQFF

SEQ ID NO: 50537 - protein, 16 aa, Homo sapiens
  CDR3 for alpha chain variable domain of TCR clone 25269 (TRAV3, TRAJ21)
CAVRDIERGNFNKFYF

SEQ ID NO: 50538 - protein, 13 aa, Homo sapiens
  CDR3 for beta chain variable domain of TCR clone 25269 (TRBV27, TRBJ2-7)
CASSLTTGYEQHF

SEQ ID NO: 50539 - protein, 14 aa, Homo sapiens
  CDR3 for alpha chain variable domain of TCR clone 25270 (TRAV13-1, TRAJ35)
CAASKGGFGNVLHC

SEQ ID NO: 50540 - protein, 15 aa, Homo sapiens
  CDR3 for beta chain variable domain of TCR clone 25270 (TRBV28, TRBJ2-1)
CASSIIAGGRSEQFF

SEQ ID NO: 50541 - protein, 14 aa, Homo sapiens
  CDR3 for alpha chain variable domain of TCR clone 25271 (TRAV20, TRAJ42)
CAVQAGGSQGNLIF

SEQ ID NO: 50542 - protein, 14 aa, Homo sapiens
  CDR3 for beta chain variable domain of TCR clone 25271 (TRBV28, TRBJ1-2)
CASRIQGANYGYTV

SEQ ID NO: 50543 - protein, 13 aa, Homo sapiens
  CDR3 for alpha chain variable domain of TCR clone 25272 (TRAV2, TRAJ15)
CAVASQAGTALIF

SEQ ID NO: 50544 - protein, 16 aa, Homo sapiens
  CDR3 for beta chain variable domain of TCR clone 25272 (TRBV7-9, TRBJ2-1)
CASSDVAGGSYNEQFF

SEQ ID NO: 50545 - protein, 13 aa, Homo sapiens
  CDR3 for alpha chain variable domain of TCR clone 25273 (TRAV8-6, TRAJ50)
CAVIKTSYDKVIF

SEQ ID NO: 50546 - protein, 15 aa, Homo sapiens
  CDR3 for beta chain variable domain of TCR clone 25273 (TRBV7-2, TRBJ2-2)
CASRRPGQNTGELFS

SEQ ID NO: 50547 - protein, 15 aa, Homo sapiens
  CDR3 for alpha chain variable domain of TCR clone 25274 (TRAV3, TRAJ5)
CAVRDRKTGRRALTF

SEQ ID NO: 50548 - protein, 15 aa, Homo sapiens
  CDR3 for beta chain variable domain of TCR clone 25274 (TRBV7-8, TRBJ2-1)
CASGLADSLYNEQFF

SEQ ID NO: 50549 - protein, 13 aa, Homo sapiens
  CDR3 for alpha chain variable domain of TCR clone 25275 (TRAV8-3, TRAJ21)
CAVGAYNFNKFYL

SEQ ID NO: 50550 - protein, 16 aa, Homo sapiens
  CDR3 for beta chain variable domain of TCR clone 25275 (TRBV19, TRBJ2-1)
CASSMGGGSSYNEQFF

SEQ ID NO: 50551 - protein, 16 aa, Homo sapiens
  CDR3 for alpha chain variable domain of TCR clone 25276 (TRAV3, TRAJ37)
CAVRPRGSGNTGKLIF

SEQ ID NO: 50552 - protein, 16 aa, Homo sapiens
  CDR3 for beta chain variable domain of TCR clone 25276 (TRBV9, TRBJ1-2)
CASSVEEKVSPYGYTF

SEQ ID NO: 50553 - protein, 14 aa, Homo sapiens
  CDR3 for alpha chain variable domain of TCR clone 25277 (TRAV14/DV4, TRAJ15)
CAMRRDQAGTALIF

SEQ ID NO: 50554 - protein, 13 aa, Homo sapiens
  CDR3 for beta chain variable domain of TCR clone 25277 (TRBV12-4, TRBJ2-5)
CASSLGGSRTQYF

SEQ ID NO: 50555 - protein, 14 aa, Homo sapiens
  CDR3 for alpha chain variable domain of TCR clone 25278 (TRAV12-2, TRAJ40)
CAVKIPSGTYKYIF

SEQ ID NO: 50556 - protein, 14 aa, Homo sapiens
  CDR3 for beta chain variable domain of TCR clone 25278 (TRBV7-9, TRBJ2-2)
CASSGLADTGELFF

SEQ ID NO: 50557 - protein, 14 aa, Homo sapiens
  CDR3 for alpha chain variable domain of TCR clone 25279 (TRAV2, TRAJ9)
CAVEDRSGGFKTIF

SEQ ID NO: 50558 - protein, 17 aa, Homo sapiens
  CDR3 for beta chain variable domain of TCR clone 25279 (TRBV7-3, TRBJ2-3)
CASSLMKRMRGADTQYF

SEQ ID NO: 50559 - protein, 13 aa, Homo sapiens
  CDR3 for alpha chain variable domain of TCR clone 25280 (TRAV2, TRAJ40)
CAVVTSATYKYIF

SEQ ID NO: 50560 - protein, 14 aa, Homo sapiens
  CDR3 for beta chain variable domain of TCR clone 25280 (TRBV19, TRBJ2-1)
CASPTFVLSGEQFF

SEQ ID NO: 50561 - protein, 17 aa, Homo sapiens
  CDR3 for alpha chain variable domain of TCR clone 25281 (TRAV8-6, TRAJ8)
CAVKEGVENTGFQKLVF

SEQ ID NO: 50562 - protein, 12 aa, Homo sapiens
  CDR3 for beta chain variable domain of TCR clone 25281 (TRBV19, TRBJ1-4)
CASKDWPGGLFF

SEQ ID NO: 50563 - protein, 13 aa, Homo sapiens
  CDR3 for alpha chain variable domain of TCR clone 25282 (TRAV8-3, TRAJ21)
CAVGAYSFNKFYF

SEQ ID NO: 50564 - protein, 16 aa, Homo sapiens
  CDR3 for beta chain variable domain of TCR clone 25282 (TRBV19, TRBJ2-1)
CASSMGGGSSYNEQFF

SEQ ID NO: 50565 - protein, 10 aa, Homo sapiens
  CDR3 for alpha chain variable domain of TCR clone 25283 (TRAV1-2, TRAJ20)
CALNDYKFSF

SEQ ID NO: 50566 - protein, 14 aa, Homo sapiens
  CDR3 for beta chain variable domain of TCR clone 25283 (TRBV12-4, TRBJ1-1)
CASSLGTGGTEAFF

SEQ ID NO: 50567 - protein, 13 aa, Homo sapiens
  CDR3 for alpha chain variable domain of TCR clone 25284 (TRAV38-1, TRAJ42)
RARWGGSQGNLIF

SEQ ID NO: 50568 - protein, 17 aa, Homo sapiens
  CDR3 for beta chain variable domain of TCR clone 25284 (TRBV20-1, TRBJ2-1)
CSARDPLAGVWDNEQFF

SEQ ID NO: 50569 - protein, 16 aa, Homo sapiens
  CDR3 for alpha chain variable domain of TCR clone 25285 (TRAV3, TRAJ37)
CAVRPHGSGNTGKLIF

SEQ ID NO: 50570 - protein, 14 aa, Homo sapiens
  CDR3 for beta chain variable domain of TCR clone 25285 (TRBV7-2, TRBJ2-7)
CASSPKTSFYEQYF

SEQ ID NO: 50571 - protein, 15 aa, Homo sapiens
  CDR3 for alpha chain variable domain of TCR clone 25286 (TRAV4, TRAJ39)
CLVGPNNSAGNMLTF

SEQ ID NO: 50572 - protein, 13 aa, Homo sapiens
  CDR3 for beta chain variable domain of TCR clone 25286 (TRBV11-2, TRBJ2-5)
CASSSTGEETQYF

SEQ ID NO: 50573 - protein, 14 aa, Homo sapiens
  CDR3 for alpha chain variable domain of TCR clone 25287 (TRAV1-2, TRAJ16)
SAVNRFSDGQKLLF

SEQ ID NO: 50574 - protein, 16 aa, Homo sapiens
  CDR3 for beta chain variable domain of TCR clone 25287 (TRBV20-1, TRBJ1-4)
CSAPGQGLLTNEKLFF

SEQ ID NO: 50575 - protein, 12 aa, Homo sapiens
  CDR3 for alpha chain variable domain of TCR clone 25288 (TRAV1-1, TRAJ8)
CTGGTGFQKLVF

SEQ ID NO: 50576 - protein, 15 aa, Homo sapiens
  CDR3 for beta chain variable domain of TCR clone 25288 (TRBV7-9, TRBJ1-4)
CASSRTGGFNEKLFF

SEQ ID NO: 50577 - protein, 14 aa, Homo sapiens
  CDR3 for alpha chain variable domain of TCR clone 25289 (TRAV1-2, TRAJ8)
CAVREDTGYQKLVF

SEQ ID NO: 50578 - protein, 18 aa, Homo sapiens
  CDR3 for beta chain variable domain of TCR clone 25289 (TRBV11-2, TRBJ2-3)
CASSLGGASRGAPNTQYF

SEQ ID NO: 50579 - protein, 10 aa, Homo sapiens
  CDR3 for alpha chain variable domain of TCR clone 25290 (TRAV17, TRAJ52)
SATSYGRLTF

SEQ ID NO: 50580 - protein, 13 aa, Homo sapiens
  CDR3 for beta chain variable domain of TCR clone 25290 (TRBV29-1, TRBJ2-5)
CSVGGTSAETQYF

SEQ ID NO: 50581 - protein, 14 aa, Homo sapiens
  CDR3 for alpha chain variable domain of TCR clone 25291 (TRAV1-2, TRAJ16)
CAVNRLSDGQKLLF

SEQ ID NO: 50582 - protein, 16 aa, Homo sapiens
  CDR3 for beta chain variable domain of TCR clone 25291 (TRBV20-1, TRBJ1-4)
CSAPGQGLLTNEKLFF

SEQ ID NO: 50583 - protein, 15 aa, Homo sapiens
  CDR3 for alpha chain variable domain of TCR clone 25292 (TRAV27, TRAJ53)
CRAMNSGGSNYKLTF

SEQ ID NO: 50584 - protein, 14 aa, Homo sapiens
  CDR3 for beta chain variable domain of TCR clone 25292 (TRBV7-3, TRBJ2-1)
CASSLAGGTNEQFF

SEQ ID NO: 50585 - protein, 13 aa, Homo sapiens
  CDR3 for alpha chain variable domain of TCR clone 25293 (TRAV2, TRAJ21)
CAVEDLNFNRFYF

SEQ ID NO: 50586 - protein, 15 aa, Homo sapiens
  CDR3 for beta chain variable domain of TCR clone 25293 (TRBV28, TRBJ2-5)
CASSPGQGSIETQYF

SEQ ID NO: 50587 - protein, 14 aa, Homo sapiens
  CDR3 for alpha chain variable domain of TCR clone 25294 (TRAV35, TRAJ22)
CAGLRPGSARQLTF

SEQ ID NO: 50588 - protein, 15 aa, Homo sapiens
  CDR3 for beta chain variable domain of TCR clone 25294 (TRBV12-4, TRBJ2-5)
CASSPPTGIQETQYF

SEQ ID NO: 50589 - protein, 13 aa, Homo sapiens
  CDR3 for alpha chain variable domain of TCR clone 25295 (TRAV38-1, TRAJ20)
CAFMKSNDYKLSF

SEQ ID NO: 50590 - protein, 16 aa, Homo sapiens
  CDR3 for beta chain variable domain of TCR clone 25295 (TRBV12-4, TRBJ1-1)
CASSHRRDRQGTEAFF

SEQ ID NO: 50591 - protein, 14 aa, Homo sapiens
  CDR3 for alpha chain variable domain of TCR clone 25296 (TRAV2, TRAJ9)
CAVEDRGGGFKTIF

SEQ ID NO: 50592 - protein, 13 aa, Homo sapiens
  CDR3 for beta chain variable domain of TCR clone 25296 (TRBV7-9, TRBJ1-2)
CASSLKQNYGYTF

SEQ ID NO: 50593 - protein, 15 aa, Homo sapiens
  CDR3 for alpha chain variable domain of TCR clone 25297 (TRAV25, TRAJ53)
CAATGGGGSNYKLTF

SEQ ID NO: 50594 - protein, 13 aa, Homo sapiens
  CDR3 for beta chain variable domain of TCR clone 25297 (TRBV7-9, TRBJ1-2)
CASSLKQNYGYTF

SEQ ID NO: 50595 - protein, 11 aa, Homo sapiens
  CDR3 for alpha chain variable domain of TCR clone 25298 (TRAV24, TRAJ43)
CAFSNNNDMRF

SEQ ID NO: 50596 - protein, 15 aa, Homo sapiens
  CDR3 for beta chain variable domain of TCR clone 25298 (TRBV27, TRBJ1-5)
CASTFNRGSNQPQHF

SEQ ID NO: 50597 - protein, 14 aa, Homo sapiens
  CDR3 for alpha chain variable domain of TCR clone 25299 (TRAV38-1, TRAJ40)
CALRPTSGTYKYIF

SEQ ID NO: 50598 - protein, 14 aa, Homo sapiens
  CDR3 for beta chain variable domain of TCR clone 25299 (TRBV25-1, TRBJ1-1)
CASTLLGGNTEAFF

SEQ ID NO: 50599 - protein, 11 aa, Homo sapiens
  CDR3 for alpha chain variable domain of TCR clone 25300 (TRAV12-1, TRAJ30)
CVVNGQDKIIF

SEQ ID NO: 50600 - protein, 12 aa, Homo sapiens
  CDR3 for beta chain variable domain of TCR clone 25300 (TRBV27, TRBJ2-2)
CASKLFTGEPFF

SEQ ID NO: 50601 - protein, 12 aa, Homo sapiens
  CDR3 for alpha chain variable domain of TCR clone 25301 (TRAV12-1, TRAJ40)
CVVYSGTYKYIF

SEQ ID NO: 50602 - protein, 18 aa, Homo sapiens
  CDR3 for beta chain variable domain of TCR clone 25301 (TRBV11-2, TRBJ2-3)
CASSLGVASRGAPNTQYF

SEQ ID NO: 50603 - protein, 15 aa, Homo sapiens
  CDR3 for alpha chain variable domain of TCR clone 25302 (TRAV17, TRAJ35)
CVTAFVIGFGNVLHC

SEQ ID NO: 50604 - protein, 16 aa, Homo sapiens
  CDR3 for beta chain variable domain of TCR clone 25302 (TRBV11-2, TRBJ2-7)
CASSPLAGGPRYEQYF

SEQ ID NO: 50605 - protein, 15 aa, Homo sapiens
  CDR3 for alpha chain variable domain of TCR clone 25303 (TRAV38-1, TRAJ37)
CSFIHGSGNTGKLIF

SEQ ID NO: 50606 - protein, 12 aa, Homo sapiens
  CDR3 for beta chain variable domain of TCR clone 25303 (TRBV7-9, TRBJ2-7)
CASSFGSYEQYF

SEQ ID NO: 50607 - protein, 15 aa, Homo sapiens
  CDR3 for alpha chain variable domain of TCR clone 25304 (TRAV17, TRAJ23)
CSTDAEDNQGGKLIF

SEQ ID NO: 50608 - protein, 12 aa, Homo sapiens
  CDR3 for beta chain variable domain of TCR clone 25304 (TRBV2, TRBJ2-1)
CAKREGYNEQFF

SEQ ID NO: 50609 - protein, 14 aa, Homo sapiens
  CDR3 for alpha chain variable domain of TCR clone 25305 (TRAV12-3, TRAJ10)
SHLPLTGGGNKLTF

SEQ ID NO: 50610 - protein, 14 aa, Homo sapiens
  CDR3 for beta chain variable domain of TCR clone 25305 (TRBV5-1, TRBJ2-7)
CASSRGESLYEQYF

SEQ ID NO: 50611 - protein, 15 aa, Homo sapiens
  CDR3 for alpha chain variable domain of TCR clone 25306 (TRAV12-3, TRAJ49)
CAMAVTPNTGNQFYF

SEQ ID NO: 50612 - protein, 18 aa, Homo sapiens
  CDR3 for beta chain variable domain of TCR clone 25306 (TRBV4-1, TRBJ1-5)
CASSQDPRGQGLNRPQHF

SEQ ID NO: 50613 - protein, 15 aa, Homo sapiens
  CDR3 for alpha chain variable domain of TCR clone 25307 (TRAV26-1, TRAJ29)
CIVRVEGSGNTPLVF

SEQ ID NO: 50614 - protein, 15 aa, Homo sapiens
  CDR3 for beta chain variable domain of TCR clone 25307 (TRBV12-4, TRBJ1-1)
CQQQDRVVANTEAFF

SEQ ID NO: 50615 - protein, 15 aa, Homo sapiens
  CDR3 for alpha chain variable domain of TCR clone 25308 (TRAV21, TRAJ40)
CAVRPQTSGTYKYIF

SEQ ID NO: 50616 - protein, 21 aa, Homo sapiens
  CDR3 for beta chain variable domain of TCR clone 25308 (TRBV7-2, TRBJ2-2)
RRTRPCISVPAARFGPGSCFF

SEQ ID NO: 50617 - protein, 14 aa, Homo sapiens
  CDR3 for alpha chain variable domain of TCR clone 25309 (TRAV12-1, TRAJ17)
CVVNYKAAGNKLTF

SEQ ID NO: 50618 - protein, 14 aa, Homo sapiens
  CDR3 for beta chain variable domain of TCR clone 25309 (TRBV7-2, TRBJ2-7)
CASSPKTSFYEQYF

SEQ ID NO: 50619 - protein, 13 aa, Homo sapiens
  CDR3 for alpha chain variable domain of TCR clone 25310 (TRAV22, TRAJ29)
CAVGGSGNTPLVF

SEQ ID NO: 50620 - protein, 13 aa, Homo sapiens
  CDR3 for beta chain variable domain of TCR clone 25310 (TRBV4-2, TRBJ1-1)
CASSQAGNTEAFL

SEQ ID NO: 50621 - protein, 14 aa, Homo sapiens
  CDR3 for alpha chain variable domain of TCR clone 25311 (TRAV12-3, TRAJ9)
CAMSPNTGGFKTIF

SEQ ID NO: 50622 - protein, 14 aa, Homo sapiens
  CDR3 for beta chain variable domain of TCR clone 25311 (TRBV11-2, TRBJ2-5)
CASRPLAGRETQYF

SEQ ID NO: 50623 - protein, 15 aa, Homo sapiens
  CDR3 for alpha chain variable domain of TCR clone 25312 (TRAV3, TRAJ47)
CAVRDIGGYGNKLVF

SEQ ID NO: 50624 - protein, 14 aa, Homo sapiens
  CDR3 for beta chain variable domain of TCR clone 25312 (TRBV13, TRBJ2-5)
CASSLERVGETQYF

SEQ ID NO: 50625 - protein, 12 aa, Homo sapiens
  CDR3 for alpha chain variable domain of TCR clone 25313 (TRAV3, TRAJ7)
CADLLWEQQTRF

SEQ ID NO: 50626 - protein, 13 aa, Homo sapiens
  CDR3 for beta chain variable domain of TCR clone 25313 (TRBV7-3, TRBJ2-5)
CASRFRGGETQYF

SEQ ID NO: 50627 - protein, 14 aa, Homo sapiens
  CDR3 for alpha chain variable domain of TCR clone 25314 (TRAV26-2, TRAJ32)
CCVGYGGATNKLIF

SEQ ID NO: 50628 - protein, 12 aa, Homo sapiens
  CDR3 for beta chain variable domain of TCR clone 25314 (TRBV12-4, TRBJ2-7)
CASSLGGYEQYF

SEQ ID NO: 50629 - protein, 14 aa, Homo sapiens
  CDR3 for alpha chain variable domain of TCR clone 25315 (TRAV35, TRAJ22)
CAGLRPGSARQLTF

SEQ ID NO: 50630 - protein, 14 aa, Homo sapiens
  CDR3 for beta chain variable domain of TCR clone 25315 (TRBV12-4, TRBJ2-7)
CASTFGLSTYEQYF

SEQ ID NO: 50631 - protein, 16 aa, Homo sapiens
  CDR3 for alpha chain variable domain of TCR clone 25316 (TRAV26-1, TRAJ31)
CIVRPPVLNSNARLMF

SEQ ID NO: 50632 - protein, 11 aa, Homo sapiens
  CDR3 for beta chain variable domain of TCR clone 25316 (TRBV7-8, TRBJ2-7)
CASSLSLEQYF

SEQ ID NO: 50633 - protein, 12 aa, Homo sapiens
  CDR3 for alpha chain variable domain of TCR clone 25317 (TRAV8-3, TRAJ20)
CAVGANDYKLSF

SEQ ID NO: 50634 - protein, 16 aa, Homo sapiens
  CDR3 for beta chain variable domain of TCR clone 25317 (TRBV12-5, TRBJ2-5)
CASGPRTSGNQETQYF

SEQ ID NO: 50635 - protein, 17 aa, Homo sapiens
  CDR3 for alpha chain variable domain of TCR clone 25318 (TRAV17, TRAJ7)
CATLGRLAFGKGNKVVV

SEQ ID NO: 50636 - protein, 13 aa, Homo sapiens
  CDR3 for beta chain variable domain of TCR clone 25318 (TRBV12-4, TRBJ2-7)
CASSLERVREQYF

SEQ ID NO: 50637 - protein, 14 aa, Homo sapiens
  CDR3 for alpha chain variable domain of TCR clone 25319 (TRAV8-4, TRAJ9)
CAVRINTGGFKTIF

SEQ ID NO: 50638 - protein, 11 aa, Homo sapiens
  CDR3 for beta chain variable domain of TCR clone 25319 (TRBV6-3, TRBJ2-3)
CATGQADTQYF

SEQ ID NO: 50639 - protein, 13 aa, Homo sapiens
  CDR3 for alpha chain variable domain of TCR clone 25320 (TRAV2, TRAJ40)
CAVVTSGTYKYIF

SEQ ID NO: 50640 - protein, 14 aa, Homo sapiens
  CDR3 for beta chain variable domain of TCR clone 25320 (TRBV5-1, TRBJ2-7)
CASSRGESLYEQYF

SEQ ID NO: 50641 - protein, 11 aa, Homo sapiens
  CDR3 for alpha chain variable domain of TCR clone 25321 (TRAV12-3, TRAJ43)
CAMSVSNDMRL

SEQ ID NO: 50642 - protein, 14 aa, Homo sapiens
  CDR3 for beta chain variable domain of TCR clone 25321 (TRBV12-5, TRBJ2-5)
CASGSRTHQETQYF

SEQ ID NO: 50643 - protein, 14 aa, Homo sapiens
  CDR3 for alpha chain variable domain of TCR clone 25322 (TRAV12-2, TRAJ40)
CAVKIPSGTYKYIF

SEQ ID NO: 50644 - protein, 14 aa, Homo sapiens
  CDR3 for beta chain variable domain of TCR clone 25322 (TRBV20-1, TRBJ1-1)
CSAETRIGGTEAFF

SEQ ID NO: 50645 - protein, 13 aa, Homo sapiens
  CDR3 for alpha chain variable domain of TCR clone 25323 (TRAV6, TRAJ45)
SPFSGGGADGLTF

SEQ ID NO: 50646 - protein, 12 aa, Homo sapiens
  CDR3 for beta chain variable domain of TCR clone 25323 (TRBV11-2, TRBJ2-2)
CASSLGGGELFF

SEQ ID NO: 50647 - protein, 10 aa, Homo sapiens
  CDR3 for alpha chain variable domain of TCR clone 25324 (TRAV23/DV6, TRAJ57)
CAVSSTLSQG

SEQ ID NO: 50648 - protein, 14 aa, Homo sapiens
  CDR3 for beta chain variable domain of TCR clone 25324 (TRBV25-1, TRBJ1-1)
CASTHLGGNTEAFF

SEQ ID NO: 50649 - protein, 14 aa, Homo sapiens
  CDR3 for alpha chain variable domain of TCR clone 25325 (TRAV12-2, TRAJ13)
CAVKKTGGYQKATF

SEQ ID NO: 50650 - protein, 16 aa, Homo sapiens
  CDR3 for beta chain variable domain of TCR clone 25325 (TRBV2, TRBJ2-1)
CASRSPAGGKYNEQFF

SEQ ID NO: 50651 - protein, 16 aa, Homo sapiens
  CDR3 for alpha chain variable domain of TCR clone 25326 (TRAV30, TRAJ24)
CGTEIVDADSWGKFQF

SEQ ID NO: 50652 - protein, 16 aa, Homo sapiens
  CDR3 for beta chain variable domain of TCR clone 25326 (TRBV6-1, TRBJ2-1)
CASILGQGSSYNEQFF

SEQ ID NO: 50653 - protein, 17 aa, Homo sapiens
  CDR3 for alpha chain variable domain of TCR clone 25327 (TRAV17, TRAJ7)
CATLGRLAFGKGDQVVV

SEQ ID NO: 50654 - protein, 13 aa, Homo sapiens
  CDR3 for beta chain variable domain of TCR clone 25327 (TRBV12-4, TRBJ2-7)
CASSLERVREQYF

SEQ ID NO: 50655 - protein, 14 aa, Homo sapiens
  CDR3 for alpha chain variable domain of TCR clone 25328 (TRAV8-3, TRAJ9)
CAAVYNTGGFKTIF

SEQ ID NO: 50656 - protein, 14 aa, Homo sapiens
  CDR3 for beta chain variable domain of TCR clone 25328 (TRBV7-3, TRBJ2-2)
CASSSGGYTGELFF

SEQ ID NO: 50657 - protein, 17 aa, Homo sapiens
  CDR3 for alpha chain variable domain of TCR clone 25329 (TRAV3, TRAJ12)
CAVRDGGRMDSSYKLIF

SEQ ID NO: 50658 - protein, 12 aa, Homo sapiens
  CDR3 for beta chain variable domain of TCR clone 25329 (TRBV20-1, TRBJ1-1)
QCSTWGGTEAFF

SEQ ID NO: 50659 - protein, 13 aa, Homo sapiens
  CDR3 for alpha chain variable domain of TCR clone 25330 (TRAV3, TRAJ15)
CAVRDQAGTALIV

SEQ ID NO: 50660 - protein, 15 aa, Homo sapiens
  CDR3 for beta chain variable domain of TCR clone 25330 (TRBV11-1, TRBJ2-7)
CASSLNYGASYEQYF

SEQ ID NO: 50661 - protein, 13 aa, Homo sapiens
  CDR3 for alpha chain variable domain of TCR clone 25331 (TRAV8-1, TRAJ28)
CAVSGAGSYRLTF

SEQ ID NO: 50662 - protein, 14 aa, Homo sapiens
  CDR3 for beta chain variable domain of TCR clone 25331 (TRBV7-2, TRBJ2-2)
CASRGQGAAGELFF

SEQ ID NO: 50663 - protein, 11 aa, Homo sapiens
  CDR3 for alpha chain variable domain of TCR clone 25332 (TRAV2, TRAJ13)
CASGGYQKVTF

SEQ ID NO: 50664 - protein, 16 aa, Homo sapiens
  CDR3 for beta chain variable domain of TCR clone 25332 (TRBV6-1, TRBJ2-5)
YASSETLDRGAETQYF

SEQ ID NO: 50665 - protein, 13 aa, Homo sapiens
  CDR3 for alpha chain variable domain of TCR clone 25333 (TRAV8-3, TRAJ44)
CAVGPGTASKLTF

SEQ ID NO: 50666 - protein, 14 aa, Homo sapiens
  CDR3 for beta chain variable domain of TCR clone 25333 (TRBV11-2, TRBJ2-3)
CASSRLARTDTQYF

SEQ ID NO: 50667 - protein, 14 aa, Homo sapiens
  CDR3 for alpha chain variable domain of TCR clone 25334 (TRAV8-4, TRAJ54)
CAVSEVLGAQKLVF

SEQ ID NO: 50668 - protein, 15 aa, Homo sapiens
  CDR3 for beta chain variable domain of TCR clone 25334 (TRBV18, TRBJ2-1)
CASSPPSASYNEQFF

SEQ ID NO: 50669 - protein, 16 aa, Homo sapiens
  CDR3 for alpha chain variable domain of TCR clone 25335 (TRAV30, TRAJ24)
CGTEIVDADSWGKFQF

SEQ ID NO: 50670 - protein, 11 aa, Homo sapiens
  CDR3 for beta chain variable domain of TCR clone 25335 (TRBV7-8, TRBJ2-7)
CASSLSLEQYF

SEQ ID NO: 50671 - protein, 12 aa, Homo sapiens
  CDR3 for alpha chain variable domain of TCR clone 25336 (TRAV16, TRAJ10)
CSRTGGGTKLTF

SEQ ID NO: 50672 - protein, 15 aa, Homo sapiens
  CDR3 for beta chain variable domain of TCR clone 25336 (TRBV6-3, TRBJ2-7)
CASSSPGTVFYEQYF

SEQ ID NO: 50673 - protein, 14 aa, Homo sapiens
  CDR3 for alpha chain variable domain of TCR clone 25337 (TRAV26-1, TRAJ38)
CIADNAGNNRKLIW

SEQ ID NO: 50674 - protein, 15 aa, Homo sapiens
  CDR3 for beta chain variable domain of TCR clone 25337 (TRBV6-3, TRBJ2-7)
CASSSPGTVFYEQYF

SEQ ID NO: 50675 - protein, 13 aa, Homo sapiens
  CDR3 for alpha chain variable domain of TCR clone 25338 (TRAV13-2, TRAJ53)
CAENMGSKYKLTF

SEQ ID NO: 50676 - protein, 13 aa, Homo sapiens
  CDR3 for beta chain variable domain of TCR clone 25338 (TRBV4-1, TRBJ2-2)
CASSQENTGELFF

SEQ ID NO: 50677 - protein, 16 aa, Homo sapiens
  CDR3 for alpha chain variable domain of TCR clone 25339 (TRAV38-1, TRAJ53)
CACPLNSGGSNYKLTF

SEQ ID NO: 50678 - protein, 15 aa, Homo sapiens
  CDR3 for beta chain variable domain of TCR clone 25339 (TRBV5-7, TRBJ2-5)
CASSLGLAAQETQYF

SEQ ID NO: 50679 - protein, 13 aa, Homo sapiens
  CDR3 for alpha chain variable domain of TCR clone 25340 (TRAV21, TRAJ27)
CAARPGNAGKSTF

SEQ ID NO: 50680 - protein, 14 aa, Homo sapiens
  CDR3 for beta chain variable domain of TCR clone 25340 (TRBV6-1, TRBJ1-3)
CASVQGGGGNTIYF

SEQ ID NO: 50681 - protein, 11 aa, Homo sapiens
  CDR3 for alpha chain variable domain of TCR clone 25341 (TRAV1-1, TRAJ23)
CAVRQGGKLIF

SEQ ID NO: 50682 - protein, 14 aa, Homo sapiens
  CDR3 for beta chain variable domain of TCR clone 25341 (TRBV19, TRBJ2-1)
CASPTFVLSGEQFF

SEQ ID NO: 50683 - protein, 13 aa, Homo sapiens
  CDR3 for alpha chain variable domain of TCR clone 25342 (TRAV8-3, TRAJ28)
CAVGAVGSYQLTF

SEQ ID NO: 50684 - protein, 15 aa, Homo sapiens
  CDR3 for beta chain variable domain of TCR clone 25342 (TRBV7-9, TRBJ1-5)
CARSQGHQPNQPQHF

SEQ ID NO: 50685 - protein, 14 aa, Homo sapiens
  CDR3 for alpha chain variable domain of TCR clone 25343 (TRAV38-1, TRAJ29)
CAFITPSGNTPLVF

SEQ ID NO: 50686 - protein, 14 aa, Homo sapiens
  CDR3 for beta chain variable domain of TCR clone 25343 (TRBV25-1, TRBJ1-1)
CASTHLGGNTEAFF

SEQ ID NO: 50687 - protein, 13 aa, Homo sapiens
  CDR3 for alpha chain variable domain of TCR clone 25344 (TRAV13-1, TRAJ39)
CAASIVMQATCSP

SEQ ID NO: 50688 - protein, 18 aa, Homo sapiens
  CDR3 for beta chain variable domain of TCR clone 25344 (TRBV10-2, TRBJ2-2)
CISAPAVHRQADAGELFF

SEQ ID NO: 50689 - protein, 16 aa, Homo sapiens
  CDR3 for alpha chain variable domain of TCR clone 25345 (TRAV17, TRAJ28)
CATASVSGAGSYQLTF

SEQ ID NO: 50690 - protein, 11 aa, Homo sapiens
  CDR3 for beta chain variable domain of TCR clone 25345 (TRBV7-9, TRBJ2-5)
CASSLGEAQYF

SEQ ID NO: 50691 - protein, 11 aa, Homo sapiens
  CDR3 for alpha chain variable domain of TCR clone 25346 (TRAV12-3, TRAJ27)
CAMANAGKSTF

SEQ ID NO: 50692 - protein, 13 aa, Homo sapiens
  CDR3 for beta chain variable domain of TCR clone 25346 (TRBV20-1, TRBJ1-1)
CSARVGGNTEAFV

SEQ ID NO: 50693 - protein, 14 aa, Homo sapiens
  CDR3 for alpha chain variable domain of TCR clone 25347 (TRAV13-2, TRAJ43)
CAEIPTYNNNDMCF

SEQ ID NO: 50694 - protein, 15 aa, Homo sapiens
  CDR3 for beta chain variable domain of TCR clone 25347 (TRBV7-9, TRBJ2-2)
CASGPLDTFPGELFF

SEQ ID NO: 50695 - protein, 15 aa, Homo sapiens
  CDR3 for alpha chain variable domain of TCR clone 25348 (TRAV3, TRAJ5)
CAVRDLDTGRRALTF

SEQ ID NO: 50696 - protein, 13 aa, Homo sapiens
  CDR3 for beta chain variable domain of TCR clone 25348 (TRBV7-9, TRBJ1-2)
CASSLKQNYGYTF

SEQ ID NO: 50697 - protein, 14 aa, Homo sapiens
  CDR3 for alpha chain variable domain of TCR clone 25349 (TRAV8-4, TRAJ13)
CAVTLSGVYQKVTF

SEQ ID NO: 50698 - protein, 14 aa, Homo sapiens
  CDR3 for beta chain variable domain of TCR clone 25349 (TRBV7-2, TRBJ1-2)
CASSQTGSTYGYTF

SEQ ID NO: 50699 - protein, 11 aa, Homo sapiens
  CDR3 for alpha chain variable domain of TCR clone 25350 (TRAV1-1, TRAJ23)
CAVRQGGKLIF

SEQ ID NO: 50700 - protein, 14 aa, Homo sapiens
  CDR3 for beta chain variable domain of TCR clone 25350 (TRBV7-6, TRBJ2-3)
CASSLGTVTDTQYF

SEQ ID NO: 50701 - protein, 12 aa, Homo sapiens
  CDR3 for alpha chain variable domain of TCR clone 25351 (TRAV17, TRAJ30)
CATDARDDKTIF

SEQ ID NO: 50702 - protein, 15 aa, Homo sapiens
  CDR3 for beta chain variable domain of TCR clone 25351 (TRBV4-1, TRBJ2-1)
CASSQGGELYNEQFF

SEQ ID NO: 50703 - protein, 13 aa, Homo sapiens
  CDR3 for alpha chain variable domain of TCR clone 25352 (TRAV27, TRAJ41)
CAGEGNSGDALNF

SEQ ID NO: 50704 - protein, 14 aa, Homo sapiens
  CDR3 for beta chain variable domain of TCR clone 25352 (TRBV25-1, TRBJ1-1)
CASTHLGGNTEAFF

SEQ ID NO: 50705 - protein, 13 aa, Homo sapiens
  CDR3 for alpha chain variable domain of TCR clone 25353 (TRAV12-1, TRAJ33)
CGDAPDSNYQLIW

SEQ ID NO: 50706 - protein, 15 aa, Homo sapiens
  CDR3 for beta chain variable domain of TCR clone 25353 (TRBV27, TRBJ2-1)
CASSNGGGSPNEQFF

SEQ ID NO: 50707 - protein, 12 aa, Homo sapiens
  CDR3 for alpha chain variable domain of TCR clone 25354 (TRAV12-2, TRAJ10)
WGVTGGGNKLTF

SEQ ID NO: 50708 - protein, 13 aa, Homo sapiens
  CDR3 for beta chain variable domain of TCR clone 25354 (TRBV7-2, TRBJ2-2)
CASSLAVTGELFF

SEQ ID NO: 50709 - protein, 12 aa, Homo sapiens
  CDR3 for alpha chain variable domain of TCR clone 25355 (TRAV12-3, TRAJ17)
CAMTLTGNKLTF

SEQ ID NO: 50710 - protein, 14 aa, Homo sapiens
  CDR3 for beta chain variable domain of TCR clone 25355 (TRBV19, TRBJ2-5)
CASSMTGQQETQYF

SEQ ID NO: 50711 - protein, 12 aa, Homo sapiens
  CDR3 for alpha chain variable domain of TCR clone 25356 (TRAV13-2, TRAJ23)
CAERHRGGKLIF

SEQ ID NO: 50712 - protein, 13 aa, Homo sapiens
  CDR3 for beta chain variable domain of TCR clone 25356 (TRBV11-3, TRBJ2-1)
CASSSRRVDEQFF

SEQ ID NO: 50713 - protein, 14 aa, Homo sapiens
  CDR3 for alpha chain variable domain of TCR clone 25357 (TRAV12-2, TRAJ17)
CAVLFKAAGNKLTF

SEQ ID NO: 50714 - protein, 13 aa, Homo sapiens
  CDR3 for beta chain variable domain of TCR clone 25357 (TRBV19, TRBJ1-2)
CASSQGQVYGYAF

SEQ ID NO: 50715 - protein, 10 aa, Homo sapiens
  CDR3 for alpha chain variable domain of TCR clone 25358 (TRAV16, TRAJ22)
SAMYLRQLTF

SEQ ID NO: 50716 - protein, 15 aa, Homo sapiens
  CDR3 for beta chain variable domain of TCR clone 25358 (TRBV7-9, TRBJ1-6)
CARSSPGRGNSPLHF

SEQ ID NO: 50717 - protein, 14 aa, Homo sapiens
  CDR3 for alpha chain variable domain of TCR clone 25359 (TRAV3, TRAJ7)
CAVREGEREQQTRF

SEQ ID NO: 50718 - protein, 12 aa, Homo sapiens
  CDR3 for beta chain variable domain of TCR clone 25359 (TRBV7-8, TRBJ2-7)
CASSLGDREQYF

SEQ ID NO: 50719 - protein, 15 aa, Homo sapiens
  CDR3 for alpha chain variable domain of TCR clone 25360 (TRAV3, TRAJ3)
CAVRDRDSSASKIIF

SEQ ID NO: 50720 - protein, 18 aa, Homo sapiens
  CDR3 for beta chain variable domain of TCR clone 25360 (TRBV25-1, TRBJ1-2)
CASSGLHNGQGLIFGYTF

SEQ ID NO: 50721 - protein, 14 aa, Homo sapiens
  CDR3 for alpha chain variable domain of TCR clone 25361 (TRAV12-2, TRAJ17)
CAVLFKAAGDKLTF

SEQ ID NO: 50722 - protein, 14 aa, Homo sapiens
  CDR3 for beta chain variable domain of TCR clone 25361 (TRBV15, TRBJ1-2)
CATSRDFDRVGYTF

SEQ ID NO: 50723 - protein, 15 aa, Homo sapiens
  CDR3 for alpha chain variable domain of TCR clone 25362 (TRAV13-1, TRAJ50)
CAASISGTSYDKVIF

SEQ ID NO: 50724 - protein, 15 aa, Homo sapiens
  CDR3 for beta chain variable domain of TCR clone 25362 (TRBV9, TRBJ1-6)
CASSVAGTGDSPLHF

SEQ ID NO: 50725 - protein, 12 aa, Homo sapiens
  CDR3 for alpha chain variable domain of TCR clone 25363 (TRAV13-2, TRAJ23)
CAERHRGGKLIF

SEQ ID NO: 50726 - protein, 16 aa, Homo sapiens
  CDR3 for beta chain variable domain of TCR clone 25363 (TRBV7-2, TRBJ2-6)
CAILGGVSSGANVLTF

SEQ ID NO: 50727 - protein, 14 aa, Homo sapiens
  CDR3 for alpha chain variable domain of TCR clone 25364 (TRAV12-3, TRAJ10)
SHLPLTGGGNKLTF

SEQ ID NO: 50728 - protein, 14 aa, Homo sapiens
  CDR3 for beta chain variable domain of TCR clone 25364 (TRBV19, TRBJ2-5)
CASPTFVLSGEQFF

SEQ ID NO: 50729 - protein, 11 aa, Homo sapiens
  CDR3 for alpha chain variable domain of TCR clone 25365 (TRAV2, TRAJ13)
CTSGGYQKVTF

SEQ ID NO: 50730 - protein, 16 aa, Homo sapiens
  CDR3 for beta chain variable domain of TCR clone 25365 (TRBV6-1, TRBJ2-5)
CASSETLDRGAETQYF

SEQ ID NO: 50731 - protein, 12 aa, Homo sapiens
  CDR3 for alpha chain variable domain of TCR clone 25366 (TRAV12-3, TRAJ3)
CAIDSSASKIIF

SEQ ID NO: 50732 - protein, 16 aa, Homo sapiens
  CDR3 for beta chain variable domain of TCR clone 25366 (TRBV7-9, TRBJ2-3)
CQQLRGSGSVPDTQYF

SEQ ID NO: 50733 - protein, 15 aa, Homo sapiens
  CDR3 for alpha chain variable domain of TCR clone 25367 (TRAV2, TRAJ37)
CAVGDGSSNTGKLIF

SEQ ID NO: 50734 - protein, 13 aa, Homo sapiens
  CDR3 for beta chain variable domain of TCR clone 25367 (TRBV20-1, TRBJ2-7)
RSAQTGLSYEQYF

SEQ ID NO: 50735 - protein, 14 aa, Homo sapiens
  CDR3 for alpha chain variable domain of TCR clone 25368 (TRAV14/DV4, TRAJ54)
CAMREAPGAQKLGF

SEQ ID NO: 50736 - protein, 15 aa, Homo sapiens
  CDR3 for beta chain variable domain of TCR clone 25368 (TRBV5-1, TRBJ2-7)
CASSLNGGPAREQYF

SEQ ID NO: 50737 - protein, 14 aa, Homo sapiens
  CDR3 for alpha chain variable domain of TCR clone 25369 (TRAV3, TRAJ21)
CAVESQANFNNFYF

SEQ ID NO: 50738 - protein, 18 aa, Homo sapiens
  CDR3 for beta chain variable domain of TCR clone 25369 (TRBV7-9, TRBJ2-1)
CASSLAVSGTSGRNEQFF

SEQ ID NO: 50739 - protein, 13 aa, Homo sapiens
  CDR3 for alpha chain variable domain of TCR clone 25370 (TRAV1-2, TRAJ9)
CAALNPGGFKTIF

SEQ ID NO: 50740 - protein, 13 aa, Homo sapiens
  CDR3 for beta chain variable domain of TCR clone 25370 (TRBV19, TRBJ1-2)
CASSVPGQDGYTF

SEQ ID NO: 50741 - protein, 12 aa, Homo sapiens
  CDR3 for alpha chain variable domain of TCR clone 25371 (TRAV12-3, TRAJ17)
CAMTLTGNKLTF

SEQ ID NO: 50742 - protein, 13 aa, Homo sapiens
  CDR3 for beta chain variable domain of TCR clone 25371 (TRBV20-1, TRBJ2-5)
CSAATELQETQYF

SEQ ID NO: 50743 - protein, 14 aa, Homo sapiens
  CDR3 for alpha chain variable domain of TCR clone 25372 (TRAV12-3, TRAJ10)
SHLPLTGGGNKLTF

SEQ ID NO: 50744 - protein, 13 aa, Homo sapiens
  CDR3 for beta chain variable domain of TCR clone 25372 (TRBV14, TRBJ1-1)
CASSREFGTEAFF

SEQ ID NO: 50745 - protein, 12 aa, Homo sapiens
  CDR3 for alpha chain variable domain of TCR clone 25373 (TRAV12-3, TRAJ17)
CAMTLTGNKLTF

SEQ ID NO: 50746 - protein, 12 aa, Homo sapiens
  CDR3 for beta chain variable domain of TCR clone 25373 (TRBV3-1, TRBJ2-7)
CASSQVRYEQYF

SEQ ID NO: 50747 - protein, 14 aa, Homo sapiens
  CDR3 for alpha chain variable domain of TCR clone 25374 (TRAV12-2, TRAJ17)
CAVLFKAAGNKLTF

SEQ ID NO: 50748 - protein, 12 aa, Homo sapiens
  CDR3 for beta chain variable domain of TCR clone 25374 (TRBV7-8, TRBJ2-7)
CASSLGDREQYF

SEQ ID NO: 50749 - protein, 16 aa, Homo sapiens
  CDR3 for alpha chain variable domain of TCR clone 25375 (TRAV8-3, TRAJ8)
CAVPRDGNTGFQKLVL

SEQ ID NO: 50750 - protein, 14 aa, Homo sapiens
  CDR3 for beta chain variable domain of TCR clone 25375 (TRBV4-1, TRBJ2-2)
CASSQAVNTGELFF

SEQ ID NO: 50751 - protein, 12 aa, Homo sapiens
  CDR3 for alpha chain variable domain of TCR clone 25376 (TRAV12-3, TRAJ17)
CAMTPTGNKLTF

SEQ ID NO: 50752 - protein, 16 aa, Homo sapiens
  CDR3 for beta chain variable domain of TCR clone 25376 (TRBV19, TRBJ2-1)
CASSKAGPSSYNEQFF

SEQ ID NO: 50753 - protein, 13 aa, Homo sapiens
  CDR3 for alpha chain variable domain of TCR clone 25377 (TRAV13-1, TRAJ21)
CAASIYNFNEFYF

SEQ ID NO: 50754 - protein, 13 aa, Homo sapiens
  CDR3 for beta chain variable domain of TCR clone 25377 (TRBV27, TRBJ1-4)
CASSLMGDEKLFF

SEQ ID NO: 50755 - protein, 20 aa, Homo sapiens
  CDR3 for alpha chain variable domain of TCR clone 25378 (TRAV8-2, TRAJ26)
CVVTLLLGSEFCLWSRNQIF

SEQ ID NO: 50756 - protein, 15 aa, Homo sapiens
  CDR3 for beta chain variable domain of TCR clone 25378 (TRBV11-2, TRBJ2-2)
CASSSDRVNAGELFF

SEQ ID NO: 50757 - protein, 14 aa, Homo sapiens
  CDR3 for alpha chain variable domain of TCR clone 25379 (TRAV12-1, TRAJ17)
CVVNYKAAGNKLTF

SEQ ID NO: 50758 - protein, 12 aa, Homo sapiens
  CDR3 for beta chain variable domain of TCR clone 25379 (TRBV11-2, TRBJ2-2)
CASSLGGGELFF

SEQ ID NO: 50759 - protein, 16 aa, Homo sapiens
  CDR3 for alpha chain variable domain of TCR clone 25380 (TRAV16, TRAJ4)
CALSRMFSGGYNTLIF

SEQ ID NO: 50760 - protein, 16 aa, Homo sapiens
  CDR3 for beta chain variable domain of TCR clone 25380 (TRBV24-1, TRBJ2-3)
CATSDPGTGATDTQYF

SEQ ID NO: 50761 - protein, 17 aa, Homo sapiens
  CDR3 for alpha chain variable domain of TCR clone 25381 (TRAV4, TRAJ13)
CLVGVQGSSGGYQKVTF

SEQ ID NO: 50762 - protein, 18 aa, Homo sapiens
  CDR3 for beta chain variable domain of TCR clone 25381 (TRBV15, TRBJ2-3)
CATGRDGARSWDTDTQYF

SEQ ID NO: 50763 - protein, 17 aa, Homo sapiens
  CDR3 for alpha chain variable domain of TCR clone 25382 (TRAV3, TRAJ6)
CAVRDGPRAGGSYIPTI

SEQ ID NO: 50764 - protein, 20 aa, Homo sapiens
  CDR3 for beta chain variable domain of TCR clone 25382 (TRBV28, TRBJ2-1)
CASTPIGRSPGLAGGNEQFF

SEQ ID NO: 50765 - protein, 15 aa, Homo sapiens
  CDR3 for alpha chain variable domain of TCR clone 25383 (TRAV26-1, TRAJ42)
CIVRVKGGSQGNLIF

SEQ ID NO: 50766 - protein, 14 aa, Homo sapiens
  CDR3 for beta chain variable domain of TCR clone 25383 (TRBV19, TRBJ2-2)
CATTGHANTGGLFF

SEQ ID NO: 50767 - protein, 14 aa, Homo sapiens
  CDR3 for alpha chain variable domain of TCR clone 25384 (TRAV20, TRAJ56)
CAVQFGGANSKLTF

SEQ ID NO: 50768 - protein, 14 aa, Homo sapiens
  CDR3 for beta chain variable domain of TCR clone 25384 (TRBV19, TRBJ2-1)
CASPTFVLSGEQFF

SEQ ID NO: 50769 - protein, 15 aa, Homo sapiens
  CDR3 for alpha chain variable domain of TCR clone 25385 (TRAV8-3, TRAJ27)
CAVGPSKTHAGKSTF

SEQ ID NO: 50770 - protein, 15 aa, Homo sapiens
  CDR3 for beta chain variable domain of TCR clone 25385 (TRBV7-2, TRBJ2-1)
CASSSGLAGGNEQFF

SEQ ID NO: 50771 - protein, 16 aa, Homo sapiens
  CDR3 for alpha chain variable domain of TCR clone 25386 (TRAV14/DV4, TRAJ54)
CAMREGRIQGAQKLVF

SEQ ID NO: 50772 - protein, 15 aa, Homo sapiens
  CDR3 for beta chain variable domain of TCR clone 25386 (TRBV27, TRBJ2-1)
CASSNGGGSSNEQFF

SEQ ID NO: 50773 - protein, 15 aa, Homo sapiens
  CDR3 for alpha chain variable domain of TCR clone 25387 (TRAV35, TRAJ40)
CAGQLGTSGTYKSIF

SEQ ID NO: 50774 - protein, 14 aa, Homo sapiens
  CDR3 for beta chain variable domain of TCR clone 25387 (TRBV7-3, TRBJ2-1)
CASSLAGGTNEQFF

SEQ ID NO: 50775 - protein, 15 aa, Homo sapiens
  CDR3 for alpha chain variable domain of TCR clone 25388 (TRAV8-2, TRAJ40)
CVVLGTTSGTYTYIF

SEQ ID NO: 50776 - protein, 16 aa, Homo sapiens
  CDR3 for beta chain variable domain of TCR clone 25388 (TRBV7-3, TRBJ2-1)
CASSLEGYRSYNEQFF

SEQ ID NO: 50777 - protein, 12 aa, Homo sapiens
  CDR3 for alpha chain variable domain of TCR clone 25389 (TRAV21, TRAJ33)
CTKMDSNYQLIW

SEQ ID NO: 50778 - protein, 14 aa, Homo sapiens
  CDR3 for beta chain variable domain of TCR clone 25389 (TRBV2, TRBJ2-7)
CASSLTSGGYEQYF

SEQ ID NO: 50779 - protein, 14 aa, Homo sapiens
  CDR3 for alpha chain variable domain of TCR clone 25390 (TRAV20, TRAJ10)
CAVRVEGGGNKLTL

SEQ ID NO: 50780 - protein, 18 aa, Homo sapiens
  CDR3 for beta chain variable domain of TCR clone 25390 (TRBV24-1, TRBJ2-1)
CATSDLMFLGRGVHEQFF

SEQ ID NO: 50781 - protein, 16 aa, Homo sapiens
  CDR3 for alpha chain variable domain of TCR clone 25391 (TRAV4, TRAJ22)
CLVGDLYSGSARQLTF

SEQ ID NO: 50782 - protein, 16 aa, Homo sapiens
  CDR3 for beta chain variable domain of TCR clone 25391 (TRBV7-9, TRBJ2-1)
CASSDVAGGSYNEQFL

SEQ ID NO: 50783 - protein, 15 aa, Homo sapiens
  CDR3 for alpha chain variable domain of TCR clone 25392 (TRAV12-1, TRAJ44)
CVADLPTVTASKLTF

SEQ ID NO: 50784 - protein, 13 aa, Homo sapiens
  CDR3 for beta chain variable domain of TCR clone 25392 (TRBV6-5, TRBJ2-5)
CASSPQGGETQYF

SEQ ID NO: 50785 - protein, 11 aa, Homo sapiens
  CDR3 for alpha chain variable domain of TCR clone 25393 (TRAV1-2, TRAJ20)
CAVANDYKLSF

SEQ ID NO: 50786 - protein, 15 aa, Homo sapiens
  CDR3 for beta chain variable domain of TCR clone 25393 (TRBV11-3, TRBJ2-3)
CASLKDGREGDTQYF

SEQ ID NO: 50787 - protein, 17 aa, Homo sapiens
  CDR3 for alpha chain variable domain of TCR clone 25394 (TRAV26-1, TRAJ37)
CVVRVITVSSNTGKLIF

SEQ ID NO: 50788 - protein, 14 aa, Homo sapiens
  CDR3 for beta chain variable domain of TCR clone 25394 (TRBV19, TRBJ2-1)
CASPTFVLSGEQFF

SEQ ID NO: 50789 - protein, 14 aa, Homo sapiens
  CDR3 for alpha chain variable domain of TCR clone 25395 (TRAV12-3, TRAJ22)
CAVSLFGSARQLTF

SEQ ID NO: 50790 - protein, 11 aa, Homo sapiens
  CDR3 for beta chain variable domain of TCR clone 25395 (TRBV12-4, TRBJ2-2)
CASSSAGELFF

SEQ ID NO: 50791 - protein, 12 aa, Homo sapiens
  CDR3 for alpha chain variable domain of TCR clone 25396 (TRAV35, TRAJ49)
CAGWNTGNQFYF

SEQ ID NO: 50792 - protein, 16 aa, Homo sapiens
  CDR3 for beta chain variable domain of TCR clone 25396 (TRBV5-1, TRBJ2-2)
CASSLWDTTDTGELFF

SEQ ID NO: 50793 - protein, 16 aa, Homo sapiens
  CDR3 for alpha chain variable domain of TCR clone 25397 (TRAV30, TRAJ24)
CGTEIVDADSWGKFQF

SEQ ID NO: 50794 - protein, 15 aa, Homo sapiens
  CDR3 for beta chain variable domain of TCR clone 25397 (TRBV2, TRBJ2-1)
CASSEEREGDNEQFF

SEQ ID NO: 50795 - protein, 13 aa, Homo sapiens
  CDR3 for alpha chain variable domain of TCR clone 25398 (TRAV27, TRAJ45)
CRSSGGVADGLTF

SEQ ID NO: 50796 - protein, 17 aa, Homo sapiens
  CDR3 for beta chain variable domain of TCR clone 25398 (TRBV11-2, TRBJ2-1)
CASSLYPPGVEYNEQFF

SEQ ID NO: 50797 - protein, 14 aa, Homo sapiens
  CDR3 for alpha chain variable domain of TCR clone 25399 (TRAV12-2, TRAJ13)
CAVKKTGGYQKVTF

SEQ ID NO: 50798 - protein, 12 aa, Homo sapiens
  CDR3 for beta chain variable domain of TCR clone 25399 (TRBV12-4, TRBJ1-2)
CASSSIWLHLRF

SEQ ID NO: 50799 - protein, 13 aa, Homo sapiens
  CDR3 for alpha chain variable domain of TCR clone 25400 (TRAV12-2, TRAJ39)
CAVNNNAGNMLTF

SEQ ID NO: 50800 - protein, 13 aa, Homo sapiens
  CDR3 for beta chain variable domain of TCR clone 25400 (TRBV2, TRBJ1-5)
CATAGPGNRPQHF

SEQ ID NO: 50801 - protein, 13 aa, Homo sapiens
  CDR3 for alpha chain variable domain of TCR clone 25401 (TRAV13-2, TRAJ53)
CAENMGSDYKLTF

SEQ ID NO: 50802 - protein, 13 aa, Homo sapiens
  CDR3 for beta chain variable domain of TCR clone 25401 (TRBV4-1, TRBJ2-2)
CASSQENTGELFF

SEQ ID NO: 50803 - protein, 12 aa, Homo sapiens
  CDR3 for alpha chain variable domain of TCR clone 25402 (TRAV12-3, TRAJ17)
CAMTLTGNKLTF

SEQ ID NO: 50804 - protein, 15 aa, Homo sapiens
  CDR3 for beta chain variable domain of TCR clone 25402 (TRBV7-9, TRBJ2-2)
CASGPLDTFPGELFF

SEQ ID NO: 50805 - protein, 13 aa, Homo sapiens
  CDR3 for alpha chain variable domain of TCR clone 25403 (TRAV12-2, TRAJ20)
CAVYPSNDYKLSF

SEQ ID NO: 50806 - protein, 15 aa, Homo sapiens
  CDR3 for beta chain variable domain of TCR clone 25403 (TRBV27, TRBJ2-5)
CASSLYPRGGETQYS

SEQ ID NO: 50807 - protein, 15 aa, Homo sapiens
  CDR3 for alpha chain variable domain of TCR clone 25404 (TRAV8-3, TRAJ11)
FAVGLLNSGYSTLTF

SEQ ID NO: 50808 - protein, 16 aa, Homo sapiens
  CDR3 for beta chain variable domain of TCR clone 25404 (TRBV7-9, TRBJ1-2)
CASSLGFSSGEDGYTF

SEQ ID NO: 50809 - protein, 11 aa, Homo sapiens
  CDR3 for alpha chain variable domain of TCR clone 25405 (TRAV12-2, TRAJ33)
CAVTSDYQLIW

SEQ ID NO: 50810 - protein, 14 aa, Homo sapiens
  CDR3 for beta chain variable domain of TCR clone 25405 (TRBV28, TRBJ2-2)
CASRIRSGTGELFF

SEQ ID NO: 50811 - protein, 15 aa, Homo sapiens
  CDR3 for alpha chain variable domain of TCR clone 25406 (TRAV21, TRAJ53)
CATLNSGGGNYKLTF

SEQ ID NO: 50812 - protein, 14 aa, Homo sapiens
  CDR3 for beta chain variable domain of TCR clone 25406 (TRBV7-2, TRBJ2-7)
CASRSQGAAYEQYF

SEQ ID NO: 50813 - protein, 12 aa, Homo sapiens
  CDR3 for alpha chain variable domain of TCR clone 25407 (TRAV12-3, TRAJ40)
CTMSSGTYKYIF

SEQ ID NO: 50814 - protein, 15 aa, Homo sapiens
  CDR3 for beta chain variable domain of TCR clone 25407 (TRBV7-3, TRBJ2-2)
CASSETGQGTGELFF

SEQ ID NO: 50815 - protein, 12 aa, Homo sapiens
  CDR3 for alpha chain variable domain of TCR clone 25408 (TRAV8-3, TRAJ20)
CAVGANDYKLSF

SEQ ID NO: 50816 - protein, 16 aa, Homo sapiens
  CDR3 for beta chain variable domain of TCR clone 25408 (TRBV19, TRBJ2-2)
WASRSPGTGATGELFF

SEQ ID NO: 50817 - protein, 12 aa, Homo sapiens
  CDR3 for alpha chain variable domain of TCR clone 25409 (TRAV12-1, TRAJ34)
CVVAGAIDKLIF

SEQ ID NO: 50818 - protein, 12 aa, Homo sapiens
  CDR3 for beta chain variable domain of TCR clone 25409 (TRBV7-9, TRBJ1-1)
CASSLVRGEAFF

SEQ ID NO: 50819 - protein, 14 aa, Homo sapiens
  CDR3 for alpha chain variable domain of TCR clone 25410 (TRAV29/DV5, TRAJ36)
CAARRKTGANTLFF

SEQ ID NO: 50820 - protein, 14 aa, Homo sapiens
  CDR3 for beta chain variable domain of TCR clone 25410 (TRBV12-5, TRBJ2-5)
CASGSRTHQETQYF

SEQ ID NO: 50821 - protein, 11 aa, Homo sapiens
  CDR3 for alpha chain variable domain of TCR clone 25411 (TRAV21, TRAJ34)
CAHYNTDKLIF

SEQ ID NO: 50822 - protein, 13 aa, Homo sapiens
  CDR3 for beta chain variable domain of TCR clone 25411 (TRBV7-6, TRBJ1-2)
CASSLVADYGYIF

SEQ ID NO: 50823 - protein, 13 aa, Homo sapiens
  CDR3 for alpha chain variable domain of TCR clone 25412 (TRAV13-1, TRAJ20)
CAARVSNDYKPSF

SEQ ID NO: 50824 - protein, 16 aa, Homo sapiens
  CDR3 for beta chain variable domain of TCR clone 25412 (TRBV11-1, TRBJ1-1)
CATNPRDRAFNTEAFF

SEQ ID NO: 50825 - protein, 13 aa, Homo sapiens
  CDR3 for alpha chain variable domain of TCR clone 25413 (TRAV12-1, TRAJ6)
CVVFPGGSYIPTF

SEQ ID NO: 50826 - protein, 15 aa, Homo sapiens
  CDR3 for beta chain variable domain of TCR clone 25413 (TRBV10-2, TRBJ2-6)
CASSEQGTGANVLTF

SEQ ID NO: 50827 - protein, 14 aa, Homo sapiens
  CDR3 for alpha chain variable domain of TCR clone 25414 (TRAV1-2, TRAJ16)
CAINRFSDGQKLLF

SEQ ID NO: 50828 - protein, 14 aa, Homo sapiens
  CDR3 for beta chain variable domain of TCR clone 25414 (TRBV11-2, TRBJ2-3)
CASSRLARTDTQYF

SEQ ID NO: 50829 - protein, 13 aa, Homo sapiens
  CDR3 for alpha chain variable domain of TCR clone 25415 (TRAV1-1, TRAJ9)
CAAKNTGGFKTIF

SEQ ID NO: 50830 - protein, 14 aa, Homo sapiens
  CDR3 for beta chain variable domain of TCR clone 25415 (TRBV12-5, TRBJ2-5)
CASGPRTHQETQYF

SEQ ID NO: 50831 - protein, 23 aa, Homo sapiens
  CDR3 for alpha chain variable domain of TCR clone 25416 (TRAV26-1, TRAJ38)
CIADNAGNNHIQNPDPAVYQLRH

SEQ ID NO: 50832 - protein, 13 aa, Homo sapiens
  CDR3 for beta chain variable domain of TCR clone 25416 (TRBV20-1, TRBJ1-1)
CSARGGGNTEAFF

SEQ ID NO: 50833 - protein, 14 aa, Homo sapiens
  CDR3 for alpha chain variable domain of TCR clone 25417 (TRAV8-1, TRAJ5)
CAVSMDTGRRALTF

SEQ ID NO: 50834 - protein, 15 aa, Homo sapiens
  CDR3 for beta chain variable domain of TCR clone 25417 (TRBV5-5, TRBJ2-2)
CASSRQASGAGELFF

SEQ ID NO: 50835 - protein, 19 aa, Homo sapiens
  CDR3 for alpha chain variable domain of TCR clone 25418 (TRAV3, TRAJ6)
CAVRDRNPSRSGGSYIPTF

SEQ ID NO: 50836 - protein, 15 aa, Homo sapiens
  CDR3 for beta chain variable domain of TCR clone 25418 (TRBV18, TRBJ2-7)
CASSPTFMDGYEQYF

SEQ ID NO: 50837 - protein, 17 aa, Homo sapiens
  CDR3 for alpha chain variable domain of TCR clone 25419 (TRAV26-1, TRAJ10)
CIVSFRGLTGGGNKLTF

SEQ ID NO: 50838 - protein, 13 aa, Homo sapiens
  CDR3 for beta chain variable domain of TCR clone 25419 (TRBV20-1, TRBJ2-3)
CSASRQAADTQYL

SEQ ID NO: 50839 - protein, 15 aa, Homo sapiens
  CDR3 for alpha chain variable domain of TCR clone 25420 (TRAV38-1, TRAJ37)
CAFIHGFGNTGKLIF

SEQ ID NO: 50840 - protein, 12 aa, Homo sapiens
  CDR3 for beta chain variable domain of TCR clone 25420 (TRBV7-9, TRBJ2-7)
CASSFGSYEQYF

SEQ ID NO: 50841 - protein, 14 aa, Homo sapiens
  CDR3 for alpha chain variable domain of TCR clone 25421 (TRAV1-2, TRAJ8)
CAVREDTGFQKLVF

SEQ ID NO: 50842 - protein, 15 aa, Homo sapiens
  CDR3 for beta chain variable domain of TCR clone 25421 (TRBV20-1, TRBJ2-7)
CSARDRVSGMDEQYL

SEQ ID NO: 50843 - protein, 16 aa, Homo sapiens
  CDR3 for alpha chain variable domain of TCR clone 25422 (TRAV16, TRAJ4)
CALSRMFSGGYNKLIF

SEQ ID NO: 50844 - protein, 15 aa, Homo sapiens
  CDR3 for beta chain variable domain of TCR clone 25422 (TRBV28, TRBJ2-1)
CASSIIAGGRSEQFF

SEQ ID NO: 50845 - protein, 11 aa, Homo sapiens
  CDR3 for alpha chain variable domain of TCR clone 25423 (TRAV3, TRAJ21)
CAVGNFNKFYF

SEQ ID NO: 50846 - protein, 14 aa, Homo sapiens
  CDR3 for beta chain variable domain of TCR clone 25423 (TRBV7-9, TRBJ2-1)
CASSPRDSLYEQFF

SEQ ID NO: 50847 - protein, 17 aa, Homo sapiens
  CDR3 for alpha chain variable domain of TCR clone 25424 (TRAV23/DV6, TRAJ57)
CAASSTLSQAGSEKLVF

SEQ ID NO: 50848 - protein, 14 aa, Homo sapiens
  CDR3 for beta chain variable domain of TCR clone 25424 (TRBV25-1, TRBJ1-1)
CASTHLGGNTEAFF

SEQ ID NO: 50849 - protein, 13 aa, Homo sapiens
  CDR3 for alpha chain variable domain of TCR clone 25425 (TRAV12-3, TRAJ13)
CAITSGGYQKVTF

SEQ ID NO: 50850 - protein, 13 aa, Homo sapiens
  CDR3 for beta chain variable domain of TCR clone 25425 (TRBV20-1, TRBJ2-2)
CSALSGGAGELFF

SEQ ID NO: 50851 - protein, 16 aa, Homo sapiens
  CDR3 for alpha chain variable domain of TCR clone 25426 (TRAV16, TRAJ52)
CALSAAGGTSYGKLKF

SEQ ID NO: 50852 - protein, 12 aa, Homo sapiens
  CDR3 for beta chain variable domain of TCR clone 25426 (TRBV12-4, TRBJ1-3)
CASSFSGNTIYF

SEQ ID NO: 50853 - protein, 15 aa, Homo sapiens
  CDR3 for alpha chain variable domain of TCR clone 25427 (TRAV8-3, TRAJ11)
CAVGLLNSGYSTLTF

SEQ ID NO: 50854 - protein, 16 aa, Homo sapiens
  CDR3 for beta chain variable domain of TCR clone 25427 (TRBV7-9, TRBJ1-2)
CASSLGFSSGEDGYIF

SEQ ID NO: 50855 - protein, 14 aa, Homo sapiens
  CDR3 for alpha chain variable domain of TCR clone 25428 (TRAV12-2, TRAJ13)
CAVKKTGGYQKVTF

SEQ ID NO: 50856 - protein, 13 aa, Homo sapiens
  CDR3 for beta chain variable domain of TCR clone 25428 (TRBV7-9, TRBJ2-3)
CASSPGSTDTQYF

SEQ ID NO: 50857 - protein, 17 aa, Homo sapiens
  CDR3 for alpha chain variable domain of TCR clone 25429 (TRAV3, TRAJ6)
CAVRDGPRAGGIYIPTF

SEQ ID NO: 50858 - protein, 20 aa, Homo sapiens
  CDR3 for beta chain variable domain of TCR clone 25429 (TRBV28, TRBJ2-1)
CASTPIGRSPGLAGGNEQFF

SEQ ID NO: 50859 - protein, 13 aa, Homo sapiens
  CDR3 for alpha chain variable domain of TCR clone 25430 (TRAV17, TRAJ9)
CATDYTGGFKTIF

SEQ ID NO: 50860 - protein, 16 aa, Homo sapiens
  CDR3 for beta chain variable domain of TCR clone 25430 (TRBV19, TRBJ2-1)
CASSKAGPSSYNEQFF

SEQ ID NO: 50861 - protein, 12 aa, Homo sapiens
  CDR3 for alpha chain variable domain of TCR clone 25431 (TRAV17, TRAJ49)
CATVTTGSQFYF

SEQ ID NO: 50862 - protein, 13 aa, Homo sapiens
  CDR3 for beta chain variable domain of TCR clone 25431 (TRBV7-2, TRBJ2-2)
CASSLAVTGELFF

SEQ ID NO: 50863 - protein, 11 aa, Homo sapiens
  CDR3 for alpha chain variable domain of TCR clone 25432 (TRAV12-1, TRAJ30)
CVVNGQDKIIF

SEQ ID NO: 50864 - protein, 13 aa, Homo sapiens
  CDR3 for beta chain variable domain of TCR clone 25432 (TRBV12-4, TRBJ1-1)
CASSPGTGFEAFF

SEQ ID NO: 50865 - protein, 14 aa, Homo sapiens
  CDR3 for alpha chain variable domain of TCR clone 25433 (TRAV12-3, TRAJ12)
CAMGRMDSSYKLIF

SEQ ID NO: 50866 - protein, 14 aa, Homo sapiens
  CDR3 for beta chain variable domain of TCR clone 25433 (TRBV20-1, TRBJ1-4)
CSARSGQSNEKLFF

SEQ ID NO: 50867 - protein, 15 aa, Homo sapiens
  CDR3 for alpha chain variable domain of TCR clone 25434 (TRAV35, TRAJ40)
CAGQLGTSGTYKYIF

SEQ ID NO: 50868 - protein, 14 aa, Homo sapiens
  CDR3 for beta chain variable domain of TCR clone 25434 (TRBV7-3, TRBJ2-1)
CASGLAGGTNEQFF

SEQ ID NO: 50869 - protein, 13 aa, Homo sapiens
  CDR3 for alpha chain variable domain of TCR clone 25435 (TRAV21, TRAJ27)
CAARPGNAGKSTF

SEQ ID NO: 50870 - protein, 14 aa, Homo sapiens
  CDR3 for beta chain variable domain of TCR clone 25435 (TRBV7-6, TRBJ2-3)
CASSLGTDTDTQYF

SEQ ID NO: 50871 - protein, 14 aa, Homo sapiens
  CDR3 for alpha chain variable domain of TCR clone 25436 (TRAV12-3, TRAJ13)
CAMENSGGYQKVTF

SEQ ID NO: 50872 - protein, 13 aa, Homo sapiens
  CDR3 for beta chain variable domain of TCR clone 25436 (TRBV29-1, TRBJ2-5)
CSARDRVEETQYF

SEQ ID NO: 50873 - protein, 14 aa, Homo sapiens
  CDR3 for alpha chain variable domain of TCR clone 25437 (TRAV8-4, TRAJ17)
CAVGDQAAGNKLTF

SEQ ID NO: 50874 - protein, 15 aa, Homo sapiens
  CDR3 for beta chain variable domain of TCR clone 25437 (TRBV7-2, TRBJ1-2)
CASSLAPDRGLGYTF

SEQ ID NO: 50875 - protein, 11 aa, Homo sapiens
  CDR3 for alpha chain variable domain of TCR clone 25438 (TRAV13-1, TRAJ39)
CASHAGNMLTF

SEQ ID NO: 50876 - protein, 15 aa, Homo sapiens
  CDR3 for beta chain variable domain of TCR clone 25438 (TRBV20-1, TRBJ2-7)
CSARDRVSGIDEQYF

SEQ ID NO: 50877 - protein, 13 aa, Homo sapiens
  CDR3 for alpha chain variable domain of TCR clone 25439 (TRAV12-3, TRAJ40)
CAMSDSGTYKYIF

SEQ ID NO: 50878 - protein, 14 aa, Homo sapiens
  CDR3 for beta chain variable domain of TCR clone 25439 (TRBV7-2, TRBJ1-5)
CASSTQGTGQPQHF

SEQ ID NO: 50879 - protein, 13 aa, Homo sapiens
  CDR3 for alpha chain variable domain of TCR clone 25440 (TRAV21, TRAJ20)
CAVGLRVDYKLSF

SEQ ID NO: 50880 - protein, 17 aa, Homo sapiens
  CDR3 for beta chain variable domain of TCR clone 25440 (TRBV13, TRBJ2-3)
CASSLSRVAGGRNTQYF

SEQ ID NO: 50881 - protein, 16 aa, Homo sapiens
  CDR3 for alpha chain variable domain of TCR clone 25441 (TRAV12-3, TRAJ53)
CAMSPGSGGGNYKLTF

SEQ ID NO: 50882 - protein, 16 aa, Homo sapiens
  CDR3 for beta chain variable domain of TCR clone 25441 (TRBV4-2, TRBJ1-1)
CASSQAGFGMNTEAFF

SEQ ID NO: 50883 - protein, 14 aa, Homo sapiens
  CDR3 for alpha chain variable domain of TCR clone 25442 (TRAV3, TRAJ34)
CAVRDINNTDKLIF

SEQ ID NO: 50884 - protein, 15 aa, Homo sapiens
  CDR3 for beta chain variable domain of TCR clone 25442 (TRBV20-1, TRBJ2-7)
CSARDRVSEMDEQYF

SEQ ID NO: 50885 - protein, 12 aa, Homo sapiens
  CDR3 for alpha chain variable domain of TCR clone 25443 (TRAV17, TRAJ4)
CATDGGYNKLIF

SEQ ID NO: 50886 - protein, 13 aa, Homo sapiens
  CDR3 for beta chain variable domain of TCR clone 25443 (TRBV29-1, TRBJ2-2)
CSTTGVNTGELFF

SEQ ID NO: 50887 - protein, 11 aa, Homo sapiens
  CDR3 for alpha chain variable domain of TCR clone 25444 (TRAV27, TRAJ47)
SIVEYGNKLVF

SEQ ID NO: 50888 - protein, 18 aa, Homo sapiens
  CDR3 for beta chain variable domain of TCR clone 25444 (TRBV2, TRBJ2-1)
CASRGLAGGPRAYNEQFF

SEQ ID NO: 50889 - protein, 15 aa, Homo sapiens
  CDR3 for alpha chain variable domain of TCR clone 25445 (TRAV26-1, TRAJ44)
CIVRANTGTASKLTF

SEQ ID NO: 50890 - protein, 16 aa, Homo sapiens
  CDR3 for beta chain variable domain of TCR clone 25445 (TRBV7-7, TRBJ2-1)
CASSLASGTSYNEQFS

SEQ ID NO: 50891 - protein, 16 aa, Homo sapiens
  CDR3 for alpha chain variable domain of TCR clone 25446 (TRAV12-1, TRAJ48)
CVVNMVSNFGNEKLTF

SEQ ID NO: 50892 - protein, 18 aa, Homo sapiens
  CDR3 for beta chain variable domain of TCR clone 25446 (TRBV11-2, TRBJ2-6)
CAGSLNPFLGTGANVLTF

SEQ ID NO: 50893 - protein, 11 aa, Homo sapiens
  CDR3 for alpha chain variable domain of TCR clone 25447 (TRAV21, TRAJ34)
CAVTNTDKLIF

SEQ ID NO: 50894 - protein, 13 aa, Homo sapiens
  CDR3 for beta chain variable domain of TCR clone 25447 (TRBV29-1, TRBJ1-3)
CSVEGGSGNTMYF

SEQ ID NO: 50895 - protein, 12 aa, Homo sapiens
  CDR3 for alpha chain variable domain of TCR clone 25448 (TRAV21, TRAJ33)
CAKMDSNYQLIW

SEQ ID NO: 50896 - protein, 15 aa, Homo sapiens
  CDR3 for beta chain variable domain of TCR clone 25448 (TRBV4-1, TRBJ1-4)
CASSDTGGTNEKLFF

SEQ ID NO: 50897 - protein, 15 aa, Homo sapiens
  CDR3 for alpha chain variable domain of TCR clone 25449 (TRAV25, TRAJ52)
CAGRPGGTSYVKLTF

SEQ ID NO: 50898 - protein, 17 aa, Homo sapiens
  CDR3 for beta chain variable domain of TCR clone 25449 (TRBV7-8, TRBJ2-6)
CASSAGTGGAGANVLTF

SEQ ID NO: 50899 - protein, 16 aa, Homo sapiens
  CDR3 for alpha chain variable domain of TCR clone 25450 (TRAV30, TRAJ24)
CGTEIVDADSWGKFQF

SEQ ID NO: 50900 - protein, 14 aa, Homo sapiens
  CDR3 for beta chain variable domain of TCR clone 25450 (TRBV12-5, TRBJ2-5)
CASGSPTHQETQYF

SEQ ID NO: 50901 - protein, 15 aa, Homo sapiens
  CDR3 for alpha chain variable domain of TCR clone 25451 (TRAV21, TRAJ53)
CATLNSGGSNYKLTF

SEQ ID NO: 50902 - protein, 15 aa, Homo sapiens
  CDR3 for beta chain variable domain of TCR clone 25451 (TRBV12-4, TRBJ2-5)
CASSPPTGLQETQYF

SEQ ID NO: 50903 - protein, 11 aa, Homo sapiens
  CDR3 for alpha chain variable domain of TCR clone 25452 (TRAV12-2, TRAJ31)
CAILNNARLMF

SEQ ID NO: 50904 - protein, 13 aa, Homo sapiens
  CDR3 for beta chain variable domain of TCR clone 25452 (TRBV20-1, TRBJ1-1)
CSARVGQGTEAFF

SEQ ID NO: 50905 - protein, 13 aa, Homo sapiens
  CDR3 for alpha chain variable domain of TCR clone 25453 (TRAV12-1, TRAJ39)
CVVPQRAGNMLTF

SEQ ID NO: 50906 - protein, 17 aa, Homo sapiens
  CDR3 for beta chain variable domain of TCR clone 25453 (TRBV4-1, TRBJ2-5)
CASGQDLTGGPIETQYF

SEQ ID NO: 50907 - protein, 12 aa, Homo sapiens
  CDR3 for alpha chain variable domain of TCR clone 25454 (TRAV6, TRAJ15)
CVRNQAGTALIF

SEQ ID NO: 50908 - protein, 15 aa, Homo sapiens
  CDR3 for beta chain variable domain of TCR clone 25454 (TRBV7-3, TRBJ2-1)
CASSPTGGGEVEQFF

SEQ ID NO: 50909 - protein, 15 aa, Homo sapiens
  CDR3 for alpha chain variable domain of TCR clone 25455 (TRAV17, TRAJ4)
CATGTWSGGYNKLIF

SEQ ID NO: 50910 - protein, 13 aa, Homo sapiens
  CDR3 for beta chain variable domain of TCR clone 25455 (TRBV10-3, TRBJ2-7)
CASKLAVNYEQYF

SEQ ID NO: 50911 - protein, 16 aa, Homo sapiens
  CDR3 for alpha chain variable domain of TCR clone 25456 (TRAV4, TRAJ22)
CLVGDLYSGSARQLTF

SEQ ID NO: 50912 - protein, 15 aa, Homo sapiens
  CDR3 for beta chain variable domain of TCR clone 25456 (TRBV20-1, TRBJ2-7)
CSARDRVSGMDEQYF

SEQ ID NO: 50913 - protein, 11 aa, Homo sapiens
  CDR3 for alpha chain variable domain of TCR clone 25457 (TRAV12-1, TRAJ34)
CVVNKGRELIF

SEQ ID NO: 50914 - protein, 14 aa, Homo sapiens
  CDR3 for beta chain variable domain of TCR clone 25457 (TRBV29-1, TRBJ2-7)
CSVESPNTSSTSGR

SEQ ID NO: 50915 - protein, 14 aa, Homo sapiens
  CDR3 for alpha chain variable domain of TCR clone 25458 (TRAV13-1, TRAJ40)
CAASMTSGTYKYIF

SEQ ID NO: 50916 - protein, 15 aa, Homo sapiens
  CDR3 for beta chain variable domain of TCR clone 25458 (TRBV7-3, TRBJ2-1)
CASSPTGGGEVERFF

SEQ ID NO: 50917 - protein, 16 aa, Homo sapiens
  CDR3 for alpha chain variable domain of TCR clone 25459 (TRAV20, TRAJ10)
CAVLRGLTGGGNKLTF

SEQ ID NO: 50918 - protein, 14 aa, Homo sapiens
  CDR3 for beta chain variable domain of TCR clone 25459 (TRBV12-5, TRBJ2-5)
CASGSRTHQETQYF

SEQ ID NO: 50919 - protein, 13 aa, Homo sapiens
  CDR3 for alpha chain variable domain of TCR clone 25460 (TRAV13-1, TRAJ5)
CAASDTGRRALTF

SEQ ID NO: 50920 - protein, 17 aa, Homo sapiens
  CDR3 for beta chain variable domain of TCR clone 25460 (TRBV11-2, TRBJ2-1)
CASSLYPPGVEYNEQFF

SEQ ID NO: 50921 - protein, 16 aa, Homo sapiens
  CDR3 for alpha chain variable domain of TCR clone 25461 (TRAV3, TRAJ21)
CAVRDIERGNFNKFYF

SEQ ID NO: 50922 - protein, 13 aa, Homo sapiens
  CDR3 for beta chain variable domain of TCR clone 25461 (TRBV12-4, TRBJ2-2)
CASSITGSGELFF

SEQ ID NO: 50923 - protein, 17 aa, Homo sapiens
  CDR3 for alpha chain variable domain of TCR clone 25462 (TRAV3, TRAJ42)
CSVRDRDYGGSQGNLIF

SEQ ID NO: 50924 - protein, 15 aa, Homo sapiens
  CDR3 for beta chain variable domain of TCR clone 25462 (TRBV6-6, TRBJ2-7)
CASSYSYGGSYEQYF

SEQ ID NO: 50925 - protein, 17 aa, Homo sapiens
  CDR3 for alpha chain variable domain of TCR clone 25463 (TRAV3, TRAJ6)
CGVRDGPRAGGSYIPTF

SEQ ID NO: 50926 - protein, 14 aa, Homo sapiens
  CDR3 for beta chain variable domain of TCR clone 25463 (TRBV7-2, TRBJ2-7)
CASSPKTSFYEQYF

SEQ ID NO: 50927 - protein, 11 aa, Homo sapiens
  CDR3 for alpha chain variable domain of TCR clone 25464 (TRAV2, TRAJ13)
CASGGYRKVTF

SEQ ID NO: 50928 - protein, 16 aa, Homo sapiens
  CDR3 for beta chain variable domain of TCR clone 25464 (TRBV12-5, TRBJ2-5)
CASGPRTSGNQETQYF

SEQ ID NO: 50929 - protein, 14 aa, Homo sapiens
  CDR3 for alpha chain variable domain of TCR clone 25465 (TRAV1-2, TRAJ8)
YAAREDTGFQKLVF

SEQ ID NO: 50930 - protein, 13 aa, Homo sapiens
  CDR3 for beta chain variable domain of TCR clone 25465 (TRBV19, TRBJ1-2)
CASSVPGQDGYTF

SEQ ID NO: 50931 - protein, 18 aa, Homo sapiens
  CDR3 for alpha chain variable domain of TCR clone 25466 (TRAV12-3, TRAJ52)
CAMSRTNAGGTSFGKLTF

SEQ ID NO: 50932 - protein, 17 aa, Homo sapiens
  CDR3 for beta chain variable domain of TCR clone 25466 (TRBV7-3, TRBJ2-3)
CASSLMKRMRGADTQYF

SEQ ID NO: 50933 - protein, 16 aa, Homo sapiens
  CDR3 for alpha chain variable domain of TCR clone 25467 (TRAV21, TRAJ37)
CAVRTAGSSNTGKLIF

SEQ ID NO: 50934 - protein, 13 aa, Homo sapiens
  CDR3 for beta chain variable domain of TCR clone 25467 (TRBV7-9, TRBJ2-5)
CASLPSGRETQYV

SEQ ID NO: 50935 - protein, 14 aa, Homo sapiens
  CDR3 for alpha chain variable domain of TCR clone 25468 (TRAV35, TRAJ22)
CVGLRPGSARQLTF

SEQ ID NO: 50936 - protein, 13 aa, Homo sapiens
  CDR3 for beta chain variable domain of TCR clone 25468 (TRBV20-1, TRBJ2-7)
CSATHTSGYEQYF

SEQ ID NO: 50937 - protein, 14 aa, Homo sapiens
  CDR3 for alpha chain variable domain of TCR clone 25469 (TRAV2, TRAJ37)
CAVDFTSNTGKLIF

SEQ ID NO: 50938 - protein, 15 aa, Homo sapiens
  CDR3 for beta chain variable domain of TCR clone 25469 (TRBV20-1, TRBJ1-1)
CSASRGVTGNAEAFF

SEQ ID NO: 50939 - protein, 12 aa, Homo sapiens
  CDR3 for alpha chain variable domain of TCR clone 25470 (TRAV12-1, TRAJ40)
CVVYSGTYKYIF

SEQ ID NO: 50940 - protein, 18 aa, Homo sapiens
  CDR3 for beta chain variable domain of TCR clone 25470 (TRBV11-2, TRBJ2-3)
CASSLGGASRVAPNTQYF

SEQ ID NO: 50941 - protein, 14 aa, Homo sapiens
  CDR3 for alpha chain variable domain of TCR clone 25471 (TRAV8-4, TRAJ40)
CAVLSTSGTYKYIF

SEQ ID NO: 50942 - protein, 14 aa, Homo sapiens
  CDR3 for beta chain variable domain of TCR clone 25471 (TRBV4-1, TRBJ2-2)
CASSQAVNTGELFF

SEQ ID NO: 50943 - protein, 13 aa, Homo sapiens
  CDR3 for alpha chain variable domain of TCR clone 25472 (TRAV2, TRAJ40)
CAVVTSGTYKYIF

SEQ ID NO: 50944 - protein, 16 aa, Homo sapiens
  CDR3 for beta chain variable domain of TCR clone 25472 (TRBV19, TRBJ1-6)
CASSVAPVAGNSPLHF

SEQ ID NO: 50945 - protein, 12 aa, Homo sapiens
  CDR3 for alpha chain variable domain of TCR clone 25473 (TRAV12-2, TRAJ21)
CAVRYNFNKSYF

SEQ ID NO: 50946 - protein, 14 aa, Homo sapiens
  CDR3 for beta chain variable domain of TCR clone 25473 (TRBV28, TRBJ2-1)
CASSYYTAYNEQFF

SEQ ID NO: 50947 - protein, 14 aa, Homo sapiens
  CDR3 for alpha chain variable domain of TCR clone 25474 (TRAV29/DV5, TRAJ45)
CAASFRGGADGLTF

SEQ ID NO: 50948 - protein, 16 aa, Homo sapiens
  CDR3 for beta chain variable domain of TCR clone 25474 (TRBV7-3, TRBJ2-2)
CASSLKRGTLSGELFF

SEQ ID NO: 50949 - protein, 16 aa, Homo sapiens
  CDR3 for alpha chain variable domain of TCR clone 25475 (TRAV12-3, TRAJ53)
CAMSPGSGGSNYKLTF

SEQ ID NO: 50950 - protein, 13 aa, Homo sapiens
  CDR3 for beta chain variable domain of TCR clone 25475 (TRBV7-2, TRBJ2-2)
CASSLAVTGELFF

SEQ ID NO: 50951 - protein, 17 aa, Homo sapiens
  CDR3 for alpha chain variable domain of TCR clone 25476 (TRAV26-2, TRAJ42)
CILSDVGYGGSQGNLIF

SEQ ID NO: 50952 - protein, 16 aa, Homo sapiens
  CDR3 for beta chain variable domain of TCR clone 25476 (TRBV12-4, TRBJ2-7)
CASSLIGGTGTYEQYF

SEQ ID NO: 50953 - protein, 12 aa, Homo sapiens
  CDR3 for alpha chain variable domain of TCR clone 25477 (TRAV30, TRAJ39)
CGRGNAGNMLTF

SEQ ID NO: 50954 - protein, 12 aa, Homo sapiens
  CDR3 for beta chain variable domain of TCR clone 25477 (TRBV11-2, TRBJ2-2)
CASSLGGGELFF

SEQ ID NO: 50955 - protein, 13 aa, Homo sapiens
  CDR3 for alpha chain variable domain of TCR clone 25478 (TRAV27, TRAJ49)
CAPRPYTGNQFYF

SEQ ID NO: 50956 - protein, 18 aa, Homo sapiens
  CDR3 for beta chain variable domain of TCR clone 25478 (TRBV7-3, TRBJ2-5)
CASSLGGAAQGRWETQYL

SEQ ID NO: 50957 - protein, 17 aa, Homo sapiens
  CDR3 for alpha chain variable domain of TCR clone 25479 (TRAV12-2, TRAJ4)
CAVNVRPVSGGYNKLIF

SEQ ID NO: 50958 - protein, 17 aa, Homo sapiens
  CDR3 for beta chain variable domain of TCR clone 25479 (TRBV6-3, TRBJ2-1)
CASSYSSRTRGLDEQFF

SEQ ID NO: 50959 - protein, 10 aa, Homo sapiens
  CDR3 for alpha chain variable domain of TCR clone 25480 (TRAV1-1, TRAJ23)
CAGQGGKLIF

SEQ ID NO: 50960 - protein, 16 aa, Homo sapiens
  CDR3 for beta chain variable domain of TCR clone 25480 (TRBV11-2, TRBJ1-1)
CASSLRQGGEHSKAFF

SEQ ID NO: 50961 - protein, 14 aa, Homo sapiens
  CDR3 for alpha chain variable domain of TCR clone 25481 (TRAV24, TRAJ13)
CASSKAGGLPESYL

SEQ ID NO: 50962 - protein, 15 aa, Homo sapiens
  CDR3 for beta chain variable domain of TCR clone 25481 (TRBV28, TRBJ2-5)
CASSSGRTIQETQYF

SEQ ID NO: 50963 - protein, 13 aa, Homo sapiens
  CDR3 for alpha chain variable domain of TCR clone 25482 (TRAV8-6, TRAJ49)
CAVITNTGNQFYF

SEQ ID NO: 50964 - protein, 16 aa, Homo sapiens
  CDR3 for beta chain variable domain of TCR clone 25482 (TRBV12-5, TRBJ2-5)
CASGPRTSGNQETQYF

SEQ ID NO: 50965 - protein, 13 aa, Homo sapiens
  CDR3 for alpha chain variable domain of TCR clone 25483 (TRAV27, TRAJ8)
CAGGPTGFQKLVF

SEQ ID NO: 50966 - protein, 14 aa, Homo sapiens
  CDR3 for beta chain variable domain of TCR clone 25483 (TRBV6-1, TRBJ1-5)
CASSETGMEQPQHF

SEQ ID NO: 50967 - protein, 13 aa, Homo sapiens
  CDR3 for alpha chain variable domain of TCR clone 25484 (TRAV23/DV6, TRAJ16)
CAASISDGQKLLF

SEQ ID NO: 50968 - protein, 15 aa, Homo sapiens
  CDR3 for beta chain variable domain of TCR clone 25484 (TRBV2, TRBJ2-2)
CASSRGTVGTGELFF

SEQ ID NO: 50969 - protein, 15 aa, Homo sapiens
  CDR3 for alpha chain variable domain of TCR clone 25485 (TRAV38-1, TRAJ37)
CAFIHGSGNTGKLIF

SEQ ID NO: 50970 - protein, 12 aa, Homo sapiens
  CDR3 for beta chain variable domain of TCR clone 25485 (TRBV7-9, TRBJ2-7)
CASSFGSYERYF

SEQ ID NO: 50971 - protein, 15 aa, Homo sapiens
  CDR3 for alpha chain variable domain of TCR clone 25486 (TRAV17, TRAJ13)
CATDAGSGGYQKVTF

SEQ ID NO: 50972 - protein, 17 aa, Homo sapiens
  CDR3 for beta chain variable domain of TCR clone 25486 (TRBV11-2, TRBJ2-1)
CASSLSPPGVEYNEQFF

SEQ ID NO: 50973 - protein, 15 aa, Homo sapiens
  CDR3 for alpha chain variable domain of TCR clone 25487 (TRAV35, TRAJ40)
CAGQLGTSGTYKYIF

SEQ ID NO: 50974 - protein, 16 aa, Homo sapiens
  CDR3 for beta chain variable domain of TCR clone 25487 (TRBV19, TRBJ2-7)
CASSLTGTSELGEQYF

SEQ ID NO: 50975 - protein, 19 aa, Homo sapiens
  CDR3 for alpha chain variable domain of TCR clone 25488 (TRAV26-1, TRAJ52)
CIVRAHRNAGGTSYGNLTF

SEQ ID NO: 50976 - protein, 15 aa, Homo sapiens
  CDR3 for beta chain variable domain of TCR clone 25488 (TRBV29-1, TRBJ2-1)
CSGRDRKSSYNEQFF

SEQ ID NO: 50977 - protein, 14 aa, Homo sapiens
  CDR3 for alpha chain variable domain of TCR clone 25489 (TRAV9-2, TRAJ39)
CALYIYNAGNMLTF

SEQ ID NO: 50978 - protein, 18 aa, Homo sapiens
  CDR3 for beta chain variable domain of TCR clone 25489 (TRBV5-1, TRBJ2-7)
CASSSTGGASGYSYEQYF

SEQ ID NO: 50979 - protein, 12 aa, Homo sapiens
  CDR3 for alpha chain variable domain of TCR clone 25490 (TRAV8-4, TRAJ43)
CAVSVNNNDMRF

SEQ ID NO: 50980 - protein, 14 aa, Homo sapiens
  CDR3 for beta chain variable domain of TCR clone 25490 (TRBV4-1, TRBJ2-2)
CASSQAVNTGELFF

SEQ ID NO: 50981 - protein, 15 aa, Homo sapiens
  CDR3 for alpha chain variable domain of TCR clone 25491 (TRAV8-4, TRAJ3)
CAVTGENLVHQCFQD

SEQ ID NO: 50982 - protein, 16 aa, Homo sapiens
  CDR3 for beta chain variable domain of TCR clone 25491 (TRBV4-2, TRBJ1-1)
CASSQAGFGMNTEAFF

SEQ ID NO: 50983 - protein, 13 aa, Homo sapiens
  CDR3 for alpha chain variable domain of TCR clone 25492 (TRAV12-3, TRAJ9)
RAMRNTGGFKTIF

SEQ ID NO: 50984 - protein, 14 aa, Homo sapiens
  CDR3 for beta chain variable domain of TCR clone 25492 (TRBV11-2, TRBJ2-7)
CASSSTGEGYEQCF

SEQ ID NO: 50985 - protein, 15 aa, Homo sapiens
  CDR3 for alpha chain variable domain of TCR clone 25493 (TRAV3, TRAJ32)
CAVSSYGGATDKLIF

SEQ ID NO: 50986 - protein, 13 aa, Homo sapiens
  CDR3 for beta chain variable domain of TCR clone 25493 (TRBV20-1, TRBJ2-7)
CSARPSTNYEQYF

SEQ ID NO: 50987 - protein, 15 aa, Homo sapiens
  CDR3 for alpha chain variable domain of TCR clone 25494 (TRAV26-1, TRAJ22)
CIVRVSFWFCKATDF

SEQ ID NO: 50988 - protein, 13 aa, Homo sapiens
  CDR3 for beta chain variable domain of TCR clone 25494 (TRBV7-9, TRBJ1-2)
CASSLKQNYGYTF

SEQ ID NO: 50989 - protein, 18 aa, Homo sapiens
  CDR3 for alpha chain variable domain of TCR clone 25495 (TRAV21, TRAJ52)
CAVRPSPAGGTSYGKLTF

SEQ ID NO: 50990 - protein, 16 aa, Homo sapiens
  CDR3 for beta chain variable domain of TCR clone 25495 (TRBV12-4, TRBJ1-5)
CASSRPVGGSNQPQHF

SEQ ID NO: 50991 - protein, 11 aa, Homo sapiens
  CDR3 for alpha chain variable domain of TCR clone 25496 (TRAV2, TRAJ33)
CAVESNYQVIW

SEQ ID NO: 50992 - protein, 15 aa, Homo sapiens
  CDR3 for beta chain variable domain of TCR clone 25496 (TRBV19, TRBJ1-1)
CASTSGQIQNTEAFF

SEQ ID NO: 50993 - protein, 15 aa, Homo sapiens
  CDR3 for alpha chain variable domain of TCR clone 25497 (TRAV12-3, TRAJ6)
CAMSATTGGSYIPTF

SEQ ID NO: 50994 - protein, 16 aa, Homo sapiens
  CDR3 for beta chain variable domain of TCR clone 25497 (TRBV19, TRBJ2-1)
CASSKAGPSSYNEQFF

SEQ ID NO: 50995 - protein, 18 aa, Homo sapiens
  CDR3 for alpha chain variable domain of TCR clone 25498 (TRAV12-3, TRAJ52)
CAMSVGGAGGTSYGKLTF

SEQ ID NO: 50996 - protein, 14 aa, Homo sapiens
  CDR3 for beta chain variable domain of TCR clone 25498 (TRBV7-3, TRBJ1-1)
CASSLKGGNTEAFF

SEQ ID NO: 50997 - protein, 15 aa, Homo sapiens
  CDR3 for alpha chain variable domain of TCR clone 25499 (TRAV17, TRAJ57)
CATGPSQGGSEKLVF

SEQ ID NO: 50998 - protein, 16 aa, Homo sapiens
  CDR3 for beta chain variable domain of TCR clone 25499 (TRBV12-4, TRBJ1-5)
CSSSRPVGGSNQPQHF

SEQ ID NO: 50999 - protein, 14 aa, Homo sapiens
  CDR3 for alpha chain variable domain of TCR clone 25500 (TRAV2, TRAJ37)
CAVDFTSNTGKLIF

SEQ ID NO: 51000 - protein, 13 aa, Homo sapiens
  CDR3 for beta chain variable domain of TCR clone 25500 (TRBV29-1, TRBJ2-1)
CSVEGGRVNEQFF

SEQ ID NO: 51001 - protein, 12 aa, Homo sapiens
  CDR3 for alpha chain variable domain of TCR clone 25501 (TRAV21, TRAJ13)
PGPSGGYQKVTF

SEQ ID NO: 51002 - protein, 15 aa, Homo sapiens
  CDR3 for beta chain variable domain of TCR clone 25501 (TRBV7-9, TRBJ1-6)
CASSYPGRGNSPLHF

SEQ ID NO: 51003 - protein, 13 aa, Homo sapiens
  CDR3 for alpha chain variable domain of TCR clone 25502 (TRAV20, TRAJ21)
CAVEGYNFNKFYF

SEQ ID NO: 51004 - protein, 12 aa, Homo sapiens
  CDR3 for beta chain variable domain of TCR clone 25502 (TRBV11-2, TRBJ2-2)
CASSLGGGELFF

SEQ ID NO: 51005 - protein, 13 aa, Homo sapiens
  CDR3 for alpha chain variable domain of TCR clone 25503 (TRAV2, TRAJ40)
CAVVTSGTYKYIF

SEQ ID NO: 51006 - protein, 14 aa, Homo sapiens
  CDR3 for beta chain variable domain of TCR clone 25503 (TRBV19, TRBJ2-1)
CASPTFVMSGEQFF

SEQ ID NO: 51007 - protein, 18 aa, Homo sapiens
  CDR3 for alpha chain variable domain of TCR clone 25504 (TRAV29/DV5, TRAJ52)
CAAGFRGAGGTSYGKLTF

SEQ ID NO: 51008 - protein, 16 aa, Homo sapiens
  CDR3 for beta chain variable domain of TCR clone 25504 (TRBV7-3, TRBJ2-2)
CASSLKRGALSGELFF

SEQ ID NO: 51009 - protein, 14 aa, Homo sapiens
  CDR3 for alpha chain variable domain of TCR clone 25505 (TRAV1-2, TRAJ16)
CAVNRFSDGQKLLF

SEQ ID NO: 51010 - protein, 12 aa, Homo sapiens
  CDR3 for beta chain variable domain of TCR clone 25505 (TRBV11-2, TRBJ1-1)
CQQLSLQPAAFF

SEQ ID NO: 51011 - protein, 11 aa, Homo sapiens
  CDR3 for alpha chain variable domain of TCR clone 25506 (TRAV1-1, TRAJ23)
CAVRQGGKLIF

SEQ ID NO: 51012 - protein, 13 aa, Homo sapiens
  CDR3 for beta chain variable domain of TCR clone 25506 (TRBV7-8, TRBJ2-2)
CASSHYFPGRLSI

SEQ ID NO: 51013 - protein, 18 aa, Homo sapiens
  CDR3 for alpha chain variable domain of TCR clone 25507 (TRAV1-2, TRAJ18)
CAVRDMGGRGSTLGRLYF

SEQ ID NO: 51014 - protein, 16 aa, Homo sapiens
  CDR3 for beta chain variable domain of TCR clone 25507 (TRBV29-1, TRBJ1-2)
CSVEANRDIANYGYTF

SEQ ID NO: 51015 - protein, 13 aa, Homo sapiens
  CDR3 for alpha chain variable domain of TCR clone 25508 (TRAV13-2, TRAJ53)
CAENMGSNYKLTF

SEQ ID NO: 51016 - protein, 14 aa, Homo sapiens
  CDR3 for beta chain variable domain of TCR clone 25508 (TRBV19, TRBJ2-2)
CASSGQGIAGELFF

SEQ ID NO: 51017 - protein, 14 aa, Homo sapiens
  CDR3 for alpha chain variable domain of TCR clone 25509 (TRAV8-2, TRAJ4)
CVVSPSGGYNKLIF

SEQ ID NO: 51018 - protein, 15 aa, Homo sapiens
  CDR3 for beta chain variable domain of TCR clone 25509 (TRBV4-1, TRBJ1-4)
CASSDTGGTNEKLFL

SEQ ID NO: 51019 - protein, 14 aa, Homo sapiens
  CDR3 for alpha chain variable domain of TCR clone 25510 (TRAV6, TRAJ5)
CALDAPTGRRALTF

SEQ ID NO: 51020 - protein, 16 aa, Homo sapiens
  CDR3 for beta chain variable domain of TCR clone 25510 (TRBV7-3, TRBJ2-2)
CASSLKRGTLSGELFF

SEQ ID NO: 51021 - protein, 16 aa, Homo sapiens
  CDR3 for alpha chain variable domain of TCR clone 25511 (TRAV12-3, TRAJ53)
CAMSPGSGGSNYKLTF

SEQ ID NO: 51022 - protein, 14 aa, Homo sapiens
  CDR3 for beta chain variable domain of TCR clone 25511 (TRBV7-8, TRBJ2-3)
CASSLEAGTDTQYF

SEQ ID NO: 51023 - protein, 17 aa, Homo sapiens
  CDR3 for alpha chain variable domain of TCR clone 25512 (TRAV3, TRAJ38)
CAVRDGLNAGNNRKLIW

SEQ ID NO: 51024 - protein, 14 aa, Homo sapiens
  CDR3 for beta chain variable domain of TCR clone 25512 (TRBV5-5, TRBJ1-5)
CASSGQGVDQPQHF

SEQ ID NO: 51025 - protein, 12 aa, Homo sapiens
  CDR3 for alpha chain variable domain of TCR clone 25513 (TRAV3, TRAJ31)
CAVRDGNARLMV

SEQ ID NO: 51026 - protein, 18 aa, Homo sapiens
  CDR3 for beta chain variable domain of TCR clone 25513 (TRBV7-2, TRBJ2-3)
CASSLKREGSGITDTQYF

SEQ ID NO: 51027 - protein, 12 aa, Homo sapiens
  CDR3 for alpha chain variable domain of TCR clone 25514 (TRAV12-3, TRAJ17)
CAMTLTGNKLTF

SEQ ID NO: 51028 - protein, 14 aa, Homo sapiens
  CDR3 for beta chain variable domain of TCR clone 25514 (TRBV7-3, TRBJ2-7)
CASSLKADSYEQYF

SEQ ID NO: 51029 - protein, 11 aa, Homo sapiens
  CDR3 for alpha chain variable domain of TCR clone 25515 (TRAV12-1, TRAJ30)
CVVNGQDKIIF

SEQ ID NO: 51030 - protein, 12 aa, Homo sapiens
  CDR3 for beta chain variable domain of TCR clone 25515 (TRBV27, TRBJ2-2)
CASKLFTGELLF

SEQ ID NO: 51031 - protein, 12 aa, Homo sapiens
  CDR3 for alpha chain variable domain of TCR clone 25516 (TRAV13-1, TRAJ27)
CAANTNAGKSTF

SEQ ID NO: 51032 - protein, 14 aa, Homo sapiens
  CDR3 for beta chain variable domain of TCR clone 25516 (TRBV19, TRBJ2-2)
CASSGQGIAGELFF

SEQ ID NO: 51033 - protein, 15 aa, Homo sapiens
  CDR3 for alpha chain variable domain of TCR clone 25517 (TRAV25, TRAJ52)
CAGRPGGTSYGKLTF

SEQ ID NO: 51034 - protein, 17 aa, Homo sapiens
  CDR3 for beta chain variable domain of TCR clone 25517 (TRBV7-8, TRBJ2-6)
CASSAGTGGAGANVLPF

SEQ ID NO: 51035 - protein, 17 aa, Homo sapiens
  CDR3 for alpha chain variable domain of TCR clone 25518 (TRAV38-1, TRAJ28)
CAFMKPTSGAGSYQLTF

SEQ ID NO: 51036 - protein, 15 aa, Homo sapiens
  CDR3 for beta chain variable domain of TCR clone 25518 (TRBV5-1, TRBJ2-4)
CAGSLGGGGSYIQYF

SEQ ID NO: 51037 - protein, 14 aa, Homo sapiens
  CDR3 for alpha chain variable domain of TCR clone 25519 (TRAV1-2, TRAJ16)
CAVNRFSGGQKLLF

SEQ ID NO: 51038 - protein, 13 aa, Homo sapiens
  CDR3 for beta chain variable domain of TCR clone 25519 (TRBV4-1, TRBJ2-1)
CASSQAGGDEQFF

SEQ ID NO: 51039 - protein, 12 aa, Homo sapiens
  CDR3 for alpha chain variable domain of TCR clone 25520 (TRAV2, TRAJ33)
CAFMDSNYQLIW

SEQ ID NO: 51040 - protein, 16 aa, Homo sapiens
  CDR3 for beta chain variable domain of TCR clone 25520 (TRBV2, TRBJ2-7)
RASSEPWTGPSYEQYF

SEQ ID NO: 51041 - protein, 14 aa, Homo sapiens
  CDR3 for alpha chain variable domain of TCR clone 25521 (TRAV35, TRAJ22)
CAGLRPGSARQLTF

SEQ ID NO: 51042 - protein, 15 aa, Homo sapiens
  CDR3 for beta chain variable domain of TCR clone 25521 (TRBV12-4, TRBJ2-5)
CASSPPTGLQETQDF

SEQ ID NO: 51043 - protein, 12 aa, Homo sapiens
  CDR3 for alpha chain variable domain of TCR clone 25522 (TRAV1-2, TRAJ29)
CAVPSGNTPLVF

SEQ ID NO: 51044 - protein, 14 aa, Homo sapiens
  CDR3 for beta chain variable domain of TCR clone 25522 (TRBV19, TRBJ1-2)
CASSLQGQAYGYTF

SEQ ID NO: 51045 - protein, 15 aa, Homo sapiens
  CDR3 for alpha chain variable domain of TCR clone 25523 (TRAV8-3, TRAJ15)
CVVGAPNQAGTALIF

SEQ ID NO: 51046 - protein, 14 aa, Homo sapiens
  CDR3 for beta chain variable domain of TCR clone 25523 (TRBV20-1, TRBJ2-1)
CSPNDEASYNEQFF

SEQ ID NO: 51047 - protein, 12 aa, Homo sapiens
  CDR3 for alpha chain variable domain of TCR clone 25524 (TRAV2, TRAJ43)
CAVEVDNNDMRL

SEQ ID NO: 51048 - protein, 13 aa, Homo sapiens
  CDR3 for beta chain variable domain of TCR clone 25524 (TRBV12-4, TRBJ2-1)
CASRRGATYGQFF

SEQ ID NO: 51049 - protein, 13 aa, Homo sapiens
  CDR3 for alpha chain variable domain of TCR clone 25525 (TRAV2, TRAJ40)
CAVVTSGTYKYIF

SEQ ID NO: 51050 - protein, 16 aa, Homo sapiens
  CDR3 for beta chain variable domain of TCR clone 25525 (TRBV7-8, TRBJ2-4)
CASSAERTLAKNIQYF

SEQ ID NO: 51051 - protein, 14 aa, Homo sapiens
  CDR3 for alpha chain variable domain of TCR clone 25526 (TRAV9-2, TRAJ39)
CALYIYNAGNMLTF

SEQ ID NO: 51052 - protein, 15 aa, Homo sapiens
  CDR3 for beta chain variable domain of TCR clone 25526 (TRBV20-1, TRBJ2-7)
CSARDRVSGVDEQYF

SEQ ID NO: 51053 - protein, 14 aa, Homo sapiens
  CDR3 for alpha chain variable domain of TCR clone 25527 (TRAV16, TRAJ33)
CALSAMDSNYQLIW

SEQ ID NO: 51054 - protein, 14 aa, Homo sapiens
  CDR3 for beta chain variable domain of TCR clone 25527 (TRBV7-8, TRBJ2-3)
CASSLEAGTDTQYF

SEQ ID NO: 51055 - protein, 16 aa, Homo sapiens
  CDR3 for alpha chain variable domain of TCR clone 25528 (TRAV23/DV6, TRAJ10)
CAASIGTHGRRKQTHL

SEQ ID NO: 51056 - protein, 13 aa, Homo sapiens
  CDR3 for beta chain variable domain of TCR clone 25528 (TRBV11-1, TRBJ1-2)
CASVGSWGYGYTF

SEQ ID NO: 51057 - protein, 18 aa, Homo sapiens
  CDR3 for alpha chain variable domain of TCR clone 25529 (TRAV21, TRAJ52)
CAVRPSPAGGTSYGELTF

SEQ ID NO: 51058 - protein, 13 aa, Homo sapiens
  CDR3 for beta chain variable domain of TCR clone 25529 (TRBV7-3, TRBJ1-1)
CASSQDWGAEAFF

SEQ ID NO: 51059 - protein, 15 aa, Homo sapiens
  CDR3 for alpha chain variable domain of TCR clone 25530 (TRAV12-3, TRAJ6)
CAMSATTRGSYIPTF

SEQ ID NO: 51060 - protein, 16 aa, Homo sapiens
  CDR3 for beta chain variable domain of TCR clone 25530 (TRBV20-1, TRBJ1-2)
CSASMGQGVANYGYTF

SEQ ID NO: 51061 - protein, 13 aa, Homo sapiens
  CDR3 for alpha chain variable domain of TCR clone 25531 (TRAV29/DV5, TRAJ33)
CAASVESNYRLIW

SEQ ID NO: 51062 - protein, 14 aa, Homo sapiens
  CDR3 for beta chain variable domain of TCR clone 25531 (TRBV11-2, TRBJ2-5)
CASSRTGGIETQYF

SEQ ID NO: 51063 - protein, 14 aa, Homo sapiens
  CDR3 for alpha chain variable domain of TCR clone 25532 (TRAV2, TRAJ37)
CAVDFTSNTGKLIF

SEQ ID NO: 51064 - protein, 15 aa, Homo sapiens
  CDR3 for beta chain variable domain of TCR clone 25532 (TRBV12-4, TRBJ2-5)
CASSPPTGLQETQYF

SEQ ID NO: 51065 - protein, 17 aa, Homo sapiens
  CDR3 for alpha chain variable domain of TCR clone 25533 (TRAV3, TRAJ42)
CAVRDRDYGGSQGNLIF

SEQ ID NO: 51066 - protein, 15 aa, Homo sapiens
  CDR3 for beta chain variable domain of TCR clone 25533 (TRBV19, TRBJ1-2)
CASSVGQVLNYGYTF

SEQ ID NO: 51067 - protein, 18 aa, Homo sapiens
  CDR3 for alpha chain variable domain of TCR clone 25534 (TRAV13-1, TRAJ52)
CAAKNPNAGGTSYGKLTS

SEQ ID NO: 51068 - protein, 15 aa, Homo sapiens
  CDR3 for beta chain variable domain of TCR clone 25534 (TRBV6-1, TRBJ2-3)
CASSERGGITDTQYF

SEQ ID NO: 51069 - protein, 12 aa, Homo sapiens
  CDR3 for alpha chain variable domain of TCR clone 25535 (TRAV4, TRAJ26)
CLVGDYGQNFVF

SEQ ID NO: 51070 - protein, 13 aa, Homo sapiens
  CDR3 for beta chain variable domain of TCR clone 25535 (TRBV7-9, TRBJ1-2)
CASSLKQNYGYTF

SEQ ID NO: 51071 - protein, 11 aa, Homo sapiens
  CDR3 for alpha chain variable domain of TCR clone 25536 (TRAV12-3, TRAJ43)
CAMSVSNDMRF

SEQ ID NO: 51072 - protein, 15 aa, Homo sapiens
  CDR3 for beta chain variable domain of TCR clone 25536 (TRBV19, TRBJ1-2)
CASSVGQVLNYGYTF

SEQ ID NO: 51073 - protein, 16 aa, Homo sapiens
  CDR3 for alpha chain variable domain of TCR clone 25537 (TRAV27, TRAJ13)
CAGANSDSGGYQKVTF

SEQ ID NO: 51074 - protein, 15 aa, Homo sapiens
  CDR3 for beta chain variable domain of TCR clone 25537 (TRBV29-1, TRBJ2-1)
CSVGRHALFYNEQFF

SEQ ID NO: 51075 - protein, 15 aa, Homo sapiens
  CDR3 for alpha chain variable domain of TCR clone 25538 (TRAV26-1, TRAJ29)
CIVRVEGSGNTPLVF

SEQ ID NO: 51076 - protein, 12 aa, Homo sapiens
  CDR3 for beta chain variable domain of TCR clone 25538 (TRBV11-2, TRBJ2-2)
CASSLPTGELFF

SEQ ID NO: 51077 - protein, 14 aa, Homo sapiens
  CDR3 for alpha chain variable domain of TCR clone 25539 (TRAV2, TRAJ9)
CAVEDRSGGFKTIF

SEQ ID NO: 51078 - protein, 16 aa, Homo sapiens
  CDR3 for beta chain variable domain of TCR clone 25539 (TRBV7-9, TRBJ1-2)
CASSLGFSSGEDGYTF

SEQ ID NO: 51079 - protein, 14 aa, Homo sapiens
  CDR3 for alpha chain variable domain of TCR clone 25540 (TRAV26-1, TRAJ22)
RIVRVYGSARQLTF

SEQ ID NO: 51080 - protein, 17 aa, Homo sapiens
  CDR3 for beta chain variable domain of TCR clone 25540 (TRBV7-3, TRBJ2-3)
CASSPGGLAGFGDTQYF

SEQ ID NO: 51081 - protein, 11 aa, Homo sapiens
  CDR3 for alpha chain variable domain of TCR clone 25541 (TRAV1-2, TRAJ11)
CAVRGYSTLTF

SEQ ID NO: 51082 - protein, 13 aa, Homo sapiens
  CDR3 for beta chain variable domain of TCR clone 25541 (TRBV4-2, TRBJ1-1)
CASSQAGNTEAFF

SEQ ID NO: 51083 - protein, 12 aa, Homo sapiens
  CDR3 for alpha chain variable domain of TCR clone 25542 (TRAV3, TRAJ43)
CAVRDPNNDMRF

SEQ ID NO: 51084 - protein, 15 aa, Homo sapiens
  CDR3 for beta chain variable domain of TCR clone 25542 (TRBV27, TRBJ1-5)
CASSLGTGFDQPQHL

SEQ ID NO: 51085 - protein, 15 aa, Homo sapiens
  CDR3 for alpha chain variable domain of TCR clone 25543 (TRAV21, TRAJ45)
CAVSYSGGGADGPTF

SEQ ID NO: 51086 - protein, 13 aa, Homo sapiens
  CDR3 for beta chain variable domain of TCR clone 25543 (TRBV20-1, TRBJ2-5)
CSAATELQETQYF

SEQ ID NO: 51087 - protein, 14 aa, Homo sapiens
  CDR3 for alpha chain variable domain of TCR clone 25544 (TRAV2, TRAJ9)
CAVDPNTGGFKTIF

SEQ ID NO: 51088 - protein, 13 aa, Homo sapiens
  CDR3 for beta chain variable domain of TCR clone 25544 (TRBV20-1, TRBJ2-1)
CSASTGTSNERFF

SEQ ID NO: 51089 - protein, 14 aa, Homo sapiens
  CDR3 for alpha chain variable domain of TCR clone 25545 (TRAV12-1, TRAJ17)
CVVNYKAAGNKLTF

SEQ ID NO: 51090 - protein, 17 aa, Homo sapiens
  CDR3 for beta chain variable domain of TCR clone 25545 (TRBV20-1, TRBJ2-1)
CSASSSGLAGSYKEQFF

SEQ ID NO: 51091 - protein, 14 aa, Homo sapiens
  CDR3 for alpha chain variable domain of TCR clone 25546 (TRAV1-2, TRAJ16)
CAVNRFSDGQKLLF

SEQ ID NO: 51092 - protein, 15 aa, Homo sapiens
  CDR3 for beta chain variable domain of TCR clone 25546 (TRBV24-1, TRBJ2-5)
CATSETAGAVGAQYF

SEQ ID NO: 51093 - protein, 14 aa, Homo sapiens
  CDR3 for alpha chain variable domain of TCR clone 25547 (TRAV12-2, TRAJ36)
CAVNPPTGANNPFF

SEQ ID NO: 51094 - protein, 13 aa, Homo sapiens
  CDR3 for beta chain variable domain of TCR clone 25547 (TRBV20-1, TRBJ1-6)
CSAPTGLGSPLHF

SEQ ID NO: 51095 - protein, 13 aa, Homo sapiens
  CDR3 for alpha chain variable domain of TCR clone 25548 (TRAV1-2, TRAJ12)
CAVSMDSSYKLIF

SEQ ID NO: 51096 - protein, 14 aa, Homo sapiens
  CDR3 for beta chain variable domain of TCR clone 25548 (TRBV7-2, TRBJ2-7)
CASGPKTSFYEQYF

SEQ ID NO: 51097 - protein, 14 aa, Homo sapiens
  CDR3 for alpha chain variable domain of TCR clone 25549 (TRAV9-2, TRAJ39)
CALYIYNAGNMLTF

SEQ ID NO: 51098 - protein, 14 aa, Homo sapiens
  CDR3 for beta chain variable domain of TCR clone 25549 (TRBV19, TRBJ2-1)
CAGPTFVLSGEQFF

SEQ ID NO: 51099 - protein, 13 aa, Homo sapiens
  CDR3 for alpha chain variable domain of TCR clone 25550 (TRAV12-1, TRAJ49)
CVVTPFTGNQFYF

SEQ ID NO: 51100 - protein, 13 aa, Homo sapiens
  CDR3 for beta chain variable domain of TCR clone 25550 (TRBV20-1, TRBJ1-1)
CSARGGASTEAFF

SEQ ID NO: 51101 - protein, 12 aa, Homo sapiens
  CDR3 for alpha chain variable domain of TCR clone 25551 (TRAV17, TRAJ12)
CATLRSSYKLIF

SEQ ID NO: 51102 - protein, 16 aa, Homo sapiens
  CDR3 for beta chain variable domain of TCR clone 25551 (TRBV28, TRBJ2-7)
CASSLFFETGSPEQYF

SEQ ID NO: 51103 - protein, 10 aa, Homo sapiens
  CDR3 for alpha chain variable domain of TCR clone 25552 (TRAV13-2, TRAJ40)
CAKGKYIFGT

SEQ ID NO: 51104 - protein, 18 aa, Homo sapiens
  CDR3 for beta chain variable domain of TCR clone 25552 (TRBV6-6, TRBJ2-5)
CASSYSWLQGALRETQYF

SEQ ID NO: 51105 - protein, 17 aa, Homo sapiens
  CDR3 for alpha chain variable domain of TCR clone 25553 (TRAV3, TRAJ6)
CAVRDGPRAVGSYIPTF

SEQ ID NO: 51106 - protein, 20 aa, Homo sapiens
  CDR3 for beta chain variable domain of TCR clone 25553 (TRBV28, TRBJ2-1)
CASTPIGRSPGLAGGNEQFF

SEQ ID NO: 51107 - protein, 12 aa, Homo sapiens
  CDR3 for alpha chain variable domain of TCR clone 25554 (TRAV17, TRAJ48)
CALNFGNEKLTF

SEQ ID NO: 51108 - protein, 15 aa, Homo sapiens
  CDR3 for beta chain variable domain of TCR clone 25554 (TRBV28, TRBJ2-7)
CASSPGGRGFYEQYF

SEQ ID NO: 51109 - protein, 14 aa, Homo sapiens
  CDR3 for alpha chain variable domain of TCR clone 25555 (TRAV1-2, TRAJ8)
CAVREDTGFQKLVF

SEQ ID NO: 51110 - protein, 13 aa, Homo sapiens
  CDR3 for beta chain variable domain of TCR clone 25555 (TRBV4-1, TRBJ2-2)
CASSQENTGELFF

SEQ ID NO: 51111 - protein, 11 aa, Homo sapiens
  CDR3 for alpha chain variable domain of TCR clone 25556 (TRAV2, TRAJ33)
CAVESNYQLIW

SEQ ID NO: 51112 - protein, 19 aa, Homo sapiens
  CDR3 for beta chain variable domain of TCR clone 25556 (TRBV25-1, TRBJ2-2)
CAILVYRVDRGRKTGELFF

SEQ ID NO: 51113 - protein, 14 aa, Homo sapiens
  CDR3 for alpha chain variable domain of TCR clone 25557 (TRAV12-2, TRAJ13)
CAVKKTGGYQKVTF

SEQ ID NO: 51114 - protein, 15 aa, Homo sapiens
  CDR3 for beta chain variable domain of TCR clone 25557 (TRBV27, TRBJ2-1)
GASSNGGGPSNEQFF

SEQ ID NO: 51115 - protein, 16 aa, Homo sapiens
  CDR3 for alpha chain variable domain of TCR clone 25558 (TRAV3, TRAJ37)
CAVRGKGYGNTGKLIF

SEQ ID NO: 51116 - protein, 13 aa, Homo sapiens
  CDR3 for beta chain variable domain of TCR clone 25558 (TRBV14, TRBJ2-7)
CASSQDRRYEQYF

SEQ ID NO: 51117 - protein, 15 aa, Homo sapiens
  CDR3 for alpha chain variable domain of TCR clone 25559 (TRAV23/DV6, TRAJ18)
CAARYRGSTLGRLNF

SEQ ID NO: 51118 - protein, 13 aa, Homo sapiens
  CDR3 for beta chain variable domain of TCR clone 25559 (TRBV7-2, TRBJ2-7)
CASSSPSGSEQYF

SEQ ID NO: 51119 - protein, 12 aa, Homo sapiens
  CDR3 for alpha chain variable domain of TCR clone 25560 (TRAV12-3, TRAJ17)
CAMTLTGNKLTF

SEQ ID NO: 51120 - protein, 11 aa, Homo sapiens
  CDR3 for beta chain variable domain of TCR clone 25560 (TRBV19, TRBJ1-1)
CASSIGSEAFF

SEQ ID NO: 51121 - protein, 13 aa, Homo sapiens
  CDR3 for alpha chain variable domain of TCR clone 25561 (TRAV12-1, TRAJ39)
CVVNYNAGNMLAF

SEQ ID NO: 51122 - protein, 14 aa, Homo sapiens
  CDR3 for beta chain variable domain of TCR clone 25561 (TRBV27, TRBJ2-3)
CASSPLGTTDTQYF

SEQ ID NO: 51123 - protein, 12 aa, Homo sapiens
  CDR3 for alpha chain variable domain of TCR clone 25562 (TRAV12-1, TRAJ40)
CVVYSGTYKYIF

SEQ ID NO: 51124 - protein, 18 aa, Homo sapiens
  CDR3 for beta chain variable domain of TCR clone 25562 (TRBV11-2, TRBJ2-3)
CASSLGGALRGAPNTQYF

SEQ ID NO: 51125 - protein, 13 aa, Homo sapiens
  CDR3 for alpha chain variable domain of TCR clone 25563 (TRAV8-6, TRAJ8)
CAVSNTGFQKLLF

SEQ ID NO: 51126 - protein, 15 aa, Homo sapiens
  CDR3 for beta chain variable domain of TCR clone 25563 (TRBV28, TRBJ2-5)
CASSSGRTIQETQYF

SEQ ID NO: 51127 - protein, 12 aa, Homo sapiens
  CDR3 for alpha chain variable domain of TCR clone 25564 (TRAV35, TRAJ49)
CAGWNTGNQFYF

SEQ ID NO: 51128 - protein, 16 aa, Homo sapiens
  CDR3 for beta chain variable domain of TCR clone 25564 (TRBV5-1, TRBJ2-2)
CASSLWDATNTGELFF

SEQ ID NO: 51129 - protein, 17 aa, Homo sapiens
  CDR3 for alpha chain variable domain of TCR clone 25565 (TRAV3, TRAJ28)
CAVREAYSGAGSYRLTF

SEQ ID NO: 51130 - protein, 13 aa, Homo sapiens
  CDR3 for beta chain variable domain of TCR clone 25565 (TRBV19, TRBJ1-2)
CASSVPGQDGYIF

SEQ ID NO: 51131 - protein, 11 aa, Homo sapiens
  CDR3 for alpha chain variable domain of TCR clone 25566 (TRAV1-2, TRAJ40)
CAVPGTYKYIF

SEQ ID NO: 51132 - protein, 16 aa, Homo sapiens
  CDR3 for beta chain variable domain of TCR clone 25566 (TRBV29-1, TRBJ2-7)
CSVEVVGASGSYEQYF

SEQ ID NO: 51133 - protein, 15 aa, Homo sapiens
  CDR3 for alpha chain variable domain of TCR clone 25567 (TRAV1-2, TRAJ9)
CAVRDDGTGGFKTIF

SEQ ID NO: 51134 - protein, 14 aa, Homo sapiens
  CDR3 for beta chain variable domain of TCR clone 25567 (TRBV7-6, TRBJ2-3)
CASSLGTVTDTQYF

SEQ ID NO: 51135 - protein, 14 aa, Homo sapiens
  CDR3 for alpha chain variable domain of TCR clone 25568 (TRAV12-2, TRAJ29)
CVVRRNSGNTPLVF

SEQ ID NO: 51136 - protein, 13 aa, Homo sapiens
  CDR3 for beta chain variable domain of TCR clone 25568 (TRBV12-4, TRBJ2-1)
CASSHYTDNEQFF

SEQ ID NO: 51137 - protein, 14 aa, Homo sapiens
  CDR3 for alpha chain variable domain of TCR clone 25569 (TRAV12-2, TRAJ44)
CAVNPAGTPSKLTF

SEQ ID NO: 51138 - protein, 13 aa, Homo sapiens
  CDR3 for beta chain variable domain of TCR clone 25569 (TRBV20-1, TRBJ1-6)
CSAPLGVGSPLHF

SEQ ID NO: 51139 - protein, 12 aa, Homo sapiens
  CDR3 for alpha chain variable domain of TCR clone 25570 (TRAV17, TRAJ57)
CATDGGSEKLVF

SEQ ID NO: 51140 - protein, 12 aa, Homo sapiens
  CDR3 for beta chain variable domain of TCR clone 25570 (TRBV11-2, TRBJ2-1)
CASSPGNNEQFF

SEQ ID NO: 51141 - protein, 14 aa, Homo sapiens
  CDR3 for alpha chain variable domain of TCR clone 25571 (TRAV13-1, TRAJ40)
CAASMTSGAYKYIF

SEQ ID NO: 51142 - protein, 15 aa, Homo sapiens
  CDR3 for beta chain variable domain of TCR clone 25571 (TRBV7-3, TRBJ2-1)
CASSPTGGGEVEQFF

SEQ ID NO: 51143 - protein, 14 aa, Homo sapiens
  CDR3 for alpha chain variable domain of TCR clone 25572 (TRAV1-2, TRAJ16)
CAVNRFSDGQKLLF

SEQ ID NO: 51144 - protein, 18 aa, Homo sapiens
  CDR3 for beta chain variable domain of TCR clone 25572 (TRBV20-1, TRBJ2-3)
CSASGLAGEPGTTDTQYF

SEQ ID NO: 51145 - protein, 13 aa, Homo sapiens
  CDR3 for alpha chain variable domain of TCR clone 25573 (TRAV8-3, TRAJ28)
CAVGAVGSYQLTF

SEQ ID NO: 51146 - protein, 14 aa, Homo sapiens
  CDR3 for beta chain variable domain of TCR clone 25573 (TRBV7-2, TRBJ2-7)
CASRSQGAAYEHYF

SEQ ID NO: 51147 - protein, 13 aa, Homo sapiens
  CDR3 for alpha chain variable domain of TCR clone 25574 (TRAV2, TRAJ40)
CAVVTSGTYKYIF

SEQ ID NO: 51148 - protein, 14 aa, Homo sapiens
  CDR3 for beta chain variable domain of TCR clone 25574 (TRBV19, TRBJ2-1)
CASPTFVLSREQFF

SEQ ID NO: 51149 - protein, 14 aa, Homo sapiens
  CDR3 for alpha chain variable domain of TCR clone 25575 (TRAV12-1, TRAJ17)
CVVNYKAAGNKITF

SEQ ID NO: 51150 - protein, 17 aa, Homo sapiens
  CDR3 for beta chain variable domain of TCR clone 25575 (TRBV20-1, TRBJ2-1)
CSASSSGLAGSYNEQFF

SEQ ID NO: 51151 - protein, 14 aa, Homo sapiens
  CDR3 for alpha chain variable domain of TCR clone 25576 (TRAV1-2, TRAJ8)
CAVREDTGFQKLVF

SEQ ID NO: 51152 - protein, 17 aa, Homo sapiens
  CDR3 for beta chain variable domain of TCR clone 25576 (TRBV7-3, TRBJ2-3)
RASSLMKRMRGADTQYF

SEQ ID NO: 51153 - protein, 17 aa, Homo sapiens
  CDR3 for alpha chain variable domain of TCR clone 25577 (TRAV8-6, TRAJ58)
CAVSSWVGETSGSRLTF

SEQ ID NO: 51154 - protein, 14 aa, Homo sapiens
  CDR3 for beta chain variable domain of TCR clone 25577 (TRBV4-2, TRBJ2-1)
CASGLDRAYSEQFF

SEQ ID NO: 51155 - protein, 13 aa, Homo sapiens
  CDR3 for alpha chain variable domain of TCR clone 25578 (TRAV1-2, TRAJ12)
CAVSMDSSYKLIF

SEQ ID NO: 51156 - protein, 14 aa, Homo sapiens
  CDR3 for beta chain variable domain of TCR clone 25578 (TRBV27, TRBJ2-5)
CQQFNTFWGETQYF

SEQ ID NO: 51157 - protein, 13 aa, Homo sapiens
  CDR3 for alpha chain variable domain of TCR clone 25579 (TRAV12-1, TRAJ31)
CVVNMNNNARLMF

SEQ ID NO: 51158 - protein, 15 aa, Homo sapiens
  CDR3 for beta chain variable domain of TCR clone 25579 (TRBV4-1, TRBJ1-2)
RASSQGQGAAYGYTF

SEQ ID NO: 51159 - protein, 14 aa, Homo sapiens
  CDR3 for alpha chain variable domain of TCR clone 25580 (TRAV12-1, TRAJ30)
CVVNIGGRDDKIIF

SEQ ID NO: 51160 - protein, 13 aa, Homo sapiens
  CDR3 for beta chain variable domain of TCR clone 25580 (TRBV12-5, TRBJ2-1)
CASGLGRRNEQFF

SEQ ID NO: 51161 - protein, 14 aa, Homo sapiens
  CDR3 for alpha chain variable domain of TCR clone 25581 (TRAV12-2, TRAJ11)
CAVNRESGYSTLTF

SEQ ID NO: 51162 - protein, 10 aa, Homo sapiens
  CDR3 for beta chain variable domain of TCR clone 25581 (TRBV20-1, TRBJ2-5)
CSARFGTQYF

SEQ ID NO: 51163 - protein, 12 aa, Homo sapiens
  CDR3 for alpha chain variable domain of TCR clone 25582 (TRAV23/DV6, TRAJ58)
CAARLLRGETSG

SEQ ID NO: 51164 - protein, 15 aa, Homo sapiens
  CDR3 for beta chain variable domain of TCR clone 25582 (TRBV9, TRBJ1-6)
CASSVAGTGDSPLHF

SEQ ID NO: 51165 - protein, 15 aa, Homo sapiens
  CDR3 for alpha chain variable domain of TCR clone 25583 (TRAV8-3, TRAJ11)
CAVGMLNSGYSTLTF

SEQ ID NO: 51166 - protein, 16 aa, Homo sapiens
  CDR3 for beta chain variable domain of TCR clone 25583 (TRBV7-9, TRBJ1-2)
CASSLGFSSGEDGYTF

SEQ ID NO: 51167 - protein, 16 aa, Homo sapiens
  CDR3 for alpha chain variable domain of TCR clone 25584 (TRAV12-3, TRAJ52)
CAVSNAGGTSYGKLTF

SEQ ID NO: 51168 - protein, 16 aa, Homo sapiens
  CDR3 for beta chain variable domain of TCR clone 25584 (TRBV6-6, TRBJ2-1)
CASSYSFSGPYNEQFF

SEQ ID NO: 51169 - protein, 14 aa, Homo sapiens
  CDR3 for alpha chain variable domain of TCR clone 25585 (TRAV13-1, TRAJ9)
CAASALTGGFKTIF

SEQ ID NO: 51170 - protein, 15 aa, Homo sapiens
  CDR3 for beta chain variable domain of TCR clone 25585 (TRBV20-1, TRBJ2-7)
CSARDRVSGMDEQYF

SEQ ID NO: 51171 - protein, 23 aa, Homo sapiens
  CDR3 for alpha chain variable domain of TCR clone 25586 (TRAV2, TRAJ13)
CASGGYQKVTLELEQSSKSSQIS

SEQ ID NO: 51172 - protein, 16 aa, Homo sapiens
  CDR3 for beta chain variable domain of TCR clone 25586 (TRBV6-1, TRBJ2-5)
CASSETLDRGAETQYF

SEQ ID NO: 51173 - protein, 17 aa, Homo sapiens
  CDR3 for alpha chain variable domain of TCR clone 25587 (TRAV3, TRAJ42)
CAVRDRDYGGSQGNFIF

SEQ ID NO: 51174 - protein, 13 aa, Homo sapiens
  CDR3 for beta chain variable domain of TCR clone 25587 (TRBV20-1, TRBJ2-5)
CSARRGTGATQYF

SEQ ID NO: 51175 - protein, 13 aa, Homo sapiens
  CDR3 for alpha chain variable domain of TCR clone 25588 (TRAV12-1, TRAJ16)
CVVDGPDGQKLLF

SEQ ID NO: 51176 - protein, 13 aa, Homo sapiens
  CDR3 for beta chain variable domain of TCR clone 25588 (TRBV2, TRBJ1-1)
CARNPTGGFHAFF

SEQ ID NO: 51177 - protein, 12 aa, Homo sapiens
  CDR3 for alpha chain variable domain of TCR clone 25589 (TRAV36/DV7, TRAJ54)
CAVVRGAQKLVF

SEQ ID NO: 51178 - protein, 14 aa, Homo sapiens
  CDR3 for beta chain variable domain of TCR clone 25589 (TRBV7-3, TRBJ1-1)
CASGLKGGNTEAFF

SEQ ID NO: 51179 - protein, 17 aa, Homo sapiens
  CDR3 for alpha chain variable domain of TCR clone 25590 (TRAV8-6, TRAJ58)
CAVSSWVGETSVSRLTF

SEQ ID NO: 51180 - protein, 14 aa, Homo sapiens
  CDR3 for beta chain variable domain of TCR clone 25590 (TRBV4-2, TRBJ2-1)
CASGLDRAYNEQFF

SEQ ID NO: 51181 - protein, 11 aa, Homo sapiens
  CDR3 for alpha chain variable domain of TCR clone 25591 (TRAV2, TRAJ33)
CAVESNYQLIW

SEQ ID NO: 51182 - protein, 15 aa, Homo sapiens
  CDR3 for beta chain variable domain of TCR clone 25591 (TRBV19, TRBJ1-5)
CASSIVWADNQPQHF

SEQ ID NO: 51183 - protein, 16 aa, Homo sapiens
  CDR3 for alpha chain variable domain of TCR clone 25592 (TRAV13-1, TRAJ48)
CAASIFGNFGNEKLTF

SEQ ID NO: 51184 - protein, 16 aa, Homo sapiens
  CDR3 for beta chain variable domain of TCR clone 25592 (TRBV7-2, TRBJ2-6)
CASSERRASGTNVLTF

SEQ ID NO: 51185 - protein, 15 aa, Homo sapiens
  CDR3 for alpha chain variable domain of TCR clone 25593 (TRAV3, TRAJ4)
CAVRAGTGGYNKLIF

SEQ ID NO: 51186 - protein, 16 aa, Homo sapiens
  CDR3 for beta chain variable domain of TCR clone 25593 (TRBV27, TRBJ2-2)
CASSSSGVSNTGELFF

SEQ ID NO: 51187 - protein, 13 aa, Homo sapiens
  CDR3 for alpha chain variable domain of TCR clone 25594 (TRAV2, TRAJ40)
WAVVTSGTYKYIF

SEQ ID NO: 51188 - protein, 15 aa, Homo sapiens
  CDR3 for beta chain variable domain of TCR clone 25594 (TRBV11-3, TRBJ2-3)
CASLKDGREGDTQYF

SEQ ID NO: 51189 - protein, 14 aa, Homo sapiens
  CDR3 for alpha chain variable domain of TCR clone 25595 (TRAV1-2, TRAJ8)
CAVREDTGFQKLVF

SEQ ID NO: 51190 - protein, 15 aa, Homo sapiens
  CDR3 for beta chain variable domain of TCR clone 25595 (TRBV28, TRBJ2-6)
CASSLAGSGANDLTF

SEQ ID NO: 51191 - protein, 12 aa, Homo sapiens
  CDR3 for alpha chain variable domain of TCR clone 25596 (TRAV12-2, TRAJ8)
CAVNTGFQKLVF

SEQ ID NO: 51192 - protein, 15 aa, Homo sapiens
  CDR3 for beta chain variable domain of TCR clone 25596 (TRBV7-8, TRBJ1-5)
CASSLERRGLEPQHL

SEQ ID NO: 51193 - protein, 12 aa, Homo sapiens
  CDR3 for alpha chain variable domain of TCR clone 25597 (TRAV21, TRAJ31)
CAVWGNNARLTF

SEQ ID NO: 51194 - protein, 16 aa, Homo sapiens
  CDR3 for beta chain variable domain of TCR clone 25597 (TRBV27, TRBJ2-5)
CASSYGPGGQKETQYF

SEQ ID NO: 51195 - protein, 13 aa, Homo sapiens
  CDR3 for alpha chain variable domain of TCR clone 25598 (TRAV35, TRAJ42)
CAGFPGSQGNLIF

SEQ ID NO: 51196 - protein, 13 aa, Homo sapiens
  CDR3 for beta chain variable domain of TCR clone 25598 (TRBV29-1, TRBJ2-1)
CSVEGGRVDEQFF

SEQ ID NO: 51197 - protein, 13 aa, Homo sapiens
  CDR3 for alpha chain variable domain of TCR clone 25599 (TRAV1-2, TRAJ9)
CAALNTGGFKTIF

SEQ ID NO: 51198 - protein, 14 aa, Homo sapiens
  CDR3 for beta chain variable domain of TCR clone 25599 (TRBV6-1, TRBJ1-3)
CASVQGGGGNTIYF

SEQ ID NO: 51199 - protein, 16 aa, Homo sapiens
  CDR3 for alpha chain variable domain of TCR clone 25600 (TRAV3, TRAJ37)
CAVRGKGSGNTGNLIF

SEQ ID NO: 51200 - protein, 13 aa, Homo sapiens
  CDR3 for beta chain variable domain of TCR clone 25600 (TRBV14, TRBJ2-7)
CASSQDRRYEQYF

SEQ ID NO: 51201 - protein, 11 aa, Homo sapiens
  CDR3 for alpha chain variable domain of TCR clone 25601 (TRAV2, TRAJ21)
CAVFNFNKFYL

SEQ ID NO: 51202 - protein, 14 aa, Homo sapiens
  CDR3 for beta chain variable domain of TCR clone 25601 (TRBV15, TRBJ2-3)
CATRSGTSTDTQYF

SEQ ID NO: 51203 - protein, 13 aa, Homo sapiens
  CDR3 for alpha chain variable domain of TCR clone 25602 (TRAV35, TRAJ42)
CAGFPGSQGNLIF

SEQ ID NO: 51204 - protein, 14 aa, Homo sapiens
  CDR3 for beta chain variable domain of TCR clone 25602 (TRBV4-1, TRBJ2-2)
CASSQAVNTGGLFF

SEQ ID NO: 51205 - protein, 11 aa, Homo sapiens
  CDR3 for alpha chain variable domain of TCR clone 25603 (TRAV2, TRAJ33)
CAVDSNYQLIW

SEQ ID NO: 51206 - protein, 17 aa, Homo sapiens
  CDR3 for beta chain variable domain of TCR clone 25603 (TRBV11-2, TRBJ2-1)
CASSLYPPGVEYNEQFF

SEQ ID NO: 51207 - protein, 19 aa, Homo sapiens
  CDR3 for alpha chain variable domain of TCR clone 25604 (TRAV26-1, TRAJ52)
CIVRAHCNAGGTSYGKLTF

SEQ ID NO: 51208 - protein, 15 aa, Homo sapiens
  CDR3 for beta chain variable domain of TCR clone 25604 (TRBV29-1, TRBJ2-1)
CSGRDRKSSYNEQFF

SEQ ID NO: 51209 - protein, 14 aa, Homo sapiens
  CDR3 for alpha chain variable domain of TCR clone 25605 (TRAV12-3, TRAJ58)
CAVSTETSGSRLTF

SEQ ID NO: 51210 - protein, 12 aa, Homo sapiens
  CDR3 for beta chain variable domain of TCR clone 25605 (TRBV7-8, TRBJ2-7)
CASSLGDREQYF

SEQ ID NO: 51211 - protein, 13 aa, Homo sapiens
  CDR3 for alpha chain variable domain of TCR clone 25606 (TRAV27, TRAJ41)
CAGEGNSGYALNF

SEQ ID NO: 51212 - protein, 14 aa, Homo sapiens
  CDR3 for beta chain variable domain of TCR clone 25606 (TRBV19, TRBJ2-1)
CASPTFVLSGEQFF

SEQ ID NO: 51213 - protein, 19 aa, Homo sapiens
  CDR3 for alpha chain variable domain of TCR clone 25607 (TRAV2, TRAJ20)
ILQVREADAAVYRDCKLSF

SEQ ID NO: 51214 - protein, 17 aa, Homo sapiens
  CDR3 for beta chain variable domain of TCR clone 25607 (TRBV13, TRBJ2-3)
CASSLSRVAGGRNTQYF

SEQ ID NO: 51215 - protein, 13 aa, Homo sapiens
  CDR3 for alpha chain variable domain of TCR clone 25608 (TRAV35, TRAJ42)
CAGFPGSQGNLIF

SEQ ID NO: 51216 - protein, 14 aa, Homo sapiens
  CDR3 for beta chain variable domain of TCR clone 25608 (TRBV19, TRBJ2-1)
CASPTFVLSGDQFF

SEQ ID NO: 51217 - protein, 12 aa, Homo sapiens
  CDR3 for alpha chain variable domain of TCR clone 25609 (TRAV21, TRAJ11)
CAATSGYSTLTF

SEQ ID NO: 51218 - protein, 14 aa, Homo sapiens
  CDR3 for beta chain variable domain of TCR clone 25609 (TRBV20-1, TRBJ2-7)
CSAPELAEVGEQYF

SEQ ID NO: 51219 - protein, 16 aa, Homo sapiens
  CDR3 for alpha chain variable domain of TCR clone 25610 (TRAV3, TRAJ28)
CAVLPRSGAGSYQLTF

SEQ ID NO: 51220 - protein, 14 aa, Homo sapiens
  CDR3 for beta chain variable domain of TCR clone 25610 (TRBV19, TRBJ2-1)
CASPTFVLSGEQFF

SEQ ID NO: 51221 - protein, 14 aa, Homo sapiens
  CDR3 for alpha chain variable domain of TCR clone 25611 (TRAV13-1, TRAJ44)
CAAKATGTASKLTF

SEQ ID NO: 51222 - protein, 13 aa, Homo sapiens
  CDR3 for beta chain variable domain of TCR clone 25611 (TRBV5-5, TRBJ1-2)
CASSFGRGEDYTF

SEQ ID NO: 51223 - protein, 12 aa, Homo sapiens
  CDR3 for alpha chain variable domain of TCR clone 25612 (TRAV13-2, TRAJ23)
CAERHRGGTLIF

SEQ ID NO: 51224 - protein, 16 aa, Homo sapiens
  CDR3 for beta chain variable domain of TCR clone 25612 (TRBV20-1, TRBJ1-4)
CSAPGQGLLTNEKLFF

SEQ ID NO: 51225 - protein, 18 aa, Homo sapiens
  CDR3 for alpha chain variable domain of TCR clone 25613 (TRAV13-1, TRAJ52)
CAASKRSAGGTSYGKLTF

SEQ ID NO: 51226 - protein, 16 aa, Homo sapiens
  CDR3 for beta chain variable domain of TCR clone 25613 (TRBV13, TRBJ2-2)
CASSPRTGEHTGELFF

SEQ ID NO: 51227 - protein, 11 aa, Homo sapiens
  CDR3 for alpha chain variable domain of TCR clone 25614 (TRAV12-1, TRAJ33)
CVVMPRIATIS

SEQ ID NO: 51228 - protein, 15 aa, Homo sapiens
  CDR3 for beta chain variable domain of TCR clone 25614 (TRBV27, TRBJ2-1)
CASSNGGGSSNEQFF

SEQ ID NO: 51229 - protein, 11 aa, Homo sapiens
  CDR3 for alpha chain variable domain of TCR clone 25615 (TRAV3, TRAJ21)
CAVGNFNKFYF

SEQ ID NO: 51230 - protein, 16 aa, Homo sapiens
  CDR3 for beta chain variable domain of TCR clone 25615 (TRBV19, TRBJ2-1)
CASSQAGPSSYNEQFF

SEQ ID NO: 51231 - protein, 16 aa, Homo sapiens
  CDR3 for alpha chain variable domain of TCR clone 25616 (TRAV16, TRAJ52)
CALSGVGGTSYGKLTF

SEQ ID NO: 51232 - protein, 14 aa, Homo sapiens
  CDR3 for beta chain variable domain of TCR clone 25616 (TRBV19, TRBJ1-2)
CASSLQGQAYGYAF

SEQ ID NO: 51233 - protein, 10 aa, Homo sapiens
  CDR3 for alpha chain variable domain of TCR clone 25617 (TRAV23/DV6, TRAJ57)
CAASSTLSQG

SEQ ID NO: 51234 - protein, 13 aa, Homo sapiens
  CDR3 for beta chain variable domain of TCR clone 25617 (TRBV10-3, TRBJ2-7)
CASKLAVNYEQYF

SEQ ID NO: 51235 - protein, 13 aa, Homo sapiens
  CDR3 for alpha chain variable domain of TCR clone 25618 (TRAV27, TRAJ56)
CAGKPGANSKLTF

SEQ ID NO: 51236 - protein, 18 aa, Homo sapiens
  CDR3 for beta chain variable domain of TCR clone 25618 (TRBV11-2, TRBJ2-3)
CASSLGGASRRAPNTQYF

SEQ ID NO: 51237 - protein, 12 aa, Homo sapiens
  CDR3 for alpha chain variable domain of TCR clone 25619 (TRAV13-1, TRAJ27)
CAAHTNAGRSTF

SEQ ID NO: 51238 - protein, 14 aa, Homo sapiens
  CDR3 for beta chain variable domain of TCR clone 25619 (TRBV19, TRBJ2-2)
CASSGQGIAGELFF

SEQ ID NO: 51239 - protein, 13 aa, Homo sapiens
  CDR3 for alpha chain variable domain of TCR clone 25620 (TRAV2, TRAJ21)
CAVEDLNFDKFYF

SEQ ID NO: 51240 - protein, 15 aa, Homo sapiens
  CDR3 for beta chain variable domain of TCR clone 25620 (TRBV28, TRBJ2-5)
CASSPGQGSIETQYF

SEQ ID NO: 51241 - protein, 14 aa, Homo sapiens
  CDR3 for alpha chain variable domain of TCR clone 25621 (TRAV26-1, TRAJ38)
CIADNAGNNRKLIW

SEQ ID NO: 51242 - protein, 13 aa, Homo sapiens
  CDR3 for beta chain variable domain of TCR clone 25621 (TRBV7-2, TRBJ2-2)
CASSLAVTGELFF

SEQ ID NO: 51243 - protein, 13 aa, Homo sapiens
  CDR3 for alpha chain variable domain of TCR clone 25622 (TRAV12-3, TRAJ40)
CAMSDSGTYKYIL

SEQ ID NO: 51244 - protein, 14 aa, Homo sapiens
  CDR3 for beta chain variable domain of TCR clone 25622 (TRBV7-2, TRBJ1-5)
CASSTQGAGQPQHF

SEQ ID NO: 51245 - protein, 12 aa, Homo sapiens
  CDR3 for alpha chain variable domain of TCR clone 25623 (TRAV8-3, TRAJ41)
CAAALSGYALNF

SEQ ID NO: 51246 - protein, 17 aa, Homo sapiens
  CDR3 for beta chain variable domain of TCR clone 25623 (TRBV7-3, TRBJ2-2)
CASSLSGTSGGTGELFF

SEQ ID NO: 51247 - protein, 12 aa, Homo sapiens
  CDR3 for alpha chain variable domain of TCR clone 25624 (TRAV12-3, TRAJ17)
CAMTLTGNKLTF

SEQ ID NO: 51248 - protein, 13 aa, Homo sapiens
  CDR3 for beta chain variable domain of TCR clone 25624 (TRBV7-3, TRBJ2-5)
CASSFRGGETQYF

SEQ ID NO: 51249 - protein, 13 aa, Homo sapiens
  CDR3 for alpha chain variable domain of TCR clone 25625 (TRAV3, TRAJ20)
CCEAFCNDYKLSF

SEQ ID NO: 51250 - protein, 16 aa, Homo sapiens
  CDR3 for beta chain variable domain of TCR clone 25625 (TRBV7-9, TRBJ1-1)
CASSLTQVRSNTEAFF

SEQ ID NO: 51251 - protein, 18 aa, Homo sapiens
  CDR3 for alpha chain variable domain of TCR clone 25626 (TRAV12-3, TRAJ52)
CAMSRTNAGGTSDGKLTF

SEQ ID NO: 51252 - protein, 17 aa, Homo sapiens
  CDR3 for beta chain variable domain of TCR clone 25626 (TRBV7-3, TRBJ2-3)
CASSLMKRMRGADTQYF

SEQ ID NO: 51253 - protein, 16 aa, Homo sapiens
  CDR3 for alpha chain variable domain of TCR clone 25627 (TRAV8-2, TRAJ7)
CVVSEGPYYGNNRPAF

SEQ ID NO: 51254 - protein, 15 aa, Homo sapiens
  CDR3 for beta chain variable domain of TCR clone 25627 (TRBV27, TRBJ2-3)
CASSLGLAATDTQYF

SEQ ID NO: 51255 - protein, 13 aa, Homo sapiens
  CDR3 for alpha chain variable domain of TCR clone 25628 (TRAV26-2, TRAJ43)
CILRAVNNNDMRF

SEQ ID NO: 51256 - protein, 14 aa, Homo sapiens
  CDR3 for beta chain variable domain of TCR clone 25628 (TRBV19, TRBJ2-1)
CASPTLVLSGEQFF

SEQ ID NO: 51257 - protein, 16 aa, Homo sapiens
  CDR3 for alpha chain variable domain of TCR clone 25629 (TRAV30, TRAJ24)
CGTEIVDADSWGKFQF

SEQ ID NO: 51258 - protein, 15 aa, Homo sapiens
  CDR3 for beta chain variable domain of TCR clone 25629 (TRBV6-6, TRBJ2-7)
CASSYSYGGSYEQYF

SEQ ID NO: 51259 - protein, 14 aa, Homo sapiens
  CDR3 for alpha chain variable domain of TCR clone 25630 (TRAV26-1, TRAJ26)
CIVRATFLGQNFFF

SEQ ID NO: 51260 - protein, 16 aa, Homo sapiens
  CDR3 for beta chain variable domain of TCR clone 25630 (TRBV12-4, TRBJ2-7)
CASRSTGTGPSYEQYF

SEQ ID NO: 51261 - protein, 14 aa, Homo sapiens
  CDR3 for alpha chain variable domain of TCR clone 25631 (TRAV12-2, TRAJ40)
CAVKIPSGTYKYIF

SEQ ID NO: 51262 - protein, 16 aa, Homo sapiens
  CDR3 for beta chain variable domain of TCR clone 25631 (TRBV20-1, TRBJ1-4)
CSAPGQGLLTNEKLFF

SEQ ID NO: 51263 - protein, 13 aa, Homo sapiens
  CDR3 for alpha chain variable domain of TCR clone 25632 (TRAV21, TRAJ57)
CAVTQGGSEKLVF

SEQ ID NO: 51264 - protein, 19 aa, Homo sapiens
  CDR3 for beta chain variable domain of TCR clone 25632 (TRBV29-1, TRBJ2-7)
SAALKMLRTVRPTSSTSGR

SEQ ID NO: 51265 - protein, 14 aa, Homo sapiens
  CDR3 for alpha chain variable domain of TCR clone 25633 (TRAV26-1, TRAJ39)
CIVRGSRAGNMLTF

SEQ ID NO: 51266 - protein, 15 aa, Homo sapiens
  CDR3 for beta chain variable domain of TCR clone 25633 (TRBV7-9, TRBJ1-5)
CASSQGHQPNKPQHF

SEQ ID NO: 51267 - protein, 11 aa, Homo sapiens
  CDR3 for alpha chain variable domain of TCR clone 25634 (TRAV2, TRAJ21)
CAVFNFNKFYF

SEQ ID NO: 51268 - protein, 12 aa, Homo sapiens
  CDR3 for beta chain variable domain of TCR clone 25634 (TRBV11-2, TRBJ2-2)
CASSLGGGELFF

SEQ ID NO: 51269 - protein, 11 aa, Homo sapiens
  CDR3 for alpha chain variable domain of TCR clone 25635 (TRAV3, TRAJ21)
CAVGNFNKLYF

SEQ ID NO: 51270 - protein, 17 aa, Homo sapiens
  CDR3 for beta chain variable domain of TCR clone 25635 (TRBV24-1, TRBJ2-1)
CATSDVPTSGTYNEQFF

SEQ ID NO: 51271 - protein, 13 aa, Homo sapiens
  CDR3 for alpha chain variable domain of TCR clone 25636 (TRAV2, TRAJ40)
CAVVTSGTYKYIF

SEQ ID NO: 51272 - protein, 15 aa, Homo sapiens
  CDR3 for beta chain variable domain of TCR clone 25636 (TRBV28, TRBJ2-7)
CASSPGGRGFYEQYF

SEQ ID NO: 51273 - protein, 14 aa, Homo sapiens
  CDR3 for alpha chain variable domain of TCR clone 25637 (TRAV35, TRAJ22)
CAGLRPGSARQLTF

SEQ ID NO: 51274 - protein, 15 aa, Homo sapiens
  CDR3 for beta chain variable domain of TCR clone 25637 (TRBV12-4, TRBJ2-5)
CASSPPTGLQETQYF

SEQ ID NO: 51275 - protein, 14 aa, Homo sapiens
  CDR3 for alpha chain variable domain of TCR clone 25638 (TRAV12-1, TRAJ22)
CVVTTSGSARQLTF

SEQ ID NO: 51276 - protein, 15 aa, Homo sapiens
  CDR3 for beta chain variable domain of TCR clone 25638 (TRBV7-9, TRBJ1-5)
CASSQGHQPNQPQHF

SEQ ID NO: 51277 - protein, 13 aa, Homo sapiens
  CDR3 for alpha chain variable domain of TCR clone 25639 (TRAV13-1, TRAJ5)
CAASDTGRRALIF

SEQ ID NO: 51278 - protein, 12 aa, Homo sapiens
  CDR3 for beta chain variable domain of TCR clone 25639 (TRBV28, TRBJ2-3)
CASSLYRDTQYF

SEQ ID NO: 51279 - protein, 14 aa, Homo sapiens
  CDR3 for alpha chain variable domain of TCR clone 25640 (TRAV35, TRAJ22)
CAGLRPGAARQLTF

SEQ ID NO: 51280 - protein, 15 aa, Homo sapiens
  CDR3 for beta chain variable domain of TCR clone 25640 (TRBV12-4, TRBJ2-5)
CASSPPTGLQETQYF

SEQ ID NO: 51281 - protein, 23 aa, Homo sapiens
  CDR3 for alpha chain variable domain of TCR clone 25641 (TRAV26-1, )
CIADNAGNSHIQNPDPAVYQLRD

SEQ ID NO: 51282 - protein, 13 aa, Homo sapiens
  CDR3 for beta chain variable domain of TCR clone 25641 (TRBV20-1, TRBJ1-1)
CSARGGGNTEAFF

SEQ ID NO: 51283 - protein, 12 aa, Homo sapiens
  CDR3 for alpha chain variable domain of TCR clone 25642 (TRAV8-3, TRAJ20)
CAVGANDYKLSF

SEQ ID NO: 51284 - protein, 16 aa, Homo sapiens
  CDR3 for beta chain variable domain of TCR clone 25642 (TRBV19, TRBJ2-2)
CASRYPGTGATGELFF

SEQ ID NO: 51285 - protein, 15 aa, Homo sapiens
  CDR3 for alpha chain variable domain of TCR clone 25643 (TRAV3, TRAJ45)
CAVRTPWGGADGLTF

SEQ ID NO: 51286 - protein, 16 aa, Homo sapiens
  CDR3 for beta chain variable domain of TCR clone 25643 (TRBV6-1, TRBJ2-2)
CASSFRQGANTGELFF

SEQ ID NO: 51287 - protein, 14 aa, Homo sapiens
  CDR3 for alpha chain variable domain of TCR clone 25644 (TRAV1-1, TRAJ23)
CAVSIYNQGGKLIF

SEQ ID NO: 51288 - protein, 18 aa, Homo sapiens
  CDR3 for beta chain variable domain of TCR clone 25644 (TRBV11-2, TRBJ2-3)
CASSLGGASRGAPNTQYF

SEQ ID NO: 51289 - protein, 15 aa, Homo sapiens
  CDR3 for alpha chain variable domain of TCR clone 25645 (TRAV8-3, TRAJ41)
CAVGSNSNSGCALNF

SEQ ID NO: 51290 - protein, 17 aa, Homo sapiens
  CDR3 for beta chain variable domain of TCR clone 25645 (TRBV25-1, TRBJ2-1)
CASSAYGQGRGVYEQFF

SEQ ID NO: 51291 - protein, 18 aa, Homo sapiens
  CDR3 for alpha chain variable domain of TCR clone 25646 (TRAV21, TRAJ52)
CAVRPSPAGGTSYGKLTF

SEQ ID NO: 51292 - protein, 16 aa, Homo sapiens
  CDR3 for beta chain variable domain of TCR clone 25646 (TRBV19, TRBJ2-1)
CASSKAGPSSYSEQFF

SEQ ID NO: 51293 - protein, 14 aa, Homo sapiens
  CDR3 for alpha chain variable domain of TCR clone 25647 (TRAV26-1, TRAJ45)
CIEVTGGGADGITF

SEQ ID NO: 51294 - protein, 13 aa, Homo sapiens
  CDR3 for beta chain variable domain of TCR clone 25647 (TRBV7-6, TRBJ1-2)
CASSLVADYGYTF

SEQ ID NO: 51295 - protein, 15 aa, Homo sapiens
  CDR3 for alpha chain variable domain of TCR clone 25648 (TRAV1-2, TRAJ38)
CAVRENAGNNRKLIW

SEQ ID NO: 51296 - protein, 15 aa, Homo sapiens
  CDR3 for beta chain variable domain of TCR clone 25648 (TRBV12-4, TRBJ2-7)
CASSSGTGKWYEQYF

SEQ ID NO: 51297 - protein, 15 aa, Homo sapiens
  CDR3 for alpha chain variable domain of TCR clone 25649 (TRAV8-3, TRAJ32)
CAVGPYGGATNKPIF

SEQ ID NO: 51298 - protein, 14 aa, Homo sapiens
  CDR3 for beta chain variable domain of TCR clone 25649 (TRBV29-1, TRBJ2-2)
CSVLAETNTGELFF

SEQ ID NO: 51299 - protein, 14 aa, Homo sapiens
  CDR3 for alpha chain variable domain of TCR clone 25650 (TRAV12-2, TRAJ40)
CAVKIPSGTYKYMF

SEQ ID NO: 51300 - protein, 14 aa, Homo sapiens
  CDR3 for beta chain variable domain of TCR clone 25650 (TRBV20-1, TRBJ1-1)
CSAQTRIGGTEAFF

SEQ ID NO: 51301 - protein, 14 aa, Homo sapiens
  CDR3 for alpha chain variable domain of TCR clone 25651 (TRAV1-2, TRAJ8)
CAVREDTGFQKLVF

SEQ ID NO: 51302 - protein, 12 aa, Homo sapiens
  CDR3 for beta chain variable domain of TCR clone 25651 (TRBV2, TRBJ2-1)
CAYGPPGNEQFL

SEQ ID NO: 51303 - protein, 11 aa, Homo sapiens
  CDR3 for alpha chain variable domain of TCR clone 25652 (TRAV25, TRAJ5)
CAGGGQESTYF

SEQ ID NO: 51304 - protein, 15 aa, Homo sapiens
  CDR3 for beta chain variable domain of TCR clone 25652 (TRBV19, TRBJ2-4)
CASRGPRRGENIQYF

SEQ ID NO: 51305 - protein, 15 aa, Homo sapiens
  CDR3 for alpha chain variable domain of TCR clone 25653 (TRAV12-3, TRAJ6)
CAMSATTGGSYIPTF

SEQ ID NO: 51306 - protein, 13 aa, Homo sapiens
  CDR3 for beta chain variable domain of TCR clone 25653 (TRBV4-2, TRBJ1-1)
CASSQAGNTEAFF

SEQ ID NO: 51307 - protein, 14 aa, Homo sapiens
  CDR3 for alpha chain variable domain of TCR clone 25654 (TRAV20, TRAJ42)
CDVQAGGSQGNLIF

SEQ ID NO: 51308 - protein, 14 aa, Homo sapiens
  CDR3 for beta chain variable domain of TCR clone 25654 (TRBV28, TRBJ1-2)
CASRIQGANYGYTF

SEQ ID NO: 51309 - protein, 17 aa, Homo sapiens
  CDR3 for alpha chain variable domain of TCR clone 25655 (TRAV3, TRAJ42)
CAVRDRDYGGSQGNPIF

SEQ ID NO: 51310 - protein, 15 aa, Homo sapiens
  CDR3 for beta chain variable domain of TCR clone 25655 (TRBV2, TRBJ2-7)
CASSEGLARSYEQYF

SEQ ID NO: 51311 - protein, 14 aa, Homo sapiens
  CDR3 for alpha chain variable domain of TCR clone 25656 (TRAV35, TRAJ33)
CAGSSQDSNYQLIW

SEQ ID NO: 51312 - protein, 15 aa, Homo sapiens
  CDR3 for beta chain variable domain of TCR clone 25656 (TRBV20-1, TRBJ2-7)
CSAEYGTSGAYEQYF

SEQ ID NO: 51313 - protein, 14 aa, Homo sapiens
  CDR3 for alpha chain variable domain of TCR clone 25657 (TRAV1-2, TRAJ8)
CAVREDTGFQKLVF

SEQ ID NO: 51314 - protein, 15 aa, Homo sapiens
  CDR3 for beta chain variable domain of TCR clone 25657 (TRBV6-3, TRBJ2-7)
CASSSPGTVFDEQYF

SEQ ID NO: 51315 - protein, 15 aa, Homo sapiens
  CDR3 for alpha chain variable domain of TCR clone 25658 (TRAV34, TRAJ38)
CGADFTPGNNRKLIW

SEQ ID NO: 51316 - protein, 22 aa, Homo sapiens
  CDR3 for beta chain variable domain of TCR clone 25658 (TRBV12-5, TRBJ2-5)
CASGPRTSSNSQENPVLRARHA

SEQ ID NO: 51317 - protein, 15 aa, Homo sapiens
  CDR3 for alpha chain variable domain of TCR clone 25659 (TRAV29/DV5, TRAJ24)
CAASGATDSWGKFQF

SEQ ID NO: 51318 - protein, 20 aa, Homo sapiens
  CDR3 for beta chain variable domain of TCR clone 25659 (TRBV11-2, TRBJ2-2)
LRARPCISVPAASLPGSCFF

SEQ ID NO: 51319 - protein, 14 aa, Homo sapiens
  CDR3 for alpha chain variable domain of TCR clone 25660 (TRAV8-4, TRAJ13)
CSVTLSGGYQKVTF

SEQ ID NO: 51320 - protein, 14 aa, Homo sapiens
  CDR3 for beta chain variable domain of TCR clone 25660 (TRBV7-2, TRBJ1-2)
CASSQTGSTYGYTF

SEQ ID NO: 51321 - protein, 13 aa, Homo sapiens
  CDR3 for alpha chain variable domain of TCR clone 25661 (TRAV35, TRAJ36)
CAGPRIGANNLFF

SEQ ID NO: 51322 - protein, 15 aa, Homo sapiens
  CDR3 for beta chain variable domain of TCR clone 25661 (TRBV28, TRBJ2-5)
CASSPPWSHQETQYF

SEQ ID NO: 51323 - protein, 12 aa, Homo sapiens
  CDR3 for alpha chain variable domain of TCR clone 25662 (TRAV29/DV5, TRAJ43)
CAAPYNNNDMRF

SEQ ID NO: 51324 - protein, 17 aa, Homo sapiens
  CDR3 for beta chain variable domain of TCR clone 25662 (TRBV19, TRBJ2-6)
CASSTGQVFSGANDLTF

SEQ ID NO: 51325 - protein, 13 aa, Homo sapiens
  CDR3 for alpha chain variable domain of TCR clone 25663 (TRAV12-3, TRAJ13)
CAMSSGGYQKVTF

SEQ ID NO: 51326 - protein, 15 aa, Homo sapiens
  CDR3 for beta chain variable domain of TCR clone 25663 (TRBV7-9, TRBJ1-5)
CASSQGHQPNQPQHF

SEQ ID NO: 51327 - protein, 13 aa, Homo sapiens
  CDR3 for alpha chain variable domain of TCR clone 25664 (TRAV13-2, TRAJ40)
CAETLSGTYKYIF

SEQ ID NO: 51328 - protein, 16 aa, Homo sapiens
  CDR3 for beta chain variable domain of TCR clone 25664 (TRBV20-1, TRBJ2-1)
CSARDFGGRIGDEQFF

SEQ ID NO: 51329 - protein, 15 aa, Homo sapiens
  CDR3 for alpha chain variable domain of TCR clone 25665 (TRAV21, TRAJ38)
CAVRQDAGNNRKLIW

SEQ ID NO: 51330 - protein, 16 aa, Homo sapiens
  CDR3 for beta chain variable domain of TCR clone 25665 (TRBV4-2, TRBJ1-1)
CASRTLDGGGDTEAFF

SEQ ID NO: 51331 - protein, 13 aa, Homo sapiens
  CDR3 for alpha chain variable domain of TCR clone 25666 (TRAV8-3, TRAJ21)
CAVGAYNFNKFYS

SEQ ID NO: 51332 - protein, 16 aa, Homo sapiens
  CDR3 for beta chain variable domain of TCR clone 25666 (TRBV19, TRBJ2-1)
CASSMGGGSSYNEQFF

SEQ ID NO: 51333 - protein, 14 aa, Homo sapiens
  CDR3 for alpha chain variable domain of TCR clone 25667 (TRAV38-1, TRAJ40)
CALLPTSGTYKYIF

SEQ ID NO: 51334 - protein, 14 aa, Homo sapiens
  CDR3 for beta chain variable domain of TCR clone 25667 (TRBV25-1, TRBJ1-1)
CASTHLGGNTEAFF

SEQ ID NO: 51335 - protein, 14 aa, Homo sapiens
  CDR3 for alpha chain variable domain of TCR clone 25668 (TRAV38-2/DV8, TRAJ33)
CAYRILDSNYQLIW

SEQ ID NO: 51336 - protein, 17 aa, Homo sapiens
  CDR3 for beta chain variable domain of TCR clone 25668 (TRBV18, TRBJ2-1)
CASSPRVAGGSYNEQFF

SEQ ID NO: 51337 - protein, 20 aa, Homo sapiens
  CDR3 for alpha chain variable domain of TCR clone 25669 (TRAV26-1, TRAJ42)
CCVLLHRQTYYGGSQGNFIF

SEQ ID NO: 51338 - protein, 16 aa, Homo sapiens
  CDR3 for beta chain variable domain of TCR clone 25669 (TRBV7-3, TRBJ2-2)
CASSLKRGTLSGELFF

SEQ ID NO: 51339 - protein, 12 aa, Homo sapiens
  CDR3 for alpha chain variable domain of TCR clone 25670 (TRAV1-2, TRAJ33)
CAALDSNYQLIW

SEQ ID NO: 51340 - protein, 13 aa, Homo sapiens
  CDR3 for beta chain variable domain of TCR clone 25670 (TRBV19, TRBJ1-2)
CASSVPGQDGYTF

SEQ ID NO: 51341 - protein, 13 aa, Homo sapiens
  CDR3 for alpha chain variable domain of TCR clone 25671 (TRAV8-3, TRAJ48)
CAVVPFGNEKLTF

SEQ ID NO: 51342 - protein, 15 aa, Homo sapiens
  CDR3 for beta chain variable domain of TCR clone 25671 (TRBV11-2, TRBJ2-1)
CASSSPSARYNEQFF

SEQ ID NO: 51343 - protein, 14 aa, Homo sapiens
  CDR3 for alpha chain variable domain of TCR clone 25672 (TRAV8-4, TRAJ9)
CAVRINTGGFKNIF

SEQ ID NO: 51344 - protein, 15 aa, Homo sapiens
  CDR3 for beta chain variable domain of TCR clone 25672 (TRBV10-2, TRBJ2-6)
CASSEQGTGANVLTF

SEQ ID NO: 51345 - protein, 14 aa, Homo sapiens
  CDR3 for alpha chain variable domain of TCR clone 25673 (TRAV8-3, TRAJ4)
CAVGAAGGYNKLIF

SEQ ID NO: 51346 - protein, 15 aa, Homo sapiens
  CDR3 for beta chain variable domain of TCR clone 25673 (TRBV6-5, TRBJ2-1)
CANSYDAGAGNEQFF

SEQ ID NO: 51347 - protein, 14 aa, Homo sapiens
  CDR3 for alpha chain variable domain of TCR clone 25674 (TRAV1-2, TRAJ16)
CAVNRFSDGQKLLF

SEQ ID NO: 51348 - protein, 16 aa, Homo sapiens
  CDR3 for beta chain variable domain of TCR clone 25674 (TRBV6-3, TRBJ2-2)
CASSSPDRGDTGELFF

SEQ ID NO: 51349 - protein, 10 aa, Homo sapiens
  CDR3 for alpha chain variable domain of TCR clone 25675 (TRAV16, TRAJ22)
SAMYLRQLTF

SEQ ID NO: 51350 - protein, 13 aa, Homo sapiens
  CDR3 for beta chain variable domain of TCR clone 25675 (TRBV7-9, TRBJ1-2)
CASSLKQNYGYTF

SEQ ID NO: 51351 - protein, 16 aa, Homo sapiens
  CDR3 for alpha chain variable domain of TCR clone 25676 (TRAV16, TRAJ52)
CALSGVGGTSYGKLTF

SEQ ID NO: 51352 - protein, 14 aa, Homo sapiens
  CDR3 for beta chain variable domain of TCR clone 25676 (TRBV19, TRBJ1-2)
CASSLQGQAYGDTF

SEQ ID NO: 51353 - protein, 12 aa, Homo sapiens
  CDR3 for alpha chain variable domain of TCR clone 25677 (TRAV12-3, TRAJ20)
CAMVRGDYKLSF

SEQ ID NO: 51354 - protein, 14 aa, Homo sapiens
  CDR3 for beta chain variable domain of TCR clone 25677 (TRBV5-5, TRBJ1-5)
CASSGQGVEQPQHF

SEQ ID NO: 51355 - protein, 17 aa, Homo sapiens
  CDR3 for alpha chain variable domain of TCR clone 25678 (TRAV13-1, TRAJ31)
CAPRDRLMFGDGTQLVV

SEQ ID NO: 51356 - protein, 12 aa, Homo sapiens
  CDR3 for beta chain variable domain of TCR clone 25678 (TRBV7-9, TRBJ2-7)
SASSLEGYEQYF

SEQ ID NO: 51357 - protein, 13 aa, Homo sapiens
  CDR3 for alpha chain variable domain of TCR clone 25679 (TRAV2, TRAJ40)
CAVVTSGTYKYIF

SEQ ID NO: 51358 - protein, 14 aa, Homo sapiens
  CDR3 for beta chain variable domain of TCR clone 25679 (TRBV19, TRBJ2-1)
CASPTFLLSGEHFF

SEQ ID NO: 51359 - protein, 12 aa, Homo sapiens
  CDR3 for alpha chain variable domain of TCR clone 25680 (TRAV3, TRAJ20)
CAVRDGDYKLSF

SEQ ID NO: 51360 - protein, 16 aa, Homo sapiens
  CDR3 for beta chain variable domain of TCR clone 25680 (TRBV7-9, TRBJ2-1)
CASSDVAGGSYNEQFF

SEQ ID NO: 51361 - protein, 17 aa, Homo sapiens
  CDR3 for alpha chain variable domain of TCR clone 25681 (TRAV3, TRAJ42)
CAVRDRDYGGSQGNLIF

SEQ ID NO: 51362 - protein, 15 aa, Homo sapiens
  CDR3 for beta chain variable domain of TCR clone 25681 (TRBV2, TRBJ2-7)
CASSEGLARSYEQYS

SEQ ID NO: 51363 - protein, 14 aa, Homo sapiens
  CDR3 for alpha chain variable domain of TCR clone 25682 (TRAV2, TRAJ9)
CAVEDRSGGFKTIF

SEQ ID NO: 51364 - protein, 17 aa, Homo sapiens
  CDR3 for beta chain variable domain of TCR clone 25682 (TRBV4-1, TRBJ1-4)
CASSQEGPRGVEEKLFF

SEQ ID NO: 51365 - protein, 13 aa, Homo sapiens
  CDR3 for alpha chain variable domain of TCR clone 25683 (TRAV2, TRAJ15)
CAVASQAGTALIF

SEQ ID NO: 51366 - protein, 16 aa, Homo sapiens
  CDR3 for beta chain variable domain of TCR clone 25683 (TRBV5-1, TRBJ1-1)
CASSSGGNSLSTEAFF

SEQ ID NO: 51367 - protein, 14 aa, Homo sapiens
  CDR3 for alpha chain variable domain of TCR clone 25684 (TRAV17, TRAJ16)
CATADFSDGQKLLF

SEQ ID NO: 51368 - protein, 12 aa, Homo sapiens
  CDR3 for beta chain variable domain of TCR clone 25684 (TRBV24-1, TRBJ1-1)
CATLDPDTEAFF

SEQ ID NO: 51369 - protein, 14 aa, Homo sapiens
  CDR3 for alpha chain variable domain of TCR clone 25685 (TRAV35, TRAJ13)
CAGRSPGGYQKVTF

SEQ ID NO: 51370 - protein, 14 aa, Homo sapiens
  CDR3 for beta chain variable domain of TCR clone 25685 (TRBV19, TRBJ2-2)
CASSMVGLSGGLFF

SEQ ID NO: 51371 - protein, 17 aa, Homo sapiens
  CDR3 for alpha chain variable domain of TCR clone 25686 (TRAV27, TRAJ26)
CAGARAPLDNYGQNSVF

SEQ ID NO: 51372 - protein, 15 aa, Homo sapiens
  CDR3 for beta chain variable domain of TCR clone 25686 (TRBV11-2, TRBJ2-5)
CASSPRSGGLETQYF

SEQ ID NO: 51373 - protein, 12 aa, Homo sapiens
  CDR3 for alpha chain variable domain of TCR clone 25687 (TRAV12-3, TRAJ17)
CAMTLTGNKLTF

SEQ ID NO: 51374 - protein, 18 aa, Homo sapiens
  CDR3 for beta chain variable domain of TCR clone 25687 (TRBV20-1, TRBJ2-6)
CSAETTPTHGSGANVLTF

SEQ ID NO: 51375 - protein, 13 aa, Homo sapiens
  CDR3 for alpha chain variable domain of TCR clone 25688 (TRAV27, TRAJ57)
CRSAQGGSEKLVL

SEQ ID NO: 51376 - protein, 11 aa, Homo sapiens
  CDR3 for beta chain variable domain of TCR clone 25688 (TRBV11-2, TRBJ1-1)
CASSINTEAFF

SEQ ID NO: 51377 - protein, 13 aa, Homo sapiens
  CDR3 for alpha chain variable domain of TCR clone 25689 (TRAV24, TRAJ17)
CAPCKAAGNKLTF

SEQ ID NO: 51378 - protein, 19 aa, Homo sapiens
  CDR3 for beta chain variable domain of TCR clone 25689 (TRBV3-1, TRBJ2-5)
CASSQDSPINRGRRETQYF

SEQ ID NO: 51379 - protein, 13 aa, Homo sapiens
  CDR3 for alpha chain variable domain of TCR clone 25690 (TRAV21, TRAJ27)
CAARPGNAGKSTF

SEQ ID NO: 51380 - protein, 15 aa, Homo sapiens
  CDR3 for beta chain variable domain of TCR clone 25690 (TRBV19, TRBJ1-1)
CASTSGQIQNTEAFF

SEQ ID NO: 51381 - protein, 12 aa, Homo sapiens
  CDR3 for alpha chain variable domain of TCR clone 25691 (TRAV21, TRAJ31)
CVLAGNNARPMF

SEQ ID NO: 51382 - protein, 16 aa, Homo sapiens
  CDR3 for beta chain variable domain of TCR clone 25691 (TRBV27, TRBJ2-5)
CASSFGPGGTKETQYF

SEQ ID NO: 51383 - protein, 12 aa, Homo sapiens
  CDR3 for alpha chain variable domain of TCR clone 25692 (TRAV8-3, TRAJ20)
CAVGANDYKLSF

SEQ ID NO: 51384 - protein, 13 aa, Homo sapiens
  CDR3 for beta chain variable domain of TCR clone 25692 (TRBV4-2, TRBJ1-1)
CASSQAGNTEAFF

SEQ ID NO: 51385 - protein, 11 aa, Homo sapiens
  CDR3 for alpha chain variable domain of TCR clone 25693 (TRAV12-1, TRAJ8)
CVVTGFQKLIF

SEQ ID NO: 51386 - protein, 14 aa, Homo sapiens
  CDR3 for beta chain variable domain of TCR clone 25693 (TRBV19, TRBJ2-1)
CASGKSTQYNEQFF

SEQ ID NO: 51387 - protein, 11 aa, Homo sapiens
  CDR3 for alpha chain variable domain of TCR clone 25694 (TRAV17, TRAJ9)
CATTGGFKTIF

SEQ ID NO: 51388 - protein, 13 aa, Homo sapiens
  CDR3 for beta chain variable domain of TCR clone 25694 (TRBV7-3, TRBJ1-1)
CASSQDWGAEAFF

SEQ ID NO: 51389 - protein, 14 aa, Homo sapiens
  CDR3 for alpha chain variable domain of TCR clone 25695 (TRAV13-1, TRAJ35)
CAASKGGFGNVLHC

SEQ ID NO: 51390 - protein, 14 aa, Homo sapiens
  CDR3 for beta chain variable domain of TCR clone 25695 (TRBV7-8, TRBJ2-3)
CASSFPDGQDTQYF

SEQ ID NO: 51391 - protein, 17 aa, Homo sapiens
  CDR3 for alpha chain variable domain of TCR clone 25696 (TRAV2, TRAJ22)
ILQVREADAAEQRQLTF

SEQ ID NO: 51392 - protein, 16 aa, Homo sapiens
  CDR3 for beta chain variable domain of TCR clone 25696 (TRBV2, TRBJ2-5)
CASSETQGVGEGTQYF

SEQ ID NO: 51393 - protein, 13 aa, Homo sapiens
  CDR3 for alpha chain variable domain of TCR clone 25697 (TRAV20, TRAJ34)
CAVSSYNTDKLIS

SEQ ID NO: 51394 - protein, 13 aa, Homo sapiens
  CDR3 for beta chain variable domain of TCR clone 25697 (TRBV7-9, TRBJ1-2)
CASSLKQNYGYTF

SEQ ID NO: 51395 - protein, 13 aa, Homo sapiens
  CDR3 for alpha chain variable domain of TCR clone 25698 (TRAV17, TRAJ9)
CTTDYTGGFKTIF

SEQ ID NO: 51396 - protein, 14 aa, Homo sapiens
  CDR3 for beta chain variable domain of TCR clone 25698 (TRBV19, TRBJ2-5)
CASSMTGQQETQYF

SEQ ID NO: 51397 - protein, 14 aa, Homo sapiens
  CDR3 for alpha chain variable domain of TCR clone 25699 (TRAV13-1, TRAJ35)
CAASKGGFGNVLLC

SEQ ID NO: 51398 - protein, 13 aa, Homo sapiens
  CDR3 for beta chain variable domain of TCR clone 25699 (TRBV7-3, TRBJ1-1)
CASSQDWGAEAFF

SEQ ID NO: 51399 - protein, 14 aa, Homo sapiens
  CDR3 for alpha chain variable domain of TCR clone 25700 (TRAV12-2, TRAJ40)
CAVRIPSGAYKYIF

SEQ ID NO: 51400 - protein, 14 aa, Homo sapiens
  CDR3 for beta chain variable domain of TCR clone 25700 (TRBV20-1, TRBJ1-1)
CSAQTRIGGTEAFF

SEQ ID NO: 51401 - protein, 13 aa, Homo sapiens
  CDR3 for alpha chain variable domain of TCR clone 25701 (TRAV12-2, TRAJ39)
CAVNNNAGNVLTF

SEQ ID NO: 51402 - protein, 13 aa, Homo sapiens
  CDR3 for beta chain variable domain of TCR clone 25701 (TRBV2, TRBJ1-5)
CATAGPGNQPQHF

SEQ ID NO: 51403 - protein, 16 aa, Homo sapiens
  CDR3 for alpha chain variable domain of TCR clone 25702 (TRAV16, TRAJ52)
SALSAAGGTSYGKLTF

SEQ ID NO: 51404 - protein, 12 aa, Homo sapiens
  CDR3 for beta chain variable domain of TCR clone 25702 (TRBV12-4, TRBJ1-3)
CASSFSGNTIYF

SEQ ID NO: 51405 - protein, 16 aa, Homo sapiens
  CDR3 for alpha chain variable domain of TCR clone 25703 (TRAV26-1, TRAJ53)
CIVRVAMGGSHYKLTF

SEQ ID NO: 51406 - protein, 12 aa, Homo sapiens
  CDR3 for beta chain variable domain of TCR clone 25703 (TRBV7-9, TRBJ1-5)
CASSPQGQPQHF

SEQ ID NO: 51407 - protein, 14 aa, Homo sapiens
  CDR3 for alpha chain variable domain of TCR clone 25704 (TRAV17, TRAJ34)
CATDSLGGTDKLIF

SEQ ID NO: 51408 - protein, 14 aa, Homo sapiens
  CDR3 for beta chain variable domain of TCR clone 25704 (TRBV7-2, TRBJ2-7)
CASRSQGAAYEQYF

SEQ ID NO: 51409 - protein, 13 aa, Homo sapiens
  CDR3 for alpha chain variable domain of TCR clone 25705 (TRAV8-6, TRAJ8)
CAVSNTGFRKLVF

SEQ ID NO: 51410 - protein, 15 aa, Homo sapiens
  CDR3 for beta chain variable domain of TCR clone 25705 (TRBV28, TRBJ2-5)
CASSSGRTIQETQYF

SEQ ID NO: 51411 - protein, 14 aa, Homo sapiens
  CDR3 for alpha chain variable domain of TCR clone 25706 (TRAV14/DV4, TRAJ42)
CPRGSLRSQGNLIF

SEQ ID NO: 51412 - protein, 17 aa, Homo sapiens
  CDR3 for beta chain variable domain of TCR clone 25706 (TRBV5-1, TRBJ2-5)
CASSLLGLAANQETQYF

SEQ ID NO: 51413 - protein, 15 aa, Homo sapiens
  CDR3 for alpha chain variable domain of TCR clone 25707 (TRAV34, TRAJ38)
CGADFTPGNNRKLIW

SEQ ID NO: 51414 - protein, 16 aa, Homo sapiens
  CDR3 for beta chain variable domain of TCR clone 25707 (TRBV12-5, TRBJ2-5)
CASGPRTSGNQETQCF

SEQ ID NO: 51415 - protein, 14 aa, Homo sapiens
  CDR3 for alpha chain variable domain of TCR clone 25708 (TRAV12-1, TRAJ6)
CVVARIRRKLHTYI

SEQ ID NO: 51416 - protein, 15 aa, Homo sapiens
  CDR3 for beta chain variable domain of TCR clone 25708 (TRBV7-3, TRBJ2-1)
CASSLRASEYNERFF

SEQ ID NO: 51417 - protein, 14 aa, Homo sapiens
  CDR3 for alpha chain variable domain of TCR clone 25709 (TRAV17, TRAJ39)
CATDPVRAGNMLTF

SEQ ID NO: 51418 - protein, 15 aa, Homo sapiens
  CDR3 for beta chain variable domain of TCR clone 25709 (TRBV13, TRBJ1-5)
CASGFGQGGVQPQHF

SEQ ID NO: 51419 - protein, 12 aa, Homo sapiens
  CDR3 for alpha chain variable domain of TCR clone 25710 (TRAV25, TRAJ31)
CAGHLNNARLMF

SEQ ID NO: 51420 - protein, 14 aa, Homo sapiens
  CDR3 for beta chain variable domain of TCR clone 25710 (TRBV6-1, TRBJ1-3)
CASVQGGGGNTIYF

SEQ ID NO: 51421 - protein, 16 aa, Homo sapiens
  CDR3 for alpha chain variable domain of TCR clone 25711 (TRAV3, TRAJ37)
CAVRPHGSGNTGKLIV

SEQ ID NO: 51422 - protein, 16 aa, Homo sapiens
  CDR3 for beta chain variable domain of TCR clone 25711 (TRBV9, TRBJ1-2)
CASSVEEKVSPYGYTF

SEQ ID NO: 51423 - protein, 15 aa, Homo sapiens
  CDR3 for alpha chain variable domain of TCR clone 25712 (TRAV21, TRAJ53)
CATLNSGGSNYKLTF

SEQ ID NO: 51424 - protein, 14 aa, Homo sapiens
  CDR3 for beta chain variable domain of TCR clone 25712 (TRBV4-2, TRBJ2-1)
CASGLDRAYNEQFF

SEQ ID NO: 51425 - protein, 14 aa, Homo sapiens
  CDR3 for alpha chain variable domain of TCR clone 25713 (TRAV1-2, TRAJ16)
CAVNRFSDGQKLLF

SEQ ID NO: 51426 - protein, 14 aa, Homo sapiens
  CDR3 for beta chain variable domain of TCR clone 25713 (TRBV11-2, TRBJ2-3)
CASSRLAHTDTQYF

SEQ ID NO: 51427 - protein, 13 aa, Homo sapiens
  CDR3 for alpha chain variable domain of TCR clone 25714 (TRAV13-1, TRAJ6)
CAASSGGSYIPTF

SEQ ID NO: 51428 - protein, 14 aa, Homo sapiens
  CDR3 for beta chain variable domain of TCR clone 25714 (TRBV20-1, TRBJ2-4)
CSAVAGGPGNSQYF

SEQ ID NO: 51429 - protein, 12 aa, Homo sapiens
  CDR3 for alpha chain variable domain of TCR clone 25715 (TRAV3, TRAJ43)
CAVRDPNNDMRF

SEQ ID NO: 51430 - protein, 14 aa, Homo sapiens
  CDR3 for beta chain variable domain of TCR clone 25715 (TRBV19, TRBJ2-1)
CASPTFVLSGEQFF

SEQ ID NO: 51431 - protein, 15 aa, Homo sapiens
  CDR3 for alpha chain variable domain of TCR clone 25716 (TRAV8-2, TRAJ16)
CVVSDGVSDGQKLLF

SEQ ID NO: 51432 - protein, 14 aa, Homo sapiens
  CDR3 for beta chain variable domain of TCR clone 25716 (TRBV7-3, TRBJ1-1)
CASSLGTGYTEAFF

SEQ ID NO: 51433 - protein, 11 aa, Homo sapiens
  CDR3 for alpha chain variable domain of TCR clone 25717 (TRAV12-3, TRAJ20)
RAMSYDYKLSF

SEQ ID NO: 51434 - protein, 14 aa, Homo sapiens
  CDR3 for beta chain variable domain of TCR clone 25717 (TRBV7-2, TRBJ2-7)
CASSPKTSFYEQYF

SEQ ID NO: 51435 - protein, 18 aa, Homo sapiens
  CDR3 for alpha chain variable domain of TCR clone 25718 (TRAV13-1, TRAJ52)
CAAKSPNAGGTSYGKLTF

SEQ ID NO: 51436 - protein, 15 aa, Homo sapiens
  CDR3 for beta chain variable domain of TCR clone 25718 (TRBV6-1, TRBJ2-3)
CASSERGGITDTQYF

SEQ ID NO: 51437 - protein, 12 aa, Homo sapiens
  CDR3 for alpha chain variable domain of TCR clone 25719 (TRAV3, TRAJ20)
CAVRDGDYKLSF

SEQ ID NO: 51438 - protein, 13 aa, Homo sapiens
  CDR3 for beta chain variable domain of TCR clone 25719 (TRBV7-3, TRBJ1-1)
CASSQDWGAEAFF

SEQ ID NO: 51439 - protein, 14 aa, Homo sapiens
  CDR3 for alpha chain variable domain of TCR clone 25720 (TRAV12-3, TRAJ56)
CAMSVTGANSKLTF

SEQ ID NO: 51440 - protein, 22 aa, Homo sapiens
  CDR3 for beta chain variable domain of TCR clone 25720 (TRBV11-2, TRBJ1-4)
CASSLDITRRGIPRKDNEKLFF

SEQ ID NO: 51441 - protein, 14 aa, Homo sapiens
  CDR3 for alpha chain variable domain of TCR clone 25721 (TRAV30, TRAJ26)
CGTEIVSYGQNFFF

SEQ ID NO: 51442 - protein, 13 aa, Homo sapiens
  CDR3 for beta chain variable domain of TCR clone 25721 (TRBV19, TRBJ1-3)
CASRLSLGNTIYF

SEQ ID NO: 51443 - protein, 14 aa, Homo sapiens
  CDR3 for alpha chain variable domain of TCR clone 25722 (TRAV26-1, TRAJ34)
CIVRVAYNTDKLIF

SEQ ID NO: 51444 - protein, 15 aa, Homo sapiens
  CDR3 for beta chain variable domain of TCR clone 25722 (TRBV20-1, TRBJ2-7)
CCARVPAAYFYEQYF

SEQ ID NO: 51445 - protein, 16 aa, Homo sapiens
  CDR3 for alpha chain variable domain of TCR clone 25723 (TRAV30, TRAJ24)
CGTEIVDADSWGKFQF

SEQ ID NO: 51446 - protein, 14 aa, Homo sapiens
  CDR3 for beta chain variable domain of TCR clone 25723 (TRBV19, TRBJ1-5)
CASRAPDSFLSQHF

SEQ ID NO: 51447 - protein, 21 aa, Homo sapiens
  CDR3 for alpha chain variable domain of TCR clone 25724 (TRAV1-1, TRAJ6)
CLLLLRCERLERTGGSYIPTF

SEQ ID NO: 51448 - protein, 13 aa, Homo sapiens
  CDR3 for beta chain variable domain of TCR clone 25724 (TRBV10-2, TRBJ2-7)
CASGASGGYEQYF

SEQ ID NO: 51449 - protein, 11 aa, Homo sapiens
  CDR3 for alpha chain variable domain of TCR clone 25725 (TRAV8-3, TRAJ49)
CAVNTSNQFYF

SEQ ID NO: 51450 - protein, 12 aa, Homo sapiens
  CDR3 for beta chain variable domain of TCR clone 25725 (TRBV11-2, TRBJ2-7)
CASSPPADEQYF

SEQ ID NO: 51451 - protein, 14 aa, Homo sapiens
  CDR3 for alpha chain variable domain of TCR clone 25726 (TRAV13-1, TRAJ44)
CAAKATGTASKPTF

SEQ ID NO: 51452 - protein, 13 aa, Homo sapiens
  CDR3 for beta chain variable domain of TCR clone 25726 (TRBV5-5, TRBJ1-2)
CASSFWRGEDYTF

SEQ ID NO: 51453 - protein, 10 aa, Homo sapiens
  CDR3 for alpha chain variable domain of TCR clone 25727 (TRAV1-2, TRAJ31)
CVSEDARLMF

SEQ ID NO: 51454 - protein, 18 aa, Homo sapiens
  CDR3 for beta chain variable domain of TCR clone 25727 (TRBV3-1, TRBJ2-1)
CASSQDLPGRPLFDEQFF

SEQ ID NO: 51455 - protein, 12 aa, Homo sapiens
  CDR3 for alpha chain variable domain of TCR clone 25728 (TRAV13-2, TRAJ23)
CAERHRGGKLIF

SEQ ID NO: 51456 - protein, 13 aa, Homo sapiens
  CDR3 for beta chain variable domain of TCR clone 25728 (TRBV15, TRBJ2-7)
CATSTTGHYEQYF

SEQ ID NO: 51457 - protein, 15 aa, Homo sapiens
  CDR3 for alpha chain variable domain of TCR clone 25729 (TRAV26-1, TRAJ29)
CIVRVEGSGNTPLVF

SEQ ID NO: 51458 - protein, 15 aa, Homo sapiens
  CDR3 for beta chain variable domain of TCR clone 25729 (TRBV7-9, TRBJ1-5)
CASSKGHQPNQPQHF

SEQ ID NO: 51459 - protein, 11 aa, Homo sapiens
  CDR3 for alpha chain variable domain of TCR clone 25730 (TRAV2, TRAJ33)
CAVESNYQLIW

SEQ ID NO: 51460 - protein, 15 aa, Homo sapiens
  CDR3 for beta chain variable domain of TCR clone 25730 (TRBV19, TRBJ1-1)
CASTSRQIQNTEAFF

SEQ ID NO: 51461 - protein, 15 aa, Homo sapiens
  CDR3 for alpha chain variable domain of TCR clone 25731 (TRAV25, TRAJ53)
CPTSNSGGSNYKLTF

SEQ ID NO: 51462 - protein, 14 aa, Homo sapiens
  CDR3 for beta chain variable domain of TCR clone 25731 (TRBV7-7, TRBJ2-2)
CATRQDSDTGELFF

SEQ ID NO: 51463 - protein, 15 aa, Homo sapiens
  CDR3 for alpha chain variable domain of TCR clone 25732 (TRAV27, TRAJ38)
CAARRNAGNNRKLIW

SEQ ID NO: 51464 - protein, 20 aa, Homo sapiens
  CDR3 for beta chain variable domain of TCR clone 25732 (TRBV7-8, TRBJ2-2)
CASSHLFPGPTIHITGELFF

SEQ ID NO: 51465 - protein, 16 aa, Homo sapiens
  CDR3 for alpha chain variable domain of TCR clone 25733 (TRAV3, TRAJ10)
CAVRDMRAGGGNKLTF

SEQ ID NO: 51466 - protein, 14 aa, Homo sapiens
  CDR3 for beta chain variable domain of TCR clone 25733 (TRBV25-1, TRBJ1-1)
RASTHLGGNTEAFF

SEQ ID NO: 51467 - protein, 15 aa, Homo sapiens
  CDR3 for alpha chain variable domain of TCR clone 25734 (TRAV27, TRAJ53)
CRAINSGGSNYKLAF

SEQ ID NO: 51468 - protein, 14 aa, Homo sapiens
  CDR3 for beta chain variable domain of TCR clone 25734 (TRBV7-3, TRBJ2-1)
CASSLAGGTNEQFF

SEQ ID NO: 51469 - protein, 12 aa, Homo sapiens
  CDR3 for alpha chain variable domain of TCR clone 25735 (TRAV38-1, TRAJ32)
CAPLGATNKLIF

SEQ ID NO: 51470 - protein, 14 aa, Homo sapiens
  CDR3 for beta chain variable domain of TCR clone 25735 (TRBV29-1, TRBJ2-5)
CSVETSGSGEAQYF

SEQ ID NO: 51471 - protein, 14 aa, Homo sapiens
  CDR3 for alpha chain variable domain of TCR clone 25736 (TRAV4, TRAJ26)
CLVGPPNYGQNFVF

SEQ ID NO: 51472 - protein, 17 aa, Homo sapiens
  CDR3 for beta chain variable domain of TCR clone 25736 (TRBV24-1, TRBJ2-1)
CATSDVSTSGTYNEQFF

SEQ ID NO: 51473 - protein, 13 aa, Homo sapiens
  CDR3 for alpha chain variable domain of TCR clone 25737 (TRAV17, TRAJ5)
CAPMDTGRRALTF

SEQ ID NO: 51474 - protein, 13 aa, Homo sapiens
  CDR3 for beta chain variable domain of TCR clone 25737 (TRBV7-9, TRBJ1-2)
CASSLEQNYGYTF

SEQ ID NO: 51475 - protein, 14 aa, Homo sapiens
  CDR3 for alpha chain variable domain of TCR clone 25738 (TRAV9-2, TRAJ39)
CALYIYNAGNMLTF

SEQ ID NO: 51476 - protein, 16 aa, Homo sapiens
  CDR3 for beta chain variable domain of TCR clone 25738 (TRBV11-3, TRBJ2-5)
CASSSVVAGSTETQYF

SEQ ID NO: 51477 - protein, 12 aa, Homo sapiens
  CDR3 for alpha chain variable domain of TCR clone 25739 (TRAV26-1, TRAJ38)
CIADNAGNNHIQ

SEQ ID NO: 51478 - protein, 13 aa, Homo sapiens
  CDR3 for beta chain variable domain of TCR clone 25739 (TRBV20-1, TRBJ1-1)
CSARGGGNTEAFF

SEQ ID NO: 51479 - protein, 15 aa, Homo sapiens
  CDR3 for alpha chain variable domain of TCR clone 25740 (TRAV38-1, TRAJ37)
CAFIFGSGNTGKLLF

SEQ ID NO: 51480 - protein, 12 aa, Homo sapiens
  CDR3 for beta chain variable domain of TCR clone 25740 (TRBV7-9, TRBJ2-7)
CASSLEGYEQYF

SEQ ID NO: 51481 - protein, 12 aa, Homo sapiens
  CDR3 for alpha chain variable domain of TCR clone 25741 (TRAV17, TRAJ39)
CATGAAGTMLTF

SEQ ID NO: 51482 - protein, 14 aa, Homo sapiens
  CDR3 for beta chain variable domain of TCR clone 25741 (TRBV7-9, TRBJ1-2)
CASSRQGANYGYTF

SEQ ID NO: 51483 - protein, 14 aa, Homo sapiens
  CDR3 for alpha chain variable domain of TCR clone 25742 (TRAV1-2, TRAJ16)
CAVNRFSDGQKLLF

SEQ ID NO: 51484 - protein, 15 aa, Homo sapiens
  CDR3 for beta chain variable domain of TCR clone 25742 (TRBV10-2, TRBJ2-6)
CASSEQGTGANILTF

SEQ ID NO: 51485 - protein, 11 aa, Homo sapiens
  CDR3 for alpha chain variable domain of TCR clone 25743 (TRAV17, TRAJ9)
CATTGGFKTIF

SEQ ID NO: 51486 - protein, 16 aa, Homo sapiens
  CDR3 for beta chain variable domain of TCR clone 25743 (TRBV24-1, TRBJ2-1)
CATSGVAGANYNEQFF

SEQ ID NO: 51487 - protein, 10 aa, Homo sapiens
  CDR3 for alpha chain variable domain of TCR clone 25744 (TRAV25, TRAJ20)
CAGNDYKLSF

SEQ ID NO: 51488 - protein, 15 aa, Homo sapiens
  CDR3 for beta chain variable domain of TCR clone 25744 (TRBV9, TRBJ1-6)
CASSVAGTGDSPLHF

SEQ ID NO: 51489 - protein, 16 aa, Homo sapiens
  CDR3 for alpha chain variable domain of TCR clone 25745 (TRAV3, TRAJ37)
CAVRGKGSGNTGKLIF

SEQ ID NO: 51490 - protein, 13 aa, Homo sapiens
  CDR3 for beta chain variable domain of TCR clone 25745 (TRBV14, TRBJ2-7)
CASSRDRRYEQYF

SEQ ID NO: 51491 - protein, 15 aa, Homo sapiens
  CDR3 for alpha chain variable domain of TCR clone 25746 (TRAV38-1, TRAJ37)
CAFIRGSGNTGKLIF

SEQ ID NO: 51492 - protein, 12 aa, Homo sapiens
  CDR3 for beta chain variable domain of TCR clone 25746 (TRBV7-9, TRBJ2-7)
CASSFGSYEQYF

SEQ ID NO: 51493 - protein, 14 aa, Homo sapiens
  CDR3 for alpha chain variable domain of TCR clone 25747 (TRAV20, TRAJ56)
CAVQFGGANSKLTF

SEQ ID NO: 51494 - protein, 14 aa, Homo sapiens
  CDR3 for beta chain variable domain of TCR clone 25747 (TRBV20-1, TRBJ2-7)
GSAKRGRSSYEQYF

SEQ ID NO: 51495 - protein, 17 aa, Homo sapiens
  CDR3 for alpha chain variable domain of TCR clone 25748 (TRAV1-2, TRAJ8)
CAVRDPDENTGFQKLVF

SEQ ID NO: 51496 - protein, 15 aa, Homo sapiens
  CDR3 for beta chain variable domain of TCR clone 25748 (TRBV29-1, TRBJ2-1)
CSAAPLAGGRNEQFF

SEQ ID NO: 51497 - protein, 16 aa, Homo sapiens
  CDR3 for alpha chain variable domain of TCR clone 25749 (TRAV12-3, TRAJ53)
CAMSPGSGGSNYILTF

SEQ ID NO: 51498 - protein, 11 aa, Homo sapiens
  CDR3 for beta chain variable domain of TCR clone 25749 (TRBV29-1, TRBJ2-5)
CSEDRTGTQYF

SEQ ID NO: 51499 - protein, 12 aa, Homo sapiens
  CDR3 for alpha chain variable domain of TCR clone 25750 (TRAV12-3, TRAJ17)
CAMTLTGNKLTF

SEQ ID NO: 51500 - protein, 16 aa, Homo sapiens
  CDR3 for beta chain variable domain of TCR clone 25750 (TRBV11-2, TRBJ1-1)
CASSLRQGGEHSKAFF

SEQ ID NO: 51501 - protein, 15 aa, Homo sapiens
  CDR3 for alpha chain variable domain of TCR clone 25751 (TRAV35, TRAJ41)
CAGQLLSNSGYALNF

SEQ ID NO: 51502 - protein, 14 aa, Homo sapiens
  CDR3 for beta chain variable domain of TCR clone 25751 (TRBV7-2, TRBJ1-2)
CASSRGGTNYGYTF

SEQ ID NO: 51503 - protein, 11 aa, Homo sapiens
  CDR3 for alpha chain variable domain of TCR clone 25752 (TRAV2, TRAJ13)
CASGGYQKVTF

SEQ ID NO: 51504 - protein, 13 aa, Homo sapiens
  CDR3 for beta chain variable domain of TCR clone 25752 (TRBV11-2, TRBJ2-5)
CASSSTGEETQYF

SEQ ID NO: 51505 - protein, 10 aa, Homo sapiens
  CDR3 for alpha chain variable domain of TCR clone 25753 (TRAV16, TRAJ22)
SAMYLRQLTF

SEQ ID NO: 51506 - protein, 15 aa, Homo sapiens
  CDR3 for beta chain variable domain of TCR clone 25753 (TRBV7-9, TRBJ1-6)
CASSAPGRGNSPLHF

SEQ ID NO: 51507 - protein, 17 aa, Homo sapiens
  CDR3 for alpha chain variable domain of TCR clone 25754 (TRAV36/DV7, TRAJ52)
CAVAQRAGGTSYGKLTF

SEQ ID NO: 51508 - protein, 14 aa, Homo sapiens
  CDR3 for beta chain variable domain of TCR clone 25754 (TRBV6-1, TRBJ1-3)
CAIVQGGGGNTIYF

SEQ ID NO: 51509 - protein, 15 aa, Homo sapiens
  CDR3 for alpha chain variable domain of TCR clone 25755 (TRAV12-1, TRAJ44)
CVVVVNTGTASKLTF

SEQ ID NO: 51510 - protein, 17 aa, Homo sapiens
  CDR3 for beta chain variable domain of TCR clone 25755 (TRBV7-8, TRBJ2-6)
CASSAGTGGAGANVLTF

SEQ ID NO: 51511 - protein, 19 aa, Homo sapiens
  CDR3 for alpha chain variable domain of TCR clone 25756 (TRAV2, TRAJ20)
ILQVREADADVYRDCKLSF

SEQ ID NO: 51512 - protein, 12 aa, Homo sapiens
  CDR3 for beta chain variable domain of TCR clone 25756 (TRBV11-2, TRBJ2-2)
CASSLGGGELFF

SEQ ID NO: 51513 - protein, 13 aa, Homo sapiens
  CDR3 for alpha chain variable domain of TCR clone 25757 (TRAV21, TRAJ11)
CAVPNSGYSTLTF

SEQ ID NO: 51514 - protein, 15 aa, Homo sapiens
  CDR3 for beta chain variable domain of TCR clone 25757 (TRBV7-9, TRBJ1-5)
CASSQGHQPNQPQHF

SEQ ID NO: 51515 - protein, 14 aa, Homo sapiens
  CDR3 for alpha chain variable domain of TCR clone 25758 (TRAV8-3, TRAJ4)
FAVGAAGGYNKLIF

SEQ ID NO: 51516 - protein, 15 aa, Homo sapiens
  CDR3 for beta chain variable domain of TCR clone 25758 (TRBV6-5, TRBJ2-1)
CASSYDAGAGNEQFF

SEQ ID NO: 51517 - protein, 14 aa, Homo sapiens
  CDR3 for alpha chain variable domain of TCR clone 25759 (TRAV2, TRAJ37)
CAVEDQGKTGKLIF

SEQ ID NO: 51518 - protein, 14 aa, Homo sapiens
  CDR3 for beta chain variable domain of TCR clone 25759 (TRBV18, TRBJ2-1)
CASSPQGRFNEQFF

SEQ ID NO: 51519 - protein, 15 aa, Homo sapiens
  CDR3 for alpha chain variable domain of TCR clone 25760 (TRAV12-1, TRAJ44)
CVVFVNTGTASKLTF

SEQ ID NO: 51520 - protein, 14 aa, Homo sapiens
  CDR3 for beta chain variable domain of TCR clone 25760 (TRBV7-9, TRBJ2-5)
CASSPAQDQETQYF

SEQ ID NO: 51521 - protein, 14 aa, Homo sapiens
  CDR3 for alpha chain variable domain of TCR clone 25761 (TRAV2, TRAJ37)
CAVDFTSNTGKLIF

SEQ ID NO: 51522 - protein, 15 aa, Homo sapiens
  CDR3 for beta chain variable domain of TCR clone 25761 (TRBV20-1, TRBJ1-1)
CSASRGVTRNTEAFF

SEQ ID NO: 51523 - protein, 15 aa, Homo sapiens
  CDR3 for alpha chain variable domain of TCR clone 25762 (TRAV3, TRAJ3)
CAVRDRDSSASKIIF

SEQ ID NO: 51524 - protein, 15 aa, Homo sapiens
  CDR3 for beta chain variable domain of TCR clone 25762 (TRBV29-1, TRBJ2-7)
CSVDFFDRGSYEQYF

SEQ ID NO: 51525 - protein, 15 aa, Homo sapiens
  CDR3 for alpha chain variable domain of TCR clone 25763 (TRAV8-3, TRAJ27)
CAVGPSKTNAGKATF

SEQ ID NO: 51526 - protein, 15 aa, Homo sapiens
  CDR3 for beta chain variable domain of TCR clone 25763 (TRBV7-2, TRBJ2-1)
CASSSGLAGGNEQFF

SEQ ID NO: 51527 - protein, 18 aa, Homo sapiens
  CDR3 for alpha chain variable domain of TCR clone 25764 (TRAV21, TRAJ52)
CAVRPSPAGGTSYGKLTF

SEQ ID NO: 51528 - protein, 17 aa, Homo sapiens
  CDR3 for beta chain variable domain of TCR clone 25764 (TRBV13, TRBJ2-3)
CGSSLSRVAGGRNTQYF

SEQ ID NO: 51529 - protein, 13 aa, Homo sapiens
  CDR3 for alpha chain variable domain of TCR clone 25765 (TRAV23/DV6, TRAJ9)
CAAGTTGGFKTIF

SEQ ID NO: 51530 - protein, 14 aa, Homo sapiens
  CDR3 for beta chain variable domain of TCR clone 25765 (TRBV5-1, TRBJ2-3)
CASRVDGVSDTQYF

SEQ ID NO: 51531 - protein, 11 aa, Homo sapiens
  CDR3 for alpha chain variable domain of TCR clone 25766 (TRAV2, TRAJ21)
CAVFNFNKFYF

SEQ ID NO: 51532 - protein, 14 aa, Homo sapiens
  CDR3 for beta chain variable domain of TCR clone 25766 (TRBV15, TRBJ2-3)
CATRSGISTDTQYF

SEQ ID NO: 51533 - protein, 11 aa, Homo sapiens
  CDR3 for alpha chain variable domain of TCR clone 25767 (TRAV2, TRAJ13)
CASGGYQKVTF

SEQ ID NO: 51534 - protein, 14 aa, Homo sapiens
  CDR3 for beta chain variable domain of TCR clone 25767 (TRBV19, TRBJ1-2)
CASSLQGQAYGYTF

SEQ ID NO: 51535 - protein, 18 aa, Homo sapiens
  CDR3 for alpha chain variable domain of TCR clone 25768 (TRAV26-2, TRAJ45)
CILRVDKYSGGGADGLTF

SEQ ID NO: 51536 - protein, 14 aa, Homo sapiens
  CDR3 for beta chain variable domain of TCR clone 25768 (TRBV19, TRBJ2-1)
CASPTFVLSGEQFF

SEQ ID NO: 51537 - protein, 17 aa, Homo sapiens
  CDR3 for alpha chain variable domain of TCR clone 25769 (TRAV3, TRAJ6)
CAVRDGPRAGGSHIPTF

SEQ ID NO: 51538 - protein, 14 aa, Homo sapiens
  CDR3 for beta chain variable domain of TCR clone 25769 (TRBV7-2, TRBJ2-7)
CASSPKTSFHEQYF

SEQ ID NO: 51539 - protein, 12 aa, Homo sapiens
  CDR3 for alpha chain variable domain of TCR clone 25770 (TRAV13-2, TRAJ23)
CAERHRGGKLIF

SEQ ID NO: 51540 - protein, 14 aa, Homo sapiens
  CDR3 for beta chain variable domain of TCR clone 25770 (TRBV7-6, TRBJ2-3)
CASSLGTVTDTQYF

SEQ ID NO: 51541 - protein, 11 aa, Homo sapiens
  CDR3 for alpha chain variable domain of TCR clone 25771 (TRAV17, TRAJ31)
CATSSNARLMF

SEQ ID NO: 51542 - protein, 16 aa, Homo sapiens
  CDR3 for beta chain variable domain of TCR clone 25771 (TRBV7-8, TRBJ2-4)
CASSAERTLAKNIQYF

SEQ ID NO: 51543 - protein, 12 aa, Homo sapiens
  CDR3 for alpha chain variable domain of TCR clone 25772 (TRAV13-1, TRAJ15)
CAASQAGTALIF

SEQ ID NO: 51544 - protein, 14 aa, Homo sapiens
  CDR3 for beta chain variable domain of TCR clone 25772 (TRBV19, TRBJ2-2)
CASSTLHRSRELFF

SEQ ID NO: 51545 - protein, 13 aa, Homo sapiens
  CDR3 for alpha chain variable domain of TCR clone 25773 (TRAV8-2, TRAJ43)
CVVSDQGDNDIRF

SEQ ID NO: 51546 - protein, 12 aa, Homo sapiens
  CDR3 for beta chain variable domain of TCR clone 25773 (TRBV7-9, TRBJ2-7)
CASRTGFDEQYF

SEQ ID NO: 51547 - protein, 15 aa, Homo sapiens
  CDR3 for alpha chain variable domain of TCR clone 25774 (TRAV12-2, TRAJ43)
CAFDMRSGAGTRLTV

SEQ ID NO: 51548 - protein, 18 aa, Homo sapiens
  CDR3 for beta chain variable domain of TCR clone 25774 (TRBV20-1, TRBJ2-3)
CSASGLAGGPGTTDTQYF

SEQ ID NO: 51549 - protein, 13 aa, Homo sapiens
  CDR3 for alpha chain variable domain of TCR clone 25775 (TRAV13-1, TRAJ21)
CAASIYNFKKFYF

SEQ ID NO: 51550 - protein, 13 aa, Homo sapiens
  CDR3 for beta chain variable domain of TCR clone 25775 (TRBV27, TRBJ1-4)
CASSLMGDEKLFF

SEQ ID NO: 51551 - protein, 14 aa, Homo sapiens
  CDR3 for alpha chain variable domain of TCR clone 25776 (TRAV25, TRAJ35)
CARRMEGFGNVPHC

SEQ ID NO: 51552 - protein, 13 aa, Homo sapiens
  CDR3 for beta chain variable domain of TCR clone 25776 (TRBV7-2, TRBJ1-4)
CASSLAGLEKLFF

SEQ ID NO: 51553 - protein, 13 aa, Homo sapiens
  CDR3 for alpha chain variable domain of TCR clone 25777 (TRAV13-1, TRAJ5)
CAASDTGGRALTF

SEQ ID NO: 51554 - protein, 14 aa, Homo sapiens
  CDR3 for beta chain variable domain of TCR clone 25777 (TRBV4-2, TRBJ2-1)
CASGLDRAYNEQFF

SEQ ID NO: 51555 - protein, 13 aa, Homo sapiens
  CDR3 for alpha chain variable domain of TCR clone 25778 (TRAV12-3, TRAJ13)
CAMSSGGYQKVTF

SEQ ID NO: 51556 - protein, 14 aa, Homo sapiens
  CDR3 for beta chain variable domain of TCR clone 25778 (TRBV25-1, TRBJ1-1)
CASTHLGGNTEAFF

SEQ ID NO: 51557 - protein, 16 aa, Homo sapiens
  CDR3 for alpha chain variable domain of TCR clone 25779 (TRAV16, TRAJ4)
CALSRMFSGGYNKLVF

SEQ ID NO: 51558 - protein, 16 aa, Homo sapiens
  CDR3 for beta chain variable domain of TCR clone 25779 (TRBV24-1, TRBJ2-3)
CATSDPGTGATDTQYF

SEQ ID NO: 51559 - protein, 10 aa, Homo sapiens
  CDR3 for alpha chain variable domain of TCR clone 25780 (TRAV12-3, TRAJ49)
CAMNDDQFSF

SEQ ID NO: 51560 - protein, 13 aa, Homo sapiens
  CDR3 for beta chain variable domain of TCR clone 25780 (TRBV12-4, TRBJ1-1)
CASSPGTGFEAFF

SEQ ID NO: 51561 - protein, 13 aa, Homo sapiens
  CDR3 for alpha chain variable domain of TCR clone 25781 (TRAV13-1, TRAJ6)
CAASKGGSYIPTF

SEQ ID NO: 51562 - protein, 14 aa, Homo sapiens
  CDR3 for beta chain variable domain of TCR clone 25781 (TRBV7-2, TRBJ2-1)
CASSLGVGYDEQFF

SEQ ID NO: 51563 - protein, 16 aa, Homo sapiens
  CDR3 for alpha chain variable domain of TCR clone 25782 (TRAV16, TRAJ52)
CALSAAGGTSYGKLTF

SEQ ID NO: 51564 - protein, 12 aa, Homo sapiens
  CDR3 for beta chain variable domain of TCR clone 25782 (TRBV12-4, TRBJ1-3)
CASSFSGSTIYF

SEQ ID NO: 51565 - protein, 15 aa, Homo sapiens
  CDR3 for alpha chain variable domain of TCR clone 25783 (TRAV17, TRAJ57)
CATGPSQGGSEKPVF

SEQ ID NO: 51566 - protein, 15 aa, Homo sapiens
  CDR3 for beta chain variable domain of TCR clone 25783 (TRBV7-3, TRBJ2-1)
CASSPTGGGEVEQFF

SEQ ID NO: 51567 - protein, 16 aa, Homo sapiens
  CDR3 for alpha chain variable domain of TCR clone 25784 (TRAV20, TRAJ10)
CAVLRGLTGGGNKLTF

SEQ ID NO: 51568 - protein, 14 aa, Homo sapiens
  CDR3 for beta chain variable domain of TCR clone 25784 (TRBV19, TRBJ1-5)
CASRAPDSLLSQHF

SEQ ID NO: 51569 - protein, 13 aa, Homo sapiens
  CDR3 for alpha chain variable domain of TCR clone 25785 (TRAV1-2, TRAJ9)
CAALNTGGFKTIF

SEQ ID NO: 51570 - protein, 13 aa, Homo sapiens
  CDR3 for beta chain variable domain of TCR clone 25785 (TRBV19, TRBJ1-2)
CASSVPGQDCYTF

SEQ ID NO: 51571 - protein, 13 aa, Homo sapiens
  CDR3 for alpha chain variable domain of TCR clone 25786 (TRAV3, TRAJ21)
CAVREPDCNKFYF

SEQ ID NO: 51572 - protein, 13 aa, Homo sapiens
  CDR3 for beta chain variable domain of TCR clone 25786 (TRBV9, TRBJ2-1)
CASSPSGGNEQFF

SEQ ID NO: 51573 - protein, 13 aa, Homo sapiens
  CDR3 for alpha chain variable domain of TCR clone 25787 (TRAV12-3, TRAJ7)
CAMTPYGNNRLAF

SEQ ID NO: 51574 - protein, 16 aa, Homo sapiens
  CDR3 for beta chain variable domain of TCR clone 25787 (TRBV20-1, TRBJ1-4)
CSARPYGGELNEKLFF

SEQ ID NO: 51575 - protein, 11 aa, Homo sapiens
  CDR3 for alpha chain variable domain of TCR clone 25788 (TRAV8-3, TRAJ15)
CAVGPGTALLF

SEQ ID NO: 51576 - protein, 18 aa, Homo sapiens
  CDR3 for beta chain variable domain of TCR clone 25788 (TRBV18, TRBJ2-3)
CASSYTSGAAGGTDTQYF

SEQ ID NO: 51577 - protein, 17 aa, Homo sapiens
  CDR3 for alpha chain variable domain of TCR clone 25789 (TRAV3, TRAJ6)
CAVRDGPRAGGSYIPTF

SEQ ID NO: 51578 - protein, 14 aa, Homo sapiens
  CDR3 for beta chain variable domain of TCR clone 25789 (TRBV7-2, TRBJ2-7)
CASSPKTSFNEQYF

SEQ ID NO: 51579 - protein, 17 aa, Homo sapiens
  CDR3 for alpha chain variable domain of TCR clone 25790 (TRAV13-1, TRAJ31)
CAPSDRLMFGDGTQLVV

SEQ ID NO: 51580 - protein, 12 aa, Homo sapiens
  CDR3 for beta chain variable domain of TCR clone 25790 (TRBV7-9, TRBJ2-7)
CASSLEGYEQYF

SEQ ID NO: 51581 - protein, 12 aa, Homo sapiens
  CDR3 for alpha chain variable domain of TCR clone 25791 (TRAV21, TRAJ31)
CAVWGNNARLMF

SEQ ID NO: 51582 - protein, 14 aa, Homo sapiens
  CDR3 for beta chain variable domain of TCR clone 25791 (TRBV19, TRBJ2-1)
CASPTFVLSGEQFF

SEQ ID NO: 51583 - protein, 18 aa, Homo sapiens
  CDR3 for alpha chain variable domain of TCR clone 25792 (TRAV13-1, TRAJ52)
CAASKRSAGGTSHGKLTF

SEQ ID NO: 51584 - protein, 13 aa, Homo sapiens
  CDR3 for beta chain variable domain of TCR clone 25792 (TRBV12-4, TRBJ1-2)
CASSLRQGKGYTF

SEQ ID NO: 51585 - protein, 15 aa, Homo sapiens
  CDR3 for alpha chain variable domain of TCR clone 25793 (TRAV8-3, TRAJ27)
CAVGPSKTNAGKSTF

SEQ ID NO: 51586 - protein, 15 aa, Homo sapiens
  CDR3 for beta chain variable domain of TCR clone 25793 (TRBV7-2, TRBJ2-1)
CASSSGLAGGNVQFF

SEQ ID NO: 51587 - protein, 12 aa, Homo sapiens
  CDR3 for alpha chain variable domain of TCR clone 25794 (TRAV12-3, TRAJ17)
RAMTLTGNKLTF

SEQ ID NO: 51588 - protein, 15 aa, Homo sapiens
  CDR3 for beta chain variable domain of TCR clone 25794 (TRBV11-2, TRBJ2-2)
CASSSDRVNAGELFF

SEQ ID NO: 51589 - protein, 16 aa, Homo sapiens
  CDR3 for alpha chain variable domain of TCR clone 25795 (TRAV12-2, TRAJ32)
CAVNLGQGGATTKLIF

SEQ ID NO: 51590 - protein, 15 aa, Homo sapiens
  CDR3 for beta chain variable domain of TCR clone 25795 (TRBV20-1, TRBJ2-7)
CSARGPLAGGREQYF

SEQ ID NO: 51591 - protein, 14 aa, Homo sapiens
  CDR3 for alpha chain variable domain of TCR clone 25796 (TRAV35, TRAJ22)
CAGLRPGSARPLTF

SEQ ID NO: 51592 - protein, 15 aa, Homo sapiens
  CDR3 for beta chain variable domain of TCR clone 25796 (TRBV12-4, TRBJ2-5)
CASSPPTGLQETQYF

SEQ ID NO: 51593 - protein, 11 aa, Homo sapiens
  CDR3 for alpha chain variable domain of TCR clone 25797 (TRAV13-1, TRAJ39)
CASHAGNMPTF

SEQ ID NO: 51594 - protein, 14 aa, Homo sapiens
  CDR3 for beta chain variable domain of TCR clone 25797 (TRBV11-2, TRBJ1-5)
CASSLDRGRQPQHF

SEQ ID NO: 51595 - protein, 15 aa, Homo sapiens
  CDR3 for alpha chain variable domain of TCR clone 25798 (TRAV3, TRAJ5)
CAVRDLDTSRRALTF

SEQ ID NO: 51596 - protein, 13 aa, Homo sapiens
  CDR3 for beta chain variable domain of TCR clone 25798 (TRBV12-4, TRBJ2-7)
CASSPTETYEQYF

SEQ ID NO: 51597 - protein, 17 aa, Homo sapiens
  CDR3 for alpha chain variable domain of TCR clone 25799 (TRAV35, TRAJ28)
CAGLQVYSGAGSYQLTF

SEQ ID NO: 51598 - protein, 15 aa, Homo sapiens
  CDR3 for beta chain variable domain of TCR clone 25799 (TRBV2, TRBJ1-2)
CASSEIGGANYGYTL

SEQ ID NO: 51599 - protein, 15 aa, Homo sapiens
  CDR3 for alpha chain variable domain of TCR clone 25800 (TRAV4, TRAJ39)
CLVGPNNNAGKMLTF

SEQ ID NO: 51600 - protein, 13 aa, Homo sapiens
  CDR3 for beta chain variable domain of TCR clone 25800 (TRBV11-2, TRBJ2-5)
CASSSTGEETQYF

SEQ ID NO: 51601 - protein, 16 aa, Homo sapiens
  CDR3 for alpha chain variable domain of TCR clone 25801 (TRAV16, TRAJ4)
CALSRMFSGGYNKLVF

SEQ ID NO: 51602 - protein, 14 aa, Homo sapiens
  CDR3 for beta chain variable domain of TCR clone 25801 (TRBV4-1, TRBJ2-2)
CASSQAVNTGELFF

SEQ ID NO: 51603 - protein, 14 aa, Homo sapiens
  CDR3 for alpha chain variable domain of TCR clone 25802 (TRAV1-2, TRAJ8)
CAVREDTGFQILVF

SEQ ID NO: 51604 - protein, 15 aa, Homo sapiens
  CDR3 for beta chain variable domain of TCR clone 25802 (TRBV6-3, TRBJ2-7)
CASSSPGTVFYEQYF

SEQ ID NO: 51605 - protein, 10 aa, Homo sapiens
  CDR3 for alpha chain variable domain of TCR clone 25803 (TRAV16, TRAJ22)
SVMYLRQLTF

SEQ ID NO: 51606 - protein, 15 aa, Homo sapiens
  CDR3 for beta chain variable domain of TCR clone 25803 (TRBV7-9, TRBJ1-6)
CASSSPGRGNSPLHF

SEQ ID NO: 51607 - protein, 17 aa, Homo sapiens
  CDR3 for alpha chain variable domain of TCR clone 25804 (TRAV3, TRAJ6)
CAVRDGPRAGGSYIPTF

SEQ ID NO: 51608 - protein, 18 aa, Homo sapiens
  CDR3 for beta chain variable domain of TCR clone 25804 (TRBV7-3, TRBJ2-3)
CASSSTGTYPGSTDTQYL

SEQ ID NO: 51609 - protein, 15 aa, Homo sapiens
  CDR3 for alpha chain variable domain of TCR clone 25805 (TRAV12-1, TRAJ44)
CVADLPTGTASKLTF

SEQ ID NO: 51610 - protein, 13 aa, Homo sapiens
  CDR3 for beta chain variable domain of TCR clone 25805 (TRBV6-5, TRBJ2-5)
CASSPQGGETQCF

SEQ ID NO: 51611 - protein, 13 aa, Homo sapiens
  CDR3 for alpha chain variable domain of TCR clone 25806 (TRAV27, TRAJ45)
CRSSGGGADGLTF

SEQ ID NO: 51612 - protein, 17 aa, Homo sapiens
  CDR3 for beta chain variable domain of TCR clone 25806 (TRBV13, TRBJ2-3)
CASSLSRVAGGRNTQYF

SEQ ID NO: 51613 - protein, 13 aa, Homo sapiens
  CDR3 for alpha chain variable domain of TCR clone 25807 (TRAV12-3, TRAJ7)
SAMSASGNNRPAF

SEQ ID NO: 51614 - protein, 14 aa, Homo sapiens
  CDR3 for beta chain variable domain of TCR clone 25807 (TRBV13, TRBJ2-5)
CASSLGPRGETQYF

SEQ ID NO: 51615 - protein, 14 aa, Homo sapiens
  CDR3 for alpha chain variable domain of TCR clone 25808 (TRAV9-2, TRAJ36)
CALPWRTGANNLFF

SEQ ID NO: 51616 - protein, 14 aa, Homo sapiens
  CDR3 for beta chain variable domain of TCR clone 25808 (TRBV2, TRBJ1-2)
CASSELQVNYGDTF

SEQ ID NO: 51617 - protein, 11 aa, Homo sapiens
  CDR3 for alpha chain variable domain of TCR clone 25809 (TRAV1-2, TRAJ31)
CDVNNNARLMF

SEQ ID NO: 51618 - protein, 15 aa, Homo sapiens
  CDR3 for beta chain variable domain of TCR clone 25809 (TRBV28, TRBJ2-1)
CASSIIAGGRSEQFF

SEQ ID NO: 51619 - protein, 16 aa, Homo sapiens
  CDR3 for alpha chain variable domain of TCR clone 25810 (TRAV4, TRAJ9)
CLVGDPNRPGGFNTIF

SEQ ID NO: 51620 - protein, 16 aa, Homo sapiens
  CDR3 for beta chain variable domain of TCR clone 25810 (TRBV28, TRBJ1-4)
CASSPPYRGRSEKLFF

SEQ ID NO: 51621 - protein, 15 aa, Homo sapiens
  CDR3 for alpha chain variable domain of TCR clone 25811 (TRAV30, TRAJ32)
CGTEILGGATNKLIF

SEQ ID NO: 51622 - protein, 17 aa, Homo sapiens
  CDR3 for beta chain variable domain of TCR clone 25811 (TRBV5-4, TRBJ2-1)
CASSSAGGREPYNEQFF

SEQ ID NO: 51623 - protein, 15 aa, Homo sapiens
  CDR3 for alpha chain variable domain of TCR clone 25812 (TRAV8-2, TRAJ40)
CVVLCTTSGTYKYIF

SEQ ID NO: 51624 - protein, 16 aa, Homo sapiens
  CDR3 for beta chain variable domain of TCR clone 25812 (TRBV7-3, TRBJ2-1)
CASSLEGYRSYNEQFF

SEQ ID NO: 51625 - protein, 19 aa, Homo sapiens
  CDR3 for alpha chain variable domain of TCR clone 25813 (TRAV26-1, TRAJ42)
CCVLLHRQSQGRKQGNLIF

SEQ ID NO: 51626 - protein, 14 aa, Homo sapiens
  CDR3 for beta chain variable domain of TCR clone 25813 (TRBV19, TRBJ2-2)
CATTGHANTGELFF

SEQ ID NO: 51627 - protein, 15 aa, Homo sapiens
  CDR3 for alpha chain variable domain of TCR clone 25814 (TRAV21, TRAJ24)
CAARSSTDSWGKLQF

SEQ ID NO: 51628 - protein, 17 aa, Homo sapiens
  CDR3 for beta chain variable domain of TCR clone 25814 (TRBV13, TRBJ2-3)
CASSLSRVAGGRNTQYF

SEQ ID NO: 51629 - protein, 12 aa, Homo sapiens
  CDR3 for alpha chain variable domain of TCR clone 25815 (TRAV1-1, TRAJ8)
CAGGTGFQKLGF

SEQ ID NO: 51630 - protein, 15 aa, Homo sapiens
  CDR3 for beta chain variable domain of TCR clone 25815 (TRBV7-9, TRBJ1-4)
CASSRTGGFNEKLFF

SEQ ID NO: 51631 - protein, 11 aa, Homo sapiens
  CDR3 for alpha chain variable domain of TCR clone 25816 (TRAV13-1, TRAJ30)
CAASRDDKIIF

SEQ ID NO: 51632 - protein, 15 aa, Homo sapiens
  CDR3 for beta chain variable domain of TCR clone 25816 (TRBV18, TRBJ1-1)
CASSPSSWVDTEAFF

SEQ ID NO: 51633 - protein, 11 aa, Homo sapiens
  CDR3 for alpha chain variable domain of TCR clone 25817 (TRAV13-2, TRAJ23)
CAESPRGELIF

SEQ ID NO: 51634 - protein, 15 aa, Homo sapiens
  CDR3 for beta chain variable domain of TCR clone 25817 (TRBV28, TRBJ2-1)
CASSGLAEVDNEQFF

SEQ ID NO: 51635 - protein, 11 aa, Homo sapiens
  CDR3 for alpha chain variable domain of TCR clone 25818 (TRAV3, TRAJ21)
CAVGNFNKFYF

SEQ ID NO: 51636 - protein, 16 aa, Homo sapiens
  CDR3 for beta chain variable domain of TCR clone 25818 (TRBV19, TRBJ2-1)
CASSKEGPSSYNEQLF

SEQ ID NO: 51637 - protein, 14 aa, Homo sapiens
  CDR3 for alpha chain variable domain of TCR clone 25819 (TRAV13-1, TRAJ35)
CAASKGGFGNVLHC

SEQ ID NO: 51638 - protein, 15 aa, Homo sapiens
  CDR3 for beta chain variable domain of TCR clone 25819 (TRBV20-1, TRBJ1-5)
CSATSDRGLGQPQHF

SEQ ID NO: 51639 - protein, 10 aa, Homo sapiens
  CDR3 for alpha chain variable domain of TCR clone 25820 (TRAV23/DV6, TRAJ57)
CAANSTLSQG

SEQ ID NO: 51640 - protein, 14 aa, Homo sapiens
  CDR3 for beta chain variable domain of TCR clone 25820 (TRBV25-1, TRBJ1-1)
CASTHLGGNTEAFF

SEQ ID NO: 51641 - protein, 12 aa, Homo sapiens
  CDR3 for alpha chain variable domain of TCR clone 25821 (TRAV13-1, TRAJ48)
CAADFGNEKLTF

SEQ ID NO: 51642 - protein, 13 aa, Homo sapiens
  CDR3 for beta chain variable domain of TCR clone 25821 (TRBV7-3, TRBJ1-1)
CASSQDWGAEAFF

SEQ ID NO: 51643 - protein, 13 aa, Homo sapiens
  CDR3 for alpha chain variable domain of TCR clone 25822 (TRAV12-3, TRAJ9)
CAMRNTGCFKTIF

SEQ ID NO: 51644 - protein, 14 aa, Homo sapiens
  CDR3 for beta chain variable domain of TCR clone 25822 (TRBV11-2, TRBJ2-7)
CASSSTGEGYEQYF

SEQ ID NO: 51645 - protein, 13 aa, Homo sapiens
  CDR3 for alpha chain variable domain of TCR clone 25823 (TRAV12-2, TRAJ52)
CAVSGTSYGKLTF

SEQ ID NO: 51646 - protein, 17 aa, Homo sapiens
  CDR3 for beta chain variable domain of TCR clone 25823 (TRBV11-2, TRBJ2-1)
CASSLCPPGVEYNEQFF

SEQ ID NO: 51647 - protein, 13 aa, Homo sapiens
  CDR3 for alpha chain variable domain of TCR clone 25824 (TRAV21, TRAJ27)
CAARPGNAGKSTF

SEQ ID NO: 51648 - protein, 16 aa, Homo sapiens
  CDR3 for beta chain variable domain of TCR clone 25824 (TRBV20-1, TRBJ1-2)
CSASIGQGVANYGYAF

SEQ ID NO: 51649 - protein, 14 aa, Homo sapiens
  CDR3 for alpha chain variable domain of TCR clone 25825 (TRAV12-2, TRAJ36)
CAVNPPTGANNLFF

SEQ ID NO: 51650 - protein, 13 aa, Homo sapiens
  CDR3 for beta chain variable domain of TCR clone 25825 (TRBV20-1, TRBJ1-6)
CSAPTGLGSPFHF

SEQ ID NO: 51651 - protein, 13 aa, Homo sapiens
  CDR3 for alpha chain variable domain of TCR clone 25826 (TRAV39, TRAJ58)
CAGEETSGSRLTF

SEQ ID NO: 51652 - protein, 13 aa, Homo sapiens
  CDR3 for beta chain variable domain of TCR clone 25826 (TRBV15, TRBJ2-7)
CAASTTGHYEQYF

SEQ ID NO: 51653 - protein, 13 aa, Homo sapiens
  CDR3 for alpha chain variable domain of TCR clone 25827 (TRAV12-3, TRAJ7)
RAMTPYGNNRLAF

SEQ ID NO: 51654 - protein, 16 aa, Homo sapiens
  CDR3 for beta chain variable domain of TCR clone 25827 (TRBV20-1, TRBJ1-4)
CSARPYGGELNEKLFF

SEQ ID NO: 51655 - protein, 14 aa, Homo sapiens
  CDR3 for alpha chain variable domain of TCR clone 25828 (TRAV38-1, TRAJ45)
CAYYSGGGADGLTF

SEQ ID NO: 51656 - protein, 20 aa, Homo sapiens
  CDR3 for beta chain variable domain of TCR clone 25828 (TRBV28, TRBJ2-1)
CASTTIGRSPGLAGGNEQFF

SEQ ID NO: 51657 - protein, 17 aa, Homo sapiens
  CDR3 for alpha chain variable domain of TCR clone 25829 (TRAV26-1, TRAJ53)
CIVRVNDSGGSNYKLTF

SEQ ID NO: 51658 - protein, 15 aa, Homo sapiens
  CDR3 for beta chain variable domain of TCR clone 25829 (TRBV20-1, TRBJ2-7)
CSARVPAAYFYEQYF

SEQ ID NO: 51659 - protein, 15 aa, Homo sapiens
  CDR3 for alpha chain variable domain of TCR clone 25830 (TRAV13-1, TRAJ5)
CAASPRGHGQESTYF

SEQ ID NO: 51660 - protein, 16 aa, Homo sapiens
  CDR3 for beta chain variable domain of TCR clone 25830 (TRBV7-3, TRBJ2-2)
CASSLKRGTLSGELFF

SEQ ID NO: 51661 - protein, 17 aa, Homo sapiens
  CDR3 for alpha chain variable domain of TCR clone 25831 (TRAV3, TRAJ42)
CAVRDRDYGGSQGNLIF

SEQ ID NO: 51662 - protein, 18 aa, Homo sapiens
  CDR3 for beta chain variable domain of TCR clone 25831 (TRBV11-2, TRBJ2-3)
CASSLGGASRGAPNTQYF

SEQ ID NO: 51663 - protein, 13 aa, Homo sapiens
  CDR3 for alpha chain variable domain of TCR clone 25832 (TRAV27, TRAJ6)
CAGGTRGSYIPTF

SEQ ID NO: 51664 - protein, 15 aa, Homo sapiens
  CDR3 for beta chain variable domain of TCR clone 25832 (TRBV4-1, TRBJ1-4)
CASSDTGGTNEKLFF

SEQ ID NO: 51665 - protein, 13 aa, Homo sapiens
  CDR3 for alpha chain variable domain of TCR clone 25833 (TRAV13-2, TRAJ53)
CAENMGSNYELTF

SEQ ID NO: 51666 - protein, 13 aa, Homo sapiens
  CDR3 for beta chain variable domain of TCR clone 25833 (TRBV4-1, TRBJ2-2)
CASSQENTGELFF

SEQ ID NO: 51667 - protein, 17 aa, Homo sapiens
  CDR3 for alpha chain variable domain of TCR clone 25834 (TRAV3, TRAJ12)
CAVRDGGRVDSSYKLIF

SEQ ID NO: 51668 - protein, 14 aa, Homo sapiens
  CDR3 for beta chain variable domain of TCR clone 25834 (TRBV7-9, TRBJ1-2)
CASSRQGANYGYTF

SEQ ID NO: 51669 - protein, 15 aa, Homo sapiens
  CDR3 for alpha chain variable domain of TCR clone 25835 (TRAV12-2, TRAJ5)
CAVNGKDTGRRALTF

SEQ ID NO: 51670 - protein, 15 aa, Homo sapiens
  CDR3 for beta chain variable domain of TCR clone 25835 (TRBV5-4, TRBJ1-3)
CASSLDMPPGNTIYF

SEQ ID NO: 51671 - protein, 14 aa, Homo sapiens
  CDR3 for alpha chain variable domain of TCR clone 25836 (TRAV23/DV6, TRAJ8)
CAASKATGFQKLVF

SEQ ID NO: 51672 - protein, 15 aa, Homo sapiens
  CDR3 for beta chain variable domain of TCR clone 25836 (TRBV28, TRBJ2-3)
CASSPDRQGANTQYL

SEQ ID NO: 51673 - protein, 14 aa, Homo sapiens
  CDR3 for alpha chain variable domain of TCR clone 25837 (TRAV26-1, TRAJ45)
CIEVTGGGADGLTF

SEQ ID NO: 51674 - protein, 13 aa, Homo sapiens
  CDR3 for beta chain variable domain of TCR clone 25837 (TRBV7-6, TRBJ1-2)
CANSLVADYGYTF

SEQ ID NO: 51675 - protein, 14 aa, Homo sapiens
  CDR3 for alpha chain variable domain of TCR clone 25838 (TRAV29/DV5, TRAJ36)
CAARRKTGANNLFF

SEQ ID NO: 51676 - protein, 14 aa, Homo sapiens
  CDR3 for beta chain variable domain of TCR clone 25838 (TRBV18, TRBJ2-7)
CASSPRGGAYEQYF

SEQ ID NO: 51677 - protein, 18 aa, Homo sapiens
  CDR3 for alpha chain variable domain of TCR clone 25839 (TRAV12-3, TRAJ52)
CAMSRTNAGGTSYGKLTF

SEQ ID NO: 51678 - protein, 17 aa, Homo sapiens
  CDR3 for beta chain variable domain of TCR clone 25839 (TRBV7-3, TRBJ2-3)
CASGLMKRMRGADTQYF

SEQ ID NO: 51679 - protein, 13 aa, Homo sapiens
  CDR3 for alpha chain variable domain of TCR clone 25840 (TRAV13-2, TRAJ48)
CAEMDFGNEKLTF

SEQ ID NO: 51680 - protein, 14 aa, Homo sapiens
  CDR3 for beta chain variable domain of TCR clone 25840 (TRBV25-1, TRBJ1-1)
CASTHLGGNTEAFF

SEQ ID NO: 51681 - protein, 10 aa, Homo sapiens
  CDR3 for alpha chain variable domain of TCR clone 25841 (TRAV12-3, TRAJ49)
CAMNDDQFYF

SEQ ID NO: 51682 - protein, 12 aa, Homo sapiens
  CDR3 for beta chain variable domain of TCR clone 25841 (TRBV12-4, TRBJ1-1)
CQQSGTGFEAFF

SEQ ID NO: 51683 - protein, 14 aa, Homo sapiens
  CDR3 for alpha chain variable domain of TCR clone 25842 (TRAV1-1, TRAJ27)
CAVIYNTNADKSTF

SEQ ID NO: 51684 - protein, 15 aa, Homo sapiens
  CDR3 for beta chain variable domain of TCR clone 25842 (TRBV7-2, TRBJ2-1)
CASSSGLAGGNEQFF

SEQ ID NO: 51685 - protein, 10 aa, Homo sapiens
  CDR3 for alpha chain variable domain of TCR clone 25843 (TRAV1-2, TRAJ31)
CVSEDARLMF

SEQ ID NO: 51686 - protein, 14 aa, Homo sapiens
  CDR3 for beta chain variable domain of TCR clone 25843 (TRBV19, TRBJ2-1)
CASPTVVLSGEQFF

SEQ ID NO: 51687 - protein, 16 aa, Homo sapiens
  CDR3 for alpha chain variable domain of TCR clone 25844 (TRAV13-1, TRAJ37)
CAASSLGPSNTGKLIF

SEQ ID NO: 51688 - protein, 12 aa, Homo sapiens
  CDR3 for beta chain variable domain of TCR clone 25844 (TRBV6-1, TRBJ2-5)
CASSEGRETQYF

SEQ ID NO: 51689 - protein, 13 aa, Homo sapiens
  CDR3 for alpha chain variable domain of TCR clone 25845 (TRAV20, TRAJ49)
CAVQARTGNQFYF

SEQ ID NO: 51690 - protein, 15 aa, Homo sapiens
  CDR3 for beta chain variable domain of TCR clone 25845 (TRBV7-2, TRBJ1-2)
CASSPRAGWNYGYTF

SEQ ID NO: 51691 - protein, 11 aa, Homo sapiens
  CDR3 for alpha chain variable domain of TCR clone 25846 (TRAV3, TRAJ21)
CAVGNFNKCYF

SEQ ID NO: 51692 - protein, 16 aa, Homo sapiens
  CDR3 for beta chain variable domain of TCR clone 25846 (TRBV19, TRBJ2-1)
CASSKAGPSSYNEQFF

SEQ ID NO: 51693 - protein, 13 aa, Homo sapiens
  CDR3 for alpha chain variable domain of TCR clone 25847 (TRAV12-2, TRAJ37)
CAGGSGNTGKLIF

SEQ ID NO: 51694 - protein, 14 aa, Homo sapiens
  CDR3 for beta chain variable domain of TCR clone 25847 (TRBV6-1, TRBJ2-6)
CASQQGAGANDLTF

SEQ ID NO: 51695 - protein, 12 aa, Homo sapiens
  CDR3 for alpha chain variable domain of TCR clone 25848 (TRAV27, TRAJ42)
CAGGGGQGNLIF

SEQ ID NO: 51696 - protein, 13 aa, Homo sapiens
  CDR3 for beta chain variable domain of TCR clone 25848 (TRBV19, TRBJ2-7)
CASSIRSSYEQYF

SEQ ID NO: 51697 - protein, 13 aa, Homo sapiens
  CDR3 for alpha chain variable domain of TCR clone 25849 (TRAV29/DV5, TRAJ47)
CAASAEYGNKLVF

SEQ ID NO: 51698 - protein, 15 aa, Homo sapiens
  CDR3 for beta chain variable domain of TCR clone 25849 (TRBV19, TRBJ1-1)
CASTSGQIQNTEAFF

SEQ ID NO: 51699 - protein, 13 aa, Homo sapiens
  CDR3 for alpha chain variable domain of TCR clone 25850 (TRAV6, TRAJ40)
CALVTSGTYKYIF

SEQ ID NO: 51700 - protein, 13 aa, Homo sapiens
  CDR3 for beta chain variable domain of TCR clone 25850 (TRBV28, TRBJ2-7)
CASRLTPRPEQYF

SEQ ID NO: 51701 - protein, 14 aa, Homo sapiens
  CDR3 for alpha chain variable domain of TCR clone 25851 (TRAV13-2, TRAJ43)
CAEIPTYNNNDMRF

SEQ ID NO: 51702 - protein, 19 aa, Homo sapiens
  CDR3 for beta chain variable domain of TCR clone 25851 (TRBV7-2, TRBJ2-3)
CASSFLSRNWGGGTDTQYF

SEQ ID NO: 51703 - protein, 12 aa, Homo sapiens
  CDR3 for alpha chain variable domain of TCR clone 25852 (TRAV13-1, TRAJ53)
AASGGGNYKLTF

SEQ ID NO: 51704 - protein, 15 aa, Homo sapiens
  CDR3 for beta chain variable domain of TCR clone 25852 (TRBV5-1, TRBJ2-1)
CASSPPRAPYNEQFF

SEQ ID NO: 51705 - protein, 13 aa, Homo sapiens
  CDR3 for alpha chain variable domain of TCR clone 25853 (TRAV3, TRAJ21)
CAVREPDFNKFYF

SEQ ID NO: 51706 - protein, 15 aa, Homo sapiens
  CDR3 for beta chain variable domain of TCR clone 25853 (TRBV5-1, TRBJ2-3)
CASSVTSGSTDTQYF

SEQ ID NO: 51707 - protein, 14 aa, Homo sapiens
  CDR3 for alpha chain variable domain of TCR clone 25854 (TRAV35, TRAJ22)
CAGLRPGYARQLTF

SEQ ID NO: 51708 - protein, 13 aa, Homo sapiens
  CDR3 for beta chain variable domain of TCR clone 25854 (TRBV20-1, TRBJ2-7)
CSATHTSGYEQYF

SEQ ID NO: 51709 - protein, 14 aa, Homo sapiens
  CDR3 for alpha chain variable domain of TCR clone 25855 (TRAV8-2, TRAJ4)
CVVSPSGGHNKLIF

SEQ ID NO: 51710 - protein, 15 aa, Homo sapiens
  CDR3 for beta chain variable domain of TCR clone 25855 (TRBV4-1, TRBJ1-4)
CASSDTGGTNEKLFF

SEQ ID NO: 51711 - protein, 14 aa, Homo sapiens
  CDR3 for alpha chain variable domain of TCR clone 25856 (TRAV13-1, TRAJ3)
CAASKSSRASKIIF

SEQ ID NO: 51712 - protein, 13 aa, Homo sapiens
  CDR3 for beta chain variable domain of TCR clone 25856 (TRBV25-1, TRBJ2-5)
CASSESGRETQYF

SEQ ID NO: 51713 - protein, 13 aa, Homo sapiens
  CDR3 for alpha chain variable domain of TCR clone 25857 (TRAV8-3, TRAJ36)
CAVGATGANNLFF

SEQ ID NO: 51714 - protein, 15 aa, Homo sapiens
  CDR3 for beta chain variable domain of TCR clone 25857 (TRBV7-2, TRBJ1-2)
CASSQRAGWNYGYTF

SEQ ID NO: 51715 - protein, 15 aa, Homo sapiens
  CDR3 for alpha chain variable domain of TCR clone 25858 (TRAV41, TRAJ45)
CAASYSGGGADGLTF

SEQ ID NO: 51716 - protein, 14 aa, Homo sapiens
  CDR3 for beta chain variable domain of TCR clone 25858 (TRBV12-5, TRBJ2-5)
CASGSRAHQETQYF

SEQ ID NO: 51717 - protein, 16 aa, Homo sapiens
  CDR3 for alpha chain variable domain of TCR clone 25859 (TRAV30, TRAJ24)
CGTEIVDADSWGKFQS

SEQ ID NO: 51718 - protein, 15 aa, Homo sapiens
  CDR3 for beta chain variable domain of TCR clone 25859 (TRBV20-1, TRBJ2-7)
CSARDRVSGMDEQYF

SEQ ID NO: 51719 - protein, 13 aa, Homo sapiens
  CDR3 for alpha chain variable domain of TCR clone 25860 (TRAV12-2, TRAJ20)
CAVYPSNDYKLSF

SEQ ID NO: 51720 - protein, 14 aa, Homo sapiens
  CDR3 for beta chain variable domain of TCR clone 25860 (TRBV6-1, TRBJ1-3)
CASVQGGGGNTIYF

SEQ ID NO: 51721 - protein, 16 aa, Homo sapiens
  CDR3 for alpha chain variable domain of TCR clone 25861 (TRAV27, TRAJ52)
CAGAPVGGTSYGKLTF

SEQ ID NO: 51722 - protein, 12 aa, Homo sapiens
  CDR3 for beta chain variable domain of TCR clone 25861 (TRBV27, TRBJ2-1)
CASRGFYNEQFF

SEQ ID NO: 51723 - protein, 14 aa, Homo sapiens
  CDR3 for alpha chain variable domain of TCR clone 25862 (TRAV12-3, TRAJ58)
CAMNTETSGSRLTF

SEQ ID NO: 51724 - protein, 13 aa, Homo sapiens
  CDR3 for beta chain variable domain of TCR clone 25862 (TRBV27, TRBJ2-3)
CASSWGRTDTQYF

SEQ ID NO: 51725 - protein, 11 aa, Homo sapiens
  CDR3 for alpha chain variable domain of TCR clone 25863 (TRAV12-3, TRAJ49)
CAANTGNQSYF

SEQ ID NO: 51726 - protein, 15 aa, Homo sapiens
  CDR3 for beta chain variable domain of TCR clone 25863 (TRBV11-2, TRBJ2-1)
CASSLGTSGLNEQFF

SEQ ID NO: 51727 - protein, 12 aa, Homo sapiens
  CDR3 for alpha chain variable domain of TCR clone 25864 (TRAV12-3, TRAJ43)
CAISSNNNDMRF

SEQ ID NO: 51728 - protein, 15 aa, Homo sapiens
  CDR3 for beta chain variable domain of TCR clone 25864 (TRBV27, TRBJ1-4)
CASSPRHATNEKLFL

SEQ ID NO: 51729 - protein, 18 aa, Homo sapiens
  CDR3 for alpha chain variable domain of TCR clone 25865 (TRAV13-1, )
CAANDIQNPDPAVYQLRD

SEQ ID NO: 51730 - protein, 15 aa, Homo sapiens
  CDR3 for beta chain variable domain of TCR clone 25865 (TRBV11-2, TRBJ2-1)
CASSLGTSGLNEQFF

SEQ ID NO: 51731 - protein, 13 aa, Homo sapiens
  CDR3 for alpha chain variable domain of TCR clone 25866 (TRAV1-2, TRAJ9)
CAALNTGGFKTIF

SEQ ID NO: 51732 - protein, 20 aa, Homo sapiens
  CDR3 for beta chain variable domain of TCR clone 25866 (TRBV28, TRBJ2-1)
CASTPIGRSPGLAGGNEQSF

SEQ ID NO: 51733 - protein, 14 aa, Homo sapiens
  CDR3 for alpha chain variable domain of TCR clone 25867 (TRAV25, TRAJ35)
CARRMEGFGNGLHC

SEQ ID NO: 51734 - protein, 13 aa, Homo sapiens
  CDR3 for beta chain variable domain of TCR clone 25867 (TRBV7-2, TRBJ1-4)
CASSLAGLEKLFF

SEQ ID NO: 51735 - protein, 13 aa, Homo sapiens
  CDR3 for alpha chain variable domain of TCR clone 25868 (TRAV35, TRAJ36)
CAGPRIGANNLFF

SEQ ID NO: 51736 - protein, 15 aa, Homo sapiens
  CDR3 for beta chain variable domain of TCR clone 25868 (TRBV28, TRBJ2-5)
CASSPPWSYQETQHF

SEQ ID NO: 51737 - protein, 15 aa, Homo sapiens
  CDR3 for alpha chain variable domain of TCR clone 25869 (TRAV3, TRAJ4)
CSVRDGTGGYNKLIF

SEQ ID NO: 51738 - protein, 16 aa, Homo sapiens
  CDR3 for beta chain variable domain of TCR clone 25869 (TRBV27, TRBJ2-2)
CASSSSGVSNTGELFF

SEQ ID NO: 51739 - protein, 16 aa, Homo sapiens
  CDR3 for alpha chain variable domain of TCR clone 25870 (TRAV16, TRAJ4)
CALSRMFSGGYNKLIF

SEQ ID NO: 51740 - protein, 16 aa, Homo sapiens
  CDR3 for beta chain variable domain of TCR clone 25870 (TRBV24-1, TRBJ2-3)
CATSDPGTGATGTQYF

SEQ ID NO: 51741 - protein, 11 aa, Homo sapiens
  CDR3 for alpha chain variable domain of TCR clone 25871 (TRAV12-3, TRAJ43)
CAMSVSNDMRF

SEQ ID NO: 51742 - protein, 16 aa, Homo sapiens
  CDR3 for beta chain variable domain of TCR clone 25871 (TRBV12-5, TRBJ2-5)
CASGPRTSGNQETQYF

SEQ ID NO: 51743 - protein, 16 aa, Homo sapiens
  CDR3 for alpha chain variable domain of TCR clone 25872 (TRAV14/DV4, TRAJ54)
CAMREGRIQGAQKLVF

SEQ ID NO: 51744 - protein, 18 aa, Homo sapiens
  CDR3 for beta chain variable domain of TCR clone 25872 (TRBV18, TRBJ1-3)
CASSPRGGAGPSGNTMYF

SEQ ID NO: 51745 - protein, 14 aa, Homo sapiens
  CDR3 for alpha chain variable domain of TCR clone 25873 (TRAV29/DV5, TRAJ34)
CAASASRETDKLIF

SEQ ID NO: 51746 - protein, 13 aa, Homo sapiens
  CDR3 for beta chain variable domain of TCR clone 25873 (TRBV12-4, TRBJ1-2)
CASSLRQGKGYTF

SEQ ID NO: 51747 - protein, 14 aa, Homo sapiens
  CDR3 for alpha chain variable domain of TCR clone 25874 (TRAV16, TRAJ37)
CALDISGNAGKLIF

SEQ ID NO: 51748 - protein, 14 aa, Homo sapiens
  CDR3 for beta chain variable domain of TCR clone 25874 (TRBV7-6, TRBJ2-7)
CASSFRQGADEQYF

SEQ ID NO: 51749 - protein, 14 aa, Homo sapiens
  CDR3 for alpha chain variable domain of TCR clone 25875 (TRAV16, TRAJ17)
CALSGRAAGNKLTF

SEQ ID NO: 51750 - protein, 15 aa, Homo sapiens
  CDR3 for beta chain variable domain of TCR clone 25875 (TRBV3-1, TRBJ1-2)
CASSPTRLPEGGYAF

SEQ ID NO: 51751 - protein, 16 aa, Homo sapiens
  CDR3 for alpha chain variable domain of TCR clone 25876 (TRAV30, TRAJ24)
CGTEIVDADTWGKFQF

SEQ ID NO: 51752 - protein, 14 aa, Homo sapiens
  CDR3 for beta chain variable domain of TCR clone 25876 (TRBV12-5, TRBJ2-5)
CASGSRTHQETQYF

SEQ ID NO: 51753 - protein, 16 aa, Homo sapiens
  CDR3 for alpha chain variable domain of TCR clone 25877 (TRAV30, TRAJ24)
CGTEIVDADSWGKFQF

SEQ ID NO: 51754 - protein, 14 aa, Homo sapiens
  CDR3 for beta chain variable domain of TCR clone 25877 (TRBV5-4, TRBJ1-3)
CASSSRSAGNTIYF

SEQ ID NO: 51755 - protein, 13 aa, Homo sapiens
  CDR3 for alpha chain variable domain of TCR clone 25878 (TRAV21, TRAJ27)
CAARPGNAGKSTF

SEQ ID NO: 51756 - protein, 13 aa, Homo sapiens
  CDR3 for beta chain variable domain of TCR clone 25878 (TRBV7-9, TRBJ2-3)
CASSPGSTDTQYF

SEQ ID NO: 51757 - protein, 16 aa, Homo sapiens
  CDR3 for alpha chain variable domain of TCR clone 25879 (TRAV3, TRAJ37)
CAVRPHGSGNTGKLLF

SEQ ID NO: 51758 - protein, 16 aa, Homo sapiens
  CDR3 for beta chain variable domain of TCR clone 25879 (TRBV9, TRBJ1-2)
CASSVEEKVSPYGYTF

SEQ ID NO: 51759 - protein, 14 aa, Homo sapiens
  CDR3 for alpha chain variable domain of TCR clone 25880 (TRAV12-1, TRAJ38)
CSELKAGNNRKLIW

SEQ ID NO: 51760 - protein, 12 aa, Homo sapiens
  CDR3 for beta chain variable domain of TCR clone 25880 (TRBV24-1, TRBJ1-1)
CATLYPDTEAFF

SEQ ID NO: 51761 - protein, 11 aa, Homo sapiens
  CDR3 for alpha chain variable domain of TCR clone 25881 (TRAV1-2, TRAJ31)
CAVNNNDRLMF

SEQ ID NO: 51762 - protein, 15 aa, Homo sapiens
  CDR3 for beta chain variable domain of TCR clone 25881 (TRBV28, TRBJ2-1)
CASSIIAGGRSEQFF

SEQ ID NO: 51763 - protein, 15 aa, Homo sapiens
  CDR3 for alpha chain variable domain of TCR clone 25882 (TRAV17, TRAJ13)
CATDAGSGGYQKVTF

SEQ ID NO: 51764 - protein, 17 aa, Homo sapiens
  CDR3 for beta chain variable domain of TCR clone 25882 (TRBV11-2, TRBJ2-1)
CASGLYPPGVEYNEQFF

SEQ ID NO: 51765 - protein, 13 aa, Homo sapiens
  CDR3 for alpha chain variable domain of TCR clone 25883 (TRAV3, TRAJ21)
CAVREPDSNKFYF

SEQ ID NO: 51766 - protein, 13 aa, Homo sapiens
  CDR3 for beta chain variable domain of TCR clone 25883 (TRBV9, TRBJ2-1)
CASSPSGGNEQFF

SEQ ID NO: 51767 - protein, 17 aa, Homo sapiens
  CDR3 for alpha chain variable domain of TCR clone 25884 (TRAV3, TRAJ6)
CAVRDGPRAGGSYIPTF

SEQ ID NO: 51768 - protein, 15 aa, Homo sapiens
  CDR3 for beta chain variable domain of TCR clone 25884 (TRBV19, TRBJ1-1)
CASTSGQIQNTEAFF

SEQ ID NO: 51769 - protein, 15 aa, Homo sapiens
  CDR3 for alpha chain variable domain of TCR clone 25885 (TRAV12-1, TRAJ42)
CVVTRDGGSQGNLIF

SEQ ID NO: 51770 - protein, 14 aa, Homo sapiens
  CDR3 for beta chain variable domain of TCR clone 25885 (TRBV11-2, TRBJ2-3)
CASSVGGGANTQYF

SEQ ID NO: 51771 - protein, 11 aa, Homo sapiens
  CDR3 for alpha chain variable domain of TCR clone 25886 (TRAV1-2, TRAJ20)
CAVSNDYKLSF

SEQ ID NO: 51772 - protein, 16 aa, Homo sapiens
  CDR3 for beta chain variable domain of TCR clone 25886 (TRBV29-1, TRBJ2-6)
CSVEDITYSGANVLAF

SEQ ID NO: 51773 - protein, 17 aa, Homo sapiens
  CDR3 for alpha chain variable domain of TCR clone 25887 (TRAV13-1, TRAJ52)
CAASSGAGGTSYGKLTF

SEQ ID NO: 51774 - protein, 15 aa, Homo sapiens
  CDR3 for beta chain variable domain of TCR clone 25887 (TRBV2, TRBJ2-1)
CASSELAGSYNKQFF

SEQ ID NO: 51775 - protein, 12 aa, Homo sapiens
  CDR3 for alpha chain variable domain of TCR clone 25888 (TRAV12-3, TRAJ41)
CAMSYSGYALNF

SEQ ID NO: 51776 - protein, 13 aa, Homo sapiens
  CDR3 for beta chain variable domain of TCR clone 25888 (TRBV7-3, TRBJ2-1)
CASSLDSYNEHFF

SEQ ID NO: 51777 - protein, 12 aa, Homo sapiens
  CDR3 for alpha chain variable domain of TCR clone 25889 (TRAV12-3, TRAJ40)
CAMSSGTYEYIF

SEQ ID NO: 51778 - protein, 15 aa, Homo sapiens
  CDR3 for beta chain variable domain of TCR clone 25889 (TRBV7-3, TRBJ2-2)
CASSETGQGTGELFF

SEQ ID NO: 51779 - protein, 17 aa, Homo sapiens
  CDR3 for alpha chain variable domain of TCR clone 25890 (TRAV26-1, TRAJ53)
CIVRVEDSGGSNYKLTF

SEQ ID NO: 51780 - protein, 15 aa, Homo sapiens
  CDR3 for beta chain variable domain of TCR clone 25890 (TRBV20-1, TRBJ2-7)
CSARVPAAYFYEQYF

SEQ ID NO: 51781 - protein, 10 aa, Homo sapiens
  CDR3 for alpha chain variable domain of TCR clone 25891 (TRAV26-1, TRAJ12)
LMDSSYKLIF

SEQ ID NO: 51782 - protein, 11 aa, Homo sapiens
  CDR3 for beta chain variable domain of TCR clone 25891 (TRBV7-9, TRBJ2-3)
CASSPPDTQYF

SEQ ID NO: 51783 - protein, 15 aa, Homo sapiens
  CDR3 for alpha chain variable domain of TCR clone 25892 (TRAV3, TRAJ22)
CAVRDRGGSARQLTF

SEQ ID NO: 51784 - protein, 14 aa, Homo sapiens
  CDR3 for beta chain variable domain of TCR clone 25892 (TRBV7-9, TRBJ2-1)
CASSPRDSLYEQFF

SEQ ID NO: 51785 - protein, 17 aa, Homo sapiens
  CDR3 for alpha chain variable domain of TCR clone 25893 (TRAV13-1, TRAJ28)
CAASPPYSGAGSYQLTF

SEQ ID NO: 51786 - protein, 15 aa, Homo sapiens
  CDR3 for beta chain variable domain of TCR clone 25893 (TRBV7-2, TRBJ2-7)
CASSLKGALTYEQYF

SEQ ID NO: 51787 - protein, 14 aa, Homo sapiens
  CDR3 for alpha chain variable domain of TCR clone 25894 (TRAV13-2, TRAJ11)
CAETGNSGYSTLTF

SEQ ID NO: 51788 - protein, 11 aa, Homo sapiens
  CDR3 for beta chain variable domain of TCR clone 25894 (TRBV10-3, TRBJ2-7)
CAISEGREQYF

SEQ ID NO: 51789 - protein, 16 aa, Homo sapiens
  CDR3 for alpha chain variable domain of TCR clone 25895 (TRAV4, TRAJ22)
CLVGDLYSGSARHLTF

SEQ ID NO: 51790 - protein, 16 aa, Homo sapiens
  CDR3 for beta chain variable domain of TCR clone 25895 (TRBV7-9, TRBJ2-1)
CASSDVAGGSYNEQFF

SEQ ID NO: 51791 - protein, 16 aa, Homo sapiens
  CDR3 for alpha chain variable domain of TCR clone 25896 (TRAV3, TRAJ37)
CAVRVRGSGNTGELIF

SEQ ID NO: 51792 - protein, 11 aa, Homo sapiens
  CDR3 for beta chain variable domain of TCR clone 25896 (TRBV11-2, TRBJ2-2)
CASSLPGELFF

SEQ ID NO: 51793 - protein, 12 aa, Homo sapiens
  CDR3 for alpha chain variable domain of TCR clone 25897 (TRAV3, TRAJ43)
CAVRDPSNDMRF

SEQ ID NO: 51794 - protein, 15 aa, Homo sapiens
  CDR3 for beta chain variable domain of TCR clone 25897 (TRBV27, TRBJ1-5)
CASSLGTGFDQPQHF

SEQ ID NO: 51795 - protein, 13 aa, Homo sapiens
  CDR3 for alpha chain variable domain of TCR clone 25898 (TRAV2, TRAJ15)
SAVASQAGTALIF

SEQ ID NO: 51796 - protein, 16 aa, Homo sapiens
  CDR3 for beta chain variable domain of TCR clone 25898 (TRBV5-1, TRBJ1-1)
CASSSGGNSLNTEAFF

SEQ ID NO: 51797 - protein, 11 aa, Homo sapiens
  CDR3 for alpha chain variable domain of TCR clone 25899 (TRAV1-2, TRAJ20)
CAVANDYKLSF

SEQ ID NO: 51798 - protein, 18 aa, Homo sapiens
  CDR3 for beta chain variable domain of TCR clone 25899 (TRBV20-1, TRBJ2-6)
CRAETTPTHGSGANVLTF

SEQ ID NO: 51799 - protein, 23 aa, Homo sapiens
  CDR3 for alpha chain variable domain of TCR clone 25900 (TRAV12-2, TRAJ43)
SLLIRDSQPSDSATYLCAFDMRF

SEQ ID NO: 51800 - protein, 17 aa, Homo sapiens
  CDR3 for beta chain variable domain of TCR clone 25900 (TRBV13, TRBJ2-3)
CASSLSRVAGGRNTQYF

SEQ ID NO: 51801 - protein, 10 aa, Homo sapiens
  CDR3 for alpha chain variable domain of TCR clone 25901 (TRAV5, TRAJ34)
CAEDTDKLIF

SEQ ID NO: 51802 - protein, 16 aa, Homo sapiens
  CDR3 for beta chain variable domain of TCR clone 25901 (TRBV7-3, TRBJ2-2)
CASSLKRGTLSGELFF

SEQ ID NO: 51803 - protein, 14 aa, Homo sapiens
  CDR3 for alpha chain variable domain of TCR clone 25902 (TRAV13-1, TRAJ9)
CAASALTGGSKTIF

SEQ ID NO: 51804 - protein, 13 aa, Homo sapiens
  CDR3 for beta chain variable domain of TCR clone 25902 (TRBV20-1, TRBJ1-1)
CSAGTVGNTEAFF

SEQ ID NO: 51805 - protein, 14 aa, Homo sapiens
  CDR3 for alpha chain variable domain of TCR clone 25903 (TRAV12-1, TRAJ12)
CVVTRMDSSYKLIF

SEQ ID NO: 51806 - protein, 13 aa, Homo sapiens
  CDR3 for beta chain variable domain of TCR clone 25903 (TRBV20-1, TRBJ1-1)
CSARGGGSTEAFF

SEQ ID NO: 51807 - protein, 15 aa, Homo sapiens
  CDR3 for alpha chain variable domain of TCR clone 25904 (TRAV3, TRAJ5)
CAVRDLDTGRRALTF

SEQ ID NO: 51808 - protein, 13 aa, Homo sapiens
  CDR3 for beta chain variable domain of TCR clone 25904 (TRBV12-4, TRBJ2-7)
CASNPTETYEQYF

SEQ ID NO: 51809 - protein, 15 aa, Homo sapiens
  CDR3 for alpha chain variable domain of TCR clone 25905 (TRAV27, TRAJ38)
CAARRNAGNNRKLIW

SEQ ID NO: 51810 - protein, 14 aa, Homo sapiens
  CDR3 for beta chain variable domain of TCR clone 25905 (TRBV6-1, TRBJ1-3)
CASVQGGGGDTIYF

SEQ ID NO: 51811 - protein, 13 aa, Homo sapiens
  CDR3 for alpha chain variable domain of TCR clone 25906 (TRAV12-3, TRAJ21)
CAPGPHNFNKFYF

SEQ ID NO: 51812 - protein, 15 aa, Homo sapiens
  CDR3 for beta chain variable domain of TCR clone 25906 (TRBV3-1, TRBJ2-7)
CASSQDAGRTYEQYF

SEQ ID NO: 51813 - protein, 14 aa, Homo sapiens
  CDR3 for alpha chain variable domain of TCR clone 25907 (TRAV12-2, TRAJ17)
CAVLFKAAGNKLTF

SEQ ID NO: 51814 - protein, 17 aa, Homo sapiens
  CDR3 for beta chain variable domain of TCR clone 25907 (TRBV20-1, TRBJ2-2)
CSASGSGQGGLTGDLFF

SEQ ID NO: 51815 - protein, 14 aa, Homo sapiens
  CDR3 for alpha chain variable domain of TCR clone 25908 (TRAV17, TRAJ16)
CATADFSDGQKLLF

SEQ ID NO: 51816 - protein, 15 aa, Homo sapiens
  CDR3 for beta chain variable domain of TCR clone 25908 (TRBV18, TRBJ2-1)
CASSPPSASHNEQFF

SEQ ID NO: 51817 - protein, 14 aa, Homo sapiens
  CDR3 for alpha chain variable domain of TCR clone 25909 (TRAV12-2, TRAJ13)
CAVKKTGGYQKVTF

SEQ ID NO: 51818 - protein, 13 aa, Homo sapiens
  CDR3 for beta chain variable domain of TCR clone 25909 (TRBV12-4, TRBJ2-7)
CASSRDSGYEQYF

SEQ ID NO: 51819 - protein, 14 aa, Homo sapiens
  CDR3 for alpha chain variable domain of TCR clone 25910 (TRAV13-1, TRAJ44)
CAAKATGTTSKLTF

SEQ ID NO: 51820 - protein, 15 aa, Homo sapiens
  CDR3 for beta chain variable domain of TCR clone 25910 (TRBV19, TRBJ2-1)
CASIKGRGPYNEQFF

SEQ ID NO: 51821 - protein, 16 aa, Homo sapiens
  CDR3 for alpha chain variable domain of TCR clone 25911 (TRAV4, TRAJ22)
CLVCDLYSGSARQLTF

SEQ ID NO: 51822 - protein, 16 aa, Homo sapiens
  CDR3 for beta chain variable domain of TCR clone 25911 (TRBV7-9, TRBJ2-1)
CASSDVAGGSYNEQFF

SEQ ID NO: 51823 - protein, 15 aa, Homo sapiens
  CDR3 for alpha chain variable domain of TCR clone 25912 (TRAV17, TRAJ35)
CATAFVIGFGNVPHC

SEQ ID NO: 51824 - protein, 15 aa, Homo sapiens
  CDR3 for beta chain variable domain of TCR clone 25912 (TRBV7-9, TRBJ2-7)
CASSLALAEAYEQYF

SEQ ID NO: 51825 - protein, 11 aa, Homo sapiens
  CDR3 for alpha chain variable domain of TCR clone 25913 (TRAV12-3, TRAJ43)
CAMSVSNDMRF

SEQ ID NO: 51826 - protein, 15 aa, Homo sapiens
  CDR3 for beta chain variable domain of TCR clone 25913 (TRBV11-3, TRBJ2-3)
CASLKDGREGDTQYF

SEQ ID NO: 51827 - protein, 15 aa, Homo sapiens
  CDR3 for alpha chain variable domain of TCR clone 25914 (TRAV38-2/DV8, TRAJ47)
CAYRSARGYGNKLVF

SEQ ID NO: 51828 - protein, 15 aa, Homo sapiens
  CDR3 for beta chain variable domain of TCR clone 25914 (TRBV6-6, TRBJ2-7)
CASSYSYGGSYEQYF

SEQ ID NO: 51829 - protein, 11 aa, Homo sapiens
  CDR3 for alpha chain variable domain of TCR clone 25915 (TRAV3, TRAJ21)
CAVGNFNKFYF

SEQ ID NO: 51830 - protein, 16 aa, Homo sapiens
  CDR3 for beta chain variable domain of TCR clone 25915 (TRBV19, TRBJ2-1)
CASSKGGPSSYNEQFF

SEQ ID NO: 51831 - protein, 15 aa, Homo sapiens
  CDR3 for alpha chain variable domain of TCR clone 25916 (TRAV25, TRAJ52)
CAGRPGGTSYGKLTF

SEQ ID NO: 51832 - protein, 14 aa, Homo sapiens
  CDR3 for beta chain variable domain of TCR clone 25916 (TRBV4-1, TRBJ2-2)
CASSQAVNTGELFF

SEQ ID NO: 51833 - protein, 16 aa, Homo sapiens
  CDR3 for alpha chain variable domain of TCR clone 25917 (TRAV3, TRAJ37)
CAVRGKGSGNTGKLIF

SEQ ID NO: 51834 - protein, 14 aa, Homo sapiens
  CDR3 for beta chain variable domain of TCR clone 25917 (TRBV7-6, TRBJ2-3)
CASSLGTVTDTQYF

SEQ ID NO: 51835 - protein, 11 aa, Homo sapiens
  CDR3 for alpha chain variable domain of TCR clone 25918 (TRAV12-3, TRAJ17)
CNDATGNKLTF

SEQ ID NO: 51836 - protein, 15 aa, Homo sapiens
  CDR3 for beta chain variable domain of TCR clone 25918 (TRBV20-1, TRBJ2-7)
CSARDRVSGMDGQYF

SEQ ID NO: 51837 - protein, 18 aa, Homo sapiens
  CDR3 for alpha chain variable domain of TCR clone 25919 (TRAV21, TRAJ52)
CAVRPSPAGGTSYGKLTF

SEQ ID NO: 51838 - protein, 13 aa, Homo sapiens
  CDR3 for beta chain variable domain of TCR clone 25919 (TRBV12-4, TRBJ2-7)
CASSPTETYEQYF

SEQ ID NO: 51839 - protein, 16 aa, Homo sapiens
  CDR3 for alpha chain variable domain of TCR clone 25920 (TRAV30, TRAJ24)
CGTEIVDADSWGKFQF

SEQ ID NO: 51840 - protein, 13 aa, Homo sapiens
  CDR3 for beta chain variable domain of TCR clone 25920 (TRBV11-2, TRBJ2-5)
CASSFSSQETQYF

SEQ ID NO: 51841 - protein, 13 aa, Homo sapiens
  CDR3 for alpha chain variable domain of TCR clone 25921 (TRAV17, TRAJ9)
CATDYTGGFKTIF

SEQ ID NO: 51842 - protein, 16 aa, Homo sapiens
  CDR3 for beta chain variable domain of TCR clone 25921 (TRBV7-7, TRBJ2-1)
CASSLASGTSYKEQFF

SEQ ID NO: 51843 - protein, 13 aa, Homo sapiens
  CDR3 for alpha chain variable domain of TCR clone 25922 (TRAV3, TRAJ41)
CAVSSNSGYALNF

SEQ ID NO: 51844 - protein, 13 aa, Homo sapiens
  CDR3 for beta chain variable domain of TCR clone 25922 (TRBV20-1, TRBJ2-2)
CSALSGGARELFF

SEQ ID NO: 51845 - protein, 16 aa, Homo sapiens
  CDR3 for alpha chain variable domain of TCR clone 25923 (TRAV27, )
CADIQNPDPAVYQLRD

SEQ ID NO: 51846 - protein, 13 aa, Homo sapiens
  CDR3 for beta chain variable domain of TCR clone 25923 (TRBV28, TRBJ2-5)
CASSSRNQETQYF

SEQ ID NO: 51847 - protein, 14 aa, Homo sapiens
  CDR3 for alpha chain variable domain of TCR clone 25924 (TRAV12-2, TRAJ40)
CAVKIPSGTYKYIF

SEQ ID NO: 51848 - protein, 14 aa, Homo sapiens
  CDR3 for beta chain variable domain of TCR clone 25924 (TRBV11-2, TRBJ2-7)
CASSLGAGAYEQYF

SEQ ID NO: 51849 - protein, 13 aa, Homo sapiens
  CDR3 for alpha chain variable domain of TCR clone 25925 (TRAV12-3, TRAJ33)
CAMSVNSNYQLIW

SEQ ID NO: 51850 - protein, 13 aa, Homo sapiens
  CDR3 for beta chain variable domain of TCR clone 25925 (TRBV7-2, TRBJ2-2)
CASSLAVTGELFF

SEQ ID NO: 51851 - protein, 13 aa, Homo sapiens
  CDR3 for alpha chain variable domain of TCR clone 25926 (TRAV8-3, TRAJ28)
CAVGAVGSYQLTF

SEQ ID NO: 51852 - protein, 14 aa, Homo sapiens
  CDR3 for beta chain variable domain of TCR clone 25926 (TRBV7-2, TRBJ2-7)
CASRSQGVAYEQYF

SEQ ID NO: 51853 - protein, 16 aa, Homo sapiens
  CDR3 for alpha chain variable domain of TCR clone 25927 (TRAV30, TRAJ24)
CGTEIVDADSWGKFQF

SEQ ID NO: 51854 - protein, 14 aa, Homo sapiens
  CDR3 for beta chain variable domain of TCR clone 25927 (TRBV12-5, TRBJ2-5)
CASGSRTLQETQYF

SEQ ID NO: 51855 - protein, 11 aa, Homo sapiens
  CDR3 for alpha chain variable domain of TCR clone 25928 (TRAV2, TRAJ33)
CAVESNYQLIW

SEQ ID NO: 51856 - protein, 13 aa, Homo sapiens
  CDR3 for beta chain variable domain of TCR clone 25928 (TRBV4-2, TRBJ1-1)
CASSQAGNTEAFF

SEQ ID NO: 51857 - protein, 14 aa, Homo sapiens
  CDR3 for alpha chain variable domain of TCR clone 25929 (TRAV8-4, TRAJ9)
CAVRINTGGLKTIF

SEQ ID NO: 51858 - protein, 15 aa, Homo sapiens
  CDR3 for beta chain variable domain of TCR clone 25929 (TRBV10-2, TRBJ2-6)
CASSEQGTGANVLTF

SEQ ID NO: 51859 - protein, 12 aa, Homo sapiens
  CDR3 for alpha chain variable domain of TCR clone 25930 (TRAV12-3, TRAJ17)
CAMTLTGNKLTF

SEQ ID NO: 51860 - protein, 15 aa, Homo sapiens
  CDR3 for beta chain variable domain of TCR clone 25930 (TRBV5-1, TRBJ1-4)
CASSPWTGREEKLFF

SEQ ID NO: 51861 - protein, 16 aa, Homo sapiens
  CDR3 for alpha chain variable domain of TCR clone 25931 (TRAV1-2, TRAJ10)
CAVRWVLTGGGNKLTF

SEQ ID NO: 51862 - protein, 12 aa, Homo sapiens
  CDR3 for beta chain variable domain of TCR clone 25931 (TRBV7-8, TRBJ2-7)
CASSLGDREQYF

SEQ ID NO: 51863 - protein, 14 aa, Homo sapiens
  CDR3 for alpha chain variable domain of TCR clone 25932 (TRAV35, TRAJ42)
CAGRYGGSQGNLIF

SEQ ID NO: 51864 - protein, 15 aa, Homo sapiens
  CDR3 for beta chain variable domain of TCR clone 25932 (TRBV7-9, TRBJ2-1)
CASSLGGGRANEQFF

SEQ ID NO: 51865 - protein, 14 aa, Homo sapiens
  CDR3 for alpha chain variable domain of TCR clone 25933 (TRAV20, TRAJ56)
RAVQFGGANSKLTF

SEQ ID NO: 51866 - protein, 14 aa, Homo sapiens
  CDR3 for beta chain variable domain of TCR clone 25933 (TRBV20-1, TRBJ2-7)
CSAKRGRSSYEQYF

SEQ ID NO: 51867 - protein, 14 aa, Homo sapiens
  CDR3 for alpha chain variable domain of TCR clone 25934 (TRAV26-2, TRAJ38)
CILYNAGNNRKLIW

SEQ ID NO: 51868 - protein, 14 aa, Homo sapiens
  CDR3 for beta chain variable domain of TCR clone 25934 (TRBV19, TRBJ2-1)
CASPTFVLSGEQFF

SEQ ID NO: 51869 - protein, 14 aa, Homo sapiens
  CDR3 for alpha chain variable domain of TCR clone 25935 (TRAV13-1, TRAJ44)
CAAKATGTDSKLTF

SEQ ID NO: 51870 - protein, 17 aa, Homo sapiens
  CDR3 for beta chain variable domain of TCR clone 25935 (TRBV7-3, TRBJ2-3)
CASSLMKRMRGADTQYF

SEQ ID NO: 51871 - protein, 14 aa, Homo sapiens
  CDR3 for alpha chain variable domain of TCR clone 25936 (TRAV1-2, TRAJ8)
CAVREDTGFQKLVF

SEQ ID NO: 51872 - protein, 14 aa, Homo sapiens
  CDR3 for beta chain variable domain of TCR clone 25936 (TRBV7-6, TRBJ2-3)
CASSVAGGTDTQYF

SEQ ID NO: 51873 - protein, 17 aa, Homo sapiens
  CDR3 for alpha chain variable domain of TCR clone 25937 (TRAV27, TRAJ26)
CAGARAHLDNYGQNFVF

SEQ ID NO: 51874 - protein, 15 aa, Homo sapiens
  CDR3 for beta chain variable domain of TCR clone 25937 (TRBV11-2, TRBJ2-5)
CASSPRSGGLETQYF

SEQ ID NO: 51875 - protein, 10 aa, Homo sapiens
  CDR3 for alpha chain variable domain of TCR clone 25938 (TRAV12-3, TRAJ49)
CAMNDDRFYF

SEQ ID NO: 51876 - protein, 13 aa, Homo sapiens
  CDR3 for beta chain variable domain of TCR clone 25938 (TRBV12-4, TRBJ1-1)
CASSPGTGFEAFF

SEQ ID NO: 51877 - protein, 16 aa, Homo sapiens
  CDR3 for alpha chain variable domain of TCR clone 25939 (TRAV30, TRAJ24)
CGTEIVDADSRGKFQF

SEQ ID NO: 51878 - protein, 19 aa, Homo sapiens
  CDR3 for beta chain variable domain of TCR clone 25939 (TRBV25-1, TRBJ2-2)
CAILVYRVDRGRKTGELFF

SEQ ID NO: 51879 - protein, 17 aa, Homo sapiens
  CDR3 for alpha chain variable domain of TCR clone 25940 (TRAV3, TRAJ42)
CAVRDRDYGGSQGNLIF

SEQ ID NO: 51880 - protein, 15 aa, Homo sapiens
  CDR3 for beta chain variable domain of TCR clone 25940 (TRBV6-6, TRBJ2-7)
CASGYSYGGSYEQYF

SEQ ID NO: 51881 - protein, 16 aa, Homo sapiens
  CDR3 for alpha chain variable domain of TCR clone 25941 (TRAV21, TRAJ37)
CAVRTAGSSNTVKLIF

SEQ ID NO: 51882 - protein, 13 aa, Homo sapiens
  CDR3 for beta chain variable domain of TCR clone 25941 (TRBV7-9, TRBJ2-5)
CASLPSGRETQYF

SEQ ID NO: 51883 - protein, 15 aa, Homo sapiens
  CDR3 for alpha chain variable domain of TCR clone 25942 (TRAV17, TRAJ57)
CATGPSQGGSEKLVF

SEQ ID NO: 51884 - protein, 14 aa, Homo sapiens
  CDR3 for beta chain variable domain of TCR clone 25942 (TRBV12-5, TRBJ2-5)
CASGSRTHQETQYV

SEQ ID NO: 51885 - protein, 15 aa, Homo sapiens
  CDR3 for alpha chain variable domain of TCR clone 25943 (TRAV12-2, )
CAVASLATTISRTLT

SEQ ID NO: 51886 - protein, 16 aa, Homo sapiens
  CDR3 for beta chain variable domain of TCR clone 25943 (TRBV5-1, TRBJ2-2)
CASSSRTGGRTGELFF

SEQ ID NO: 51887 - protein, 12 aa, Homo sapiens
  CDR3 for alpha chain variable domain of TCR clone 25944 (TRAV12-3, TRAJ17)
CAKTLTGNKLTF

SEQ ID NO: 51888 - protein, 13 aa, Homo sapiens
  CDR3 for beta chain variable domain of TCR clone 25944 (TRBV20-1, TRBJ1-1)
CSARGGGNTEAFF

SEQ ID NO: 51889 - protein, 13 aa, Homo sapiens
  CDR3 for alpha chain variable domain of TCR clone 25945 (TRAV23/DV6, TRAJ43)
CAASMGGNNDMRF

SEQ ID NO: 51890 - protein, 11 aa, Homo sapiens
  CDR3 for beta chain variable domain of TCR clone 25945 (TRBV12-4, TRBJ2-3)
CASTATDTQYF

SEQ ID NO: 51891 - protein, 16 aa, Homo sapiens
  CDR3 for alpha chain variable domain of TCR clone 25946 (TRAV3, TRAJ37)
CAVRPHGSGNTGKLIF

SEQ ID NO: 51892 - protein, 16 aa, Homo sapiens
  CDR3 for beta chain variable domain of TCR clone 25946 (TRBV28, TRBJ1-4)
CASSSRTGAANEKLFF

SEQ ID NO: 51893 - protein, 14 aa, Homo sapiens
  CDR3 for alpha chain variable domain of TCR clone 25947 (TRAV12-2, TRAJ6)
CASKWGGGSYIHTF

SEQ ID NO: 51894 - protein, 13 aa, Homo sapiens
  CDR3 for beta chain variable domain of TCR clone 25947 (TRBV2, TRBJ1-1)
CASSEGGNTEAFF

SEQ ID NO: 51895 - protein, 10 aa, Homo sapiens
  CDR3 for alpha chain variable domain of TCR clone 25948 (TRAV12-2, TRAJ52)
RSTSYGKLTF

SEQ ID NO: 51896 - protein, 11 aa, Homo sapiens
  CDR3 for beta chain variable domain of TCR clone 25948 (TRBV11-3, TRBJ2-2)
CASSLPGELFF

SEQ ID NO: 51897 - protein, 14 aa, Homo sapiens
  CDR3 for alpha chain variable domain of TCR clone 25949 (TRAV1-2, TRAJ16)
CAVNRFSDGQKLLF

SEQ ID NO: 51898 - protein, 15 aa, Homo sapiens
  CDR3 for beta chain variable domain of TCR clone 25949 (TRBV7-9, TRBJ1-6)
CASCSPGRGNSPLHF

SEQ ID NO: 51899 - protein, 10 aa, Homo sapiens
  CDR3 for alpha chain variable domain of TCR clone 25950 (TRAV1-2, TRAJ20)
CALNDYKPSF

SEQ ID NO: 51900 - protein, 16 aa, Homo sapiens
  CDR3 for beta chain variable domain of TCR clone 25950 (TRBV20-1, TRBJ1-1)
CSARALTQGMNTEAFF

SEQ ID NO: 51901 - protein, 13 aa, Homo sapiens
  CDR3 for alpha chain variable domain of TCR clone 25951 (TRAV8-3, TRAJ44)
CAVVPGTASKLPF

SEQ ID NO: 51902 - protein, 14 aa, Homo sapiens
  CDR3 for beta chain variable domain of TCR clone 25951 (TRBV11-2, TRBJ2-3)
CASRRLARTDTQYF

SEQ ID NO: 51903 - protein, 16 aa, Homo sapiens
  CDR3 for alpha chain variable domain of TCR clone 25952 (TRAV8-3, TRAJ13)
CAVGAYPSGGYQKVTF

SEQ ID NO: 51904 - protein, 15 aa, Homo sapiens
  CDR3 for beta chain variable domain of TCR clone 25952 (TRBV19, TRBJ1-5)
CASSIVCADNQPQHF

SEQ ID NO: 51905 - protein, 16 aa, Homo sapiens
  CDR3 for alpha chain variable domain of TCR clone 25953 (TRAV3, TRAJ10)
CAVRDMRAGGGNKLTF

SEQ ID NO: 51906 - protein, 12 aa, Homo sapiens
  CDR3 for beta chain variable domain of TCR clone 25953 (TRBV29-1, TRBJ2-3)
CSVTGGADTQYF

SEQ ID NO: 51907 - protein, 18 aa, Homo sapiens
  CDR3 for alpha chain variable domain of TCR clone 25954 (TRAV12-3, TRAJ52)
CAMRRTNAGGTSYGKLTF

SEQ ID NO: 51908 - protein, 17 aa, Homo sapiens
  CDR3 for beta chain variable domain of TCR clone 25954 (TRBV7-3, TRBJ2-3)
CASSLMKRMRGADTQYF

SEQ ID NO: 51909 - protein, 13 aa, Homo sapiens
  CDR3 for alpha chain variable domain of TCR clone 25955 (TRAV17, TRAJ9)
CATDYTGGFKTIF

SEQ ID NO: 51910 - protein, 16 aa, Homo sapiens
  CDR3 for beta chain variable domain of TCR clone 25955 (TRBV7-7, TRBJ2-1)
CASSLASGTSYDEQFF

SEQ ID NO: 51911 - protein, 13 aa, Homo sapiens
  CDR3 for alpha chain variable domain of TCR clone 25956 (TRAV21, TRAJ27)
CAARPGNTGKSTF

SEQ ID NO: 51912 - protein, 16 aa, Homo sapiens
  CDR3 for beta chain variable domain of TCR clone 25956 (TRBV20-1, TRBJ1-2)
CSASMGQGVANYGYTF

SEQ ID NO: 51913 - protein, 14 aa, Homo sapiens
  CDR3 for alpha chain variable domain of TCR clone 25957 (TRAV38-1, TRAJ45)
CASNSGGGADGLTF

SEQ ID NO: 51914 - protein, 13 aa, Homo sapiens
  CDR3 for beta chain variable domain of TCR clone 25957 (TRBV10-3, TRBJ1-2)
CAISERDSYGYTF

SEQ ID NO: 51915 - protein, 10 aa, Homo sapiens
  CDR3 for alpha chain variable domain of TCR clone 25958 (TRAV8-4, TRAJ43)
CAVSADDMRL

SEQ ID NO: 51916 - protein, 15 aa, Homo sapiens
  CDR3 for beta chain variable domain of TCR clone 25958 (TRBV5-1, TRBJ2-3)
CASSVTSGSTDTQYF

SEQ ID NO: 51917 - protein, 14 aa, Homo sapiens
  CDR3 for alpha chain variable domain of TCR clone 25959 (TRAV17, TRAJ16)
CATADFSYGQKLLF

SEQ ID NO: 51918 - protein, 15 aa, Homo sapiens
  CDR3 for beta chain variable domain of TCR clone 25959 (TRBV18, TRBJ2-1)
CASSPPSASYNEQFF

SEQ ID NO: 51919 - protein, 10 aa, Homo sapiens
  CDR3 for alpha chain variable domain of TCR clone 25960 (TRAV23/DV6, TRAJ57)
CAASSTLSQG

SEQ ID NO: 51920 - protein, 14 aa, Homo sapiens
  CDR3 for beta chain variable domain of TCR clone 25960 (TRBV25-1, TRBJ1-1)
CASTHLGWNTEAFF

SEQ ID NO: 51921 - protein, 13 aa, Homo sapiens
  CDR3 for alpha chain variable domain of TCR clone 25961 (TRAV35, TRAJ42)
CAGFPGSQGNLIF

SEQ ID NO: 51922 - protein, 13 aa, Homo sapiens
  CDR3 for beta chain variable domain of TCR clone 25961 (TRBV29-1, TRBJ2-1)
CSVGGGRVNEQFF

SEQ ID NO: 51923 - protein, 12 aa, Homo sapiens
  CDR3 for alpha chain variable domain of TCR clone 25962 (TRAV13-1, TRAJ21)
CAAREGFNKFYF

SEQ ID NO: 51924 - protein, 14 aa, Homo sapiens
  CDR3 for beta chain variable domain of TCR clone 25962 (TRBV5-4, TRBJ1-1)
CASSLDSRRDEAFF

SEQ ID NO: 51925 - protein, 16 aa, Homo sapiens
  CDR3 for alpha chain variable domain of TCR clone 25963 (TRAV12-1, TRAJ53)
CVVTSVAGGSNYKLTF

SEQ ID NO: 51926 - protein, 13 aa, Homo sapiens
  CDR3 for beta chain variable domain of TCR clone 25963 (TRBV19, TRBJ1-2)
CASSVPGQDGYTF

SEQ ID NO: 51927 - protein, 12 aa, Homo sapiens
  CDR3 for alpha chain variable domain of TCR clone 25964 (TRAV13-2, TRAJ23)
CAERHRGGKLIF

SEQ ID NO: 51928 - protein, 16 aa, Homo sapiens
  CDR3 for beta chain variable domain of TCR clone 25964 (TRBV20-1, TRBJ1-4)
CSAPGQCLLTNEKLFF

SEQ ID NO: 51929 - protein, 13 aa, Homo sapiens
  CDR3 for alpha chain variable domain of TCR clone 25965 (TRAV9-2, TRAJ53)
CALSGGSNYKLTS

SEQ ID NO: 51930 - protein, 17 aa, Homo sapiens
  CDR3 for beta chain variable domain of TCR clone 25965 (TRBV11-2, TRBJ2-1)
CASSLYPPGVEYNEQFF

SEQ ID NO: 51931 - protein, 15 aa, Homo sapiens
  CDR3 for alpha chain variable domain of TCR clone 25966 (TRAV26-1, TRAJ44)
CIVRANTGTAGKLTF

SEQ ID NO: 51932 - protein, 16 aa, Homo sapiens
  CDR3 for beta chain variable domain of TCR clone 25966 (TRBV7-7, TRBJ2-1)
CASSLASGTSYNEQFF

SEQ ID NO: 51933 - protein, 13 aa, Homo sapiens
  CDR3 for alpha chain variable domain of TCR clone 25967 (TRAV26-2, TRAJ43)
CILRAVNNNNMRF

SEQ ID NO: 51934 - protein, 15 aa, Homo sapiens
  CDR3 for beta chain variable domain of TCR clone 25967 (TRBV7-2, TRBJ2-1)
CASTHGTGIYNEQFF

SEQ ID NO: 51935 - protein, 12 aa, Homo sapiens
  CDR3 for alpha chain variable domain of TCR clone 25968 (TRAV12-2, TRAJ16)
CAVNLDGQKLLF

SEQ ID NO: 51936 - protein, 12 aa, Homo sapiens
  CDR3 for beta chain variable domain of TCR clone 25968 (TRBV5-7, TRBJ2-7)
CASSVQGGEQYS

SEQ ID NO: 51937 - protein, 11 aa, Homo sapiens
  CDR3 for alpha chain variable domain of TCR clone 25969 (TRAV13-1, TRAJ52)
PGGTSYGKLTF

SEQ ID NO: 51938 - protein, 16 aa, Homo sapiens
  CDR3 for beta chain variable domain of TCR clone 25969 (TRBV28, TRBJ2-7)
CASSPWVATGDLAQYF

SEQ ID NO: 51939 - protein, 14 aa, Homo sapiens
  CDR3 for alpha chain variable domain of TCR clone 25970 (TRAV12-2, TRAJ13)
CAVKKTGGYQKVTF

SEQ ID NO: 51940 - protein, 14 aa, Homo sapiens
  CDR3 for beta chain variable domain of TCR clone 25970 (TRBV19, TRBJ2-7)
CASTVQGRPYEQYF

SEQ ID NO: 51941 - protein, 14 aa, Homo sapiens
  CDR3 for alpha chain variable domain of TCR clone 25971 (TRAV8-3, TRAJ4)
CAVGAAGGYNKLIF

SEQ ID NO: 51942 - protein, 15 aa, Homo sapiens
  CDR3 for beta chain variable domain of TCR clone 25971 (TRBV6-5, TRBJ2-1)
CASSYDVGAGNEQFF

SEQ ID NO: 51943 - protein, 12 aa, Homo sapiens
  CDR3 for alpha chain variable domain of TCR clone 25972 (TRAV3, TRAJ31)
CAVRDGNARRMF

SEQ ID NO: 51944 - protein, 18 aa, Homo sapiens
  CDR3 for beta chain variable domain of TCR clone 25972 (TRBV7-2, TRBJ2-3)
CASSLKREGSGITDTQYF

SEQ ID NO: 51945 - protein, 13 aa, Homo sapiens
  CDR3 for alpha chain variable domain of TCR clone 25973 (TRAV21, TRAJ27)
CAGRPGNAGKSTF

SEQ ID NO: 51946 - protein, 14 aa, Homo sapiens
  CDR3 for beta chain variable domain of TCR clone 25973 (TRBV7-6, TRBJ2-3)
CASSLGTVTDTQYF

SEQ ID NO: 51947 - protein, 12 aa, Homo sapiens
  CDR3 for alpha chain variable domain of TCR clone 25974 (TRAV12-3, TRAJ17)
CAMTLTGNKLTF

SEQ ID NO: 51948 - protein, 17 aa, Homo sapiens
  CDR3 for beta chain variable domain of TCR clone 25974 (TRBV20-1, TRBJ2-7)
CSARDGSLGWTSSTSGR

SEQ ID NO: 51949 - protein, 11 aa, Homo sapiens
  CDR3 for alpha chain variable domain of TCR clone 25975 (TRAV2, TRAJ33)
CAVDSNYQLIW

SEQ ID NO: 51950 - protein, 15 aa, Homo sapiens
  CDR3 for beta chain variable domain of TCR clone 25975 (TRBV19, TRBJ1-2)
CASSVRQVLNYGYTF

SEQ ID NO: 51951 - protein, 14 aa, Homo sapiens
  CDR3 for alpha chain variable domain of TCR clone 25976 (TRAV12-2, TRAJ40)
CAVKIPSGTYKYIF

SEQ ID NO: 51952 - protein, 13 aa, Homo sapiens
  CDR3 for beta chain variable domain of TCR clone 25976 (TRBV4-2, TRBJ1-1)
CASSQAGNTEAFF

SEQ ID NO: 51953 - protein, 16 aa, Homo sapiens
  CDR3 for alpha chain variable domain of TCR clone 25977 (TRAV23/DV6, TRAJ9)
CAASIGGNTGGFKTTF

SEQ ID NO: 51954 - protein, 12 aa, Homo sapiens
  CDR3 for beta chain variable domain of TCR clone 25977 (TRBV11-2, TRBJ2-1)
CASSVQREGQFF

SEQ ID NO: 51955 - protein, 15 aa, Homo sapiens
  CDR3 for alpha chain variable domain of TCR clone 25978 (TRAV3, TRAJ20)
CAVRDIKLSDYKLSF

SEQ ID NO: 51956 - protein, 15 aa, Homo sapiens
  CDR3 for beta chain variable domain of TCR clone 25978 (TRBV7-9, TRBJ1-6)
CTSSSPGRGNSPLHF

SEQ ID NO: 51957 - protein, 12 aa, Homo sapiens
  CDR3 for alpha chain variable domain of TCR clone 25979 (TRAV27, TRAJ9)
CAGESGGFKTIL

SEQ ID NO: 51958 - protein, 18 aa, Homo sapiens
  CDR3 for beta chain variable domain of TCR clone 25979 (TRBV10-2, TRBJ2-2)
CISAPAVHRQADAGELFF

SEQ ID NO: 51959 - protein, 14 aa, Homo sapiens
  CDR3 for alpha chain variable domain of TCR clone 25980 (TRAV29/DV5, TRAJ28)
RAARAGAGSYQLTF

SEQ ID NO: 51960 - protein, 13 aa, Homo sapiens
  CDR3 for beta chain variable domain of TCR clone 25980 (TRBV7-2, TRBJ1-5)
CASSFARNQPQHF

SEQ ID NO: 51961 - protein, 12 aa, Homo sapiens
  CDR3 for alpha chain variable domain of TCR clone 25981 (TRAV30, TRAJ39)
CGRGNAGNMLTF

SEQ ID NO: 51962 - protein, 14 aa, Homo sapiens
  CDR3 for beta chain variable domain of TCR clone 25981 (TRBV10-3, TRBJ2-1)
CAIRTDRGLNEQFF

SEQ ID NO: 51963 - protein, 12 aa, Homo sapiens
  CDR3 for alpha chain variable domain of TCR clone 25982 (TRAV27, TRAJ41)
CAGRNSGYALNF

SEQ ID NO: 51964 - protein, 13 aa, Homo sapiens
  CDR3 for beta chain variable domain of TCR clone 25982 (TRBV12-4, TRBJ1-1)
CASSPGTGFEAFF

SEQ ID NO: 51965 - protein, 18 aa, Homo sapiens
  CDR3 for alpha chain variable domain of TCR clone 25983 (TRAV12-3, TRAJ52)
CAMSRTNAGGTSYGKLTF

SEQ ID NO: 51966 - protein, 15 aa, Homo sapiens
  CDR3 for beta chain variable domain of TCR clone 25983 (TRBV13, TRBJ2-1)
CASSLVAGGHNEQFF

SEQ ID NO: 51967 - protein, 15 aa, Homo sapiens
  CDR3 for alpha chain variable domain of TCR clone 25984 (TRAV8-3, TRAJ27)
CAVGPSKTNAGKSTF

SEQ ID NO: 51968 - protein, 15 aa, Homo sapiens
  CDR3 for beta chain variable domain of TCR clone 25984 (TRBV7-8, TRBJ2-1)
CASSSGLAGGNEQFF

SEQ ID NO: 51969 - protein, 10 aa, Homo sapiens
  CDR3 for alpha chain variable domain of TCR clone 25985 (TRAV26-1, TRAJ40)
CIAGTYKYIF

SEQ ID NO: 51970 - protein, 15 aa, Homo sapiens
  CDR3 for beta chain variable domain of TCR clone 25985 (TRBV19, TRBJ2-1)
CASSSPEVPLDEQFF

SEQ ID NO: 51971 - protein, 15 aa, Homo sapiens
  CDR3 for alpha chain variable domain of TCR clone 25986 (TRAV8-3, TRAJ11)
CAVGLLNSGYSTLTV

SEQ ID NO: 51972 - protein, 16 aa, Homo sapiens
  CDR3 for beta chain variable domain of TCR clone 25986 (TRBV7-9, TRBJ1-2)
CASSLGFSSGEDGYTF

SEQ ID NO: 51973 - protein, 15 aa, Homo sapiens
  CDR3 for alpha chain variable domain of TCR clone 25987 (TRAV21, TRAJ53)
CATLNSGGSNYKLTF

SEQ ID NO: 51974 - protein, 14 aa, Homo sapiens
  CDR3 for beta chain variable domain of TCR clone 25987 (TRBV7-6, TRBJ2-3)
CASSLGTVTDTQYF

SEQ ID NO: 51975 - protein, 16 aa, Homo sapiens
  CDR3 for alpha chain variable domain of TCR clone 25988 (TRAV3, TRAJ37)
CAVRGKGSGNTGKLIF

SEQ ID NO: 51976 - protein, 13 aa, Homo sapiens
  CDR3 for beta chain variable domain of TCR clone 25988 (TRBV10-3, TRBJ2-7)
CASKLAVNYEQYF

SEQ ID NO: 51977 - protein, 14 aa, Homo sapiens
  CDR3 for alpha chain variable domain of TCR clone 25989 (TRAV38-1, TRAJ45)
WAYYSGGGADGLTF

SEQ ID NO: 51978 - protein, 20 aa, Homo sapiens
  CDR3 for beta chain variable domain of TCR clone 25989 (TRBV28, TRBJ2-1)
CASTPIGRSPGLAGGNEQFF

SEQ ID NO: 51979 - protein, 12 aa, Homo sapiens
  CDR3 for alpha chain variable domain of TCR clone 25990 (TRAV2, TRAJ9)
CVVGAGGFKTIF

SEQ ID NO: 51980 - protein, 16 aa, Homo sapiens
  CDR3 for beta chain variable domain of TCR clone 25990 (TRBV13, TRBJ2-2)
CASSPRTGEHTGELFF

SEQ ID NO: 51981 - protein, 14 aa, Homo sapiens
  CDR3 for alpha chain variable domain of TCR clone 25991 (TRAV12-2, TRAJ17)
CTVNIKAAGNKLTF

SEQ ID NO: 51982 - protein, 13 aa, Homo sapiens
  CDR3 for beta chain variable domain of TCR clone 25991 (TRBV7-8, TRBJ2-7)
CASSLTGGREQYF

SEQ ID NO: 51983 - protein, 12 aa, Homo sapiens
  CDR3 for alpha chain variable domain of TCR clone 25992 (TRAV12-2, TRAJ10)
WGVTGGGNKLTF

SEQ ID NO: 51984 - protein, 16 aa, Homo sapiens
  CDR3 for beta chain variable domain of TCR clone 25992 (TRBV6-4, TRBJ1-2)
CASSEAVGDPNYGYIF

SEQ ID NO: 51985 - protein, 11 aa, Homo sapiens
  CDR3 for alpha chain variable domain of TCR clone 25993 (TRAV1-2, TRAJ20)
CAVSNDYKLSF

SEQ ID NO: 51986 - protein, 16 aa, Homo sapiens
  CDR3 for beta chain variable domain of TCR clone 25993 (TRBV29-1, TRBJ2-6)
CSVEDITDSGANVLTF

SEQ ID NO: 51987 - protein, 13 aa, Homo sapiens
  CDR3 for alpha chain variable domain of TCR clone 25994 (TRAV17, TRAJ27)
CATSNPNAGKSTF

SEQ ID NO: 51988 - protein, 14 aa, Homo sapiens
  CDR3 for beta chain variable domain of TCR clone 25994 (TRBV11-1, TRBJ2-2)
CASSLGARTGELFF

SEQ ID NO: 51989 - protein, 15 aa, Homo sapiens
  CDR3 for alpha chain variable domain of TCR clone 25995 (TRAV26-1, TRAJ29)
CIVRVEGSGNTPLVF

SEQ ID NO: 51990 - protein, 14 aa, Homo sapiens
  CDR3 for beta chain variable domain of TCR clone 25995 (TRBV4-2, TRBJ2-1)
CASGLDRAYNEQFF

SEQ ID NO: 51991 - protein, 14 aa, Homo sapiens
  CDR3 for alpha chain variable domain of TCR clone 25996 (TRAV12-2, TRAJ40)
CAVKIPSGTYKNIF

SEQ ID NO: 51992 - protein, 14 aa, Homo sapiens
  CDR3 for beta chain variable domain of TCR clone 25996 (TRBV20-1, TRBJ1-1)
CSAQTRIGGTEAFF

SEQ ID NO: 51993 - protein, 11 aa, Homo sapiens
  CDR3 for alpha chain variable domain of TCR clone 25997 (TRAV17, TRAJ9)
CATAGGFKTIF

SEQ ID NO: 51994 - protein, 14 aa, Homo sapiens
  CDR3 for beta chain variable domain of TCR clone 25997 (TRBV7-9, TRBJ2-2)
CASSGLADTGELFF

SEQ ID NO: 51995 - protein, 13 aa, Homo sapiens
  CDR3 for alpha chain variable domain of TCR clone 25998 (TRAV8-3, TRAJ36)
CAVGATGANNLFF

SEQ ID NO: 51996 - protein, 15 aa, Homo sapiens
  CDR3 for beta chain variable domain of TCR clone 25998 (TRBV7-2, TRBJ1-2)
CASGPRAGWNYGYTF

SEQ ID NO: 51997 - protein, 13 aa, Homo sapiens
  CDR3 for alpha chain variable domain of TCR clone 25999 (TRAV21, TRAJ57)
CAVTQGGSVKLVF

SEQ ID NO: 51998 - protein, 16 aa, Homo sapiens
  CDR3 for beta chain variable domain of TCR clone 25999 (TRBV29-1, TRBJ2-7)
CSVEDAEDGTAYEQYF

SEQ ID NO: 51999 - protein, 12 aa, Homo sapiens
  CDR3 for alpha chain variable domain of TCR clone 26000 (TRAV12-3, TRAJ17)
CAMTLTGNKLTF

SEQ ID NO: 52000 - protein, 13 aa, Homo sapiens
  CDR3 for beta chain variable domain of TCR clone 26000 (TRBV6-1, TRBJ2-7)
CASSADTSYERYF

SEQ ID NO: 52001 - protein, 15 aa, Homo sapiens
  CDR3 for alpha chain variable domain of TCR clone 26001 (TRAV12-2, TRAJ43)
CAFDMRFGAGTRLTA

SEQ ID NO: 52002 - protein, 18 aa, Homo sapiens
  CDR3 for beta chain variable domain of TCR clone 26001 (TRBV20-1, TRBJ2-3)
CSASGLAGGPGTTDTQYF

SEQ ID NO: 52003 - protein, 14 aa, Homo sapiens
  CDR3 for alpha chain variable domain of TCR clone 26002 (TRAV20, TRAJ42)
CAVQAGGSQGSLIF

SEQ ID NO: 52004 - protein, 14 aa, Homo sapiens
  CDR3 for beta chain variable domain of TCR clone 26002 (TRBV28, TRBJ1-2)
CASRIQGANYGYTF

SEQ ID NO: 52005 - protein, 14 aa, Homo sapiens
  CDR3 for alpha chain variable domain of TCR clone 26003 (TRAV17, TRAJ57)
CATDPQGGSEKLVF

SEQ ID NO: 52006 - protein, 13 aa, Homo sapiens
  CDR3 for beta chain variable domain of TCR clone 26003 (TRBV19, TRBJ1-2)
CASSQGQVYGYTF

SEQ ID NO: 52007 - protein, 12 aa, Homo sapiens
  CDR3 for alpha chain variable domain of TCR clone 26004 (TRAV12-2, TRAJ10)
WGVTGGGNKLTL

SEQ ID NO: 52008 - protein, 16 aa, Homo sapiens
  CDR3 for beta chain variable domain of TCR clone 26004 (TRBV6-4, TRBJ1-2)
CASSEAVGDPNYGYTF

SEQ ID NO: 52009 - protein, 17 aa, Homo sapiens
  CDR3 for alpha chain variable domain of TCR clone 26005 (TRAV3, TRAJ6)
CAVRDGPRAGGSYIPTF

SEQ ID NO: 52010 - protein, 19 aa, Homo sapiens
  CDR3 for beta chain variable domain of TCR clone 26005 (TRBV25-1, TRBJ2-2)
CAILVYRVDRGHKTGELFF

SEQ ID NO: 52011 - protein, 19 aa, Homo sapiens
  CDR3 for alpha chain variable domain of TCR clone 26006 (TRAV2, TRAJ20)
ILQVREADAAVYRDCKLSF

SEQ ID NO: 52012 - protein, 13 aa, Homo sapiens
  CDR3 for beta chain variable domain of TCR clone 26006 (TRBV15, TRBJ1-6)
CATSGGLNSPLLF

SEQ ID NO: 52013 - protein, 16 aa, Homo sapiens
  CDR3 for alpha chain variable domain of TCR clone 26007 (TRAV30, TRAJ24)
CGTEIVDADSWGKFQF

SEQ ID NO: 52014 - protein, 18 aa, Homo sapiens
  CDR3 for beta chain variable domain of TCR clone 26007 (TRBV11-2, TRBJ2-3)
CASSFGGASRGAPNTQYF

SEQ ID NO: 52015 - protein, 12 aa, Homo sapiens
  CDR3 for alpha chain variable domain of TCR clone 26008 (TRAV13-1, TRAJ21)
CAAKEGFNKFYF

SEQ ID NO: 52016 - protein, 11 aa, Homo sapiens
  CDR3 for beta chain variable domain of TCR clone 26008 (TRBV12-4, TRBJ2-3)
CASTATDTQYF

SEQ ID NO: 52017 - protein, 13 aa, Homo sapiens
  CDR3 for alpha chain variable domain of TCR clone 26009 (TRAV12-2, TRAJ20)
CAVNRFDDYKLSF

SEQ ID NO: 52018 - protein, 12 aa, Homo sapiens
  CDR3 for beta chain variable domain of TCR clone 26009 (TRBV19, TRBJ2-1)
FASSQISNEQFF

SEQ ID NO: 52019 - protein, 11 aa, Homo sapiens
  CDR3 for alpha chain variable domain of TCR clone 26010 (TRAV17, TRAJ43)
CGFTGGFKTIF

SEQ ID NO: 52020 - protein, 14 aa, Homo sapiens
  CDR3 for beta chain variable domain of TCR clone 26010 (TRBV7-9, TRBJ2-2)
CASSLVQDTGELFF

SEQ ID NO: 52021 - protein, 16 aa, Homo sapiens
  CDR3 for alpha chain variable domain of TCR clone 26011 (TRAV14/DV4, TRAJ53)
CAMREGGGGSNYKLTF

SEQ ID NO: 52022 - protein, 14 aa, Homo sapiens
  CDR3 for beta chain variable domain of TCR clone 26011 (TRBV19, TRBJ2-1)
CASPTFVLSGEQFF

SEQ ID NO: 52023 - protein, 14 aa, Homo sapiens
  CDR3 for alpha chain variable domain of TCR clone 26012 (TRAV1-2, TRAJ16)
CAVNRFSDGQKLLF

SEQ ID NO: 52024 - protein, 14 aa, Homo sapiens
  CDR3 for beta chain variable domain of TCR clone 26012 (TRBV7-9, TRBJ2-3)
CASRLEDGTDTQYF

SEQ ID NO: 52025 - protein, 13 aa, Homo sapiens
  CDR3 for alpha chain variable domain of TCR clone 26013 (TRAV21, TRAJ27)
GAARPGNAGKSTF

SEQ ID NO: 52026 - protein, 14 aa, Homo sapiens
  CDR3 for beta chain variable domain of TCR clone 26013 (TRBV7-6, TRBJ2-3)
CASSLGTVTDTQYF

SEQ ID NO: 52027 - protein, 18 aa, Homo sapiens
  CDR3 for alpha chain variable domain of TCR clone 26014 (TRAV29/DV5, TRAJ52)
CAAGFRGAGCTSYGKLTF

SEQ ID NO: 52028 - protein, 16 aa, Homo sapiens
  CDR3 for beta chain variable domain of TCR clone 26014 (TRBV7-3, TRBJ2-2)
CASSLKRGTLSGELFF

SEQ ID NO: 52029 - protein, 11 aa, Homo sapiens
  CDR3 for alpha chain variable domain of TCR clone 26015 (TRAV2, TRAJ33)
CAVDSNYQLIW

SEQ ID NO: 52030 - protein, 15 aa, Homo sapiens
  CDR3 for beta chain variable domain of TCR clone 26015 (TRBV19, TRBJ1-2)
CASSVGHVLNYGYTF

SEQ ID NO: 52031 - protein, 14 aa, Homo sapiens
  CDR3 for alpha chain variable domain of TCR clone 26016 (TRAV26-1, TRAJ38)
CIADNAGNNRKLSW

SEQ ID NO: 52032 - protein, 17 aa, Homo sapiens
  CDR3 for beta chain variable domain of TCR clone 26016 (TRBV7-9, TRBJ2-3)
CASSPTVAGDLTDTQYF

SEQ ID NO: 52033 - protein, 18 aa, Homo sapiens
  CDR3 for alpha chain variable domain of TCR clone 26017 (TRAV26-2, TRAJ54)
CILRDVEVGIQGAQKLVF

SEQ ID NO: 52034 - protein, 15 aa, Homo sapiens
  CDR3 for beta chain variable domain of TCR clone 26017 (TRBV11-3, TRBJ2-3)
CASLKDGREGDTQYF

SEQ ID NO: 52035 - protein, 20 aa, Homo sapiens
  CDR3 for alpha chain variable domain of TCR clone 26018 (TRAV26-1, TRAJ42)
CCVLLHRQTYYGGSQGNLIF

SEQ ID NO: 52036 - protein, 16 aa, Homo sapiens
  CDR3 for beta chain variable domain of TCR clone 26018 (TRBV4-1, TRBJ1-1)
CASSSMSERPNTEAFL

SEQ ID NO: 52037 - protein, 12 aa, Homo sapiens
  CDR3 for alpha chain variable domain of TCR clone 26019 (TRAV21, TRAJ58)
CAAEASGSRLTF

SEQ ID NO: 52038 - protein, 15 aa, Homo sapiens
  CDR3 for beta chain variable domain of TCR clone 26019 (TRBV20-1, TRBJ2-7)
CSARDPVKGEGEQYF

SEQ ID NO: 52039 - protein, 17 aa, Homo sapiens
  CDR3 for alpha chain variable domain of TCR clone 26020 (TRAV23/DV6, TRAJ18)
CAASMNHRGSTLGRLYF

SEQ ID NO: 52040 - protein, 15 aa, Homo sapiens
  CDR3 for beta chain variable domain of TCR clone 26020 (TRBV27, TRBJ2-7)
CASSPDQGRLYEQYF

SEQ ID NO: 52041 - protein, 13 aa, Homo sapiens
  CDR3 for alpha chain variable domain of TCR clone 26021 (TRAV16, TRAJ31)
CALSAHNNARLMF

SEQ ID NO: 52042 - protein, 17 aa, Homo sapiens
  CDR3 for beta chain variable domain of TCR clone 26021 (TRBV12-4, TRBJ2-1)
RASSPGLAGGRINEQFF

SEQ ID NO: 52043 - protein, 14 aa, Homo sapiens
  CDR3 for alpha chain variable domain of TCR clone 26022 (TRAV1-2, TRAJ16)
CAVNRFSDSQKLLF

SEQ ID NO: 52044 - protein, 15 aa, Homo sapiens
  CDR3 for beta chain variable domain of TCR clone 26022 (TRBV7-9, TRBJ1-6)
CASSSPGRGNSPLHF

SEQ ID NO: 52045 - protein, 18 aa, Homo sapiens
  CDR3 for alpha chain variable domain of TCR clone 26023 (TRAV26-2, TRAJ54)
CILRDVEVGIQGAQKLVF

SEQ ID NO: 52046 - protein, 14 aa, Homo sapiens
  CDR3 for beta chain variable domain of TCR clone 26023 (TRBV25-1, TRBJ1-1)
CASTHLGGNTEAFF

SEQ ID NO: 52047 - protein, 13 aa, Homo sapiens
  CDR3 for alpha chain variable domain of TCR clone 26024 (TRAV20, TRAJ37)
CAGCSSNTGKLIF

SEQ ID NO: 52048 - protein, 16 aa, Homo sapiens
  CDR3 for beta chain variable domain of TCR clone 26024 (TRBV6-1, TRBJ1-2)
CASSGAWQGRSHGYTF

SEQ ID NO: 52049 - protein, 12 aa, Homo sapiens
  CDR3 for alpha chain variable domain of TCR clone 26025 (TRAV13-1, TRAJ53)
AASGGSNYKLTF

SEQ ID NO: 52050 - protein, 15 aa, Homo sapiens
  CDR3 for beta chain variable domain of TCR clone 26025 (TRBV5-1, TRBJ2-1)
RASSPPRAPYNEQFF

SEQ ID NO: 52051 - protein, 13 aa, Homo sapiens
  CDR3 for alpha chain variable domain of TCR clone 26026 (TRAV13-1, TRAJ10)
CAATAGGGNKLTF

SEQ ID NO: 52052 - protein, 12 aa, Homo sapiens
  CDR3 for beta chain variable domain of TCR clone 26026 (TRBV7-3, TRBJ2-1)
CASSFQSGTQFF

SEQ ID NO: 52053 - protein, 14 aa, Homo sapiens
  CDR3 for alpha chain variable domain of TCR clone 26027 (TRAV35, TRAJ42)
CAGRHGGSQGNLIF

SEQ ID NO: 52054 - protein, 15 aa, Homo sapiens
  CDR3 for beta chain variable domain of TCR clone 26027 (TRBV7-9, TRBJ2-1)
CASSLGWGRANEQFF

SEQ ID NO: 52055 - protein, 16 aa, Homo sapiens
  CDR3 for alpha chain variable domain of TCR clone 26028 (TRAV12-3, TRAJ53)
CAMSAGSGGSNYKLTF

SEQ ID NO: 52056 - protein, 11 aa, Homo sapiens
  CDR3 for beta chain variable domain of TCR clone 26028 (TRBV29-1, TRBJ2-5)
CSEDRTGTQYF

SEQ ID NO: 52057 - protein, 13 aa, Homo sapiens
  CDR3 for alpha chain variable domain of TCR clone 26029 (TRAV12-3, TRAJ9)
CALRNTGGFKTIF

SEQ ID NO: 52058 - protein, 14 aa, Homo sapiens
  CDR3 for beta chain variable domain of TCR clone 26029 (TRBV11-2, TRBJ2-7)
CASSSTGEGYEQYF

SEQ ID NO: 52059 - protein, 14 aa, Homo sapiens
  CDR3 for alpha chain variable domain of TCR clone 26030 (TRAV17, TRAJ37)
CATDGSSNTGKLIF

SEQ ID NO: 52060 - protein, 13 aa, Homo sapiens
  CDR3 for beta chain variable domain of TCR clone 26030 (TRBV11-2, TRBJ2-1)
CASSLDLVNEQFS

SEQ ID NO: 52061 - protein, 13 aa, Homo sapiens
  CDR3 for alpha chain variable domain of TCR clone 26031 (TRAV8-3, TRAJ43)
CAVGPDNNNDMRF

SEQ ID NO: 52062 - protein, 14 aa, Homo sapiens
  CDR3 for beta chain variable domain of TCR clone 26031 (TRBV2, TRBJ1-5)
CASSGTGFNQPQHF

SEQ ID NO: 52063 - protein, 15 aa, Homo sapiens
  CDR3 for alpha chain variable domain of TCR clone 26032 (TRAV8-2, TRAJ16)
CVVSDGFSDGQKLLF

SEQ ID NO: 52064 - protein, 15 aa, Homo sapiens
  CDR3 for beta chain variable domain of TCR clone 26032 (TRBV5-1, TRBJ2-4)
CASSLGGGGSYIQYF

SEQ ID NO: 52065 - protein, 14 aa, Homo sapiens
  CDR3 for alpha chain variable domain of TCR clone 26033 (TRAV13-1, TRAJ44)
CAAKATGTASKLTF

SEQ ID NO: 52066 - protein, 12 aa, Homo sapiens
  CDR3 for beta chain variable domain of TCR clone 26033 (TRBV11-2, TRBJ2-2)
CASSLPTGELFF

SEQ ID NO: 52067 - protein, 15 aa, Homo sapiens
  CDR3 for alpha chain variable domain of TCR clone 26034 (TRAV3, TRAJ17)
CAVSPKEAAGNKLTF

SEQ ID NO: 52068 - protein, 12 aa, Homo sapiens
  CDR3 for beta chain variable domain of TCR clone 26034 (TRBV7-9, TRBJ1-6)
CASSLMTSPLLF

SEQ ID NO: 52069 - protein, 20 aa, Homo sapiens
  CDR3 for alpha chain variable domain of TCR clone 26035 (TRAV26-1, TRAJ29)
CCVLLHRQGLEGSGNTPLVF

SEQ ID NO: 52070 - protein, 15 aa, Homo sapiens
  CDR3 for beta chain variable domain of TCR clone 26035 (TRBV7-9, TRBJ1-5)
CASSQGHQPNQPQHF

SEQ ID NO: 52071 - protein, 14 aa, Homo sapiens
  CDR3 for alpha chain variable domain of TCR clone 26036 (TRAV8-3, TRAJ9)
CAVVYNTGVFKTIF

SEQ ID NO: 52072 - protein, 14 aa, Homo sapiens
  CDR3 for beta chain variable domain of TCR clone 26036 (TRBV7-3, TRBJ2-2)
CASSSGGYTGELFF

SEQ ID NO: 52073 - protein, 15 aa, Homo sapiens
  CDR3 for alpha chain variable domain of TCR clone 26037 (TRAV27, TRAJ38)
CAARLNAGNNRKLIW

SEQ ID NO: 52074 - protein, 13 aa, Homo sapiens
  CDR3 for beta chain variable domain of TCR clone 26037 (TRBV12-5, TRBJ2-3)
CASGDRQSDTQYF

SEQ ID NO: 52075 - protein, 14 aa, Homo sapiens
  CDR3 for alpha chain variable domain of TCR clone 26038 (TRAV3, TRAJ7)
CAVREEEREQQTRF

SEQ ID NO: 52076 - protein, 12 aa, Homo sapiens
  CDR3 for beta chain variable domain of TCR clone 26038 (TRBV24-1, TRBJ1-4)
CATSDPNEKLFF

SEQ ID NO: 52077 - protein, 16 aa, Homo sapiens
  CDR3 for alpha chain variable domain of TCR clone 26039 (TRAV3, TRAJ6)
CAVRRPQGRRKLHTYI

SEQ ID NO: 52078 - protein, 14 aa, Homo sapiens
  CDR3 for beta chain variable domain of TCR clone 26039 (TRBV7-2, TRBJ2-7)
CASSPKTSFYEQYF

SEQ ID NO: 52079 - protein, 15 aa, Homo sapiens
  CDR3 for alpha chain variable domain of TCR clone 26040 (TRAV12-2, TRAJ43)
CAFDMRFGSGTRLTV

SEQ ID NO: 52080 - protein, 18 aa, Homo sapiens
  CDR3 for beta chain variable domain of TCR clone 26040 (TRBV20-1, TRBJ2-3)
CSASGLAGGPGTTDTQYF

SEQ ID NO: 52081 - protein, 12 aa, Homo sapiens
  CDR3 for alpha chain variable domain of TCR clone 26041 (TRAV17, TRAJ57)
CATDGGSEKLVF

SEQ ID NO: 52082 - protein, 13 aa, Homo sapiens
  CDR3 for beta chain variable domain of TCR clone 26041 (TRBV7-9, TRBJ2-7)
CASSFAGDYEQYF

SEQ ID NO: 52083 - protein, 12 aa, Homo sapiens
  CDR3 for alpha chain variable domain of TCR clone 26042 (TRAV27, TRAJ13)
CAGAGGYQKVTF

SEQ ID NO: 52084 - protein, 15 aa, Homo sapiens
  CDR3 for beta chain variable domain of TCR clone 26042 (TRBV5-1, TRBJ1-1)
CASSLAPRGNTEAFF

SEQ ID NO: 52085 - protein, 14 aa, Homo sapiens
  CDR3 for alpha chain variable domain of TCR clone 26043 (TRAV12-1, TRAJ12)
CAVTRMDSSYKLIF

SEQ ID NO: 52086 - protein, 14 aa, Homo sapiens
  CDR3 for beta chain variable domain of TCR clone 26043 (TRBV4-1, TRBJ2-7)
CASSPVAGGDEQYF

SEQ ID NO: 52087 - protein, 14 aa, Homo sapiens
  CDR3 for alpha chain variable domain of TCR clone 26044 (TRAV17, TRAJ39)
CATDPVRAGNVLTF

SEQ ID NO: 52088 - protein, 15 aa, Homo sapiens
  CDR3 for beta chain variable domain of TCR clone 26044 (TRBV13, TRBJ1-5)
CASSFGQGGVQPQHF

SEQ ID NO: 52089 - protein, 16 aa, Homo sapiens
  CDR3 for alpha chain variable domain of TCR clone 26045 (TRAV3, TRAJ23)
CAVKIGIYNQGGKLIF

SEQ ID NO: 52090 - protein, 17 aa, Homo sapiens
  CDR3 for beta chain variable domain of TCR clone 26045 (TRBV10-3, TRBJ2-6)
CAISESTAPSGANALTF

SEQ ID NO: 52091 - protein, 13 aa, Homo sapiens
  CDR3 for alpha chain variable domain of TCR clone 26046 (TRAV3, TRAJ43)
CAVKARNNNDMRF

SEQ ID NO: 52092 - protein, 16 aa, Homo sapiens
  CDR3 for beta chain variable domain of TCR clone 26046 (TRBV7-9, TRBJ2-3)
CASSCSVAGGTDTQYF

SEQ ID NO: 52093 - protein, 16 aa, Homo sapiens
  CDR3 for alpha chain variable domain of TCR clone 26047 (TRAV3, TRAJ21)
CAMRDIERGNFNKFYF

SEQ ID NO: 52094 - protein, 13 aa, Homo sapiens
  CDR3 for beta chain variable domain of TCR clone 26047 (TRBV27, TRBJ2-7)
CASSLTTGYEQYF

SEQ ID NO: 52095 - protein, 13 aa, Homo sapiens
  CDR3 for alpha chain variable domain of TCR clone 26048 (TRAV12-1, TRAJ33)
CGDAPDSNYQLIR

SEQ ID NO: 52096 - protein, 15 aa, Homo sapiens
  CDR3 for beta chain variable domain of TCR clone 26048 (TRBV27, TRBJ2-1)
CASSNGGGSSNEQLF

SEQ ID NO: 52097 - protein, 13 aa, Homo sapiens
  CDR3 for alpha chain variable domain of TCR clone 26049 (TRAV21, TRAJ20)
CAVGLRVDYKLSF

SEQ ID NO: 52098 - protein, 13 aa, Homo sapiens
  CDR3 for beta chain variable domain of TCR clone 26049 (TRBV6-1, TRBJ1-1)
RASSRQGNTEAFF

SEQ ID NO: 52099 - protein, 17 aa, Homo sapiens
  CDR3 for alpha chain variable domain of TCR clone 26050 (TRAV3, TRAJ6)
CAVRDGPRAGGSYIPTF

SEQ ID NO: 52100 - protein, 16 aa, Homo sapiens
  CDR3 for beta chain variable domain of TCR clone 26050 (TRBV4-1, TRBJ1-2)
CASSQDAGQVLYGYTF

SEQ ID NO: 52101 - protein, 15 aa, Homo sapiens
  CDR3 for alpha chain variable domain of TCR clone 26051 (TRAV25, TRAJ52)
CAGRPGGTSYGKLTF

SEQ ID NO: 52102 - protein, 17 aa, Homo sapiens
  CDR3 for beta chain variable domain of TCR clone 26051 (TRBV7-8, TRBJ2-6)
CASSAGTGGAGVNVLTF

SEQ ID NO: 52103 - protein, 16 aa, Homo sapiens
  CDR3 for alpha chain variable domain of TCR clone 26052 (TRAV16, TRAJ4)
CALSRMFSGGYNKLIF

SEQ ID NO: 52104 - protein, 15 aa, Homo sapiens
  CDR3 for beta chain variable domain of TCR clone 26052 (TRBV20-1, TRBJ2-7)
CSARDRVSGMDEQYF

SEQ ID NO: 52105 - protein, 15 aa, Homo sapiens
  CDR3 for alpha chain variable domain of TCR clone 26053 (TRAV23/DV6, TRAJ18)
CEARYRGSTLGRLYF

SEQ ID NO: 52106 - protein, 13 aa, Homo sapiens
  CDR3 for beta chain variable domain of TCR clone 26053 (TRBV7-2, TRBJ2-7)
CASSSPSGSEQYF

SEQ ID NO: 52107 - protein, 12 aa, Homo sapiens
  CDR3 for alpha chain variable domain of TCR clone 26054 (TRAV8-3, TRAJ41)
CAVGALGYAPNF

SEQ ID NO: 52108 - protein, 16 aa, Homo sapiens
  CDR3 for beta chain variable domain of TCR clone 26054 (TRBV7-6, TRBJ2-3)
CASSDSRGEGTDTQYF

SEQ ID NO: 52109 - protein, 10 aa, Homo sapiens
  CDR3 for alpha chain variable domain of TCR clone 26055 (TRAV12-3, TRAJ34)
CAMSADKLVF

SEQ ID NO: 52110 - protein, 15 aa, Homo sapiens
  CDR3 for beta chain variable domain of TCR clone 26055 (TRBV20-1, TRBJ2-3)
CSARRGEAITDTQYF

SEQ ID NO: 52111 - protein, 13 aa, Homo sapiens
  CDR3 for alpha chain variable domain of TCR clone 26056 (TRAV12-2, TRAJ39)
CAVNNNAGNMLTF

SEQ ID NO: 52112 - protein, 16 aa, Homo sapiens
  CDR3 for beta chain variable domain of TCR clone 26056 (TRBV19, TRBJ2-2)
CASSTARASNTGELFF

SEQ ID NO: 52113 - protein, 11 aa, Homo sapiens
  CDR3 for alpha chain variable domain of TCR clone 26057 (TRAV17, TRAJ31)
CATSNNARLMF

SEQ ID NO: 52114 - protein, 16 aa, Homo sapiens
  CDR3 for beta chain variable domain of TCR clone 26057 (TRBV7-8, TRBJ2-4)
CASSAERTLAKNIQYF

SEQ ID NO: 52115 - protein, 11 aa, Homo sapiens
  CDR3 for alpha chain variable domain of TCR clone 26058 (TRAV3, TRAJ21)
CAVRNFNKFYF

SEQ ID NO: 52116 - protein, 16 aa, Homo sapiens
  CDR3 for beta chain variable domain of TCR clone 26058 (TRBV19, TRBJ2-1)
CASSKAGPSSYNEQFF

SEQ ID NO: 52117 - protein, 15 aa, Homo sapiens
  CDR3 for alpha chain variable domain of TCR clone 26059 (TRAV12-3, TRAJ6)
CAMSATPGGSYIPTF

SEQ ID NO: 52118 - protein, 16 aa, Homo sapiens
  CDR3 for beta chain variable domain of TCR clone 26059 (TRBV20-1, TRBJ1-2)
CSASMGQGVANYGYTF

SEQ ID NO: 52119 - protein, 12 aa, Homo sapiens
  CDR3 for alpha chain variable domain of TCR clone 26060 (TRAV17, TRAJ4)
CATDGGYHKLIF

SEQ ID NO: 52120 - protein, 13 aa, Homo sapiens
  CDR3 for beta chain variable domain of TCR clone 26060 (TRBV29-1, TRBJ2-2)
CSTTGVNTGELFF

SEQ ID NO: 52121 - protein, 15 aa, Homo sapiens
  CDR3 for alpha chain variable domain of TCR clone 26061 (TRAV12-3, TRAJ6)
CAMSATTGGSYIPTF

SEQ ID NO: 52122 - protein, 16 aa, Homo sapiens
  CDR3 for beta chain variable domain of TCR clone 26061 (TRBV20-1, TRBJ1-2)
CSASMGQGVANYGYTS

SEQ ID NO: 52123 - protein, 18 aa, Homo sapiens
  CDR3 for alpha chain variable domain of TCR clone 26062 (TRAV21, TRAJ52)
CAVRPSPAGGTSYGKLTF

SEQ ID NO: 52124 - protein, 13 aa, Homo sapiens
  CDR3 for beta chain variable domain of TCR clone 26062 (TRBV7-3, TRBJ1-1)
CASSQEWGAEAFF

SEQ ID NO: 52125 - protein, 11 aa, Homo sapiens
  CDR3 for alpha chain variable domain of TCR clone 26063 (TRAV1-1, TRAJ23)
CAVRQGGKLIV

SEQ ID NO: 52126 - protein, 20 aa, Homo sapiens
  CDR3 for beta chain variable domain of TCR clone 26063 (TRBV7-8, TRBJ2-2)
CASSHLFPGPTIHITGELFF

SEQ ID NO: 52127 - protein, 14 aa, Homo sapiens
  CDR3 for alpha chain variable domain of TCR clone 26064 (TRAV35, TRAJ22)
CVGLRPGSARQLTF

SEQ ID NO: 52128 - protein, 15 aa, Homo sapiens
  CDR3 for beta chain variable domain of TCR clone 26064 (TRBV12-4, TRBJ2-5)
CASSPPTGLQETQYF

SEQ ID NO: 52129 - protein, 16 aa, Homo sapiens
  CDR3 for alpha chain variable domain of TCR clone 26065 (TRAV26-1, TRAJ53)
CIVRVAMGGSNYKLTL

SEQ ID NO: 52130 - protein, 12 aa, Homo sapiens
  CDR3 for beta chain variable domain of TCR clone 26065 (TRBV7-9, TRBJ1-5)
CASSPQGQPQHF

SEQ ID NO: 52131 - protein, 16 aa, Homo sapiens
  CDR3 for alpha chain variable domain of TCR clone 26066 (TRAV3, TRAJ37)
CALRGKGSGNTGKLIF

SEQ ID NO: 52132 - protein, 13 aa, Homo sapiens
  CDR3 for beta chain variable domain of TCR clone 26066 (TRBV14, TRBJ2-7)
CASSQDRRYEQYF

SEQ ID NO: 52133 - protein, 12 aa, Homo sapiens
  CDR3 for alpha chain variable domain of TCR clone 26067 (TRAV17, TRAJ30)
CATDARDDKIIF

SEQ ID NO: 52134 - protein, 15 aa, Homo sapiens
  CDR3 for beta chain variable domain of TCR clone 26067 (TRBV4-1, TRBJ2-1)
CASNQGGELYNEQFF

SEQ ID NO: 52135 - protein, 13 aa, Homo sapiens
  CDR3 for alpha chain variable domain of TCR clone 26068 (TRAV38-1, TRAJ42)
CARWGGSQGNLIF

SEQ ID NO: 52136 - protein, 17 aa, Homo sapiens
  CDR3 for beta chain variable domain of TCR clone 26068 (TRBV20-1, TRBJ2-1)
CIARDPLAGVWDNEQFF

SEQ ID NO: 52137 - protein, 15 aa, Homo sapiens
  CDR3 for alpha chain variable domain of TCR clone 26069 (TRAV17, TRAJ57)
CATGPSQGGSEKLVF

SEQ ID NO: 52138 - protein, 16 aa, Homo sapiens
  CDR3 for beta chain variable domain of TCR clone 26069 (TRBV12-4, TRBJ1-5)
CASSRPVGGSNQPQHY

SEQ ID NO: 52139 - protein, 13 aa, Homo sapiens
  CDR3 for alpha chain variable domain of TCR clone 26070 (TRAV3, TRAJ29)
CAVRDIIDTLLVF

SEQ ID NO: 52140 - protein, 14 aa, Homo sapiens
  CDR3 for beta chain variable domain of TCR clone 26070 (TRBV27, TRBJ2-1)
CASSATGGYNEQFF

SEQ ID NO: 52141 - protein, 15 aa, Homo sapiens
  CDR3 for alpha chain variable domain of TCR clone 26071 (TRAV21, TRAJ13)
CAVRPTSGGYQKVIF

SEQ ID NO: 52142 - protein, 15 aa, Homo sapiens
  CDR3 for beta chain variable domain of TCR clone 26071 (TRBV28, TRBJ2-7)
CASSPGGRGFYEQYF

SEQ ID NO: 52143 - protein, 14 aa, Homo sapiens
  CDR3 for alpha chain variable domain of TCR clone 26072 (TRAV21, TRAJ10)
CAVALTGGGNKLTF

SEQ ID NO: 52144 - protein, 20 aa, Homo sapiens
  CDR3 for beta chain variable domain of TCR clone 26072 (TRBV20-1, TRBJ1-5)
CSARGPGTGGLLHSNQPQHF

SEQ ID NO: 52145 - protein, 13 aa, Homo sapiens
  CDR3 for alpha chain variable domain of TCR clone 26073 (TRAV13-2, TRAJ48)
CAEMDFGNAKLTF

SEQ ID NO: 52146 - protein, 15 aa, Homo sapiens
  CDR3 for beta chain variable domain of TCR clone 26073 (TRBV7-9, TRBJ1-6)
CASSSPGRGNSPLHF

SEQ ID NO: 52147 - protein, 18 aa, Homo sapiens
  CDR3 for alpha chain variable domain of TCR clone 26074 (TRAV26-1, TRAJ23)
CIVRVGLEVWNQGGKLIF

SEQ ID NO: 52148 - protein, 14 aa, Homo sapiens
  CDR3 for beta chain variable domain of TCR clone 26074 (TRBV4-2, TRBJ2-1)
CASGLDRAYNEQFF

SEQ ID NO: 52149 - protein, 11 aa, Homo sapiens
  CDR3 for alpha chain variable domain of TCR clone 26075 (TRAV12-3, TRAJ43)
CAMSVSNDMRF

SEQ ID NO: 52150 - protein, 13 aa, Homo sapiens
  CDR3 for beta chain variable domain of TCR clone 26075 (TRBV20-1, TRBJ1-1)
CSDPLGGGTEAFF

SEQ ID NO: 52151 - protein, 15 aa, Homo sapiens
  CDR3 for alpha chain variable domain of TCR clone 26076 (TRAV23/DV6, TRAJ30)
CAASSQESRDGKIIF

SEQ ID NO: 52152 - protein, 17 aa, Homo sapiens
  CDR3 for beta chain variable domain of TCR clone 26076 (TRBV4-3, TRBJ2-1)
CASSQFSSGRASGEQFF

SEQ ID NO: 52153 - protein, 11 aa, Homo sapiens
  CDR3 for alpha chain variable domain of TCR clone 26077 (TRAV3, TRAJ21)
CAVGNFNKFYF

SEQ ID NO: 52154 - protein, 15 aa, Homo sapiens
  CDR3 for beta chain variable domain of TCR clone 26077 (TRBV4-1, TRBJ1-4)
CASSDTGGTNEKLFF

SEQ ID NO: 52155 - protein, 14 aa, Homo sapiens
  CDR3 for alpha chain variable domain of TCR clone 26078 (TRAV38-1, TRAJ29)
CAFITPSGNTPLVF

SEQ ID NO: 52156 - protein, 14 aa, Homo sapiens
  CDR3 for beta chain variable domain of TCR clone 26078 (TRBV18, TRBJ2-7)
CASPPRGGAYEQYF

SEQ ID NO: 52157 - protein, 11 aa, Homo sapiens
  CDR3 for alpha chain variable domain of TCR clone 26079 (TRAV12-3, TRAJ43)
CAMSVSNDMRF

SEQ ID NO: 52158 - protein, 14 aa, Homo sapiens
  CDR3 for beta chain variable domain of TCR clone 26079 (TRBV12-5, TRBJ2-5)
CASGSRTHQETQCF

SEQ ID NO: 52159 - protein, 14 aa, Homo sapiens
  CDR3 for alpha chain variable domain of TCR clone 26080 (TRAV1-1, TRAJ28)
CAAPSGAGSYQLTF

SEQ ID NO: 52160 - protein, 15 aa, Homo sapiens
  CDR3 for beta chain variable domain of TCR clone 26080 (TRBV7-2, TRBJ1-2)
CASSLVSGGDYGHTF

SEQ ID NO: 52161 - protein, 14 aa, Homo sapiens
  CDR3 for alpha chain variable domain of TCR clone 26081 (TRAV1-2, TRAJ8)
CAVREDTGFQKLVF

SEQ ID NO: 52162 - protein, 12 aa, Homo sapiens
  CDR3 for beta chain variable domain of TCR clone 26081 (TRBV14, TRBJ2-7)
CASNRLKGEQYF

SEQ ID NO: 52163 - protein, 11 aa, Homo sapiens
  CDR3 for alpha chain variable domain of TCR clone 26082 (TRAV13-1, TRAJ6)
CATLGSYIPTF

SEQ ID NO: 52164 - protein, 12 aa, Homo sapiens
  CDR3 for beta chain variable domain of TCR clone 26082 (TRBV11-2, TRBJ2-1)
CASSPGNNEQLF

SEQ ID NO: 52165 - protein, 12 aa, Homo sapiens
  CDR3 for alpha chain variable domain of TCR clone 26083 (TRAV13-1, TRAJ49)
CAASPMGNQFYF

SEQ ID NO: 52166 - protein, 13 aa, Homo sapiens
  CDR3 for beta chain variable domain of TCR clone 26083 (TRBV12-4, TRBJ1-2)
CASSLRQGKGYTF

SEQ ID NO: 52167 - protein, 11 aa, Homo sapiens
  CDR3 for alpha chain variable domain of TCR clone 26084 (TRAV1-2, TRAJ40)
CAVPGTYKYIF

SEQ ID NO: 52168 - protein, 16 aa, Homo sapiens
  CDR3 for beta chain variable domain of TCR clone 26084 (TRBV29-1, TRBJ2-7)
CSVEVVGTSESYEQYF

SEQ ID NO: 52169 - protein, 15 aa, Homo sapiens
  CDR3 for alpha chain variable domain of TCR clone 26085 (TRAV26-1, TRAJ40)
CIVRVTTSGTHKYIF

SEQ ID NO: 52170 - protein, 12 aa, Homo sapiens
  CDR3 for beta chain variable domain of TCR clone 26085 (TRBV7-9, TRBJ1-4)
CASSTDREKLFF

SEQ ID NO: 52171 - protein, 12 aa, Homo sapiens
  CDR3 for alpha chain variable domain of TCR clone 26086 (TRAV8-3, TRAJ41)
CAVALSGYALNF

SEQ ID NO: 52172 - protein, 17 aa, Homo sapiens
  CDR3 for beta chain variable domain of TCR clone 26086 (TRBV7-8, TRBJ2-6)
CASSAGTGGAGANVLTF

SEQ ID NO: 52173 - protein, 14 aa, Homo sapiens
  CDR3 for alpha chain variable domain of TCR clone 26087 (TRAV29/DV5, TRAJ36)
CAARRKTGANNLFF

SEQ ID NO: 52174 - protein, 12 aa, Homo sapiens
  CDR3 for beta chain variable domain of TCR clone 26087 (TRBV12-4, TRBJ1-2)
CASSFIWLHLRF

SEQ ID NO: 52175 - protein, 18 aa, Homo sapiens
  CDR3 for alpha chain variable domain of TCR clone 26088 (TRAV8-4, TRAJ52)
CAVTRANAGGTSYGKLTF

SEQ ID NO: 52176 - protein, 12 aa, Homo sapiens
  CDR3 for beta chain variable domain of TCR clone 26088 (TRBV11-2, TRBJ2-2)
CASSLPTGELFF

SEQ ID NO: 52177 - protein, 15 aa, Homo sapiens
  CDR3 for alpha chain variable domain of TCR clone 26089 (TRAV8-3, TRAJ45)
CASSFSGGGADGLTF

SEQ ID NO: 52178 - protein, 13 aa, Homo sapiens
  CDR3 for beta chain variable domain of TCR clone 26089 (TRBV10-3, TRBJ2-7)
CASKLAVNYEQYF

SEQ ID NO: 52179 - protein, 11 aa, Homo sapiens
  CDR3 for alpha chain variable domain of TCR clone 26090 (TRAV17, TRAJ9)
CATTGGFKTIF

SEQ ID NO: 52180 - protein, 15 aa, Homo sapiens
  CDR3 for beta chain variable domain of TCR clone 26090 (TRBV7-9, TRBJ1-5)
CASSQGHQPNQPQHF

SEQ ID NO: 52181 - protein, 19 aa, Homo sapiens
  CDR3 for alpha chain variable domain of TCR clone 26091 (TRAV2, TRAJ20)
ILQVREADAAVYRDCKLSF

SEQ ID NO: 52182 - protein, 13 aa, Homo sapiens
  CDR3 for beta chain variable domain of TCR clone 26091 (TRBV15, TRBJ1-6)
CATSGGVNSPLHF

SEQ ID NO: 52183 - protein, 11 aa, Homo sapiens
  CDR3 for alpha chain variable domain of TCR clone 26092 (TRAV21, TRAJ34)
CAHYNTDKLIF

SEQ ID NO: 52184 - protein, 17 aa, Homo sapiens
  CDR3 for beta chain variable domain of TCR clone 26092 (TRBV11-2, TRBJ2-1)
CASSLYPPGVEYNEQFF

SEQ ID NO: 52185 - protein, 12 aa, Homo sapiens
  CDR3 for alpha chain variable domain of TCR clone 26093 (TRAV13-1, TRAJ21)
CAAKEGFNKFYF

SEQ ID NO: 52186 - protein, 14 aa, Homo sapiens
  CDR3 for beta chain variable domain of TCR clone 26093 (TRBV5-4, TRBJ1-1)
CASSSDSRRDEAFF

SEQ ID NO: 52187 - protein, 13 aa, Homo sapiens
  CDR3 for alpha chain variable domain of TCR clone 26094 (TRAV1-2, TRAJ9)
CAALNTGGFKTIF

SEQ ID NO: 52188 - protein, 13 aa, Homo sapiens
  CDR3 for beta chain variable domain of TCR clone 26094 (TRBV19, TRBJ1-2)
CASSVPGQDGYTC

SEQ ID NO: 52189 - protein, 14 aa, Homo sapiens
  CDR3 for alpha chain variable domain of TCR clone 26095 (TRAV12-3, TRAJ10)
SHLPLTGGGNKLTF

SEQ ID NO: 52190 - protein, 14 aa, Homo sapiens
  CDR3 for beta chain variable domain of TCR clone 26095 (TRBV5-5, TRBJ2-7)
CASSLGLAVYEQYF

SEQ ID NO: 52191 - protein, 14 aa, Homo sapiens
  CDR3 for alpha chain variable domain of TCR clone 26096 (TRAV13-1, TRAJ52)
CAANGGTSYGKLTF

SEQ ID NO: 52192 - protein, 14 aa, Homo sapiens
  CDR3 for beta chain variable domain of TCR clone 26096 (TRBV14, TRBJ2-5)
CASSPLGSGETQYF

SEQ ID NO: 52193 - protein, 13 aa, Homo sapiens
  CDR3 for alpha chain variable domain of TCR clone 26097 (TRAV21, TRAJ27)
CAARPGNAGKSTF

SEQ ID NO: 52194 - protein, 16 aa, Homo sapiens
  CDR3 for beta chain variable domain of TCR clone 26097 (TRBV20-1, TRBJ1-2)
CSASMGQGVANYGDTF

SEQ ID NO: 52195 - protein, 14 aa, Homo sapiens
  CDR3 for alpha chain variable domain of TCR clone 26098 (TRAV38-1, TRAJ40)
CALRPTSETYKYIF

SEQ ID NO: 52196 - protein, 14 aa, Homo sapiens
  CDR3 for beta chain variable domain of TCR clone 26098 (TRBV25-1, TRBJ1-1)
CASTHLGGNTEAFF

SEQ ID NO: 52197 - protein, 15 aa, Homo sapiens
  CDR3 for alpha chain variable domain of TCR clone 26099 (TRAV35, TRAJ40)
CARQLGTSGTYKYIF

SEQ ID NO: 52198 - protein, 14 aa, Homo sapiens
  CDR3 for beta chain variable domain of TCR clone 26099 (TRBV7-3, TRBJ2-1)
CASSLAGGTNEQFF

SEQ ID NO: 52199 - protein, 13 aa, Homo sapiens
  CDR3 for alpha chain variable domain of TCR clone 26100 (TRAV38-1, TRAJ42)
CARWGGSQGNLIF

SEQ ID NO: 52200 - protein, 17 aa, Homo sapiens
  CDR3 for beta chain variable domain of TCR clone 26100 (TRBV20-1, TRBJ2-1)
CSARDPLAGVGDNEQFF

SEQ ID NO: 52201 - protein, 14 aa, Homo sapiens
  CDR3 for alpha chain variable domain of TCR clone 26101 (TRAV21, TRAJ58)
CAVRRGGSGSRLTF

SEQ ID NO: 52202 - protein, 13 aa, Homo sapiens
  CDR3 for beta chain variable domain of TCR clone 26101 (TRBV7-2, TRBJ1-6)
CASSLKFDSPLHF

SEQ ID NO: 52203 - protein, 14 aa, Homo sapiens
  CDR3 for alpha chain variable domain of TCR clone 26102 (TRAV1-1, TRAJ27)
CAVIYNTNAGKSIF

SEQ ID NO: 52204 - protein, 15 aa, Homo sapiens
  CDR3 for beta chain variable domain of TCR clone 26102 (TRBV6-3, TRBJ2-7)
CASSSPGTVFYEQYF

SEQ ID NO: 52205 - protein, 12 aa, Homo sapiens
  CDR3 for alpha chain variable domain of TCR clone 26103 (TRAV8-6, TRAJ8)
CAVTSGFQKLVF

SEQ ID NO: 52206 - protein, 16 aa, Homo sapiens
  CDR3 for beta chain variable domain of TCR clone 26103 (TRBV7-3, TRBJ2-2)
CASSLKRGTLSGELFF

SEQ ID NO: 52207 - protein, 13 aa, Homo sapiens
  CDR3 for alpha chain variable domain of TCR clone 26104 (TRAV13-1, TRAJ5)
CAASDAGRRALTF

SEQ ID NO: 52208 - protein, 12 aa, Homo sapiens
  CDR3 for beta chain variable domain of TCR clone 26104 (TRBV28, TRBJ2-3)
CASSLYRDTQYF

SEQ ID NO: 52209 - protein, 14 aa, Homo sapiens
  CDR3 for alpha chain variable domain of TCR clone 26105 (TRAV1-2, TRAJ16)
CAVNRFSYGQKLLF

SEQ ID NO: 52210 - protein, 16 aa, Homo sapiens
  CDR3 for beta chain variable domain of TCR clone 26105 (TRBV20-1, TRBJ1-4)
CSAPGQGLLTNEKLFF

SEQ ID NO: 52211 - protein, 12 aa, Homo sapiens
  CDR3 for alpha chain variable domain of TCR clone 26106 (TRAV12-3, TRAJ17)
CAMTLTGNKLTF

SEQ ID NO: 52212 - protein, 17 aa, Homo sapiens
  CDR3 for beta chain variable domain of TCR clone 26106 (TRBV7-3, TRBJ2-3)
RASSLMKRMRGADTQYF

SEQ ID NO: 52213 - protein, 14 aa, Homo sapiens
  CDR3 for alpha chain variable domain of TCR clone 26107 (TRAV1-2, TRAJ16)
CAVNRFSDGRKLLF

SEQ ID NO: 52214 - protein, 12 aa, Homo sapiens
  CDR3 for beta chain variable domain of TCR clone 26107 (TRBV11-2, TRBJ2-2)
CASSLGGGELFF

SEQ ID NO: 52215 - protein, 14 aa, Homo sapiens
  CDR3 for alpha chain variable domain of TCR clone 26108 (TRAV9-2, TRAJ39)
CALYIYNAGNMLTF

SEQ ID NO: 52216 - protein, 11 aa, Homo sapiens
  CDR3 for beta chain variable domain of TCR clone 26108 (TRBV11-2, TRBJ1-1)
CASSINTEAFF

SEQ ID NO: 52217 - protein, 18 aa, Homo sapiens
  CDR3 for alpha chain variable domain of TCR clone 26109 (TRAV12-3, TRAJ52)
CAMSVGGAGGTSYRKLTF

SEQ ID NO: 52218 - protein, 15 aa, Homo sapiens
  CDR3 for beta chain variable domain of TCR clone 26109 (TRBV27, TRBJ1-6)
CASSFDRGLGSPLHF

SEQ ID NO: 52219 - protein, 10 aa, Homo sapiens
  CDR3 for alpha chain variable domain of TCR clone 26110 (TRAV21, TRAJ31)
CAVDNARLMF

SEQ ID NO: 52220 - protein, 13 aa, Homo sapiens
  CDR3 for beta chain variable domain of TCR clone 26110 (TRBV4-1, TRBJ1-1)
CASSRKMNTEAVF

SEQ ID NO: 52221 - protein, 13 aa, Homo sapiens
  CDR3 for alpha chain variable domain of TCR clone 26111 (TRAV20, TRAJ34)
CAVSSYNTDKLIF

SEQ ID NO: 52222 - protein, 13 aa, Homo sapiens
  CDR3 for beta chain variable domain of TCR clone 26111 (TRBV7-9, TRBJ1-2)
CASSLKQNYGYAF

SEQ ID NO: 52223 - protein, 14 aa, Homo sapiens
  CDR3 for alpha chain variable domain of TCR clone 26112 (TRAV12-1, TRAJ13)
CVVIDSGGYQKVTF

SEQ ID NO: 52224 - protein, 17 aa, Homo sapiens
  CDR3 for beta chain variable domain of TCR clone 26112 (TRBV13, TRBJ2-3)
CASSLSRVAGGRNTQYF

SEQ ID NO: 52225 - protein, 15 aa, Homo sapiens
  CDR3 for alpha chain variable domain of TCR clone 26113 (TRAV26-1, TRAJ29)
CIVRVEGSGNTPLVF

SEQ ID NO: 52226 - protein, 15 aa, Homo sapiens
  CDR3 for beta chain variable domain of TCR clone 26113 (TRBV7-9, TRBJ1-5)
YASSQGHQPNQPQHF

SEQ ID NO: 52227 - protein, 17 aa, Homo sapiens
  CDR3 for alpha chain variable domain of TCR clone 26114 (TRAV3, TRAJ6)
CAVRDGPRAGGSYIPTF

SEQ ID NO: 52228 - protein, 12 aa, Homo sapiens
  CDR3 for beta chain variable domain of TCR clone 26114 (TRBV24-1, TRBJ1-1)
CATLYPDTEAFF

SEQ ID NO: 52229 - protein, 14 aa, Homo sapiens
  CDR3 for alpha chain variable domain of TCR clone 26115 (TRAV1-2, TRAJ16)
CAINRFSDGQKLLF

SEQ ID NO: 52230 - protein, 15 aa, Homo sapiens
  CDR3 for beta chain variable domain of TCR clone 26115 (TRBV7-9, TRBJ1-6)
CASSSPGRGNSPLHF

SEQ ID NO: 52231 - protein, 11 aa, Homo sapiens
  CDR3 for alpha chain variable domain of TCR clone 26116 (TRAV1-1, TRAJ23)
CAVRQGGKLIY

SEQ ID NO: 52232 - protein, 20 aa, Homo sapiens
  CDR3 for beta chain variable domain of TCR clone 26116 (TRBV7-8, TRBJ2-2)
CASSHLFPGPTIHITGELFF

SEQ ID NO: 52233 - protein, 15 aa, Homo sapiens
  CDR3 for alpha chain variable domain of TCR clone 26117 (TRAV27, TRAJ38)
CAARRNAGNNRKLIW

SEQ ID NO: 52234 - protein, 15 aa, Homo sapiens
  CDR3 for beta chain variable domain of TCR clone 26117 (TRBV7-9, TRBJ1-5)
CASSQGHQPNQPQHF

SEQ ID NO: 52235 - protein, 10 aa, Homo sapiens
  CDR3 for alpha chain variable domain of TCR clone 26118 (TRAV26-2, TRAJ20)
CIQNDYKLSF

SEQ ID NO: 52236 - protein, 15 aa, Homo sapiens
  CDR3 for beta chain variable domain of TCR clone 26118 (TRBV9, TRBJ1-6)
CASSVAGTGDSPLHF

SEQ ID NO: 52237 - protein, 14 aa, Homo sapiens
  CDR3 for alpha chain variable domain of TCR clone 26119 (TRAV8-1, TRAJ5)
CAVRTDTGRGALTF

SEQ ID NO: 52238 - protein, 15 aa, Homo sapiens
  CDR3 for beta chain variable domain of TCR clone 26119 (TRBV6-3, TRBJ2-7)
CASSSPGTVFYEQYF

SEQ ID NO: 52239 - protein, 17 aa, Homo sapiens
  CDR3 for alpha chain variable domain of TCR clone 26120 (TRAV3, TRAJ6)
GAVRDGPRAGGSYIPTF

SEQ ID NO: 52240 - protein, 14 aa, Homo sapiens
  CDR3 for beta chain variable domain of TCR clone 26120 (TRBV7-2, TRBJ2-7)
CASSPKTSFYEQYF

SEQ ID NO: 52241 - protein, 15 aa, Homo sapiens
  CDR3 for alpha chain variable domain of TCR clone 26121 (TRAV3, TRAJ22)
CAVRDRGGSARQLTF

SEQ ID NO: 52242 - protein, 16 aa, Homo sapiens
  CDR3 for beta chain variable domain of TCR clone 26121 (TRBV5-4, TRBJ2-3)
CANQQPGAGGADTQYF

SEQ ID NO: 52243 - protein, 15 aa, Homo sapiens
  CDR3 for alpha chain variable domain of TCR clone 26122 (TRAV17, TRAJ57)
CATGPSQSGSEKLVF

SEQ ID NO: 52244 - protein, 15 aa, Homo sapiens
  CDR3 for beta chain variable domain of TCR clone 26122 (TRBV25-1, TRBJ1-4)
CASSPGDSTNEKLFF

SEQ ID NO: 52245 - protein, 12 aa, Homo sapiens
  CDR3 for alpha chain variable domain of TCR clone 26123 (TRAV10, TRAJ34)
CVVSGKHRQAHL

SEQ ID NO: 52246 - protein, 14 aa, Homo sapiens
  CDR3 for beta chain variable domain of TCR clone 26123 (TRBV19, TRBJ2-1)
CASPTFVSSGEQFF

SEQ ID NO: 52247 - protein, 15 aa, Homo sapiens
  CDR3 for alpha chain variable domain of TCR clone 26124 (TRAV25, TRAJ52)
CAGRPGGTSYGKLTF

SEQ ID NO: 52248 - protein, 17 aa, Homo sapiens
  CDR3 for beta chain variable domain of TCR clone 26124 (TRBV7-8, TRBJ2-6)
CASSARTGGAGANVLTF

SEQ ID NO: 52249 - protein, 15 aa, Homo sapiens
  CDR3 for alpha chain variable domain of TCR clone 26125 (TRAV8-3, TRAJ40)
CAAPSLCSGTYKYIF

SEQ ID NO: 52250 - protein, 16 aa, Homo sapiens
  CDR3 for beta chain variable domain of TCR clone 26125 (TRBV7-3, TRBJ2-3)
CASSLSGYRPEDTQYF

SEQ ID NO: 52251 - protein, 14 aa, Homo sapiens
  CDR3 for alpha chain variable domain of TCR clone 26126 (TRAV29/DV5, TRAJ36)
CAARRKTGANNHFF

SEQ ID NO: 52252 - protein, 14 aa, Homo sapiens
  CDR3 for beta chain variable domain of TCR clone 26126 (TRBV12-5, TRBJ2-5)
CASGSRTHQETQYF

SEQ ID NO: 52253 - protein, 15 aa, Homo sapiens
  CDR3 for alpha chain variable domain of TCR clone 26127 (TRAV2, TRAJ22)
CAVPSRGGSARQLTF

SEQ ID NO: 52254 - protein, 14 aa, Homo sapiens
  CDR3 for beta chain variable domain of TCR clone 26127 (TRBV12-5, TRBJ2-5)
CASGSRTHQETQYF

SEQ ID NO: 52255 - protein, 16 aa, Homo sapiens
  CDR3 for alpha chain variable domain of TCR clone 26128 (TRAV22, TRAJ45)
CAVERGKRGGAYGLTF

SEQ ID NO: 52256 - protein, 11 aa, Homo sapiens
  CDR3 for beta chain variable domain of TCR clone 26128 (TRBV29-1, TRBJ2-5)
CSEDRTGTQYF

SEQ ID NO: 52257 - protein, 12 aa, Homo sapiens
  CDR3 for alpha chain variable domain of TCR clone 26129 (TRAV17, TRAJ39)
CATGAAGNMLTF

SEQ ID NO: 52258 - protein, 14 aa, Homo sapiens
  CDR3 for beta chain variable domain of TCR clone 26129 (TRBV7-9, TRBJ1-2)
CASSRQGAKYGYTF

SEQ ID NO: 52259 - protein, 11 aa, Homo sapiens
  CDR3 for alpha chain variable domain of TCR clone 26130 (TRAV12-1, TRAJ30)
CVVNGQDKIIF

SEQ ID NO: 52260 - protein, 15 aa, Homo sapiens
  CDR3 for beta chain variable domain of TCR clone 26130 (TRBV20-1, TRBJ2-7)
CSARDRVSGMDEQYF

SEQ ID NO: 52261 - protein, 17 aa, Homo sapiens
  CDR3 for alpha chain variable domain of TCR clone 26131 (TRAV8-6, TRAJ58)
CAVSSWVEETSGSRLTF

SEQ ID NO: 52262 - protein, 15 aa, Homo sapiens
  CDR3 for beta chain variable domain of TCR clone 26131 (TRBV20-1, TRBJ2-7)
CSARDRVSGMDEQYF

SEQ ID NO: 52263 - protein, 10 aa, Homo sapiens
  CDR3 for alpha chain variable domain of TCR clone 26132 (TRAV23/DV6, TRAJ57)
CAASSTLSQG

SEQ ID NO: 52264 - protein, 15 aa, Homo sapiens
  CDR3 for beta chain variable domain of TCR clone 26132 (TRBV27, TRBJ2-1)
CASSNGGGSSNEQFF

SEQ ID NO: 52265 - protein, 13 aa, Homo sapiens
  CDR3 for alpha chain variable domain of TCR clone 26133 (TRAV20, TRAJ37)
CAGCSSNTGKLIF

SEQ ID NO: 52266 - protein, 13 aa, Homo sapiens
  CDR3 for beta chain variable domain of TCR clone 26133 (TRBV4-2, TRBJ1-1)
CASSQAGNTEAFF

SEQ ID NO: 52267 - protein, 16 aa, Homo sapiens
  CDR3 for alpha chain variable domain of TCR clone 26134 (TRAV4, TRAJ22)
CLVGDLYSGSARQLNF

SEQ ID NO: 52268 - protein, 16 aa, Homo sapiens
  CDR3 for beta chain variable domain of TCR clone 26134 (TRBV7-9, TRBJ2-1)
CASSDVAGGSYNEQFF

SEQ ID NO: 52269 - protein, 14 aa, Homo sapiens
  CDR3 for alpha chain variable domain of TCR clone 26135 (TRAV17, TRAJ16)
CATAGFSDGQKLLF

SEQ ID NO: 52270 - protein, 12 aa, Homo sapiens
  CDR3 for beta chain variable domain of TCR clone 26135 (TRBV24-1, TRBJ1-1)
CATLYPDTEAFF

SEQ ID NO: 52271 - protein, 12 aa, Homo sapiens
  CDR3 for alpha chain variable domain of TCR clone 26136 (TRAV4, TRAJ26)
CLVGDYGQNFVF

SEQ ID NO: 52272 - protein, 16 aa, Homo sapiens
  CDR3 for beta chain variable domain of TCR clone 26136 (TRBV7-2, TRBJ1-2)
CASGSNQDRRGHGYTF

SEQ ID NO: 52273 - protein, 13 aa, Homo sapiens
  CDR3 for alpha chain variable domain of TCR clone 26137 (TRAV26-1, TRAJ33)
CIVGVEGNYQLIW

SEQ ID NO: 52274 - protein, 16 aa, Homo sapiens
  CDR3 for beta chain variable domain of TCR clone 26137 (TRBV15, TRBJ2-7)
CATSRDRGRRRGEQYF

SEQ ID NO: 52275 - protein, 15 aa, Homo sapiens
  CDR3 for alpha chain variable domain of TCR clone 26138 (TRAV26-1, TRAJ29)
CIVRVEGSGNTPLVF

SEQ ID NO: 52276 - protein, 12 aa, Homo sapiens
  CDR3 for beta chain variable domain of TCR clone 26138 (TRBV7-8, TRBJ2-7)
CASSLGDREQYF

SEQ ID NO: 52277 - protein, 15 aa, Homo sapiens
  CDR3 for alpha chain variable domain of TCR clone 26139 (TRAV2, TRAJ9)
CAVEDRGTGCFKTIF

SEQ ID NO: 52278 - protein, 16 aa, Homo sapiens
  CDR3 for beta chain variable domain of TCR clone 26139 (TRBV24-1, TRBJ2-3)
CATSDPGTGATDTQYF

SEQ ID NO: 52279 - protein, 14 aa, Homo sapiens
  CDR3 for alpha chain variable domain of TCR clone 26140 (TRAV12-3, TRAJ9)
CAMSPHTGGFKTIF

SEQ ID NO: 52280 - protein, 12 aa, Homo sapiens
  CDR3 for beta chain variable domain of TCR clone 26140 (TRBV19, TRBJ1-5)
CASSIAQQPQHF

SEQ ID NO: 52281 - protein, 14 aa, Homo sapiens
  CDR3 for alpha chain variable domain of TCR clone 26141 (TRAV1-2, TRAJ8)
CAVREDTGFQKLVL

SEQ ID NO: 52282 - protein, 14 aa, Homo sapiens
  CDR3 for beta chain variable domain of TCR clone 26141 (TRBV12-5, TRBJ2-5)
CASGSRTHQETQYF

SEQ ID NO: 52283 - protein, 15 aa, Homo sapiens
  CDR3 for alpha chain variable domain of TCR clone 26142 (TRAV4, TRAJ29)
CLVGAYRSQETHLLS

SEQ ID NO: 52284 - protein, 17 aa, Homo sapiens
  CDR3 for beta chain variable domain of TCR clone 26142 (TRBV25-1, TRBJ2-7)
CASSDARVVFSSYEQYF

SEQ ID NO: 52285 - protein, 12 aa, Homo sapiens
  CDR3 for alpha chain variable domain of TCR clone 26143 (TRAV21, TRAJ11)
CAATSEYSTLTF

SEQ ID NO: 52286 - protein, 13 aa, Homo sapiens
  CDR3 for beta chain variable domain of TCR clone 26143 (TRBV20-1, TRBJ2-7)
QCPELAGVGEQYF

SEQ ID NO: 52287 - protein, 12 aa, Homo sapiens
  CDR3 for alpha chain variable domain of TCR clone 26144 (TRAV29/DV5, TRAJ49)
CAATDTGNQFYF

SEQ ID NO: 52288 - protein, 14 aa, Homo sapiens
  CDR3 for beta chain variable domain of TCR clone 26144 (TRBV7-3, TRBJ1-1)
CASSLKGGNTEAFF

SEQ ID NO: 52289 - protein, 12 aa, Homo sapiens
  CDR3 for alpha chain variable domain of TCR clone 26145 (TRAV13-1, TRAJ53)
AASGGSNYKLKF

SEQ ID NO: 52290 - protein, 15 aa, Homo sapiens
  CDR3 for beta chain variable domain of TCR clone 26145 (TRBV5-1, TRBJ2-1)
CASSPPRAPYNEQFF

SEQ ID NO: 52291 - protein, 15 aa, Homo sapiens
  CDR3 for alpha chain variable domain of TCR clone 26146 (TRAV17, TRAJ57)
CATGPSQGGSEKLVF

SEQ ID NO: 52292 - protein, 18 aa, Homo sapiens
  CDR3 for beta chain variable domain of TCR clone 26146 (TRBV11-2, TRBJ2-3)
CASSLGGASRGAPNTQYF

SEQ ID NO: 52293 - protein, 13 aa, Homo sapiens
  CDR3 for alpha chain variable domain of TCR clone 26147 (TRAV1-2, TRAJ9)
CAALNTGGFKTIF

SEQ ID NO: 52294 - protein, 13 aa, Homo sapiens
  CDR3 for beta chain variable domain of TCR clone 26147 (TRBV19, TRBJ1-2)
CASSVLGQDGYTF

SEQ ID NO: 52295 - protein, 11 aa, Homo sapiens
  CDR3 for alpha chain variable domain of TCR clone 26148 (TRAV2, TRAJ33)
CAVDSNYQLIW

SEQ ID NO: 52296 - protein, 12 aa, Homo sapiens
  CDR3 for beta chain variable domain of TCR clone 26148 (TRBV12-4, TRBJ2-7)
CASSLGGYEQYF

SEQ ID NO: 52297 - protein, 12 aa, Homo sapiens
  CDR3 for alpha chain variable domain of TCR clone 26149 (TRAV16, TRAJ10)
CSRTGGGNKLTF

SEQ ID NO: 52298 - protein, 13 aa, Homo sapiens
  CDR3 for beta chain variable domain of TCR clone 26149 (TRBV12-5, TRBJ2-3)
CASGDRQSDTQYF

SEQ ID NO: 52299 - protein, 14 aa, Homo sapiens
  CDR3 for alpha chain variable domain of TCR clone 26150 (TRAV16, TRAJ33)
CALSAMDSNHQLIW

SEQ ID NO: 52300 - protein, 15 aa, Homo sapiens
  CDR3 for beta chain variable domain of TCR clone 26150 (TRBV28, TRBJ2-7)
CASSLEAYPIYEQYF

SEQ ID NO: 52301 - protein, 15 aa, Homo sapiens
  CDR3 for alpha chain variable domain of TCR clone 26151 (TRAV26-1, TRAJ22)
CIVRVSFWFCKATDL

SEQ ID NO: 52302 - protein, 13 aa, Homo sapiens
  CDR3 for beta chain variable domain of TCR clone 26151 (TRBV7-3, TRBJ1-1)
CASSQDWGAEAFF

SEQ ID NO: 52303 - protein, 12 aa, Homo sapiens
  CDR3 for alpha chain variable domain of TCR clone 26152 (TRAV17, TRAJ20)
CATLANDYKLSF

SEQ ID NO: 52304 - protein, 14 aa, Homo sapiens
  CDR3 for beta chain variable domain of TCR clone 26152 (TRBV10-3, TRBJ1-2)
CAISEDTPYYDYTF

SEQ ID NO: 52305 - protein, 15 aa, Homo sapiens
  CDR3 for alpha chain variable domain of TCR clone 26153 (TRAV8-3, TRAJ45)
CASSYSGGGADALTF

SEQ ID NO: 52306 - protein, 13 aa, Homo sapiens
  CDR3 for beta chain variable domain of TCR clone 26153 (TRBV10-3, TRBJ2-7)
CASKLAVNYEQYF

SEQ ID NO: 52307 - protein, 18 aa, Homo sapiens
  CDR3 for alpha chain variable domain of TCR clone 26154 (TRAV12-3, TRAJ52)
CAMSRTNACGTSYGKLTF

SEQ ID NO: 52308 - protein, 17 aa, Homo sapiens
  CDR3 for beta chain variable domain of TCR clone 26154 (TRBV7-3, TRBJ2-3)
CASSLMKRMRGADTQYF

SEQ ID NO: 52309 - protein, 10 aa, Homo sapiens
  CDR3 for alpha chain variable domain of TCR clone 26155 (TRAV16, TRAJ22)
SAMYLRQLTF

SEQ ID NO: 52310 - protein, 15 aa, Homo sapiens
  CDR3 for beta chain variable domain of TCR clone 26155 (TRBV19, TRBJ1-1)
CASTSGQIQNTEAFF

SEQ ID NO: 52311 - protein, 14 aa, Homo sapiens
  CDR3 for alpha chain variable domain of TCR clone 26156 (TRAV38-1, TRAJ45)
CAYYSGGGADGLTF

SEQ ID NO: 52312 - protein, 20 aa, Homo sapiens
  CDR3 for beta chain variable domain of TCR clone 26156 (TRBV28, TRBJ2-1)
CASTPTGRSPGLAGGNEQFF

SEQ ID NO: 52313 - protein, 10 aa, Homo sapiens
  CDR3 for alpha chain variable domain of TCR clone 26157 (TRAV21, TRAJ31)
CAVDNARLMF

SEQ ID NO: 52314 - protein, 15 aa, Homo sapiens
  CDR3 for beta chain variable domain of TCR clone 26157 (TRBV18, TRBJ1-5)
CASSETGGNNQPQHF

SEQ ID NO: 52315 - protein, 16 aa, Homo sapiens
  CDR3 for alpha chain variable domain of TCR clone 26158 (TRAV12-3, TRAJ53)
CAMSPGSGGSDYKLTF

SEQ ID NO: 52316 - protein, 13 aa, Homo sapiens
  CDR3 for beta chain variable domain of TCR clone 26158 (TRBV19, TRBJ1-2)
CASSVPGQDGYTF

SEQ ID NO: 52317 - protein, 15 aa, Homo sapiens
  CDR3 for alpha chain variable domain of TCR clone 26159 (TRAV27, TRAJ38)
CAARRNAGNNRKLIW

SEQ ID NO: 52318 - protein, 18 aa, Homo sapiens
  CDR3 for beta chain variable domain of TCR clone 26159 (TRBV11-2, TRBJ2-3)
CASSLGGASRGAPNTQYF

SEQ ID NO: 52319 - protein, 14 aa, Homo sapiens
  CDR3 for alpha chain variable domain of TCR clone 26160 (TRAV8-4, TRAJ8)
RAVSLNTGFQKLVF

SEQ ID NO: 52320 - protein, 13 aa, Homo sapiens
  CDR3 for beta chain variable domain of TCR clone 26160 (TRBV7-9, TRBJ2-3)
CASSPGSTDTQYF

SEQ ID NO: 52321 - protein, 11 aa, Homo sapiens
  CDR3 for alpha chain variable domain of TCR clone 26161 (TRAV1-1, TRAJ23)
CAVRQGGKLIF

SEQ ID NO: 52322 - protein, 13 aa, Homo sapiens
  CDR3 for beta chain variable domain of TCR clone 26161 (TRBV7-8, TRBJ2-2)
CASSHLFPGPTII

SEQ ID NO: 52323 - protein, 16 aa, Homo sapiens
  CDR3 for alpha chain variable domain of TCR clone 26162 (TRAV12-3, TRAJ53)
CAMSPGSGGSNYKLTF

SEQ ID NO: 52324 - protein, 15 aa, Homo sapiens
  CDR3 for beta chain variable domain of TCR clone 26162 (TRBV7-9, TRBJ1-6)
CASSSPGRGNSPLHF

SEQ ID NO: 52325 - protein, 12 aa, Homo sapiens
  CDR3 for alpha chain variable domain of TCR clone 26163 (TRAV27, TRAJ9)
CAGESGGFKTIF

SEQ ID NO: 52326 - protein, 18 aa, Homo sapiens
  CDR3 for beta chain variable domain of TCR clone 26163 (TRBV10-2, TRBJ2-2)
CISAPAVHRQADAGGLFF

SEQ ID NO: 52327 - protein, 14 aa, Homo sapiens
  CDR3 for alpha chain variable domain of TCR clone 26164 (TRAV35, TRAJ22)
CAGLRPGSARQLTF

SEQ ID NO: 52328 - protein, 14 aa, Homo sapiens
  CDR3 for beta chain variable domain of TCR clone 26164 (TRBV7-2, TRBJ2-7)
CASSPKTSFYEQYF

SEQ ID NO: 52329 - protein, 13 aa, Homo sapiens
  CDR3 for alpha chain variable domain of TCR clone 26165 (TRAV1-2, TRAJ9)
CAVLNTGGFKTIF

SEQ ID NO: 52330 - protein, 14 aa, Homo sapiens
  CDR3 for beta chain variable domain of TCR clone 26165 (TRBV20-1, TRBJ2-3)
CSARGGTSTDAQYF

SEQ ID NO: 52331 - protein, 13 aa, Homo sapiens
  CDR3 for alpha chain variable domain of TCR clone 26166 (TRAV3, TRAJ41)
CAVSSNSGYALNF

SEQ ID NO: 52332 - protein, 13 aa, Homo sapiens
  CDR3 for beta chain variable domain of TCR clone 26166 (TRBV20-1, TRBJ2-2)
CSALSGGAEELFF

SEQ ID NO: 52333 - protein, 14 aa, Homo sapiens
  CDR3 for alpha chain variable domain of TCR clone 26167 (TRAV1-2, TRAJ16)
CAVNRFSDGQKLLF

SEQ ID NO: 52334 - protein, 15 aa, Homo sapiens
  CDR3 for beta chain variable domain of TCR clone 26167 (TRBV7-9, TRBJ1-6)
CASSSQGRGNSPLHF

SEQ ID NO: 52335 - protein, 14 aa, Homo sapiens
  CDR3 for alpha chain variable domain of TCR clone 26168 (TRAV1-2, TRAJ16)
FAVNRFSDGQKLLF

SEQ ID NO: 52336 - protein, 15 aa, Homo sapiens
  CDR3 for beta chain variable domain of TCR clone 26168 (TRBV7-9, TRBJ1-6)
CASSSPGRGNSPLHF

SEQ ID NO: 52337 - protein, 15 aa, Homo sapiens
  CDR3 for alpha chain variable domain of TCR clone 26169 (TRAV21, TRAJ53)
CATLNSGGSNYEPTF

SEQ ID NO: 52338 - protein, 16 aa, Homo sapiens
  CDR3 for beta chain variable domain of TCR clone 26169 (TRBV9, TRBJ2-1)
CASSVGGGGNYNEQFF

SEQ ID NO: 52339 - protein, 18 aa, Homo sapiens
  CDR3 for alpha chain variable domain of TCR clone 26170 (TRAV21, TRAJ52)
CAVRPSPAGGTSYGKQTF

SEQ ID NO: 52340 - protein, 17 aa, Homo sapiens
  CDR3 for beta chain variable domain of TCR clone 26170 (TRBV13, TRBJ2-3)
CASSLSRVAGGRNTQYF

SEQ ID NO: 52341 - protein, 16 aa, Homo sapiens
  CDR3 for alpha chain variable domain of TCR clone 26171 (TRAV23/DV6, TRAJ9)
CAASIGGNTGGFKPIF

SEQ ID NO: 52342 - protein, 14 aa, Homo sapiens
  CDR3 for beta chain variable domain of TCR clone 26171 (TRBV9, TRBJ2-7)
CASSVGVGSYEQYF

SEQ ID NO: 52343 - protein, 14 aa, Homo sapiens
  CDR3 for alpha chain variable domain of TCR clone 26172 (TRAV21, TRAJ35)
CAVMPIGFGNVLHC

SEQ ID NO: 52344 - protein, 13 aa, Homo sapiens
  CDR3 for beta chain variable domain of TCR clone 26172 (TRBV7-3, TRBJ1-1)
CASSQDWGAEAFF

SEQ ID NO: 52345 - protein, 14 aa, Homo sapiens
  CDR3 for alpha chain variable domain of TCR clone 26173 (TRAV26-1, TRAJ39)
CIVRGSRAGNMLTF

SEQ ID NO: 52346 - protein, 15 aa, Homo sapiens
  CDR3 for beta chain variable domain of TCR clone 26173 (TRBV7-9, TRBJ1-5)
CASSQGYQPNQPQHF

SEQ ID NO: 52347 - protein, 16 aa, Homo sapiens
  CDR3 for alpha chain variable domain of TCR clone 26174 (TRAV21, TRAJ53)
CAMSPGSGGSNYKLTF

SEQ ID NO: 52348 - protein, 11 aa, Homo sapiens
  CDR3 for beta chain variable domain of TCR clone 26174 (TRBV29-1, TRBJ2-5)
CSEDRTGTQYF

SEQ ID NO: 52349 - protein, 14 aa, Homo sapiens
  CDR3 for alpha chain variable domain of TCR clone 26175 (TRAV12-2, TRAJ13)
CAVKKTGGYQKVTF

SEQ ID NO: 52350 - protein, 16 aa, Homo sapiens
  CDR3 for beta chain variable domain of TCR clone 26175 (TRBV7-3, TRBJ2-1)
CASSLEGYRSYNEQFF

SEQ ID NO: 52351 - protein, 13 aa, Homo sapiens
  CDR3 for alpha chain variable domain of TCR clone 26176 (TRAV12-2, TRAJ42)
CAVKRGSQGNLIF

SEQ ID NO: 52352 - protein, 12 aa, Homo sapiens
  CDR3 for beta chain variable domain of TCR clone 26176 (TRBV5-7, TRBJ1-2)
CASSLVQSGYTF

SEQ ID NO: 52353 - protein, 16 aa, Homo sapiens
  CDR3 for alpha chain variable domain of TCR clone 26177 (TRAV3, TRAJ37)
CAVRGKGSGNTGKLIF

SEQ ID NO: 52354 - protein, 14 aa, Homo sapiens
  CDR3 for beta chain variable domain of TCR clone 26177 (TRBV13, TRBJ2-5)
CASSLGTAQETQYF

SEQ ID NO: 52355 - protein, 17 aa, Homo sapiens
  CDR3 for alpha chain variable domain of TCR clone 26178 (TRAV3, TRAJ12)
CCEGRDGTMDSSYKLIF

SEQ ID NO: 52356 - protein, 15 aa, Homo sapiens
  CDR3 for beta chain variable domain of TCR clone 26178 (TRBV5-5, TRBJ1-5)
CASSLKGGGEQPQHF

SEQ ID NO: 52357 - protein, 13 aa, Homo sapiens
  CDR3 for alpha chain variable domain of TCR clone 26179 (TRAV13-2, TRAJ53)
CAENMGSNYKMTF

SEQ ID NO: 52358 - protein, 13 aa, Homo sapiens
  CDR3 for beta chain variable domain of TCR clone 26179 (TRBV4-1, TRBJ2-2)
CASSQENTGELFF

SEQ ID NO: 52359 - protein, 10 aa, Homo sapiens
  CDR3 for alpha chain variable domain of TCR clone 26180 (TRAV13-1, TRAJ27)
CAPLARQINL

SEQ ID NO: 52360 - protein, 13 aa, Homo sapiens
  CDR3 for beta chain variable domain of TCR clone 26180 (TRBV28, TRBJ1-1)
CAGSKQGWTEAFF

SEQ ID NO: 52361 - protein, 14 aa, Homo sapiens
  CDR3 for alpha chain variable domain of TCR clone 26181 (TRAV8-4, TRAJ9)
YAVRINTGGFKTIF

SEQ ID NO: 52362 - protein, 15 aa, Homo sapiens
  CDR3 for beta chain variable domain of TCR clone 26181 (TRBV10-2, TRBJ2-6)
CASSEQGTGANVLTF

SEQ ID NO: 52363 - protein, 12 aa, Homo sapiens
  CDR3 for alpha chain variable domain of TCR clone 26182 (TRAV12-3, TRAJ17)
CAMTLTGNKLTF

SEQ ID NO: 52364 - protein, 16 aa, Homo sapiens
  CDR3 for beta chain variable domain of TCR clone 26182 (TRBV7-3, TRBJ2-1)
YASSLEGYRSYNEQFF

SEQ ID NO: 52365 - protein, 16 aa, Homo sapiens
  CDR3 for alpha chain variable domain of TCR clone 26183 (TRAV16, TRAJ52)
CALSAAGGTSYGKLTF

SEQ ID NO: 52366 - protein, 12 aa, Homo sapiens
  CDR3 for beta chain variable domain of TCR clone 26183 (TRBV12-4, TRBJ2-7)
CASSLGGYEQYF

SEQ ID NO: 52367 - protein, 15 aa, Homo sapiens
  CDR3 for alpha chain variable domain of TCR clone 26184 (TRAV8-6, TRAJ10)
CAVSGQAGGGNKLTF

SEQ ID NO: 52368 - protein, 15 aa, Homo sapiens
  CDR3 for beta chain variable domain of TCR clone 26184 (TRBV3-1, TRBJ2-5)
CASSANLGGPETQYF

SEQ ID NO: 52369 - protein, 14 aa, Homo sapiens
  CDR3 for alpha chain variable domain of TCR clone 26185 (TRAV17, TRAJ12)
CATDEKDSSYKLIF

SEQ ID NO: 52370 - protein, 16 aa, Homo sapiens
  CDR3 for beta chain variable domain of TCR clone 26185 (TRBV11-2, TRBJ2-1)
CASSPRLAGVYNGQFF

SEQ ID NO: 52371 - protein, 14 aa, Homo sapiens
  CDR3 for alpha chain variable domain of TCR clone 26186 (TRAV12-2, TRAJ13)
CAVKKTGGYQKVTF

SEQ ID NO: 52372 - protein, 14 aa, Homo sapiens
  CDR3 for beta chain variable domain of TCR clone 26186 (TRBV11-2, TRBJ2-7)
CASSLGAGAYEQYF

SEQ ID NO: 52373 - protein, 12 aa, Homo sapiens
  CDR3 for alpha chain variable domain of TCR clone 26187 (TRAV17, TRAJ20)
CATDSNDYKLSF

SEQ ID NO: 52374 - protein, 16 aa, Homo sapiens
  CDR3 for beta chain variable domain of TCR clone 26187 (TRBV7-2, TRBJ1-2)
CASSSNQDRRGHGYAF

SEQ ID NO: 52375 - protein, 16 aa, Homo sapiens
  CDR3 for alpha chain variable domain of TCR clone 26188 (TRAV12-3, TRAJ53)
CAMSPGSGGSNYKLTF

SEQ ID NO: 52376 - protein, 16 aa, Homo sapiens
  CDR3 for beta chain variable domain of TCR clone 26188 (TRBV4-2, TRBJ1-1)
CASIQAGFGMNTEAFF

SEQ ID NO: 52377 - protein, 14 aa, Homo sapiens
  CDR3 for alpha chain variable domain of TCR clone 26189 (TRAV1-1, TRAJ15)
CAVRTQPGRNCSDL

SEQ ID NO: 52378 - protein, 13 aa, Homo sapiens
  CDR3 for beta chain variable domain of TCR clone 26189 (TRBV5-7, TRBJ2-2)
CASTNIDTGELFF

SEQ ID NO: 52379 - protein, 12 aa, Homo sapiens
  CDR3 for alpha chain variable domain of TCR clone 26190 (TRAV12-1, TRAJ40)
CVVYSGTYKYIF

SEQ ID NO: 52380 - protein, 18 aa, Homo sapiens
  CDR3 for beta chain variable domain of TCR clone 26190 (TRBV11-2, TRBJ2-3)
CASSLGGDSRGAPNTQYF

SEQ ID NO: 52381 - protein, 14 aa, Homo sapiens
  CDR3 for alpha chain variable domain of TCR clone 26191 (TRAV12-2, TRAJ40)
CAVKIPSGTYKYIF

SEQ ID NO: 52382 - protein, 14 aa, Homo sapiens
  CDR3 for beta chain variable domain of TCR clone 26191 (TRBV20-1, TRBJ1-1)
CSAQTRIWGTEAFF

SEQ ID NO: 52383 - protein, 14 aa, Homo sapiens
  CDR3 for alpha chain variable domain of TCR clone 26192 (TRAV36/DV7, TRAJ13)
WGSGENGGYQKVTF

SEQ ID NO: 52384 - protein, 15 aa, Homo sapiens
  CDR3 for beta chain variable domain of TCR clone 26192 (TRBV19, TRBJ2-1)
CASSTGTSSYNEQLF

SEQ ID NO: 52385 - protein, 11 aa, Homo sapiens
  CDR3 for alpha chain variable domain of TCR clone 26193 (TRAV2, TRAJ33)
CAVDSNYQLIW

SEQ ID NO: 52386 - protein, 15 aa, Homo sapiens
  CDR3 for beta chain variable domain of TCR clone 26193 (TRBV19, TRBJ1-2)
CVSSVGQVLNYGYTF

SEQ ID NO: 52387 - protein, 16 aa, Homo sapiens
  CDR3 for alpha chain variable domain of TCR clone 26194 (TRAV3, TRAJ23)
CAVKIGIYNQGGKLIF

SEQ ID NO: 52388 - protein, 17 aa, Homo sapiens
  CDR3 for beta chain variable domain of TCR clone 26194 (TRBV10-3, TRBJ2-6)
CAISESTAPSGANGLTF

SEQ ID NO: 52389 - protein, 15 aa, Homo sapiens
  CDR3 for alpha chain variable domain of TCR clone 26195 (TRAV3, TRAJ32)
CAVSSYGVATNKLIF

SEQ ID NO: 52390 - protein, 13 aa, Homo sapiens
  CDR3 for beta chain variable domain of TCR clone 26195 (TRBV20-1, TRBJ2-7)
CSARPSTNYEQYF

SEQ ID NO: 52391 - protein, 14 aa, Homo sapiens
  CDR3 for alpha chain variable domain of TCR clone 26196 (TRAV2, TRAJ37)
CAVDFTSSTGKLIF

SEQ ID NO: 52392 - protein, 13 aa, Homo sapiens
  CDR3 for beta chain variable domain of TCR clone 26196 (TRBV20-1, TRBJ1-1)
CSAPLGGGTEAFF

SEQ ID NO: 52393 - protein, 14 aa, Homo sapiens
  CDR3 for alpha chain variable domain of TCR clone 26197 (TRAV12-1, TRAJ17)
CVVNYKAAGNKLTF

SEQ ID NO: 52394 - protein, 17 aa, Homo sapiens
  CDR3 for beta chain variable domain of TCR clone 26197 (TRBV20-1, TRBJ2-1)
CSASSSGLAGSYNAQFF

SEQ ID NO: 52395 - protein, 12 aa, Homo sapiens
  CDR3 for alpha chain variable domain of TCR clone 26198 (TRAV3, TRAJ39)
CAVIEWRNMLTF

SEQ ID NO: 52396 - protein, 14 aa, Homo sapiens
  CDR3 for beta chain variable domain of TCR clone 26198 (TRBV7-8, TRBJ2-3)
CASSFPDGQDTQYF

SEQ ID NO: 52397 - protein, 12 aa, Homo sapiens
  CDR3 for alpha chain variable domain of TCR clone 26199 (TRAV12-1, TRAJ40)
CVVYSGTYKYIF

SEQ ID NO: 52398 - protein, 18 aa, Homo sapiens
  CDR3 for beta chain variable domain of TCR clone 26199 (TRBV11-2, TRBJ2-3)
CASNLGGASRGAPNTQYF

SEQ ID NO: 52399 - protein, 18 aa, Homo sapiens
  CDR3 for alpha chain variable domain of TCR clone 26200 (TRAV26-1, TRAJ23)
CIVRVGLEVWNQGGKLIF

SEQ ID NO: 52400 - protein, 16 aa, Homo sapiens
  CDR3 for beta chain variable domain of TCR clone 26200 (TRBV12-4, TRBJ2-5)
CASSFVVRGRQETQYF

SEQ ID NO: 52401 - protein, 16 aa, Homo sapiens
  CDR3 for alpha chain variable domain of TCR clone 26201 (TRAV5, TRAJ6)
CAERPHASGGSYIPTF

SEQ ID NO: 52402 - protein, 13 aa, Homo sapiens
  CDR3 for beta chain variable domain of TCR clone 26201 (TRBV6-5, TRBJ1-2)
CASSYTGGGGYTF

SEQ ID NO: 52403 - protein, 15 aa, Homo sapiens
  CDR3 for alpha chain variable domain of TCR clone 26202 (TRAV8-3, TRAJ45)
CASSYSGGGADGLTF

SEQ ID NO: 52404 - protein, 16 aa, Homo sapiens
  CDR3 for beta chain variable domain of TCR clone 26202 (TRBV7-3, TRBJ2-2)
CASSLKRGTLSGELFF

SEQ ID NO: 52405 - protein, 15 aa, Homo sapiens
  CDR3 for alpha chain variable domain of TCR clone 26203 (TRAV3, TRAJ4)
CAVRDGTGGYNKPIF

SEQ ID NO: 52406 - protein, 16 aa, Homo sapiens
  CDR3 for beta chain variable domain of TCR clone 26203 (TRBV27, TRBJ2-2)
CASSSSGVSNTGELFF

SEQ ID NO: 52407 - protein, 12 aa, Homo sapiens
  CDR3 for alpha chain variable domain of TCR clone 26204 (TRAV27, TRAJ35)
CAGADFGSVLHC

SEQ ID NO: 52408 - protein, 16 aa, Homo sapiens
  CDR3 for beta chain variable domain of TCR clone 26204 (TRBV6-1, TRBJ2-1)
CASILRQGSSYNEQFF

SEQ ID NO: 52409 - protein, 15 aa, Homo sapiens
  CDR3 for alpha chain variable domain of TCR clone 26205 (TRAV26-1, TRAJ29)
CIVRVEGSGNTPLVF

SEQ ID NO: 52410 - protein, 14 aa, Homo sapiens
  CDR3 for beta chain variable domain of TCR clone 26205 (TRBV18, TRBJ2-5)
CASSSGVSQETQYF

SEQ ID NO: 52411 - protein, 15 aa, Homo sapiens
  CDR3 for alpha chain variable domain of TCR clone 26206 (TRAV12-2, TRAJ53)
CAVNTGGGSNYNLTF

SEQ ID NO: 52412 - protein, 15 aa, Homo sapiens
  CDR3 for beta chain variable domain of TCR clone 26206 (TRBV5-1, TRBJ2-5)
CASSLGLGEIKTQYF

SEQ ID NO: 52413 - protein, 15 aa, Homo sapiens
  CDR3 for alpha chain variable domain of TCR clone 26207 (TRAV13-1, TRAJ44)
CAASRGGGTASKLTF

SEQ ID NO: 52414 - protein, 14 aa, Homo sapiens
  CDR3 for beta chain variable domain of TCR clone 26207 (TRBV7-2, TRBJ2-5)
CAGSPRGSSETQYF

SEQ ID NO: 52415 - protein, 11 aa, Homo sapiens
  CDR3 for alpha chain variable domain of TCR clone 26208 (TRAV20, TRAJ34)
CTRDNTDKLIF

SEQ ID NO: 52416 - protein, 15 aa, Homo sapiens
  CDR3 for beta chain variable domain of TCR clone 26208 (TRBV2, TRBJ2-1)
CASSVTGEGTDEQFF

SEQ ID NO: 52417 - protein, 11 aa, Homo sapiens
  CDR3 for alpha chain variable domain of TCR clone 26209 (TRAV1-1, TRAJ23)
CAVRQGGKLIF

SEQ ID NO: 52418 - protein, 17 aa, Homo sapiens
  CDR3 for beta chain variable domain of TCR clone 26209 (TRBV11-2, TRBJ2-1)
CASSLYPPGVEYNEQFF

SEQ ID NO: 52419 - protein, 14 aa, Homo sapiens
  CDR3 for alpha chain variable domain of TCR clone 26210 (TRAV12-2, TRAJ11)
CAVNRESGYSTLTF

SEQ ID NO: 52420 - protein, 10 aa, Homo sapiens
  CDR3 for beta chain variable domain of TCR clone 26210 (TRBV20-1, TRBJ2-5)
CSARFEAQYF

SEQ ID NO: 52421 - protein, 12 aa, Homo sapiens
  CDR3 for alpha chain variable domain of TCR clone 26211 (TRAV12-3, TRAJ17)
CAMTLTGNKLTF

SEQ ID NO: 52422 - protein, 13 aa, Homo sapiens
  CDR3 for beta chain variable domain of TCR clone 26211 (TRBV4-1, TRBJ2-2)
CASSQENTGELFF

SEQ ID NO: 52423 - protein, 13 aa, Homo sapiens
  CDR3 for alpha chain variable domain of TCR clone 26212 (TRAV3, TRAJ21)
CAVREPDFNKFYF

SEQ ID NO: 52424 - protein, 17 aa, Homo sapiens
  CDR3 for beta chain variable domain of TCR clone 26212 (TRBV11-2, TRBJ2-1)
CASSLYPPGVEYNEQFF

SEQ ID NO: 52425 - protein, 17 aa, Homo sapiens
  CDR3 for alpha chain variable domain of TCR clone 26213 (TRAV4, TRAJ13)
CLVGVQGSSGGYQKVTF

SEQ ID NO: 52426 - protein, 17 aa, Homo sapiens
  CDR3 for beta chain variable domain of TCR clone 26213 (TRBV15, TRBJ2-3)
CHQQRWRQELDTDTQYF

SEQ ID NO: 52427 - protein, 14 aa, Homo sapiens
  CDR3 for alpha chain variable domain of TCR clone 26214 (TRAV29/DV5, TRAJ36)
CAARRKTGANNLFF

SEQ ID NO: 52428 - protein, 14 aa, Homo sapiens
  CDR3 for beta chain variable domain of TCR clone 26214 (TRBV7-2, TRBJ1-1)
CASSFLTGTTEAFF

SEQ ID NO: 52429 - protein, 14 aa, Homo sapiens
  CDR3 for alpha chain variable domain of TCR clone 26215 (TRAV1-2, TRAJ8)
CAVREDTGFQKLVF

SEQ ID NO: 52430 - protein, 16 aa, Homo sapiens
  CDR3 for beta chain variable domain of TCR clone 26215 (TRBV20-1, TRBJ2-4)
CSARAIPAGQGDIQYF

SEQ ID NO: 52431 - protein, 12 aa, Homo sapiens
  CDR3 for alpha chain variable domain of TCR clone 26216 (TRAV17, TRAJ4)
CATDGGYNQLIF

SEQ ID NO: 52432 - protein, 13 aa, Homo sapiens
  CDR3 for beta chain variable domain of TCR clone 26216 (TRBV29-1, TRBJ2-2)
CSTTGVNTGELFF

SEQ ID NO: 52433 - protein, 15 aa, Homo sapiens
  CDR3 for alpha chain variable domain of TCR clone 26217 (TRAV2, TRAJ9)
CAVGDRGTGGFKTIF

SEQ ID NO: 52434 - protein, 14 aa, Homo sapiens
  CDR3 for beta chain variable domain of TCR clone 26217 (TRBV4-1, TRBJ2-2)
CASSQAVNTGELFF

SEQ ID NO: 52435 - protein, 12 aa, Homo sapiens
  CDR3 for alpha chain variable domain of TCR clone 26218 (TRAV12-3, TRAJ20)
CAMVRGDYKLSF

SEQ ID NO: 52436 - protein, 14 aa, Homo sapiens
  CDR3 for beta chain variable domain of TCR clone 26218 (TRBV5-5, TRBJ1-5)
CASSGQGFDQPQHF

SEQ ID NO: 52437 - protein, 13 aa, Homo sapiens
  CDR3 for alpha chain variable domain of TCR clone 26219 (TRAV17, TRAJ26)
RATVDNYGQNFVF

SEQ ID NO: 52438 - protein, 16 aa, Homo sapiens
  CDR3 for beta chain variable domain of TCR clone 26219 (TRBV2, TRBJ2-1)
CASSVGGSLSYNEQFF

SEQ ID NO: 52439 - protein, 12 aa, Homo sapiens
  CDR3 for alpha chain variable domain of TCR clone 26220 (TRAV21, TRAJ33)
CAKMDSNYQLIW

SEQ ID NO: 52440 - protein, 16 aa, Homo sapiens
  CDR3 for beta chain variable domain of TCR clone 26220 (TRBV7-3, TRBJ2-2)
CASSLKRGTLSGELFF

SEQ ID NO: 52441 - protein, 15 aa, Homo sapiens
  CDR3 for alpha chain variable domain of TCR clone 26221 (TRAV36/DV7, TRAJ53)
CAVGGSGGSNYKLTF

SEQ ID NO: 52442 - protein, 16 aa, Homo sapiens
  CDR3 for beta chain variable domain of TCR clone 26221 (TRBV27, TRBJ2-2)
CASSLSGFWVTGELFF

SEQ ID NO: 52443 - protein, 16 aa, Homo sapiens
  CDR3 for alpha chain variable domain of TCR clone 26222 (TRAV30, TRAJ24)
CGTEIVHADSWGKFQF

SEQ ID NO: 52444 - protein, 14 aa, Homo sapiens
  CDR3 for beta chain variable domain of TCR clone 26222 (TRBV12-5, TRBJ2-5)
CASGSRTHQETQYF

SEQ ID NO: 52445 - protein, 15 aa, Homo sapiens
  CDR3 for alpha chain variable domain of TCR clone 26223 (TRAV3, TRAJ4)
CAVRDGTGGYNKLIF

SEQ ID NO: 52446 - protein, 16 aa, Homo sapiens
  CDR3 for beta chain variable domain of TCR clone 26223 (TRBV27, TRBJ2-2)
YASSSSGVSNTGELFF

SEQ ID NO: 52447 - protein, 11 aa, Homo sapiens
  CDR3 for alpha chain variable domain of TCR clone 26224 (TRAV2, TRAJ21)
CAVFNFNEFYF

SEQ ID NO: 52448 - protein, 14 aa, Homo sapiens
  CDR3 for beta chain variable domain of TCR clone 26224 (TRBV15, TRBJ2-3)
CATRSGTSTDTQYF

SEQ ID NO: 52449 - protein, 14 aa, Homo sapiens
  CDR3 for alpha chain variable domain of TCR clone 26225 (TRAV8-4, TRAJ54)
CAVSEGLGAQKLVF

SEQ ID NO: 52450 - protein, 13 aa, Homo sapiens
  CDR3 for beta chain variable domain of TCR clone 26225 (TRBV27, TRBJ2-7)
CASSFVSSYEQYF

SEQ ID NO: 52451 - protein, 14 aa, Homo sapiens
  CDR3 for alpha chain variable domain of TCR clone 26226 (TRAV12-3, TRAJ22)
CAMSLFGSARQLTF

SEQ ID NO: 52452 - protein, 11 aa, Homo sapiens
  CDR3 for beta chain variable domain of TCR clone 26226 (TRBV12-4, TRBJ2-2)
RASSSAGELFF

SEQ ID NO: 52453 - protein, 13 aa, Homo sapiens
  CDR3 for alpha chain variable domain of TCR clone 26227 (TRAV21, TRAJ15)
CAVANQAGTAPIF

SEQ ID NO: 52454 - protein, 14 aa, Homo sapiens
  CDR3 for beta chain variable domain of TCR clone 26227 (TRBV27, TRBJ2-2)
CASSLGAATGELFF

SEQ ID NO: 52455 - protein, 14 aa, Homo sapiens
  CDR3 for alpha chain variable domain of TCR clone 26228 (TRAV21, TRAJ38)
CAVANAGNNRKLIW

SEQ ID NO: 52456 - protein, 16 aa, Homo sapiens
  CDR3 for beta chain variable domain of TCR clone 26228 (TRBV6-1, TRBJ2-5)
CASSETLDRGAETQYF

SEQ ID NO: 52457 - protein, 14 aa, Homo sapiens
  CDR3 for alpha chain variable domain of TCR clone 26229 (TRAV1-2, TRAJ8)
CTVREDTGFQKLVF

SEQ ID NO: 52458 - protein, 12 aa, Homo sapiens
  CDR3 for beta chain variable domain of TCR clone 26229 (TRBV11-2, TRBJ2-2)
CASSLGGGELFF

SEQ ID NO: 52459 - protein, 14 aa, Homo sapiens
  CDR3 for alpha chain variable domain of TCR clone 26230 (TRAV12-1, TRAJ3)
CGADRYSSASKIIF

SEQ ID NO: 52460 - protein, 15 aa, Homo sapiens
  CDR3 for beta chain variable domain of TCR clone 26230 (TRBV7-2, TRBJ2-6)
CASSREGSGANVLTF

SEQ ID NO: 52461 - protein, 14 aa, Homo sapiens
  CDR3 for alpha chain variable domain of TCR clone 26231 (TRAV1-2, TRAJ8)
CAVREDTGFQKLVF

SEQ ID NO: 52462 - protein, 13 aa, Homo sapiens
  CDR3 for beta chain variable domain of TCR clone 26231 (TRBV12-4, TRBJ1-1)
CASSPGTGFEAFF

SEQ ID NO: 52463 - protein, 15 aa, Homo sapiens
  CDR3 for alpha chain variable domain of TCR clone 26232 (TRAV17, TRAJ16)
CATALRFSDGQKLLF

SEQ ID NO: 52464 - protein, 12 aa, Homo sapiens
  CDR3 for beta chain variable domain of TCR clone 26232 (TRBV2, TRBJ2-7)
CASSDPDYEQYS

SEQ ID NO: 52465 - protein, 17 aa, Homo sapiens
  CDR3 for alpha chain variable domain of TCR clone 26233 (TRAV13-1, TRAJ52)
CAASSGAGGTGYGKLTF

SEQ ID NO: 52466 - protein, 15 aa, Homo sapiens
  CDR3 for beta chain variable domain of TCR clone 26233 (TRBV2, TRBJ2-1)
CASSELAGSYNEQFF

SEQ ID NO: 52467 - protein, 16 aa, Homo sapiens
  CDR3 for alpha chain variable domain of TCR clone 26234 (TRAV17, TRAJ17)
CATALREEAAGNKLTF

SEQ ID NO: 52468 - protein, 12 aa, Homo sapiens
  CDR3 for beta chain variable domain of TCR clone 26234 (TRBV4-2, TRBJ2-5)
CASGGAQETQYF

SEQ ID NO: 52469 - protein, 12 aa, Homo sapiens
  CDR3 for alpha chain variable domain of TCR clone 26235 (TRAV13-1, TRAJ21)
CAAEEGFNKFYF

SEQ ID NO: 52470 - protein, 13 aa, Homo sapiens
  CDR3 for beta chain variable domain of TCR clone 26235 (TRBV19, TRBJ1-2)
CASSVPGQDGYTF

SEQ ID NO: 52471 - protein, 11 aa, Homo sapiens
  CDR3 for alpha chain variable domain of TCR clone 26236 (TRAV16, TRAJ29)
WAPSGNTPLVF

SEQ ID NO: 52472 - protein, 13 aa, Homo sapiens
  CDR3 for beta chain variable domain of TCR clone 26236 (TRBV10-3, TRBJ2-7)
CASKLAVNYEQYF

SEQ ID NO: 52473 - protein, 13 aa, Homo sapiens
  CDR3 for alpha chain variable domain of TCR clone 26237 (TRAV2, TRAJ40)
CAVVTSGTYKYIF

SEQ ID NO: 52474 - protein, 13 aa, Homo sapiens
  CDR3 for beta chain variable domain of TCR clone 26237 (TRBV7-2, TRBJ2-2)
CASSLAVTGELFF

SEQ ID NO: 52475 - protein, 14 aa, Homo sapiens
  CDR3 for alpha chain variable domain of TCR clone 26238 (TRAV12-1, TRAJ30)
CVANIGGRDDKIIF

SEQ ID NO: 52476 - protein, 13 aa, Homo sapiens
  CDR3 for beta chain variable domain of TCR clone 26238 (TRBV12-5, TRBJ2-1)
CASGLGRGNEQFF

SEQ ID NO: 52477 - protein, 12 aa, Homo sapiens
  CDR3 for alpha chain variable domain of TCR clone 26239 (TRAV13-1, TRAJ49)
CAASPMGNQFYF

SEQ ID NO: 52478 - protein, 13 aa, Homo sapiens
  CDR3 for beta chain variable domain of TCR clone 26239 (TRBV20-1, TRBJ2-2)
CSASAAGTGELFF

SEQ ID NO: 52479 - protein, 16 aa, Homo sapiens
  CDR3 for alpha chain variable domain of TCR clone 26240 (TRAV14/DV4, TRAJ53)
CAMREGGGGSNYKLTF

SEQ ID NO: 52480 - protein, 14 aa, Homo sapiens
  CDR3 for beta chain variable domain of TCR clone 26240 (TRBV6-1, TRBJ1-3)
CASVQGGGGNTIYF

SEQ ID NO: 52481 - protein, 12 aa, Homo sapiens
  CDR3 for alpha chain variable domain of TCR clone 26241 (TRAV17, TRAJ39)
CATGAAGNMLTF

SEQ ID NO: 52482 - protein, 14 aa, Homo sapiens
  CDR3 for beta chain variable domain of TCR clone 26241 (TRBV7-9, TRBJ1-2)
CASSQQGANYGYTF

SEQ ID NO: 52483 - protein, 14 aa, Homo sapiens
  CDR3 for alpha chain variable domain of TCR clone 26242 (TRAV1-2, TRAJ16)
CAVNRFSDGQKLLF

SEQ ID NO: 52484 - protein, 16 aa, Homo sapiens
  CDR3 for beta chain variable domain of TCR clone 26242 (TRBV7-7, TRBJ2-1)
CASSLASGTSYNEQFF

SEQ ID NO: 52485 - protein, 14 aa, Homo sapiens
  CDR3 for alpha chain variable domain of TCR clone 26243 (TRAV12-2, TRAJ9)
CAVNMEGGGFKTIF

SEQ ID NO: 52486 - protein, 14 aa, Homo sapiens
  CDR3 for beta chain variable domain of TCR clone 26243 (TRBV27, TRBJ2-5)
CASSSLEGWETQYF

SEQ ID NO: 52487 - protein, 15 aa, Homo sapiens
  CDR3 for alpha chain variable domain of TCR clone 26244 (TRAV2, TRAJ9)
CAVEDRGTGGFKTIF

SEQ ID NO: 52488 - protein, 19 aa, Homo sapiens
  CDR3 for beta chain variable domain of TCR clone 26244 (TRBV28, TRBJ2-7)
CASSYSGTSRLGRVYEQYF

SEQ ID NO: 52489 - protein, 15 aa, Homo sapiens
  CDR3 for alpha chain variable domain of TCR clone 26245 (TRAV12-2, TRAJ53)
CAVNGGGGSNYKLTF

SEQ ID NO: 52490 - protein, 17 aa, Homo sapiens
  CDR3 for beta chain variable domain of TCR clone 26245 (TRBV7-3, TRBJ2-3)
RAGSLMKRMRGADTQYF

SEQ ID NO: 52491 - protein, 18 aa, Homo sapiens
  CDR3 for alpha chain variable domain of TCR clone 26246 (TRAV26-1, TRAJ52)
CIVRVEGAGGTSYGKLTF

SEQ ID NO: 52492 - protein, 13 aa, Homo sapiens
  CDR3 for beta chain variable domain of TCR clone 26246 (TRBV7-3, TRBJ1-2)
CASSLKRGYGHTF

SEQ ID NO: 52493 - protein, 15 aa, Homo sapiens
  CDR3 for alpha chain variable domain of TCR clone 26247 (TRAV21, TRAJ24)
CAARSSTDSWWKLQF

SEQ ID NO: 52494 - protein, 13 aa, Homo sapiens
  CDR3 for beta chain variable domain of TCR clone 26247 (TRBV11-2, TRBJ2-5)
CASSSTGEETQYF

SEQ ID NO: 52495 - protein, 14 aa, Homo sapiens
  CDR3 for alpha chain variable domain of TCR clone 26248 (TRAV12-2, TRAJ44)
CAVNPAGTASKLTF

SEQ ID NO: 52496 - protein, 12 aa, Homo sapiens
  CDR3 for beta chain variable domain of TCR clone 26248 (TRBV11-2, TRBJ2-2)
CASSLGGGELFF

SEQ ID NO: 52497 - protein, 18 aa, Homo sapiens
  CDR3 for alpha chain variable domain of TCR clone 26249 (TRAV26-1, TRAJ52)
CIVRVEGAGGTSYGKLTF

SEQ ID NO: 52498 - protein, 13 aa, Homo sapiens
  CDR3 for beta chain variable domain of TCR clone 26249 (TRBV7-3, TRBJ1-2)
CASSLERGYGYTF

SEQ ID NO: 52499 - protein, 13 aa, Homo sapiens
  CDR3 for alpha chain variable domain of TCR clone 26250 (TRAV1-1, TRAJ9)
CAAKNTGGFKTIF

SEQ ID NO: 52500 - protein, 14 aa, Homo sapiens
  CDR3 for beta chain variable domain of TCR clone 26250 (TRBV20-1, TRBJ2-1)
CSAQIGGSANEQFF

SEQ ID NO: 52501 - protein, 13 aa, Homo sapiens
  CDR3 for alpha chain variable domain of TCR clone 26251 (TRAV38-1, TRAJ42)
CARWGGSQGNLIF

SEQ ID NO: 52502 - protein, 17 aa, Homo sapiens
  CDR3 for beta chain variable domain of TCR clone 26251 (TRBV11-2, TRBJ2-1)
CASSLYPPGVEYNEQFF

SEQ ID NO: 52503 - protein, 13 aa, Homo sapiens
  CDR3 for alpha chain variable domain of TCR clone 26252 (TRAV1-2, TRAJ9)
CDALNTGGFKTIF

SEQ ID NO: 52504 - protein, 13 aa, Homo sapiens
  CDR3 for beta chain variable domain of TCR clone 26252 (TRBV19, TRBJ1-2)
CASSVPGQDGYTF

SEQ ID NO: 52505 - protein, 14 aa, Homo sapiens
  CDR3 for alpha chain variable domain of TCR clone 26253 (TRAV1-2, TRAJ16)
CAVNRFSDGQKLLF

SEQ ID NO: 52506 - protein, 13 aa, Homo sapiens
  CDR3 for beta chain variable domain of TCR clone 26253 (TRBV12-4, TRBJ1-2)
CASSSGPNYGYTF

SEQ ID NO: 52507 - protein, 15 aa, Homo sapiens
  CDR3 for alpha chain variable domain of TCR clone 26254 (TRAV26-1, TRAJ29)
CIVRVEGSGNTPLVF

SEQ ID NO: 52508 - protein, 16 aa, Homo sapiens
  CDR3 for beta chain variable domain of TCR clone 26254 (TRBV19, TRBJ2-1)
CASSKAGPSSYNEQFF

SEQ ID NO: 52509 - protein, 11 aa, Homo sapiens
  CDR3 for alpha chain variable domain of TCR clone 26255 (TRAV35, TRAJ30)
CAGPGDDKIIF

SEQ ID NO: 52510 - protein, 14 aa, Homo sapiens
  CDR3 for beta chain variable domain of TCR clone 26255 (TRBV7-6, TRBJ1-6)
CASSQAGGGSHLHF

SEQ ID NO: 52511 - protein, 13 aa, Homo sapiens
  CDR3 for alpha chain variable domain of TCR clone 26256 (TRAV13-1, TRAJ26)
CAIVLGPGTRLSV

SEQ ID NO: 52512 - protein, 15 aa, Homo sapiens
  CDR3 for beta chain variable domain of TCR clone 26256 (TRBV12-4, TRBJ2-1)
CASSLLGRTYNEQFF

SEQ ID NO: 52513 - protein, 12 aa, Homo sapiens
  CDR3 for alpha chain variable domain of TCR clone 26257 (TRAV21, TRAJ27)
CCASRQCRQITF

SEQ ID NO: 52514 - protein, 14 aa, Homo sapiens
  CDR3 for beta chain variable domain of TCR clone 26257 (TRBV7-6, TRBJ2-3)
CASSLGTVTDTQYF

SEQ ID NO: 52515 - protein, 14 aa, Homo sapiens
  CDR3 for alpha chain variable domain of TCR clone 26258 (TRAV38-1, TRAJ45)
CASHSGGGADGLTF

SEQ ID NO: 52516 - protein, 13 aa, Homo sapiens
  CDR3 for beta chain variable domain of TCR clone 26258 (TRBV10-3, TRBJ1-2)
RAISERDSYGYTF

SEQ ID NO: 52517 - protein, 14 aa, Homo sapiens
  CDR3 for alpha chain variable domain of TCR clone 26259 (TRAV12-2, TRAJ40)
CAVKIPSGTYKYIF

SEQ ID NO: 52518 - protein, 14 aa, Homo sapiens
  CDR3 for beta chain variable domain of TCR clone 26259 (TRBV20-1, TRBJ1-1)
CRAQTRIGGTEAFF

SEQ ID NO: 52519 - protein, 16 aa, Homo sapiens
  CDR3 for alpha chain variable domain of TCR clone 26260 (TRAV3, TRAJ37)
CAVRPHGSGNTGKLIF

SEQ ID NO: 52520 - protein, 16 aa, Homo sapiens
  CDR3 for beta chain variable domain of TCR clone 26260 (TRBV9, TRBJ1-2)
CASSVEEKVAPYGYTF

SEQ ID NO: 52521 - protein, 15 aa, Homo sapiens
  CDR3 for alpha chain variable domain of TCR clone 26261 (TRAV8-3, TRAJ11)
CAVGLLNSGYSTLTF

SEQ ID NO: 52522 - protein, 16 aa, Homo sapiens
  CDR3 for beta chain variable domain of TCR clone 26261 (TRBV7-9, TRBJ1-2)
CASSLGFPSGEDGYTF

SEQ ID NO: 52523 - protein, 18 aa, Homo sapiens
  CDR3 for alpha chain variable domain of TCR clone 26262 (TRAV12-3, TRAJ52)
CAMSVGGAGGTSYGKLTF

SEQ ID NO: 52524 - protein, 15 aa, Homo sapiens
  CDR3 for beta chain variable domain of TCR clone 26262 (TRBV27, TRBJ1-6)
RASSFDRGLGSPLHF

SEQ ID NO: 52525 - protein, 13 aa, Homo sapiens
  CDR3 for alpha chain variable domain of TCR clone 26263 (TRAV20, TRAJ42)
CAVQGGSQGNLIF

SEQ ID NO: 52526 - protein, 14 aa, Homo sapiens
  CDR3 for beta chain variable domain of TCR clone 26263 (TRBV11-2, TRBJ1-2)
CASSLGTANYGYTF

SEQ ID NO: 52527 - protein, 13 aa, Homo sapiens
  CDR3 for alpha chain variable domain of TCR clone 26264 (TRAV17, TRAJ9)
CATDYTGGIKTIF

SEQ ID NO: 52528 - protein, 16 aa, Homo sapiens
  CDR3 for beta chain variable domain of TCR clone 26264 (TRBV7-7, TRBJ2-1)
CASSLASGTSYNEQFF

SEQ ID NO: 52529 - protein, 14 aa, Homo sapiens
  CDR3 for alpha chain variable domain of TCR clone 26265 (TRAV8-3, TRAJ17)
RAVGAQTAGNKLTF

SEQ ID NO: 52530 - protein, 11 aa, Homo sapiens
  CDR3 for beta chain variable domain of TCR clone 26265 (TRBV29-1, TRBJ1-4)
CSVSSGEKLFF

SEQ ID NO: 52531 - protein, 12 aa, Homo sapiens
  CDR3 for alpha chain variable domain of TCR clone 26266 (TRAV13-2, TRAJ23)
CAERHRGGKLIF

SEQ ID NO: 52532 - protein, 16 aa, Homo sapiens
  CDR3 for beta chain variable domain of TCR clone 26266 (TRBV27, TRBJ2-1)
CASSLSKGFGLDEQFF

SEQ ID NO: 52533 - protein, 14 aa, Homo sapiens
  CDR3 for alpha chain variable domain of TCR clone 26267 (TRAV3, TRAJ17)
CAVRDAAAGNKLTF

SEQ ID NO: 52534 - protein, 13 aa, Homo sapiens
  CDR3 for beta chain variable domain of TCR clone 26267 (TRBV2, TRBJ1-1)
CASSVSGYTEALF

SEQ ID NO: 52535 - protein, 12 aa, Homo sapiens
  CDR3 for alpha chain variable domain of TCR clone 26268 (TRAV2, TRAJ31)
CAVEDNNDRLMF

SEQ ID NO: 52536 - protein, 16 aa, Homo sapiens
  CDR3 for beta chain variable domain of TCR clone 26268 (TRBV10-3, TRBJ2-1)
CAISGVGDGGGGEQFF

SEQ ID NO: 52537 - protein, 12 aa, Homo sapiens
  CDR3 for alpha chain variable domain of TCR clone 26269 (TRAV2, TRAJ9)
CAVGAGGFITIF

SEQ ID NO: 52538 - protein, 16 aa, Homo sapiens
  CDR3 for beta chain variable domain of TCR clone 26269 (TRBV13, TRBJ2-2)
CASSPRTGEHTGELFF

SEQ ID NO: 52539 - protein, 15 aa, Homo sapiens
  CDR3 for alpha chain variable domain of TCR clone 26270 (TRAV3, TRAJ9)
CAVRARNTGGFKTIF

SEQ ID NO: 52540 - protein, 17 aa, Homo sapiens
  CDR3 for beta chain variable domain of TCR clone 26270 (TRBV13, TRBJ2-3)
CASSLSRVAGGRNTQYF

SEQ ID NO: 52541 - protein, 16 aa, Homo sapiens
  CDR3 for alpha chain variable domain of TCR clone 26271 (TRAV13-2, TRAJ53)
CAENANSGGSNYKLTF

SEQ ID NO: 52542 - protein, 19 aa, Homo sapiens
  CDR3 for beta chain variable domain of TCR clone 26271 (TRBV28, TRBJ2-7)
CASSYSGTSRLGWVYGQYF

SEQ ID NO: 52543 - protein, 14 aa, Homo sapiens
  CDR3 for alpha chain variable domain of TCR clone 26272 (TRAV1-2, TRAJ16)
CAVNRFSDGQKLLF

SEQ ID NO: 52544 - protein, 15 aa, Homo sapiens
  CDR3 for beta chain variable domain of TCR clone 26272 (TRBV7-2, TRBJ2-1)
CASSLASGRVNEQFF

SEQ ID NO: 52545 - protein, 11 aa, Homo sapiens
  CDR3 for alpha chain variable domain of TCR clone 26273 (TRAV1-2, TRAJ20)
CAVANDYKLSF

SEQ ID NO: 52546 - protein, 18 aa, Homo sapiens
  CDR3 for beta chain variable domain of TCR clone 26273 (TRBV20-1, TRBJ2-6)
CSAETTLTHGSGANVLTF

SEQ ID NO: 52547 - protein, 14 aa, Homo sapiens
  CDR3 for alpha chain variable domain of TCR clone 26274 (TRAV2, TRAJ9)
CAVEDRSGGFKTIF

SEQ ID NO: 52548 - protein, 13 aa, Homo sapiens
  CDR3 for beta chain variable domain of TCR clone 26274 (TRBV10-3, TRBJ2-7)
CASKLAVNYEQYF

SEQ ID NO: 52549 - protein, 14 aa, Homo sapiens
  CDR3 for alpha chain variable domain of TCR clone 26275 (TRAV1-2, TRAJ8)
CTVREDTGFQKLVF

SEQ ID NO: 52550 - protein, 15 aa, Homo sapiens
  CDR3 for beta chain variable domain of TCR clone 26275 (TRBV6-3, TRBJ2-7)
CASSSPGTVFYEQYF

SEQ ID NO: 52551 - protein, 19 aa, Homo sapiens
  CDR3 for alpha chain variable domain of TCR clone 26276 (TRAV26-1, TRAJ52)
CIVRAYRNAGGTSYGKLTF

SEQ ID NO: 52552 - protein, 15 aa, Homo sapiens
  CDR3 for beta chain variable domain of TCR clone 26276 (TRBV12-4, TRBJ2-5)
CASSPPTGLQETQYF

SEQ ID NO: 52553 - protein, 14 aa, Homo sapiens
  CDR3 for alpha chain variable domain of TCR clone 26277 (TRAV29/DV5, TRAJ36)
CAARRKTGANNLFF

SEQ ID NO: 52554 - protein, 15 aa, Homo sapiens
  CDR3 for beta chain variable domain of TCR clone 26277 (TRBV7-8, TRBJ1-2)
CASSPDRGREYGYTF

SEQ ID NO: 52555 - protein, 20 aa, Homo sapiens
  CDR3 for alpha chain variable domain of TCR clone 26278 (TRAV12-1, TRAJ42)
SSVIQPPASVKGGSQGNLIF

SEQ ID NO: 52556 - protein, 18 aa, Homo sapiens
  CDR3 for beta chain variable domain of TCR clone 26278 (TRBV11-2, TRBJ2-3)
CASSLGGASRGAPNTQYF

SEQ ID NO: 52557 - protein, 18 aa, Homo sapiens
  CDR3 for alpha chain variable domain of TCR clone 26279 (TRAV21, TRAJ52)
CAVRPSPAGGTSYGKPTF

SEQ ID NO: 52558 - protein, 16 aa, Homo sapiens
  CDR3 for beta chain variable domain of TCR clone 26279 (TRBV19, TRBJ2-1)
CASSKAGPSSYNEQFF

SEQ ID NO: 52559 - protein, 18 aa, Homo sapiens
  CDR3 for alpha chain variable domain of TCR clone 26280 (TRAV21, TRAJ52)
CAVRPSPAGGTSYGKLTF

SEQ ID NO: 52560 - protein, 17 aa, Homo sapiens
  CDR3 for beta chain variable domain of TCR clone 26280 (TRBV13, TRBJ2-3)
CASSVSRVAGGRNTQYF

SEQ ID NO: 52561 - protein, 14 aa, Homo sapiens
  CDR3 for alpha chain variable domain of TCR clone 26281 (TRAV26-1, TRAJ38)
CIADNAGNNRKLIW

SEQ ID NO: 52562 - protein, 14 aa, Homo sapiens
  CDR3 for beta chain variable domain of TCR clone 26281 (TRBV7-6, TRBJ2-3)
CASSLGTVTDTQYF

SEQ ID NO: 52563 - protein, 19 aa, Homo sapiens
  CDR3 for alpha chain variable domain of TCR clone 26282 (TRAV26-1, TRAJ52)
CIVRAHRNAGGTSYGKLTF

SEQ ID NO: 52564 - protein, 15 aa, Homo sapiens
  CDR3 for beta chain variable domain of TCR clone 26282 (TRBV29-1, TRBJ2-1)
CSGRDKKSSYNEQFF

SEQ ID NO: 52565 - protein, 12 aa, Homo sapiens
  CDR3 for alpha chain variable domain of TCR clone 26283 (TRAV12-1, TRAJ40)
CVVYSGIYKYIF

SEQ ID NO: 52566 - protein, 18 aa, Homo sapiens
  CDR3 for beta chain variable domain of TCR clone 26283 (TRBV11-2, TRBJ2-3)
CASSLGGASRGAPNTQYF

SEQ ID NO: 52567 - protein, 16 aa, Homo sapiens
  CDR3 for alpha chain variable domain of TCR clone 26284 (TRAV16, TRAJ4)
CALSRMFSGGYHKLIF

SEQ ID NO: 52568 - protein, 16 aa, Homo sapiens
  CDR3 for beta chain variable domain of TCR clone 26284 (TRBV24-1, TRBJ2-3)
CATSDPGTGATDTQYF

SEQ ID NO: 52569 - protein, 11 aa, Homo sapiens
  CDR3 for alpha chain variable domain of TCR clone 26285 (TRAV12-3, TRAJ43)
CVMSVSNDMRF

SEQ ID NO: 52570 - protein, 13 aa, Homo sapiens
  CDR3 for beta chain variable domain of TCR clone 26285 (TRBV20-1, TRBJ1-1)
CSAPLGGGTEAFF

SEQ ID NO: 52571 - protein, 13 aa, Homo sapiens
  CDR3 for alpha chain variable domain of TCR clone 26286 (TRAV1-2, TRAJ9)
CAVLNTGGSKTIF

SEQ ID NO: 52572 - protein, 15 aa, Homo sapiens
  CDR3 for beta chain variable domain of TCR clone 26286 (TRBV7-3, TRBJ2-1)
CASSPTGGGEVEQFF

SEQ ID NO: 52573 - protein, 14 aa, Homo sapiens
  CDR3 for alpha chain variable domain of TCR clone 26287 (TRAV13-2, TRAJ11)
CAETGNSGYSTLTF

SEQ ID NO: 52574 - protein, 11 aa, Homo sapiens
  CDR3 for beta chain variable domain of TCR clone 26287 (TRBV10-3, TRBJ2-7)
CAINEGLEQYF

SEQ ID NO: 52575 - protein, 13 aa, Homo sapiens
  CDR3 for alpha chain variable domain of TCR clone 26288 (TRAV17, TRAJ15)
CATDARAGTALIL

SEQ ID NO: 52576 - protein, 15 aa, Homo sapiens
  CDR3 for beta chain variable domain of TCR clone 26288 (TRBV20-1, TRBJ2-7)
CSARDRVSGMDEQYF

SEQ ID NO: 52577 - protein, 12 aa, Homo sapiens
  CDR3 for alpha chain variable domain of TCR clone 26289 (TRAV12-3, TRAJ5)
CAMNTGRRALTF

SEQ ID NO: 52578 - protein, 13 aa, Homo sapiens
  CDR3 for beta chain variable domain of TCR clone 26289 (TRBV7-7, TRBJ2-2)
CASSLTSAGELFF

SEQ ID NO: 52579 - protein, 15 aa, Homo sapiens
  CDR3 for alpha chain variable domain of TCR clone 26290 (TRAV26-1, TRAJ29)
CIVRVEGSGNTPLVF

SEQ ID NO: 52580 - protein, 14 aa, Homo sapiens
  CDR3 for beta chain variable domain of TCR clone 26290 (TRBV18, TRBJ2-5)
CARSPGVSQETQYF

SEQ ID NO: 52581 - protein, 14 aa, Homo sapiens
  CDR3 for alpha chain variable domain of TCR clone 26291 (TRAV16, TRAJ37)
CALDISGNTGKLIF

SEQ ID NO: 52582 - protein, 14 aa, Homo sapiens
  CDR3 for beta chain variable domain of TCR clone 26291 (TRBV7-6, TRBJ2-7)
CASSCRQGADEQYF

SEQ ID NO: 52583 - protein, 17 aa, Homo sapiens
  CDR3 for alpha chain variable domain of TCR clone 26292 (TRAV3, TRAJ6)
CAVSRRTDTGGSYIPTF

SEQ ID NO: 52584 - protein, 18 aa, Homo sapiens
  CDR3 for beta chain variable domain of TCR clone 26292 (TRBV7-2, TRBJ2-3)
CASSLDTSRGRKADTQYF

SEQ ID NO: 52585 - protein, 16 aa, Homo sapiens
  CDR3 for alpha chain variable domain of TCR clone 26293 (TRAV1-2, TRAJ16)
CAVNRFQMARSCSLQG

SEQ ID NO: 52586 - protein, 15 aa, Homo sapiens
  CDR3 for beta chain variable domain of TCR clone 26293 (TRBV9, TRBJ1-6)
CASSVAGTGDSPLHF

SEQ ID NO: 52587 - protein, 15 aa, Homo sapiens
  CDR3 for alpha chain variable domain of TCR clone 26294 (TRAV13-1, TRAJ52)
SYYNAGGTSYGKLTF

SEQ ID NO: 52588 - protein, 15 aa, Homo sapiens
  CDR3 for beta chain variable domain of TCR clone 26294 (TRBV5-1, TRBJ2-1)
CASSPPRAPYNEQFF

SEQ ID NO: 52589 - protein, 12 aa, Homo sapiens
  CDR3 for alpha chain variable domain of TCR clone 26295 (TRAV8-3, TRAJ26)
CADDNYGQNFVF

SEQ ID NO: 52590 - protein, 15 aa, Homo sapiens
  CDR3 for beta chain variable domain of TCR clone 26295 (TRBV9, TRBJ2-1)
CASSLAGSSYNEQFF

SEQ ID NO: 52591 - protein, 14 aa, Homo sapiens
  CDR3 for alpha chain variable domain of TCR clone 26296 (TRAV13-1, TRAJ35)
CAASKGGFGNVLHC

SEQ ID NO: 52592 - protein, 13 aa, Homo sapiens
  CDR3 for beta chain variable domain of TCR clone 26296 (TRBV7-3, TRBJ1-1)
CASSPDWGAEAFF

SEQ ID NO: 52593 - protein, 13 aa, Homo sapiens
  CDR3 for alpha chain variable domain of TCR clone 26297 (TRAV13-1, TRAJ5)
CAASDTGRRALTF

SEQ ID NO: 52594 - protein, 15 aa, Homo sapiens
  CDR3 for beta chain variable domain of TCR clone 26297 (TRBV6-5, TRBJ2-1)
CASSYDAGAGNEQFF

SEQ ID NO: 52595 - protein, 17 aa, Homo sapiens
  CDR3 for alpha chain variable domain of TCR clone 26298 (TRAV3, TRAJ12)
CAVRDGGRTDSSYKLIF

SEQ ID NO: 52596 - protein, 13 aa, Homo sapiens
  CDR3 for beta chain variable domain of TCR clone 26298 (TRBV20-1, TRBJ1-1)
CSAPLGGGTEAFF

SEQ ID NO: 52597 - protein, 15 aa, Homo sapiens
  CDR3 for alpha chain variable domain of TCR clone 26299 (TRAV12-3, TRAJ27)
CAMRAYNTNAGKSTF

SEQ ID NO: 52598 - protein, 13 aa, Homo sapiens
  CDR3 for beta chain variable domain of TCR clone 26299 (TRBV7-9, TRBJ1-2)
CASSLKQNYGYTF

SEQ ID NO: 52599 - protein, 11 aa, Homo sapiens
  CDR3 for alpha chain variable domain of TCR clone 26300 (TRAV2, TRAJ13)
CASGGYQKVTF

SEQ ID NO: 52600 - protein, 14 aa, Homo sapiens
  CDR3 for beta chain variable domain of TCR clone 26300 (TRBV7-9, TRBJ2-1)
CASSPRDSLYEQFF

SEQ ID NO: 52601 - protein, 12 aa, Homo sapiens
  CDR3 for alpha chain variable domain of TCR clone 26301 (TRAV17, TRAJ39)
CATGAAGNMLTF

SEQ ID NO: 52602 - protein, 14 aa, Homo sapiens
  CDR3 for beta chain variable domain of TCR clone 26301 (TRBV7-9, TRBJ1-2)
CASSRQGANYGYTL

SEQ ID NO: 52603 - protein, 15 aa, Homo sapiens
  CDR3 for alpha chain variable domain of TCR clone 26302 (TRAV27, TRAJ38)
CAARRNAGNNRKLIW

SEQ ID NO: 52604 - protein, 14 aa, Homo sapiens
  CDR3 for beta chain variable domain of TCR clone 26302 (TRBV7-2, TRBJ2-7)
CASRSQGAAYEQYF

SEQ ID NO: 52605 - protein, 14 aa, Homo sapiens
  CDR3 for alpha chain variable domain of TCR clone 26303 (TRAV26-1, TRAJ34)
CIARVAYNTDKLIF

SEQ ID NO: 52606 - protein, 15 aa, Homo sapiens
  CDR3 for beta chain variable domain of TCR clone 26303 (TRBV20-1, TRBJ2-7)
CSARVPAAYFYEQYF

SEQ ID NO: 52607 - protein, 14 aa, Homo sapiens
  CDR3 for alpha chain variable domain of TCR clone 26304 (TRAV2, TRAJ37)
CAVDFTCNTGKLIF

SEQ ID NO: 52608 - protein, 15 aa, Homo sapiens
  CDR3 for beta chain variable domain of TCR clone 26304 (TRBV20-1, TRBJ1-1)
CSASRGVTGNTEAFF

SEQ ID NO: 52609 - protein, 14 aa, Homo sapiens
  CDR3 for alpha chain variable domain of TCR clone 26305 (TRAV12-3, TRAJ10)
SHLPLTGGGNKLTF

SEQ ID NO: 52610 - protein, 14 aa, Homo sapiens
  CDR3 for beta chain variable domain of TCR clone 26305 (TRBV7-2, TRBJ2-2)
RASSLNSNTGELFF

SEQ ID NO: 52611 - protein, 14 aa, Homo sapiens
  CDR3 for alpha chain variable domain of TCR clone 26306 (TRAV16, TRAJ39)
CALSKNNAGNMLTF

SEQ ID NO: 52612 - protein, 17 aa, Homo sapiens
  CDR3 for beta chain variable domain of TCR clone 26306 (TRBV23-1, TRBJ1-2)
CASSNTGGGLLWLHLRF

SEQ ID NO: 52613 - protein, 14 aa, Homo sapiens
  CDR3 for alpha chain variable domain of TCR clone 26307 (TRAV4, TRAJ26)
CLVGPYNYGQNFVF

SEQ ID NO: 52614 - protein, 17 aa, Homo sapiens
  CDR3 for beta chain variable domain of TCR clone 26307 (TRBV24-1, TRBJ2-1)
CATSDVSTSGTYNEQFF

SEQ ID NO: 52615 - protein, 14 aa, Homo sapiens
  CDR3 for alpha chain variable domain of TCR clone 26308 (TRAV13-1, TRAJ9)
CAASALTGGFKTIF

SEQ ID NO: 52616 - protein, 13 aa, Homo sapiens
  CDR3 for beta chain variable domain of TCR clone 26308 (TRBV20-1, TRBJ1-1)
CSAGTVGNTEAVF

SEQ ID NO: 52617 - protein, 17 aa, Homo sapiens
  CDR3 for alpha chain variable domain of TCR clone 26309 (TRAV35, TRAJ28)
CAGLQVYSGAGSYQLTF

SEQ ID NO: 52618 - protein, 15 aa, Homo sapiens
  CDR3 for beta chain variable domain of TCR clone 26309 (TRBV2, TRBJ1-2)
CASSEIGGANYGYAF

SEQ ID NO: 52619 - protein, 14 aa, Homo sapiens
  CDR3 for alpha chain variable domain of TCR clone 26310 (TRAV17, TRAJ16)
CATADFSDGQKLLF

SEQ ID NO: 52620 - protein, 15 aa, Homo sapiens
  CDR3 for beta chain variable domain of TCR clone 26310 (TRBV18, TRBJ2-1)
CASSPPSASYSEQFF

SEQ ID NO: 52621 - protein, 14 aa, Homo sapiens
  CDR3 for alpha chain variable domain of TCR clone 26311 (TRAV3, TRAJ22)
CAVRDYGPARQLTF

SEQ ID NO: 52622 - protein, 13 aa, Homo sapiens
  CDR3 for beta chain variable domain of TCR clone 26311 (TRBV11-2, TRBJ2-5)
CASGHGAKETQYF

SEQ ID NO: 52623 - protein, 11 aa, Homo sapiens
  CDR3 for alpha chain variable domain of TCR clone 26312 (TRAV2, TRAJ33)
CAVESNYQLIW

SEQ ID NO: 52624 - protein, 17 aa, Homo sapiens
  CDR3 for beta chain variable domain of TCR clone 26312 (TRBV11-2, TRBJ2-1)
CASSLYPPGVEYNEQFF

SEQ ID NO: 52625 - protein, 14 aa, Homo sapiens
  CDR3 for alpha chain variable domain of TCR clone 26313 (TRAV1-2, TRAJ16)
CAVNRFSDGQKLLF

SEQ ID NO: 52626 - protein, 16 aa, Homo sapiens
  CDR3 for beta chain variable domain of TCR clone 26313 (TRBV2, TRBJ2-7)
CASSEPWTGPSYEQYF

SEQ ID NO: 52627 - protein, 18 aa, Homo sapiens
  CDR3 for alpha chain variable domain of TCR clone 26314 (TRAV21, TRAJ52)
CAVRPSPAGGTSYGKLTF

SEQ ID NO: 52628 - protein, 13 aa, Homo sapiens
  CDR3 for beta chain variable domain of TCR clone 26314 (TRBV7-3, TRBJ1-1)
CASSQDWGAEDFF

SEQ ID NO: 52629 - protein, 13 aa, Homo sapiens
  CDR3 for alpha chain variable domain of TCR clone 26315 (TRAV1-2, TRAJ9)
CAALNTGGFKTIF

SEQ ID NO: 52630 - protein, 13 aa, Homo sapiens
  CDR3 for beta chain variable domain of TCR clone 26315 (TRBV11-2, TRBJ1-2)
CASSLDSPSGYTF

SEQ ID NO: 52631 - protein, 15 aa, Homo sapiens
  CDR3 for alpha chain variable domain of TCR clone 26316 (TRAV21, TRAJ53)
CATLNSGGSNYKLTF

SEQ ID NO: 52632 - protein, 14 aa, Homo sapiens
  CDR3 for beta chain variable domain of TCR clone 26316 (TRBV11-2, TRBJ2-5)
CASSRTGGIETQYF

SEQ ID NO: 52633 - protein, 13 aa, Homo sapiens
  CDR3 for alpha chain variable domain of TCR clone 26317 (TRAV16, TRAJ58)
CALSIPSGSRLTF

SEQ ID NO: 52634 - protein, 13 aa, Homo sapiens
  CDR3 for beta chain variable domain of TCR clone 26317 (TRBV27, TRBJ1-1)
CASSLSIGAEAFF

SEQ ID NO: 52635 - protein, 12 aa, Homo sapiens
  CDR3 for alpha chain variable domain of TCR clone 26318 (TRAV12-3, TRAJ17)
CAMTLTGNKLTF

SEQ ID NO: 52636 - protein, 14 aa, Homo sapiens
  CDR3 for beta chain variable domain of TCR clone 26318 (TRBV11-1, TRBJ2-7)
CASSFRQGSYEQYF

SEQ ID NO: 52637 - protein, 15 aa, Homo sapiens
  CDR3 for alpha chain variable domain of TCR clone 26319 (TRAV26-1, TRAJ44)
CIVRANTGTASKLTF

SEQ ID NO: 52638 - protein, 14 aa, Homo sapiens
  CDR3 for beta chain variable domain of TCR clone 26319 (TRBV19, TRBJ2-1)
CASPTFVLSGEQFF

SEQ ID NO: 52639 - protein, 17 aa, Homo sapiens
  CDR3 for alpha chain variable domain of TCR clone 26320 (TRAV12-2, TRAJ6)
CAPQGPPRAGGSYIPPF

SEQ ID NO: 52640 - protein, 16 aa, Homo sapiens
  CDR3 for beta chain variable domain of TCR clone 26320 (TRBV19, TRBJ2-2)
CASSTARASNTGELFF

SEQ ID NO: 52641 - protein, 11 aa, Homo sapiens
  CDR3 for alpha chain variable domain of TCR clone 26321 (TRAV1-2, TRAJ31)
CAVNNNAILMF

SEQ ID NO: 52642 - protein, 15 aa, Homo sapiens
  CDR3 for beta chain variable domain of TCR clone 26321 (TRBV28, TRBJ2-1)
CASSIIAGGRSEQFF

SEQ ID NO: 52643 - protein, 12 aa, Homo sapiens
  CDR3 for alpha chain variable domain of TCR clone 26322 (TRAV1-1, TRAJ9)
CAVDTGGFNTIF

SEQ ID NO: 52644 - protein, 14 aa, Homo sapiens
  CDR3 for beta chain variable domain of TCR clone 26322 (TRBV7-8, TRBJ2-5)
CASSATGGQETQYF

SEQ ID NO: 52645 - protein, 12 aa, Homo sapiens
  CDR3 for alpha chain variable domain of TCR clone 26323 (TRAV13-1, TRAJ21)
CAAKEGFNKFYF

SEQ ID NO: 52646 - protein, 14 aa, Homo sapiens
  CDR3 for beta chain variable domain of TCR clone 26323 (TRBV12-4, TRBJ1-1)
CASSSARGYTEAFF

SEQ ID NO: 52647 - protein, 16 aa, Homo sapiens
  CDR3 for alpha chain variable domain of TCR clone 26324 (TRAV4, TRAJ9)
CLVGDPNRPEGFKTIF

SEQ ID NO: 52648 - protein, 16 aa, Homo sapiens
  CDR3 for beta chain variable domain of TCR clone 26324 (TRBV28, TRBJ1-4)
CASSPPYRGRSEKLFF

SEQ ID NO: 52649 - protein, 14 aa, Homo sapiens
  CDR3 for alpha chain variable domain of TCR clone 26325 (TRAV1-2, TRAJ8)
CAVREDTGFQKLVF

SEQ ID NO: 52650 - protein, 18 aa, Homo sapiens
  CDR3 for beta chain variable domain of TCR clone 26325 (TRBV18, TRBJ1-3)
CASSPRGGAGPSGNTIYF

SEQ ID NO: 52651 - protein, 13 aa, Homo sapiens
  CDR3 for alpha chain variable domain of TCR clone 26326 (TRAV2, TRAJ40)
CAVVTSGTYKNIF

SEQ ID NO: 52652 - protein, 14 aa, Homo sapiens
  CDR3 for beta chain variable domain of TCR clone 26326 (TRBV19, TRBJ2-1)
CASPTFVLSGEQFF

SEQ ID NO: 52653 - protein, 16 aa, Homo sapiens
  CDR3 for alpha chain variable domain of TCR clone 26327 (TRAV22, TRAJ45)
CAVVRGKRGGADGLTF

SEQ ID NO: 52654 - protein, 13 aa, Homo sapiens
  CDR3 for beta chain variable domain of TCR clone 26327 (TRBV27, TRBJ1-1)
CASSLSIGAEAFF

SEQ ID NO: 52655 - protein, 14 aa, Homo sapiens
  CDR3 for alpha chain variable domain of TCR clone 26328 (TRAV1-2, TRAJ16)
CAVNRFSDGQKLLF

SEQ ID NO: 52656 - protein, 14 aa, Homo sapiens
  CDR3 for beta chain variable domain of TCR clone 26328 (TRBV27, TRBJ2-5)
CASSSLKGWETQYF

SEQ ID NO: 52657 - protein, 13 aa, Homo sapiens
  CDR3 for alpha chain variable domain of TCR clone 26329 (TRAV2, TRAJ40)
CAVVTSGTSKYIF

SEQ ID NO: 52658 - protein, 15 aa, Homo sapiens
  CDR3 for beta chain variable domain of TCR clone 26329 (TRBV11-3, TRBJ2-3)
CASLKDGREGDTQYF

SEQ ID NO: 52659 - protein, 15 aa, Homo sapiens
  CDR3 for alpha chain variable domain of TCR clone 26330 (TRAV26-1, TRAJ56)
CIVRVATGANSKLTF

SEQ ID NO: 52660 - protein, 15 aa, Homo sapiens
  CDR3 for beta chain variable domain of TCR clone 26330 (TRBV27, TRBJ2-7)
CASSPQREGKREQYF

SEQ ID NO: 52661 - protein, 15 aa, Homo sapiens
  CDR3 for alpha chain variable domain of TCR clone 26331 (TRAV23/DV6, TRAJ18)
CAVRYRGSTLGRLYF

SEQ ID NO: 52662 - protein, 13 aa, Homo sapiens
  CDR3 for beta chain variable domain of TCR clone 26331 (TRBV7-2, TRBJ2-7)
CASSSPSGSEQYF

SEQ ID NO: 52663 - protein, 11 aa, Homo sapiens
  CDR3 for alpha chain variable domain of TCR clone 26332 (TRAV3, TRAJ21)
RAVGNFNKFYF

SEQ ID NO: 52664 - protein, 16 aa, Homo sapiens
  CDR3 for beta chain variable domain of TCR clone 26332 (TRBV19, TRBJ2-1)
CASSKAGPSSYNEQSF

SEQ ID NO: 52665 - protein, 13 aa, Homo sapiens
  CDR3 for alpha chain variable domain of TCR clone 26333 (TRAV12-2, TRAJ20)
CAVHPSNDYKLSF

SEQ ID NO: 52666 - protein, 15 aa, Homo sapiens
  CDR3 for beta chain variable domain of TCR clone 26333 (TRBV27, TRBJ2-5)
CASSLYPRGGETQYF

SEQ ID NO: 52667 - protein, 15 aa, Homo sapiens
  CDR3 for alpha chain variable domain of TCR clone 26334 (TRAV21, TRAJ32)
CAVNSYGSATNKLIF

SEQ ID NO: 52668 - protein, 18 aa, Homo sapiens
  CDR3 for beta chain variable domain of TCR clone 26334 (TRBV7-9, TRBJ2-1)
CASSTGLAEGSSYNEQFF

SEQ ID NO: 52669 - protein, 12 aa, Homo sapiens
  CDR3 for alpha chain variable domain of TCR clone 26335 (TRAV36/DV7, TRAJ54)
CAVVRGDQKLVF

SEQ ID NO: 52670 - protein, 14 aa, Homo sapiens
  CDR3 for beta chain variable domain of TCR clone 26335 (TRBV7-3, TRBJ1-1)
CASSLKGGNTEAFF

SEQ ID NO: 52671 - protein, 13 aa, Homo sapiens
  CDR3 for alpha chain variable domain of TCR clone 26336 (TRAV27, TRAJ29)
RAGAHSGNTPLVF

SEQ ID NO: 52672 - protein, 14 aa, Homo sapiens
  CDR3 for beta chain variable domain of TCR clone 26336 (TRBV7-9, TRBJ2-7)
CASSIGQGAGEQYF

SEQ ID NO: 52673 - protein, 14 aa, Homo sapiens
  CDR3 for alpha chain variable domain of TCR clone 26337 (TRAV12-2, TRAJ13)
CAVKKTGGYQKVTF

SEQ ID NO: 52674 - protein, 15 aa, Homo sapiens
  CDR3 for beta chain variable domain of TCR clone 26337 (TRBV27, TRBJ2-1)
CASSHGGGSSNEQFF

SEQ ID NO: 52675 - protein, 17 aa, Homo sapiens
  CDR3 for alpha chain variable domain of TCR clone 26338 (TRAV12-3, TRAJ6)
CAMSARGGAGGSYIPPF

SEQ ID NO: 52676 - protein, 12 aa, Homo sapiens
  CDR3 for beta chain variable domain of TCR clone 26338 (TRBV12-4, TRBJ2-3)
CASSTLPDTQYF

SEQ ID NO: 52677 - protein, 14 aa, Homo sapiens
  CDR3 for alpha chain variable domain of TCR clone 26339 (TRAV38-1, TRAJ45)
CAYYSGGGADGLTF

SEQ ID NO: 52678 - protein, 20 aa, Homo sapiens
  CDR3 for beta chain variable domain of TCR clone 26339 (TRBV28, TRBJ2-1)
CASTPIGRSPGLEGGNEQFF

SEQ ID NO: 52679 - protein, 13 aa, Homo sapiens
  CDR3 for alpha chain variable domain of TCR clone 26340 (TRAV2, TRAJ40)
CAVVTSGTYKYIF

SEQ ID NO: 52680 - protein, 15 aa, Homo sapiens
  CDR3 for beta chain variable domain of TCR clone 26340 (TRBV27, TRBJ1-6)
CASSFDRGLGSPLHF

SEQ ID NO: 52681 - protein, 15 aa, Homo sapiens
  CDR3 for alpha chain variable domain of TCR clone 26341 (TRAV17, TRAJ57)
CATGPSQGGSEKLVF

SEQ ID NO: 52682 - protein, 16 aa, Homo sapiens
  CDR3 for beta chain variable domain of TCR clone 26341 (TRBV12-4, TRBJ1-5)
CASSRQVGGSNQPQHF

SEQ ID NO: 52683 - protein, 14 aa, Homo sapiens
  CDR3 for alpha chain variable domain of TCR clone 26342 (TRAV12-2, TRAJ13)
CAVKKTGGYQKVTF

SEQ ID NO: 52684 - protein, 12 aa, Homo sapiens
  CDR3 for beta chain variable domain of TCR clone 26342 (TRBV2, TRBJ2-1)
CAYGPPGNEQFF

SEQ ID NO: 52685 - protein, 15 aa, Homo sapiens
  CDR3 for alpha chain variable domain of TCR clone 26343 (TRAV26-1, TRAJ29)
CIVRVEGSGNTPLVF

SEQ ID NO: 52686 - protein, 14 aa, Homo sapiens
  CDR3 for beta chain variable domain of TCR clone 26343 (TRBV2, TRBJ2-7)
CASSLTSGGYEQYF

SEQ ID NO: 52687 - protein, 14 aa, Homo sapiens
  CDR3 for alpha chain variable domain of TCR clone 26344 (TRAV8-3, TRAJ4)
CAVGAAGGYNKLIF

SEQ ID NO: 52688 - protein, 15 aa, Homo sapiens
  CDR3 for beta chain variable domain of TCR clone 26344 (TRBV6-5, TRBJ2-1)
CARSYDAGAGNEQFF

SEQ ID NO: 52689 - protein, 14 aa, Homo sapiens
  CDR3 for alpha chain variable domain of TCR clone 26345 (TRAV1-2, TRAJ16)
CAVNRFSDGQKLLF

SEQ ID NO: 52690 - protein, 16 aa, Homo sapiens
  CDR3 for beta chain variable domain of TCR clone 26345 (TRBV13, TRBJ2-3)
CQQPLQGSGGRNTQYF

SEQ ID NO: 52691 - protein, 14 aa, Homo sapiens
  CDR3 for alpha chain variable domain of TCR clone 26346 (TRAV26-1, TRAJ34)
CIVRVAYNTDKLIF

SEQ ID NO: 52692 - protein, 15 aa, Homo sapiens
  CDR3 for beta chain variable domain of TCR clone 26346 (TRBV20-1, TRBJ2-7)
CSAGVPAAYFYEQYF

SEQ ID NO: 52693 - protein, 14 aa, Homo sapiens
  CDR3 for alpha chain variable domain of TCR clone 26347 (TRAV13-1, TRAJ35)
CAASKGGFGNVLHC

SEQ ID NO: 52694 - protein, 16 aa, Homo sapiens
  CDR3 for beta chain variable domain of TCR clone 26347 (TRBV19, TRBJ2-1)
CASSKAGPSSYNEQFF

SEQ ID NO: 52695 - protein, 14 aa, Homo sapiens
  CDR3 for alpha chain variable domain of TCR clone 26348 (TRAV38-1, TRAJ40)
CALRPTSGTYKYIF

SEQ ID NO: 52696 - protein, 14 aa, Homo sapiens
  CDR3 for beta chain variable domain of TCR clone 26348 (TRBV25-1, TRBJ1-1)
CASTHLGGNSEAFF

SEQ ID NO: 52697 - protein, 11 aa, Homo sapiens
  CDR3 for alpha chain variable domain of TCR clone 26349 (TRAV21, TRAJ48)
YAVDGNEKLTF

SEQ ID NO: 52698 - protein, 16 aa, Homo sapiens
  CDR3 for beta chain variable domain of TCR clone 26349 (TRBV12-4, TRBJ1-5)
CASSSGPRGSNQPQHF

SEQ ID NO: 52699 - protein, 14 aa, Homo sapiens
  CDR3 for alpha chain variable domain of TCR clone 26350 (TRAV13-1, TRAJ44)
CAAKATGTASKLTF

SEQ ID NO: 52700 - protein, 17 aa, Homo sapiens
  CDR3 for beta chain variable domain of TCR clone 26350 (TRBV7-3, TRBJ2-3)
CASSLTKRMRGADTQYF

SEQ ID NO: 52701 - protein, 13 aa, Homo sapiens
  CDR3 for alpha chain variable domain of TCR clone 26351 (TRAV3, TRAJ21)
CALREPDFNKFYF

SEQ ID NO: 52702 - protein, 13 aa, Homo sapiens
  CDR3 for beta chain variable domain of TCR clone 26351 (TRBV9, TRBJ2-1)
CASSPSGGNEQFF

SEQ ID NO: 52703 - protein, 14 aa, Homo sapiens
  CDR3 for alpha chain variable domain of TCR clone 26352 (TRAV12-3, TRAJ10)
SHLPLTGGGNKLTF

SEQ ID NO: 52704 - protein, 14 aa, Homo sapiens
  CDR3 for beta chain variable domain of TCR clone 26352 (TRBV7-8, TRBJ2-3)
CASSFKSSTDTQYF

SEQ ID NO: 52705 - protein, 12 aa, Homo sapiens
  CDR3 for alpha chain variable domain of TCR clone 26353 (TRAV17, TRAJ57)
CATDGGSEKLVF

SEQ ID NO: 52706 - protein, 13 aa, Homo sapiens
  CDR3 for beta chain variable domain of TCR clone 26353 (TRBV7-9, TRBJ2-7)
CASSLAGAYEQYF

SEQ ID NO: 52707 - protein, 22 aa, Homo sapiens
  CDR3 for alpha chain variable domain of TCR clone 26354 (TRAV26-1, TRAJ42)
CIVRPIKEEAKEISSLEKALNS

SEQ ID NO: 52708 - protein, 16 aa, Homo sapiens
  CDR3 for beta chain variable domain of TCR clone 26354 (TRBV7-3, TRBJ2-2)
CASSLKRGTLSGELFF

SEQ ID NO: 52709 - protein, 13 aa, Homo sapiens
  CDR3 for alpha chain variable domain of TCR clone 26355 (TRAV27, TRAJ6)
CAGGTRGSYIPTF

SEQ ID NO: 52710 - protein, 14 aa, Homo sapiens
  CDR3 for beta chain variable domain of TCR clone 26355 (TRBV20-1, TRBJ2-4)
CSAGGRVGENIQYF

SEQ ID NO: 52711 - protein, 12 aa, Homo sapiens
  CDR3 for alpha chain variable domain of TCR clone 26356 (TRAV21, TRAJ12)
CAVMDSSYKLIF

SEQ ID NO: 52712 - protein, 16 aa, Homo sapiens
  CDR3 for beta chain variable domain of TCR clone 26356 (TRBV7-9, TRBJ2-5)
CASRLEIGTRKETRYF

SEQ ID NO: 52713 - protein, 15 aa, Homo sapiens
  CDR3 for alpha chain variable domain of TCR clone 26357 (TRAV38-1, TRAJ57)
CAFMDSQGGSDKLVF

SEQ ID NO: 52714 - protein, 16 aa, Homo sapiens
  CDR3 for beta chain variable domain of TCR clone 26357 (TRBV10-3, TRBJ2-1)
CAIRGGGRGDYNEQFF

SEQ ID NO: 52715 - protein, 14 aa, Homo sapiens
  CDR3 for alpha chain variable domain of TCR clone 26358 (TRAV26-1, TRAJ15)
CIVRADQAGTALIF

SEQ ID NO: 52716 - protein, 16 aa, Homo sapiens
  CDR3 for beta chain variable domain of TCR clone 26358 (TRBV20-1, TRBJ1-4)
CSAIGGPRGANEKLFF

SEQ ID NO: 52717 - protein, 18 aa, Homo sapiens
  CDR3 for alpha chain variable domain of TCR clone 26359 (TRAV17, TRAJ45)
CATSLDLYSGGGAAGLTF

SEQ ID NO: 52718 - protein, 15 aa, Homo sapiens
  CDR3 for beta chain variable domain of TCR clone 26359 (TRBV11-2, TRBJ2-1)
CASSKNRGLIYEQFF

SEQ ID NO: 52719 - protein, 13 aa, Homo sapiens
  CDR3 for alpha chain variable domain of TCR clone 26360 (TRAV12-3, TRAJ33)
CAMSVNSNYQLIW

SEQ ID NO: 52720 - protein, 14 aa, Homo sapiens
  CDR3 for beta chain variable domain of TCR clone 26360 (TRBV19, TRBJ2-1)
CASPTFVLSGEQFF

SEQ ID NO: 52721 - protein, 18 aa, Homo sapiens
  CDR3 for alpha chain variable domain of TCR clone 26361 (TRAV21, TRAJ52)
CAGRPSPAGGTSYGKLTF

SEQ ID NO: 52722 - protein, 17 aa, Homo sapiens
  CDR3 for beta chain variable domain of TCR clone 26361 (TRBV13, TRBJ2-3)
CASSLSRVAGGRNTQYF

SEQ ID NO: 52723 - protein, 11 aa, Homo sapiens
  CDR3 for alpha chain variable domain of TCR clone 26362 (TRAV26-1, TRAJ27)
CIDPNAGKSTF

SEQ ID NO: 52724 - protein, 18 aa, Homo sapiens
  CDR3 for beta chain variable domain of TCR clone 26362 (TRBV7-9, TRBJ2-6)
CASSFPGAGISGANDLTF

SEQ ID NO: 52725 - protein, 11 aa, Homo sapiens
  CDR3 for alpha chain variable domain of TCR clone 26363 (TRAV12-3, TRAJ43)
CAMSVSDDMRF

SEQ ID NO: 52726 - protein, 14 aa, Homo sapiens
  CDR3 for beta chain variable domain of TCR clone 26363 (TRBV20-1, TRBJ1-1)
SAVLHLGGGTEAFF

SEQ ID NO: 52727 - protein, 19 aa, Homo sapiens
  CDR3 for alpha chain variable domain of TCR clone 26364 (TRAV26-1, TRAJ52)
CIVRAHRNAGGTSYGKLKF

SEQ ID NO: 52728 - protein, 15 aa, Homo sapiens
  CDR3 for beta chain variable domain of TCR clone 26364 (TRBV29-1, TRBJ2-1)
CSGRDRKSSYNEQFF

SEQ ID NO: 52729 - protein, 21 aa, Homo sapiens
  CDR3 for alpha chain variable domain of TCR clone 26365 (TRAV1-1, TRAJ6)
CAVRREEATYLHLEEEPALLF

SEQ ID NO: 52730 - protein, 15 aa, Homo sapiens
  CDR3 for beta chain variable domain of TCR clone 26365 (TRBV6-6, TRBJ2-1)
CATRQGVSSHNEQFF

SEQ ID NO: 52731 - protein, 14 aa, Homo sapiens
  CDR3 for alpha chain variable domain of TCR clone 26366 (TRAV1-2, TRAJ16)
CAVNRFSDGQKLLF

SEQ ID NO: 52732 - protein, 15 aa, Homo sapiens
  CDR3 for beta chain variable domain of TCR clone 26366 (TRBV18, TRBJ1-1)
CASSGRTGEVTEAFF

SEQ ID NO: 52733 - protein, 13 aa, Homo sapiens
  CDR3 for alpha chain variable domain of TCR clone 26367 (TRAV13-2, TRAJ48)
CAEMDFGNEKLTF

SEQ ID NO: 52734 - protein, 15 aa, Homo sapiens
  CDR3 for beta chain variable domain of TCR clone 26367 (TRBV7-9, TRBJ1-6)
CTSSSPGRGNSPLHF

SEQ ID NO: 52735 - protein, 15 aa, Homo sapiens
  CDR3 for alpha chain variable domain of TCR clone 26368 (TRAV25, TRAJ53)
CAATGGGGSNYKLTF

SEQ ID NO: 52736 - protein, 19 aa, Homo sapiens
  CDR3 for beta chain variable domain of TCR clone 26368 (TRBV7-2, TRBJ2-3)
CASSFLSRSWGGGTDTQYF

SEQ ID NO: 52737 - protein, 13 aa, Homo sapiens
  CDR3 for alpha chain variable domain of TCR clone 26369 (TRAV1-2, TRAJ9)
CAALNTGGFKTIF

SEQ ID NO: 52738 - protein, 14 aa, Homo sapiens
  CDR3 for beta chain variable domain of TCR clone 26369 (TRBV5-1, TRBJ2-3)
CASSRGQGGGTQYF

SEQ ID NO: 52739 - protein, 23 aa, Homo sapiens
  CDR3 for alpha chain variable domain of TCR clone 26370 (TRAV26-1, TRAJ38)
CIADNAGNNHIKNPDPAVYQLRD

SEQ ID NO: 52740 - protein, 13 aa, Homo sapiens
  CDR3 for beta chain variable domain of TCR clone 26370 (TRBV20-1, TRBJ1-1)
CSARGGGNTEAFF

SEQ ID NO: 52741 - protein, 14 aa, Homo sapiens
  CDR3 for alpha chain variable domain of TCR clone 26371 (TRAV8-2, TRAJ4)
CVVSPSGGYNKLIF

SEQ ID NO: 52742 - protein, 15 aa, Homo sapiens
  CDR3 for beta chain variable domain of TCR clone 26371 (TRBV4-1, TRBJ1-4)
CASSGTGGTNEKLFF

SEQ ID NO: 52743 - protein, 14 aa, Homo sapiens
  CDR3 for alpha chain variable domain of TCR clone 26372 (TRAV13-1, TRAJ40)
CAASVTSGTYKYIF

SEQ ID NO: 52744 - protein, 15 aa, Homo sapiens
  CDR3 for beta chain variable domain of TCR clone 26372 (TRBV7-3, TRBJ2-1)
CASSPTGGGEVEQFF

SEQ ID NO: 52745 - protein, 13 aa, Homo sapiens
  CDR3 for alpha chain variable domain of TCR clone 26373 (TRAV8-3, TRAJ48)
CCGCNLGNEKLTF

SEQ ID NO: 52746 - protein, 12 aa, Homo sapiens
  CDR3 for beta chain variable domain of TCR clone 26373 (TRBV7-2, TRBJ2-5)
CASSQYQETQYF

SEQ ID NO: 52747 - protein, 12 aa, Homo sapiens
  CDR3 for alpha chain variable domain of TCR clone 26374 (TRAV2, TRAJ9)
CAVGAGGFKTIF

SEQ ID NO: 52748 - protein, 16 aa, Homo sapiens
  CDR3 for beta chain variable domain of TCR clone 26374 (TRBV13, TRBJ2-2)
CASSPRTGEHTGELFV

SEQ ID NO: 52749 - protein, 13 aa, Homo sapiens
  CDR3 for alpha chain variable domain of TCR clone 26375 (TRAV21, TRAJ57)
CAVTQGGSEKLVF

SEQ ID NO: 52750 - protein, 16 aa, Homo sapiens
  CDR3 for beta chain variable domain of TCR clone 26375 (TRBV29-1, TRBJ2-7)
CSVEDAEDGTTYEQYF

SEQ ID NO: 52751 - protein, 12 aa, Homo sapiens
  CDR3 for alpha chain variable domain of TCR clone 26376 (TRAV35, TRAJ42)
CWFPGSQGNLIF

SEQ ID NO: 52752 - protein, 13 aa, Homo sapiens
  CDR3 for beta chain variable domain of TCR clone 26376 (TRBV29-1, TRBJ2-1)
CSVEGGRVNEQFF

SEQ ID NO: 52753 - protein, 11 aa, Homo sapiens
  CDR3 for alpha chain variable domain of TCR clone 26377 (TRAV1-1, TRAJ23)
CAVRQGGKLIF

SEQ ID NO: 52754 - protein, 20 aa, Homo sapiens
  CDR3 for beta chain variable domain of TCR clone 26377 (TRBV7-8, TRBJ2-2)
FASSHLFPGPTIHITGELFF

SEQ ID NO: 52755 - protein, 14 aa, Homo sapiens
  CDR3 for alpha chain variable domain of TCR clone 26378 (TRAV20, TRAJ22)
CAVALGGSARQLTF

SEQ ID NO: 52756 - protein, 15 aa, Homo sapiens
  CDR3 for beta chain variable domain of TCR clone 26378 (TRBV4-1, TRBJ1-4)
CASSDTGGTNEKLFF

SEQ ID NO: 52757 - protein, 17 aa, Homo sapiens
  CDR3 for alpha chain variable domain of TCR clone 26379 (TRAV3, TRAJ6)
CAVRDGPRVGGSYIPTF

SEQ ID NO: 52758 - protein, 12 aa, Homo sapiens
  CDR3 for beta chain variable domain of TCR clone 26379 (TRBV11-2, TRBJ2-2)
CASSLGGGELFL

SEQ ID NO: 52759 - protein, 13 aa, Homo sapiens
  CDR3 for alpha chain variable domain of TCR clone 26380 (TRAV17, TRAJ9)
CATDYTGGFKTIF

SEQ ID NO: 52760 - protein, 14 aa, Homo sapiens
  CDR3 for beta chain variable domain of TCR clone 26380 (TRBV19, TRBJ2-5)
CASSMTGQQENQYF

SEQ ID NO: 52761 - protein, 13 aa, Homo sapiens
  CDR3 for alpha chain variable domain of TCR clone 26381 (TRAV2, TRAJ40)
CAVVTSGTYKYIF

SEQ ID NO: 52762 - protein, 14 aa, Homo sapiens
  CDR3 for beta chain variable domain of TCR clone 26381 (TRBV19, TRBJ2-1)
CASPTIVLSGEQFF

SEQ ID NO: 52763 - protein, 12 aa, Homo sapiens
  CDR3 for alpha chain variable domain of TCR clone 26382 (TRAV17, TRAJ57)
CATDGGSEKPVF

SEQ ID NO: 52764 - protein, 13 aa, Homo sapiens
  CDR3 for beta chain variable domain of TCR clone 26382 (TRBV7-9, TRBJ2-7)
CASSFAGAYEQYF

SEQ ID NO: 52765 - protein, 13 aa, Homo sapiens
  CDR3 for alpha chain variable domain of TCR clone 26383 (TRAV12-3, TRAJ33)
CAMSVNSNYQLIW

SEQ ID NO: 52766 - protein, 15 aa, Homo sapiens
  CDR3 for beta chain variable domain of TCR clone 26383 (TRBV6-3, TRBJ2-7)
CASSSPGTVFYEQYF

SEQ ID NO: 52767 - protein, 14 aa, Homo sapiens
  CDR3 for alpha chain variable domain of TCR clone 26384 (TRAV8-3, TRAJ39)
CAVGANNAGNMLTF

SEQ ID NO: 52768 - protein, 15 aa, Homo sapiens
  CDR3 for beta chain variable domain of TCR clone 26384 (TRBV4-3, TRBJ1-1)
CASSQELGRGTEAFS

SEQ ID NO: 52769 - protein, 12 aa, Homo sapiens
  CDR3 for alpha chain variable domain of TCR clone 26385 (TRAV21, TRAJ11)
CAATSGYSTLTF

SEQ ID NO: 52770 - protein, 14 aa, Homo sapiens
  CDR3 for beta chain variable domain of TCR clone 26385 (TRBV20-1, TRBJ2-7)
CSAPELAGVGEQYC

SEQ ID NO: 52771 - protein, 11 aa, Homo sapiens
  CDR3 for alpha chain variable domain of TCR clone 26386 (TRAV1-2, TRAJ40)
CAIPGTYKYIF

SEQ ID NO: 52772 - protein, 16 aa, Homo sapiens
  CDR3 for beta chain variable domain of TCR clone 26386 (TRBV29-1, TRBJ2-7)
CSVEVVGTSGSYEQYF

SEQ ID NO: 52773 - protein, 15 aa, Homo sapiens
  CDR3 for alpha chain variable domain of TCR clone 26387 (TRAV26-2, TRAJ13)
CILRDLSGGYQEVTF

SEQ ID NO: 52774 - protein, 11 aa, Homo sapiens
  CDR3 for beta chain variable domain of TCR clone 26387 (TRBV7-9, TRBJ2-3)
CASSYTDTQYF

SEQ ID NO: 52775 - protein, 16 aa, Homo sapiens
  CDR3 for alpha chain variable domain of TCR clone 26388 (TRAV12-3, TRAJ53)
CAMSPGSGGSNYKLTY

SEQ ID NO: 52776 - protein, 11 aa, Homo sapiens
  CDR3 for beta chain variable domain of TCR clone 26388 (TRBV29-1, TRBJ2-5)
CSEDRTGTQYF

SEQ ID NO: 52777 - protein, 12 aa, Homo sapiens
  CDR3 for alpha chain variable domain of TCR clone 26389 (TRAV8-3, TRAJ20)
CAVDFNDYRLSF

SEQ ID NO: 52778 - protein, 13 aa, Homo sapiens
  CDR3 for beta chain variable domain of TCR clone 26389 (TRBV5-7, TRBJ2-3)
CASSLGRTDTQYF

SEQ ID NO: 52779 - protein, 13 aa, Homo sapiens
  CDR3 for alpha chain variable domain of TCR clone 26390 (TRAV13-1, TRAJ5)
CAASDTGRRVLTF

SEQ ID NO: 52780 - protein, 12 aa, Homo sapiens
  CDR3 for beta chain variable domain of TCR clone 26390 (TRBV28, TRBJ2-3)
CASSLYRDTQYF

SEQ ID NO: 52781 - protein, 14 aa, Homo sapiens
  CDR3 for alpha chain variable domain of TCR clone 26391 (TRAV38-1, TRAJ45)
CAYYSGGGADGLTF

SEQ ID NO: 52782 - protein, 12 aa, Homo sapiens
  CDR3 for beta chain variable domain of TCR clone 26391 (TRBV11-2, TRBJ2-2)
CASSLGGGELFF

SEQ ID NO: 52783 - protein, 13 aa, Homo sapiens
  CDR3 for alpha chain variable domain of TCR clone 26392 (TRAV1-2, TRAJ9)
CAALNTGGFKTIF

SEQ ID NO: 52784 - protein, 13 aa, Homo sapiens
  CDR3 for beta chain variable domain of TCR clone 26392 (TRBV12-4, TRBJ2-7)
CASSPTETYEQYF

SEQ ID NO: 52785 - protein, 18 aa, Homo sapiens
  CDR3 for alpha chain variable domain of TCR clone 26393 (TRAV21, TRAJ52)
CAVRPSPAGGTSYGKLTF

SEQ ID NO: 52786 - protein, 17 aa, Homo sapiens
  CDR3 for beta chain variable domain of TCR clone 26393 (TRBV13, TRBJ2-3)
CASSLSRVTGGRNTQYF

SEQ ID NO: 52787 - protein, 14 aa, Homo sapiens
  CDR3 for alpha chain variable domain of TCR clone 26394 (TRAV8-3, TRAJ4)
CAVGAAGGYNKLFF

SEQ ID NO: 52788 - protein, 15 aa, Homo sapiens
  CDR3 for beta chain variable domain of TCR clone 26394 (TRBV6-5, TRBJ2-1)
CASSYDAGAGNEQFF

SEQ ID NO: 52789 - protein, 12 aa, Homo sapiens
  CDR3 for alpha chain variable domain of TCR clone 26395 (TRAV25, TRAJ17)
CAGEAAGNKLTF

SEQ ID NO: 52790 - protein, 14 aa, Homo sapiens
  CDR3 for beta chain variable domain of TCR clone 26395 (TRBV5-1, TRBJ2-1)
CASSAPWAGNEQFF

SEQ ID NO: 52791 - protein, 13 aa, Homo sapiens
  CDR3 for alpha chain variable domain of TCR clone 26396 (TRAV8-6, TRAJ20)
CAVLLGDDYKLSF

SEQ ID NO: 52792 - protein, 15 aa, Homo sapiens
  CDR3 for beta chain variable domain of TCR clone 26396 (TRBV4-1, TRBJ2-7)
CASSQQGQGFDEQYF

SEQ ID NO: 52793 - protein, 14 aa, Homo sapiens
  CDR3 for alpha chain variable domain of TCR clone 26397 (TRAV29/DV5, TRAJ36)
CAARRKTGANNLFF

SEQ ID NO: 52794 - protein, 14 aa, Homo sapiens
  CDR3 for beta chain variable domain of TCR clone 26397 (TRBV12-5, TRBJ2-5)
CASGSRTHRETQYF

SEQ ID NO: 52795 - protein, 13 aa, Homo sapiens
  CDR3 for alpha chain variable domain of TCR clone 26398 (TRAV12-3, TRAJ4)
CAMTERGYNKLIF

SEQ ID NO: 52796 - protein, 17 aa, Homo sapiens
  CDR3 for beta chain variable domain of TCR clone 26398 (TRBV28, TRBJ2-3)
CASSLQVGPYSTDTQYF

SEQ ID NO: 52797 - protein, 13 aa, Homo sapiens
  CDR3 for alpha chain variable domain of TCR clone 26399 (TRAV2, TRAJ40)
CAVVTTGTYKYIF

SEQ ID NO: 52798 - protein, 15 aa, Homo sapiens
  CDR3 for beta chain variable domain of TCR clone 26399 (TRBV11-3, TRBJ2-3)
CASLKDGREGDTQYF

SEQ ID NO: 52799 - protein, 15 aa, Homo sapiens
  CDR3 for alpha chain variable domain of TCR clone 26400 (TRAV2, TRAJ9)
CAVEDRGTGGFKTIF

SEQ ID NO: 52800 - protein, 13 aa, Homo sapiens
  CDR3 for beta chain variable domain of TCR clone 26400 (TRBV10-3, TRBJ2-7)
CASKLAVNYEQYF

SEQ ID NO: 52801 - protein, 16 aa, Homo sapiens
  CDR3 for alpha chain variable domain of TCR clone 26401 (TRAV3, TRAJ37)
CAVRGKGSGNTGKLIF

SEQ ID NO: 52802 - protein, 13 aa, Homo sapiens
  CDR3 for beta chain variable domain of TCR clone 26401 (TRBV12-5, TRBJ2-3)
CASGDRQSDTQYF

SEQ ID NO: 52803 - protein, 14 aa, Homo sapiens
  CDR3 for alpha chain variable domain of TCR clone 26402 (TRAV1-2, TRAJ8)
CAVREDTGFQKLVF

SEQ ID NO: 52804 - protein, 15 aa, Homo sapiens
  CDR3 for beta chain variable domain of TCR clone 26402 (TRBV6-3, TRBJ2-7)
CASSTPGTVFYEQYF

SEQ ID NO: 52805 - protein, 14 aa, Homo sapiens
  CDR3 for alpha chain variable domain of TCR clone 26403 (TRAV1-2, TRAJ8)
CAVREDTGFQKLVF

SEQ ID NO: 52806 - protein, 16 aa, Homo sapiens
  CDR3 for beta chain variable domain of TCR clone 26403 (TRBV20-1, TRBJ1-2)
CSASMGQGVANYGYTF

SEQ ID NO: 52807 - protein, 14 aa, Homo sapiens
  CDR3 for alpha chain variable domain of TCR clone 26404 (TRAV12-2, TRAJ17)
CAVLFKAAGNKLTF

SEQ ID NO: 52808 - protein, 18 aa, Homo sapiens
  CDR3 for beta chain variable domain of TCR clone 26404 (TRBV11-2, TRBJ2-3)
CASSLGGASRGAPNTQYF

SEQ ID NO: 52809 - protein, 14 aa, Homo sapiens
  CDR3 for alpha chain variable domain of TCR clone 26405 (TRAV26-1, TRAJ39)
CIVRGSRAGNMLTF

SEQ ID NO: 52810 - protein, 15 aa, Homo sapiens
  CDR3 for beta chain variable domain of TCR clone 26405 (TRBV7-9, TRBJ1-5)
CASSQVHQPNQPQHF

SEQ ID NO: 52811 - protein, 16 aa, Homo sapiens
  CDR3 for alpha chain variable domain of TCR clone 26406 (TRAV30, TRAJ24)
CGTEIVDADSWGKFQF

SEQ ID NO: 52812 - protein, 15 aa, Homo sapiens
  CDR3 for beta chain variable domain of TCR clone 26406 (TRBV7-9, TRBJ1-4)
CASSARTGGNENLFF

SEQ ID NO: 52813 - protein, 14 aa, Homo sapiens
  CDR3 for alpha chain variable domain of TCR clone 26407 (TRAV9-2, TRAJ36)
CALPWRTGANNPFF

SEQ ID NO: 52814 - protein, 14 aa, Homo sapiens
  CDR3 for beta chain variable domain of TCR clone 26407 (TRBV2, TRBJ1-2)
CASSELQVNYGYTF

SEQ ID NO: 52815 - protein, 11 aa, Homo sapiens
  CDR3 for alpha chain variable domain of TCR clone 26408 (TRAV21, TRAJ34)
CAHYNTDTLIF

SEQ ID NO: 52816 - protein, 13 aa, Homo sapiens
  CDR3 for beta chain variable domain of TCR clone 26408 (TRBV7-6, TRBJ1-2)
CASSLVADYGYTF

SEQ ID NO: 52817 - protein, 14 aa, Homo sapiens
  CDR3 for alpha chain variable domain of TCR clone 26409 (TRAV17, TRAJ53)
CDTDAGGSNYKLTF

SEQ ID NO: 52818 - protein, 16 aa, Homo sapiens
  CDR3 for beta chain variable domain of TCR clone 26409 (TRBV4-1, TRBJ1-1)
CASSQDAGMGNTEAFF

SEQ ID NO: 52819 - protein, 15 aa, Homo sapiens
  CDR3 for alpha chain variable domain of TCR clone 26410 (TRAV17, TRAJ23)
CAADAEDNQGGKLIF

SEQ ID NO: 52820 - protein, 12 aa, Homo sapiens
  CDR3 for beta chain variable domain of TCR clone 26410 (TRBV2, TRBJ2-1)
CAKREGYNEQFF

SEQ ID NO: 52821 - protein, 15 aa, Homo sapiens
  CDR3 for alpha chain variable domain of TCR clone 26411 (TRAV26-1, TRAJ29)
CIVRVEGSGNTPLVF

SEQ ID NO: 52822 - protein, 14 aa, Homo sapiens
  CDR3 for beta chain variable domain of TCR clone 26411 (TRBV18, TRBJ2-5)
CASSPGVSQETLYF

SEQ ID NO: 52823 - protein, 11 aa, Homo sapiens
  CDR3 for alpha chain variable domain of TCR clone 26412 (TRAV12-1, TRAJ8)
CVVTGFQKLVF

SEQ ID NO: 52824 - protein, 14 aa, Homo sapiens
  CDR3 for beta chain variable domain of TCR clone 26412 (TRBV19, TRBJ2-1)
RASGKSTQYNEQFF

SEQ ID NO: 52825 - protein, 13 aa, Homo sapiens
  CDR3 for alpha chain variable domain of TCR clone 26413 (TRAV27, TRAJ6)
CAGGTRGSYIPTF

SEQ ID NO: 52826 - protein, 14 aa, Homo sapiens
  CDR3 for beta chain variable domain of TCR clone 26413 (TRBV25-1, TRBJ1-1)
CASTHLGGNTEAFF

SEQ ID NO: 52827 - protein, 13 aa, Homo sapiens
  CDR3 for alpha chain variable domain of TCR clone 26414 (TRAV27, TRAJ6)
CAGGTRGSYIPTF

SEQ ID NO: 52828 - protein, 13 aa, Homo sapiens
  CDR3 for beta chain variable domain of TCR clone 26414 (TRBV7-9, TRBJ1-2)
CASSLKQNYGYTF

SEQ ID NO: 52829 - protein, 14 aa, Homo sapiens
  CDR3 for alpha chain variable domain of TCR clone 26415 (TRAV12-3, TRAJ10)
SHLPLTGGGNKLNF

SEQ ID NO: 52830 - protein, 14 aa, Homo sapiens
  CDR3 for beta chain variable domain of TCR clone 26415 (TRBV6-1, TRBJ1-3)
CASVQGGGGNTIYF

SEQ ID NO: 52831 - protein, 15 aa, Homo sapiens
  CDR3 for alpha chain variable domain of TCR clone 26416 (TRAV8-3, TRAJ40)
CAAPSLGSGTYKYIF

SEQ ID NO: 52832 - protein, 16 aa, Homo sapiens
  CDR3 for beta chain variable domain of TCR clone 26416 (TRBV7-3, TRBJ2-3)
CASSLSGDRPEDTQYF

SEQ ID NO: 52833 - protein, 14 aa, Homo sapiens
  CDR3 for alpha chain variable domain of TCR clone 26417 (TRAV13-1, TRAJ40)
CAASMTSGTYKYIF

SEQ ID NO: 52834 - protein, 11 aa, Homo sapiens
  CDR3 for beta chain variable domain of TCR clone 26417 (TRBV11-2, TRBJ1-1)
CASSINTEAFF

SEQ ID NO: 52835 - protein, 12 aa, Homo sapiens
  CDR3 for alpha chain variable domain of TCR clone 26418 (TRAV14/DV4, TRAJ9)
CAMNPGGFKTIF

SEQ ID NO: 52836 - protein, 16 aa, Homo sapiens
  CDR3 for beta chain variable domain of TCR clone 26418 (TRBV28, TRBJ2-5)
CASSFSPAGGWETQYL

SEQ ID NO: 52837 - protein, 17 aa, Homo sapiens
  CDR3 for alpha chain variable domain of TCR clone 26419 (TRAV26-2, TRAJ42)
CILRDAGYGGSQGNLIF

SEQ ID NO: 52838 - protein, 16 aa, Homo sapiens
  CDR3 for beta chain variable domain of TCR clone 26419 (TRBV12-4, TRBJ2-7)
CASSLIGGTGTYEQYF

SEQ ID NO: 52839 - protein, 13 aa, Homo sapiens
  CDR3 for alpha chain variable domain of TCR clone 26420 (TRAV12-3, TRAJ35)
CAMAIGFGNVLHC

SEQ ID NO: 52840 - protein, 15 aa, Homo sapiens
  CDR3 for beta chain variable domain of TCR clone 26420 (TRBV20-1, TRBJ2-1)
CSARGSGTYCNEQFF

SEQ ID NO: 52841 - protein, 12 aa, Homo sapiens
  CDR3 for alpha chain variable domain of TCR clone 26421 (TRAV13-1, TRAJ53)
AASGGSNYKLTF

SEQ ID NO: 52842 - protein, 15 aa, Homo sapiens
  CDR3 for beta chain variable domain of TCR clone 26421 (TRBV5-1, TRBJ2-1)
CASSPPRAPYNEQLF

SEQ ID NO: 52843 - protein, 12 aa, Homo sapiens
  CDR3 for alpha chain variable domain of TCR clone 26422 (TRAV12-3, TRAJ4)
CAMTGAGTRLAV

SEQ ID NO: 52844 - protein, 14 aa, Homo sapiens
  CDR3 for beta chain variable domain of TCR clone 26422 (TRBV10-3, TRBJ1-1)
CAISDTDRGVGAFF

SEQ ID NO: 52845 - protein, 14 aa, Homo sapiens
  CDR3 for alpha chain variable domain of TCR clone 26423 (TRAV13-1, TRAJ44)
CAAKATGTANKLTF

SEQ ID NO: 52846 - protein, 15 aa, Homo sapiens
  CDR3 for beta chain variable domain of TCR clone 26423 (TRBV4-3, TRBJ1-1)
CASSQELGRGTEAFF

SEQ ID NO: 52847 - protein, 14 aa, Homo sapiens
  CDR3 for alpha chain variable domain of TCR clone 26424 (TRAV38-1, TRAJ29)
CAFISPSGNTPLVF

SEQ ID NO: 52848 - protein, 14 aa, Homo sapiens
  CDR3 for beta chain variable domain of TCR clone 26424 (TRBV18, TRBJ2-7)
CASSPRGGAYEQYF

SEQ ID NO: 52849 - protein, 14 aa, Homo sapiens
  CDR3 for alpha chain variable domain of TCR clone 26425 (TRAV1-1, TRAJ23)
CAVSIYNQGGKLVF

SEQ ID NO: 52850 - protein, 15 aa, Homo sapiens
  CDR3 for beta chain variable domain of TCR clone 26425 (TRBV5-8, TRBJ2-2)
CASSLDRGATGELFF

SEQ ID NO: 52851 - protein, 13 aa, Homo sapiens
  CDR3 for alpha chain variable domain of TCR clone 26426 (TRAV35, TRAJ43)
CAGYPYSNNDMRF

SEQ ID NO: 52852 - protein, 15 aa, Homo sapiens
  CDR3 for beta chain variable domain of TCR clone 26426 (TRBV25-1, TRBJ1-4)
CASSKRIATNEKLFF

SEQ ID NO: 52853 - protein, 15 aa, Homo sapiens
  CDR3 for alpha chain variable domain of TCR clone 26427 (TRAV34, TRAJ38)
CGADFTPGNNRKLIW

SEQ ID NO: 52854 - protein, 16 aa, Homo sapiens
  CDR3 for beta chain variable domain of TCR clone 26427 (TRBV12-5, TRBJ2-5)
CASGPRASGNQETQYF

SEQ ID NO: 52855 - protein, 16 aa, Homo sapiens
  CDR3 for alpha chain variable domain of TCR clone 26428 (TRAV17, TRAJ28)
CATASVSGAGSYQLPF

SEQ ID NO: 52856 - protein, 11 aa, Homo sapiens
  CDR3 for beta chain variable domain of TCR clone 26428 (TRBV7-9, TRBJ2-5)
CASSLGETQYF

SEQ ID NO: 52857 - protein, 15 aa, Homo sapiens
  CDR3 for alpha chain variable domain of TCR clone 26429 (TRAV12-2, TRAJ43)
CAFDIRFGAGTRLTV

SEQ ID NO: 52858 - protein, 13 aa, Homo sapiens
  CDR3 for beta chain variable domain of TCR clone 26429 (TRBV4-2, TRBJ1-1)
CASSQAGNTEAFF

SEQ ID NO: 52859 - protein, 15 aa, Homo sapiens
  CDR3 for alpha chain variable domain of TCR clone 26430 (TRAV23/DV6, TRAJ13)
CAAWPGGGGYQKVAF

SEQ ID NO: 52860 - protein, 17 aa, Homo sapiens
  CDR3 for beta chain variable domain of TCR clone 26430 (TRBV19, TRBJ2-7)
CASSISFYDSYPYEQYF

SEQ ID NO: 52861 - protein, 12 aa, Homo sapiens
  CDR3 for alpha chain variable domain of TCR clone 26431 (TRAV23/DV6, TRAJ30)
CSASKGDDKIIF

SEQ ID NO: 52862 - protein, 15 aa, Homo sapiens
  CDR3 for beta chain variable domain of TCR clone 26431 (TRBV29-1, TRBJ2-1)
CSGRDRKSSYNEQFF

SEQ ID NO: 52863 - protein, 14 aa, Homo sapiens
  CDR3 for alpha chain variable domain of TCR clone 26432 (TRAV12-2, TRAJ40)
CAVKIPSGTYKYIF

SEQ ID NO: 52864 - protein, 14 aa, Homo sapiens
  CDR3 for beta chain variable domain of TCR clone 26432 (TRBV20-1, TRBJ1-1)
CSAQTRIGDTEAFF

SEQ ID NO: 52865 - protein, 11 aa, Homo sapiens
  CDR3 for alpha chain variable domain of TCR clone 26433 (TRAV12-2, TRAJ36)
CAVDGANNPFF

SEQ ID NO: 52866 - protein, 13 aa, Homo sapiens
  CDR3 for beta chain variable domain of TCR clone 26433 (TRBV28, TRBJ2-5)
CAGVSRGEETQYF

SEQ ID NO: 52867 - protein, 15 aa, Homo sapiens
  CDR3 for alpha chain variable domain of TCR clone 26434 (TRAV3, TRAJ5)
CAVRDLDTGRRALTF

SEQ ID NO: 52868 - protein, 13 aa, Homo sapiens
  CDR3 for beta chain variable domain of TCR clone 26434 (TRBV12-4, TRBJ2-7)
CASSPTQTYEQYF

SEQ ID NO: 52869 - protein, 14 aa, Homo sapiens
  CDR3 for alpha chain variable domain of TCR clone 26435 (TRAV1-2, TRAJ8)
CAVREDTGFQKLVF

SEQ ID NO: 52870 - protein, 15 aa, Homo sapiens
  CDR3 for beta chain variable domain of TCR clone 26435 (TRBV2, TRBJ2-3)
CASSDFEKATDTQYF

SEQ ID NO: 52871 - protein, 11 aa, Homo sapiens
  CDR3 for alpha chain variable domain of TCR clone 26436 (TRAV12-2, TRAJ23)
CVRGRGGKLIF

SEQ ID NO: 52872 - protein, 14 aa, Homo sapiens
  CDR3 for beta chain variable domain of TCR clone 26436 (TRBV28, TRBJ2-5)
CASSLGDRAETQYF

SEQ ID NO: 52873 - protein, 14 aa, Homo sapiens
  CDR3 for alpha chain variable domain of TCR clone 26437 (TRAV21, TRAJ35)
CAGMPIGFGNVLHC

SEQ ID NO: 52874 - protein, 12 aa, Homo sapiens
  CDR3 for beta chain variable domain of TCR clone 26437 (TRBV7-9, TRBJ2-7)
CASSIKREEQYF

SEQ ID NO: 52875 - protein, 14 aa, Homo sapiens
  CDR3 for alpha chain variable domain of TCR clone 26438 (TRAV12-2, TRAJ17)
CAVLFKAAGNKLTF

SEQ ID NO: 52876 - protein, 17 aa, Homo sapiens
  CDR3 for beta chain variable domain of TCR clone 26438 (TRBV20-1, TRBJ2-2)
CSDSGSGQGGLTGELFF

SEQ ID NO: 52877 - protein, 15 aa, Homo sapiens
  CDR3 for alpha chain variable domain of TCR clone 26439 (TRAV25, TRAJ53)
CPTSNSGGSNYKLTS

SEQ ID NO: 52878 - protein, 14 aa, Homo sapiens
  CDR3 for beta chain variable domain of TCR clone 26439 (TRBV11-2, TRBJ2-3)
CASSRLARTDTQYF

SEQ ID NO: 52879 - protein, 13 aa, Homo sapiens
  CDR3 for alpha chain variable domain of TCR clone 26440 (TRAV3, TRAJ26)
CAVSRGYGQNFVF

SEQ ID NO: 52880 - protein, 15 aa, Homo sapiens
  CDR3 for beta chain variable domain of TCR clone 26440 (TRBV6-5, TRBJ2-2)
CASSSWLGGTGELFF

SEQ ID NO: 52881 - protein, 14 aa, Homo sapiens
  CDR3 for alpha chain variable domain of TCR clone 26441 (TRAV8-3, TRAJ11)
CAVGPNSGYSTLTF

SEQ ID NO: 52882 - protein, 14 aa, Homo sapiens
  CDR3 for beta chain variable domain of TCR clone 26441 (TRBV5-1, TRBJ2-7)
CASSLTSGGYEQYF

SEQ ID NO: 52883 - protein, 12 aa, Homo sapiens
  CDR3 for alpha chain variable domain of TCR clone 26442 (TRAV3, TRAJ31)
CAVRDGNARLMF

SEQ ID NO: 52884 - protein, 18 aa, Homo sapiens
  CDR3 for beta chain variable domain of TCR clone 26442 (TRBV7-2, TRBJ2-3)
CASGLKREGSGITDTQYF

SEQ ID NO: 52885 - protein, 16 aa, Homo sapiens
  CDR3 for alpha chain variable domain of TCR clone 26443 (TRAV3, TRAJ10)
CAVRDMRAGGGNKITF

SEQ ID NO: 52886 - protein, 14 aa, Homo sapiens
  CDR3 for beta chain variable domain of TCR clone 26443 (TRBV11-2, TRBJ2-7)
CASSSTGEGYEQYF

SEQ ID NO: 52887 - protein, 13 aa, Homo sapiens
  CDR3 for alpha chain variable domain of TCR clone 26444 (TRAV16, TRAJ9)
CALSNTGGFKTIF

SEQ ID NO: 52888 - protein, 13 aa, Homo sapiens
  CDR3 for beta chain variable domain of TCR clone 26444 (TRBV7-9, TRBJ1-2)
CASSLKQNYGYTF

SEQ ID NO: 52889 - protein, 13 aa, Homo sapiens
  CDR3 for alpha chain variable domain of TCR clone 26445 (TRAV27, TRAJ45)
CAGAPSQEEVLTD

SEQ ID NO: 52890 - protein, 12 aa, Homo sapiens
  CDR3 for beta chain variable domain of TCR clone 26445 (TRBV24-1, TRBJ2-7)
CATSDPGYEQYF

SEQ ID NO: 52891 - protein, 17 aa, Homo sapiens
  CDR3 for alpha chain variable domain of TCR clone 26446 (TRAV3, TRAJ42)
CAVRDRDYGGSQGNLIF

SEQ ID NO: 52892 - protein, 11 aa, Homo sapiens
  CDR3 for beta chain variable domain of TCR clone 26446 (TRBV29-1, TRBJ2-5)
CSEDRTGTQYF

SEQ ID NO: 52893 - protein, 14 aa, Homo sapiens
  CDR3 for alpha chain variable domain of TCR clone 26447 (TRAV38-1, TRAJ45)
CAYYSGGGADGPTF

SEQ ID NO: 52894 - protein, 14 aa, Homo sapiens
  CDR3 for beta chain variable domain of TCR clone 26447 (TRBV25-1, TRBJ1-1)
CASTHLGGNTEAFF

SEQ ID NO: 52895 - protein, 15 aa, Homo sapiens
  CDR3 for alpha chain variable domain of TCR clone 26448 (TRAV12-2, TRAJ53)
CAVNGGGGRNYKLTF

SEQ ID NO: 52896 - protein, 17 aa, Homo sapiens
  CDR3 for beta chain variable domain of TCR clone 26448 (TRBV7-3, TRBJ2-3)
RASSLMKRMRGADTQYF

SEQ ID NO: 52897 - protein, 11 aa, Homo sapiens
  CDR3 for alpha chain variable domain of TCR clone 26449 (TRAV3, TRAJ17)
CAEAVGNKLTF

SEQ ID NO: 52898 - protein, 15 aa, Homo sapiens
  CDR3 for beta chain variable domain of TCR clone 26449 (TRBV12-4, TRBJ2-7)
CASSLGSGGPYEQYF

SEQ ID NO: 52899 - protein, 12 aa, Homo sapiens
  CDR3 for alpha chain variable domain of TCR clone 26450 (TRAV16, TRAJ10)
CSRTGGGNKLTF

SEQ ID NO: 52900 - protein, 13 aa, Homo sapiens
  CDR3 for beta chain variable domain of TCR clone 26450 (TRBV15, TRBJ2-7)
RATSTTGHYEQYF

SEQ ID NO: 52901 - protein, 14 aa, Homo sapiens
  CDR3 for alpha chain variable domain of TCR clone 26451 (TRAV8-4, TRAJ13)
CAVTLSGGYQKVTF

SEQ ID NO: 52902 - protein, 14 aa, Homo sapiens
  CDR3 for beta chain variable domain of TCR clone 26451 (TRBV7-2, TRBJ1-2)
CSSSQTGSTYGYTF

SEQ ID NO: 52903 - protein, 14 aa, Homo sapiens
  CDR3 for alpha chain variable domain of TCR clone 26452 (TRAV16, TRAJ44)
YALSTTGTASKLTF

SEQ ID NO: 52904 - protein, 14 aa, Homo sapiens
  CDR3 for beta chain variable domain of TCR clone 26452 (TRBV20-1, TRBJ2-7)
CSAISREASYEQYF

SEQ ID NO: 52905 - protein, 12 aa, Homo sapiens
  CDR3 for alpha chain variable domain of TCR clone 26453 (TRAV36/DV7, TRAJ54)
CAVVRGAQKLVF

SEQ ID NO: 52906 - protein, 14 aa, Homo sapiens
  CDR3 for beta chain variable domain of TCR clone 26453 (TRBV7-3, TRBJ1-1)
RASSLKGGNTEAFF

SEQ ID NO: 52907 - protein, 12 aa, Homo sapiens
  CDR3 for alpha chain variable domain of TCR clone 26454 (TRAV5, TRAJ41)
CAENNFGYALNF

SEQ ID NO: 52908 - protein, 13 aa, Homo sapiens
  CDR3 for beta chain variable domain of TCR clone 26454 (TRBV29-1, TRBJ1-3)
CSADVDSGNTIYF

SEQ ID NO: 52909 - protein, 15 aa, Homo sapiens
  CDR3 for alpha chain variable domain of TCR clone 26455 (TRAV21, TRAJ53)
CATLNSGGSNYKLTF

SEQ ID NO: 52910 - protein, 16 aa, Homo sapiens
  CDR3 for beta chain variable domain of TCR clone 26455 (TRBV6-1, TRBJ2-5)
CASSETLDRGAETQYF

SEQ ID NO: 52911 - protein, 12 aa, Homo sapiens
  CDR3 for alpha chain variable domain of TCR clone 26456 (TRAV13-1, TRAJ21)
CAAKEGFNKFYF

SEQ ID NO: 52912 - protein, 19 aa, Homo sapiens
  CDR3 for beta chain variable domain of TCR clone 26456 (TRBV7-2, TRBJ2-5)
CASSLSGGGGDPVLRARHA

SEQ ID NO: 52913 - protein, 14 aa, Homo sapiens
  CDR3 for alpha chain variable domain of TCR clone 26457 (TRAV12-2, TRAJ17)
CAVLFKAAGNKLTF

SEQ ID NO: 52914 - protein, 17 aa, Homo sapiens
  CDR3 for beta chain variable domain of TCR clone 26457 (TRBV20-1, TRBJ2-2)
CSTSGSGQGGLTGELFF

SEQ ID NO: 52915 - protein, 11 aa, Homo sapiens
  CDR3 for alpha chain variable domain of TCR clone 26458 (TRAV23/DV6, TRAJ48)
CAPRWGEKLAF

SEQ ID NO: 52916 - protein, 13 aa, Homo sapiens
  CDR3 for beta chain variable domain of TCR clone 26458 (TRBV12-4, TRBJ2-5)
CASSPGTEETQYF

SEQ ID NO: 52917 - protein, 13 aa, Homo sapiens
  CDR3 for alpha chain variable domain of TCR clone 26459 (TRAV30, TRAJ34)
CGTVGYNTDKLTF

SEQ ID NO: 52918 - protein, 16 aa, Homo sapiens
  CDR3 for beta chain variable domain of TCR clone 26459 (TRBV7-9, TRBJ1-2)
CASSLGFSSGEDGYTF

SEQ ID NO: 52919 - protein, 13 aa, Homo sapiens
  CDR3 for alpha chain variable domain of TCR clone 26460 (TRAV2, TRAJ10)
CAVETGGGNKLTF

SEQ ID NO: 52920 - protein, 14 aa, Homo sapiens
  CDR3 for beta chain variable domain of TCR clone 26460 (TRBV20-1, TRBJ2-3)
CSAGGRRGTDTRYF

SEQ ID NO: 52921 - protein, 11 aa, Homo sapiens
  CDR3 for alpha chain variable domain of TCR clone 26461 (TRAV17, TRAJ31)
CATSNNARLMF

SEQ ID NO: 52922 - protein, 16 aa, Homo sapiens
  CDR3 for beta chain variable domain of TCR clone 26461 (TRBV7-8, TRBJ2-4)
CASSAERTLAKNTQYF

SEQ ID NO: 52923 - protein, 16 aa, Homo sapiens
  CDR3 for alpha chain variable domain of TCR clone 26462 (TRAV3, TRAJ37)
CAVRPHGPGNTGKLIF

SEQ ID NO: 52924 - protein, 17 aa, Homo sapiens
  CDR3 for beta chain variable domain of TCR clone 26462 (TRBV5-1, TRBJ2-5)
CASSPVALGQNQETQYF

SEQ ID NO: 52925 - protein, 14 aa, Homo sapiens
  CDR3 for alpha chain variable domain of TCR clone 26463 (TRAV12-2, TRAJ13)
CAVKKTGGYQKVTF

SEQ ID NO: 52926 - protein, 14 aa, Homo sapiens
  CDR3 for beta chain variable domain of TCR clone 26463 (TRBV27, TRBJ2-1)
CQQYGGGSSNEQFF

SEQ ID NO: 52927 - protein, 14 aa, Homo sapiens
  CDR3 for alpha chain variable domain of TCR clone 26464 (TRAV29/DV5, TRAJ45)
CAASFRGGADGLTF

SEQ ID NO: 52928 - protein, 11 aa, Homo sapiens
  CDR3 for beta chain variable domain of TCR clone 26464 (TRBV11-2, TRBJ2-2)
CASSLPGELFL

SEQ ID NO: 52929 - protein, 14 aa, Homo sapiens
  CDR3 for alpha chain variable domain of TCR clone 26465 (TRAV12-2, TRAJ40)
CAVKIPSGTYKYIF

SEQ ID NO: 52930 - protein, 11 aa, Homo sapiens
  CDR3 for beta chain variable domain of TCR clone 26465 (TRBV19, TRBJ1-1)
CASSIGSEAFF

SEQ ID NO: 52931 - protein, 18 aa, Homo sapiens
  CDR3 for alpha chain variable domain of TCR clone 26466 (TRAV12-3, TRAJ52)
CAMSVGGAGGTSYGKLTF

SEQ ID NO: 52932 - protein, 14 aa, Homo sapiens
  CDR3 for beta chain variable domain of TCR clone 26466 (TRBV27, TRBJ1-6)
CQQFRRGLGSPLHF

SEQ ID NO: 52933 - protein, 11 aa, Homo sapiens
  CDR3 for alpha chain variable domain of TCR clone 26467 (TRAV17, TRAJ9)
CATTGGFKTIF

SEQ ID NO: 52934 - protein, 14 aa, Homo sapiens
  CDR3 for beta chain variable domain of TCR clone 26467 (TRBV7-9, TRBJ2-2)
CASSGPADTGELFF

SEQ ID NO: 52935 - protein, 14 aa, Homo sapiens
  CDR3 for alpha chain variable domain of TCR clone 26468 (TRAV1-2, TRAJ16)
CAVNRFSDGQKLLF

SEQ ID NO: 52936 - protein, 14 aa, Homo sapiens
  CDR3 for beta chain variable domain of TCR clone 26468 (TRBV13, TRBJ2-5)
CASSLERVGETQYF

SEQ ID NO: 52937 - protein, 13 aa, Homo sapiens
  CDR3 for alpha chain variable domain of TCR clone 26469 (TRAV8-6, TRAJ34)
CAVSDQGTDKLIF

SEQ ID NO: 52938 - protein, 14 aa, Homo sapiens
  CDR3 for beta chain variable domain of TCR clone 26469 (TRBV12-4, TRBJ1-1)
CASTWTGHDTEAFS

SEQ ID NO: 52939 - protein, 14 aa, Homo sapiens
  CDR3 for alpha chain variable domain of TCR clone 26470 (TRAV12-1, TRAJ12)
CVVTRMDSSYRLIF

SEQ ID NO: 52940 - protein, 13 aa, Homo sapiens
  CDR3 for beta chain variable domain of TCR clone 26470 (TRBV20-1, TRBJ1-1)
CSARGGGNTEAFF

SEQ ID NO: 52941 - protein, 13 aa, Homo sapiens
  CDR3 for alpha chain variable domain of TCR clone 26471 (TRAV27, TRAJ45)
CRSSGGGADGLTF

SEQ ID NO: 52942 - protein, 17 aa, Homo sapiens
  CDR3 for beta chain variable domain of TCR clone 26471 (TRBV11-2, TRBJ2-1)
CASSLYPPGVEYDEQFF

SEQ ID NO: 52943 - protein, 14 aa, Homo sapiens
  CDR3 for alpha chain variable domain of TCR clone 26472 (TRAV26-1, TRAJ38)
CIADNVGNNRKLIW

SEQ ID NO: 52944 - protein, 13 aa, Homo sapiens
  CDR3 for beta chain variable domain of TCR clone 26472 (TRBV20-1, TRBJ1-1)
CSARGGGNTEAFF

SEQ ID NO: 52945 - protein, 10 aa, Homo sapiens
  CDR3 for alpha chain variable domain of TCR clone 26473 (TRAV23/DV6, TRAJ57)
CAASSTLSQG

SEQ ID NO: 52946 - protein, 14 aa, Homo sapiens
  CDR3 for beta chain variable domain of TCR clone 26473 (TRBV7-2, TRBJ2-7)
CASSPKTSFYEQYF

SEQ ID NO: 52947 - protein, 11 aa, Homo sapiens
  CDR3 for alpha chain variable domain of TCR clone 26474 (TRAV17, TRAJ39)
CATNPYNMLTF

SEQ ID NO: 52948 - protein, 13 aa, Homo sapiens
  CDR3 for beta chain variable domain of TCR clone 26474 (TRBV7-8, TRBJ2-1)
CASTRDAVGEQFF

SEQ ID NO: 52949 - protein, 11 aa, Homo sapiens
  CDR3 for alpha chain variable domain of TCR clone 26475 (TRAV2, TRAJ13)
CASGGYQKVTF

SEQ ID NO: 52950 - protein, 16 aa, Homo sapiens
  CDR3 for beta chain variable domain of TCR clone 26475 (TRBV6-1, TRBJ2-5)
CASSESLDRGAETQYF

SEQ ID NO: 52951 - protein, 14 aa, Homo sapiens
  CDR3 for alpha chain variable domain of TCR clone 26476 (TRAV8-4, TRAJ9)
CAVRINTGGFKTIF

SEQ ID NO: 52952 - protein, 15 aa, Homo sapiens
  CDR3 for beta chain variable domain of TCR clone 26476 (TRBV10-2, TRBJ2-6)
CASSEQGTGDNVLTF

SEQ ID NO: 52953 - protein, 16 aa, Homo sapiens
  CDR3 for alpha chain variable domain of TCR clone 26477 (TRAV3, TRAJ3)
CAVRDRAKSSASKIIF

SEQ ID NO: 52954 - protein, 13 aa, Homo sapiens
  CDR3 for beta chain variable domain of TCR clone 26477 (TRBV10-3, TRBJ2-7)
CASKLAVNHEQYF

SEQ ID NO: 52955 - protein, 15 aa, Homo sapiens
  CDR3 for alpha chain variable domain of TCR clone 26478 (TRAV8-3, TRAJ45)
CASSYSGGGAGGLTF

SEQ ID NO: 52956 - protein, 15 aa, Homo sapiens
  CDR3 for beta chain variable domain of TCR clone 26478 (TRBV20-1, TRBJ2-7)
CSARDRVSGMDEQYF

SEQ ID NO: 52957 - protein, 14 aa, Homo sapiens
  CDR3 for alpha chain variable domain of TCR clone 26479 (TRAV2, TRAJ9)
CAVEDRSGGFKTIF

SEQ ID NO: 52958 - protein, 13 aa, Homo sapiens
  CDR3 for beta chain variable domain of TCR clone 26479 (TRBV2, TRBJ1-1)
CARNPTGGFHAFF

SEQ ID NO: 52959 - protein, 13 aa, Homo sapiens
  CDR3 for alpha chain variable domain of TCR clone 26480 (TRAV22, TRAJ26)
CAVEHNYGQNFFF

SEQ ID NO: 52960 - protein, 16 aa, Homo sapiens
  CDR3 for beta chain variable domain of TCR clone 26480 (TRBV7-2, TRBJ2-6)
CASSERRASGANVLTF

SEQ ID NO: 52961 - protein, 15 aa, Homo sapiens
  CDR3 for alpha chain variable domain of TCR clone 26481 (TRAV4, TRAJ39)
CLVGPNNNAGNMPTF

SEQ ID NO: 52962 - protein, 16 aa, Homo sapiens
  CDR3 for beta chain variable domain of TCR clone 26481 (TRBV13, TRBJ2-2)
CASSPRTGEHTGELFF

SEQ ID NO: 52963 - protein, 12 aa, Homo sapiens
  CDR3 for alpha chain variable domain of TCR clone 26482 (TRAV12-3, TRAJ17)
CAMALTGNKLTF

SEQ ID NO: 52964 - protein, 15 aa, Homo sapiens
  CDR3 for beta chain variable domain of TCR clone 26482 (TRBV6-3, TRBJ2-7)
CASSSPGTVFYEQYF

SEQ ID NO: 52965 - protein, 11 aa, Homo sapiens
  CDR3 for alpha chain variable domain of TCR clone 26483 (TRAV17, TRAJ9)
YGFTGGFKTIF

SEQ ID NO: 52966 - protein, 14 aa, Homo sapiens
  CDR3 for beta chain variable domain of TCR clone 26483 (TRBV7-9, TRBJ2-2)
CASSLVQDTGELFF

SEQ ID NO: 52967 - protein, 15 aa, Homo sapiens
  CDR3 for alpha chain variable domain of TCR clone 26484 (TRAV21, TRAJ38)
CAVRQDAGNNRKPIW

SEQ ID NO: 52968 - protein, 16 aa, Homo sapiens
  CDR3 for beta chain variable domain of TCR clone 26484 (TRBV4-2, TRBJ1-1)
CASRPLDGGGDTEAFF

SEQ ID NO: 52969 - protein, 11 aa, Homo sapiens
  CDR3 for alpha chain variable domain of TCR clone 26485 (TRAV12-3, TRAJ27)
CAMASAGKSTF

SEQ ID NO: 52970 - protein, 13 aa, Homo sapiens
  CDR3 for beta chain variable domain of TCR clone 26485 (TRBV20-1, TRBJ1-1)
CSARVGGNTEAFF

SEQ ID NO: 52971 - protein, 11 aa, Homo sapiens
  CDR3 for alpha chain variable domain of TCR clone 26486 (TRAV3, TRAJ13)
CAVTSYQKVTF

SEQ ID NO: 52972 - protein, 15 aa, Homo sapiens
  CDR3 for beta chain variable domain of TCR clone 26486 (TRBV7-9, TRBJ2-7)
CASSSSGLVVYEQYF

SEQ ID NO: 52973 - protein, 16 aa, Homo sapiens
  CDR3 for alpha chain variable domain of TCR clone 26487 (TRAV38-1, TRAJ32)
CAFMKGGGGAANKLIF

SEQ ID NO: 52974 - protein, 13 aa, Homo sapiens
  CDR3 for beta chain variable domain of TCR clone 26487 (TRBV20-1, TRBJ2-5)
CSAREAFQETQYF

SEQ ID NO: 52975 - protein, 16 aa, Homo sapiens
  CDR3 for alpha chain variable domain of TCR clone 26488 (TRAV17, TRAJ28)
CASYAYSGAGSYQLTS

SEQ ID NO: 52976 - protein, 15 aa, Homo sapiens
  CDR3 for beta chain variable domain of TCR clone 26488 (TRBV4-2, TRBJ2-1)
CASSPSGGLYNEQFF

SEQ ID NO: 52977 - protein, 14 aa, Homo sapiens
  CDR3 for alpha chain variable domain of TCR clone 26489 (TRAV13-1, TRAJ13)
CAASRVGGYQKVTF

SEQ ID NO: 52978 - protein, 17 aa, Homo sapiens
  CDR3 for beta chain variable domain of TCR clone 26489 (TRBV15, TRBJ1-5)
CDTSRAPPGTRNQPQHF

SEQ ID NO: 52979 - protein, 16 aa, Homo sapiens
  CDR3 for alpha chain variable domain of TCR clone 26490 (TRAV3, TRAJ37)
CAVRGKGSGNTSKLIF

SEQ ID NO: 52980 - protein, 13 aa, Homo sapiens
  CDR3 for beta chain variable domain of TCR clone 26490 (TRBV14, TRBJ2-7)
CASSQDRRYEQYF

SEQ ID NO: 52981 - protein, 11 aa, Homo sapiens
  CDR3 for alpha chain variable domain of TCR clone 26491 (TRAV2, TRAJ13)
CASGGYQKVTF

SEQ ID NO: 52982 - protein, 13 aa, Homo sapiens
  CDR3 for beta chain variable domain of TCR clone 26491 (TRBV10-2, TRBJ2-7)
CASGASGGYEQYF

SEQ ID NO: 52983 - protein, 18 aa, Homo sapiens
  CDR3 for alpha chain variable domain of TCR clone 26492 (TRAV17, TRAJ45)
CATSPDLYSGGGADGLTF

SEQ ID NO: 52984 - protein, 15 aa, Homo sapiens
  CDR3 for beta chain variable domain of TCR clone 26492 (TRBV11-2, TRBJ2-1)
CASSKNRGLIYEQFF

SEQ ID NO: 52985 - protein, 17 aa, Homo sapiens
  CDR3 for alpha chain variable domain of TCR clone 26493 (TRAV13-1, TRAJ52)
CAASSGAGGTSYGKLTF

SEQ ID NO: 52986 - protein, 12 aa, Homo sapiens
  CDR3 for beta chain variable domain of TCR clone 26493 (TRBV14, TRBJ2-7)
CASSRLKGEQYF

SEQ ID NO: 52987 - protein, 12 aa, Homo sapiens
  CDR3 for alpha chain variable domain of TCR clone 26494 (TRAV12-3, TRAJ17)
CAMTLTGNKLTF

SEQ ID NO: 52988 - protein, 14 aa, Homo sapiens
  CDR3 for beta chain variable domain of TCR clone 26494 (TRBV11-2, TRBJ1-2)
CASSLYRGNYGYTF

SEQ ID NO: 52989 - protein, 19 aa, Homo sapiens
  CDR3 for alpha chain variable domain of TCR clone 26495 (TRAV8-1, TRAJ18)
CAVNARRADRGSTLGRLYF

SEQ ID NO: 52990 - protein, 12 aa, Homo sapiens
  CDR3 for beta chain variable domain of TCR clone 26495 (TRBV11-2, TRBJ2-2)
CASSLGGGELFF

SEQ ID NO: 52991 - protein, 17 aa, Homo sapiens
  CDR3 for alpha chain variable domain of TCR clone 26496 (TRAV4, TRAJ42)
CLVCVLNYGGSQGNLIF

SEQ ID NO: 52992 - protein, 12 aa, Homo sapiens
  CDR3 for beta chain variable domain of TCR clone 26496 (TRBV20-1, TRBJ2-1)
CSAQYTYNEQFF

SEQ ID NO: 52993 - protein, 14 aa, Homo sapiens
  CDR3 for alpha chain variable domain of TCR clone 26497 (TRAV17, TRAJ22)
CATSPSGSARQLTF

SEQ ID NO: 52994 - protein, 15 aa, Homo sapiens
  CDR3 for beta chain variable domain of TCR clone 26497 (TRBV4-1, TRBJ2-5)
CASSQWDLYQESQYF

SEQ ID NO: 52995 - protein, 12 aa, Homo sapiens
  CDR3 for alpha chain variable domain of TCR clone 26498 (TRAV8-3, TRAJ20)
CAVGANDYKRSF

SEQ ID NO: 52996 - protein, 16 aa, Homo sapiens
  CDR3 for beta chain variable domain of TCR clone 26498 (TRBV19, TRBJ2-2)
CASRSPGTGATGELFF

SEQ ID NO: 52997 - protein, 16 aa, Homo sapiens
  CDR3 for alpha chain variable domain of TCR clone 26499 (TRAV19, TRAJ45)
CALSGYSGGGADGLTF

SEQ ID NO: 52998 - protein, 13 aa, Homo sapiens
  CDR3 for beta chain variable domain of TCR clone 26499 (TRBV7-9, TRBJ1-5)
CASSLRNDQPQHF

SEQ ID NO: 52999 - protein, 14 aa, Homo sapiens
  CDR3 for alpha chain variable domain of TCR clone 26500 (TRAV1-2, TRAJ8)
CAVREDTGFQKLVF

SEQ ID NO: 53000 - protein, 12 aa, Homo sapiens
  CDR3 for beta chain variable domain of TCR clone 26500 (TRBV12-5, TRBJ2-5)
CASGQGVETQYF

SEQ ID NO: 53001 - protein, 10 aa, Homo sapiens
  CDR3 for alpha chain variable domain of TCR clone 26501 (TRAV1-2, TRAJ23)
CAGQGGKLIF

SEQ ID NO: 53002 - protein, 16 aa, Homo sapiens
  CDR3 for beta chain variable domain of TCR clone 26501 (TRBV11-3, TRBJ1-1)
CASSLRQGGEHSKAFF

SEQ ID NO: 53003 - protein, 11 aa, Homo sapiens
  CDR3 for alpha chain variable domain of TCR clone 26502 (TRAV21, TRAJ34)
CAVTNTDKLIF

SEQ ID NO: 53004 - protein, 13 aa, Homo sapiens
  CDR3 for beta chain variable domain of TCR clone 26502 (TRBV20-1, TRBJ2-1)
GALAGTSYNEQFF

SEQ ID NO: 53005 - protein, 15 aa, Homo sapiens
  CDR3 for alpha chain variable domain of TCR clone 26503 (TRAV2, TRAJ9)
CAVEDRGTGGFKTIF

SEQ ID NO: 53006 - protein, 16 aa, Homo sapiens
  CDR3 for beta chain variable domain of TCR clone 26503 (TRBV24-1, TRBJ2-3)
CATSDTGTGATDTQYF

SEQ ID NO: 53007 - protein, 14 aa, Homo sapiens
  CDR3 for alpha chain variable domain of TCR clone 26504 (TRAV1-1, TRAJ27)
CAVIYNTNACKSTF

SEQ ID NO: 53008 - protein, 15 aa, Homo sapiens
  CDR3 for beta chain variable domain of TCR clone 26504 (TRBV7-2, TRBJ2-1)
CASSSGLAGGNEQFF

SEQ ID NO: 53009 - protein, 13 aa, Homo sapiens
  CDR3 for alpha chain variable domain of TCR clone 26505 (TRAV12-3, TRAJ43)
CAMIRSNNNDMRF

SEQ ID NO: 53010 - protein, 12 aa, Homo sapiens
  CDR3 for beta chain variable domain of TCR clone 26505 (TRBV11-2, TRBJ2-5)
CASSLGQETQYF

SEQ ID NO: 53011 - protein, 12 aa, Homo sapiens
  CDR3 for alpha chain variable domain of TCR clone 26506 (TRAV6, TRAJ37)
CALGSNTGKLIF

SEQ ID NO: 53012 - protein, 17 aa, Homo sapiens
  CDR3 for beta chain variable domain of TCR clone 26506 (TRBV19, TRBJ2-2)
CASSTLVGDRVSGELFF

SEQ ID NO: 53013 - protein, 11 aa, Homo sapiens
  CDR3 for alpha chain variable domain of TCR clone 26507 (TRAV1-1, TRAJ23)
CAVRQGGKLSF

SEQ ID NO: 53014 - protein, 20 aa, Homo sapiens
  CDR3 for beta chain variable domain of TCR clone 26507 (TRBV7-8, TRBJ2-2)
CASSHLFPGPTIHITGELFF

SEQ ID NO: 53015 - protein, 12 aa, Homo sapiens
  CDR3 for alpha chain variable domain of TCR clone 26508 (TRAV12-3, TRAJ17)
CAMTLTGNKLTF

SEQ ID NO: 53016 - protein, 16 aa, Homo sapiens
  CDR3 for beta chain variable domain of TCR clone 26508 (TRBV4-3, TRBJ2-2)
CASSHLQGSGTGELFF

SEQ ID NO: 53017 - protein, 13 aa, Homo sapiens
  CDR3 for alpha chain variable domain of TCR clone 26509 (TRAV13-2, TRAJ53)
RAENMGSNYKLTF

SEQ ID NO: 53018 - protein, 13 aa, Homo sapiens
  CDR3 for beta chain variable domain of TCR clone 26509 (TRBV4-1, TRBJ2-2)
CASSQENTGELFF

SEQ ID NO: 53019 - protein, 15 aa, Homo sapiens
  CDR3 for alpha chain variable domain of TCR clone 26510 (TRAV12-3, TRAJ6)
CAMSATTGGSYIPTF

SEQ ID NO: 53020 - protein, 14 aa, Homo sapiens
  CDR3 for beta chain variable domain of TCR clone 26510 (TRBV2, TRBJ1-5)
CASSENRGGQPQHF

SEQ ID NO: 53021 - protein, 14 aa, Homo sapiens
  CDR3 for alpha chain variable domain of TCR clone 26511 (TRAV1-2, TRAJ16)
CAVNRFSDGQKLLF

SEQ ID NO: 53022 - protein, 14 aa, Homo sapiens
  CDR3 for beta chain variable domain of TCR clone 26511 (TRBV19, TRBJ2-1)
CASGKSTQYNEQFF

SEQ ID NO: 53023 - protein, 15 aa, Homo sapiens
  CDR3 for alpha chain variable domain of TCR clone 26512 (TRAV20, TRAJ53)
CAVQASGGSNYKLTF

SEQ ID NO: 53024 - protein, 12 aa, Homo sapiens
  CDR3 for beta chain variable domain of TCR clone 26512 (TRBV7-6, TRBJ2-5)
RASSLSQETQYF

SEQ ID NO: 53025 - protein, 13 aa, Homo sapiens
  CDR3 for alpha chain variable domain of TCR clone 26513 (TRAV21, TRAJ20)
CAVGLRVDYKLSF

SEQ ID NO: 53026 - protein, 16 aa, Homo sapiens
  CDR3 for beta chain variable domain of TCR clone 26513 (TRBV12-4, TRBJ1-5)
CASSRPVGGSNQPQHF

SEQ ID NO: 53027 - protein, 14 aa, Homo sapiens
  CDR3 for alpha chain variable domain of TCR clone 26514 (TRAV13-1, TRAJ24)
CAASRTDSWGKLQF

SEQ ID NO: 53028 - protein, 14 aa, Homo sapiens
  CDR3 for beta chain variable domain of TCR clone 26514 (TRBV25-1, TRBJ1-1)
CASTHLGGNTEAFF

SEQ ID NO: 53029 - protein, 13 aa, Homo sapiens
  CDR3 for alpha chain variable domain of TCR clone 26515 (TRAV17, TRAJ9)
CATDYTGGFKNIF

SEQ ID NO: 53030 - protein, 16 aa, Homo sapiens
  CDR3 for beta chain variable domain of TCR clone 26515 (TRBV7-7, TRBJ2-1)
CASSLASGTSYNEQFF

SEQ ID NO: 53031 - protein, 15 aa, Homo sapiens
  CDR3 for alpha chain variable domain of TCR clone 26516 (TRAV20, TRAJ43)
CAVQAGKRSNNDMRF

SEQ ID NO: 53032 - protein, 14 aa, Homo sapiens
  CDR3 for beta chain variable domain of TCR clone 26516 (TRBV27, TRBJ2-1)
CASRHLGGGKEQFF

SEQ ID NO: 53033 - protein, 11 aa, Homo sapiens
  CDR3 for alpha chain variable domain of TCR clone 26517 (TRAV2, TRAJ33)
SAVDSNYQLIW

SEQ ID NO: 53034 - protein, 14 aa, Homo sapiens
  CDR3 for beta chain variable domain of TCR clone 26517 (TRBV11-2, TRBJ2-3)
CASSRLARTDTQYF

SEQ ID NO: 53035 - protein, 14 aa, Homo sapiens
  CDR3 for alpha chain variable domain of TCR clone 26518 (TRAV20, TRAJ56)
CAVQFGVANSKLTF

SEQ ID NO: 53036 - protein, 14 aa, Homo sapiens
  CDR3 for beta chain variable domain of TCR clone 26518 (TRBV20-1, TRBJ2-7)
CSAKRGRSSYEQYF

SEQ ID NO: 53037 - protein, 17 aa, Homo sapiens
  CDR3 for alpha chain variable domain of TCR clone 26519 (TRAV26-1, TRAJ53)
CIVRVDDSGGINYKLTF

SEQ ID NO: 53038 - protein, 15 aa, Homo sapiens
  CDR3 for beta chain variable domain of TCR clone 26519 (TRBV20-1, TRBJ2-7)
CSARVPAAYFYEQYF

SEQ ID NO: 53039 - protein, 13 aa, Homo sapiens
  CDR3 for alpha chain variable domain of TCR clone 26520 (TRAV9-2, TRAJ23)
CALSDIQGGKLIF

SEQ ID NO: 53040 - protein, 15 aa, Homo sapiens
  CDR3 for beta chain variable domain of TCR clone 26520 (TRBV11-3, TRBJ2-1)
CASSAEGGVYNEQFF

SEQ ID NO: 53041 - protein, 12 aa, Homo sapiens
  CDR3 for alpha chain variable domain of TCR clone 26521 (TRAV25, TRAJ53)
CQSGGSNYKLTF

SEQ ID NO: 53042 - protein, 15 aa, Homo sapiens
  CDR3 for beta chain variable domain of TCR clone 26521 (TRBV5-1, TRBJ2-2)
CASSWTRPNTGELFF

SEQ ID NO: 53043 - protein, 15 aa, Homo sapiens
  CDR3 for alpha chain variable domain of TCR clone 26522 (TRAV3, TRAJ5)
CAVRDLHTGRRALTF

SEQ ID NO: 53044 - protein, 13 aa, Homo sapiens
  CDR3 for beta chain variable domain of TCR clone 26522 (TRBV12-4, TRBJ2-7)
CASSPTETYEQYF

SEQ ID NO: 53045 - protein, 11 aa, Homo sapiens
  CDR3 for alpha chain variable domain of TCR clone 26523 (TRAV1-2, TRAJ20)
CAVANNYKLSF

SEQ ID NO: 53046 - protein, 18 aa, Homo sapiens
  CDR3 for beta chain variable domain of TCR clone 26523 (TRBV20-1, TRBJ2-6)
CSAETTPTHGSGANVLTF

SEQ ID NO: 53047 - protein, 15 aa, Homo sapiens
  CDR3 for alpha chain variable domain of TCR clone 26524 (TRAV3, TRAJ5)
CAVRDLDTGRRALTF

SEQ ID NO: 53048 - protein, 11 aa, Homo sapiens
  CDR3 for beta chain variable domain of TCR clone 26524 (TRBV11-2, TRBJ2-2)
CASSLPGELFF

SEQ ID NO: 53049 - protein, 14 aa, Homo sapiens
  CDR3 for alpha chain variable domain of TCR clone 26525 (TRAV20, TRAJ56)
CAAQFGGANSKLTF

SEQ ID NO: 53050 - protein, 14 aa, Homo sapiens
  CDR3 for beta chain variable domain of TCR clone 26525 (TRBV20-1, TRBJ2-7)
CSAKRGRSSYEQYF

SEQ ID NO: 53051 - protein, 20 aa, Homo sapiens
  CDR3 for alpha chain variable domain of TCR clone 26526 (TRAV12-1, TRAJ42)
SSVIQPPISVKGGSQGNLIF

SEQ ID NO: 53052 - protein, 18 aa, Homo sapiens
  CDR3 for beta chain variable domain of TCR clone 26526 (TRBV11-2, TRBJ2-3)
CASSLGGASRGAPNTQYF

SEQ ID NO: 53053 - protein, 13 aa, Homo sapiens
  CDR3 for alpha chain variable domain of TCR clone 26527 (TRAV13-2, TRAJ48)
CAEMDFGNEKLTF

SEQ ID NO: 53054 - protein, 15 aa, Homo sapiens
  CDR3 for beta chain variable domain of TCR clone 26527 (TRBV7-9, TRBJ1-6)
CASSAPGRGNSPLHF

SEQ ID NO: 53055 - protein, 13 aa, Homo sapiens
  CDR3 for alpha chain variable domain of TCR clone 26528 (TRAV8-3, TRAJ44)
CAVVPGTASKLTF

SEQ ID NO: 53056 - protein, 14 aa, Homo sapiens
  CDR3 for beta chain variable domain of TCR clone 26528 (TRBV11-2, TRBJ2-3)
CASRRLARTYTQYF

SEQ ID NO: 53057 - protein, 12 aa, Homo sapiens
  CDR3 for alpha chain variable domain of TCR clone 26529 (TRAV21, TRAJ37)
CAVRGNTGKLIF

SEQ ID NO: 53058 - protein, 14 aa, Homo sapiens
  CDR3 for beta chain variable domain of TCR clone 26529 (TRBV19, TRBJ2-1)
CASEVTGARNEQFL

SEQ ID NO: 53059 - protein, 14 aa, Homo sapiens
  CDR3 for alpha chain variable domain of TCR clone 26530 (TRAV17, TRAJ4)
CATAPLGGYNKLIF

SEQ ID NO: 53060 - protein, 13 aa, Homo sapiens
  CDR3 for beta chain variable domain of TCR clone 26530 (TRBV12-4, TRBJ1-3)
CASSLASGNTMYF

SEQ ID NO: 53061 - protein, 10 aa, Homo sapiens
  CDR3 for alpha chain variable domain of TCR clone 26531 (TRAV12-1, TRAJ43)
CVVHNNDMRF

SEQ ID NO: 53062 - protein, 13 aa, Homo sapiens
  CDR3 for beta chain variable domain of TCR clone 26531 (TRBV12-4, TRBJ1-2)
CASSSGLTVISTS

SEQ ID NO: 53063 - protein, 14 aa, Homo sapiens
  CDR3 for alpha chain variable domain of TCR clone 26532 (TRAV12-2, TRAJ13)
CAVKKTGGYQKVTF

SEQ ID NO: 53064 - protein, 11 aa, Homo sapiens
  CDR3 for beta chain variable domain of TCR clone 26532 (TRBV29-1, TRBJ2-5)
RSEDRTGTQYF

SEQ ID NO: 53065 - protein, 15 aa, Homo sapiens
  CDR3 for alpha chain variable domain of TCR clone 26533 (TRAV13-1, TRAJ57)
CAASNTQGGSEKLVF

SEQ ID NO: 53066 - protein, 16 aa, Homo sapiens
  CDR3 for beta chain variable domain of TCR clone 26533 (TRBV19, TRBJ2-1)
CASSKAGPSSYNEQLF

SEQ ID NO: 53067 - protein, 13 aa, Homo sapiens
  CDR3 for alpha chain variable domain of TCR clone 26534 (TRAV12-1, TRAJ21)
CVVTLYNFNKFYF

SEQ ID NO: 53068 - protein, 20 aa, Homo sapiens
  CDR3 for beta chain variable domain of TCR clone 26534 (TRBV7-8, TRBJ2-1)
CASSLAHRLAGVRSYNEQLF

SEQ ID NO: 53069 - protein, 12 aa, Homo sapiens
  CDR3 for alpha chain variable domain of TCR clone 26535 (TRAV21, TRAJ31)
CAVWGNNARLMS

SEQ ID NO: 53070 - protein, 16 aa, Homo sapiens
  CDR3 for beta chain variable domain of TCR clone 26535 (TRBV27, TRBJ2-5)
CASSYGPGGQKETQYF

SEQ ID NO: 53071 - protein, 14 aa, Homo sapiens
  CDR3 for alpha chain variable domain of TCR clone 26536 (TRAV26-2, TRAJ31)
CILIPGNNNARLMF

SEQ ID NO: 53072 - protein, 16 aa, Homo sapiens
  CDR3 for beta chain variable domain of TCR clone 26536 (TRBV7-3, TRBJ2-1)
CASSLVSGSSSNEQFF

SEQ ID NO: 53073 - protein, 16 aa, Homo sapiens
  CDR3 for alpha chain variable domain of TCR clone 26537 (TRAV38-1, TRAJ37)
CAFRGDGSSNTGKLIF

SEQ ID NO: 53074 - protein, 13 aa, Homo sapiens
  CDR3 for beta chain variable domain of TCR clone 26537 (TRBV12-4, TRBJ2-5)
CASSLFRRETQYF

SEQ ID NO: 53075 - protein, 14 aa, Homo sapiens
  CDR3 for alpha chain variable domain of TCR clone 26538 (TRAV38-1, TRAJ45)
CASHSGGGADGITF

SEQ ID NO: 53076 - protein, 13 aa, Homo sapiens
  CDR3 for beta chain variable domain of TCR clone 26538 (TRBV10-3, TRBJ1-2)
CAISERDSYGYTF

SEQ ID NO: 53077 - protein, 13 aa, Homo sapiens
  CDR3 for alpha chain variable domain of TCR clone 26539 (TRAV8-3, TRAJ28)
CAVGAVGSYQLTF

SEQ ID NO: 53078 - protein, 14 aa, Homo sapiens
  CDR3 for beta chain variable domain of TCR clone 26539 (TRBV7-2, TRBJ2-7)
CASRSQGAAYGQYF

SEQ ID NO: 53079 - protein, 13 aa, Homo sapiens
  CDR3 for alpha chain variable domain of TCR clone 26540 (TRAV2, TRAJ40)
CAVVTSGTYKDIF

SEQ ID NO: 53080 - protein, 14 aa, Homo sapiens
  CDR3 for beta chain variable domain of TCR clone 26540 (TRBV19, TRBJ2-1)
CASPTFVLSGEQFF

SEQ ID NO: 53081 - protein, 13 aa, Homo sapiens
  CDR3 for alpha chain variable domain of TCR clone 26541 (TRAV35, TRAJ42)
CAGSPGSQGNLIF

SEQ ID NO: 53082 - protein, 13 aa, Homo sapiens
  CDR3 for beta chain variable domain of TCR clone 26541 (TRBV29-1, TRBJ2-1)
CSVEGGRVNEQFF

SEQ ID NO: 53083 - protein, 11 aa, Homo sapiens
  CDR3 for alpha chain variable domain of TCR clone 26542 (TRAV16, TRAJ49)
RALRSGNQFYF

SEQ ID NO: 53084 - protein, 16 aa, Homo sapiens
  CDR3 for beta chain variable domain of TCR clone 26542 (TRBV20-1, TRBJ1-5)
CSARDVGGGWIQPQHF

SEQ ID NO: 53085 - protein, 15 aa, Homo sapiens
  CDR3 for alpha chain variable domain of TCR clone 26543 (TRAV12-3, TRAJ6)
CAMSATTGGSHIPTF

SEQ ID NO: 53086 - protein, 19 aa, Homo sapiens
  CDR3 for beta chain variable domain of TCR clone 26543 (TRBV25-1, TRBJ2-2)
CAILVYRVDRGRKTGELFF

SEQ ID NO: 53087 - protein, 12 aa, Homo sapiens
  CDR3 for alpha chain variable domain of TCR clone 26544 (TRAV30, TRAJ43)
CGTEERGNDMRL

SEQ ID NO: 53088 - protein, 11 aa, Homo sapiens
  CDR3 for beta chain variable domain of TCR clone 26544 (TRBV29-1, TRBJ2-5)
CSEDRTGTQYF

SEQ ID NO: 53089 - protein, 13 aa, Homo sapiens
  CDR3 for alpha chain variable domain of TCR clone 26545 (TRAV12-2, TRAJ39)
CAVNNNAGNMLTF

SEQ ID NO: 53090 - protein, 13 aa, Homo sapiens
  CDR3 for beta chain variable domain of TCR clone 26545 (TRBV2, TRBJ1-5)
RATAGPGNQPQHF

SEQ ID NO: 53091 - protein, 13 aa, Homo sapiens
  CDR3 for alpha chain variable domain of TCR clone 26546 (TRAV27, TRAJ53)
CAGQGGSNYKLTF

SEQ ID NO: 53092 - protein, 13 aa, Homo sapiens
  CDR3 for beta chain variable domain of TCR clone 26546 (TRBV29-1, TRBJ1-1)
SSVESGFGTEAFF

SEQ ID NO: 53093 - protein, 13 aa, Homo sapiens
  CDR3 for alpha chain variable domain of TCR clone 26547 (TRAV38-2/DV8, TRAJ34)
CAYGTWNTDKLIF

SEQ ID NO: 53094 - protein, 18 aa, Homo sapiens
  CDR3 for beta chain variable domain of TCR clone 26547 (TRBV6-6, TRBJ1-3)
CASSYSKWDSISGNTIYF

SEQ ID NO: 53095 - protein, 18 aa, Homo sapiens
  CDR3 for alpha chain variable domain of TCR clone 26548 (TRAV17, TRAJ45)
CAKSLDLYSGGGADGLTF

SEQ ID NO: 53096 - protein, 15 aa, Homo sapiens
  CDR3 for beta chain variable domain of TCR clone 26548 (TRBV11-2, TRBJ2-1)
CASSKNRGLIYEQFF

SEQ ID NO: 53097 - protein, 12 aa, Homo sapiens
  CDR3 for alpha chain variable domain of TCR clone 26549 (TRAV21, TRAJ11)
CAATSGYSTLTF

SEQ ID NO: 53098 - protein, 14 aa, Homo sapiens
  CDR3 for beta chain variable domain of TCR clone 26549 (TRBV20-1, TRBJ2-7)
CSAPERAGVGEQYF

SEQ ID NO: 53099 - protein, 11 aa, Homo sapiens
  CDR3 for alpha chain variable domain of TCR clone 26550 (TRAV27, TRAJ45)
CAGAQEEVLTD

SEQ ID NO: 53100 - protein, 17 aa, Homo sapiens
  CDR3 for beta chain variable domain of TCR clone 26550 (TRBV10-3, TRBJ2-4)
CTSVPSVNKGSKNIQYF

SEQ ID NO: 53101 - protein, 17 aa, Homo sapiens
  CDR3 for alpha chain variable domain of TCR clone 26551 (TRAV13-1, TRAJ31)
CAPRDRLMFGDGTQLVV

SEQ ID NO: 53102 - protein, 12 aa, Homo sapiens
  CDR3 for beta chain variable domain of TCR clone 26551 (TRBV7-9, TRBJ2-7)
CASGLEGYEQYF

SEQ ID NO: 53103 - protein, 12 aa, Homo sapiens
  CDR3 for alpha chain variable domain of TCR clone 26552 (TRAV13-1, TRAJ49)
CAAPSTGNQFYF

SEQ ID NO: 53104 - protein, 17 aa, Homo sapiens
  CDR3 for beta chain variable domain of TCR clone 26552 (TRBV25-1, TRBJ2-7)
CASSDARVVFSSYEQYF

SEQ ID NO: 53105 - protein, 14 aa, Homo sapiens
  CDR3 for alpha chain variable domain of TCR clone 26553 (TRAV8-3, TRAJ4)
CAVGAAGGYNKLIF

SEQ ID NO: 53106 - protein, 15 aa, Homo sapiens
  CDR3 for beta chain variable domain of TCR clone 26553 (TRBV6-5, TRBJ2-1)
CASSYDAGASNEQFF

SEQ ID NO: 53107 - protein, 11 aa, Homo sapiens
  CDR3 for alpha chain variable domain of TCR clone 26554 (TRAV8-3, TRAJ15)
CAAGPGTALIF

SEQ ID NO: 53108 - protein, 18 aa, Homo sapiens
  CDR3 for beta chain variable domain of TCR clone 26554 (TRBV18, TRBJ2-3)
CASSYTSGAAGGTDTQYF

SEQ ID NO: 53109 - protein, 15 aa, Homo sapiens
  CDR3 for alpha chain variable domain of TCR clone 26555 (TRAV12-2, TRAJ43)
CAFDMRFGAGTRLTV

SEQ ID NO: 53110 - protein, 15 aa, Homo sapiens
  CDR3 for beta chain variable domain of TCR clone 26555 (TRBV6-3, TRBJ2-7)
CASSSPGTVFYEQYF

SEQ ID NO: 53111 - protein, 13 aa, Homo sapiens
  CDR3 for alpha chain variable domain of TCR clone 26556 (TRAV3, TRAJ27)
CAVRPLGAGKSIF

SEQ ID NO: 53112 - protein, 13 aa, Homo sapiens
  CDR3 for beta chain variable domain of TCR clone 26556 (TRBV7-9, TRBJ2-3)
CASSPGSTDTQYF

SEQ ID NO: 53113 - protein, 17 aa, Homo sapiens
  CDR3 for alpha chain variable domain of TCR clone 26557 (TRAV3, TRAJ42)
CAVRDRDYGGSQGNLIF

SEQ ID NO: 53114 - protein, 14 aa, Homo sapiens
  CDR3 for beta chain variable domain of TCR clone 26557 (TRBV19, TRBJ2-5)
CASSMTGQQGTQYF

SEQ ID NO: 53115 - protein, 11 aa, Homo sapiens
  CDR3 for alpha chain variable domain of TCR clone 26558 (TRAV2, TRAJ33)
CAVESNYQLIW

SEQ ID NO: 53116 - protein, 13 aa, Homo sapiens
  CDR3 for beta chain variable domain of TCR clone 26558 (TRBV19, TRBJ1-2)
CASSQGQVYGYTF

SEQ ID NO: 53117 - protein, 14 aa, Homo sapiens
  CDR3 for alpha chain variable domain of TCR clone 26559 (TRAV12-2, TRAJ13)
GAVKKTGGYQKVTF

SEQ ID NO: 53118 - protein, 14 aa, Homo sapiens
  CDR3 for beta chain variable domain of TCR clone 26559 (TRBV25-1, TRBJ1-1)
CASTHLGGNTEAFF

SEQ ID NO: 53119 - protein, 12 aa, Homo sapiens
  CDR3 for alpha chain variable domain of TCR clone 26560 (TRAV16, TRAJ10)
CSRTGGGNKLTS

SEQ ID NO: 53120 - protein, 15 aa, Homo sapiens
  CDR3 for beta chain variable domain of TCR clone 26560 (TRBV6-3, TRBJ2-7)
CASSSPGTVFYEQYF

SEQ ID NO: 53121 - protein, 13 aa, Homo sapiens
  CDR3 for alpha chain variable domain of TCR clone 26561 (TRAV17, TRAJ9)
CATDYTGGFKTIF

SEQ ID NO: 53122 - protein, 14 aa, Homo sapiens
  CDR3 for beta chain variable domain of TCR clone 26561 (TRBV19, TRBJ2-5)
CSSSMTGQQETQYF

SEQ ID NO: 53123 - protein, 15 aa, Homo sapiens
  CDR3 for alpha chain variable domain of TCR clone 26562 (TRAV8-3, TRAJ11)
CAVGLLNSGYSTLTF

SEQ ID NO: 53124 - protein, 16 aa, Homo sapiens
  CDR3 for beta chain variable domain of TCR clone 26562 (TRBV24-1, TRBJ2-3)
CATSDPGTGATDTQYF

SEQ ID NO: 53125 - protein, 17 aa, Homo sapiens
  CDR3 for alpha chain variable domain of TCR clone 26563 (TRAV3, TRAJ42)
CAVKDRDYGGSQGNLIF

SEQ ID NO: 53126 - protein, 18 aa, Homo sapiens
  CDR3 for beta chain variable domain of TCR clone 26563 (TRBV20-1, TRBJ2-3)
CSASGLAGGPGTTDTQYF

SEQ ID NO: 53127 - protein, 13 aa, Homo sapiens
  CDR3 for alpha chain variable domain of TCR clone 26564 (TRAV9-2, TRAJ49)
CALLSNTGNQFYF

SEQ ID NO: 53128 - protein, 14 aa, Homo sapiens
  CDR3 for beta chain variable domain of TCR clone 26564 (TRBV29-1, TRBJ2-5)
CSVETSGSGETQYF

SEQ ID NO: 53129 - protein, 15 aa, Homo sapiens
  CDR3 for alpha chain variable domain of TCR clone 26565 (TRAV17, TRAJ57)
CATGPSQGGSEKLVF

SEQ ID NO: 53130 - protein, 16 aa, Homo sapiens
  CDR3 for beta chain variable domain of TCR clone 26565 (TRBV12-4, TRBJ1-5)
CASRRPVGGSNQPQHF

SEQ ID NO: 53131 - protein, 14 aa, Homo sapiens
  CDR3 for alpha chain variable domain of TCR clone 26566 (TRAV16, TRAJ33)
CALSAMDSNYQLIW

SEQ ID NO: 53132 - protein, 17 aa, Homo sapiens
  CDR3 for beta chain variable domain of TCR clone 26566 (TRBV13, TRBJ2-3)
CASSLSRVAGGRNTQYF

SEQ ID NO: 53133 - protein, 21 aa, Homo sapiens
  CDR3 for alpha chain variable domain of TCR clone 26567 (TRAV12-1, TRAJ32)
SSVIQPPTSMNYGGATNKLIF

SEQ ID NO: 53134 - protein, 15 aa, Homo sapiens
  CDR3 for beta chain variable domain of TCR clone 26567 (TRBV7-9, TRBJ2-2)
CASGPLDTLPGELFF

SEQ ID NO: 53135 - protein, 14 aa, Homo sapiens
  CDR3 for alpha chain variable domain of TCR clone 26568 (TRAV17, TRAJ16)
CATADFSDGQKLLF

SEQ ID NO: 53136 - protein, 12 aa, Homo sapiens
  CDR3 for beta chain variable domain of TCR clone 26568 (TRBV24-1, TRBJ1-1)
CATLYTDTEAFF

SEQ ID NO: 53137 - protein, 13 aa, Homo sapiens
  CDR3 for alpha chain variable domain of TCR clone 26569 (TRAV2, TRAJ20)
CAVEDPSEYKLSF

SEQ ID NO: 53138 - protein, 16 aa, Homo sapiens
  CDR3 for beta chain variable domain of TCR clone 26569 (TRBV25-1, TRBJ2-7)
CASSELTGGGICEQYF

SEQ ID NO: 53139 - protein, 13 aa, Homo sapiens
  CDR3 for alpha chain variable domain of TCR clone 26570 (TRAV20, TRAJ15)
CAAINQAGTALIF

SEQ ID NO: 53140 - protein, 13 aa, Homo sapiens
  CDR3 for beta chain variable domain of TCR clone 26570 (TRBV12-4, TRBJ2-1)
CASRQPSNNEQFF

SEQ ID NO: 53141 - protein, 13 aa, Homo sapiens
  CDR3 for alpha chain variable domain of TCR clone 26571 (TRAV13-1, TRAJ39)
CSKYSNEGNMLTF

SEQ ID NO: 53142 - protein, 16 aa, Homo sapiens
  CDR3 for beta chain variable domain of TCR clone 26571 (TRBV20-1, TRBJ1-4)
CSAPGQGLLTNEKLFF

SEQ ID NO: 53143 - protein, 14 aa, Homo sapiens
  CDR3 for alpha chain variable domain of TCR clone 26572 (TRAV12-2, TRAJ13)
CAVKKTGGYQKVTF

SEQ ID NO: 53144 - protein, 18 aa, Homo sapiens
  CDR3 for beta chain variable domain of TCR clone 26572 (TRBV27, TRBJ2-1)
CTSVPAVMGGGSSNEQFF

SEQ ID NO: 53145 - protein, 14 aa, Homo sapiens
  CDR3 for alpha chain variable domain of TCR clone 26573 (TRAV8-1, TRAJ24)
CAVNAADGWGKLQF

SEQ ID NO: 53146 - protein, 16 aa, Homo sapiens
  CDR3 for beta chain variable domain of TCR clone 26573 (TRBV4-3, TRBJ2-1)
CASSPALDRGVNEQFF

SEQ ID NO: 53147 - protein, 14 aa, Homo sapiens
  CDR3 for alpha chain variable domain of TCR clone 26574 (TRAV16, TRAJ44)
CSLSTTGTASKLTF

SEQ ID NO: 53148 - protein, 14 aa, Homo sapiens
  CDR3 for beta chain variable domain of TCR clone 26574 (TRBV20-1, TRBJ2-7)
CSAISREASYEQYF

SEQ ID NO: 53149 - protein, 17 aa, Homo sapiens
  CDR3 for alpha chain variable domain of TCR clone 26575 (TRAV12-3, TRAJ4)
CAMTGAGTRLAVHPYIQ

SEQ ID NO: 53150 - protein, 14 aa, Homo sapiens
  CDR3 for beta chain variable domain of TCR clone 26575 (TRBV10-3, TRBJ1-1)
CAISDTDRGVEAFF

SEQ ID NO: 53151 - protein, 14 aa, Homo sapiens
  CDR3 for alpha chain variable domain of TCR clone 26576 (TRAV1-2, TRAJ8)
CAVREDTGFQKLVF

SEQ ID NO: 53152 - protein, 15 aa, Homo sapiens
  CDR3 for beta chain variable domain of TCR clone 26576 (TRBV18, TRBJ2-1)
CASSPPSASYNEQFF

SEQ ID NO: 53153 - protein, 12 aa, Homo sapiens
  CDR3 for alpha chain variable domain of TCR clone 26577 (TRAV8-3, TRAJ41)
CAVALSGYALNF

SEQ ID NO: 53154 - protein, 18 aa, Homo sapiens
  CDR3 for beta chain variable domain of TCR clone 26577 (TRBV20-1, TRBJ2-6)
CSAETTPTHGSGANDLTF

SEQ ID NO: 53155 - protein, 14 aa, Homo sapiens
  CDR3 for alpha chain variable domain of TCR clone 26578 (TRAV12-1, TRAJ17)
CVVNYKAAGNKLTF

SEQ ID NO: 53156 - protein, 17 aa, Homo sapiens
  CDR3 for beta chain variable domain of TCR clone 26578 (TRBV20-1, TRBJ2-1)
CSASSSGLAGSHNEQFF

SEQ ID NO: 53157 - protein, 13 aa, Homo sapiens
  CDR3 for alpha chain variable domain of TCR clone 26579 (TRAV12-1, TRAJ40)
CVVPTSGTYKYIF

SEQ ID NO: 53158 - protein, 18 aa, Homo sapiens
  CDR3 for beta chain variable domain of TCR clone 26579 (TRBV7-6, TRBJ2-1)
CASSPRTSGMSYYNEQFF

SEQ ID NO: 53159 - protein, 13 aa, Homo sapiens
  CDR3 for alpha chain variable domain of TCR clone 26580 (TRAV8-4, TRAJ53)
CAVWSGSNYKLTF

SEQ ID NO: 53160 - protein, 14 aa, Homo sapiens
  CDR3 for beta chain variable domain of TCR clone 26580 (TRBV25-1, TRBJ1-4)
CASSGGGQPEKLFF

SEQ ID NO: 53161 - protein, 12 aa, Homo sapiens
  CDR3 for alpha chain variable domain of TCR clone 26581 (TRAV21, TRAJ33)
CSKMDSNYQLIW

SEQ ID NO: 53162 - protein, 14 aa, Homo sapiens
  CDR3 for beta chain variable domain of TCR clone 26581 (TRBV2, TRBJ2-7)
CASSLTSGGYEQYF

SEQ ID NO: 53163 - protein, 11 aa, Homo sapiens
  CDR3 for alpha chain variable domain of TCR clone 26582 (TRAV21, TRAJ34)
CAHYNTDKLIF

SEQ ID NO: 53164 - protein, 16 aa, Homo sapiens
  CDR3 for beta chain variable domain of TCR clone 26582 (TRBV7-9, TRBJ1-2)
CASSLGFSSGEDGYTF

SEQ ID NO: 53165 - protein, 15 aa, Homo sapiens
  CDR3 for alpha chain variable domain of TCR clone 26583 (TRAV8-3, TRAJ23)
CAVGDRYNRGGKLIF

SEQ ID NO: 53166 - protein, 22 aa, Homo sapiens
  CDR3 for beta chain variable domain of TCR clone 26583 (TRBV29-1, TRBJ2-5)
TVSNMSPEDSSIYLCSAGTQYF

SEQ ID NO: 53167 - protein, 11 aa, Homo sapiens
  CDR3 for alpha chain variable domain of TCR clone 26584 (TRAV12-3, TRAJ43)
CAMSASNDMRF

SEQ ID NO: 53168 - protein, 18 aa, Homo sapiens
  CDR3 for beta chain variable domain of TCR clone 26584 (TRBV20-1, TRBJ2-3)
CSASGLAGGPGTTDTQYF

SEQ ID NO: 53169 - protein, 14 aa, Homo sapiens
  CDR3 for alpha chain variable domain of TCR clone 26585 (TRAV8-4, TRAJ13)
WAVTLSGGYQKVTF

SEQ ID NO: 53170 - protein, 14 aa, Homo sapiens
  CDR3 for beta chain variable domain of TCR clone 26585 (TRBV7-2, TRBJ1-2)
CASSQTGSTYGYTF

SEQ ID NO: 53171 - protein, 16 aa, Homo sapiens
  CDR3 for alpha chain variable domain of TCR clone 26586 (TRAV16, TRAJ52)
CALSAAGGTSYGKLTF

SEQ ID NO: 53172 - protein, 16 aa, Homo sapiens
  CDR3 for beta chain variable domain of TCR clone 26586 (TRBV11-2, TRBJ2-1)
CQQLIPPGVEYNEQFF

SEQ ID NO: 53173 - protein, 14 aa, Homo sapiens
  CDR3 for alpha chain variable domain of TCR clone 26587 (TRAV26-1, TRAJ45)
CIVRVVGGADGLTF

SEQ ID NO: 53174 - protein, 16 aa, Homo sapiens
  CDR3 for beta chain variable domain of TCR clone 26587 (TRBV7-9, TRBJ1-1)
CASSLTQVRSNTEAFL

SEQ ID NO: 53175 - protein, 10 aa, Homo sapiens
  CDR3 for alpha chain variable domain of TCR clone 26588 (TRAV17, TRAJ52)
SATSYGKLTF

SEQ ID NO: 53176 - protein, 13 aa, Homo sapiens
  CDR3 for beta chain variable domain of TCR clone 26588 (TRBV29-1, TRBJ2-5)
CSVGGTGAETQYF

SEQ ID NO: 53177 - protein, 12 aa, Homo sapiens
  CDR3 for alpha chain variable domain of TCR clone 26589 (TRAV2, TRAJ31)
CAVEDNNARLMF

SEQ ID NO: 53178 - protein, 16 aa, Homo sapiens
  CDR3 for beta chain variable domain of TCR clone 26589 (TRBV10-3, TRBJ2-1)
CAISGVGDGGGGEQLF

SEQ ID NO: 53179 - protein, 14 aa, Homo sapiens
  CDR3 for alpha chain variable domain of TCR clone 26590 (TRAV17, TRAJ34)
CATDSLGGTDKLIF

SEQ ID NO: 53180 - protein, 13 aa, Homo sapiens
  CDR3 for beta chain variable domain of TCR clone 26590 (TRBV11-2, TRBJ2-7)
CASSGTRPYEQYF

SEQ ID NO: 53181 - protein, 13 aa, Homo sapiens
  CDR3 for alpha chain variable domain of TCR clone 26591 (TRAV2, TRAJ40)
CAVVTSGTYKYIF

SEQ ID NO: 53182 - protein, 15 aa, Homo sapiens
  CDR3 for beta chain variable domain of TCR clone 26591 (TRBV6-5, TRBJ2-1)
CASSYDAGAGNEQFF

SEQ ID NO: 53183 - protein, 14 aa, Homo sapiens
  CDR3 for alpha chain variable domain of TCR clone 26592 (TRAV2, TRAJ37)
CAVDFTSNTGKLIF

SEQ ID NO: 53184 - protein, 15 aa, Homo sapiens
  CDR3 for beta chain variable domain of TCR clone 26592 (TRBV20-1, TRBJ1-1)
CSASRRVTGNTEAFF

SEQ ID NO: 53185 - protein, 17 aa, Homo sapiens
  CDR3 for alpha chain variable domain of TCR clone 26593 (TRAV13-1, TRAJ31)
CAPRDRLTFGDGTQLVV

SEQ ID NO: 53186 - protein, 12 aa, Homo sapiens
  CDR3 for beta chain variable domain of TCR clone 26593 (TRBV7-9, TRBJ2-7)
CASSLEGYEQYF

SEQ ID NO: 53187 - protein, 15 aa, Homo sapiens
  CDR3 for alpha chain variable domain of TCR clone 26594 (TRAV26-1, TRAJ44)
CIVRANTGTASQLTF

SEQ ID NO: 53188 - protein, 16 aa, Homo sapiens
  CDR3 for beta chain variable domain of TCR clone 26594 (TRBV7-7, TRBJ2-1)
CASSLASGTSYNEQFF

SEQ ID NO: 53189 - protein, 17 aa, Homo sapiens
  CDR3 for alpha chain variable domain of TCR clone 26595 (TRAV3, TRAJ6)
CAVRDGPRAGGSYIPTF

SEQ ID NO: 53190 - protein, 13 aa, Homo sapiens
  CDR3 for beta chain variable domain of TCR clone 26595 (TRBV7-2, TRBJ2-7)
CASSSPSGSEQYF

SEQ ID NO: 53191 - protein, 13 aa, Homo sapiens
  CDR3 for alpha chain variable domain of TCR clone 26596 (TRAV23/DV6, TRAJ22)
CVPYSGSARQLTF

SEQ ID NO: 53192 - protein, 13 aa, Homo sapiens
  CDR3 for beta chain variable domain of TCR clone 26596 (TRBV6-1, TRBJ1-1)
CASSRQGNTEAFF

SEQ ID NO: 53193 - protein, 14 aa, Homo sapiens
  CDR3 for alpha chain variable domain of TCR clone 26597 (TRAV12-2, TRAJ5)
CAVNRSTGRSALTF

SEQ ID NO: 53194 - protein, 12 aa, Homo sapiens
  CDR3 for beta chain variable domain of TCR clone 26597 (TRBV19, TRBJ1-5)
CASSIAQQPQHF

SEQ ID NO: 53195 - protein, 18 aa, Homo sapiens
  CDR3 for alpha chain variable domain of TCR clone 26598 (TRAV17, TRAJ28)
CATDPPRGSGAGRYQLTF

SEQ ID NO: 53196 - protein, 14 aa, Homo sapiens
  CDR3 for beta chain variable domain of TCR clone 26598 (TRBV13, TRBJ2-5)
CASSLDYPQETQYF

SEQ ID NO: 53197 - protein, 14 aa, Homo sapiens
  CDR3 for alpha chain variable domain of TCR clone 26599 (TRAV38-1, TRAJ40)
CALRSTSGTYKYIF

SEQ ID NO: 53198 - protein, 14 aa, Homo sapiens
  CDR3 for beta chain variable domain of TCR clone 26599 (TRBV25-1, TRBJ1-1)
CASTHLGGNTEAFF

SEQ ID NO: 53199 - protein, 14 aa, Homo sapiens
  CDR3 for alpha chain variable domain of TCR clone 26600 (TRAV30, TRAJ26)
CGTEIVSYGQNFVF

SEQ ID NO: 53200 - protein, 13 aa, Homo sapiens
  CDR3 for beta chain variable domain of TCR clone 26600 (TRBV19, TRBJ1-3)
RASRLSLGNTIYF

SEQ ID NO: 53201 - protein, 20 aa, Homo sapiens
  CDR3 for alpha chain variable domain of TCR clone 26601 (TRAV26-1, TRAJ42)
CCVLLHRQTYYGGSHGNLIF

SEQ ID NO: 53202 - protein, 16 aa, Homo sapiens
  CDR3 for beta chain variable domain of TCR clone 26601 (TRBV7-3, TRBJ2-2)
CASSLKRGTLSGELFF

SEQ ID NO: 53203 - protein, 12 aa, Homo sapiens
  CDR3 for alpha chain variable domain of TCR clone 26602 (TRAV1-1, TRAJ39)
CAVPVVGNMLTF

SEQ ID NO: 53204 - protein, 15 aa, Homo sapiens
  CDR3 for beta chain variable domain of TCR clone 26602 (TRBV7-3, TRBJ2-2)
CASSETGQGTGEPFF

SEQ ID NO: 53205 - protein, 11 aa, Homo sapiens
  CDR3 for alpha chain variable domain of TCR clone 26603 (TRAV16, TRAJ42)
CALASQGNLIF

SEQ ID NO: 53206 - protein, 17 aa, Homo sapiens
  CDR3 for beta chain variable domain of TCR clone 26603 (TRBV13, TRBJ2-3)
CASSLSRVAGGRNTQYF

SEQ ID NO: 53207 - protein, 11 aa, Homo sapiens
  CDR3 for alpha chain variable domain of TCR clone 26604 (TRAV2, TRAJ21)
CAVFNFNKFYS

SEQ ID NO: 53208 - protein, 14 aa, Homo sapiens
  CDR3 for beta chain variable domain of TCR clone 26604 (TRBV15, TRBJ2-3)
CATRSGTSTDTQYF

SEQ ID NO: 53209 - protein, 13 aa, Homo sapiens
  CDR3 for alpha chain variable domain of TCR clone 26605 (TRAV36/DV7, TRAJ7)
CAGTRYGNNRLAF

SEQ ID NO: 53210 - protein, 14 aa, Homo sapiens
  CDR3 for beta chain variable domain of TCR clone 26605 (TRBV19, TRBJ2-1)
CASPTFVLSGGQFF

SEQ ID NO: 53211 - protein, 12 aa, Homo sapiens
  CDR3 for alpha chain variable domain of TCR clone 26606 (TRAV13-1, TRAJ49)
CAASPMGNQFYF

SEQ ID NO: 53212 - protein, 13 aa, Homo sapiens
  CDR3 for beta chain variable domain of TCR clone 26606 (TRBV20-1, TRBJ2-2)
CSASAAVTGELFF

SEQ ID NO: 53213 - protein, 12 aa, Homo sapiens
  CDR3 for alpha chain variable domain of TCR clone 26607 (TRAV36/DV7, TRAJ54)
CAVVRGAQRLVF

SEQ ID NO: 53214 - protein, 14 aa, Homo sapiens
  CDR3 for beta chain variable domain of TCR clone 26607 (TRBV7-3, TRBJ1-1)
CASSLKGGNTEAFF

SEQ ID NO: 53215 - protein, 14 aa, Homo sapiens
  CDR3 for alpha chain variable domain of TCR clone 26608 (TRAV17, TRAJ22)
CATSPSGSARRLTF

SEQ ID NO: 53216 - protein, 15 aa, Homo sapiens
  CDR3 for beta chain variable domain of TCR clone 26608 (TRBV4-1, TRBJ2-5)
CASSQWDLYQETQYF

SEQ ID NO: 53217 - protein, 18 aa, Homo sapiens
  CDR3 for alpha chain variable domain of TCR clone 26609 (TRAV29/DV5, TRAJ52)
CAAGFSGAGGTSYGKLTF

SEQ ID NO: 53218 - protein, 16 aa, Homo sapiens
  CDR3 for beta chain variable domain of TCR clone 26609 (TRBV7-3, TRBJ2-2)
CASSLKRGTLSGELFF

SEQ ID NO: 53219 - protein, 12 aa, Homo sapiens
  CDR3 for alpha chain variable domain of TCR clone 26610 (TRAV16, TRAJ10)
CSRTGGGNKLTF

SEQ ID NO: 53220 - protein, 13 aa, Homo sapiens
  CDR3 for beta chain variable domain of TCR clone 26610 (TRBV5-4, TRBJ1-1)
CASSFQVNTEAFF

SEQ ID NO: 53221 - protein, 14 aa, Homo sapiens
  CDR3 for alpha chain variable domain of TCR clone 26611 (TRAV21, TRAJ35)
CAVMPIGFGNVLHC

SEQ ID NO: 53222 - protein, 12 aa, Homo sapiens
  CDR3 for beta chain variable domain of TCR clone 26611 (TRBV7-9, TRBJ2-7)
CASCIKREEQYF

SEQ ID NO: 53223 - protein, 14 aa, Homo sapiens
  CDR3 for alpha chain variable domain of TCR clone 26612 (TRAV12-3, TRAJ9)
CAMSPNTGSFKTIF

SEQ ID NO: 53224 - protein, 12 aa, Homo sapiens
  CDR3 for beta chain variable domain of TCR clone 26612 (TRBV19, TRBJ1-5)
CASSIAQQPQHF

SEQ ID NO: 53225 - protein, 17 aa, Homo sapiens
  CDR3 for alpha chain variable domain of TCR clone 26613 (TRAV13-1, TRAJ31)
CAPRDRLMFGDGTQLVV

SEQ ID NO: 53226 - protein, 12 aa, Homo sapiens
  CDR3 for beta chain variable domain of TCR clone 26613 (TRBV7-9, TRBJ2-7)
CASSLEGYEQHF

SEQ ID NO: 53227 - protein, 13 aa, Homo sapiens
  CDR3 for alpha chain variable domain of TCR clone 26614 (TRAV9-2, TRAJ53)
CALSGGSNYKLTF

SEQ ID NO: 53228 - protein, 15 aa, Homo sapiens
  CDR3 for beta chain variable domain of TCR clone 26614 (TRBV6-3, TRBJ2-7)
CASSSPGTVFYEQYF

SEQ ID NO: 53229 - protein, 13 aa, Homo sapiens
  CDR3 for alpha chain variable domain of TCR clone 26615 (TRAV3, TRAJ43)
CAVRDTRGGEMRF

SEQ ID NO: 53230 - protein, 15 aa, Homo sapiens
  CDR3 for beta chain variable domain of TCR clone 26615 (TRBV6-5, TRBJ1-5)
CASSYSRRSNQPQHF

SEQ ID NO: 53231 - protein, 12 aa, Homo sapiens
  CDR3 for alpha chain variable domain of TCR clone 26616 (TRAV21, TRAJ11)
CAATSGYSSLTF

SEQ ID NO: 53232 - protein, 14 aa, Homo sapiens
  CDR3 for beta chain variable domain of TCR clone 26616 (TRBV20-1, TRBJ2-7)
CSAPELAGVGEQYF

SEQ ID NO: 53233 - protein, 14 aa, Homo sapiens
  CDR3 for alpha chain variable domain of TCR clone 26617 (TRAV26-1, TRAJ38)
CIADNAGNNRKLIW

SEQ ID NO: 53234 - protein, 13 aa, Homo sapiens
  CDR3 for beta chain variable domain of TCR clone 26617 (TRBV20-1, TRBJ1-1)
CSARGGGYTEAFF

SEQ ID NO: 53235 - protein, 14 aa, Homo sapiens
  CDR3 for alpha chain variable domain of TCR clone 26618 (TRAV12-2, TRAJ17)
CAVLFKAAGNKLTF

SEQ ID NO: 53236 - protein, 18 aa, Homo sapiens
  CDR3 for beta chain variable domain of TCR clone 26618 (TRBV20-1, TRBJ2-3)
CSASGLAGGPGTTDTQYF

SEQ ID NO: 53237 - protein, 14 aa, Homo sapiens
  CDR3 for alpha chain variable domain of TCR clone 26619 (TRAV38-1, TRAJ45)
CASHSGGGAEGLTF

SEQ ID NO: 53238 - protein, 13 aa, Homo sapiens
  CDR3 for beta chain variable domain of TCR clone 26619 (TRBV10-3, TRBJ1-2)
CAISERDSYGYTF

SEQ ID NO: 53239 - protein, 12 aa, Homo sapiens
  CDR3 for alpha chain variable domain of TCR clone 26620 (TRAV12-3, TRAJ17)
CAMTLTGNKLTF

SEQ ID NO: 53240 - protein, 12 aa, Homo sapiens
  CDR3 for beta chain variable domain of TCR clone 26620 (TRBV5-1, TRBJ1-2)
CASSQDTYGYTF

SEQ ID NO: 53241 - protein, 12 aa, Homo sapiens
  CDR3 for alpha chain variable domain of TCR clone 26621 (TRAV3, TRAJ20)
CAARDPDYKLSF

SEQ ID NO: 53242 - protein, 13 aa, Homo sapiens
  CDR3 for beta chain variable domain of TCR clone 26621 (TRBV9, TRBJ2-1)
CASSVGQGGEQFF

SEQ ID NO: 53243 - protein, 15 aa, Homo sapiens
  CDR3 for alpha chain variable domain of TCR clone 26622 (TRAV34, TRAJ38)
CGADFTPGNNRKLSW

SEQ ID NO: 53244 - protein, 16 aa, Homo sapiens
  CDR3 for beta chain variable domain of TCR clone 26622 (TRBV12-5, TRBJ2-5)
CASGPRTSGNQETQYF

SEQ ID NO: 53245 - protein, 17 aa, Homo sapiens
  CDR3 for alpha chain variable domain of TCR clone 26623 (TRAV3, TRAJ42)
CAVRDRDYGGSQGNLIF

SEQ ID NO: 53246 - protein, 14 aa, Homo sapiens
  CDR3 for beta chain variable domain of TCR clone 26623 (TRBV19, TRBJ2-1)
CASPTFVLSGEQFF

SEQ ID NO: 53247 - protein, 15 aa, Homo sapiens
  CDR3 for alpha chain variable domain of TCR clone 26624 (TRAV12-1, TRAJ44)
CVVDTPQGTAIRLTF

SEQ ID NO: 53248 - protein, 13 aa, Homo sapiens
  CDR3 for beta chain variable domain of TCR clone 26624 (TRBV27, TRBJ2-1)
CASSSGSYNEQFF

SEQ ID NO: 53249 - protein, 15 aa, Homo sapiens
  CDR3 for alpha chain variable domain of TCR clone 26625 (TRAV8-3, TRAJ15)
CAVGAPNQAGTALFF

SEQ ID NO: 53250 - protein, 14 aa, Homo sapiens
  CDR3 for beta chain variable domain of TCR clone 26625 (TRBV20-1, TRBJ2-1)
CSPNDEASYNEQFF

SEQ ID NO: 53251 - protein, 12 aa, Homo sapiens
  CDR3 for alpha chain variable domain of TCR clone 26626 (TRAV17, TRAJ57)
CATDGGSEQLVF

SEQ ID NO: 53252 - protein, 13 aa, Homo sapiens
  CDR3 for beta chain variable domain of TCR clone 26626 (TRBV7-9, TRBJ2-7)
CASSFAGAYEQYF

SEQ ID NO: 53253 - protein, 13 aa, Homo sapiens
  CDR3 for alpha chain variable domain of TCR clone 26627 (TRAV8-3, TRAJ48)
CAVVPFGNEKLTF

SEQ ID NO: 53254 - protein, 15 aa, Homo sapiens
  CDR3 for beta chain variable domain of TCR clone 26627 (TRBV11-2, TRBJ2-1)
CASSPPSTRYNEQFF

SEQ ID NO: 53255 - protein, 12 aa, Homo sapiens
  CDR3 for alpha chain variable domain of TCR clone 26628 (TRAV12-3, TRAJ17)
CATTLTGNKLTF

SEQ ID NO: 53256 - protein, 15 aa, Homo sapiens
  CDR3 for beta chain variable domain of TCR clone 26628 (TRBV6-3, TRBJ2-7)
CASSSPGTVFYEQYF

SEQ ID NO: 53257 - protein, 15 aa, Homo sapiens
  CDR3 for alpha chain variable domain of TCR clone 26629 (TRAV21, TRAJ53)
CATLNSGGSNYKLTF

SEQ ID NO: 53258 - protein, 17 aa, Homo sapiens
  CDR3 for beta chain variable domain of TCR clone 26629 (TRBV20-1, TRBJ2-2)
CSASGSGQGRLTGELFF

SEQ ID NO: 53259 - protein, 15 aa, Homo sapiens
  CDR3 for alpha chain variable domain of TCR clone 26630 (TRAV38-1, TRAJ57)
CAFMDSQGGSEKLVL

SEQ ID NO: 53260 - protein, 16 aa, Homo sapiens
  CDR3 for beta chain variable domain of TCR clone 26630 (TRBV10-3, TRBJ2-1)
CAIRGGGRGDYNEQFF

SEQ ID NO: 53261 - protein, 11 aa, Homo sapiens
  CDR3 for alpha chain variable domain of TCR clone 26631 (TRAV12-1, TRAJ30)
CVVNGQDKIIF

SEQ ID NO: 53262 - protein, 11 aa, Homo sapiens
  CDR3 for beta chain variable domain of TCR clone 26631 (TRBV27, TRBJ2-2)
CQQTLHRGAVF

SEQ ID NO: 53263 - protein, 12 aa, Homo sapiens
  CDR3 for alpha chain variable domain of TCR clone 26632 (TRAV17, TRAJ4)
CATDGGYNKLIF

SEQ ID NO: 53264 - protein, 13 aa, Homo sapiens
  CDR3 for beta chain variable domain of TCR clone 26632 (TRBV29-1, TRBJ2-2)
CNTTGVNTGELFF

SEQ ID NO: 53265 - protein, 15 aa, Homo sapiens
  CDR3 for alpha chain variable domain of TCR clone 26633 (TRAV2, TRAJ22)
CAVPSRGGSARQPTF

SEQ ID NO: 53266 - protein, 11 aa, Homo sapiens
  CDR3 for beta chain variable domain of TCR clone 26633 (TRBV27, TRBJ2-3)
CASSLGDTQYF

SEQ ID NO: 53267 - protein, 14 aa, Homo sapiens
  CDR3 for alpha chain variable domain of TCR clone 26634 (TRAV12-1, TRAJ37)
CVVTGSSNTGKLIF

SEQ ID NO: 53268 - protein, 22 aa, Homo sapiens
  CDR3 for beta chain variable domain of TCR clone 26634 (TRBV23-1, TRBJ2-5)
CASSPWARPPHSRDPVLRARHA

SEQ ID NO: 53269 - protein, 14 aa, Homo sapiens
  CDR3 for alpha chain variable domain of TCR clone 26635 (TRAV12-2, TRAJ45)
CALPERGGADGLAF

SEQ ID NO: 53270 - protein, 14 aa, Homo sapiens
  CDR3 for beta chain variable domain of TCR clone 26635 (TRBV18, TRBJ1-5)
CASSPGNSNQPQHF

SEQ ID NO: 53271 - protein, 11 aa, Homo sapiens
  CDR3 for alpha chain variable domain of TCR clone 26636 (TRAV3, TRAJ21)
CAVGNFNKFYF

SEQ ID NO: 53272 - protein, 16 aa, Homo sapiens
  CDR3 for beta chain variable domain of TCR clone 26636 (TRBV19, TRBJ2-1)
CPSSKAGPSSYNEQFF

SEQ ID NO: 53273 - protein, 11 aa, Homo sapiens
  CDR3 for alpha chain variable domain of TCR clone 26637 (TRAV3, TRAJ21)
CAVGNFNKFYC

SEQ ID NO: 53274 - protein, 16 aa, Homo sapiens
  CDR3 for beta chain variable domain of TCR clone 26637 (TRBV19, TRBJ2-1)
CASSKAGPSSYNEQFF

SEQ ID NO: 53275 - protein, 14 aa, Homo sapiens
  CDR3 for alpha chain variable domain of TCR clone 26638 (TRAV12-3, TRAJ9)
CAMSPNTGGFKTIF

SEQ ID NO: 53276 - protein, 14 aa, Homo sapiens
  CDR3 for beta chain variable domain of TCR clone 26638 (TRBV7-9, TRBJ2-1)
CASSPRDSLYEQFF

SEQ ID NO: 53277 - protein, 15 aa, Homo sapiens
  CDR3 for alpha chain variable domain of TCR clone 26639 (TRAV26-1, TRAJ22)
CIVRVSFWFCKATDL

SEQ ID NO: 53278 - protein, 13 aa, Homo sapiens
  CDR3 for beta chain variable domain of TCR clone 26639 (TRBV7-9, TRBJ1-2)
CASGLKQNYGYTF

SEQ ID NO: 53279 - protein, 13 aa, Homo sapiens
  CDR3 for alpha chain variable domain of TCR clone 26640 (TRAV2, TRAJ40)
CAVVTSGTYKYIF

SEQ ID NO: 53280 - protein, 15 aa, Homo sapiens
  CDR3 for beta chain variable domain of TCR clone 26640 (TRBV11-3, TRBJ2-3)
CASLKDWREGDTQYF

SEQ ID NO: 53281 - protein, 16 aa, Homo sapiens
  CDR3 for alpha chain variable domain of TCR clone 26641 (TRAV1-2, TRAJ10)
CAVRGVLTGGGNKLTF

SEQ ID NO: 53282 - protein, 14 aa, Homo sapiens
  CDR3 for beta chain variable domain of TCR clone 26641 (TRBV7-2, TRBJ2-7)
CASSPKTSFYEQYF

SEQ ID NO: 53283 - protein, 14 aa, Homo sapiens
  CDR3 for alpha chain variable domain of TCR clone 26642 (TRAV12-2, TRAJ13)
CAVKKTGGYQKVTF

SEQ ID NO: 53284 - protein, 14 aa, Homo sapiens
  CDR3 for beta chain variable domain of TCR clone 26642 (TRBV11-2, TRBJ2-3)
CASSRLARTDTQYF

SEQ ID NO: 53285 - protein, 11 aa, Homo sapiens
  CDR3 for alpha chain variable domain of TCR clone 26643 (TRAV21, TRAJ34)
CAHYNTDKLIF

SEQ ID NO: 53286 - protein, 13 aa, Homo sapiens
  CDR3 for beta chain variable domain of TCR clone 26643 (TRBV7-6, TRBJ1-2)
CASSLVADYDYTF

SEQ ID NO: 53287 - protein, 15 aa, Homo sapiens
  CDR3 for alpha chain variable domain of TCR clone 26644 (TRAV17, TRAJ57)
CATGPSQGGSEKLVF

SEQ ID NO: 53288 - protein, 17 aa, Homo sapiens
  CDR3 for beta chain variable domain of TCR clone 26644 (TRBV20-1, TRBJ2-1)
CSASSSGLAGSYNEQSF

SEQ ID NO: 53289 - protein, 11 aa, Homo sapiens
  CDR3 for alpha chain variable domain of TCR clone 26645 (TRAV2, TRAJ33)
CDVESNYQLIW

SEQ ID NO: 53290 - protein, 15 aa, Homo sapiens
  CDR3 for beta chain variable domain of TCR clone 26645 (TRBV19, TRBJ1-1)
CASTSGQIQNTEAFF

SEQ ID NO: 53291 - protein, 15 aa, Homo sapiens
  CDR3 for alpha chain variable domain of TCR clone 26646 (TRAV38-2/DV8, TRAJ45)
CAYWDSGGGADGLTF

SEQ ID NO: 53292 - protein, 13 aa, Homo sapiens
  CDR3 for beta chain variable domain of TCR clone 26646 (TRBV7-9, TRBJ1-2)
CASSLKQNYGYTF

SEQ ID NO: 53293 - protein, 14 aa, Homo sapiens
  CDR3 for alpha chain variable domain of TCR clone 26647 (TRAV26-1, TRAJ39)
CIVRGSRAGHMLTF

SEQ ID NO: 53294 - protein, 15 aa, Homo sapiens
  CDR3 for beta chain variable domain of TCR clone 26647 (TRBV7-9, TRBJ1-5)
CASSQGHQPNQPQHF

SEQ ID NO: 53295 - protein, 12 aa, Homo sapiens
  CDR3 for alpha chain variable domain of TCR clone 26648 (TRAV12-3, TRAJ17)
CAMTLTGNKLTF

SEQ ID NO: 53296 - protein, 16 aa, Homo sapiens
  CDR3 for beta chain variable domain of TCR clone 26648 (TRBV24-1, TRBJ2-3)
CATSDPGTGATDTQYF

SEQ ID NO: 53297 - protein, 11 aa, Homo sapiens
  CDR3 for alpha chain variable domain of TCR clone 26649 (TRAV2, TRAJ33)
CAVESNYQLIR

SEQ ID NO: 53298 - protein, 15 aa, Homo sapiens
  CDR3 for beta chain variable domain of TCR clone 26649 (TRBV19, TRBJ1-1)
CASTSGQIQNTEAFF

SEQ ID NO: 53299 - protein, 16 aa, Homo sapiens
  CDR3 for alpha chain variable domain of TCR clone 26650 (TRAV16, TRAJ52)
CALRAAGGTSYGKLTF

SEQ ID NO: 53300 - protein, 12 aa, Homo sapiens
  CDR3 for beta chain variable domain of TCR clone 26650 (TRBV12-4, TRBJ1-3)
CASSFSGNTIYF

SEQ ID NO: 53301 - protein, 18 aa, Homo sapiens
  CDR3 for alpha chain variable domain of TCR clone 26651 (TRAV29/DV5, TRAJ52)
CAAGFRGAGSTSYGKLTF

SEQ ID NO: 53302 - protein, 16 aa, Homo sapiens
  CDR3 for beta chain variable domain of TCR clone 26651 (TRBV7-3, TRBJ2-2)
CASSLKRGTLSGELFF

SEQ ID NO: 53303 - protein, 17 aa, Homo sapiens
  CDR3 for alpha chain variable domain of TCR clone 26652 (TRAV4, TRAJ18)
CLVGERSVGPTLGRLYF

SEQ ID NO: 53304 - protein, 18 aa, Homo sapiens
  CDR3 for beta chain variable domain of TCR clone 26652 (TRBV11-2, TRBJ2-3)
CASSLGGASRGAPNTQYF

SEQ ID NO: 53305 - protein, 12 aa, Homo sapiens
  CDR3 for alpha chain variable domain of TCR clone 26653 (TRAV13-1, TRAJ21)
CAAKEGFNKFYF

SEQ ID NO: 53306 - protein, 15 aa, Homo sapiens
  CDR3 for beta chain variable domain of TCR clone 26653 (TRBV20-1, TRBJ1-1)
CSASRGVTGNTEAFF

SEQ ID NO: 53307 - protein, 19 aa, Homo sapiens
  CDR3 for alpha chain variable domain of TCR clone 26654 (TRAV2, TRAJ20)
ILQVREADAAVYRDCKLSF

SEQ ID NO: 53308 - protein, 12 aa, Homo sapiens
  CDR3 for beta chain variable domain of TCR clone 26654 (TRBV11-2, TRBJ2-2)
CASSLGGGELLF

SEQ ID NO: 53309 - protein, 15 aa, Homo sapiens
  CDR3 for alpha chain variable domain of TCR clone 26655 (TRAV8-3, TRAJ27)
CAVAPLRPMQANQPL

SEQ ID NO: 53310 - protein, 15 aa, Homo sapiens
  CDR3 for beta chain variable domain of TCR clone 26655 (TRBV7-2, TRBJ2-1)
CASSSGLAGGNEQFF

SEQ ID NO: 53311 - protein, 13 aa, Homo sapiens
  CDR3 for alpha chain variable domain of TCR clone 26656 (TRAV2, TRAJ40)
CAVVTSGTYKYIF

SEQ ID NO: 53312 - protein, 15 aa, Homo sapiens
  CDR3 for beta chain variable domain of TCR clone 26656 (TRBV11-3, TRBJ2-3)
YASLKDGREGDTQYF

SEQ ID NO: 53313 - protein, 10 aa, Homo sapiens
  CDR3 for alpha chain variable domain of TCR clone 26657 (TRAV23/DV6, TRAJ57)
CAASSTLSQG

SEQ ID NO: 53314 - protein, 13 aa, Homo sapiens
  CDR3 for beta chain variable domain of TCR clone 26657 (TRBV7-3, TRBJ1-1)
CASSQDWGAEAFF

SEQ ID NO: 53315 - protein, 16 aa, Homo sapiens
  CDR3 for alpha chain variable domain of TCR clone 26658 (TRAV8-4, TRAJ10)
CAVSDILTGGGNKLTF

SEQ ID NO: 53316 - protein, 15 aa, Homo sapiens
  CDR3 for beta chain variable domain of TCR clone 26658 (TRBV7-2, TRBJ1-6)
CASSLRYAYNSPLHF

SEQ ID NO: 53317 - protein, 12 aa, Homo sapiens
  CDR3 for alpha chain variable domain of TCR clone 26659 (TRAV12-3, TRAJ17)
CAMTLTGSKLTF

SEQ ID NO: 53318 - protein, 15 aa, Homo sapiens
  CDR3 for beta chain variable domain of TCR clone 26659 (TRBV6-6, TRBJ2-5)
CASSPGGGLEETQYF

SEQ ID NO: 53319 - protein, 13 aa, Homo sapiens
  CDR3 for alpha chain variable domain of TCR clone 26660 (TRAV2, TRAJ40)
CAVVTSGTYKYIF

SEQ ID NO: 53320 - protein, 14 aa, Homo sapiens
  CDR3 for beta chain variable domain of TCR clone 26660 (TRBV19, TRBJ2-1)
CASPAFVLGGEQFF

SEQ ID NO: 53321 - protein, 11 aa, Homo sapiens
  CDR3 for alpha chain variable domain of TCR clone 26661 (TRAV2, TRAJ13)
CASVGYQKVTF

SEQ ID NO: 53322 - protein, 16 aa, Homo sapiens
  CDR3 for beta chain variable domain of TCR clone 26661 (TRBV19, TRBJ2-1)
CASSKAGPSSYNEQFF

SEQ ID NO: 53323 - protein, 16 aa, Homo sapiens
  CDR3 for alpha chain variable domain of TCR clone 26662 (TRAV1-2, TRAJ10)
CAVRGVLTGGGNKLTF

SEQ ID NO: 53324 - protein, 16 aa, Homo sapiens
  CDR3 for beta chain variable domain of TCR clone 26662 (TRBV2, TRBJ2-3)
CASSTSVEGVTDTQYF

SEQ ID NO: 53325 - protein, 14 aa, Homo sapiens
  CDR3 for alpha chain variable domain of TCR clone 26663 (TRAV12-2, TRAJ32)
CAHPESGAANKLIF

SEQ ID NO: 53326 - protein, 14 aa, Homo sapiens
  CDR3 for beta chain variable domain of TCR clone 26663 (TRBV4-2, TRBJ2-3)
CASRETRAPGMQYF

SEQ ID NO: 53327 - protein, 12 aa, Homo sapiens
  CDR3 for alpha chain variable domain of TCR clone 26664 (TRAV1-2, TRAJ29)
CAVPSGNTTLVF

SEQ ID NO: 53328 - protein, 12 aa, Homo sapiens
  CDR3 for beta chain variable domain of TCR clone 26664 (TRBV7-9, TRBJ2-7)
CASSFGSYEQYF

SEQ ID NO: 53329 - protein, 18 aa, Homo sapiens
  CDR3 for alpha chain variable domain of TCR clone 26665 (TRAV13-1, TRAJ52)
CAAKSPNAGGTSYGKLTF

SEQ ID NO: 53330 - protein, 14 aa, Homo sapiens
  CDR3 for beta chain variable domain of TCR clone 26665 (TRBV7-3, TRBJ2-1)
CASSLAGGTNEQFF

SEQ ID NO: 53331 - protein, 12 aa, Homo sapiens
  CDR3 for alpha chain variable domain of TCR clone 26666 (TRAV36/DV7, TRAJ54)
CAAVRGAQKLVF

SEQ ID NO: 53332 - protein, 18 aa, Homo sapiens
  CDR3 for beta chain variable domain of TCR clone 26666 (TRBV20-1, TRBJ2-3)
CSASGLAGGPGTTDTQYF

SEQ ID NO: 53333 - protein, 16 aa, Homo sapiens
  CDR3 for alpha chain variable domain of TCR clone 26667 (TRAV20, TRAJ22)
CAVQASSSGSARQLTF

SEQ ID NO: 53334 - protein, 13 aa, Homo sapiens
  CDR3 for beta chain variable domain of TCR clone 26667 (TRBV12-4, TRBJ1-2)
CASSLRQGKGYTF

SEQ ID NO: 53335 - protein, 12 aa, Homo sapiens
  CDR3 for alpha chain variable domain of TCR clone 26668 (TRAV2, TRAJ9)
CAVGAGDFKTIF

SEQ ID NO: 53336 - protein, 16 aa, Homo sapiens
  CDR3 for beta chain variable domain of TCR clone 26668 (TRBV13, TRBJ2-2)
CASSPRTGEHTGELFF

SEQ ID NO: 53337 - protein, 14 aa, Homo sapiens
  CDR3 for alpha chain variable domain of TCR clone 26669 (TRAV8-3, TRAJ9)
CAVVYNTGGFKTTF

SEQ ID NO: 53338 - protein, 16 aa, Homo sapiens
  CDR3 for beta chain variable domain of TCR clone 26669 (TRBV7-3, TRBJ2-2)
CASSLKRGTLSGELFF

SEQ ID NO: 53339 - protein, 14 aa, Homo sapiens
  CDR3 for alpha chain variable domain of TCR clone 26670 (TRAV12-3, TRAJ58)
CAMSTGTSGSRLTF

SEQ ID NO: 53340 - protein, 13 aa, Homo sapiens
  CDR3 for beta chain variable domain of TCR clone 26670 (TRBV27, TRBJ2-3)
CASSWGRTDTQYF

SEQ ID NO: 53341 - protein, 16 aa, Homo sapiens
  CDR3 for alpha chain variable domain of TCR clone 26671 (TRAV30, TRAJ24)
CGTEIVDADSWGKFQF

SEQ ID NO: 53342 - protein, 14 aa, Homo sapiens
  CDR3 for beta chain variable domain of TCR clone 26671 (TRBV12-5, TRBJ2-5)
CASRSRTHQETQYF

SEQ ID NO: 53343 - protein, 13 aa, Homo sapiens
  CDR3 for alpha chain variable domain of TCR clone 26672 (TRAV20, TRAJ37)
CAGCSSNTGKLIF

SEQ ID NO: 53344 - protein, 11 aa, Homo sapiens
  CDR3 for beta chain variable domain of TCR clone 26672 (TRBV12-4, TRBJ2-3)
CASTTTDTQYF

SEQ ID NO: 53345 - protein, 14 aa, Homo sapiens
  CDR3 for alpha chain variable domain of TCR clone 26673 (TRAV21, TRAJ37)
YAVKGSSNTGKLIF

SEQ ID NO: 53346 - protein, 14 aa, Homo sapiens
  CDR3 for beta chain variable domain of TCR clone 26673 (TRBV7-2, TRBJ2-1)
CASSRGGARNEQFF

SEQ ID NO: 53347 - protein, 17 aa, Homo sapiens
  CDR3 for alpha chain variable domain of TCR clone 26674 (TRAV26-1, TRAJ53)
CIVRVDDCGGSNYKLTF

SEQ ID NO: 53348 - protein, 15 aa, Homo sapiens
  CDR3 for beta chain variable domain of TCR clone 26674 (TRBV20-1, TRBJ2-7)
CSARVPAAYFYEQYF

SEQ ID NO: 53349 - protein, 15 aa, Homo sapiens
  CDR3 for alpha chain variable domain of TCR clone 26675 (TRAV12-2, TRAJ43)
CAFDMRFGAGIRLTV

SEQ ID NO: 53350 - protein, 18 aa, Homo sapiens
  CDR3 for beta chain variable domain of TCR clone 26675 (TRBV20-1, TRBJ2-3)
CSASGLAGGPGTTDTQYF

SEQ ID NO: 53351 - protein, 15 aa, Homo sapiens
  CDR3 for alpha chain variable domain of TCR clone 26676 (TRAV23/DV6, TRAJ33)
CAASNSGGGNYQLIL

SEQ ID NO: 53352 - protein, 14 aa, Homo sapiens
  CDR3 for beta chain variable domain of TCR clone 26676 (TRBV7-2, TRBJ2-7)
CASSLYPGRYEQYF

SEQ ID NO: 53353 - protein, 17 aa, Homo sapiens
  CDR3 for alpha chain variable domain of TCR clone 26677 (TRAV3, TRAJ6)
CAVRDGPRAGGSDIPTF

SEQ ID NO: 53354 - protein, 18 aa, Homo sapiens
  CDR3 for beta chain variable domain of TCR clone 26677 (TRBV7-9, TRBJ2-7)
CASSLTTSGSRTWYEQYF

SEQ ID NO: 53355 - protein, 17 aa, Homo sapiens
  CDR3 for alpha chain variable domain of TCR clone 26678 (TRAV27, TRAJ52)
CAGAGGAGGTSYGKLTF

SEQ ID NO: 53356 - protein, 16 aa, Homo sapiens
  CDR3 for beta chain variable domain of TCR clone 26678 (TRBV19, TRBJ2-1)
CASSKAGPSSYNEQFF

SEQ ID NO: 53357 - protein, 14 aa, Homo sapiens
  CDR3 for alpha chain variable domain of TCR clone 26679 (TRAV12-2, TRAJ13)
CAVKKTGGYQKVTF

SEQ ID NO: 53358 - protein, 17 aa, Homo sapiens
  CDR3 for beta chain variable domain of TCR clone 26679 (TRBV4-1, TRBJ2-3)
CASSQGYVSGGTDTQYF

SEQ ID NO: 53359 - protein, 12 aa, Homo sapiens
  CDR3 for alpha chain variable domain of TCR clone 26680 (TRAV12-3, TRAJ17)
CAMTLTGNKLTF

SEQ ID NO: 53360 - protein, 15 aa, Homo sapiens
  CDR3 for beta chain variable domain of TCR clone 26680 (TRBV7-3, TRBJ2-2)
CASSETGQGTGELFF

SEQ ID NO: 53361 - protein, 13 aa, Homo sapiens
  CDR3 for alpha chain variable domain of TCR clone 26681 (TRAV13-2, TRAJ40)
CAELTSGTYKYIF

SEQ ID NO: 53362 - protein, 14 aa, Homo sapiens
  CDR3 for beta chain variable domain of TCR clone 26681 (TRBV10-2, TRBJ1-5)
CASSSTGRNQPQHF

SEQ ID NO: 53363 - protein, 14 aa, Homo sapiens
  CDR3 for alpha chain variable domain of TCR clone 26682 (TRAV34, TRAJ44)
CGADGTGTASKLTF

SEQ ID NO: 53364 - protein, 16 aa, Homo sapiens
  CDR3 for beta chain variable domain of TCR clone 26682 (TRBV7-3, TRBJ2-2)
CASSLKRGTLSGELFF

SEQ ID NO: 53365 - protein, 11 aa, Homo sapiens
  CDR3 for alpha chain variable domain of TCR clone 26683 (TRAV16, TRAJ31)
CALFNNAGLMF

SEQ ID NO: 53366 - protein, 15 aa, Homo sapiens
  CDR3 for beta chain variable domain of TCR clone 26683 (TRBV18, TRBJ1-1)
CASSPRQGENTEAFF

SEQ ID NO: 53367 - protein, 15 aa, Homo sapiens
  CDR3 for alpha chain variable domain of TCR clone 26684 (TRAV8-3, TRAJ27)
CAVGPSKTNAGKSTF

SEQ ID NO: 53368 - protein, 15 aa, Homo sapiens
  CDR3 for beta chain variable domain of TCR clone 26684 (TRBV20-1, TRBJ2-7)
CSARDRVSGMDEQYF

SEQ ID NO: 53369 - protein, 12 aa, Homo sapiens
  CDR3 for alpha chain variable domain of TCR clone 26685 (TRAV12-2, TRAJ17)
CAMTLTGNKLTF

SEQ ID NO: 53370 - protein, 15 aa, Homo sapiens
  CDR3 for beta chain variable domain of TCR clone 26685 (TRBV27, TRBJ2-1)
CASSNGGGSSNEQFF

SEQ ID NO: 53371 - protein, 15 aa, Homo sapiens
  CDR3 for alpha chain variable domain of TCR clone 26686 (TRAV3, TRAJ17)
CAVRDTGAAGNKLTF

SEQ ID NO: 53372 - protein, 14 aa, Homo sapiens
  CDR3 for beta chain variable domain of TCR clone 26686 (TRBV6-3, TRBJ1-1)
CASSNPLPGAEAFF

SEQ ID NO: 53373 - protein, 15 aa, Homo sapiens
  CDR3 for alpha chain variable domain of TCR clone 26687 (TRAV14/DV4, TRAJ3)
CAMRAGYSSASKIIF

SEQ ID NO: 53374 - protein, 14 aa, Homo sapiens
  CDR3 for beta chain variable domain of TCR clone 26687 (TRBV7-8, TRBJ2-3)
CASSLEAGTDTQYF

SEQ ID NO: 53375 - protein, 11 aa, Homo sapiens
  CDR3 for alpha chain variable domain of TCR clone 26688 (TRAV27, TRAJ47)
PIVEYGNKLVF

SEQ ID NO: 53376 - protein, 18 aa, Homo sapiens
  CDR3 for beta chain variable domain of TCR clone 26688 (TRBV2, TRBJ2-1)
CASRGLAGGPRTYNEQFF

SEQ ID NO: 53377 - protein, 12 aa, Homo sapiens
  CDR3 for alpha chain variable domain of TCR clone 26689 (TRAV21, TRAJ33)
CAKMDSNYQLIW

SEQ ID NO: 53378 - protein, 14 aa, Homo sapiens
  CDR3 for beta chain variable domain of TCR clone 26689 (TRBV12-5, TRBJ2-5)
CASGSRTHQETQYF

SEQ ID NO: 53379 - protein, 12 aa, Homo sapiens
  CDR3 for alpha chain variable domain of TCR clone 26690 (TRAV25, TRAJ53)
CQSGGSNYKLTS

SEQ ID NO: 53380 - protein, 15 aa, Homo sapiens
  CDR3 for beta chain variable domain of TCR clone 26690 (TRBV5-1, TRBJ2-2)
CASSWTSPNTGELFF

SEQ ID NO: 53381 - protein, 15 aa, Homo sapiens
  CDR3 for alpha chain variable domain of TCR clone 26691 (TRAV3, TRAJ17)
CAVRNGPAAGNRLTF

SEQ ID NO: 53382 - protein, 12 aa, Homo sapiens
  CDR3 for beta chain variable domain of TCR clone 26691 (TRBV12-4, TRBJ2-1)
CASSPGRNEQFF

SEQ ID NO: 53383 - protein, 16 aa, Homo sapiens
  CDR3 for alpha chain variable domain of TCR clone 26692 (TRAV30, TRAJ24)
CGTEIVDADSWGKFQF

SEQ ID NO: 53384 - protein, 13 aa, Homo sapiens
  CDR3 for beta chain variable domain of TCR clone 26692 (TRBV7-3, TRBJ1-1)
CASSRDWGAEAFF

SEQ ID NO: 53385 - protein, 15 aa, Homo sapiens
  CDR3 for alpha chain variable domain of TCR clone 26693 (TRAV12-3, TRAJ6)
CAMSATSGGSYIPTF

SEQ ID NO: 53386 - protein, 11 aa, Homo sapiens
  CDR3 for beta chain variable domain of TCR clone 26693 (TRBV20-1, TRBJ1-5)
CSAQGGQPQHF

SEQ ID NO: 53387 - protein, 18 aa, Homo sapiens
  CDR3 for alpha chain variable domain of TCR clone 26694 (TRAV35, TRAJ28)
CAGHNYPLSGAGSYQLTF

SEQ ID NO: 53388 - protein, 13 aa, Homo sapiens
  CDR3 for beta chain variable domain of TCR clone 26694 (TRBV9, TRBJ1-1)
CASSVGGLTEAFF

SEQ ID NO: 53389 - protein, 14 aa, Homo sapiens
  CDR3 for alpha chain variable domain of TCR clone 26695 (TRAV38-1, TRAJ45)
CASHSGGGADGLTF

SEQ ID NO: 53390 - protein, 13 aa, Homo sapiens
  CDR3 for beta chain variable domain of TCR clone 26695 (TRBV10-3, TRBJ1-2)
CAISELDSYGYTF

SEQ ID NO: 53391 - protein, 15 aa, Homo sapiens
  CDR3 for alpha chain variable domain of TCR clone 26696 (TRAV3, TRAJ47)
CAVRDIGEYGNKLVF

SEQ ID NO: 53392 - protein, 14 aa, Homo sapiens
  CDR3 for beta chain variable domain of TCR clone 26696 (TRBV13, TRBJ2-5)
CASSLGRVGETQYF

SEQ ID NO: 53393 - protein, 15 aa, Homo sapiens
  CDR3 for alpha chain variable domain of TCR clone 26697 (TRAV17, TRAJ54)
CATEKLGQGAQKLVF

SEQ ID NO: 53394 - protein, 14 aa, Homo sapiens
  CDR3 for beta chain variable domain of TCR clone 26697 (TRBV7-3, TRBJ1-1)
CQQLRGQMNIEAFF

SEQ ID NO: 53395 - protein, 17 aa, Homo sapiens
  CDR3 for alpha chain variable domain of TCR clone 26698 (TRAV8-6, TRAJ58)
CAVSSWVGETSGSRVTF

SEQ ID NO: 53396 - protein, 14 aa, Homo sapiens
  CDR3 for beta chain variable domain of TCR clone 26698 (TRBV4-2, TRBJ2-1)
CASGLDRAYNEQFF

SEQ ID NO: 53397 - protein, 13 aa, Homo sapiens
  CDR3 for alpha chain variable domain of TCR clone 26699 (TRAV27, TRAJ45)
CRSSGGGADGLTF

SEQ ID NO: 53398 - protein, 17 aa, Homo sapiens
  CDR3 for beta chain variable domain of TCR clone 26699 (TRBV11-2, TRBJ2-1)
CASSLYPPGVEYNEKFF

SEQ ID NO: 53399 - protein, 14 aa, Homo sapiens
  CDR3 for alpha chain variable domain of TCR clone 26700 (TRAV35, TRAJ22)
CAGLRPGSARQLTF

SEQ ID NO: 53400 - protein, 13 aa, Homo sapiens
  CDR3 for beta chain variable domain of TCR clone 26700 (TRBV20-1, TRBJ1-1)
YSARGGGNTEAFF

SEQ ID NO: 53401 - protein, 18 aa, Homo sapiens
  CDR3 for alpha chain variable domain of TCR clone 26701 (TRAV21, TRAJ52)
FAVRPSPAGGTSYGKLTF

SEQ ID NO: 53402 - protein, 13 aa, Homo sapiens
  CDR3 for beta chain variable domain of TCR clone 26701 (TRBV7-3, TRBJ1-1)
CASSQDWGAEAFF

SEQ ID NO: 53403 - protein, 17 aa, Homo sapiens
  CDR3 for alpha chain variable domain of TCR clone 26702 (TRAV3, TRAJ42)
CAVRDRDYGGSQGNLIF

SEQ ID NO: 53404 - protein, 12 aa, Homo sapiens
  CDR3 for beta chain variable domain of TCR clone 26702 (TRBV7-8, TRBJ2-7)
CASSLGDREQYF

SEQ ID NO: 53405 - protein, 14 aa, Homo sapiens
  CDR3 for alpha chain variable domain of TCR clone 26703 (TRAV2, TRAJ37)
CAVDFTSNTGKLIF

SEQ ID NO: 53406 - protein, 13 aa, Homo sapiens
  CDR3 for beta chain variable domain of TCR clone 26703 (TRBV20-1, TRBJ1-1)
CSAPLGGGTEAVF

SEQ ID NO: 53407 - protein, 17 aa, Homo sapiens
  CDR3 for alpha chain variable domain of TCR clone 26704 (TRAV4, TRAJ18)
CLVVAAGRGSTLGGLYF

SEQ ID NO: 53408 - protein, 17 aa, Homo sapiens
  CDR3 for beta chain variable domain of TCR clone 26704 (TRBV28, TRBJ2-2)
CASSLATGMGDAGELFF

SEQ ID NO: 53409 - protein, 11 aa, Homo sapiens
  CDR3 for alpha chain variable domain of TCR clone 26705 (TRAV17, TRAJ31)
CATSNNARLMF

SEQ ID NO: 53410 - protein, 16 aa, Homo sapiens
  CDR3 for beta chain variable domain of TCR clone 26705 (TRBV7-8, TRBJ2-4)
CASSAEGTLAKNIQYF

SEQ ID NO: 53411 - protein, 14 aa, Homo sapiens
  CDR3 for alpha chain variable domain of TCR clone 26706 (TRAV36/DV7, TRAJ13)
WGSGENGGYQEVTF

SEQ ID NO: 53412 - protein, 15 aa, Homo sapiens
  CDR3 for beta chain variable domain of TCR clone 26706 (TRBV19, TRBJ2-1)
CASSTGTSSYNEQFF

SEQ ID NO: 53413 - protein, 13 aa, Homo sapiens
  CDR3 for alpha chain variable domain of TCR clone 26707 (TRAV3, TRAJ20)
CAVRRLNDYKLSF

SEQ ID NO: 53414 - protein, 13 aa, Homo sapiens
  CDR3 for beta chain variable domain of TCR clone 26707 (TRBV7-3, TRBJ1-1)
CASSQDWGAEAFF

SEQ ID NO: 53415 - protein, 14 aa, Homo sapiens
  CDR3 for alpha chain variable domain of TCR clone 26708 (TRAV9-2, TRAJ39)
CALYIYNAGNMLTF

SEQ ID NO: 53416 - protein, 14 aa, Homo sapiens
  CDR3 for beta chain variable domain of TCR clone 26708 (TRBV7-3, TRBJ1-1)
CASSLKGGNTEAFF

SEQ ID NO: 53417 - protein, 14 aa, Homo sapiens
  CDR3 for alpha chain variable domain of TCR clone 26709 (TRAV38-1, TRAJ39)
CAFAYNNAGNMLTF

SEQ ID NO: 53418 - protein, 15 aa, Homo sapiens
  CDR3 for beta chain variable domain of TCR clone 26709 (TRBV19, TRBJ2-6)
CASSIGPSGANDLTF

SEQ ID NO: 53419 - protein, 15 aa, Homo sapiens
  CDR3 for alpha chain variable domain of TCR clone 26710 (TRAV13-1, TRAJ48)
CAATPANFGNEKLTF

SEQ ID NO: 53420 - protein, 17 aa, Homo sapiens
  CDR3 for beta chain variable domain of TCR clone 26710 (TRBV5-5, TRBJ2-3)
CASSGRTVASSTDTQYF

SEQ ID NO: 53421 - protein, 12 aa, Homo sapiens
  CDR3 for alpha chain variable domain of TCR clone 26711 (TRAV13-1, TRAJ3)
CAATGVQQCFQD

SEQ ID NO: 53422 - protein, 14 aa, Homo sapiens
  CDR3 for beta chain variable domain of TCR clone 26711 (TRBV25-1, TRBJ1-1)
CASTHLGGNTEAFF

SEQ ID NO: 53423 - protein, 16 aa, Homo sapiens
  CDR3 for alpha chain variable domain of TCR clone 26712 (TRAV1-2, TRAJ10)
CAVRGVLTGGGNKLTF

SEQ ID NO: 53424 - protein, 13 aa, Homo sapiens
  CDR3 for beta chain variable domain of TCR clone 26712 (TRBV20-1, TRBJ1-6)
RSAPLGVGSPLHF

SEQ ID NO: 53425 - protein, 17 aa, Homo sapiens
  CDR3 for alpha chain variable domain of TCR clone 26713 (TRAV16, TRAJ42)
CALGPKLYGGSQGNLIF

SEQ ID NO: 53426 - protein, 13 aa, Homo sapiens
  CDR3 for beta chain variable domain of TCR clone 26713 (TRBV19, TRBJ1-5)
CASSTRRDQPQHF

SEQ ID NO: 53427 - protein, 14 aa, Homo sapiens
  CDR3 for alpha chain variable domain of TCR clone 26714 (TRAV12-3, TRAJ10)
SHLPLTGGGNKLTF

SEQ ID NO: 53428 - protein, 14 aa, Homo sapiens
  CDR3 for beta chain variable domain of TCR clone 26714 (TRBV28, TRBJ2-2)
CASRIRSGTGELFF

SEQ ID NO: 53429 - protein, 18 aa, Homo sapiens
  CDR3 for alpha chain variable domain of TCR clone 26715 (TRAV21, TRAJ52)
CAVRPSPAGGTSYGKLTF

SEQ ID NO: 53430 - protein, 13 aa, Homo sapiens
  CDR3 for beta chain variable domain of TCR clone 26715 (TRBV7-2, TRBJ2-7)
CASSSPSGSEQYF

SEQ ID NO: 53431 - protein, 13 aa, Homo sapiens
  CDR3 for alpha chain variable domain of TCR clone 26716 (TRAV20, TRAJ37)
CAGCSSNTGKLIF

SEQ ID NO: 53432 - protein, 11 aa, Homo sapiens
  CDR3 for beta chain variable domain of TCR clone 26716 (TRBV12-4, TRBJ2-3)
CASTATDTQYS

SEQ ID NO: 53433 - protein, 15 aa, Homo sapiens
  CDR3 for alpha chain variable domain of TCR clone 26717 (TRAV14/DV4, TRAJ12)
CAMREERDSGYKLIF

SEQ ID NO: 53434 - protein, 16 aa, Homo sapiens
  CDR3 for beta chain variable domain of TCR clone 26717 (TRBV11-2, TRBJ1-2)
CASSLDRGGNNYGYTF

SEQ ID NO: 53435 - protein, 17 aa, Homo sapiens
  CDR3 for alpha chain variable domain of TCR clone 26718 (TRAV8-6, TRAJ58)
CAVSSWVGETSGSRWTF

SEQ ID NO: 53436 - protein, 14 aa, Homo sapiens
  CDR3 for beta chain variable domain of TCR clone 26718 (TRBV4-2, TRBJ2-1)
CASGLDRAYNEQFF

SEQ ID NO: 53437 - protein, 14 aa, Homo sapiens
  CDR3 for alpha chain variable domain of TCR clone 26719 (TRAV8-2, TRAJ4)
CVVSPSGGYNKLIF

SEQ ID NO: 53438 - protein, 17 aa, Homo sapiens
  CDR3 for beta chain variable domain of TCR clone 26719 (TRBV4-1, TRBJ1-4)
CASSDTGGTNEKLFLAV

SEQ ID NO: 53439 - protein, 14 aa, Homo sapiens
  CDR3 for alpha chain variable domain of TCR clone 26720 (TRAV14/DV4, TRAJ32)
SNVLPLTPTNKLIF

SEQ ID NO: 53440 - protein, 12 aa, Homo sapiens
  CDR3 for beta chain variable domain of TCR clone 26720 (TRBV11-2, TRBJ2-2)
CASSLGGGELFF

SEQ ID NO: 53441 - protein, 13 aa, Homo sapiens
  CDR3 for alpha chain variable domain of TCR clone 26721 (TRAV21, TRAJ57)
FAVTQGGSEKLVF

SEQ ID NO: 53442 - protein, 16 aa, Homo sapiens
  CDR3 for beta chain variable domain of TCR clone 26721 (TRBV29-1, TRBJ2-7)
CSVEDAEDGTAYEQYF

SEQ ID NO: 53443 - protein, 12 aa, Homo sapiens
  CDR3 for alpha chain variable domain of TCR clone 26722 (TRAV12-3, TRAJ17)
CAMTLTGNKLTF

SEQ ID NO: 53444 - protein, 14 aa, Homo sapiens
  CDR3 for beta chain variable domain of TCR clone 26722 (TRBV18, TRBJ2-3)
CASSGLADTDTQYF

SEQ ID NO: 53445 - protein, 12 aa, Homo sapiens
  CDR3 for alpha chain variable domain of TCR clone 26723 (TRAV8-3, TRAJ26)
CAGDNYGQNFFF

SEQ ID NO: 53446 - protein, 15 aa, Homo sapiens
  CDR3 for beta chain variable domain of TCR clone 26723 (TRBV11-2, TRBJ2-1)
CASSLGTSGLNEQFF

SEQ ID NO: 53447 - protein, 14 aa, Homo sapiens
  CDR3 for alpha chain variable domain of TCR clone 26724 (TRAV13-2, TRAJ9)
CAENSFTGGFKTIF

SEQ ID NO: 53448 - protein, 17 aa, Homo sapiens
  CDR3 for beta chain variable domain of TCR clone 26724 (TRBV13, TRBJ2-3)
CASSLSRVAGGRNTQYF

SEQ ID NO: 53449 - protein, 14 aa, Homo sapiens
  CDR3 for alpha chain variable domain of TCR clone 26725 (TRAV1-2, TRAJ16)
CAVNRFSDGQKLLF

SEQ ID NO: 53450 - protein, 16 aa, Homo sapiens
  CDR3 for beta chain variable domain of TCR clone 26725 (TRBV5-1, TRBJ2-3)
CASSLGLAVYTDTQYF

SEQ ID NO: 53451 - protein, 15 aa, Homo sapiens
  CDR3 for alpha chain variable domain of TCR clone 26726 (TRAV12-2, TRAJ53)
CAVNGGGGSNYKLTL

SEQ ID NO: 53452 - protein, 17 aa, Homo sapiens
  CDR3 for beta chain variable domain of TCR clone 26726 (TRBV7-3, TRBJ2-3)
CASSLMKRMRGADTQYF

SEQ ID NO: 53453 - protein, 12 aa, Homo sapiens
  CDR3 for alpha chain variable domain of TCR clone 26727 (TRAV17, TRAJ4)
CATDSGYNKLIF

SEQ ID NO: 53454 - protein, 13 aa, Homo sapiens
  CDR3 for beta chain variable domain of TCR clone 26727 (TRBV29-1, TRBJ2-2)
CSTTGVNTGELFF

SEQ ID NO: 53455 - protein, 13 aa, Homo sapiens
  CDR3 for alpha chain variable domain of TCR clone 26728 (TRAV17, TRAJ9)
CATDYTGGFKTIF

SEQ ID NO: 53456 - protein, 16 aa, Homo sapiens
  CDR3 for beta chain variable domain of TCR clone 26728 (TRBV7-7, TRBJ2-1)
CASSLAGGTSYNEQFF

SEQ ID NO: 53457 - protein, 16 aa, Homo sapiens
  CDR3 for alpha chain variable domain of TCR clone 26729 (TRAV16, TRAJ52)
CALSGVGGTSYGKLTF

SEQ ID NO: 53458 - protein, 14 aa, Homo sapiens
  CDR3 for beta chain variable domain of TCR clone 26729 (TRBV19, TRBJ1-2)
CASSLQGQAYGYTS

SEQ ID NO: 53459 - protein, 16 aa, Homo sapiens
  CDR3 for alpha chain variable domain of TCR clone 26730 (TRAV1-1, TRAJ29)
CAVRSTRNSGNTPLVF

SEQ ID NO: 53460 - protein, 16 aa, Homo sapiens
  CDR3 for beta chain variable domain of TCR clone 26730 (TRBV27, TRBJ1-1)
CASSSRGRTGYTEAFL

SEQ ID NO: 53461 - protein, 12 aa, Homo sapiens
  CDR3 for alpha chain variable domain of TCR clone 26731 (TRAV12-3, TRAJ17)
CAMTLTGNKLTF

SEQ ID NO: 53462 - protein, 16 aa, Homo sapiens
  CDR3 for beta chain variable domain of TCR clone 26731 (TRBV2, TRBJ2-3)
CASSTSVEGVTDTQYF

SEQ ID NO: 53463 - protein, 16 aa, Homo sapiens
  CDR3 for alpha chain variable domain of TCR clone 26732 (TRAV21, TRAJ17)
CAVRPGEEAAGNKLTF

SEQ ID NO: 53464 - protein, 16 aa, Homo sapiens
  CDR3 for beta chain variable domain of TCR clone 26732 (TRBV2, TRBJ2-7)
CASSEPWTGHSYEQYF

SEQ ID NO: 53465 - protein, 16 aa, Homo sapiens
  CDR3 for alpha chain variable domain of TCR clone 26733 (TRAV3, TRAJ37)
CAVRVRGSGNTGKLLF

SEQ ID NO: 53466 - protein, 11 aa, Homo sapiens
  CDR3 for beta chain variable domain of TCR clone 26733 (TRBV11-2, TRBJ2-2)
CASSLPGELFF

SEQ ID NO: 53467 - protein, 14 aa, Homo sapiens
  CDR3 for alpha chain variable domain of TCR clone 26734 (TRAV1-2, TRAJ16)
CAVNRFSDGQKLLF

SEQ ID NO: 53468 - protein, 20 aa, Homo sapiens
  CDR3 for beta chain variable domain of TCR clone 26734 (TRBV11-3, TRBJ2-7)
CASSQRTSGSLRAVLRAGHQ

SEQ ID NO: 53469 - protein, 14 aa, Homo sapiens
  CDR3 for alpha chain variable domain of TCR clone 26735 (TRAV9-2, TRAJ39)
CALYIYNAGNMLTF

SEQ ID NO: 53470 - protein, 15 aa, Homo sapiens
  CDR3 for beta chain variable domain of TCR clone 26735 (TRBV28, TRBJ1-5)
CASSRTGGYVQPQHF

SEQ ID NO: 53471 - protein, 14 aa, Homo sapiens
  CDR3 for alpha chain variable domain of TCR clone 26736 (TRAV1-2, TRAJ16)
CAVNRFSDGQKLLF

SEQ ID NO: 53472 - protein, 15 aa, Homo sapiens
  CDR3 for beta chain variable domain of TCR clone 26736 (TRBV19, TRBJ1-6)
CASSTQGAVGSPLHF

SEQ ID NO: 53473 - protein, 16 aa, Homo sapiens
  CDR3 for alpha chain variable domain of TCR clone 26737 (TRAV26-1, TRAJ53)
CIVRVAMGGSNYKLTF

SEQ ID NO: 53474 - protein, 12 aa, Homo sapiens
  CDR3 for beta chain variable domain of TCR clone 26737 (TRBV7-9, TRBJ1-5)
RASSPQGQPQHF

SEQ ID NO: 53475 - protein, 16 aa, Homo sapiens
  CDR3 for alpha chain variable domain of TCR clone 26738 (TRAV3, TRAJ10)
CAVRDMRAGGGDKLTF

SEQ ID NO: 53476 - protein, 15 aa, Homo sapiens
  CDR3 for beta chain variable domain of TCR clone 26738 (TRBV11-2, TRBJ1-6)
CASTGFGTAVSPLHF

SEQ ID NO: 53477 - protein, 13 aa, Homo sapiens
  CDR3 for alpha chain variable domain of TCR clone 26739 (TRAV27, TRAJ42)
CAGARGSQGNLIF

SEQ ID NO: 53478 - protein, 15 aa, Homo sapiens
  CDR3 for beta chain variable domain of TCR clone 26739 (TRBV10-3, TRBJ2-2)
CAIRKDREDTGELFF

SEQ ID NO: 53479 - protein, 14 aa, Homo sapiens
  CDR3 for alpha chain variable domain of TCR clone 26740 (TRAV20, TRAJ42)
CAVQAGGNQGNLIF

SEQ ID NO: 53480 - protein, 14 aa, Homo sapiens
  CDR3 for beta chain variable domain of TCR clone 26740 (TRBV28, TRBJ1-2)
CASRIQGANYGYTF

SEQ ID NO: 53481 - protein, 16 aa, Homo sapiens
  CDR3 for alpha chain variable domain of TCR clone 26741 (TRAV25, TRAJ53)
CAGPKGSGGSNYKLTF

SEQ ID NO: 53482 - protein, 14 aa, Homo sapiens
  CDR3 for beta chain variable domain of TCR clone 26741 (TRBV12-5, TRBJ2-5)
CASGSRTHQETQYF

SEQ ID NO: 53483 - protein, 13 aa, Homo sapiens
  CDR3 for alpha chain variable domain of TCR clone 26742 (TRAV8-3, TRAJ34)
CAVGGGNTDKLIF

SEQ ID NO: 53484 - protein, 15 aa, Homo sapiens
  CDR3 for beta chain variable domain of TCR clone 26742 (TRBV6-3, TRBJ2-7)
CASSSPGTVFYEQYF

SEQ ID NO: 53485 - protein, 12 aa, Homo sapiens
  CDR3 for alpha chain variable domain of TCR clone 26743 (TRAV29/DV5, TRAJ49)
CAATDTGNQFYF

SEQ ID NO: 53486 - protein, 12 aa, Homo sapiens
  CDR3 for beta chain variable domain of TCR clone 26743 (TRBV12-4, TRBJ2-7)
CASSLGGYGQYF

SEQ ID NO: 53487 - protein, 13 aa, Homo sapiens
  CDR3 for alpha chain variable domain of TCR clone 26744 (TRAV12-1, TRAJ39)
CVVPQRAGNMLTF

SEQ ID NO: 53488 - protein, 14 aa, Homo sapiens
  CDR3 for beta chain variable domain of TCR clone 26744 (TRBV13, TRBJ2-5)
CASGLERVGETQYF

SEQ ID NO: 53489 - protein, 14 aa, Homo sapiens
  CDR3 for alpha chain variable domain of TCR clone 26745 (TRAV1-2, TRAJ16)
CAVNRFSDGQKLLF

SEQ ID NO: 53490 - protein, 12 aa, Homo sapiens
  CDR3 for beta chain variable domain of TCR clone 26745 (TRBV7-9, TRBJ1-4)
CASSTDREKLFF

SEQ ID NO: 53491 - protein, 13 aa, Homo sapiens
  CDR3 for alpha chain variable domain of TCR clone 26746 (TRAV35, TRAJ44)
CAGLSGAASKLTF

SEQ ID NO: 53492 - protein, 17 aa, Homo sapiens
  CDR3 for beta chain variable domain of TCR clone 26746 (TRBV7-8, TRBJ1-2)
CASSLRPLQGHLYGYTF

SEQ ID NO: 53493 - protein, 14 aa, Homo sapiens
  CDR3 for alpha chain variable domain of TCR clone 26747 (TRAV1-2, TRAJ16)
CAVNRFSDGQKLLF

SEQ ID NO: 53494 - protein, 16 aa, Homo sapiens
  CDR3 for beta chain variable domain of TCR clone 26747 (TRBV9, TRBJ2-1)
CASGVGGGGNYNEQFF

SEQ ID NO: 53495 - protein, 13 aa, Homo sapiens
  CDR3 for alpha chain variable domain of TCR clone 26748 (TRAV2, TRAJ40)
CAVVTSGTYKYIF

SEQ ID NO: 53496 - protein, 15 aa, Homo sapiens
  CDR3 for beta chain variable domain of TCR clone 26748 (TRBV11-3, TRBJ2-3)
CASLKDGRDGDTQYF

SEQ ID NO: 53497 - protein, 14 aa, Homo sapiens
  CDR3 for alpha chain variable domain of TCR clone 26749 (TRAV1-2, TRAJ8)
CAVREDTGFQKLVF

SEQ ID NO: 53498 - protein, 14 aa, Homo sapiens
  CDR3 for beta chain variable domain of TCR clone 26749 (TRBV2, TRBJ2-7)
CASSLTSGGYEQYF

SEQ ID NO: 53499 - protein, 10 aa, Homo sapiens
  CDR3 for alpha chain variable domain of TCR clone 26750 (TRAV16, TRAJ22)
SAMYLRQLAF

SEQ ID NO: 53500 - protein, 15 aa, Homo sapiens
  CDR3 for beta chain variable domain of TCR clone 26750 (TRBV7-9, TRBJ1-6)
CASSSPGRGNSPLHF

SEQ ID NO: 53501 - protein, 12 aa, Homo sapiens
  CDR3 for alpha chain variable domain of TCR clone 26751 (TRAV2, TRAJ31)
CAVEDNNARLMF

SEQ ID NO: 53502 - protein, 16 aa, Homo sapiens
  CDR3 for beta chain variable domain of TCR clone 26751 (TRBV10-3, TRBJ2-1)
CAISGVGDRGGGEQFF

SEQ ID NO: 53503 - protein, 13 aa, Homo sapiens
  CDR3 for alpha chain variable domain of TCR clone 26752 (TRAV1-1, TRAJ9)
CAAKNTGGFKTIF

SEQ ID NO: 53504 - protein, 17 aa, Homo sapiens
  CDR3 for beta chain variable domain of TCR clone 26752 (TRBV11-2, TRBJ2-1)
CASSLYPPGVEYNEQFF

SEQ ID NO: 53505 - protein, 14 aa, Homo sapiens
  CDR3 for alpha chain variable domain of TCR clone 26753 (TRAV12-2, TRAJ44)
CAVNPAGTASKLPF

SEQ ID NO: 53506 - protein, 13 aa, Homo sapiens
  CDR3 for beta chain variable domain of TCR clone 26753 (TRBV20-1, TRBJ1-6)
CSAPLGVGSPLHF

SEQ ID NO: 53507 - protein, 17 aa, Homo sapiens
  CDR3 for alpha chain variable domain of TCR clone 26754 (TRAV3, TRAJ6)
CAERDGPRAGGSYIPTF

SEQ ID NO: 53508 - protein, 20 aa, Homo sapiens
  CDR3 for beta chain variable domain of TCR clone 26754 (TRBV28, TRBJ2-1)
CASTPIGRSPGLAGGNEQFF

SEQ ID NO: 53509 - protein, 15 aa, Homo sapiens
  CDR3 for alpha chain variable domain of TCR clone 26755 (TRAV2, TRAJ15)
CAVEVRGQAGTALIF

SEQ ID NO: 53510 - protein, 13 aa, Homo sapiens
  CDR3 for beta chain variable domain of TCR clone 26755 (TRBV10-2, TRBJ2-7)
CASGASGGYEQYF

SEQ ID NO: 53511 - protein, 13 aa, Homo sapiens
  CDR3 for alpha chain variable domain of TCR clone 26756 (TRAV8-3, TRAJ28)
CAVGAVGSYQLIF

SEQ ID NO: 53512 - protein, 14 aa, Homo sapiens
  CDR3 for beta chain variable domain of TCR clone 26756 (TRBV7-2, TRBJ2-7)
CASRSQGAAYEQYF

SEQ ID NO: 53513 - protein, 14 aa, Homo sapiens
  CDR3 for alpha chain variable domain of TCR clone 26757 (TRAV35, TRAJ22)
CAGLRPVSARQLTF

SEQ ID NO: 53514 - protein, 15 aa, Homo sapiens
  CDR3 for beta chain variable domain of TCR clone 26757 (TRBV12-4, TRBJ2-5)
CASSPPTGLQETQYF

SEQ ID NO: 53515 - protein, 12 aa, Homo sapiens
  CDR3 for alpha chain variable domain of TCR clone 26758 (TRAV4, TRAJ26)
CLVGDCGQNFVF

SEQ ID NO: 53516 - protein, 16 aa, Homo sapiens
  CDR3 for beta chain variable domain of TCR clone 26758 (TRBV7-2, TRBJ1-2)
CASSSNQDRRGHGYTF

SEQ ID NO: 53517 - protein, 14 aa, Homo sapiens
  CDR3 for alpha chain variable domain of TCR clone 26759 (TRAV12-1, TRAJ17)
CVVNYKAAGNKQTF

SEQ ID NO: 53518 - protein, 17 aa, Homo sapiens
  CDR3 for beta chain variable domain of TCR clone 26759 (TRBV20-1, TRBJ2-1)
CSASSSGLAGSYNEQFF

SEQ ID NO: 53519 - protein, 14 aa, Homo sapiens
  CDR3 for alpha chain variable domain of TCR clone 26760 (TRAV1-2, TRAJ16)
CAVNRFSDGQKLPF

SEQ ID NO: 53520 - protein, 16 aa, Homo sapiens
  CDR3 for beta chain variable domain of TCR clone 26760 (TRBV12-5, TRBJ2-5)
CASGPRTSGNQETQYF

SEQ ID NO: 53521 - protein, 13 aa, Homo sapiens
  CDR3 for alpha chain variable domain of TCR clone 26761 (TRAV1-1, TRAJ11)
CAVLNSGYSTLTF

SEQ ID NO: 53522 - protein, 13 aa, Homo sapiens
  CDR3 for beta chain variable domain of TCR clone 26761 (TRBV7-9, TRBJ1-2)
CASSLKQNYGYTF

SEQ ID NO: 53523 - protein, 12 aa, Homo sapiens
  CDR3 for alpha chain variable domain of TCR clone 26762 (TRAV12-1, TRAJ40)
CVVSSGIYKYIF

SEQ ID NO: 53524 - protein, 14 aa, Homo sapiens
  CDR3 for beta chain variable domain of TCR clone 26762 (TRBV20-1, TRBJ2-2)
CSAPDTANTGELFF

SEQ ID NO: 53525 - protein, 13 aa, Homo sapiens
  CDR3 for alpha chain variable domain of TCR clone 26763 (TRAV8-4, TRAJ48)
CAVSLFGNEKLTF

SEQ ID NO: 53526 - protein, 15 aa, Homo sapiens
  CDR3 for beta chain variable domain of TCR clone 26763 (TRBV20-1, TRBJ2-7)
CSARKGLAESYGQYF

SEQ ID NO: 53527 - protein, 18 aa, Homo sapiens
  CDR3 for alpha chain variable domain of TCR clone 26764 (TRAV26-1, TRAJ23)
CIVRVGLEVWNQGGKLTF

SEQ ID NO: 53528 - protein, 16 aa, Homo sapiens
  CDR3 for beta chain variable domain of TCR clone 26764 (TRBV12-4, TRBJ2-5)
CASSFFVRGRQETQYF

SEQ ID NO: 53529 - protein, 13 aa, Homo sapiens
  CDR3 for alpha chain variable domain of TCR clone 26765 (TRAV2, TRAJ40)
CAVVTSGTYKYIF

SEQ ID NO: 53530 - protein, 15 aa, Homo sapiens
  CDR3 for beta chain variable domain of TCR clone 26765 (TRBV11-2, TRBJ1-3)
CASSIWGSYGNTIYF

SEQ ID NO: 53531 - protein, 13 aa, Homo sapiens
  CDR3 for alpha chain variable domain of TCR clone 26766 (TRAV20, TRAJ21)
CAVEGYNFNKFYF

SEQ ID NO: 53532 - protein, 14 aa, Homo sapiens
  CDR3 for beta chain variable domain of TCR clone 26766 (TRBV25-1, TRBJ1-1)
CASTHLGGNTEAFF

SEQ ID NO: 53533 - protein, 13 aa, Homo sapiens
  CDR3 for alpha chain variable domain of TCR clone 26767 (TRAV27, TRAJ41)
CAGEVNSGYALNF

SEQ ID NO: 53534 - protein, 14 aa, Homo sapiens
  CDR3 for beta chain variable domain of TCR clone 26767 (TRBV7-2, TRBJ1-1)
CASSFLTGTTEAFF

SEQ ID NO: 53535 - protein, 13 aa, Homo sapiens
  CDR3 for alpha chain variable domain of TCR clone 26768 (TRAV26-1, TRAJ39)
CIVRVVAGNMLTF

SEQ ID NO: 53536 - protein, 14 aa, Homo sapiens
  CDR3 for beta chain variable domain of TCR clone 26768 (TRBV20-1, TRBJ2-5)
CSARHQGIRETQYF

SEQ ID NO: 53537 - protein, 15 aa, Homo sapiens
  CDR3 for alpha chain variable domain of TCR clone 26769 (TRAV25, TRAJ52)
CAGRPGGTSYGKLTF

SEQ ID NO: 53538 - protein, 17 aa, Homo sapiens
  CDR3 for beta chain variable domain of TCR clone 26769 (TRBV7-8, TRBJ2-6)
CAISAGTGGAGANVLTF

SEQ ID NO: 53539 - protein, 14 aa, Homo sapiens
  CDR3 for alpha chain variable domain of TCR clone 26770 (TRAV1-1, TRAJ27)
CAVIYNTNAGKSAF

SEQ ID NO: 53540 - protein, 15 aa, Homo sapiens
  CDR3 for beta chain variable domain of TCR clone 26770 (TRBV7-2, TRBJ2-1)
CASSSGLAGGNEQFF

SEQ ID NO: 53541 - protein, 13 aa, Homo sapiens
  CDR3 for alpha chain variable domain of TCR clone 26771 (TRAV3, TRAJ27)
CAVRPLGAGKSTF

SEQ ID NO: 53542 - protein, 15 aa, Homo sapiens
  CDR3 for beta chain variable domain of TCR clone 26771 (TRBV3-1, TRBJ2-7)
CASSQAPSGSYEQYF

SEQ ID NO: 53543 - protein, 17 aa, Homo sapiens
  CDR3 for alpha chain variable domain of TCR clone 26772 (TRAV26-1, TRAJ28)
RIVRVPDSGAGSYQLTF

SEQ ID NO: 53544 - protein, 17 aa, Homo sapiens
  CDR3 for beta chain variable domain of TCR clone 26772 (TRBV28, TRBJ2-7)
CASSPLPAGGKSYEQYF

SEQ ID NO: 53545 - protein, 16 aa, Homo sapiens
  CDR3 for alpha chain variable domain of TCR clone 26773 (TRAV16, TRAJ52)
CALSAAGGTSYGKLTF

SEQ ID NO: 53546 - protein, 12 aa, Homo sapiens
  CDR3 for beta chain variable domain of TCR clone 26773 (TRBV12-4, TRBJ1-3)
CASSFSGNTVYF

SEQ ID NO: 53547 - protein, 16 aa, Homo sapiens
  CDR3 for alpha chain variable domain of TCR clone 26774 (TRAV1-1, TRAJ45)
CAVRAYSGGGAGGLTF

SEQ ID NO: 53548 - protein, 13 aa, Homo sapiens
  CDR3 for beta chain variable domain of TCR clone 26774 (TRBV20-1, TRBJ1-2)
CSARGTADYGYTF

SEQ ID NO: 53549 - protein, 11 aa, Homo sapiens
  CDR3 for alpha chain variable domain of TCR clone 26775 (TRAV3, TRAJ21)
CAVGNFNKFYF

SEQ ID NO: 53550 - protein, 15 aa, Homo sapiens
  CDR3 for beta chain variable domain of TCR clone 26775 (TRBV2, TRBJ2-1)
CASSELAGSYNEQFF

SEQ ID NO: 53551 - protein, 14 aa, Homo sapiens
  CDR3 for alpha chain variable domain of TCR clone 26776 (TRAV8-3, TRAJ4)
CAVGAAGGYDKLIF

SEQ ID NO: 53552 - protein, 15 aa, Homo sapiens
  CDR3 for beta chain variable domain of TCR clone 26776 (TRBV6-5, TRBJ2-1)
CASSYDAGAGNEQFF

SEQ ID NO: 53553 - protein, 13 aa, Homo sapiens
  CDR3 for alpha chain variable domain of TCR clone 26777 (TRAV29/DV5, TRAJ31)
CAASRNNNARLMF

SEQ ID NO: 53554 - protein, 15 aa, Homo sapiens
  CDR3 for beta chain variable domain of TCR clone 26777 (TRBV6-1, TRBJ2-1)
CASSELRGQYNEQFF

SEQ ID NO: 53555 - protein, 11 aa, Homo sapiens
  CDR3 for alpha chain variable domain of TCR clone 26778 (TRAV21, TRAJ34)
CAHYNTDKPIF

SEQ ID NO: 53556 - protein, 11 aa, Homo sapiens
  CDR3 for beta chain variable domain of TCR clone 26778 (TRBV29-1, TRBJ2-5)
CSEDRTGTQYF

SEQ ID NO: 53557 - protein, 14 aa, Homo sapiens
  CDR3 for alpha chain variable domain of TCR clone 26779 (TRAV12-3, TRAJ9)
CAMSPNTGGFKTIF

SEQ ID NO: 53558 - protein, 12 aa, Homo sapiens
  CDR3 for beta chain variable domain of TCR clone 26779 (TRBV19, TRBJ1-5)
CASSIAQQPQHV

SEQ ID NO: 53559 - protein, 13 aa, Homo sapiens
  CDR3 for alpha chain variable domain of TCR clone 26780 (TRAV4, TRAJ9)
CLVAEGGGFKTIF

SEQ ID NO: 53560 - protein, 17 aa, Homo sapiens
  CDR3 for beta chain variable domain of TCR clone 26780 (TRBV27, TRBJ2-1)
RASSPMKGQGSYNEQFF

SEQ ID NO: 53561 - protein, 15 aa, Homo sapiens
  CDR3 for alpha chain variable domain of TCR clone 26781 (TRAV8-3, TRAJ11)
CAVGLLNSGYSTLTS

SEQ ID NO: 53562 - protein, 16 aa, Homo sapiens
  CDR3 for beta chain variable domain of TCR clone 26781 (TRBV7-9, TRBJ1-2)
CASSLGFSSGEDGYTF

SEQ ID NO: 53563 - protein, 15 aa, Homo sapiens
  CDR3 for alpha chain variable domain of TCR clone 26782 (TRAV17, TRAJ57)
CATGPSQGGSEKQVF

SEQ ID NO: 53564 - protein, 16 aa, Homo sapiens
  CDR3 for beta chain variable domain of TCR clone 26782 (TRBV12-4, TRBJ1-5)
CASSRPVGGSNQPQHF

SEQ ID NO: 53565 - protein, 14 aa, Homo sapiens
  CDR3 for alpha chain variable domain of TCR clone 26783 (TRAV12-2, TRAJ17)
CAVLFKAAGNKLTF

SEQ ID NO: 53566 - protein, 13 aa, Homo sapiens
  CDR3 for beta chain variable domain of TCR clone 26783 (TRBV20-1, TRBJ1-1)
CSARGGGNTEAFF

SEQ ID NO: 53567 - protein, 13 aa, Homo sapiens
  CDR3 for alpha chain variable domain of TCR clone 26784 (TRAV22, TRAJ29)
CAVGGSGNTTLVF

SEQ ID NO: 53568 - protein, 13 aa, Homo sapiens
  CDR3 for beta chain variable domain of TCR clone 26784 (TRBV4-2, TRBJ1-1)
CASSQAGNTEAFF

SEQ ID NO: 53569 - protein, 13 aa, Homo sapiens
  CDR3 for alpha chain variable domain of TCR clone 26785 (TRAV20, TRAJ21)
CAVEGYNFNKFYF

SEQ ID NO: 53570 - protein, 14 aa, Homo sapiens
  CDR3 for beta chain variable domain of TCR clone 26785 (TRBV3-1, TRBJ2-5)
CASRQGPDQETQYF

SEQ ID NO: 53571 - protein, 16 aa, Homo sapiens
  CDR3 for alpha chain variable domain of TCR clone 26786 (TRAV1-2, TRAJ10)
CAVRGVLTGGGNKLTF

SEQ ID NO: 53572 - protein, 12 aa, Homo sapiens
  CDR3 for beta chain variable domain of TCR clone 26786 (TRBV7-8, TRBJ2-7)
CASSLGDRVQYF

SEQ ID NO: 53573 - protein, 15 aa, Homo sapiens
  CDR3 for alpha chain variable domain of TCR clone 26787 (TRAV8-4, TRAJ7)
CAVSGGNYGNNRIAF

SEQ ID NO: 53574 - protein, 11 aa, Homo sapiens
  CDR3 for beta chain variable domain of TCR clone 26787 (TRBV20-1, TRBJ2-1)
CSLSSGSEQFF

SEQ ID NO: 53575 - protein, 12 aa, Homo sapiens
  CDR3 for alpha chain variable domain of TCR clone 26788 (TRAV12-3, TRAJ17)
CAMTLTGNKLTF

SEQ ID NO: 53576 - protein, 12 aa, Homo sapiens
  CDR3 for beta chain variable domain of TCR clone 26788 (TRBV11-2, TRBJ2-5)
CASSLVGETQYF

SEQ ID NO: 53577 - protein, 16 aa, Homo sapiens
  CDR3 for alpha chain variable domain of TCR clone 26789 (TRAV12-2, TRAJ45)
CAVIFLSGGGADGLTS

SEQ ID NO: 53578 - protein, 19 aa, Homo sapiens
  CDR3 for beta chain variable domain of TCR clone 26789 (TRBV28, TRBJ2-4)
CASSFQPGGPAHSKNIQYF

SEQ ID NO: 53579 - protein, 18 aa, Homo sapiens
  CDR3 for alpha chain variable domain of TCR clone 26790 (TRAV26-2, TRAJ54)
CILRDVEVGIQGAQKRVF

SEQ ID NO: 53580 - protein, 16 aa, Homo sapiens
  CDR3 for beta chain variable domain of TCR clone 26790 (TRBV6-1, TRBJ2-5)
CASSETLDRGAETQYF

SEQ ID NO: 53581 - protein, 12 aa, Homo sapiens
  CDR3 for alpha chain variable domain of TCR clone 26791 (TRAV8-3, TRAJ26)
CAGDNCGQNFVF

SEQ ID NO: 53582 - protein, 15 aa, Homo sapiens
  CDR3 for beta chain variable domain of TCR clone 26791 (TRBV11-2, TRBJ2-1)
CASSLGTSGLNEQFF

SEQ ID NO: 53583 - protein, 12 aa, Homo sapiens
  CDR3 for alpha chain variable domain of TCR clone 26792 (TRAV8-3, TRAJ20)
CAVGANDYQLSF

SEQ ID NO: 53584 - protein, 16 aa, Homo sapiens
  CDR3 for beta chain variable domain of TCR clone 26792 (TRBV19, TRBJ2-2)
CASRSPGTGATGELFF

SEQ ID NO: 53585 - protein, 13 aa, Homo sapiens
  CDR3 for alpha chain variable domain of TCR clone 26793 (TRAV1-2, TRAJ9)
CAALNTGGFKTIF

SEQ ID NO: 53586 - protein, 14 aa, Homo sapiens
  CDR3 for beta chain variable domain of TCR clone 26793 (TRBV12-4, TRBJ1-1)
CASSLGTGGTEAFF

SEQ ID NO: 53587 - protein, 18 aa, Homo sapiens
  CDR3 for alpha chain variable domain of TCR clone 26794 (TRAV26-2, TRAJ45)
CILRLGGYSGGGADGLTF

SEQ ID NO: 53588 - protein, 17 aa, Homo sapiens
  CDR3 for beta chain variable domain of TCR clone 26794 (TRBV28, TRBJ2-3)
CASSPTPAGGRVDTQYF

SEQ ID NO: 53589 - protein, 16 aa, Homo sapiens
  CDR3 for alpha chain variable domain of TCR clone 26795 (TRAV3, TRAJ37)
CAVRGKGSGNTGKLIF

SEQ ID NO: 53590 - protein, 16 aa, Homo sapiens
  CDR3 for beta chain variable domain of TCR clone 26795 (TRBV7-3, TRBJ2-1)
CASSLEGYRSYNEQFF

SEQ ID NO: 53591 - protein, 12 aa, Homo sapiens
  CDR3 for alpha chain variable domain of TCR clone 26796 (TRAV20, TRAJ39)
CAVGNAGNMLTF

SEQ ID NO: 53592 - protein, 17 aa, Homo sapiens
  CDR3 for beta chain variable domain of TCR clone 26796 (TRBV4-1, TRBJ2-3)
CASSHGYVSGGTDTQYF

SEQ ID NO: 53593 - protein, 13 aa, Homo sapiens
  CDR3 for alpha chain variable domain of TCR clone 26797 (TRAV3, TRAJ27)
CAVRPLGAGKSTF

SEQ ID NO: 53594 - protein, 14 aa, Homo sapiens
  CDR3 for beta chain variable domain of TCR clone 26797 (TRBV12-5, TRBJ2-5)
CASGSRTHQETQYF

SEQ ID NO: 53595 - protein, 14 aa, Homo sapiens
  CDR3 for alpha chain variable domain of TCR clone 26798 (TRAV14/DV4, TRAJ42)
CPRGSLRSQGNLIF

SEQ ID NO: 53596 - protein, 17 aa, Homo sapiens
  CDR3 for beta chain variable domain of TCR clone 26798 (TRBV13, TRBJ2-3)
CASSLSRVAGGRNTQYF

SEQ ID NO: 53597 - protein, 11 aa, Homo sapiens
  CDR3 for alpha chain variable domain of TCR clone 26799 (TRAV1-2, TRAJ20)
CAVANDYTLSF

SEQ ID NO: 53598 - protein, 18 aa, Homo sapiens
  CDR3 for beta chain variable domain of TCR clone 26799 (TRBV20-1, TRBJ2-6)
CSAETTPTHGSGANVLTF

SEQ ID NO: 53599 - protein, 16 aa, Homo sapiens
  CDR3 for alpha chain variable domain of TCR clone 26800 (TRAV3, TRAJ37)
CAVRPHGSDNTGKLIF

SEQ ID NO: 53600 - protein, 16 aa, Homo sapiens
  CDR3 for beta chain variable domain of TCR clone 26800 (TRBV9, TRBJ1-2)
CASSVEEKVSPYGYTF

SEQ ID NO: 53601 - protein, 13 aa, Homo sapiens
  CDR3 for alpha chain variable domain of TCR clone 26801 (TRAV21, TRAJ57)
CAVTRGGSEKLVF

SEQ ID NO: 53602 - protein, 16 aa, Homo sapiens
  CDR3 for beta chain variable domain of TCR clone 26801 (TRBV29-1, TRBJ2-7)
CSVEDAEDGTAYEQYF

SEQ ID NO: 53603 - protein, 13 aa, Homo sapiens
  CDR3 for alpha chain variable domain of TCR clone 26802 (TRAV21, TRAJ57)
CAVTQGGSEKLVF

SEQ ID NO: 53604 - protein, 17 aa, Homo sapiens
  CDR3 for beta chain variable domain of TCR clone 26802 (TRBV10-3, TRBJ2-6)
RAISELAESSGANVLTF

SEQ ID NO: 53605 - protein, 14 aa, Homo sapiens
  CDR3 for alpha chain variable domain of TCR clone 26803 (TRAV26-1, TRAJ52)
CTVRVGTSYGKLTF

SEQ ID NO: 53606 - protein, 13 aa, Homo sapiens
  CDR3 for beta chain variable domain of TCR clone 26803 (TRBV7-2, TRBJ1-1)
CASSLKASTEAFF

SEQ ID NO: 53607 - protein, 11 aa, Homo sapiens
  CDR3 for alpha chain variable domain of TCR clone 26804 (TRAV13-1, TRAJ43)
CAAHNNNDVRF

SEQ ID NO: 53608 - protein, 15 aa, Homo sapiens
  CDR3 for beta chain variable domain of TCR clone 26804 (TRBV6-1, TRBJ2-2)
CASSRLRGDTGELFF

SEQ ID NO: 53609 - protein, 14 aa, Homo sapiens
  CDR3 for alpha chain variable domain of TCR clone 26805 (TRAV9-2, TRAJ39)
CALYIYNAGNMLTF

SEQ ID NO: 53610 - protein, 13 aa, Homo sapiens
  CDR3 for beta chain variable domain of TCR clone 26805 (TRBV12-4, TRBJ1-2)
CASSLRQGKGYTF

SEQ ID NO: 53611 - protein, 15 aa, Homo sapiens
  CDR3 for alpha chain variable domain of TCR clone 26806 (TRAV25, TRAJ52)
CAGRPGGTSYGKLTS

SEQ ID NO: 53612 - protein, 17 aa, Homo sapiens
  CDR3 for beta chain variable domain of TCR clone 26806 (TRBV7-8, TRBJ2-6)
CASSAGTGGAGANVLTF

SEQ ID NO: 53613 - protein, 16 aa, Homo sapiens
  CDR3 for alpha chain variable domain of TCR clone 26807 (TRAV3, TRAJ37)
CAVRGKGSGNTGRLIF

SEQ ID NO: 53614 - protein, 16 aa, Homo sapiens
  CDR3 for beta chain variable domain of TCR clone 26807 (TRBV12-5, TRBJ2-5)
CASGPRTSGNQETQYF

SEQ ID NO: 53615 - protein, 14 aa, Homo sapiens
  CDR3 for alpha chain variable domain of TCR clone 26808 (TRAV12-3, TRAJ10)
SHLPLTGGGNKLTF

SEQ ID NO: 53616 - protein, 14 aa, Homo sapiens
  CDR3 for beta chain variable domain of TCR clone 26808 (TRBV6-1, TRBJ1-3)
CAGVQGGGGNTIYF

SEQ ID NO: 53617 - protein, 14 aa, Homo sapiens
  CDR3 for alpha chain variable domain of TCR clone 26809 (TRAV20, TRAJ56)
CSVQFGGANSKLTF

SEQ ID NO: 53618 - protein, 14 aa, Homo sapiens
  CDR3 for beta chain variable domain of TCR clone 26809 (TRBV20-1, TRBJ2-7)
CSAKRGRSSYEQYF

SEQ ID NO: 53619 - protein, 14 aa, Homo sapiens
  CDR3 for alpha chain variable domain of TCR clone 26810 (TRAV20, TRAJ42)
CAVQAGGSQGNLVF

SEQ ID NO: 53620 - protein, 14 aa, Homo sapiens
  CDR3 for beta chain variable domain of TCR clone 26810 (TRBV28, TRBJ1-2)
CASRIQGANYGYTF

SEQ ID NO: 53621 - protein, 14 aa, Homo sapiens
  CDR3 for alpha chain variable domain of TCR clone 26811 (TRAV29/DV5, TRAJ36)
CAARRKTGANNLFF

SEQ ID NO: 53622 - protein, 14 aa, Homo sapiens
  CDR3 for beta chain variable domain of TCR clone 26811 (TRBV12-4, TRBJ1-1)
CASRPGQGRTEAFF

SEQ ID NO: 53623 - protein, 14 aa, Homo sapiens
  CDR3 for alpha chain variable domain of TCR clone 26812 (TRAV12-3, TRAJ9)
CAMSPNTGGSKTIF

SEQ ID NO: 53624 - protein, 12 aa, Homo sapiens
  CDR3 for beta chain variable domain of TCR clone 26812 (TRBV19, TRBJ1-5)
CASSIAQQPQHF

SEQ ID NO: 53625 - protein, 13 aa, Homo sapiens
  CDR3 for alpha chain variable domain of TCR clone 26813 (TRAV13-2, TRAJ53)
CAENMGSNYKLTL

SEQ ID NO: 53626 - protein, 13 aa, Homo sapiens
  CDR3 for beta chain variable domain of TCR clone 26813 (TRBV4-1, TRBJ2-2)
CASSQENTGELFF

SEQ ID NO: 53627 - protein, 14 aa, Homo sapiens
  CDR3 for alpha chain variable domain of TCR clone 26814 (TRAV38-1, TRAJ45)
CAYYSGGGADGITF

SEQ ID NO: 53628 - protein, 20 aa, Homo sapiens
  CDR3 for beta chain variable domain of TCR clone 26814 (TRBV28, TRBJ2-1)
CASTPIGRSPGLAGGNEQFF

SEQ ID NO: 53629 - protein, 15 aa, Homo sapiens
  CDR3 for alpha chain variable domain of TCR clone 26815 (TRAV41, TRAJ57)
CAPNDTGGGSEKLVF

SEQ ID NO: 53630 - protein, 13 aa, Homo sapiens
  CDR3 for beta chain variable domain of TCR clone 26815 (TRBV4-1, TRBJ1-1)
CASSLRGPTEAFF

SEQ ID NO: 53631 - protein, 14 aa, Homo sapiens
  CDR3 for alpha chain variable domain of TCR clone 26816 (TRAV12-3, TRAJ10)
SRLPLTGGGNKLTF

SEQ ID NO: 53632 - protein, 14 aa, Homo sapiens
  CDR3 for beta chain variable domain of TCR clone 26816 (TRBV12-5, TRBJ2-5)
CASGSRTHQETQYF

SEQ ID NO: 53633 - protein, 23 aa, Homo sapiens
  CDR3 for alpha chain variable domain of TCR clone 26817 (TRAV26-1, TRAJ38)
CIADNAGNNHIQNPDPAGYQLRD

SEQ ID NO: 53634 - protein, 12 aa, Homo sapiens
  CDR3 for beta chain variable domain of TCR clone 26817 (TRBV11-2, TRBJ2-2)
CASSLGGGELFF

SEQ ID NO: 53635 - protein, 12 aa, Homo sapiens
  CDR3 for alpha chain variable domain of TCR clone 26818 (TRAV30, TRAJ43)
CGTEERGNDMRF

SEQ ID NO: 53636 - protein, 13 aa, Homo sapiens
  CDR3 for beta chain variable domain of TCR clone 26818 (TRBV12-5, TRBJ2-3)
CASGDRQSDTQYF

SEQ ID NO: 53637 - protein, 14 aa, Homo sapiens
  CDR3 for alpha chain variable domain of TCR clone 26819 (TRAV8-4, TRAJ13)
CAVTLSGGYQKVTF

SEQ ID NO: 53638 - protein, 15 aa, Homo sapiens
  CDR3 for beta chain variable domain of TCR clone 26819 (TRBV11-2, TRBJ2-1)
CASSLGTSGLNEQFF

SEQ ID NO: 53639 - protein, 12 aa, Homo sapiens
  CDR3 for alpha chain variable domain of TCR clone 26820 (TRAV8-3, TRAJ26)
CAGDNYGQNFVF

SEQ ID NO: 53640 - protein, 16 aa, Homo sapiens
  CDR3 for beta chain variable domain of TCR clone 26820 (TRBV19, TRBJ2-1)
CASSKAGPSSYNEQFF

SEQ ID NO: 53641 - protein, 11 aa, Homo sapiens
  CDR3 for alpha chain variable domain of TCR clone 26821 (TRAV8-3, TRAJ49)
CAVSTGNQFYF

SEQ ID NO: 53642 - protein, 12 aa, Homo sapiens
  CDR3 for beta chain variable domain of TCR clone 26821 (TRBV11-2, TRBJ2-7)
CASSPPADEQYF

SEQ ID NO: 53643 - protein, 13 aa, Homo sapiens
  CDR3 for alpha chain variable domain of TCR clone 26822 (TRAV20, TRAJ37)
CAGCSSNTGKLIF

SEQ ID NO: 53644 - protein, 11 aa, Homo sapiens
  CDR3 for beta chain variable domain of TCR clone 26822 (TRBV12-4, TRBJ2-3)
GASTATDTQYF

SEQ ID NO: 53645 - protein, 13 aa, Homo sapiens
  CDR3 for alpha chain variable domain of TCR clone 26823 (TRAV13-1, TRAJ12)
CAASPDSSYKLIF

SEQ ID NO: 53646 - protein, 16 aa, Homo sapiens
  CDR3 for beta chain variable domain of TCR clone 26823 (TRBV15, TRBJ2-1)
CATSRERLAGAYEPFF

SEQ ID NO: 53647 - protein, 14 aa, Homo sapiens
  CDR3 for alpha chain variable domain of TCR clone 26824 (TRAV12-2, TRAJ45)
CAVNIGGGADGLTF

SEQ ID NO: 53648 - protein, 17 aa, Homo sapiens
  CDR3 for beta chain variable domain of TCR clone 26824 (TRBV7-8, TRBJ2-6)
CASSAGTGGAGANVLAF

SEQ ID NO: 53649 - protein, 13 aa, Homo sapiens
  CDR3 for alpha chain variable domain of TCR clone 26825 (TRAV26-1, TRAJ34)
CIVRPWITDKLIF

SEQ ID NO: 53650 - protein, 11 aa, Homo sapiens
  CDR3 for beta chain variable domain of TCR clone 26825 (TRBV11-2, TRBJ1-1)
CASSINTEAFF

SEQ ID NO: 53651 - protein, 22 aa, Homo sapiens
  CDR3 for alpha chain variable domain of TCR clone 26826 (TRAV13-1, TRAJ32)
CAASNGWWCYKQAHLWNWHSAF

SEQ ID NO: 53652 - protein, 17 aa, Homo sapiens
  CDR3 for beta chain variable domain of TCR clone 26826 (TRBV15, TRBJ1-2)
CATSGREIDVVNYGYTF

SEQ ID NO: 53653 - protein, 11 aa, Homo sapiens
  CDR3 for alpha chain variable domain of TCR clone 26827 (TRAV1-2, TRAJ31)
CAVNNNARLMV

SEQ ID NO: 53654 - protein, 15 aa, Homo sapiens
  CDR3 for beta chain variable domain of TCR clone 26827 (TRBV28, TRBJ2-1)
CASSIIAGGRSEQFF

SEQ ID NO: 53655 - protein, 17 aa, Homo sapiens
  CDR3 for alpha chain variable domain of TCR clone 26828 (TRAV8-6, TRAJ58)
CAVSSWVGETSGSRLIF

SEQ ID NO: 53656 - protein, 14 aa, Homo sapiens
  CDR3 for beta chain variable domain of TCR clone 26828 (TRBV4-2, TRBJ2-1)
CASGLDRAYNEQFF

SEQ ID NO: 53657 - protein, 16 aa, Homo sapiens
  CDR3 for alpha chain variable domain of TCR clone 26829 (TRAV30, TRAJ24)
CGTEIVDADSWGKFQL

SEQ ID NO: 53658 - protein, 14 aa, Homo sapiens
  CDR3 for beta chain variable domain of TCR clone 26829 (TRBV7-2, TRBJ2-7)
CASSPKTSFYEQYF

SEQ ID NO: 53659 - protein, 14 aa, Homo sapiens
  CDR3 for alpha chain variable domain of TCR clone 26830 (TRAV9-2, TRAJ39)
CALYIYNAGNMLTF

SEQ ID NO: 53660 - protein, 13 aa, Homo sapiens
  CDR3 for beta chain variable domain of TCR clone 26830 (TRBV11-2, TRBJ2-5)
CASSSTGEETQYF

SEQ ID NO: 53661 - protein, 15 aa, Homo sapiens
  CDR3 for alpha chain variable domain of TCR clone 26831 (TRAV8-3, TRAJ27)
CAVGPSKTNAGKSTF

SEQ ID NO: 53662 - protein, 15 aa, Homo sapiens
  CDR3 for beta chain variable domain of TCR clone 26831 (TRBV7-2, TRBJ2-1)
CASSSGLAGGNEQLF

SEQ ID NO: 53663 - protein, 17 aa, Homo sapiens
  CDR3 for alpha chain variable domain of TCR clone 26832 (TRAV13-1, TRAJ31)
CAPRERLMFGDGTQLVV

SEQ ID NO: 53664 - protein, 12 aa, Homo sapiens
  CDR3 for beta chain variable domain of TCR clone 26832 (TRBV7-9, TRBJ2-7)
CASSLEGYEQYF

SEQ ID NO: 53665 - protein, 12 aa, Homo sapiens
  CDR3 for alpha chain variable domain of TCR clone 26833 (TRAV8-3, TRAJ20)
CAVGANDYMLSF

SEQ ID NO: 53666 - protein, 16 aa, Homo sapiens
  CDR3 for beta chain variable domain of TCR clone 26833 (TRBV19, TRBJ2-2)
CASRSPGTGATGELFF

SEQ ID NO: 53667 - protein, 13 aa, Homo sapiens
  CDR3 for alpha chain variable domain of TCR clone 26834 (TRAV12-2, TRAJ37)
RAGGSGNTGKLIF

SEQ ID NO: 53668 - protein, 14 aa, Homo sapiens
  CDR3 for beta chain variable domain of TCR clone 26834 (TRBV6-1, TRBJ2-6)
CASQQGAGANVLTF

SEQ ID NO: 53669 - protein, 14 aa, Homo sapiens
  CDR3 for alpha chain variable domain of TCR clone 26835 (TRAV12-1, TRAJ24)
CVVRSTDSWGKFQF

SEQ ID NO: 53670 - protein, 13 aa, Homo sapiens
  CDR3 for beta chain variable domain of TCR clone 26835 (TRBV2, TRBJ2-3)
CASILVGGQGQYF

SEQ ID NO: 53671 - protein, 15 aa, Homo sapiens
  CDR3 for alpha chain variable domain of TCR clone 26836 (TRAV21, TRAJ52)
CAVRGGGTSYGKLTF

SEQ ID NO: 53672 - protein, 15 aa, Homo sapiens
  CDR3 for beta chain variable domain of TCR clone 26836 (TRBV18, TRBJ1-5)
CASSPSDRSNQTQHF

SEQ ID NO: 53673 - protein, 14 aa, Homo sapiens
  CDR3 for alpha chain variable domain of TCR clone 26837 (TRAV12-2, TRAJ13)
CAVMKTGGYQKVTF

SEQ ID NO: 53674 - protein, 15 aa, Homo sapiens
  CDR3 for beta chain variable domain of TCR clone 26837 (TRBV27, TRBJ2-1)
CASSNGGGSSNEQFF

SEQ ID NO: 53675 - protein, 14 aa, Homo sapiens
  CDR3 for alpha chain variable domain of TCR clone 26838 (TRAV27, TRAJ36)
CAGPPKRGANNLFF

SEQ ID NO: 53676 - protein, 15 aa, Homo sapiens
  CDR3 for beta chain variable domain of TCR clone 26838 (TRBV18, TRBJ2-7)
CASSPASTTNYEQYF

SEQ ID NO: 53677 - protein, 12 aa, Homo sapiens
  CDR3 for alpha chain variable domain of TCR clone 26839 (TRAV35, TRAJ49)
CAGWNTGNQFYF

SEQ ID NO: 53678 - protein, 16 aa, Homo sapiens
  CDR3 for beta chain variable domain of TCR clone 26839 (TRBV5-1, TRBJ2-2)
CASSLWDTTNTGEPFF

SEQ ID NO: 53679 - protein, 15 aa, Homo sapiens
  CDR3 for alpha chain variable domain of TCR clone 26840 (TRAV3, TRAJ13)
CAARVYSGGYQKVTF

SEQ ID NO: 53680 - protein, 15 aa, Homo sapiens
  CDR3 for beta chain variable domain of TCR clone 26840 (TRBV5-7, TRBJ1-2)
CASSLGVAANYGYTF

SEQ ID NO: 53681 - protein, 14 aa, Homo sapiens
  CDR3 for alpha chain variable domain of TCR clone 26841 (TRAV12-1, TRAJ12)
CVVTGMDSSYKLIF

SEQ ID NO: 53682 - protein, 13 aa, Homo sapiens
  CDR3 for beta chain variable domain of TCR clone 26841 (TRBV20-1, TRBJ1-1)
CSARGGGNTEAFF

SEQ ID NO: 53683 - protein, 11 aa, Homo sapiens
  CDR3 for alpha chain variable domain of TCR clone 26842 (TRAV2, TRAJ33)
CAVDSNYQLIW

SEQ ID NO: 53684 - protein, 15 aa, Homo sapiens
  CDR3 for beta chain variable domain of TCR clone 26842 (TRBV6-3, TRBJ2-7)
CASSSPGTVFYEQYF

SEQ ID NO: 53685 - protein, 18 aa, Homo sapiens
  CDR3 for alpha chain variable domain of TCR clone 26843 (TRAV21, TRAJ52)
CAVRPSPAGGTSYGKLTF

SEQ ID NO: 53686 - protein, 17 aa, Homo sapiens
  CDR3 for beta chain variable domain of TCR clone 26843 (TRBV28, TRBJ2-5)
CASSTPEGDALQETQYF

SEQ ID NO: 53687 - protein, 13 aa, Homo sapiens
  CDR3 for alpha chain variable domain of TCR clone 26844 (TRAV1-1, TRAJ9)
CAAKNTGGFKIIF

SEQ ID NO: 53688 - protein, 14 aa, Homo sapiens
  CDR3 for beta chain variable domain of TCR clone 26844 (TRBV20-1, TRBJ2-1)
CSAQIGGSANEQFF

SEQ ID NO: 53689 - protein, 15 aa, Homo sapiens
  CDR3 for alpha chain variable domain of TCR clone 26845 (TRAV17, TRAJ23)
CATDAEDNQGGKPIF

SEQ ID NO: 53690 - protein, 12 aa, Homo sapiens
  CDR3 for beta chain variable domain of TCR clone 26845 (TRBV2, TRBJ2-1)
CAKREGYNEQFF

SEQ ID NO: 53691 - protein, 15 aa, Homo sapiens
  CDR3 for alpha chain variable domain of TCR clone 26846 (TRAV12-3, TRAJ6)
CAMSATTGGSYLPTF

SEQ ID NO: 53692 - protein, 16 aa, Homo sapiens
  CDR3 for beta chain variable domain of TCR clone 26846 (TRBV20-1, TRBJ1-2)
CSASMGQGVANYGYTF

SEQ ID NO: 53693 - protein, 16 aa, Homo sapiens
  CDR3 for alpha chain variable domain of TCR clone 26847 (TRAV30, TRAJ24)
CGTEIVDADSWGKLQL

SEQ ID NO: 53694 - protein, 14 aa, Homo sapiens
  CDR3 for beta chain variable domain of TCR clone 26847 (TRBV12-5, TRBJ2-5)
CASGSRTHQETQYF

SEQ ID NO: 53695 - protein, 14 aa, Homo sapiens
  CDR3 for alpha chain variable domain of TCR clone 26848 (TRAV26-1, TRAJ52)
CIPAGGTSHGKLTF

SEQ ID NO: 53696 - protein, 16 aa, Homo sapiens
  CDR3 for beta chain variable domain of TCR clone 26848 (TRBV19, TRBJ2-2)
CASTIGARAGAGELFF

SEQ ID NO: 53697 - protein, 13 aa, Homo sapiens
  CDR3 for alpha chain variable domain of TCR clone 26849 (TRAV13-1, TRAJ6)
CAARRGGSYIPTF

SEQ ID NO: 53698 - protein, 16 aa, Homo sapiens
  CDR3 for beta chain variable domain of TCR clone 26849 (TRBV7-9, TRBJ2-2)
CASSLATGVGTGELSF

SEQ ID NO: 53699 - protein, 12 aa, Homo sapiens
  CDR3 for alpha chain variable domain of TCR clone 26850 (TRAV13-2, TRAJ23)
CAERHRGGKLIF

SEQ ID NO: 53700 - protein, 15 aa, Homo sapiens
  CDR3 for beta chain variable domain of TCR clone 26850 (TRBV11-3, TRBJ2-3)
CASLKDGREGDTQYF

SEQ ID NO: 53701 - protein, 16 aa, Homo sapiens
  CDR3 for alpha chain variable domain of TCR clone 26851 (TRAV30, TRAJ24)
CGTEIVDADSWGKFQF

SEQ ID NO: 53702 - protein, 17 aa, Homo sapiens
  CDR3 for beta chain variable domain of TCR clone 26851 (TRBV20-1, TRBJ2-1)
CSASSSGLAGSSNEQFF

SEQ ID NO: 53703 - protein, 12 aa, Homo sapiens
  CDR3 for alpha chain variable domain of TCR clone 26852 (TRAV12-3, TRAJ17)
CAMTLTGNKLTF

SEQ ID NO: 53704 - protein, 16 aa, Homo sapiens
  CDR3 for beta chain variable domain of TCR clone 26852 (TRBV6-6, TRBJ2-1)
CASSYSFSGSYNEQFF

SEQ ID NO: 53705 - protein, 15 aa, Homo sapiens
  CDR3 for alpha chain variable domain of TCR clone 26853 (TRAV17, TRAJ57)
RATGPSQGGSEKLVF

SEQ ID NO: 53706 - protein, 16 aa, Homo sapiens
  CDR3 for beta chain variable domain of TCR clone 26853 (TRBV12-4, TRBJ1-5)
CASSRPVGGSNQPQHF

SEQ ID NO: 53707 - protein, 12 aa, Homo sapiens
  CDR3 for alpha chain variable domain of TCR clone 26854 (TRAV12-3, TRAJ17)
CAMTLTGNKLTF

SEQ ID NO: 53708 - protein, 15 aa, Homo sapiens
  CDR3 for beta chain variable domain of TCR clone 26854 (TRBV11-2, TRBJ2-1)
CASSKNRGLIYEQFF

SEQ ID NO: 53709 - protein, 12 aa, Homo sapiens
  CDR3 for alpha chain variable domain of TCR clone 26855 (TRAV12-3, TRAJ17)
CAMTLTGNKLTF

SEQ ID NO: 53710 - protein, 13 aa, Homo sapiens
  CDR3 for beta chain variable domain of TCR clone 26855 (TRBV4-1, TRBJ2-1)
CASSQEVQYEQFF

SEQ ID NO: 53711 - protein, 14 aa, Homo sapiens
  CDR3 for alpha chain variable domain of TCR clone 26856 (TRAV38-1, TRAJ45)
CAYYSGGGADGLTF

SEQ ID NO: 53712 - protein, 20 aa, Homo sapiens
  CDR3 for beta chain variable domain of TCR clone 26856 (TRBV28, TRBJ2-1)
CASTPIGRSQGLAGGNEQFF

SEQ ID NO: 53713 - protein, 14 aa, Homo sapiens
  CDR3 for alpha chain variable domain of TCR clone 26857 (TRAV1-2, TRAJ8)
CAVREDTGFQKLVF

SEQ ID NO: 53714 - protein, 12 aa, Homo sapiens
  CDR3 for beta chain variable domain of TCR clone 26857 (TRBV29-1, TRBJ2-3)
CSVTGGADTQYS

SEQ ID NO: 53715 - protein, 15 aa, Homo sapiens
  CDR3 for alpha chain variable domain of TCR clone 26858 (TRAV8-3, TRAJ11)
CAVGLLNSGYSTLTF

SEQ ID NO: 53716 - protein, 14 aa, Homo sapiens
  CDR3 for beta chain variable domain of TCR clone 26858 (TRBV7-2, TRBJ2-7)
CASSPKTSFYEQYF

SEQ ID NO: 53717 - protein, 14 aa, Homo sapiens
  CDR3 for alpha chain variable domain of TCR clone 26859 (TRAV12-1, TRAJ17)
CVVNYKAAGNKLAF

SEQ ID NO: 53718 - protein, 15 aa, Homo sapiens
  CDR3 for beta chain variable domain of TCR clone 26859 (TRBV18, TRBJ2-7)
CASSPTFMDSYEQYF

SEQ ID NO: 53719 - protein, 16 aa, Homo sapiens
  CDR3 for alpha chain variable domain of TCR clone 26860 (TRAV3, TRAJ10)
CAVRDMRAGGGNKLTF

SEQ ID NO: 53720 - protein, 20 aa, Homo sapiens
  CDR3 for beta chain variable domain of TCR clone 26860 (TRBV7-8, TRBJ2-2)
CASSHLFPGPTIHITGELFF

SEQ ID NO: 53721 - protein, 18 aa, Homo sapiens
  CDR3 for alpha chain variable domain of TCR clone 26861 (TRAV21, TRAJ52)
CAVRPSPAGGTSYGKLTF

SEQ ID NO: 53722 - protein, 13 aa, Homo sapiens
  CDR3 for beta chain variable domain of TCR clone 26861 (TRBV11-2, TRBJ2-5)
CASSSTGEETQYF

SEQ ID NO: 53723 - protein, 13 aa, Homo sapiens
  CDR3 for alpha chain variable domain of TCR clone 26862 (TRAV12-2, TRAJ6)
CAVNVSRKLHTYI

SEQ ID NO: 53724 - protein, 14 aa, Homo sapiens
  CDR3 for beta chain variable domain of TCR clone 26862 (TRBV12-5, TRBJ2-5)
CASGSRTHQETQYF

SEQ ID NO: 53725 - protein, 14 aa, Homo sapiens
  CDR3 for alpha chain variable domain of TCR clone 26863 (TRAV2, TRAJ9)
CAVADRSGGFKTIF

SEQ ID NO: 53726 - protein, 15 aa, Homo sapiens
  CDR3 for beta chain variable domain of TCR clone 26863 (TRBV20-1, TRBJ2-7)
CSARDRVSGMDEQYF

SEQ ID NO: 53727 - protein, 16 aa, Homo sapiens
  CDR3 for alpha chain variable domain of TCR clone 26864 (TRAV3, TRAJ37)
CAVRGKGSGNTGKLIF

SEQ ID NO: 53728 - protein, 18 aa, Homo sapiens
  CDR3 for beta chain variable domain of TCR clone 26864 (TRBV11-2, TRBJ2-3)
CASSLGGASRGAPNTQYF

SEQ ID NO: 53729 - protein, 14 aa, Homo sapiens
  CDR3 for alpha chain variable domain of TCR clone 26865 (TRAV21, TRAJ45)
CAAVSGGGADGLTF

SEQ ID NO: 53730 - protein, 14 aa, Homo sapiens
  CDR3 for beta chain variable domain of TCR clone 26865 (TRBV20-1, TRBJ2-3)
CSALGLEGADTQYF

SEQ ID NO: 53731 - protein, 18 aa, Homo sapiens
  CDR3 for alpha chain variable domain of TCR clone 26866 (TRAV21, TRAJ52)
CAVRPSPAGGTSYGKLTF

SEQ ID NO: 53732 - protein, 13 aa, Homo sapiens
  CDR3 for beta chain variable domain of TCR clone 26866 (TRBV29-1, TRBJ2-2)
CSVCREDTGELFF

SEQ ID NO: 53733 - protein, 14 aa, Homo sapiens
  CDR3 for alpha chain variable domain of TCR clone 26867 (TRAV30, TRAJ33)
CGTVAPRSNYQLIW

SEQ ID NO: 53734 - protein, 13 aa, Homo sapiens
  CDR3 for beta chain variable domain of TCR clone 26867 (TRBV7-9, TRBJ1-2)
CASSLKQNYGYTF

SEQ ID NO: 53735 - protein, 18 aa, Homo sapiens
  CDR3 for alpha chain variable domain of TCR clone 26868 (TRAV13-1, TRAJ52)
CAAKNPNAGGTSYGKLTF

SEQ ID NO: 53736 - protein, 14 aa, Homo sapiens
  CDR3 for beta chain variable domain of TCR clone 26868 (TRBV12-4, TRBJ1-2)
CASSNLRGNYGYTF

SEQ ID NO: 53737 - protein, 15 aa, Homo sapiens
  CDR3 for alpha chain variable domain of TCR clone 26869 (TRAV21, TRAJ53)
CATLNSGGSNYKLTF

SEQ ID NO: 53738 - protein, 15 aa, Homo sapiens
  CDR3 for beta chain variable domain of TCR clone 26869 (TRBV5-4, TRBJ2-5)
CAARDRGKEKETQYF

SEQ ID NO: 53739 - protein, 14 aa, Homo sapiens
  CDR3 for alpha chain variable domain of TCR clone 26870 (TRAV20, TRAJ10)
CAVRVEGGGNKLTF

SEQ ID NO: 53740 - protein, 18 aa, Homo sapiens
  CDR3 for beta chain variable domain of TCR clone 26870 (TRBV24-1, TRBJ2-1)
CATSDLMFLGRGVHGQFF

SEQ ID NO: 53741 - protein, 14 aa, Homo sapiens
  CDR3 for alpha chain variable domain of TCR clone 26871 (TRAV12-3, TRAJ6)
CAMSATGGSYVPTF

SEQ ID NO: 53742 - protein, 16 aa, Homo sapiens
  CDR3 for beta chain variable domain of TCR clone 26871 (TRBV4-2, TRBJ2-1)
CASSPRAGQGANEQFF

SEQ ID NO: 53743 - protein, 15 aa, Homo sapiens
  CDR3 for alpha chain variable domain of TCR clone 26872 (TRAV13-1, TRAJ6)
CAAIHPSGGSYIPTF

SEQ ID NO: 53744 - protein, 14 aa, Homo sapiens
  CDR3 for beta chain variable domain of TCR clone 26872 (TRBV7-9, TRBJ2-2)
CASGPAINTGELFF

SEQ ID NO: 53745 - protein, 15 aa, Homo sapiens
  CDR3 for alpha chain variable domain of TCR clone 26873 (TRAV12-1, TRAJ45)
CVVLSGGGGADGLTF

SEQ ID NO: 53746 - protein, 14 aa, Homo sapiens
  CDR3 for beta chain variable domain of TCR clone 26873 (TRBV7-2, TRBJ2-7)
CASSPKTSFYEQYF

SEQ ID NO: 53747 - protein, 15 aa, Homo sapiens
  CDR3 for alpha chain variable domain of TCR clone 26874 (TRAV35, TRAJ58)
CAGRRQETSGSRLTF

SEQ ID NO: 53748 - protein, 16 aa, Homo sapiens
  CDR3 for beta chain variable domain of TCR clone 26874 (TRBV2, TRBJ2-1)
CASSVGGSLSHNEQFF

SEQ ID NO: 53749 - protein, 16 aa, Homo sapiens
  CDR3 for alpha chain variable domain of TCR clone 26875 (TRAV12-2, TRAJ10)
CAVNRVLTGGGNKLTL

SEQ ID NO: 53750 - protein, 12 aa, Homo sapiens
  CDR3 for beta chain variable domain of TCR clone 26875 (TRBV28, TRBJ2-7)
CASSFSSYEQYF

SEQ ID NO: 53751 - protein, 14 aa, Homo sapiens
  CDR3 for alpha chain variable domain of TCR clone 26876 (TRAV9-2, TRAJ39)
CALYIYNAGNMLTF

SEQ ID NO: 53752 - protein, 15 aa, Homo sapiens
  CDR3 for beta chain variable domain of TCR clone 26876 (TRBV4-1, TRBJ1-1)
CASSQEWGHYTEAFF

SEQ ID NO: 53753 - protein, 13 aa, Homo sapiens
  CDR3 for alpha chain variable domain of TCR clone 26877 (TRAV23/DV6, )
CAATALIPDIQNP

SEQ ID NO: 53754 - protein, 16 aa, Homo sapiens
  CDR3 for beta chain variable domain of TCR clone 26877 (TRBV10-3, TRBJ2-7)
CAISPRGQEQTYEQYF

SEQ ID NO: 53755 - protein, 14 aa, Homo sapiens
  CDR3 for alpha chain variable domain of TCR clone 26878 (TRAV8-4, TRAJ13)
CAGTLSGGYQKVTF

SEQ ID NO: 53756 - protein, 14 aa, Homo sapiens
  CDR3 for beta chain variable domain of TCR clone 26878 (TRBV7-2, TRBJ1-2)
CASSQTGSTYGYTF

SEQ ID NO: 53757 - protein, 14 aa, Homo sapiens
  CDR3 for alpha chain variable domain of TCR clone 26879 (TRAV17, TRAJ57)
CATDPQGGSEKLVL

SEQ ID NO: 53758 - protein, 16 aa, Homo sapiens
  CDR3 for beta chain variable domain of TCR clone 26879 (TRBV13, TRBJ2-2)
CASSPRTGEHTGELFF

SEQ ID NO: 53759 - protein, 13 aa, Homo sapiens
  CDR3 for alpha chain variable domain of TCR clone 26880 (TRAV8-1, TRAJ23)
CAVTGGQGGKLIF

SEQ ID NO: 53760 - protein, 14 aa, Homo sapiens
  CDR3 for beta chain variable domain of TCR clone 26880 (TRBV20-1, TRBJ1-1)
CSAQTRIGGAEAFF

SEQ ID NO: 53761 - protein, 14 aa, Homo sapiens
  CDR3 for alpha chain variable domain of TCR clone 26881 (TRAV3, TRAJ22)
CAVRDYGSARQLTF

SEQ ID NO: 53762 - protein, 13 aa, Homo sapiens
  CDR3 for beta chain variable domain of TCR clone 26881 (TRBV11-2, TRBJ2-5)
CASGHGAKETRYF

SEQ ID NO: 53763 - protein, 15 aa, Homo sapiens
  CDR3 for alpha chain variable domain of TCR clone 26882 (TRAV3, TRAJ3)
CAVRDRGSSASKIIF

SEQ ID NO: 53764 - protein, 18 aa, Homo sapiens
  CDR3 for beta chain variable domain of TCR clone 26882 (TRBV25-1, TRBJ1-2)
CASSGLQNGQGLIFGYTF

SEQ ID NO: 53765 - protein, 12 aa, Homo sapiens
  CDR3 for alpha chain variable domain of TCR clone 26883 (TRAV13-2, TRAJ23)
CAERHRGGKLIF

SEQ ID NO: 53766 - protein, 13 aa, Homo sapiens
  CDR3 for beta chain variable domain of TCR clone 26883 (TRBV20-1, TRBJ2-5)
CSAATELQETQYF

SEQ ID NO: 53767 - protein, 12 aa, Homo sapiens
  CDR3 for alpha chain variable domain of TCR clone 26884 (TRAV27, TRAJ35)
CAGADFGNVLHC

SEQ ID NO: 53768 - protein, 13 aa, Homo sapiens
  CDR3 for beta chain variable domain of TCR clone 26884 (TRBV7-3, TRBJ1-1)
CASSQDWGAEAFF

SEQ ID NO: 53769 - protein, 14 aa, Homo sapiens
  CDR3 for alpha chain variable domain of TCR clone 26885 (TRAV12-3, TRAJ54)
CAMSALQGAQKLVF

SEQ ID NO: 53770 - protein, 15 aa, Homo sapiens
  CDR3 for beta chain variable domain of TCR clone 26885 (TRBV19, TRBJ2-4)
CASSTPGIAKNMQYF

SEQ ID NO: 53771 - protein, 14 aa, Homo sapiens
  CDR3 for alpha chain variable domain of TCR clone 26886 (TRAV1-2, TRAJ8)
CAVREDTGFQKLVF

SEQ ID NO: 53772 - protein, 15 aa, Homo sapiens
  CDR3 for beta chain variable domain of TCR clone 26886 (TRBV7-9, TRBJ1-4)
CASNARTGGNEKLFF

SEQ ID NO: 53773 - protein, 14 aa, Homo sapiens
  CDR3 for alpha chain variable domain of TCR clone 26887 (TRAV1-2, TRAJ16)
CAVNRFSDGQKLLF

SEQ ID NO: 53774 - protein, 14 aa, Homo sapiens
  CDR3 for beta chain variable domain of TCR clone 26887 (TRBV20-1, TRBJ2-7)
CSAPELAGVGEQYF

SEQ ID NO: 53775 - protein, 12 aa, Homo sapiens
  CDR3 for alpha chain variable domain of TCR clone 26888 (TRAV13-1, TRAJ49)
CAASPMGNRFYF

SEQ ID NO: 53776 - protein, 13 aa, Homo sapiens
  CDR3 for beta chain variable domain of TCR clone 26888 (TRBV20-1, TRBJ2-2)
CSASAAGTGELFF

SEQ ID NO: 53777 - protein, 16 aa, Homo sapiens
  CDR3 for alpha chain variable domain of TCR clone 26889 (TRAV3, TRAJ10)
CAVRDMRAGGGNKLTF

SEQ ID NO: 53778 - protein, 14 aa, Homo sapiens
  CDR3 for beta chain variable domain of TCR clone 26889 (TRBV4-1, TRBJ2-2)
CASSQAVNTGELFF

SEQ ID NO: 53779 - protein, 13 aa, Homo sapiens
  CDR3 for alpha chain variable domain of TCR clone 26890 (TRAV24, TRAJ48)
CAFNILGNEKLTF

SEQ ID NO: 53780 - protein, 14 aa, Homo sapiens
  CDR3 for beta chain variable domain of TCR clone 26890 (TRBV5-1, TRBJ2-7)
CASNTGTGFYEQYF

SEQ ID NO: 53781 - protein, 12 aa, Homo sapiens
  CDR3 for alpha chain variable domain of TCR clone 26891 (TRAV21, TRAJ33)
CAKMDGNYQLIW

SEQ ID NO: 53782 - protein, 14 aa, Homo sapiens
  CDR3 for beta chain variable domain of TCR clone 26891 (TRBV2, TRBJ2-7)
CASSLTSGGYEQYF

SEQ ID NO: 53783 - protein, 14 aa, Homo sapiens
  CDR3 for alpha chain variable domain of TCR clone 26892 (TRAV12-1, TRAJ23)
CVVIVYNQGGKLIF

SEQ ID NO: 53784 - protein, 15 aa, Homo sapiens
  CDR3 for beta chain variable domain of TCR clone 26892 (TRBV20-1, TRBJ1-5)
CSANPPGQGPQPQHF

SEQ ID NO: 53785 - protein, 12 aa, Homo sapiens
  CDR3 for alpha chain variable domain of TCR clone 26893 (TRAV2, TRAJ9)
CAVGAGGFKTIF

SEQ ID NO: 53786 - protein, 13 aa, Homo sapiens
  CDR3 for beta chain variable domain of TCR clone 26893 (TRBV6-1, TRBJ1-3)
CQRAGGGGNTIYF

SEQ ID NO: 53787 - protein, 14 aa, Homo sapiens
  CDR3 for alpha chain variable domain of TCR clone 26894 (TRAV12-2, TRAJ9)
CAVRGQTGGFKAIF

SEQ ID NO: 53788 - protein, 15 aa, Homo sapiens
  CDR3 for beta chain variable domain of TCR clone 26894 (TRBV7-2, TRBJ2-7)
CASSFTGQGAQEQYF

SEQ ID NO: 53789 - protein, 14 aa, Homo sapiens
  CDR3 for alpha chain variable domain of TCR clone 26895 (TRAV1-2, TRAJ10)
CAVRVTGGGNKLTF

SEQ ID NO: 53790 - protein, 12 aa, Homo sapiens
  CDR3 for beta chain variable domain of TCR clone 26895 (TRBV24-1, TRBJ1-1)
CATLYPDTEAFF

SEQ ID NO: 53791 - protein, 16 aa, Homo sapiens
  CDR3 for alpha chain variable domain of TCR clone 26896 (TRAV14/DV4, TRAJ53)
CAMREGGGGSNYKLTF

SEQ ID NO: 53792 - protein, 15 aa, Homo sapiens
  CDR3 for beta chain variable domain of TCR clone 26896 (TRBV29-1, TRBJ2-1)
CSVGRHALFYNEQFF

SEQ ID NO: 53793 - protein, 17 aa, Homo sapiens
  CDR3 for alpha chain variable domain of TCR clone 26897 (TRAV3, TRAJ6)
CAVRDGPRAGGSYIPTF

SEQ ID NO: 53794 - protein, 20 aa, Homo sapiens
  CDR3 for beta chain variable domain of TCR clone 26897 (TRBV28, TRBJ2-1)
CASTPIGLSPGLAGGNEQFF

SEQ ID NO: 53795 - protein, 17 aa, Homo sapiens
  CDR3 for alpha chain variable domain of TCR clone 26898 (TRAV3, TRAJ6)
CAVRAGPRAGGSYIPTF

SEQ ID NO: 53796 - protein, 20 aa, Homo sapiens
  CDR3 for beta chain variable domain of TCR clone 26898 (TRBV28, TRBJ2-1)
CASTPIGRSPGLAGGNEQFF

SEQ ID NO: 53797 - protein, 13 aa, Homo sapiens
  CDR3 for alpha chain variable domain of TCR clone 26899 (TRAV1-1, TRAJ9)
CAAKNTGGFKTIF

SEQ ID NO: 53798 - protein, 14 aa, Homo sapiens
  CDR3 for beta chain variable domain of TCR clone 26899 (TRBV20-1, TRBJ2-1)
CSAQIGGSANERFF

SEQ ID NO: 53799 - protein, 13 aa, Homo sapiens
  CDR3 for alpha chain variable domain of TCR clone 26900 (TRAV8-6, TRAJ49)
CAVITNTGNQFYF

SEQ ID NO: 53800 - protein, 16 aa, Homo sapiens
  CDR3 for beta chain variable domain of TCR clone 26900 (TRBV7-3, TRBJ2-2)
CASSLKRGTLSGELFF

SEQ ID NO: 53801 - protein, 18 aa, Homo sapiens
  CDR3 for alpha chain variable domain of TCR clone 26901 (TRAV26-1, TRAJ42)
CIVRPPLNYGGSQGNLIF

SEQ ID NO: 53802 - protein, 12 aa, Homo sapiens
  CDR3 for beta chain variable domain of TCR clone 26901 (TRBV25-1, TRBJ2-7)
CASKRGTGEQYF

SEQ ID NO: 53803 - protein, 14 aa, Homo sapiens
  CDR3 for alpha chain variable domain of TCR clone 26902 (TRAV8-4, TRAJ13)
CAVTLSGGYQKVTF

SEQ ID NO: 53804 - protein, 14 aa, Homo sapiens
  CDR3 for beta chain variable domain of TCR clone 26902 (TRBV7-2, TRBJ1-2)
CASSQTGSTYDYTF

SEQ ID NO: 53805 - protein, 14 aa, Homo sapiens
  CDR3 for alpha chain variable domain of TCR clone 26903 (TRAV29/DV5, TRAJ45)
CAASFRGGADGLTF

SEQ ID NO: 53806 - protein, 11 aa, Homo sapiens
  CDR3 for beta chain variable domain of TCR clone 26903 (TRBV11-2, TRBJ2-2)
CAGSLPGELFF

SEQ ID NO: 53807 - protein, 14 aa, Homo sapiens
  CDR3 for alpha chain variable domain of TCR clone 26904 (TRAV35, TRAJ22)
CAGLRPGSARQLTF

SEQ ID NO: 53808 - protein, 12 aa, Homo sapiens
  CDR3 for beta chain variable domain of TCR clone 26904 (TRBV11-2, TRBJ2-2)
CASSLGGGELFF

SEQ ID NO: 53809 - protein, 14 aa, Homo sapiens
  CDR3 for alpha chain variable domain of TCR clone 26905 (TRAV29/DV5, TRAJ36)
CAARRKTWANNLFF

SEQ ID NO: 53810 - protein, 14 aa, Homo sapiens
  CDR3 for beta chain variable domain of TCR clone 26905 (TRBV12-5, TRBJ2-5)
CASGSRTHQETQYF

SEQ ID NO: 53811 - protein, 14 aa, Homo sapiens
  CDR3 for alpha chain variable domain of TCR clone 26906 (TRAV1-2, TRAJ8)
CAVREDTGFQKLVF

SEQ ID NO: 53812 - protein, 12 aa, Homo sapiens
  CDR3 for beta chain variable domain of TCR clone 26906 (TRBV7-9, TRBJ2-7)
CASSLEGYEQYF

SEQ ID NO: 53813 - protein, 14 aa, Homo sapiens
  CDR3 for alpha chain variable domain of TCR clone 26907 (TRAV13-1, TRAJ44)
CAAKATGTASKLTF

SEQ ID NO: 53814 - protein, 17 aa, Homo sapiens
  CDR3 for beta chain variable domain of TCR clone 26907 (TRBV7-3, TRBJ2-3)
RASSLMKRMWGADTQYF

SEQ ID NO: 53815 - protein, 12 aa, Homo sapiens
  CDR3 for alpha chain variable domain of TCR clone 26908 (TRAV9-2, TRAJ36)
CALKKGANNLFF

SEQ ID NO: 53816 - protein, 14 aa, Homo sapiens
  CDR3 for beta chain variable domain of TCR clone 26908 (TRBV7-3, TRBJ1-1)
CASSLKGGNTEAFF

SEQ ID NO: 53817 - protein, 15 aa, Homo sapiens
  CDR3 for alpha chain variable domain of TCR clone 26909 (TRAV17, TRAJ57)
CATGPSQGGSGKLVF

SEQ ID NO: 53818 - protein, 14 aa, Homo sapiens
  CDR3 for beta chain variable domain of TCR clone 26909 (TRBV12-5, TRBJ2-5)
CASGSRTHQETQYF

SEQ ID NO: 53819 - protein, 15 aa, Homo sapiens
  CDR3 for alpha chain variable domain of TCR clone 26910 (TRAV26-1, TRAJ29)
CIVRVEGSGNTPLVF

SEQ ID NO: 53820 - protein, 16 aa, Homo sapiens
  CDR3 for beta chain variable domain of TCR clone 26910 (TRBV7-9, TRBJ1-2)
CASSLGFSSGEDGYTF

SEQ ID NO: 53821 - protein, 16 aa, Homo sapiens
  CDR3 for alpha chain variable domain of TCR clone 26911 (TRAV26-2, TRAJ57)
CILRDVGSGGSEKLVF

SEQ ID NO: 53822 - protein, 13 aa, Homo sapiens
  CDR3 for beta chain variable domain of TCR clone 26911 (TRBV18, TRBJ2-3)
CASSPGVKDTQYF

SEQ ID NO: 53823 - protein, 14 aa, Homo sapiens
  CDR3 for alpha chain variable domain of TCR clone 26912 (TRAV12-2, TRAJ13)
CAVKKTGGYQKVTF

SEQ ID NO: 53824 - protein, 17 aa, Homo sapiens
  CDR3 for beta chain variable domain of TCR clone 26912 (TRBV20-1, TRBJ2-1)
CSASSSGLAGSYNEQFF

SEQ ID NO: 53825 - protein, 14 aa, Homo sapiens
  CDR3 for alpha chain variable domain of TCR clone 26913 (TRAV8-2, TRAJ4)
CVVSPSGGYNKLIF

SEQ ID NO: 53826 - protein, 15 aa, Homo sapiens
  CDR3 for beta chain variable domain of TCR clone 26913 (TRBV4-1, TRBJ1-4)
RASSDTGGTNEKLFF

SEQ ID NO: 53827 - protein, 18 aa, Homo sapiens
  CDR3 for alpha chain variable domain of TCR clone 26914 (TRAV12-3, TRAJ52)
CAMSRTNAGGTSHGKLTF

SEQ ID NO: 53828 - protein, 17 aa, Homo sapiens
  CDR3 for beta chain variable domain of TCR clone 26914 (TRBV7-3, TRBJ2-3)
CASSLMKRMRGADTQYF

SEQ ID NO: 53829 - protein, 12 aa, Homo sapiens
  CDR3 for alpha chain variable domain of TCR clone 26915 (TRAV3, TRAJ39)
CAVVEWSNMLTF

SEQ ID NO: 53830 - protein, 14 aa, Homo sapiens
  CDR3 for beta chain variable domain of TCR clone 26915 (TRBV7-8, TRBJ2-3)
CASSFPDGQDTQYF

SEQ ID NO: 53831 - protein, 15 aa, Homo sapiens
  CDR3 for alpha chain variable domain of TCR clone 26916 (TRAV17, TRAJ10)
CATVLLTGGGNKLTF

SEQ ID NO: 53832 - protein, 17 aa, Homo sapiens
  CDR3 for beta chain variable domain of TCR clone 26916 (TRBV11-2, TRBJ2-1)
CASSLYPPGVEYNEQFS

SEQ ID NO: 53833 - protein, 15 aa, Homo sapiens
  CDR3 for alpha chain variable domain of TCR clone 26917 (TRAV8-3, TRAJ15)
CAVGAPNQAGTALIF

SEQ ID NO: 53834 - protein, 14 aa, Homo sapiens
  CDR3 for beta chain variable domain of TCR clone 26917 (TRBV20-1, TRBJ2-1)
CGPNDEASYNEQFF

SEQ ID NO: 53835 - protein, 14 aa, Homo sapiens
  CDR3 for alpha chain variable domain of TCR clone 26918 (TRAV12-2, TRAJ6)
CASQWGGGSYIPTF

SEQ ID NO: 53836 - protein, 13 aa, Homo sapiens
  CDR3 for beta chain variable domain of TCR clone 26918 (TRBV2, TRBJ1-1)
CASSEGGNTEAFF

SEQ ID NO: 53837 - protein, 13 aa, Homo sapiens
  CDR3 for alpha chain variable domain of TCR clone 26919 (TRAV8-3, TRAJ48)
CAVVPFGNEKLTF

SEQ ID NO: 53838 - protein, 19 aa, Homo sapiens
  CDR3 for beta chain variable domain of TCR clone 26919 (TRBV25-1, TRBJ2-2)
CATLVYRVDRGRKTGELFF

SEQ ID NO: 53839 - protein, 15 aa, Homo sapiens
  CDR3 for alpha chain variable domain of TCR clone 26920 (TRAV34, TRAJ36)
CGAPSRPGGANNLFF

SEQ ID NO: 53840 - protein, 16 aa, Homo sapiens
  CDR3 for beta chain variable domain of TCR clone 26920 (TRBV4-3, TRBJ2-1)
CASSYRRLGSWDEQFF

SEQ ID NO: 53841 - protein, 18 aa, Homo sapiens
  CDR3 for alpha chain variable domain of TCR clone 26921 (TRAV13-1, TRAJ52)
CAAKNPNAGGTSYGKLTF

SEQ ID NO: 53842 - protein, 17 aa, Homo sapiens
  CDR3 for beta chain variable domain of TCR clone 26921 (TRBV11-2, TRBJ2-1)
CASSLYPPGVEYNEQLF

SEQ ID NO: 53843 - protein, 14 aa, Homo sapiens
  CDR3 for alpha chain variable domain of TCR clone 26922 (TRAV26-1, TRAJ38)
CIADNAGNNRKLIW

SEQ ID NO: 53844 - protein, 13 aa, Homo sapiens
  CDR3 for beta chain variable domain of TCR clone 26922 (TRBV20-1, TRBJ1-1)
CSARGGGNTEAFV

SEQ ID NO: 53845 - protein, 17 aa, Homo sapiens
  CDR3 for alpha chain variable domain of TCR clone 26923 (TRAV3, TRAJ6)
CAVRDGPRAGGSYIPTF

SEQ ID NO: 53846 - protein, 20 aa, Homo sapiens
  CDR3 for beta chain variable domain of TCR clone 26923 (TRBV28, TRBJ2-1)
CAGTPIGRSPGLAGGNEQFF

SEQ ID NO: 53847 - protein, 11 aa, Homo sapiens
  CDR3 for alpha chain variable domain of TCR clone 26924 (TRAV3, TRAJ21)
CAVGNFNKFYF

SEQ ID NO: 53848 - protein, 15 aa, Homo sapiens
  CDR3 for beta chain variable domain of TCR clone 26924 (TRBV5-1, TRBJ2-5)
CASSLGLAEQETQYF

SEQ ID NO: 53849 - protein, 12 aa, Homo sapiens
  CDR3 for alpha chain variable domain of TCR clone 26925 (TRAV3, TRAJ43)
CAVRDPNNDIRF

SEQ ID NO: 53850 - protein, 15 aa, Homo sapiens
  CDR3 for beta chain variable domain of TCR clone 26925 (TRBV4-3, TRBJ2-7)
CASSQGDWGDYEQYF

SEQ ID NO: 53851 - protein, 11 aa, Homo sapiens
  CDR3 for alpha chain variable domain of TCR clone 26926 (TRAV12-1, TRAJ34)
CVVNKVRELIF

SEQ ID NO: 53852 - protein, 12 aa, Homo sapiens
  CDR3 for beta chain variable domain of TCR clone 26926 (TRBV2, TRBJ2-1)
CAYGPPGNEQFF

SEQ ID NO: 53853 - protein, 13 aa, Homo sapiens
  CDR3 for alpha chain variable domain of TCR clone 26927 (TRAV27, TRAJ29)
CAGAHPGNTPLVF

SEQ ID NO: 53854 - protein, 14 aa, Homo sapiens
  CDR3 for beta chain variable domain of TCR clone 26927 (TRBV7-9, TRBJ2-7)
CASSIGQGAGEQYF

SEQ ID NO: 53855 - protein, 10 aa, Homo sapiens
  CDR3 for alpha chain variable domain of TCR clone 26928 (TRAV26-1, TRAJ40)
CIAGTYKYIF

SEQ ID NO: 53856 - protein, 14 aa, Homo sapiens
  CDR3 for beta chain variable domain of TCR clone 26928 (TRBV19, TRBJ2-1)
CASPTFVLSGEQFF

SEQ ID NO: 53857 - protein, 17 aa, Homo sapiens
  CDR3 for alpha chain variable domain of TCR clone 26929 (TRAV13-1, TRAJ52)
CAAGSGAGGTSYGKLTF

SEQ ID NO: 53858 - protein, 15 aa, Homo sapiens
  CDR3 for beta chain variable domain of TCR clone 26929 (TRBV2, TRBJ2-1)
CASSELAGSYNEQFF

SEQ ID NO: 53859 - protein, 15 aa, Homo sapiens
  CDR3 for alpha chain variable domain of TCR clone 26930 (TRAV12-3, TRAJ6)
CAMSATTGGSYIPTF

SEQ ID NO: 53860 - protein, 19 aa, Homo sapiens
  CDR3 for beta chain variable domain of TCR clone 26930 (TRBV11-2, TRBJ2-2)
LRTRPCISVPAAYPGSCFF

SEQ ID NO: 53861 - protein, 12 aa, Homo sapiens
  CDR3 for alpha chain variable domain of TCR clone 26931 (TRAV1-1, TRAJ8)
CAGGTGFQKLVF

SEQ ID NO: 53862 - protein, 15 aa, Homo sapiens
  CDR3 for beta chain variable domain of TCR clone 26931 (TRBV7-9, TRBJ1-4)
CASSLTGGFNEKLFF

SEQ ID NO: 53863 - protein, 12 aa, Homo sapiens
  CDR3 for alpha chain variable domain of TCR clone 26932 (TRAV12-3, TRAJ17)
CAMTLTGNKLTF

SEQ ID NO: 53864 - protein, 17 aa, Homo sapiens
  CDR3 for beta chain variable domain of TCR clone 26932 (TRBV24-1, TRBJ2-1)
CATSDVSTSGTYNEQFF

SEQ ID NO: 53865 - protein, 12 aa, Homo sapiens
  CDR3 for alpha chain variable domain of TCR clone 26933 (TRAV12-3, TRAJ17)
CAMALTSNKLTF

SEQ ID NO: 53866 - protein, 15 aa, Homo sapiens
  CDR3 for beta chain variable domain of TCR clone 26933 (TRBV20-1, TRBJ2-7)
CSARDRVSGLDEQYF

SEQ ID NO: 53867 - protein, 13 aa, Homo sapiens
  CDR3 for alpha chain variable domain of TCR clone 26934 (TRAV21, TRAJ57)
CAVTQGGSEKLVF

SEQ ID NO: 53868 - protein, 15 aa, Homo sapiens
  CDR3 for beta chain variable domain of TCR clone 26934 (TRBV7-9, TRBJ1-6)
CASSSPGRGNSPLHF

SEQ ID NO: 53869 - protein, 18 aa, Homo sapiens
  CDR3 for alpha chain variable domain of TCR clone 26935 (TRAV21, TRAJ52)
CAVRPSPAGGTSYGKLTF

SEQ ID NO: 53870 - protein, 12 aa, Homo sapiens
  CDR3 for beta chain variable domain of TCR clone 26935 (TRBV14, TRBJ2-5)
CASSQLKETQYF

SEQ ID NO: 53871 - protein, 15 aa, Homo sapiens
  CDR3 for alpha chain variable domain of TCR clone 26936 (TRAV21, TRAJ53)
CATLNSGGSNYKLTF

SEQ ID NO: 53872 - protein, 11 aa, Homo sapiens
  CDR3 for beta chain variable domain of TCR clone 26936 (TRBV11-2, TRBJ2-2)
CASSLPGELFF

SEQ ID NO: 53873 - protein, 14 aa, Homo sapiens
  CDR3 for alpha chain variable domain of TCR clone 26937 (TRAV38-1, TRAJ40)
CALRPTSGTYKYIF

SEQ ID NO: 53874 - protein, 16 aa, Homo sapiens
  CDR3 for beta chain variable domain of TCR clone 26937 (TRBV12-5, TRBJ2-5)
CASGPRTSGNQETQYF

SEQ ID NO: 53875 - protein, 16 aa, Homo sapiens
  CDR3 for alpha chain variable domain of TCR clone 26938 (TRAV3, TRAJ37)
CAVRGKGSGNTGKLIF

SEQ ID NO: 53876 - protein, 14 aa, Homo sapiens
  CDR3 for beta chain variable domain of TCR clone 26938 (TRBV7-3, TRBJ1-1)
CASSLKGGNTEAFF

SEQ ID NO: 53877 - protein, 12 aa, Homo sapiens
  CDR3 for alpha chain variable domain of TCR clone 26939 (TRAV12-3, TRAJ17)
CAMTLTDNKLTF

SEQ ID NO: 53878 - protein, 15 aa, Homo sapiens
  CDR3 for beta chain variable domain of TCR clone 26939 (TRBV20-1, TRBJ2-7)
CSARDRVSGMDERYF

SEQ ID NO: 53879 - protein, 12 aa, Homo sapiens
  CDR3 for alpha chain variable domain of TCR clone 26940 (TRAV13-1, TRAJ53)
AASGGSNYKLTF

SEQ ID NO: 53880 - protein, 16 aa, Homo sapiens
  CDR3 for beta chain variable domain of TCR clone 26940 (TRBV20-1, TRBJ1-4)
CSAPGQGLLTNEKLFF

SEQ ID NO: 53881 - protein, 15 aa, Homo sapiens
  CDR3 for alpha chain variable domain of TCR clone 26941 (TRAV20, TRAJ6)
CAVRLQSGGSYIPTF

SEQ ID NO: 53882 - protein, 14 aa, Homo sapiens
  CDR3 for beta chain variable domain of TCR clone 26941 (TRBV12-4, TRBJ2-7)
CASSASGDWYEQYF

SEQ ID NO: 53883 - protein, 12 aa, Homo sapiens
  CDR3 for alpha chain variable domain of TCR clone 26942 (TRAV21, TRAJ31)
CAVWGNNARLMF

SEQ ID NO: 53884 - protein, 16 aa, Homo sapiens
  CDR3 for beta chain variable domain of TCR clone 26942 (TRBV27, TRBJ2-5)
CASSYGPVGQKETQYF

SEQ ID NO: 53885 - protein, 12 aa, Homo sapiens
  CDR3 for alpha chain variable domain of TCR clone 26943 (TRAV12-3, TRAJ17)
CAMTLTGNKLTF

SEQ ID NO: 53886 - protein, 15 aa, Homo sapiens
  CDR3 for beta chain variable domain of TCR clone 26943 (TRBV20-1, TRBJ2-7)
CSATDRVSGMDEQYF

SEQ ID NO: 53887 - protein, 13 aa, Homo sapiens
  CDR3 for alpha chain variable domain of TCR clone 26944 (TRAV27, TRAJ42)
CAGARGSQGNLIF

SEQ ID NO: 53888 - protein, 15 aa, Homo sapiens
  CDR3 for beta chain variable domain of TCR clone 26944 (TRBV10-3, TRBJ2-2)
CAIRTDREDTGELFS

SEQ ID NO: 53889 - protein, 14 aa, Homo sapiens
  CDR3 for alpha chain variable domain of TCR clone 26945 (TRAV12-3, TRAJ22)
CAMSLLGSARQLTF

SEQ ID NO: 53890 - protein, 11 aa, Homo sapiens
  CDR3 for beta chain variable domain of TCR clone 26945 (TRBV12-4, TRBJ2-2)
CASSSAGELFF

SEQ ID NO: 53891 - protein, 12 aa, Homo sapiens
  CDR3 for alpha chain variable domain of TCR clone 26946 (TRAV3, TRAJ43)
CAVRDPNNDMRF

SEQ ID NO: 53892 - protein, 17 aa, Homo sapiens
  CDR3 for beta chain variable domain of TCR clone 26946 (TRBV13, TRBJ2-3)
CASSLSRVAGGRNTQYF

SEQ ID NO: 53893 - protein, 15 aa, Homo sapiens
  CDR3 for alpha chain variable domain of TCR clone 26947 (TRAV17, TRAJ57)
CATGPSQGGSEKLVF

SEQ ID NO: 53894 - protein, 16 aa, Homo sapiens
  CDR3 for beta chain variable domain of TCR clone 26947 (TRBV7-3, TRBJ2-2)
CASSLKRGTLSGELFF

SEQ ID NO: 53895 - protein, 14 aa, Homo sapiens
  CDR3 for alpha chain variable domain of TCR clone 26948 (TRAV17, TRAJ22)
YATSPSGSARQLTF

SEQ ID NO: 53896 - protein, 15 aa, Homo sapiens
  CDR3 for beta chain variable domain of TCR clone 26948 (TRBV4-1, TRBJ2-5)
CASSQWDLYQETQYF

SEQ ID NO: 53897 - protein, 14 aa, Homo sapiens
  CDR3 for alpha chain variable domain of TCR clone 26949 (TRAV26-1, TRAJ39)
CIVRGSRAGNMLTF

SEQ ID NO: 53898 - protein, 15 aa, Homo sapiens
  CDR3 for beta chain variable domain of TCR clone 26949 (TRBV7-9, TRBJ1-5)
CASSQGHQPNQPQHV

SEQ ID NO: 53899 - protein, 16 aa, Homo sapiens
  CDR3 for alpha chain variable domain of TCR clone 26950 (TRAV4, TRAJ9)
CLVGDPNRPGGFKTIF

SEQ ID NO: 53900 - protein, 16 aa, Homo sapiens
  CDR3 for beta chain variable domain of TCR clone 26950 (TRBV28, TRBJ1-4)
CAGSPPYRGRSEKLFF

SEQ ID NO: 53901 - protein, 15 aa, Homo sapiens
  CDR3 for alpha chain variable domain of TCR clone 26951 (TRAV27, TRAJ38)
CAARRNAGNNRKLIW

SEQ ID NO: 53902 - protein, 16 aa, Homo sapiens
  CDR3 for beta chain variable domain of TCR clone 26951 (TRBV7-3, TRBJ2-2)
CASSLKRGTLSGELFF

SEQ ID NO: 53903 - protein, 13 aa, Homo sapiens
  CDR3 for alpha chain variable domain of TCR clone 26952 (TRAV27, TRAJ41)
CAGEGNSGYALNF

SEQ ID NO: 53904 - protein, 16 aa, Homo sapiens
  CDR3 for beta chain variable domain of TCR clone 26952 (TRBV19, TRBJ2-1)
CASSKAGPSSYNEQFF

SEQ ID NO: 53905 - protein, 13 aa, Homo sapiens
  CDR3 for alpha chain variable domain of TCR clone 26953 (TRAV2, TRAJ15)
CAVASQAGTALIF

SEQ ID NO: 53906 - protein, 16 aa, Homo sapiens
  CDR3 for beta chain variable domain of TCR clone 26953 (TRBV5-1, TRBJ1-1)
CASSSGGNSLNTEALF

SEQ ID NO: 53907 - protein, 13 aa, Homo sapiens
  CDR3 for alpha chain variable domain of TCR clone 26954 (TRAV21, TRAJ57)
CAVTQGGSEKLVF

SEQ ID NO: 53908 - protein, 15 aa, Homo sapiens
  CDR3 for beta chain variable domain of TCR clone 26954 (TRBV28, TRBJ2-1)
CASSGLAEVDNEQFF

SEQ ID NO: 53909 - protein, 15 aa, Homo sapiens
  CDR3 for alpha chain variable domain of TCR clone 26955 (TRAV1-2, TRAJ12)
CADARWMDSSYKLIF

SEQ ID NO: 53910 - protein, 15 aa, Homo sapiens
  CDR3 for beta chain variable domain of TCR clone 26955 (TRBV9, TRBJ1-6)
CASSVAGTGDSPLHF

SEQ ID NO: 53911 - protein, 23 aa, Homo sapiens
  CDR3 for alpha chain variable domain of TCR clone 26956 (TRAV26-1, TRAJ38)
CIADNAGNNHVQNPDPAVYQLRD

SEQ ID NO: 53912 - protein, 13 aa, Homo sapiens
  CDR3 for beta chain variable domain of TCR clone 26956 (TRBV20-1, TRBJ1-1)
CSARGGGNTEAFF

SEQ ID NO: 53913 - protein, 12 aa, Homo sapiens
  CDR3 for alpha chain variable domain of TCR clone 26957 (TRAV12-3, TRAJ17)
CAMTLTGNKLTF

SEQ ID NO: 53914 - protein, 15 aa, Homo sapiens
  CDR3 for beta chain variable domain of TCR clone 26957 (TRBV18, TRBJ1-1)
CASSPRQGENTEAFF

SEQ ID NO: 53915 - protein, 13 aa, Homo sapiens
  CDR3 for alpha chain variable domain of TCR clone 26958 (TRAV2, TRAJ15)
CAVASQAGTALIF

SEQ ID NO: 53916 - protein, 15 aa, Homo sapiens
  CDR3 for beta chain variable domain of TCR clone 26958 (TRBV28, TRBJ2-1)
CASSIIAGGRSEQFF

SEQ ID NO: 53917 - protein, 11 aa, Homo sapiens
  CDR3 for alpha chain variable domain of TCR clone 26959 (TRAV27, TRAJ47)
CRSNQGSKLVF

SEQ ID NO: 53918 - protein, 16 aa, Homo sapiens
  CDR3 for beta chain variable domain of TCR clone 26959 (TRBV12-4, TRBJ1-5)
CASSRPVGGSNQPQHF

SEQ ID NO: 53919 - protein, 12 aa, Homo sapiens
  CDR3 for alpha chain variable domain of TCR clone 26960 (TRAV23/DV6, TRAJ30)
CAASKGDDKIIF

SEQ ID NO: 53920 - protein, 15 aa, Homo sapiens
  CDR3 for beta chain variable domain of TCR clone 26960 (TRBV29-1, TRBJ2-1)
CSGGDRKSSYNEQFF

SEQ ID NO: 53921 - protein, 11 aa, Homo sapiens
  CDR3 for alpha chain variable domain of TCR clone 26961 (TRAV21, TRAJ11)
CAVNGYSTLTF

SEQ ID NO: 53922 - protein, 11 aa, Homo sapiens
  CDR3 for beta chain variable domain of TCR clone 26961 (TRBV19, TRBJ1-1)
CASSIGCEAFF

SEQ ID NO: 53923 - protein, 10 aa, Homo sapiens
  CDR3 for alpha chain variable domain of TCR clone 26962 (TRAV21, TRAJ31)
CAVDNARLMF

SEQ ID NO: 53924 - protein, 17 aa, Homo sapiens
  CDR3 for beta chain variable domain of TCR clone 26962 (TRBV11-2, TRBJ2-1)
CASSLYPPGVEYNEQFF

SEQ ID NO: 53925 - protein, 14 aa, Homo sapiens
  CDR3 for alpha chain variable domain of TCR clone 26963 (TRAV13-1, TRAJ44)
CAAKATGTASELTF

SEQ ID NO: 53926 - protein, 13 aa, Homo sapiens
  CDR3 for beta chain variable domain of TCR clone 26963 (TRBV5-5, TRBJ1-2)
CASSFWRGEDYTF

SEQ ID NO: 53927 - protein, 14 aa, Homo sapiens
  CDR3 for alpha chain variable domain of TCR clone 26964 (TRAV1-2, TRAJ16)
CAVNRFSDGQKLLF

SEQ ID NO: 53928 - protein, 16 aa, Homo sapiens
  CDR3 for beta chain variable domain of TCR clone 26964 (TRBV20-1, TRBJ1-4)
CSAPGQGVLTNEKLFF

SEQ ID NO: 53929 - protein, 12 aa, Homo sapiens
  CDR3 for alpha chain variable domain of TCR clone 26965 (TRAV12-1, TRAJ20)
CVANPDDYKLSF

SEQ ID NO: 53930 - protein, 15 aa, Homo sapiens
  CDR3 for beta chain variable domain of TCR clone 26965 (TRBV11-3, TRBJ2-2)
CASSLVGTGAGELFF

SEQ ID NO: 53931 - protein, 13 aa, Homo sapiens
  CDR3 for alpha chain variable domain of TCR clone 26966 (TRAV35, TRAJ42)
CAGFPGSQGNLIF

SEQ ID NO: 53932 - protein, 15 aa, Homo sapiens
  CDR3 for beta chain variable domain of TCR clone 26966 (TRBV11-3, TRBJ2-3)
CASLKDGREGDTQYF

SEQ ID NO: 53933 - protein, 17 aa, Homo sapiens
  CDR3 for alpha chain variable domain of TCR clone 26967 (TRAV13-1, TRAJ52)
CAASSGAGGTSYGKMTF

SEQ ID NO: 53934 - protein, 15 aa, Homo sapiens
  CDR3 for beta chain variable domain of TCR clone 26967 (TRBV2, TRBJ2-1)
CASSELAGSYNEQFF

SEQ ID NO: 53935 - protein, 13 aa, Homo sapiens
  CDR3 for alpha chain variable domain of TCR clone 26968 (TRAV8-3, TRAJ28)
CAVGAVGSYQLTF

SEQ ID NO: 53936 - protein, 15 aa, Homo sapiens
  CDR3 for beta chain variable domain of TCR clone 26968 (TRBV7-9, TRBJ1-5)
CASSQGHQPNQPQHS

SEQ ID NO: 53937 - protein, 15 aa, Homo sapiens
  CDR3 for alpha chain variable domain of TCR clone 26969 (TRAV17, TRAJ57)
CATGPSQGGSEKLVF

SEQ ID NO: 53938 - protein, 16 aa, Homo sapiens
  CDR3 for beta chain variable domain of TCR clone 26969 (TRBV12-4, TRBJ1-5)
CASSRPVRGSNQPQHF

SEQ ID NO: 53939 - protein, 18 aa, Homo sapiens
  CDR3 for alpha chain variable domain of TCR clone 26970 (TRAV26-1, TRAJ23)
CIVRVGLEVWNQGGKLIF

SEQ ID NO: 53940 - protein, 13 aa, Homo sapiens
  CDR3 for beta chain variable domain of TCR clone 26970 (TRBV7-9, TRBJ1-2)
CASSLKQNYGYTF

SEQ ID NO: 53941 - protein, 11 aa, Homo sapiens
  CDR3 for alpha chain variable domain of TCR clone 26971 (TRAV4, TRAJ31)
CLVGLNARPMF

SEQ ID NO: 53942 - protein, 16 aa, Homo sapiens
  CDR3 for beta chain variable domain of TCR clone 26971 (TRBV15, TRBJ2-6)
CATSVNGGFLANVLTF

SEQ ID NO: 53943 - protein, 15 aa, Homo sapiens
  CDR3 for alpha chain variable domain of TCR clone 26972 (TRAV3, TRAJ3)
CAVRDRDSSASKIVF

SEQ ID NO: 53944 - protein, 18 aa, Homo sapiens
  CDR3 for beta chain variable domain of TCR clone 26972 (TRBV25-1, TRBJ1-2)
CASSGLQNGQGLIFGYTF

SEQ ID NO: 53945 - protein, 12 aa, Homo sapiens
  CDR3 for alpha chain variable domain of TCR clone 26973 (TRAV17, TRAJ20)
CATQSNDYELSF

SEQ ID NO: 53946 - protein, 13 aa, Homo sapiens
  CDR3 for beta chain variable domain of TCR clone 26973 (TRBV10-3, TRBJ1-1)
CAIIPEGGTEAFF

SEQ ID NO: 53947 - protein, 18 aa, Homo sapiens
  CDR3 for alpha chain variable domain of TCR clone 26974 (TRAV21, TRAJ52)
CAVRPSPAGGTSYGKLTF

SEQ ID NO: 53948 - protein, 13 aa, Homo sapiens
  CDR3 for beta chain variable domain of TCR clone 26974 (TRBV7-2, TRBJ2-2)
CASSLAVTGELFF

SEQ ID NO: 53949 - protein, 15 aa, Homo sapiens
  CDR3 for alpha chain variable domain of TCR clone 26975 (TRAV21, TRAJ53)
CATLNSGGSNYKLTF

SEQ ID NO: 53950 - protein, 14 aa, Homo sapiens
  CDR3 for beta chain variable domain of TCR clone 26975 (TRBV7-9, TRBJ2-1)
CASSPRDSLYEQFF

SEQ ID NO: 53951 - protein, 14 aa, Homo sapiens
  CDR3 for alpha chain variable domain of TCR clone 26976 (TRAV1-2, TRAJ8)
CAVREDTGFQKLVF

SEQ ID NO: 53952 - protein, 13 aa, Homo sapiens
  CDR3 for beta chain variable domain of TCR clone 26976 (TRBV11-2, TRBJ2-5)
CASSRGPSETQYF

SEQ ID NO: 53953 - protein, 14 aa, Homo sapiens
  CDR3 for alpha chain variable domain of TCR clone 26977 (TRAV1-2, TRAJ8)
CAVREDTGFQKLVF

SEQ ID NO: 53954 - protein, 15 aa, Homo sapiens
  CDR3 for beta chain variable domain of TCR clone 26977 (TRBV11-3, TRBJ2-7)
CASSPGPASSYEQYF

SEQ ID NO: 53955 - protein, 12 aa, Homo sapiens
  CDR3 for alpha chain variable domain of TCR clone 26978 (TRAV17, TRAJ4)
CATDGGYTKLIF

SEQ ID NO: 53956 - protein, 13 aa, Homo sapiens
  CDR3 for beta chain variable domain of TCR clone 26978 (TRBV29-1, TRBJ2-2)
CSTTGVNTGELFF

SEQ ID NO: 53957 - protein, 13 aa, Homo sapiens
  CDR3 for alpha chain variable domain of TCR clone 26979 (TRAV8-4, TRAJ47)
SAVTALYGNKLVF

SEQ ID NO: 53958 - protein, 14 aa, Homo sapiens
  CDR3 for beta chain variable domain of TCR clone 26979 (TRBV19, TRBJ2-7)
CASSIGGAVAEQYF

SEQ ID NO: 53959 - protein, 15 aa, Homo sapiens
  CDR3 for alpha chain variable domain of TCR clone 26980 (TRAV13-1, TRAJ57)
CAASNTQGGSEKLVF

SEQ ID NO: 53960 - protein, 16 aa, Homo sapiens
  CDR3 for beta chain variable domain of TCR clone 26980 (TRBV19, TRBJ2-1)
CASSKAGPSSHNEQFF

SEQ ID NO: 53961 - protein, 12 aa, Homo sapiens
  CDR3 for alpha chain variable domain of TCR clone 26981 (TRAV12-1, TRAJ34)
CVVAGATDKLIF

SEQ ID NO: 53962 - protein, 12 aa, Homo sapiens
  CDR3 for beta chain variable domain of TCR clone 26981 (TRBV7-9, TRBJ1-1)
RASSLVRGEAFF

SEQ ID NO: 53963 - protein, 14 aa, Homo sapiens
  CDR3 for alpha chain variable domain of TCR clone 26982 (TRAV1-2, TRAJ8)
CAVRENTGFQKLVF

SEQ ID NO: 53964 - protein, 15 aa, Homo sapiens
  CDR3 for beta chain variable domain of TCR clone 26982 (TRBV6-3, TRBJ2-7)
CASSSPGTVFYEQYF

SEQ ID NO: 53965 - protein, 16 aa, Homo sapiens
  CDR3 for alpha chain variable domain of TCR clone 26983 (TRAV12-3, TRAJ53)
CAMSPGSGGSNYKLTF

SEQ ID NO: 53966 - protein, 16 aa, Homo sapiens
  CDR3 for beta chain variable domain of TCR clone 26983 (TRBV12-4, TRBJ1-5)
CASSRPVGGSNQPQHF

SEQ ID NO: 53967 - protein, 11 aa, Homo sapiens
  CDR3 for alpha chain variable domain of TCR clone 26984 (TRAV13-1, TRAJ13)
LLLGGYQKVTF

SEQ ID NO: 53968 - protein, 15 aa, Homo sapiens
  CDR3 for beta chain variable domain of TCR clone 26984 (TRBV7-8, TRBJ2-1)
CASSLADSLYNEQFF

SEQ ID NO: 53969 - protein, 13 aa, Homo sapiens
  CDR3 for alpha chain variable domain of TCR clone 26985 (TRAV2, TRAJ40)
CAVVTSGTYKCIF

SEQ ID NO: 53970 - protein, 15 aa, Homo sapiens
  CDR3 for beta chain variable domain of TCR clone 26985 (TRBV11-3, TRBJ2-3)
CASLKDGREGDTQYF

SEQ ID NO: 53971 - protein, 14 aa, Homo sapiens
  CDR3 for alpha chain variable domain of TCR clone 26986 (TRAV35, TRAJ50)
CAGHRKTSYDKVVF

SEQ ID NO: 53972 - protein, 13 aa, Homo sapiens
  CDR3 for beta chain variable domain of TCR clone 26986 (TRBV7-7, TRBJ2-3)
CASSLSRADTQYF

SEQ ID NO: 53973 - protein, 14 aa, Homo sapiens
  CDR3 for alpha chain variable domain of TCR clone 26987 (TRAV1-2, TRAJ6)
CAVRSSGGSYIPTF

SEQ ID NO: 53974 - protein, 14 aa, Homo sapiens
  CDR3 for beta chain variable domain of TCR clone 26987 (TRBV19, TRBJ2-1)
CASPTFVLSGEQFF

SEQ ID NO: 53975 - protein, 15 aa, Homo sapiens
  CDR3 for alpha chain variable domain of TCR clone 26988 (TRAV2, TRAJ9)
CAVEDRGTGGFKTSF

SEQ ID NO: 53976 - protein, 16 aa, Homo sapiens
  CDR3 for beta chain variable domain of TCR clone 26988 (TRBV24-1, TRBJ2-3)
CATSDPGTGATDTQYF

SEQ ID NO: 53977 - protein, 14 aa, Homo sapiens
  CDR3 for alpha chain variable domain of TCR clone 26989 (TRAV35, TRAJ33)
CAGSSLDSNYQLIW

SEQ ID NO: 53978 - protein, 15 aa, Homo sapiens
  CDR3 for beta chain variable domain of TCR clone 26989 (TRBV20-1, TRBJ2-7)
CSAESGTSGAYEQYF

SEQ ID NO: 53979 - protein, 15 aa, Homo sapiens
  CDR3 for alpha chain variable domain of TCR clone 26990 (TRAV3, TRAJ20)
CAVRDIKLSDYKLIF

SEQ ID NO: 53980 - protein, 15 aa, Homo sapiens
  CDR3 for beta chain variable domain of TCR clone 26990 (TRBV7-9, TRBJ1-6)
CASSSPGRGNSPLHF

SEQ ID NO: 53981 - protein, 14 aa, Homo sapiens
  CDR3 for alpha chain variable domain of TCR clone 26991 (TRAV8-2, TRAJ37)
CVVSISGNTGKLIF

SEQ ID NO: 53982 - protein, 11 aa, Homo sapiens
  CDR3 for beta chain variable domain of TCR clone 26991 (TRBV18, TRBJ2-5)
FASSPRETQYF

SEQ ID NO: 53983 - protein, 18 aa, Homo sapiens
  CDR3 for alpha chain variable domain of TCR clone 26992 (TRAV21, TRAJ52)
CAVRPSPAGGTNYGKLTF

SEQ ID NO: 53984 - protein, 14 aa, Homo sapiens
  CDR3 for beta chain variable domain of TCR clone 26992 (TRBV4-2, TRBJ2-1)
CASGLDRAYNEQFF

SEQ ID NO: 53985 - protein, 14 aa, Homo sapiens
  CDR3 for alpha chain variable domain of TCR clone 26993 (TRAV17, TRAJ15)
CATTTNQAGTALIF

SEQ ID NO: 53986 - protein, 16 aa, Homo sapiens
  CDR3 for beta chain variable domain of TCR clone 26993 (TRBV4-1, TRBJ2-7)
CASSRGGILNSYEQYF

SEQ ID NO: 53987 - protein, 14 aa, Homo sapiens
  CDR3 for alpha chain variable domain of TCR clone 26994 (TRAV12-3, TRAJ22)
CAMSLFGSARQPTF

SEQ ID NO: 53988 - protein, 11 aa, Homo sapiens
  CDR3 for beta chain variable domain of TCR clone 26994 (TRBV12-4, TRBJ2-2)
CASSSAGELFF

SEQ ID NO: 53989 - protein, 12 aa, Homo sapiens
  CDR3 for alpha chain variable domain of TCR clone 26995 (TRAV13-1, TRAJ21)
CAAKEGFNKFYF

SEQ ID NO: 53990 - protein, 14 aa, Homo sapiens
  CDR3 for beta chain variable domain of TCR clone 26995 (TRBV19, TRBJ2-7)
CASSMGQGAIEQYF

SEQ ID NO: 53991 - protein, 13 aa, Homo sapiens
  CDR3 for alpha chain variable domain of TCR clone 26996 (TRAV21, TRAJ37)
CAVSSGNTGKLIF

SEQ ID NO: 53992 - protein, 14 aa, Homo sapiens
  CDR3 for beta chain variable domain of TCR clone 26996 (TRBV19, TRBJ2-1)
CASPTFVLSGEQFF

SEQ ID NO: 53993 - protein, 14 aa, Homo sapiens
  CDR3 for alpha chain variable domain of TCR clone 26997 (TRAV1-2, TRAJ16)
CAVNRCSDGQKLLF

SEQ ID NO: 53994 - protein, 15 aa, Homo sapiens
  CDR3 for beta chain variable domain of TCR clone 26997 (TRBV7-9, TRBJ1-6)
CASSSPGRGNSPLHF

SEQ ID NO: 53995 - protein, 13 aa, Homo sapiens
  CDR3 for alpha chain variable domain of TCR clone 26998 (TRAV12-2, TRAJ39)
CAVNNNAGKMLTF

SEQ ID NO: 53996 - protein, 13 aa, Homo sapiens
  CDR3 for beta chain variable domain of TCR clone 26998 (TRBV2, TRBJ1-5)
CATAGPGNQPQHF

SEQ ID NO: 53997 - protein, 13 aa, Homo sapiens
  CDR3 for alpha chain variable domain of TCR clone 26999 (TRAV21, TRAJ20)
CAVGLRVDYKLSF

SEQ ID NO: 53998 - protein, 15 aa, Homo sapiens
  CDR3 for beta chain variable domain of TCR clone 26999 (TRBV7-2, TRBJ2-1)
CASSSGLAGGNEQFF

SEQ ID NO: 53999 - protein, 16 aa, Homo sapiens
  CDR3 for alpha chain variable domain of TCR clone 27000 (TRAV8-3, TRAJ13)
CAVGAYPSGGYQKVTF

SEQ ID NO: 54000 - protein, 14 aa, Homo sapiens
  CDR3 for beta chain variable domain of TCR clone 27000 (TRBV12-5, TRBJ2-5)
CASGSRTHQETQYF

SEQ ID NO: 54001 - protein, 22 aa, Homo sapiens
  CDR3 for alpha chain variable domain of TCR clone 27001 (TRAV21, TRAJ30)
CAVRRRMTRSSLEKGHDFIFSP

SEQ ID NO: 54002 - protein, 15 aa, Homo sapiens
  CDR3 for beta chain variable domain of TCR clone 27001 (TRBV6-6, TRBJ2-7)
CASSYSYGGSYEQYF

SEQ ID NO: 54003 - protein, 14 aa, Homo sapiens
  CDR3 for alpha chain variable domain of TCR clone 27002 (TRAV1-2, TRAJ8)
CAVREDTGFQKLVF

SEQ ID NO: 54004 - protein, 15 aa, Homo sapiens
  CDR3 for beta chain variable domain of TCR clone 27002 (TRBV19, TRBJ2-1)
CASSSPGVPLDEQFF

SEQ ID NO: 54005 - protein, 14 aa, Homo sapiens
  CDR3 for alpha chain variable domain of TCR clone 27003 (TRAV16, TRAJ15)
CALSGPQVGTALIF

SEQ ID NO: 54006 - protein, 12 aa, Homo sapiens
  CDR3 for beta chain variable domain of TCR clone 27003 (TRBV18, TRBJ2-5)
CASSPSKETQYF

SEQ ID NO: 54007 - protein, 16 aa, Homo sapiens
  CDR3 for alpha chain variable domain of TCR clone 27004 (TRAV21, TRAJ17)
CAVRPGAEAAGNKLTF

SEQ ID NO: 54008 - protein, 16 aa, Homo sapiens
  CDR3 for beta chain variable domain of TCR clone 27004 (TRBV2, TRBJ2-7)
CASSEPWTGPSYEQYF

SEQ ID NO: 54009 - protein, 16 aa, Homo sapiens
  CDR3 for alpha chain variable domain of TCR clone 27005 (TRAV3, TRAJ10)
CAVRDMRAGGGNKLTF

SEQ ID NO: 54010 - protein, 14 aa, Homo sapiens
  CDR3 for beta chain variable domain of TCR clone 27005 (TRBV25-1, TRBJ1-1)
CVSTHLGGNTEAFF

SEQ ID NO: 54011 - protein, 12 aa, Homo sapiens
  CDR3 for alpha chain variable domain of TCR clone 27006 (TRAV1-1, TRAJ39)
CAVPVVGNMLTF

SEQ ID NO: 54012 - protein, 15 aa, Homo sapiens
  CDR3 for beta chain variable domain of TCR clone 27006 (TRBV19, TRBJ1-6)
CASSTQGAVGSHLHF

SEQ ID NO: 54013 - protein, 17 aa, Homo sapiens
  CDR3 for alpha chain variable domain of TCR clone 27007 (TRAV3, TRAJ42)
CAVRDRDYGGSQGNLIF

SEQ ID NO: 54014 - protein, 17 aa, Homo sapiens
  CDR3 for beta chain variable domain of TCR clone 27007 (TRBV7-9, TRBJ2-3)
CASNPTVAGDLTDTQYF

SEQ ID NO: 54015 - protein, 12 aa, Homo sapiens
  CDR3 for alpha chain variable domain of TCR clone 27008 (TRAV12-3, TRAJ17)
CAMTLTGNKLTF

SEQ ID NO: 54016 - protein, 10 aa, Homo sapiens
  CDR3 for beta chain variable domain of TCR clone 27008 (TRBV20-1, TRBJ2-7)
IGSLMDEQYF

SEQ ID NO: 54017 - protein, 13 aa, Homo sapiens
  CDR3 for alpha chain variable domain of TCR clone 27009 (TRAV2, TRAJ40)
CAMVTSGTYKYIF

SEQ ID NO: 54018 - protein, 15 aa, Homo sapiens
  CDR3 for beta chain variable domain of TCR clone 27009 (TRBV11-3, TRBJ2-3)
CASLKDGREGDTQYF

SEQ ID NO: 54019 - protein, 18 aa, Homo sapiens
  CDR3 for alpha chain variable domain of TCR clone 27010 (TRAV21, TRAJ52)
CAVRPSPAGGTSYGKLTF

SEQ ID NO: 54020 - protein, 15 aa, Homo sapiens
  CDR3 for beta chain variable domain of TCR clone 27010 (TRBV7-3, TRBJ1-1)
CASSQDWGLKLSLDK

SEQ ID NO: 54021 - protein, 14 aa, Homo sapiens
  CDR3 for alpha chain variable domain of TCR clone 27011 (TRAV23/DV6, TRAJ24)
CAASLSDSWGKLQF

SEQ ID NO: 54022 - protein, 16 aa, Homo sapiens
  CDR3 for beta chain variable domain of TCR clone 27011 (TRBV7-9, TRBJ2-6)
CASSLKGPLRANDLTF

SEQ ID NO: 54023 - protein, 13 aa, Homo sapiens
  CDR3 for alpha chain variable domain of TCR clone 27012 (TRAV13-1, TRAJ21)
FAASIYNFNKFYF

SEQ ID NO: 54024 - protein, 13 aa, Homo sapiens
  CDR3 for beta chain variable domain of TCR clone 27012 (TRBV27, TRBJ1-4)
CASSLMGDEKLFF

SEQ ID NO: 54025 - protein, 16 aa, Homo sapiens
  CDR3 for alpha chain variable domain of TCR clone 27013 (TRAV30, TRAJ24)
CGTEIVDADSWGKFQF

SEQ ID NO: 54026 - protein, 13 aa, Homo sapiens
  CDR3 for beta chain variable domain of TCR clone 27013 (TRBV7-2, TRBJ1-1)
CASNLKGAKVAFF

SEQ ID NO: 54027 - protein, 12 aa, Homo sapiens
  CDR3 for alpha chain variable domain of TCR clone 27014 (TRAV2, TRAJ9)
CAVGAGGFQTIF

SEQ ID NO: 54028 - protein, 16 aa, Homo sapiens
  CDR3 for beta chain variable domain of TCR clone 27014 (TRBV13, TRBJ2-2)
CASSPRTGEHTGELFF

SEQ ID NO: 54029 - protein, 15 aa, Homo sapiens
  CDR3 for alpha chain variable domain of TCR clone 27015 (TRAV12-3, TRAJ6)
CAMSATTGGSYIPTF

SEQ ID NO: 54030 - protein, 17 aa, Homo sapiens
  CDR3 for beta chain variable domain of TCR clone 27015 (TRBV7-8, TRBJ2-6)
CASSAGTGGAGANVLTF

SEQ ID NO: 54031 - protein, 13 aa, Homo sapiens
  CDR3 for alpha chain variable domain of TCR clone 27016 (TRAV12-3, TRAJ9)
CAMRNTGGFKTIF

SEQ ID NO: 54032 - protein, 14 aa, Homo sapiens
  CDR3 for beta chain variable domain of TCR clone 27016 (TRBV11-2, TRBJ2-7)
CASNSTGEGYEQYF

SEQ ID NO: 54033 - protein, 16 aa, Homo sapiens
  CDR3 for alpha chain variable domain of TCR clone 27017 (TRAV12-3, TRAJ53)
CAMSPGSGGSNYKLTF

SEQ ID NO: 54034 - protein, 16 aa, Homo sapiens
  CDR3 for beta chain variable domain of TCR clone 27017 (TRBV4-2, TRBJ1-1)
CASSQAGFGMNTEAVF

SEQ ID NO: 54035 - protein, 15 aa, Homo sapiens
  CDR3 for alpha chain variable domain of TCR clone 27018 (TRAV4, TRAJ39)
CLVGPNNDAGNMLTF

SEQ ID NO: 54036 - protein, 13 aa, Homo sapiens
  CDR3 for beta chain variable domain of TCR clone 27018 (TRBV11-2, TRBJ2-5)
CASSSTGEETQYF

SEQ ID NO: 54037 - protein, 13 aa, Homo sapiens
  CDR3 for alpha chain variable domain of TCR clone 27019 (TRAV8-3, TRAJ48)
CAVVPFGNEELTF

SEQ ID NO: 54038 - protein, 14 aa, Homo sapiens
  CDR3 for beta chain variable domain of TCR clone 27019 (TRBV12-5, TRBJ2-5)
CASGSRTHQETQYF

SEQ ID NO: 54039 - protein, 16 aa, Homo sapiens
  CDR3 for alpha chain variable domain of TCR clone 27020 (TRAV21, TRAJ17)
CAVRPGEEAAGNKLTF

SEQ ID NO: 54040 - protein, 16 aa, Homo sapiens
  CDR3 for beta chain variable domain of TCR clone 27020 (TRBV2, TRBJ2-7)
CASSVPWTGPSYEQYF

SEQ ID NO: 54041 - protein, 12 aa, Homo sapiens
  CDR3 for alpha chain variable domain of TCR clone 27021 (TRAV21, TRAJ30)
CAAMNRDDKIIF

SEQ ID NO: 54042 - protein, 17 aa, Homo sapiens
  CDR3 for beta chain variable domain of TCR clone 27021 (TRBV5-1, TRBJ1-1)
CASRPIRTGGVNTEAFF

SEQ ID NO: 54043 - protein, 16 aa, Homo sapiens
  CDR3 for alpha chain variable domain of TCR clone 27022 (TRAV1-2, TRAJ10)
CAVRGVLTGGGNKLTF

SEQ ID NO: 54044 - protein, 13 aa, Homo sapiens
  CDR3 for beta chain variable domain of TCR clone 27022 (TRBV20-1, TRBJ1-1)
CSAPLGGGTEAFF

SEQ ID NO: 54045 - protein, 14 aa, Homo sapiens
  CDR3 for alpha chain variable domain of TCR clone 27023 (TRAV12-2, TRAJ17)
CAVLFKAAGNKLTY

SEQ ID NO: 54046 - protein, 17 aa, Homo sapiens
  CDR3 for beta chain variable domain of TCR clone 27023 (TRBV20-1, TRBJ2-2)
CSASGSGQGGLTGELFF

SEQ ID NO: 54047 - protein, 11 aa, Homo sapiens
  CDR3 for alpha chain variable domain of TCR clone 27024 (TRAV21, TRAJ34)
CAVTNTDKLIF

SEQ ID NO: 54048 - protein, 14 aa, Homo sapiens
  CDR3 for beta chain variable domain of TCR clone 27024 (TRBV12-5, TRBJ2-5)
CASGSRTHQETQYF

SEQ ID NO: 54049 - protein, 11 aa, Homo sapiens
  CDR3 for alpha chain variable domain of TCR clone 27025 (TRAV21, TRAJ45)
CAVSSPEVLTD

SEQ ID NO: 54050 - protein, 15 aa, Homo sapiens
  CDR3 for beta chain variable domain of TCR clone 27025 (TRBV6-5, TRBJ2-7)
CASSYSTSGNYEQYF

SEQ ID NO: 54051 - protein, 12 aa, Homo sapiens
  CDR3 for alpha chain variable domain of TCR clone 27026 (TRAV12-1, TRAJ23)
CVVNIPGGKLTF

SEQ ID NO: 54052 - protein, 15 aa, Homo sapiens
  CDR3 for beta chain variable domain of TCR clone 27026 (TRBV7-2, TRBJ2-7)
CASSLVSSGSYEQYF

SEQ ID NO: 54053 - protein, 15 aa, Homo sapiens
  CDR3 for alpha chain variable domain of TCR clone 27027 (TRAV27, TRAJ38)
CAARRNDGNNRKLIW

SEQ ID NO: 54054 - protein, 13 aa, Homo sapiens
  CDR3 for beta chain variable domain of TCR clone 27027 (TRBV12-5, TRBJ2-3)
CASGDRQSDTQYF

SEQ ID NO: 54055 - protein, 12 aa, Homo sapiens
  CDR3 for alpha chain variable domain of TCR clone 27028 (TRAV21, TRAJ13)
PGPSGGYRKVTF

SEQ ID NO: 54056 - protein, 15 aa, Homo sapiens
  CDR3 for beta chain variable domain of TCR clone 27028 (TRBV27, TRBJ2-5)
CASSLYPRGGETQYF

SEQ ID NO: 54057 - protein, 12 aa, Homo sapiens
  CDR3 for alpha chain variable domain of TCR clone 27029 (TRAV13-2, TRAJ23)
CAEHHRGGKLIF

SEQ ID NO: 54058 - protein, 16 aa, Homo sapiens
  CDR3 for beta chain variable domain of TCR clone 27029 (TRBV12-5, TRBJ2-5)
CASGPRTSGNQETQYF

SEQ ID NO: 54059 - protein, 13 aa, Homo sapiens
  CDR3 for alpha chain variable domain of TCR clone 27030 (TRAV35, TRAJ43)
CAGYPYNNNDMRF

SEQ ID NO: 54060 - protein, 15 aa, Homo sapiens
  CDR3 for beta chain variable domain of TCR clone 27030 (TRBV25-1, TRBJ1-4)
CASSKRIASNEKLFF

SEQ ID NO: 54061 - protein, 12 aa, Homo sapiens
  CDR3 for alpha chain variable domain of TCR clone 27031 (TRAV12-3, TRAJ41)
CAMSYSGYALNF

SEQ ID NO: 54062 - protein, 13 aa, Homo sapiens
  CDR3 for beta chain variable domain of TCR clone 27031 (TRBV7-3, TRBJ2-1)
CASSLDSYNEQLF

SEQ ID NO: 54063 - protein, 13 aa, Homo sapiens
  CDR3 for alpha chain variable domain of TCR clone 27032 (TRAV13-1, TRAJ39)
CAASIWAGNMLTF

SEQ ID NO: 54064 - protein, 15 aa, Homo sapiens
  CDR3 for beta chain variable domain of TCR clone 27032 (TRBV7-9, TRBJ1-6)
CASSSPGRGNSPLHF

SEQ ID NO: 54065 - protein, 14 aa, Homo sapiens
  CDR3 for alpha chain variable domain of TCR clone 27033 (TRAV1-2, TRAJ16)
CAVNRFSDGQKLLF

SEQ ID NO: 54066 - protein, 14 aa, Homo sapiens
  CDR3 for beta chain variable domain of TCR clone 27033 (TRBV19, TRBJ2-2)
CASSTLHRSGELSF

SEQ ID NO: 54067 - protein, 13 aa, Homo sapiens
  CDR3 for alpha chain variable domain of TCR clone 27034 (TRAV16, TRAJ5)
CALTNTGRRALTF

SEQ ID NO: 54068 - protein, 15 aa, Homo sapiens
  CDR3 for beta chain variable domain of TCR clone 27034 (TRBV11-2, TRBJ2-4)
CASSRPGTGINMQYF

SEQ ID NO: 54069 - protein, 14 aa, Homo sapiens
  CDR3 for alpha chain variable domain of TCR clone 27035 (TRAV12-1, TRAJ9)
CVVTGYTGGFKTIF

SEQ ID NO: 54070 - protein, 13 aa, Homo sapiens
  CDR3 for beta chain variable domain of TCR clone 27035 (TRBV20-1, TRBJ1-1)
CSARAGGNTEASF

SEQ ID NO: 54071 - protein, 14 aa, Homo sapiens
  CDR3 for alpha chain variable domain of TCR clone 27036 (TRAV35, TRAJ33)
CAGSSQDSKYQLIW

SEQ ID NO: 54072 - protein, 15 aa, Homo sapiens
  CDR3 for beta chain variable domain of TCR clone 27036 (TRBV20-1, TRBJ2-7)
CSAESGTSGAYEQYF

SEQ ID NO: 54073 - protein, 15 aa, Homo sapiens
  CDR3 for alpha chain variable domain of TCR clone 27037 (TRAV21, TRAJ24)
CAARASTDSWGKLQF

SEQ ID NO: 54074 - protein, 13 aa, Homo sapiens
  CDR3 for beta chain variable domain of TCR clone 27037 (TRBV11-2, TRBJ2-5)
CASSSTGEETQYF

SEQ ID NO: 54075 - protein, 13 aa, Homo sapiens
  CDR3 for alpha chain variable domain of TCR clone 27038 (TRAV21, TRAJ27)
CAALNTNAGKSTF

SEQ ID NO: 54076 - protein, 14 aa, Homo sapiens
  CDR3 for beta chain variable domain of TCR clone 27038 (TRBV27, TRBJ1-1)
CASSLLGGLSEAFF

SEQ ID NO: 54077 - protein, 12 aa, Homo sapiens
  CDR3 for alpha chain variable domain of TCR clone 27039 (TRAV12-2, TRAJ17)
CAMTLTGNKLTF

SEQ ID NO: 54078 - protein, 13 aa, Homo sapiens
  CDR3 for beta chain variable domain of TCR clone 27039 (TRBV9, TRBJ2-2)
CASSPRPAGELFF

SEQ ID NO: 54079 - protein, 16 aa, Homo sapiens
  CDR3 for alpha chain variable domain of TCR clone 27040 (TRAV14/DV4, TRAJ54)
CAMREGRIQGAQKLVF

SEQ ID NO: 54080 - protein, 13 aa, Homo sapiens
  CDR3 for beta chain variable domain of TCR clone 27040 (TRBV10-3, TRBJ2-7)
CASKLAVNYEQYF

SEQ ID NO: 54081 - protein, 12 aa, Homo sapiens
  CDR3 for alpha chain variable domain of TCR clone 27041 (TRAV13-1, TRAJ21)
CAAKEGFNKFYF

SEQ ID NO: 54082 - protein, 11 aa, Homo sapiens
  CDR3 for beta chain variable domain of TCR clone 27041 (TRBV29-1, TRBJ2-5)
CSEDRTGTQYF

SEQ ID NO: 54083 - protein, 16 aa, Homo sapiens
  CDR3 for alpha chain variable domain of TCR clone 27042 (TRAV8-4, TRAJ13)
CAVSAKGVTRKLPLEL

SEQ ID NO: 54084 - protein, 15 aa, Homo sapiens
  CDR3 for beta chain variable domain of TCR clone 27042 (TRBV4-3, TRBJ1-5)
CASSQEAVGGQPQHF

SEQ ID NO: 54085 - protein, 14 aa, Homo sapiens
  CDR3 for alpha chain variable domain of TCR clone 27043 (TRAV19, TRAJ37)
CALRGSSNTGKLIF

SEQ ID NO: 54086 - protein, 14 aa, Homo sapiens
  CDR3 for beta chain variable domain of TCR clone 27043 (TRBV7-2, TRBJ2-3)
CASSLNSGTDTQYF

SEQ ID NO: 54087 - protein, 12 aa, Homo sapiens
  CDR3 for alpha chain variable domain of TCR clone 27044 (TRAV19, TRAJ30)
CALSDRDDKIIF

SEQ ID NO: 54088 - protein, 15 aa, Homo sapiens
  CDR3 for beta chain variable domain of TCR clone 27044 (TRBV29-1, TRBJ2-5)
CSVAPGQGARETQYF

SEQ ID NO: 54089 - protein, 18 aa, Homo sapiens
  CDR3 for alpha chain variable domain of TCR clone 27045 (TRAV3, TRAJ17)
CAVRARRGGRGCRQQANF

SEQ ID NO: 54090 - protein, 14 aa, Homo sapiens
  CDR3 for beta chain variable domain of TCR clone 27045 (TRBV4-1, TRBJ2-2)
CASSQAVNTGELFF

SEQ ID NO: 54091 - protein, 12 aa, Homo sapiens
  CDR3 for alpha chain variable domain of TCR clone 27046 (TRAV13-1, TRAJ49)
CAASPVGNQFYF

SEQ ID NO: 54092 - protein, 17 aa, Homo sapiens
  CDR3 for beta chain variable domain of TCR clone 27046 (TRBV11-2, TRBJ2-1)
CASSLYPPGVEYNEQFF

SEQ ID NO: 54093 - protein, 15 aa, Homo sapiens
  CDR3 for alpha chain variable domain of TCR clone 27047 (TRAV26-1, TRAJ56)
CIVRVATGANSKLTF

SEQ ID NO: 54094 - protein, 14 aa, Homo sapiens
  CDR3 for beta chain variable domain of TCR clone 27047 (TRBV27, TRBJ2-7)
CQQSQREGQREQYF

SEQ ID NO: 54095 - protein, 12 aa, Homo sapiens
  CDR3 for alpha chain variable domain of TCR clone 27048 (TRAV12-3, TRAJ17)
CAMTLTGNKLTF

SEQ ID NO: 54096 - protein, 15 aa, Homo sapiens
  CDR3 for beta chain variable domain of TCR clone 27048 (TRBV28, TRBJ2-5)
CASSPGQGSIETQYF

SEQ ID NO: 54097 - protein, 12 aa, Homo sapiens
  CDR3 for alpha chain variable domain of TCR clone 27049 (TRAV13-1, TRAJ53)
AASGGSNYELTF

SEQ ID NO: 54098 - protein, 15 aa, Homo sapiens
  CDR3 for beta chain variable domain of TCR clone 27049 (TRBV5-1, TRBJ2-1)
CASSPPRAPYNEQFF

SEQ ID NO: 54099 - protein, 13 aa, Homo sapiens
  CDR3 for alpha chain variable domain of TCR clone 27050 (TRAV3, TRAJ15)
CAVRDQAGTALIF

SEQ ID NO: 54100 - protein, 15 aa, Homo sapiens
  CDR3 for beta chain variable domain of TCR clone 27050 (TRBV11-1, TRBJ2-7)
CASSLNHGASYEQYF

SEQ ID NO: 54101 - protein, 12 aa, Homo sapiens
  CDR3 for alpha chain variable domain of TCR clone 27051 (TRAV16, TRAJ10)
CSRTGGGNKLTF

SEQ ID NO: 54102 - protein, 15 aa, Homo sapiens
  CDR3 for beta chain variable domain of TCR clone 27051 (TRBV6-3, TRBJ2-7)
CASSSPGKVFYEQYF

SEQ ID NO: 54103 - protein, 14 aa, Homo sapiens
  CDR3 for alpha chain variable domain of TCR clone 27052 (TRAV8-4, TRAJ13)
CAVTLSRGYQKVTF

SEQ ID NO: 54104 - protein, 14 aa, Homo sapiens
  CDR3 for beta chain variable domain of TCR clone 27052 (TRBV7-2, TRBJ1-2)
CASSQTGSTYGYTF

SEQ ID NO: 54105 - protein, 15 aa, Homo sapiens
  CDR3 for alpha chain variable domain of TCR clone 27053 (TRAV27, TRAJ50)
CAGVGRGTPYDKVIF

SEQ ID NO: 54106 - protein, 14 aa, Homo sapiens
  CDR3 for beta chain variable domain of TCR clone 27053 (TRBV7-2, TRBJ1-1)
CASSFYDLNTEAFF

SEQ ID NO: 54107 - protein, 16 aa, Homo sapiens
  CDR3 for alpha chain variable domain of TCR clone 27054 (TRAV22, TRAJ45)
CAVERGKRGGADGLTF

SEQ ID NO: 54108 - protein, 11 aa, Homo sapiens
  CDR3 for beta chain variable domain of TCR clone 27054 (TRBV29-1, TRBJ2-5)
CSEDRAGTQYF

SEQ ID NO: 54109 - protein, 13 aa, Homo sapiens
  CDR3 for alpha chain variable domain of TCR clone 27055 (TRAV27, TRAJ8)
CAGGPTGFQKLVF

SEQ ID NO: 54110 - protein, 15 aa, Homo sapiens
  CDR3 for beta chain variable domain of TCR clone 27055 (TRBV6-1, TRBJ2-7)
CASSERMGDFYEQYF

SEQ ID NO: 54111 - protein, 11 aa, Homo sapiens
  CDR3 for alpha chain variable domain of TCR clone 27056 (TRAV27, TRAJ47)
CRSNQGDKLVF

SEQ ID NO: 54112 - protein, 16 aa, Homo sapiens
  CDR3 for beta chain variable domain of TCR clone 27056 (TRBV7-9, TRBJ2-1)
CASSDVAGGSYNEQFF

SEQ ID NO: 54113 - protein, 16 aa, Homo sapiens
  CDR3 for alpha chain variable domain of TCR clone 27057 (TRAV23/DV6, TRAJ9)
CAASIGENTGGFKTIF

SEQ ID NO: 54114 - protein, 14 aa, Homo sapiens
  CDR3 for beta chain variable domain of TCR clone 27057 (TRBV9, TRBJ2-7)
CASSVGVGSYEQYF

SEQ ID NO: 54115 - protein, 13 aa, Homo sapiens
  CDR3 for alpha chain variable domain of TCR clone 27058 (TRAV13-1, TRAJ33)
CAASRAGNYQLIW

SEQ ID NO: 54116 - protein, 12 aa, Homo sapiens
  CDR3 for beta chain variable domain of TCR clone 27058 (TRBV11-2, TRBJ1-2)
CASSREGDGYTL

SEQ ID NO: 54117 - protein, 13 aa, Homo sapiens
  CDR3 for alpha chain variable domain of TCR clone 27059 (TRAV21, TRAJ27)
CAARPGNAGKSTY

SEQ ID NO: 54118 - protein, 14 aa, Homo sapiens
  CDR3 for beta chain variable domain of TCR clone 27059 (TRBV7-6, TRBJ2-3)
CASSLGTVTDTQYF

SEQ ID NO: 54119 - protein, 14 aa, Homo sapiens
  CDR3 for alpha chain variable domain of TCR clone 27060 (TRAV38-1, TRAJ45)
CASHSGGGADGLTF

SEQ ID NO: 54120 - protein, 13 aa, Homo sapiens
  CDR3 for beta chain variable domain of TCR clone 27060 (TRBV19, TRBJ1-2)
CASSVPGQDGYTF

SEQ ID NO: 54121 - protein, 14 aa, Homo sapiens
  CDR3 for alpha chain variable domain of TCR clone 27061 (TRAV2, TRAJ37)
CAVDFTSNTGKLIF

SEQ ID NO: 54122 - protein, 18 aa, Homo sapiens
  CDR3 for beta chain variable domain of TCR clone 27061 (TRBV11-2, TRBJ2-3)
CASSLGGASRGAPNTQYF

SEQ ID NO: 54123 - protein, 13 aa, Homo sapiens
  CDR3 for alpha chain variable domain of TCR clone 27062 (TRAV3, TRAJ21)
CAVREPDFNKFYF

SEQ ID NO: 54124 - protein, 18 aa, Homo sapiens
  CDR3 for beta chain variable domain of TCR clone 27062 (TRBV11-2, TRBJ2-3)
CASSVGGASRGAPNTQYF

SEQ ID NO: 54125 - protein, 18 aa, Homo sapiens
  CDR3 for alpha chain variable domain of TCR clone 27063 (TRAV12-3, TRAJ52)
CAMSVGGAGGTSYGKLTF

SEQ ID NO: 54126 - protein, 11 aa, Homo sapiens
  CDR3 for beta chain variable domain of TCR clone 27063 (TRBV7-8, TRBJ2-7)
CASSLSLEQYF

SEQ ID NO: 54127 - protein, 12 aa, Homo sapiens
  CDR3 for alpha chain variable domain of TCR clone 27064 (TRAV12-3, TRAJ5)
CAIDTGRRALTF

SEQ ID NO: 54128 - protein, 13 aa, Homo sapiens
  CDR3 for beta chain variable domain of TCR clone 27064 (TRBV7-7, TRBJ2-2)
CASSLTSAGELFF

SEQ ID NO: 54129 - protein, 13 aa, Homo sapiens
  CDR3 for alpha chain variable domain of TCR clone 27065 (TRAV16, TRAJ34)
CALTGYNTDKLIF

SEQ ID NO: 54130 - protein, 16 aa, Homo sapiens
  CDR3 for beta chain variable domain of TCR clone 27065 (TRBV6-1, TRBJ2-1)
CTSVPAGRTGGHEQFF

SEQ ID NO: 54131 - protein, 18 aa, Homo sapiens
  CDR3 for alpha chain variable domain of TCR clone 27066 (TRAV13-1, TRAJ52)
CAAKNPNAGGTSYGKLTF

SEQ ID NO: 54132 - protein, 15 aa, Homo sapiens
  CDR3 for beta chain variable domain of TCR clone 27066 (TRBV6-1, TRBJ2-3)
CASSERGGITDMQYF

SEQ ID NO: 54133 - protein, 12 aa, Homo sapiens
  CDR3 for alpha chain variable domain of TCR clone 27067 (TRAV22, TRAJ22)
FAPGGSARQLTF

SEQ ID NO: 54134 - protein, 13 aa, Homo sapiens
  CDR3 for beta chain variable domain of TCR clone 27067 (TRBV15, TRBJ1-6)
CATSGGLNSPLHF

SEQ ID NO: 54135 - protein, 11 aa, Homo sapiens
  CDR3 for alpha chain variable domain of TCR clone 27068 (TRAV21, TRAJ31)
CAVRNNARLMF

SEQ ID NO: 54136 - protein, 15 aa, Homo sapiens
  CDR3 for beta chain variable domain of TCR clone 27068 (TRBV6-3, TRBJ2-7)
CASSSPGTVFYEQYF

SEQ ID NO: 54137 - protein, 15 aa, Homo sapiens
  CDR3 for alpha chain variable domain of TCR clone 27069 (TRAV30, TRAJ32)
CGTEILGGATNKLIF

SEQ ID NO: 54138 - protein, 17 aa, Homo sapiens
  CDR3 for beta chain variable domain of TCR clone 27069 (TRBV5-4, TRBJ2-1)
RASSSAGGRGPYNEQFF

SEQ ID NO: 54139 - protein, 17 aa, Homo sapiens
  CDR3 for alpha chain variable domain of TCR clone 27070 (TRAV2, TRAJ22)
ILQVREADAAEQRQLTF

SEQ ID NO: 54140 - protein, 16 aa, Homo sapiens
  CDR3 for beta chain variable domain of TCR clone 27070 (TRBV2, TRBJ2-5)
RASSETQGVGEETQYF

SEQ ID NO: 54141 - protein, 12 aa, Homo sapiens
  CDR3 for alpha chain variable domain of TCR clone 27071 (TRAV21, TRAJ11)
CAATSGYSTLTF

SEQ ID NO: 54142 - protein, 14 aa, Homo sapiens
  CDR3 for beta chain variable domain of TCR clone 27071 (TRBV20-1, TRBJ2-7)
CSAPELAGVGEQYF

SEQ ID NO: 54143 - protein, 15 aa, Homo sapiens
  CDR3 for alpha chain variable domain of TCR clone 27072 (TRAV12-3, TRAJ6)
CAMSATTGGSYIPTF

SEQ ID NO: 54144 - protein, 16 aa, Homo sapiens
  CDR3 for beta chain variable domain of TCR clone 27072 (TRBV20-1, TRBJ1-2)
CSASMGKGVANYGYTF

SEQ ID NO: 54145 - protein, 18 aa, Homo sapiens
  CDR3 for alpha chain variable domain of TCR clone 27073 (TRAV29/DV5, TRAJ52)
CAAGFRGAGGTSYGTLTF

SEQ ID NO: 54146 - protein, 16 aa, Homo sapiens
  CDR3 for beta chain variable domain of TCR clone 27073 (TRBV7-3, TRBJ2-2)
CASSLKRGTLSGELFF

SEQ ID NO: 54147 - protein, 15 aa, Homo sapiens
  CDR3 for alpha chain variable domain of TCR clone 27074 (TRAV21, TRAJ24)
CAARSSTDSWGKLQF

SEQ ID NO: 54148 - protein, 13 aa, Homo sapiens
  CDR3 for beta chain variable domain of TCR clone 27074 (TRBV11-2, TRBJ2-5)
CASSSTGEETQYV

SEQ ID NO: 54149 - protein, 12 aa, Homo sapiens
  CDR3 for alpha chain variable domain of TCR clone 27075 (TRAV17, TRAJ4)
CATDGCYNKLIF

SEQ ID NO: 54150 - protein, 13 aa, Homo sapiens
  CDR3 for beta chain variable domain of TCR clone 27075 (TRBV29-1, TRBJ2-2)
CSTTGVNTGELFF

SEQ ID NO: 54151 - protein, 11 aa, Homo sapiens
  CDR3 for alpha chain variable domain of TCR clone 27076 (TRAV1-2, TRAJ20)
CAVANDYKLRF

SEQ ID NO: 54152 - protein, 18 aa, Homo sapiens
  CDR3 for beta chain variable domain of TCR clone 27076 (TRBV20-1, TRBJ2-6)
CSAETTPTHGSGANVLTF

SEQ ID NO: 54153 - protein, 16 aa, Homo sapiens
  CDR3 for alpha chain variable domain of TCR clone 27077 (TRAV3, TRAJ5)
CAVRNLMDTGRRALTF

SEQ ID NO: 54154 - protein, 16 aa, Homo sapiens
  CDR3 for beta chain variable domain of TCR clone 27077 (TRBV12-5, TRBJ2-5)
CASGPRTSGNQGTQYF

SEQ ID NO: 54155 - protein, 17 aa, Homo sapiens
  CDR3 for alpha chain variable domain of TCR clone 27078 (TRAV13-1, TRAJ52)
CAAGRNAGGTSFGKLTF

SEQ ID NO: 54156 - protein, 13 aa, Homo sapiens
  CDR3 for beta chain variable domain of TCR clone 27078 (TRBV7-2, TRBJ1-1)
CASNLKGAKVAFF

SEQ ID NO: 54157 - protein, 16 aa, Homo sapiens
  CDR3 for alpha chain variable domain of TCR clone 27079 (TRAV8-3, TRAJ44)
CAMGASNTGTASKLTF

SEQ ID NO: 54158 - protein, 15 aa, Homo sapiens
  CDR3 for beta chain variable domain of TCR clone 27079 (TRBV27, TRBJ1-5)
CASTFNRGSNQPQHF

SEQ ID NO: 54159 - protein, 12 aa, Homo sapiens
  CDR3 for alpha chain variable domain of TCR clone 27080 (TRAV35, TRAJ39)
LAPNNAGNVLTF

SEQ ID NO: 54160 - protein, 16 aa, Homo sapiens
  CDR3 for beta chain variable domain of TCR clone 27080 (TRBV2, TRBJ2-3)
CASSTSVEGVTDTQYF

SEQ ID NO: 54161 - protein, 15 aa, Homo sapiens
  CDR3 for alpha chain variable domain of TCR clone 27081 (TRAV21, TRAJ53)
CATLNSGGSNYKLTF

SEQ ID NO: 54162 - protein, 16 aa, Homo sapiens
  CDR3 for beta chain variable domain of TCR clone 27081 (TRBV10-3, TRBJ2-1)
CAIRGGGRGDYNEQFF

SEQ ID NO: 54163 - protein, 11 aa, Homo sapiens
  CDR3 for alpha chain variable domain of TCR clone 27082 (TRAV2, TRAJ13)
CASGGYQKVTF

SEQ ID NO: 54164 - protein, 16 aa, Homo sapiens
  CDR3 for beta chain variable domain of TCR clone 27082 (TRBV6-1, TRBJ2-5)
CASSETPDRGAETQYF

SEQ ID NO: 54165 - protein, 14 aa, Homo sapiens
  CDR3 for alpha chain variable domain of TCR clone 27083 (TRAV35, TRAJ13)
CAGSPSGGYQKVTF

SEQ ID NO: 54166 - protein, 12 aa, Homo sapiens
  CDR3 for beta chain variable domain of TCR clone 27083 (TRBV6-3, TRBJ2-7)
CASSLGRRGLYF

SEQ ID NO: 54167 - protein, 11 aa, Homo sapiens
  CDR3 for alpha chain variable domain of TCR clone 27084 (TRAV13-1, TRAJ33)
CAANSNYQLIW

SEQ ID NO: 54168 - protein, 14 aa, Homo sapiens
  CDR3 for beta chain variable domain of TCR clone 27084 (TRBV7-2, TRBJ2-3)
CQQLRGGGRDTQYF

SEQ ID NO: 54169 - protein, 12 aa, Homo sapiens
  CDR3 for alpha chain variable domain of TCR clone 27085 (TRAV25, TRAJ11)
CAGAPGYSTLTF

SEQ ID NO: 54170 - protein, 14 aa, Homo sapiens
  CDR3 for beta chain variable domain of TCR clone 27085 (TRBV5-8, TRBJ2-3)
CASSLGQGTDTQYF

SEQ ID NO: 54171 - protein, 18 aa, Homo sapiens
  CDR3 for alpha chain variable domain of TCR clone 27086 (TRAV21, TRAJ52)
CAVRPSPAGGTSYGKLTF

SEQ ID NO: 54172 - protein, 15 aa, Homo sapiens
  CDR3 for beta chain variable domain of TCR clone 27086 (TRBV28, TRBJ2-7)
CASSPGGRGFYEQYF

SEQ ID NO: 54173 - protein, 16 aa, Homo sapiens
  CDR3 for alpha chain variable domain of TCR clone 27087 (TRAV8-3, TRAJ44)
CAVGTLMTGTASKLTF

SEQ ID NO: 54174 - protein, 13 aa, Homo sapiens
  CDR3 for beta chain variable domain of TCR clone 27087 (TRBV11-2, TRBJ2-1)
CASSLRLTHGQFF

SEQ ID NO: 54175 - protein, 16 aa, Homo sapiens
  CDR3 for alpha chain variable domain of TCR clone 27088 (TRAV12-1, TRAJ42)
CVVTPYYGGSQGNLIS

SEQ ID NO: 54176 - protein, 15 aa, Homo sapiens
  CDR3 for beta chain variable domain of TCR clone 27088 (TRBV4-3, TRBJ2-7)
CASSQGGRGIYEQYF

SEQ ID NO: 54177 - protein, 13 aa, Homo sapiens
  CDR3 for alpha chain variable domain of TCR clone 27089 (TRAV12-3, TRAJ13)
CAMGTGGYQKVTF

SEQ ID NO: 54178 - protein, 13 aa, Homo sapiens
  CDR3 for beta chain variable domain of TCR clone 27089 (TRBV7-2, TRBJ2-5)
CQQHRGELKTQYF

SEQ ID NO: 54179 - protein, 15 aa, Homo sapiens
  CDR3 for alpha chain variable domain of TCR clone 27090 (TRAV3, TRAJ22)
CAVRDRGGSARQLTF

SEQ ID NO: 54180 - protein, 13 aa, Homo sapiens
  CDR3 for beta chain variable domain of TCR clone 27090 (TRBV12-3, TRBJ1-2)
CASSLRQGKGHTF

SEQ ID NO: 54181 - protein, 14 aa, Homo sapiens
  CDR3 for alpha chain variable domain of TCR clone 27091 (TRAV1-2, TRAJ27)
CAVRSGTNAGKSTF

SEQ ID NO: 54182 - protein, 15 aa, Homo sapiens
  CDR3 for beta chain variable domain of TCR clone 27091 (TRBV18, TRBJ2-7)
CASSPLRGRTYEQYF

SEQ ID NO: 54183 - protein, 14 aa, Homo sapiens
  CDR3 for alpha chain variable domain of TCR clone 27092 (TRAV12-2, TRAJ17)
CAVLFKAAGNKLTF

SEQ ID NO: 54184 - protein, 15 aa, Homo sapiens
  CDR3 for beta chain variable domain of TCR clone 27092 (TRBV7-2, TRBJ2-1)
CASSSGLAGGNEQFF

SEQ ID NO: 54185 - protein, 15 aa, Homo sapiens
  CDR3 for alpha chain variable domain of TCR clone 27093 (TRAV13-1, TRAJ10)
CAATILTGGGNKLTL

SEQ ID NO: 54186 - protein, 15 aa, Homo sapiens
  CDR3 for beta chain variable domain of TCR clone 27093 (TRBV2, TRBJ2-7)
CASTLLGSGATEQYF

SEQ ID NO: 54187 - protein, 13 aa, Homo sapiens
  CDR3 for alpha chain variable domain of TCR clone 27094 (TRAV35, TRAJ36)
CAGPRIGANNLFF

SEQ ID NO: 54188 - protein, 13 aa, Homo sapiens
  CDR3 for beta chain variable domain of TCR clone 27094 (TRBV27, TRBJ1-1)
CASSLSIGAEAFF

SEQ ID NO: 54189 - protein, 15 aa, Homo sapiens
  CDR3 for alpha chain variable domain of TCR clone 27095 (TRAV17, TRAJ57)
CATGPSQGGSEKLVF

SEQ ID NO: 54190 - protein, 16 aa, Homo sapiens
  CDR3 for beta chain variable domain of TCR clone 27095 (TRBV12-4, TRBJ1-5)
CASSRPVGGANQPQHF

SEQ ID NO: 54191 - protein, 12 aa, Homo sapiens
  CDR3 for alpha chain variable domain of TCR clone 27096 (TRAV3, TRAJ20)
CAVRDGDYRLSF

SEQ ID NO: 54192 - protein, 13 aa, Homo sapiens
  CDR3 for beta chain variable domain of TCR clone 27096 (TRBV9, TRBJ2-1)
CASSVGQGGEQFF

SEQ ID NO: 54193 - protein, 15 aa, Homo sapiens
  CDR3 for alpha chain variable domain of TCR clone 27097 (TRAV8-3, TRAJ11)
CAVDLLNSGYSTLTF

SEQ ID NO: 54194 - protein, 16 aa, Homo sapiens
  CDR3 for beta chain variable domain of TCR clone 27097 (TRBV7-9, TRBJ1-2)
CASSLGFSSGEDGYTF

SEQ ID NO: 54195 - protein, 12 aa, Homo sapiens
  CDR3 for alpha chain variable domain of TCR clone 27098 (TRAV26-1, TRAJ40)
CSTTSGTCKYIF

SEQ ID NO: 54196 - protein, 14 aa, Homo sapiens
  CDR3 for beta chain variable domain of TCR clone 27098 (TRBV24-1, TRBJ1-1)
CATRPTQGATEAFF

SEQ ID NO: 54197 - protein, 12 aa, Homo sapiens
  CDR3 for alpha chain variable domain of TCR clone 27099 (TRAV21, TRAJ33)
CAKRDSNYQLIW

SEQ ID NO: 54198 - protein, 14 aa, Homo sapiens
  CDR3 for beta chain variable domain of TCR clone 27099 (TRBV2, TRBJ2-7)
CASSLTSGGYEQYF

SEQ ID NO: 54199 - protein, 15 aa, Homo sapiens
  CDR3 for alpha chain variable domain of TCR clone 27100 (TRAV35, TRAJ58)
CAGRRQETSGSRLTF

SEQ ID NO: 54200 - protein, 11 aa, Homo sapiens
  CDR3 for beta chain variable domain of TCR clone 27100 (TRBV11-2, TRBJ1-1)
CASSINTEASF

SEQ ID NO: 54201 - protein, 13 aa, Homo sapiens
  CDR3 for alpha chain variable domain of TCR clone 27101 (TRAV8-3, TRAJ28)
CAGGAVGSYQLTF

SEQ ID NO: 54202 - protein, 15 aa, Homo sapiens
  CDR3 for beta chain variable domain of TCR clone 27101 (TRBV7-9, TRBJ1-5)
CASSQGHQPNQPQHF

SEQ ID NO: 54203 - protein, 14 aa, Homo sapiens
  CDR3 for alpha chain variable domain of TCR clone 27102 (TRAV2, TRAJ37)
CAVDFTSNTGKLIF

SEQ ID NO: 54204 - protein, 15 aa, Homo sapiens
  CDR3 for beta chain variable domain of TCR clone 27102 (TRBV20-1, TRBJ1-1)
CSASRGVTGNTETFF

SEQ ID NO: 54205 - protein, 18 aa, Homo sapiens
  CDR3 for alpha chain variable domain of TCR clone 27103 (TRAV26-2, TRAJ54)
CILRDVEVGIQGAQKLGF

SEQ ID NO: 54206 - protein, 17 aa, Homo sapiens
  CDR3 for beta chain variable domain of TCR clone 27103 (TRBV20-1, TRBJ1-5)
CSASLSPGQGGNQPQHF

SEQ ID NO: 54207 - protein, 12 aa, Homo sapiens
  CDR3 for alpha chain variable domain of TCR clone 27104 (TRAV8-3, TRAJ26)
CAGDNYGQNFVF

SEQ ID NO: 54208 - protein, 15 aa, Homo sapiens
  CDR3 for beta chain variable domain of TCR clone 27104 (TRBV7-9, TRBJ1-6)
CASSSPGRGNSPLHF

SEQ ID NO: 54209 - protein, 16 aa, Homo sapiens
  CDR3 for alpha chain variable domain of TCR clone 27105 (TRAV27, TRAJ13)
CAGAKSNSGGYQKVTF

SEQ ID NO: 54210 - protein, 15 aa, Homo sapiens
  CDR3 for beta chain variable domain of TCR clone 27105 (TRBV29-1, TRBJ2-1)
CSVGRHALFYNEQFF

SEQ ID NO: 54211 - protein, 12 aa, Homo sapiens
  CDR3 for alpha chain variable domain of TCR clone 27106 (TRAV12-3, TRAJ17)
CAMTLTGNKLTF

SEQ ID NO: 54212 - protein, 17 aa, Homo sapiens
  CDR3 for beta chain variable domain of TCR clone 27106 (TRBV20-1, TRBJ2-7)
CSARDRVSGMDEQYSGR

SEQ ID NO: 54213 - protein, 15 aa, Homo sapiens
  CDR3 for alpha chain variable domain of TCR clone 27107 (TRAV14/DV4, TRAJ27)
CAMREGLTNAGKSTF

SEQ ID NO: 54214 - protein, 17 aa, Homo sapiens
  CDR3 for beta chain variable domain of TCR clone 27107 (TRBV27, TRBJ2-5)
CASSFSLLGNYQETQYF

SEQ ID NO: 54215 - protein, 11 aa, Homo sapiens
  CDR3 for alpha chain variable domain of TCR clone 27108 (TRAV3, TRAJ21)
CAVGNFNKFYF

SEQ ID NO: 54216 - protein, 12 aa, Homo sapiens
  CDR3 for beta chain variable domain of TCR clone 27108 (TRBV11-2, TRBJ2-2)
CASSLPTGELFF

SEQ ID NO: 54217 - protein, 16 aa, Homo sapiens
  CDR3 for alpha chain variable domain of TCR clone 27109 (TRAV3, TRAJ37)
CAVRGKGSGNAGKLIF

SEQ ID NO: 54218 - protein, 13 aa, Homo sapiens
  CDR3 for beta chain variable domain of TCR clone 27109 (TRBV14, TRBJ2-7)
CASSQDRRYEQYF

SEQ ID NO: 54219 - protein, 11 aa, Homo sapiens
  CDR3 for alpha chain variable domain of TCR clone 27110 (TRAV8-4, TRAJ47)
DAAERGNKLVF

SEQ ID NO: 54220 - protein, 14 aa, Homo sapiens
  CDR3 for beta chain variable domain of TCR clone 27110 (TRBV7-9, TRBJ2-1)
CASSPRDSLYEQFF

SEQ ID NO: 54221 - protein, 14 aa, Homo sapiens
  CDR3 for alpha chain variable domain of TCR clone 27111 (TRAV16, TRAJ17)
CALSGHAAGNKLTF

SEQ ID NO: 54222 - protein, 15 aa, Homo sapiens
  CDR3 for beta chain variable domain of TCR clone 27111 (TRBV3-1, TRBJ1-2)
CASSPTRLPEGGYTF

SEQ ID NO: 54223 - protein, 14 aa, Homo sapiens
  CDR3 for alpha chain variable domain of TCR clone 27112 (TRAV16, TRAJ44)
CSKRRTGTASKLTF

SEQ ID NO: 54224 - protein, 15 aa, Homo sapiens
  CDR3 for beta chain variable domain of TCR clone 27112 (TRBV7-6, TRBJ1-5)
CASSQSSGINQPQHF

SEQ ID NO: 54225 - protein, 13 aa, Homo sapiens
  CDR3 for alpha chain variable domain of TCR clone 27113 (TRAV27, TRAJ41)
CAGEGNSGYALNF

SEQ ID NO: 54226 - protein, 13 aa, Homo sapiens
  CDR3 for beta chain variable domain of TCR clone 27113 (TRBV10-3, TRBJ2-7)
CASKLAVNYEQYF

SEQ ID NO: 54227 - protein, 16 aa, Homo sapiens
  CDR3 for alpha chain variable domain of TCR clone 27114 (TRAV1-2, TRAJ18)
CAVRVERGSTLGRLYF

SEQ ID NO: 54228 - protein, 16 aa, Homo sapiens
  CDR3 for beta chain variable domain of TCR clone 27114 (TRBV20-1, TRBJ2-7)
CSASTSGRLSSHEQYF

SEQ ID NO: 54229 - protein, 12 aa, Homo sapiens
  CDR3 for alpha chain variable domain of TCR clone 27115 (TRAV27, TRAJ13)
CAGVRGYQKVTF

SEQ ID NO: 54230 - protein, 16 aa, Homo sapiens
  CDR3 for beta chain variable domain of TCR clone 27115 (TRBV28, TRBJ2-1)
CASSSSHSGSLNEQFF

SEQ ID NO: 54231 - protein, 15 aa, Homo sapiens
  CDR3 for alpha chain variable domain of TCR clone 27116 (TRAV8-3, TRAJ11)
CAVGLLNSGYSTRTF

SEQ ID NO: 54232 - protein, 16 aa, Homo sapiens
  CDR3 for beta chain variable domain of TCR clone 27116 (TRBV7-9, TRBJ1-2)
CASSLGFSSGEDGYTF

SEQ ID NO: 54233 - protein, 13 aa, Homo sapiens
  CDR3 for alpha chain variable domain of TCR clone 27117 (TRAV2, TRAJ21)
CAVEDLNFNKFYF

SEQ ID NO: 54234 - protein, 15 aa, Homo sapiens
  CDR3 for beta chain variable domain of TCR clone 27117 (TRBV28, TRBJ2-5)
CASSPGQGSIETQHF

SEQ ID NO: 54235 - protein, 15 aa, Homo sapiens
  CDR3 for alpha chain variable domain of TCR clone 27118 (TRAV26-2, TRAJ28)
CILVESGAGRYQLTF

SEQ ID NO: 54236 - protein, 16 aa, Homo sapiens
  CDR3 for beta chain variable domain of TCR clone 27118 (TRBV4-2, TRBJ1-2)
CASSQEIGGASYGYTF

SEQ ID NO: 54237 - protein, 15 aa, Homo sapiens
  CDR3 for alpha chain variable domain of TCR clone 27119 (TRAV26-1, TRAJ29)
CIVRVEGSGNTPLVF

SEQ ID NO: 54238 - protein, 15 aa, Homo sapiens
  CDR3 for beta chain variable domain of TCR clone 27119 (TRBV7-9, TRBJ1-5)
CASSQGHQPNEPQHF

SEQ ID NO: 54239 - protein, 15 aa, Homo sapiens
  CDR3 for alpha chain variable domain of TCR clone 27120 (TRAV26-1, TRAJ40)
CIVRVTTSGAYKYIF

SEQ ID NO: 54240 - protein, 12 aa, Homo sapiens
  CDR3 for beta chain variable domain of TCR clone 27120 (TRBV7-9, TRBJ1-4)
CASSTDREKLFF

SEQ ID NO: 54241 - protein, 14 aa, Homo sapiens
  CDR3 for alpha chain variable domain of TCR clone 27121 (TRAV17, TRAJ4)
CATAPLGGYNELIF

SEQ ID NO: 54242 - protein, 13 aa, Homo sapiens
  CDR3 for beta chain variable domain of TCR clone 27121 (TRBV12-4, TRBJ1-3)
CASSLASGNTIYF

SEQ ID NO: 54243 - protein, 13 aa, Homo sapiens
  CDR3 for alpha chain variable domain of TCR clone 27122 (TRAV8-3, TRAJ28)
CAVGAVGSYQLTF

SEQ ID NO: 54244 - protein, 14 aa, Homo sapiens
  CDR3 for beta chain variable domain of TCR clone 27122 (TRBV6-1, TRBJ1-3)
CASVQGGGGNTIYF

SEQ ID NO: 54245 - protein, 16 aa, Homo sapiens
  CDR3 for alpha chain variable domain of TCR clone 27123 (TRAV27, TRAJ13)
CAGAKSDSGGHQKVTF

SEQ ID NO: 54246 - protein, 15 aa, Homo sapiens
  CDR3 for beta chain variable domain of TCR clone 27123 (TRBV29-1, TRBJ2-1)
CSVGRHALFYNEQFF

SEQ ID NO: 54247 - protein, 17 aa, Homo sapiens
  CDR3 for alpha chain variable domain of TCR clone 27124 (TRAV3, TRAJ42)
CAVEDRDYGGSQGNLIF

SEQ ID NO: 54248 - protein, 18 aa, Homo sapiens
  CDR3 for beta chain variable domain of TCR clone 27124 (TRBV20-1, TRBJ2-3)
CSASGLAGGPGTTDTQYF

SEQ ID NO: 54249 - protein, 11 aa, Homo sapiens
  CDR3 for alpha chain variable domain of TCR clone 27125 (TRAV3, TRAJ17)
CAEAAGNKLTF

SEQ ID NO: 54250 - protein, 15 aa, Homo sapiens
  CDR3 for beta chain variable domain of TCR clone 27125 (TRBV12-4, TRBJ2-7)
CASSLGAGGPYEQYF

SEQ ID NO: 54251 - protein, 17 aa, Homo sapiens
  CDR3 for alpha chain variable domain of TCR clone 27126 (TRAV3, TRAJ6)
CAVRDGPRAGGSYIPTF

SEQ ID NO: 54252 - protein, 20 aa, Homo sapiens
  CDR3 for beta chain variable domain of TCR clone 27126 (TRBV28, TRBJ2-1)
CANTPIGRSPGLAGGNEQFF

SEQ ID NO: 54253 - protein, 13 aa, Homo sapiens
  CDR3 for alpha chain variable domain of TCR clone 27127 (TRAV1-2, TRAJ9)
CAALNTGGFKTIF

SEQ ID NO: 54254 - protein, 15 aa, Homo sapiens
  CDR3 for beta chain variable domain of TCR clone 27127 (TRBV2, TRBJ2-1)
CASSELAGSYNEQFF

SEQ ID NO: 54255 - protein, 11 aa, Homo sapiens
  CDR3 for alpha chain variable domain of TCR clone 27128 (TRAV2, TRAJ21)
CAVFNFNRFYF

SEQ ID NO: 54256 - protein, 14 aa, Homo sapiens
  CDR3 for beta chain variable domain of TCR clone 27128 (TRBV15, TRBJ2-3)
CATRSGTSTDTQYF

SEQ ID NO: 54257 - protein, 15 aa, Homo sapiens
  CDR3 for alpha chain variable domain of TCR clone 27129 (TRAV3, TRAJ5)
CAVRELDTGRRALTF

SEQ ID NO: 54258 - protein, 13 aa, Homo sapiens
  CDR3 for beta chain variable domain of TCR clone 27129 (TRBV12-4, TRBJ2-7)
CASSPTETYEQYF

SEQ ID NO: 54259 - protein, 14 aa, Homo sapiens
  CDR3 for alpha chain variable domain of TCR clone 27130 (TRAV12-2, TRAJ17)
CAVLFKAAGNKLTF

SEQ ID NO: 54260 - protein, 15 aa, Homo sapiens
  CDR3 for beta chain variable domain of TCR clone 27130 (TRBV19, TRBJ2-1)
CASSTGTSSYNEQFF

SEQ ID NO: 54261 - protein, 14 aa, Homo sapiens
  CDR3 for alpha chain variable domain of TCR clone 27131 (TRAV17, TRAJ31)
CATVLRDNNARLMF

SEQ ID NO: 54262 - protein, 14 aa, Homo sapiens
  CDR3 for beta chain variable domain of TCR clone 27131 (TRBV12-4, TRBJ2-5)
CASSLWQKQETQYF

SEQ ID NO: 54263 - protein, 13 aa, Homo sapiens
  CDR3 for alpha chain variable domain of TCR clone 27132 (TRAV12-3, TRAJ43)
CAMIRPNNNDMRF

SEQ ID NO: 54264 - protein, 12 aa, Homo sapiens
  CDR3 for beta chain variable domain of TCR clone 27132 (TRBV11-2, TRBJ2-5)
CASGLGQETQYF

SEQ ID NO: 54265 - protein, 11 aa, Homo sapiens
  CDR3 for alpha chain variable domain of TCR clone 27133 (TRAV3, TRAJ21)
CAVGNFNKFYF

SEQ ID NO: 54266 - protein, 16 aa, Homo sapiens
  CDR3 for beta chain variable domain of TCR clone 27133 (TRBV19, TRBJ2-1)
CAWSVAGPSSYNEQFF

SEQ ID NO: 54267 - protein, 14 aa, Homo sapiens
  CDR3 for alpha chain variable domain of TCR clone 27134 (TRAV23/DV6, TRAJ22)
CAASVSGSARQLTF

SEQ ID NO: 54268 - protein, 16 aa, Homo sapiens
  CDR3 for beta chain variable domain of TCR clone 27134 (TRBV19, TRBJ2-2)
CASSCPGQGLAGELFF

SEQ ID NO: 54269 - protein, 11 aa, Homo sapiens
  CDR3 for alpha chain variable domain of TCR clone 27135 (TRAV2, TRAJ33)
CAVVSNYQLIW

SEQ ID NO: 54270 - protein, 15 aa, Homo sapiens
  CDR3 for beta chain variable domain of TCR clone 27135 (TRBV19, TRBJ1-1)
CASTSGQIQNTEAFF

SEQ ID NO: 54271 - protein, 12 aa, Homo sapiens
  CDR3 for alpha chain variable domain of TCR clone 27136 (TRAV8-3, TRAJ26)
CAGDNYGQNFVF

SEQ ID NO: 54272 - protein, 12 aa, Homo sapiens
  CDR3 for beta chain variable domain of TCR clone 27136 (TRBV11-2, TRBJ2-2)
CASSLGGGELLF

SEQ ID NO: 54273 - protein, 13 aa, Homo sapiens
  CDR3 for alpha chain variable domain of TCR clone 27137 (TRAV9-2, TRAJ39)
CALQNNAGNMLTF

SEQ ID NO: 54274 - protein, 15 aa, Homo sapiens
  CDR3 for beta chain variable domain of TCR clone 27137 (TRBV4-1, TRBJ2-7)
CASSQNTGRLYEQYF

SEQ ID NO: 54275 - protein, 18 aa, Homo sapiens
  CDR3 for alpha chain variable domain of TCR clone 27138 (TRAV13-1, TRAJ52)
CAAKNPNAGGTSYGKLTF

SEQ ID NO: 54276 - protein, 15 aa, Homo sapiens
  CDR3 for beta chain variable domain of TCR clone 27138 (TRBV6-1, TRBJ2-3)
CASSGRGGITDTQYF

SEQ ID NO: 54277 - protein, 13 aa, Homo sapiens
  CDR3 for alpha chain variable domain of TCR clone 27139 (TRAV38-2/DV8, TRAJ34)
WAYRNYNTDKLIF

SEQ ID NO: 54278 - protein, 15 aa, Homo sapiens
  CDR3 for beta chain variable domain of TCR clone 27139 (TRBV20-1, TRBJ2-5)
CSAEGTGGLQETQYF

SEQ ID NO: 54279 - protein, 15 aa, Homo sapiens
  CDR3 for alpha chain variable domain of TCR clone 27140 (TRAV17, TRAJ23)
CATNAEDNQGGKLIF

SEQ ID NO: 54280 - protein, 12 aa, Homo sapiens
  CDR3 for beta chain variable domain of TCR clone 27140 (TRBV2, TRBJ2-1)
CAKREGYNEQFF

SEQ ID NO: 54281 - protein, 15 aa, Homo sapiens
  CDR3 for alpha chain variable domain of TCR clone 27141 (TRAV21, TRAJ40)
CAVRPQPSGTYKYIF

SEQ ID NO: 54282 - protein, 13 aa, Homo sapiens
  CDR3 for beta chain variable domain of TCR clone 27141 (TRBV7-2, TRBJ2-2)
CASSSVRAGELFF

SEQ ID NO: 54283 - protein, 13 aa, Homo sapiens
  CDR3 for alpha chain variable domain of TCR clone 27142 (TRAV8-6, TRAJ50)
CAVIKTSYDKVTF

SEQ ID NO: 54284 - protein, 15 aa, Homo sapiens
  CDR3 for beta chain variable domain of TCR clone 27142 (TRBV7-2, TRBJ2-2)
CASRRPGQNTGELFF

SEQ ID NO: 54285 - protein, 18 aa, Homo sapiens
  CDR3 for alpha chain variable domain of TCR clone 27143 (TRAV13-1, TRAJ52)
CAAKNPNAGGTSYGKLTF

SEQ ID NO: 54286 - protein, 15 aa, Homo sapiens
  CDR3 for beta chain variable domain of TCR clone 27143 (TRBV6-1, TRBJ2-3)
CASSERGGTTDTQYF

SEQ ID NO: 54287 - protein, 11 aa, Homo sapiens
  CDR3 for alpha chain variable domain of TCR clone 27144 (TRAV3, TRAJ21)
CAVGNFNKSYF

SEQ ID NO: 54288 - protein, 16 aa, Homo sapiens
  CDR3 for beta chain variable domain of TCR clone 27144 (TRBV19, TRBJ2-1)
CASSRAGPSSYNEQFF

SEQ ID NO: 54289 - protein, 14 aa, Homo sapiens
  CDR3 for alpha chain variable domain of TCR clone 27145 (TRAV16, TRAJ48)
CVLTPGFGNEKLTF

SEQ ID NO: 54290 - protein, 14 aa, Homo sapiens
  CDR3 for beta chain variable domain of TCR clone 27145 (TRBV7-2, TRBJ2-7)
CASSSISGFSEQYF

SEQ ID NO: 54291 - protein, 11 aa, Homo sapiens
  CDR3 for alpha chain variable domain of TCR clone 27146 (TRAV1-1, TRAJ23)
CAVRQGGKLIF

SEQ ID NO: 54292 - protein, 13 aa, Homo sapiens
  CDR3 for beta chain variable domain of TCR clone 27146 (TRBV19, TRBJ1-2)
CASSVPGQDGYTF

SEQ ID NO: 54293 - protein, 14 aa, Homo sapiens
  CDR3 for alpha chain variable domain of TCR clone 27147 (TRAV27, TRAJ22)
CAGLPSGSARQLTF

SEQ ID NO: 54294 - protein, 17 aa, Homo sapiens
  CDR3 for beta chain variable domain of TCR clone 27147 (TRBV11-2, TRBJ2-1)
CASSLYPPGVEYNEQFF

SEQ ID NO: 54295 - protein, 12 aa, Homo sapiens
  CDR3 for alpha chain variable domain of TCR clone 27148 (TRAV4, TRAJ26)
CLVGDYGQNFAF

SEQ ID NO: 54296 - protein, 16 aa, Homo sapiens
  CDR3 for beta chain variable domain of TCR clone 27148 (TRBV7-2, TRBJ1-2)
CASSSNQDRRGHGYTF

SEQ ID NO: 54297 - protein, 14 aa, Homo sapiens
  CDR3 for alpha chain variable domain of TCR clone 27149 (TRAV9-2, TRAJ39)
CALYIYNAGNMLIF

SEQ ID NO: 54298 - protein, 18 aa, Homo sapiens
  CDR3 for beta chain variable domain of TCR clone 27149 (TRBV20-1, TRBJ2-6)
CSAETTPTHGSGANVLTF

SEQ ID NO: 54299 - protein, 15 aa, Homo sapiens
  CDR3 for alpha chain variable domain of TCR clone 27150 (TRAV27, TRAJ38)
CAARRNAGNNRKLIW

SEQ ID NO: 54300 - protein, 13 aa, Homo sapiens
  CDR3 for beta chain variable domain of TCR clone 27150 (TRBV12-5, TRBJ2-3)
CASGDGQSDTQYF

SEQ ID NO: 54301 - protein, 14 aa, Homo sapiens
  CDR3 for alpha chain variable domain of TCR clone 27151 (TRAV1-2, TRAJ16)
CAVNRFSDGQKLLF

SEQ ID NO: 54302 - protein, 12 aa, Homo sapiens
  CDR3 for beta chain variable domain of TCR clone 27151 (TRBV19, TRBJ2-1)
CASSMQDTEQFF

SEQ ID NO: 54303 - protein, 14 aa, Homo sapiens
  CDR3 for alpha chain variable domain of TCR clone 27152 (TRAV8-3, TRAJ16)
CAVDRFSNGQKLLF

SEQ ID NO: 54304 - protein, 15 aa, Homo sapiens
  CDR3 for beta chain variable domain of TCR clone 27152 (TRBV7-6, TRBJ2-1)
CASSPGQGPYNEQFF

SEQ ID NO: 54305 - protein, 13 aa, Homo sapiens
  CDR3 for alpha chain variable domain of TCR clone 27153 (TRAV8-3, TRAJ43)
CAVVPYNNNDMRF

SEQ ID NO: 54306 - protein, 16 aa, Homo sapiens
  CDR3 for beta chain variable domain of TCR clone 27153 (TRBV7-2, TRBJ2-5)
CASSPFQTGGEETQYF

SEQ ID NO: 54307 - protein, 13 aa, Homo sapiens
  CDR3 for alpha chain variable domain of TCR clone 27154 (TRAV30, TRAJ24)
CGTVTDSWGKLQF

SEQ ID NO: 54308 - protein, 15 aa, Homo sapiens
  CDR3 for beta chain variable domain of TCR clone 27154 (TRBV25-1, TRBJ1-4)
CASSPGDSTNEKLLF

SEQ ID NO: 54309 - protein, 15 aa, Homo sapiens
  CDR3 for alpha chain variable domain of TCR clone 27155 (TRAV17, TRAJ16)
CATALRFSDGQKLLF

SEQ ID NO: 54310 - protein, 12 aa, Homo sapiens
  CDR3 for beta chain variable domain of TCR clone 27155 (TRBV11-2, TRBJ2-2)
CASSLGGGELFF

SEQ ID NO: 54311 - protein, 13 aa, Homo sapiens
  CDR3 for alpha chain variable domain of TCR clone 27156 (TRAV1-2, TRAJ9)
CAALNTGGFKTIF

SEQ ID NO: 54312 - protein, 13 aa, Homo sapiens
  CDR3 for beta chain variable domain of TCR clone 27156 (TRBV19, TRBJ1-2)
WASSVPGQDGYTF

SEQ ID NO: 54313 - protein, 15 aa, Homo sapiens
  CDR3 for alpha chain variable domain of TCR clone 27157 (TRAV1-2, TRAJ28)
CAVQYSGAGSYQLTF

SEQ ID NO: 54314 - protein, 13 aa, Homo sapiens
  CDR3 for beta chain variable domain of TCR clone 27157 (TRBV20-1, TRBJ2-7)
CSATHTSGYEQYL

SEQ ID NO: 54315 - protein, 12 aa, Homo sapiens
  CDR3 for alpha chain variable domain of TCR clone 27158 (TRAV35, TRAJ49)
CAGWNTGNQFYF

SEQ ID NO: 54316 - protein, 16 aa, Homo sapiens
  CDR3 for beta chain variable domain of TCR clone 27158 (TRBV5-1, TRBJ2-2)
CASSLWDTTNTGELFL

SEQ ID NO: 54317 - protein, 12 aa, Homo sapiens
  CDR3 for alpha chain variable domain of TCR clone 27159 (TRAV12-2, TRAJ43)
CAVNVNNNDIRF

SEQ ID NO: 54318 - protein, 14 aa, Homo sapiens
  CDR3 for beta chain variable domain of TCR clone 27159 (TRBV25-1, TRBJ2-2)
CASSELGLPGELFF

SEQ ID NO: 54319 - protein, 13 aa, Homo sapiens
  CDR3 for alpha chain variable domain of TCR clone 27160 (TRAV29/DV5, TRAJ21)
CAASVYNFNKFYF

SEQ ID NO: 54320 - protein, 14 aa, Homo sapiens
  CDR3 for beta chain variable domain of TCR clone 27160 (TRBV2, TRBJ1-2)
CASNEGTGPYGYTF

SEQ ID NO: 54321 - protein, 13 aa, Homo sapiens
  CDR3 for alpha chain variable domain of TCR clone 27161 (TRAV21, TRAJ20)
CAVGPRVDYKLSF

SEQ ID NO: 54322 - protein, 13 aa, Homo sapiens
  CDR3 for beta chain variable domain of TCR clone 27161 (TRBV6-1, TRBJ1-1)
CASSRQGNTEAFF

SEQ ID NO: 54323 - protein, 13 aa, Homo sapiens
  CDR3 for alpha chain variable domain of TCR clone 27162 (TRAV1-2, TRAJ9)
CAALNTGGFKTIF

SEQ ID NO: 54324 - protein, 13 aa, Homo sapiens
  CDR3 for beta chain variable domain of TCR clone 27162 (TRBV19, TRBJ1-2)
CDSSVPGQDGYTF

SEQ ID NO: 54325 - protein, 15 aa, Homo sapiens
  CDR3 for alpha chain variable domain of TCR clone 27163 (TRAV38-1, TRAJ37)
CAFIFGSGNTGKLIF

SEQ ID NO: 54326 - protein, 12 aa, Homo sapiens
  CDR3 for beta chain variable domain of TCR clone 27163 (TRBV7-9, TRBJ2-7)
CASSVEGYEQYF

SEQ ID NO: 54327 - protein, 14 aa, Homo sapiens
  CDR3 for alpha chain variable domain of TCR clone 27164 (TRAV17, TRAJ16)
CATADFSDGQKLLF

SEQ ID NO: 54328 - protein, 15 aa, Homo sapiens
  CDR3 for beta chain variable domain of TCR clone 27164 (TRBV18, TRBJ2-1)
CASSPPSAAYNEQFF

SEQ ID NO: 54329 - protein, 15 aa, Homo sapiens
  CDR3 for alpha chain variable domain of TCR clone 27165 (TRAV8-4, TRAJ37)
CAVTYGSSNTGKLIF

SEQ ID NO: 54330 - protein, 13 aa, Homo sapiens
  CDR3 for beta chain variable domain of TCR clone 27165 (TRBV12-4, TRBJ2-5)
CASSLGGSRTQYL

SEQ ID NO: 54331 - protein, 13 aa, Homo sapiens
  CDR3 for alpha chain variable domain of TCR clone 27166 (TRAV27, TRAJ45)
CRSSGGGADGLTF

SEQ ID NO: 54332 - protein, 17 aa, Homo sapiens
  CDR3 for beta chain variable domain of TCR clone 27166 (TRBV11-2, TRBJ2-1)
CASSLYPPWVEYNEQFF

SEQ ID NO: 54333 - protein, 11 aa, Homo sapiens
  CDR3 for alpha chain variable domain of TCR clone 27167 (TRAV3, TRAJ21)
CAVGNFNKFYF

SEQ ID NO: 54334 - protein, 16 aa, Homo sapiens
  CDR3 for beta chain variable domain of TCR clone 27167 (TRBV20-1, TRBJ1-4)
CSAPGQGLLTNEKLFF

SEQ ID NO: 54335 - protein, 12 aa, Homo sapiens
  CDR3 for alpha chain variable domain of TCR clone 27168 (TRAV1-1, TRAJ9)
CAVDTGGFKTIF

SEQ ID NO: 54336 - protein, 18 aa, Homo sapiens
  CDR3 for beta chain variable domain of TCR clone 27168 (TRBV18, TRBJ2-3)
CASSYTSGAAGGTDTQYF

SEQ ID NO: 54337 - protein, 13 aa, Homo sapiens
  CDR3 for alpha chain variable domain of TCR clone 27169 (TRAV13-2, TRAJ41)
CAESINSGYALNL

SEQ ID NO: 54338 - protein, 14 aa, Homo sapiens
  CDR3 for beta chain variable domain of TCR clone 27169 (TRBV2, TRBJ2-1)
CASSEALDGNEQFF

SEQ ID NO: 54339 - protein, 17 aa, Homo sapiens
  CDR3 for alpha chain variable domain of TCR clone 27170 (TRAV3, TRAJ42)
CAVRDRDYGGSQGNPIF

SEQ ID NO: 54340 - protein, 14 aa, Homo sapiens
  CDR3 for beta chain variable domain of TCR clone 27170 (TRBV7-2, TRBJ2-5)
CASSPRGSSETQYF

SEQ ID NO: 54341 - protein, 14 aa, Homo sapiens
  CDR3 for alpha chain variable domain of TCR clone 27171 (TRAV1-2, TRAJ16)
CAVNRFSDGQKLLF

SEQ ID NO: 54342 - protein, 18 aa, Homo sapiens
  CDR3 for beta chain variable domain of TCR clone 27171 (TRBV20-1, TRBJ2-6)
CSAESTPTHGSGANVLTF

SEQ ID NO: 54343 - protein, 16 aa, Homo sapiens
  CDR3 for alpha chain variable domain of TCR clone 27172 (TRAV13-1, TRAJ22)
CAAKGGRSGSARQLTF

SEQ ID NO: 54344 - protein, 15 aa, Homo sapiens
  CDR3 for beta chain variable domain of TCR clone 27172 (TRBV9, TRBJ1-6)
CASSVAGTGGSPLHF

SEQ ID NO: 54345 - protein, 16 aa, Homo sapiens
  CDR3 for alpha chain variable domain of TCR clone 27173 (TRAV8-3, TRAJ13)
CAVGAYPSGGYPKVTF

SEQ ID NO: 54346 - protein, 15 aa, Homo sapiens
  CDR3 for beta chain variable domain of TCR clone 27173 (TRBV19, TRBJ1-5)
CASSIVWADNQPQHF

SEQ ID NO: 54347 - protein, 16 aa, Homo sapiens
  CDR3 for alpha chain variable domain of TCR clone 27174 (TRAV27, TRAJ13)
CAGSKSDSGGYQKVTF

SEQ ID NO: 54348 - protein, 15 aa, Homo sapiens
  CDR3 for beta chain variable domain of TCR clone 27174 (TRBV29-1, TRBJ2-1)
CSVGRHALFYNEQFF

SEQ ID NO: 54349 - protein, 18 aa, Homo sapiens
  CDR3 for alpha chain variable domain of TCR clone 27175 (TRAV13-1, TRAJ52)
CAAKNPNAGGTSYGKLTF

SEQ ID NO: 54350 - protein, 15 aa, Homo sapiens
  CDR3 for beta chain variable domain of TCR clone 27175 (TRBV6-1, TRBJ2-3)
CVSSERGGITDTQYF

SEQ ID NO: 54351 - protein, 15 aa, Homo sapiens
  CDR3 for alpha chain variable domain of TCR clone 27176 (TRAV8-2, TRAJ40)
CAVLGTTSGTYKYIF

SEQ ID NO: 54352 - protein, 16 aa, Homo sapiens
  CDR3 for beta chain variable domain of TCR clone 27176 (TRBV7-3, TRBJ2-1)
CASSLEGYRSYNEQFF

SEQ ID NO: 54353 - protein, 11 aa, Homo sapiens
  CDR3 for alpha chain variable domain of TCR clone 27177 (TRAV3, TRAJ21)
CAVGNFNKFYF

SEQ ID NO: 54354 - protein, 14 aa, Homo sapiens
  CDR3 for beta chain variable domain of TCR clone 27177 (TRBV7-9, TRBJ1-2)
CASSRQGANYGYTF

SEQ ID NO: 54355 - protein, 14 aa, Homo sapiens
  CDR3 for alpha chain variable domain of TCR clone 27178 (TRAV38-1, TRAJ40)
CALRLTSGTYKYIF

SEQ ID NO: 54356 - protein, 14 aa, Homo sapiens
  CDR3 for beta chain variable domain of TCR clone 27178 (TRBV25-1, TRBJ1-1)
CASTHLGGNTEAFF

SEQ ID NO: 54357 - protein, 13 aa, Homo sapiens
  CDR3 for alpha chain variable domain of TCR clone 27179 (TRAV2, TRAJ40)
CAVVTSGTYKYIF

SEQ ID NO: 54358 - protein, 15 aa, Homo sapiens
  CDR3 for beta chain variable domain of TCR clone 27179 (TRBV11-3, TRBJ2-3)
CASLKDGREGDTHYF

SEQ ID NO: 54359 - protein, 14 aa, Homo sapiens
  CDR3 for alpha chain variable domain of TCR clone 27180 (TRAV12-3, TRAJ58)
CAMSTETSGPRLTF

SEQ ID NO: 54360 - protein, 15 aa, Homo sapiens
  CDR3 for beta chain variable domain of TCR clone 27180 (TRBV4-1, TRBJ1-4)
CASSDTGGTNEKLFF

SEQ ID NO: 54361 - protein, 14 aa, Homo sapiens
  CDR3 for alpha chain variable domain of TCR clone 27181 (TRAV35, TRAJ33)
CAGSSQDSNYPLIW

SEQ ID NO: 54362 - protein, 15 aa, Homo sapiens
  CDR3 for beta chain variable domain of TCR clone 27181 (TRBV20-1, TRBJ2-7)
CSAESGTSGAYEQYF

SEQ ID NO: 54363 - protein, 16 aa, Homo sapiens
  CDR3 for alpha chain variable domain of TCR clone 27182 (TRAV3, TRAJ37)
CAVRGKGSGNTGKLIF

SEQ ID NO: 54364 - protein, 14 aa, Homo sapiens
  CDR3 for beta chain variable domain of TCR clone 27182 (TRBV18, TRBJ2-5)
CASSPGVSQETQYF

SEQ ID NO: 54365 - protein, 12 aa, Homo sapiens
  CDR3 for alpha chain variable domain of TCR clone 27183 (TRAV12-3, TRAJ17)
CAMTLTGNKLTF

SEQ ID NO: 54366 - protein, 15 aa, Homo sapiens
  CDR3 for beta chain variable domain of TCR clone 27183 (TRBV18, TRBJ2-1)
CASSPPSASYNEQFF

SEQ ID NO: 54367 - protein, 14 aa, Homo sapiens
  CDR3 for alpha chain variable domain of TCR clone 27184 (TRAV13-2, TRAJ11)
CAETWNSGYSTLTF

SEQ ID NO: 54368 - protein, 11 aa, Homo sapiens
  CDR3 for beta chain variable domain of TCR clone 27184 (TRBV10-3, TRBJ2-7)
CAISEGLEQYF

SEQ ID NO: 54369 - protein, 14 aa, Homo sapiens
  CDR3 for alpha chain variable domain of TCR clone 27185 (TRAV12-1, TRAJ17)
CVVSYKAAGNKLTF

SEQ ID NO: 54370 - protein, 17 aa, Homo sapiens
  CDR3 for beta chain variable domain of TCR clone 27185 (TRBV20-1, TRBJ2-1)
CSASSSGLAGSYSEQFF

SEQ ID NO: 54371 - protein, 17 aa, Homo sapiens
  CDR3 for alpha chain variable domain of TCR clone 27186 (TRAV8-1, TRAJ43)
CAVTNDMRFGAGTRLTV

SEQ ID NO: 54372 - protein, 17 aa, Homo sapiens
  CDR3 for beta chain variable domain of TCR clone 27186 (TRBV5-4, TRBJ2-1)
CASSSAGGGGPYNEQFF

SEQ ID NO: 54373 - protein, 13 aa, Homo sapiens
  CDR3 for alpha chain variable domain of TCR clone 27187 (TRAV13-1, TRAJ5)
CAASDTGRRALTF

SEQ ID NO: 54374 - protein, 15 aa, Homo sapiens
  CDR3 for beta chain variable domain of TCR clone 27187 (TRBV20-1, TRBJ2-7)
CSARDRVSGMDEQYF

SEQ ID NO: 54375 - protein, 17 aa, Homo sapiens
  CDR3 for alpha chain variable domain of TCR clone 27188 (TRAV13-1, TRAJ52)
CAASSGAGGTSYGNLTF

SEQ ID NO: 54376 - protein, 15 aa, Homo sapiens
  CDR3 for beta chain variable domain of TCR clone 27188 (TRBV2, TRBJ2-1)
CASSELAGSYNEQFF

SEQ ID NO: 54377 - protein, 14 aa, Homo sapiens
  CDR3 for alpha chain variable domain of TCR clone 27189 (TRAV23/DV6, TRAJ11)
CSASLESGYSTLTF

SEQ ID NO: 54378 - protein, 13 aa, Homo sapiens
  CDR3 for beta chain variable domain of TCR clone 27189 (TRBV4-1, TRBJ2-5)
CASSLTRGETQYF

SEQ ID NO: 54379 - protein, 14 aa, Homo sapiens
  CDR3 for alpha chain variable domain of TCR clone 27190 (TRAV38-1, TRAJ45)
CASHSGGGADGLTF

SEQ ID NO: 54380 - protein, 13 aa, Homo sapiens
  CDR3 for beta chain variable domain of TCR clone 27190 (TRBV10-3, TRBJ1-2)
CAISERDSYGYSF

SEQ ID NO: 54381 - protein, 15 aa, Homo sapiens
  CDR3 for alpha chain variable domain of TCR clone 27191 (TRAV26-1, TRAJ29)
CIVRVEGSGNTPLVF

SEQ ID NO: 54382 - protein, 16 aa, Homo sapiens
  CDR3 for beta chain variable domain of TCR clone 27191 (TRBV12-4, TRBJ1-5)
CASSRPVGGSNQPQHF

SEQ ID NO: 54383 - protein, 13 aa, Homo sapiens
  CDR3 for alpha chain variable domain of TCR clone 27192 (TRAV3, TRAJ27)
CAVRPLGAGKSTF

SEQ ID NO: 54384 - protein, 16 aa, Homo sapiens
  CDR3 for beta chain variable domain of TCR clone 27192 (TRBV7-9, TRBJ2-1)
CASSDVAGGSYNEQFF

SEQ ID NO: 54385 - protein, 13 aa, Homo sapiens
  CDR3 for alpha chain variable domain of TCR clone 27193 (TRAV12-1, TRAJ11)
CVVTRGGYSALTF

SEQ ID NO: 54386 - protein, 13 aa, Homo sapiens
  CDR3 for beta chain variable domain of TCR clone 27193 (TRBV20-1, TRBJ1-2)
CSARDQGAYGYTF

SEQ ID NO: 54387 - protein, 16 aa, Homo sapiens
  CDR3 for alpha chain variable domain of TCR clone 27194 (TRAV3, TRAJ37)
CAVRGKGSGNTGKLIF

SEQ ID NO: 54388 - protein, 12 aa, Homo sapiens
  CDR3 for beta chain variable domain of TCR clone 27194 (TRBV11-2, TRBJ2-2)
CASSLGGGELLF

SEQ ID NO: 54389 - protein, 15 aa, Homo sapiens
  CDR3 for alpha chain variable domain of TCR clone 27195 (TRAV8-3, TRAJ45)
CASSYSGGVADGLTF

SEQ ID NO: 54390 - protein, 17 aa, Homo sapiens
  CDR3 for beta chain variable domain of TCR clone 27195 (TRBV7-8, TRBJ1-2)
CASSLRPLQGHLYGYTF

SEQ ID NO: 54391 - protein, 14 aa, Homo sapiens
  CDR3 for alpha chain variable domain of TCR clone 27196 (TRAV2, TRAJ39)
CAVEGDNAGNMLTF

SEQ ID NO: 54392 - protein, 14 aa, Homo sapiens
  CDR3 for beta chain variable domain of TCR clone 27196 (TRBV28, TRBJ2-7)
CASRLRARGNEQYF

SEQ ID NO: 54393 - protein, 15 aa, Homo sapiens
  CDR3 for alpha chain variable domain of TCR clone 27197 (TRAV8-4, TRAJ45)
CAVSPPGGGADGLTF

SEQ ID NO: 54394 - protein, 13 aa, Homo sapiens
  CDR3 for beta chain variable domain of TCR clone 27197 (TRBV14, TRBJ2-7)
CASSRGQAYEQYF

SEQ ID NO: 54395 - protein, 15 aa, Homo sapiens
  CDR3 for alpha chain variable domain of TCR clone 27198 (TRAV25, TRAJ52)
CAGRPGGTSYGKLKF

SEQ ID NO: 54396 - protein, 17 aa, Homo sapiens
  CDR3 for beta chain variable domain of TCR clone 27198 (TRBV7-8, TRBJ2-6)
CASSAGTGGAGANVLTF

SEQ ID NO: 54397 - protein, 12 aa, Homo sapiens
  CDR3 for alpha chain variable domain of TCR clone 27199 (TRAV2, TRAJ9)
CAVGAGGFKTIF

SEQ ID NO: 54398 - protein, 16 aa, Homo sapiens
  CDR3 for beta chain variable domain of TCR clone 27199 (TRBV13, TRBJ2-2)
CASSLRTGEHTGELFF

SEQ ID NO: 54399 - protein, 13 aa, Homo sapiens
  CDR3 for alpha chain variable domain of TCR clone 27200 (TRAV12-2, TRAJ20)
CAVYPSNDYKLSF

SEQ ID NO: 54400 - protein, 15 aa, Homo sapiens
  CDR3 for beta chain variable domain of TCR clone 27200 (TRBV27, TRBJ2-5)
CASSLYLRGGETQYF

SEQ ID NO: 54401 - protein, 14 aa, Homo sapiens
  CDR3 for alpha chain variable domain of TCR clone 27201 (TRAV26-1, TRAJ57)
CILAGQGGSEKLVF

SEQ ID NO: 54402 - protein, 13 aa, Homo sapiens
  CDR3 for beta chain variable domain of TCR clone 27201 (TRBV19, TRBJ2-7)
CASSLTTSYEQYF

SEQ ID NO: 54403 - protein, 14 aa, Homo sapiens
  CDR3 for alpha chain variable domain of TCR clone 27202 (TRAV8-4, TRAJ8)
CAVSLNTGLQKLVF

SEQ ID NO: 54404 - protein, 13 aa, Homo sapiens
  CDR3 for beta chain variable domain of TCR clone 27202 (TRBV7-9, TRBJ2-3)
CASSPGSTDTQYF

SEQ ID NO: 54405 - protein, 17 aa, Homo sapiens
  CDR3 for alpha chain variable domain of TCR clone 27203 (TRAV4, TRAJ18)
CLVVAAGRGPTLGRLYF

SEQ ID NO: 54406 - protein, 17 aa, Homo sapiens
  CDR3 for beta chain variable domain of TCR clone 27203 (TRBV28, TRBJ2-2)
CASSLATGMGDAGELFF

SEQ ID NO: 54407 - protein, 16 aa, Homo sapiens
  CDR3 for alpha chain variable domain of TCR clone 27204 (TRAV12-3, TRAJ53)
CAMSPGSGGSNYKLTF

SEQ ID NO: 54408 - protein, 11 aa, Homo sapiens
  CDR3 for beta chain variable domain of TCR clone 27204 (TRBV29-1, TRBJ2-5)
CSEDRTVTQYF

SEQ ID NO: 54409 - protein, 13 aa, Homo sapiens
  CDR3 for alpha chain variable domain of TCR clone 27205 (TRAV12-3, TRAJ54)
CALVPQGAQKLVF

SEQ ID NO: 54410 - protein, 15 aa, Homo sapiens
  CDR3 for beta chain variable domain of TCR clone 27205 (TRBV4-1, TRBJ2-2)
CASSQDARGTGELFF

SEQ ID NO: 54411 - protein, 11 aa, Homo sapiens
  CDR3 for alpha chain variable domain of TCR clone 27206 (TRAV12-1, TRAJ26)
CVVAYGQNLVF

SEQ ID NO: 54412 - protein, 15 aa, Homo sapiens
  CDR3 for beta chain variable domain of TCR clone 27206 (TRBV12-4, TRBJ2-5)
CASSGTGQAQETQYF

SEQ ID NO: 54413 - protein, 13 aa, Homo sapiens
  CDR3 for alpha chain variable domain of TCR clone 27207 (TRAV13-2, TRAJ13)
CAERPGGYQKVTF

SEQ ID NO: 54414 - protein, 17 aa, Homo sapiens
  CDR3 for beta chain variable domain of TCR clone 27207 (TRBV11-2, TRBJ2-1)
CAGSLYPPGVEYNEQFF

SEQ ID NO: 54415 - protein, 13 aa, Homo sapiens
  CDR3 for alpha chain variable domain of TCR clone 27208 (TRAV30, TRAJ34)
CGTVGYNTDKLIF

SEQ ID NO: 54416 - protein, 16 aa, Homo sapiens
  CDR3 for beta chain variable domain of TCR clone 27208 (TRBV7-9, TRBJ1-2)
CASSLGFSSGEDGYTL

SEQ ID NO: 54417 - protein, 14 aa, Homo sapiens
  CDR3 for alpha chain variable domain of TCR clone 27209 (TRAV38-1, TRAJ45)
RASHSGGGADGLTF

SEQ ID NO: 54418 - protein, 13 aa, Homo sapiens
  CDR3 for beta chain variable domain of TCR clone 27209 (TRBV10-3, TRBJ1-2)
CAISERDSYGYTF

SEQ ID NO: 54419 - protein, 14 aa, Homo sapiens
  CDR3 for alpha chain variable domain of TCR clone 27210 (TRAV13-1, TRAJ21)
CAAKEGFNKFTLDL

SEQ ID NO: 54420 - protein, 20 aa, Homo sapiens
  CDR3 for beta chain variable domain of TCR clone 27210 (TRBV28, TRBJ2-1)
CASTPIGRSPGLAGGNEQFF

SEQ ID NO: 54421 - protein, 13 aa, Homo sapiens
  CDR3 for alpha chain variable domain of TCR clone 27211 (TRAV35, TRAJ48)
CAGHEFGNKKLTF

SEQ ID NO: 54422 - protein, 14 aa, Homo sapiens
  CDR3 for beta chain variable domain of TCR clone 27211 (TRBV19, TRBJ2-1)
CASPTFVLSGEQFF

SEQ ID NO: 54423 - protein, 20 aa, Homo sapiens
  CDR3 for alpha chain variable domain of TCR clone 27212 (TRAV26-1, TRAJ38)
CIADNAGNNHIQNPDPAVYQ

SEQ ID NO: 54424 - protein, 12 aa, Homo sapiens
  CDR3 for beta chain variable domain of TCR clone 27212 (TRBV11-2, TRBJ2-2)
CASSLGGGELFF

SEQ ID NO: 54425 - protein, 14 aa, Homo sapiens
  CDR3 for alpha chain variable domain of TCR clone 27213 (TRAV12-3, TRAJ57)
CAMSAWGGSEKLAF

SEQ ID NO: 54426 - protein, 14 aa, Homo sapiens
  CDR3 for beta chain variable domain of TCR clone 27213 (TRBV7-8, TRBJ2-7)
CASSPRDRVYEQYF

SEQ ID NO: 54427 - protein, 11 aa, Homo sapiens
  CDR3 for alpha chain variable domain of TCR clone 27214 (TRAV4, TRAJ28)
CLVGDNRAETL

SEQ ID NO: 54428 - protein, 13 aa, Homo sapiens
  CDR3 for beta chain variable domain of TCR clone 27214 (TRBV20-1, TRBJ2-7)
CSAAHTSGYEQYF

SEQ ID NO: 54429 - protein, 11 aa, Homo sapiens
  CDR3 for alpha chain variable domain of TCR clone 27215 (TRAV17, TRAJ36)
CAPTGANNLLF

SEQ ID NO: 54430 - protein, 12 aa, Homo sapiens
  CDR3 for beta chain variable domain of TCR clone 27215 (TRBV29-1, TRBJ2-3)
CSVTGGADTQYF

SEQ ID NO: 54431 - protein, 11 aa, Homo sapiens
  CDR3 for alpha chain variable domain of TCR clone 27216 (TRAV1-1, TRAJ23)
CVVRQGGKLIF

SEQ ID NO: 54432 - protein, 13 aa, Homo sapiens
  CDR3 for beta chain variable domain of TCR clone 27216 (TRBV11-2, TRBJ2-5)
CASSRGPSETQYF

SEQ ID NO: 54433 - protein, 12 aa, Homo sapiens
  CDR3 for alpha chain variable domain of TCR clone 27217 (TRAV13-1, TRAJ15)
CAASQAGTALIF

SEQ ID NO: 54434 - protein, 18 aa, Homo sapiens
  CDR3 for beta chain variable domain of TCR clone 27217 (TRBV7-9, TRBJ2-3)
CASSLPINGQIGTDTQYF

SEQ ID NO: 54435 - protein, 15 aa, Homo sapiens
  CDR3 for alpha chain variable domain of TCR clone 27218 (TRAV25, TRAJ52)
CAGRPGGTSYGKLTF

SEQ ID NO: 54436 - protein, 15 aa, Homo sapiens
  CDR3 for beta chain variable domain of TCR clone 27218 (TRBV27, TRBJ2-1)
CASSNGGGSSNEQFF

SEQ ID NO: 54437 - protein, 13 aa, Homo sapiens
  CDR3 for alpha chain variable domain of TCR clone 27219 (TRAV9-2, TRAJ3)
CAPFYSSASKIIF

SEQ ID NO: 54438 - protein, 13 aa, Homo sapiens
  CDR3 for beta chain variable domain of TCR clone 27219 (TRBV12-4, TRBJ2-5)
CASSPGTVETQYF

SEQ ID NO: 54439 - protein, 18 aa, Homo sapiens
  CDR3 for alpha chain variable domain of TCR clone 27220 (TRAV21, TRAJ52)
CAVRPSPAGGTSYGKLTF

SEQ ID NO: 54440 - protein, 13 aa, Homo sapiens
  CDR3 for beta chain variable domain of TCR clone 27220 (TRBV7-3, TRBJ1-1)
CASGQDWGAEAFF

SEQ ID NO: 54441 - protein, 13 aa, Homo sapiens
  CDR3 for alpha chain variable domain of TCR clone 27221 (TRAV13-2, TRAJ48)
CEEMDFGNEKLTF

SEQ ID NO: 54442 - protein, 15 aa, Homo sapiens
  CDR3 for beta chain variable domain of TCR clone 27221 (TRBV7-9, TRBJ1-6)
CASSSPGRGNSPLHF

SEQ ID NO: 54443 - protein, 11 aa, Homo sapiens
  CDR3 for alpha chain variable domain of TCR clone 27222 (TRAV12-3, TRAJ27)
CAMANAGKSTF

SEQ ID NO: 54444 - protein, 13 aa, Homo sapiens
  CDR3 for beta chain variable domain of TCR clone 27222 (TRBV20-1, TRBJ1-1)
CSARVGRNTEAFF

SEQ ID NO: 54445 - protein, 15 aa, Homo sapiens
  CDR3 for alpha chain variable domain of TCR clone 27223 (TRAV8-3, TRAJ20)
CAVEAKGSNGYKLSF

SEQ ID NO: 54446 - protein, 12 aa, Homo sapiens
  CDR3 for beta chain variable domain of TCR clone 27223 (TRBV7-2, TRBJ1-2)
CASRDSIYGYTF

SEQ ID NO: 54447 - protein, 14 aa, Homo sapiens
  CDR3 for alpha chain variable domain of TCR clone 27224 (TRAV35, TRAJ33)
CAGSSQDSNYQLIW

SEQ ID NO: 54448 - protein, 15 aa, Homo sapiens
  CDR3 for beta chain variable domain of TCR clone 27224 (TRBV20-1, TRBJ2-7)
CSAESGTSGAYEQYL

SEQ ID NO: 54449 - protein, 15 aa, Homo sapiens
  CDR3 for alpha chain variable domain of TCR clone 27225 (TRAV2, TRAJ9)
CAVEDRGTGGFKTIF

SEQ ID NO: 54450 - protein, 12 aa, Homo sapiens
  CDR3 for beta chain variable domain of TCR clone 27225 (TRBV11-2, TRBJ2-2)
CASSLGGGELFF

SEQ ID NO: 54451 - protein, 21 aa, Homo sapiens
  CDR3 for alpha chain variable domain of TCR clone 27226 (TRAV3, TRAJ22)
HLKKPFAQEEDSAMYLRQLTF

SEQ ID NO: 54452 - protein, 15 aa, Homo sapiens
  CDR3 for beta chain variable domain of TCR clone 27226 (TRBV7-9, TRBJ1-6)
CASSSPGRGNSPLHF

SEQ ID NO: 54453 - protein, 11 aa, Homo sapiens
  CDR3 for alpha chain variable domain of TCR clone 27227 (TRAV12-3, TRAJ16)
LTGGDGQKLLF

SEQ ID NO: 54454 - protein, 13 aa, Homo sapiens
  CDR3 for beta chain variable domain of TCR clone 27227 (TRBV12-4, TRBJ1-4)
RASAMGHNEKLFF

SEQ ID NO: 54455 - protein, 12 aa, Homo sapiens
  CDR3 for alpha chain variable domain of TCR clone 27228 (TRAV29/DV5, TRAJ49)
CAATDTGNQFYF

SEQ ID NO: 54456 - protein, 15 aa, Homo sapiens
  CDR3 for beta chain variable domain of TCR clone 27228 (TRBV20-1, TRBJ2-7)
CSARDRVSGMDEQYF

SEQ ID NO: 54457 - protein, 16 aa, Homo sapiens
  CDR3 for alpha chain variable domain of TCR clone 27229 (TRAV3, TRAJ37)
CAVRGKGSGNTVKLIF

SEQ ID NO: 54458 - protein, 13 aa, Homo sapiens
  CDR3 for beta chain variable domain of TCR clone 27229 (TRBV14, TRBJ2-7)
CASSQDRRYEQYF

SEQ ID NO: 54459 - protein, 17 aa, Homo sapiens
  CDR3 for alpha chain variable domain of TCR clone 27230 (TRAV3, TRAJ6)
CAVRDGPRAGGSYIPTL

SEQ ID NO: 54460 - protein, 15 aa, Homo sapiens
  CDR3 for beta chain variable domain of TCR clone 27230 (TRBV5-8, TRBJ2-2)
CASSLDRGATGELFF

SEQ ID NO: 54461 - protein, 14 aa, Homo sapiens
  CDR3 for alpha chain variable domain of TCR clone 27231 (TRAV1-1, TRAJ27)
CAVIYNTNAGKSTF

SEQ ID NO: 54462 - protein, 15 aa, Homo sapiens
  CDR3 for beta chain variable domain of TCR clone 27231 (TRBV20-1, TRBJ2-7)
CSARDRVSGMDEQYF

SEQ ID NO: 54463 - protein, 15 aa, Homo sapiens
  CDR3 for alpha chain variable domain of TCR clone 27232 (TRAV26-1, TRAJ22)
CIVRVSFWFCKATNL

SEQ ID NO: 54464 - protein, 13 aa, Homo sapiens
  CDR3 for beta chain variable domain of TCR clone 27232 (TRBV7-9, TRBJ1-2)
CASSLKQNYGYTF

SEQ ID NO: 54465 - protein, 14 aa, Homo sapiens
  CDR3 for alpha chain variable domain of TCR clone 27233 (TRAV1-2, TRAJ6)
CAASLSGGSYIPTF

SEQ ID NO: 54466 - protein, 15 aa, Homo sapiens
  CDR3 for beta chain variable domain of TCR clone 27233 (TRBV28, TRBJ2-7)
CASSPGGRGFYEQYF

SEQ ID NO: 54467 - protein, 14 aa, Homo sapiens
  CDR3 for alpha chain variable domain of TCR clone 27234 (TRAV1-2, TRAJ8)
CAVREDTGFQKLVF

SEQ ID NO: 54468 - protein, 15 aa, Homo sapiens
  CDR3 for beta chain variable domain of TCR clone 27234 (TRBV11-2, TRBJ2-2)
CASSSDRVNAGELFF

SEQ ID NO: 54469 - protein, 10 aa, Homo sapiens
  CDR3 for alpha chain variable domain of TCR clone 27235 (TRAV30, TRAJ48)
CGIGNEKLTF

SEQ ID NO: 54470 - protein, 14 aa, Homo sapiens
  CDR3 for beta chain variable domain of TCR clone 27235 (TRBV7-6, TRBJ2-3)
CASSVAGGADTQYF

SEQ ID NO: 54471 - protein, 14 aa, Homo sapiens
  CDR3 for alpha chain variable domain of TCR clone 27236 (TRAV8-2, TRAJ11)
CVVSEKSGYSTLTL

SEQ ID NO: 54472 - protein, 16 aa, Homo sapiens
  CDR3 for beta chain variable domain of TCR clone 27236 (TRBV28, TRBJ2-1)
CASSSPEYPRDNEQFF

SEQ ID NO: 54473 - protein, 15 aa, Homo sapiens
  CDR3 for alpha chain variable domain of TCR clone 27237 (TRAV3, TRAJ20)
CAVRDIKLSDYKLSF

SEQ ID NO: 54474 - protein, 15 aa, Homo sapiens
  CDR3 for beta chain variable domain of TCR clone 27237 (TRBV7-9, TRBJ1-6)
CASSSPGRGNSPPHF

SEQ ID NO: 54475 - protein, 14 aa, Homo sapiens
  CDR3 for alpha chain variable domain of TCR clone 27238 (TRAV12-2, TRAJ6)
CASTWGGGSYIPTF

SEQ ID NO: 54476 - protein, 13 aa, Homo sapiens
  CDR3 for beta chain variable domain of TCR clone 27238 (TRBV2, TRBJ1-1)
CASSEGGNTEAFF

SEQ ID NO: 54477 - protein, 14 aa, Homo sapiens
  CDR3 for alpha chain variable domain of TCR clone 27239 (TRAV12-2, TRAJ17)
CAVLFKAAGNKQTF

SEQ ID NO: 54478 - protein, 17 aa, Homo sapiens
  CDR3 for beta chain variable domain of TCR clone 27239 (TRBV20-1, TRBJ2-2)
CSASGSGQGGLTGELFF

SEQ ID NO: 54479 - protein, 14 aa, Homo sapiens
  CDR3 for alpha chain variable domain of TCR clone 27240 (TRAV12-1, TRAJ17)
CVVNYKAAGHKLTF

SEQ ID NO: 54480 - protein, 17 aa, Homo sapiens
  CDR3 for beta chain variable domain of TCR clone 27240 (TRBV20-1, TRBJ2-1)
CSASSSGLAGSYNEQFF

SEQ ID NO: 54481 - protein, 12 aa, Homo sapiens
  CDR3 for alpha chain variable domain of TCR clone 27241 (TRAV8-4, TRAJ43)
CAVGVNNNDMRF

SEQ ID NO: 54482 - protein, 14 aa, Homo sapiens
  CDR3 for beta chain variable domain of TCR clone 27241 (TRBV11-2, TRBJ1-2)
CASSLGTANYGYTF

SEQ ID NO: 54483 - protein, 13 aa, Homo sapiens
  CDR3 for alpha chain variable domain of TCR clone 27242 (TRAV12-3, TRAJ7)
CEMTPYGNNRLAF

SEQ ID NO: 54484 - protein, 16 aa, Homo sapiens
  CDR3 for beta chain variable domain of TCR clone 27242 (TRBV20-1, TRBJ1-4)
CSARPYGGELNEKLFF

SEQ ID NO: 54485 - protein, 16 aa, Homo sapiens
  CDR3 for alpha chain variable domain of TCR clone 27243 (TRAV1-2, TRAJ10)
CAVRGVLTGGGNKLTF

SEQ ID NO: 54486 - protein, 12 aa, Homo sapiens
  CDR3 for beta chain variable domain of TCR clone 27243 (TRBV7-8, TRBJ2-7)
CASSLGDREKYF

SEQ ID NO: 54487 - protein, 15 aa, Homo sapiens
  CDR3 for alpha chain variable domain of TCR clone 27244 (TRAV1-2, TRAJ40)
CLLPLCCSGTYKYIF

SEQ ID NO: 54488 - protein, 16 aa, Homo sapiens
  CDR3 for beta chain variable domain of TCR clone 27244 (TRBV29-1, TRBJ2-7)
CSVEVVGTSGSYEQYF

SEQ ID NO: 54489 - protein, 12 aa, Homo sapiens
  CDR3 for alpha chain variable domain of TCR clone 27245 (TRAV17, TRAJ21)
CALRYNFNKSYF

SEQ ID NO: 54490 - protein, 13 aa, Homo sapiens
  CDR3 for beta chain variable domain of TCR clone 27245 (TRBV24-1, TRBJ2-5)
CATSTGGTETQYF

SEQ ID NO: 54491 - protein, 14 aa, Homo sapiens
  CDR3 for alpha chain variable domain of TCR clone 27246 (TRAV8-3, TRAJ6)
CAVGASGGSYIPTF

SEQ ID NO: 54492 - protein, 17 aa, Homo sapiens
  CDR3 for beta chain variable domain of TCR clone 27246 (TRBV18, TRBJ2-2)
CASSPSDPWLNTGELFF

SEQ ID NO: 54493 - protein, 15 aa, Homo sapiens
  CDR3 for alpha chain variable domain of TCR clone 27247 (TRAV4, TRAJ26)
CLVGDMNNYGQNSVF

SEQ ID NO: 54494 - protein, 16 aa, Homo sapiens
  CDR3 for beta chain variable domain of TCR clone 27247 (TRBV28, TRBJ1-4)
CASSSRTGAANEKLFF

SEQ ID NO: 54495 - protein, 10 aa, Homo sapiens
  CDR3 for alpha chain variable domain of TCR clone 27248 (TRAV8-4, TRAJ43)
CAVSAGDMRF

SEQ ID NO: 54496 - protein, 15 aa, Homo sapiens
  CDR3 for beta chain variable domain of TCR clone 27248 (TRBV5-1, TRBJ2-3)
CASSVTSGSTDTQYF

SEQ ID NO: 54497 - protein, 11 aa, Homo sapiens
  CDR3 for alpha chain variable domain of TCR clone 27249 (TRAV20, TRAJ40)
CAVGGTYKYIF

SEQ ID NO: 54498 - protein, 15 aa, Homo sapiens
  CDR3 for beta chain variable domain of TCR clone 27249 (TRBV6-3, TRBJ2-2)
CASSFLATLTGEPFF

SEQ ID NO: 54499 - protein, 18 aa, Homo sapiens
  CDR3 for alpha chain variable domain of TCR clone 27250 (TRAV26-2, TRAJ54)
CILRDVEGGIQGAQKLVF

SEQ ID NO: 54500 - protein, 16 aa, Homo sapiens
  CDR3 for beta chain variable domain of TCR clone 27250 (TRBV6-1, TRBJ2-5)
CASSETLDRGAETQYF

SEQ ID NO: 54501 - protein, 11 aa, Homo sapiens
  CDR3 for alpha chain variable domain of TCR clone 27251 (TRAV1-1, TRAJ23)
CAVRQGGKLIF

SEQ ID NO: 54502 - protein, 16 aa, Homo sapiens
  CDR3 for beta chain variable domain of TCR clone 27251 (TRBV5-1, TRBJ2-7)
CASSLEGLAGLYEQYF

SEQ ID NO: 54503 - protein, 13 aa, Homo sapiens
  CDR3 for alpha chain variable domain of TCR clone 27252 (TRAV30, TRAJ49)
CGTESQPVTSSIL

SEQ ID NO: 54504 - protein, 12 aa, Homo sapiens
  CDR3 for beta chain variable domain of TCR clone 27252 (TRBV11-2, TRBJ2-2)
CASSLGGGELFF

SEQ ID NO: 54505 - protein, 13 aa, Homo sapiens
  CDR3 for alpha chain variable domain of TCR clone 27253 (TRAV27, TRAJ45)
CSSSGGGADGLTF

SEQ ID NO: 54506 - protein, 17 aa, Homo sapiens
  CDR3 for beta chain variable domain of TCR clone 27253 (TRBV11-2, TRBJ2-1)
CASSLYPPGVEYNEQFF

SEQ ID NO: 54507 - protein, 11 aa, Homo sapiens
  CDR3 for alpha chain variable domain of TCR clone 27254 (TRAV17, TRAJ9)
CGFTGGFTTIF

SEQ ID NO: 54508 - protein, 14 aa, Homo sapiens
  CDR3 for beta chain variable domain of TCR clone 27254 (TRBV7-9, TRBJ2-2)
CASSLVQDTGELFF

SEQ ID NO: 54509 - protein, 12 aa, Homo sapiens
  CDR3 for alpha chain variable domain of TCR clone 27255 (TRAV12-3, TRAJ40)
CAMSSGTYKYIF

SEQ ID NO: 54510 - protein, 17 aa, Homo sapiens
  CDR3 for beta chain variable domain of TCR clone 27255 (TRBV7-8, TRBJ2-6)
CASSAGTGGAGANVLTF

SEQ ID NO: 54511 - protein, 15 aa, Homo sapiens
  CDR3 for alpha chain variable domain of TCR clone 27256 (TRAV8-3, TRAJ11)
CAVGLLNSGYSTLTF

SEQ ID NO: 54512 - protein, 16 aa, Homo sapiens
  CDR3 for beta chain variable domain of TCR clone 27256 (TRBV7-9, TRBJ1-2)
CASSLGFSSGEDGHTF

SEQ ID NO: 54513 - protein, 16 aa, Homo sapiens
  CDR3 for alpha chain variable domain of TCR clone 27257 (TRAV4, TRAJ5)
CLVGPDHGHGQESTYF

SEQ ID NO: 54514 - protein, 15 aa, Homo sapiens
  CDR3 for beta chain variable domain of TCR clone 27257 (TRBV27, TRBJ2-5)
CASSLIPAGGETQYF

SEQ ID NO: 54515 - protein, 13 aa, Homo sapiens
  CDR3 for alpha chain variable domain of TCR clone 27258 (TRAV27, TRAJ6)
CAGGTRGSYIPTF

SEQ ID NO: 54516 - protein, 14 aa, Homo sapiens
  CDR3 for beta chain variable domain of TCR clone 27258 (TRBV19, TRBJ2-1)
CASPTFVLSGEQFF

SEQ ID NO: 54517 - protein, 16 aa, Homo sapiens
  CDR3 for alpha chain variable domain of TCR clone 27259 (TRAV1-2, TRAJ10)
CAVRGVLPGGGNKLTF

SEQ ID NO: 54518 - protein, 12 aa, Homo sapiens
  CDR3 for beta chain variable domain of TCR clone 27259 (TRBV7-8, TRBJ2-7)
CASSLGDREQYF

SEQ ID NO: 54519 - protein, 15 aa, Homo sapiens
  CDR3 for alpha chain variable domain of TCR clone 27260 (TRAV26-1, TRAJ29)
CLVRVEGSGNTPLVF

SEQ ID NO: 54520 - protein, 14 aa, Homo sapiens
  CDR3 for beta chain variable domain of TCR clone 27260 (TRBV18, TRBJ2-5)
CASSPGVSQETQYF

SEQ ID NO: 54521 - protein, 13 aa, Homo sapiens
  CDR3 for alpha chain variable domain of TCR clone 27261 (TRAV21, TRAJ15)
CAVANQAGTALIF

SEQ ID NO: 54522 - protein, 14 aa, Homo sapiens
  CDR3 for beta chain variable domain of TCR clone 27261 (TRBV27, TRBJ2-2)
CASSLGAATGEPFF

SEQ ID NO: 54523 - protein, 15 aa, Homo sapiens
  CDR3 for alpha chain variable domain of TCR clone 27262 (TRAV38-2/DV8, TRAJ48)
CAYRSGGFGNEKLTF

SEQ ID NO: 54524 - protein, 16 aa, Homo sapiens
  CDR3 for beta chain variable domain of TCR clone 27262 (TRBV28, TRBJ2-7)
CASSPWVATGDLAQYF

SEQ ID NO: 54525 - protein, 12 aa, Homo sapiens
  CDR3 for alpha chain variable domain of TCR clone 27263 (TRAV8-3, TRAJ20)
CAVGANDYKLSF

SEQ ID NO: 54526 - protein, 16 aa, Homo sapiens
  CDR3 for beta chain variable domain of TCR clone 27263 (TRBV19, TRBJ2-2)
CASRSPVTGATGELFF

SEQ ID NO: 54527 - protein, 10 aa, Homo sapiens
  CDR3 for alpha chain variable domain of TCR clone 27264 (TRAV1-2, TRAJ20)
CACNDYKLSF

SEQ ID NO: 54528 - protein, 16 aa, Homo sapiens
  CDR3 for beta chain variable domain of TCR clone 27264 (TRBV20-1, TRBJ2-1)
CSARDLKQGMNDEQFF

SEQ ID NO: 54529 - protein, 14 aa, Homo sapiens
  CDR3 for alpha chain variable domain of TCR clone 27265 (TRAV20, TRAJ42)
CAVQAGGSQGNLIF

SEQ ID NO: 54530 - protein, 14 aa, Homo sapiens
  CDR3 for beta chain variable domain of TCR clone 27265 (TRBV28, TRBJ1-2)
CDSRIQGANYGYTF

SEQ ID NO: 54531 - protein, 13 aa, Homo sapiens
  CDR3 for alpha chain variable domain of TCR clone 27266 (TRAV13-1, TRAJ5)
CAARVTGRRALTL

SEQ ID NO: 54532 - protein, 15 aa, Homo sapiens
  CDR3 for beta chain variable domain of TCR clone 27266 (TRBV28, TRBJ2-7)
CASSPGGRGFYEQYF

SEQ ID NO: 54533 - protein, 14 aa, Homo sapiens
  CDR3 for alpha chain variable domain of TCR clone 27267 (TRAV1-2, TRAJ16)
CAVNRFSDGQRLLF

SEQ ID NO: 54534 - protein, 16 aa, Homo sapiens
  CDR3 for beta chain variable domain of TCR clone 27267 (TRBV12-4, TRBJ1-5)
CASSRPVGGSNQPQHF

SEQ ID NO: 54535 - protein, 13 aa, Homo sapiens
  CDR3 for alpha chain variable domain of TCR clone 27268 (TRAV35, TRAJ36)
CAVPRIGANNLFF

SEQ ID NO: 54536 - protein, 15 aa, Homo sapiens
  CDR3 for beta chain variable domain of TCR clone 27268 (TRBV28, TRBJ2-5)
CASSPPWSYQETQYF

SEQ ID NO: 54537 - protein, 15 aa, Homo sapiens
  CDR3 for alpha chain variable domain of TCR clone 27269 (TRAV27, TRAJ50)
CAGVGRGTSYDKVIL

SEQ ID NO: 54538 - protein, 14 aa, Homo sapiens
  CDR3 for beta chain variable domain of TCR clone 27269 (TRBV7-2, TRBJ1-1)
CASSFYDLNTEAFF

SEQ ID NO: 54539 - protein, 15 aa, Homo sapiens
  CDR3 for alpha chain variable domain of TCR clone 27270 (TRAV38-1, TRAJ37)
CAFIHGSGNTGKLIF

SEQ ID NO: 54540 - protein, 12 aa, Homo sapiens
  CDR3 for beta chain variable domain of TCR clone 27270 (TRBV7-9, TRBJ2-7)
CASSFGSYEQYL

SEQ ID NO: 54541 - protein, 13 aa, Homo sapiens
  CDR3 for alpha chain variable domain of TCR clone 27271 (TRAV20, TRAJ21)
CAVEGYNFNKFYF

SEQ ID NO: 54542 - protein, 14 aa, Homo sapiens
  CDR3 for beta chain variable domain of TCR clone 27271 (TRBV12-5, TRBJ2-5)
CDSGSRTHQETQYF

SEQ ID NO: 54543 - protein, 13 aa, Homo sapiens
  CDR3 for alpha chain variable domain of TCR clone 27272 (TRAV3, TRAJ27)
CAVRPLGAGKSTF

SEQ ID NO: 54544 - protein, 13 aa, Homo sapiens
  CDR3 for beta chain variable domain of TCR clone 27272 (TRBV7-9, TRBJ2-3)
CASSPGSTDTKYF

SEQ ID NO: 54545 - protein, 18 aa, Homo sapiens
  CDR3 for alpha chain variable domain of TCR clone 27273 (TRAV8-4, TRAJ52)
CAVTRANAGGTSYGKLTF

SEQ ID NO: 54546 - protein, 12 aa, Homo sapiens
  CDR3 for beta chain variable domain of TCR clone 27273 (TRBV11-2, TRBJ2-2)
CASSLGGGELFF

SEQ ID NO: 54547 - protein, 15 aa, Homo sapiens
  CDR3 for alpha chain variable domain of TCR clone 27274 (TRAV29/DV5, TRAJ29)
CAASERSSGNTPLVF

SEQ ID NO: 54548 - protein, 13 aa, Homo sapiens
  CDR3 for beta chain variable domain of TCR clone 27274 (TRBV19, TRBJ1-1)
CASSPSNGGEAFF

SEQ ID NO: 54549 - protein, 15 aa, Homo sapiens
  CDR3 for alpha chain variable domain of TCR clone 27275 (TRAV27, TRAJ38)
CAARRNAGNNRKLIW

SEQ ID NO: 54550 - protein, 14 aa, Homo sapiens
  CDR3 for beta chain variable domain of TCR clone 27275 (TRBV7-6, TRBJ2-3)
CASSLGTVTDTQYF

SEQ ID NO: 54551 - protein, 14 aa, Homo sapiens
  CDR3 for alpha chain variable domain of TCR clone 27276 (TRAV35, TRAJ22)
CAGLRPGSARQLTF

SEQ ID NO: 54552 - protein, 16 aa, Homo sapiens
  CDR3 for beta chain variable domain of TCR clone 27276 (TRBV12-4, TRBJ1-5)
CASSRPVGGSNQPQHF

SEQ ID NO: 54553 - protein, 12 aa, Homo sapiens
  CDR3 for alpha chain variable domain of TCR clone 27277 (TRAV13-1, TRAJ21)
CAAKEGFNKFYF

SEQ ID NO: 54554 - protein, 14 aa, Homo sapiens
  CDR3 for beta chain variable domain of TCR clone 27277 (TRBV7-6, TRBJ2-3)
CASSLGTVTDTQYF

SEQ ID NO: 54555 - protein, 16 aa, Homo sapiens
  CDR3 for alpha chain variable domain of TCR clone 27278 (TRAV30, TRAJ24)
CGTEIVDADSWGKFQF

SEQ ID NO: 54556 - protein, 13 aa, Homo sapiens
  CDR3 for beta chain variable domain of TCR clone 27278 (TRBV11-2, TRBJ2-5)
CASSATGEETQYF

SEQ ID NO: 54557 - protein, 15 aa, Homo sapiens
  CDR3 for alpha chain variable domain of TCR clone 27279 (TRAV21, TRAJ24)
CAARSSTDSWGKLQF

SEQ ID NO: 54558 - protein, 16 aa, Homo sapiens
  CDR3 for beta chain variable domain of TCR clone 27279 (TRBV7-3, TRBJ2-2)
CASSLKRGTLSGELFF

SEQ ID NO: 54559 - protein, 12 aa, Homo sapiens
  CDR3 for alpha chain variable domain of TCR clone 27280 (TRAV1-2, TRAJ33)
CAALGSNYQLIW

SEQ ID NO: 54560 - protein, 14 aa, Homo sapiens
  CDR3 for beta chain variable domain of TCR clone 27280 (TRBV19, TRBJ2-3)
CASSAPRGTDTQYF

SEQ ID NO: 54561 - protein, 10 aa, Homo sapiens
  CDR3 for alpha chain variable domain of TCR clone 27281 (TRAV23/DV6, TRAJ57)
CAESSTLSQG

SEQ ID NO: 54562 - protein, 14 aa, Homo sapiens
  CDR3 for beta chain variable domain of TCR clone 27281 (TRBV25-1, TRBJ1-1)
CASTHLGGNTEAFF

SEQ ID NO: 54563 - protein, 14 aa, Homo sapiens
  CDR3 for alpha chain variable domain of TCR clone 27282 (TRAV8-3, TRAJ4)
CAVGASGGYNKLIV

SEQ ID NO: 54564 - protein, 13 aa, Homo sapiens
  CDR3 for beta chain variable domain of TCR clone 27282 (TRBV18, TRBJ2-5)
CASSLQGQETQYF

SEQ ID NO: 54565 - protein, 17 aa, Homo sapiens
  CDR3 for alpha chain variable domain of TCR clone 27283 (TRAV26-2, TRAJ42)
CNLRDVGYGGSQGNLIF

SEQ ID NO: 54566 - protein, 16 aa, Homo sapiens
  CDR3 for beta chain variable domain of TCR clone 27283 (TRBV12-4, TRBJ2-7)
CASSLIGGTGTYEQYF

SEQ ID NO: 54567 - protein, 15 aa, Homo sapiens
  CDR3 for alpha chain variable domain of TCR clone 27284 (TRAV21, TRAJ53)
CATLNSGGSNYKLTF

SEQ ID NO: 54568 - protein, 13 aa, Homo sapiens
  CDR3 for beta chain variable domain of TCR clone 27284 (TRBV10-3, TRBJ2-7)
CASKLAVNYEQYF

SEQ ID NO: 54569 - protein, 16 aa, Homo sapiens
  CDR3 for alpha chain variable domain of TCR clone 27285 (TRAV3, TRAJ37)
CAVRPHGSGNTGKLIF

SEQ ID NO: 54570 - protein, 13 aa, Homo sapiens
  CDR3 for beta chain variable domain of TCR clone 27285 (TRBV10-3, TRBJ2-7)
CASKLAVNYEQYF

SEQ ID NO: 54571 - protein, 14 aa, Homo sapiens
  CDR3 for alpha chain variable domain of TCR clone 27286 (TRAV29/DV5, TRAJ44)
RAAFLVGTASKLTF

SEQ ID NO: 54572 - protein, 15 aa, Homo sapiens
  CDR3 for beta chain variable domain of TCR clone 27286 (TRBV7-3, TRBJ2-2)
CASSETGQGTGELFF

SEQ ID NO: 54573 - protein, 15 aa, Homo sapiens
  CDR3 for alpha chain variable domain of TCR clone 27287 (TRAV35, TRAJ40)
CAGQLGTSGTYKYIF

SEQ ID NO: 54574 - protein, 14 aa, Homo sapiens
  CDR3 for beta chain variable domain of TCR clone 27287 (TRBV7-3, TRBJ2-1)
CASSLAVGTNEQFF

SEQ ID NO: 54575 - protein, 17 aa, Homo sapiens
  CDR3 for alpha chain variable domain of TCR clone 27288 (TRAV8-6, TRAJ58)
CAVSSWVGETSGSRFTF

SEQ ID NO: 54576 - protein, 14 aa, Homo sapiens
  CDR3 for beta chain variable domain of TCR clone 27288 (TRBV4-2, TRBJ2-1)
CASGLDRAYNEQFF

SEQ ID NO: 54577 - protein, 13 aa, Homo sapiens
  CDR3 for alpha chain variable domain of TCR clone 27289 (TRAV13-1, TRAJ5)
CAARVKGRRALTF

SEQ ID NO: 54578 - protein, 15 aa, Homo sapiens
  CDR3 for beta chain variable domain of TCR clone 27289 (TRBV7-9, TRBJ2-7)
CASSPGGGLTYEQYF

SEQ ID NO: 54579 - protein, 13 aa, Homo sapiens
  CDR3 for alpha chain variable domain of TCR clone 27290 (TRAV35, TRAJ42)
CAGFPGSQGNLIF

SEQ ID NO: 54580 - protein, 13 aa, Homo sapiens
  CDR3 for beta chain variable domain of TCR clone 27290 (TRBV7-3, TRBJ2-1)
CASSLDSYNEQFF

SEQ ID NO: 54581 - protein, 14 aa, Homo sapiens
  CDR3 for alpha chain variable domain of TCR clone 27291 (TRAV29/DV5, TRAJ20)
CAASAPIEDYKLSF

SEQ ID NO: 54582 - protein, 15 aa, Homo sapiens
  CDR3 for beta chain variable domain of TCR clone 27291 (TRBV10-2, TRBJ2-6)
CASSEQGTGANVLTF

SEQ ID NO: 54583 - protein, 16 aa, Homo sapiens
  CDR3 for alpha chain variable domain of TCR clone 27292 (TRAV1-1, TRAJ24)
CAVRDNQLGEIPVWSR

SEQ ID NO: 54584 - protein, 14 aa, Homo sapiens
  CDR3 for beta chain variable domain of TCR clone 27292 (TRBV27, TRBJ2-3)
CASSWAGTTDTQYF

SEQ ID NO: 54585 - protein, 12 aa, Homo sapiens
  CDR3 for alpha chain variable domain of TCR clone 27293 (TRAV13-2, TRAJ33)
CRDFWSNYQLIW

SEQ ID NO: 54586 - protein, 15 aa, Homo sapiens
  CDR3 for beta chain variable domain of TCR clone 27293 (TRBV6-1, TRBJ2-6)
CASSSRPSGANVLTF

SEQ ID NO: 54587 - protein, 17 aa, Homo sapiens
  CDR3 for alpha chain variable domain of TCR clone 27294 (TRAV3, TRAJ6)
CAVRGGPRAGGSYIPTF

SEQ ID NO: 54588 - protein, 20 aa, Homo sapiens
  CDR3 for beta chain variable domain of TCR clone 27294 (TRBV28, TRBJ2-1)
CASTPIGRSPGLAGGNEQFF

SEQ ID NO: 54589 - protein, 13 aa, Homo sapiens
  CDR3 for alpha chain variable domain of TCR clone 27295 (TRAV27, TRAJ6)
CAGGTRGSYIPTF

SEQ ID NO: 54590 - protein, 14 aa, Homo sapiens
  CDR3 for beta chain variable domain of TCR clone 27295 (TRBV28, TRBJ1-5)
CASSGQALYQPQHF

SEQ ID NO: 54591 - protein, 15 aa, Homo sapiens
  CDR3 for alpha chain variable domain of TCR clone 27296 (TRAV26-1, TRAJ22)
CIVRVSFWFCKATDL

SEQ ID NO: 54592 - protein, 13 aa, Homo sapiens
  CDR3 for beta chain variable domain of TCR clone 27296 (TRBV7-9, TRBJ1-2)
CASSLKQNYGHTF

SEQ ID NO: 54593 - protein, 14 aa, Homo sapiens
  CDR3 for alpha chain variable domain of TCR clone 27297 (TRAV1-2, TRAJ8)
CAVREDTGFQKLVF

SEQ ID NO: 54594 - protein, 12 aa, Homo sapiens
  CDR3 for beta chain variable domain of TCR clone 27297 (TRBV19, TRBJ1-5)
CASSIAQQPQHF

SEQ ID NO: 54595 - protein, 13 aa, Homo sapiens
  CDR3 for alpha chain variable domain of TCR clone 27298 (TRAV16, TRAJ31)
FALSAHNNARLMF

SEQ ID NO: 54596 - protein, 17 aa, Homo sapiens
  CDR3 for beta chain variable domain of TCR clone 27298 (TRBV12-4, TRBJ2-1)
CASSPGLAGGRINEQFF

SEQ ID NO: 54597 - protein, 20 aa, Homo sapiens
  CDR3 for alpha chain variable domain of TCR clone 27299 (TRAV12-1, TRAJ42)
SSVIQPPTPVKGGSQGNLIF

SEQ ID NO: 54598 - protein, 18 aa, Homo sapiens
  CDR3 for beta chain variable domain of TCR clone 27299 (TRBV11-2, TRBJ2-3)
CASSLGGASRGAPNTQYF

SEQ ID NO: 54599 - protein, 15 aa, Homo sapiens
  CDR3 for alpha chain variable domain of TCR clone 27300 (TRAV16, TRAJ12)
CSKWPLRDSSYKSIF

SEQ ID NO: 54600 - protein, 13 aa, Homo sapiens
  CDR3 for beta chain variable domain of TCR clone 27300 (TRBV4-2, TRBJ1-1)
CASSQAGNTEAFF

SEQ ID NO: 54601 - protein, 14 aa, Homo sapiens
  CDR3 for alpha chain variable domain of TCR clone 27301 (TRAV8-3, TRAJ4)
CAVGAAGGYNKLIF

SEQ ID NO: 54602 - protein, 11 aa, Homo sapiens
  CDR3 for beta chain variable domain of TCR clone 27301 (TRBV11-2, TRBJ2-2)
CASSLPGELFF

SEQ ID NO: 54603 - protein, 15 aa, Homo sapiens
  CDR3 for alpha chain variable domain of TCR clone 27302 (TRAV2, TRAJ24)
CAVVRLKNSWGKLQF

SEQ ID NO: 54604 - protein, 16 aa, Homo sapiens
  CDR3 for beta chain variable domain of TCR clone 27302 (TRBV7-7, TRBJ2-3)
CASSPGASGSTDTQYF

SEQ ID NO: 54605 - protein, 23 aa, Homo sapiens
  CDR3 for alpha chain variable domain of TCR clone 27303 (TRAV26-1, TRAJ38)
CIADNAGNNHIQNPDPAVYQLRD

SEQ ID NO: 54606 - protein, 13 aa, Homo sapiens
  CDR3 for beta chain variable domain of TCR clone 27303 (TRBV20-1, TRBJ1-1)
RSARGGGNTEAFF

SEQ ID NO: 54607 - protein, 11 aa, Homo sapiens
  CDR3 for alpha chain variable domain of TCR clone 27304 (TRAV17, TRAJ9)
CATPGGFKTIF

SEQ ID NO: 54608 - protein, 14 aa, Homo sapiens
  CDR3 for beta chain variable domain of TCR clone 27304 (TRBV7-9, TRBJ2-2)
CASSGLADTGELFF

SEQ ID NO: 54609 - protein, 11 aa, Homo sapiens
  CDR3 for alpha chain variable domain of TCR clone 27305 (TRAV12-3, TRAJ43)
CAMSVSNNMRF

SEQ ID NO: 54610 - protein, 13 aa, Homo sapiens
  CDR3 for beta chain variable domain of TCR clone 27305 (TRBV20-1, TRBJ1-1)
CSAPLGGGTEAFF

SEQ ID NO: 54611 - protein, 19 aa, Homo sapiens
  CDR3 for alpha chain variable domain of TCR clone 27306 (TRAV26-1, TRAJ52)
CIVRAHRNAGGTSYGKPTF

SEQ ID NO: 54612 - protein, 15 aa, Homo sapiens
  CDR3 for beta chain variable domain of TCR clone 27306 (TRBV29-1, TRBJ2-1)
CSGRDRKSSYNEQFF

SEQ ID NO: 54613 - protein, 18 aa, Homo sapiens
  CDR3 for alpha chain variable domain of TCR clone 27307 (TRAV12-3, TRAJ52)
CAMSRTNVGGTSYGKLTF

SEQ ID NO: 54614 - protein, 17 aa, Homo sapiens
  CDR3 for beta chain variable domain of TCR clone 27307 (TRBV7-3, TRBJ2-3)
CASSLMKRMRGADTQYF

SEQ ID NO: 54615 - protein, 13 aa, Homo sapiens
  CDR3 for alpha chain variable domain of TCR clone 27308 (TRAV21, TRAJ20)
CAVGLGVDYKLSF

SEQ ID NO: 54616 - protein, 13 aa, Homo sapiens
  CDR3 for beta chain variable domain of TCR clone 27308 (TRBV6-1, TRBJ1-1)
CASSRQGNTGAFF

SEQ ID NO: 54617 - protein, 12 aa, Homo sapiens
  CDR3 for alpha chain variable domain of TCR clone 27309 (TRAV8-3, TRAJ26)
CAGDNYGQDFVF

SEQ ID NO: 54618 - protein, 15 aa, Homo sapiens
  CDR3 for beta chain variable domain of TCR clone 27309 (TRBV9, TRBJ2-1)
CASSLAGSSYNEQFF

SEQ ID NO: 54619 - protein, 23 aa, Homo sapiens
  CDR3 for alpha chain variable domain of TCR clone 27310 (TRAV21, TRAJ32)
CAVEIMVVLQTSSSLELALCLLS

SEQ ID NO: 54620 - protein, 13 aa, Homo sapiens
  CDR3 for beta chain variable domain of TCR clone 27310 (TRBV2, TRBJ1-6)
CASGRGGISPLHF

SEQ ID NO: 54621 - protein, 17 aa, Homo sapiens
  CDR3 for alpha chain variable domain of TCR clone 27311 (TRAV38-1, TRAJ28)
CAFMKPTSGAGGYQLTF

SEQ ID NO: 54622 - protein, 15 aa, Homo sapiens
  CDR3 for beta chain variable domain of TCR clone 27311 (TRBV5-1, TRBJ2-4)
CASSLGGGGSYIQYF

SEQ ID NO: 54623 - protein, 14 aa, Homo sapiens
  CDR3 for alpha chain variable domain of TCR clone 27312 (TRAV29/DV5, TRAJ49)
CSKLTVDTGNQFYF

SEQ ID NO: 54624 - protein, 17 aa, Homo sapiens
  CDR3 for beta chain variable domain of TCR clone 27312 (TRBV13, TRBJ2-3)
CASSLSRVAGGRNTQYF

SEQ ID NO: 54625 - protein, 13 aa, Homo sapiens
  CDR3 for alpha chain variable domain of TCR clone 27313 (TRAV2, TRAJ40)
CAVVTSGTYKYLF

SEQ ID NO: 54626 - protein, 15 aa, Homo sapiens
  CDR3 for beta chain variable domain of TCR clone 27313 (TRBV11-3, TRBJ2-3)
CASLKDGREGDTQYF

SEQ ID NO: 54627 - protein, 16 aa, Homo sapiens
  CDR3 for alpha chain variable domain of TCR clone 27314 (TRAV16, TRAJ4)
CALSRMFSGGYNKLIF

SEQ ID NO: 54628 - protein, 16 aa, Homo sapiens
  CDR3 for beta chain variable domain of TCR clone 27314 (TRBV24-1, TRBJ2-3)
CATGDPGTGATDTQYF

SEQ ID NO: 54629 - protein, 12 aa, Homo sapiens
  CDR3 for alpha chain variable domain of TCR clone 27315 (TRAV25, TRAJ11)
CAGASGYSTLTL

SEQ ID NO: 54630 - protein, 14 aa, Homo sapiens
  CDR3 for beta chain variable domain of TCR clone 27315 (TRBV5-8, TRBJ2-3)
CASSLGQGTDTQYF

SEQ ID NO: 54631 - protein, 14 aa, Homo sapiens
  CDR3 for alpha chain variable domain of TCR clone 27316 (TRAV9-2, TRAJ39)
CALYIYNAGNMLTF

SEQ ID NO: 54632 - protein, 11 aa, Homo sapiens
  CDR3 for beta chain variable domain of TCR clone 27316 (TRBV19, TRBJ1-1)
CASSIGSEAFF

SEQ ID NO: 54633 - protein, 18 aa, Homo sapiens
  CDR3 for alpha chain variable domain of TCR clone 27317 (TRAV21, TRAJ52)
CAVRPSPAGGTSYGTLTF

SEQ ID NO: 54634 - protein, 13 aa, Homo sapiens
  CDR3 for beta chain variable domain of TCR clone 27317 (TRBV7-3, TRBJ1-1)
CASSQDWGAEAFF

SEQ ID NO: 54635 - protein, 16 aa, Homo sapiens
  CDR3 for alpha chain variable domain of TCR clone 27318 (TRAV30, TRAJ24)
CGTEIVDADSWGKFQF

SEQ ID NO: 54636 - protein, 17 aa, Homo sapiens
  CDR3 for beta chain variable domain of TCR clone 27318 (TRBV28, TRBJ2-7)
CASSPLHRASGVYEQYF

SEQ ID NO: 54637 - protein, 14 aa, Homo sapiens
  CDR3 for alpha chain variable domain of TCR clone 27319 (TRAV29/DV5, TRAJ45)
CAASLRGGADGLTF

SEQ ID NO: 54638 - protein, 11 aa, Homo sapiens
  CDR3 for beta chain variable domain of TCR clone 27319 (TRBV11-2, TRBJ2-2)
CASSLPGELFF

SEQ ID NO: 54639 - protein, 16 aa, Homo sapiens
  CDR3 for alpha chain variable domain of TCR clone 27320 (TRAV16, TRAJ4)
CALSRMFSGGYNRLIF

SEQ ID NO: 54640 - protein, 16 aa, Homo sapiens
  CDR3 for beta chain variable domain of TCR clone 27320 (TRBV12-4, TRBJ1-5)
CASSRPVGGSNQPQHF

SEQ ID NO: 54641 - protein, 12 aa, Homo sapiens
  CDR3 for alpha chain variable domain of TCR clone 27321 (TRAV13-1, TRAJ49)
CAASPMGNQFYF

SEQ ID NO: 54642 - protein, 13 aa, Homo sapiens
  CDR3 for beta chain variable domain of TCR clone 27321 (TRBV20-1, TRBJ2-2)
CSASAAGTGKLFF

SEQ ID NO: 54643 - protein, 13 aa, Homo sapiens
  CDR3 for alpha chain variable domain of TCR clone 27322 (TRAV8-3, TRAJ44)
CAVVPGTASQLTF

SEQ ID NO: 54644 - protein, 14 aa, Homo sapiens
  CDR3 for beta chain variable domain of TCR clone 27322 (TRBV11-2, TRBJ2-3)
CASSRLARTDTQYF

SEQ ID NO: 54645 - protein, 13 aa, Homo sapiens
  CDR3 for alpha chain variable domain of TCR clone 27323 (TRAV16, TRAJ34)
CALSPYNTNKLIF

SEQ ID NO: 54646 - protein, 17 aa, Homo sapiens
  CDR3 for beta chain variable domain of TCR clone 27323 (TRBV5-1, TRBJ2-1)
CASSTGTSGYSYNEQFF

SEQ ID NO: 54647 - protein, 14 aa, Homo sapiens
  CDR3 for alpha chain variable domain of TCR clone 27324 (TRAV38-1, TRAJ45)
CAYYSGGGVDGLTF

SEQ ID NO: 54648 - protein, 20 aa, Homo sapiens
  CDR3 for beta chain variable domain of TCR clone 27324 (TRBV28, TRBJ2-1)
CASTPIGRSPGLAGGNEQFF

SEQ ID NO: 54649 - protein, 13 aa, Homo sapiens
  CDR3 for alpha chain variable domain of TCR clone 27325 (TRAV21, TRAJ27)
CAARPGNAGKSTS

SEQ ID NO: 54650 - protein, 13 aa, Homo sapiens
  CDR3 for beta chain variable domain of TCR clone 27325 (TRBV18, TRBJ2-7)
CASQSGGGYEQYF

SEQ ID NO: 54651 - protein, 13 aa, Homo sapiens
  CDR3 for alpha chain variable domain of TCR clone 27326 (TRAV3, TRAJ21)
CAVREPDFNKFYF

SEQ ID NO: 54652 - protein, 13 aa, Homo sapiens
  CDR3 for beta chain variable domain of TCR clone 27326 (TRBV9, TRBJ2-1)
CASSPSGGNEQLF

SEQ ID NO: 54653 - protein, 14 aa, Homo sapiens
  CDR3 for alpha chain variable domain of TCR clone 27327 (TRAV8-3, TRAJ39)
CAVGANNAGNMLTL

SEQ ID NO: 54654 - protein, 12 aa, Homo sapiens
  CDR3 for beta chain variable domain of TCR clone 27327 (TRBV11-3, TRBJ1-1)
CASSHRQGEAFF

SEQ ID NO: 54655 - protein, 13 aa, Homo sapiens
  CDR3 for alpha chain variable domain of TCR clone 27328 (TRAV35, TRAJ42)
CAGFLGSQGNLIF

SEQ ID NO: 54656 - protein, 14 aa, Homo sapiens
  CDR3 for beta chain variable domain of TCR clone 27328 (TRBV19, TRBJ2-1)
CASPTFVLSGEQFF

SEQ ID NO: 54657 - protein, 13 aa, Homo sapiens
  CDR3 for alpha chain variable domain of TCR clone 27329 (TRAV27, TRAJ3)
ASLRGSSASKIIF

SEQ ID NO: 54658 - protein, 15 aa, Homo sapiens
  CDR3 for beta chain variable domain of TCR clone 27329 (TRBV28, TRBJ1-3)
CASSMGWAYGNTIYF

SEQ ID NO: 54659 - protein, 11 aa, Homo sapiens
  CDR3 for alpha chain variable domain of TCR clone 27330 (TRAV1-1, TRAJ23)
CAVRQGGKLIF

SEQ ID NO: 54660 - protein, 20 aa, Homo sapiens
  CDR3 for beta chain variable domain of TCR clone 27330 (TRBV7-8, TRBJ2-2)
CASSHLFPGPTIHIPGELFF

SEQ ID NO: 54661 - protein, 11 aa, Homo sapiens
  CDR3 for alpha chain variable domain of TCR clone 27331 (TRAV1-1, TRAJ23)
CAVRQGGKLIF

SEQ ID NO: 54662 - protein, 20 aa, Homo sapiens
  CDR3 for beta chain variable domain of TCR clone 27331 (TRBV7-8, TRBJ2-2)
CASSHLFPGSTIHITGELFF

SEQ ID NO: 54663 - protein, 15 aa, Homo sapiens
  CDR3 for alpha chain variable domain of TCR clone 27332 (TRAV12-3, TRAJ49)
CAMAVTPNPGNQFYF

SEQ ID NO: 54664 - protein, 18 aa, Homo sapiens
  CDR3 for beta chain variable domain of TCR clone 27332 (TRBV4-1, TRBJ1-5)
CASSQDPRGQGLNQPQHF

SEQ ID NO: 54665 - protein, 13 aa, Homo sapiens
  CDR3 for alpha chain variable domain of TCR clone 27333 (TRAV12-1, TRAJ11)
CVVNRAGYSTLTF

SEQ ID NO: 54666 - protein, 15 aa, Homo sapiens
  CDR3 for beta chain variable domain of TCR clone 27333 (TRBV7-3, TRBJ2-2)
CASSETGQGTGGLFF

SEQ ID NO: 54667 - protein, 13 aa, Homo sapiens
  CDR3 for alpha chain variable domain of TCR clone 27334 (TRAV17, TRAJ9)
CATDYTGGFKTIF

SEQ ID NO: 54668 - protein, 16 aa, Homo sapiens
  CDR3 for beta chain variable domain of TCR clone 27334 (TRBV7-7, TRBJ2-1)
CARSLASGTSYNEQFF

SEQ ID NO: 54669 - protein, 14 aa, Homo sapiens
  CDR3 for alpha chain variable domain of TCR clone 27335 (TRAV12-3, TRAJ10)
SHLPLTGGGNKLTF

SEQ ID NO: 54670 - protein, 12 aa, Homo sapiens
  CDR3 for beta chain variable domain of TCR clone 27335 (TRBV7-9, TRBJ2-7)
CASSLEGYEQYF

SEQ ID NO: 54671 - protein, 12 aa, Homo sapiens
  CDR3 for alpha chain variable domain of TCR clone 27336 (TRAV17, TRAJ12)
CATLRSSYKLIF

SEQ ID NO: 54672 - protein, 16 aa, Homo sapiens
  CDR3 for beta chain variable domain of TCR clone 27336 (TRBV28, TRBJ2-7)
CAISLFFETGGPEQYF

SEQ ID NO: 54673 - protein, 13 aa, Homo sapiens
  CDR3 for alpha chain variable domain of TCR clone 27337 (TRAV12-3, TRAJ33)
CAMSVNSNYQLIW

SEQ ID NO: 54674 - protein, 13 aa, Homo sapiens
  CDR3 for beta chain variable domain of TCR clone 27337 (TRBV7-2, TRBJ2-2)
CASSLAGTGELFF

SEQ ID NO: 54675 - protein, 14 aa, Homo sapiens
  CDR3 for alpha chain variable domain of TCR clone 27338 (TRAV17, TRAJ57)
CATDPQGGSEKLVF

SEQ ID NO: 54676 - protein, 13 aa, Homo sapiens
  CDR3 for beta chain variable domain of TCR clone 27338 (TRBV7-3, TRBJ1-1)
CASSQDWGAEAFF

SEQ ID NO: 54677 - protein, 12 aa, Homo sapiens
  CDR3 for alpha chain variable domain of TCR clone 27339 (TRAV26-1, TRAJ53)
CIEGGSNYKLTF

SEQ ID NO: 54678 - protein, 13 aa, Homo sapiens
  CDR3 for beta chain variable domain of TCR clone 27339 (TRBV19, TRBJ1-3)
CASRLSLGNTIYF

SEQ ID NO: 54679 - protein, 14 aa, Homo sapiens
  CDR3 for alpha chain variable domain of TCR clone 27340 (TRAV1-2, TRAJ29)
CAVRELTNATPLVF

SEQ ID NO: 54680 - protein, 14 aa, Homo sapiens
  CDR3 for beta chain variable domain of TCR clone 27340 (TRBV3-1, TRBJ2-5)
CASSQGPDQETQYF

SEQ ID NO: 54681 - protein, 13 aa, Homo sapiens
  CDR3 for alpha chain variable domain of TCR clone 27341 (TRAV8-3, TRAJ28)
CAVGAVGSYQLTC

SEQ ID NO: 54682 - protein, 15 aa, Homo sapiens
  CDR3 for beta chain variable domain of TCR clone 27341 (TRBV7-9, TRBJ1-5)
CASSQGHQPNQPQHF

SEQ ID NO: 54683 - protein, 17 aa, Homo sapiens
  CDR3 for alpha chain variable domain of TCR clone 27342 (TRAV3, TRAJ28)
CAVREAYSGAGSYQLTF

SEQ ID NO: 54684 - protein, 18 aa, Homo sapiens
  CDR3 for beta chain variable domain of TCR clone 27342 (TRBV27, TRBJ2-1)
CASGSRAVGVGSKNEQFF

SEQ ID NO: 54685 - protein, 16 aa, Homo sapiens
  CDR3 for alpha chain variable domain of TCR clone 27343 (TRAV4, TRAJ22)
CLVGDLYSGSARQLTF

SEQ ID NO: 54686 - protein, 16 aa, Homo sapiens
  CDR3 for beta chain variable domain of TCR clone 27343 (TRBV7-9, TRBJ2-1)
CAGSDVAGGSYNEQFF

SEQ ID NO: 54687 - protein, 13 aa, Homo sapiens
  CDR3 for alpha chain variable domain of TCR clone 27344 (TRAV12-1, TRAJ40)
CVVPTSGTYKHIF

SEQ ID NO: 54688 - protein, 18 aa, Homo sapiens
  CDR3 for beta chain variable domain of TCR clone 27344 (TRBV7-6, TRBJ2-1)
CASSPRTSGMSSYNEQFF

SEQ ID NO: 54689 - protein, 10 aa, Homo sapiens
  CDR3 for alpha chain variable domain of TCR clone 27345 (TRAV12-3, TRAJ49)
CAMNDDQFDF

SEQ ID NO: 54690 - protein, 13 aa, Homo sapiens
  CDR3 for beta chain variable domain of TCR clone 27345 (TRBV12-4, TRBJ1-1)
CASSPGTGFEAFF

SEQ ID NO: 54691 - protein, 16 aa, Homo sapiens
  CDR3 for alpha chain variable domain of TCR clone 27346 (TRAV17, TRAJ35)
CATAGGGIGFGNVLHC

SEQ ID NO: 54692 - protein, 16 aa, Homo sapiens
  CDR3 for beta chain variable domain of TCR clone 27346 (TRBV6-5, TRBJ2-7)
CASSSDPTSGFYEQYF

SEQ ID NO: 54693 - protein, 17 aa, Homo sapiens
  CDR3 for alpha chain variable domain of TCR clone 27347 (TRAV8-6, TRAJ58)
CAVSSWLGETSGSRLTF

SEQ ID NO: 54694 - protein, 14 aa, Homo sapiens
  CDR3 for beta chain variable domain of TCR clone 27347 (TRBV4-2, TRBJ2-1)
CASGLDRAYNEQFF

SEQ ID NO: 54695 - protein, 14 aa, Homo sapiens
  CDR3 for alpha chain variable domain of TCR clone 27348 (TRAV1-1, TRAJ30)
CAVRSLNRDDKIIF

SEQ ID NO: 54696 - protein, 15 aa, Homo sapiens
  CDR3 for beta chain variable domain of TCR clone 27348 (TRBV27, TRBJ1-4)
CASSAQQDLNEKLFF

SEQ ID NO: 54697 - protein, 14 aa, Homo sapiens
  CDR3 for alpha chain variable domain of TCR clone 27349 (TRAV8-1, TRAJ34)
CAVITTYNTDKLIF

SEQ ID NO: 54698 - protein, 14 aa, Homo sapiens
  CDR3 for beta chain variable domain of TCR clone 27349 (TRBV11-3, TRBJ1-3)
CASSHNGQGNTIYV

SEQ ID NO: 54699 - protein, 14 aa, Homo sapiens
  CDR3 for alpha chain variable domain of TCR clone 27350 (TRAV38-1, TRAJ45)
CAYYLGGGADGLTF

SEQ ID NO: 54700 - protein, 20 aa, Homo sapiens
  CDR3 for beta chain variable domain of TCR clone 27350 (TRBV28, TRBJ2-1)
CASTPIGRSPGLAGGNEQFF

SEQ ID NO: 54701 - protein, 13 aa, Homo sapiens
  CDR3 for alpha chain variable domain of TCR clone 27351 (TRAV12-3, TRAJ31)
CAMSANSNARLMF

SEQ ID NO: 54702 - protein, 16 aa, Homo sapiens
  CDR3 for beta chain variable domain of TCR clone 27351 (TRBV7-9, TRBJ1-2)
CASSLGFSSGEDGYTF

SEQ ID NO: 54703 - protein, 14 aa, Homo sapiens
  CDR3 for alpha chain variable domain of TCR clone 27352 (TRAV12-2, TRAJ17)
CAVNIKAAGNRLTF

SEQ ID NO: 54704 - protein, 16 aa, Homo sapiens
  CDR3 for beta chain variable domain of TCR clone 27352 (TRBV20-1, TRBJ2-6)
CSASSQGYDGANVLTF

SEQ ID NO: 54705 - protein, 13 aa, Homo sapiens
  CDR3 for alpha chain variable domain of TCR clone 27353 (TRAV21, TRAJ27)
CAALNTNAGKSTL

SEQ ID NO: 54706 - protein, 14 aa, Homo sapiens
  CDR3 for beta chain variable domain of TCR clone 27353 (TRBV27, TRBJ1-1)
CASSLLSGLSEAFF

SEQ ID NO: 54707 - protein, 12 aa, Homo sapiens
  CDR3 for alpha chain variable domain of TCR clone 27354 (TRAV8-3, TRAJ20)
CAVGANDYKLSF

SEQ ID NO: 54708 - protein, 16 aa, Homo sapiens
  CDR3 for beta chain variable domain of TCR clone 27354 (TRBV19, TRBJ2-2)
CASRSPGTGANGELFF

SEQ ID NO: 54709 - protein, 12 aa, Homo sapiens
  CDR3 for alpha chain variable domain of TCR clone 27355 (TRAV12-2, TRAJ30)
CAVRNRDDKIIF

SEQ ID NO: 54710 - protein, 14 aa, Homo sapiens
  CDR3 for beta chain variable domain of TCR clone 27355 (TRBV7-8, TRBJ2-3)
CASSLEAGTDTQYF

SEQ ID NO: 54711 - protein, 12 aa, Homo sapiens
  CDR3 for alpha chain variable domain of TCR clone 27356 (TRAV12-3, TRAJ17)
CAMTLTGNKLTF

SEQ ID NO: 54712 - protein, 16 aa, Homo sapiens
  CDR3 for beta chain variable domain of TCR clone 27356 (TRBV29-1, TRBJ2-7)
CGVEVVGTSGSYEQYF

SEQ ID NO: 54713 - protein, 13 aa, Homo sapiens
  CDR3 for alpha chain variable domain of TCR clone 27357 (TRAV1-2, TRAJ9)
CAALNTGGFKIIF

SEQ ID NO: 54714 - protein, 13 aa, Homo sapiens
  CDR3 for beta chain variable domain of TCR clone 27357 (TRBV19, TRBJ1-2)
CASSVPGQDGYTF

SEQ ID NO: 54715 - protein, 15 aa, Homo sapiens
  CDR3 for alpha chain variable domain of TCR clone 27358 (TRAV12-1, TRAJ44)
CVVDTPQGTASKLTF

SEQ ID NO: 54716 - protein, 13 aa, Homo sapiens
  CDR3 for beta chain variable domain of TCR clone 27358 (TRBV27, TRBJ2-1)
CASSAGSYNEQFF

SEQ ID NO: 54717 - protein, 14 aa, Homo sapiens
  CDR3 for alpha chain variable domain of TCR clone 27359 (TRAV12-2, TRAJ53)
CAVKGGGSNYKLTF

SEQ ID NO: 54718 - protein, 17 aa, Homo sapiens
  CDR3 for beta chain variable domain of TCR clone 27359 (TRBV7-2, TRBJ1-4)
CASSFKAGPTTNEKLFF

SEQ ID NO: 54719 - protein, 15 aa, Homo sapiens
  CDR3 for alpha chain variable domain of TCR clone 27360 (TRAV17, TRAJ10)
CATVLLTGRGNKLTF

SEQ ID NO: 54720 - protein, 16 aa, Homo sapiens
  CDR3 for beta chain variable domain of TCR clone 27360 (TRBV7-9, TRBJ2-3)
CASSPWREVGTDTQYF

SEQ ID NO: 54721 - protein, 17 aa, Homo sapiens
  CDR3 for alpha chain variable domain of TCR clone 27361 (TRAV13-1, TRAJ31)
CAPRGRLMFGDGTQLVV

SEQ ID NO: 54722 - protein, 12 aa, Homo sapiens
  CDR3 for beta chain variable domain of TCR clone 27361 (TRBV7-9, TRBJ2-7)
CASSLEGYEQYF

SEQ ID NO: 54723 - protein, 14 aa, Homo sapiens
  CDR3 for alpha chain variable domain of TCR clone 27362 (TRAV12-2, TRAJ17)
CAVLFKAAGNKLTF

SEQ ID NO: 54724 - protein, 17 aa, Homo sapiens
  CDR3 for beta chain variable domain of TCR clone 27362 (TRBV20-1, TRBJ2-2)
CSASGSGQGGLTGEMFF

SEQ ID NO: 54725 - protein, 14 aa, Homo sapiens
  CDR3 for alpha chain variable domain of TCR clone 27363 (TRAV12-2, TRAJ5)
CAVNRSTGRRALTF

SEQ ID NO: 54726 - protein, 12 aa, Homo sapiens
  CDR3 for beta chain variable domain of TCR clone 27363 (TRBV19, TRBJ1-5)
CASSIAQQSQHF

SEQ ID NO: 54727 - protein, 12 aa, Homo sapiens
  CDR3 for alpha chain variable domain of TCR clone 27364 (TRAV13-1, TRAJ21)
CAAKEGFNKFYF

SEQ ID NO: 54728 - protein, 14 aa, Homo sapiens
  CDR3 for beta chain variable domain of TCR clone 27364 (TRBV5-4, TRBJ1-1)
CSSSLDSRRDEAFF

SEQ ID NO: 54729 - protein, 16 aa, Homo sapiens
  CDR3 for alpha chain variable domain of TCR clone 27365 (TRAV17, TRAJ35)
CATAEGGIGFGNGLHC

SEQ ID NO: 54730 - protein, 16 aa, Homo sapiens
  CDR3 for beta chain variable domain of TCR clone 27365 (TRBV6-5, TRBJ2-7)
CASSSDPTSGFYEQYF

SEQ ID NO: 54731 - protein, 14 aa, Homo sapiens
  CDR3 for alpha chain variable domain of TCR clone 27366 (TRAV12-3, TRAJ29)
CAMILLSGNTPLVF

SEQ ID NO: 54732 - protein, 16 aa, Homo sapiens
  CDR3 for beta chain variable domain of TCR clone 27366 (TRBV28, TRBJ2-7)
CASSSGASGRGYEQYF

SEQ ID NO: 54733 - protein, 16 aa, Homo sapiens
  CDR3 for alpha chain variable domain of TCR clone 27367 (TRAV30, TRAJ24)
CGTEIVGADSWGKFRF

SEQ ID NO: 54734 - protein, 14 aa, Homo sapiens
  CDR3 for beta chain variable domain of TCR clone 27367 (TRBV12-5, TRBJ2-5)
CASGSRTHQETQYF

SEQ ID NO: 54735 - protein, 13 aa, Homo sapiens
  CDR3 for alpha chain variable domain of TCR clone 27368 (TRAV21, TRAJ20)
CAVGLRADYKLSF

SEQ ID NO: 54736 - protein, 13 aa, Homo sapiens
  CDR3 for beta chain variable domain of TCR clone 27368 (TRBV6-1, TRBJ1-1)
CASSRQGNTEAFF

SEQ ID NO: 54737 - protein, 17 aa, Homo sapiens
  CDR3 for alpha chain variable domain of TCR clone 27369 (TRAV8-1, TRAJ43)
CAVTNDMRFGAGTRLTG

SEQ ID NO: 54738 - protein, 17 aa, Homo sapiens
  CDR3 for beta chain variable domain of TCR clone 27369 (TRBV5-4, TRBJ2-1)
CASSSAGGRGPYNEQFF

SEQ ID NO: 54739 - protein, 12 aa, Homo sapiens
  CDR3 for alpha chain variable domain of TCR clone 27370 (TRAV1-1, TRAJ39)
CAVPVVGNMLPF

SEQ ID NO: 54740 - protein, 15 aa, Homo sapiens
  CDR3 for beta chain variable domain of TCR clone 27370 (TRBV19, TRBJ1-6)
CASSTQGAVGSPLHF

SEQ ID NO: 54741 - protein, 13 aa, Homo sapiens
  CDR3 for alpha chain variable domain of TCR clone 27371 (TRAV27, TRAJ56)
CAGKPGANRKLTF

SEQ ID NO: 54742 - protein, 18 aa, Homo sapiens
  CDR3 for beta chain variable domain of TCR clone 27371 (TRBV11-2, TRBJ2-3)
CASSLGGASRGAPNTQYF

SEQ ID NO: 54743 - protein, 14 aa, Homo sapiens
  CDR3 for alpha chain variable domain of TCR clone 27372 (TRAV38-1, TRAJ45)
CASHSGGGADGLTF

SEQ ID NO: 54744 - protein, 13 aa, Homo sapiens
  CDR3 for beta chain variable domain of TCR clone 27372 (TRBV10-3, TRBJ1-2)
CAISERDSYGYTV

SEQ ID NO: 54745 - protein, 13 aa, Homo sapiens
  CDR3 for alpha chain variable domain of TCR clone 27373 (TRAV21, TRAJ15)
CAVANQEGTALIF

SEQ ID NO: 54746 - protein, 14 aa, Homo sapiens
  CDR3 for beta chain variable domain of TCR clone 27373 (TRBV27, TRBJ2-2)
CASSLGAATGELFF

SEQ ID NO: 54747 - protein, 16 aa, Homo sapiens
  CDR3 for alpha chain variable domain of TCR clone 27374 (TRAV16, TRAJ52)
CALSGVGGTSYGKLTF

SEQ ID NO: 54748 - protein, 14 aa, Homo sapiens
  CDR3 for beta chain variable domain of TCR clone 27374 (TRBV19, TRBJ1-2)
CASSLQGQAYDYTF

SEQ ID NO: 54749 - protein, 14 aa, Homo sapiens
  CDR3 for alpha chain variable domain of TCR clone 27375 (TRAV12-3, TRAJ10)
SHLPLTGGGNKLTF

SEQ ID NO: 54750 - protein, 16 aa, Homo sapiens
  CDR3 for beta chain variable domain of TCR clone 27375 (TRBV29-1, TRBJ2-7)
CSVEDAEDGTAYEQYF

SEQ ID NO: 54751 - protein, 15 aa, Homo sapiens
  CDR3 for alpha chain variable domain of TCR clone 27376 (TRAV13-2, TRAJ40)
CAENRPRQGTYKYIF

SEQ ID NO: 54752 - protein, 15 aa, Homo sapiens
  CDR3 for beta chain variable domain of TCR clone 27376 (TRBV19, TRBJ2-1)
CASSMGWNSNNEQFF

SEQ ID NO: 54753 - protein, 14 aa, Homo sapiens
  CDR3 for alpha chain variable domain of TCR clone 27377 (TRAV38-1, TRAJ45)
CAYYSGGGADGFTF

SEQ ID NO: 54754 - protein, 20 aa, Homo sapiens
  CDR3 for beta chain variable domain of TCR clone 27377 (TRBV28, TRBJ2-1)
CASTPIGRSPGLAGGNEQFF

SEQ ID NO: 54755 - protein, 12 aa, Homo sapiens
  CDR3 for alpha chain variable domain of TCR clone 27378 (TRAV12-3, TRAJ17)
CAMTLTGNKLTF

SEQ ID NO: 54756 - protein, 14 aa, Homo sapiens
  CDR3 for beta chain variable domain of TCR clone 27378 (TRBV4-1, TRBJ2-7)
CASSQDGEHVEQYF

SEQ ID NO: 54757 - protein, 18 aa, Homo sapiens
  CDR3 for alpha chain variable domain of TCR clone 27379 (TRAV26-1, TRAJ52)
CIVRVEGAGGTSYGKLTF

SEQ ID NO: 54758 - protein, 13 aa, Homo sapiens
  CDR3 for beta chain variable domain of TCR clone 27379 (TRBV7-3, TRBJ1-2)
CASSLKRGYGYNF

SEQ ID NO: 54759 - protein, 13 aa, Homo sapiens
  CDR3 for alpha chain variable domain of TCR clone 27380 (TRAV2, TRAJ40)
CAVVTSGTYKYIF

SEQ ID NO: 54760 - protein, 14 aa, Homo sapiens
  CDR3 for beta chain variable domain of TCR clone 27380 (TRBV19, TRBJ2-1)
CASPTFVLSGQQFF

SEQ ID NO: 54761 - protein, 23 aa, Homo sapiens
  CDR3 for alpha chain variable domain of TCR clone 27381 (TRAV12-2, TRAJ36)
SPLIRDSQPSDSATLERANNLFF

SEQ ID NO: 54762 - protein, 16 aa, Homo sapiens
  CDR3 for beta chain variable domain of TCR clone 27381 (TRBV7-3, TRBJ2-2)
CARSLKRGTLSGELFF

SEQ ID NO: 54763 - protein, 11 aa, Homo sapiens
  CDR3 for alpha chain variable domain of TCR clone 27382 (TRAV12-1, TRAJ30)
CVVNGQDKNIF

SEQ ID NO: 54764 - protein, 12 aa, Homo sapiens
  CDR3 for beta chain variable domain of TCR clone 27382 (TRBV27, TRBJ2-2)
CASKLFTGELFF

SEQ ID NO: 54765 - protein, 17 aa, Homo sapiens
  CDR3 for alpha chain variable domain of TCR clone 27383 (TRAV8-3, TRAJ8)
CAVGPNEHRLLETCIWN

SEQ ID NO: 54766 - protein, 13 aa, Homo sapiens
  CDR3 for beta chain variable domain of TCR clone 27383 (TRBV10-2, TRBJ2-3)
CASSESGDHTQYF

SEQ ID NO: 54767 - protein, 14 aa, Homo sapiens
  CDR3 for alpha chain variable domain of TCR clone 27384 (TRAV4, TRAJ20)
CLVGRRSNDYKLSF

SEQ ID NO: 54768 - protein, 18 aa, Homo sapiens
  CDR3 for beta chain variable domain of TCR clone 27384 (TRBV2, TRBJ2-5)
CASSGDPQGRGTQETQYF

SEQ ID NO: 54769 - protein, 13 aa, Homo sapiens
  CDR3 for alpha chain variable domain of TCR clone 27385 (TRAV22, TRAJ29)
CAVGGSGNTPLVF

SEQ ID NO: 54770 - protein, 13 aa, Homo sapiens
  CDR3 for beta chain variable domain of TCR clone 27385 (TRBV4-2, TRBJ1-1)
CASSQAGNTEAVF

SEQ ID NO: 54771 - protein, 14 aa, Homo sapiens
  CDR3 for alpha chain variable domain of TCR clone 27386 (TRAV1-2, TRAJ16)
CAVNRFSDGKKLLF

SEQ ID NO: 54772 - protein, 12 aa, Homo sapiens
  CDR3 for beta chain variable domain of TCR clone 27386 (TRBV7-6, TRBJ2-7)
CASSLADSEQYF

SEQ ID NO: 54773 - protein, 15 aa, Homo sapiens
  CDR3 for alpha chain variable domain of TCR clone 27387 (TRAV27, TRAJ38)
CAARRNAGNNRKLIW

SEQ ID NO: 54774 - protein, 20 aa, Homo sapiens
  CDR3 for beta chain variable domain of TCR clone 27387 (TRBV28, TRBJ2-1)
CASTPIGRSPGLAGGNEQFF

SEQ ID NO: 54775 - protein, 13 aa, Homo sapiens
  CDR3 for alpha chain variable domain of TCR clone 27388 (TRAV17, TRAJ9)
CATDYAGGFKTIF

SEQ ID NO: 54776 - protein, 16 aa, Homo sapiens
  CDR3 for beta chain variable domain of TCR clone 27388 (TRBV7-7, TRBJ2-1)
CASSLASGTSYNEQFF

SEQ ID NO: 54777 - protein, 17 aa, Homo sapiens
  CDR3 for alpha chain variable domain of TCR clone 27389 (TRAV26-2, TRAJ32)
GRCCCVGYGGATNKLIF

SEQ ID NO: 54778 - protein, 14 aa, Homo sapiens
  CDR3 for beta chain variable domain of TCR clone 27389 (TRBV4-2, TRBJ2-1)
CASGLDRAYNEQFF

SEQ ID NO: 54779 - protein, 14 aa, Homo sapiens
  CDR3 for alpha chain variable domain of TCR clone 27390 (TRAV12-2, TRAJ13)
CAVKKTGGYQKVTF

SEQ ID NO: 54780 - protein, 16 aa, Homo sapiens
  CDR3 for beta chain variable domain of TCR clone 27390 (TRBV4-2, TRBJ2-4)
CASSQELRRAKNMQYF

SEQ ID NO: 54781 - protein, 23 aa, Homo sapiens
  CDR3 for alpha chain variable domain of TCR clone 27391 (TRAV26-1, TRAJ38)
CIADNAGNNHIQNHDPAVYQLRD

SEQ ID NO: 54782 - protein, 13 aa, Homo sapiens
  CDR3 for beta chain variable domain of TCR clone 27391 (TRBV20-1, TRBJ1-1)
CSARGGGNTEAFF

SEQ ID NO: 54783 - protein, 15 aa, Homo sapiens
  CDR3 for alpha chain variable domain of TCR clone 27392 (TRAV12-2, TRAJ53)
CAVNGGGGSNYKLTF

SEQ ID NO: 54784 - protein, 17 aa, Homo sapiens
  CDR3 for beta chain variable domain of TCR clone 27392 (TRBV7-2, TRBJ2-2)
CASSPRGAGEGTGELFF

SEQ ID NO: 54785 - protein, 14 aa, Homo sapiens
  CDR3 for alpha chain variable domain of TCR clone 27393 (TRAV17, TRAJ34)
CATDSLEGTAKLIF

SEQ ID NO: 54786 - protein, 13 aa, Homo sapiens
  CDR3 for beta chain variable domain of TCR clone 27393 (TRBV11-2, TRBJ2-7)
CASSGTRPYEQYF

SEQ ID NO: 54787 - protein, 13 aa, Homo sapiens
  CDR3 for alpha chain variable domain of TCR clone 27394 (TRAV21, TRAJ27)
CAARPGNAGKSTF

SEQ ID NO: 54788 - protein, 14 aa, Homo sapiens
  CDR3 for beta chain variable domain of TCR clone 27394 (TRBV11-2, TRBJ2-7)
CAGSLGAGAYEQYF

SEQ ID NO: 54789 - protein, 14 aa, Homo sapiens
  CDR3 for alpha chain variable domain of TCR clone 27395 (TRAV12-2, TRAJ5)
CAVNRFTGRRALTF

SEQ ID NO: 54790 - protein, 12 aa, Homo sapiens
  CDR3 for beta chain variable domain of TCR clone 27395 (TRBV19, TRBJ1-5)
CASSIAQQPQHF

SEQ ID NO: 54791 - protein, 11 aa, Homo sapiens
  CDR3 for alpha chain variable domain of TCR clone 27396 (TRAV2, TRAJ33)
CAVESNYQLIW

SEQ ID NO: 54792 - protein, 14 aa, Homo sapiens
  CDR3 for beta chain variable domain of TCR clone 27396 (TRBV7-8, TRBJ2-3)
CASSLEAGTDTQYF

SEQ ID NO: 54793 - protein, 11 aa, Homo sapiens
  CDR3 for alpha chain variable domain of TCR clone 27397 (TRAV39, TRAJ49)
CAVDISTPFYF

SEQ ID NO: 54794 - protein, 11 aa, Homo sapiens
  CDR3 for beta chain variable domain of TCR clone 27397 (TRBV7-8, TRBJ2-7)
CASSLSLEQYF

SEQ ID NO: 54795 - protein, 16 aa, Homo sapiens
  CDR3 for alpha chain variable domain of TCR clone 27398 (TRAV30, TRAJ49)
SAAQRVGPNTGNQFYF

SEQ ID NO: 54796 - protein, 14 aa, Homo sapiens
  CDR3 for beta chain variable domain of TCR clone 27398 (TRBV12-5, TRBJ2-5)
CASGSRTHQETQYF

SEQ ID NO: 54797 - protein, 12 aa, Homo sapiens
  CDR3 for alpha chain variable domain of TCR clone 27399 (TRAV2, TRAJ34)
CAVERNTDKLIF

SEQ ID NO: 54798 - protein, 20 aa, Homo sapiens
  CDR3 for beta chain variable domain of TCR clone 27399 (TRBV7-2, TRBJ2-5)
CASSFLRGGGKRPSTSGQAR

SEQ ID NO: 54799 - protein, 14 aa, Homo sapiens
  CDR3 for alpha chain variable domain of TCR clone 27400 (TRAV1-2, TRAJ8)
CAVREDTGFQKLVF

SEQ ID NO: 54800 - protein, 13 aa, Homo sapiens
  CDR3 for beta chain variable domain of TCR clone 27400 (TRBV6-5, TRBJ2-6)
CASSTSGPLRLDF

SEQ ID NO: 54801 - protein, 14 aa, Homo sapiens
  CDR3 for alpha chain variable domain of TCR clone 27401 (TRAV38-1, TRAJ40)
CALRPTSGTYKYIF

SEQ ID NO: 54802 - protein, 14 aa, Homo sapiens
  CDR3 for beta chain variable domain of TCR clone 27401 (TRBV25-1, TRBJ1-1)
CASTHRGGNTEAFF

SEQ ID NO: 54803 - protein, 15 aa, Homo sapiens
  CDR3 for alpha chain variable domain of TCR clone 27402 (TRAV17, TRAJ56)
CATEPFTGANSKMTF

SEQ ID NO: 54804 - protein, 15 aa, Homo sapiens
  CDR3 for beta chain variable domain of TCR clone 27402 (TRBV28, TRBJ1-5)
CASSRTGGYVQPQHF

SEQ ID NO: 54805 - protein, 11 aa, Homo sapiens
  CDR3 for alpha chain variable domain of TCR clone 27403 (TRAV35, TRAJ34)
CWARNTDKLIF

SEQ ID NO: 54806 - protein, 14 aa, Homo sapiens
  CDR3 for beta chain variable domain of TCR clone 27403 (TRBV5-1, TRBJ2-7)
CASSREESLYEQYF

SEQ ID NO: 54807 - protein, 13 aa, Homo sapiens
  CDR3 for alpha chain variable domain of TCR clone 27404 (TRAV13-1, TRAJ12)
CAAGPDSSYKLIF

SEQ ID NO: 54808 - protein, 16 aa, Homo sapiens
  CDR3 for beta chain variable domain of TCR clone 27404 (TRBV15, TRBJ2-1)
CATSRERLAGAYEQFF

SEQ ID NO: 54809 - protein, 14 aa, Homo sapiens
  CDR3 for alpha chain variable domain of TCR clone 27405 (TRAV12-1, TRAJ17)
CVVNFKAAGNKLTF

SEQ ID NO: 54810 - protein, 14 aa, Homo sapiens
  CDR3 for beta chain variable domain of TCR clone 27405 (TRBV12-4, TRBJ2-7)
CASSLTGRAYEQYF

SEQ ID NO: 54811 - protein, 14 aa, Homo sapiens
  CDR3 for alpha chain variable domain of TCR clone 27406 (TRAV20, TRAJ42)
CSVQAGGSQGNLIF

SEQ ID NO: 54812 - protein, 14 aa, Homo sapiens
  CDR3 for beta chain variable domain of TCR clone 27406 (TRBV28, TRBJ1-2)
CASRIQGANYGYTF

SEQ ID NO: 54813 - protein, 12 aa, Homo sapiens
  CDR3 for alpha chain variable domain of TCR clone 27407 (TRAV20, TRAJ23)
CAVHNQGGKLIF

SEQ ID NO: 54814 - protein, 11 aa, Homo sapiens
  CDR3 for beta chain variable domain of TCR clone 27407 (TRBV7-6, TRBJ2-3)
CQQLAEDTQYF

SEQ ID NO: 54815 - protein, 12 aa, Homo sapiens
  CDR3 for alpha chain variable domain of TCR clone 27408 (TRAV12-3, TRAJ17)
CAMTLTGNKLTF

SEQ ID NO: 54816 - protein, 16 aa, Homo sapiens
  CDR3 for beta chain variable domain of TCR clone 27408 (TRBV20-1, TRBJ1-4)
CSARPYGGELNEKLFF

SEQ ID NO: 54817 - protein, 13 aa, Homo sapiens
  CDR3 for alpha chain variable domain of TCR clone 27409 (TRAV29/DV5, TRAJ48)
CAASPFGNEKLTF

SEQ ID NO: 54818 - protein, 14 aa, Homo sapiens
  CDR3 for beta chain variable domain of TCR clone 27409 (TRBV3-1, TRBJ2-2)
CASSQDWVQGELFF

SEQ ID NO: 54819 - protein, 13 aa, Homo sapiens
  CDR3 for alpha chain variable domain of TCR clone 27410 (TRAV2, TRAJ40)
CAVVTSGTYKYIF

SEQ ID NO: 54820 - protein, 14 aa, Homo sapiens
  CDR3 for beta chain variable domain of TCR clone 27410 (TRBV24-1, TRBJ1-1)
CATSIPRGDTEAFF

SEQ ID NO: 54821 - protein, 12 aa, Homo sapiens
  CDR3 for alpha chain variable domain of TCR clone 27411 (TRAV12-3, TRAJ17)
SAMTLTGNKLTF

SEQ ID NO: 54822 - protein, 13 aa, Homo sapiens
  CDR3 for beta chain variable domain of TCR clone 27411 (TRBV27, TRBJ1-1)
CASSLSIGAEAFF

SEQ ID NO: 54823 - protein, 10 aa, Homo sapiens
  CDR3 for alpha chain variable domain of TCR clone 27412 (TRAV8-4, TRAJ43)
CAVGADDMRF

SEQ ID NO: 54824 - protein, 15 aa, Homo sapiens
  CDR3 for beta chain variable domain of TCR clone 27412 (TRBV5-1, TRBJ2-3)
CASSVTSGSTDTQYF

SEQ ID NO: 54825 - protein, 11 aa, Homo sapiens
  CDR3 for alpha chain variable domain of TCR clone 27413 (TRAV12-3, TRAJ43)
CAMSVSNDMSF

SEQ ID NO: 54826 - protein, 13 aa, Homo sapiens
  CDR3 for beta chain variable domain of TCR clone 27413 (TRBV20-1, TRBJ1-1)
CSAPLGGGTEAFF

SEQ ID NO: 54827 - protein, 11 aa, Homo sapiens
  CDR3 for alpha chain variable domain of TCR clone 27414 (TRAV2, TRAJ33)
CAVDSNYQLIW

SEQ ID NO: 54828 - protein, 16 aa, Homo sapiens
  CDR3 for beta chain variable domain of TCR clone 27414 (TRBV7-3, TRBJ2-2)
CASSLKRGTLSGELFF

SEQ ID NO: 54829 - protein, 14 aa, Homo sapiens
  CDR3 for alpha chain variable domain of TCR clone 27415 (TRAV1-2, TRAJ16)
CAVNRFSDGQKLLF

SEQ ID NO: 54830 - protein, 15 aa, Homo sapiens
  CDR3 for beta chain variable domain of TCR clone 27415 (TRBV7-9, TRBJ1-6)
CASSSPGRGNSPFHF

SEQ ID NO: 54831 - protein, 12 aa, Homo sapiens
  CDR3 for alpha chain variable domain of TCR clone 27416 (TRAV12-2, TRAJ30)
CAVRNRDDKIIF

SEQ ID NO: 54832 - protein, 15 aa, Homo sapiens
  CDR3 for beta chain variable domain of TCR clone 27416 (TRBV6-3, TRBJ1-5)
CASRVERWSNQPQHF

SEQ ID NO: 54833 - protein, 14 aa, Homo sapiens
  CDR3 for alpha chain variable domain of TCR clone 27417 (TRAV1-2, TRAJ16)
CAVNRFSDVQKLLF

SEQ ID NO: 54834 - protein, 12 aa, Homo sapiens
  CDR3 for beta chain variable domain of TCR clone 27417 (TRBV7-9, TRBJ2-7)
CASSLEGYEQYF

SEQ ID NO: 54835 - protein, 11 aa, Homo sapiens
  CDR3 for alpha chain variable domain of TCR clone 27418 (TRAV3, TRAJ21)
CAVGNFNKFYF

SEQ ID NO: 54836 - protein, 16 aa, Homo sapiens
  CDR3 for beta chain variable domain of TCR clone 27418 (TRBV19, TRBJ2-1)
CASSKAGPSSYNEQCF

SEQ ID NO: 54837 - protein, 16 aa, Homo sapiens
  CDR3 for alpha chain variable domain of TCR clone 27419 (TRAV3, TRAJ10)
CAVRDMRAGGGNKLTF

SEQ ID NO: 54838 - protein, 17 aa, Homo sapiens
  CDR3 for beta chain variable domain of TCR clone 27419 (TRBV7-3, TRBJ2-3)
CASSLMKRMRGADTQYF

SEQ ID NO: 54839 - protein, 15 aa, Homo sapiens
  CDR3 for alpha chain variable domain of TCR clone 27420 (TRAV21, TRAJ24)
CAARSSTDSWGKLQF

SEQ ID NO: 54840 - protein, 13 aa, Homo sapiens
  CDR3 for beta chain variable domain of TCR clone 27420 (TRBV7-9, TRBJ1-2)
CASSLKQNYGYTF

SEQ ID NO: 54841 - protein, 14 aa, Homo sapiens
  CDR3 for alpha chain variable domain of TCR clone 27421 (TRAV17, TRAJ39)
CATDPVRAGNMLTF

SEQ ID NO: 54842 - protein, 15 aa, Homo sapiens
  CDR3 for beta chain variable domain of TCR clone 27421 (TRBV13, TRBJ1-5)
CASSFGQGGVQPQYF

SEQ ID NO: 54843 - protein, 13 aa, Homo sapiens
  CDR3 for alpha chain variable domain of TCR clone 27422 (TRAV16, TRAJ26)
CITVLCLGQDFVF

SEQ ID NO: 54844 - protein, 12 aa, Homo sapiens
  CDR3 for beta chain variable domain of TCR clone 27422 (TRBV11-2, TRBJ2-1)
CASSPGNNEQFF

SEQ ID NO: 54845 - protein, 11 aa, Homo sapiens
  CDR3 for alpha chain variable domain of TCR clone 27423 (TRAV4, TRAJ31)
CLVGDNARLMS

SEQ ID NO: 54846 - protein, 16 aa, Homo sapiens
  CDR3 for beta chain variable domain of TCR clone 27423 (TRBV7-2, TRBJ2-5)
CASSSKWLSGQETQYF

SEQ ID NO: 54847 - protein, 16 aa, Homo sapiens
  CDR3 for alpha chain variable domain of TCR clone 27424 (TRAV1-2, TRAJ10)
CAVRGVLTGGGNKLTF

SEQ ID NO: 54848 - protein, 12 aa, Homo sapiens
  CDR3 for beta chain variable domain of TCR clone 27424 (TRBV7-8, TRBJ2-7)
CTSSLGDREQYF

SEQ ID NO: 54849 - protein, 12 aa, Homo sapiens
  CDR3 for alpha chain variable domain of TCR clone 27425 (TRAV13-1, TRAJ21)
CAAKEGFNKFYF

SEQ ID NO: 54850 - protein, 15 aa, Homo sapiens
  CDR3 for beta chain variable domain of TCR clone 27425 (TRBV4-1, TRBJ1-4)
CASSDTGGTNEKLFF

SEQ ID NO: 54851 - protein, 13 aa, Homo sapiens
  CDR3 for alpha chain variable domain of TCR clone 27426 (TRAV1-2, TRAJ9)
CAALNTGGLKTIF

SEQ ID NO: 54852 - protein, 15 aa, Homo sapiens
  CDR3 for beta chain variable domain of TCR clone 27426 (TRBV6-3, TRBJ2-7)
CASSSPGTVFYEQYF

SEQ ID NO: 54853 - protein, 13 aa, Homo sapiens
  CDR3 for alpha chain variable domain of TCR clone 27427 (TRAV3, TRAJ27)
CAVRDRGDDKIIF

SEQ ID NO: 54854 - protein, 16 aa, Homo sapiens
  CDR3 for beta chain variable domain of TCR clone 27427 (TRBV20-1, TRBJ1-2)
CSASMGQGVANYGYTF

SEQ ID NO: 54855 - protein, 14 aa, Homo sapiens
  CDR3 for alpha chain variable domain of TCR clone 27428 (TRAV13-1, TRAJ40)
CAASMTSGTYKYIF

SEQ ID NO: 54856 - protein, 14 aa, Homo sapiens
  CDR3 for beta chain variable domain of TCR clone 27428 (TRBV18, TRBJ2-5)
CASSPGVSQETQYF

SEQ ID NO: 54857 - protein, 14 aa, Homo sapiens
  CDR3 for alpha chain variable domain of TCR clone 27429 (TRAV12-3, TRAJ10)
SHLPLTGGGNELTF

SEQ ID NO: 54858 - protein, 13 aa, Homo sapiens
  CDR3 for beta chain variable domain of TCR clone 27429 (TRBV2, TRBJ1-6)
CASGRGGISPLHF

SEQ ID NO: 54859 - protein, 14 aa, Homo sapiens
  CDR3 for alpha chain variable domain of TCR clone 27430 (TRAV12-2, TRAJ40)
CAVKIPSGTYKYIF

SEQ ID NO: 54860 - protein, 20 aa, Homo sapiens
  CDR3 for beta chain variable domain of TCR clone 27430 (TRBV28, TRBJ2-1)
CASTPSGRSPGLAGGNEQFF

SEQ ID NO: 54861 - protein, 12 aa, Homo sapiens
  CDR3 for alpha chain variable domain of TCR clone 27431 (TRAV21, TRAJ33)
SAKMDSNYQLIW

SEQ ID NO: 54862 - protein, 14 aa, Homo sapiens
  CDR3 for beta chain variable domain of TCR clone 27431 (TRBV2, TRBJ2-7)
CASSLTSGGYEQYF

SEQ ID NO: 54863 - protein, 15 aa, Homo sapiens
  CDR3 for alpha chain variable domain of TCR clone 27432 (TRAV14/DV4, TRAJ8)
CAMREGNTGFQKLVF

SEQ ID NO: 54864 - protein, 15 aa, Homo sapiens
  CDR3 for beta chain variable domain of TCR clone 27432 (TRBV28, TRBJ2-1)
CASSRSSGEVDEQFF

SEQ ID NO: 54865 - protein, 14 aa, Homo sapiens
  CDR3 for alpha chain variable domain of TCR clone 27433 (TRAV12-3, TRAJ10)
SRLPLTGGGNKLTF

SEQ ID NO: 54866 - protein, 15 aa, Homo sapiens
  CDR3 for beta chain variable domain of TCR clone 27433 (TRBV7-9, TRBJ1-4)
CASSRTGGFNEKLFF

SEQ ID NO: 54867 - protein, 15 aa, Homo sapiens
  CDR3 for alpha chain variable domain of TCR clone 27434 (TRAV2, TRAJ15)
CAVEDRGQAGTALIF

SEQ ID NO: 54868 - protein, 13 aa, Homo sapiens
  CDR3 for beta chain variable domain of TCR clone 27434 (TRBV10-2, TRBJ2-7)
CASGVSGGYEQYF

SEQ ID NO: 54869 - protein, 12 aa, Homo sapiens
  CDR3 for alpha chain variable domain of TCR clone 27435 (TRAV12-2, TRAJ31)
CAVNTPDAGLMF

SEQ ID NO: 54870 - protein, 15 aa, Homo sapiens
  CDR3 for beta chain variable domain of TCR clone 27435 (TRBV4-2, TRBJ1-1)
CASSQDQGLNTEAFF

SEQ ID NO: 54871 - protein, 13 aa, Homo sapiens
  CDR3 for alpha chain variable domain of TCR clone 27436 (TRAV13-1, TRAJ5)
CAARDTGRRALTF

SEQ ID NO: 54872 - protein, 12 aa, Homo sapiens
  CDR3 for beta chain variable domain of TCR clone 27436 (TRBV28, TRBJ2-3)
CASSLYRDTQYF

SEQ ID NO: 54873 - protein, 15 aa, Homo sapiens
  CDR3 for alpha chain variable domain of TCR clone 27437 (TRAV29/DV5, TRAJ24)
CAASGATDSWGTFQF

SEQ ID NO: 54874 - protein, 12 aa, Homo sapiens
  CDR3 for beta chain variable domain of TCR clone 27437 (TRBV11-2, TRBJ2-2)
CASSLPTGELFF

SEQ ID NO: 54875 - protein, 13 aa, Homo sapiens
  CDR3 for alpha chain variable domain of TCR clone 27438 (TRAV21, TRAJ57)
CAVTQGGSEKLIF

SEQ ID NO: 54876 - protein, 16 aa, Homo sapiens
  CDR3 for beta chain variable domain of TCR clone 27438 (TRBV29-1, TRBJ2-7)
CSVEDAEDGTAYEQYF

SEQ ID NO: 54877 - protein, 14 aa, Homo sapiens
  CDR3 for alpha chain variable domain of TCR clone 27439 (TRAV26-1, TRAJ21)
CIARPPYNFNKFYF

SEQ ID NO: 54878 - protein, 14 aa, Homo sapiens
  CDR3 for beta chain variable domain of TCR clone 27439 (TRBV19, TRBJ2-1)
CASPTFVLSGEQFF

SEQ ID NO: 54879 - protein, 11 aa, Homo sapiens
  CDR3 for alpha chain variable domain of TCR clone 27440 (TRAV21, TRAJ34)
CAVTNTDKLIF

SEQ ID NO: 54880 - protein, 15 aa, Homo sapiens
  CDR3 for beta chain variable domain of TCR clone 27440 (TRBV5-1, TRBJ2-1)
CASSPPRAPYNEQFF

SEQ ID NO: 54881 - protein, 14 aa, Homo sapiens
  CDR3 for alpha chain variable domain of TCR clone 27441 (TRAV1-2, TRAJ16)
CAVNRFSDGQKLLF

SEQ ID NO: 54882 - protein, 20 aa, Homo sapiens
  CDR3 for beta chain variable domain of TCR clone 27441 (TRBV11-2, TRBJ2-1)
CASSPRISALGRGAMNEQFF

SEQ ID NO: 54883 - protein, 14 aa, Homo sapiens
  CDR3 for alpha chain variable domain of TCR clone 27442 (TRAV14/DV4, TRAJ54)
CAMREAPGAQKLVF

SEQ ID NO: 54884 - protein, 13 aa, Homo sapiens
  CDR3 for beta chain variable domain of TCR clone 27442 (TRBV12-4, TRBJ1-1)
CASSPGTGFEAFF

SEQ ID NO: 54885 - protein, 12 aa, Homo sapiens
  CDR3 for alpha chain variable domain of TCR clone 27443 (TRAV13-1, TRAJ27)
CAAHTSAGKSTF

SEQ ID NO: 54886 - protein, 14 aa, Homo sapiens
  CDR3 for beta chain variable domain of TCR clone 27443 (TRBV19, TRBJ2-2)
CASSGQGIAGELFF

SEQ ID NO: 54887 - protein, 14 aa, Homo sapiens
  CDR3 for alpha chain variable domain of TCR clone 27444 (TRAV1-2, TRAJ16)
CAVNRFSDGQKLLF

SEQ ID NO: 54888 - protein, 15 aa, Homo sapiens
  CDR3 for beta chain variable domain of TCR clone 27444 (TRBV29-1, TRBJ2-1)
CSVGRHALFYNEQFF

SEQ ID NO: 54889 - protein, 16 aa, Homo sapiens
  CDR3 for alpha chain variable domain of TCR clone 27445 (TRAV3, TRAJ37)
CAVRPPGSGNTGKLIF

SEQ ID NO: 54890 - protein, 16 aa, Homo sapiens
  CDR3 for beta chain variable domain of TCR clone 27445 (TRBV9, TRBJ1-2)
CASSVEEKVSPYGYTF

SEQ ID NO: 54891 - protein, 15 aa, Homo sapiens
  CDR3 for alpha chain variable domain of TCR clone 27446 (TRAV4, TRAJ39)
CLVGPNNNAGNMLTF

SEQ ID NO: 54892 - protein, 13 aa, Homo sapiens
  CDR3 for beta chain variable domain of TCR clone 27446 (TRBV11-2, TRBJ2-5)
CASSSTGEETQYL

SEQ ID NO: 54893 - protein, 13 aa, Homo sapiens
  CDR3 for alpha chain variable domain of TCR clone 27447 (TRAV3, TRAJ20)
CAVRSLNDYKLSF

SEQ ID NO: 54894 - protein, 12 aa, Homo sapiens
  CDR3 for beta chain variable domain of TCR clone 27447 (TRBV11-2, TRBJ2-2)
CASSLGGGELFF

SEQ ID NO: 54895 - protein, 16 aa, Homo sapiens
  CDR3 for alpha chain variable domain of TCR clone 27448 (TRAV3, TRAJ3)
CAVGDRAKSSASKIIF

SEQ ID NO: 54896 - protein, 16 aa, Homo sapiens
  CDR3 for beta chain variable domain of TCR clone 27448 (TRBV20-1, TRBJ2-4)
CSATSLAELAKNIQYF

SEQ ID NO: 54897 - protein, 16 aa, Homo sapiens
  CDR3 for alpha chain variable domain of TCR clone 27449 (TRAV30, TRAJ24)
CGTEIVDADSWGKFQF

SEQ ID NO: 54898 - protein, 15 aa, Homo sapiens
  CDR3 for beta chain variable domain of TCR clone 27449 (TRBV19, TRBJ1-5)
CASSIVWADNQPQHF

SEQ ID NO: 54899 - protein, 18 aa, Homo sapiens
  CDR3 for alpha chain variable domain of TCR clone 27450 (TRAV12-3, TRAJ52)
CAMSVGGAGGTSYGKLTF

SEQ ID NO: 54900 - protein, 15 aa, Homo sapiens
  CDR3 for beta chain variable domain of TCR clone 27450 (TRBV9, TRBJ1-6)
CASSVAGTGDSPLHF

SEQ ID NO: 54901 - protein, 12 aa, Homo sapiens
  CDR3 for alpha chain variable domain of TCR clone 27451 (TRAV13-1, TRAJ53)
RAAGGSNYKLTF

SEQ ID NO: 54902 - protein, 11 aa, Homo sapiens
  CDR3 for beta chain variable domain of TCR clone 27451 (TRBV2, TRBJ1-1)
CASREGTEAFF

SEQ ID NO: 54903 - protein, 12 aa, Homo sapiens
  CDR3 for alpha chain variable domain of TCR clone 27452 (TRAV2, TRAJ31)
CAVEEGNARLMF

SEQ ID NO: 54904 - protein, 18 aa, Homo sapiens
  CDR3 for beta chain variable domain of TCR clone 27452 (TRBV7-9, TRBJ2-3)
CASSLDRAGLATPDTQYF

SEQ ID NO: 54905 - protein, 13 aa, Homo sapiens
  CDR3 for alpha chain variable domain of TCR clone 27453 (TRAV8-3, TRAJ44)
CAVVPGTASKLTF

SEQ ID NO: 54906 - protein, 14 aa, Homo sapiens
  CDR3 for beta chain variable domain of TCR clone 27453 (TRBV7-2, TRBJ2-7)
CASRSQGAAYEQYF

SEQ ID NO: 54907 - protein, 15 aa, Homo sapiens
  CDR3 for alpha chain variable domain of TCR clone 27454 (TRAV2, TRAJ15)
CAVEDRGQAGTALVF

SEQ ID NO: 54908 - protein, 15 aa, Homo sapiens
  CDR3 for beta chain variable domain of TCR clone 27454 (TRBV7-2, TRBJ2-3)
CASSLVVRGPDTQYF

SEQ ID NO: 54909 - protein, 13 aa, Homo sapiens
  CDR3 for alpha chain variable domain of TCR clone 27455 (TRAV21, TRAJ20)
CAVGLRVDSKLSF

SEQ ID NO: 54910 - protein, 13 aa, Homo sapiens
  CDR3 for beta chain variable domain of TCR clone 27455 (TRBV6-1, TRBJ1-1)
CASSRQGNTEAFF

SEQ ID NO: 54911 - protein, 14 aa, Homo sapiens
  CDR3 for alpha chain variable domain of TCR clone 27456 (TRAV2, TRAJ37)
CAVDFTSNTGKLIF

SEQ ID NO: 54912 - protein, 15 aa, Homo sapiens
  CDR3 for beta chain variable domain of TCR clone 27456 (TRBV7-2, TRBJ2-3)
CASSSTGLETDTQYF

SEQ ID NO: 54913 - protein, 13 aa, Homo sapiens
  CDR3 for alpha chain variable domain of TCR clone 27457 (TRAV17, TRAJ9)
CATAYTGGFKTIF

SEQ ID NO: 54914 - protein, 16 aa, Homo sapiens
  CDR3 for beta chain variable domain of TCR clone 27457 (TRBV7-7, TRBJ2-1)
CASSLASGTSYNEQFF

SEQ ID NO: 54915 - protein, 13 aa, Homo sapiens
  CDR3 for alpha chain variable domain of TCR clone 27458 (TRAV12-1, TRAJ33)
CGDSPDSNYQLIW

SEQ ID NO: 54916 - protein, 15 aa, Homo sapiens
  CDR3 for beta chain variable domain of TCR clone 27458 (TRBV27, TRBJ2-1)
CASSNGGGSSNEQFF

SEQ ID NO: 54917 - protein, 16 aa, Homo sapiens
  CDR3 for alpha chain variable domain of TCR clone 27459 (TRAV3, TRAJ23)
CAVKIGIYNQGGKLIF

SEQ ID NO: 54918 - protein, 17 aa, Homo sapiens
  CDR3 for beta chain variable domain of TCR clone 27459 (TRBV10-3, TRBJ2-6)
CAISESTAPSGANVLTF

SEQ ID NO: 54919 - protein, 13 aa, Homo sapiens
  CDR3 for alpha chain variable domain of TCR clone 27460 (TRAV2, TRAJ40)
CAVVTSGTYKYIF

SEQ ID NO: 54920 - protein, 14 aa, Homo sapiens
  CDR3 for beta chain variable domain of TCR clone 27460 (TRBV11-2, TRBJ2-3)
CASSRLARTDTQYF

SEQ ID NO: 54921 - protein, 11 aa, Homo sapiens
  CDR3 for alpha chain variable domain of TCR clone 27461 (TRAV21, TRAJ31)
CAVRNNARLMF

SEQ ID NO: 54922 - protein, 13 aa, Homo sapiens
  CDR3 for beta chain variable domain of TCR clone 27461 (TRBV19, TRBJ2-1)
CASSRQGNKEQFF

SEQ ID NO: 54923 - protein, 13 aa, Homo sapiens
  CDR3 for alpha chain variable domain of TCR clone 27462 (TRAV12-2, TRAJ15)
CPHTGQAGTALIF

SEQ ID NO: 54924 - protein, 11 aa, Homo sapiens
  CDR3 for beta chain variable domain of TCR clone 27462 (TRBV7-8, TRBJ2-7)
CASSLSLEQYF

SEQ ID NO: 54925 - protein, 11 aa, Homo sapiens
  CDR3 for alpha chain variable domain of TCR clone 27463 (TRAV3, TRAJ21)
CAVGNFNKFYF

SEQ ID NO: 54926 - protein, 17 aa, Homo sapiens
  CDR3 for beta chain variable domain of TCR clone 27463 (TRBV24-1, TRBJ2-1)
CATSDVSTSGTYNEQFF

SEQ ID NO: 54927 - protein, 14 aa, Homo sapiens
  CDR3 for alpha chain variable domain of TCR clone 27464 (TRAV13-1, TRAJ44)
CTAKATGTASKLTF

SEQ ID NO: 54928 - protein, 13 aa, Homo sapiens
  CDR3 for beta chain variable domain of TCR clone 27464 (TRBV5-5, TRBJ1-2)
CASSFWRGEDYTF

SEQ ID NO: 54929 - protein, 11 aa, Homo sapiens
  CDR3 for alpha chain variable domain of TCR clone 27465 (TRAV17, TRAJ9)
CATNGGFKTIF

SEQ ID NO: 54930 - protein, 14 aa, Homo sapiens
  CDR3 for beta chain variable domain of TCR clone 27465 (TRBV7-9, TRBJ2-2)
CASSGLADTGELFF

SEQ ID NO: 54931 - protein, 14 aa, Homo sapiens
  CDR3 for alpha chain variable domain of TCR clone 27466 (TRAV12-2, TRAJ13)
CAVKKTGGYQKVTF

SEQ ID NO: 54932 - protein, 13 aa, Homo sapiens
  CDR3 for beta chain variable domain of TCR clone 27466 (TRBV6-1, TRBJ1-1)
CASSRQGNTEAFF

SEQ ID NO: 54933 - protein, 14 aa, Homo sapiens
  CDR3 for alpha chain variable domain of TCR clone 27467 (TRAV12-2, TRAJ13)
CAVKKTGGYQKVTF

SEQ ID NO: 54934 - protein, 16 aa, Homo sapiens
  CDR3 for beta chain variable domain of TCR clone 27467 (TRBV20-1, TRBJ2-1)
CSAPGLAGSYSDEQFF

SEQ ID NO: 54935 - protein, 14 aa, Homo sapiens
  CDR3 for alpha chain variable domain of TCR clone 27468 (TRAV8-2, TRAJ4)
CVVSPSGGYNKLIS

SEQ ID NO: 54936 - protein, 15 aa, Homo sapiens
  CDR3 for beta chain variable domain of TCR clone 27468 (TRBV2, TRBJ2-1)
CASSELAGSYNEQFF

SEQ ID NO: 54937 - protein, 14 aa, Homo sapiens
  CDR3 for alpha chain variable domain of TCR clone 27469 (TRAV38-1, TRAJ29)
CAFITTSGNTPLVF

SEQ ID NO: 54938 - protein, 14 aa, Homo sapiens
  CDR3 for beta chain variable domain of TCR clone 27469 (TRBV18, TRBJ2-7)
CASSPRGGAYEQYF

SEQ ID NO: 54939 - protein, 11 aa, Homo sapiens
  CDR3 for alpha chain variable domain of TCR clone 27470 (TRAV12-1, TRAJ21)
CVVNNFNKFYF

SEQ ID NO: 54940 - protein, 14 aa, Homo sapiens
  CDR3 for beta chain variable domain of TCR clone 27470 (TRBV15, TRBJ1-5)
CATSREQSNQTQHF

SEQ ID NO: 54941 - protein, 12 aa, Homo sapiens
  CDR3 for alpha chain variable domain of TCR clone 27471 (TRAV1-1, TRAJ8)
CAGCTGFQKLVF

SEQ ID NO: 54942 - protein, 15 aa, Homo sapiens
  CDR3 for beta chain variable domain of TCR clone 27471 (TRBV7-9, TRBJ1-4)
CASSRTGGFNEKLFF

SEQ ID NO: 54943 - protein, 13 aa, Homo sapiens
  CDR3 for alpha chain variable domain of TCR clone 27472 (TRAV12-1, TRAJ21)
CVVTLYNFNKFYF

SEQ ID NO: 54944 - protein, 20 aa, Homo sapiens
  CDR3 for beta chain variable domain of TCR clone 27472 (TRBV7-8, TRBJ2-1)
CASSLAHGLAGVRSYNEQFF

SEQ ID NO: 54945 - protein, 14 aa, Homo sapiens
  CDR3 for alpha chain variable domain of TCR clone 27473 (TRAV9-2, TRAJ39)
CALYIYNAGNMLTF

SEQ ID NO: 54946 - protein, 13 aa, Homo sapiens
  CDR3 for beta chain variable domain of TCR clone 27473 (TRBV3-1, TRBJ1-1)
CASSPGVITEAFF

SEQ ID NO: 54947 - protein, 15 aa, Homo sapiens
  CDR3 for alpha chain variable domain of TCR clone 27474 (TRAV3, TRAJ42)
CAVRGGTGSQGNLIF

SEQ ID NO: 54948 - protein, 14 aa, Homo sapiens
  CDR3 for beta chain variable domain of TCR clone 27474 (TRBV19, TRBJ1-2)
CASSSLFARDVYTL

SEQ ID NO: 54949 - protein, 12 aa, Homo sapiens
  CDR3 for alpha chain variable domain of TCR clone 27475 (TRAV13-1, TRAJ21)
CAAKEGFNKFYF

SEQ ID NO: 54950 - protein, 14 aa, Homo sapiens
  CDR3 for beta chain variable domain of TCR clone 27475 (TRBV5-4, TRBJ1-1)
CASSLDSRRYEAFF

SEQ ID NO: 54951 - protein, 16 aa, Homo sapiens
  CDR3 for alpha chain variable domain of TCR clone 27476 (TRAV17, TRAJ52)
CATSNAGGTSYGRLTF

SEQ ID NO: 54952 - protein, 13 aa, Homo sapiens
  CDR3 for beta chain variable domain of TCR clone 27476 (TRBV27, TRBJ1-6)
CASSLVLVSPLHF

SEQ ID NO: 54953 - protein, 14 aa, Homo sapiens
  CDR3 for alpha chain variable domain of TCR clone 27477 (TRAV35, TRAJ33)
CAGSSQDSNYQLIW

SEQ ID NO: 54954 - protein, 15 aa, Homo sapiens
  CDR3 for beta chain variable domain of TCR clone 27477 (TRBV20-1, TRBJ2-7)
SSAESGTSGAYEQYF

SEQ ID NO: 54955 - protein, 12 aa, Homo sapiens
  CDR3 for alpha chain variable domain of TCR clone 27478 (TRAV21, TRAJ3)
CCFYSSASKIIF

SEQ ID NO: 54956 - protein, 16 aa, Homo sapiens
  CDR3 for beta chain variable domain of TCR clone 27478 (TRBV19, TRBJ2-1)
CASSKAGPSSYNEQLF

SEQ ID NO: 54957 - protein, 11 aa, Homo sapiens
  CDR3 for alpha chain variable domain of TCR clone 27479 (TRAV2, TRAJ13)
CASGGYQKVTF

SEQ ID NO: 54958 - protein, 13 aa, Homo sapiens
  CDR3 for beta chain variable domain of TCR clone 27479 (TRBV29-1, TRBJ2-1)
CSVEGGRVNEQFF

SEQ ID NO: 54959 - protein, 16 aa, Homo sapiens
  CDR3 for alpha chain variable domain of TCR clone 27480 (TRAV30, TRAJ24)
CDTEIVDADSWGKFQF

SEQ ID NO: 54960 - protein, 17 aa, Homo sapiens
  CDR3 for beta chain variable domain of TCR clone 27480 (TRBV20-1, TRBJ2-2)
CSASGSGQGGLTGELFF

SEQ ID NO: 54961 - protein, 12 aa, Homo sapiens
  CDR3 for alpha chain variable domain of TCR clone 27481 (TRAV13-1, TRAJ21)
CAAKEGFNKFYF

SEQ ID NO: 54962 - protein, 17 aa, Homo sapiens
  CDR3 for beta chain variable domain of TCR clone 27481 (TRBV7-8, TRBJ2-6)
CASSAGTGGAGANVLTF

SEQ ID NO: 54963 - protein, 15 aa, Homo sapiens
  CDR3 for alpha chain variable domain of TCR clone 27482 (TRAV36/DV7, TRAJ54)
CAVEKPVQGAQKLGF

SEQ ID NO: 54964 - protein, 14 aa, Homo sapiens
  CDR3 for beta chain variable domain of TCR clone 27482 (TRBV4-3, TRBJ2-2)
CASSQGHVTGELFF

SEQ ID NO: 54965 - protein, 13 aa, Homo sapiens
  CDR3 for alpha chain variable domain of TCR clone 27483 (TRAV35, TRAJ44)
CAGLSGTASKLTF

SEQ ID NO: 54966 - protein, 17 aa, Homo sapiens
  CDR3 for beta chain variable domain of TCR clone 27483 (TRBV7-8, TRBJ1-2)
CASSLRPLQGHLYGDTF

SEQ ID NO: 54967 - protein, 12 aa, Homo sapiens
  CDR3 for alpha chain variable domain of TCR clone 27484 (TRAV12-2, TRAJ10)
WGVTGGGNKLTF

SEQ ID NO: 54968 - protein, 16 aa, Homo sapiens
  CDR3 for beta chain variable domain of TCR clone 27484 (TRBV19, TRBJ2-2)
CASRSPGTGATGELFF

SEQ ID NO: 54969 - protein, 16 aa, Homo sapiens
  CDR3 for alpha chain variable domain of TCR clone 27485 (TRAV27, TRAJ13)
CAGAKSDSGVYQKVTF

SEQ ID NO: 54970 - protein, 15 aa, Homo sapiens
  CDR3 for beta chain variable domain of TCR clone 27485 (TRBV29-1, TRBJ2-1)
CSVGRHALFYNEQFF

SEQ ID NO: 54971 - protein, 12 aa, Homo sapiens
  CDR3 for alpha chain variable domain of TCR clone 27486 (TRAV12-3, TRAJ20)
CAMVRGDYKLSF

SEQ ID NO: 54972 - protein, 12 aa, Homo sapiens
  CDR3 for beta chain variable domain of TCR clone 27486 (TRBV14, TRBJ2-5)
CASSHLKETQYF

SEQ ID NO: 54973 - protein, 14 aa, Homo sapiens
  CDR3 for alpha chain variable domain of TCR clone 27487 (TRAV3, TRAJ7)
CAVREEGREQQTRF

SEQ ID NO: 54974 - protein, 12 aa, Homo sapiens
  CDR3 for beta chain variable domain of TCR clone 27487 (TRBV7-8, TRBJ2-7)
CASSLGDREQYF

SEQ ID NO: 54975 - protein, 16 aa, Homo sapiens
  CDR3 for alpha chain variable domain of TCR clone 27488 (TRAV21, TRAJ45)
CAVSWGSGGGADGLTS

SEQ ID NO: 54976 - protein, 14 aa, Homo sapiens
  CDR3 for beta chain variable domain of TCR clone 27488 (TRBV4-2, TRBJ1-2)
CASSPGGSNYGYTF

SEQ ID NO: 54977 - protein, 14 aa, Homo sapiens
  CDR3 for alpha chain variable domain of TCR clone 27489 (TRAV12-1, TRAJ17)
CVVNYKAAGNKLTF

SEQ ID NO: 54978 - protein, 20 aa, Homo sapiens
  CDR3 for beta chain variable domain of TCR clone 27489 (TRBV7-8, TRBJ2-2)
CASSHLFPGPTIHITGELFF

SEQ ID NO: 54979 - protein, 14 aa, Homo sapiens
  CDR3 for alpha chain variable domain of TCR clone 27490 (TRAV17, TRAJ39)
CATDPVRAGNTLTF

SEQ ID NO: 54980 - protein, 15 aa, Homo sapiens
  CDR3 for beta chain variable domain of TCR clone 27490 (TRBV13, TRBJ1-5)
CASSFGQGGVQPQHF

SEQ ID NO: 54981 - protein, 13 aa, Homo sapiens
  CDR3 for alpha chain variable domain of TCR clone 27491 (TRAV2, TRAJ40)
CAVVTSGTYKYIF

SEQ ID NO: 54982 - protein, 13 aa, Homo sapiens
  CDR3 for beta chain variable domain of TCR clone 27491 (TRBV12-4, TRBJ1-2)
CASSLRQGKGYTF

SEQ ID NO: 54983 - protein, 14 aa, Homo sapiens
  CDR3 for alpha chain variable domain of TCR clone 27492 (TRAV13-1, TRAJ44)
CAAKATVTASKLTF

SEQ ID NO: 54984 - protein, 17 aa, Homo sapiens
  CDR3 for beta chain variable domain of TCR clone 27492 (TRBV7-3, TRBJ2-3)
CASSLMKRMRGADTQYF

SEQ ID NO: 54985 - protein, 16 aa, Homo sapiens
  CDR3 for alpha chain variable domain of TCR clone 27493 (TRAV27, TRAJ13)
CAGAKSDSGGYPKVTF

SEQ ID NO: 54986 - protein, 15 aa, Homo sapiens
  CDR3 for beta chain variable domain of TCR clone 27493 (TRBV29-1, TRBJ2-1)
CSVGRHALFYNEQFF

SEQ ID NO: 54987 - protein, 15 aa, Homo sapiens
  CDR3 for alpha chain variable domain of TCR clone 27494 (TRAV26-1, TRAJ29)
CIVRVEGSGNTPLVF

SEQ ID NO: 54988 - protein, 15 aa, Homo sapiens
  CDR3 for beta chain variable domain of TCR clone 27494 (TRBV28, TRBJ1-5)
CASSQGHQPNQPQHF

SEQ ID NO: 54989 - protein, 15 aa, Homo sapiens
  CDR3 for alpha chain variable domain of TCR clone 27495 (TRAV20, TRAJ53)
CAVQASGGSDYKLTF

SEQ ID NO: 54990 - protein, 12 aa, Homo sapiens
  CDR3 for beta chain variable domain of TCR clone 27495 (TRBV7-8, TRBJ2-7)
CASSLGDREQYF

SEQ ID NO: 54991 - protein, 15 aa, Homo sapiens
  CDR3 for alpha chain variable domain of TCR clone 27496 (TRAV13-1, TRAJ49)
CATSTEGNTGNQFYF

SEQ ID NO: 54992 - protein, 12 aa, Homo sapiens
  CDR3 for beta chain variable domain of TCR clone 27496 (TRBV11-2, TRBJ2-2)
CASSLGGGELFF

SEQ ID NO: 54993 - protein, 14 aa, Homo sapiens
  CDR3 for alpha chain variable domain of TCR clone 27497 (TRAV9-2, TRAJ39)
CALYIYNAGNMLTL

SEQ ID NO: 54994 - protein, 14 aa, Homo sapiens
  CDR3 for beta chain variable domain of TCR clone 27497 (TRBV6-1, TRBJ1-3)
CASVQGGGGNTIYF

SEQ ID NO: 54995 - protein, 13 aa, Homo sapiens
  CDR3 for alpha chain variable domain of TCR clone 27498 (TRAV13-1, TRAJ21)
CAASIYNFNKFYF

SEQ ID NO: 54996 - protein, 13 aa, Homo sapiens
  CDR3 for beta chain variable domain of TCR clone 27498 (TRBV27, TRBJ1-4)
YASSLMGDEKLFF

SEQ ID NO: 54997 - protein, 15 aa, Homo sapiens
  CDR3 for alpha chain variable domain of TCR clone 27499 (TRAV26-1, TRAJ29)
CIVRVEGSGNTPLVF

SEQ ID NO: 54998 - protein, 15 aa, Homo sapiens
  CDR3 for beta chain variable domain of TCR clone 27499 (TRBV7-9, TRBJ1-5)
CASSQGHQPNQPQLF

SEQ ID NO: 54999 - protein, 16 aa, Homo sapiens
  CDR3 for alpha chain variable domain of TCR clone 27500 (TRAV3, TRAJ10)
CAVRDMRAGGGNKLTF

SEQ ID NO: 55000 - protein, 14 aa, Homo sapiens
  CDR3 for beta chain variable domain of TCR clone 27500 (TRBV19, TRBJ2-2)
CASSGQGIAGELFF

SEQ ID NO: 55001 - protein, 16 aa, Homo sapiens
  CDR3 for alpha chain variable domain of TCR clone 27501 (TRAV1-2, TRAJ10)
CAVRGVLTGGGNKLTF

SEQ ID NO: 55002 - protein, 12 aa, Homo sapiens
  CDR3 for beta chain variable domain of TCR clone 27501 (TRBV28, TRBJ2-3)
CASSLYRDTQYF

SEQ ID NO: 55003 - protein, 17 aa, Homo sapiens
  CDR3 for alpha chain variable domain of TCR clone 27502 (TRAV17, TRAJ7)
CTTLGRLAFGKGNQVVV

SEQ ID NO: 55004 - protein, 13 aa, Homo sapiens
  CDR3 for beta chain variable domain of TCR clone 27502 (TRBV12-4, TRBJ2-7)
CASSLERVREQYF

SEQ ID NO: 55005 - protein, 13 aa, Homo sapiens
  CDR3 for alpha chain variable domain of TCR clone 27503 (TRAV29/DV5, TRAJ31)
CAASRNNNARLMF

SEQ ID NO: 55006 - protein, 13 aa, Homo sapiens
  CDR3 for beta chain variable domain of TCR clone 27503 (TRBV7-2, TRBJ1-1)
CASNLKGAKVAFF

SEQ ID NO: 55007 - protein, 16 aa, Homo sapiens
  CDR3 for alpha chain variable domain of TCR clone 27504 (TRAV3, TRAJ28)
CTVLPRSGAGSYQLTF

SEQ ID NO: 55008 - protein, 13 aa, Homo sapiens
  CDR3 for beta chain variable domain of TCR clone 27504 (TRBV12-4, TRBJ2-5)
CASRLAVQETQYF

SEQ ID NO: 55009 - protein, 14 aa, Homo sapiens
  CDR3 for alpha chain variable domain of TCR clone 27505 (TRAV16, TRAJ17)
FALSGRAAGNKLTF

SEQ ID NO: 55010 - protein, 15 aa, Homo sapiens
  CDR3 for beta chain variable domain of TCR clone 27505 (TRBV3-1, TRBJ1-2)
CASSPTRLPEGGYTF

SEQ ID NO: 55011 - protein, 16 aa, Homo sapiens
  CDR3 for alpha chain variable domain of TCR clone 27506 (TRAV8-3, TRAJ13)
CAVGAYPSGGYQKVTS

SEQ ID NO: 55012 - protein, 15 aa, Homo sapiens
  CDR3 for beta chain variable domain of TCR clone 27506 (TRBV19, TRBJ1-5)
CASSIVWADNQPQHF

SEQ ID NO: 55013 - protein, 11 aa, Homo sapiens
  CDR3 for alpha chain variable domain of TCR clone 27507 (TRAV12-1, TRAJ34)
CVVNKGRELIF

SEQ ID NO: 55014 - protein, 12 aa, Homo sapiens
  CDR3 for beta chain variable domain of TCR clone 27507 (TRBV2, TRBJ2-1)
CAYGTPGNEQFF

SEQ ID NO: 55015 - protein, 14 aa, Homo sapiens
  CDR3 for alpha chain variable domain of TCR clone 27508 (TRAV26-1, TRAJ26)
CIVRATFLGQNFVF

SEQ ID NO: 55016 - protein, 14 aa, Homo sapiens
  CDR3 for beta chain variable domain of TCR clone 27508 (TRBV12-4, TRBJ2-5)
RASSLWQKQETQYF

SEQ ID NO: 55017 - protein, 15 aa, Homo sapiens
  CDR3 for alpha chain variable domain of TCR clone 27509 (TRAV3, TRAJ22)
CAVRDRGGSARQLTF

SEQ ID NO: 55018 - protein, 14 aa, Homo sapiens
  CDR3 for beta chain variable domain of TCR clone 27509 (TRBV12-4, TRBJ1-1)
CASSLGTGGTEAFF

SEQ ID NO: 55019 - protein, 14 aa, Homo sapiens
  CDR3 for alpha chain variable domain of TCR clone 27510 (TRAV12-3, TRAJ42)
CAMNYGGSRGNLIF

SEQ ID NO: 55020 - protein, 15 aa, Homo sapiens
  CDR3 for beta chain variable domain of TCR clone 27510 (TRBV5-7, TRBJ1-5)
CASSYGKLWDQPQHF

SEQ ID NO: 55021 - protein, 14 aa, Homo sapiens
  CDR3 for alpha chain variable domain of TCR clone 27511 (TRAV9-2, TRAJ9)
CALSLIGGGFKTIF

SEQ ID NO: 55022 - protein, 18 aa, Homo sapiens
  CDR3 for beta chain variable domain of TCR clone 27511 (TRBV28, TRBJ2-6)
CACSLAGRAVSGANVLTF

SEQ ID NO: 55023 - protein, 16 aa, Homo sapiens
  CDR3 for alpha chain variable domain of TCR clone 27512 (TRAV3, TRAJ37)
CAVRPHGYGNTGKLIF

SEQ ID NO: 55024 - protein, 16 aa, Homo sapiens
  CDR3 for beta chain variable domain of TCR clone 27512 (TRBV9, TRBJ1-2)
CASSVEEKVSPYGYTF

SEQ ID NO: 55025 - protein, 20 aa, Homo sapiens
  CDR3 for alpha chain variable domain of TCR clone 27513 (TRAV12-3, TRAJ17)
SPVIQPPTSAMTLTGNKLTF

SEQ ID NO: 55026 - protein, 15 aa, Homo sapiens
  CDR3 for beta chain variable domain of TCR clone 27513 (TRBV20-1, TRBJ2-7)
CSARDRVSGMDEQYF

SEQ ID NO: 55027 - protein, 16 aa, Homo sapiens
  CDR3 for alpha chain variable domain of TCR clone 27514 (TRAV12-2, TRAJ10)
CAVNRVLTGGGSKLTF

SEQ ID NO: 55028 - protein, 17 aa, Homo sapiens
  CDR3 for beta chain variable domain of TCR clone 27514 (TRBV11-2, TRBJ2-1)
CASSLYPPGVEYNEQFF

SEQ ID NO: 55029 - protein, 14 aa, Homo sapiens
  CDR3 for alpha chain variable domain of TCR clone 27515 (TRAV8-3, TRAJ9)
CAVVYNTGGIKTIF

SEQ ID NO: 55030 - protein, 14 aa, Homo sapiens
  CDR3 for beta chain variable domain of TCR clone 27515 (TRBV7-3, TRBJ2-2)
CASSSGGYTGELFF

SEQ ID NO: 55031 - protein, 14 aa, Homo sapiens
  CDR3 for alpha chain variable domain of TCR clone 27516 (TRAV13-1, TRAJ35)
CAASKGGFGNVLHC

SEQ ID NO: 55032 - protein, 14 aa, Homo sapiens
  CDR3 for beta chain variable domain of TCR clone 27516 (TRBV7-2, TRBJ1-1)
CASSFLTGTTEAFF

SEQ ID NO: 55033 - protein, 12 aa, Homo sapiens
  CDR3 for alpha chain variable domain of TCR clone 27517 (TRAV13-1, TRAJ48)
CAANFGNEKLTF

SEQ ID NO: 55034 - protein, 14 aa, Homo sapiens
  CDR3 for beta chain variable domain of TCR clone 27517 (TRBV5-1, TRBJ2-7)
CASSRGESLYEQYF

SEQ ID NO: 55035 - protein, 16 aa, Homo sapiens
  CDR3 for alpha chain variable domain of TCR clone 27518 (TRAV30, TRAJ24)
CGTEIVDADSWGKFQF

SEQ ID NO: 55036 - protein, 12 aa, Homo sapiens
  CDR3 for beta chain variable domain of TCR clone 27518 (TRBV11-2, TRBJ2-2)
CASSLGGRELFF

SEQ ID NO: 55037 - protein, 14 aa, Homo sapiens
  CDR3 for alpha chain variable domain of TCR clone 27519 (TRAV21, TRAJ35)
CDVMPIGFGNVLHC

SEQ ID NO: 55038 - protein, 12 aa, Homo sapiens
  CDR3 for beta chain variable domain of TCR clone 27519 (TRBV7-9, TRBJ2-7)
CASSIKREEQYF

SEQ ID NO: 55039 - protein, 15 aa, Homo sapiens
  CDR3 for alpha chain variable domain of TCR clone 27520 (TRAV12-3, TRAJ11)
CAMSGENSGYSTLTF

SEQ ID NO: 55040 - protein, 16 aa, Homo sapiens
  CDR3 for beta chain variable domain of TCR clone 27520 (TRBV5-1, TRBJ2-7)
CASSLEGLAGLYEQYF

SEQ ID NO: 55041 - protein, 12 aa, Homo sapiens
  CDR3 for alpha chain variable domain of TCR clone 27521 (TRAV16, TRAJ12)
CAHGDSSYKLIF

SEQ ID NO: 55042 - protein, 12 aa, Homo sapiens
  CDR3 for beta chain variable domain of TCR clone 27521 (TRBV28, TRBJ2-1)
CASSRLVGEQFL

SEQ ID NO: 55043 - protein, 14 aa, Homo sapiens
  CDR3 for alpha chain variable domain of TCR clone 27522 (TRAV12-2, TRAJ17)
CAALFKAAGNKLTF

SEQ ID NO: 55044 - protein, 13 aa, Homo sapiens
  CDR3 for beta chain variable domain of TCR clone 27522 (TRBV12-4, TRBJ2-5)
CASSPGTEETQYF

SEQ ID NO: 55045 - protein, 17 aa, Homo sapiens
  CDR3 for alpha chain variable domain of TCR clone 27523 (TRAV12-2, TRAJ36)
CAVKDNLFFGTGTRLTV

SEQ ID NO: 55046 - protein, 15 aa, Homo sapiens
  CDR3 for beta chain variable domain of TCR clone 27523 (TRBV28, TRBJ2-2)
CASTVAGADTGELFF

SEQ ID NO: 55047 - protein, 17 aa, Homo sapiens
  CDR3 for alpha chain variable domain of TCR clone 27524 (TRAV13-1, TRAJ28)
CAASPPYSGAGSYQLTF

SEQ ID NO: 55048 - protein, 15 aa, Homo sapiens
  CDR3 for beta chain variable domain of TCR clone 27524 (TRBV6-3, TRBJ2-2)
CASSFLATPTGELFF

SEQ ID NO: 55049 - protein, 11 aa, Homo sapiens
  CDR3 for alpha chain variable domain of TCR clone 27525 (TRAV12-3, TRAJ43)
CAMSVSNDMRF

SEQ ID NO: 55050 - protein, 11 aa, Homo sapiens
  CDR3 for beta chain variable domain of TCR clone 27525 (TRBV19, TRBJ1-1)
CASSIGSEAFF

SEQ ID NO: 55051 - protein, 12 aa, Homo sapiens
  CDR3 for alpha chain variable domain of TCR clone 27526 (TRAV21, TRAJ49)
CAVTNTGNQFYF

SEQ ID NO: 55052 - protein, 17 aa, Homo sapiens
  CDR3 for beta chain variable domain of TCR clone 27526 (TRBV13, TRBJ2-3)
CARSLSRVAGGRNTQYF

SEQ ID NO: 55053 - protein, 15 aa, Homo sapiens
  CDR3 for alpha chain variable domain of TCR clone 27527 (TRAV3, TRAJ13)
RAVRVYSGGYQKVTF

SEQ ID NO: 55054 - protein, 15 aa, Homo sapiens
  CDR3 for beta chain variable domain of TCR clone 27527 (TRBV5-7, TRBJ1-2)
CASSLGVAANYGYTF

SEQ ID NO: 55055 - protein, 14 aa, Homo sapiens
  CDR3 for alpha chain variable domain of TCR clone 27528 (TRAV1-2, TRAJ8)
CAVREDTGFQKLVF

SEQ ID NO: 55056 - protein, 16 aa, Homo sapiens
  CDR3 for beta chain variable domain of TCR clone 27528 (TRBV7-9, TRBJ2-3)
CASSPWREVGTDTQYF

SEQ ID NO: 55057 - protein, 12 aa, Homo sapiens
  CDR3 for alpha chain variable domain of TCR clone 27529 (TRAV27, TRAJ36)
CAGMTGANNLFF

SEQ ID NO: 55058 - protein, 14 aa, Homo sapiens
  CDR3 for beta chain variable domain of TCR clone 27529 (TRBV12-4, TRBJ2-3)
CASSLVHSTDTQYF

SEQ ID NO: 55059 - protein, 17 aa, Homo sapiens
  CDR3 for alpha chain variable domain of TCR clone 27530 (TRAV13-1, TRAJ52)
CAAGRNAGGTGYGKLTF

SEQ ID NO: 55060 - protein, 13 aa, Homo sapiens
  CDR3 for beta chain variable domain of TCR clone 27530 (TRBV7-2, TRBJ1-1)
CASNLKGAKVAFF

SEQ ID NO: 55061 - protein, 14 aa, Homo sapiens
  CDR3 for alpha chain variable domain of TCR clone 27531 (TRAV12-1, TRAJ23)
CAVIVYNQGGKLIF

SEQ ID NO: 55062 - protein, 15 aa, Homo sapiens
  CDR3 for beta chain variable domain of TCR clone 27531 (TRBV20-1, TRBJ1-5)
CSAKPPGQGPQPQHF

SEQ ID NO: 55063 - protein, 15 aa, Homo sapiens
  CDR3 for alpha chain variable domain of TCR clone 27532 (TRAV8-3, TRAJ27)
CAVGPSKTNAGKSTF

SEQ ID NO: 55064 - protein, 12 aa, Homo sapiens
  CDR3 for beta chain variable domain of TCR clone 27532 (TRBV7-8, TRBJ2-7)
CASSLGDREQYF

SEQ ID NO: 55065 - protein, 12 aa, Homo sapiens
  CDR3 for alpha chain variable domain of TCR clone 27533 (TRAV12-1, TRAJ40)
CVVNGETYKYTF

SEQ ID NO: 55066 - protein, 14 aa, Homo sapiens
  CDR3 for beta chain variable domain of TCR clone 27533 (TRBV7-9, TRBJ1-1)
CASSSTKGNTEAFF

SEQ ID NO: 55067 - protein, 15 aa, Homo sapiens
  CDR3 for alpha chain variable domain of TCR clone 27534 (TRAV8-3, TRAJ45)
CASSYSGGGADGLTF

SEQ ID NO: 55068 - protein, 13 aa, Homo sapiens
  CDR3 for beta chain variable domain of TCR clone 27534 (TRBV7-2, TRBJ2-2)
CASSSVRAGELFF

SEQ ID NO: 55069 - protein, 15 aa, Homo sapiens
  CDR3 for alpha chain variable domain of TCR clone 27535 (TRAV21, TRAJ24)
CAARSSTHSWGKLQF

SEQ ID NO: 55070 - protein, 13 aa, Homo sapiens
  CDR3 for beta chain variable domain of TCR clone 27535 (TRBV11-2, TRBJ2-5)
CASSSTGEETQYF

SEQ ID NO: 55071 - protein, 13 aa, Homo sapiens
  CDR3 for alpha chain variable domain of TCR clone 27536 (TRAV1-1, TRAJ9)
CAAKNTGGFKTIF

SEQ ID NO: 55072 - protein, 14 aa, Homo sapiens
  CDR3 for beta chain variable domain of TCR clone 27536 (TRBV20-1, TRBJ2-1)
CSARIGGSANEQFF

SEQ ID NO: 55073 - protein, 12 aa, Homo sapiens
  CDR3 for alpha chain variable domain of TCR clone 27537 (TRAV13-1, TRAJ53)
CAAGGSNYKPTF

SEQ ID NO: 55074 - protein, 11 aa, Homo sapiens
  CDR3 for beta chain variable domain of TCR clone 27537 (TRBV2, TRBJ1-1)
CASREGTEAFF

SEQ ID NO: 55075 - protein, 11 aa, Homo sapiens
  CDR3 for alpha chain variable domain of TCR clone 27538 (TRAV8-3, TRAJ15)
CAVGPGTALIF

SEQ ID NO: 55076 - protein, 18 aa, Homo sapiens
  CDR3 for beta chain variable domain of TCR clone 27538 (TRBV18, TRBJ2-3)
CASSYTGGAAGGTDTQYF

SEQ ID NO: 55077 - protein, 16 aa, Homo sapiens
  CDR3 for alpha chain variable domain of TCR clone 27539 (TRAV20, TRAJ10)
CAVLRGLTGGGNKLTF

SEQ ID NO: 55078 - protein, 14 aa, Homo sapiens
  CDR3 for beta chain variable domain of TCR clone 27539 (TRBV19, TRBJ1-5)
CASRAPDSFRSQHF

SEQ ID NO: 55079 - protein, 13 aa, Homo sapiens
  CDR3 for alpha chain variable domain of TCR clone 27540 (TRAV2, TRAJ40)
CAVVTSGTYKYIF

SEQ ID NO: 55080 - protein, 14 aa, Homo sapiens
  CDR3 for beta chain variable domain of TCR clone 27540 (TRBV19, TRBJ2-1)
CATPTFVLSGEQFF

SEQ ID NO: 55081 - protein, 13 aa, Homo sapiens
  CDR3 for alpha chain variable domain of TCR clone 27541 (TRAV27, TRAJ41)
CAGEGNSGYALNF

SEQ ID NO: 55082 - protein, 14 aa, Homo sapiens
  CDR3 for beta chain variable domain of TCR clone 27541 (TRBV7-2, TRBJ1-1)
CASIFLTGTTEAFF

SEQ ID NO: 55083 - protein, 15 aa, Homo sapiens
  CDR3 for alpha chain variable domain of TCR clone 27542 (TRAV3, TRAJ22)
CAVRDRGCSARQLTF

SEQ ID NO: 55084 - protein, 16 aa, Homo sapiens
  CDR3 for beta chain variable domain of TCR clone 27542 (TRBV5-4, TRBJ2-3)
CASQQPGAGGADTQYF

SEQ ID NO: 55085 - protein, 15 aa, Homo sapiens
  CDR3 for alpha chain variable domain of TCR clone 27543 (TRAV17, TRAJ57)
CATGPSQGGSEKLVF

SEQ ID NO: 55086 - protein, 13 aa, Homo sapiens
  CDR3 for beta chain variable domain of TCR clone 27543 (TRBV19, TRBJ1-2)
CASSVPGQDGYTF

SEQ ID NO: 55087 - protein, 13 aa, Homo sapiens
  CDR3 for alpha chain variable domain of TCR clone 27544 (TRAV17, TRAJ9)
CATAITGGFKTIF

SEQ ID NO: 55088 - protein, 16 aa, Homo sapiens
  CDR3 for beta chain variable domain of TCR clone 27544 (TRBV15, TRBJ2-1)
CATSRNLAGGHNEQFF

SEQ ID NO: 55089 - protein, 17 aa, Homo sapiens
  CDR3 for alpha chain variable domain of TCR clone 27545 (TRAV23/DV6, TRAJ57)
RAASSTLSQGGSEKLVF

SEQ ID NO: 55090 - protein, 14 aa, Homo sapiens
  CDR3 for beta chain variable domain of TCR clone 27545 (TRBV25-1, TRBJ1-1)
CASTHLGGNTEAFF

SEQ ID NO: 55091 - protein, 14 aa, Homo sapiens
  CDR3 for alpha chain variable domain of TCR clone 27546 (TRAV12-2, TRAJ13)
CAVKKTGGYQKVTF

SEQ ID NO: 55092 - protein, 15 aa, Homo sapiens
  CDR3 for beta chain variable domain of TCR clone 27546 (TRBV19, TRBJ1-5)
CASSILTGENQPQHF

SEQ ID NO: 55093 - protein, 16 aa, Homo sapiens
  CDR3 for alpha chain variable domain of TCR clone 27547 (TRAV14/DV4, TRAJ11)
CAMREGGNSGYSTLTF

SEQ ID NO: 55094 - protein, 15 aa, Homo sapiens
  CDR3 for beta chain variable domain of TCR clone 27547 (TRBV9, TRBJ1-6)
CASSVAGTGDSPLHF

SEQ ID NO: 55095 - protein, 14 aa, Homo sapiens
  CDR3 for alpha chain variable domain of TCR clone 27548 (TRAV26-1, TRAJ48)
CIVRVGFGNEKLTF

SEQ ID NO: 55096 - protein, 13 aa, Homo sapiens
  CDR3 for beta chain variable domain of TCR clone 27548 (TRBV11-3, TRBJ2-3)
CASSHNTKDTQYF

SEQ ID NO: 55097 - protein, 14 aa, Homo sapiens
  CDR3 for alpha chain variable domain of TCR clone 27549 (TRAV1-2, TRAJ8)
CAVREDTGFQRLVF

SEQ ID NO: 55098 - protein, 16 aa, Homo sapiens
  CDR3 for beta chain variable domain of TCR clone 27549 (TRBV4-3, TRBJ2-1)
CASSPALDRGVNEQFF

SEQ ID NO: 55099 - protein, 14 aa, Homo sapiens
  CDR3 for alpha chain variable domain of TCR clone 27550 (TRAV1-1, TRAJ23)
CAVSIYNQGGKLIF

SEQ ID NO: 55100 - protein, 13 aa, Homo sapiens
  CDR3 for beta chain variable domain of TCR clone 27550 (TRBV7-9, TRBJ1-2)
CASSLKQNYGYTF

SEQ ID NO: 55101 - protein, 16 aa, Homo sapiens
  CDR3 for alpha chain variable domain of TCR clone 27551 (TRAV12-2, TRAJ10)
CAVNRVLTGGGNKLTF

SEQ ID NO: 55102 - protein, 12 aa, Homo sapiens
  CDR3 for beta chain variable domain of TCR clone 27551 (TRBV28, TRBJ2-7)
CASSCSSYEQYF

SEQ ID NO: 55103 - protein, 18 aa, Homo sapiens
  CDR3 for alpha chain variable domain of TCR clone 27552 (TRAV21, TRAJ52)
CAVRPSPAGGTSYGKLTF

SEQ ID NO: 55104 - protein, 15 aa, Homo sapiens
  CDR3 for beta chain variable domain of TCR clone 27552 (TRBV27, TRBJ2-7)
CASSTAGTGSYEQYF

SEQ ID NO: 55105 - protein, 15 aa, Homo sapiens
  CDR3 for alpha chain variable domain of TCR clone 27553 (TRAV38-1, TRAJ37)
CAFIHGSGNKGKLIF

SEQ ID NO: 55106 - protein, 12 aa, Homo sapiens
  CDR3 for beta chain variable domain of TCR clone 27553 (TRBV7-9, TRBJ2-7)
CASSFGSYEQYF

SEQ ID NO: 55107 - protein, 14 aa, Homo sapiens
  CDR3 for alpha chain variable domain of TCR clone 27554 (TRAV8-2, TRAJ4)
CVVSPSGGYNKLIL

SEQ ID NO: 55108 - protein, 15 aa, Homo sapiens
  CDR3 for beta chain variable domain of TCR clone 27554 (TRBV4-1, TRBJ1-4)
CASSDTGGTNEKLFF

SEQ ID NO: 55109 - protein, 14 aa, Homo sapiens
  CDR3 for alpha chain variable domain of TCR clone 27555 (TRAV38-1, TRAJ45)
CAYYSGGGADGLAF

SEQ ID NO: 55110 - protein, 20 aa, Homo sapiens
  CDR3 for beta chain variable domain of TCR clone 27555 (TRBV28, TRBJ2-1)
CASTPIGRSPGLAGGNEQFF

SEQ ID NO: 55111 - protein, 15 aa, Homo sapiens
  CDR3 for alpha chain variable domain of TCR clone 27556 (TRAV2, TRAJ42)
CAVEGYGGSQGNLIF

SEQ ID NO: 55112 - protein, 14 aa, Homo sapiens
  CDR3 for beta chain variable domain of TCR clone 27556 (TRBV11-3, TRBJ2-7)
CASSPDRNTYEQYL

SEQ ID NO: 55113 - protein, 20 aa, Homo sapiens
  CDR3 for alpha chain variable domain of TCR clone 27557 (TRAV26-1, TRAJ42)
CCVLLHRQTYYGESQGNLIF

SEQ ID NO: 55114 - protein, 16 aa, Homo sapiens
  CDR3 for beta chain variable domain of TCR clone 27557 (TRBV7-3, TRBJ2-2)
CASSLKRGTLSGELFF

SEQ ID NO: 55115 - protein, 14 aa, Homo sapiens
  CDR3 for alpha chain variable domain of TCR clone 27558 (TRAV19, TRAJ20)
CALSEAPRGRTTTS

SEQ ID NO: 55116 - protein, 15 aa, Homo sapiens
  CDR3 for beta chain variable domain of TCR clone 27558 (TRBV10-3, TRBJ2-3)
CAISLTSGGTDTRYF

SEQ ID NO: 55117 - protein, 10 aa, Homo sapiens
  CDR3 for alpha chain variable domain of TCR clone 27559 (TRAV1-2, TRAJ23)
CAGQGGKLIF

SEQ ID NO: 55118 - protein, 19 aa, Homo sapiens
  CDR3 for beta chain variable domain of TCR clone 27559 (TRBV11-1, TRBJ2-1)
CASSSLGTGGFTLDNEQFF

SEQ ID NO: 55119 - protein, 14 aa, Homo sapiens
  CDR3 for alpha chain variable domain of TCR clone 27560 (TRAV12-2, TRAJ5)
CAVTRSTGRRALTF

SEQ ID NO: 55120 - protein, 12 aa, Homo sapiens
  CDR3 for beta chain variable domain of TCR clone 27560 (TRBV19, TRBJ1-5)
CASSIAQQPQHF

SEQ ID NO: 55121 - protein, 11 aa, Homo sapiens
  CDR3 for alpha chain variable domain of TCR clone 27561 (TRAV17, TRAJ9)
CGFTGGFKTIF

SEQ ID NO: 55122 - protein, 14 aa, Homo sapiens
  CDR3 for beta chain variable domain of TCR clone 27561 (TRBV7-9, TRBJ2-2)
CASSVVQDTGELFF

SEQ ID NO: 55123 - protein, 15 aa, Homo sapiens
  CDR3 for alpha chain variable domain of TCR clone 27562 (TRAV12-1, TRAJ44)
CVVFVNTGTASKLTF

SEQ ID NO: 55124 - protein, 16 aa, Homo sapiens
  CDR3 for beta chain variable domain of TCR clone 27562 (TRBV7-3, TRBJ2-5)
CASSLMGGASQETQYF

SEQ ID NO: 55125 - protein, 13 aa, Homo sapiens
  CDR3 for alpha chain variable domain of TCR clone 27563 (TRAV29/DV5, TRAJ31)
CAASRNNNARLMF

SEQ ID NO: 55126 - protein, 12 aa, Homo sapiens
  CDR3 for beta chain variable domain of TCR clone 27563 (TRBV14, TRBJ2-5)
CASSQLKEAQYF

SEQ ID NO: 55127 - protein, 14 aa, Homo sapiens
  CDR3 for alpha chain variable domain of TCR clone 27564 (TRAV13-1, TRAJ44)
CAAKATGTASKLTF

SEQ ID NO: 55128 - protein, 17 aa, Homo sapiens
  CDR3 for beta chain variable domain of TCR clone 27564 (TRBV7-3, TRBJ2-3)
CASSLMKRMRGADTKYF

SEQ ID NO: 55129 - protein, 15 aa, Homo sapiens
  CDR3 for alpha chain variable domain of TCR clone 27565 (TRAV13-2, TRAJ45)
CAESDSGGGADGLTF

SEQ ID NO: 55130 - protein, 14 aa, Homo sapiens
  CDR3 for beta chain variable domain of TCR clone 27565 (TRBV19, TRBJ2-2)
CASSTLHRSGELFF

SEQ ID NO: 55131 - protein, 14 aa, Homo sapiens
  CDR3 for alpha chain variable domain of TCR clone 27566 (TRAV1-2, TRAJ16)
CAVNRFSDGQELLF

SEQ ID NO: 55132 - protein, 14 aa, Homo sapiens
  CDR3 for beta chain variable domain of TCR clone 27566 (TRBV6-1, TRBJ2-2)
CASTWQGNTGELFF

SEQ ID NO: 55133 - protein, 16 aa, Homo sapiens
  CDR3 for alpha chain variable domain of TCR clone 27567 (TRAV1-2, TRAJ10)
CAVRGVLTGGENKLTF

SEQ ID NO: 55134 - protein, 12 aa, Homo sapiens
  CDR3 for beta chain variable domain of TCR clone 27567 (TRBV7-8, TRBJ2-7)
CASSLGDREQYF

SEQ ID NO: 55135 - protein, 14 aa, Homo sapiens
  CDR3 for alpha chain variable domain of TCR clone 27568 (TRAV3, TRAJ28)
CAVSRGAGSYQLTF

SEQ ID NO: 55136 - protein, 16 aa, Homo sapiens
  CDR3 for beta chain variable domain of TCR clone 27568 (TRBV4-1, TRBJ2-7)
CASSQEWTSGPLEQYF

SEQ ID NO: 55137 - protein, 14 aa, Homo sapiens
  CDR3 for alpha chain variable domain of TCR clone 27569 (TRAV38-1, TRAJ45)
CASHSGGGADGLTF

SEQ ID NO: 55138 - protein, 13 aa, Homo sapiens
  CDR3 for beta chain variable domain of TCR clone 27569 (TRBV10-3, TRBJ1-2)
CAISERDGYGYTF

SEQ ID NO: 55139 - protein, 14 aa, Homo sapiens
  CDR3 for alpha chain variable domain of TCR clone 27570 (TRAV35, TRAJ22)
CAGLRPGSARQLTF

SEQ ID NO: 55140 - protein, 15 aa, Homo sapiens
  CDR3 for beta chain variable domain of TCR clone 27570 (TRBV12-4, TRBJ2-5)
CASSPPKGLQETQYF

SEQ ID NO: 55141 - protein, 11 aa, Homo sapiens
  CDR3 for alpha chain variable domain of TCR clone 27571 (TRAV2, TRAJ21)
CAVFNFNKFYF

SEQ ID NO: 55142 - protein, 14 aa, Homo sapiens
  CDR3 for beta chain variable domain of TCR clone 27571 (TRBV15, TRBJ2-3)
CATRSGTSTDAQYF

SEQ ID NO: 55143 - protein, 13 aa, Homo sapiens
  CDR3 for alpha chain variable domain of TCR clone 27572 (TRAV21, TRAJ27)
CADLNTNAGKSTF

SEQ ID NO: 55144 - protein, 14 aa, Homo sapiens
  CDR3 for beta chain variable domain of TCR clone 27572 (TRBV27, TRBJ1-1)
CASSLLSGLSEAFF

SEQ ID NO: 55145 - protein, 18 aa, Homo sapiens
  CDR3 for alpha chain variable domain of TCR clone 27573 (TRAV29/DV5, TRAJ52)
CAAGLRGAGGTSYGKLTF

SEQ ID NO: 55146 - protein, 16 aa, Homo sapiens
  CDR3 for beta chain variable domain of TCR clone 27573 (TRBV7-3, TRBJ2-2)
CASSLKRGTLSGELFF

SEQ ID NO: 55147 - protein, 12 aa, Homo sapiens
  CDR3 for alpha chain variable domain of TCR clone 27574 (TRAV8-3, TRAJ6)
CAVVGRKLHTYI

SEQ ID NO: 55148 - protein, 14 aa, Homo sapiens
  CDR3 for beta chain variable domain of TCR clone 27574 (TRBV5-1, TRBJ2-7)
CASSRGESLYEQYF

SEQ ID NO: 55149 - protein, 15 aa, Homo sapiens
  CDR3 for alpha chain variable domain of TCR clone 27575 (TRAV12-3, TRAJ11)
CAMSEENSGYSTLTF

SEQ ID NO: 55150 - protein, 12 aa, Homo sapiens
  CDR3 for beta chain variable domain of TCR clone 27575 (TRBV11-2, TRBJ2-2)
CASSLPTGELFF

SEQ ID NO: 55151 - protein, 13 aa, Homo sapiens
  CDR3 for alpha chain variable domain of TCR clone 27576 (TRAV12-3, TRAJ9)
YAMRNTGGFKTIF

SEQ ID NO: 55152 - protein, 14 aa, Homo sapiens
  CDR3 for beta chain variable domain of TCR clone 27576 (TRBV11-2, TRBJ2-7)
CASSSTGEGYEQYF

SEQ ID NO: 55153 - protein, 14 aa, Homo sapiens
  CDR3 for alpha chain variable domain of TCR clone 27577 (TRAV12-3, TRAJ29)
CAIILLSGNTPLVF

SEQ ID NO: 55154 - protein, 16 aa, Homo sapiens
  CDR3 for beta chain variable domain of TCR clone 27577 (TRBV28, TRBJ2-7)
CASSSGTSGRGYEQYF

SEQ ID NO: 55155 - protein, 14 aa, Homo sapiens
  CDR3 for alpha chain variable domain of TCR clone 27578 (TRAV26-1, TRAJ34)
CIVRVADNTDKLIF

SEQ ID NO: 55156 - protein, 15 aa, Homo sapiens
  CDR3 for beta chain variable domain of TCR clone 27578 (TRBV20-1, TRBJ2-7)
CSARVPAAYFYEQYF

SEQ ID NO: 55157 - protein, 16 aa, Homo sapiens
  CDR3 for alpha chain variable domain of TCR clone 27579 (TRAV30, TRAJ24)
CGTEIVDADSWGKFQF

SEQ ID NO: 55158 - protein, 15 aa, Homo sapiens
  CDR3 for beta chain variable domain of TCR clone 27579 (TRBV12-4, TRBJ2-7)
CASSQRTSGNYEQYL

SEQ ID NO: 55159 - protein, 16 aa, Homo sapiens
  CDR3 for alpha chain variable domain of TCR clone 27580 (TRAV16, TRAJ21)
CACGWATTSTNFTLDL

SEQ ID NO: 55160 - protein, 15 aa, Homo sapiens
  CDR3 for beta chain variable domain of TCR clone 27580 (TRBV19, TRBJ2-1)
CASSIQATSYNEQSF

SEQ ID NO: 55161 - protein, 13 aa, Homo sapiens
  CDR3 for alpha chain variable domain of TCR clone 27581 (TRAV13-1, TRAJ21)
CAASIYNFNKFYF

SEQ ID NO: 55162 - protein, 17 aa, Homo sapiens
  CDR3 for beta chain variable domain of TCR clone 27581 (TRBV13, TRBJ2-3)
CASSLSRVAGGRNTQYF

SEQ ID NO: 55163 - protein, 14 aa, Homo sapiens
  CDR3 for alpha chain variable domain of TCR clone 27582 (TRAV17, TRAJ22)
CATSPSGSARQLTF

SEQ ID NO: 55164 - protein, 15 aa, Homo sapiens
  CDR3 for beta chain variable domain of TCR clone 27582 (TRBV4-1, TRBJ2-5)
CASSQWDLYRETQYF

SEQ ID NO: 55165 - protein, 14 aa, Homo sapiens
  CDR3 for alpha chain variable domain of TCR clone 27583 (TRAV12-3, TRAJ10)
SHLPLTGGGNKLSF

SEQ ID NO: 55166 - protein, 14 aa, Homo sapiens
  CDR3 for beta chain variable domain of TCR clone 27583 (TRBV6-1, TRBJ1-3)
CASVQGGGGNTIYF

SEQ ID NO: 55167 - protein, 14 aa, Homo sapiens
  CDR3 for alpha chain variable domain of TCR clone 27584 (TRAV9-2, TRAJ39)
CALYIYNAGNMLTF

SEQ ID NO: 55168 - protein, 14 aa, Homo sapiens
  CDR3 for beta chain variable domain of TCR clone 27584 (TRBV7-9, TRBJ2-3)
CASSLEDGTDTQYF

SEQ ID NO: 55169 - protein, 15 aa, Homo sapiens
  CDR3 for alpha chain variable domain of TCR clone 27585 (TRAV3, TRAJ20)
CAVRDIKLSDYKLSF

SEQ ID NO: 55170 - protein, 15 aa, Homo sapiens
  CDR3 for beta chain variable domain of TCR clone 27585 (TRBV7-9, TRBJ1-6)
CASSAPGRGNSPLHF

SEQ ID NO: 55171 - protein, 12 aa, Homo sapiens
  CDR3 for alpha chain variable domain of TCR clone 27586 (TRAV13-2, TRAJ23)
CAERHRGGKLIF

SEQ ID NO: 55172 - protein, 16 aa, Homo sapiens
  CDR3 for beta chain variable domain of TCR clone 27586 (TRBV20-1, TRBJ1-4)
YSAPGQGLLTNEKLFF

SEQ ID NO: 55173 - protein, 15 aa, Homo sapiens
  CDR3 for alpha chain variable domain of TCR clone 27587 (TRAV12-3, TRAJ10)
CASYILTGGGNKLTF

SEQ ID NO: 55174 - protein, 15 aa, Homo sapiens
  CDR3 for beta chain variable domain of TCR clone 27587 (TRBV7-2, TRBJ1-6)
CASSLGPDRGMTLHF

SEQ ID NO: 55175 - protein, 12 aa, Homo sapiens
  CDR3 for alpha chain variable domain of TCR clone 27588 (TRAV8-3, TRAJ20)
CAVGANDYKLSF

SEQ ID NO: 55176 - protein, 16 aa, Homo sapiens
  CDR3 for beta chain variable domain of TCR clone 27588 (TRBV19, TRBJ2-2)
YASRSPGTGATGELFF

SEQ ID NO: 55177 - protein, 14 aa, Homo sapiens
  CDR3 for alpha chain variable domain of TCR clone 27589 (TRAV2, TRAJ37)
CAVDVTSNTGKLIF

SEQ ID NO: 55178 - protein, 15 aa, Homo sapiens
  CDR3 for beta chain variable domain of TCR clone 27589 (TRBV20-1, TRBJ1-1)
CSASRGVTGNTEAFF

SEQ ID NO: 55179 - protein, 16 aa, Homo sapiens
  CDR3 for alpha chain variable domain of TCR clone 27590 (TRAV30, TRAJ24)
CGTEIVDADSWGKFQF

SEQ ID NO: 55180 - protein, 12 aa, Homo sapiens
  CDR3 for beta chain variable domain of TCR clone 27590 (TRBV7-9, TRBJ2-7)
CASSFGSYEQYF

SEQ ID NO: 55181 - protein, 16 aa, Homo sapiens
  CDR3 for alpha chain variable domain of TCR clone 27591 (TRAV3, TRAJ10)
CAVRDMRAGGGNKLTF

SEQ ID NO: 55182 - protein, 14 aa, Homo sapiens
  CDR3 for beta chain variable domain of TCR clone 27591 (TRBV11-2, TRBJ2-5)
CASSRTGGIETQYF

SEQ ID NO: 55183 - protein, 17 aa, Homo sapiens
  CDR3 for alpha chain variable domain of TCR clone 27592 (TRAV17, TRAJ28)
CATDPRRGGAGSYPLTF

SEQ ID NO: 55184 - protein, 16 aa, Homo sapiens
  CDR3 for beta chain variable domain of TCR clone 27592 (TRBV25-1, TRBJ1-1)
CASSGDRDRGRIEAFF

SEQ ID NO: 55185 - protein, 13 aa, Homo sapiens
  CDR3 for alpha chain variable domain of TCR clone 27593 (TRAV12-1, TRAJ29)
CVVNGPGNTPLVF

SEQ ID NO: 55186 - protein, 11 aa, Homo sapiens
  CDR3 for beta chain variable domain of TCR clone 27593 (TRBV27, TRBJ2-7)
CASSLGYEQYF

SEQ ID NO: 55187 - protein, 14 aa, Homo sapiens
  CDR3 for alpha chain variable domain of TCR clone 27594 (TRAV13-1, TRAJ35)
CAASKGGFGNVLHC

SEQ ID NO: 55188 - protein, 15 aa, Homo sapiens
  CDR3 for beta chain variable domain of TCR clone 27594 (TRBV19, TRBJ1-1)
CASTSGQIQNTEAFF

SEQ ID NO: 55189 - protein, 16 aa, Homo sapiens
  CDR3 for alpha chain variable domain of TCR clone 27595 (TRAV30, TRAJ24)
CGTEIVDADSWGKFQL

SEQ ID NO: 55190 - protein, 15 aa, Homo sapiens
  CDR3 for beta chain variable domain of TCR clone 27595 (TRBV20-1, TRBJ2-6)
CSARDRGPGANVLTF

SEQ ID NO: 55191 - protein, 11 aa, Homo sapiens
  CDR3 for alpha chain variable domain of TCR clone 27596 (TRAV2, TRAJ33)
CAVESNYQLIW

SEQ ID NO: 55192 - protein, 14 aa, Homo sapiens
  CDR3 for beta chain variable domain of TCR clone 27596 (TRBV4-1, TRBJ2-2)
CASSQAVNTGELFF

SEQ ID NO: 55193 - protein, 19 aa, Homo sapiens
  CDR3 for alpha chain variable domain of TCR clone 27597 (TRAV2, TRAJ20)
ILQVREADAAVYRDCKLSF

SEQ ID NO: 55194 - protein, 13 aa, Homo sapiens
  CDR3 for beta chain variable domain of TCR clone 27597 (TRBV15, TRBJ1-6)
CATSGGLDSPLHF

SEQ ID NO: 55195 - protein, 15 aa, Homo sapiens
  CDR3 for alpha chain variable domain of TCR clone 27598 (TRAV17, TRAJ57)
CATGPSQGGSEKLVF

SEQ ID NO: 55196 - protein, 15 aa, Homo sapiens
  CDR3 for beta chain variable domain of TCR clone 27598 (TRBV7-9, TRBJ1-6)
CASSSPRRGNSPLHF

SEQ ID NO: 55197 - protein, 17 aa, Homo sapiens
  CDR3 for alpha chain variable domain of TCR clone 27599 (TRAV13-1, TRAJ28)
CAASPPYSRAGSYQLTF

SEQ ID NO: 55198 - protein, 15 aa, Homo sapiens
  CDR3 for beta chain variable domain of TCR clone 27599 (TRBV6-3, TRBJ2-2)
CASSFLATLTGELFF

SEQ ID NO: 55199 - protein, 11 aa, Homo sapiens
  CDR3 for alpha chain variable domain of TCR clone 27600 (TRAV23/DV6, TRAJ58)
CAARLLRGETR

SEQ ID NO: 55200 - protein, 13 aa, Homo sapiens
  CDR3 for beta chain variable domain of TCR clone 27600 (TRBV6-4, TRBJ1-5)
CASSADLNQPQHF

SEQ ID NO: 55201 - protein, 13 aa, Homo sapiens
  CDR3 for alpha chain variable domain of TCR clone 27601 (TRAV8-6, TRAJ13)
CAVSSGGYQEVTF

SEQ ID NO: 55202 - protein, 15 aa, Homo sapiens
  CDR3 for beta chain variable domain of TCR clone 27601 (TRBV7-9, TRBJ2-7)
CASSLPMGQANEQYF

SEQ ID NO: 55203 - protein, 14 aa, Homo sapiens
  CDR3 for alpha chain variable domain of TCR clone 27602 (TRAV12-1, TRAJ17)
CVVNYKAAGNKLTF

SEQ ID NO: 55204 - protein, 15 aa, Homo sapiens
  CDR3 for beta chain variable domain of TCR clone 27602 (TRBV7-2, TRBJ2-1)
CASTHGTGIYNEQSF

SEQ ID NO: 55205 - protein, 11 aa, Homo sapiens
  CDR3 for alpha chain variable domain of TCR clone 27603 (TRAV12-3, TRAJ49)
CAMSSGNQFYF

SEQ ID NO: 55206 - protein, 17 aa, Homo sapiens
  CDR3 for beta chain variable domain of TCR clone 27603 (TRBV5-6, TRBJ2-7)
CASSLWRVLAGSYEQYF

SEQ ID NO: 55207 - protein, 13 aa, Homo sapiens
  CDR3 for alpha chain variable domain of TCR clone 27604 (TRAV21, TRAJ27)
CAARPANAGKSTF

SEQ ID NO: 55208 - protein, 14 aa, Homo sapiens
  CDR3 for beta chain variable domain of TCR clone 27604 (TRBV7-6, TRBJ2-3)
CASSLGTVTDTQYF

SEQ ID NO: 55209 - protein, 18 aa, Homo sapiens
  CDR3 for alpha chain variable domain of TCR clone 27605 (TRAV17, TRAJ45)
CATSLDLYSGGGADGLTF

SEQ ID NO: 55210 - protein, 12 aa, Homo sapiens
  CDR3 for beta chain variable domain of TCR clone 27605 (TRBV29-1, TRBJ2-3)
CSVTGGADTQYF

SEQ ID NO: 55211 - protein, 17 aa, Homo sapiens
  CDR3 for alpha chain variable domain of TCR clone 27606 (TRAV16, TRAJ58)
CITVLSNGEASGSRLTF

SEQ ID NO: 55212 - protein, 13 aa, Homo sapiens
  CDR3 for beta chain variable domain of TCR clone 27606 (TRBV20-1, TRBJ2-2)
CSASAAGTGELFF

SEQ ID NO: 55213 - protein, 15 aa, Homo sapiens
  CDR3 for alpha chain variable domain of TCR clone 27607 (TRAV12-2, TRAJ43)
CAFDMRFGAGTRLTV

SEQ ID NO: 55214 - protein, 13 aa, Homo sapiens
  CDR3 for beta chain variable domain of TCR clone 27607 (TRBV19, TRBJ1-2)
CASSPGTGVGYTF

SEQ ID NO: 55215 - protein, 15 aa, Homo sapiens
  CDR3 for alpha chain variable domain of TCR clone 27608 (TRAV29/DV5, TRAJ29)
CAASERSSGNTPLVF

SEQ ID NO: 55216 - protein, 13 aa, Homo sapiens
  CDR3 for beta chain variable domain of TCR clone 27608 (TRBV10-3, TRBJ1-2)
CAISERDSYGYTF

SEQ ID NO: 55217 - protein, 16 aa, Homo sapiens
  CDR3 for alpha chain variable domain of TCR clone 27609 (TRAV26-1, TRAJ38)
CIVRVELGGNNRKLIW

SEQ ID NO: 55218 - protein, 14 aa, Homo sapiens
  CDR3 for beta chain variable domain of TCR clone 27609 (TRBV5-1, TRBJ2-3)
WASSPGLAADTQYF

SEQ ID NO: 55219 - protein, 12 aa, Homo sapiens
  CDR3 for alpha chain variable domain of TCR clone 27610 (TRAV13-1, TRAJ49)
CAAPNTGNQFYF

SEQ ID NO: 55220 - protein, 17 aa, Homo sapiens
  CDR3 for beta chain variable domain of TCR clone 27610 (TRBV25-1, TRBJ2-7)
CASSDARVVFSSYEQHF

SEQ ID NO: 55221 - protein, 15 aa, Homo sapiens
  CDR3 for alpha chain variable domain of TCR clone 27611 (TRAV21, TRAJ53)
CATLSSGGSNYKLTF

SEQ ID NO: 55222 - protein, 15 aa, Homo sapiens
  CDR3 for beta chain variable domain of TCR clone 27611 (TRBV20-1, TRBJ2-7)
CSARDRVSGMDEQYF

SEQ ID NO: 55223 - protein, 15 aa, Homo sapiens
  CDR3 for alpha chain variable domain of TCR clone 27612 (TRAV8-4, TRAJ37)
CAVSRGPGNTGKLIF

SEQ ID NO: 55224 - protein, 15 aa, Homo sapiens
  CDR3 for beta chain variable domain of TCR clone 27612 (TRBV5-1, TRBJ2-7)
CASSLDLTSSYEQYF

SEQ ID NO: 55225 - protein, 15 aa, Homo sapiens
  CDR3 for alpha chain variable domain of TCR clone 27613 (TRAV12-2, TRAJ53)
CAVNGGGGSNYKLTF

SEQ ID NO: 55226 - protein, 17 aa, Homo sapiens
  CDR3 for beta chain variable domain of TCR clone 27613 (TRBV7-3, TRBJ2-3)
CASSLMKRMRGAETQYF

SEQ ID NO: 55227 - protein, 12 aa, Homo sapiens
  CDR3 for alpha chain variable domain of TCR clone 27614 (TRAV17, TRAJ39)
CATGAAVNMLTF

SEQ ID NO: 55228 - protein, 14 aa, Homo sapiens
  CDR3 for beta chain variable domain of TCR clone 27614 (TRBV7-9, TRBJ1-2)
CASSRQGANYGYTF

SEQ ID NO: 55229 - protein, 14 aa, Homo sapiens
  CDR3 for alpha chain variable domain of TCR clone 27615 (TRAV12-2, TRAJ40)
CAVKIPSGTYKYIF

SEQ ID NO: 55230 - protein, 20 aa, Homo sapiens
  CDR3 for beta chain variable domain of TCR clone 27615 (TRBV28, TRBJ2-1)
SASTPIGRSPGLAGGNEQFF

SEQ ID NO: 55231 - protein, 11 aa, Homo sapiens
  CDR3 for alpha chain variable domain of TCR clone 27616 (TRAV1-2, TRAJ40)
CAVPGTYKYIF

SEQ ID NO: 55232 - protein, 16 aa, Homo sapiens
  CDR3 for beta chain variable domain of TCR clone 27616 (TRBV29-1, TRBJ2-7)
CSVEVVGTSGSYEHYF

SEQ ID NO: 55233 - protein, 14 aa, Homo sapiens
  CDR3 for alpha chain variable domain of TCR clone 27617 (TRAV3, TRAJ21)
CAVRDAYNFNKFYL

SEQ ID NO: 55234 - protein, 15 aa, Homo sapiens
  CDR3 for beta chain variable domain of TCR clone 27617 (TRBV6-5, TRBJ1-5)
CASSYSWDSNQPQHF

SEQ ID NO: 55235 - protein, 11 aa, Homo sapiens
  CDR3 for alpha chain variable domain of TCR clone 27618 (TRAV17, TRAJ31)
CATSNNARLML

SEQ ID NO: 55236 - protein, 16 aa, Homo sapiens
  CDR3 for beta chain variable domain of TCR clone 27618 (TRBV7-8, TRBJ2-4)
CASSAERTLAKNIQYF

SEQ ID NO: 55237 - protein, 14 aa, Homo sapiens
  CDR3 for alpha chain variable domain of TCR clone 27619 (TRAV8-2, TRAJ4)
CVVSPSGGYNKLIF

SEQ ID NO: 55238 - protein, 15 aa, Homo sapiens
  CDR3 for beta chain variable domain of TCR clone 27619 (TRBV20-1, TRBJ2-7)
CSARDRVSGMDEQYF

SEQ ID NO: 55239 - protein, 13 aa, Homo sapiens
  CDR3 for alpha chain variable domain of TCR clone 27620 (TRAV21, TRAJ27)
CAASPGNAGKSTF

SEQ ID NO: 55240 - protein, 16 aa, Homo sapiens
  CDR3 for beta chain variable domain of TCR clone 27620 (TRBV20-1, TRBJ1-2)
CSASMGQGVANYGYTF

SEQ ID NO: 55241 - protein, 14 aa, Homo sapiens
  CDR3 for alpha chain variable domain of TCR clone 27621 (TRAV35, TRAJ22)
CAGLRPGSARQLTF

SEQ ID NO: 55242 - protein, 15 aa, Homo sapiens
  CDR3 for beta chain variable domain of TCR clone 27621 (TRBV12-4, TRBJ2-5)
CASSHPTGLQETQYF

SEQ ID NO: 55243 - protein, 16 aa, Homo sapiens
  CDR3 for alpha chain variable domain of TCR clone 27622 (TRAV27, TRAJ13)
CAGAKSDSGGYQTVTF

SEQ ID NO: 55244 - protein, 15 aa, Homo sapiens
  CDR3 for beta chain variable domain of TCR clone 27622 (TRBV29-1, TRBJ2-1)
CSVGRHALFYNEQFF

SEQ ID NO: 55245 - protein, 14 aa, Homo sapiens
  CDR3 for alpha chain variable domain of TCR clone 27623 (TRAV25, TRAJ45)
CAGNSGGGADGLTF

SEQ ID NO: 55246 - protein, 14 aa, Homo sapiens
  CDR3 for beta chain variable domain of TCR clone 27623 (TRBV29-1, TRBJ1-2)
CSARRGAQTSGYTF

SEQ ID NO: 55247 - protein, 14 aa, Homo sapiens
  CDR3 for alpha chain variable domain of TCR clone 27624 (TRAV12-1, TRAJ17)
CVVNYKAAGNKLTF

SEQ ID NO: 55248 - protein, 17 aa, Homo sapiens
  CDR3 for beta chain variable domain of TCR clone 27624 (TRBV20-1, TRBJ2-1)
CSASSSGLAGSYNERFF

SEQ ID NO: 55249 - protein, 15 aa, Homo sapiens
  CDR3 for alpha chain variable domain of TCR clone 27625 (TRAV17, TRAJ54)
CATTRPEQGAQKLVF

SEQ ID NO: 55250 - protein, 16 aa, Homo sapiens
  CDR3 for beta chain variable domain of TCR clone 27625 (TRBV12-4, TRBJ2-3)
CASSLRLAETTDTQYF

SEQ ID NO: 55251 - protein, 13 aa, Homo sapiens
  CDR3 for alpha chain variable domain of TCR clone 27626 (TRAV35, TRAJ42)
CAGFPGSQGNLIF

SEQ ID NO: 55252 - protein, 13 aa, Homo sapiens
  CDR3 for beta chain variable domain of TCR clone 27626 (TRBV7-9, TRBJ1-2)
CASSLKQNYGYTF

SEQ ID NO: 55253 - protein, 13 aa, Homo sapiens
  CDR3 for alpha chain variable domain of TCR clone 27627 (TRAV38-1, TRAJ42)
CARWGGSQGTLIF

SEQ ID NO: 55254 - protein, 17 aa, Homo sapiens
  CDR3 for beta chain variable domain of TCR clone 27627 (TRBV20-1, TRBJ2-1)
CSARDPLAGVWDNEQFF

SEQ ID NO: 55255 - protein, 16 aa, Homo sapiens
  CDR3 for alpha chain variable domain of TCR clone 27628 (TRAV30, TRAJ24)
CGTEIVDADSWGKFQF

SEQ ID NO: 55256 - protein, 14 aa, Homo sapiens
  CDR3 for beta chain variable domain of TCR clone 27628 (TRBV19, TRBJ2-7)
CASTVQGRPYEQYF

SEQ ID NO: 55257 - protein, 14 aa, Homo sapiens
  CDR3 for alpha chain variable domain of TCR clone 27629 (TRAV13-1, TRAJ44)
CAAKATGTASKLTF

SEQ ID NO: 55258 - protein, 17 aa, Homo sapiens
  CDR3 for beta chain variable domain of TCR clone 27629 (TRBV7-3, TRBJ2-3)
CASSVMKRMRGADTQYF

SEQ ID NO: 55259 - protein, 14 aa, Homo sapiens
  CDR3 for alpha chain variable domain of TCR clone 27630 (TRAV35, TRAJ13)
CAGSPSGGYQKVTF

SEQ ID NO: 55260 - protein, 12 aa, Homo sapiens
  CDR3 for beta chain variable domain of TCR clone 27630 (TRBV14, TRBJ2-4)
CASSNLKSIQYF

SEQ ID NO: 55261 - protein, 14 aa, Homo sapiens
  CDR3 for alpha chain variable domain of TCR clone 27631 (TRAV38-1, TRAJ45)
CAYYSGGGADGRTF

SEQ ID NO: 55262 - protein, 20 aa, Homo sapiens
  CDR3 for beta chain variable domain of TCR clone 27631 (TRBV28, TRBJ2-1)
CASTPIGRSPGLAGGNEQFF

SEQ ID NO: 55263 - protein, 14 aa, Homo sapiens
  CDR3 for alpha chain variable domain of TCR clone 27632 (TRAV26-1, TRAJ38)
CIADHAGNNRKLIW

SEQ ID NO: 55264 - protein, 13 aa, Homo sapiens
  CDR3 for beta chain variable domain of TCR clone 27632 (TRBV20-1, TRBJ1-1)
CSARGGGNTEAFF

SEQ ID NO: 55265 - protein, 10 aa, Homo sapiens
  CDR3 for alpha chain variable domain of TCR clone 27633 (TRAV16, TRAJ39)
CSSAGNMLTF

SEQ ID NO: 55266 - protein, 14 aa, Homo sapiens
  CDR3 for beta chain variable domain of TCR clone 27633 (TRBV27, TRBJ1-4)
CASSLDGGWEKLFF

SEQ ID NO: 55267 - protein, 15 aa, Homo sapiens
  CDR3 for alpha chain variable domain of TCR clone 27634 (TRAV12-3, TRAJ6)
CAMSATTGGSYIPTF

SEQ ID NO: 55268 - protein, 14 aa, Homo sapiens
  CDR3 for beta chain variable domain of TCR clone 27634 (TRBV27, TRBJ1-2)
CASSLRRTNYGYTF

SEQ ID NO: 55269 - protein, 12 aa, Homo sapiens
  CDR3 for alpha chain variable domain of TCR clone 27635 (TRAV12-2, TRAJ10)
WGVTGGGNKLTF

SEQ ID NO: 55270 - protein, 16 aa, Homo sapiens
  CDR3 for beta chain variable domain of TCR clone 27635 (TRBV6-4, TRBJ1-2)
CASSGAVGDPNYGYTF

SEQ ID NO: 55271 - protein, 14 aa, Homo sapiens
  CDR3 for alpha chain variable domain of TCR clone 27636 (TRAV1-1, TRAJ27)
CAVIYNTNAGKSTF

SEQ ID NO: 55272 - protein, 14 aa, Homo sapiens
  CDR3 for beta chain variable domain of TCR clone 27636 (TRBV19, TRBJ2-2)
CASSTLHRSGELFF

SEQ ID NO: 55273 - protein, 15 aa, Homo sapiens
  CDR3 for alpha chain variable domain of TCR clone 27637 (TRAV29/DV5, TRAJ29)
CAASERSSGNTPLVF

SEQ ID NO: 55274 - protein, 13 aa, Homo sapiens
  CDR3 for beta chain variable domain of TCR clone 27637 (TRBV20-1, TRBJ1-1)
CSARGGGNTEAFF

SEQ ID NO: 55275 - protein, 15 aa, Homo sapiens
  CDR3 for alpha chain variable domain of TCR clone 27638 (TRAV26-1, TRAJ22)
CIVRESFWFCKATDL

SEQ ID NO: 55276 - protein, 13 aa, Homo sapiens
  CDR3 for beta chain variable domain of TCR clone 27638 (TRBV7-9, TRBJ1-2)
CASSLKQNYGYTF

SEQ ID NO: 55277 - protein, 14 aa, Homo sapiens
  CDR3 for alpha chain variable domain of TCR clone 27639 (TRAV35, TRAJ24)
CAGPKRDSWGKLQF

SEQ ID NO: 55278 - protein, 12 aa, Homo sapiens
  CDR3 for beta chain variable domain of TCR clone 27639 (TRBV12-4, TRBJ2-3)
CASSLGQDTQYF

SEQ ID NO: 55279 - protein, 13 aa, Homo sapiens
  CDR3 for alpha chain variable domain of TCR clone 27640 (TRAV13-1, TRAJ9)
CAASGTGGFKTIF

SEQ ID NO: 55280 - protein, 13 aa, Homo sapiens
  CDR3 for beta chain variable domain of TCR clone 27640 (TRBV12-4, TRBJ2-7)
CASSVERVREQYF

SEQ ID NO: 55281 - protein, 11 aa, Homo sapiens
  CDR3 for alpha chain variable domain of TCR clone 27641 (TRAV2, TRAJ21)
CAVFNFNKFYF

SEQ ID NO: 55282 - protein, 14 aa, Homo sapiens
  CDR3 for beta chain variable domain of TCR clone 27641 (TRBV15, TRBJ2-3)
CATRSGTSTDTQHF

SEQ ID NO: 55283 - protein, 16 aa, Homo sapiens
  CDR3 for alpha chain variable domain of TCR clone 27642 (TRAV3, TRAJ10)
CAVRDMRAGGGSKLTF

SEQ ID NO: 55284 - protein, 14 aa, Homo sapiens
  CDR3 for beta chain variable domain of TCR clone 27642 (TRBV7-2, TRBJ2-7)
CASSPKTSFYEQYF

SEQ ID NO: 55285 - protein, 14 aa, Homo sapiens
  CDR3 for alpha chain variable domain of TCR clone 27643 (TRAV8-2, TRAJ11)
CVVSGKSGYSTLTF

SEQ ID NO: 55286 - protein, 16 aa, Homo sapiens
  CDR3 for beta chain variable domain of TCR clone 27643 (TRBV28, TRBJ2-1)
CASSSPEYPRDNEQFF

SEQ ID NO: 55287 - protein, 15 aa, Homo sapiens
  CDR3 for alpha chain variable domain of TCR clone 27644 (TRAV12-2, TRAJ43)
CAFYMRFGAGTRLTV

SEQ ID NO: 55288 - protein, 18 aa, Homo sapiens
  CDR3 for beta chain variable domain of TCR clone 27644 (TRBV20-1, TRBJ2-3)
CSASGLAGGPGTTDTQYF

SEQ ID NO: 55289 - protein, 13 aa, Homo sapiens
  CDR3 for alpha chain variable domain of TCR clone 27645 (TRAV12-1, TRAJ16)
CVVNGPDGQKLLS

SEQ ID NO: 55290 - protein, 13 aa, Homo sapiens
  CDR3 for beta chain variable domain of TCR clone 27645 (TRBV2, TRBJ1-1)
CARNPTGGFHAFF

SEQ ID NO: 55291 - protein, 11 aa, Homo sapiens
  CDR3 for alpha chain variable domain of TCR clone 27646 (TRAV17, TRAJ9)
CATTGGFKTIF

SEQ ID NO: 55292 - protein, 14 aa, Homo sapiens
  CDR3 for beta chain variable domain of TCR clone 27646 (TRBV7-9, TRBJ2-2)
CASSGLADTGELFF

SEQ ID NO: 55293 - protein, 13 aa, Homo sapiens
  CDR3 for alpha chain variable domain of TCR clone 27647 (TRAV12-3, TRAJ33)
CAMSVNSNYQLIW

SEQ ID NO: 55294 - protein, 16 aa, Homo sapiens
  CDR3 for beta chain variable domain of TCR clone 27647 (TRBV12-5, TRBJ2-5)
CASGPRTSGNQETQYF

SEQ ID NO: 55295 - protein, 15 aa, Homo sapiens
  CDR3 for alpha chain variable domain of TCR clone 27648 (TRAV25, TRAJ53)
CPTSNSGGSNYKLTF

SEQ ID NO: 55296 - protein, 16 aa, Homo sapiens
  CDR3 for beta chain variable domain of TCR clone 27648 (TRBV5-1, TRBJ2-2)
CASSSRTGGRTGELFF

SEQ ID NO: 55297 - protein, 11 aa, Homo sapiens
  CDR3 for alpha chain variable domain of TCR clone 27649 (TRAV13-1, TRAJ40)
CAVSGAYKYIF

SEQ ID NO: 55298 - protein, 13 aa, Homo sapiens
  CDR3 for beta chain variable domain of TCR clone 27649 (TRBV19, TRBJ1-5)
CASSIGGNQPQHF

SEQ ID NO: 55299 - protein, 15 aa, Homo sapiens
  CDR3 for alpha chain variable domain of TCR clone 27650 (TRAV2, TRAJ11)
CAVGGRNSGYSTLTF

SEQ ID NO: 55300 - protein, 14 aa, Homo sapiens
  CDR3 for beta chain variable domain of TCR clone 27650 (TRBV4-1, TRBJ2-2)
CASSQAVNTGGLFF

SEQ ID NO: 55301 - protein, 11 aa, Homo sapiens
  CDR3 for alpha chain variable domain of TCR clone 27651 (TRAV4, TRAJ31)
CLVGDNASLMF

SEQ ID NO: 55302 - protein, 16 aa, Homo sapiens
  CDR3 for beta chain variable domain of TCR clone 27651 (TRBV7-2, TRBJ2-5)
CASSSKWLSGQETQYF

SEQ ID NO: 55303 - protein, 14 aa, Homo sapiens
  CDR3 for alpha chain variable domain of TCR clone 27652 (TRAV4, TRAJ6)
CLVGEAGGSYIPTF

SEQ ID NO: 55304 - protein, 16 aa, Homo sapiens
  CDR3 for beta chain variable domain of TCR clone 27652 (TRBV7-6, TRBJ2-1)
CASSSNEGPSYNEQFF

SEQ ID NO: 55305 - protein, 13 aa, Homo sapiens
  CDR3 for alpha chain variable domain of TCR clone 27653 (TRAV39, TRAJ33)
CAVEFSSNYQLIW

SEQ ID NO: 55306 - protein, 19 aa, Homo sapiens
  CDR3 for beta chain variable domain of TCR clone 27653 (TRBV2, TRBJ2-2)
CASSQPGLAGGGNTGELFF

SEQ ID NO: 55307 - protein, 16 aa, Homo sapiens
  CDR3 for alpha chain variable domain of TCR clone 27654 (TRAV12-2, TRAJ32)
CAVNLGQGGAANKLIF

SEQ ID NO: 55308 - protein, 14 aa, Homo sapiens
  CDR3 for beta chain variable domain of TCR clone 27654 (TRBV11-2, TRBJ2-3)
CASSRLARTDTQHF

SEQ ID NO: 55309 - protein, 16 aa, Homo sapiens
  CDR3 for alpha chain variable domain of TCR clone 27655 (TRAV4, TRAJ5)
CLVGPDHGHGQESTYF

SEQ ID NO: 55310 - protein, 15 aa, Homo sapiens
  CDR3 for beta chain variable domain of TCR clone 27655 (TRBV27, TRBJ2-5)
CASSLMPSGGETQYF

SEQ ID NO: 55311 - protein, 10 aa, Homo sapiens
  CDR3 for alpha chain variable domain of TCR clone 27656 (TRAV1-2, TRAJ31)
CVSEDARLMF

SEQ ID NO: 55312 - protein, 14 aa, Homo sapiens
  CDR3 for beta chain variable domain of TCR clone 27656 (TRBV20-1, TRBJ1-3)
CSASPTGAGNTMYF

SEQ ID NO: 55313 - protein, 13 aa, Homo sapiens
  CDR3 for alpha chain variable domain of TCR clone 27657 (TRAV13-1, TRAJ24)
CAASDGSWGKLQF

SEQ ID NO: 55314 - protein, 13 aa, Homo sapiens
  CDR3 for beta chain variable domain of TCR clone 27657 (TRBV4-3, TRBJ2-5)
RASSQGGGETQYF

SEQ ID NO: 55315 - protein, 11 aa, Homo sapiens
  CDR3 for alpha chain variable domain of TCR clone 27658 (TRAV27, TRAJ47)
CRSNQGNKLVF

SEQ ID NO: 55316 - protein, 16 aa, Homo sapiens
  CDR3 for beta chain variable domain of TCR clone 27658 (TRBV7-9, TRBJ2-1)
CASSDVAGGPYNEQFF

SEQ ID NO: 55317 - protein, 16 aa, Homo sapiens
  CDR3 for alpha chain variable domain of TCR clone 27659 (TRAV27, TRAJ13)
CAGAKSDSGGYQKVTF

SEQ ID NO: 55318 - protein, 15 aa, Homo sapiens
  CDR3 for beta chain variable domain of TCR clone 27659 (TRBV29-1, TRBJ2-1)
CSVGRHALFYNEQFL

SEQ ID NO: 55319 - protein, 14 aa, Homo sapiens
  CDR3 for alpha chain variable domain of TCR clone 27660 (TRAV17, TRAJ22)
CATSPSGPARQLTF

SEQ ID NO: 55320 - protein, 13 aa, Homo sapiens
  CDR3 for beta chain variable domain of TCR clone 27660 (TRBV12-4, TRBJ1-2)
CASSLRQGKGYTF

SEQ ID NO: 55321 - protein, 13 aa, Homo sapiens
  CDR3 for alpha chain variable domain of TCR clone 27661 (TRAV3, TRAJ4)
CAVRDGGHNKLIF

SEQ ID NO: 55322 - protein, 14 aa, Homo sapiens
  CDR3 for beta chain variable domain of TCR clone 27661 (TRBV12-4, TRBJ1-2)
CASSSSAAGSSYTF

SEQ ID NO: 55323 - protein, 15 aa, Homo sapiens
  CDR3 for alpha chain variable domain of TCR clone 27662 (TRAV17, TRAJ40)
CASKYIFGTGTRLKV

SEQ ID NO: 55324 - protein, 17 aa, Homo sapiens
  CDR3 for beta chain variable domain of TCR clone 27662 (TRBV11-2, TRBJ2-4)
CASSFLALGGAGDIQYF

SEQ ID NO: 55325 - protein, 13 aa, Homo sapiens
  CDR3 for alpha chain variable domain of TCR clone 27663 (TRAV20, TRAJ37)
CAGCSSNTGKLIF

SEQ ID NO: 55326 - protein, 14 aa, Homo sapiens
  CDR3 for beta chain variable domain of TCR clone 27663 (TRBV7-2, TRBJ2-7)
CASSPKTSFYEQYF

SEQ ID NO: 55327 - protein, 14 aa, Homo sapiens
  CDR3 for alpha chain variable domain of TCR clone 27664 (TRAV8-3, TRAJ9)
CAVVYNAGGFKTIF

SEQ ID NO: 55328 - protein, 14 aa, Homo sapiens
  CDR3 for beta chain variable domain of TCR clone 27664 (TRBV7-3, TRBJ2-2)
CASSSGGYTGELFF

SEQ ID NO: 55329 - protein, 12 aa, Homo sapiens
  CDR3 for alpha chain variable domain of TCR clone 27665 (TRAV2, TRAJ9)
CAVGARGFKTIF

SEQ ID NO: 55330 - protein, 16 aa, Homo sapiens
  CDR3 for beta chain variable domain of TCR clone 27665 (TRBV13, TRBJ2-2)
CASSPRTGEHTGELFF

SEQ ID NO: 55331 - protein, 14 aa, Homo sapiens
  CDR3 for alpha chain variable domain of TCR clone 27666 (TRAV12-2, TRAJ3)
CAVSLYSSASKIIF

SEQ ID NO: 55332 - protein, 14 aa, Homo sapiens
  CDR3 for beta chain variable domain of TCR clone 27666 (TRBV27, TRBJ2-1)
CAGSIAETYDEQFF

SEQ ID NO: 55333 - protein, 11 aa, Homo sapiens
  CDR3 for alpha chain variable domain of TCR clone 27667 (TRAV2, TRAJ33)
CAVESNYQLIW

SEQ ID NO: 55334 - protein, 15 aa, Homo sapiens
  CDR3 for beta chain variable domain of TCR clone 27667 (TRBV19, TRBJ1-1)
CASTSGQIQNTEAFF

SEQ ID NO: 55335 - protein, 15 aa, Homo sapiens
  CDR3 for alpha chain variable domain of TCR clone 27668 (TRAV8-4, TRAJ3)
CAVTGENLVQQCFQD

SEQ ID NO: 55336 - protein, 14 aa, Homo sapiens
  CDR3 for beta chain variable domain of TCR clone 27668 (TRBV25-1, TRBJ1-1)
CASTHLGGNTEAFF

SEQ ID NO: 55337 - protein, 13 aa, Homo sapiens
  CDR3 for alpha chain variable domain of TCR clone 27669 (TRAV3, TRAJ27)
CAVRPLGAGKSTF

SEQ ID NO: 55338 - protein, 13 aa, Homo sapiens
  CDR3 for beta chain variable domain of TCR clone 27669 (TRBV7-9, TRBJ2-3)
CANSPGSTDTQYF

SEQ ID NO: 55339 - protein, 16 aa, Homo sapiens
  CDR3 for alpha chain variable domain of TCR clone 27670 (TRAV21, TRAJ17)
CAVRPGEEAAGNKLTC

SEQ ID NO: 55340 - protein, 16 aa, Homo sapiens
  CDR3 for beta chain variable domain of TCR clone 27670 (TRBV2, TRBJ2-7)
CASSEPWTGPSYEQYF

SEQ ID NO: 55341 - protein, 10 aa, Homo sapiens
  CDR3 for alpha chain variable domain of TCR clone 27671 (TRAV1-2, TRAJ23)
CADQGGKLIF

SEQ ID NO: 55342 - protein, 16 aa, Homo sapiens
  CDR3 for beta chain variable domain of TCR clone 27671 (TRBV11-2, TRBJ1-1)
CASSLRQGGEHSKAFF

SEQ ID NO: 55343 - protein, 12 aa, Homo sapiens
  CDR3 for alpha chain variable domain of TCR clone 27672 (TRAV12-3, TRAJ20)
CAMVRGDYKLSF

SEQ ID NO: 55344 - protein, 20 aa, Homo sapiens
  CDR3 for beta chain variable domain of TCR clone 27672 (TRBV28, TRBJ2-1)
CASTPIGRSPGLAGGNEQFF

SEQ ID NO: 55345 - protein, 17 aa, Homo sapiens
  CDR3 for alpha chain variable domain of TCR clone 27673 (TRAV26-2, TRAJ42)
CILRDVGYGGSQGNLIS

SEQ ID NO: 55346 - protein, 16 aa, Homo sapiens
  CDR3 for beta chain variable domain of TCR clone 27673 (TRBV12-4, TRBJ2-7)
CASSLIGGTGTYEQYF

SEQ ID NO: 55347 - protein, 13 aa, Homo sapiens
  CDR3 for alpha chain variable domain of TCR clone 27674 (TRAV12-3, TRAJ9)
CAMRNTGGFKTIF

SEQ ID NO: 55348 - protein, 15 aa, Homo sapiens
  CDR3 for beta chain variable domain of TCR clone 27674 (TRBV3-1, TRBJ1-1)
CASSQGGSGPTEAFF

SEQ ID NO: 55349 - protein, 14 aa, Homo sapiens
  CDR3 for alpha chain variable domain of TCR clone 27675 (TRAV9-2, TRAJ45)
CALPSRGGADGLTF

SEQ ID NO: 55350 - protein, 21 aa, Homo sapiens
  CDR3 for beta chain variable domain of TCR clone 27675 (TRBV4-1, TRBJ2-2)
CASSQEGMSRGGPKDTGELFF

SEQ ID NO: 55351 - protein, 18 aa, Homo sapiens
  CDR3 for alpha chain variable domain of TCR clone 27676 (TRAV13-1, TRAJ52)
CAASKRSAGGTSYGKLTF

SEQ ID NO: 55352 - protein, 14 aa, Homo sapiens
  CDR3 for beta chain variable domain of TCR clone 27676 (TRBV25-1, TRBJ1-1)
CASTHLGGNTEAFF

SEQ ID NO: 55353 - protein, 13 aa, Homo sapiens
  CDR3 for alpha chain variable domain of TCR clone 27677 (TRAV8-3, TRAJ44)
CAVVPGTASKLTF

SEQ ID NO: 55354 - protein, 14 aa, Homo sapiens
  CDR3 for beta chain variable domain of TCR clone 27677 (TRBV11-2, TRBJ2-3)
CASSRRARTDTQYF

SEQ ID NO: 55355 - protein, 15 aa, Homo sapiens
  CDR3 for alpha chain variable domain of TCR clone 27678 (TRAV17, TRAJ35)
CATAFVIGSGNVLHC

SEQ ID NO: 55356 - protein, 15 aa, Homo sapiens
  CDR3 for beta chain variable domain of TCR clone 27678 (TRBV7-9, TRBJ2-7)
CASSLALAEAYEQYF

SEQ ID NO: 55357 - protein, 15 aa, Homo sapiens
  CDR3 for alpha chain variable domain of TCR clone 27679 (TRAV3, TRAJ47)
CAGRDIGEYGNKLVF

SEQ ID NO: 55358 - protein, 14 aa, Homo sapiens
  CDR3 for beta chain variable domain of TCR clone 27679 (TRBV13, TRBJ2-5)
CASSLERVGETQYF

SEQ ID NO: 55359 - protein, 14 aa, Homo sapiens
  CDR3 for alpha chain variable domain of TCR clone 27680 (TRAV12-2, TRAJ17)
CAALFKAAGNKLTF

SEQ ID NO: 55360 - protein, 16 aa, Homo sapiens
  CDR3 for beta chain variable domain of TCR clone 27680 (TRBV20-1, TRBJ2-2)
CSASASGILGAGELFF

SEQ ID NO: 55361 - protein, 14 aa, Homo sapiens
  CDR3 for alpha chain variable domain of TCR clone 27681 (TRAV12-1, TRAJ17)
CVVNYKAAGNKLTL

SEQ ID NO: 55362 - protein, 17 aa, Homo sapiens
  CDR3 for beta chain variable domain of TCR clone 27681 (TRBV20-1, TRBJ2-1)
CSASSSGLAGSYNEQFF

SEQ ID NO: 55363 - protein, 14 aa, Homo sapiens
  CDR3 for alpha chain variable domain of TCR clone 27682 (TRAV2, TRAJ37)
CAVDFTSNTGKLIF

SEQ ID NO: 55364 - protein, 12 aa, Homo sapiens
  CDR3 for beta chain variable domain of TCR clone 27682 (TRBV11-3, TRBJ2-2)
CASSLGGGELFF

SEQ ID NO: 55365 - protein, 14 aa, Homo sapiens
  CDR3 for alpha chain variable domain of TCR clone 27683 (TRAV3, TRAJ7)
CAVREEERERQTRF

SEQ ID NO: 55366 - protein, 15 aa, Homo sapiens
  CDR3 for beta chain variable domain of TCR clone 27683 (TRBV20-1, TRBJ1-5)
CSAFKNGQRDQPQHF

SEQ ID NO: 55367 - protein, 14 aa, Homo sapiens
  CDR3 for alpha chain variable domain of TCR clone 27684 (TRAV1-1, TRAJ28)
CAAPSGAGSHQLTF

SEQ ID NO: 55368 - protein, 15 aa, Homo sapiens
  CDR3 for beta chain variable domain of TCR clone 27684 (TRBV7-2, TRBJ1-2)
CASSLVSGGDYGYTF

SEQ ID NO: 55369 - protein, 12 aa, Homo sapiens
  CDR3 for alpha chain variable domain of TCR clone 27685 (TRAV3, TRAJ31)
CAVRDGSARLMF

SEQ ID NO: 55370 - protein, 18 aa, Homo sapiens
  CDR3 for beta chain variable domain of TCR clone 27685 (TRBV7-2, TRBJ2-3)
CASSLKREGSGITDTQYF

SEQ ID NO: 55371 - protein, 13 aa, Homo sapiens
  CDR3 for alpha chain variable domain of TCR clone 27686 (TRAV27, TRAJ6)
CAGGTRGSYIPTF

SEQ ID NO: 55372 - protein, 14 aa, Homo sapiens
  CDR3 for beta chain variable domain of TCR clone 27686 (TRBV12-5, TRBJ2-5)
CASGSRTHQETQYF

SEQ ID NO: 55373 - protein, 15 aa, Homo sapiens
  CDR3 for alpha chain variable domain of TCR clone 27687 (TRAV2, TRAJ15)
CAVEDRGKAGTALIF

SEQ ID NO: 55374 - protein, 13 aa, Homo sapiens
  CDR3 for beta chain variable domain of TCR clone 27687 (TRBV10-2, TRBJ2-7)
CASGASGGYEQYF

SEQ ID NO: 55375 - protein, 17 aa, Homo sapiens
  CDR3 for alpha chain variable domain of TCR clone 27688 (TRAV3, TRAJ42)
GAVRDRDYGGSQGNLIF

SEQ ID NO: 55376 - protein, 15 aa, Homo sapiens
  CDR3 for beta chain variable domain of TCR clone 27688 (TRBV6-6, TRBJ2-7)
CASSYSYGGSYEQYF

SEQ ID NO: 55377 - protein, 14 aa, Homo sapiens
  CDR3 for alpha chain variable domain of TCR clone 27689 (TRAV2, TRAJ9)
CAVDPNTGGFKTIF

SEQ ID NO: 55378 - protein, 14 aa, Homo sapiens
  CDR3 for beta chain variable domain of TCR clone 27689 (TRBV7-2, TRBJ2-7)
CASSPKTSFYERYF

SEQ ID NO: 55379 - protein, 14 aa, Homo sapiens
  CDR3 for alpha chain variable domain of TCR clone 27690 (TRAV1-2, TRAJ16)
CAVNRFSDGQKLLF

SEQ ID NO: 55380 - protein, 14 aa, Homo sapiens
  CDR3 for beta chain variable domain of TCR clone 27690 (TRBV7-8, TRBJ1-2)
CASSPDSLSYGYTF

SEQ ID NO: 55381 - protein, 14 aa, Homo sapiens
  CDR3 for alpha chain variable domain of TCR clone 27691 (TRAV1-2, TRAJ16)
RAVNRFSDGQKLLF

SEQ ID NO: 55382 - protein, 13 aa, Homo sapiens
  CDR3 for beta chain variable domain of TCR clone 27691 (TRBV4-1, TRBJ2-1)
CASSQAGGDEQFF

SEQ ID NO: 55383 - protein, 13 aa, Homo sapiens
  CDR3 for alpha chain variable domain of TCR clone 27692 (TRAV8-6, TRAJ49)
CAVITNTGNQVYF

SEQ ID NO: 55384 - protein, 14 aa, Homo sapiens
  CDR3 for beta chain variable domain of TCR clone 27692 (TRBV5-1, TRBJ2-7)
CASSRGESLYEQYF

SEQ ID NO: 55385 - protein, 12 aa, Homo sapiens
  CDR3 for alpha chain variable domain of TCR clone 27693 (TRAV2, TRAJ45)
CAEEEVLTDPPL

SEQ ID NO: 55386 - protein, 14 aa, Homo sapiens
  CDR3 for beta chain variable domain of TCR clone 27693 (TRBV27, TRBJ2-5)
CASSWREGLETQYF

SEQ ID NO: 55387 - protein, 14 aa, Homo sapiens
  CDR3 for alpha chain variable domain of TCR clone 27694 (TRAV38-1, TRAJ45)
CASHSGGGADGLTF

SEQ ID NO: 55388 - protein, 15 aa, Homo sapiens
  CDR3 for beta chain variable domain of TCR clone 27694 (TRBV20-1, TRBJ2-7)
CSARDRVSGMDEQYF

SEQ ID NO: 55389 - protein, 15 aa, Homo sapiens
  CDR3 for alpha chain variable domain of TCR clone 27695 (TRAV8-1, TRAJ42)
CAVTNYGGSQGNLIF

SEQ ID NO: 55390 - protein, 13 aa, Homo sapiens
  CDR3 for beta chain variable domain of TCR clone 27695 (TRBV12-4, TRBJ1-2)
CASSLRQGKGYTF

SEQ ID NO: 55391 - protein, 15 aa, Homo sapiens
  CDR3 for alpha chain variable domain of TCR clone 27696 (TRAV20, TRAJ53)
CAVQASGGSNYKMTF

SEQ ID NO: 55392 - protein, 12 aa, Homo sapiens
  CDR3 for beta chain variable domain of TCR clone 27696 (TRBV7-6, TRBJ2-5)
CASSLSQETQYF

SEQ ID NO: 55393 - protein, 14 aa, Homo sapiens
  CDR3 for alpha chain variable domain of TCR clone 27697 (TRAV12-2, TRAJ23)
CAVGGYNQGGKLIF

SEQ ID NO: 55394 - protein, 15 aa, Homo sapiens
  CDR3 for beta chain variable domain of TCR clone 27697 (TRBV20-1, TRBJ2-3)
CSACSGGPRTDTQYF

SEQ ID NO: 55395 - protein, 13 aa, Homo sapiens
  CDR3 for alpha chain variable domain of TCR clone 27698 (TRAV16, TRAJ34)
CALSPYNADKLIF

SEQ ID NO: 55396 - protein, 17 aa, Homo sapiens
  CDR3 for beta chain variable domain of TCR clone 27698 (TRBV5-1, TRBJ2-1)
CASSTGTSGYSYNEQFF

SEQ ID NO: 55397 - protein, 14 aa, Homo sapiens
  CDR3 for alpha chain variable domain of TCR clone 27699 (TRAV26-2, TRAJ31)
CILIPGNNNARPIF

SEQ ID NO: 55398 - protein, 16 aa, Homo sapiens
  CDR3 for beta chain variable domain of TCR clone 27699 (TRBV7-3, TRBJ2-1)
CASSLVSGSSNNEQFF

SEQ ID NO: 55399 - protein, 14 aa, Homo sapiens
  CDR3 for alpha chain variable domain of TCR clone 27700 (TRAV8-6, TRAJ5)
CAVSVDTGRRALTF

SEQ ID NO: 55400 - protein, 16 aa, Homo sapiens
  CDR3 for beta chain variable domain of TCR clone 27700 (TRBV6-1, TRBJ1-3)
CASVQGGVETPYILER

SEQ ID NO: 55401 - protein, 15 aa, Homo sapiens
  CDR3 for alpha chain variable domain of TCR clone 27701 (TRAV8-3, TRAJ40)
CAAPSLGSGTYKSIF

SEQ ID NO: 55402 - protein, 16 aa, Homo sapiens
  CDR3 for beta chain variable domain of TCR clone 27701 (TRBV7-3, TRBJ2-3)
CASSLSGYRPEDTQYF

SEQ ID NO: 55403 - protein, 16 aa, Homo sapiens
  CDR3 for alpha chain variable domain of TCR clone 27702 (TRAV12-2, TRAJ18)
CAVTTDRGSTLGRLYF

SEQ ID NO: 55404 - protein, 14 aa, Homo sapiens
  CDR3 for beta chain variable domain of TCR clone 27702 (TRBV4-2, TRBJ1-5)
CASSQDSINQTQHF

SEQ ID NO: 55405 - protein, 14 aa, Homo sapiens
  CDR3 for alpha chain variable domain of TCR clone 27703 (TRAV21, TRAJ35)
CAVMPIGFGNVLHC

SEQ ID NO: 55406 - protein, 12 aa, Homo sapiens
  CDR3 for beta chain variable domain of TCR clone 27703 (TRBV7-9, TRBJ2-7)
YASGIKREEQYF

SEQ ID NO: 55407 - protein, 13 aa, Homo sapiens
  CDR3 for alpha chain variable domain of TCR clone 27704 (TRAV29/DV5, TRAJ29)
CAASAAGNKPLVF

SEQ ID NO: 55408 - protein, 14 aa, Homo sapiens
  CDR3 for beta chain variable domain of TCR clone 27704 (TRBV19, TRBJ2-3)
CASSAPRGTDTQYF

SEQ ID NO: 55409 - protein, 13 aa, Homo sapiens
  CDR3 for alpha chain variable domain of TCR clone 27705 (TRAV8-3, TRAJ36)
CAVGATGATNLFF

SEQ ID NO: 55410 - protein, 15 aa, Homo sapiens
  CDR3 for beta chain variable domain of TCR clone 27705 (TRBV7-2, TRBJ1-2)
CASSPRAGWNYGYTF

SEQ ID NO: 55411 - protein, 14 aa, Homo sapiens
  CDR3 for alpha chain variable domain of TCR clone 27706 (TRAV1-2, TRAJ8)
CAVREDTGFQKLVF

SEQ ID NO: 55412 - protein, 12 aa, Homo sapiens
  CDR3 for beta chain variable domain of TCR clone 27706 (TRBV7-3, TRBJ2-1)
CASSFINNEQFF

SEQ ID NO: 55413 - protein, 13 aa, Homo sapiens
  CDR3 for alpha chain variable domain of TCR clone 27707 (TRAV1-2, TRAJ9)
CAALNTGGFETIF

SEQ ID NO: 55414 - protein, 20 aa, Homo sapiens
  CDR3 for beta chain variable domain of TCR clone 27707 (TRBV28, TRBJ2-1)
CASTPIGRSPGLAGGNEQFF

SEQ ID NO: 55415 - protein, 11 aa, Homo sapiens
  CDR3 for alpha chain variable domain of TCR clone 27708 (TRAV1-2, TRAJ40)
CAVPGTYKYIF

SEQ ID NO: 55416 - protein, 16 aa, Homo sapiens
  CDR3 for beta chain variable domain of TCR clone 27708 (TRBV29-1, TRBJ2-7)
CRVEVVGTSGSYEQYF

SEQ ID NO: 55417 - protein, 14 aa, Homo sapiens
  CDR3 for alpha chain variable domain of TCR clone 27709 (TRAV13-1, TRAJ20)
CAARPGSNDYKLSF

SEQ ID NO: 55418 - protein, 15 aa, Homo sapiens
  CDR3 for beta chain variable domain of TCR clone 27709 (TRBV4-1, TRBJ2-7)
CAGSQQGQGFDEQYF

SEQ ID NO: 55419 - protein, 15 aa, Homo sapiens
  CDR3 for alpha chain variable domain of TCR clone 27710 (TRAV23/DV6, TRAJ13)
CAAWPGGGGYQKVTL

SEQ ID NO: 55420 - protein, 17 aa, Homo sapiens
  CDR3 for beta chain variable domain of TCR clone 27710 (TRBV19, TRBJ2-7)
CASSISFYDSYPYEQYF

SEQ ID NO: 55421 - protein, 12 aa, Homo sapiens
  CDR3 for alpha chain variable domain of TCR clone 27711 (TRAV12-3, TRAJ17)
CAMTLTGNKLTF

SEQ ID NO: 55422 - protein, 14 aa, Homo sapiens
  CDR3 for beta chain variable domain of TCR clone 27711 (TRBV7-3, TRBJ2-2)
CASSSGGYTGELFF

SEQ ID NO: 55423 - protein, 12 aa, Homo sapiens
  CDR3 for alpha chain variable domain of TCR clone 27712 (TRAV2, TRAJ9)
CAVGAGGFKTIF

SEQ ID NO: 55424 - protein, 15 aa, Homo sapiens
  CDR3 for beta chain variable domain of TCR clone 27712 (TRBV6-3, TRBJ2-7)
CASSSPGTVFYEQYF

SEQ ID NO: 55425 - protein, 15 aa, Homo sapiens
  CDR3 for alpha chain variable domain of TCR clone 27713 (TRAV27, TRAJ38)
CAARRNAGNNRKLIW

SEQ ID NO: 55426 - protein, 13 aa, Homo sapiens
  CDR3 for beta chain variable domain of TCR clone 27713 (TRBV12-5, TRBJ2-3)
CARGDRQSDTQYF

SEQ ID NO: 55427 - protein, 15 aa, Homo sapiens
  CDR3 for alpha chain variable domain of TCR clone 27714 (TRAV3, TRAJ20)
CAMRDIKLSDYKLSF

SEQ ID NO: 55428 - protein, 15 aa, Homo sapiens
  CDR3 for beta chain variable domain of TCR clone 27714 (TRBV7-9, TRBJ1-6)
CASSSPGRGNSPLHF

SEQ ID NO: 55429 - protein, 16 aa, Homo sapiens
  CDR3 for alpha chain variable domain of TCR clone 27715 (TRAV2, TRAJ4)
CAVEDRFSGGYNKLLF

SEQ ID NO: 55430 - protein, 13 aa, Homo sapiens
  CDR3 for beta chain variable domain of TCR clone 27715 (TRBV7-7, TRBJ2-5)
CASSRSGQETQYF

SEQ ID NO: 55431 - protein, 16 aa, Homo sapiens
  CDR3 for alpha chain variable domain of TCR clone 27716 (TRAV12-3, TRAJ53)
CAMSPGSGGSNYKLTF

SEQ ID NO: 55432 - protein, 11 aa, Homo sapiens
  CDR3 for beta chain variable domain of TCR clone 27716 (TRBV29-1, TRBJ2-5)
FSEDRTGTQYF

SEQ ID NO: 55433 - protein, 14 aa, Homo sapiens
  CDR3 for alpha chain variable domain of TCR clone 27717 (TRAV12-2, TRAJ40)
CAVKIPSGTYKYIF

SEQ ID NO: 55434 - protein, 14 aa, Homo sapiens
  CDR3 for beta chain variable domain of TCR clone 27717 (TRBV20-1, TRBJ1-1)
CSAQTRIGGTKAFF

SEQ ID NO: 55435 - protein, 15 aa, Homo sapiens
  CDR3 for alpha chain variable domain of TCR clone 27718 (TRAV17, TRAJ56)
CATDANTGANSKLTF

SEQ ID NO: 55436 - protein, 14 aa, Homo sapiens
  CDR3 for beta chain variable domain of TCR clone 27718 (TRBV19, TRBJ1-5)
CASSLGTGGQPRHF

SEQ ID NO: 55437 - protein, 15 aa, Homo sapiens
  CDR3 for alpha chain variable domain of TCR clone 27719 (TRAV8-3, TRAJ37)
CAVGARASDTGKLIF

SEQ ID NO: 55438 - protein, 15 aa, Homo sapiens
  CDR3 for beta chain variable domain of TCR clone 27719 (TRBV5-4, TRBJ2-3)
CASSLAGRVTDTQYF

SEQ ID NO: 55439 - protein, 15 aa, Homo sapiens
  CDR3 for alpha chain variable domain of TCR clone 27720 (TRAV8-2, TRAJ40)
CVVLGTTSGTYKYIF

SEQ ID NO: 55440 - protein, 16 aa, Homo sapiens
  CDR3 for beta chain variable domain of TCR clone 27720 (TRBV7-3, TRBJ2-1)
CASSLECYRSYNEQFF

SEQ ID NO: 55441 - protein, 11 aa, Homo sapiens
  CDR3 for alpha chain variable domain of TCR clone 27721 (TRAV1-2, TRAJ11)
CAVRGYSTLTF

SEQ ID NO: 55442 - protein, 12 aa, Homo sapiens
  CDR3 for beta chain variable domain of TCR clone 27721 (TRBV11-2, TRBJ2-1)
CASSPGNNEQFF

SEQ ID NO: 55443 - protein, 11 aa, Homo sapiens
  CDR3 for alpha chain variable domain of TCR clone 27722 (TRAV2, TRAJ13)
CAFGGYQKVTF

SEQ ID NO: 55444 - protein, 16 aa, Homo sapiens
  CDR3 for beta chain variable domain of TCR clone 27722 (TRBV6-1, TRBJ2-5)
CASSETLDRGAETQYF

SEQ ID NO: 55445 - protein, 16 aa, Homo sapiens
  CDR3 for alpha chain variable domain of TCR clone 27723 (TRAV20, TRAJ38)
CAVQASNAGNNRKPIW

SEQ ID NO: 55446 - protein, 16 aa, Homo sapiens
  CDR3 for beta chain variable domain of TCR clone 27723 (TRBV7-8, TRBJ2-6)
CASRVGDSSGANDLTF

SEQ ID NO: 55447 - protein, 14 aa, Homo sapiens
  CDR3 for alpha chain variable domain of TCR clone 27724 (TRAV12-2, TRAJ53)
CAVKGGGSNYKLTF

SEQ ID NO: 55448 - protein, 14 aa, Homo sapiens
  CDR3 for beta chain variable domain of TCR clone 27724 (TRBV7-7, TRBJ2-2)
CATRQDSDTGELSF

SEQ ID NO: 55449 - protein, 10 aa, Homo sapiens
  CDR3 for alpha chain variable domain of TCR clone 27725 (TRAV13-1, TRAJ8)
CAAPFQKLVF

SEQ ID NO: 55450 - protein, 13 aa, Homo sapiens
  CDR3 for beta chain variable domain of TCR clone 27725 (TRBV28, TRBJ1-2)
CAGRDRGNYGYTF

SEQ ID NO: 55451 - protein, 14 aa, Homo sapiens
  CDR3 for alpha chain variable domain of TCR clone 27726 (TRAV13-2, TRAJ17)
CAENSKAAGNKLTF

SEQ ID NO: 55452 - protein, 12 aa, Homo sapiens
  CDR3 for beta chain variable domain of TCR clone 27726 (TRBV11-2, TRBJ2-2)
CASSLGGGELFF

SEQ ID NO: 55453 - protein, 15 aa, Homo sapiens
  CDR3 for alpha chain variable domain of TCR clone 27727 (TRAV3, TRAJ22)
CAVRDRGGSARQLTF

SEQ ID NO: 55454 - protein, 15 aa, Homo sapiens
  CDR3 for beta chain variable domain of TCR clone 27727 (TRBV5-1, TRBJ2-1)
CASSPPRAPYNEQFF

SEQ ID NO: 55455 - protein, 13 aa, Homo sapiens
  CDR3 for alpha chain variable domain of TCR clone 27728 (TRAV1-1, TRAJ9)
CAAKNTGGFKTIF

SEQ ID NO: 55456 - protein, 14 aa, Homo sapiens
  CDR3 for beta chain variable domain of TCR clone 27728 (TRBV18, TRBJ2-7)
CASSPRGGAYEQYF

SEQ ID NO: 55457 - protein, 11 aa, Homo sapiens
  CDR3 for alpha chain variable domain of TCR clone 27729 (TRAV2, TRAJ21)
CAVFNLNKFYF

SEQ ID NO: 55458 - protein, 14 aa, Homo sapiens
  CDR3 for beta chain variable domain of TCR clone 27729 (TRBV15, TRBJ2-3)
CATRSGTSTDTQYF

SEQ ID NO: 55459 - protein, 10 aa, Homo sapiens
  CDR3 for alpha chain variable domain of TCR clone 27730 (TRAV30, TRAJ48)
CGIGHEKLTF

SEQ ID NO: 55460 - protein, 14 aa, Homo sapiens
  CDR3 for beta chain variable domain of TCR clone 27730 (TRBV7-6, TRBJ2-3)
CASSVAGGTDTQYF

SEQ ID NO: 55461 - protein, 14 aa, Homo sapiens
  CDR3 for alpha chain variable domain of TCR clone 27731 (TRAV1-2, TRAJ8)
CTVREDTGFQKLVF

SEQ ID NO: 55462 - protein, 14 aa, Homo sapiens
  CDR3 for beta chain variable domain of TCR clone 27731 (TRBV7-2, TRBJ2-7)
CASSPKTSFYEQYF

SEQ ID NO: 55463 - protein, 13 aa, Homo sapiens
  CDR3 for alpha chain variable domain of TCR clone 27732 (TRAV36/DV7, TRAJ49)
CAVEANTGNQLYF

SEQ ID NO: 55464 - protein, 13 aa, Homo sapiens
  CDR3 for beta chain variable domain of TCR clone 27732 (TRBV10-3, TRBJ2-7)
CASKLAVNYEQYF

SEQ ID NO: 55465 - protein, 15 aa, Homo sapiens
  CDR3 for alpha chain variable domain of TCR clone 27733 (TRAV38-1, TRAJ57)
CAFVDSQGGSEKLVF

SEQ ID NO: 55466 - protein, 16 aa, Homo sapiens
  CDR3 for beta chain variable domain of TCR clone 27733 (TRBV10-3, TRBJ2-1)
CAIRGGGRGDYNEQFF

SEQ ID NO: 55467 - protein, 15 aa, Homo sapiens
  CDR3 for alpha chain variable domain of TCR clone 27734 (TRAV8-3, TRAJ23)
CAVGDRYNQGGKLIF

SEQ ID NO: 55468 - protein, 22 aa, Homo sapiens
  CDR3 for beta chain variable domain of TCR clone 27734 (TRBV29-1, TRBJ2-5)
TLSNMSPEDSSIYLCSAGTQYF

SEQ ID NO: 55469 - protein, 14 aa, Homo sapiens
  CDR3 for alpha chain variable domain of TCR clone 27735 (TRAV1-2, TRAJ29)
CAVRELTSATPLVF

SEQ ID NO: 55470 - protein, 14 aa, Homo sapiens
  CDR3 for beta chain variable domain of TCR clone 27735 (TRBV3-1, TRBJ2-5)
CASSQGPDQGTQYF

SEQ ID NO: 55471 - protein, 13 aa, Homo sapiens
  CDR3 for alpha chain variable domain of TCR clone 27736 (TRAV2, TRAJ15)
CAVASQAGTALIF

SEQ ID NO: 55472 - protein, 15 aa, Homo sapiens
  CDR3 for beta chain variable domain of TCR clone 27736 (TRBV5-1, TRBJ2-1)
CASSPPRAPYNEQFF

SEQ ID NO: 55473 - protein, 14 aa, Homo sapiens
  CDR3 for alpha chain variable domain of TCR clone 27737 (TRAV38-1, TRAJ45)
CAYYSGGGADGLTF

SEQ ID NO: 55474 - protein, 20 aa, Homo sapiens
  CDR3 for beta chain variable domain of TCR clone 27737 (TRBV28, TRBJ2-1)
CASTPIGRSPVLAGGNEQFF

SEQ ID NO: 55475 - protein, 13 aa, Homo sapiens
  CDR3 for alpha chain variable domain of TCR clone 27738 (TRAV12-3, TRAJ9)
CAMRNTGGSKTIF

SEQ ID NO: 55476 - protein, 14 aa, Homo sapiens
  CDR3 for beta chain variable domain of TCR clone 27738 (TRBV11-2, TRBJ2-7)
CASSSTGEGYEQYF

SEQ ID NO: 55477 - protein, 13 aa, Homo sapiens
  CDR3 for alpha chain variable domain of TCR clone 27739 (TRAV36/DV7, TRAJ37)
CAVFSSNTGKLIF

SEQ ID NO: 55478 - protein, 15 aa, Homo sapiens
  CDR3 for beta chain variable domain of TCR clone 27739 (TRBV12-4, TRBJ2-5)
CQQFFVRGRRETQYF

SEQ ID NO: 55479 - protein, 14 aa, Homo sapiens
  CDR3 for alpha chain variable domain of TCR clone 27740 (TRAV13-1, TRAJ44)
CAAKATGTASKLTF

SEQ ID NO: 55480 - protein, 14 aa, Homo sapiens
  CDR3 for beta chain variable domain of TCR clone 27740 (TRBV2, TRBJ2-3)
CASSEGQNTDTQYF

SEQ ID NO: 55481 - protein, 13 aa, Homo sapiens
  CDR3 for alpha chain variable domain of TCR clone 27741 (TRAV8-3, TRAJ36)
CAVGATGANNLFF

SEQ ID NO: 55482 - protein, 13 aa, Homo sapiens
  CDR3 for beta chain variable domain of TCR clone 27741 (TRBV12-4, TRBJ1-2)
CASSLRQGKGYAF

SEQ ID NO: 55483 - protein, 12 aa, Homo sapiens
  CDR3 for alpha chain variable domain of TCR clone 27742 (TRAV12-3, TRAJ34)
CAMGYNTDKLIF

SEQ ID NO: 55484 - protein, 14 aa, Homo sapiens
  CDR3 for beta chain variable domain of TCR clone 27742 (TRBV5-6, TRBJ1-5)
CASSRTGGGQPQHF

SEQ ID NO: 55485 - protein, 15 aa, Homo sapiens
  CDR3 for alpha chain variable domain of TCR clone 27743 (TRAV27, TRAJ38)
CAARRNAGNNRKLIW

SEQ ID NO: 55486 - protein, 13 aa, Homo sapiens
  CDR3 for beta chain variable domain of TCR clone 27743 (TRBV12-5, TRBJ2-3)
CASGDRQSDMQYF

SEQ ID NO: 55487 - protein, 14 aa, Homo sapiens
  CDR3 for alpha chain variable domain of TCR clone 27744 (TRAV16, TRAJ37)
CALDISGNTGKLIL

SEQ ID NO: 55488 - protein, 14 aa, Homo sapiens
  CDR3 for beta chain variable domain of TCR clone 27744 (TRBV7-6, TRBJ2-7)
CASSFRQGADEQYF

SEQ ID NO: 55489 - protein, 15 aa, Homo sapiens
  CDR3 for alpha chain variable domain of TCR clone 27745 (TRAV26-1, TRAJ40)
CIIRVTTSGTYKYIF

SEQ ID NO: 55490 - protein, 12 aa, Homo sapiens
  CDR3 for beta chain variable domain of TCR clone 27745 (TRBV7-9, TRBJ1-4)
CASSTDREKLFF

SEQ ID NO: 55491 - protein, 15 aa, Homo sapiens
  CDR3 for alpha chain variable domain of TCR clone 27746 (TRAV16, TRAJ58)
TVLSNGETSGSRLTF

SEQ ID NO: 55492 - protein, 17 aa, Homo sapiens
  CDR3 for beta chain variable domain of TCR clone 27746 (TRBV18, TRBJ2-1)
CASSKGLSGGADNEQFF

SEQ ID NO: 55493 - protein, 11 aa, Homo sapiens
  CDR3 for alpha chain variable domain of TCR clone 27747 (TRAV1-2, TRAJ31)
CAVNNNARLMF

SEQ ID NO: 55494 - protein, 18 aa, Homo sapiens
  CDR3 for beta chain variable domain of TCR clone 27747 (TRBV11-2, TRBJ2-3)
CASSLGGASRGAPNTQYF

SEQ ID NO: 55495 - protein, 16 aa, Homo sapiens
  CDR3 for alpha chain variable domain of TCR clone 27748 (TRAV12-2, TRAJ18)
CAVTTDRGSTLGRLYF

SEQ ID NO: 55496 - protein, 14 aa, Homo sapiens
  CDR3 for beta chain variable domain of TCR clone 27748 (TRBV4-2, TRBJ1-5)
CAGSQDSINQPQHF

SEQ ID NO: 55497 - protein, 11 aa, Homo sapiens
  CDR3 for alpha chain variable domain of TCR clone 27749 (TRAV12-3, TRAJ27)
CAMANAGKSTF

SEQ ID NO: 55498 - protein, 15 aa, Homo sapiens
  CDR3 for beta chain variable domain of TCR clone 27749 (TRBV9, TRBJ1-6)
CASSVAGTGDSPLHF

SEQ ID NO: 55499 - protein, 15 aa, Homo sapiens
  CDR3 for alpha chain variable domain of TCR clone 27750 (TRAV8-2, TRAJ16)
CVVSDGFSDGQKLLF

SEQ ID NO: 55500 - protein, 14 aa, Homo sapiens
  CDR3 for beta chain variable domain of TCR clone 27750 (TRBV7-3, TRBJ1-1)
CASSLGTGYTEAFL

SEQ ID NO: 55501 - protein, 15 aa, Homo sapiens
  CDR3 for alpha chain variable domain of TCR clone 27751 (TRAV17, TRAJ37)
CATDHGSSNTGKPIF

SEQ ID NO: 55502 - protein, 14 aa, Homo sapiens
  CDR3 for beta chain variable domain of TCR clone 27751 (TRBV7-2, TRBJ2-3)
CASSRTSGADTQYF

SEQ ID NO: 55503 - protein, 15 aa, Homo sapiens
  CDR3 for alpha chain variable domain of TCR clone 27752 (TRAV35, TRAJ40)
CAGQLGTSGTYKYVF

SEQ ID NO: 55504 - protein, 14 aa, Homo sapiens
  CDR3 for beta chain variable domain of TCR clone 27752 (TRBV7-3, TRBJ2-1)
CASSLAGGTNEQFF

SEQ ID NO: 55505 - protein, 16 aa, Homo sapiens
  CDR3 for alpha chain variable domain of TCR clone 27753 (TRAV9-2, TRAJ53)
CALRKNSGGSNYKLTF

SEQ ID NO: 55506 - protein, 14 aa, Homo sapiens
  CDR3 for beta chain variable domain of TCR clone 27753 (TRBV28, TRBJ2-1)
YASSLNGRNNEQFF

SEQ ID NO: 55507 - protein, 17 aa, Homo sapiens
  CDR3 for alpha chain variable domain of TCR clone 27754 (TRAV26-1, TRAJ53)
CIVRVDDSGGSNYKLPF

SEQ ID NO: 55508 - protein, 15 aa, Homo sapiens
  CDR3 for beta chain variable domain of TCR clone 27754 (TRBV20-1, TRBJ2-7)
CSARVPAAYFYEQYF

SEQ ID NO: 55509 - protein, 11 aa, Homo sapiens
  CDR3 for alpha chain variable domain of TCR clone 27755 (TRAV39, TRAJ49)
CAVDISTQSYF

SEQ ID NO: 55510 - protein, 11 aa, Homo sapiens
  CDR3 for beta chain variable domain of TCR clone 27755 (TRBV7-8, TRBJ2-7)
CASSLSLEQYF

SEQ ID NO: 55511 - protein, 19 aa, Homo sapiens
  CDR3 for alpha chain variable domain of TCR clone 27756 (TRAV2, TRAJ20)
ILQVREADAAVYRDCKLSF

SEQ ID NO: 55512 - protein, 13 aa, Homo sapiens
  CDR3 for beta chain variable domain of TCR clone 27756 (TRBV15, TRBJ1-6)
CATSGGPNSPLHF

SEQ ID NO: 55513 - protein, 16 aa, Homo sapiens
  CDR3 for alpha chain variable domain of TCR clone 27757 (TRAV30, TRAJ24)
CGTEIVDADSWGKFKF

SEQ ID NO: 55514 - protein, 19 aa, Homo sapiens
  CDR3 for beta chain variable domain of TCR clone 27757 (TRBV25-1, TRBJ2-2)
CAILVYRVDRGRKTGELFF

SEQ ID NO: 55515 - protein, 14 aa, Homo sapiens
  CDR3 for alpha chain variable domain of TCR clone 27758 (TRAV38-1, TRAJ45)
CAYYSGGGADGLTF

SEQ ID NO: 55516 - protein, 15 aa, Homo sapiens
  CDR3 for beta chain variable domain of TCR clone 27758 (TRBV7-9, TRBJ1-6)
CASSSPGRGNSPLHF

SEQ ID NO: 55517 - protein, 15 aa, Homo sapiens
  CDR3 for alpha chain variable domain of TCR clone 27759 (TRAV8-3, TRAJ45)
CASSYSGGGAGGLTF

SEQ ID NO: 55518 - protein, 15 aa, Homo sapiens
  CDR3 for beta chain variable domain of TCR clone 27759 (TRBV18, TRBJ1-1)
CASSPRQGENTEAFF

SEQ ID NO: 55519 - protein, 14 aa, Homo sapiens
  CDR3 for alpha chain variable domain of TCR clone 27760 (TRAV17, TRAJ31)
CATVLRNNNARLMF

SEQ ID NO: 55520 - protein, 14 aa, Homo sapiens
  CDR3 for beta chain variable domain of TCR clone 27760 (TRBV12-4, TRBJ2-5)
CASSLWQKQETQYS

SEQ ID NO: 55521 - protein, 17 aa, Homo sapiens
  CDR3 for alpha chain variable domain of TCR clone 27761 (TRAV8-6, TRAJ58)
FAVSSWVGETSGSRLTF

SEQ ID NO: 55522 - protein, 14 aa, Homo sapiens
  CDR3 for beta chain variable domain of TCR clone 27761 (TRBV4-2, TRBJ2-1)
CASGLDRAYNEQFF

SEQ ID NO: 55523 - protein, 14 aa, Homo sapiens
  CDR3 for alpha chain variable domain of TCR clone 27762 (TRAV12-2, TRAJ44)
CAVNPAGTASKLTF

SEQ ID NO: 55524 - protein, 13 aa, Homo sapiens
  CDR3 for beta chain variable domain of TCR clone 27762 (TRBV10-3, TRBJ2-7)
CASKLAVNYEQYF

SEQ ID NO: 55525 - protein, 19 aa, Homo sapiens
  CDR3 for alpha chain variable domain of TCR clone 27763 (TRAV26-1, TRAJ52)
CIVRAHRNAGCTSYGKLTF

SEQ ID NO: 55526 - protein, 15 aa, Homo sapiens
  CDR3 for beta chain variable domain of TCR clone 27763 (TRBV29-1, TRBJ2-1)
CSGRDRKSSYNEQFF

SEQ ID NO: 55527 - protein, 18 aa, Homo sapiens
  CDR3 for alpha chain variable domain of TCR clone 27764 (TRAV9-2, TRAJ52)
CALSRHNAGCTSYGKLTF

SEQ ID NO: 55528 - protein, 13 aa, Homo sapiens
  CDR3 for beta chain variable domain of TCR clone 27764 (TRBV7-9, TRBJ1-2)
CASSLKQNYGYTF

SEQ ID NO: 55529 - protein, 12 aa, Homo sapiens
  CDR3 for alpha chain variable domain of TCR clone 27765 (TRAV13-2, TRAJ23)
CAESHRGGKLIF

SEQ ID NO: 55530 - protein, 16 aa, Homo sapiens
  CDR3 for beta chain variable domain of TCR clone 27765 (TRBV20-1, TRBJ1-4)
CSAPGQGLLTNEKLFF

SEQ ID NO: 55531 - protein, 13 aa, Homo sapiens
  CDR3 for alpha chain variable domain of TCR clone 27766 (TRAV1-2, TRAJ12)
CAVSMDSSYKLIF

SEQ ID NO: 55532 - protein, 13 aa, Homo sapiens
  CDR3 for beta chain variable domain of TCR clone 27766 (TRBV7-9, TRBJ1-2)
CASSLKQNYGYTF

SEQ ID NO: 55533 - protein, 14 aa, Homo sapiens
  CDR3 for alpha chain variable domain of TCR clone 27767 (TRAV1-2, TRAJ16)
CAVNRFPDGQKLLF

SEQ ID NO: 55534 - protein, 16 aa, Homo sapiens
  CDR3 for beta chain variable domain of TCR clone 27767 (TRBV20-1, TRBJ1-4)
CSAPGQGLLTNEKLFF

SEQ ID NO: 55535 - protein, 15 aa, Homo sapiens
  CDR3 for alpha chain variable domain of TCR clone 27768 (TRAV27, TRAJ38)
CAARRNAGNNRKLIW

SEQ ID NO: 55536 - protein, 11 aa, Homo sapiens
  CDR3 for beta chain variable domain of TCR clone 27768 (TRBV12-4, TRBJ2-2)
CASSSAGELFF

SEQ ID NO: 55537 - protein, 11 aa, Homo sapiens
  CDR3 for alpha chain variable domain of TCR clone 27769 (TRAV2, TRAJ21)
CAVFNFNKLYF

SEQ ID NO: 55538 - protein, 14 aa, Homo sapiens
  CDR3 for beta chain variable domain of TCR clone 27769 (TRBV15, TRBJ2-3)
CATRSGTSTDTQYF

SEQ ID NO: 55539 - protein, 12 aa, Homo sapiens
  CDR3 for alpha chain variable domain of TCR clone 27770 (TRAV30, TRAJ43)
CGTEERGNDMRF

SEQ ID NO: 55540 - protein, 13 aa, Homo sapiens
  CDR3 for beta chain variable domain of TCR clone 27770 (TRBV27, TRBJ2-7)
CASSFSRGYEQYF

SEQ ID NO: 55541 - protein, 15 aa, Homo sapiens
  CDR3 for alpha chain variable domain of TCR clone 27771 (TRAV8-3, TRAJ27)
CAGGPSKTNAGKSTF

SEQ ID NO: 55542 - protein, 15 aa, Homo sapiens
  CDR3 for beta chain variable domain of TCR clone 27771 (TRBV7-2, TRBJ2-1)
CASSSGLAGGNEQFF

SEQ ID NO: 55543 - protein, 12 aa, Homo sapiens
  CDR3 for alpha chain variable domain of TCR clone 27772 (TRAV13-1, TRAJ15)
CAASQAGTALIF

SEQ ID NO: 55544 - protein, 14 aa, Homo sapiens
  CDR3 for beta chain variable domain of TCR clone 27772 (TRBV19, TRBJ2-2)
CASITLHRSGELFF

SEQ ID NO: 55545 - protein, 13 aa, Homo sapiens
  CDR3 for alpha chain variable domain of TCR clone 27773 (TRAV17, TRAJ15)
CATDARAGTALVF

SEQ ID NO: 55546 - protein, 15 aa, Homo sapiens
  CDR3 for beta chain variable domain of TCR clone 27773 (TRBV20-1, TRBJ2-7)
CSARDRVSGMDEQYF

SEQ ID NO: 55547 - protein, 14 aa, Homo sapiens
  CDR3 for alpha chain variable domain of TCR clone 27774 (TRAV13-2, TRAJ11)
FAETGNSGYSTLTF

SEQ ID NO: 55548 - protein, 11 aa, Homo sapiens
  CDR3 for beta chain variable domain of TCR clone 27774 (TRBV10-3, TRBJ2-7)
CAISEGLEQYF

SEQ ID NO: 55549 - protein, 14 aa, Homo sapiens
  CDR3 for alpha chain variable domain of TCR clone 27775 (TRAV1-2, TRAJ8)
CAVREDTGLQKLVL

SEQ ID NO: 55550 - protein, 14 aa, Homo sapiens
  CDR3 for beta chain variable domain of TCR clone 27775 (TRBV7-9, TRBJ1-1)
CASSLGGANTEAFF

SEQ ID NO: 55551 - protein, 15 aa, Homo sapiens
  CDR3 for alpha chain variable domain of TCR clone 27776 (TRAV34, TRAJ38)
CGADFTPGNNRKLIW

SEQ ID NO: 55552 - protein, 12 aa, Homo sapiens
  CDR3 for beta chain variable domain of TCR clone 27776 (TRBV11-2, TRBJ2-2)
CASSLGGGELFF

SEQ ID NO: 55553 - protein, 15 aa, Homo sapiens
  CDR3 for alpha chain variable domain of TCR clone 27777 (TRAV8-4, TRAJ3)
CAVTGENLVQQCFQD

SEQ ID NO: 55554 - protein, 16 aa, Homo sapiens
  CDR3 for beta chain variable domain of TCR clone 27777 (TRBV4-2, TRBJ1-1)
CASSQAGFGMNTEAFL

SEQ ID NO: 55555 - protein, 15 aa, Homo sapiens
  CDR3 for alpha chain variable domain of TCR clone 27778 (TRAV23/DV6, TRAJ18)
CAARYRGSTLGRLYF

SEQ ID NO: 55556 - protein, 13 aa, Homo sapiens
  CDR3 for beta chain variable domain of TCR clone 27778 (TRBV7-2, TRBJ2-7)
CASSSPSGSEQCF

SEQ ID NO: 55557 - protein, 14 aa, Homo sapiens
  CDR3 for alpha chain variable domain of TCR clone 27779 (TRAV17, TRAJ57)
CATDAPGGSEKLVF

SEQ ID NO: 55558 - protein, 14 aa, Homo sapiens
  CDR3 for beta chain variable domain of TCR clone 27779 (TRBV4-2, TRBJ2-1)
CASGLDRAYNEQFF

SEQ ID NO: 55559 - protein, 16 aa, Homo sapiens
  CDR3 for alpha chain variable domain of TCR clone 27780 (TRAV3, TRAJ37)
CAVRGKGSGNTGKLIF

SEQ ID NO: 55560 - protein, 13 aa, Homo sapiens
  CDR3 for beta chain variable domain of TCR clone 27780 (TRBV14, TRBJ2-7)
CASSQGRRYEQYF

SEQ ID NO: 55561 - protein, 12 aa, Homo sapiens
  CDR3 for alpha chain variable domain of TCR clone 27781 (TRAV17, TRAJ12)
CATLRSSYKLIF

SEQ ID NO: 55562 - protein, 15 aa, Homo sapiens
  CDR3 for beta chain variable domain of TCR clone 27781 (TRBV28, TRBJ2-7)
CQQFIFETGGPEQYF

SEQ ID NO: 55563 - protein, 12 aa, Homo sapiens
  CDR3 for alpha chain variable domain of TCR clone 27782 (TRAV13-1, TRAJ15)
CSASQAGTALIF

SEQ ID NO: 55564 - protein, 14 aa, Homo sapiens
  CDR3 for beta chain variable domain of TCR clone 27782 (TRBV19, TRBJ2-2)
CASSTLHRSGELFF

SEQ ID NO: 55565 - protein, 15 aa, Homo sapiens
  CDR3 for alpha chain variable domain of TCR clone 27783 (TRAV3, TRAJ5)
CAVRYRKTGRRALTF

SEQ ID NO: 55566 - protein, 15 aa, Homo sapiens
  CDR3 for beta chain variable domain of TCR clone 27783 (TRBV7-8, TRBJ2-1)
CASSLADSLYNEQFF

SEQ ID NO: 55567 - protein, 15 aa, Homo sapiens
  CDR3 for alpha chain variable domain of TCR clone 27784 (TRAV17, TRAJ16)
CATALRFSDGQKRLF

SEQ ID NO: 55568 - protein, 12 aa, Homo sapiens
  CDR3 for beta chain variable domain of TCR clone 27784 (TRBV2, TRBJ2-7)
CASSDPDYEQYF

SEQ ID NO: 55569 - protein, 12 aa, Homo sapiens
  CDR3 for alpha chain variable domain of TCR clone 27785 (TRAV8-1, TRAJ39)
CAGLNNAGNMLT

SEQ ID NO: 55570 - protein, 17 aa, Homo sapiens
  CDR3 for beta chain variable domain of TCR clone 27785 (TRBV19, TRBJ2-3)
CASSIDPAGGGTDTQYF

SEQ ID NO: 55571 - protein, 13 aa, Homo sapiens
  CDR3 for alpha chain variable domain of TCR clone 27786 (TRAV12-3, TRAJ40)
CAMSDSVTYKYIF

SEQ ID NO: 55572 - protein, 14 aa, Homo sapiens
  CDR3 for beta chain variable domain of TCR clone 27786 (TRBV7-2, TRBJ1-5)
CASSTQGAGQPQHF

SEQ ID NO: 55573 - protein, 13 aa, Homo sapiens
  CDR3 for alpha chain variable domain of TCR clone 27787 (TRAV21, TRAJ57)
CAVTQDGSEKLVF

SEQ ID NO: 55574 - protein, 16 aa, Homo sapiens
  CDR3 for beta chain variable domain of TCR clone 27787 (TRBV29-1, TRBJ2-7)
CSVEDAEDGTAYEQYF

SEQ ID NO: 55575 - protein, 18 aa, Homo sapiens
  CDR3 for alpha chain variable domain of TCR clone 27788 (TRAV21, TRAJ52)
CAVRPSPAGGTSYGKLTF

SEQ ID NO: 55576 - protein, 14 aa, Homo sapiens
  CDR3 for beta chain variable domain of TCR clone 27788 (TRBV20-1, TRBJ1-1)
CSAQTRIGGTEAFF

SEQ ID NO: 55577 - protein, 13 aa, Homo sapiens
  CDR3 for alpha chain variable domain of TCR clone 27789 (TRAV3, TRAJ21)
CAMREPDFNKFYF

SEQ ID NO: 55578 - protein, 13 aa, Homo sapiens
  CDR3 for beta chain variable domain of TCR clone 27789 (TRBV9, TRBJ2-1)
CASSPSGGNEQFF

SEQ ID NO: 55579 - protein, 14 aa, Homo sapiens
  CDR3 for alpha chain variable domain of TCR clone 27790 (TRAV35, TRAJ13)
CAGRSPGGYQKVTF

SEQ ID NO: 55580 - protein, 14 aa, Homo sapiens
  CDR3 for beta chain variable domain of TCR clone 27790 (TRBV19, TRBJ2-2)
CASSMVGLSGELFL

SEQ ID NO: 55581 - protein, 13 aa, Homo sapiens
  CDR3 for alpha chain variable domain of TCR clone 27791 (TRAV12-3, TRAJ53)
CAMRGGSNYKLTF

SEQ ID NO: 55582 - protein, 15 aa, Homo sapiens
  CDR3 for beta chain variable domain of TCR clone 27791 (TRBV2, TRBJ2-1)
CATQARRVMIGEQFF

SEQ ID NO: 55583 - protein, 12 aa, Homo sapiens
  CDR3 for alpha chain variable domain of TCR clone 27792 (TRAV13-1, TRAJ9)
CASHTGGFKTIF

SEQ ID NO: 55584 - protein, 18 aa, Homo sapiens
  CDR3 for beta chain variable domain of TCR clone 27792 (TRBV11-2, TRBJ2-3)
CASSLGGAARGAPNTQYF

SEQ ID NO: 55585 - protein, 14 aa, Homo sapiens
  CDR3 for alpha chain variable domain of TCR clone 27793 (TRAV12-1, TRAJ17)
CVVNYKAAGNKLTF

SEQ ID NO: 55586 - protein, 17 aa, Homo sapiens
  CDR3 for beta chain variable domain of TCR clone 27793 (TRBV20-1, TRBJ2-1)
CSASSSGLAGSYNEKFF

SEQ ID NO: 55587 - protein, 11 aa, Homo sapiens
  CDR3 for alpha chain variable domain of TCR clone 27794 (TRAV12-1, TRAJ30)
CVVNGQDEIIF

SEQ ID NO: 55588 - protein, 12 aa, Homo sapiens
  CDR3 for beta chain variable domain of TCR clone 27794 (TRBV27, TRBJ2-2)
CASKLFTGELFF

SEQ ID NO: 55589 - protein, 11 aa, Homo sapiens
  CDR3 for alpha chain variable domain of TCR clone 27795 (TRAV1-2, TRAJ34)
CAGYNTDKLIF

SEQ ID NO: 55590 - protein, 16 aa, Homo sapiens
  CDR3 for beta chain variable domain of TCR clone 27795 (TRBV10-3, TRBJ2-1)
CAISGVGDGGGEEQFF

SEQ ID NO: 55591 - protein, 14 aa, Homo sapiens
  CDR3 for alpha chain variable domain of TCR clone 27796 (TRAV26-1, TRAJ45)
CIEVTGGGADGLIF

SEQ ID NO: 55592 - protein, 13 aa, Homo sapiens
  CDR3 for beta chain variable domain of TCR clone 27796 (TRBV7-6, TRBJ1-2)
CASSLVADYGYTF

SEQ ID NO: 55593 - protein, 15 aa, Homo sapiens
  CDR3 for alpha chain variable domain of TCR clone 27797 (TRAV8-3, TRAJ45)
CASSYSGGGADGLTF

SEQ ID NO: 55594 - protein, 13 aa, Homo sapiens
  CDR3 for beta chain variable domain of TCR clone 27797 (TRBV10-3, TRBJ2-7)
CAYKLAVNYEQHF

SEQ ID NO: 55595 - protein, 11 aa, Homo sapiens
  CDR3 for alpha chain variable domain of TCR clone 27798 (TRAV3, TRAJ21)
CAVGNFNKFYF

SEQ ID NO: 55596 - protein, 16 aa, Homo sapiens
  CDR3 for beta chain variable domain of TCR clone 27798 (TRBV6-1, TRBJ2-5)
CASSETLDRGAETQYF

SEQ ID NO: 55597 - protein, 14 aa, Homo sapiens
  CDR3 for alpha chain variable domain of TCR clone 27799 (TRAV12-2, TRAJ13)
CAVKKTGGYQKVTF

SEQ ID NO: 55598 - protein, 13 aa, Homo sapiens
  CDR3 for beta chain variable domain of TCR clone 27799 (TRBV27, TRBJ1-1)
CASSLSIGAEAFF

SEQ ID NO: 55599 - protein, 15 aa, Homo sapiens
  CDR3 for alpha chain variable domain of TCR clone 27800 (TRAV14/DV4, TRAJ33)
SAMREDMDSNYQLIW

SEQ ID NO: 55600 - protein, 16 aa, Homo sapiens
  CDR3 for beta chain variable domain of TCR clone 27800 (TRBV20-1, TRBJ1-4)
CSAPGQGLLTNEKLFF

SEQ ID NO: 55601 - protein, 13 aa, Homo sapiens
  CDR3 for alpha chain variable domain of TCR clone 27801 (TRAV3, TRAJ21)
CAVREPDFNKFYF

SEQ ID NO: 55602 - protein, 14 aa, Homo sapiens
  CDR3 for beta chain variable domain of TCR clone 27801 (TRBV7-2, TRBJ2-7)
CASRSQGAAYEQYF

SEQ ID NO: 55603 - protein, 11 aa, Homo sapiens
  CDR3 for alpha chain variable domain of TCR clone 27802 (TRAV1-2, TRAJ31)
CAVNNNARLMF

SEQ ID NO: 55604 - protein, 15 aa, Homo sapiens
  CDR3 for beta chain variable domain of TCR clone 27802 (TRBV28, TRBJ2-1)
CASIIIAGGRSEQFF

SEQ ID NO: 55605 - protein, 13 aa, Homo sapiens
  CDR3 for alpha chain variable domain of TCR clone 27803 (TRAV17, TRAJ9)
CATDYTGVFKTIF

SEQ ID NO: 55606 - protein, 14 aa, Homo sapiens
  CDR3 for beta chain variable domain of TCR clone 27803 (TRBV19, TRBJ2-5)
CASSMTGQQETQYF

SEQ ID NO: 55607 - protein, 18 aa, Homo sapiens
  CDR3 for alpha chain variable domain of TCR clone 27804 (TRAV16, TRAJ26)
CALSGSEFCLWSRNQIVR

SEQ ID NO: 55608 - protein, 12 aa, Homo sapiens
  CDR3 for beta chain variable domain of TCR clone 27804 (TRBV11-2, TRBJ2-1)
CASSPGNNEQFF

SEQ ID NO: 55609 - protein, 13 aa, Homo sapiens
  CDR3 for alpha chain variable domain of TCR clone 27805 (TRAV13-2, TRAJ8)
CAFMNTGFQKLVF

SEQ ID NO: 55610 - protein, 17 aa, Homo sapiens
  CDR3 for beta chain variable domain of TCR clone 27805 (TRBV28, TRBJ2-1)
CASSSARQDLTYNEQFF

SEQ ID NO: 55611 - protein, 10 aa, Homo sapiens
  CDR3 for alpha chain variable domain of TCR clone 27806 (TRAV23/DV6, TRAJ43)
CAAAVAALEQ

SEQ ID NO: 55612 - protein, 13 aa, Homo sapiens
  CDR3 for beta chain variable domain of TCR clone 27806 (TRBV12-4, TRBJ1-2)
CASSLRQGKGDTF

SEQ ID NO: 55613 - protein, 14 aa, Homo sapiens
  CDR3 for alpha chain variable domain of TCR clone 27807 (TRAV8-3, TRAJ4)
CAVGASGGYNKLIF

SEQ ID NO: 55614 - protein, 17 aa, Homo sapiens
  CDR3 for beta chain variable domain of TCR clone 27807 (TRBV11-3, TRBJ2-1)
CASSLYPPGVEYNEQFF

SEQ ID NO: 55615 - protein, 14 aa, Homo sapiens
  CDR3 for alpha chain variable domain of TCR clone 27808 (TRAV1-2, TRAJ15)
CAVRDRQAGTALTF

SEQ ID NO: 55616 - protein, 14 aa, Homo sapiens
  CDR3 for beta chain variable domain of TCR clone 27808 (TRBV4-1, TRBJ2-2)
CASSQAVNTGELFF

SEQ ID NO: 55617 - protein, 18 aa, Homo sapiens
  CDR3 for alpha chain variable domain of TCR clone 27809 (TRAV21, TRAJ52)
CAVRPSPAGGTSYGKLTF

SEQ ID NO: 55618 - protein, 21 aa, Homo sapiens
  CDR3 for beta chain variable domain of TCR clone 27809 (TRBV7-3, TRBJ1-1)
GGTQPCISVPAARIGGAEAFF

SEQ ID NO: 55619 - protein, 15 aa, Homo sapiens
  CDR3 for alpha chain variable domain of TCR clone 27810 (TRAV38-1, TRAJ37)
CSFIFGSGNTGKLIF

SEQ ID NO: 55620 - protein, 12 aa, Homo sapiens
  CDR3 for beta chain variable domain of TCR clone 27810 (TRBV7-9, TRBJ2-7)
CASSLEGYEQYF

SEQ ID NO: 55621 - protein, 14 aa, Homo sapiens
  CDR3 for alpha chain variable domain of TCR clone 27811 (TRAV1-2, TRAJ16)
CAVNPFSDGQKLLF

SEQ ID NO: 55622 - protein, 15 aa, Homo sapiens
  CDR3 for beta chain variable domain of TCR clone 27811 (TRBV9, TRBJ1-6)
CASSVAGTGDSPLHF

SEQ ID NO: 55623 - protein, 14 aa, Homo sapiens
  CDR3 for alpha chain variable domain of TCR clone 27812 (TRAV8-3, TRAJ13)
CAVGAQEGYQKVTS

SEQ ID NO: 55624 - protein, 13 aa, Homo sapiens
  CDR3 for beta chain variable domain of TCR clone 27812 (TRBV11-2, TRBJ2-5)
CASSSTGEETQYF

SEQ ID NO: 55625 - protein, 15 aa, Homo sapiens
  CDR3 for alpha chain variable domain of TCR clone 27813 (TRAV26-1, TRAJ29)
CIVRVEGSGNTPLVF

SEQ ID NO: 55626 - protein, 14 aa, Homo sapiens
  CDR3 for beta chain variable domain of TCR clone 27813 (TRBV18, TRBJ2-5)
CASSPGVSQETQYC

SEQ ID NO: 55627 - protein, 13 aa, Homo sapiens
  CDR3 for alpha chain variable domain of TCR clone 27814 (TRAV13-2, TRAJ48)
CAETDFGNEKLTF

SEQ ID NO: 55628 - protein, 14 aa, Homo sapiens
  CDR3 for beta chain variable domain of TCR clone 27814 (TRBV20-1, TRBJ2-7)
CSAKDRKGAYEQYF

SEQ ID NO: 55629 - protein, 18 aa, Homo sapiens
  CDR3 for alpha chain variable domain of TCR clone 27815 (TRAV13-1, TRAJ52)
CAAGKRSAGGTSYGKLTF

SEQ ID NO: 55630 - protein, 13 aa, Homo sapiens
  CDR3 for beta chain variable domain of TCR clone 27815 (TRBV12-4, TRBJ1-2)
CASSLRQGKGYTF

SEQ ID NO: 55631 - protein, 18 aa, Homo sapiens
  CDR3 for alpha chain variable domain of TCR clone 27816 (TRAV12-3, TRAJ52)
CAMSRTNAGGTSYGKLTF

SEQ ID NO: 55632 - protein, 17 aa, Homo sapiens
  CDR3 for beta chain variable domain of TCR clone 27816 (TRBV7-3, TRBJ2-3)
CASSLMKRMRGADTQYL

SEQ ID NO: 55633 - protein, 10 aa, Homo sapiens
  CDR3 for alpha chain variable domain of TCR clone 27817 (TRAV23/DV6, TRAJ57)
CAASSTLSQG

SEQ ID NO: 55634 - protein, 13 aa, Homo sapiens
  CDR3 for beta chain variable domain of TCR clone 27817 (TRBV25-1, TRBJ1-1)
CQHHLGGNTEAFF

SEQ ID NO: 55635 - protein, 13 aa, Homo sapiens
  CDR3 for alpha chain variable domain of TCR clone 27818 (TRAV13-1, TRAJ5)
CAASDTGRRALTF

SEQ ID NO: 55636 - protein, 17 aa, Homo sapiens
  CDR3 for beta chain variable domain of TCR clone 27818 (TRBV13, TRBJ2-3)
CASSLSRVAGGRNTQYF

SEQ ID NO: 55637 - protein, 14 aa, Homo sapiens
  CDR3 for alpha chain variable domain of TCR clone 27819 (TRAV1-2, TRAJ8)
CAVREDTGFQKLVF

SEQ ID NO: 55638 - protein, 17 aa, Homo sapiens
  CDR3 for beta chain variable domain of TCR clone 27819 (TRBV11-3, TRBJ2-1)
CASSLYPPGVEYNEQFF

SEQ ID NO: 55639 - protein, 18 aa, Homo sapiens
  CDR3 for alpha chain variable domain of TCR clone 27820 (TRAV29/DV5, TRAJ53)
CSVLLCSKRGGSNYKLTF

SEQ ID NO: 55640 - protein, 17 aa, Homo sapiens
  CDR3 for beta chain variable domain of TCR clone 27820 (TRBV7-8, TRBJ2-6)
CASSAGTGGAGANDLTF

SEQ ID NO: 55641 - protein, 14 aa, Homo sapiens
  CDR3 for alpha chain variable domain of TCR clone 27821 (TRAV38-1, TRAJ40)
CVLRPTSGTYKYIF

SEQ ID NO: 55642 - protein, 14 aa, Homo sapiens
  CDR3 for beta chain variable domain of TCR clone 27821 (TRBV25-1, TRBJ1-1)
CASTHLGGNTEAFF

SEQ ID NO: 55643 - protein, 14 aa, Homo sapiens
  CDR3 for alpha chain variable domain of TCR clone 27822 (TRAV13-1, TRAJ9)
CAASALTGGFKTIF

SEQ ID NO: 55644 - protein, 13 aa, Homo sapiens
  CDR3 for beta chain variable domain of TCR clone 27822 (TRBV20-1, TRBJ1-1)
CSAGTVGNTEAFF

SEQ ID NO: 55645 - protein, 14 aa, Homo sapiens
  CDR3 for alpha chain variable domain of TCR clone 27823 (TRAV12-2, TRAJ36)
CAVNPPTGANNLFF

SEQ ID NO: 55646 - protein, 13 aa, Homo sapiens
  CDR3 for beta chain variable domain of TCR clone 27823 (TRBV20-1, TRBJ1-6)
CSAPTGLGSTLHF

SEQ ID NO: 55647 - protein, 15 aa, Homo sapiens
  CDR3 for alpha chain variable domain of TCR clone 27824 (TRAV27, TRAJ33)
CAGADIMDSNYQLIW

SEQ ID NO: 55648 - protein, 13 aa, Homo sapiens
  CDR3 for beta chain variable domain of TCR clone 27824 (TRBV28, TRBJ1-2)
CASSVQGRGGYTF

SEQ ID NO: 55649 - protein, 12 aa, Homo sapiens
  CDR3 for alpha chain variable domain of TCR clone 27825 (TRAV1-1, TRAJ9)
CAVDTGGFKTIS

SEQ ID NO: 55650 - protein, 19 aa, Homo sapiens
  CDR3 for beta chain variable domain of TCR clone 27825 (TRBV9, TRBJ1-3)
CQQRRPGRNNDRSGNTIYF

SEQ ID NO: 55651 - protein, 13 aa, Homo sapiens
  CDR3 for alpha chain variable domain of TCR clone 27826 (TRAV20, TRAJ34)
CAVSSYNTDKLIF

SEQ ID NO: 55652 - protein, 13 aa, Homo sapiens
  CDR3 for beta chain variable domain of TCR clone 27826 (TRBV7-9, TRBJ1-2)
CASSVKQNYGYTF

SEQ ID NO: 55653 - protein, 11 aa, Homo sapiens
  CDR3 for alpha chain variable domain of TCR clone 27827 (TRAV3, TRAJ17)
PRGAAGSKLTF

SEQ ID NO: 55654 - protein, 12 aa, Homo sapiens
  CDR3 for beta chain variable domain of TCR clone 27827 (TRBV11-2, TRBJ2-2)
CASSLGGGELFF

SEQ ID NO: 55655 - protein, 18 aa, Homo sapiens
  CDR3 for alpha chain variable domain of TCR clone 27828 (TRAV26-2, TRAJ54)
CILRDVEVGIQGAQKRVF

SEQ ID NO: 55656 - protein, 17 aa, Homo sapiens
  CDR3 for beta chain variable domain of TCR clone 27828 (TRBV20-1, TRBJ1-5)
CSASLSPGQGGNQPQHF

SEQ ID NO: 55657 - protein, 11 aa, Homo sapiens
  CDR3 for alpha chain variable domain of TCR clone 27829 (TRAV4, TRAJ23)
CLVAPGGTLIF

SEQ ID NO: 55658 - protein, 15 aa, Homo sapiens
  CDR3 for beta chain variable domain of TCR clone 27829 (TRBV7-2, TRBJ2-1)
CASSFQADEYNEQFF

SEQ ID NO: 55659 - protein, 14 aa, Homo sapiens
  CDR3 for alpha chain variable domain of TCR clone 27830 (TRAV1-2, TRAJ16)
CAVNRFSDGQKLLF

SEQ ID NO: 55660 - protein, 12 aa, Homo sapiens
  CDR3 for beta chain variable domain of TCR clone 27830 (TRBV11-2, TRBJ2-2)
CASSLGGGELVF

SEQ ID NO: 55661 - protein, 14 aa, Homo sapiens
  CDR3 for alpha chain variable domain of TCR clone 27831 (TRAV8-3, TRAJ4)
CAVGASGGYNKLIF

SEQ ID NO: 55662 - protein, 13 aa, Homo sapiens
  CDR3 for beta chain variable domain of TCR clone 27831 (TRBV18, TRBJ2-5)
CASSLRGQETQYF

SEQ ID NO: 55663 - protein, 14 aa, Homo sapiens
  CDR3 for alpha chain variable domain of TCR clone 27832 (TRAV4, TRAJ9)
CLVGPGTGGFKTIF

SEQ ID NO: 55664 - protein, 15 aa, Homo sapiens
  CDR3 for beta chain variable domain of TCR clone 27832 (TRBV7-2, TRBJ2-1)
CASSLASGRVNEQFF

SEQ ID NO: 55665 - protein, 13 aa, Homo sapiens
  CDR3 for alpha chain variable domain of TCR clone 27833 (TRAV38-1, TRAJ42)
CARWGGSKGNLIF

SEQ ID NO: 55666 - protein, 17 aa, Homo sapiens
  CDR3 for beta chain variable domain of TCR clone 27833 (TRBV20-1, TRBJ2-1)
CSARDPLAGVWDNEQFF

SEQ ID NO: 55667 - protein, 15 aa, Homo sapiens
  CDR3 for alpha chain variable domain of TCR clone 27834 (TRAV1-2, TRAJ26)
CAVRDLITMVRILSL

SEQ ID NO: 55668 - protein, 11 aa, Homo sapiens
  CDR3 for beta chain variable domain of TCR clone 27834 (TRBV12-4, TRBJ2-3)
CASTATDTQYF

SEQ ID NO: 55669 - protein, 15 aa, Homo sapiens
  CDR3 for alpha chain variable domain of TCR clone 27835 (TRAV3, TRAJ22)
CAVRDRGGSARQLTF

SEQ ID NO: 55670 - protein, 16 aa, Homo sapiens
  CDR3 for beta chain variable domain of TCR clone 27835 (TRBV5-4, TRBJ2-3)
CASKQPGAGGADTQYF

SEQ ID NO: 55671 - protein, 17 aa, Homo sapiens
  CDR3 for alpha chain variable domain of TCR clone 27836 (TRAV3, TRAJ42)
CAVRDRDYGGSQGNLIF

SEQ ID NO: 55672 - protein, 13 aa, Homo sapiens
  CDR3 for beta chain variable domain of TCR clone 27836 (TRBV19, TRBJ1-2)
CASSVPGQDGYTF

SEQ ID NO: 55673 - protein, 16 aa, Homo sapiens
  CDR3 for alpha chain variable domain of TCR clone 27837 (TRAV16, TRAJ52)
CALSAAGCTSYGKLTF

SEQ ID NO: 55674 - protein, 12 aa, Homo sapiens
  CDR3 for beta chain variable domain of TCR clone 27837 (TRBV12-4, TRBJ1-3)
CASSFSGNTIYF

SEQ ID NO: 55675 - protein, 14 aa, Homo sapiens
  CDR3 for alpha chain variable domain of TCR clone 27838 (TRAV12-1, TRAJ17)
CVVNYKAAGNKLTF

SEQ ID NO: 55676 - protein, 17 aa, Homo sapiens
  CDR3 for beta chain variable domain of TCR clone 27838 (TRBV20-1, TRBJ2-1)
CSASSSGLAGYYNEQFF

SEQ ID NO: 55677 - protein, 10 aa, Homo sapiens
  CDR3 for alpha chain variable domain of TCR clone 27839 (TRAV26-1, TRAJ40)
CIAGTYKYIF

SEQ ID NO: 55678 - protein, 15 aa, Homo sapiens
  CDR3 for beta chain variable domain of TCR clone 27839 (TRBV19, TRBJ2-1)
CASSSPGVPLHEQFF

SEQ ID NO: 55679 - protein, 13 aa, Homo sapiens
  CDR3 for alpha chain variable domain of TCR clone 27840 (TRAV35, TRAJ42)
CAGFPGSQGNPIF

SEQ ID NO: 55680 - protein, 14 aa, Homo sapiens
  CDR3 for beta chain variable domain of TCR clone 27840 (TRBV4-1, TRBJ2-2)
CASSQAVNTGELFF

SEQ ID NO: 55681 - protein, 12 aa, Homo sapiens
  CDR3 for alpha chain variable domain of TCR clone 27841 (TRAV1-1, TRAJ8)
CAGGTGFQKIVF

SEQ ID NO: 55682 - protein, 15 aa, Homo sapiens
  CDR3 for beta chain variable domain of TCR clone 27841 (TRBV7-9, TRBJ1-4)
CASSRTGGFNEKLFF

SEQ ID NO: 55683 - protein, 14 aa, Homo sapiens
  CDR3 for alpha chain variable domain of TCR clone 27842 (TRAV8-4, TRAJ9)
CAVRINTGGFKPIF

SEQ ID NO: 55684 - protein, 15 aa, Homo sapiens
  CDR3 for beta chain variable domain of TCR clone 27842 (TRBV10-2, TRBJ2-6)
CASSEQGTGANVLTF

SEQ ID NO: 55685 - protein, 15 aa, Homo sapiens
  CDR3 for alpha chain variable domain of TCR clone 27843 (TRAV34, TRAJ38)
CGADFTPGNNRKLIW

SEQ ID NO: 55686 - protein, 11 aa, Homo sapiens
  CDR3 for beta chain variable domain of TCR clone 27843 (TRBV7-2, TRBJ2-3)
CASSLGDTQYF

SEQ ID NO: 55687 - protein, 15 aa, Homo sapiens
  CDR3 for alpha chain variable domain of TCR clone 27844 (TRAV17, TRAJ35)
CATAFVIGFGNVLHC

SEQ ID NO: 55688 - protein, 18 aa, Homo sapiens
  CDR3 for beta chain variable domain of TCR clone 27844 (TRBV11-2, TRBJ2-7)
CASSPLAGGRGTSSTSGR

SEQ ID NO: 55689 - protein, 16 aa, Homo sapiens
  CDR3 for alpha chain variable domain of TCR clone 27845 (TRAV30, TRAJ24)
CGTEIVDADSWGKFQF

SEQ ID NO: 55690 - protein, 11 aa, Homo sapiens
  CDR3 for beta chain variable domain of TCR clone 27845 (TRBV7-9, TRBJ2-3)
CASSGPDTQYF

SEQ ID NO: 55691 - protein, 13 aa, Homo sapiens
  CDR3 for alpha chain variable domain of TCR clone 27846 (TRAV3, TRAJ27)
CAVRPLGAGKSTF

SEQ ID NO: 55692 - protein, 13 aa, Homo sapiens
  CDR3 for beta chain variable domain of TCR clone 27846 (TRBV7-9, TRBJ2-3)
CASSPWSTDTQYF

SEQ ID NO: 55693 - protein, 12 aa, Homo sapiens
  CDR3 for alpha chain variable domain of TCR clone 27847 (TRAV27, TRAJ9)
CAGESGGFKTIF

SEQ ID NO: 55694 - protein, 14 aa, Homo sapiens
  CDR3 for beta chain variable domain of TCR clone 27847 (TRBV19, TRBJ2-1)
CASPTFVLSGEQFF

SEQ ID NO: 55695 - protein, 12 aa, Homo sapiens
  CDR3 for alpha chain variable domain of TCR clone 27848 (TRAV12-2, TRAJ3)
CAVWSSASKIIF

SEQ ID NO: 55696 - protein, 12 aa, Homo sapiens
  CDR3 for beta chain variable domain of TCR clone 27848 (TRBV11-2, TRBJ2-1)
CASSPGNNEQSF

SEQ ID NO: 55697 - protein, 11 aa, Homo sapiens
  CDR3 for alpha chain variable domain of TCR clone 27849 (TRAV17, TRAJ36)
CAPTGANNLSF

SEQ ID NO: 55698 - protein, 12 aa, Homo sapiens
  CDR3 for beta chain variable domain of TCR clone 27849 (TRBV29-1, TRBJ2-3)
CSVTGGADTQYF

SEQ ID NO: 55699 - protein, 12 aa, Homo sapiens
  CDR3 for alpha chain variable domain of TCR clone 27850 (TRAV13-1, TRAJ21)
CAAKGGFNKFYF

SEQ ID NO: 55700 - protein, 13 aa, Homo sapiens
  CDR3 for beta chain variable domain of TCR clone 27850 (TRBV19, TRBJ2-7)
CASSPRQSYEQYF

SEQ ID NO: 55701 - protein, 17 aa, Homo sapiens
  CDR3 for alpha chain variable domain of TCR clone 27851 (TRAV4, TRAJ42)
CLVGVLNYGGSQGNRIF

SEQ ID NO: 55702 - protein, 12 aa, Homo sapiens
  CDR3 for beta chain variable domain of TCR clone 27851 (TRBV20-1, TRBJ2-1)
CSAQYTYNEQFF

SEQ ID NO: 55703 - protein, 11 aa, Homo sapiens
  CDR3 for alpha chain variable domain of TCR clone 27852 (TRAV12-3, TRAJ43)
CAMSVSNDMRF

SEQ ID NO: 55704 - protein, 14 aa, Homo sapiens
  CDR3 for beta chain variable domain of TCR clone 27852 (TRBV19, TRBJ2-2)
CASSGQGIAGELFF

SEQ ID NO: 55705 - protein, 16 aa, Homo sapiens
  CDR3 for alpha chain variable domain of TCR clone 27853 (TRAV30, TRAJ24)
CGTEIVDADSWGKFQF

SEQ ID NO: 55706 - protein, 15 aa, Homo sapiens
  CDR3 for beta chain variable domain of TCR clone 27853 (TRBV19, TRBJ2-7)
CASSPAGSGEALRYF

SEQ ID NO: 55707 - protein, 14 aa, Homo sapiens
  CDR3 for alpha chain variable domain of TCR clone 27854 (TRAV17, TRAJ35)
CATDRPGFGNVLHC

SEQ ID NO: 55708 - protein, 18 aa, Homo sapiens
  CDR3 for beta chain variable domain of TCR clone 27854 (TRBV11-2, TRBJ2-3)
CASSLGGASRGAPNTQYF

SEQ ID NO: 55709 - protein, 12 aa, Homo sapiens
  CDR3 for alpha chain variable domain of TCR clone 27855 (TRAV21, TRAJ33)
CAKMDSNSQLIW

SEQ ID NO: 55710 - protein, 14 aa, Homo sapiens
  CDR3 for beta chain variable domain of TCR clone 27855 (TRBV2, TRBJ2-7)
CASSLTSGGYEQYF

SEQ ID NO: 55711 - protein, 15 aa, Homo sapiens
  CDR3 for alpha chain variable domain of TCR clone 27856 (TRAV8-3, TRAJ15)
CAVGAPNQAGTALIF

SEQ ID NO: 55712 - protein, 14 aa, Homo sapiens
  CDR3 for beta chain variable domain of TCR clone 27856 (TRBV20-1, TRBJ2-1)
RSPNDEASYNEQFF

SEQ ID NO: 55713 - protein, 13 aa, Homo sapiens
  CDR3 for alpha chain variable domain of TCR clone 27857 (TRAV20, TRAJ54)
CAVQAGGAQKLVF

SEQ ID NO: 55714 - protein, 14 aa, Homo sapiens
  CDR3 for beta chain variable domain of TCR clone 27857 (TRBV20-1, TRBJ2-7)
CSANTGTGGYEQYF

SEQ ID NO: 55715 - protein, 14 aa, Homo sapiens
  CDR3 for alpha chain variable domain of TCR clone 27858 (TRAV27, TRAJ3)
QASLRGSSASKIIF

SEQ ID NO: 55716 - protein, 15 aa, Homo sapiens
  CDR3 for beta chain variable domain of TCR clone 27858 (TRBV28, TRBJ1-3)
CASSMGWASGNTIYF

SEQ ID NO: 55717 - protein, 15 aa, Homo sapiens
  CDR3 for alpha chain variable domain of TCR clone 27859 (TRAV26-1, TRAJ44)
CIVRANTGTASKLTF

SEQ ID NO: 55718 - protein, 15 aa, Homo sapiens
  CDR3 for beta chain variable domain of TCR clone 27859 (TRBV7-9, TRBJ1-5)
CASSQGHQPNQPQHF

SEQ ID NO: 55719 - protein, 14 aa, Homo sapiens
  CDR3 for alpha chain variable domain of TCR clone 27860 (TRAV3, TRAJ9)
CAVRLNTGGFKTIF

SEQ ID NO: 55720 - protein, 15 aa, Homo sapiens
  CDR3 for beta chain variable domain of TCR clone 27860 (TRBV7-2, TRBJ2-1)
CASSLASGHVNEQFF

SEQ ID NO: 55721 - protein, 15 aa, Homo sapiens
  CDR3 for alpha chain variable domain of TCR clone 27861 (TRAV3, TRAJ22)
CAVRDRGGSARQLTF

SEQ ID NO: 55722 - protein, 15 aa, Homo sapiens
  CDR3 for beta chain variable domain of TCR clone 27861 (TRBV4-1, TRBJ1-4)
CASSDTGGTNEKLFF

SEQ ID NO: 55723 - protein, 15 aa, Homo sapiens
  CDR3 for alpha chain variable domain of TCR clone 27862 (TRAV17, TRAJ57)
CATGPSQGGSEKLVF

SEQ ID NO: 55724 - protein, 14 aa, Homo sapiens
  CDR3 for beta chain variable domain of TCR clone 27862 (TRBV7-2, TRBJ2-7)
CASRSQGAAYEQYF

SEQ ID NO: 55725 - protein, 11 aa, Homo sapiens
  CDR3 for alpha chain variable domain of TCR clone 27863 (TRAV1-2, TRAJ40)
CAVPGTYKYTF

SEQ ID NO: 55726 - protein, 15 aa, Homo sapiens
  CDR3 for beta chain variable domain of TCR clone 27863 (TRBV25-1, TRBJ1-4)
CASSPGDSTNEKLFF

SEQ ID NO: 55727 - protein, 15 aa, Homo sapiens
  CDR3 for alpha chain variable domain of TCR clone 27864 (TRAV12-2, TRAJ53)
CAVNGGGGSNYKLTF

SEQ ID NO: 55728 - protein, 14 aa, Homo sapiens
  CDR3 for beta chain variable domain of TCR clone 27864 (TRBV12-4, TRBJ1-1)
CASSLGTGGTEAFF

SEQ ID NO: 55729 - protein, 14 aa, Homo sapiens
  CDR3 for alpha chain variable domain of TCR clone 27865 (TRAV12-1, TRAJ13)
CVVIDSGGYQKVTF

SEQ ID NO: 55730 - protein, 15 aa, Homo sapiens
  CDR3 for beta chain variable domain of TCR clone 27865 (TRBV20-1, TRBJ2-7)
CSARDRVSGMDEQYF

SEQ ID NO: 55731 - protein, 15 aa, Homo sapiens
  CDR3 for alpha chain variable domain of TCR clone 27866 (TRAV3, TRAJ22)
CAVRDRGGSARQLTF

SEQ ID NO: 55732 - protein, 15 aa, Homo sapiens
  CDR3 for beta chain variable domain of TCR clone 27866 (TRBV18, TRBJ2-1)
CASSPPSASYNEQFF

SEQ ID NO: 55733 - protein, 14 aa, Homo sapiens
  CDR3 for alpha chain variable domain of TCR clone 27867 (TRAV26-1, TRAJ45)
CIEVTGGGADGPTF

SEQ ID NO: 55734 - protein, 15 aa, Homo sapiens
  CDR3 for beta chain variable domain of TCR clone 27867 (TRBV5-1, TRBJ1-1)
CASSSTTGTNTEAFF

SEQ ID NO: 55735 - protein, 15 aa, Homo sapiens
  CDR3 for alpha chain variable domain of TCR clone 27868 (TRAV13-2, TRAJ42)
CAGLNYGGSQGNLIF

SEQ ID NO: 55736 - protein, 16 aa, Homo sapiens
  CDR3 for beta chain variable domain of TCR clone 27868 (TRBV5-4, TRBJ2-5)
CASSLGLAGGRETQYF

SEQ ID NO: 55737 - protein, 11 aa, Homo sapiens
  CDR3 for alpha chain variable domain of TCR clone 27869 (TRAV2, TRAJ33)
CAVESNYQLIW

SEQ ID NO: 55738 - protein, 14 aa, Homo sapiens
  CDR3 for beta chain variable domain of TCR clone 27869 (TRBV7-6, TRBJ2-3)
CASSLGTVTDTQYF

SEQ ID NO: 55739 - protein, 12 aa, Homo sapiens
  CDR3 for alpha chain variable domain of TCR clone 27870 (TRAV21, TRAJ12)
CAVMDSSYKLIF

SEQ ID NO: 55740 - protein, 16 aa, Homo sapiens
  CDR3 for beta chain variable domain of TCR clone 27870 (TRBV7-9, TRBJ2-5)
CASRLETGTRKETQYF

SEQ ID NO: 55741 - protein, 14 aa, Homo sapiens
  CDR3 for alpha chain variable domain of TCR clone 27871 (TRAV38-1, TRAJ29)
CAFITPSGNTPLVF

SEQ ID NO: 55742 - protein, 14 aa, Homo sapiens
  CDR3 for beta chain variable domain of TCR clone 27871 (TRBV18, TRBJ2-7)
CASSPRGGDYEQYF

SEQ ID NO: 55743 - protein, 13 aa, Homo sapiens
  CDR3 for alpha chain variable domain of TCR clone 27872 (TRAV20, TRAJ57)
CAVHPGGSEKLVF

SEQ ID NO: 55744 - protein, 14 aa, Homo sapiens
  CDR3 for beta chain variable domain of TCR clone 27872 (TRBV7-3, TRBJ2-7)
CASSLGRGSYEQYF

SEQ ID NO: 55745 - protein, 10 aa, Homo sapiens
  CDR3 for alpha chain variable domain of TCR clone 27873 (TRAV23/DV6, TRAJ57)
CAASSTLSQG

SEQ ID NO: 55746 - protein, 15 aa, Homo sapiens
  CDR3 for beta chain variable domain of TCR clone 27873 (TRBV7-9, TRBJ1-6)
CASSSPGRGNSPLHF

SEQ ID NO: 55747 - protein, 15 aa, Homo sapiens
  CDR3 for alpha chain variable domain of TCR clone 27874 (TRAV8-3, TRAJ27)
CAVGHSKTNAGKSTF

SEQ ID NO: 55748 - protein, 15 aa, Homo sapiens
  CDR3 for beta chain variable domain of TCR clone 27874 (TRBV7-2, TRBJ2-1)
CASSSGLAGGNEQFF

SEQ ID NO: 55749 - protein, 11 aa, Homo sapiens
  CDR3 for alpha chain variable domain of TCR clone 27875 (TRAV1-1, TRAJ23)
CAVRQGGKLIF

SEQ ID NO: 55750 - protein, 20 aa, Homo sapiens
  CDR3 for beta chain variable domain of TCR clone 27875 (TRBV7-8, TRBJ2-2)
CASIHLFPGPTIHITGELFF

SEQ ID NO: 55751 - protein, 11 aa, Homo sapiens
  CDR3 for alpha chain variable domain of TCR clone 27876 (TRAV1-2, TRAJ11)
CAVRGYSTLTF

SEQ ID NO: 55752 - protein, 13 aa, Homo sapiens
  CDR3 for beta chain variable domain of TCR clone 27876 (TRBV20-1, TRBJ1-2)
CSAPRPGRYGYTF

SEQ ID NO: 55753 - protein, 15 aa, Homo sapiens
  CDR3 for alpha chain variable domain of TCR clone 27877 (TRAV14/DV4, TRAJ22)
CATREGWTTARQLTF

SEQ ID NO: 55754 - protein, 13 aa, Homo sapiens
  CDR3 for beta chain variable domain of TCR clone 27877 (TRBV5-4, TRBJ1-2)
CASSSRENYGYTF

SEQ ID NO: 55755 - protein, 14 aa, Homo sapiens
  CDR3 for alpha chain variable domain of TCR clone 27878 (TRAV20, TRAJ29)
CAVQAWVGNTPLVF

SEQ ID NO: 55756 - protein, 15 aa, Homo sapiens
  CDR3 for beta chain variable domain of TCR clone 27878 (TRBV29-1, TRBJ2-7)
CSVEFFDRGSHEQYF

SEQ ID NO: 55757 - protein, 11 aa, Homo sapiens
  CDR3 for alpha chain variable domain of TCR clone 27879 (TRAV26-1, TRAJ37)
CIVRVGRKLIF

SEQ ID NO: 55758 - protein, 15 aa, Homo sapiens
  CDR3 for beta chain variable domain of TCR clone 27879 (TRBV28, TRBJ2-1)
CASSIIAGGRSEQFF

SEQ ID NO: 55759 - protein, 14 aa, Homo sapiens
  CDR3 for alpha chain variable domain of TCR clone 27880 (TRAV12-2, TRAJ45)
CAVNIGGGADGLTS

SEQ ID NO: 55760 - protein, 13 aa, Homo sapiens
  CDR3 for beta chain variable domain of TCR clone 27880 (TRBV19, TRBJ2-2)
CASSIWSTGELFF

SEQ ID NO: 55761 - protein, 13 aa, Homo sapiens
  CDR3 for alpha chain variable domain of TCR clone 27881 (TRAV2, TRAJ15)
CAVASQAGTALIF

SEQ ID NO: 55762 - protein, 16 aa, Homo sapiens
  CDR3 for beta chain variable domain of TCR clone 27881 (TRBV5-1, TRBJ1-1)
CASSSGGDSLNTEAFF

SEQ ID NO: 55763 - protein, 13 aa, Homo sapiens
  CDR3 for alpha chain variable domain of TCR clone 27882 (TRAV22, TRAJ29)
CAVGGSGNTPLVF

SEQ ID NO: 55764 - protein, 13 aa, Homo sapiens
  CDR3 for beta chain variable domain of TCR clone 27882 (TRBV4-2, TRBJ1-1)
CARSQAGNTEAFF

SEQ ID NO: 55765 - protein, 13 aa, Homo sapiens
  CDR3 for alpha chain variable domain of TCR clone 27883 (TRAV12-3, TRAJ43)
CAMIRPNNNDMRF

SEQ ID NO: 55766 - protein, 14 aa, Homo sapiens
  CDR3 for beta chain variable domain of TCR clone 27883 (TRBV5-8, TRBJ2-3)
CASSLGQGTDTQYF

SEQ ID NO: 55767 - protein, 11 aa, Homo sapiens
  CDR3 for alpha chain variable domain of TCR clone 27884 (TRAV12-1, TRAJ8)
CVVTGFQKLVF

SEQ ID NO: 55768 - protein, 14 aa, Homo sapiens
  CDR3 for beta chain variable domain of TCR clone 27884 (TRBV19, TRBJ2-1)
CASGKSTQCNEQFF

SEQ ID NO: 55769 - protein, 13 aa, Homo sapiens
  CDR3 for alpha chain variable domain of TCR clone 27885 (TRAV29/DV5, TRAJ31)
CAASRNNSARLMF

SEQ ID NO: 55770 - protein, 13 aa, Homo sapiens
  CDR3 for beta chain variable domain of TCR clone 27885 (TRBV7-2, TRBJ2-4)
CASSREHANIQYF

SEQ ID NO: 55771 - protein, 17 aa, Homo sapiens
  CDR3 for alpha chain variable domain of TCR clone 27886 (TRAV12-3, TRAJ6)
CAMSARGGAGGSHIPTF

SEQ ID NO: 55772 - protein, 12 aa, Homo sapiens
  CDR3 for beta chain variable domain of TCR clone 27886 (TRBV12-4, TRBJ2-3)
CASSTLPDTQYF

SEQ ID NO: 55773 - protein, 13 aa, Homo sapiens
  CDR3 for alpha chain variable domain of TCR clone 27887 (TRAV27, TRAJ41)
YAGEGNSGYALNF

SEQ ID NO: 55774 - protein, 14 aa, Homo sapiens
  CDR3 for beta chain variable domain of TCR clone 27887 (TRBV7-2, TRBJ1-1)
CASSFLTGTTEAFF

SEQ ID NO: 55775 - protein, 11 aa, Homo sapiens
  CDR3 for alpha chain variable domain of TCR clone 27888 (TRAV1-2, TRAJ40)
CAVPGTYKYIF

SEQ ID NO: 55776 - protein, 17 aa, Homo sapiens
  CDR3 for beta chain variable domain of TCR clone 27888 (TRBV5-7, TRBJ1-5)
CASSYGNCGISPSILVM

SEQ ID NO: 55777 - protein, 13 aa, Homo sapiens
  CDR3 for alpha chain variable domain of TCR clone 27889 (TRAV12-2, TRAJ20)
CAVYPSNDYKLSF

SEQ ID NO: 55778 - protein, 15 aa, Homo sapiens
  CDR3 for beta chain variable domain of TCR clone 27889 (TRBV27, TRBJ2-5)
FASSLYPRGGETQYF

SEQ ID NO: 55779 - protein, 11 aa, Homo sapiens
  CDR3 for alpha chain variable domain of TCR clone 27890 (TRAV17, TRAJ31)
CATDRTARLMF

SEQ ID NO: 55780 - protein, 14 aa, Homo sapiens
  CDR3 for beta chain variable domain of TCR clone 27890 (TRBV11-2, TRBJ1-2)
CASSLGTANYGYTF

SEQ ID NO: 55781 - protein, 13 aa, Homo sapiens
  CDR3 for alpha chain variable domain of TCR clone 27891 (TRAV35, TRAJ42)
CAGFPGSQGNLIF

SEQ ID NO: 55782 - protein, 13 aa, Homo sapiens
  CDR3 for beta chain variable domain of TCR clone 27891 (TRBV29-1, TRBJ2-1)
CSVEGGRANEQFF

SEQ ID NO: 55783 - protein, 16 aa, Homo sapiens
  CDR3 for alpha chain variable domain of TCR clone 27892 (TRAV3, TRAJ37)
CAVRGKGSGNTGKLTF

SEQ ID NO: 55784 - protein, 13 aa, Homo sapiens
  CDR3 for beta chain variable domain of TCR clone 27892 (TRBV14, TRBJ2-7)
CASSQDRRYEQYF

SEQ ID NO: 55785 - protein, 11 aa, Homo sapiens
  CDR3 for alpha chain variable domain of TCR clone 27893 (TRAV13-1, TRAJ30)
CAASRDDKIIF

SEQ ID NO: 55786 - protein, 15 aa, Homo sapiens
  CDR3 for beta chain variable domain of TCR clone 27893 (TRBV18, TRBJ1-1)
CASSPSNWVNTEAFF

SEQ ID NO: 55787 - protein, 12 aa, Homo sapiens
  CDR3 for alpha chain variable domain of TCR clone 27894 (TRAV13-1, TRAJ9)
CAPHTGGFKTIF

SEQ ID NO: 55788 - protein, 18 aa, Homo sapiens
  CDR3 for beta chain variable domain of TCR clone 27894 (TRBV11-2, TRBJ2-3)
CASSLGGASRGAPNTQYF

SEQ ID NO: 55789 - protein, 13 aa, Homo sapiens
  CDR3 for alpha chain variable domain of TCR clone 27895 (TRAV13-2, TRAJ57)
CAESEGGSEKLVL

SEQ ID NO: 55790 - protein, 14 aa, Homo sapiens
  CDR3 for beta chain variable domain of TCR clone 27895 (TRBV20-1, TRBJ1-2)
CSANPPPGRYGYTF

SEQ ID NO: 55791 - protein, 15 aa, Homo sapiens
  CDR3 for alpha chain variable domain of TCR clone 27896 (TRAV3, TRAJ3)
CAVRDRDSSASKIIF

SEQ ID NO: 55792 - protein, 18 aa, Homo sapiens
  CDR3 for beta chain variable domain of TCR clone 27896 (TRBV25-1, TRBJ1-2)
CASSGLQNGQGLIFSYTF

SEQ ID NO: 55793 - protein, 13 aa, Homo sapiens
  CDR3 for alpha chain variable domain of TCR clone 27897 (TRAV12-1, TRAJ40)
CAVPTSGTYKYIF

SEQ ID NO: 55794 - protein, 18 aa, Homo sapiens
  CDR3 for beta chain variable domain of TCR clone 27897 (TRBV7-6, TRBJ2-1)
CASSPRTSGMSSYNEQFF

SEQ ID NO: 55795 - protein, 16 aa, Homo sapiens
  CDR3 for alpha chain variable domain of TCR clone 27898 (TRAV14/DV4, TRAJ53)
CAMREGGGGSNYKLTF

SEQ ID NO: 55796 - protein, 13 aa, Homo sapiens
  CDR3 for beta chain variable domain of TCR clone 27898 (TRBV27, TRBJ2-1)
CASRTLGVGEQFF

SEQ ID NO: 55797 - protein, 14 aa, Homo sapiens
  CDR3 for alpha chain variable domain of TCR clone 27899 (TRAV8-3, TRAJ4)
CAVGAAGGYNKLSF

SEQ ID NO: 55798 - protein, 15 aa, Homo sapiens
  CDR3 for beta chain variable domain of TCR clone 27899 (TRBV6-5, TRBJ2-1)
CASSYDAGAGNEQFF

SEQ ID NO: 55799 - protein, 19 aa, Homo sapiens
  CDR3 for alpha chain variable domain of TCR clone 27900 (TRAV3, TRAJ6)
CAVRDGPRQEEATYLHLEE

SEQ ID NO: 55800 - protein, 14 aa, Homo sapiens
  CDR3 for beta chain variable domain of TCR clone 27900 (TRBV7-2, TRBJ2-7)
CASSPKTSFYEQYF

SEQ ID NO: 55801 - protein, 10 aa, Homo sapiens
  CDR3 for alpha chain variable domain of TCR clone 27901 (TRAV38-2/DV8, TRAJ40)
CASGTYKYIF

SEQ ID NO: 55802 - protein, 14 aa, Homo sapiens
  CDR3 for beta chain variable domain of TCR clone 27901 (TRBV6-1, TRBJ1-3)
CASVQGGGGNTIYF

SEQ ID NO: 55803 - protein, 15 aa, Homo sapiens
  CDR3 for alpha chain variable domain of TCR clone 27902 (TRAV26-1, TRAJ44)
CIVRANTGTAIKLTF

SEQ ID NO: 55804 - protein, 16 aa, Homo sapiens
  CDR3 for beta chain variable domain of TCR clone 27902 (TRBV7-7, TRBJ2-1)
CASSLASGTSYNEQFF

SEQ ID NO: 55805 - protein, 13 aa, Homo sapiens
  CDR3 for alpha chain variable domain of TCR clone 27903 (TRAV16, TRAJ10)
CALLTGGGNKLPF

SEQ ID NO: 55806 - protein, 12 aa, Homo sapiens
  CDR3 for beta chain variable domain of TCR clone 27903 (TRBV28, TRBJ2-7)
CASTGNHYEQYF

SEQ ID NO: 55807 - protein, 14 aa, Homo sapiens
  CDR3 for alpha chain variable domain of TCR clone 27904 (TRAV1-2, TRAJ16)
CAVNRFSGGQKLLF

SEQ ID NO: 55808 - protein, 11 aa, Homo sapiens
  CDR3 for beta chain variable domain of TCR clone 27904 (TRBV29-1, TRBJ2-5)
CSEDRTGTQYF

SEQ ID NO: 55809 - protein, 16 aa, Homo sapiens
  CDR3 for alpha chain variable domain of TCR clone 27905 (TRAV27, TRAJ13)
CAGAKSDSWGYQKVTF

SEQ ID NO: 55810 - protein, 15 aa, Homo sapiens
  CDR3 for beta chain variable domain of TCR clone 27905 (TRBV29-1, TRBJ2-1)
CSVGRHALFYNEQFF

SEQ ID NO: 55811 - protein, 13 aa, Homo sapiens
  CDR3 for alpha chain variable domain of TCR clone 27906 (TRAV27, TRAJ41)
CAGEGNSGYALNF

SEQ ID NO: 55812 - protein, 14 aa, Homo sapiens
  CDR3 for beta chain variable domain of TCR clone 27906 (TRBV7-2, TRBJ1-1)
CASSFLTGTTEAFS

SEQ ID NO: 55813 - protein, 15 aa, Homo sapiens
  CDR3 for alpha chain variable domain of TCR clone 27907 (TRAV20, TRAJ53)
CAVQASGGSNYKLTF

SEQ ID NO: 55814 - protein, 14 aa, Homo sapiens
  CDR3 for beta chain variable domain of TCR clone 27907 (TRBV7-2, TRBJ2-3)
CASSLVGGSRYAVF

SEQ ID NO: 55815 - protein, 13 aa, Homo sapiens
  CDR3 for alpha chain variable domain of TCR clone 27908 (TRAV8-3, TRAJ43)
CAVGPDNNSDMRF

SEQ ID NO: 55816 - protein, 12 aa, Homo sapiens
  CDR3 for beta chain variable domain of TCR clone 27908 (TRBV7-2, TRBJ1-6)
CASSLSSSPLHF

SEQ ID NO: 55817 - protein, 12 aa, Homo sapiens
  CDR3 for alpha chain variable domain of TCR clone 27909 (TRAV12-3, TRAJ3)
RAIDSSASKIIF

SEQ ID NO: 55818 - protein, 17 aa, Homo sapiens
  CDR3 for beta chain variable domain of TCR clone 27909 (TRBV7-9, TRBJ2-3)
CASSLEEAGAYPDTQYF

SEQ ID NO: 55819 - protein, 13 aa, Homo sapiens
  CDR3 for alpha chain variable domain of TCR clone 27910 (TRAV13-1, TRAJ39)
CSKYSNAGNMLTF

SEQ ID NO: 55820 - protein, 15 aa, Homo sapiens
  CDR3 for beta chain variable domain of TCR clone 27910 (TRBV6-3, TRBJ2-7)
CASSSPGTVFYEQYF

SEQ ID NO: 55821 - protein, 15 aa, Homo sapiens
  CDR3 for alpha chain variable domain of TCR clone 27911 (TRAV12-1, TRAJ44)
CVVDEYTGTASKLTF

SEQ ID NO: 55822 - protein, 14 aa, Homo sapiens
  CDR3 for beta chain variable domain of TCR clone 27911 (TRBV5-1, TRBJ1-2)
RASSLEPVNYGYTF

SEQ ID NO: 55823 - protein, 13 aa, Homo sapiens
  CDR3 for alpha chain variable domain of TCR clone 27912 (TRAV26-1, TRAJ17)
IAFLKAAGNKLTF

SEQ ID NO: 55824 - protein, 16 aa, Homo sapiens
  CDR3 for beta chain variable domain of TCR clone 27912 (TRBV28, TRBJ1-4)
CASSSRTGAANEKLFF

SEQ ID NO: 55825 - protein, 12 aa, Homo sapiens
  CDR3 for alpha chain variable domain of TCR clone 27913 (TRAV21, TRAJ31)
CVLAGNNAGLMF

SEQ ID NO: 55826 - protein, 16 aa, Homo sapiens
  CDR3 for beta chain variable domain of TCR clone 27913 (TRBV27, TRBJ2-5)
CASSFGPGGTKETQYF

SEQ ID NO: 55827 - protein, 14 aa, Homo sapiens
  CDR3 for alpha chain variable domain of TCR clone 27914 (TRAV12-2, TRAJ53)
CAGKGGGSNYKLTF

SEQ ID NO: 55828 - protein, 14 aa, Homo sapiens
  CDR3 for beta chain variable domain of TCR clone 27914 (TRBV19, TRBJ2-1)
CASPTFVLSGEQFF

SEQ ID NO: 55829 - protein, 19 aa, Homo sapiens
  CDR3 for alpha chain variable domain of TCR clone 27915 (TRAV35, TRAJ30)
CAPGGMTRSSLEKGHDFIF

SEQ ID NO: 55830 - protein, 15 aa, Homo sapiens
  CDR3 for beta chain variable domain of TCR clone 27915 (TRBV9, TRBJ1-6)
CASSVAGTGDSPLHF

SEQ ID NO: 55831 - protein, 12 aa, Homo sapiens
  CDR3 for alpha chain variable domain of TCR clone 27916 (TRAV8-6, TRAJ43)
CAVSNNNNDMRF

SEQ ID NO: 55832 - protein, 15 aa, Homo sapiens
  CDR3 for beta chain variable domain of TCR clone 27916 (TRBV7-3, TRBJ2-6)
CAGSLGGSGANVLTF

SEQ ID NO: 55833 - protein, 14 aa, Homo sapiens
  CDR3 for alpha chain variable domain of TCR clone 27917 (TRAV12-2, TRAJ5)
CAVNRSTGRRALPF

SEQ ID NO: 55834 - protein, 12 aa, Homo sapiens
  CDR3 for beta chain variable domain of TCR clone 27917 (TRBV19, TRBJ1-5)
CASSIAQQPQHF

SEQ ID NO: 55835 - protein, 13 aa, Homo sapiens
  CDR3 for alpha chain variable domain of TCR clone 27918 (TRAV38-2/DV8, TRAJ34)
CAYRTWNTDKPIF

SEQ ID NO: 55836 - protein, 18 aa, Homo sapiens
  CDR3 for beta chain variable domain of TCR clone 27918 (TRBV6-6, TRBJ1-3)
CASSYSKWDSISGNTIYF

SEQ ID NO: 55837 - protein, 14 aa, Homo sapiens
  CDR3 for alpha chain variable domain of TCR clone 27919 (TRAV26-1, TRAJ26)
CIVRATFLGQNFVF

SEQ ID NO: 55838 - protein, 16 aa, Homo sapiens
  CDR3 for beta chain variable domain of TCR clone 27919 (TRBV12-4, TRBJ2-7)
CASRPTGTGPSYEQYF

SEQ ID NO: 55839 - protein, 18 aa, Homo sapiens
  CDR3 for alpha chain variable domain of TCR clone 27920 (TRAV17, TRAJ45)
CATSLDLYSGGGADGPTF

SEQ ID NO: 55840 - protein, 15 aa, Homo sapiens
  CDR3 for beta chain variable domain of TCR clone 27920 (TRBV11-2, TRBJ2-1)
CASSKNRGLIYEQFF

SEQ ID NO: 55841 - protein, 14 aa, Homo sapiens
  CDR3 for alpha chain variable domain of TCR clone 27921 (TRAV9-2, TRAJ39)
CALYIYNAGNMLTF

SEQ ID NO: 55842 - protein, 13 aa, Homo sapiens
  CDR3 for beta chain variable domain of TCR clone 27921 (TRBV20-1, TRBJ2-2)
CSASAAGTGELFF

SEQ ID NO: 55843 - protein, 14 aa, Homo sapiens
  CDR3 for alpha chain variable domain of TCR clone 27922 (TRAV12-1, TRAJ8)
CAVNSNTGFQKLVF

SEQ ID NO: 55844 - protein, 16 aa, Homo sapiens
  CDR3 for beta chain variable domain of TCR clone 27922 (TRBV20-1, TRBJ2-2)
CSARDDRVGLTGELFF

SEQ ID NO: 55845 - protein, 13 aa, Homo sapiens
  CDR3 for alpha chain variable domain of TCR clone 27923 (TRAV27, TRAJ54)
CAGAGQGAQKLVF

SEQ ID NO: 55846 - protein, 15 aa, Homo sapiens
  CDR3 for beta chain variable domain of TCR clone 27923 (TRBV18, TRBJ2-6)
CAGSPSYAGANVLTF

SEQ ID NO: 55847 - protein, 13 aa, Homo sapiens
  CDR3 for alpha chain variable domain of TCR clone 27924 (TRAV17, TRAJ21)
CTTDGNNFNKFYF

SEQ ID NO: 55848 - protein, 12 aa, Homo sapiens
  CDR3 for beta chain variable domain of TCR clone 27924 (TRBV20-1, TRBJ1-1)
CSARGGNTEAFF

SEQ ID NO: 55849 - protein, 20 aa, Homo sapiens
  CDR3 for alpha chain variable domain of TCR clone 27925 (TRAV25, TRAJ21)
TATQTTDVGTYPLSFNKFYF

SEQ ID NO: 55850 - protein, 14 aa, Homo sapiens
  CDR3 for beta chain variable domain of TCR clone 27925 (TRBV6-1, TRBJ2-1)
CASAKDGSYNEQFF

SEQ ID NO: 55851 - protein, 14 aa, Homo sapiens
  CDR3 for alpha chain variable domain of TCR clone 27926 (TRAV29/DV5, TRAJ22)
CAASATGSAGQLTF

SEQ ID NO: 55852 - protein, 14 aa, Homo sapiens
  CDR3 for beta chain variable domain of TCR clone 27926 (TRBV19, TRBJ2-1)
CASSPGLAPNEQFF

SEQ ID NO: 55853 - protein, 14 aa, Homo sapiens
  CDR3 for alpha chain variable domain of TCR clone 27927 (TRAV1-2, TRAJ16)
CAVNRFSDGQKLLF

SEQ ID NO: 55854 - protein, 15 aa, Homo sapiens
  CDR3 for beta chain variable domain of TCR clone 27927 (TRBV9, TRBJ1-6)
CASSVAGTGDAPLHF

SEQ ID NO: 55855 - protein, 13 aa, Homo sapiens
  CDR3 for alpha chain variable domain of TCR clone 27928 (TRAV21, TRAJ27)
CAARPGNACKSTF

SEQ ID NO: 55856 - protein, 13 aa, Homo sapiens
  CDR3 for beta chain variable domain of TCR clone 27928 (TRBV7-3, TRBJ2-7)
CASSQAGGYEQYF

SEQ ID NO: 55857 - protein, 15 aa, Homo sapiens
  CDR3 for alpha chain variable domain of TCR clone 27929 (TRAV27, TRAJ38)
CAARRNAGNNRKLLW

SEQ ID NO: 55858 - protein, 13 aa, Homo sapiens
  CDR3 for beta chain variable domain of TCR clone 27929 (TRBV12-5, TRBJ2-3)
CASGDRQSDTQYF

SEQ ID NO: 55859 - protein, 13 aa, Homo sapiens
  CDR3 for alpha chain variable domain of TCR clone 27930 (TRAV3, TRAJ33)
CAVRDRSNYQLIW

SEQ ID NO: 55860 - protein, 16 aa, Homo sapiens
  CDR3 for beta chain variable domain of TCR clone 27930 (TRBV4-2, TRBJ2-7)
CASSRDRGTSSYEQYF

SEQ ID NO: 55861 - protein, 12 aa, Homo sapiens
  CDR3 for alpha chain variable domain of TCR clone 27931 (TRAV13-1, TRAJ53)
AASGGSNYKLTF

SEQ ID NO: 55862 - protein, 13 aa, Homo sapiens
  CDR3 for beta chain variable domain of TCR clone 27931 (TRBV10-3, TRBJ2-7)
CASKLAVNYEQYF

SEQ ID NO: 55863 - protein, 13 aa, Homo sapiens
  CDR3 for alpha chain variable domain of TCR clone 27932 (TRAV17, TRAJ26)
CATVDNYGRNFVF

SEQ ID NO: 55864 - protein, 16 aa, Homo sapiens
  CDR3 for beta chain variable domain of TCR clone 27932 (TRBV2, TRBJ2-1)
CASSVGGSLSYNEQFF

SEQ ID NO: 55865 - protein, 13 aa, Homo sapiens
  CDR3 for alpha chain variable domain of TCR clone 27933 (TRAV2, TRAJ29)
CAAGNSENTPLVF

SEQ ID NO: 55866 - protein, 16 aa, Homo sapiens
  CDR3 for beta chain variable domain of TCR clone 27933 (TRBV7-9, TRBJ1-2)
CASSPGGGAINYGYTF

SEQ ID NO: 55867 - protein, 14 aa, Homo sapiens
  CDR3 for alpha chain variable domain of TCR clone 27934 (TRAV13-1, TRAJ35)
CAASKGGFGNVQHC

SEQ ID NO: 55868 - protein, 14 aa, Homo sapiens
  CDR3 for beta chain variable domain of TCR clone 27934 (TRBV20-1, TRBJ2-2)
CSAPDTANTGELFF

SEQ ID NO: 55869 - protein, 14 aa, Homo sapiens
  CDR3 for alpha chain variable domain of TCR clone 27935 (TRAV26-1, TRAJ34)
YIVRVAYNTDKLIF

SEQ ID NO: 55870 - protein, 15 aa, Homo sapiens
  CDR3 for beta chain variable domain of TCR clone 27935 (TRBV20-1, TRBJ2-7)
CSARVPAAYFYEQYF

SEQ ID NO: 55871 - protein, 15 aa, Homo sapiens
  CDR3 for alpha chain variable domain of TCR clone 27936 (TRAV12-2, TRAJ53)
CAVNGGGGSNYKLTF

SEQ ID NO: 55872 - protein, 13 aa, Homo sapiens
  CDR3 for beta chain variable domain of TCR clone 27936 (TRBV3-1, TRBJ1-1)
CASSPGVITEAVF

SEQ ID NO: 55873 - protein, 16 aa, Homo sapiens
  CDR3 for alpha chain variable domain of TCR clone 27937 (TRAV30, TRAJ24)
CGTEIVDADSWGKFQL

SEQ ID NO: 55874 - protein, 15 aa, Homo sapiens
  CDR3 for beta chain variable domain of TCR clone 27937 (TRBV7-9, TRBJ1-4)
CASSARTGGNEKLFF

SEQ ID NO: 55875 - protein, 13 aa, Homo sapiens
  CDR3 for alpha chain variable domain of TCR clone 27938 (TRAV13-2, TRAJ13)
CAERPGGYQKVTF

SEQ ID NO: 55876 - protein, 15 aa, Homo sapiens
  CDR3 for beta chain variable domain of TCR clone 27938 (TRBV11-3, TRBJ2-7)
CARSPGPASSYEQYF

SEQ ID NO: 55877 - protein, 14 aa, Homo sapiens
  CDR3 for alpha chain variable domain of TCR clone 27939 (TRAV17, TRAJ54)
CATDANQGAQKLVF

SEQ ID NO: 55878 - protein, 12 aa, Homo sapiens
  CDR3 for beta chain variable domain of TCR clone 27939 (TRBV7-9, TRBJ2-7)
CASSIRREEQYF

SEQ ID NO: 55879 - protein, 12 aa, Homo sapiens
  CDR3 for alpha chain variable domain of TCR clone 27940 (TRAV8-3, TRAJ20)
CAVGANDYKLSF

SEQ ID NO: 55880 - protein, 13 aa, Homo sapiens
  CDR3 for beta chain variable domain of TCR clone 27940 (TRBV19, TRBJ1-2)
CASSVPGQDGYTF

SEQ ID NO: 55881 - protein, 15 aa, Homo sapiens
  CDR3 for alpha chain variable domain of TCR clone 27941 (TRAV3, TRAJ5)
CAVRDLDTGRRALTF

SEQ ID NO: 55882 - protein, 13 aa, Homo sapiens
  CDR3 for beta chain variable domain of TCR clone 27941 (TRBV12-4, TRBJ2-7)
CACSPTETYEQYF

SEQ ID NO: 55883 - protein, 16 aa, Homo sapiens
  CDR3 for alpha chain variable domain of TCR clone 27942 (TRAV13-1, TRAJ37)
CAASSLGSSNTGKLIF

SEQ ID NO: 55884 - protein, 12 aa, Homo sapiens
  CDR3 for beta chain variable domain of TCR clone 27942 (TRBV6-1, TRBJ2-5)
CASSEGREAQYF

SEQ ID NO: 55885 - protein, 13 aa, Homo sapiens
  CDR3 for alpha chain variable domain of TCR clone 27943 (TRAV12-3, TRAJ53)
CAMRGGSNYKLTF

SEQ ID NO: 55886 - protein, 15 aa, Homo sapiens
  CDR3 for beta chain variable domain of TCR clone 27943 (TRBV2, TRBJ2-1)
CTTQARLVMIGEQFF

SEQ ID NO: 55887 - protein, 12 aa, Homo sapiens
  CDR3 for alpha chain variable domain of TCR clone 27944 (TRAV8-3, TRAJ6)
CAVAGGSYIPTF

SEQ ID NO: 55888 - protein, 12 aa, Homo sapiens
  CDR3 for beta chain variable domain of TCR clone 27944 (TRBV11-2, TRBJ2-1)
CASSPGNNEQFF

SEQ ID NO: 55889 - protein, 14 aa, Homo sapiens
  CDR3 for alpha chain variable domain of TCR clone 27945 (TRAV12-3, TRAJ10)
SHLPLTGGGNKLTF

SEQ ID NO: 55890 - protein, 14 aa, Homo sapiens
  CDR3 for beta chain variable domain of TCR clone 27945 (TRBV20-1, TRBJ1-1)
CSAQTRIGGTEAFF

SEQ ID NO: 55891 - protein, 12 aa, Homo sapiens
  CDR3 for alpha chain variable domain of TCR clone 27946 (TRAV17, TRAJ4)
CATNGGYNKLIF

SEQ ID NO: 55892 - protein, 13 aa, Homo sapiens
  CDR3 for beta chain variable domain of TCR clone 27946 (TRBV29-1, TRBJ2-2)
CSTTGVNTGELFF

SEQ ID NO: 55893 - protein, 11 aa, Homo sapiens
  CDR3 for alpha chain variable domain of TCR clone 27947 (TRAV17, TRAJ9)
CATTGGFKTIF

SEQ ID NO: 55894 - protein, 14 aa, Homo sapiens
  CDR3 for beta chain variable domain of TCR clone 27947 (TRBV7-9, TRBJ2-2)
CASSGLVDTGELFF

SEQ ID NO: 55895 - protein, 15 aa, Homo sapiens
  CDR3 for alpha chain variable domain of TCR clone 27948 (TRAV21, TRAJ53)
CATLSSGGSNYKLTF

SEQ ID NO: 55896 - protein, 17 aa, Homo sapiens
  CDR3 for beta chain variable domain of TCR clone 27948 (TRBV7-8, TRBJ2-6)
CASSAGTGGAGANVLTF

SEQ ID NO: 55897 - protein, 15 aa, Homo sapiens
  CDR3 for alpha chain variable domain of TCR clone 27949 (TRAV12-1, TRAJ44)
CVVFVNTGTASKLTF

SEQ ID NO: 55898 - protein, 15 aa, Homo sapiens
  CDR3 for beta chain variable domain of TCR clone 27949 (TRBV20-1, TRBJ2-7)
CSARDRVSGMDEQYF

SEQ ID NO: 55899 - protein, 15 aa, Homo sapiens
  CDR3 for alpha chain variable domain of TCR clone 27950 (TRAV23/DV6, TRAJ38)
CAASGGADNNRKLIW

SEQ ID NO: 55900 - protein, 13 aa, Homo sapiens
  CDR3 for beta chain variable domain of TCR clone 27950 (TRBV7-2, TRBJ1-2)
CASSLPGLYGYTF

SEQ ID NO: 55901 - protein, 19 aa, Homo sapiens
  CDR3 for alpha chain variable domain of TCR clone 27951 (TRAV2, TRAJ20)
ILQVREADAAVYRDCKLSF

SEQ ID NO: 55902 - protein, 16 aa, Homo sapiens
  CDR3 for beta chain variable domain of TCR clone 27951 (TRBV5-1, TRBJ1-1)
CASSSGGNSLNTEAFF

SEQ ID NO: 55903 - protein, 14 aa, Homo sapiens
  CDR3 for alpha chain variable domain of TCR clone 27952 (TRAV26-1, TRAJ38)
CIADNAGNNRKLIW

SEQ ID NO: 55904 - protein, 15 aa, Homo sapiens
  CDR3 for beta chain variable domain of TCR clone 27952 (TRBV28, TRBJ2-1)
CASSIIAGGRSEQFF

SEQ ID NO: 55905 - protein, 15 aa, Homo sapiens
  CDR3 for alpha chain variable domain of TCR clone 27953 (TRAV8-4, TRAJ6)
CAVSAPSGGNYIPTF

SEQ ID NO: 55906 - protein, 15 aa, Homo sapiens
  CDR3 for beta chain variable domain of TCR clone 27953 (TRBV7-3, TRBJ2-2)
CASKANGANTGELFF

SEQ ID NO: 55907 - protein, 16 aa, Homo sapiens
  CDR3 for alpha chain variable domain of TCR clone 27954 (TRAV16, TRAJ52)
CALSAAGGTIYGKLTF

SEQ ID NO: 55908 - protein, 12 aa, Homo sapiens
  CDR3 for beta chain variable domain of TCR clone 27954 (TRBV12-4, TRBJ1-3)
CASSFSGNTIYF

SEQ ID NO: 55909 - protein, 10 aa, Homo sapiens
  CDR3 for alpha chain variable domain of TCR clone 27955 (TRAV16, TRAJ22)
SAMYLRQLTF

SEQ ID NO: 55910 - protein, 17 aa, Homo sapiens
  CDR3 for beta chain variable domain of TCR clone 27955 (TRBV24-1, TRBJ2-1)
CATSDVSTSGTYNEQFF

SEQ ID NO: 55911 - protein, 13 aa, Homo sapiens
  CDR3 for alpha chain variable domain of TCR clone 27956 (TRAV2, TRAJ26)
CAVEENYGQNFVF

SEQ ID NO: 55912 - protein, 18 aa, Homo sapiens
  CDR3 for beta chain variable domain of TCR clone 27956 (TRBV19, TRBJ2-1)
CASSISIRSGSSYNEQFF

SEQ ID NO: 55913 - protein, 14 aa, Homo sapiens
  CDR3 for alpha chain variable domain of TCR clone 27957 (TRAV21, TRAJ35)
CAVMPIGFGNVLHS

SEQ ID NO: 55914 - protein, 12 aa, Homo sapiens
  CDR3 for beta chain variable domain of TCR clone 27957 (TRBV7-9, TRBJ2-7)
CASSIKREEQYF

SEQ ID NO: 55915 - protein, 11 aa, Homo sapiens
  CDR3 for alpha chain variable domain of TCR clone 27958 (TRAV3, TRAJ21)
CAVGNFNKFYF

SEQ ID NO: 55916 - protein, 13 aa, Homo sapiens
  CDR3 for beta chain variable domain of TCR clone 27958 (TRBV20-1, TRBJ1-1)
CSARVGGNTEAFF

SEQ ID NO: 55917 - protein, 12 aa, Homo sapiens
  CDR3 for alpha chain variable domain of TCR clone 27959 (TRAV21, TRAJ58)
CALSAGGSRLTF

SEQ ID NO: 55918 - protein, 13 aa, Homo sapiens
  CDR3 for beta chain variable domain of TCR clone 27959 (TRBV5-7, TRBJ1-2)
CASSLGVFNGYTF

SEQ ID NO: 55919 - protein, 15 aa, Homo sapiens
  CDR3 for alpha chain variable domain of TCR clone 27960 (TRAV35, TRAJ40)
CAGQLGTSGTYKYIF

SEQ ID NO: 55920 - protein, 14 aa, Homo sapiens
  CDR3 for beta chain variable domain of TCR clone 27960 (TRBV7-3, TRBJ2-1)
CASSLAGGTNEKFF

SEQ ID NO: 55921 - protein, 18 aa, Homo sapiens
  CDR3 for alpha chain variable domain of TCR clone 27961 (TRAV13-1, TRAJ52)
CAESKRSAGGTSYGKLTF

SEQ ID NO: 55922 - protein, 13 aa, Homo sapiens
  CDR3 for beta chain variable domain of TCR clone 27961 (TRBV12-4, TRBJ1-2)
CASSLRQGKGYTF

SEQ ID NO: 55923 - protein, 17 aa, Homo sapiens
  CDR3 for alpha chain variable domain of TCR clone 27962 (TRAV26-2, TRAJ42)
CILRDVGYGGRQGNLIF

SEQ ID NO: 55924 - protein, 16 aa, Homo sapiens
  CDR3 for beta chain variable domain of TCR clone 27962 (TRBV12-4, TRBJ2-7)
CASSLIGGTGTYEQYF

SEQ ID NO: 55925 - protein, 11 aa, Homo sapiens
  CDR3 for alpha chain variable domain of TCR clone 27963 (TRAV1-2, TRAJ40)
CAVPGTYKYIF

SEQ ID NO: 55926 - protein, 16 aa, Homo sapiens
  CDR3 for beta chain variable domain of TCR clone 27963 (TRBV29-1, TRBJ2-7)
CSVEVVGTSGSYEQYV

SEQ ID NO: 55927 - protein, 15 aa, Homo sapiens
  CDR3 for alpha chain variable domain of TCR clone 27964 (TRAV3, TRAJ22)
CAVRDRGGSARRLTF

SEQ ID NO: 55928 - protein, 16 aa, Homo sapiens
  CDR3 for beta chain variable domain of TCR clone 27964 (TRBV5-4, TRBJ2-3)
CASQQPGAGGADTQYF

SEQ ID NO: 55929 - protein, 12 aa, Homo sapiens
  CDR3 for alpha chain variable domain of TCR clone 27965 (TRAV16, TRAJ10)
CSRTGGGDKLTF

SEQ ID NO: 55930 - protein, 12 aa, Homo sapiens
  CDR3 for beta chain variable domain of TCR clone 27965 (TRBV2, TRBJ1-1)
YCRWTVNTEAFF

SEQ ID NO: 55931 - protein, 16 aa, Homo sapiens
  CDR3 for alpha chain variable domain of TCR clone 27966 (TRAV3, TRAJ37)
CAVRGKGSGNTGKLIF

SEQ ID NO: 55932 - protein, 13 aa, Homo sapiens
  CDR3 for beta chain variable domain of TCR clone 27966 (TRBV14, TRBJ2-7)
CASSQDRRYKQYF

SEQ ID NO: 55933 - protein, 14 aa, Homo sapiens
  CDR3 for alpha chain variable domain of TCR clone 27967 (TRAV16, TRAJ33)
CALSAMDSNYQLIW

SEQ ID NO: 55934 - protein, 15 aa, Homo sapiens
  CDR3 for beta chain variable domain of TCR clone 27967 (TRBV28, TRBJ2-7)
CASSLEAYPIYGQYF

SEQ ID NO: 55935 - protein, 11 aa, Homo sapiens
  CDR3 for alpha chain variable domain of TCR clone 27968 (TRAV1-2, TRAJ20)
CAVANDYNLSF

SEQ ID NO: 55936 - protein, 18 aa, Homo sapiens
  CDR3 for beta chain variable domain of TCR clone 27968 (TRBV20-1, TRBJ2-6)
CSAETTPTHGSGANVLTF

SEQ ID NO: 55937 - protein, 14 aa, Homo sapiens
  CDR3 for alpha chain variable domain of TCR clone 27969 (TRAV12-2, TRAJ48)
CAVNAFLGNEKLTF

SEQ ID NO: 55938 - protein, 13 aa, Homo sapiens
  CDR3 for beta chain variable domain of TCR clone 27969 (TRBV28, TRBJ2-7)
CAGAQQGLDEQYF

SEQ ID NO: 55939 - protein, 13 aa, Homo sapiens
  CDR3 for alpha chain variable domain of TCR clone 27970 (TRAV8-3, TRAJ36)
CAVGATGANNLFF

SEQ ID NO: 55940 - protein, 16 aa, Homo sapiens
  CDR3 for beta chain variable domain of TCR clone 27970 (TRBV4-2, TRBJ2-3)
CASSQELAGDTDTQYF

SEQ ID NO: 55941 - protein, 19 aa, Homo sapiens
  CDR3 for alpha chain variable domain of TCR clone 27971 (TRAV1-2, TRAJ16)
LSYNVLDGLEEKDGQKLLF

SEQ ID NO: 55942 - protein, 16 aa, Homo sapiens
  CDR3 for beta chain variable domain of TCR clone 27971 (TRBV2, TRBJ2-1)
CASRSPAGGKYNEQFF

SEQ ID NO: 55943 - protein, 12 aa, Homo sapiens
  CDR3 for alpha chain variable domain of TCR clone 27972 (TRAV29/DV5, TRAJ49)
CAATDTGNQFSF

SEQ ID NO: 55944 - protein, 12 aa, Homo sapiens
  CDR3 for beta chain variable domain of TCR clone 27972 (TRBV12-4, TRBJ2-7)
CASSLGGYEQYF

SEQ ID NO: 55945 - protein, 15 aa, Homo sapiens
  CDR3 for alpha chain variable domain of TCR clone 27973 (TRAV3, TRAJ22)
CVVRDRGGSARQLTF

SEQ ID NO: 55946 - protein, 16 aa, Homo sapiens
  CDR3 for beta chain variable domain of TCR clone 27973 (TRBV5-4, TRBJ2-3)
CASQQPGAGGADTQYF

SEQ ID NO: 55947 - protein, 15 aa, Homo sapiens
  CDR3 for alpha chain variable domain of TCR clone 27974 (TRAV17, TRAJ23)
CATDAEDNQGGKLIF

SEQ ID NO: 55948 - protein, 14 aa, Homo sapiens
  CDR3 for beta chain variable domain of TCR clone 27974 (TRBV10-2, TRBJ1-5)
CASSSTGRNQPQHF

SEQ ID NO: 55949 - protein, 13 aa, Homo sapiens
  CDR3 for alpha chain variable domain of TCR clone 27975 (TRAV1-2, TRAJ9)
CAALNTGGFKTIF

SEQ ID NO: 55950 - protein, 13 aa, Homo sapiens
  CDR3 for beta chain variable domain of TCR clone 27975 (TRBV19, TRBJ1-2)
CASSVPEQDGYTF

SEQ ID NO: 55951 - protein, 18 aa, Homo sapiens
  CDR3 for alpha chain variable domain of TCR clone 27976 (TRAV26-1, TRAJ23)
CIVRVGLEVWNQGGKLIF

SEQ ID NO: 55952 - protein, 16 aa, Homo sapiens
  CDR3 for beta chain variable domain of TCR clone 27976 (TRBV12-4, TRBJ2-5)
CASSFFVRGRQEAQYF

SEQ ID NO: 55953 - protein, 15 aa, Homo sapiens
  CDR3 for alpha chain variable domain of TCR clone 27977 (TRAV10, TRAJ4)
CVVRGFSGGYNKLIF

SEQ ID NO: 55954 - protein, 16 aa, Homo sapiens
  CDR3 for beta chain variable domain of TCR clone 27977 (TRBV19, TRBJ2-7)
CASSLTGTSELGEQYF

SEQ ID NO: 55955 - protein, 15 aa, Homo sapiens
  CDR3 for alpha chain variable domain of TCR clone 27978 (TRAV13-1, TRAJ22)
CAAIPLSGSARQLTF

SEQ ID NO: 55956 - protein, 13 aa, Homo sapiens
  CDR3 for beta chain variable domain of TCR clone 27978 (TRBV27, TRBJ2-7)
CASSFFGGREQYF

SEQ ID NO: 55957 - protein, 11 aa, Homo sapiens
  CDR3 for alpha chain variable domain of TCR clone 27979 (TRAV21, TRAJ48)
CAVDGNEELTF

SEQ ID NO: 55958 - protein, 16 aa, Homo sapiens
  CDR3 for beta chain variable domain of TCR clone 27979 (TRBV12-4, TRBJ1-5)
CASSSGPRGSNQPQHF

SEQ ID NO: 55959 - protein, 12 aa, Homo sapiens
  CDR3 for alpha chain variable domain of TCR clone 27980 (TRAV8-3, TRAJ20)
FAVGANDYKLSF

SEQ ID NO: 55960 - protein, 16 aa, Homo sapiens
  CDR3 for beta chain variable domain of TCR clone 27980 (TRBV19, TRBJ2-2)
CASRSPGTGATGELFF

SEQ ID NO: 55961 - protein, 12 aa, Homo sapiens
  CDR3 for alpha chain variable domain of TCR clone 27981 (TRAV8-3, TRAJ26)
CAGDNYGQKFVF

SEQ ID NO: 55962 - protein, 15 aa, Homo sapiens
  CDR3 for beta chain variable domain of TCR clone 27981 (TRBV9, TRBJ2-1)
CASSLAGSSYNEQFF

SEQ ID NO: 55963 - protein, 11 aa, Homo sapiens
  CDR3 for alpha chain variable domain of TCR clone 27982 (TRAV2, TRAJ13)
CASGGYQKVTF

SEQ ID NO: 55964 - protein, 16 aa, Homo sapiens
  CDR3 for beta chain variable domain of TCR clone 27982 (TRBV10-3, TRBJ2-1)
CAISGVGDEGGGEQFF

SEQ ID NO: 55965 - protein, 17 aa, Homo sapiens
  CDR3 for alpha chain variable domain of TCR clone 27983 (TRAV12-2, TRAJ52)
CAVNPYAGGTSYGKLTF

SEQ ID NO: 55966 - protein, 14 aa, Homo sapiens
  CDR3 for beta chain variable domain of TCR clone 27983 (TRBV2, TRBJ1-1)
CASTQAGENTEAFF

SEQ ID NO: 55967 - protein, 13 aa, Homo sapiens
  CDR3 for alpha chain variable domain of TCR clone 27984 (TRAV12-1, TRAJ16)
CVVNGPDGRKLLF

SEQ ID NO: 55968 - protein, 13 aa, Homo sapiens
  CDR3 for beta chain variable domain of TCR clone 27984 (TRBV2, TRBJ1-1)
CARNPTGGFHAFF

SEQ ID NO: 55969 - protein, 16 aa, Homo sapiens
  CDR3 for alpha chain variable domain of TCR clone 27985 (TRAV17, TRAJ22)
CATDAISSGSARQLTF

SEQ ID NO: 55970 - protein, 15 aa, Homo sapiens
  CDR3 for beta chain variable domain of TCR clone 27985 (TRBV5-1, TRBJ2-1)
CASSPPRAPYDEQFF

SEQ ID NO: 55971 - protein, 15 aa, Homo sapiens
  CDR3 for alpha chain variable domain of TCR clone 27986 (TRAV26-1, TRAJ29)
CIARVTNSGNTPLVF

SEQ ID NO: 55972 - protein, 12 aa, Homo sapiens
  CDR3 for beta chain variable domain of TCR clone 27986 (TRBV20-1, TRBJ1-2)
CSASWQGYGYTF

SEQ ID NO: 55973 - protein, 13 aa, Homo sapiens
  CDR3 for alpha chain variable domain of TCR clone 27987 (TRAV3, TRAJ43)
CAVRGVGTMTCAL

SEQ ID NO: 55974 - protein, 12 aa, Homo sapiens
  CDR3 for beta chain variable domain of TCR clone 27987 (TRBV5-1, TRBJ2-7)
CASSLDSYEQYF

SEQ ID NO: 55975 - protein, 11 aa, Homo sapiens
  CDR3 for alpha chain variable domain of TCR clone 27988 (TRAV12-3, TRAJ43)
CAMSVSNDMCF

SEQ ID NO: 55976 - protein, 13 aa, Homo sapiens
  CDR3 for beta chain variable domain of TCR clone 27988 (TRBV20-1, TRBJ1-1)
CSAPLGGGTEAFF

SEQ ID NO: 55977 - protein, 14 aa, Homo sapiens
  CDR3 for alpha chain variable domain of TCR clone 27989 (TRAV17, TRAJ22)
FATSPSGSARQLTF

SEQ ID NO: 55978 - protein, 15 aa, Homo sapiens
  CDR3 for beta chain variable domain of TCR clone 27989 (TRBV4-1, TRBJ2-5)
CASSQWDLYQETQYF

SEQ ID NO: 55979 - protein, 23 aa, Homo sapiens
  CDR3 for alpha chain variable domain of TCR clone 27990 (TRAV26-1, TRAJ38)
CIADNAGNNHIQNPDPAVYQLRD

SEQ ID NO: 55980 - protein, 13 aa, Homo sapiens
  CDR3 for beta chain variable domain of TCR clone 27990 (TRBV20-1, TRBJ1-1)
YSARGGGNTEAFF

SEQ ID NO: 55981 - protein, 13 aa, Homo sapiens
  CDR3 for alpha chain variable domain of TCR clone 27991 (TRAV1-1, TRAJ13)
CAVNSGGYQKVTF

SEQ ID NO: 55982 - protein, 12 aa, Homo sapiens
  CDR3 for beta chain variable domain of TCR clone 27991 (TRBV28, TRBJ2-1)
CASSVQINEQLF

SEQ ID NO: 55983 - protein, 13 aa, Homo sapiens
  CDR3 for alpha chain variable domain of TCR clone 27992 (TRAV3, TRAJ27)
CAVRPLGAGKSTF

SEQ ID NO: 55984 - protein, 13 aa, Homo sapiens
  CDR3 for beta chain variable domain of TCR clone 27992 (TRBV7-9, TRBJ2-3)
CASSPGYTDTQYF

SEQ ID NO: 55985 - protein, 10 aa, Homo sapiens
  CDR3 for alpha chain variable domain of TCR clone 27993 (TRAV8-4, TRAJ43)
CAVSADYMRF

SEQ ID NO: 55986 - protein, 15 aa, Homo sapiens
  CDR3 for beta chain variable domain of TCR clone 27993 (TRBV5-1, TRBJ2-3)
CASSVTSGSTDTQYF

SEQ ID NO: 55987 - protein, 15 aa, Homo sapiens
  CDR3 for alpha chain variable domain of TCR clone 27994 (TRAV12-3, TRAJ27)
CAMRAYNTNAGKLTF

SEQ ID NO: 55988 - protein, 13 aa, Homo sapiens
  CDR3 for beta chain variable domain of TCR clone 27994 (TRBV11-2, TRBJ2-5)
CASSRGPSETQYF

SEQ ID NO: 55989 - protein, 11 aa, Homo sapiens
  CDR3 for alpha chain variable domain of TCR clone 27995 (TRAV13-2, TRAJ20)
CADSNDYKLSF

SEQ ID NO: 55990 - protein, 16 aa, Homo sapiens
  CDR3 for beta chain variable domain of TCR clone 27995 (TRBV13, TRBJ2-2)
CASSPRTGEHTGELFF

SEQ ID NO: 55991 - protein, 14 aa, Homo sapiens
  CDR3 for alpha chain variable domain of TCR clone 27996 (TRAV12-3, TRAJ10)
SHLPLTGGGNKLTF

SEQ ID NO: 55992 - protein, 15 aa, Homo sapiens
  CDR3 for beta chain variable domain of TCR clone 27996 (TRBV5-7, TRBJ2-7)
CASSLGPGRGHEQYF

SEQ ID NO: 55993 - protein, 14 aa, Homo sapiens
  CDR3 for alpha chain variable domain of TCR clone 27997 (TRAV13-2, TRAJ17)
CAENSKAAGNKLNF

SEQ ID NO: 55994 - protein, 14 aa, Homo sapiens
  CDR3 for beta chain variable domain of TCR clone 27997 (TRBV19, TRBJ2-1)
CASPTFVLSGEQFF

SEQ ID NO: 55995 - protein, 15 aa, Homo sapiens
  CDR3 for alpha chain variable domain of TCR clone 27998 (TRAV4, TRAJ39)
CLVGPNNNAGNMLPF

SEQ ID NO: 55996 - protein, 14 aa, Homo sapiens
  CDR3 for beta chain variable domain of TCR clone 27998 (TRBV19, TRBJ2-1)
CASPTFVLSGEQFF

SEQ ID NO: 55997 - protein, 14 aa, Homo sapiens
  CDR3 for alpha chain variable domain of TCR clone 27999 (TRAV26-1, TRAJ34)
CIVRVAYNTDKLIF

SEQ ID NO: 55998 - protein, 19 aa, Homo sapiens
  CDR3 for beta chain variable domain of TCR clone 27999 (TRBV25-1, TRBJ2-2)
CAILVYRVDRGRKTGELFL

SEQ ID NO: 55999 - protein, 14 aa, Homo sapiens
  CDR3 for alpha chain variable domain of TCR clone 28000 (TRAV27, TRAJ37)
CAGERSSNTGKLIF

SEQ ID NO: 56000 - protein, 15 aa, Homo sapiens
  CDR3 for beta chain variable domain of TCR clone 28000 (TRBV20-1, TRBJ2-7)
CSARDRVSGMDEQYF

SEQ ID NO: 56001 - protein, 12 aa, Homo sapiens
  CDR3 for alpha chain variable domain of TCR clone 28001 (TRAV8-4, TRAJ43)
CAVSVNNNDIRF

SEQ ID NO: 56002 - protein, 13 aa, Homo sapiens
  CDR3 for beta chain variable domain of TCR clone 28001 (TRBV7-9, TRBJ1-2)
CASSLKQNYGYTF

SEQ ID NO: 56003 - protein, 16 aa, Homo sapiens
  CDR3 for alpha chain variable domain of TCR clone 28002 (TRAV3, TRAJ5)
CAVRNLMVTGRRALTF

SEQ ID NO: 56004 - protein, 16 aa, Homo sapiens
  CDR3 for beta chain variable domain of TCR clone 28002 (TRBV12-5, TRBJ2-5)
CASGPRTSGNQETQYF

SEQ ID NO: 56005 - protein, 15 aa, Homo sapiens
  CDR3 for alpha chain variable domain of TCR clone 28003 (TRAV8-3, TRAJ45)
CASSYSGGGADGLTF

SEQ ID NO: 56006 - protein, 13 aa, Homo sapiens
  CDR3 for beta chain variable domain of TCR clone 28003 (TRBV10-3, TRBJ2-7)
YASKLAVSYEQYF

SEQ ID NO: 56007 - protein, 13 aa, Homo sapiens
  CDR3 for alpha chain variable domain of TCR clone 28004 (TRAV27, TRAJ41)
CAGEGNSGYALNF

SEQ ID NO: 56008 - protein, 14 aa, Homo sapiens
  CDR3 for beta chain variable domain of TCR clone 28004 (TRBV7-2, TRBJ1-1)
CASSFLTGTTEDFF

SEQ ID NO: 56009 - protein, 14 aa, Homo sapiens
  CDR3 for alpha chain variable domain of TCR clone 28005 (TRAV29/DV5, TRAJ36)
CAARRKTGANNLFF

SEQ ID NO: 56010 - protein, 15 aa, Homo sapiens
  CDR3 for beta chain variable domain of TCR clone 28005 (TRBV10-3, TRBJ2-3)
CAISLTSGGTDTQYF

SEQ ID NO: 56011 - protein, 12 aa, Homo sapiens
  CDR3 for alpha chain variable domain of TCR clone 28006 (TRAV27, TRAJ41)
CAGRNSGYAPNF

SEQ ID NO: 56012 - protein, 15 aa, Homo sapiens
  CDR3 for beta chain variable domain of TCR clone 28006 (TRBV20-1, TRBJ1-5)
CSATSDRGLGQPQHF

SEQ ID NO: 56013 - protein, 11 aa, Homo sapiens
  CDR3 for alpha chain variable domain of TCR clone 28007 (TRAV8-3, TRAJ49)
RAVNTGNQFYF

SEQ ID NO: 56014 - protein, 12 aa, Homo sapiens
  CDR3 for beta chain variable domain of TCR clone 28007 (TRBV11-2, TRBJ2-7)
CASSPPADEQYF

SEQ ID NO: 56015 - protein, 14 aa, Homo sapiens
  CDR3 for alpha chain variable domain of TCR clone 28008 (TRAV9-2, TRAJ39)
CALYIYNAGNMLTF

SEQ ID NO: 56016 - protein, 14 aa, Homo sapiens
  CDR3 for beta chain variable domain of TCR clone 28008 (TRBV11-2, TRBJ2-7)
CASSSTGEGYEQYF

SEQ ID NO: 56017 - protein, 12 aa, Homo sapiens
  CDR3 for alpha chain variable domain of TCR clone 28009 (TRAV25, TRAJ38)
CAGTGNNRKLLW

SEQ ID NO: 56018 - protein, 14 aa, Homo sapiens
  CDR3 for beta chain variable domain of TCR clone 28009 (TRBV5-4, TRBJ1-1)
CASSLDSRRDEAFF

SEQ ID NO: 56019 - protein, 15 aa, Homo sapiens
  CDR3 for alpha chain variable domain of TCR clone 28010 (TRAV21, TRAJ38)
CAVRQDAGNNRKLIW

SEQ ID NO: 56020 - protein, 16 aa, Homo sapiens
  CDR3 for beta chain variable domain of TCR clone 28010 (TRBV4-2, TRBJ1-1)
CASGPLDGGGDTEAFF

SEQ ID NO: 56021 - protein, 12 aa, Homo sapiens
  CDR3 for alpha chain variable domain of TCR clone 28011 (TRAV13-1, TRAJ53)
AASGGSNYKLTS

SEQ ID NO: 56022 - protein, 15 aa, Homo sapiens
  CDR3 for beta chain variable domain of TCR clone 28011 (TRBV5-1, TRBJ2-1)
CASSPPRAPYNEQFF

SEQ ID NO: 56023 - protein, 14 aa, Homo sapiens
  CDR3 for alpha chain variable domain of TCR clone 28012 (TRAV26-1, TRAJ38)
CIADNAGNNRKLIW

SEQ ID NO: 56024 - protein, 12 aa, Homo sapiens
  CDR3 for beta chain variable domain of TCR clone 28012 (TRBV24-1, TRBJ1-1)
CATLYPDTEAFF

SEQ ID NO: 56025 - protein, 12 aa, Homo sapiens
  CDR3 for alpha chain variable domain of TCR clone 28013 (TRAV13-1, TRAJ15)
CAASQAGTALLF

SEQ ID NO: 56026 - protein, 18 aa, Homo sapiens
  CDR3 for beta chain variable domain of TCR clone 28013 (TRBV7-9, TRBJ2-3)
CASSLPINGQISTDTQYF

SEQ ID NO: 56027 - protein, 18 aa, Homo sapiens
  CDR3 for alpha chain variable domain of TCR clone 28014 (TRAV3, TRAJ17)
CAVRARQGGRSCRQQANF

SEQ ID NO: 56028 - protein, 14 aa, Homo sapiens
  CDR3 for beta chain variable domain of TCR clone 28014 (TRBV4-1, TRBJ2-2)
CASSQAVNTGELFF

SEQ ID NO: 56029 - protein, 10 aa, Homo sapiens
  CDR3 for alpha chain variable domain of TCR clone 28015 (TRAV12-3, TRAJ49)
CAMNYDQFYF

SEQ ID NO: 56030 - protein, 13 aa, Homo sapiens
  CDR3 for beta chain variable domain of TCR clone 28015 (TRBV12-4, TRBJ1-1)
CASSPGTGFEAFF

SEQ ID NO: 56031 - protein, 15 aa, Homo sapiens
  CDR3 for alpha chain variable domain of TCR clone 28016 (TRAV35, TRAJ40)
CAGQLGTSGTYKYLF

SEQ ID NO: 56032 - protein, 14 aa, Homo sapiens
  CDR3 for beta chain variable domain of TCR clone 28016 (TRBV7-3, TRBJ2-1)
CASSLAGGTNEQFF

SEQ ID NO: 56033 - protein, 13 aa, Homo sapiens
  CDR3 for alpha chain variable domain of TCR clone 28017 (TRAV36/DV7, TRAJ37)
CAVFSSNTGKLIF

SEQ ID NO: 56034 - protein, 16 aa, Homo sapiens
  CDR3 for beta chain variable domain of TCR clone 28017 (TRBV3-1, TRBJ2-5)
CASSPGQFNGLGTQYF

SEQ ID NO: 56035 - protein, 14 aa, Homo sapiens
  CDR3 for alpha chain variable domain of TCR clone 28018 (TRAV3, TRAJ22)
CAVRDYGSARQLTF

SEQ ID NO: 56036 - protein, 12 aa, Homo sapiens
  CDR3 for beta chain variable domain of TCR clone 28018 (TRBV12-4, TRBJ2-3)
CASSSTTDTQYF

SEQ ID NO: 56037 - protein, 11 aa, Homo sapiens
  CDR3 for alpha chain variable domain of TCR clone 28019 (TRAV2, TRAJ33)
CAVESNYQLIW

SEQ ID NO: 56038 - protein, 15 aa, Homo sapiens
  CDR3 for beta chain variable domain of TCR clone 28019 (TRBV19, TRBJ1-1)
CASTSGHIQNTEAFF

SEQ ID NO: 56039 - protein, 12 aa, Homo sapiens
  CDR3 for alpha chain variable domain of TCR clone 28020 (TRAV24, TRAJ39)
CAFANAGNMLTF

SEQ ID NO: 56040 - protein, 15 aa, Homo sapiens
  CDR3 for beta chain variable domain of TCR clone 28020 (TRBV5-1, TRBJ2-7)
CASSPQGRPLDEQYF

SEQ ID NO: 56041 - protein, 14 aa, Homo sapiens
  CDR3 for alpha chain variable domain of TCR clone 28021 (TRAV35, TRAJ41)
CAGQASVRRNELNF

SEQ ID NO: 56042 - protein, 14 aa, Homo sapiens
  CDR3 for beta chain variable domain of TCR clone 28021 (TRBV20-1, TRBJ1-2)
CSASEQGAVYGYTF

SEQ ID NO: 56043 - protein, 16 aa, Homo sapiens
  CDR3 for alpha chain variable domain of TCR clone 28022 (TRAV3, TRAJ10)
CAVRDMRAGGGNKLTF

SEQ ID NO: 56044 - protein, 19 aa, Homo sapiens
  CDR3 for beta chain variable domain of TCR clone 28022 (TRBV25-1, TRBJ2-2)
CAILVYRVDRGRKTGELFF

SEQ ID NO: 56045 - protein, 16 aa, Homo sapiens
  CDR3 for alpha chain variable domain of TCR clone 28023 (TRAV30, TRAJ24)
CGTEIVDADSWGNSSL

SEQ ID NO: 56046 - protein, 13 aa, Homo sapiens
  CDR3 for beta chain variable domain of TCR clone 28023 (TRBV7-3, TRBJ1-1)
CASSQDWGAEAFF

SEQ ID NO: 56047 - protein, 14 aa, Homo sapiens
  CDR3 for alpha chain variable domain of TCR clone 28024 (TRAV12-2, TRAJ13)
CAVKKTGGYQKVTF

SEQ ID NO: 56048 - protein, 13 aa, Homo sapiens
  CDR3 for beta chain variable domain of TCR clone 28024 (TRBV6-5, TRBJ2-6)
CASSTSGPLRLDF

SEQ ID NO: 56049 - protein, 11 aa, Homo sapiens
  CDR3 for alpha chain variable domain of TCR clone 28025 (TRAV1-2, TRAJ40)
CAVPGTYKYLF

SEQ ID NO: 56050 - protein, 16 aa, Homo sapiens
  CDR3 for beta chain variable domain of TCR clone 28025 (TRBV29-1, TRBJ2-7)
CSVEVVGTSGSYEQYF

SEQ ID NO: 56051 - protein, 12 aa, Homo sapiens
  CDR3 for alpha chain variable domain of TCR clone 28026 (TRAV12-3, TRAJ17)
CAMTPTGNKLTF

SEQ ID NO: 56052 - protein, 14 aa, Homo sapiens
  CDR3 for beta chain variable domain of TCR clone 28026 (TRBV4-1, TRBJ2-7)
CASSQDREHVEQYF

SEQ ID NO: 56053 - protein, 15 aa, Homo sapiens
  CDR3 for alpha chain variable domain of TCR clone 28027 (TRAV13-1, TRAJ36)
CAASIRQTGANNLFF

SEQ ID NO: 56054 - protein, 15 aa, Homo sapiens
  CDR3 for beta chain variable domain of TCR clone 28027 (TRBV3-1, TRBJ2-1)
CASSQQPSGGNEQFF

SEQ ID NO: 56055 - protein, 11 aa, Homo sapiens
  CDR3 for alpha chain variable domain of TCR clone 28028 (TRAV17, TRAJ31)
CATYNNARLMF

SEQ ID NO: 56056 - protein, 16 aa, Homo sapiens
  CDR3 for beta chain variable domain of TCR clone 28028 (TRBV7-8, TRBJ2-4)
CASSAERTLAKNIQYF

SEQ ID NO: 56057 - protein, 16 aa, Homo sapiens
  CDR3 for alpha chain variable domain of TCR clone 28029 (TRAV3, TRAJ18)
CAVRDGRGSTLGRLYC

SEQ ID NO: 56058 - protein, 15 aa, Homo sapiens
  CDR3 for beta chain variable domain of TCR clone 28029 (TRBV7-9, TRBJ1-6)
CASSSPGRGNSPLHF

SEQ ID NO: 56059 - protein, 11 aa, Homo sapiens
  CDR3 for alpha chain variable domain of TCR clone 28030 (TRAV2, TRAJ33)
CAVDSNYQLIW

SEQ ID NO: 56060 - protein, 15 aa, Homo sapiens
  CDR3 for beta chain variable domain of TCR clone 28030 (TRBV19, TRBJ1-2)
CASSVGQVLNYGYSF

SEQ ID NO: 56061 - protein, 17 aa, Homo sapiens
  CDR3 for alpha chain variable domain of TCR clone 28031 (TRAV12-2, TRAJ42)
CAVNILNYGGSQGNLIF

SEQ ID NO: 56062 - protein, 13 aa, Homo sapiens
  CDR3 for beta chain variable domain of TCR clone 28031 (TRBV7-9, TRBJ1-2)
CASSLKQNYGYTF

SEQ ID NO: 56063 - protein, 11 aa, Homo sapiens
  CDR3 for alpha chain variable domain of TCR clone 28032 (TRAV12-2, TRAJ13)
CAARFYQKVTF

SEQ ID NO: 56064 - protein, 14 aa, Homo sapiens
  CDR3 for beta chain variable domain of TCR clone 28032 (TRBV12-4, TRBJ2-1)
CASRDTASRDEQFF

SEQ ID NO: 56065 - protein, 14 aa, Homo sapiens
  CDR3 for alpha chain variable domain of TCR clone 28033 (TRAV38-1, TRAJ45)
CAYYSGGGADGLTF

SEQ ID NO: 56066 - protein, 20 aa, Homo sapiens
  CDR3 for beta chain variable domain of TCR clone 28033 (TRBV28, TRBJ2-1)
CASTPIGRSPGLAVGNEQFF

SEQ ID NO: 56067 - protein, 16 aa, Homo sapiens
  CDR3 for alpha chain variable domain of TCR clone 28034 (TRAV30, TRAJ24)
CGTEIVDADSWGKFRL

SEQ ID NO: 56068 - protein, 14 aa, Homo sapiens
  CDR3 for beta chain variable domain of TCR clone 28034 (TRBV12-5, TRBJ2-5)
CASGSRTHQETQYF

SEQ ID NO: 56069 - protein, 15 aa, Homo sapiens
  CDR3 for alpha chain variable domain of TCR clone 28035 (TRAV26-1, TRAJ29)
CIVRVEGSGNTPLVF

SEQ ID NO: 56070 - protein, 15 aa, Homo sapiens
  CDR3 for beta chain variable domain of TCR clone 28035 (TRBV11-2, TRBJ2-2)
CASSSDRVNAGELFF

SEQ ID NO: 56071 - protein, 12 aa, Homo sapiens
  CDR3 for alpha chain variable domain of TCR clone 28036 (TRAV12-3, TRAJ17)
CAMTLTGNKLTF

SEQ ID NO: 56072 - protein, 12 aa, Homo sapiens
  CDR3 for beta chain variable domain of TCR clone 28036 (TRBV7-6, TRBJ2-5)
CASSLSQETQYF

SEQ ID NO: 56073 - protein, 18 aa, Homo sapiens
  CDR3 for alpha chain variable domain of TCR clone 28037 (TRAV16, TRAJ26)
CALTRWSESCLWSRNQIV

SEQ ID NO: 56074 - protein, 15 aa, Homo sapiens
  CDR3 for beta chain variable domain of TCR clone 28037 (TRBV6-3, TRBJ2-7)
CASSSPGTVFYEQYF

SEQ ID NO: 56075 - protein, 11 aa, Homo sapiens
  CDR3 for alpha chain variable domain of TCR clone 28038 (TRAV3, TRAJ13)
CAVTSYQKVTF

SEQ ID NO: 56076 - protein, 15 aa, Homo sapiens
  CDR3 for beta chain variable domain of TCR clone 28038 (TRBV7-9, TRBJ2-7)
CASSSSGLAVYERYF

SEQ ID NO: 56077 - protein, 21 aa, Homo sapiens
  CDR3 for alpha chain variable domain of TCR clone 28039 (TRAV3, TRAJ17)
CAVRARRGGRSCRQQANFCRR

SEQ ID NO: 56078 - protein, 14 aa, Homo sapiens
  CDR3 for beta chain variable domain of TCR clone 28039 (TRBV4-1, TRBJ2-2)
CASSQAVNTGELFF

SEQ ID NO: 56079 - protein, 15 aa, Homo sapiens
  CDR3 for alpha chain variable domain of TCR clone 28040 (TRAV26-1, TRAJ44)
CIVRANTGTDSKLTF

SEQ ID NO: 56080 - protein, 16 aa, Homo sapiens
  CDR3 for beta chain variable domain of TCR clone 28040 (TRBV7-7, TRBJ2-1)
CASSLASGTSYNEQFF

SEQ ID NO: 56081 - protein, 14 aa, Homo sapiens
  CDR3 for alpha chain variable domain of TCR clone 28041 (TRAV17, TRAJ16)
CATADFSDGQKLLF

SEQ ID NO: 56082 - protein, 15 aa, Homo sapiens
  CDR3 for beta chain variable domain of TCR clone 28041 (TRBV6-3, TRBJ2-7)
CASSSPGTVFYEQYF

SEQ ID NO: 56083 - protein, 22 aa, Homo sapiens
  CDR3 for alpha chain variable domain of TCR clone 28042 (TRAV30, TRAJ48)
TASQLSYSGTYFFGIGNEKLTF

SEQ ID NO: 56084 - protein, 14 aa, Homo sapiens
  CDR3 for beta chain variable domain of TCR clone 28042 (TRBV7-6, TRBJ2-3)
CASSVAGGTDTQYF

SEQ ID NO: 56085 - protein, 14 aa, Homo sapiens
  CDR3 for alpha chain variable domain of TCR clone 28043 (TRAV12-1, TRAJ17)
CVGNYKAAGNKLTF

SEQ ID NO: 56086 - protein, 14 aa, Homo sapiens
  CDR3 for beta chain variable domain of TCR clone 28043 (TRBV7-8, TRBJ2-3)
CASSLEAGTDTQYF

SEQ ID NO: 56087 - protein, 10 aa, Homo sapiens
  CDR3 for alpha chain variable domain of TCR clone 28044 (TRAV5, TRAJ34)
CAEDTDKLIL

SEQ ID NO: 56088 - protein, 12 aa, Homo sapiens
  CDR3 for beta chain variable domain of TCR clone 28044 (TRBV11-2, TRBJ2-2)
CASSLGGGELFF

SEQ ID NO: 56089 - protein, 13 aa, Homo sapiens
  CDR3 for alpha chain variable domain of TCR clone 28045 (TRAV22, TRAJ29)
CAVGGSGNTPLVF

SEQ ID NO: 56090 - protein, 14 aa, Homo sapiens
  CDR3 for beta chain variable domain of TCR clone 28045 (TRBV19, TRBJ2-1)
CASPTFVLSGEQFF

SEQ ID NO: 56091 - protein, 11 aa, Homo sapiens
  CDR3 for alpha chain variable domain of TCR clone 28046 (TRAV17, TRAJ9)
CGFTGGCKTIF

SEQ ID NO: 56092 - protein, 14 aa, Homo sapiens
  CDR3 for beta chain variable domain of TCR clone 28046 (TRBV7-9, TRBJ2-2)
CASSLVQDTGELFF

SEQ ID NO: 56093 - protein, 15 aa, Homo sapiens
  CDR3 for alpha chain variable domain of TCR clone 28047 (TRAV26-1, TRAJ40)
CIVRVTTSGNYKYIF

SEQ ID NO: 56094 - protein, 12 aa, Homo sapiens
  CDR3 for beta chain variable domain of TCR clone 28047 (TRBV7-9, TRBJ1-4)
CASSTDREKLFF

SEQ ID NO: 56095 - protein, 13 aa, Homo sapiens
  CDR3 for alpha chain variable domain of TCR clone 28048 (TRAV17, TRAJ20)
CAPLGVDDYKPSF

SEQ ID NO: 56096 - protein, 12 aa, Homo sapiens
  CDR3 for beta chain variable domain of TCR clone 28048 (TRBV29-1, TRBJ2-3)
CSVTGGADTQYF

SEQ ID NO: 56097 - protein, 10 aa, Homo sapiens
  CDR3 for alpha chain variable domain of TCR clone 28049 (TRAV16, TRAJ22)
SAMYLRQLTF

SEQ ID NO: 56098 - protein, 15 aa, Homo sapiens
  CDR3 for beta chain variable domain of TCR clone 28049 (TRBV7-9, TRBJ1-6)
CASISPGRGNSPLHF

SEQ ID NO: 56099 - protein, 14 aa, Homo sapiens
  CDR3 for alpha chain variable domain of TCR clone 28050 (TRAV13-2, TRAJ17)
CAENSKAAGNKLTF

SEQ ID NO: 56100 - protein, 13 aa, Homo sapiens
  CDR3 for beta chain variable domain of TCR clone 28050 (TRBV19, TRBJ1-2)
CASSVPGQDGYTF

SEQ ID NO: 56101 - protein, 17 aa, Homo sapiens
  CDR3 for alpha chain variable domain of TCR clone 28051 (TRAV3, TRAJ28)
CAVREAYSGAGSYQLTF

SEQ ID NO: 56102 - protein, 14 aa, Homo sapiens
  CDR3 for beta chain variable domain of TCR clone 28051 (TRBV19, TRBJ1-5)
CASSKMTGPQPQHF

SEQ ID NO: 56103 - protein, 17 aa, Homo sapiens
  CDR3 for alpha chain variable domain of TCR clone 28052 (TRAV8-1, TRAJ42)
CAVRWGNYGGSQGNLIF

SEQ ID NO: 56104 - protein, 15 aa, Homo sapiens
  CDR3 for beta chain variable domain of TCR clone 28052 (TRBV9, TRBJ1-6)
CASSVAGTGDSPLHF

SEQ ID NO: 56105 - protein, 12 aa, Homo sapiens
  CDR3 for alpha chain variable domain of TCR clone 28053 (TRAV12-1, TRAJ40)
CVVYSGTYKYIF

SEQ ID NO: 56106 - protein, 15 aa, Homo sapiens
  CDR3 for beta chain variable domain of TCR clone 28053 (TRBV4-1, TRBJ1-4)
CASSDTGGTNEKLFF

SEQ ID NO: 56107 - protein, 12 aa, Homo sapiens
  CDR3 for alpha chain variable domain of TCR clone 28054 (TRAV2, TRAJ26)
CAGSPGRLWSEF

SEQ ID NO: 56108 - protein, 13 aa, Homo sapiens
  CDR3 for beta chain variable domain of TCR clone 28054 (TRBV7-9, TRBJ1-2)
RASSLKQNYGYTF

SEQ ID NO: 56109 - protein, 15 aa, Homo sapiens
  CDR3 for alpha chain variable domain of TCR clone 28055 (TRAV12-3, TRAJ6)
CSMSATTGGSYIPTF

SEQ ID NO: 56110 - protein, 16 aa, Homo sapiens
  CDR3 for beta chain variable domain of TCR clone 28055 (TRBV20-1, TRBJ1-2)
CSASMGQGVANYGYTF

SEQ ID NO: 56111 - protein, 13 aa, Homo sapiens
  CDR3 for alpha chain variable domain of TCR clone 28056 (TRAV17, TRAJ26)
CATVDNYGQNFVL

SEQ ID NO: 56112 - protein, 16 aa, Homo sapiens
  CDR3 for beta chain variable domain of TCR clone 28056 (TRBV2, TRBJ2-1)
CASSVGGSLSYNEQFF

SEQ ID NO: 56113 - protein, 15 aa, Homo sapiens
  CDR3 for alpha chain variable domain of TCR clone 28057 (TRAV8-3, TRAJ32)
CAVGPYGGATNKLIF

SEQ ID NO: 56114 - protein, 14 aa, Homo sapiens
  CDR3 for beta chain variable domain of TCR clone 28057 (TRBV29-1, TRBJ2-2)
CSVLAETNTGELFY

SEQ ID NO: 56115 - protein, 11 aa, Homo sapiens
  CDR3 for alpha chain variable domain of TCR clone 28058 (TRAV17, TRAJ43)
CAAPRSNDMRF

SEQ ID NO: 56116 - protein, 15 aa, Homo sapiens
  CDR3 for beta chain variable domain of TCR clone 28058 (TRBV11-2, TRBJ2-1)
CASSLGTSGLNEQFF

SEQ ID NO: 56117 - protein, 14 aa, Homo sapiens
  CDR3 for alpha chain variable domain of TCR clone 28059 (TRAV8-1, TRAJ9)
CAVNAWTGGFKTIF

SEQ ID NO: 56118 - protein, 16 aa, Homo sapiens
  CDR3 for beta chain variable domain of TCR clone 28059 (TRBV28, TRBJ2-2)
CASSLEGGLNTGELFF

SEQ ID NO: 56119 - protein, 12 aa, Homo sapiens
  CDR3 for alpha chain variable domain of TCR clone 28060 (TRAV12-2, TRAJ10)
WGVTGGGNRLTF

SEQ ID NO: 56120 - protein, 14 aa, Homo sapiens
  CDR3 for beta chain variable domain of TCR clone 28060 (TRBV19, TRBJ2-3)
CASSAPRGTDTQYF

SEQ ID NO: 56121 - protein, 15 aa, Homo sapiens
  CDR3 for alpha chain variable domain of TCR clone 28061 (TRAV21, TRAJ40)
CAVRPQTSGTYNYIF

SEQ ID NO: 56122 - protein, 13 aa, Homo sapiens
  CDR3 for beta chain variable domain of TCR clone 28061 (TRBV7-2, TRBJ2-2)
CASSSVRAGELFF

SEQ ID NO: 56123 - protein, 15 aa, Homo sapiens
  CDR3 for alpha chain variable domain of TCR clone 28062 (TRAV19, TRAJ45)
CALSASGGGADGLTF

SEQ ID NO: 56124 - protein, 15 aa, Homo sapiens
  CDR3 for beta chain variable domain of TCR clone 28062 (TRBV13, TRBJ1-5)
CASSRTGRGHQPQHF

SEQ ID NO: 56125 - protein, 15 aa, Homo sapiens
  CDR3 for alpha chain variable domain of TCR clone 28063 (TRAV13-1, TRAJ17)
CAAGIERAAGNKLTF

SEQ ID NO: 56126 - protein, 15 aa, Homo sapiens
  CDR3 for beta chain variable domain of TCR clone 28063 (TRBV6-3, TRBJ2-7)
CASSSPGTVFYEQYF

SEQ ID NO: 56127 - protein, 15 aa, Homo sapiens
  CDR3 for alpha chain variable domain of TCR clone 28064 (TRAV17, TRAJ52)
CATEAGGTSYGKLTF

SEQ ID NO: 56128 - protein, 14 aa, Homo sapiens
  CDR3 for beta chain variable domain of TCR clone 28064 (TRBV28, TRBJ1-5)
CASSLGVVVKPQHF

SEQ ID NO: 56129 - protein, 13 aa, Homo sapiens
  CDR3 for alpha chain variable domain of TCR clone 28065 (TRAV1-2, TRAJ9)
CAVLNTGGFKTTF

SEQ ID NO: 56130 - protein, 17 aa, Homo sapiens
  CDR3 for beta chain variable domain of TCR clone 28065 (TRBV7-2, TRBJ2-3)
CASSLAGGLAGTAGQYF

SEQ ID NO: 56131 - protein, 13 aa, Homo sapiens
  CDR3 for alpha chain variable domain of TCR clone 28066 (TRAV26-2, TRAJ43)
CILRAVTNNDMRF

SEQ ID NO: 56132 - protein, 15 aa, Homo sapiens
  CDR3 for beta chain variable domain of TCR clone 28066 (TRBV7-2, TRBJ2-1)
CASTHGTGIYNEQFF

SEQ ID NO: 56133 - protein, 12 aa, Homo sapiens
  CDR3 for alpha chain variable domain of TCR clone 28067 (TRAV12-3, TRAJ17)
CAMTLTGNKLTF

SEQ ID NO: 56134 - protein, 15 aa, Homo sapiens
  CDR3 for beta chain variable domain of TCR clone 28067 (TRBV2, TRBJ2-1)
CASSEARSAYNEQFF

SEQ ID NO: 56135 - protein, 14 aa, Homo sapiens
  CDR3 for alpha chain variable domain of TCR clone 28068 (TRAV26-1, TRAJ34)
CIVRVAYNTDKRIF

SEQ ID NO: 56136 - protein, 15 aa, Homo sapiens
  CDR3 for beta chain variable domain of TCR clone 28068 (TRBV20-1, TRBJ2-7)
CSARVPAAYFYEQYF

SEQ ID NO: 56137 - protein, 12 aa, Homo sapiens
  CDR3 for alpha chain variable domain of TCR clone 28069 (TRAV8-3, TRAJ26)
CAGDNYGQNFVF

SEQ ID NO: 56138 - protein, 15 aa, Homo sapiens
  CDR3 for beta chain variable domain of TCR clone 28069 (TRBV9, TRBJ2-1)
CASSFAGSSYNEQLF

SEQ ID NO: 56139 - protein, 14 aa, Homo sapiens
  CDR3 for alpha chain variable domain of TCR clone 28070 (TRAV20, TRAJ42)
FAVQAGGSQGNLIF

SEQ ID NO: 56140 - protein, 14 aa, Homo sapiens
  CDR3 for beta chain variable domain of TCR clone 28070 (TRBV28, TRBJ1-2)
CASRIQGANYGYTF

SEQ ID NO: 56141 - protein, 13 aa, Homo sapiens
  CDR3 for alpha chain variable domain of TCR clone 28071 (TRAV27, TRAJ41)
CAGEGNSGYALNF

SEQ ID NO: 56142 - protein, 14 aa, Homo sapiens
  CDR3 for beta chain variable domain of TCR clone 28071 (TRBV7-2, TRBJ1-1)
CASSFLTGTTEVFF

SEQ ID NO: 56143 - protein, 13 aa, Homo sapiens
  CDR3 for alpha chain variable domain of TCR clone 28072 (TRAV1-2, TRAJ9)
CAVLNTGGFKTIF

SEQ ID NO: 56144 - protein, 14 aa, Homo sapiens
  CDR3 for beta chain variable domain of TCR clone 28072 (TRBV20-1, TRBJ2-3)
CSAGGGTSTDTQYF

SEQ ID NO: 56145 - protein, 15 aa, Homo sapiens
  CDR3 for alpha chain variable domain of TCR clone 28073 (TRAV3, TRAJ22)
CAVRDRGGSARQLTF

SEQ ID NO: 56146 - protein, 15 aa, Homo sapiens
  CDR3 for beta chain variable domain of TCR clone 28073 (TRBV19, TRBJ1-1)
CASTSGQIQNTEAFF

SEQ ID NO: 56147 - protein, 15 aa, Homo sapiens
  CDR3 for alpha chain variable domain of TCR clone 28074 (TRAV8-3, TRAJ45)
CASSYTGGGADGLTF

SEQ ID NO: 56148 - protein, 13 aa, Homo sapiens
  CDR3 for beta chain variable domain of TCR clone 28074 (TRBV10-3, TRBJ2-7)
CASKLAVNYEQYF

SEQ ID NO: 56149 - protein, 17 aa, Homo sapiens
  CDR3 for alpha chain variable domain of TCR clone 28075 (TRAV8-6, TRAJ58)
CAVSSWIGETSGSRLTF

SEQ ID NO: 56150 - protein, 14 aa, Homo sapiens
  CDR3 for beta chain variable domain of TCR clone 28075 (TRBV4-2, TRBJ2-1)
CASGLDRAYNEQFF

SEQ ID NO: 56151 - protein, 16 aa, Homo sapiens
  CDR3 for alpha chain variable domain of TCR clone 28076 (TRAV3, TRAJ37)
CAVRPHVSGNTGKLIF

SEQ ID NO: 56152 - protein, 16 aa, Homo sapiens
  CDR3 for beta chain variable domain of TCR clone 28076 (TRBV9, TRBJ1-2)
CASSVEEKVSPYGYTF

SEQ ID NO: 56153 - protein, 16 aa, Homo sapiens
  CDR3 for alpha chain variable domain of TCR clone 28077 (TRAV30, TRAJ24)
CGTEIVDADSWGKFQF

SEQ ID NO: 56154 - protein, 15 aa, Homo sapiens
  CDR3 for beta chain variable domain of TCR clone 28077 (TRBV20-1, TRBJ2-4)
CSARDLTGGPNSQYF

SEQ ID NO: 56155 - protein, 15 aa, Homo sapiens
  CDR3 for alpha chain variable domain of TCR clone 28078 (TRAV8-4, TRAJ3)
CAVTGENLVQQCFQD

SEQ ID NO: 56156 - protein, 16 aa, Homo sapiens
  CDR3 for beta chain variable domain of TCR clone 28078 (TRBV4-3, TRBJ1-1)
CASSQAGFGMNTEAFF

SEQ ID NO: 56157 - protein, 14 aa, Homo sapiens
  CDR3 for alpha chain variable domain of TCR clone 28079 (TRAV13-1, TRAJ44)
CAAKATGTASKLTF

SEQ ID NO: 56158 - protein, 14 aa, Homo sapiens
  CDR3 for beta chain variable domain of TCR clone 28079 (TRBV19, TRBJ2-2)
CASSTLHRSGGLFF

SEQ ID NO: 56159 - protein, 12 aa, Homo sapiens
  CDR3 for alpha chain variable domain of TCR clone 28080 (TRAV38-1, TRAJ43)
CAFMTRLADIRF

SEQ ID NO: 56160 - protein, 14 aa, Homo sapiens
  CDR3 for beta chain variable domain of TCR clone 28080 (TRBV27, TRBJ2-2)
CASSLSVVDGRMFF

SEQ ID NO: 56161 - protein, 12 aa, Homo sapiens
  CDR3 for alpha chain variable domain of TCR clone 28081 (TRAV12-3, TRAJ17)
CAMTLTGNKLTF

SEQ ID NO: 56162 - protein, 15 aa, Homo sapiens
  CDR3 for beta chain variable domain of TCR clone 28081 (TRBV5-1, TRBJ2-5)
CASSFKGGDQETQYF

SEQ ID NO: 56163 - protein, 18 aa, Homo sapiens
  CDR3 for alpha chain variable domain of TCR clone 28082 (TRAV26-1, TRAJ23)
CIVRVGLEVWNQGGKLIS

SEQ ID NO: 56164 - protein, 16 aa, Homo sapiens
  CDR3 for beta chain variable domain of TCR clone 28082 (TRBV12-4, TRBJ2-5)
CASSFFVRGRQETQYF

SEQ ID NO: 56165 - protein, 14 aa, Homo sapiens
  CDR3 for alpha chain variable domain of TCR clone 28083 (TRAV21, TRAJ58)
CAVRRERSGSRLTF

SEQ ID NO: 56166 - protein, 13 aa, Homo sapiens
  CDR3 for beta chain variable domain of TCR clone 28083 (TRBV7-2, TRBJ1-6)
CASSLKFDSPLHF

SEQ ID NO: 56167 - protein, 14 aa, Homo sapiens
  CDR3 for alpha chain variable domain of TCR clone 28084 (TRAV26-1, TRAJ45)
CIVRVVGGADGLTF

SEQ ID NO: 56168 - protein, 16 aa, Homo sapiens
  CDR3 for beta chain variable domain of TCR clone 28084 (TRBV7-9, TRBJ1-1)
CASSLTQVRSNTEAVF

SEQ ID NO: 56169 - protein, 15 aa, Homo sapiens
  CDR3 for alpha chain variable domain of TCR clone 28085 (TRAV13-1, TRAJ11)
CAASNRNSGYSTLTF

SEQ ID NO: 56170 - protein, 13 aa, Homo sapiens
  CDR3 for beta chain variable domain of TCR clone 28085 (TRBV19, TRBJ1-3)
CASRLSLGNTIYF

SEQ ID NO: 56171 - protein, 12 aa, Homo sapiens
  CDR3 for alpha chain variable domain of TCR clone 28086 (TRAV16, TRAJ10)
CSRTGGGNKLTF

SEQ ID NO: 56172 - protein, 13 aa, Homo sapiens
  CDR3 for beta chain variable domain of TCR clone 28086 (TRBV7-3, TRBJ1-1)
CASSQDRGAEAFF

SEQ ID NO: 56173 - protein, 15 aa, Homo sapiens
  CDR3 for alpha chain variable domain of TCR clone 28087 (TRAV10, TRAJ44)
CVVGGATDTASKLTF

SEQ ID NO: 56174 - protein, 15 aa, Homo sapiens
  CDR3 for beta chain variable domain of TCR clone 28087 (TRBV12-4, TRBJ1-5)
CASTRQGSGNQPQHF

SEQ ID NO: 56175 - protein, 21 aa, Homo sapiens
  CDR3 for alpha chain variable domain of TCR clone 28088 (TRAV30, TRAJ43)
GLPAQLLRNLLPIIELDDMRF

SEQ ID NO: 56176 - protein, 14 aa, Homo sapiens
  CDR3 for beta chain variable domain of TCR clone 28088 (TRBV27, TRBJ2-1)
CASRHLGGGKEQFF

SEQ ID NO: 56177 - protein, 19 aa, Homo sapiens
  CDR3 for alpha chain variable domain of TCR clone 28089 (TRAV26-1, TRAJ22)
CCVLLHRWVFSGSARQLTF

SEQ ID NO: 56178 - protein, 19 aa, Homo sapiens
  CDR3 for beta chain variable domain of TCR clone 28089 (TRBV19, TRBJ2-5)
CASSIGQVTDLFLGETQYF

SEQ ID NO: 56179 - protein, 16 aa, Homo sapiens
  CDR3 for alpha chain variable domain of TCR clone 28090 (TRAV13-1, TRAJ48)
CAASIFGNFGNEKLTF

SEQ ID NO: 56180 - protein, 15 aa, Homo sapiens
  CDR3 for beta chain variable domain of TCR clone 28090 (TRBV11-3, TRBJ2-3)
CASLKDGREGDTQYF

SEQ ID NO: 56181 - protein, 14 aa, Homo sapiens
  CDR3 for alpha chain variable domain of TCR clone 28091 (TRAV12-2, TRAJ13)
CAVKKTGGYQKVTF

SEQ ID NO: 56182 - protein, 17 aa, Homo sapiens
  CDR3 for beta chain variable domain of TCR clone 28091 (TRBV28, TRBJ2-5)
CASSTPEGDALQETQYF

SEQ ID NO: 56183 - protein, 14 aa, Homo sapiens
  CDR3 for alpha chain variable domain of TCR clone 28092 (TRAV16, TRAJ33)
CALSAMDSNYQLIW

SEQ ID NO: 56184 - protein, 14 aa, Homo sapiens
  CDR3 for beta chain variable domain of TCR clone 28092 (TRBV28, TRBJ2-7)
CQQLEAYPIYEQYF

SEQ ID NO: 56185 - protein, 20 aa, Homo sapiens
  CDR3 for alpha chain variable domain of TCR clone 28093 (TRAV26-1, TRAJ47)
CCVLLHRQSPFMEYGNKLVF

SEQ ID NO: 56186 - protein, 14 aa, Homo sapiens
  CDR3 for beta chain variable domain of TCR clone 28093 (TRBV7-2, TRBJ1-2)
CASSRGGTNYGYTF

SEQ ID NO: 56187 - protein, 16 aa, Homo sapiens
  CDR3 for alpha chain variable domain of TCR clone 28094 (TRAV12-3, TRAJ53)
CAMSPGSGGSNYKLTF

SEQ ID NO: 56188 - protein, 16 aa, Homo sapiens
  CDR3 for beta chain variable domain of TCR clone 28094 (TRBV4-3, TRBJ1-1)
CASSQAGFGMNTEAFF

SEQ ID NO: 56189 - protein, 13 aa, Homo sapiens
  CDR3 for alpha chain variable domain of TCR clone 28095 (TRAV17, TRAJ26)
CATVDNYGQNFVF

SEQ ID NO: 56190 - protein, 16 aa, Homo sapiens
  CDR3 for beta chain variable domain of TCR clone 28095 (TRBV2, TRBJ2-1)
CASSVGGSLSNNEQFF

SEQ ID NO: 56191 - protein, 15 aa, Homo sapiens
  CDR3 for alpha chain variable domain of TCR clone 28096 (TRAV2, TRAJ11)
CAVGGRNSGYSTLTF

SEQ ID NO: 56192 - protein, 15 aa, Homo sapiens
  CDR3 for beta chain variable domain of TCR clone 28096 (TRBV9, TRBJ1-6)
CASSVAGTGDSPLHF

SEQ ID NO: 56193 - protein, 12 aa, Homo sapiens
  CDR3 for alpha chain variable domain of TCR clone 28097 (TRAV12-3, TRAJ17)
CAMTLTGNKLAF

SEQ ID NO: 56194 - protein, 13 aa, Homo sapiens
  CDR3 for beta chain variable domain of TCR clone 28097 (TRBV5-1, TRBJ1-2)
CASSSTGVYGYTF

SEQ ID NO: 56195 - protein, 18 aa, Homo sapiens
  CDR3 for alpha chain variable domain of TCR clone 28098 (TRAV21, TRAJ52)
CAVRPSPAGGTSYGKLTF

SEQ ID NO: 56196 - protein, 17 aa, Homo sapiens
  CDR3 for beta chain variable domain of TCR clone 28098 (TRBV13, TRBJ2-3)
CASSLTRVAGGRNTQYF

SEQ ID NO: 56197 - protein, 13 aa, Homo sapiens
  CDR3 for alpha chain variable domain of TCR clone 28099 (TRAV36/DV7, TRAJ29)
CAVEPSGNTPLVF

SEQ ID NO: 56198 - protein, 15 aa, Homo sapiens
  CDR3 for beta chain variable domain of TCR clone 28099 (TRBV7-2, TRBJ2-2)
CASSLVAGSAGELFF

SEQ ID NO: 56199 - protein, 14 aa, Homo sapiens
  CDR3 for alpha chain variable domain of TCR clone 28100 (TRAV13-1, TRAJ35)
CAASKGGFGNVLHC

SEQ ID NO: 56200 - protein, 14 aa, Homo sapiens
  CDR3 for beta chain variable domain of TCR clone 28100 (TRBV5-4, TRBJ1-1)
CASSLDSRRDEAFF

SEQ ID NO: 56201 - protein, 10 aa, Homo sapiens
  CDR3 for alpha chain variable domain of TCR clone 28101 (TRAV8-4, TRAJ43)
CAVRADDMRF

SEQ ID NO: 56202 - protein, 15 aa, Homo sapiens
  CDR3 for beta chain variable domain of TCR clone 28101 (TRBV5-1, TRBJ2-3)
CASSVTSGSTDTQYF

SEQ ID NO: 56203 - protein, 12 aa, Homo sapiens
  CDR3 for alpha chain variable domain of TCR clone 28102 (TRAV1-2, TRAJ33)
CAALDSDYQLIW

SEQ ID NO: 56204 - protein, 16 aa, Homo sapiens
  CDR3 for beta chain variable domain of TCR clone 28102 (TRBV6-4, TRBJ1-2)
CASSEAVGDPNYGYTF

SEQ ID NO: 56205 - protein, 15 aa, Homo sapiens
  CDR3 for alpha chain variable domain of TCR clone 28103 (TRAV27, TRAJ38)
CAARRNAGNNRKLIG

SEQ ID NO: 56206 - protein, 11 aa, Homo sapiens
  CDR3 for beta chain variable domain of TCR clone 28103 (TRBV12-4, TRBJ2-2)
CASSSAGELFF

SEQ ID NO: 56207 - protein, 14 aa, Homo sapiens
  CDR3 for alpha chain variable domain of TCR clone 28104 (TRAV16, TRAJ42)
CALLAGGSQGNPIF

SEQ ID NO: 56208 - protein, 15 aa, Homo sapiens
  CDR3 for beta chain variable domain of TCR clone 28104 (TRBV2, TRBJ2-7)
CASSEGLARSYEQYF

SEQ ID NO: 56209 - protein, 15 aa, Homo sapiens
  CDR3 for alpha chain variable domain of TCR clone 28105 (TRAV12-3, TRAJ6)
CAMSATTVGSYIPTF

SEQ ID NO: 56210 - protein, 16 aa, Homo sapiens
  CDR3 for beta chain variable domain of TCR clone 28105 (TRBV20-1, TRBJ1-2)
CSASMGQGVANYGYTF

SEQ ID NO: 56211 - protein, 10 aa, Homo sapiens
  CDR3 for alpha chain variable domain of TCR clone 28106 (TRAV23/DV6, TRAJ57)
CAASSTLSQG

SEQ ID NO: 56212 - protein, 13 aa, Homo sapiens
  CDR3 for beta chain variable domain of TCR clone 28106 (TRBV12-4, TRBJ2-7)
CASSPTETYEQYF

SEQ ID NO: 56213 - protein, 14 aa, Homo sapiens
  CDR3 for alpha chain variable domain of TCR clone 28107 (TRAV1-2, TRAJ8)
CAVREDTGFQKLVF

SEQ ID NO: 56214 - protein, 17 aa, Homo sapiens
  CDR3 for beta chain variable domain of TCR clone 28107 (TRBV7-9, TRBJ2-1)
CASSLVASYPSYNEQFF

SEQ ID NO: 56215 - protein, 16 aa, Homo sapiens
  CDR3 for alpha chain variable domain of TCR clone 28108 (TRAV14/DV4, TRAJ54)
CAMREGRIQGAQKLVF

SEQ ID NO: 56216 - protein, 16 aa, Homo sapiens
  CDR3 for beta chain variable domain of TCR clone 28108 (TRBV27, TRBJ2-2)
CASSFRGLVRTGELFF

SEQ ID NO: 56217 - protein, 15 aa, Homo sapiens
  CDR3 for alpha chain variable domain of TCR clone 28109 (TRAV3, TRAJ20)
CAVRDIKLSDYKLSF

SEQ ID NO: 56218 - protein, 15 aa, Homo sapiens
  CDR3 for beta chain variable domain of TCR clone 28109 (TRBV7-9, TRBJ1-6)
CANSSPGRGNSPLHF

SEQ ID NO: 56219 - protein, 14 aa, Homo sapiens
  CDR3 for alpha chain variable domain of TCR clone 28110 (TRAV13-1, TRAJ35)
CAASKGGFGNVLHC

SEQ ID NO: 56220 - protein, 14 aa, Homo sapiens
  CDR3 for beta chain variable domain of TCR clone 28110 (TRBV4-2, TRBJ2-1)
CASGLDRAYNEQFF

SEQ ID NO: 56221 - protein, 12 aa, Homo sapiens
  CDR3 for alpha chain variable domain of TCR clone 28111 (TRAV16, TRAJ10)
CSRTGGGNKLTF

SEQ ID NO: 56222 - protein, 15 aa, Homo sapiens
  CDR3 for beta chain variable domain of TCR clone 28111 (TRBV6-3, TRBJ2-7)
CASSSPGTVCYEQYF

SEQ ID NO: 56223 - protein, 13 aa, Homo sapiens
  CDR3 for alpha chain variable domain of TCR clone 28112 (TRAV12-3, TRAJ53)
CAMRGGSNYKLTF

SEQ ID NO: 56224 - protein, 15 aa, Homo sapiens
  CDR3 for beta chain variable domain of TCR clone 28112 (TRBV2, TRBJ2-1)
CATHARLVMIGEQFF

SEQ ID NO: 56225 - protein, 13 aa, Homo sapiens
  CDR3 for alpha chain variable domain of TCR clone 28113 (TRAV13-1, TRAJ10)
CAALEGGGNKLTF

SEQ ID NO: 56226 - protein, 13 aa, Homo sapiens
  CDR3 for beta chain variable domain of TCR clone 28113 (TRBV7-3, TRBJ1-1)
CASSQDWGAEAFF

SEQ ID NO: 56227 - protein, 15 aa, Homo sapiens
  CDR3 for alpha chain variable domain of TCR clone 28114 (TRAV12-3, TRAJ49)
CEMAVTPNTGNQFYF

SEQ ID NO: 56228 - protein, 14 aa, Homo sapiens
  CDR3 for beta chain variable domain of TCR clone 28114 (TRBV7-8, TRBJ2-3)
CASSLEAGTDTQYF

SEQ ID NO: 56229 - protein, 14 aa, Homo sapiens
  CDR3 for alpha chain variable domain of TCR clone 28115 (TRAV21, TRAJ38)
CAVANAGNNRKLIW

SEQ ID NO: 56230 - protein, 16 aa, Homo sapiens
  CDR3 for beta chain variable domain of TCR clone 28115 (TRBV5-4, TRBJ2-1)
CASNLALAGAYNEQFF

SEQ ID NO: 56231 - protein, 12 aa, Homo sapiens
  CDR3 for alpha chain variable domain of TCR clone 28116 (TRAV4, TRAJ26)
CLVGDYGQNFVF

SEQ ID NO: 56232 - protein, 15 aa, Homo sapiens
  CDR3 for beta chain variable domain of TCR clone 28116 (TRBV20-1, TRBJ2-7)
CSARDRVSGMDEQYF

SEQ ID NO: 56233 - protein, 13 aa, Homo sapiens
  CDR3 for alpha chain variable domain of TCR clone 28117 (TRAV8-3, TRAJ28)
CAVGAVGSYQRTF

SEQ ID NO: 56234 - protein, 14 aa, Homo sapiens
  CDR3 for beta chain variable domain of TCR clone 28117 (TRBV7-2, TRBJ2-7)
CASRSQGAAYEQYF

SEQ ID NO: 56235 - protein, 15 aa, Homo sapiens
  CDR3 for alpha chain variable domain of TCR clone 28118 (TRAV17, TRAJ48)
CATDETNFGNEKLTF

SEQ ID NO: 56236 - protein, 13 aa, Homo sapiens
  CDR3 for beta chain variable domain of TCR clone 28118 (TRBV7-9, TRBJ1-2)
CASSLKQNYGYTF

SEQ ID NO: 56237 - protein, 13 aa, Homo sapiens
  CDR3 for alpha chain variable domain of TCR clone 28119 (TRAV13-1, TRAJ6)
CAASKGGSYIPTF

SEQ ID NO: 56238 - protein, 16 aa, Homo sapiens
  CDR3 for beta chain variable domain of TCR clone 28119 (TRBV20-1, TRBJ1-4)
CSAPGQGLLTNEKLFF

SEQ ID NO: 56239 - protein, 14 aa, Homo sapiens
  CDR3 for alpha chain variable domain of TCR clone 28120 (TRAV27, TRAJ22)
CAGVVPGSARRLTF

SEQ ID NO: 56240 - protein, 16 aa, Homo sapiens
  CDR3 for beta chain variable domain of TCR clone 28120 (TRBV9, TRBJ2-7)
CASSVGLGGGTYEQYF

SEQ ID NO: 56241 - protein, 14 aa, Homo sapiens
  CDR3 for alpha chain variable domain of TCR clone 28121 (TRAV9-2, TRAJ39)
CALYIYNAGNMLTF

SEQ ID NO: 56242 - protein, 14 aa, Homo sapiens
  CDR3 for beta chain variable domain of TCR clone 28121 (TRBV11-2, TRBJ2-3)
CASSRLARTDTQYF

SEQ ID NO: 56243 - protein, 18 aa, Homo sapiens
  CDR3 for alpha chain variable domain of TCR clone 28122 (TRAV13-1, TRAJ52)
CAASKRSAGGNSYGKLTF

SEQ ID NO: 56244 - protein, 13 aa, Homo sapiens
  CDR3 for beta chain variable domain of TCR clone 28122 (TRBV12-4, TRBJ1-2)
CASSLRQGKGYTF

SEQ ID NO: 56245 - protein, 13 aa, Homo sapiens
  CDR3 for alpha chain variable domain of TCR clone 28123 (TRAV13-1, TRAJ10)
CAALEGGGNKLTF

SEQ ID NO: 56246 - protein, 15 aa, Homo sapiens
  CDR3 for beta chain variable domain of TCR clone 28123 (TRBV19, TRBJ1-1)
CASTSGQIQNTEAFF

SEQ ID NO: 56247 - protein, 14 aa, Homo sapiens
  CDR3 for alpha chain variable domain of TCR clone 28124 (TRAV20, TRAJ56)
CAVQFGGANSKLTF

SEQ ID NO: 56248 - protein, 14 aa, Homo sapiens
  CDR3 for beta chain variable domain of TCR clone 28124 (TRBV20-1, TRBJ2-7)
CSTKRGRSSYEQYF

SEQ ID NO: 56249 - protein, 15 aa, Homo sapiens
  CDR3 for alpha chain variable domain of TCR clone 28125 (TRAV8-3, TRAJ45)
CASSYSGGGPDGLTF

SEQ ID NO: 56250 - protein, 13 aa, Homo sapiens
  CDR3 for beta chain variable domain of TCR clone 28125 (TRBV10-3, TRBJ2-7)
CASKLAVNYEQYF

SEQ ID NO: 56251 - protein, 14 aa, Homo sapiens
  CDR3 for alpha chain variable domain of TCR clone 28126 (TRAV20, TRAJ22)
CAVQVSGSARQLTF

SEQ ID NO: 56252 - protein, 13 aa, Homo sapiens
  CDR3 for beta chain variable domain of TCR clone 28126 (TRBV10-3, TRBJ2-7)
CASKLAVNYEQYF

SEQ ID NO: 56253 - protein, 12 aa, Homo sapiens
  CDR3 for alpha chain variable domain of TCR clone 28127 (TRAV12-1, TRAJ40)
CVVYSGTYKYIF

SEQ ID NO: 56254 - protein, 18 aa, Homo sapiens
  CDR3 for beta chain variable domain of TCR clone 28127 (TRBV11-2, TRBJ2-3)
CASSLGGASWGAPNTQYF

SEQ ID NO: 56255 - protein, 11 aa, Homo sapiens
  CDR3 for alpha chain variable domain of TCR clone 28128 (TRAV2, TRAJ13)
CASGGYQKVTF

SEQ ID NO: 56256 - protein, 20 aa, Homo sapiens
  CDR3 for beta chain variable domain of TCR clone 28128 (TRBV7-8, TRBJ2-2)
CASSHLFPGPTIHITGEPFF

SEQ ID NO: 56257 - protein, 14 aa, Homo sapiens
  CDR3 for alpha chain variable domain of TCR clone 28129 (TRAV21, TRAJ35)
CAVMPRGFGNVLHC

SEQ ID NO: 56258 - protein, 12 aa, Homo sapiens
  CDR3 for beta chain variable domain of TCR clone 28129 (TRBV7-9, TRBJ2-7)
CASSIKREEQYF

SEQ ID NO: 56259 - protein, 23 aa, Homo sapiens
  CDR3 for alpha chain variable domain of TCR clone 28130 (TRAV3, TRAJ38)
CAVRDCLNAGNNHIQNPDPAVYQ

SEQ ID NO: 56260 - protein, 13 aa, Homo sapiens
  CDR3 for beta chain variable domain of TCR clone 28130 (TRBV12-4, TRBJ1-2)
CASSLRQGKGYTF

SEQ ID NO: 56261 - protein, 13 aa, Homo sapiens
  CDR3 for alpha chain variable domain of TCR clone 28131 (TRAV17, TRAJ9)
CATDYTGGFKTIF

SEQ ID NO: 56262 - protein, 16 aa, Homo sapiens
  CDR3 for beta chain variable domain of TCR clone 28131 (TRBV7-7, TRBJ2-1)
CASSSASGTSYNEQFF

SEQ ID NO: 56263 - protein, 12 aa, Homo sapiens
  CDR3 for alpha chain variable domain of TCR clone 28132 (TRAV21, TRAJ23)
CAVMLQGGKLIF

SEQ ID NO: 56264 - protein, 14 aa, Homo sapiens
  CDR3 for beta chain variable domain of TCR clone 28132 (TRBV7-9, TRBJ1-4)
CAITEGEANEKLFF

SEQ ID NO: 56265 - protein, 14 aa, Homo sapiens
  CDR3 for alpha chain variable domain of TCR clone 28133 (TRAV26-1, TRAJ39)
CIVRGSRAGNMLTF

SEQ ID NO: 56266 - protein, 15 aa, Homo sapiens
  CDR3 for beta chain variable domain of TCR clone 28133 (TRBV7-9, TRBJ1-5)
CAISQGHQPNQPQHF

SEQ ID NO: 56267 - protein, 14 aa, Homo sapiens
  CDR3 for alpha chain variable domain of TCR clone 28134 (TRAV13-1, TRAJ35)
CAASKGGFGNVLHC

SEQ ID NO: 56268 - protein, 13 aa, Homo sapiens
  CDR3 for beta chain variable domain of TCR clone 28134 (TRBV7-3, TRBJ1-1)
CASSQDWGAEAFI

SEQ ID NO: 56269 - protein, 13 aa, Homo sapiens
  CDR3 for alpha chain variable domain of TCR clone 28135 (TRAV12-3, TRAJ46)
CAVKKSSGDKLTF

SEQ ID NO: 56270 - protein, 13 aa, Homo sapiens
  CDR3 for beta chain variable domain of TCR clone 28135 (TRBV6-1, TRBJ2-1)
CASSRDRNNEQFF

SEQ ID NO: 56271 - protein, 13 aa, Homo sapiens
  CDR3 for alpha chain variable domain of TCR clone 28136 (TRAV13-2, TRAJ13)
CADLSGGYQKVTF

SEQ ID NO: 56272 - protein, 15 aa, Homo sapiens
  CDR3 for beta chain variable domain of TCR clone 28136 (TRBV19, TRBJ1-1)
CASNIGGGRNTEAFF

SEQ ID NO: 56273 - protein, 14 aa, Homo sapiens
  CDR3 for alpha chain variable domain of TCR clone 28137 (TRAV3, TRAJ34)
CAVGAPGNTDKLIF

SEQ ID NO: 56274 - protein, 17 aa, Homo sapiens
  CDR3 for beta chain variable domain of TCR clone 28137 (TRBV20-1, TRBJ2-7)
CSAAPGLARGISYEQYF

SEQ ID NO: 56275 - protein, 18 aa, Homo sapiens
  CDR3 for alpha chain variable domain of TCR clone 28138 (TRAV26-1, TRAJ5)
CIVRVVPPRDTGRRALTF

SEQ ID NO: 56276 - protein, 15 aa, Homo sapiens
  CDR3 for beta chain variable domain of TCR clone 28138 (TRBV7-9, TRBJ2-7)
CASSLPMGQANGQYF

SEQ ID NO: 56277 - protein, 13 aa, Homo sapiens
  CDR3 for alpha chain variable domain of TCR clone 28139 (TRAV3, TRAJ27)
CAVRPLGAGKSTF

SEQ ID NO: 56278 - protein, 13 aa, Homo sapiens
  CDR3 for beta chain variable domain of TCR clone 28139 (TRBV7-9, TRBJ2-3)
CTSSPGSTDTQYF

SEQ ID NO: 56279 - protein, 14 aa, Homo sapiens
  CDR3 for alpha chain variable domain of TCR clone 28140 (TRAV12-2, TRAJ13)
CAVKKTGGYQKVTF

SEQ ID NO: 56280 - protein, 14 aa, Homo sapiens
  CDR3 for beta chain variable domain of TCR clone 28140 (TRBV7-9, TRBJ2-1)
CASSPRDSLYEQFF

SEQ ID NO: 56281 - protein, 14 aa, Homo sapiens
  CDR3 for alpha chain variable domain of TCR clone 28141 (TRAV8-3, TRAJ4)
GAVGAAGGYNKLIF

SEQ ID NO: 56282 - protein, 15 aa, Homo sapiens
  CDR3 for beta chain variable domain of TCR clone 28141 (TRBV6-5, TRBJ2-1)
CASSYDAGAGNEQFF

SEQ ID NO: 56283 - protein, 13 aa, Homo sapiens
  CDR3 for alpha chain variable domain of TCR clone 28142 (TRAV35, TRAJ42)
CAGVPGSQGNLIF

SEQ ID NO: 56284 - protein, 13 aa, Homo sapiens
  CDR3 for beta chain variable domain of TCR clone 28142 (TRBV29-1, TRBJ2-1)
CSVEGGRVNEQFF

SEQ ID NO: 56285 - protein, 14 aa, Homo sapiens
  CDR3 for alpha chain variable domain of TCR clone 28143 (TRAV1-2, TRAJ8)
CAVREDTGFQKLVF

SEQ ID NO: 56286 - protein, 11 aa, Homo sapiens
  CDR3 for beta chain variable domain of TCR clone 28143 (TRBV11-3, TRBJ2-7)
CASSRTCEQYF

SEQ ID NO: 56287 - protein, 13 aa, Homo sapiens
  CDR3 for alpha chain variable domain of TCR clone 28144 (TRAV3, TRAJ21)
CAVREPYFNKFYF

SEQ ID NO: 56288 - protein, 13 aa, Homo sapiens
  CDR3 for beta chain variable domain of TCR clone 28144 (TRBV9, TRBJ2-1)
CASSPSGGNEQFF

SEQ ID NO: 56289 - protein, 13 aa, Homo sapiens
  CDR3 for alpha chain variable domain of TCR clone 28145 (TRAV2, TRAJ40)
CAVVTSGTYKYIF

SEQ ID NO: 56290 - protein, 15 aa, Homo sapiens
  CDR3 for beta chain variable domain of TCR clone 28145 (TRBV11-3, TRBJ2-3)
CASLKNGREGDTQYF

SEQ ID NO: 56291 - protein, 12 aa, Homo sapiens
  CDR3 for alpha chain variable domain of TCR clone 28146 (TRAV12-1, TRAJ40)
CVGYSGTYKYIF

SEQ ID NO: 56292 - protein, 15 aa, Homo sapiens
  CDR3 for beta chain variable domain of TCR clone 28146 (TRBV7-9, TRBJ1-6)
CASSSPGRGNSPLHF

SEQ ID NO: 56293 - protein, 11 aa, Homo sapiens
  CDR3 for alpha chain variable domain of TCR clone 28147 (TRAV35, TRAJ30)
CAGLSDDKIIF

SEQ ID NO: 56294 - protein, 15 aa, Homo sapiens
  CDR3 for beta chain variable domain of TCR clone 28147 (TRBV2, TRBJ1-3)
CASSISPRSGNTIYF

SEQ ID NO: 56295 - protein, 15 aa, Homo sapiens
  CDR3 for alpha chain variable domain of TCR clone 28148 (TRAV12-2, TRAJ53)
CAVNGGGGSNYKLTF

SEQ ID NO: 56296 - protein, 16 aa, Homo sapiens
  CDR3 for beta chain variable domain of TCR clone 28148 (TRBV7-3, TRBJ2-2)
CASSLKRGTLSGELFF

SEQ ID NO: 56297 - protein, 13 aa, Homo sapiens
  CDR3 for alpha chain variable domain of TCR clone 28149 (TRAV13-2, TRAJ15)
CAERPQAGTALIF

SEQ ID NO: 56298 - protein, 15 aa, Homo sapiens
  CDR3 for beta chain variable domain of TCR clone 28149 (TRBV11-2, TRBJ2-7)
CASRFPGIGGYEQYF

SEQ ID NO: 56299 - protein, 11 aa, Homo sapiens
  CDR3 for alpha chain variable domain of TCR clone 28150 (TRAV21, TRAJ34)
CAATNTDKLIF

SEQ ID NO: 56300 - protein, 16 aa, Homo sapiens
  CDR3 for beta chain variable domain of TCR clone 28150 (TRBV18, TRBJ1-1)
CASSPGVGGRGGEAFF

SEQ ID NO: 56301 - protein, 15 aa, Homo sapiens
  CDR3 for alpha chain variable domain of TCR clone 28151 (TRAV30, TRAJ32)
RGTEILGGATNKLIF

SEQ ID NO: 56302 - protein, 13 aa, Homo sapiens
  CDR3 for beta chain variable domain of TCR clone 28151 (TRBV6-3, TRBJ2-7)
CASSFSGGYEQYF

SEQ ID NO: 56303 - protein, 13 aa, Homo sapiens
  CDR3 for alpha chain variable domain of TCR clone 28152 (TRAV2, TRAJ40)
CAVVTSGTYKYIF

SEQ ID NO: 56304 - protein, 13 aa, Homo sapiens
  CDR3 for beta chain variable domain of TCR clone 28152 (TRBV19, TRBJ1-1)
CASTRRGDTEAFF

SEQ ID NO: 56305 - protein, 12 aa, Homo sapiens
  CDR3 for alpha chain variable domain of TCR clone 28153 (TRAV13-1, TRAJ42)
SVLRGSQGNLIF

SEQ ID NO: 56306 - protein, 10 aa, Homo sapiens
  CDR3 for beta chain variable domain of TCR clone 28153 (TRBV28, TRBJ2-5)
CQQSSWTQYF

SEQ ID NO: 56307 - protein, 14 aa, Homo sapiens
  CDR3 for alpha chain variable domain of TCR clone 28154 (TRAV1-2, TRAJ16)
CAVNRFSDGQKLLF

SEQ ID NO: 56308 - protein, 14 aa, Homo sapiens
  CDR3 for beta chain variable domain of TCR clone 28154 (TRBV7-3, TRBJ1-1)
CASSLKGGNTEAFL

SEQ ID NO: 56309 - protein, 14 aa, Homo sapiens
  CDR3 for alpha chain variable domain of TCR clone 28155 (TRAV16, TRAJ33)
CALSAMDSNYQLIW

SEQ ID NO: 56310 - protein, 13 aa, Homo sapiens
  CDR3 for beta chain variable domain of TCR clone 28155 (TRBV7-3, TRBJ1-1)
CASSQDWGAEAFF

SEQ ID NO: 56311 - protein, 11 aa, Homo sapiens
  CDR3 for alpha chain variable domain of TCR clone 28156 (TRAV3, TRAJ49)
CAPITGNQFYF

SEQ ID NO: 56312 - protein, 16 aa, Homo sapiens
  CDR3 for beta chain variable domain of TCR clone 28156 (TRBV5-1, TRBJ2-3)
CASRVFPMSSADTQYF

SEQ ID NO: 56313 - protein, 13 aa, Homo sapiens
  CDR3 for alpha chain variable domain of TCR clone 28157 (TRAV3, TRAJ21)
CAVREPDFNKFYF

SEQ ID NO: 56314 - protein, 12 aa, Homo sapiens
  CDR3 for beta chain variable domain of TCR clone 28157 (TRBV5-1, TRBJ2-4)
LAGEWTKNSQYF

SEQ ID NO: 56315 - protein, 13 aa, Homo sapiens
  CDR3 for alpha chain variable domain of TCR clone 28158 (TRAV12-3, TRAJ6)
CANPSGGSHIPTF

SEQ ID NO: 56316 - protein, 14 aa, Homo sapiens
  CDR3 for beta chain variable domain of TCR clone 28158 (TRBV19, TRBJ1-1)
CASSRDRDATEAFF

SEQ ID NO: 56317 - protein, 12 aa, Homo sapiens
  CDR3 for alpha chain variable domain of TCR clone 28159 (TRAV8-3, TRAJ26)
CAGDNYGQNFVF

SEQ ID NO: 56318 - protein, 15 aa, Homo sapiens
  CDR3 for beta chain variable domain of TCR clone 28159 (TRBV9, TRBJ2-1)
CASSLAGSSYSEQFF

SEQ ID NO: 56319 - protein, 13 aa, Homo sapiens
  CDR3 for alpha chain variable domain of TCR clone 28160 (TRAV20, TRAJ31)
CAVQARNNARLMF

SEQ ID NO: 56320 - protein, 16 aa, Homo sapiens
  CDR3 for beta chain variable domain of TCR clone 28160 (TRBV6-6, TRBJ2-1)
CASSWGGQGPYNEQFF

SEQ ID NO: 56321 - protein, 12 aa, Homo sapiens
  CDR3 for alpha chain variable domain of TCR clone 28161 (TRAV8-6, TRAJ33)
CAVADSNYQLIW

SEQ ID NO: 56322 - protein, 15 aa, Homo sapiens
  CDR3 for beta chain variable domain of TCR clone 28161 (TRBV4-3, TRBJ1-2)
CASSRGQGRNYGYTF

SEQ ID NO: 56323 - protein, 14 aa, Homo sapiens
  CDR3 for alpha chain variable domain of TCR clone 28162 (TRAV3, TRAJ34)
CAARDINNTDKLIF

SEQ ID NO: 56324 - protein, 15 aa, Homo sapiens
  CDR3 for beta chain variable domain of TCR clone 28162 (TRBV20-1, TRBJ2-7)
CSARDRVSGMDEQYF

SEQ ID NO: 56325 - protein, 11 aa, Homo sapiens
  CDR3 for alpha chain variable domain of TCR clone 28163 (TRAV12-2, TRAJ31)
CAVTRWARLMF

SEQ ID NO: 56326 - protein, 15 aa, Homo sapiens
  CDR3 for beta chain variable domain of TCR clone 28163 (TRBV19, TRBJ2-7)
RASSIGGGLVNEQYF

SEQ ID NO: 56327 - protein, 15 aa, Homo sapiens
  CDR3 for alpha chain variable domain of TCR clone 28164 (TRAV27, TRAJ38)
CAARRNAGNNRKLIW

SEQ ID NO: 56328 - protein, 17 aa, Homo sapiens
  CDR3 for beta chain variable domain of TCR clone 28164 (TRBV11-2, TRBJ2-1)
CASSLYPPGVEYNEQFF

SEQ ID NO: 56329 - protein, 14 aa, Homo sapiens
  CDR3 for alpha chain variable domain of TCR clone 28165 (TRAV36/DV7, TRAJ57)
CAVGFPGGSEKLVF

SEQ ID NO: 56330 - protein, 12 aa, Homo sapiens
  CDR3 for beta chain variable domain of TCR clone 28165 (TRBV19, TRBJ2-7)
CASTSGTYEQDF

SEQ ID NO: 56331 - protein, 13 aa, Homo sapiens
  CDR3 for alpha chain variable domain of TCR clone 28166 (TRAV4, TRAJ28)
CLFIWGWGLPTHF

SEQ ID NO: 56332 - protein, 14 aa, Homo sapiens
  CDR3 for beta chain variable domain of TCR clone 28166 (TRBV7-9, TRBJ2-5)
CASSLDTAQETQYF

SEQ ID NO: 56333 - protein, 11 aa, Homo sapiens
  CDR3 for alpha chain variable domain of TCR clone 28167 (TRAV1-2, TRAJ40)
CAVPGTYKYVF

SEQ ID NO: 56334 - protein, 16 aa, Homo sapiens
  CDR3 for beta chain variable domain of TCR clone 28167 (TRBV29-1, TRBJ2-7)
CSVEVVGTSGSYEQYF

SEQ ID NO: 56335 - protein, 12 aa, Homo sapiens
  CDR3 for alpha chain variable domain of TCR clone 28168 (TRAV21, TRAJ23)
CAVMLPGGKLIF

SEQ ID NO: 56336 - protein, 14 aa, Homo sapiens
  CDR3 for beta chain variable domain of TCR clone 28168 (TRBV7-9, TRBJ1-4)
CAITEGEANEKLFF

SEQ ID NO: 56337 - protein, 16 aa, Homo sapiens
  CDR3 for alpha chain variable domain of TCR clone 28169 (TRAV30, TRAJ24)
CGTEIVDADSWGKFQF

SEQ ID NO: 56338 - protein, 13 aa, Homo sapiens
  CDR3 for beta chain variable domain of TCR clone 28169 (TRBV7-3, TRBJ2-5)
CASSFRGGETQYF

SEQ ID NO: 56339 - protein, 13 aa, Homo sapiens
  CDR3 for alpha chain variable domain of TCR clone 28170 (TRAV4, TRAJ22)
CLGGSGSARQLTF

SEQ ID NO: 56340 - protein, 16 aa, Homo sapiens
  CDR3 for beta chain variable domain of TCR clone 28170 (TRBV12-4, TRBJ1-5)
CASSRPVGGSNQPQHF

SEQ ID NO: 56341 - protein, 14 aa, Homo sapiens
  CDR3 for alpha chain variable domain of TCR clone 28171 (TRAV9-2, TRAJ39)
CALYIYNAGNMLTF

SEQ ID NO: 56342 - protein, 14 aa, Homo sapiens
  CDR3 for beta chain variable domain of TCR clone 28171 (TRBV10-2, TRBJ2-1)
CASSEGTSEDEQFF

SEQ ID NO: 56343 - protein, 13 aa, Homo sapiens
  CDR3 for alpha chain variable domain of TCR clone 28172 (TRAV27, TRAJ6)
CAGGTRGSYIPTF

SEQ ID NO: 56344 - protein, 13 aa, Homo sapiens
  CDR3 for beta chain variable domain of TCR clone 28172 (TRBV6-1, TRBJ1-1)
CASSRQGNTEAFF

SEQ ID NO: 56345 - protein, 14 aa, Homo sapiens
  CDR3 for alpha chain variable domain of TCR clone 28173 (TRAV4, TRAJ17)
CLVGDMAAGNKLTF

SEQ ID NO: 56346 - protein, 14 aa, Homo sapiens
  CDR3 for beta chain variable domain of TCR clone 28173 (TRBV9, TRBJ2-1)
CASSQGVSYNEQFF

SEQ ID NO: 56347 - protein, 15 aa, Homo sapiens
  CDR3 for alpha chain variable domain of TCR clone 28174 (TRAV17, TRAJ57)
CDTGPSQGGSEKLVF

SEQ ID NO: 56348 - protein, 16 aa, Homo sapiens
  CDR3 for beta chain variable domain of TCR clone 28174 (TRBV12-4, TRBJ1-5)
CASSRPVGGSNQPQHF

SEQ ID NO: 56349 - protein, 12 aa, Homo sapiens
  CDR3 for alpha chain variable domain of TCR clone 28175 (TRAV13-1, TRAJ21)
CAAKEGFNKFYF

SEQ ID NO: 56350 - protein, 13 aa, Homo sapiens
  CDR3 for beta chain variable domain of TCR clone 28175 (TRBV18, TRBJ2-7)
CQLTERGAYEQYF

SEQ ID NO: 56351 - protein, 16 aa, Homo sapiens
  CDR3 for alpha chain variable domain of TCR clone 28176 (TRAV4, TRAJ18)
CCVLLIGGSTLGRLYF

SEQ ID NO: 56352 - protein, 12 aa, Homo sapiens
  CDR3 for beta chain variable domain of TCR clone 28176 (TRBV7-8, TRBJ2-7)
CASSLGDREQYF

SEQ ID NO: 56353 - protein, 12 aa, Homo sapiens
  CDR3 for alpha chain variable domain of TCR clone 28177 (TRAV12-3, TRAJ17)
CAMTLTGNKLTF

SEQ ID NO: 56354 - protein, 15 aa, Homo sapiens
  CDR3 for beta chain variable domain of TCR clone 28177 (TRBV20-1, TRBJ2-7)
CSARDRVSGMDGQHF

SEQ ID NO: 56355 - protein, 13 aa, Homo sapiens
  CDR3 for alpha chain variable domain of TCR clone 28178 (TRAV17, TRAJ9)
CATDYTGGFKTIF

SEQ ID NO: 56356 - protein, 15 aa, Homo sapiens
  CDR3 for beta chain variable domain of TCR clone 28178 (TRBV9, TRBJ1-6)
CASSVAGTGDSPLHF

SEQ ID NO: 56357 - protein, 11 aa, Homo sapiens
  CDR3 for alpha chain variable domain of TCR clone 28179 (TRAV12-1, TRAJ34)
CVVNKGRELIF

SEQ ID NO: 56358 - protein, 12 aa, Homo sapiens
  CDR3 for beta chain variable domain of TCR clone 28179 (TRBV2, TRBJ2-1)
CAYGPPGNEQLF

SEQ ID NO: 56359 - protein, 14 aa, Homo sapiens
  CDR3 for alpha chain variable domain of TCR clone 28180 (TRAV14/DV4, TRAJ58)
CAMMKETSGPRLTF

SEQ ID NO: 56360 - protein, 12 aa, Homo sapiens
  CDR3 for beta chain variable domain of TCR clone 28180 (TRBV12-4, TRBJ2-1)
CASTYVLNEQFF

SEQ ID NO: 56361 - protein, 12 aa, Homo sapiens
  CDR3 for alpha chain variable domain of TCR clone 28181 (TRAV8-3, TRAJ4)
PAFSGGYNKLIF

SEQ ID NO: 56362 - protein, 15 aa, Homo sapiens
  CDR3 for beta chain variable domain of TCR clone 28181 (TRBV7-9, TRBJ1-6)
CASSSPGRGNSPLHF

SEQ ID NO: 56363 - protein, 15 aa, Homo sapiens
  CDR3 for alpha chain variable domain of TCR clone 28182 (TRAV26-1, TRAJ56)
CIVRVATGANSKLTF

SEQ ID NO: 56364 - protein, 15 aa, Homo sapiens
  CDR3 for beta chain variable domain of TCR clone 28182 (TRBV27, TRBJ2-7)
CASSPQREGQCEQYF

SEQ ID NO: 56365 - protein, 14 aa, Homo sapiens
  CDR3 for alpha chain variable domain of TCR clone 28183 (TRAV1-2, TRAJ16)
CAVNRFSDGQKLLF

SEQ ID NO: 56366 - protein, 16 aa, Homo sapiens
  CDR3 for beta chain variable domain of TCR clone 28183 (TRBV7-3, TRBJ2-2)
CARSLKRGTLSGELFF

SEQ ID NO: 56367 - protein, 16 aa, Homo sapiens
  CDR3 for alpha chain variable domain of TCR clone 28184 (TRAV8-3, TRAJ13)
CAVGAYPSGGYQKVTF

SEQ ID NO: 56368 - protein, 15 aa, Homo sapiens
  CDR3 for beta chain variable domain of TCR clone 28184 (TRBV19, TRBJ1-5)
CASSIVWADNQPKHF

SEQ ID NO: 56369 - protein, 13 aa, Homo sapiens
  CDR3 for alpha chain variable domain of TCR clone 28185 (TRAV3, TRAJ27)
CAGRPLGAGKSTF

SEQ ID NO: 56370 - protein, 13 aa, Homo sapiens
  CDR3 for beta chain variable domain of TCR clone 28185 (TRBV7-9, TRBJ2-3)
CASSPGSTDTQYF

SEQ ID NO: 56371 - protein, 14 aa, Homo sapiens
  CDR3 for alpha chain variable domain of TCR clone 28186 (TRAV23/DV6, TRAJ11)
CAASLESGYSTPTF

SEQ ID NO: 56372 - protein, 13 aa, Homo sapiens
  CDR3 for beta chain variable domain of TCR clone 28186 (TRBV4-1, TRBJ2-5)
CASSLTRGETQYF

SEQ ID NO: 56373 - protein, 15 aa, Homo sapiens
  CDR3 for alpha chain variable domain of TCR clone 28187 (TRAV16, TRAJ12)
CSKWPLRDSSYKLIF

SEQ ID NO: 56374 - protein, 13 aa, Homo sapiens
  CDR3 for beta chain variable domain of TCR clone 28187 (TRBV4-2, TRBJ1-1)
CASGQAGNTEAFF

SEQ ID NO: 56375 - protein, 14 aa, Homo sapiens
  CDR3 for alpha chain variable domain of TCR clone 28188 (TRAV12-2, TRAJ13)
CAVKKTGGYQKVAF

SEQ ID NO: 56376 - protein, 14 aa, Homo sapiens
  CDR3 for beta chain variable domain of TCR clone 28188 (TRBV6-1, TRBJ1-3)
CASVQGGGGNTIYF

SEQ ID NO: 56377 - protein, 13 aa, Homo sapiens
  CDR3 for alpha chain variable domain of TCR clone 28189 (TRAV36/DV7, TRAJ45)
CVHSGGGADGLTF

SEQ ID NO: 56378 - protein, 14 aa, Homo sapiens
  CDR3 for beta chain variable domain of TCR clone 28189 (TRBV2, TRBJ1-5)
CASSENRGGQPQHF

SEQ ID NO: 56379 - protein, 15 aa, Homo sapiens
  CDR3 for alpha chain variable domain of TCR clone 28190 (TRAV8-3, TRAJ45)
CASSYSGGGADGLTF

SEQ ID NO: 56380 - protein, 16 aa, Homo sapiens
  CDR3 for beta chain variable domain of TCR clone 28190 (TRBV7-9, TRBJ2-2)
CASSGLGGANTGELFF

SEQ ID NO: 56381 - protein, 12 aa, Homo sapiens
  CDR3 for alpha chain variable domain of TCR clone 28191 (TRAV12-2, TRAJ10)
WGVTGGGNKLTF

SEQ ID NO: 56382 - protein, 16 aa, Homo sapiens
  CDR3 for beta chain variable domain of TCR clone 28191 (TRBV6-4, TRBJ1-2)
CASSEAVGDPNYGDTF

SEQ ID NO: 56383 - protein, 13 aa, Homo sapiens
  CDR3 for alpha chain variable domain of TCR clone 28192 (TRAV27, TRAJ41)
CAGEGNSGYALHF

SEQ ID NO: 56384 - protein, 14 aa, Homo sapiens
  CDR3 for beta chain variable domain of TCR clone 28192 (TRBV7-2, TRBJ1-1)
CASSFLTGTTEAFF

SEQ ID NO: 56385 - protein, 14 aa, Homo sapiens
  CDR3 for alpha chain variable domain of TCR clone 28193 (TRAV12-3, TRAJ10)
SHLPLTGGGNKLTF

SEQ ID NO: 56386 - protein, 14 aa, Homo sapiens
  CDR3 for beta chain variable domain of TCR clone 28193 (TRBV19, TRBJ2-7)
CASSMGQGAIEQYF

SEQ ID NO: 56387 - protein, 12 aa, Homo sapiens
  CDR3 for alpha chain variable domain of TCR clone 28194 (TRAV3, TRAJ20)
CAVRDPDYKLSF

SEQ ID NO: 56388 - protein, 15 aa, Homo sapiens
  CDR3 for beta chain variable domain of TCR clone 28194 (TRBV7-9, TRBJ2-1)
CASSLGLAGGTEQFF

SEQ ID NO: 56389 - protein, 13 aa, Homo sapiens
  CDR3 for alpha chain variable domain of TCR clone 28195 (TRAV8-4, TRAJ29)
CAVSATGNTPLVF

SEQ ID NO: 56390 - protein, 14 aa, Homo sapiens
  CDR3 for beta chain variable domain of TCR clone 28195 (TRBV6-1, TRBJ1-1)
CASRYAQRNTEAFF

SEQ ID NO: 56391 - protein, 16 aa, Homo sapiens
  CDR3 for alpha chain variable domain of TCR clone 28196 (TRAV30, TRAJ24)
CGREIVDADSWGKFQF

SEQ ID NO: 56392 - protein, 14 aa, Homo sapiens
  CDR3 for beta chain variable domain of TCR clone 28196 (TRBV12-5, TRBJ2-5)
CASGSRTHQETQYF

SEQ ID NO: 56393 - protein, 15 aa, Homo sapiens
  CDR3 for alpha chain variable domain of TCR clone 28197 (TRAV26-1, TRAJ3)
CIVRSGYSSAPKIIF

SEQ ID NO: 56394 - protein, 14 aa, Homo sapiens
  CDR3 for beta chain variable domain of TCR clone 28197 (TRBV13, TRBJ2-5)
CASYRRLAEETQYF

SEQ ID NO: 56395 - protein, 13 aa, Homo sapiens
  CDR3 for alpha chain variable domain of TCR clone 28198 (TRAV2, TRAJ40)
CAVVTSGTYKYIF

SEQ ID NO: 56396 - protein, 15 aa, Homo sapiens
  CDR3 for beta chain variable domain of TCR clone 28198 (TRBV4-1, TRBJ2-7)
CASSQQGQGFDEQYF

SEQ ID NO: 56397 - protein, 15 aa, Homo sapiens
  CDR3 for alpha chain variable domain of TCR clone 28199 (TRAV13-1, TRAJ16)
CAARYRMARSCSLQG

SEQ ID NO: 56398 - protein, 13 aa, Homo sapiens
  CDR3 for beta chain variable domain of TCR clone 28199 (TRBV4-1, TRBJ2-1)
CASSQAGGDEQFF

SEQ ID NO: 56399 - protein, 12 aa, Homo sapiens
  CDR3 for alpha chain variable domain of TCR clone 28200 (TRAV3, TRAJ20)
CAVRDPDYKLSF

SEQ ID NO: 56400 - protein, 17 aa, Homo sapiens
  CDR3 for beta chain variable domain of TCR clone 28200 (TRBV13, TRBJ2-3)
CASSLSRVAGGRNTQYF

SEQ ID NO: 56401 - protein, 15 aa, Homo sapiens
  CDR3 for alpha chain variable domain of TCR clone 28201 (TRAV8-1, TRAJ4)
CAVIDVSGGYNKLIF

SEQ ID NO: 56402 - protein, 14 aa, Homo sapiens
  CDR3 for beta chain variable domain of TCR clone 28201 (TRBV5-1, TRBJ1-1)
CASSFTGRNTEAFF

SEQ ID NO: 56403 - protein, 18 aa, Homo sapiens
  CDR3 for alpha chain variable domain of TCR clone 28202 (TRAV21, TRAJ52)
CAVRPSPAGGTSYGKLTF

SEQ ID NO: 56404 - protein, 13 aa, Homo sapiens
  CDR3 for beta chain variable domain of TCR clone 28202 (TRBV7-3, TRBJ1-1)
CASNQDWGAEAFF

SEQ ID NO: 56405 - protein, 14 aa, Homo sapiens
  CDR3 for alpha chain variable domain of TCR clone 28203 (TRAV3, TRAJ9)
CAVRLNTGGFKAIF

SEQ ID NO: 56406 - protein, 15 aa, Homo sapiens
  CDR3 for beta chain variable domain of TCR clone 28203 (TRBV7-2, TRBJ2-1)
CASSLASGRVNEQFF

SEQ ID NO: 56407 - protein, 14 aa, Homo sapiens
  CDR3 for alpha chain variable domain of TCR clone 28204 (TRAV12-2, TRAJ13)
CAVKKTGGYQKVTF

SEQ ID NO: 56408 - protein, 13 aa, Homo sapiens
  CDR3 for beta chain variable domain of TCR clone 28204 (TRBV20-1, TRBJ1-1)
YSARGGGNTEAFF

SEQ ID NO: 56409 - protein, 14 aa, Homo sapiens
  CDR3 for alpha chain variable domain of TCR clone 28205 (TRAV12-2, TRAJ5)
CAVNRSTGRRALTF

SEQ ID NO: 56410 - protein, 12 aa, Homo sapiens
  CDR3 for beta chain variable domain of TCR clone 28205 (TRBV19, TRBJ1-5)
CAGSIAQQPQHF

SEQ ID NO: 56411 - protein, 15 aa, Homo sapiens
  CDR3 for alpha chain variable domain of TCR clone 28206 (TRAV17, TRAJ56)
CATEPFTGANSKLTL

SEQ ID NO: 56412 - protein, 14 aa, Homo sapiens
  CDR3 for beta chain variable domain of TCR clone 28206 (TRBV19, TRBJ2-1)
CASPTFVLSGEQFF

SEQ ID NO: 56413 - protein, 13 aa, Homo sapiens
  CDR3 for alpha chain variable domain of TCR clone 28207 (TRAV38-2/DV8, TRAJ34)
CAYRTWNTDKLIF

SEQ ID NO: 56414 - protein, 18 aa, Homo sapiens
  CDR3 for beta chain variable domain of TCR clone 28207 (TRBV6-6, TRBJ1-3)
CASSYSRWDSISGNTIYF

SEQ ID NO: 56415 - protein, 12 aa, Homo sapiens
  CDR3 for alpha chain variable domain of TCR clone 28208 (TRAV13-1, TRAJ49)
CAASPIGNQFYF

SEQ ID NO: 56416 - protein, 13 aa, Homo sapiens
  CDR3 for beta chain variable domain of TCR clone 28208 (TRBV20-1, TRBJ2-2)
CSASAAGTGELFF

SEQ ID NO: 56417 - protein, 14 aa, Homo sapiens
  CDR3 for alpha chain variable domain of TCR clone 28209 (TRAV8-4, TRAJ17)
CAVSDQAAGNKLTF

SEQ ID NO: 56418 - protein, 15 aa, Homo sapiens
  CDR3 for beta chain variable domain of TCR clone 28209 (TRBV7-2, TRBJ1-2)
CASSLAPDRGLGDTF

SEQ ID NO: 56419 - protein, 16 aa, Homo sapiens
  CDR3 for alpha chain variable domain of TCR clone 28210 (TRAV26-1, TRAJ37)
CIVRGDGSGNTGKIIF

SEQ ID NO: 56420 - protein, 17 aa, Homo sapiens
  CDR3 for beta chain variable domain of TCR clone 28210 (TRBV4-1, TRBJ2-7)
CASSRDPLGVRGGEQYF

SEQ ID NO: 56421 - protein, 12 aa, Homo sapiens
  CDR3 for alpha chain variable domain of TCR clone 28211 (TRAV17, TRAJ20)
CATDSNDYKLSF

SEQ ID NO: 56422 - protein, 14 aa, Homo sapiens
  CDR3 for beta chain variable domain of TCR clone 28211 (TRBV7-3, TRBJ2-3)
CASSSLHTSDTQYF

SEQ ID NO: 56423 - protein, 12 aa, Homo sapiens
  CDR3 for alpha chain variable domain of TCR clone 28212 (TRAV3, TRAJ31)
CAVRDGDARLMF

SEQ ID NO: 56424 - protein, 18 aa, Homo sapiens
  CDR3 for beta chain variable domain of TCR clone 28212 (TRBV7-2, TRBJ2-3)
CASSLKREGSGITDTQYF

SEQ ID NO: 56425 - protein, 17 aa, Homo sapiens
  CDR3 for alpha chain variable domain of TCR clone 28213 (TRAV2, TRAJ36)
CAVEDRGNWGKQPLLWD

SEQ ID NO: 56426 - protein, 14 aa, Homo sapiens
  CDR3 for beta chain variable domain of TCR clone 28213 (TRBV7-9, TRBJ2-5)
CASSLDTARETQYF

SEQ ID NO: 56427 - protein, 13 aa, Homo sapiens
  CDR3 for alpha chain variable domain of TCR clone 28214 (TRAV2, TRAJ24)
CAVSTDSWGKLQF

SEQ ID NO: 56428 - protein, 14 aa, Homo sapiens
  CDR3 for beta chain variable domain of TCR clone 28214 (TRBV13, TRBJ2-5)
CAGSLGTAQETQYF

SEQ ID NO: 56429 - protein, 14 aa, Homo sapiens
  CDR3 for alpha chain variable domain of TCR clone 28215 (TRAV35, TRAJ33)
YAGSSQDSNYQLIW

SEQ ID NO: 56430 - protein, 15 aa, Homo sapiens
  CDR3 for beta chain variable domain of TCR clone 28215 (TRBV20-1, TRBJ2-7)
CSAESGTSGAYEQYF

SEQ ID NO: 56431 - protein, 14 aa, Homo sapiens
  CDR3 for alpha chain variable domain of TCR clone 28216 (TRAV12-3, TRAJ9)
CAMSPNTGGFKTIF

SEQ ID NO: 56432 - protein, 15 aa, Homo sapiens
  CDR3 for beta chain variable domain of TCR clone 28216 (TRBV19, TRBJ1-1)
CASTSGQIQNTEAFF

SEQ ID NO: 56433 - protein, 18 aa, Homo sapiens
  CDR3 for alpha chain variable domain of TCR clone 28217 (TRAV21, TRAJ52)
CAVRPSPAGGTTYGKLTF

SEQ ID NO: 56434 - protein, 17 aa, Homo sapiens
  CDR3 for beta chain variable domain of TCR clone 28217 (TRBV13, TRBJ2-3)
CASSLSRVAGGRNTQYF

SEQ ID NO: 56435 - protein, 10 aa, Homo sapiens
  CDR3 for alpha chain variable domain of TCR clone 28218 (TRAV30, TRAJ48)
CGIGNEKLTF

SEQ ID NO: 56436 - protein, 14 aa, Homo sapiens
  CDR3 for beta chain variable domain of TCR clone 28218 (TRBV7-6, TRBJ2-3)
CASSVAGGTGTQYF

SEQ ID NO: 56437 - protein, 14 aa, Homo sapiens
  CDR3 for alpha chain variable domain of TCR clone 28219 (TRAV21, TRAJ35)
CAVMPISFGNVLHC

SEQ ID NO: 56438 - protein, 12 aa, Homo sapiens
  CDR3 for beta chain variable domain of TCR clone 28219 (TRBV7-9, TRBJ2-7)
CASSIKREEQYF

SEQ ID NO: 56439 - protein, 13 aa, Homo sapiens
  CDR3 for alpha chain variable domain of TCR clone 28220 (TRAV27, TRAJ29)
CAGAHSGNTPLVF

SEQ ID NO: 56440 - protein, 14 aa, Homo sapiens
  CDR3 for beta chain variable domain of TCR clone 28220 (TRBV7-9, TRBJ2-7)
CASSIGQGEGEQYF

SEQ ID NO: 56441 - protein, 12 aa, Homo sapiens
  CDR3 for alpha chain variable domain of TCR clone 28221 (TRAV21, TRAJ11)
RAATSGYSTLTF

SEQ ID NO: 56442 - protein, 14 aa, Homo sapiens
  CDR3 for beta chain variable domain of TCR clone 28221 (TRBV20-1, TRBJ2-7)
CSAPELAGVGEQYF

SEQ ID NO: 56443 - protein, 14 aa, Homo sapiens
  CDR3 for alpha chain variable domain of TCR clone 28222 (TRAV16, TRAJ37)
CALDLSGNTGKLIF

SEQ ID NO: 56444 - protein, 14 aa, Homo sapiens
  CDR3 for beta chain variable domain of TCR clone 28222 (TRBV7-6, TRBJ2-7)
CASSFRQGADEQYF

SEQ ID NO: 56445 - protein, 12 aa, Homo sapiens
  CDR3 for alpha chain variable domain of TCR clone 28223 (TRAV13-1, TRAJ15)
CAASKAGTALIF

SEQ ID NO: 56446 - protein, 14 aa, Homo sapiens
  CDR3 for beta chain variable domain of TCR clone 28223 (TRBV19, TRBJ2-1)
CASPTFVLSGEQFF

SEQ ID NO: 56447 - protein, 13 aa, Homo sapiens
  CDR3 for alpha chain variable domain of TCR clone 28224 (TRAV21, TRAJ57)
CAVTQGGSEKLVF

SEQ ID NO: 56448 - protein, 16 aa, Homo sapiens
  CDR3 for beta chain variable domain of TCR clone 28224 (TRBV29-1, TRBJ2-7)
CSVEDAEDGTAYDQYF

SEQ ID NO: 56449 - protein, 18 aa, Homo sapiens
  CDR3 for alpha chain variable domain of TCR clone 28225 (TRAV21, TRAJ52)
GAVRPSPAGGTSYGKLTF

SEQ ID NO: 56450 - protein, 17 aa, Homo sapiens
  CDR3 for beta chain variable domain of TCR clone 28225 (TRBV13, TRBJ2-3)
CASSLSRVAGGRNTQYF

SEQ ID NO: 56451 - protein, 13 aa, Homo sapiens
  CDR3 for alpha chain variable domain of TCR clone 28226 (TRAV8-3, TRAJ48)
CAVVPFGNVKLTF

SEQ ID NO: 56452 - protein, 15 aa, Homo sapiens
  CDR3 for beta chain variable domain of TCR clone 28226 (TRBV11-2, TRBJ2-1)
CASSSPSTRYNEQFF

SEQ ID NO: 56453 - protein, 13 aa, Homo sapiens
  CDR3 for alpha chain variable domain of TCR clone 28227 (TRAV12-1, TRAJ40)
CVVNSSGTYRYIF

SEQ ID NO: 56454 - protein, 14 aa, Homo sapiens
  CDR3 for beta chain variable domain of TCR clone 28227 (TRBV2, TRBJ1-6)
CASEVSSYNSPLHF

SEQ ID NO: 56455 - protein, 14 aa, Homo sapiens
  CDR3 for alpha chain variable domain of TCR clone 28228 (TRAV38-1, TRAJ29)
CAFITPSENTPLVF

SEQ ID NO: 56456 - protein, 14 aa, Homo sapiens
  CDR3 for beta chain variable domain of TCR clone 28228 (TRBV18, TRBJ2-7)
CASSPRGGAYEQYF

SEQ ID NO: 56457 - protein, 18 aa, Homo sapiens
  CDR3 for alpha chain variable domain of TCR clone 28229 (TRAV12-3, TRAJ52)
CAMSRTNAGGTSYGKMTF

SEQ ID NO: 56458 - protein, 17 aa, Homo sapiens
  CDR3 for beta chain variable domain of TCR clone 28229 (TRBV7-3, TRBJ2-3)
CASSLMKRMRGADTQYF

SEQ ID NO: 56459 - protein, 16 aa, Homo sapiens
  CDR3 for alpha chain variable domain of TCR clone 28230 (TRAV12-3, TRAJ53)
CAMSPGSGGSDYKLTF

SEQ ID NO: 56460 - protein, 11 aa, Homo sapiens
  CDR3 for beta chain variable domain of TCR clone 28230 (TRBV29-1, TRBJ2-5)
CSEDRAGTQYF

SEQ ID NO: 56461 - protein, 15 aa, Homo sapiens
  CDR3 for alpha chain variable domain of TCR clone 28231 (TRAV4, TRAJ39)
CLVGPNNNAGNMLTF

SEQ ID NO: 56462 - protein, 14 aa, Homo sapiens
  CDR3 for beta chain variable domain of TCR clone 28231 (TRBV19, TRBJ2-7)
CASNFRDTFTGTYF

SEQ ID NO: 56463 - protein, 13 aa, Homo sapiens
  CDR3 for alpha chain variable domain of TCR clone 28232 (TRAV27, TRAJ6)
CAGGTRGSYIPTF

SEQ ID NO: 56464 - protein, 12 aa, Homo sapiens
  CDR3 for beta chain variable domain of TCR clone 28232 (TRBV11-2, TRBJ2-2)
CASSLGGGELFF

SEQ ID NO: 56465 - protein, 14 aa, Homo sapiens
  CDR3 for alpha chain variable domain of TCR clone 28233 (TRAV12-2, TRAJ40)
CAVKTPSGTYKYIF

SEQ ID NO: 56466 - protein, 17 aa, Homo sapiens
  CDR3 for beta chain variable domain of TCR clone 28233 (TRBV7-8, TRBJ2-6)
CASSAGTGGAGANVLTF

SEQ ID NO: 56467 - protein, 14 aa, Homo sapiens
  CDR3 for alpha chain variable domain of TCR clone 28234 (TRAV1-2, TRAJ8)
CSVREDTGFQKLVF

SEQ ID NO: 56468 - protein, 17 aa, Homo sapiens
  CDR3 for beta chain variable domain of TCR clone 28234 (TRBV28, TRBJ2-5)
CASSRQGGLAGAETQYF

SEQ ID NO: 56469 - protein, 12 aa, Homo sapiens
  CDR3 for alpha chain variable domain of TCR clone 28235 (TRAV12-2, TRAJ47)
CAVAEYGNKLAF

SEQ ID NO: 56470 - protein, 14 aa, Homo sapiens
  CDR3 for beta chain variable domain of TCR clone 28235 (TRBV20-1, TRBJ1-1)
CSAMGGTANTEAFF

SEQ ID NO: 56471 - protein, 10 aa, Homo sapiens
  CDR3 for alpha chain variable domain of TCR clone 28236 (TRAV24, TRAJ23)
CAFLGGKLIF

SEQ ID NO: 56472 - protein, 13 aa, Homo sapiens
  CDR3 for beta chain variable domain of TCR clone 28236 (TRBV4-2, TRBJ2-3)
CASSQGNTDTQYF

SEQ ID NO: 56473 - protein, 17 aa, Homo sapiens
  CDR3 for alpha chain variable domain of TCR clone 28237 (TRAV36/DV7, TRAJ52)
CAVAQRAGGTSYGKLTF

SEQ ID NO: 56474 - protein, 14 aa, Homo sapiens
  CDR3 for beta chain variable domain of TCR clone 28237 (TRBV7-2, TRBJ2-7)
CASSPKTSFYEQYF

SEQ ID NO: 56475 - protein, 14 aa, Homo sapiens
  CDR3 for alpha chain variable domain of TCR clone 28238 (TRAV20, TRAJ10)
CAVRVEGGGSKLTF

SEQ ID NO: 56476 - protein, 18 aa, Homo sapiens
  CDR3 for beta chain variable domain of TCR clone 28238 (TRBV24-1, TRBJ2-1)
CATSDLMFLGRGVHEQFF

SEQ ID NO: 56477 - protein, 13 aa, Homo sapiens
  CDR3 for alpha chain variable domain of TCR clone 28239 (TRAV21, TRAJ27)
CAARPGNAGKSTF

SEQ ID NO: 56478 - protein, 17 aa, Homo sapiens
  CDR3 for beta chain variable domain of TCR clone 28239 (TRBV7-3, TRBJ2-2)
CASSLSGTSGGTGELFF

SEQ ID NO: 56479 - protein, 12 aa, Homo sapiens
  CDR3 for alpha chain variable domain of TCR clone 28240 (TRAV12-3, TRAJ17)
CAMTLTGNKLTF

SEQ ID NO: 56480 - protein, 14 aa, Homo sapiens
  CDR3 for beta chain variable domain of TCR clone 28240 (TRBV20-1, TRBJ1-1)
CSARAVNGYTEAFF

SEQ ID NO: 56481 - protein, 15 aa, Homo sapiens
  CDR3 for alpha chain variable domain of TCR clone 28241 (TRAV8-6, TRAJ10)
YAVSDQAGGGNKLTF

SEQ ID NO: 56482 - protein, 15 aa, Homo sapiens
  CDR3 for beta chain variable domain of TCR clone 28241 (TRBV3-1, TRBJ2-5)
CASSANLGGPETQYF

SEQ ID NO: 56483 - protein, 14 aa, Homo sapiens
  CDR3 for alpha chain variable domain of TCR clone 28242 (TRAV8-4, TRAJ9)
CAVRINTGGFKTIF

SEQ ID NO: 56484 - protein, 15 aa, Homo sapiens
  CDR3 for beta chain variable domain of TCR clone 28242 (TRBV19, TRBJ1-2)
CASSVGQVLNYGYTF

SEQ ID NO: 56485 - protein, 15 aa, Homo sapiens
  CDR3 for alpha chain variable domain of TCR clone 28243 (TRAV25, TRAJ53)
CAATGGGGSNYKLTF

SEQ ID NO: 56486 - protein, 19 aa, Homo sapiens
  CDR3 for beta chain variable domain of TCR clone 28243 (TRBV7-2, TRBJ2-3)
CASSFLSRKWGGGTDTQYF

SEQ ID NO: 56487 - protein, 12 aa, Homo sapiens
  CDR3 for alpha chain variable domain of TCR clone 28244 (TRAV21, TRAJ11)
CAATSGYSTLTF

SEQ ID NO: 56488 - protein, 14 aa, Homo sapiens
  CDR3 for beta chain variable domain of TCR clone 28244 (TRBV20-1, TRBJ2-7)
CSASELAGVGEQYF

SEQ ID NO: 56489 - protein, 14 aa, Homo sapiens
  CDR3 for alpha chain variable domain of TCR clone 28245 (TRAV1-2, TRAJ8)
CAVREDTGFQKLVF

SEQ ID NO: 56490 - protein, 13 aa, Homo sapiens
  CDR3 for beta chain variable domain of TCR clone 28245 (TRBV12-4, TRBJ1-2)
CASSLDSNYGYTF

SEQ ID NO: 56491 - protein, 13 aa, Homo sapiens
  CDR3 for alpha chain variable domain of TCR clone 28246 (TRAV8-3, TRAJ6)
CAARRGGSYIPTF

SEQ ID NO: 56492 - protein, 15 aa, Homo sapiens
  CDR3 for beta chain variable domain of TCR clone 28246 (TRBV4-1, TRBJ2-3)
CASRNLAGGRDTQYF

SEQ ID NO: 56493 - protein, 16 aa, Homo sapiens
  CDR3 for alpha chain variable domain of TCR clone 28247 (TRAV30, TRAJ24)
CGTEIVDADSWGKFQF

SEQ ID NO: 56494 - protein, 13 aa, Homo sapiens
  CDR3 for beta chain variable domain of TCR clone 28247 (TRBV10-3, TRBJ2-7)
CASKPAVNYEQYF

SEQ ID NO: 56495 - protein, 16 aa, Homo sapiens
  CDR3 for alpha chain variable domain of TCR clone 28248 (TRAV26-1, TRAJ53)
CIVRVAMGGSDYKLTF

SEQ ID NO: 56496 - protein, 12 aa, Homo sapiens
  CDR3 for beta chain variable domain of TCR clone 28248 (TRBV7-9, TRBJ1-5)
CASSPQGQPQHF

SEQ ID NO: 56497 - protein, 14 aa, Homo sapiens
  CDR3 for alpha chain variable domain of TCR clone 28249 (TRAV8-2, TRAJ10)
CVVSDPGGGNKLTF

SEQ ID NO: 56498 - protein, 15 aa, Homo sapiens
  CDR3 for beta chain variable domain of TCR clone 28249 (TRBV5-1, TRBJ2-1)
CASSPPRAPYNEQFF

SEQ ID NO: 56499 - protein, 15 aa, Homo sapiens
  CDR3 for alpha chain variable domain of TCR clone 28250 (TRAV8-3, TRAJ45)
CASSYSGGGADGLTF

SEQ ID NO: 56500 - protein, 15 aa, Homo sapiens
  CDR3 for beta chain variable domain of TCR clone 28250 (TRBV12-4, TRBJ1-5)
CASTRQGSGNQPQHF

SEQ ID NO: 56501 - protein, 13 aa, Homo sapiens
  CDR3 for alpha chain variable domain of TCR clone 28251 (TRAV21, TRAJ27)
CAARPGNAGKSTF

SEQ ID NO: 56502 - protein, 14 aa, Homo sapiens
  CDR3 for beta chain variable domain of TCR clone 28251 (TRBV11-2, TRBJ2-7)
CASSVGAGAYEQYF

SEQ ID NO: 56503 - protein, 14 aa, Homo sapiens
  CDR3 for alpha chain variable domain of TCR clone 28252 (TRAV12-2, TRAJ13)
CAVKKTGGYQKVTF

SEQ ID NO: 56504 - protein, 15 aa, Homo sapiens
  CDR3 for beta chain variable domain of TCR clone 28252 (TRBV5-1, TRBJ2-7)
CASSLNGGPAREQYF

SEQ ID NO: 56505 - protein, 14 aa, Homo sapiens
  CDR3 for alpha chain variable domain of TCR clone 28253 (TRAV17, TRAJ22)
CATSPSGSARQLTF

SEQ ID NO: 56506 - protein, 15 aa, Homo sapiens
  CDR3 for beta chain variable domain of TCR clone 28253 (TRBV4-1, TRBJ2-5)
CASSQWDLCQETQYF

SEQ ID NO: 56507 - protein, 14 aa, Homo sapiens
  CDR3 for alpha chain variable domain of TCR clone 28254 (TRAV20, TRAJ29)
CAVQAWVGNTPLVF

SEQ ID NO: 56508 - protein, 15 aa, Homo sapiens
  CDR3 for beta chain variable domain of TCR clone 28254 (TRBV29-1, TRBJ2-7)
CSVGFFDRGSYEQYF

SEQ ID NO: 56509 - protein, 14 aa, Homo sapiens
  CDR3 for alpha chain variable domain of TCR clone 28255 (TRAV1-2, TRAJ8)
CAVREDTGFQKLVF

SEQ ID NO: 56510 - protein, 16 aa, Homo sapiens
  CDR3 for beta chain variable domain of TCR clone 28255 (TRBV2, TRBJ2-1)
CASRSPAGGKYNEQFF

SEQ ID NO: 56511 - protein, 15 aa, Homo sapiens
  CDR3 for alpha chain variable domain of TCR clone 28256 (TRAV12-3, TRAJ49)
CAMAVTPNTGNQFYF

SEQ ID NO: 56512 - protein, 18 aa, Homo sapiens
  CDR3 for beta chain variable domain of TCR clone 28256 (TRBV4-1, TRBJ1-5)
CASSQDTRGQGLNQPQHF

SEQ ID NO: 56513 - protein, 18 aa, Homo sapiens
  CDR3 for alpha chain variable domain of TCR clone 28257 (TRAV26-2, TRAJ45)
CILRVDKYSGGGADGLTF

SEQ ID NO: 56514 - protein, 16 aa, Homo sapiens
  CDR3 for beta chain variable domain of TCR clone 28257 (TRBV2, TRBJ1-4)
CASNLLQEATNEKLFF

SEQ ID NO: 56515 - protein, 14 aa, Homo sapiens
  CDR3 for alpha chain variable domain of TCR clone 28258 (TRAV3, TRAJ7)
CAVREEEREQQTRF

SEQ ID NO: 56516 - protein, 12 aa, Homo sapiens
  CDR3 for beta chain variable domain of TCR clone 28258 (TRBV7-8, TRBJ2-7)
CASSLGDRGQYF

SEQ ID NO: 56517 - protein, 16 aa, Homo sapiens
  CDR3 for alpha chain variable domain of TCR clone 28259 (TRAV8-6, TRAJ37)
CAVSGLGSSNTGKLIF

SEQ ID NO: 56518 - protein, 17 aa, Homo sapiens
  CDR3 for beta chain variable domain of TCR clone 28259 (TRBV20-1, TRBJ2-3)
CSARDGWNAKERDTQYF

SEQ ID NO: 56519 - protein, 13 aa, Homo sapiens
  CDR3 for alpha chain variable domain of TCR clone 28260 (TRAV3, TRAJ27)
CAVRPLGAGKSTL

SEQ ID NO: 56520 - protein, 15 aa, Homo sapiens
  CDR3 for beta chain variable domain of TCR clone 28260 (TRBV9, TRBJ1-6)
CASSVAGTGDSPLHF

SEQ ID NO: 56521 - protein, 13 aa, Homo sapiens
  CDR3 for alpha chain variable domain of TCR clone 28261 (TRAV27, TRAJ45)
CRSTGGGADGLTF

SEQ ID NO: 56522 - protein, 17 aa, Homo sapiens
  CDR3 for beta chain variable domain of TCR clone 28261 (TRBV11-2, TRBJ2-1)
CASSLYPPGVEYNEQFF

SEQ ID NO: 56523 - protein, 18 aa, Homo sapiens
  CDR3 for alpha chain variable domain of TCR clone 28262 (TRAV21, TRAJ52)
CAVRPSPPGGTSYGKLTF

SEQ ID NO: 56524 - protein, 13 aa, Homo sapiens
  CDR3 for beta chain variable domain of TCR clone 28262 (TRBV7-3, TRBJ1-1)
CASSQDWGAEAFF

SEQ ID NO: 56525 - protein, 16 aa, Homo sapiens
  CDR3 for alpha chain variable domain of TCR clone 28263 (TRAV19, TRAJ35)
CALKRDVEGFGNVLHC

SEQ ID NO: 56526 - protein, 16 aa, Homo sapiens
  CDR3 for beta chain variable domain of TCR clone 28263 (TRBV4-3, TRBJ2-1)
CASSPALDRGVNEQFF

SEQ ID NO: 56527 - protein, 12 aa, Homo sapiens
  CDR3 for alpha chain variable domain of TCR clone 28264 (TRAV2, TRAJ31)
CAVEDNNARLMF

SEQ ID NO: 56528 - protein, 16 aa, Homo sapiens
  CDR3 for beta chain variable domain of TCR clone 28264 (TRBV10-3, TRBJ2-1)
CAISGVGDGGGGERFF

SEQ ID NO: 56529 - protein, 14 aa, Homo sapiens
  CDR3 for alpha chain variable domain of TCR clone 28265 (TRAV13-1, TRAJ10)
CAAKEPGGGNKLTF

SEQ ID NO: 56530 - protein, 14 aa, Homo sapiens
  CDR3 for beta chain variable domain of TCR clone 28265 (TRBV6-6, TRBJ2-7)
CASSDSGAGCEQYF

SEQ ID NO: 56531 - protein, 15 aa, Homo sapiens
  CDR3 for alpha chain variable domain of TCR clone 28266 (TRAV3, TRAJ17)
CAVSPKEAAGNKRTF

SEQ ID NO: 56532 - protein, 12 aa, Homo sapiens
  CDR3 for beta chain variable domain of TCR clone 28266 (TRBV7-9, TRBJ1-6)
CASSLMTSPLHF

SEQ ID NO: 56533 - protein, 17 aa, Homo sapiens
  CDR3 for alpha chain variable domain of TCR clone 28267 (TRAV13-1, TRAJ53)
CAASWKSSGGSNYKLTF

SEQ ID NO: 56534 - protein, 19 aa, Homo sapiens
  CDR3 for beta chain variable domain of TCR clone 28267 (TRBV7-9, TRBJ2-1)
CASSHNRGALLRSYNEQSF

SEQ ID NO: 56535 - protein, 16 aa, Homo sapiens
  CDR3 for alpha chain variable domain of TCR clone 28268 (TRAV30, TRAJ24)
CGTEIVDADSWGKFQF

SEQ ID NO: 56536 - protein, 13 aa, Homo sapiens
  CDR3 for beta chain variable domain of TCR clone 28268 (TRBV12-4, TRBJ2-2)
CASSITGSGELFF

SEQ ID NO: 56537 - protein, 18 aa, Homo sapiens
  CDR3 for alpha chain variable domain of TCR clone 28269 (TRAV9-2, TRAJ52)
CALSRHNAGGTSYGKLTF

SEQ ID NO: 56538 - protein, 15 aa, Homo sapiens
  CDR3 for beta chain variable domain of TCR clone 28269 (TRBV19, TRBJ2-1)
CASSHRDRGPNEQFF

SEQ ID NO: 56539 - protein, 12 aa, Homo sapiens
  CDR3 for alpha chain variable domain of TCR clone 28270 (TRAV12-3, TRAJ17)
CAMTLIGNKLTF

SEQ ID NO: 56540 - protein, 15 aa, Homo sapiens
  CDR3 for beta chain variable domain of TCR clone 28270 (TRBV10-2, TRBJ2-6)
CASSEQGTGANVLTF

SEQ ID NO: 56541 - protein, 13 aa, Homo sapiens
  CDR3 for alpha chain variable domain of TCR clone 28271 (TRAV3, TRAJ27)
CAVRPLGAGKSTF

SEQ ID NO: 56542 - protein, 16 aa, Homo sapiens
  CDR3 for beta chain variable domain of TCR clone 28271 (TRBV4-2, TRBJ1-1)
CASSQAGFGMNTEAFF

SEQ ID NO: 56543 - protein, 14 aa, Homo sapiens
  CDR3 for alpha chain variable domain of TCR clone 28272 (TRAV12-3, TRAJ10)
SHLPLAGGGNKLTF

SEQ ID NO: 56544 - protein, 14 aa, Homo sapiens
  CDR3 for beta chain variable domain of TCR clone 28272 (TRBV6-1, TRBJ1-3)
CASVQGGGGNTIYF

SEQ ID NO: 56545 - protein, 23 aa, Homo sapiens
  CDR3 for alpha chain variable domain of TCR clone 28273 (TRAV12-1, TRAJ6)
CVVNIVQEEATYLHLEEEPALLF

SEQ ID NO: 56546 - protein, 15 aa, Homo sapiens
  CDR3 for beta chain variable domain of TCR clone 28273 (TRBV18, TRBJ1-1)
CASSDRGTGDTEAFF

SEQ ID NO: 56547 - protein, 15 aa, Homo sapiens
  CDR3 for alpha chain variable domain of TCR clone 28274 (TRAV8-3, TRAJ27)
CAVGPSKTNAVKSTF

SEQ ID NO: 56548 - protein, 15 aa, Homo sapiens
  CDR3 for beta chain variable domain of TCR clone 28274 (TRBV7-2, TRBJ2-1)
CASSSGLAGGNEQFF

SEQ ID NO: 56549 - protein, 16 aa, Homo sapiens
  CDR3 for alpha chain variable domain of TCR clone 28275 (TRAV4, TRAJ9)
CLVGDPNRPGGFKTIF

SEQ ID NO: 56550 - protein, 16 aa, Homo sapiens
  CDR3 for beta chain variable domain of TCR clone 28275 (TRBV28, TRBJ1-4)
CASSPPYRGRSDKLFF

SEQ ID NO: 56551 - protein, 13 aa, Homo sapiens
  CDR3 for alpha chain variable domain of TCR clone 28276 (TRAV17, TRAJ9)
CATDYTGGVKTIF

SEQ ID NO: 56552 - protein, 16 aa, Homo sapiens
  CDR3 for beta chain variable domain of TCR clone 28276 (TRBV7-7, TRBJ2-1)
CASSLASGTSYNEQFF

SEQ ID NO: 56553 - protein, 14 aa, Homo sapiens
  CDR3 for alpha chain variable domain of TCR clone 28277 (TRAV12-2, TRAJ5)
CAVNRSTGSRALTF

SEQ ID NO: 56554 - protein, 12 aa, Homo sapiens
  CDR3 for beta chain variable domain of TCR clone 28277 (TRBV19, TRBJ1-5)
CASSIAQQPQHF

SEQ ID NO: 56555 - protein, 14 aa, Homo sapiens
  CDR3 for alpha chain variable domain of TCR clone 28278 (TRAV26-1, TRAJ45)
CIEVTGGGADGLTF

SEQ ID NO: 56556 - protein, 17 aa, Homo sapiens
  CDR3 for beta chain variable domain of TCR clone 28278 (TRBV7-8, TRBJ2-6)
CASSAGTGGAGANVLTF

SEQ ID NO: 56557 - protein, 15 aa, Homo sapiens
  CDR3 for alpha chain variable domain of TCR clone 28279 (TRAV1-2, TRAJ30)
CAVRPHGNRDDQIIF

SEQ ID NO: 56558 - protein, 13 aa, Homo sapiens
  CDR3 for beta chain variable domain of TCR clone 28279 (TRBV4-1, TRBJ2-7)
CASSQGQAYEQYF

SEQ ID NO: 56559 - protein, 14 aa, Homo sapiens
  CDR3 for alpha chain variable domain of TCR clone 28280 (TRAV23/DV6, TRAJ11)
CAASLESGYSPLTF

SEQ ID NO: 56560 - protein, 13 aa, Homo sapiens
  CDR3 for beta chain variable domain of TCR clone 28280 (TRBV4-1, TRBJ2-5)
CASSLTRGETQYF

SEQ ID NO: 56561 - protein, 13 aa, Homo sapiens
  CDR3 for alpha chain variable domain of TCR clone 28281 (TRAV17, TRAJ26)
CATVDNYGQNFVF

SEQ ID NO: 56562 - protein, 16 aa, Homo sapiens
  CDR3 for beta chain variable domain of TCR clone 28281 (TRBV2, TRBJ2-1)
CASSGGGSLSYNEQFF

SEQ ID NO: 56563 - protein, 15 aa, Homo sapiens
  CDR3 for alpha chain variable domain of TCR clone 28282 (TRAV1-1, TRAJ5)
CAVRHMDTGRRALTF

SEQ ID NO: 56564 - protein, 17 aa, Homo sapiens
  CDR3 for beta chain variable domain of TCR clone 28282 (TRBV28, TRBJ2-7)
CTSSPGLAGGDSSEQYF

SEQ ID NO: 56565 - protein, 17 aa, Homo sapiens
  CDR3 for alpha chain variable domain of TCR clone 28283 (TRAV4, TRAJ18)
CLVGERSVGSTLGRLYF

SEQ ID NO: 56566 - protein, 16 aa, Homo sapiens
  CDR3 for beta chain variable domain of TCR clone 28283 (TRBV4-2, TRBJ1-1)
CASSPPPGRAAPEAFF

SEQ ID NO: 56567 - protein, 11 aa, Homo sapiens
  CDR3 for alpha chain variable domain of TCR clone 28284 (TRAV13-1, TRAJ6)
CATLGGYIPTF

SEQ ID NO: 56568 - protein, 12 aa, Homo sapiens
  CDR3 for beta chain variable domain of TCR clone 28284 (TRBV11-2, TRBJ2-1)
CASSPGNNEQFF

SEQ ID NO: 56569 - protein, 11 aa, Homo sapiens
  CDR3 for alpha chain variable domain of TCR clone 28285 (TRAV36/DV7, TRAJ43)
CCGGVNNDMRF

SEQ ID NO: 56570 - protein, 16 aa, Homo sapiens
  CDR3 for beta chain variable domain of TCR clone 28285 (TRBV7-2, TRBJ2-5)
CASSPFPTGGEETQYF

SEQ ID NO: 56571 - protein, 12 aa, Homo sapiens
  CDR3 for alpha chain variable domain of TCR clone 28286 (TRAV12-3, TRAJ17)
CAMTHTGNKLTF

SEQ ID NO: 56572 - protein, 15 aa, Homo sapiens
  CDR3 for beta chain variable domain of TCR clone 28286 (TRBV6-4, TRBJ2-7)
CASSDQGPPNYEQYF

SEQ ID NO: 56573 - protein, 14 aa, Homo sapiens
  CDR3 for alpha chain variable domain of TCR clone 28287 (TRAV12-3, TRAJ20)
CAMSARRGDYKLSF

SEQ ID NO: 56574 - protein, 14 aa, Homo sapiens
  CDR3 for beta chain variable domain of TCR clone 28287 (TRBV7-3, TRBJ2-3)
CASSPAARTDTQYF

SEQ ID NO: 56575 - protein, 12 aa, Homo sapiens
  CDR3 for alpha chain variable domain of TCR clone 28288 (TRAV12-1, TRAJ6)
CVVSERSYIPTF

SEQ ID NO: 56576 - protein, 21 aa, Homo sapiens
  CDR3 for beta chain variable domain of TCR clone 28288 (TRBV7-3, TRBJ2-1)
GGTQPRISVPAAYGLAGAQFF

SEQ ID NO: 56577 - protein, 14 aa, Homo sapiens
  CDR3 for alpha chain variable domain of TCR clone 28289 (TRAV12-3, TRAJ10)
SHLPLTGGGNKLTF

SEQ ID NO: 56578 - protein, 12 aa, Homo sapiens
  CDR3 for beta chain variable domain of TCR clone 28289 (TRBV12-5, TRBJ2-5)
CASGQGVETQYF

SEQ ID NO: 56579 - protein, 18 aa, Homo sapiens
  CDR3 for alpha chain variable domain of TCR clone 28290 (TRAV13-1, TRAJ52)
CAASKRSAGGTSYGKLTF

SEQ ID NO: 56580 - protein, 15 aa, Homo sapiens
  CDR3 for beta chain variable domain of TCR clone 28290 (TRBV20-1, TRBJ2-7)
CSARTPGTITYGQYF

SEQ ID NO: 56581 - protein, 14 aa, Homo sapiens
  CDR3 for alpha chain variable domain of TCR clone 28291 (TRAV21, TRAJ15)
CAVSLNQAGTALTF

SEQ ID NO: 56582 - protein, 11 aa, Homo sapiens
  CDR3 for beta chain variable domain of TCR clone 28291 (TRBV20-1, TRBJ2-7)
CSARTSYEQYF

SEQ ID NO: 56583 - protein, 13 aa, Homo sapiens
  CDR3 for alpha chain variable domain of TCR clone 28292 (TRAV12-3, TRAJ53)
CAMRGGSNYKLKF

SEQ ID NO: 56584 - protein, 15 aa, Homo sapiens
  CDR3 for beta chain variable domain of TCR clone 28292 (TRBV2, TRBJ2-1)
CATQARLVMIGEQFF

SEQ ID NO: 56585 - protein, 14 aa, Homo sapiens
  CDR3 for alpha chain variable domain of TCR clone 28293 (TRAV13-2, TRAJ43)
CAEIPTYDNNDMRF

SEQ ID NO: 56586 - protein, 15 aa, Homo sapiens
  CDR3 for beta chain variable domain of TCR clone 28293 (TRBV7-9, TRBJ2-2)
CASGPLDTFPGELFF

SEQ ID NO: 56587 - protein, 14 aa, Homo sapiens
  CDR3 for alpha chain variable domain of TCR clone 28294 (TRAV38-1, TRAJ29)
CAFITPSGHTPLVF

SEQ ID NO: 56588 - protein, 14 aa, Homo sapiens
  CDR3 for beta chain variable domain of TCR clone 28294 (TRBV18, TRBJ2-7)
CASSPRGGAYEQYF

SEQ ID NO: 56589 - protein, 13 aa, Homo sapiens
  CDR3 for alpha chain variable domain of TCR clone 28295 (TRAV17, TRAJ9)
CATDYTGGFKTIF

SEQ ID NO: 56590 - protein, 13 aa, Homo sapiens
  CDR3 for beta chain variable domain of TCR clone 28295 (TRBV7-9, TRBJ1-2)
CASSLRQNYGYTF

SEQ ID NO: 56591 - protein, 17 aa, Homo sapiens
  CDR3 for alpha chain variable domain of TCR clone 28296 (TRAV17, TRAJ20)
CATRYKLSFGAGTTVTV

SEQ ID NO: 56592 - protein, 17 aa, Homo sapiens
  CDR3 for beta chain variable domain of TCR clone 28296 (TRBV13, TRBJ2-3)
CASSLSRVAGGRNTQYF

SEQ ID NO: 56593 - protein, 12 aa, Homo sapiens
  CDR3 for alpha chain variable domain of TCR clone 28297 (TRAV13-1, TRAJ21)
CATTINFNKFYF

SEQ ID NO: 56594 - protein, 14 aa, Homo sapiens
  CDR3 for beta chain variable domain of TCR clone 28297 (TRBV7-2, TRBJ2-7)
CASGPKTSFYEQYF

SEQ ID NO: 56595 - protein, 11 aa, Homo sapiens
  CDR3 for alpha chain variable domain of TCR clone 28298 (TRAV12-3, TRAJ49)
CAANTGNQFCF

SEQ ID NO: 56596 - protein, 12 aa, Homo sapiens
  CDR3 for beta chain variable domain of TCR clone 28298 (TRBV6-3, TRBJ2-7)
CASSEPGFEQYF

SEQ ID NO: 56597 - protein, 11 aa, Homo sapiens
  CDR3 for alpha chain variable domain of TCR clone 28299 (TRAV3, TRAJ21)
CAVGNFNKFYF

SEQ ID NO: 56598 - protein, 12 aa, Homo sapiens
  CDR3 for beta chain variable domain of TCR clone 28299 (TRBV7-9, TRBJ2-7)
CASSFGSYEQYF

SEQ ID NO: 56599 - protein, 12 aa, Homo sapiens
  CDR3 for alpha chain variable domain of TCR clone 28300 (TRAV12-3, TRAJ3)
CAIDSSASTIIF

SEQ ID NO: 56600 - protein, 17 aa, Homo sapiens
  CDR3 for beta chain variable domain of TCR clone 28300 (TRBV7-9, TRBJ2-3)
CASSLEEAGAYPDTQYF

SEQ ID NO: 56601 - protein, 11 aa, Homo sapiens
  CDR3 for alpha chain variable domain of TCR clone 28301 (TRAV1-2, TRAJ40)
CAVPGTYKYIF

SEQ ID NO: 56602 - protein, 16 aa, Homo sapiens
  CDR3 for beta chain variable domain of TCR clone 28301 (TRBV29-1, TRBJ2-7)
SSVEVVGTSGSYEQYF

SEQ ID NO: 56603 - protein, 12 aa, Homo sapiens
  CDR3 for alpha chain variable domain of TCR clone 28302 (TRAV1-1, TRAJ8)
CAGGIGFQKLVF

SEQ ID NO: 56604 - protein, 15 aa, Homo sapiens
  CDR3 for beta chain variable domain of TCR clone 28302 (TRBV7-9, TRBJ1-4)
CASSRTGGFNEKLFF

SEQ ID NO: 56605 - protein, 12 aa, Homo sapiens
  CDR3 for alpha chain variable domain of TCR clone 28303 (TRAV12-3, TRAJ17)
CAMTLTGNKLTF

SEQ ID NO: 56606 - protein, 12 aa, Homo sapiens
  CDR3 for beta chain variable domain of TCR clone 28303 (TRBV7-3, TRBJ2-1)
CASSFQSGPQFF

SEQ ID NO: 56607 - protein, 16 aa, Homo sapiens
  CDR3 for alpha chain variable domain of TCR clone 28304 (TRAV14/DV4, TRAJ54)
CAMREGRIQGAQKLVF

SEQ ID NO: 56608 - protein, 18 aa, Homo sapiens
  CDR3 for beta chain variable domain of TCR clone 28304 (TRBV11-2, TRBJ2-3)
CASSLGGASRGAPNTQYF

SEQ ID NO: 56609 - protein, 14 aa, Homo sapiens
  CDR3 for alpha chain variable domain of TCR clone 28305 (TRAV17, TRAJ16)
CATADFSDGQKLLF

SEQ ID NO: 56610 - protein, 12 aa, Homo sapiens
  CDR3 for beta chain variable domain of TCR clone 28305 (TRBV24-1, TRBJ1-1)
CATLYPDTEAFL

SEQ ID NO: 56611 - protein, 13 aa, Homo sapiens
  CDR3 for alpha chain variable domain of TCR clone 28306 (TRAV26-1, TRAJ29)
CIVRRSGNTPLVF

SEQ ID NO: 56612 - protein, 16 aa, Homo sapiens
  CDR3 for beta chain variable domain of TCR clone 28306 (TRBV11-2, TRBJ2-7)
CASSLAPTGVNYERYF

SEQ ID NO: 56613 - protein, 14 aa, Homo sapiens
  CDR3 for alpha chain variable domain of TCR clone 28307 (TRAV12-2, TRAJ13)
CAVKKTGGYQEVTF

SEQ ID NO: 56614 - protein, 12 aa, Homo sapiens
  CDR3 for beta chain variable domain of TCR clone 28307 (TRBV6-3, TRBJ2-7)
CASSLTPYEQYF

SEQ ID NO: 56615 - protein, 19 aa, Homo sapiens
  CDR3 for alpha chain variable domain of TCR clone 28308 (TRAV17, TRAJ40)
TASRAADTASYFCASKYIF

SEQ ID NO: 56616 - protein, 17 aa, Homo sapiens
  CDR3 for beta chain variable domain of TCR clone 28308 (TRBV11-2, TRBJ2-4)
CASSFLALGGAGDIQCF

SEQ ID NO: 56617 - protein, 14 aa, Homo sapiens
  CDR3 for alpha chain variable domain of TCR clone 28309 (TRAV2, TRAJ9)
CAVEDRSGGFKTIL

SEQ ID NO: 56618 - protein, 13 aa, Homo sapiens
  CDR3 for beta chain variable domain of TCR clone 28309 (TRBV7-9, TRBJ1-2)
CASSLKQNYGYTF

SEQ ID NO: 56619 - protein, 13 aa, Homo sapiens
  CDR3 for alpha chain variable domain of TCR clone 28310 (TRAV8-3, TRAJ28)
CAVGAVGSYQLTF

SEQ ID NO: 56620 - protein, 15 aa, Homo sapiens
  CDR3 for beta chain variable domain of TCR clone 28310 (TRBV7-9, TRBJ1-5)
CASSQGHHPNQPQHF

SEQ ID NO: 56621 - protein, 13 aa, Homo sapiens
  CDR3 for alpha chain variable domain of TCR clone 28311 (TRAV17, TRAJ5)
CAPMDTGRRALTF

SEQ ID NO: 56622 - protein, 16 aa, Homo sapiens
  CDR3 for beta chain variable domain of TCR clone 28311 (TRBV27, TRBJ2-7)
CASSSERRDSAYEQYL

SEQ ID NO: 56623 - protein, 14 aa, Homo sapiens
  CDR3 for alpha chain variable domain of TCR clone 28312 (TRAV13-1, TRAJ35)
CAASKGGFGNVLHC

SEQ ID NO: 56624 - protein, 13 aa, Homo sapiens
  CDR3 for beta chain variable domain of TCR clone 28312 (TRBV12-5, TRBJ2-3)
CASGDRQSDTQYF

SEQ ID NO: 56625 - protein, 14 aa, Homo sapiens
  CDR3 for alpha chain variable domain of TCR clone 28313 (TRAV26-1, TRAJ38)
CIADNAGNNRKLIW

SEQ ID NO: 56626 - protein, 20 aa, Homo sapiens
  CDR3 for beta chain variable domain of TCR clone 28313 (TRBV19, TRBJ2-1)
CASSISRTVTSTRLNNEQFF

SEQ ID NO: 56627 - protein, 13 aa, Homo sapiens
  CDR3 for alpha chain variable domain of TCR clone 28314 (TRAV27, TRAJ9)
CAGRDTGGFKTIF

SEQ ID NO: 56628 - protein, 15 aa, Homo sapiens
  CDR3 for beta chain variable domain of TCR clone 28314 (TRBV18, TRBJ2-3)
CASSPLAGETDTQYF

SEQ ID NO: 56629 - protein, 15 aa, Homo sapiens
  CDR3 for alpha chain variable domain of TCR clone 28315 (TRAV3, TRAJ20)
CAVRDTKLSDYKLSF

SEQ ID NO: 56630 - protein, 15 aa, Homo sapiens
  CDR3 for beta chain variable domain of TCR clone 28315 (TRBV7-9, TRBJ1-6)
CASSSPGRGNSPLHF

SEQ ID NO: 56631 - protein, 14 aa, Homo sapiens
  CDR3 for alpha chain variable domain of TCR clone 28316 (TRAV13-1, TRAJ35)
CAASKGGFGNVLHF

SEQ ID NO: 56632 - protein, 15 aa, Homo sapiens
  CDR3 for beta chain variable domain of TCR clone 28316 (TRBV7-9, TRBJ1-6)
CASSSPGRGNSPLHF

SEQ ID NO: 56633 - protein, 14 aa, Homo sapiens
  CDR3 for alpha chain variable domain of TCR clone 28317 (TRAV1-2, TRAJ16)
CAVNRFSDGQKLLF

SEQ ID NO: 56634 - protein, 16 aa, Homo sapiens
  CDR3 for beta chain variable domain of TCR clone 28317 (TRBV19, TRBJ1-1)
CASRVDVTGAAWGAFF

SEQ ID NO: 56635 - protein, 14 aa, Homo sapiens
  CDR3 for alpha chain variable domain of TCR clone 28318 (TRAV2, TRAJ37)
CAVDFTSNTGKLIF

SEQ ID NO: 56636 - protein, 15 aa, Homo sapiens
  CDR3 for beta chain variable domain of TCR clone 28318 (TRBV19, TRBJ1-6)
CASSTQGAVGSPLHF

SEQ ID NO: 56637 - protein, 15 aa, Homo sapiens
  CDR3 for alpha chain variable domain of TCR clone 28319 (TRAV12-1, TRAJ42)
RVVTRDGGSQGNLIF

SEQ ID NO: 56638 - protein, 14 aa, Homo sapiens
  CDR3 for beta chain variable domain of TCR clone 28319 (TRBV11-2, TRBJ2-3)
CASSLGGGANTQYF

SEQ ID NO: 56639 - protein, 15 aa, Homo sapiens
  CDR3 for alpha chain variable domain of TCR clone 28320 (TRAV14/DV4, TRAJ9)
CAMREGNTGGFKTIL

SEQ ID NO: 56640 - protein, 16 aa, Homo sapiens
  CDR3 for beta chain variable domain of TCR clone 28320 (TRBV13, TRBJ2-5)
CASSRGAGIRQETQYF

SEQ ID NO: 56641 - protein, 13 aa, Homo sapiens
  CDR3 for alpha chain variable domain of TCR clone 28321 (TRAV27, TRAJ6)
CAGGTRGSYIPTF

SEQ ID NO: 56642 - protein, 22 aa, Homo sapiens
  CDR3 for beta chain variable domain of TCR clone 28321 (TRBV6-1, TRBJ1-3)
CASVQGGGWKHHIFWRGKLAHC

SEQ ID NO: 56643 - protein, 13 aa, Homo sapiens
  CDR3 for alpha chain variable domain of TCR clone 28322 (TRAV27, TRAJ29)
CAGAHSGNTPLVF

SEQ ID NO: 56644 - protein, 13 aa, Homo sapiens
  CDR3 for beta chain variable domain of TCR clone 28322 (TRBV7-3, TRBJ1-1)
CASSQDWGAEAFF

SEQ ID NO: 56645 - protein, 14 aa, Homo sapiens
  CDR3 for alpha chain variable domain of TCR clone 28323 (TRAV1-2, TRAJ16)
CAVSRFSDGQKLLF

SEQ ID NO: 56646 - protein, 16 aa, Homo sapiens
  CDR3 for beta chain variable domain of TCR clone 28323 (TRBV20-1, TRBJ1-4)
CSAPGQGLLTNEKLFF

SEQ ID NO: 56647 - protein, 14 aa, Homo sapiens
  CDR3 for alpha chain variable domain of TCR clone 28324 (TRAV1-2, TRAJ16)
CAVNRFSDGQKLLF

SEQ ID NO: 56648 - protein, 17 aa, Homo sapiens
  CDR3 for beta chain variable domain of TCR clone 28324 (TRBV19, TRBJ2-7)
CASSISFYDSYPYEQYF

SEQ ID NO: 56649 - protein, 18 aa, Homo sapiens
  CDR3 for alpha chain variable domain of TCR clone 28325 (TRAV9-2, TRAJ10)
CALSDGALASGGGNKLTF

SEQ ID NO: 56650 - protein, 16 aa, Homo sapiens
  CDR3 for beta chain variable domain of TCR clone 28325 (TRBV28, TRBJ2-7)
CASSSPGTSGSYEQYF

SEQ ID NO: 56651 - protein, 11 aa, Homo sapiens
  CDR3 for alpha chain variable domain of TCR clone 28326 (TRAV1-2, TRAJ40)
CAVPGTYKYIF

SEQ ID NO: 56652 - protein, 14 aa, Homo sapiens
  CDR3 for beta chain variable domain of TCR clone 28326 (TRBV19, TRBJ2-1)
CASPTFVLSGEQFF

SEQ ID NO: 56653 - protein, 15 aa, Homo sapiens
  CDR3 for alpha chain variable domain of TCR clone 28327 (TRAV2, TRAJ9)
CAVEDRGTGGFKTIF

SEQ ID NO: 56654 - protein, 16 aa, Homo sapiens
  CDR3 for beta chain variable domain of TCR clone 28327 (TRBV24-1, TRBJ2-3)
CATSDPGTGATDTHYF

SEQ ID NO: 56655 - protein, 15 aa, Homo sapiens
  CDR3 for alpha chain variable domain of TCR clone 28328 (TRAV8-3, TRAJ40)
CAAPSLGSGTYKYIF

SEQ ID NO: 56656 - protein, 16 aa, Homo sapiens
  CDR3 for beta chain variable domain of TCR clone 28328 (TRBV7-3, TRBJ2-3)
CASRLSGYRPEDTQYF

SEQ ID NO: 56657 - protein, 13 aa, Homo sapiens
  CDR3 for alpha chain variable domain of TCR clone 28329 (TRAV39, TRAJ33)
CAANPASNYQLIW

SEQ ID NO: 56658 - protein, 13 aa, Homo sapiens
  CDR3 for beta chain variable domain of TCR clone 28329 (TRBV18, TRBJ1-1)
CASSGGRNTEAFF

SEQ ID NO: 56659 - protein, 13 aa, Homo sapiens
  CDR3 for alpha chain variable domain of TCR clone 28330 (TRAV27, TRAJ3)
ASLRGSSSSKIIF

SEQ ID NO: 56660 - protein, 15 aa, Homo sapiens
  CDR3 for beta chain variable domain of TCR clone 28330 (TRBV28, TRBJ1-3)
CASSMGWASGNTIYF

SEQ ID NO: 56661 - protein, 17 aa, Homo sapiens
  CDR3 for alpha chain variable domain of TCR clone 28331 (TRAV23/DV6, TRAJ57)
CAASSTLSQGGSEKLVF

SEQ ID NO: 56662 - protein, 14 aa, Homo sapiens
  CDR3 for beta chain variable domain of TCR clone 28331 (TRBV25-1, TRBJ1-1)
CVSTHLGGNTEAFF

SEQ ID NO: 56663 - protein, 16 aa, Homo sapiens
  CDR3 for alpha chain variable domain of TCR clone 28332 (TRAV30, TRAJ24)
CGTEIVDADSWGQFQF

SEQ ID NO: 56664 - protein, 15 aa, Homo sapiens
  CDR3 for beta chain variable domain of TCR clone 28332 (TRBV20-1, TRBJ2-7)
CSARDRVSGMDEQYF

SEQ ID NO: 56665 - protein, 10 aa, Homo sapiens
  CDR3 for alpha chain variable domain of TCR clone 28333 (TRAV26-1, TRAJ22)
RSGSARQLTF

SEQ ID NO: 56666 - protein, 12 aa, Homo sapiens
  CDR3 for beta chain variable domain of TCR clone 28333 (TRBV11-2, TRBJ2-2)
CASSLGGGELFF

SEQ ID NO: 56667 - protein, 11 aa, Homo sapiens
  CDR3 for alpha chain variable domain of TCR clone 28334 (TRAV12-3, TRAJ43)
CAMSVSNDMRF

SEQ ID NO: 56668 - protein, 13 aa, Homo sapiens
  CDR3 for beta chain variable domain of TCR clone 28334 (TRBV20-1, TRBJ1-1)
CSAPLVGGTEAFF

SEQ ID NO: 56669 - protein, 12 aa, Homo sapiens
  CDR3 for alpha chain variable domain of TCR clone 28335 (TRAV12-1, TRAJ40)
CVVYSGTYKYIF

SEQ ID NO: 56670 - protein, 13 aa, Homo sapiens
  CDR3 for beta chain variable domain of TCR clone 28335 (TRBV11-2, TRBJ1-1)
CASSLGNGAEAFF

SEQ ID NO: 56671 - protein, 13 aa, Homo sapiens
  CDR3 for alpha chain variable domain of TCR clone 28336 (TRAV13-1, TRAJ39)
CSKYSNAGNMLTF

SEQ ID NO: 56672 - protein, 16 aa, Homo sapiens
  CDR3 for beta chain variable domain of TCR clone 28336 (TRBV6-1, TRBJ2-5)
CASSETLDRGAETQYF

SEQ ID NO: 56673 - protein, 17 aa, Homo sapiens
  CDR3 for alpha chain variable domain of TCR clone 28337 (TRAV13-1, TRAJ52)
CAASSGAGGTSYGKLAF

SEQ ID NO: 56674 - protein, 15 aa, Homo sapiens
  CDR3 for beta chain variable domain of TCR clone 28337 (TRBV2, TRBJ2-1)
CASSELAGSYNEQFF

SEQ ID NO: 56675 - protein, 14 aa, Homo sapiens
  CDR3 for alpha chain variable domain of TCR clone 28338 (TRAV12-2, TRAJ40)
CAVKILSGTYKYIF

SEQ ID NO: 56676 - protein, 13 aa, Homo sapiens
  CDR3 for beta chain variable domain of TCR clone 28338 (TRBV20-1, TRBJ1-3)
CSARVQGRDTIYF

SEQ ID NO: 56677 - protein, 15 aa, Homo sapiens
  CDR3 for alpha chain variable domain of TCR clone 28339 (TRAV3, TRAJ22)
CTVRDRGGSARQLTF

SEQ ID NO: 56678 - protein, 16 aa, Homo sapiens
  CDR3 for beta chain variable domain of TCR clone 28339 (TRBV5-4, TRBJ2-3)
CASQQPGAGGADTQYF

SEQ ID NO: 56679 - protein, 12 aa, Homo sapiens
  CDR3 for alpha chain variable domain of TCR clone 28340 (TRAV10, TRAJ6)
CVVSEGSYIPTF

SEQ ID NO: 56680 - protein, 13 aa, Homo sapiens
  CDR3 for beta chain variable domain of TCR clone 28340 (TRBV27, TRBJ2-7)
CASSLTTGYEQYF

SEQ ID NO: 56681 - protein, 15 aa, Homo sapiens
  CDR3 for alpha chain variable domain of TCR clone 28341 (TRAV17, TRAJ23)
CATDAEDNQEGKLIF

SEQ ID NO: 56682 - protein, 12 aa, Homo sapiens
  CDR3 for beta chain variable domain of TCR clone 28341 (TRBV2, TRBJ2-1)
CAKREGYNEQFF

SEQ ID NO: 56683 - protein, 15 aa, Homo sapiens
  CDR3 for alpha chain variable domain of TCR clone 28342 (TRAV3, TRAJ4)
CAVRDGTGGYNNLIF

SEQ ID NO: 56684 - protein, 16 aa, Homo sapiens
  CDR3 for beta chain variable domain of TCR clone 28342 (TRBV27, TRBJ2-2)
CASSSSGVSNTGELFF

SEQ ID NO: 56685 - protein, 12 aa, Homo sapiens
  CDR3 for alpha chain variable domain of TCR clone 28343 (TRAV12-3, TRAJ17)
CAMTLTGNKLTF

SEQ ID NO: 56686 - protein, 15 aa, Homo sapiens
  CDR3 for beta chain variable domain of TCR clone 28343 (TRBV5-1, TRBJ1-4)
FAPAAWKDGNEKLFF

SEQ ID NO: 56687 - protein, 11 aa, Homo sapiens
  CDR3 for alpha chain variable domain of TCR clone 28344 (TRAV21, TRAJ32)
CAVEIMVVLQT

SEQ ID NO: 56688 - protein, 13 aa, Homo sapiens
  CDR3 for beta chain variable domain of TCR clone 28344 (TRBV2, TRBJ1-6)
CASGRGGISPLHF

SEQ ID NO: 56689 - protein, 11 aa, Homo sapiens
  CDR3 for alpha chain variable domain of TCR clone 28345 (TRAV17, TRAJ9)
CATTGGFKTIF

SEQ ID NO: 56690 - protein, 14 aa, Homo sapiens
  CDR3 for beta chain variable domain of TCR clone 28345 (TRBV7-9, TRBJ2-2)
CASSGLAGTGELFF

SEQ ID NO: 56691 - protein, 14 aa, Homo sapiens
  CDR3 for alpha chain variable domain of TCR clone 28346 (TRAV38-1, TRAJ40)
CALRPTSGTYKYIF

SEQ ID NO: 56692 - protein, 12 aa, Homo sapiens
  CDR3 for beta chain variable domain of TCR clone 28346 (TRBV11-2, TRBJ2-1)
CASSPGNNEQFF

SEQ ID NO: 56693 - protein, 13 aa, Homo sapiens
  CDR3 for alpha chain variable domain of TCR clone 28347 (TRAV12-3, TRAJ48)
CAMSLVGNEKLTF

SEQ ID NO: 56694 - protein, 11 aa, Homo sapiens
  CDR3 for beta chain variable domain of TCR clone 28347 (TRBV7-2, TRBJ2-7)
YASSSGLWQYF

SEQ ID NO: 56695 - protein, 11 aa, Homo sapiens
  CDR3 for alpha chain variable domain of TCR clone 28348 (TRAV12-1, TRAJ8)
CVVTGFQELVF

SEQ ID NO: 56696 - protein, 14 aa, Homo sapiens
  CDR3 for beta chain variable domain of TCR clone 28348 (TRBV19, TRBJ2-1)
CASGKATQYNEQFF

SEQ ID NO: 56697 - protein, 13 aa, Homo sapiens
  CDR3 for alpha chain variable domain of TCR clone 28349 (TRAV23/DV6, TRAJ22)
CAPYSSSARQLTF

SEQ ID NO: 56698 - protein, 15 aa, Homo sapiens
  CDR3 for beta chain variable domain of TCR clone 28349 (TRBV11-2, TRBJ1-6)
CASSLDPWAVSPLHF

SEQ ID NO: 56699 - protein, 15 aa, Homo sapiens
  CDR3 for alpha chain variable domain of TCR clone 28350 (TRAV29/DV5, TRAJ42)
CAAKTDGGSQGNLIF

SEQ ID NO: 56700 - protein, 14 aa, Homo sapiens
  CDR3 for beta chain variable domain of TCR clone 28350 (TRBV2, TRBJ2-3)
CASSEGQNTDTQYF

SEQ ID NO: 56701 - protein, 14 aa, Homo sapiens
  CDR3 for alpha chain variable domain of TCR clone 28351 (TRAV12-2, TRAJ45)
CAVYSGGGADGLTF

SEQ ID NO: 56702 - protein, 13 aa, Homo sapiens
  CDR3 for beta chain variable domain of TCR clone 28351 (TRBV7-9, TRBJ1-2)
CASSLKQNYGYTF

SEQ ID NO: 56703 - protein, 13 aa, Homo sapiens
  CDR3 for alpha chain variable domain of TCR clone 28352 (TRAV20, TRAJ37)
CAGCSSNTSKLIF

SEQ ID NO: 56704 - protein, 11 aa, Homo sapiens
  CDR3 for beta chain variable domain of TCR clone 28352 (TRBV12-4, TRBJ2-3)
CASTATDTQYF

SEQ ID NO: 56705 - protein, 13 aa, Homo sapiens
  CDR3 for alpha chain variable domain of TCR clone 28353 (TRAV12-2, TRAJ42)
CAVKRGSQGNLIF

SEQ ID NO: 56706 - protein, 14 aa, Homo sapiens
  CDR3 for beta chain variable domain of TCR clone 28353 (TRBV5-4, TRBJ1-1)
CASSLDSRRDEAFF

SEQ ID NO: 56707 - protein, 15 aa, Homo sapiens
  CDR3 for alpha chain variable domain of TCR clone 28354 (TRAV21, TRAJ24)
CAARSSTDSWGKLQF

SEQ ID NO: 56708 - protein, 13 aa, Homo sapiens
  CDR3 for beta chain variable domain of TCR clone 28354 (TRBV11-2, TRBJ2-5)
CARSSTGEETQYF

SEQ ID NO: 56709 - protein, 14 aa, Homo sapiens
  CDR3 for alpha chain variable domain of TCR clone 28355 (TRAV35, TRAJ46)
CAGPQKSSGDKLTF

SEQ ID NO: 56710 - protein, 13 aa, Homo sapiens
  CDR3 for beta chain variable domain of TCR clone 28355 (TRBV27, TRBJ1-4)
CASSLMGDEKLFF

SEQ ID NO: 56711 - protein, 11 aa, Homo sapiens
  CDR3 for alpha chain variable domain of TCR clone 28356 (TRAV13-1, TRAJ40)
CAVSGTYKYIF

SEQ ID NO: 56712 - protein, 14 aa, Homo sapiens
  CDR3 for beta chain variable domain of TCR clone 28356 (TRBV25-1, TRBJ1-1)
CASTHLGGNTEAFF

SEQ ID NO: 56713 - protein, 14 aa, Homo sapiens
  CDR3 for alpha chain variable domain of TCR clone 28357 (TRAV12-2, TRAJ24)
CAVTPAASWGKLQF

SEQ ID NO: 56714 - protein, 12 aa, Homo sapiens
  CDR3 for beta chain variable domain of TCR clone 28357 (TRBV3-1, TRBJ2-1)
CASSQGSSGQFF

SEQ ID NO: 56715 - protein, 16 aa, Homo sapiens
  CDR3 for alpha chain variable domain of TCR clone 28358 (TRAV12-2, TRAJ45)
CAGKRNPGGGADGLTF

SEQ ID NO: 56716 - protein, 12 aa, Homo sapiens
  CDR3 for beta chain variable domain of TCR clone 28358 (TRBV6-1, TRBJ2-5)
CASSEGRETQYF

SEQ ID NO: 56717 - protein, 15 aa, Homo sapiens
  CDR3 for alpha chain variable domain of TCR clone 28359 (TRAV8-3, TRAJ27)
CAVGPSKTNAGKSTL

SEQ ID NO: 56718 - protein, 14 aa, Homo sapiens
  CDR3 for beta chain variable domain of TCR clone 28359 (TRBV11-2, TRBJ2-3)
CASSRLARTDTQYF

SEQ ID NO: 56719 - protein, 11 aa, Homo sapiens
  CDR3 for alpha chain variable domain of TCR clone 28360 (TRAV2, TRAJ33)
CAVESNYQLIW

SEQ ID NO: 56720 - protein, 15 aa, Homo sapiens
  CDR3 for beta chain variable domain of TCR clone 28360 (TRBV6-3, TRBJ2-7)
CASSSPGTVFYEQYF

SEQ ID NO: 56721 - protein, 17 aa, Homo sapiens
  CDR3 for alpha chain variable domain of TCR clone 28361 (TRAV3, TRAJ6)
CAVRDGPRARGSYIPTF

SEQ ID NO: 56722 - protein, 13 aa, Homo sapiens
  CDR3 for beta chain variable domain of TCR clone 28361 (TRBV12-5, TRBJ2-3)
CASGDRQSDTQYF

SEQ ID NO: 56723 - protein, 12 aa, Homo sapiens
  CDR3 for alpha chain variable domain of TCR clone 28362 (TRAV17, TRAJ49)
CATVATGNQFYF

SEQ ID NO: 56724 - protein, 13 aa, Homo sapiens
  CDR3 for beta chain variable domain of TCR clone 28362 (TRBV7-2, TRBJ2-2)
CASSLAVTGELFF

SEQ ID NO: 56725 - protein, 13 aa, Homo sapiens
  CDR3 for alpha chain variable domain of TCR clone 28363 (TRAV21, TRAJ20)
CAVGLRVDYKISF

SEQ ID NO: 56726 - protein, 13 aa, Homo sapiens
  CDR3 for beta chain variable domain of TCR clone 28363 (TRBV6-1, TRBJ1-1)
CASSRQGNTEAFF

SEQ ID NO: 56727 - protein, 10 aa, Homo sapiens
  CDR3 for alpha chain variable domain of TCR clone 28364 (TRAV26-1, TRAJ22)
RSGSERQLTF

SEQ ID NO: 56728 - protein, 13 aa, Homo sapiens
  CDR3 for beta chain variable domain of TCR clone 28364 (TRBV7-9, TRBJ1-2)
CASSLKQNYGYTF

SEQ ID NO: 56729 - protein, 13 aa, Homo sapiens
  CDR3 for alpha chain variable domain of TCR clone 28365 (TRAV9-2, TRAJ58)
CSATGTGGSRLTF

SEQ ID NO: 56730 - protein, 14 aa, Homo sapiens
  CDR3 for beta chain variable domain of TCR clone 28365 (TRBV7-9, TRBJ2-1)
CASSPRDSLYEQFF

SEQ ID NO: 56731 - protein, 13 aa, Homo sapiens
  CDR3 for alpha chain variable domain of TCR clone 28366 (TRAV21, TRAJ27)
CAARPGNAGKSTF

SEQ ID NO: 56732 - protein, 13 aa, Homo sapiens
  CDR3 for beta chain variable domain of TCR clone 28366 (TRBV7-6, TRBJ2-3)
CQQLRDSHRYAVF

SEQ ID NO: 56733 - protein, 14 aa, Homo sapiens
  CDR3 for alpha chain variable domain of TCR clone 28367 (TRAV4, TRAJ26)
CLVGPHNYGQNFVF

SEQ ID NO: 56734 - protein, 17 aa, Homo sapiens
  CDR3 for beta chain variable domain of TCR clone 28367 (TRBV24-1, TRBJ2-1)
CATSDVSTSGTYNGQFF

SEQ ID NO: 56735 - protein, 13 aa, Homo sapiens
  CDR3 for alpha chain variable domain of TCR clone 28368 (TRAV8-1, TRAJ30)
CAVIMNRDDKITF

SEQ ID NO: 56736 - protein, 14 aa, Homo sapiens
  CDR3 for beta chain variable domain of TCR clone 28368 (TRBV7-2, TRBJ1-6)
CASSLQGANSPLHF

SEQ ID NO: 56737 - protein, 11 aa, Homo sapiens
  CDR3 for alpha chain variable domain of TCR clone 28369 (TRAV12-1, TRAJ30)
CVVNGQDKIIF

SEQ ID NO: 56738 - protein, 15 aa, Homo sapiens
  CDR3 for beta chain variable domain of TCR clone 28369 (TRBV20-1, TRBJ2-7)
CSAREGRDSLYEQYF

SEQ ID NO: 56739 - protein, 17 aa, Homo sapiens
  CDR3 for alpha chain variable domain of TCR clone 28370 (TRAV3, TRAJ6)
CAVRDGPRAGGSYIPTF

SEQ ID NO: 56740 - protein, 17 aa, Homo sapiens
  CDR3 for beta chain variable domain of TCR clone 28370 (TRBV25-1, TRBJ2-1)
CASSAYGQGRGVYEQFF

SEQ ID NO: 56741 - protein, 14 aa, Homo sapiens
  CDR3 for alpha chain variable domain of TCR clone 28371 (TRAV9-2, TRAJ15)
CALSESQAGTALIF

SEQ ID NO: 56742 - protein, 13 aa, Homo sapiens
  CDR3 for beta chain variable domain of TCR clone 28371 (TRBV7-9, TRBJ1-2)
CASSLKQNYGYTF

SEQ ID NO: 56743 - protein, 15 aa, Homo sapiens
  CDR3 for alpha chain variable domain of TCR clone 28372 (TRAV8-4, TRAJ10)
CAVSDQMGGGNKLTF

SEQ ID NO: 56744 - protein, 13 aa, Homo sapiens
  CDR3 for beta chain variable domain of TCR clone 28372 (TRBV10-3, TRBJ1-2)
CAISERDSYGYTF

SEQ ID NO: 56745 - protein, 15 aa, Homo sapiens
  CDR3 for alpha chain variable domain of TCR clone 28373 (TRAV12-3, TRAJ17)
CAMSPSLAAGNKLTF

SEQ ID NO: 56746 - protein, 12 aa, Homo sapiens
  CDR3 for beta chain variable domain of TCR clone 28373 (TRBV11-2, TRBJ2-2)
CASSLPTGELFF

SEQ ID NO: 56747 - protein, 12 aa, Homo sapiens
  CDR3 for alpha chain variable domain of TCR clone 28374 (TRAV12-2, TRAJ8)
CAVNTGFRKLVF

SEQ ID NO: 56748 - protein, 15 aa, Homo sapiens
  CDR3 for beta chain variable domain of TCR clone 28374 (TRBV7-8, TRBJ1-5)
CASSLERRGLEPQHF

SEQ ID NO: 56749 - protein, 14 aa, Homo sapiens
  CDR3 for alpha chain variable domain of TCR clone 28375 (TRAV38-1, TRAJ38)
CAFMKHEVDRKLIW

SEQ ID NO: 56750 - protein, 15 aa, Homo sapiens
  CDR3 for beta chain variable domain of TCR clone 28375 (TRBV28, TRBJ1-3)
CASSMGWASGNTIYF

SEQ ID NO: 56751 - protein, 16 aa, Homo sapiens
  CDR3 for alpha chain variable domain of TCR clone 28376 (TRAV30, TRAJ24)
CGTEIVDAESWGKFQF

SEQ ID NO: 56752 - protein, 15 aa, Homo sapiens
  CDR3 for beta chain variable domain of TCR clone 28376 (TRBV7-9, TRBJ1-4)
CASSARTGGNEKLFF

SEQ ID NO: 56753 - protein, 14 aa, Homo sapiens
  CDR3 for alpha chain variable domain of TCR clone 28377 (TRAV1-2, TRAJ16)
CAVNRFSDGQKMLF

SEQ ID NO: 56754 - protein, 13 aa, Homo sapiens
  CDR3 for beta chain variable domain of TCR clone 28377 (TRBV7-3, TRBJ1-1)
CASSQDWGAEAFF

SEQ ID NO: 56755 - protein, 14 aa, Homo sapiens
  CDR3 for alpha chain variable domain of TCR clone 28378 (TRAV13-2, TRAJ43)
CAEIPTYNDNDMRF

SEQ ID NO: 56756 - protein, 15 aa, Homo sapiens
  CDR3 for beta chain variable domain of TCR clone 28378 (TRBV7-9, TRBJ2-2)
CASGPLDTFPGELFF

SEQ ID NO: 56757 - protein, 12 aa, Homo sapiens
  CDR3 for alpha chain variable domain of TCR clone 28379 (TRAV21, TRAJ49)
CAVTNTGNQFYF

SEQ ID NO: 56758 - protein, 17 aa, Homo sapiens
  CDR3 for beta chain variable domain of TCR clone 28379 (TRBV13, TRBJ2-3)
CASSLSRVAGGRNTRYF

SEQ ID NO: 56759 - protein, 16 aa, Homo sapiens
  CDR3 for alpha chain variable domain of TCR clone 28380 (TRAV30, TRAJ24)
CGTEIVDADSWGKFQF

SEQ ID NO: 56760 - protein, 12 aa, Homo sapiens
  CDR3 for beta chain variable domain of TCR clone 28380 (TRBV19, TRBJ1-1)
CASSTTGIEAFF

SEQ ID NO: 56761 - protein, 16 aa, Homo sapiens
  CDR3 for alpha chain variable domain of TCR clone 28381 (TRAV4, TRAJ18)
CCVLLIGGSTLGRLYF

SEQ ID NO: 56762 - protein, 14 aa, Homo sapiens
  CDR3 for beta chain variable domain of TCR clone 28381 (TRBV7-9, TRBJ2-5)
CASSLDTAQETQYF

SEQ ID NO: 56763 - protein, 15 aa, Homo sapiens
  CDR3 for alpha chain variable domain of TCR clone 28382 (TRAV26-1, TRAJ22)
CIVRVSFWFCKATDL

SEQ ID NO: 56764 - protein, 14 aa, Homo sapiens
  CDR3 for beta chain variable domain of TCR clone 28382 (TRBV6-1, TRBJ1-3)
CASVQGGGGNTIYF

SEQ ID NO: 56765 - protein, 15 aa, Homo sapiens
  CDR3 for alpha chain variable domain of TCR clone 28383 (TRAV25, TRAJ52)
CAGTSGGTSYGKMTF

SEQ ID NO: 56766 - protein, 16 aa, Homo sapiens
  CDR3 for beta chain variable domain of TCR clone 28383 (TRBV15, TRBJ1-2)
CATSRGPRTGGGGYTF

SEQ ID NO: 56767 - protein, 12 aa, Homo sapiens
  CDR3 for alpha chain variable domain of TCR clone 28384 (TRAV2, TRAJ24)
CAATDSWGKFQF

SEQ ID NO: 56768 - protein, 15 aa, Homo sapiens
  CDR3 for beta chain variable domain of TCR clone 28384 (TRBV11-2, TRBJ2-2)
CASSLDTGNTGELFF

SEQ ID NO: 56769 - protein, 14 aa, Homo sapiens
  CDR3 for alpha chain variable domain of TCR clone 28385 (TRAV26-1, TRAJ45)
CIVRVAGGADGLTF

SEQ ID NO: 56770 - protein, 16 aa, Homo sapiens
  CDR3 for beta chain variable domain of TCR clone 28385 (TRBV7-9, TRBJ1-1)
CASSLTQVRSNTEAFF

SEQ ID NO: 56771 - protein, 14 aa, Homo sapiens
  CDR3 for alpha chain variable domain of TCR clone 28386 (TRAV8-4, TRAJ13)
CAVTLSGGYQKVTF

SEQ ID NO: 56772 - protein, 11 aa, Homo sapiens
  CDR3 for beta chain variable domain of TCR clone 28386 (TRBV12-4, TRBJ2-3)
CASTATDTQYF

SEQ ID NO: 56773 - protein, 13 aa, Homo sapiens
  CDR3 for alpha chain variable domain of TCR clone 28387 (TRAV13-2, TRAJ13)
CAERPGGYQKVTF

SEQ ID NO: 56774 - protein, 13 aa, Homo sapiens
  CDR3 for beta chain variable domain of TCR clone 28387 (TRBV24-1, TRBJ2-2)
CATSDWSTGELFF

SEQ ID NO: 56775 - protein, 13 aa, Homo sapiens
  CDR3 for alpha chain variable domain of TCR clone 28388 (TRAV20, TRAJ48)
CAVQGVGNEKLTF

SEQ ID NO: 56776 - protein, 14 aa, Homo sapiens
  CDR3 for beta chain variable domain of TCR clone 28388 (TRBV27, TRBJ2-7)
CASSFPDGPYEQYF

SEQ ID NO: 56777 - protein, 12 aa, Homo sapiens
  CDR3 for alpha chain variable domain of TCR clone 28389 (TRAV35, TRAJ30)
CAGLNRDDKIIF

SEQ ID NO: 56778 - protein, 15 aa, Homo sapiens
  CDR3 for beta chain variable domain of TCR clone 28389 (TRBV9, TRBJ1-6)
CASSVAGTGDSHLHF

SEQ ID NO: 56779 - protein, 15 aa, Homo sapiens
  CDR3 for alpha chain variable domain of TCR clone 28390 (TRAV21, TRAJ24)
CAARSSTDSWGKLQF

SEQ ID NO: 56780 - protein, 13 aa, Homo sapiens
  CDR3 for beta chain variable domain of TCR clone 28390 (TRBV7-3, TRBJ1-1)
CASSQDWGAEAFF

SEQ ID NO: 56781 - protein, 14 aa, Homo sapiens
  CDR3 for alpha chain variable domain of TCR clone 28391 (TRAV8-1, TRAJ5)
CAVSMDTGRRALTF

SEQ ID NO: 56782 - protein, 15 aa, Homo sapiens
  CDR3 for beta chain variable domain of TCR clone 28391 (TRBV19, TRBJ2-4)
CASRGPRRGESIQYF

SEQ ID NO: 56783 - protein, 11 aa, Homo sapiens
  CDR3 for alpha chain variable domain of TCR clone 28392 (TRAV2, TRAJ33)
CAVESNYQLIW

SEQ ID NO: 56784 - protein, 15 aa, Homo sapiens
  CDR3 for beta chain variable domain of TCR clone 28392 (TRBV20-1, TRBJ2-7)
CSARDRVSGMDEQYF

SEQ ID NO: 56785 - protein, 13 aa, Homo sapiens
  CDR3 for alpha chain variable domain of TCR clone 28393 (TRAV22, TRAJ29)
CAVGGSGNTHLVF

SEQ ID NO: 56786 - protein, 13 aa, Homo sapiens
  CDR3 for beta chain variable domain of TCR clone 28393 (TRBV4-2, TRBJ1-1)
CASSQAGNTEAFF

SEQ ID NO: 56787 - protein, 11 aa, Homo sapiens
  CDR3 for alpha chain variable domain of TCR clone 28394 (TRAV17, TRAJ9)
CGFTGGFKTIF

SEQ ID NO: 56788 - protein, 14 aa, Homo sapiens
  CDR3 for beta chain variable domain of TCR clone 28394 (TRBV7-9, TRBJ2-2)
CASSLVQDTGDLFF

SEQ ID NO: 56789 - protein, 12 aa, Homo sapiens
  CDR3 for alpha chain variable domain of TCR clone 28395 (TRAV2, TRAJ9)
CAVGAGGFKTIF

SEQ ID NO: 56790 - protein, 14 aa, Homo sapiens
  CDR3 for beta chain variable domain of TCR clone 28395 (TRBV7-8, TRBJ2-3)
CASSLEAGTDTQYF

SEQ ID NO: 56791 - protein, 14 aa, Homo sapiens
  CDR3 for alpha chain variable domain of TCR clone 28396 (TRAV12-2, TRAJ24)
CAVTPADSWGQLQF

SEQ ID NO: 56792 - protein, 12 aa, Homo sapiens
  CDR3 for beta chain variable domain of TCR clone 28396 (TRBV3-1, TRBJ2-1)
CASSQGSSGQFF

SEQ ID NO: 56793 - protein, 16 aa, Homo sapiens
  CDR3 for alpha chain variable domain of TCR clone 28397 (TRAV3, TRAJ3)
CAVRDRAKSSASKIIF

SEQ ID NO: 56794 - protein, 16 aa, Homo sapiens
  CDR3 for beta chain variable domain of TCR clone 28397 (TRBV20-1, TRBJ2-4)
CSATSLAELVKNIQYF

SEQ ID NO: 56795 - protein, 12 aa, Homo sapiens
  CDR3 for alpha chain variable domain of TCR clone 28398 (TRAV27, TRAJ9)
CAGESGGFKTIF

SEQ ID NO: 56796 - protein, 14 aa, Homo sapiens
  CDR3 for beta chain variable domain of TCR clone 28398 (TRBV25-1, TRBJ1-1)
CASTHLGGNTEAFF

SEQ ID NO: 56797 - protein, 16 aa, Homo sapiens
  CDR3 for alpha chain variable domain of TCR clone 28399 (TRAV3, TRAJ37)
CAVRGKGSGNTGKLIF

SEQ ID NO: 56798 - protein, 16 aa, Homo sapiens
  CDR3 for beta chain variable domain of TCR clone 28399 (TRBV13, TRBJ2-2)
CASSPRTGEHTGELFF

SEQ ID NO: 56799 - protein, 13 aa, Homo sapiens
  CDR3 for alpha chain variable domain of TCR clone 28400 (TRAV12-3, TRAJ7)
CAMTPYGNNRLAF

SEQ ID NO: 56800 - protein, 16 aa, Homo sapiens
  CDR3 for beta chain variable domain of TCR clone 28400 (TRBV20-1, TRBJ1-4)
CSARPYGGELNGKLFF

SEQ ID NO: 56801 - protein, 15 aa, Homo sapiens
  CDR3 for alpha chain variable domain of TCR clone 28401 (TRAV13-1, TRAJ32)
CAASNGWWCYKQAHL

SEQ ID NO: 56802 - protein, 12 aa, Homo sapiens
  CDR3 for beta chain variable domain of TCR clone 28401 (TRBV24-1, TRBJ1-1)
CATLYPDTEAFF

SEQ ID NO: 56803 - protein, 14 aa, Homo sapiens
  CDR3 for alpha chain variable domain of TCR clone 28402 (TRAV9-2, TRAJ39)
CALYIYNAGNMLTF

SEQ ID NO: 56804 - protein, 13 aa, Homo sapiens
  CDR3 for beta chain variable domain of TCR clone 28402 (TRBV7-2, TRBJ2-4)
CASSREHANIQYF

SEQ ID NO: 56805 - protein, 13 aa, Homo sapiens
  CDR3 for alpha chain variable domain of TCR clone 28403 (TRAV27, TRAJ57)
CRSAQGGSEKLVF

SEQ ID NO: 56806 - protein, 11 aa, Homo sapiens
  CDR3 for beta chain variable domain of TCR clone 28403 (TRBV11-2, TRBJ1-1)
CASSINTEAVF

SEQ ID NO: 56807 - protein, 13 aa, Homo sapiens
  CDR3 for alpha chain variable domain of TCR clone 28404 (TRAV8-1, TRAJ30)
CAVIMNRGDKIIF

SEQ ID NO: 56808 - protein, 14 aa, Homo sapiens
  CDR3 for beta chain variable domain of TCR clone 28404 (TRBV7-2, TRBJ1-6)
CASSLQGANSPLHF

SEQ ID NO: 56809 - protein, 13 aa, Homo sapiens
  CDR3 for alpha chain variable domain of TCR clone 28405 (TRAV2, TRAJ21)
CAVEDLNFNKFYS

SEQ ID NO: 56810 - protein, 15 aa, Homo sapiens
  CDR3 for beta chain variable domain of TCR clone 28405 (TRBV28, TRBJ2-5)
CASSPGQGSIETQYF

SEQ ID NO: 56811 - protein, 14 aa, Homo sapiens
  CDR3 for alpha chain variable domain of TCR clone 28406 (TRAV8-3, TRAJ4)
CAVGAAGGYNKLIF

SEQ ID NO: 56812 - protein, 15 aa, Homo sapiens
  CDR3 for beta chain variable domain of TCR clone 28406 (TRBV6-5, TRBJ2-1)
CASSYDAGAGNEKFF

SEQ ID NO: 56813 - protein, 14 aa, Homo sapiens
  CDR3 for alpha chain variable domain of TCR clone 28407 (TRAV13-1, TRAJ21)
CAAKEGFNKFYLDL

SEQ ID NO: 56814 - protein, 17 aa, Homo sapiens
  CDR3 for beta chain variable domain of TCR clone 28407 (TRBV20-1, TRBJ2-1)
CSASSSGLAGSYNEQFF

SEQ ID NO: 56815 - protein, 18 aa, Homo sapiens
  CDR3 for alpha chain variable domain of TCR clone 28408 (TRAV12-3, TRAJ52)
CAMSRTNAGGTSYGKLTF

SEQ ID NO: 56816 - protein, 15 aa, Homo sapiens
  CDR3 for beta chain variable domain of TCR clone 28408 (TRBV7-2, TRBJ2-1)
CASSLVEGGHNEQFF

SEQ ID NO: 56817 - protein, 13 aa, Homo sapiens
  CDR3 for alpha chain variable domain of TCR clone 28409 (TRAV35, TRAJ42)
CAGFPGSQGNLTF

SEQ ID NO: 56818 - protein, 13 aa, Homo sapiens
  CDR3 for beta chain variable domain of TCR clone 28409 (TRBV29-1, TRBJ2-1)
CSVEGGRVNEQFF

SEQ ID NO: 56819 - protein, 19 aa, Homo sapiens
  CDR3 for alpha chain variable domain of TCR clone 28410 (TRAV27, TRAJ49)
TAAQPGDTGLHPTSNQFYF

SEQ ID NO: 56820 - protein, 14 aa, Homo sapiens
  CDR3 for beta chain variable domain of TCR clone 28410 (TRBV9, TRBJ2-3)
CASSNDWGRDTQYF

SEQ ID NO: 56821 - protein, 16 aa, Homo sapiens
  CDR3 for alpha chain variable domain of TCR clone 28411 (TRAV3, TRAJ5)
CAVRNLMYTGRRALTF

SEQ ID NO: 56822 - protein, 16 aa, Homo sapiens
  CDR3 for beta chain variable domain of TCR clone 28411 (TRBV4-2, TRBJ2-7)
CASSQEGLANSYEQYF

SEQ ID NO: 56823 - protein, 12 aa, Homo sapiens
  CDR3 for alpha chain variable domain of TCR clone 28412 (TRAV16, TRAJ10)
CSRTGGGNKLTF

SEQ ID NO: 56824 - protein, 15 aa, Homo sapiens
  CDR3 for beta chain variable domain of TCR clone 28412 (TRBV6-3, TRBJ2-7)
CASSSHGTVFYEQYF

SEQ ID NO: 56825 - protein, 12 aa, Homo sapiens
  CDR3 for alpha chain variable domain of TCR clone 28413 (TRAV12-3, TRAJ20)
CAMVRGDYELSF

SEQ ID NO: 56826 - protein, 14 aa, Homo sapiens
  CDR3 for beta chain variable domain of TCR clone 28413 (TRBV5-5, TRBJ1-5)
CASSGQGVDQPQHF

SEQ ID NO: 56827 - protein, 12 aa, Homo sapiens
  CDR3 for alpha chain variable domain of TCR clone 28414 (TRAV38-1, TRAJ32)
CAPLGAINKLIF

SEQ ID NO: 56828 - protein, 14 aa, Homo sapiens
  CDR3 for beta chain variable domain of TCR clone 28414 (TRBV29-1, TRBJ2-5)
CSVETSGSGETQYF

SEQ ID NO: 56829 - protein, 16 aa, Homo sapiens
  CDR3 for alpha chain variable domain of TCR clone 28415 (TRAV16, TRAJ52)
CALSAAGGTSDGKLTF

SEQ ID NO: 56830 - protein, 12 aa, Homo sapiens
  CDR3 for beta chain variable domain of TCR clone 28415 (TRBV12-4, TRBJ1-3)
CASSFSGNTIYF

SEQ ID NO: 56831 - protein, 14 aa, Homo sapiens
  CDR3 for alpha chain variable domain of TCR clone 28416 (TRAV12-3, TRAJ29)
CAMILLSGNTPLVF

SEQ ID NO: 56832 - protein, 16 aa, Homo sapiens
  CDR3 for beta chain variable domain of TCR clone 28416 (TRBV28, TRBJ2-7)
CASSSGTGGRGYEQYF

SEQ ID NO: 56833 - protein, 12 aa, Homo sapiens
  CDR3 for alpha chain variable domain of TCR clone 28417 (TRAV13-1, TRAJ27)
CAATPMQANQPL

SEQ ID NO: 56834 - protein, 11 aa, Homo sapiens
  CDR3 for beta chain variable domain of TCR clone 28417 (TRBV28, TRBJ2-7)
CASSWDCEQYF

SEQ ID NO: 56835 - protein, 14 aa, Homo sapiens
  CDR3 for alpha chain variable domain of TCR clone 28418 (TRAV35, TRAJ22)
CAGLRPGSARQLTF

SEQ ID NO: 56836 - protein, 15 aa, Homo sapiens
  CDR3 for beta chain variable domain of TCR clone 28418 (TRBV12-4, TRBJ2-5)
CASSPPAGLQETQYL

SEQ ID NO: 56837 - protein, 14 aa, Homo sapiens
  CDR3 for alpha chain variable domain of TCR clone 28419 (TRAV12-3, TRAJ10)
SHLPLTGGGNKLTF

SEQ ID NO: 56838 - protein, 16 aa, Homo sapiens
  CDR3 for beta chain variable domain of TCR clone 28419 (TRBV4-2, TRBJ2-3)
CASSQELAGDTDTQYF

SEQ ID NO: 56839 - protein, 13 aa, Homo sapiens
  CDR3 for alpha chain variable domain of TCR clone 28420 (TRAV8-3, TRAJ36)
CAVGATGANNLFF

SEQ ID NO: 56840 - protein, 15 aa, Homo sapiens
  CDR3 for beta chain variable domain of TCR clone 28420 (TRBV7-2, TRBJ1-2)
CASSPRAGWNYGYNF

SEQ ID NO: 56841 - protein, 17 aa, Homo sapiens
  CDR3 for alpha chain variable domain of TCR clone 28421 (TRAV3, TRAJ6)
CAVRDGPRAGGSYIPTF

SEQ ID NO: 56842 - protein, 10 aa, Homo sapiens
  CDR3 for beta chain variable domain of TCR clone 28421 (TRBV2, TRBJ2-5)
CASSAATQYF

SEQ ID NO: 56843 - protein, 13 aa, Homo sapiens
  CDR3 for alpha chain variable domain of TCR clone 28422 (TRAV17, TRAJ40)
CATAPGGTYKYIL

SEQ ID NO: 56844 - protein, 12 aa, Homo sapiens
  CDR3 for beta chain variable domain of TCR clone 28422 (TRBV2, TRBJ1-5)
CASSENRTPQHF

SEQ ID NO: 56845 - protein, 16 aa, Homo sapiens
  CDR3 for alpha chain variable domain of TCR clone 28423 (TRAV1-2, TRAJ10)
CAVRGVLTGGGNKLTF

SEQ ID NO: 56846 - protein, 12 aa, Homo sapiens
  CDR3 for beta chain variable domain of TCR clone 28423 (TRBV7-8, TRBJ2-7)
CASSLGDKEQYF

SEQ ID NO: 56847 - protein, 13 aa, Homo sapiens
  CDR3 for alpha chain variable domain of TCR clone 28424 (TRAV12-2, TRAJ39)
CAVNNNADNMLTF

SEQ ID NO: 56848 - protein, 13 aa, Homo sapiens
  CDR3 for beta chain variable domain of TCR clone 28424 (TRBV2, TRBJ1-5)
CATAGPGNQPQHF

SEQ ID NO: 56849 - protein, 15 aa, Homo sapiens
  CDR3 for alpha chain variable domain of TCR clone 28425 (TRAV12-3, TRAJ49)
CVMAVTPNTGNQFYF

SEQ ID NO: 56850 - protein, 18 aa, Homo sapiens
  CDR3 for beta chain variable domain of TCR clone 28425 (TRBV4-1, TRBJ1-5)
CASSQDPRGQGLNQPQHF

SEQ ID NO: 56851 - protein, 14 aa, Homo sapiens
  CDR3 for alpha chain variable domain of TCR clone 28426 (TRAV13-1, TRAJ9)
YAASALTGGFKTIF

SEQ ID NO: 56852 - protein, 13 aa, Homo sapiens
  CDR3 for beta chain variable domain of TCR clone 28426 (TRBV20-1, TRBJ1-1)
CSAGTVGNTEAFF

SEQ ID NO: 56853 - protein, 23 aa, Homo sapiens
  CDR3 for alpha chain variable domain of TCR clone 28427 (TRAV26-1, TRAJ38)
CIADNAGNNHIQNPDPAVYQMRD

SEQ ID NO: 56854 - protein, 13 aa, Homo sapiens
  CDR3 for beta chain variable domain of TCR clone 28427 (TRBV20-1, TRBJ1-1)
CSARGGGNTEAFF

SEQ ID NO: 56855 - protein, 11 aa, Homo sapiens
  CDR3 for alpha chain variable domain of TCR clone 28428 (TRAV2, TRAJ21)
CAVFNFNNFYF

SEQ ID NO: 56856 - protein, 14 aa, Homo sapiens
  CDR3 for beta chain variable domain of TCR clone 28428 (TRBV15, TRBJ2-3)
CATRSGTSTDTQYF

SEQ ID NO: 56857 - protein, 16 aa, Homo sapiens
  CDR3 for alpha chain variable domain of TCR clone 28429 (TRAV3, TRAJ23)
CAVKIGIYNQGGKLIF

SEQ ID NO: 56858 - protein, 17 aa, Homo sapiens
  CDR3 for beta chain variable domain of TCR clone 28429 (TRBV10-3, TRBJ2-6)
CAISGPTAPSGANVLTF

SEQ ID NO: 56859 - protein, 13 aa, Homo sapiens
  CDR3 for alpha chain variable domain of TCR clone 28430 (TRAV21, TRAJ57)
CAVTQGGSEKLVF

SEQ ID NO: 56860 - protein, 16 aa, Homo sapiens
  CDR3 for beta chain variable domain of TCR clone 28430 (TRBV12-5, TRBJ2-5)
CASGPRTSGNQETQYF

SEQ ID NO: 56861 - protein, 14 aa, Homo sapiens
  CDR3 for alpha chain variable domain of TCR clone 28431 (TRAV25, TRAJ23)
CAGQGDNQGGKLIF

SEQ ID NO: 56862 - protein, 12 aa, Homo sapiens
  CDR3 for beta chain variable domain of TCR clone 28431 (TRBV7-9, TRBJ1-1)
CASSLVRGEASF

SEQ ID NO: 56863 - protein, 15 aa, Homo sapiens
  CDR3 for alpha chain variable domain of TCR clone 28432 (TRAV41, TRAJ45)
CAASYSGGGADGLTF

SEQ ID NO: 56864 - protein, 14 aa, Homo sapiens
  CDR3 for beta chain variable domain of TCR clone 28432 (TRBV7-2, TRBJ2-7)
CASSPKTSFYEQYF

SEQ ID NO: 56865 - protein, 16 aa, Homo sapiens
  CDR3 for alpha chain variable domain of TCR clone 28433 (TRAV30, TRAJ24)
CGTEIVDTDSWGKFQF

SEQ ID NO: 56866 - protein, 13 aa, Homo sapiens
  CDR3 for beta chain variable domain of TCR clone 28433 (TRBV7-7, TRBJ1-1)
CASSLGANTEAFF

SEQ ID NO: 56867 - protein, 12 aa, Homo sapiens
  CDR3 for alpha chain variable domain of TCR clone 28434 (TRAV23/DV6, TRAJ32)
CSIPGATNKLIF

SEQ ID NO: 56868 - protein, 17 aa, Homo sapiens
  CDR3 for beta chain variable domain of TCR clone 28434 (TRBV13, TRBJ2-3)
CASSSLGTSGLTDTQYF

SEQ ID NO: 56869 - protein, 15 aa, Homo sapiens
  CDR3 for alpha chain variable domain of TCR clone 28435 (TRAV3, TRAJ5)
CAVRDRKTGRRALTF

SEQ ID NO: 56870 - protein, 15 aa, Homo sapiens
  CDR3 for beta chain variable domain of TCR clone 28435 (TRBV7-8, TRBJ2-1)
CASSLADRLYNEQFF

SEQ ID NO: 56871 - protein, 15 aa, Homo sapiens
  CDR3 for alpha chain variable domain of TCR clone 28436 (TRAV8-3, TRAJ27)
CAVGPSKTNAGKSTF

SEQ ID NO: 56872 - protein, 15 aa, Homo sapiens
  CDR3 for beta chain variable domain of TCR clone 28436 (TRBV7-2, TRBJ2-1)
CASSSGLAGGNEHFF

SEQ ID NO: 56873 - protein, 15 aa, Homo sapiens
  CDR3 for alpha chain variable domain of TCR clone 28437 (TRAV38-1, TRAJ37)
CAFIHGSGNTGKLVF

SEQ ID NO: 56874 - protein, 12 aa, Homo sapiens
  CDR3 for beta chain variable domain of TCR clone 28437 (TRBV7-9, TRBJ2-7)
CASSFGSYEQYF

SEQ ID NO: 56875 - protein, 14 aa, Homo sapiens
  CDR3 for alpha chain variable domain of TCR clone 28438 (TRAV9-2, TRAJ38)
CALSNAGNNRKLIW

SEQ ID NO: 56876 - protein, 13 aa, Homo sapiens
  CDR3 for beta chain variable domain of TCR clone 28438 (TRBV14, TRBJ1-1)
CASSREFGTEAFF

SEQ ID NO: 56877 - protein, 14 aa, Homo sapiens
  CDR3 for alpha chain variable domain of TCR clone 28439 (TRAV1-2, TRAJ16)
CAVNRFSDGQRLLF

SEQ ID NO: 56878 - protein, 14 aa, Homo sapiens
  CDR3 for beta chain variable domain of TCR clone 28439 (TRBV13, TRBJ2-5)
CASSLGRGQETQYF

SEQ ID NO: 56879 - protein, 12 aa, Homo sapiens
  CDR3 for alpha chain variable domain of TCR clone 28440 (TRAV12-3, TRAJ17)
CAMTLTGNKLTL

SEQ ID NO: 56880 - protein, 15 aa, Homo sapiens
  CDR3 for beta chain variable domain of TCR clone 28440 (TRBV20-1, TRBJ2-7)
CSARDRVSGMDGQYF

SEQ ID NO: 56881 - protein, 13 aa, Homo sapiens
  CDR3 for alpha chain variable domain of TCR clone 28441 (TRAV21, TRAJ57)
CAVIEGGSEKLVS

SEQ ID NO: 56882 - protein, 15 aa, Homo sapiens
  CDR3 for beta chain variable domain of TCR clone 28441 (TRBV10-3, TRBJ2-5)
CAISEFGRGQETQYF

SEQ ID NO: 56883 - protein, 17 aa, Homo sapiens
  CDR3 for alpha chain variable domain of TCR clone 28442 (TRAV3, TRAJ6)
CAVRDGPRAGGSYIPTF

SEQ ID NO: 56884 - protein, 13 aa, Homo sapiens
  CDR3 for beta chain variable domain of TCR clone 28442 (TRBV7-9, TRBJ2-7)
CASSFAGAYEQYF

SEQ ID NO: 56885 - protein, 14 aa, Homo sapiens
  CDR3 for alpha chain variable domain of TCR clone 28443 (TRAV13-1, TRAJ12)
CSNYPMDSSYKLIF

SEQ ID NO: 56886 - protein, 11 aa, Homo sapiens
  CDR3 for beta chain variable domain of TCR clone 28443 (TRBV20-1, TRBJ2-1)
CSLFSGSEQFF

SEQ ID NO: 56887 - protein, 14 aa, Homo sapiens
  CDR3 for alpha chain variable domain of TCR clone 28444 (TRAV9-2, TRAJ39)
CALYIYNAGNMLTF

SEQ ID NO: 56888 - protein, 14 aa, Homo sapiens
  CDR3 for beta chain variable domain of TCR clone 28444 (TRBV19, TRBJ2-7)
CASSMGQGAIEQYF

SEQ ID NO: 56889 - protein, 11 aa, Homo sapiens
  CDR3 for alpha chain variable domain of TCR clone 28445 (TRAV1-1, TRAJ23)
CAVRQGGKLIF

SEQ ID NO: 56890 - protein, 15 aa, Homo sapiens
  CDR3 for beta chain variable domain of TCR clone 28445 (TRBV7-9, TRBJ1-5)
CASSQGHQPNQPQHF

SEQ ID NO: 56891 - protein, 14 aa, Homo sapiens
  CDR3 for alpha chain variable domain of TCR clone 28446 (TRAV35, TRAJ38)
CAGSNAGNNRKLIW

SEQ ID NO: 56892 - protein, 12 aa, Homo sapiens
  CDR3 for beta chain variable domain of TCR clone 28446 (TRBV19, TRBJ2-7)
CASTDRGYGQYF

SEQ ID NO: 56893 - protein, 14 aa, Homo sapiens
  CDR3 for alpha chain variable domain of TCR clone 28447 (TRAV13-1, TRAJ35)
CAASKGGFGNVLHC

SEQ ID NO: 56894 - protein, 13 aa, Homo sapiens
  CDR3 for beta chain variable domain of TCR clone 28447 (TRBV7-3, TRBJ1-1)
CASSQDWGAEAYF

SEQ ID NO: 56895 - protein, 14 aa, Homo sapiens
  CDR3 for alpha chain variable domain of TCR clone 28448 (TRAV13-1, TRAJ39)
CAASYNNAGNVLTF

SEQ ID NO: 56896 - protein, 13 aa, Homo sapiens
  CDR3 for beta chain variable domain of TCR clone 28448 (TRBV24-1, TRBJ1-4)
CATNNGRSEKLFF

SEQ ID NO: 56897 - protein, 14 aa, Homo sapiens
  CDR3 for alpha chain variable domain of TCR clone 28449 (TRAV21, TRAJ45)
CAVSSGGGADGLTF

SEQ ID NO: 56898 - protein, 12 aa, Homo sapiens
  CDR3 for beta chain variable domain of TCR clone 28449 (TRBV11-2, TRBJ2-2)
CASSLPTGELFF

SEQ ID NO: 56899 - protein, 14 aa, Homo sapiens
  CDR3 for alpha chain variable domain of TCR clone 28450 (TRAV8-4, TRAJ9)
CAVRINIGGFKTIF

SEQ ID NO: 56900 - protein, 14 aa, Homo sapiens
  CDR3 for beta chain variable domain of TCR clone 28450 (TRBV5-1, TRBJ1-1)
CASSLQGASTEAFF

SEQ ID NO: 56901 - protein, 14 aa, Homo sapiens
  CDR3 for alpha chain variable domain of TCR clone 28451 (TRAV13-1, TRAJ40)
CAASMTSGTYKSIF

SEQ ID NO: 56902 - protein, 15 aa, Homo sapiens
  CDR3 for beta chain variable domain of TCR clone 28451 (TRBV7-3, TRBJ2-1)
CASSPTGGGEVEQFF

SEQ ID NO: 56903 - protein, 14 aa, Homo sapiens
  CDR3 for alpha chain variable domain of TCR clone 28452 (TRAV35, TRAJ33)
CAGSSQDSNYQLIW

SEQ ID NO: 56904 - protein, 17 aa, Homo sapiens
  CDR3 for beta chain variable domain of TCR clone 28452 (TRBV20-1, TRBJ2-1)
CSASSSGLAGSYNEQFF

SEQ ID NO: 56905 - protein, 12 aa, Homo sapiens
  CDR3 for alpha chain variable domain of TCR clone 28453 (TRAV17, TRAJ47)
CAPTVRGNKLVF

SEQ ID NO: 56906 - protein, 13 aa, Homo sapiens
  CDR3 for beta chain variable domain of TCR clone 28453 (TRBV7-2, TRBJ2-4)
CASSLAEGGTQYF

SEQ ID NO: 56907 - protein, 14 aa, Homo sapiens
  CDR3 for alpha chain variable domain of TCR clone 28454 (TRAV9-2, TRAJ39)
CALYIYNAGNMLTF

SEQ ID NO: 56908 - protein, 15 aa, Homo sapiens
  CDR3 for beta chain variable domain of TCR clone 28454 (TRBV28, TRBJ2-3)
CASSPDRRGANTQYF

SEQ ID NO: 56909 - protein, 12 aa, Homo sapiens
  CDR3 for alpha chain variable domain of TCR clone 28455 (TRAV13-2, TRAJ23)
CAERLRGGKLIF

SEQ ID NO: 56910 - protein, 16 aa, Homo sapiens
  CDR3 for beta chain variable domain of TCR clone 28455 (TRBV20-1, TRBJ1-4)
CSAPGQGLLTNEKLFF

SEQ ID NO: 56911 - protein, 12 aa, Homo sapiens
  CDR3 for alpha chain variable domain of TCR clone 28456 (TRAV17, TRAJ20)
CATDSNDYKLSF

SEQ ID NO: 56912 - protein, 15 aa, Homo sapiens
  CDR3 for beta chain variable domain of TCR clone 28456 (TRBV19, TRBJ2-1)
CASSINREPSHEQFF

SEQ ID NO: 56913 - protein, 12 aa, Homo sapiens
  CDR3 for alpha chain variable domain of TCR clone 28457 (TRAV25, TRAJ20)
CAGRSNDHKLSF

SEQ ID NO: 56914 - protein, 15 aa, Homo sapiens
  CDR3 for beta chain variable domain of TCR clone 28457 (TRBV7-6, TRBJ2-7)
CASSGRRDTFGEQYF

SEQ ID NO: 56915 - protein, 15 aa, Homo sapiens
  CDR3 for alpha chain variable domain of TCR clone 28458 (TRAV17, TRAJ56)
CATEPSTGANSKLTF

SEQ ID NO: 56916 - protein, 15 aa, Homo sapiens
  CDR3 for beta chain variable domain of TCR clone 28458 (TRBV28, TRBJ1-5)
CASSRTGGYVQPQHF

SEQ ID NO: 56917 - protein, 16 aa, Homo sapiens
  CDR3 for alpha chain variable domain of TCR clone 28459 (TRAV22, TRAJ45)
CAVERGKRGGADGLTL

SEQ ID NO: 56918 - protein, 13 aa, Homo sapiens
  CDR3 for beta chain variable domain of TCR clone 28459 (TRBV27, TRBJ1-1)
CASSLSIGAEAFF

SEQ ID NO: 56919 - protein, 14 aa, Homo sapiens
  CDR3 for alpha chain variable domain of TCR clone 28460 (TRAV12-2, TRAJ17)
CAALFKAAGTKLTF

SEQ ID NO: 56920 - protein, 16 aa, Homo sapiens
  CDR3 for beta chain variable domain of TCR clone 28460 (TRBV20-1, TRBJ2-2)
CSASASGIPGAGELFF

SEQ ID NO: 56921 - protein, 13 aa, Homo sapiens
  CDR3 for alpha chain variable domain of TCR clone 28461 (TRAV30, TRAJ24)
CGTVTDSWGKLQV

SEQ ID NO: 56922 - protein, 14 aa, Homo sapiens
  CDR3 for beta chain variable domain of TCR clone 28461 (TRBV6-3, TRBJ2-2)
CASTYTPDTGELFF

SEQ ID NO: 56923 - protein, 13 aa, Homo sapiens
  CDR3 for alpha chain variable domain of TCR clone 28462 (TRAV3, TRAJ27)
CAVRPLGAGKSTF

SEQ ID NO: 56924 - protein, 13 aa, Homo sapiens
  CDR3 for beta chain variable domain of TCR clone 28462 (TRBV7-9, TRBJ2-3)
CASSPGSTDTQHF

SEQ ID NO: 56925 - protein, 12 aa, Homo sapiens
  CDR3 for alpha chain variable domain of TCR clone 28463 (TRAV21, TRAJ31)
CAVWGKNARLMF

SEQ ID NO: 56926 - protein, 16 aa, Homo sapiens
  CDR3 for beta chain variable domain of TCR clone 28463 (TRBV27, TRBJ2-5)
CASSYGPGGQKETQYF

SEQ ID NO: 56927 - protein, 14 aa, Homo sapiens
  CDR3 for alpha chain variable domain of TCR clone 28464 (TRAV12-2, TRAJ53)
CAVKGGGSNYKLTF

SEQ ID NO: 56928 - protein, 14 aa, Homo sapiens
  CDR3 for beta chain variable domain of TCR clone 28464 (TRBV25-1, TRBJ1-1)
CASTHLGGNTEAFF

SEQ ID NO: 56929 - protein, 20 aa, Homo sapiens
  CDR3 for alpha chain variable domain of TCR clone 28465 (TRAV12-1, TRAJ42)
SSVIQPPTSVKGGSQGSLIF

SEQ ID NO: 56930 - protein, 18 aa, Homo sapiens
  CDR3 for beta chain variable domain of TCR clone 28465 (TRBV11-2, TRBJ2-3)
CASSLGGASRGAPNTQYF

SEQ ID NO: 56931 - protein, 14 aa, Homo sapiens
  CDR3 for alpha chain variable domain of TCR clone 28466 (TRAV26-1, TRAJ45)
CIEVTGGGADGLTF

SEQ ID NO: 56932 - protein, 13 aa, Homo sapiens
  CDR3 for beta chain variable domain of TCR clone 28466 (TRBV7-6, TRBJ1-2)
CASSLVADHGYTF

SEQ ID NO: 56933 - protein, 15 aa, Homo sapiens
  CDR3 for alpha chain variable domain of TCR clone 28467 (TRAV12-3, TRAJ27)
CAMRAYNTNAVKSTF

SEQ ID NO: 56934 - protein, 13 aa, Homo sapiens
  CDR3 for beta chain variable domain of TCR clone 28467 (TRBV11-2, TRBJ2-5)
CASSRGPSETQYF

SEQ ID NO: 56935 - protein, 11 aa, Homo sapiens
  CDR3 for alpha chain variable domain of TCR clone 28468 (TRAV1-1, TRAJ23)
CAVRQGGKLIF

SEQ ID NO: 56936 - protein, 19 aa, Homo sapiens
  CDR3 for beta chain variable domain of TCR clone 28468 (TRBV25-1, TRBJ2-2)
CAILVYRVDRGRKTGELFF

SEQ ID NO: 56937 - protein, 14 aa, Homo sapiens
  CDR3 for alpha chain variable domain of TCR clone 28469 (TRAV12-2, TRAJ5)
CSVNRSTGRRALTF

SEQ ID NO: 56938 - protein, 12 aa, Homo sapiens
  CDR3 for beta chain variable domain of TCR clone 28469 (TRBV19, TRBJ1-5)
CASSIAQQPQHF

SEQ ID NO: 56939 - protein, 12 aa, Homo sapiens
  CDR3 for alpha chain variable domain of TCR clone 28470 (TRAV12-3, TRAJ17)
CAMTLTGNKLTF

SEQ ID NO: 56940 - protein, 14 aa, Homo sapiens
  CDR3 for beta chain variable domain of TCR clone 28470 (TRBV2, TRBJ2-3)
CASSEGQNTDTQYF

SEQ ID NO: 56941 - protein, 16 aa, Homo sapiens
  CDR3 for alpha chain variable domain of TCR clone 28471 (TRAV21, TRAJ37)
CAVRTAGSSNTGKLIF

SEQ ID NO: 56942 - protein, 13 aa, Homo sapiens
  CDR3 for beta chain variable domain of TCR clone 28471 (TRBV7-9, TRBJ2-5)
CVSLPSGRETQYF

SEQ ID NO: 56943 - protein, 15 aa, Homo sapiens
  CDR3 for alpha chain variable domain of TCR clone 28472 (TRAV8-2, TRAJ16)
CVVSDGFSDGQKLLF

SEQ ID NO: 56944 - protein, 13 aa, Homo sapiens
  CDR3 for beta chain variable domain of TCR clone 28472 (TRBV7-3, TRBJ1-1)
CQQLGTGYTEAFF

SEQ ID NO: 56945 - protein, 12 aa, Homo sapiens
  CDR3 for alpha chain variable domain of TCR clone 28473 (TRAV13-1, TRAJ36)
WRGGAGADNLFF

SEQ ID NO: 56946 - protein, 16 aa, Homo sapiens
  CDR3 for beta chain variable domain of TCR clone 28473 (TRBV7-9, TRBJ2-5)
CASRLEIGTRKETQYF

SEQ ID NO: 56947 - protein, 14 aa, Homo sapiens
  CDR3 for alpha chain variable domain of TCR clone 28474 (TRAV1-2, TRAJ16)
CAVNRFSDGQKLLF

SEQ ID NO: 56948 - protein, 14 aa, Homo sapiens
  CDR3 for beta chain variable domain of TCR clone 28474 (TRBV11-2, TRBJ1-2)
CASSLGTANYGYTF

SEQ ID NO: 56949 - protein, 15 aa, Homo sapiens
  CDR3 for alpha chain variable domain of TCR clone 28475 (TRAV26-1, TRAJ28)
CIVRVAGAGSYQLTF

SEQ ID NO: 56950 - protein, 19 aa, Homo sapiens
  CDR3 for beta chain variable domain of TCR clone 28475 (TRBV7-3, TRBJ2-7)
CASSLTGVAGGWPSYERYF

SEQ ID NO: 56951 - protein, 14 aa, Homo sapiens
  CDR3 for alpha chain variable domain of TCR clone 28476 (TRAV17, TRAJ53)
CATDAGGSNYKLTL

SEQ ID NO: 56952 - protein, 16 aa, Homo sapiens
  CDR3 for beta chain variable domain of TCR clone 28476 (TRBV4-1, TRBJ1-1)
CASSQDAGMGNTEAFF

SEQ ID NO: 56953 - protein, 14 aa, Homo sapiens
  CDR3 for alpha chain variable domain of TCR clone 28477 (TRAV8-3, TRAJ4)
CAVGAAGGYNKLIF

SEQ ID NO: 56954 - protein, 13 aa, Homo sapiens
  CDR3 for beta chain variable domain of TCR clone 28477 (TRBV7-3, TRBJ1-1)
CASSQDWGAEAFF

SEQ ID NO: 56955 - protein, 12 aa, Homo sapiens
  CDR3 for alpha chain variable domain of TCR clone 28478 (TRAV26-2, TRAJ21)
CILKGNFNKFYF

SEQ ID NO: 56956 - protein, 14 aa, Homo sapiens
  CDR3 for beta chain variable domain of TCR clone 28478 (TRBV7-9, TRBJ1-1)
CASAPLQSYTEAFF

SEQ ID NO: 56957 - protein, 14 aa, Homo sapiens
  CDR3 for alpha chain variable domain of TCR clone 28479 (TRAV17, TRAJ57)
CATDPQGGSEKLVF

SEQ ID NO: 56958 - protein, 16 aa, Homo sapiens
  CDR3 for beta chain variable domain of TCR clone 28479 (TRBV20-1, TRBJ1-4)
CSAPGQGLLTDEKLFF

SEQ ID NO: 56959 - protein, 13 aa, Homo sapiens
  CDR3 for alpha chain variable domain of TCR clone 28480 (TRAV12-3, TRAJ13)
CAMSSGGYQKVTF

SEQ ID NO: 56960 - protein, 14 aa, Homo sapiens
  CDR3 for beta chain variable domain of TCR clone 28480 (TRBV7-2, TRBJ2-7)
CASRSQGAAYEQYF

SEQ ID NO: 56961 - protein, 13 aa, Homo sapiens
  CDR3 for alpha chain variable domain of TCR clone 28481 (TRAV12-2, TRAJ47)
CAVFMEYGNKLAF

SEQ ID NO: 56962 - protein, 14 aa, Homo sapiens
  CDR3 for beta chain variable domain of TCR clone 28481 (TRBV4-1, TRBJ1-5)
CASSQGPTNQPQHF

SEQ ID NO: 56963 - protein, 11 aa, Homo sapiens
  CDR3 for alpha chain variable domain of TCR clone 28482 (TRAV1-2, TRAJ31)
CAVNNNARLMF

SEQ ID NO: 56964 - protein, 15 aa, Homo sapiens
  CDR3 for beta chain variable domain of TCR clone 28482 (TRBV28, TRBJ2-1)
CSSSIIAGGRSEQFF

SEQ ID NO: 56965 - protein, 11 aa, Homo sapiens
  CDR3 for alpha chain variable domain of TCR clone 28483 (TRAV3, TRAJ21)
CAVGQLQQILL

SEQ ID NO: 56966 - protein, 16 aa, Homo sapiens
  CDR3 for beta chain variable domain of TCR clone 28483 (TRBV19, TRBJ2-1)
CASSKAGPSSYNEQFF

SEQ ID NO: 56967 - protein, 14 aa, Homo sapiens
  CDR3 for alpha chain variable domain of TCR clone 28484 (TRAV12-1, TRAJ17)
RVVNYKAAGNKLTF

SEQ ID NO: 56968 - protein, 16 aa, Homo sapiens
  CDR3 for beta chain variable domain of TCR clone 28484 (TRBV12-4, TRBJ1-5)
CASSRPVGGSNQPQHF

SEQ ID NO: 56969 - protein, 15 aa, Homo sapiens
  CDR3 for alpha chain variable domain of TCR clone 28485 (TRAV12-2, TRAJ53)
CAVNGGGGSNYKLTF

SEQ ID NO: 56970 - protein, 17 aa, Homo sapiens
  CDR3 for beta chain variable domain of TCR clone 28485 (TRBV7-3, TRBJ2-3)
CASSLMNRMRGADTQYF

SEQ ID NO: 56971 - protein, 13 aa, Homo sapiens
  CDR3 for alpha chain variable domain of TCR clone 28486 (TRAV35, TRAJ48)
GRSRVFGNEKLTL

SEQ ID NO: 56972 - protein, 14 aa, Homo sapiens
  CDR3 for beta chain variable domain of TCR clone 28486 (TRBV20-1, TRBJ2-5)
CSALVPGYQETQYF

SEQ ID NO: 56973 - protein, 13 aa, Homo sapiens
  CDR3 for alpha chain variable domain of TCR clone 28487 (TRAV23/DV6, TRAJ20)
CAAGGLHDYKLSF

SEQ ID NO: 56974 - protein, 14 aa, Homo sapiens
  CDR3 for beta chain variable domain of TCR clone 28487 (TRBV3-1, TRBJ2-7)
CASSQSGAHYEQYF

SEQ ID NO: 56975 - protein, 14 aa, Homo sapiens
  CDR3 for alpha chain variable domain of TCR clone 28488 (TRAV13-1, TRAJ35)
CSASKGGFGNVLHF

SEQ ID NO: 56976 - protein, 13 aa, Homo sapiens
  CDR3 for beta chain variable domain of TCR clone 28488 (TRBV7-3, TRBJ1-1)
CASSQDWGAEAFF

SEQ ID NO: 56977 - protein, 15 aa, Homo sapiens
  CDR3 for alpha chain variable domain of TCR clone 28489 (TRAV14/DV4, TRAJ33)
CAMREGRDSNYQLIW

SEQ ID NO: 56978 - protein, 15 aa, Homo sapiens
  CDR3 for beta chain variable domain of TCR clone 28489 (TRBV5-5, TRBJ1-5)
CASSSTPGSSQPQHF

SEQ ID NO: 56979 - protein, 13 aa, Homo sapiens
  CDR3 for alpha chain variable domain of TCR clone 28490 (TRAV27, TRAJ45)
CRSSGGGADGLTF

SEQ ID NO: 56980 - protein, 17 aa, Homo sapiens
  CDR3 for beta chain variable domain of TCR clone 28490 (TRBV11-2, TRBJ2-1)
CASSLYPPGVEYIEQFF

SEQ ID NO: 56981 - protein, 13 aa, Homo sapiens
  CDR3 for alpha chain variable domain of TCR clone 28491 (TRAV16, TRAJ10)
FALLTGGGNKLTF

SEQ ID NO: 56982 - protein, 12 aa, Homo sapiens
  CDR3 for beta chain variable domain of TCR clone 28491 (TRBV28, TRBJ2-7)
CASTGNHYEQYF

SEQ ID NO: 56983 - protein, 13 aa, Homo sapiens
  CDR3 for alpha chain variable domain of TCR clone 28492 (TRAV27, TRAJ53)
CAGQGGSNDKLTF

SEQ ID NO: 56984 - protein, 13 aa, Homo sapiens
  CDR3 for beta chain variable domain of TCR clone 28492 (TRBV29-1, TRBJ1-1)
CSVESGFGTEAFF

SEQ ID NO: 56985 - protein, 14 aa, Homo sapiens
  CDR3 for alpha chain variable domain of TCR clone 28493 (TRAV39, TRAJ42)
CAVSYGGSQGNLIF

SEQ ID NO: 56986 - protein, 15 aa, Homo sapiens
  CDR3 for beta chain variable domain of TCR clone 28493 (TRBV5-1, TRBJ2-3)
CASSVTSGSTDTQYF

SEQ ID NO: 56987 - protein, 12 aa, Homo sapiens
  CDR3 for alpha chain variable domain of TCR clone 28494 (TRAV16, TRAJ57)
CALEGGSEKMVF

SEQ ID NO: 56988 - protein, 12 aa, Homo sapiens
  CDR3 for beta chain variable domain of TCR clone 28494 (TRBV28, TRBJ2-7)
CASSGRPYEQYF

SEQ ID NO: 56989 - protein, 14 aa, Homo sapiens
  CDR3 for alpha chain variable domain of TCR clone 28495 (TRAV3, TRAJ28)
CAVRRGAGRYQLTF

SEQ ID NO: 56990 - protein, 16 aa, Homo sapiens
  CDR3 for beta chain variable domain of TCR clone 28495 (TRBV4-1, TRBJ2-7)
CASSQEWTSGPLEQYF

SEQ ID NO: 56991 - protein, 13 aa, Homo sapiens
  CDR3 for alpha chain variable domain of TCR clone 28496 (TRAV8-6, TRAJ9)
CAVWDTGGFRTIF

SEQ ID NO: 56992 - protein, 14 aa, Homo sapiens
  CDR3 for beta chain variable domain of TCR clone 28496 (TRBV2, TRBJ2-1)
CASSEALIYNEQFF

SEQ ID NO: 56993 - protein, 16 aa, Homo sapiens
  CDR3 for alpha chain variable domain of TCR clone 28497 (TRAV3, TRAJ37)
CAVRPHGSGNTGKLIF

SEQ ID NO: 56994 - protein, 13 aa, Homo sapiens
  CDR3 for beta chain variable domain of TCR clone 28497 (TRBV7-9, TRBJ1-2)
CASSLKQNYGYTF

SEQ ID NO: 56995 - protein, 15 aa, Homo sapiens
  CDR3 for alpha chain variable domain of TCR clone 28498 (TRAV3, TRAJ5)
CAVRDLDTGRRALTF

SEQ ID NO: 56996 - protein, 13 aa, Homo sapiens
  CDR3 for beta chain variable domain of TCR clone 28498 (TRBV12-4, TRBJ2-7)
CASSPTETSEQYF

SEQ ID NO: 56997 - protein, 13 aa, Homo sapiens
  CDR3 for alpha chain variable domain of TCR clone 28499 (TRAV12-1, TRAJ17)
CVVNKAAGNKLTF

SEQ ID NO: 56998 - protein, 16 aa, Homo sapiens
  CDR3 for beta chain variable domain of TCR clone 28499 (TRBV11-2, TRBJ2-2)
CASSIRTGNLIGELFF

SEQ ID NO: 56999 - protein, 14 aa, Homo sapiens
  CDR3 for alpha chain variable domain of TCR clone 28500 (TRAV12-2, TRAJ13)
CAVKKTGGYQKVTF

SEQ ID NO: 57000 - protein, 14 aa, Homo sapiens
  CDR3 for beta chain variable domain of TCR clone 28500 (TRBV7-2, TRBJ2-2)
CASRGQGAAGELFF

SEQ ID NO: 57001 - protein, 11 aa, Homo sapiens
  CDR3 for alpha chain variable domain of TCR clone 28501 (TRAV21, TRAJ48)
CAVDGNEKLTF

SEQ ID NO: 57002 - protein, 16 aa, Homo sapiens
  CDR3 for beta chain variable domain of TCR clone 28501 (TRBV12-4, TRBJ1-5)
CASSSGPRGSNQPQHS

SEQ ID NO: 57003 - protein, 17 aa, Homo sapiens
  CDR3 for alpha chain variable domain of TCR clone 28502 (TRAV13-1, TRAJ52)
CAASSGAGGTSYGKQTF

SEQ ID NO: 57004 - protein, 15 aa, Homo sapiens
  CDR3 for beta chain variable domain of TCR clone 28502 (TRBV2, TRBJ2-1)
CASSELAGSYNEQFF

SEQ ID NO: 57005 - protein, 10 aa, Homo sapiens
  CDR3 for alpha chain variable domain of TCR clone 28503 (TRAV26-1, TRAJ48)
SNFGNEKLTF

SEQ ID NO: 57006 - protein, 14 aa, Homo sapiens
  CDR3 for beta chain variable domain of TCR clone 28503 (TRBV13, TRBJ2-7)
CASSLKGASYEQYF

SEQ ID NO: 57007 - protein, 12 aa, Homo sapiens
  CDR3 for alpha chain variable domain of TCR clone 28504 (TRAV12-3, TRAJ21)
CAMFNNFSKFYF

SEQ ID NO: 57008 - protein, 14 aa, Homo sapiens
  CDR3 for beta chain variable domain of TCR clone 28504 (TRBV28, TRBJ2-1)
CASSIQGTVGEQFF

SEQ ID NO: 57009 - protein, 17 aa, Homo sapiens
  CDR3 for alpha chain variable domain of TCR clone 28505 (TRAV3, TRAJ6)
CAVRDGPRAGGSYIPTF

SEQ ID NO: 57010 - protein, 14 aa, Homo sapiens
  CDR3 for beta chain variable domain of TCR clone 28505 (TRBV19, TRBJ2-1)
CASPTFVLSGEQLF

SEQ ID NO: 57011 - protein, 12 aa, Homo sapiens
  CDR3 for alpha chain variable domain of TCR clone 28506 (TRAV4, TRAJ5)
RTMDTGRRALTF

SEQ ID NO: 57012 - protein, 17 aa, Homo sapiens
  CDR3 for beta chain variable domain of TCR clone 28506 (TRBV11-2, TRBJ2-1)
CASSLYPPGVEYNEQFF

SEQ ID NO: 57013 - protein, 15 aa, Homo sapiens
  CDR3 for alpha chain variable domain of TCR clone 28507 (TRAV20, TRAJ50)
CAVRQMKTSYDKVIF

SEQ ID NO: 57014 - protein, 19 aa, Homo sapiens
  CDR3 for beta chain variable domain of TCR clone 28507 (TRBV28, TRBJ2-7)
CASSPFTGLAGYTSSTSGR

SEQ ID NO: 57015 - protein, 12 aa, Homo sapiens
  CDR3 for alpha chain variable domain of TCR clone 28508 (TRAV12-3, TRAJ3)
CAIDSSASKIIF

SEQ ID NO: 57016 - protein, 13 aa, Homo sapiens
  CDR3 for beta chain variable domain of TCR clone 28508 (TRBV7-9, TRBJ1-2)
CASSLKQNYGYTF

SEQ ID NO: 57017 - protein, 12 aa, Homo sapiens
  CDR3 for alpha chain variable domain of TCR clone 28509 (TRAV12-3, TRAJ20)
CAMVRGDYKLSF

SEQ ID NO: 57018 - protein, 14 aa, Homo sapiens
  CDR3 for beta chain variable domain of TCR clone 28509 (TRBV5-5, TRBJ1-5)
CDSSGQGVDQPQHF

SEQ ID NO: 57019 - protein, 15 aa, Homo sapiens
  CDR3 for alpha chain variable domain of TCR clone 28510 (TRAV20, TRAJ6)
CAVRLQSGGSYIPTF

SEQ ID NO: 57020 - protein, 14 aa, Homo sapiens
  CDR3 for beta chain variable domain of TCR clone 28510 (TRBV12-4, TRBJ2-7)
CASSAAGGWYEQYF

SEQ ID NO: 57021 - protein, 16 aa, Homo sapiens
  CDR3 for alpha chain variable domain of TCR clone 28511 (TRAV3, TRAJ10)
CAVRDMRAGGGNKLTF

SEQ ID NO: 57022 - protein, 14 aa, Homo sapiens
  CDR3 for beta chain variable domain of TCR clone 28511 (TRBV7-2, TRBJ2-7)
CASSLKTSFYEQYF

SEQ ID NO: 57023 - protein, 16 aa, Homo sapiens
  CDR3 for alpha chain variable domain of TCR clone 28512 (TRAV23/DV6, TRAJ9)
CAASIGGNTVGFKTIF

SEQ ID NO: 57024 - protein, 14 aa, Homo sapiens
  CDR3 for beta chain variable domain of TCR clone 28512 (TRBV9, TRBJ2-7)
CASSVGVGSYEQYF

SEQ ID NO: 57025 - protein, 12 aa, Homo sapiens
  CDR3 for alpha chain variable domain of TCR clone 28513 (TRAV12-1, TRAJ31)
CVSWNNNARLMF

SEQ ID NO: 57026 - protein, 15 aa, Homo sapiens
  CDR3 for beta chain variable domain of TCR clone 28513 (TRBV7-2, TRBJ1-5)
CASSLDRGQDQPQHF

SEQ ID NO: 57027 - protein, 12 aa, Homo sapiens
  CDR3 for alpha chain variable domain of TCR clone 28514 (TRAV16, TRAJ22)
CALGVSARQLTF

SEQ ID NO: 57028 - protein, 14 aa, Homo sapiens
  CDR3 for beta chain variable domain of TCR clone 28514 (TRBV11-2, TRBJ2-3)
CASSSIASTDTQYF

SEQ ID NO: 57029 - protein, 15 aa, Homo sapiens
  CDR3 for alpha chain variable domain of TCR clone 28515 (TRAV26-1, TRAJ29)
CIVRVEGSGNTPLVF

SEQ ID NO: 57030 - protein, 14 aa, Homo sapiens
  CDR3 for beta chain variable domain of TCR clone 28515 (TRBV18, TRBJ2-5)
CASSPGVSQESQYF

SEQ ID NO: 57031 - protein, 17 aa, Homo sapiens
  CDR3 for alpha chain variable domain of TCR clone 28516 (TRAV9-2, TRAJ45)
CALSGYYSGGGADGLTF

SEQ ID NO: 57032 - protein, 16 aa, Homo sapiens
  CDR3 for beta chain variable domain of TCR clone 28516 (TRBV5-7, TRBJ2-7)
PAANEGGGRGSYEQYF

SEQ ID NO: 57033 - protein, 15 aa, Homo sapiens
  CDR3 for alpha chain variable domain of TCR clone 28517 (TRAV2, TRAJ28)
CAVPYSGAGSYQLTF

SEQ ID NO: 57034 - protein, 17 aa, Homo sapiens
  CDR3 for beta chain variable domain of TCR clone 28517 (TRBV20-1, TRBJ2-4)
CGARDWASGGRENIQYF

SEQ ID NO: 57035 - protein, 14 aa, Homo sapiens
  CDR3 for alpha chain variable domain of TCR clone 28518 (TRAV29/DV5, TRAJ49)
CAASLSNTGNQFYF

SEQ ID NO: 57036 - protein, 13 aa, Homo sapiens
  CDR3 for beta chain variable domain of TCR clone 28518 (TRBV19, TRBJ1-2)
CASSQGQVYGYTF

SEQ ID NO: 57037 - protein, 15 aa, Homo sapiens
  CDR3 for alpha chain variable domain of TCR clone 28519 (TRAV8-3, TRAJ10)
CAVSDQAGGGNKLTF

SEQ ID NO: 57038 - protein, 13 aa, Homo sapiens
  CDR3 for beta chain variable domain of TCR clone 28519 (TRBV10-2, TRBJ2-3)
CASSESGDHTQYF

SEQ ID NO: 57039 - protein, 14 aa, Homo sapiens
  CDR3 for alpha chain variable domain of TCR clone 28520 (TRAV17, TRAJ6)
FATDERRGSYIPTF

SEQ ID NO: 57040 - protein, 13 aa, Homo sapiens
  CDR3 for beta chain variable domain of TCR clone 28520 (TRBV27, TRBJ2-1)
CASSLGRIWGQFF

SEQ ID NO: 57041 - protein, 18 aa, Homo sapiens
  CDR3 for alpha chain variable domain of TCR clone 28521 (TRAV21, TRAJ52)
CAVRPSPAGGTSHGKLTF

SEQ ID NO: 57042 - protein, 13 aa, Homo sapiens
  CDR3 for beta chain variable domain of TCR clone 28521 (TRBV7-3, TRBJ1-1)
CASSQDWGAEAFF

SEQ ID NO: 57043 - protein, 11 aa, Homo sapiens
  CDR3 for alpha chain variable domain of TCR clone 28522 (TRAV3, TRAJ21)
CAVGNFNKFYF

SEQ ID NO: 57044 - protein, 15 aa, Homo sapiens
  CDR3 for beta chain variable domain of TCR clone 28522 (TRBV7-3, TRBJ2-2)
CASSETGQGTGELFF

SEQ ID NO: 57045 - protein, 11 aa, Homo sapiens
  CDR3 for alpha chain variable domain of TCR clone 28523 (TRAV3, TRAJ21)
CAVGNFNKFYF

SEQ ID NO: 57046 - protein, 19 aa, Homo sapiens
  CDR3 for beta chain variable domain of TCR clone 28523 (TRBV25-1, TRBJ2-2)
CAILVYRVDRGRKTGELFF

SEQ ID NO: 57047 - protein, 13 aa, Homo sapiens
  CDR3 for alpha chain variable domain of TCR clone 28524 (TRAV21, TRAJ27)
CAARPGNAGKSTF

SEQ ID NO: 57048 - protein, 14 aa, Homo sapiens
  CDR3 for beta chain variable domain of TCR clone 28524 (TRBV7-6, TRBJ2-3)
CASSLGTVTDRQYF

SEQ ID NO: 57049 - protein, 12 aa, Homo sapiens
  CDR3 for alpha chain variable domain of TCR clone 28525 (TRAV2, TRAJ37)
CAVTMNTGKLIF

SEQ ID NO: 57050 - protein, 15 aa, Homo sapiens
  CDR3 for beta chain variable domain of TCR clone 28525 (TRBV5-1, TRBJ2-5)
CASSFGGPPQEAQYF

SEQ ID NO: 57051 - protein, 12 aa, Homo sapiens
  CDR3 for alpha chain variable domain of TCR clone 28526 (TRAV1-2, TRAJ33)
CAALDSNYQLIW

SEQ ID NO: 57052 - protein, 14 aa, Homo sapiens
  CDR3 for beta chain variable domain of TCR clone 28526 (TRBV6-1, TRBJ1-3)
CASVQGGGGNTIYF

SEQ ID NO: 57053 - protein, 12 aa, Homo sapiens
  CDR3 for alpha chain variable domain of TCR clone 28527 (TRAV23/DV6, TRAJ16)
CAATGTGQRLLF

SEQ ID NO: 57054 - protein, 20 aa, Homo sapiens
  CDR3 for beta chain variable domain of TCR clone 28527 (TRBV6-7, TRBJ1-2)
CASSYSAGQGNPLRVYGYTF

SEQ ID NO: 57055 - protein, 16 aa, Homo sapiens
  CDR3 for alpha chain variable domain of TCR clone 28528 (TRAV12-1, TRAJ48)
CVVSMRDNFGNEKLTF

SEQ ID NO: 57056 - protein, 16 aa, Homo sapiens
  CDR3 for beta chain variable domain of TCR clone 28528 (TRBV7-6, TRBJ2-1)
CASSSVVAGTYNEQFF

SEQ ID NO: 57057 - protein, 17 aa, Homo sapiens
  CDR3 for alpha chain variable domain of TCR clone 28529 (TRAV8-6, TRAJ58)
CAVSSWVGETSGSRLTF

SEQ ID NO: 57058 - protein, 15 aa, Homo sapiens
  CDR3 for beta chain variable domain of TCR clone 28529 (TRBV11-3, TRBJ2-3)
CASLKDGREGDTQYF

SEQ ID NO: 57059 - protein, 14 aa, Homo sapiens
  CDR3 for alpha chain variable domain of TCR clone 28530 (TRAV17, TRAJ16)
CATADFSDGQKLLL

SEQ ID NO: 57060 - protein, 15 aa, Homo sapiens
  CDR3 for beta chain variable domain of TCR clone 28530 (TRBV18, TRBJ2-1)
CASSPPSASYNEQFF

SEQ ID NO: 57061 - protein, 14 aa, Homo sapiens
  CDR3 for alpha chain variable domain of TCR clone 28531 (TRAV1-2, TRAJ8)
CAVREDTGFQKLVF

SEQ ID NO: 57062 - protein, 15 aa, Homo sapiens
  CDR3 for beta chain variable domain of TCR clone 28531 (TRBV6-3, TRBJ2-7)
CASSSPGTVFYEQSF

SEQ ID NO: 57063 - protein, 15 aa, Homo sapiens
  CDR3 for alpha chain variable domain of TCR clone 28532 (TRAV26-1, TRAJ29)
SIVRVEGSGNTPLVF

SEQ ID NO: 57064 - protein, 14 aa, Homo sapiens
  CDR3 for beta chain variable domain of TCR clone 28532 (TRBV18, TRBJ2-5)
CASSPGVSQETQYF

SEQ ID NO: 57065 - protein, 13 aa, Homo sapiens
  CDR3 for alpha chain variable domain of TCR clone 28533 (TRAV17, TRAJ9)
CATDYTGGFKTIF

SEQ ID NO: 57066 - protein, 14 aa, Homo sapiens
  CDR3 for beta chain variable domain of TCR clone 28533 (TRBV12-5, TRBJ2-5)
CASGSRTHQETQYF

SEQ ID NO: 57067 - protein, 16 aa, Homo sapiens
  CDR3 for alpha chain variable domain of TCR clone 28534 (TRAV30, TRAJ24)
CGTEIVDADGWGKFQF

SEQ ID NO: 57068 - protein, 15 aa, Homo sapiens
  CDR3 for beta chain variable domain of TCR clone 28534 (TRBV7-9, TRBJ1-4)
CASSARTGGNEKLFF

SEQ ID NO: 57069 - protein, 14 aa, Homo sapiens
  CDR3 for alpha chain variable domain of TCR clone 28535 (TRAV13-1, TRAJ35)
CAASKGGFGNVLHC

SEQ ID NO: 57070 - protein, 13 aa, Homo sapiens
  CDR3 for beta chain variable domain of TCR clone 28535 (TRBV7-3, TRBJ1-1)
CASSQNWGAEAFF

SEQ ID NO: 57071 - protein, 13 aa, Homo sapiens
  CDR3 for alpha chain variable domain of TCR clone 28536 (TRAV22, TRAJ29)
CAVGGSGNAPLVF

SEQ ID NO: 57072 - protein, 13 aa, Homo sapiens
  CDR3 for beta chain variable domain of TCR clone 28536 (TRBV4-2, TRBJ1-1)
CASSQAGNTEAFF

SEQ ID NO: 57073 - protein, 14 aa, Homo sapiens
  CDR3 for alpha chain variable domain of TCR clone 28537 (TRAV21, TRAJ35)
CAVMPIGFGNVLNC

SEQ ID NO: 57074 - protein, 12 aa, Homo sapiens
  CDR3 for beta chain variable domain of TCR clone 28537 (TRBV7-9, TRBJ2-7)
CASSIKREEQYF

SEQ ID NO: 57075 - protein, 12 aa, Homo sapiens
  CDR3 for alpha chain variable domain of TCR clone 28538 (TRAV13-1, TRAJ9)
CASHTGGFKTIF

SEQ ID NO: 57076 - protein, 13 aa, Homo sapiens
  CDR3 for beta chain variable domain of TCR clone 28538 (TRBV12-4, TRBJ1-2)
CASSSGSKDGYSF

SEQ ID NO: 57077 - protein, 14 aa, Homo sapiens
  CDR3 for alpha chain variable domain of TCR clone 28539 (TRAV12-1, TRAJ12)
CVVTRMDSSYKLIF

SEQ ID NO: 57078 - protein, 13 aa, Homo sapiens
  CDR3 for beta chain variable domain of TCR clone 28539 (TRBV20-1, TRBJ1-1)
CSARGGGNTEAFF

SEQ ID NO: 57079 - protein, 14 aa, Homo sapiens
  CDR3 for alpha chain variable domain of TCR clone 28540 (TRAV26-1, TRAJ38)
CIADNAGNNGKLIW

SEQ ID NO: 57080 - protein, 13 aa, Homo sapiens
  CDR3 for beta chain variable domain of TCR clone 28540 (TRBV20-1, TRBJ1-1)
CSARGGGNTEAFF

SEQ ID NO: 57081 - protein, 13 aa, Homo sapiens
  CDR3 for alpha chain variable domain of TCR clone 28541 (TRAV8-3, TRAJ48)
CDVVPFGNEKLTF

SEQ ID NO: 57082 - protein, 15 aa, Homo sapiens
  CDR3 for beta chain variable domain of TCR clone 28541 (TRBV11-2, TRBJ2-1)
CASSSPSTRYNEQFF

SEQ ID NO: 57083 - protein, 13 aa, Homo sapiens
  CDR3 for alpha chain variable domain of TCR clone 28542 (TRAV8-6, TRAJ49)
CAVITNTGNPFYF

SEQ ID NO: 57084 - protein, 14 aa, Homo sapiens
  CDR3 for beta chain variable domain of TCR clone 28542 (TRBV5-1, TRBJ2-7)
CASSRGESLYEQYF

SEQ ID NO: 57085 - protein, 16 aa, Homo sapiens
  CDR3 for alpha chain variable domain of TCR clone 28543 (TRAV30, TRAJ24)
CGTEIVDADSWGRFQF

SEQ ID NO: 57086 - protein, 14 aa, Homo sapiens
  CDR3 for beta chain variable domain of TCR clone 28543 (TRBV7-2, TRBJ2-7)
CASSPKTSFYEQYF

SEQ ID NO: 57087 - protein, 12 aa, Homo sapiens
  CDR3 for alpha chain variable domain of TCR clone 28544 (TRAV13-1, TRAJ15)
CAASQAGAALIF

SEQ ID NO: 57088 - protein, 14 aa, Homo sapiens
  CDR3 for beta chain variable domain of TCR clone 28544 (TRBV19, TRBJ2-2)
CASSTLHRSGELFF

SEQ ID NO: 57089 - protein, 13 aa, Homo sapiens
  CDR3 for alpha chain variable domain of TCR clone 28545 (TRAV3, TRAJ21)
CAVREPDFNKFYF

SEQ ID NO: 57090 - protein, 13 aa, Homo sapiens
  CDR3 for beta chain variable domain of TCR clone 28545 (TRBV9, TRBJ2-1)
CASGPSGGNEQFF

SEQ ID NO: 57091 - protein, 14 aa, Homo sapiens
  CDR3 for alpha chain variable domain of TCR clone 28546 (TRAV3, TRAJ35)
CAASKGGFGNVLHC

SEQ ID NO: 57092 - protein, 13 aa, Homo sapiens
  CDR3 for beta chain variable domain of TCR clone 28546 (TRBV7-3, TRBJ1-1)
CASSQDWGAEAFF

SEQ ID NO: 57093 - protein, 14 aa, Homo sapiens
  CDR3 for alpha chain variable domain of TCR clone 28547 (TRAV30, TRAJ33)
CGTVAPRSDYQLIW

SEQ ID NO: 57094 - protein, 16 aa, Homo sapiens
  CDR3 for beta chain variable domain of TCR clone 28547 (TRBV3-1, TRBJ2-5)
CASSPGQFNGFGTQYF

SEQ ID NO: 57095 - protein, 14 aa, Homo sapiens
  CDR3 for alpha chain variable domain of TCR clone 28548 (TRAV14/DV4, TRAJ26)
CAMREGTYGQNFVF

SEQ ID NO: 57096 - protein, 16 aa, Homo sapiens
  CDR3 for beta chain variable domain of TCR clone 28548 (TRBV7-8, TRBJ2-4)
CASSAERTLAKNIQYF

SEQ ID NO: 57097 - protein, 16 aa, Homo sapiens
  CDR3 for alpha chain variable domain of TCR clone 28549 (TRAV12-3, TRAJ53)
CAMSPGSGGSNYKLTF

SEQ ID NO: 57098 - protein, 11 aa, Homo sapiens
  CDR3 for beta chain variable domain of TCR clone 28549 (TRBV29-1, TRBJ2-5)
CSEARTGTQYF

SEQ ID NO: 57099 - protein, 13 aa, Homo sapiens
  CDR3 for alpha chain variable domain of TCR clone 28550 (TRAV13-1, TRAJ5)
CAAEHAGRRALTF

SEQ ID NO: 57100 - protein, 13 aa, Homo sapiens
  CDR3 for beta chain variable domain of TCR clone 28550 (TRBV3-1, TRBJ1-1)
CASSPGVITEAFF

SEQ ID NO: 57101 - protein, 15 aa, Homo sapiens
  CDR3 for alpha chain variable domain of TCR clone 28551 (TRAV25, TRAJ53)
CAATGGGGSNYKLTF

SEQ ID NO: 57102 - protein, 12 aa, Homo sapiens
  CDR3 for beta chain variable domain of TCR clone 28551 (TRBV11-2, TRBJ2-2)
CASSLGGGELFF

SEQ ID NO: 57103 - protein, 12 aa, Homo sapiens
  CDR3 for alpha chain variable domain of TCR clone 28552 (TRAV27, TRAJ9)
CAGESGGFKTIF

SEQ ID NO: 57104 - protein, 20 aa, Homo sapiens
  CDR3 for beta chain variable domain of TCR clone 28552 (TRBV7-8, TRBJ2-2)
CASSHLFPGPTIHITGELFF

SEQ ID NO: 57105 - protein, 12 aa, Homo sapiens
  CDR3 for alpha chain variable domain of TCR clone 28553 (TRAV13-1, TRAJ21)
CAAKEGFNKFYF

SEQ ID NO: 57106 - protein, 15 aa, Homo sapiens
  CDR3 for beta chain variable domain of TCR clone 28553 (TRBV15, TRBJ1-5)
CATSRDPASNQPQHF

SEQ ID NO: 57107 - protein, 11 aa, Homo sapiens
  CDR3 for alpha chain variable domain of TCR clone 28554 (TRAV12-2, TRAJ31)
CAVTRWARLMS

SEQ ID NO: 57108 - protein, 15 aa, Homo sapiens
  CDR3 for beta chain variable domain of TCR clone 28554 (TRBV19, TRBJ2-7)
CASSIGGGLVNEQYF

SEQ ID NO: 57109 - protein, 13 aa, Homo sapiens
  CDR3 for alpha chain variable domain of TCR clone 28555 (TRAV8-3, TRAJ43)
CAVGPDNNNDMRF

SEQ ID NO: 57110 - protein, 19 aa, Homo sapiens
  CDR3 for beta chain variable domain of TCR clone 28555 (TRBV7-2, TRBJ2-3)
CASSFLSRNWGGGADTQYF

SEQ ID NO: 57111 - protein, 13 aa, Homo sapiens
  CDR3 for alpha chain variable domain of TCR clone 28556 (TRAV22, TRAJ49)
CAVGMYTGNQFYF

SEQ ID NO: 57112 - protein, 15 aa, Homo sapiens
  CDR3 for beta chain variable domain of TCR clone 28556 (TRBV6-3, TRBJ2-7)
CASSSPGTVFYEQYF

SEQ ID NO: 57113 - protein, 14 aa, Homo sapiens
  CDR3 for alpha chain variable domain of TCR clone 28557 (TRAV38-1, TRAJ40)
CALRPTSGTYKYIF

SEQ ID NO: 57114 - protein, 13 aa, Homo sapiens
  CDR3 for beta chain variable domain of TCR clone 28557 (TRBV25-1, TRBJ1-1)
CQHHLGGNTEAFF

SEQ ID NO: 57115 - protein, 15 aa, Homo sapiens
  CDR3 for alpha chain variable domain of TCR clone 28558 (TRAV17, TRAJ22)
CATAPISGSARQLTF

SEQ ID NO: 57116 - protein, 15 aa, Homo sapiens
  CDR3 for beta chain variable domain of TCR clone 28558 (TRBV10-3, TRBJ2-3)
CAISVLGQETDTQYF

SEQ ID NO: 57117 - protein, 18 aa, Homo sapiens
  CDR3 for alpha chain variable domain of TCR clone 28559 (TRAV12-3, TRAJ52)
CAMSVGGAGGTSYGKLTF

SEQ ID NO: 57118 - protein, 14 aa, Homo sapiens
  CDR3 for beta chain variable domain of TCR clone 28559 (TRBV7-8, TRBJ2-3)
CASSLEAGTDTQYF

SEQ ID NO: 57119 - protein, 11 aa, Homo sapiens
  CDR3 for alpha chain variable domain of TCR clone 28560 (TRAV1-2, TRAJ31)
CAVNNNVRLMF

SEQ ID NO: 57120 - protein, 15 aa, Homo sapiens
  CDR3 for beta chain variable domain of TCR clone 28560 (TRBV28, TRBJ2-1)
CASSIIAGGRSEQFF

SEQ ID NO: 57121 - protein, 12 aa, Homo sapiens
  CDR3 for alpha chain variable domain of TCR clone 28561 (TRAV12-2, TRAJ10)
WGVTGGGNKLTF

SEQ ID NO: 57122 - protein, 16 aa, Homo sapiens
  CDR3 for beta chain variable domain of TCR clone 28561 (TRBV6-4, TRBJ1-2)
CASSEAVGDPNHGYTF

SEQ ID NO: 57123 - protein, 14 aa, Homo sapiens
  CDR3 for alpha chain variable domain of TCR clone 28562 (TRAV8-2, TRAJ4)
CVVSPSGGYNKLIF

SEQ ID NO: 57124 - protein, 15 aa, Homo sapiens
  CDR3 for beta chain variable domain of TCR clone 28562 (TRBV4-1, TRBJ1-4)
CASSGTGGTDEKLFF

SEQ ID NO: 57125 - protein, 23 aa, Homo sapiens
  CDR3 for alpha chain variable domain of TCR clone 28563 (TRAV26-1, TRAJ38)
CIADNAGNNHIQNLDPAVYQLRD

SEQ ID NO: 57126 - protein, 13 aa, Homo sapiens
  CDR3 for beta chain variable domain of TCR clone 28563 (TRBV20-1, TRBJ1-1)
CSARGGGNTEAFF

SEQ ID NO: 57127 - protein, 14 aa, Homo sapiens
  CDR3 for alpha chain variable domain of TCR clone 28564 (TRAV13-2, TRAJ9)
CAENSFTGGFETIF

SEQ ID NO: 57128 - protein, 13 aa, Homo sapiens
  CDR3 for beta chain variable domain of TCR clone 28564 (TRBV19, TRBJ2-7)
CASSIDRTYEQYF

SEQ ID NO: 57129 - protein, 16 aa, Homo sapiens
  CDR3 for alpha chain variable domain of TCR clone 28565 (TRAV3, TRAJ23)
CAVKIGIYNQGGKLIF

SEQ ID NO: 57130 - protein, 13 aa, Homo sapiens
  CDR3 for beta chain variable domain of TCR clone 28565 (TRBV7-9, TRBJ1-2)
CASSLKQNYGYTF

SEQ ID NO: 57131 - protein, 18 aa, Homo sapiens
  CDR3 for alpha chain variable domain of TCR clone 28566 (TRAV26-1, TRAJ23)
CIVRVGLEVWNQGGKLIF

SEQ ID NO: 57132 - protein, 16 aa, Homo sapiens
  CDR3 for beta chain variable domain of TCR clone 28566 (TRBV12-4, TRBJ2-5)
CASSFFVRGRQKTQYF

SEQ ID NO: 57133 - protein, 18 aa, Homo sapiens
  CDR3 for alpha chain variable domain of TCR clone 28567 (TRAV21, TRAJ52)
CTVRPSPAGGTSYGKLTF

SEQ ID NO: 57134 - protein, 17 aa, Homo sapiens
  CDR3 for beta chain variable domain of TCR clone 28567 (TRBV13, TRBJ2-3)
CASSLSRVAGGRNTQYF

SEQ ID NO: 57135 - protein, 15 aa, Homo sapiens
  CDR3 for alpha chain variable domain of TCR clone 28568 (TRAV8-3, TRAJ11)
CAVGLLNSGYSTLTF

SEQ ID NO: 57136 - protein, 12 aa, Homo sapiens
  CDR3 for beta chain variable domain of TCR clone 28568 (TRBV28, TRBJ2-3)
CASSLYRDTQYF

SEQ ID NO: 57137 - protein, 13 aa, Homo sapiens
  CDR3 for alpha chain variable domain of TCR clone 28569 (TRAV3, TRAJ21)
CAVSEPDFNKFYF

SEQ ID NO: 57138 - protein, 13 aa, Homo sapiens
  CDR3 for beta chain variable domain of TCR clone 28569 (TRBV9, TRBJ2-1)
CASSPSGGNEQFF

SEQ ID NO: 57139 - protein, 15 aa, Homo sapiens
  CDR3 for alpha chain variable domain of TCR clone 28570 (TRAV4, TRAJ39)
CIVGPNNNADNMLTF

SEQ ID NO: 57140 - protein, 16 aa, Homo sapiens
  CDR3 for beta chain variable domain of TCR clone 28570 (TRBV13, TRBJ2-2)
CASSPRTGEHTGELFF

SEQ ID NO: 57141 - protein, 14 aa, Homo sapiens
  CDR3 for alpha chain variable domain of TCR clone 28571 (TRAV1-2, TRAJ8)
CAVREDTGFQKLVF

SEQ ID NO: 57142 - protein, 13 aa, Homo sapiens
  CDR3 for beta chain variable domain of TCR clone 28571 (TRBV11-2, TRBJ1-3)
CASSLEPVNTIYF

SEQ ID NO: 57143 - protein, 13 aa, Homo sapiens
  CDR3 for alpha chain variable domain of TCR clone 28572 (TRAV20, TRAJ9)
CAVLDTGGFKTIF

SEQ ID NO: 57144 - protein, 15 aa, Homo sapiens
  CDR3 for beta chain variable domain of TCR clone 28572 (TRBV27, TRBJ2-7)
CASSKAGRGGYEQYF

SEQ ID NO: 57145 - protein, 15 aa, Homo sapiens
  CDR3 for alpha chain variable domain of TCR clone 28573 (TRAV17, TRAJ13)
CATDAGSGGYQKVTL

SEQ ID NO: 57146 - protein, 17 aa, Homo sapiens
  CDR3 for beta chain variable domain of TCR clone 28573 (TRBV11-2, TRBJ2-1)
CASSLYPPGVEYNEQFF

SEQ ID NO: 57147 - protein, 11 aa, Homo sapiens
  CDR3 for alpha chain variable domain of TCR clone 28574 (TRAV12-2, TRAJ31)
CAVTRWARLMF

SEQ ID NO: 57148 - protein, 15 aa, Homo sapiens
  CDR3 for beta chain variable domain of TCR clone 28574 (TRBV19, TRBJ2-7)
CASSVGGGLVNEQYF

SEQ ID NO: 57149 - protein, 14 aa, Homo sapiens
  CDR3 for alpha chain variable domain of TCR clone 28575 (TRAV12-3, TRAJ42)
CAMNYGGSRGNLIF

SEQ ID NO: 57150 - protein, 13 aa, Homo sapiens
  CDR3 for beta chain variable domain of TCR clone 28575 (TRBV20-1, TRBJ1-6)
CSAPLGVGSPLHF

SEQ ID NO: 57151 - protein, 13 aa, Homo sapiens
  CDR3 for alpha chain variable domain of TCR clone 28576 (TRAV23/DV6, TRAJ22)
CAPYSGSASQLTF

SEQ ID NO: 57152 - protein, 15 aa, Homo sapiens
  CDR3 for beta chain variable domain of TCR clone 28576 (TRBV11-2, TRBJ1-6)
CASSLDPWAVSPLHF

SEQ ID NO: 57153 - protein, 16 aa, Homo sapiens
  CDR3 for alpha chain variable domain of TCR clone 28577 (TRAV12-3, TRAJ53)
CAMSPGSGGSKYKLTF

SEQ ID NO: 57154 - protein, 16 aa, Homo sapiens
  CDR3 for beta chain variable domain of TCR clone 28577 (TRBV4-2, TRBJ1-1)
CASSQAGFGMNTEAFF

SEQ ID NO: 57155 - protein, 16 aa, Homo sapiens
  CDR3 for alpha chain variable domain of TCR clone 28578 (TRAV4, TRAJ22)
CLVGDLYSGTARQLTF

SEQ ID NO: 57156 - protein, 16 aa, Homo sapiens
  CDR3 for beta chain variable domain of TCR clone 28578 (TRBV7-9, TRBJ2-1)
CASSDVAGGSYNEQFF

SEQ ID NO: 57157 - protein, 14 aa, Homo sapiens
  CDR3 for alpha chain variable domain of TCR clone 28579 (TRAV1-2, TRAJ8)
CAVREDTGFQKLVF

SEQ ID NO: 57158 - protein, 15 aa, Homo sapiens
  CDR3 for beta chain variable domain of TCR clone 28579 (TRBV7-9, TRBJ1-1)
CASSLLEQGGTEAFF

SEQ ID NO: 57159 - protein, 12 aa, Homo sapiens
  CDR3 for alpha chain variable domain of TCR clone 28580 (TRAV3, TRAJ34)
CAVLGNTDKLIF

SEQ ID NO: 57160 - protein, 13 aa, Homo sapiens
  CDR3 for beta chain variable domain of TCR clone 28580 (TRBV19, TRBJ2-1)
RASSIGTGNEQFF

SEQ ID NO: 57161 - protein, 14 aa, Homo sapiens
  CDR3 for alpha chain variable domain of TCR clone 28581 (TRAV38-1, TRAJ45)
CAYYSGGGADGLTF

SEQ ID NO: 57162 - protein, 13 aa, Homo sapiens
  CDR3 for beta chain variable domain of TCR clone 28581 (TRBV10-3, TRBJ2-7)
CASKLAVNYEQYF

SEQ ID NO: 57163 - protein, 14 aa, Homo sapiens
  CDR3 for alpha chain variable domain of TCR clone 28582 (TRAV9-2, TRAJ39)
CALYIYNAGNMLTF

SEQ ID NO: 57164 - protein, 16 aa, Homo sapiens
  CDR3 for beta chain variable domain of TCR clone 28582 (TRBV5-1, TRBJ2-7)
CASSWGTGGRAWEQYF

SEQ ID NO: 57165 - protein, 15 aa, Homo sapiens
  CDR3 for alpha chain variable domain of TCR clone 28583 (TRAV38-1, TRAJ37)
CAFIHSSGNTGKLIF

SEQ ID NO: 57166 - protein, 12 aa, Homo sapiens
  CDR3 for beta chain variable domain of TCR clone 28583 (TRBV7-9, TRBJ2-7)
CASSFGSYEQYF

SEQ ID NO: 57167 - protein, 13 aa, Homo sapiens
  CDR3 for alpha chain variable domain of TCR clone 28584 (TRAV27, TRAJ11)
CAGARSGYSALTF

SEQ ID NO: 57168 - protein, 16 aa, Homo sapiens
  CDR3 for beta chain variable domain of TCR clone 28584 (TRBV10-2, TRBJ2-2)
CASSESRDRGSGELFF

SEQ ID NO: 57169 - protein, 11 aa, Homo sapiens
  CDR3 for alpha chain variable domain of TCR clone 28585 (TRAV13-1, TRAJ52)
PGGTSYGKLTF

SEQ ID NO: 57170 - protein, 16 aa, Homo sapiens
  CDR3 for beta chain variable domain of TCR clone 28585 (TRBV28, TRBJ2-7)
CASSPWVATGDLSQYL

SEQ ID NO: 57171 - protein, 12 aa, Homo sapiens
  CDR3 for alpha chain variable domain of TCR clone 28586 (TRAV26-1, TRAJ26)
CIVFIYGQNFVF

SEQ ID NO: 57172 - protein, 12 aa, Homo sapiens
  CDR3 for beta chain variable domain of TCR clone 28586 (TRBV28, TRBJ2-7)
CASSFSSYEQYF

SEQ ID NO: 57173 - protein, 14 aa, Homo sapiens
  CDR3 for alpha chain variable domain of TCR clone 28587 (TRAV12-3, TRAJ10)
SHLPLTGGGNKLTF

SEQ ID NO: 57174 - protein, 12 aa, Homo sapiens
  CDR3 for beta chain variable domain of TCR clone 28587 (TRBV6-6, TRBJ2-3)
RASSSRGDTQYF

SEQ ID NO: 57175 - protein, 14 aa, Homo sapiens
  CDR3 for alpha chain variable domain of TCR clone 28588 (TRAV12-2, TRAJ44)
CAVNPAGTASKLTF

SEQ ID NO: 57176 - protein, 12 aa, Homo sapiens
  CDR3 for beta chain variable domain of TCR clone 28588 (TRBV9, TRBJ2-2)
CASSLVTGELFF

SEQ ID NO: 57177 - protein, 13 aa, Homo sapiens
  CDR3 for alpha chain variable domain of TCR clone 28589 (TRAV13-1, TRAJ11)
CAASKEGYSTLTF

SEQ ID NO: 57178 - protein, 21 aa, Homo sapiens
  CDR3 for beta chain variable domain of TCR clone 28589 (TRBV23-1, TRBJ2-5)
CASTPTGQGPGGDPVLRARHA

SEQ ID NO: 57179 - protein, 13 aa, Homo sapiens
  CDR3 for alpha chain variable domain of TCR clone 28590 (TRAV27, TRAJ49)
CAPRPCTGNQFYF

SEQ ID NO: 57180 - protein, 16 aa, Homo sapiens
  CDR3 for beta chain variable domain of TCR clone 28590 (TRBV4-1, TRBJ1-2)
CASSQDAGQVLYGYTF

SEQ ID NO: 57181 - protein, 17 aa, Homo sapiens
  CDR3 for alpha chain variable domain of TCR clone 28591 (TRAV12-1, TRAJ8)
CVVNPKRVNTGFQRLVF

SEQ ID NO: 57182 - protein, 14 aa, Homo sapiens
  CDR3 for beta chain variable domain of TCR clone 28591 (TRBV3-1, TRBJ2-7)
CASSRTSGKEEQYF

SEQ ID NO: 57183 - protein, 13 aa, Homo sapiens
  CDR3 for alpha chain variable domain of TCR clone 28592 (TRAV21, TRAJ27)
CAALNTNAGKSTF

SEQ ID NO: 57184 - protein, 14 aa, Homo sapiens
  CDR3 for beta chain variable domain of TCR clone 28592 (TRBV11-1, TRBJ1-1)
CASSLLSGLSEAFF

SEQ ID NO: 57185 - protein, 13 aa, Homo sapiens
  CDR3 for alpha chain variable domain of TCR clone 28593 (TRAV14/DV4, TRAJ20)
CAMRESNDYKLSF

SEQ ID NO: 57186 - protein, 14 aa, Homo sapiens
  CDR3 for beta chain variable domain of TCR clone 28593 (TRBV4-2, TRBJ1-4)
CASSQGATNEKLFF

SEQ ID NO: 57187 - protein, 18 aa, Homo sapiens
  CDR3 for alpha chain variable domain of TCR clone 28594 (TRAV21, TRAJ52)
CAVRPSPAGGTSYGKLTF

SEQ ID NO: 57188 - protein, 18 aa, Homo sapiens
  CDR3 for beta chain variable domain of TCR clone 28594 (TRBV7-9, TRBJ2-7)
CASSLTTSGSRTWYEQYF

SEQ ID NO: 57189 - protein, 14 aa, Homo sapiens
  CDR3 for alpha chain variable domain of TCR clone 28595 (TRAV12-3, TRAJ6)
CAMSATGGRYIPTF

SEQ ID NO: 57190 - protein, 16 aa, Homo sapiens
  CDR3 for beta chain variable domain of TCR clone 28595 (TRBV4-2, TRBJ2-1)
CASSPRAGQGANEQFF

SEQ ID NO: 57191 - protein, 18 aa, Homo sapiens
  CDR3 for alpha chain variable domain of TCR clone 28596 (TRAV2, TRAJ32)
CCLLLCFHYGGATNKLIF

SEQ ID NO: 57192 - protein, 16 aa, Homo sapiens
  CDR3 for beta chain variable domain of TCR clone 28596 (TRBV7-9, TRBJ2-7)
CASSYPDGEGGYEQYF

SEQ ID NO: 57193 - protein, 13 aa, Homo sapiens
  CDR3 for alpha chain variable domain of TCR clone 28597 (TRAV2, TRAJ40)
CAVVTSGTYKYIF

SEQ ID NO: 57194 - protein, 14 aa, Homo sapiens
  CDR3 for beta chain variable domain of TCR clone 28597 (TRBV19, TRBJ2-1)
CASPAFVLSGEHFF

SEQ ID NO: 57195 - protein, 13 aa, Homo sapiens
  CDR3 for alpha chain variable domain of TCR clone 28598 (TRAV12-3, TRAJ13)
CAMASGGYQKVTF

SEQ ID NO: 57196 - protein, 13 aa, Homo sapiens
  CDR3 for beta chain variable domain of TCR clone 28598 (TRBV20-1, TRBJ2-2)
CSALSGGAGELFF

SEQ ID NO: 57197 - protein, 13 aa, Homo sapiens
  CDR3 for alpha chain variable domain of TCR clone 28599 (TRAV1-2, TRAJ9)
CAVLNTGGFKTIF

SEQ ID NO: 57198 - protein, 13 aa, Homo sapiens
  CDR3 for beta chain variable domain of TCR clone 28599 (TRBV13, TRBJ2-1)
CASILGGRGEQFF

SEQ ID NO: 57199 - protein, 14 aa, Homo sapiens
  CDR3 for alpha chain variable domain of TCR clone 28600 (TRAV12-2, TRAJ17)
CAVLFKAAGNKLTF

SEQ ID NO: 57200 - protein, 13 aa, Homo sapiens
  CDR3 for beta chain variable domain of TCR clone 28600 (TRBV4-2, TRBJ1-1)
CASSQAGNTEAFF

SEQ ID NO: 57201 - protein, 14 aa, Homo sapiens
  CDR3 for alpha chain variable domain of TCR clone 28601 (TRAV13-1, TRAJ3)
CAASKSSSASKIIF

SEQ ID NO: 57202 - protein, 13 aa, Homo sapiens
  CDR3 for beta chain variable domain of TCR clone 28601 (TRBV25-1, TRBJ2-5)
CAGSESGRETQYF

SEQ ID NO: 57203 - protein, 14 aa, Homo sapiens
  CDR3 for alpha chain variable domain of TCR clone 28602 (TRAV9-2, TRAJ39)
CALYIYNAGNMLTF

SEQ ID NO: 57204 - protein, 16 aa, Homo sapiens
  CDR3 for beta chain variable domain of TCR clone 28602 (TRBV4-2, TRBJ2-4)
CASSQELRRAKNIQYF

SEQ ID NO: 57205 - protein, 13 aa, Homo sapiens
  CDR3 for alpha chain variable domain of TCR clone 28603 (TRAV27, TRAJ16)
CAGACSGGQKLLF

SEQ ID NO: 57206 - protein, 14 aa, Homo sapiens
  CDR3 for beta chain variable domain of TCR clone 28603 (TRBV11-2, TRBJ1-3)
CASSLAVPGNTIYF

SEQ ID NO: 57207 - protein, 15 aa, Homo sapiens
  CDR3 for alpha chain variable domain of TCR clone 28604 (TRAV3, TRAJ22)
CAVRDRGGSARQLTF

SEQ ID NO: 57208 - protein, 16 aa, Homo sapiens
  CDR3 for beta chain variable domain of TCR clone 28604 (TRBV5-4, TRBJ2-3)
CASQQPGAGGADTQYF

SEQ ID NO: 57209 - protein, 13 aa, Homo sapiens
  CDR3 for alpha chain variable domain of TCR clone 28605 (TRAV8-6, TRAJ49)
CAVITNTGNQFYF

SEQ ID NO: 57210 - protein, 13 aa, Homo sapiens
  CDR3 for beta chain variable domain of TCR clone 28605 (TRBV12-4, TRBJ1-2)
CASSLRQGKGYTF

SEQ ID NO: 57211 - protein, 16 aa, Homo sapiens
  CDR3 for alpha chain variable domain of TCR clone 28606 (TRAV8-3, TRAJ8)
CAVPRDGNTGFQKLVL

SEQ ID NO: 57212 - protein, 14 aa, Homo sapiens
  CDR3 for beta chain variable domain of TCR clone 28606 (TRBV28, TRBJ1-1)
CASSESGRGTEAFF

SEQ ID NO: 57213 - protein, 14 aa, Homo sapiens
  CDR3 for alpha chain variable domain of TCR clone 28607 (TRAV12-2, TRAJ44)
CAVNPDGTASKLTF

SEQ ID NO: 57214 - protein, 13 aa, Homo sapiens
  CDR3 for beta chain variable domain of TCR clone 28607 (TRBV20-1, TRBJ1-6)
CSAPLGVGSPLHF

SEQ ID NO: 57215 - protein, 17 aa, Homo sapiens
  CDR3 for alpha chain variable domain of TCR clone 28608 (TRAV3, TRAJ6)
CAVRDGPRAGGSYIPTL

SEQ ID NO: 57216 - protein, 14 aa, Homo sapiens
  CDR3 for beta chain variable domain of TCR clone 28608 (TRBV11-2, TRBJ2-3)
CASSRLARTDTQYF

SEQ ID NO: 57217 - protein, 13 aa, Homo sapiens
  CDR3 for alpha chain variable domain of TCR clone 28609 (TRAV13-1, TRAJ11)
CAAVLAGYSTLTF

SEQ ID NO: 57218 - protein, 17 aa, Homo sapiens
  CDR3 for beta chain variable domain of TCR clone 28609 (TRBV25-1, TRBJ2-7)
CASSDARVVFSSYERYF

SEQ ID NO: 57219 - protein, 13 aa, Homo sapiens
  CDR3 for alpha chain variable domain of TCR clone 28610 (TRAV13-1, TRAJ12)
CAASPDSSYKLIF

SEQ ID NO: 57220 - protein, 14 aa, Homo sapiens
  CDR3 for beta chain variable domain of TCR clone 28610 (TRBV12-4, TRBJ1-1)
CASSLGTGGTEAFF

SEQ ID NO: 57221 - protein, 15 aa, Homo sapiens
  CDR3 for alpha chain variable domain of TCR clone 28611 (TRAV3, TRAJ5)
CAVRDLDTGRRALTF

SEQ ID NO: 57222 - protein, 14 aa, Homo sapiens
  CDR3 for beta chain variable domain of TCR clone 28611 (TRBV12-5, TRBJ2-5)
CASGSRTHQETQYF

SEQ ID NO: 57223 - protein, 11 aa, Homo sapiens
  CDR3 for alpha chain variable domain of TCR clone 28612 (TRAV12-3, TRAJ17)
CNDAYSNKLTF

SEQ ID NO: 57224 - protein, 15 aa, Homo sapiens
  CDR3 for beta chain variable domain of TCR clone 28612 (TRBV20-1, TRBJ2-7)
CSARDRVSGMDEQYF

SEQ ID NO: 57225 - protein, 14 aa, Homo sapiens
  CDR3 for alpha chain variable domain of TCR clone 28613 (TRAV20, TRAJ13)
CAVQVSGGYQKVTF

SEQ ID NO: 57226 - protein, 14 aa, Homo sapiens
  CDR3 for beta chain variable domain of TCR clone 28613 (TRBV20-1, TRBJ1-1)
CSAQTRIGGTEAFF

SEQ ID NO: 57227 - protein, 16 aa, Homo sapiens
  CDR3 for alpha chain variable domain of TCR clone 28614 (TRAV3, TRAJ21)
CAVRDIERGNFNKFYL

SEQ ID NO: 57228 - protein, 13 aa, Homo sapiens
  CDR3 for beta chain variable domain of TCR clone 28614 (TRBV27, TRBJ2-7)
CASSLTTGYEQYF

SEQ ID NO: 57229 - protein, 17 aa, Homo sapiens
  CDR3 for alpha chain variable domain of TCR clone 28615 (TRAV26-2, TRAJ42)
CILRDVGYGGSQGKLIF

SEQ ID NO: 57230 - protein, 16 aa, Homo sapiens
  CDR3 for beta chain variable domain of TCR clone 28615 (TRBV12-4, TRBJ2-7)
CASSLIGGTGTYEQYF

SEQ ID NO: 57231 - protein, 13 aa, Homo sapiens
  CDR3 for alpha chain variable domain of TCR clone 28616 (TRAV20, TRAJ31)
CAVHAIGGARLMF

SEQ ID NO: 57232 - protein, 14 aa, Homo sapiens
  CDR3 for beta chain variable domain of TCR clone 28616 (TRBV2, TRBJ1-5)
CASSGTVSNQPQHF

SEQ ID NO: 57233 - protein, 13 aa, Homo sapiens
  CDR3 for alpha chain variable domain of TCR clone 28617 (TRAV12-2, TRAJ48)
CAAPNFGNEKLTF

SEQ ID NO: 57234 - protein, 13 aa, Homo sapiens
  CDR3 for beta chain variable domain of TCR clone 28617 (TRBV19, TRBJ1-1)
CASTRRGDTEAFF

SEQ ID NO: 57235 - protein, 16 aa, Homo sapiens
  CDR3 for alpha chain variable domain of TCR clone 28618 (TRAV12-2, TRAJ45)
CAVIFLSGGGADGLTF

SEQ ID NO: 57236 - protein, 19 aa, Homo sapiens
  CDR3 for beta chain variable domain of TCR clone 28618 (TRBV28, TRBJ2-4)
CASSFQPGGPAHSKNSQYF

SEQ ID NO: 57237 - protein, 10 aa, Homo sapiens
  CDR3 for alpha chain variable domain of TCR clone 28619 (TRAV23/DV6, TRAJ43)
CAAAVAALGQ

SEQ ID NO: 57238 - protein, 13 aa, Homo sapiens
  CDR3 for beta chain variable domain of TCR clone 28619 (TRBV12-4, TRBJ1-2)
CASSLRQGKGYTF

SEQ ID NO: 57239 - protein, 14 aa, Homo sapiens
  CDR3 for alpha chain variable domain of TCR clone 28620 (TRAV12-2, TRAJ6)
CASKWGGGSYIPTF

SEQ ID NO: 57240 - protein, 13 aa, Homo sapiens
  CDR3 for beta chain variable domain of TCR clone 28620 (TRBV2, TRBJ1-1)
CASSEGGNAEAFF

SEQ ID NO: 57241 - protein, 18 aa, Homo sapiens
  CDR3 for alpha chain variable domain of TCR clone 28621 (TRAV29/DV5, TRAJ52)
CAAGFRGAGGTSYGKLTF

SEQ ID NO: 57242 - protein, 16 aa, Homo sapiens
  CDR3 for beta chain variable domain of TCR clone 28621 (TRBV7-3, TRBJ2-2)
CASSLKRGTLSGELFS

SEQ ID NO: 57243 - protein, 22 aa, Homo sapiens
  CDR3 for alpha chain variable domain of TCR clone 28622 (TRAV35, TRAJ38)
CAGFSNAGNNHIQNPDPAVYQL

SEQ ID NO: 57244 - protein, 15 aa, Homo sapiens
  CDR3 for beta chain variable domain of TCR clone 28622 (TRBV7-8, TRBJ2-1)
CASSLAGGLYNEQFF

SEQ ID NO: 57245 - protein, 12 aa, Homo sapiens
  CDR3 for alpha chain variable domain of TCR clone 28623 (TRAV13-2, TRAJ23)
CAERHRGGKLIF

SEQ ID NO: 57246 - protein, 16 aa, Homo sapiens
  CDR3 for beta chain variable domain of TCR clone 28623 (TRBV20-1, TRBJ1-4)
CSAPGQGLVTNEKLFF

SEQ ID NO: 57247 - protein, 13 aa, Homo sapiens
  CDR3 for alpha chain variable domain of TCR clone 28624 (TRAV13-1, TRAJ5)
CAASDTGRKALTF

SEQ ID NO: 57248 - protein, 12 aa, Homo sapiens
  CDR3 for beta chain variable domain of TCR clone 28624 (TRBV28, TRBJ2-3)
CASSLYRDTQYF

SEQ ID NO: 57249 - protein, 13 aa, Homo sapiens
  CDR3 for alpha chain variable domain of TCR clone 28625 (TRAV9-2, TRAJ23)
CALSGDQGGKLIF

SEQ ID NO: 57250 - protein, 13 aa, Homo sapiens
  CDR3 for beta chain variable domain of TCR clone 28625 (TRBV20-1, TRBJ2-5)
CSARRGTGATQYF

SEQ ID NO: 57251 - protein, 20 aa, Homo sapiens
  CDR3 for alpha chain variable domain of TCR clone 28626 (TRAV26-1, TRAJ42)
CCVLLHRQTYYGGSQGHLIF

SEQ ID NO: 57252 - protein, 16 aa, Homo sapiens
  CDR3 for beta chain variable domain of TCR clone 28626 (TRBV7-3, TRBJ2-2)
CASSLKRGTLSGELFF

SEQ ID NO: 57253 - protein, 13 aa, Homo sapiens
  CDR3 for alpha chain variable domain of TCR clone 28627 (TRAV2, TRAJ40)
CGVVTSGTYKYIF

SEQ ID NO: 57254 - protein, 14 aa, Homo sapiens
  CDR3 for beta chain variable domain of TCR clone 28627 (TRBV19, TRBJ2-1)
CASPTFVLSGEQFF

SEQ ID NO: 57255 - protein, 12 aa, Homo sapiens
  CDR3 for alpha chain variable domain of TCR clone 28628 (TRAV36/DV7, TRAJ39)
CWTNNAGNMLTF

SEQ ID NO: 57256 - protein, 14 aa, Homo sapiens
  CDR3 for beta chain variable domain of TCR clone 28628 (TRBV7-2, TRBJ2-2)
CASSSDGHTGELFF

SEQ ID NO: 57257 - protein, 13 aa, Homo sapiens
  CDR3 for alpha chain variable domain of TCR clone 28629 (TRAV21, TRAJ20)
CAVGLRVDYKLSL

SEQ ID NO: 57258 - protein, 13 aa, Homo sapiens
  CDR3 for beta chain variable domain of TCR clone 28629 (TRBV6-1, TRBJ1-1)
CASSRQGNTEAFF

SEQ ID NO: 57259 - protein, 14 aa, Homo sapiens
  CDR3 for alpha chain variable domain of TCR clone 28630 (TRAV1-1, TRAJ27)
CAVIYKTNAGKSTF

SEQ ID NO: 57260 - protein, 15 aa, Homo sapiens
  CDR3 for beta chain variable domain of TCR clone 28630 (TRBV7-2, TRBJ2-1)
CASSSGLAGGNEQFF

SEQ ID NO: 57261 - protein, 14 aa, Homo sapiens
  CDR3 for alpha chain variable domain of TCR clone 28631 (TRAV12-2, TRAJ5)
CAVNRSTGRRALTF

SEQ ID NO: 57262 - protein, 13 aa, Homo sapiens
  CDR3 for beta chain variable domain of TCR clone 28631 (TRBV7-9, TRBJ1-2)
CASSLKQNYGYTF

SEQ ID NO: 57263 - protein, 14 aa, Homo sapiens
  CDR3 for alpha chain variable domain of TCR clone 28632 (TRAV1-2, TRAJ8)
CAVREDTGFQKLVF

SEQ ID NO: 57264 - protein, 14 aa, Homo sapiens
  CDR3 for beta chain variable domain of TCR clone 28632 (TRBV28, TRBJ2-7)
CASSLLRISYEQYF

SEQ ID NO: 57265 - protein, 14 aa, Homo sapiens
  CDR3 for alpha chain variable domain of TCR clone 28633 (TRAV25, TRAJ35)
CARRMEGFGNVLHC

SEQ ID NO: 57266 - protein, 13 aa, Homo sapiens
  CDR3 for beta chain variable domain of TCR clone 28633 (TRBV7-2, TRBJ1-4)
CASSLAGLKKLFF

SEQ ID NO: 57267 - protein, 12 aa, Homo sapiens
  CDR3 for alpha chain variable domain of TCR clone 28634 (TRAV36/DV7, TRAJ37)
CACYGNTGKLIF

SEQ ID NO: 57268 - protein, 14 aa, Homo sapiens
  CDR3 for beta chain variable domain of TCR clone 28634 (TRBV6-3, TRBJ1-4)
CASSGQNLNERLFF

SEQ ID NO: 57269 - protein, 23 aa, Homo sapiens
  CDR3 for alpha chain variable domain of TCR clone 28635 (TRAV12-2, TRAJ22)
CAVSFRVHPGPPIVSGSARQLTF

SEQ ID NO: 57270 - protein, 12 aa, Homo sapiens
  CDR3 for beta chain variable domain of TCR clone 28635 (TRBV7-2, TRBJ1-5)
CASSLWSQPQHF

SEQ ID NO: 57271 - protein, 16 aa, Homo sapiens
  CDR3 for alpha chain variable domain of TCR clone 28636 (TRAV14/DV4, TRAJ12)
CAMREVLMDSSYKLIF

SEQ ID NO: 57272 - protein, 15 aa, Homo sapiens
  CDR3 for beta chain variable domain of TCR clone 28636 (TRBV7-3, TRBJ2-1)
CASSLSSGSFDEQFF

SEQ ID NO: 57273 - protein, 19 aa, Homo sapiens
  CDR3 for alpha chain variable domain of TCR clone 28637 (TRAV29/DV5, TRAJ49)
CSVLLCSKLTVDTGNQFYF

SEQ ID NO: 57274 - protein, 14 aa, Homo sapiens
  CDR3 for beta chain variable domain of TCR clone 28637 (TRBV4-1, TRBJ2-7)
CASSPVAGGDEQYF

SEQ ID NO: 57275 - protein, 14 aa, Homo sapiens
  CDR3 for alpha chain variable domain of TCR clone 28638 (TRAV8-3, TRAJ9)
CAVVYNTGGFKTVF

SEQ ID NO: 57276 - protein, 14 aa, Homo sapiens
  CDR3 for beta chain variable domain of TCR clone 28638 (TRBV7-3, TRBJ2-2)
CASSSGGYTGELFF

SEQ ID NO: 57277 - protein, 17 aa, Homo sapiens
  CDR3 for alpha chain variable domain of TCR clone 28639 (TRAV21, TRAJ52)
CCEASPAGGTSYGKLTF

SEQ ID NO: 57278 - protein, 16 aa, Homo sapiens
  CDR3 for beta chain variable domain of TCR clone 28639 (TRBV19, TRBJ2-1)
CASSKAGPSSYNEQFF

SEQ ID NO: 57279 - protein, 14 aa, Homo sapiens
  CDR3 for alpha chain variable domain of TCR clone 28640 (TRAV17, TRAJ31)
CATVLRNNNARLMF

SEQ ID NO: 57280 - protein, 14 aa, Homo sapiens
  CDR3 for beta chain variable domain of TCR clone 28640 (TRBV12-4, TRBJ2-5)
CAISLWQKQETQYF

SEQ ID NO: 57281 - protein, 14 aa, Homo sapiens
  CDR3 for alpha chain variable domain of TCR clone 28641 (TRAV13-1, TRAJ44)
CAAKATGTASKLTF

SEQ ID NO: 57282 - protein, 16 aa, Homo sapiens
  CDR3 for beta chain variable domain of TCR clone 28641 (TRBV7-9, TRBJ2-6)
CASSLKGSLRANVLTF

SEQ ID NO: 57283 - protein, 14 aa, Homo sapiens
  CDR3 for alpha chain variable domain of TCR clone 28642 (TRAV1-2, TRAJ8)
CAVREDTGLQKLVF

SEQ ID NO: 57284 - protein, 16 aa, Homo sapiens
  CDR3 for beta chain variable domain of TCR clone 28642 (TRBV12-4, TRBJ1-5)
CASSRPVGGSNQPQHF

SEQ ID NO: 57285 - protein, 12 aa, Homo sapiens
  CDR3 for alpha chain variable domain of TCR clone 28643 (TRAV13-2, TRAJ8)
CTPWLGFQKLVF

SEQ ID NO: 57286 - protein, 18 aa, Homo sapiens
  CDR3 for beta chain variable domain of TCR clone 28643 (TRBV11-2, TRBJ2-3)
CASSLGGASRGAPNTQYF

SEQ ID NO: 57287 - protein, 15 aa, Homo sapiens
  CDR3 for alpha chain variable domain of TCR clone 28644 (TRAV12-2, TRAJ53)
CAVNGGGGSNYKLTF

SEQ ID NO: 57288 - protein, 11 aa, Homo sapiens
  CDR3 for beta chain variable domain of TCR clone 28644 (TRBV29-1, TRBJ2-5)
CSEDRTGTQYF

SEQ ID NO: 57289 - protein, 14 aa, Homo sapiens
  CDR3 for alpha chain variable domain of TCR clone 28645 (TRAV1-2, TRAJ16)
CAVNRFSDGQKLLF

SEQ ID NO: 57290 - protein, 13 aa, Homo sapiens
  CDR3 for beta chain variable domain of TCR clone 28645 (TRBV7-7, TRBJ2-3)
CASSLSRADTQYF

SEQ ID NO: 57291 - protein, 14 aa, Homo sapiens
  CDR3 for alpha chain variable domain of TCR clone 28646 (TRAV35, TRAJ22)
CAGLRPGSARQLTF

SEQ ID NO: 57292 - protein, 15 aa, Homo sapiens
  CDR3 for beta chain variable domain of TCR clone 28646 (TRBV7-9, TRBJ1-6)
CASSSPGRGNSPLHF

SEQ ID NO: 57293 - protein, 14 aa, Homo sapiens
  CDR3 for alpha chain variable domain of TCR clone 28647 (TRAV13-1, TRAJ35)
CAASKGGFGNVLHC

SEQ ID NO: 57294 - protein, 13 aa, Homo sapiens
  CDR3 for beta chain variable domain of TCR clone 28647 (TRBV10-3, TRBJ2-7)
CASKLAVNYEQYF

SEQ ID NO: 57295 - protein, 15 aa, Homo sapiens
  CDR3 for alpha chain variable domain of TCR clone 28648 (TRAV12-2, TRAJ53)
CAVNGGGGSNYKLTF

SEQ ID NO: 57296 - protein, 15 aa, Homo sapiens
  CDR3 for beta chain variable domain of TCR clone 28648 (TRBV2, TRBJ2-7)
CASTLLGSGATEQYF

SEQ ID NO: 57297 - protein, 16 aa, Homo sapiens
  CDR3 for alpha chain variable domain of TCR clone 28649 (TRAV8-4, TRAJ9)
CAVTCNTGGFKNYLWS

SEQ ID NO: 57298 - protein, 15 aa, Homo sapiens
  CDR3 for beta chain variable domain of TCR clone 28649 (TRBV7-9, TRBJ2-2)
CASSPETGAGGELFF

SEQ ID NO: 57299 - protein, 20 aa, Homo sapiens
  CDR3 for alpha chain variable domain of TCR clone 28650 (TRAV26-1, TRAJ42)
CCVLLHRQTYYGGSQGNLIF

SEQ ID NO: 57300 - protein, 16 aa, Homo sapiens
  CDR3 for beta chain variable domain of TCR clone 28650 (TRBV7-3, TRBJ2-2)
CASSLKRRTLSGELFF

SEQ ID NO: 57301 - protein, 14 aa, Homo sapiens
  CDR3 for alpha chain variable domain of TCR clone 28651 (TRAV12-2, TRAJ5)
CAVNRSTGRRALTF

SEQ ID NO: 57302 - protein, 14 aa, Homo sapiens
  CDR3 for beta chain variable domain of TCR clone 28651 (TRBV18, TRBJ2-5)
CAGSPGVSQETQYF

SEQ ID NO: 57303 - protein, 15 aa, Homo sapiens
  CDR3 for alpha chain variable domain of TCR clone 28652 (TRAV12-2, TRAJ53)
CAVNGGGGSNYKLTF

SEQ ID NO: 57304 - protein, 16 aa, Homo sapiens
  CDR3 for beta chain variable domain of TCR clone 28652 (TRBV4-1, TRBJ1-2)
CASSQDAGQVLYGHTF

SEQ ID NO: 57305 - protein, 12 aa, Homo sapiens
  CDR3 for alpha chain variable domain of TCR clone 28653 (TRAV13-1, TRAJ21)
CAAKEGFNKFYF

SEQ ID NO: 57306 - protein, 15 aa, Homo sapiens
  CDR3 for beta chain variable domain of TCR clone 28653 (TRBV28, TRBJ2-1)
CASSIIAGGRSEQFF

SEQ ID NO: 57307 - protein, 13 aa, Homo sapiens
  CDR3 for alpha chain variable domain of TCR clone 28654 (TRAV12-1, TRAJ16)
CVVNGPDGQKLLF

SEQ ID NO: 57308 - protein, 13 aa, Homo sapiens
  CDR3 for beta chain variable domain of TCR clone 28654 (TRBV2, TRBJ1-1)
CARNPTGGFHALF

SEQ ID NO: 57309 - protein, 18 aa, Homo sapiens
  CDR3 for alpha chain variable domain of TCR clone 28655 (TRAV12-3, TRAJ52)
CAMSVGGAGGTSYGKLTF

SEQ ID NO: 57310 - protein, 15 aa, Homo sapiens
  CDR3 for beta chain variable domain of TCR clone 28655 (TRBV27, TRBJ1-6)
CASSFDRGLGSPRHF

SEQ ID NO: 57311 - protein, 13 aa, Homo sapiens
  CDR3 for alpha chain variable domain of TCR clone 28656 (TRAV38-1, TRAJ42)
CARWGGSQGNLIF

SEQ ID NO: 57312 - protein, 13 aa, Homo sapiens
  CDR3 for beta chain variable domain of TCR clone 28656 (TRBV7-9, TRBJ1-2)
CASSLKQNYGYTF

SEQ ID NO: 57313 - protein, 13 aa, Homo sapiens
  CDR3 for alpha chain variable domain of TCR clone 28657 (TRAV29/DV5, TRAJ31)
CAASRNNNARLMF

SEQ ID NO: 57314 - protein, 12 aa, Homo sapiens
  CDR3 for beta chain variable domain of TCR clone 28657 (TRBV14, TRBJ1-1)
CASSQLKGRAFF

SEQ ID NO: 57315 - protein, 11 aa, Homo sapiens
  CDR3 for alpha chain variable domain of TCR clone 28658 (TRAV21, TRAJ48)
CAVDGNEKLTF

SEQ ID NO: 57316 - protein, 16 aa, Homo sapiens
  CDR3 for beta chain variable domain of TCR clone 28658 (TRBV12-4, TRBJ1-5)
CASSSGTRGSNQPQHF

SEQ ID NO: 57317 - protein, 14 aa, Homo sapiens
  CDR3 for alpha chain variable domain of TCR clone 28659 (TRAV17, TRAJ54)
CATDDNQGAQKLVF

SEQ ID NO: 57318 - protein, 12 aa, Homo sapiens
  CDR3 for beta chain variable domain of TCR clone 28659 (TRBV6-3, TRBJ2-1)
CASSGSYNEQFF

SEQ ID NO: 57319 - protein, 11 aa, Homo sapiens
  CDR3 for alpha chain variable domain of TCR clone 28660 (TRAV21, TRAJ34)
CAHYNTDKLIF

SEQ ID NO: 57320 - protein, 11 aa, Homo sapiens
  CDR3 for beta chain variable domain of TCR clone 28660 (TRBV29-1, TRBJ2-5)
CSGDRTGTQYF

SEQ ID NO: 57321 - protein, 14 aa, Homo sapiens
  CDR3 for alpha chain variable domain of TCR clone 28661 (TRAV12-3, TRAJ10)
SHLPLTGGGNKLTF

SEQ ID NO: 57322 - protein, 14 aa, Homo sapiens
  CDR3 for beta chain variable domain of TCR clone 28661 (TRBV6-1, TRBJ1-3)
CASVQGGGGNNIYF

SEQ ID NO: 57323 - protein, 12 aa, Homo sapiens
  CDR3 for alpha chain variable domain of TCR clone 28662 (TRAV13-2, TRAJ23)
CAERHRGGKLIF

SEQ ID NO: 57324 - protein, 16 aa, Homo sapiens
  CDR3 for beta chain variable domain of TCR clone 28662 (TRBV20-1, TRBJ1-4)
CSAPGQGLLTNETLFF

SEQ ID NO: 57325 - protein, 16 aa, Homo sapiens
  CDR3 for alpha chain variable domain of TCR clone 28663 (TRAV3, TRAJ37)
CAVRGKGSGNTGKLIF

SEQ ID NO: 57326 - protein, 14 aa, Homo sapiens
  CDR3 for beta chain variable domain of TCR clone 28663 (TRBV12-5, TRBJ2-5)
CASGSRTHQETQYF

SEQ ID NO: 57327 - protein, 15 aa, Homo sapiens
  CDR3 for alpha chain variable domain of TCR clone 28664 (TRAV21, TRAJ37)
CAVRPTLRNTGKLIF

SEQ ID NO: 57328 - protein, 16 aa, Homo sapiens
  CDR3 for beta chain variable domain of TCR clone 28664 (TRBV24-1, TRBJ2-3)
CATSDRRQDLTDTQYF

SEQ ID NO: 57329 - protein, 14 aa, Homo sapiens
  CDR3 for alpha chain variable domain of TCR clone 28665 (TRAV3, TRAJ9)
CAVRLNTGGFKTIF

SEQ ID NO: 57330 - protein, 14 aa, Homo sapiens
  CDR3 for beta chain variable domain of TCR clone 28665 (TRBV12-5, TRBJ2-5)
CASGSRTHQETQYF

SEQ ID NO: 57331 - protein, 14 aa, Homo sapiens
  CDR3 for alpha chain variable domain of TCR clone 28666 (TRAV1-2, TRAJ16)
CAVNRFPDGQKLLF

SEQ ID NO: 57332 - protein, 16 aa, Homo sapiens
  CDR3 for beta chain variable domain of TCR clone 28666 (TRBV7-3, TRBJ2-2)
CASSLKRGTLSGELFF

SEQ ID NO: 57333 - protein, 12 aa, Homo sapiens
  CDR3 for alpha chain variable domain of TCR clone 28667 (TRAV8-3, TRAJ20)
CAVGANDYKLSF

SEQ ID NO: 57334 - protein, 15 aa, Homo sapiens
  CDR3 for beta chain variable domain of TCR clone 28667 (TRBV11-3, TRBJ2-3)
CASLKDGREGDTQYF

SEQ ID NO: 57335 - protein, 16 aa, Homo sapiens
  CDR3 for alpha chain variable domain of TCR clone 28668 (TRAV23/DV6, TRAJ9)
CAASIGGNTGGFTTIF

SEQ ID NO: 57336 - protein, 14 aa, Homo sapiens
  CDR3 for beta chain variable domain of TCR clone 28668 (TRBV9, TRBJ2-7)
CASSVGVGSYEQYF

SEQ ID NO: 57337 - protein, 14 aa, Homo sapiens
  CDR3 for alpha chain variable domain of TCR clone 28669 (TRAV23/DV6, TRAJ8)
CSASKNTGFQKLVF

SEQ ID NO: 57338 - protein, 16 aa, Homo sapiens
  CDR3 for beta chain variable domain of TCR clone 28669 (TRBV4-1, TRBJ2-6)
CASSQVGDPGANVLTF

SEQ ID NO: 57339 - protein, 14 aa, Homo sapiens
  CDR3 for alpha chain variable domain of TCR clone 28670 (TRAV12-2, TRAJ40)
CAVKIPSGTYKYIF

SEQ ID NO: 57340 - protein, 13 aa, Homo sapiens
  CDR3 for beta chain variable domain of TCR clone 28670 (TRBV19, TRBJ1-5)
CASSMRGYQPQHF

SEQ ID NO: 57341 - protein, 13 aa, Homo sapiens
  CDR3 for alpha chain variable domain of TCR clone 28671 (TRAV8-6, TRAJ49)
CAVITNTGNQFYF

SEQ ID NO: 57342 - protein, 17 aa, Homo sapiens
  CDR3 for beta chain variable domain of TCR clone 28671 (TRBV7-8, TRBJ2-6)
CASSAGTGGAGANVLTF

SEQ ID NO: 57343 - protein, 16 aa, Homo sapiens
  CDR3 for alpha chain variable domain of TCR clone 28672 (TRAV1-2, TRAJ6)
CAVRDQGTGGSYIHTF

SEQ ID NO: 57344 - protein, 13 aa, Homo sapiens
  CDR3 for beta chain variable domain of TCR clone 28672 (TRBV28, TRBJ2-7)
CASTPGLAGEQYF

SEQ ID NO: 57345 - protein, 13 aa, Homo sapiens
  CDR3 for alpha chain variable domain of TCR clone 28673 (TRAV16, TRAJ54)
FALMVQGAQKLVF

SEQ ID NO: 57346 - protein, 12 aa, Homo sapiens
  CDR3 for beta chain variable domain of TCR clone 28673 (TRBV18, TRBJ2-7)
CASSTAMGEQYF

SEQ ID NO: 57347 - protein, 10 aa, Homo sapiens
  CDR3 for alpha chain variable domain of TCR clone 28674 (TRAV12-1, TRAJ43)
CVVHNNDMRF

SEQ ID NO: 57348 - protein, 15 aa, Homo sapiens
  CDR3 for beta chain variable domain of TCR clone 28674 (TRBV12-4, TRBJ2-5)
CASSPPTGLQETQYF

SEQ ID NO: 57349 - protein, 12 aa, Homo sapiens
  CDR3 for alpha chain variable domain of TCR clone 28675 (TRAV27, TRAJ35)
CAGADFGNVLHC

SEQ ID NO: 57350 - protein, 16 aa, Homo sapiens
  CDR3 for beta chain variable domain of TCR clone 28675 (TRBV6-1, TRBJ2-1)
CASISRQGSSYNEQFF

SEQ ID NO: 57351 - protein, 14 aa, Homo sapiens
  CDR3 for alpha chain variable domain of TCR clone 28676 (TRAV9-2, TRAJ39)
CALYIYNAGSMLTF

SEQ ID NO: 57352 - protein, 13 aa, Homo sapiens
  CDR3 for beta chain variable domain of TCR clone 28676 (TRBV27, TRBJ2-7)
CASSFVSSYEQYF

SEQ ID NO: 57353 - protein, 15 aa, Homo sapiens
  CDR3 for alpha chain variable domain of TCR clone 28677 (TRAV21, TRAJ32)
CAVNSYGGATNKLIF

SEQ ID NO: 57354 - protein, 18 aa, Homo sapiens
  CDR3 for beta chain variable domain of TCR clone 28677 (TRBV7-9, TRBJ2-1)
CTSSTGLAEGSSYNEQFF

SEQ ID NO: 57355 - protein, 13 aa, Homo sapiens
  CDR3 for alpha chain variable domain of TCR clone 28678 (TRAV12-3, TRAJ43)
CAMIRPNNNDMRF

SEQ ID NO: 57356 - protein, 12 aa, Homo sapiens
  CDR3 for beta chain variable domain of TCR clone 28678 (TRBV11-2, TRBJ2-5)
CASSLGKETQYF

SEQ ID NO: 57357 - protein, 11 aa, Homo sapiens
  CDR3 for alpha chain variable domain of TCR clone 28679 (TRAV2, TRAJ33)
CAVESNYQLIW

SEQ ID NO: 57358 - protein, 16 aa, Homo sapiens
  CDR3 for beta chain variable domain of TCR clone 28679 (TRBV5-1, TRBJ1-1)
CASSSGGNSLNTEAFF

SEQ ID NO: 57359 - protein, 14 aa, Homo sapiens
  CDR3 for alpha chain variable domain of TCR clone 28680 (TRAV1-2, TRAJ16)
CAVNRFSDGQKLLF

SEQ ID NO: 57360 - protein, 15 aa, Homo sapiens
  CDR3 for beta chain variable domain of TCR clone 28680 (TRBV7-9, TRBJ1-6)
CASSSPGRGSSPLHF

SEQ ID NO: 57361 - protein, 14 aa, Homo sapiens
  CDR3 for alpha chain variable domain of TCR clone 28681 (TRAV12-3, TRAJ10)
SHLPLTGGGNKLTF

SEQ ID NO: 57362 - protein, 15 aa, Homo sapiens
  CDR3 for beta chain variable domain of TCR clone 28681 (TRBV11-2, TRBJ1-3)
CASSLDGAVGNTIYF

SEQ ID NO: 57363 - protein, 16 aa, Homo sapiens
  CDR3 for alpha chain variable domain of TCR clone 28682 (TRAV13-1, TRAJ48)
CAASIFGNFGNEKLTF

SEQ ID NO: 57364 - protein, 13 aa, Homo sapiens
  CDR3 for beta chain variable domain of TCR clone 28682 (TRBV24-1, TRBJ2-2)
CATSDWSTGELFF

SEQ ID NO: 57365 - protein, 15 aa, Homo sapiens
  CDR3 for alpha chain variable domain of TCR clone 28683 (TRAV21, TRAJ53)
CATLNSGGSNYKLTF

SEQ ID NO: 57366 - protein, 13 aa, Homo sapiens
  CDR3 for beta chain variable domain of TCR clone 28683 (TRBV9, TRBJ2-1)
CASSPSGRNEQFF

SEQ ID NO: 57367 - protein, 14 aa, Homo sapiens
  CDR3 for alpha chain variable domain of TCR clone 28684 (TRAV12-2, TRAJ22)
CAVRVSGSARQPTF

SEQ ID NO: 57368 - protein, 13 aa, Homo sapiens
  CDR3 for beta chain variable domain of TCR clone 28684 (TRBV6-1, TRBJ2-1)
CAGAGTGLHEQFF

SEQ ID NO: 57369 - protein, 16 aa, Homo sapiens
  CDR3 for alpha chain variable domain of TCR clone 28685 (TRAV26-1, TRAJ37)
CIVRGDGSGNTGKLIF

SEQ ID NO: 57370 - protein, 17 aa, Homo sapiens
  CDR3 for beta chain variable domain of TCR clone 28685 (TRBV4-1, TRBJ2-7)
CASSRDPLGVRGGEQCF

SEQ ID NO: 57371 - protein, 15 aa, Homo sapiens
  CDR3 for alpha chain variable domain of TCR clone 28686 (TRAV9-2, TRAJ16)
CALSDRFSDGQKLLF

SEQ ID NO: 57372 - protein, 17 aa, Homo sapiens
  CDR3 for beta chain variable domain of TCR clone 28686 (TRBV19, TRBJ2-6)
CASSKGATASGANVLTF

SEQ ID NO: 57373 - protein, 13 aa, Homo sapiens
  CDR3 for alpha chain variable domain of TCR clone 28687 (TRAV2, TRAJ40)
CAVVTSGTYKYIF

SEQ ID NO: 57374 - protein, 15 aa, Homo sapiens
  CDR3 for beta chain variable domain of TCR clone 28687 (TRBV7-2, TRBJ2-3)
CASSSTGLETDTQYF

SEQ ID NO: 57375 - protein, 13 aa, Homo sapiens
  CDR3 for alpha chain variable domain of TCR clone 28688 (TRAV3, TRAJ27)
CAVRPLGAGKSTF

SEQ ID NO: 57376 - protein, 13 aa, Homo sapiens
  CDR3 for beta chain variable domain of TCR clone 28688 (TRBV7-9, TRBJ2-3)
FASSPGSTDTQYF

SEQ ID NO: 57377 - protein, 11 aa, Homo sapiens
  CDR3 for alpha chain variable domain of TCR clone 28689 (TRAV1-2, TRAJ20)
CAVSNDYKLSF

SEQ ID NO: 57378 - protein, 16 aa, Homo sapiens
  CDR3 for beta chain variable domain of TCR clone 28689 (TRBV29-1, TRBJ2-6)
CSVEDITYSGANVPTF

SEQ ID NO: 57379 - protein, 17 aa, Homo sapiens
  CDR3 for alpha chain variable domain of TCR clone 28690 (TRAV23/DV6, TRAJ57)
CAASSTLSQGGSEKLGF

SEQ ID NO: 57380 - protein, 14 aa, Homo sapiens
  CDR3 for beta chain variable domain of TCR clone 28690 (TRBV25-1, TRBJ1-1)
CASTHLGGNTEAFF

SEQ ID NO: 57381 - protein, 14 aa, Homo sapiens
  CDR3 for alpha chain variable domain of TCR clone 28691 (TRAV1-2, TRAJ16)
CAVNRFSDGQKLLF

SEQ ID NO: 57382 - protein, 12 aa, Homo sapiens
  CDR3 for beta chain variable domain of TCR clone 28691 (TRBV12-4, TRBJ1-2)
CASSFIWLHLRF

SEQ ID NO: 57383 - protein, 15 aa, Homo sapiens
  CDR3 for alpha chain variable domain of TCR clone 28692 (TRAV2, TRAJ15)
CAVEDRGQAGTALIF

SEQ ID NO: 57384 - protein, 13 aa, Homo sapiens
  CDR3 for beta chain variable domain of TCR clone 28692 (TRBV10-2, TRBJ2-7)
CASGASGGCEQYF

SEQ ID NO: 57385 - protein, 12 aa, Homo sapiens
  CDR3 for alpha chain variable domain of TCR clone 28693 (TRAV8-3, TRAJ20)
CAVGANDCKLSF

SEQ ID NO: 57386 - protein, 16 aa, Homo sapiens
  CDR3 for beta chain variable domain of TCR clone 28693 (TRBV19, TRBJ2-2)
CASRSPGTGATGELFF

SEQ ID NO: 57387 - protein, 15 aa, Homo sapiens
  CDR3 for alpha chain variable domain of TCR clone 28694 (TRAV26-1, TRAJ29)
CIVRVEGSGNTPLVF

SEQ ID NO: 57388 - protein, 13 aa, Homo sapiens
  CDR3 for beta chain variable domain of TCR clone 28694 (TRBV18, TRBJ2-5)
CQLTWGVPRDQYF

SEQ ID NO: 57389 - protein, 11 aa, Homo sapiens
  CDR3 for alpha chain variable domain of TCR clone 28695 (TRAV12-2, TRAJ49)
CAFQGGNQFYF

SEQ ID NO: 57390 - protein, 14 aa, Homo sapiens
  CDR3 for beta chain variable domain of TCR clone 28695 (TRBV7-2, TRBJ2-7)
CASSPKTSFYEQYF

SEQ ID NO: 57391 - protein, 18 aa, Homo sapiens
  CDR3 for alpha chain variable domain of TCR clone 28696 (TRAV26-1, TRAJ23)
CIVRVGLEVWNQGGKLIF

SEQ ID NO: 57392 - protein, 16 aa, Homo sapiens
  CDR3 for beta chain variable domain of TCR clone 28696 (TRBV12-4, TRBJ2-5)
CASSFFVRGRQETQYF

SEQ ID NO: 57393 - protein, 13 aa, Homo sapiens
  CDR3 for alpha chain variable domain of TCR clone 28697 (TRAV29/DV5, TRAJ47)
CAASAEYGNKLFF

SEQ ID NO: 57394 - protein, 15 aa, Homo sapiens
  CDR3 for beta chain variable domain of TCR clone 28697 (TRBV7-9, TRBJ1-4)
CASSARTGGNEKLFF

SEQ ID NO: 57395 - protein, 14 aa, Homo sapiens
  CDR3 for alpha chain variable domain of TCR clone 28698 (TRAV1-2, TRAJ16)
CAVNRFSDGQKLLF

SEQ ID NO: 57396 - protein, 12 aa, Homo sapiens
  CDR3 for beta chain variable domain of TCR clone 28698 (TRBV11-2, TRBJ2-1)
CASSPGNNEQSF

SEQ ID NO: 57397 - protein, 17 aa, Homo sapiens
  CDR3 for alpha chain variable domain of TCR clone 28699 (TRAV17, TRAJ24)
CATANSMTTDSWGKLQF

SEQ ID NO: 57398 - protein, 13 aa, Homo sapiens
  CDR3 for beta chain variable domain of TCR clone 28699 (TRBV12-4, TRBJ1-1)
CASSPGTGFEAFF

SEQ ID NO: 57399 - protein, 14 aa, Homo sapiens
  CDR3 for alpha chain variable domain of TCR clone 28700 (TRAV12-1, TRAJ17)
CVVNYTAAGNKLTF

SEQ ID NO: 57400 - protein, 17 aa, Homo sapiens
  CDR3 for beta chain variable domain of TCR clone 28700 (TRBV20-1, TRBJ2-1)
CSASSSGLAGSYNEQFF

SEQ ID NO: 57401 - protein, 11 aa, Homo sapiens
  CDR3 for alpha chain variable domain of TCR clone 28701 (TRAV21, TRAJ34)
CAVTNTDKLIF

SEQ ID NO: 57402 - protein, 14 aa, Homo sapiens
  CDR3 for beta chain variable domain of TCR clone 28701 (TRBV25-1, TRBJ1-1)
CASTHLGGNTEAFF

SEQ ID NO: 57403 - protein, 14 aa, Homo sapiens
  CDR3 for alpha chain variable domain of TCR clone 28702 (TRAV38-1, TRAJ29)
CALITPSGNTPLVF

SEQ ID NO: 57404 - protein, 14 aa, Homo sapiens
  CDR3 for beta chain variable domain of TCR clone 28702 (TRBV18, TRBJ2-7)
CASSPRGGAYEQYF

SEQ ID NO: 57405 - protein, 13 aa, Homo sapiens
  CDR3 for alpha chain variable domain of TCR clone 28703 (TRAV12-1, TRAJ40)
CVVNSSGTYKYIF

SEQ ID NO: 57406 - protein, 14 aa, Homo sapiens
  CDR3 for beta chain variable domain of TCR clone 28703 (TRBV2, TRBJ1-6)
CASEVSSYNSPLRF

SEQ ID NO: 57407 - protein, 18 aa, Homo sapiens
  CDR3 for alpha chain variable domain of TCR clone 28704 (TRAV21, TRAJ52)
CAVRPSPAGGTSYGKLTF

SEQ ID NO: 57408 - protein, 15 aa, Homo sapiens
  CDR3 for beta chain variable domain of TCR clone 28704 (TRBV5-7, TRBJ2-7)
CASSLPGQVFYEQYF

SEQ ID NO: 57409 - protein, 12 aa, Homo sapiens
  CDR3 for alpha chain variable domain of TCR clone 28705 (TRAV8-3, TRAJ6)
CAVVGGSYIPTF

SEQ ID NO: 57410 - protein, 14 aa, Homo sapiens
  CDR3 for beta chain variable domain of TCR clone 28705 (TRBV27, TRBJ2-7)
CASATGTERREQYF

SEQ ID NO: 57411 - protein, 13 aa, Homo sapiens
  CDR3 for alpha chain variable domain of TCR clone 28706 (TRAV12-3, TRAJ40)
CAMSARGTHKYIF

SEQ ID NO: 57412 - protein, 16 aa, Homo sapiens
  CDR3 for beta chain variable domain of TCR clone 28706 (TRBV20-1, TRBJ2-3)
CSGEAGLAGGQDTQYF

SEQ ID NO: 57413 - protein, 14 aa, Homo sapiens
  CDR3 for alpha chain variable domain of TCR clone 28707 (TRAV1-2, TRAJ16)
CAVNRFSDGQKLPF

SEQ ID NO: 57414 - protein, 12 aa, Homo sapiens
  CDR3 for beta chain variable domain of TCR clone 28707 (TRBV7-9, TRBJ2-7)
CASSLEGYEQYF

SEQ ID NO: 57415 - protein, 20 aa, Homo sapiens
  CDR3 for alpha chain variable domain of TCR clone 28708 (TRAV25, TRAJ21)
TATQTTDVGIYPLSFNKFYF

SEQ ID NO: 57416 - protein, 14 aa, Homo sapiens
  CDR3 for beta chain variable domain of TCR clone 28708 (TRBV6-1, TRBJ2-1)
CASAKDGFYNEQFF

SEQ ID NO: 57417 - protein, 15 aa, Homo sapiens
  CDR3 for alpha chain variable domain of TCR clone 28709 (TRAV26-1, TRAJ29)
CILRVEGSGNTPLVF

SEQ ID NO: 57418 - protein, 14 aa, Homo sapiens
  CDR3 for beta chain variable domain of TCR clone 28709 (TRBV18, TRBJ2-5)
CASSPGVSQETQYF

SEQ ID NO: 57419 - protein, 14 aa, Homo sapiens
  CDR3 for alpha chain variable domain of TCR clone 28710 (TRAV1-2, TRAJ8)
CAVRGDTGFQKLVF

SEQ ID NO: 57420 - protein, 19 aa, Homo sapiens
  CDR3 for beta chain variable domain of TCR clone 28710 (TRBV28, TRBJ2-1)
CASSFSIRGSGRTRYEQFF

SEQ ID NO: 57421 - protein, 13 aa, Homo sapiens
  CDR3 for alpha chain variable domain of TCR clone 28711 (TRAV13-2, TRAJ22)
CSGWISSARQLTF

SEQ ID NO: 57422 - protein, 15 aa, Homo sapiens
  CDR3 for beta chain variable domain of TCR clone 28711 (TRBV7-2, TRBJ2-3)
CASSSTGLETDTQYF

SEQ ID NO: 57423 - protein, 14 aa, Homo sapiens
  CDR3 for alpha chain variable domain of TCR clone 28712 (TRAV9-2, TRAJ39)
CALYIYNAGNMLTF

SEQ ID NO: 57424 - protein, 13 aa, Homo sapiens
  CDR3 for beta chain variable domain of TCR clone 28712 (TRBV20-1, TRBJ2-7)
CSATHTSGYEQYF

SEQ ID NO: 57425 - protein, 12 aa, Homo sapiens
  CDR3 for alpha chain variable domain of TCR clone 28713 (TRAV12-3, TRAJ17)
CAMTLTGNKLTF

SEQ ID NO: 57426 - protein, 13 aa, Homo sapiens
  CDR3 for beta chain variable domain of TCR clone 28713 (TRBV14, TRBJ1-2)
CASSEDRRYGYTF

SEQ ID NO: 57427 - protein, 15 aa, Homo sapiens
  CDR3 for alpha chain variable domain of TCR clone 28714 (TRAV30, TRAJ57)
CGTAIPQGGSEKLVF

SEQ ID NO: 57428 - protein, 13 aa, Homo sapiens
  CDR3 for beta chain variable domain of TCR clone 28714 (TRBV7-9, TRBJ1-2)
CASSPSNFWGYTL

SEQ ID NO: 57429 - protein, 14 aa, Homo sapiens
  CDR3 for alpha chain variable domain of TCR clone 28715 (TRAV12-1, TRAJ17)
CVVNYKAAGNKLTF

SEQ ID NO: 57430 - protein, 13 aa, Homo sapiens
  CDR3 for beta chain variable domain of TCR clone 28715 (TRBV2, TRBJ1-1)
CASNLLRNTEAFF

SEQ ID NO: 57431 - protein, 11 aa, Homo sapiens
  CDR3 for alpha chain variable domain of TCR clone 28716 (TRAV2, TRAJ33)
CAVDNNYQLIW

SEQ ID NO: 57432 - protein, 14 aa, Homo sapiens
  CDR3 for beta chain variable domain of TCR clone 28716 (TRBV11-2, TRBJ2-3)
CASSRLARTDTQYF

SEQ ID NO: 57433 - protein, 14 aa, Homo sapiens
  CDR3 for alpha chain variable domain of TCR clone 28717 (TRAV8-4, TRAJ13)
CAVTLSGGYQKVTF

SEQ ID NO: 57434 - protein, 14 aa, Homo sapiens
  CDR3 for beta chain variable domain of TCR clone 28717 (TRBV7-2, TRBJ1-2)
CASGQTGSTYGYTF

SEQ ID NO: 57435 - protein, 16 aa, Homo sapiens
  CDR3 for alpha chain variable domain of TCR clone 28718 (TRAV30, TRAJ24)
CGTEIVDAYSWGKFQF

SEQ ID NO: 57436 - protein, 11 aa, Homo sapiens
  CDR3 for beta chain variable domain of TCR clone 28718 (TRBV19, TRBJ1-1)
CASSIGSEAFF

SEQ ID NO: 57437 - protein, 13 aa, Homo sapiens
  CDR3 for alpha chain variable domain of TCR clone 28719 (TRAV2, TRAJ15)
CAVASQAGTALIF

SEQ ID NO: 57438 - protein, 14 aa, Homo sapiens
  CDR3 for beta chain variable domain of TCR clone 28719 (TRBV12-5, TRBJ2-5)
CASGSRTHQETQYF

SEQ ID NO: 57439 - protein, 16 aa, Homo sapiens
  CDR3 for alpha chain variable domain of TCR clone 28720 (TRAV6, TRAJ6)
CALDMPPSGGSYIPTF

SEQ ID NO: 57440 - protein, 19 aa, Homo sapiens
  CDR3 for beta chain variable domain of TCR clone 28720 (TRBV20-1, TRBJ2-3)
CSARGVSGGTVSSTDTQYF

SEQ ID NO: 57441 - protein, 13 aa, Homo sapiens
  CDR3 for alpha chain variable domain of TCR clone 28721 (TRAV3, TRAJ21)
CAVREPDFNKFYF

SEQ ID NO: 57442 - protein, 13 aa, Homo sapiens
  CDR3 for beta chain variable domain of TCR clone 28721 (TRBV4-2, TRBJ1-1)
CASSQAGNTEAFF

SEQ ID NO: 57443 - protein, 12 aa, Homo sapiens
  CDR3 for alpha chain variable domain of TCR clone 28722 (TRAV2, TRAJ10)
CASTGGGNKLTF

SEQ ID NO: 57444 - protein, 14 aa, Homo sapiens
  CDR3 for beta chain variable domain of TCR clone 28722 (TRBV7-2, TRBJ2-2)
CASRGQGAAGGLFF

SEQ ID NO: 57445 - protein, 15 aa, Homo sapiens
  CDR3 for alpha chain variable domain of TCR clone 28723 (TRAV27, TRAJ38)
CAGRFNAGNNRKLIW

SEQ ID NO: 57446 - protein, 16 aa, Homo sapiens
  CDR3 for beta chain variable domain of TCR clone 28723 (TRBV20-1, TRBJ1-4)
CSAPGQGLLTNEKLFF

SEQ ID NO: 57447 - protein, 14 aa, Homo sapiens
  CDR3 for alpha chain variable domain of TCR clone 28724 (TRAV1-2, TRAJ8)
CAVREDTGFQRLVF

SEQ ID NO: 57448 - protein, 14 aa, Homo sapiens
  CDR3 for beta chain variable domain of TCR clone 28724 (TRBV20-1, TRBJ1-1)
CSAQTRIGGTEAFF

SEQ ID NO: 57449 - protein, 11 aa, Homo sapiens
  CDR3 for alpha chain variable domain of TCR clone 28725 (TRAV2, TRAJ13)
CASGGYQKVTF

SEQ ID NO: 57450 - protein, 14 aa, Homo sapiens
  CDR3 for beta chain variable domain of TCR clone 28725 (TRBV2, TRBJ2-5)
CASSEVLAQETQYF

SEQ ID NO: 57451 - protein, 17 aa, Homo sapiens
  CDR3 for alpha chain variable domain of TCR clone 28726 (TRAV13-1, TRAJ52)
CAASSGAGGTSYGKRTF

SEQ ID NO: 57452 - protein, 15 aa, Homo sapiens
  CDR3 for beta chain variable domain of TCR clone 28726 (TRBV2, TRBJ2-1)
CASSELAGSYNEQFF

SEQ ID NO: 57453 - protein, 16 aa, Homo sapiens
  CDR3 for alpha chain variable domain of TCR clone 28727 (TRAV30, TRAJ24)
CDTEIVDADSWGKFQF

SEQ ID NO: 57454 - protein, 13 aa, Homo sapiens
  CDR3 for beta chain variable domain of TCR clone 28727 (TRBV9, TRBJ1-1)
CASSPTGSTEAFF

SEQ ID NO: 57455 - protein, 11 aa, Homo sapiens
  CDR3 for alpha chain variable domain of TCR clone 28728 (TRAV12-3, TRAJ16)
LTGGDGQKLLF

SEQ ID NO: 57456 - protein, 13 aa, Homo sapiens
  CDR3 for beta chain variable domain of TCR clone 28728 (TRBV12-4, TRBJ1-4)
CASAKGHNEKLFF

SEQ ID NO: 57457 - protein, 13 aa, Homo sapiens
  CDR3 for alpha chain variable domain of TCR clone 28729 (TRAV2, TRAJ40)
CAVVTSGTYKYIF

SEQ ID NO: 57458 - protein, 15 aa, Homo sapiens
  CDR3 for beta chain variable domain of TCR clone 28729 (TRBV5-1, TRBJ2-3)
CASSVTSGSTDTQYF

SEQ ID NO: 57459 - protein, 11 aa, Homo sapiens
  CDR3 for alpha chain variable domain of TCR clone 28730 (TRAV12-2, TRAJ33)
CAVTSNCQLIW

SEQ ID NO: 57460 - protein, 14 aa, Homo sapiens
  CDR3 for beta chain variable domain of TCR clone 28730 (TRBV28, TRBJ2-2)
CASRIRSGTGELFF

SEQ ID NO: 57461 - protein, 12 aa, Homo sapiens
  CDR3 for alpha chain variable domain of TCR clone 28731 (TRAV1-1, TRAJ39)
CAAPVVGNMLTF

SEQ ID NO: 57462 - protein, 15 aa, Homo sapiens
  CDR3 for beta chain variable domain of TCR clone 28731 (TRBV19, TRBJ1-6)
CASSTQGAVGSPLHF

SEQ ID NO: 57463 - protein, 13 aa, Homo sapiens
  CDR3 for alpha chain variable domain of TCR clone 28732 (TRAV16, TRAJ5)
CALTNTGRRALTF

SEQ ID NO: 57464 - protein, 15 aa, Homo sapiens
  CDR3 for beta chain variable domain of TCR clone 28732 (TRBV11-2, TRBJ2-4)
CASSRPGTGINSQYF

SEQ ID NO: 57465 - protein, 12 aa, Homo sapiens
  CDR3 for alpha chain variable domain of TCR clone 28733 (TRAV9-2, TRAJ26)
CALRGYGQNFVF

SEQ ID NO: 57466 - protein, 12 aa, Homo sapiens
  CDR3 for beta chain variable domain of TCR clone 28733 (TRBV29-1, TRBJ2-3)
CSVTRGADTQYF

SEQ ID NO: 57467 - protein, 16 aa, Homo sapiens
  CDR3 for alpha chain variable domain of TCR clone 28734 (TRAV30, TRAJ24)
CGTEIVDADSWGKFQF

SEQ ID NO: 57468 - protein, 12 aa, Homo sapiens
  CDR3 for beta chain variable domain of TCR clone 28734 (TRBV5-1, TRBJ1-2)
CASSQDTYGYTF

SEQ ID NO: 57469 - protein, 13 aa, Homo sapiens
  CDR3 for alpha chain variable domain of TCR clone 28735 (TRAV12-3, TRAJ33)
CAMSVNSNYQLIW

SEQ ID NO: 57470 - protein, 15 aa, Homo sapiens
  CDR3 for beta chain variable domain of TCR clone 28735 (TRBV9, TRBJ1-6)
CASSVAGTGDSPLHF

SEQ ID NO: 57471 - protein, 13 aa, Homo sapiens
  CDR3 for alpha chain variable domain of TCR clone 28736 (TRAV21, TRAJ20)
CAVCLRVDYKLSF

SEQ ID NO: 57472 - protein, 13 aa, Homo sapiens
  CDR3 for beta chain variable domain of TCR clone 28736 (TRBV6-1, TRBJ1-1)
CASSRQGNTEAFF

SEQ ID NO: 57473 - protein, 15 aa, Homo sapiens
  CDR3 for alpha chain variable domain of TCR clone 28737 (TRAV4, TRAJ39)
CLVGPNNNAGNMPTF

SEQ ID NO: 57474 - protein, 13 aa, Homo sapiens
  CDR3 for beta chain variable domain of TCR clone 28737 (TRBV11-2, TRBJ2-5)
CASSPTGEETQYF

SEQ ID NO: 57475 - protein, 15 aa, Homo sapiens
  CDR3 for alpha chain variable domain of TCR clone 28738 (TRAV38-1, TRAJ37)
CAFIHGSGNTGKLIF

SEQ ID NO: 57476 - protein, 12 aa, Homo sapiens
  CDR3 for beta chain variable domain of TCR clone 28738 (TRBV7-9, TRBJ2-7)
RASSFGSYEQYF

SEQ ID NO: 57477 - protein, 14 aa, Homo sapiens
  CDR3 for alpha chain variable domain of TCR clone 28739 (TRAV3, TRAJ9)
CAVRLNAGGFKTIF

SEQ ID NO: 57478 - protein, 15 aa, Homo sapiens
  CDR3 for beta chain variable domain of TCR clone 28739 (TRBV7-2, TRBJ2-1)
CASSLASGRVNEQFF

SEQ ID NO: 57479 - protein, 14 aa, Homo sapiens
  CDR3 for alpha chain variable domain of TCR clone 28740 (TRAV38-1, TRAJ40)
CALRPTSGTYKYIF

SEQ ID NO: 57480 - protein, 14 aa, Homo sapiens
  CDR3 for beta chain variable domain of TCR clone 28740 (TRBV25-1, TRBJ1-1)
CASTHLRGNTEAFF

SEQ ID NO: 57481 - protein, 14 aa, Homo sapiens
  CDR3 for alpha chain variable domain of TCR clone 28741 (TRAV38-1, TRAJ45)
CASHSVGGADGLTF

SEQ ID NO: 57482 - protein, 13 aa, Homo sapiens
  CDR3 for beta chain variable domain of TCR clone 28741 (TRBV10-3, TRBJ1-2)
CAISERDSYGYTF

SEQ ID NO: 57483 - protein, 16 aa, Homo sapiens
  CDR3 for alpha chain variable domain of TCR clone 28742 (TRAV38-1, TRAJ37)
CAFKGDGSSNTGELIF

SEQ ID NO: 57484 - protein, 13 aa, Homo sapiens
  CDR3 for beta chain variable domain of TCR clone 28742 (TRBV12-4, TRBJ2-5)
CASSLFRRETQYF

SEQ ID NO: 57485 - protein, 13 aa, Homo sapiens
  CDR3 for alpha chain variable domain of TCR clone 28743 (TRAV20, TRAJ37)
CAGCSSNTGKLIF

SEQ ID NO: 57486 - protein, 13 aa, Homo sapiens
  CDR3 for beta chain variable domain of TCR clone 28743 (TRBV7-3, TRBJ1-1)
CASSQDWGAEAFF

SEQ ID NO: 57487 - protein, 23 aa, Homo sapiens
  CDR3 for alpha chain variable domain of TCR clone 28744 (TRAV26-1, TRAJ38)
CIADNAGNNHIQNPDPAVYQLRD

SEQ ID NO: 57488 - protein, 14 aa, Homo sapiens
  CDR3 for beta chain variable domain of TCR clone 28744 (TRBV12-5, TRBJ2-5)
CASGSRTHQETQYF

SEQ ID NO: 57489 - protein, 13 aa, Homo sapiens
  CDR3 for alpha chain variable domain of TCR clone 28745 (TRAV12-2, TRAJ7)
CAVNLYGNNRLAF

SEQ ID NO: 57490 - protein, 14 aa, Homo sapiens
  CDR3 for beta chain variable domain of TCR clone 28745 (TRBV25-1, TRBJ1-2)
CASSEATGHYGYTF

SEQ ID NO: 57491 - protein, 14 aa, Homo sapiens
  CDR3 for alpha chain variable domain of TCR clone 28746 (TRAV17, TRAJ16)
CATADFSDDQKLLF

SEQ ID NO: 57492 - protein, 15 aa, Homo sapiens
  CDR3 for beta chain variable domain of TCR clone 28746 (TRBV18, TRBJ2-1)
CASSPPSASYNEQFF

SEQ ID NO: 57493 - protein, 15 aa, Homo sapiens
  CDR3 for alpha chain variable domain of TCR clone 28747 (TRAV38-1, TRAJ37)
CAFIHGSGNTGQLIF

SEQ ID NO: 57494 - protein, 12 aa, Homo sapiens
  CDR3 for beta chain variable domain of TCR clone 28747 (TRBV7-9, TRBJ2-7)
CASSFGSYEQYF

SEQ ID NO: 57495 - protein, 14 aa, Homo sapiens
  CDR3 for alpha chain variable domain of TCR clone 28748 (TRAV13-1, TRAJ20)
CAARPGSNDYKPSF

SEQ ID NO: 57496 - protein, 15 aa, Homo sapiens
  CDR3 for beta chain variable domain of TCR clone 28748 (TRBV4-1, TRBJ2-7)
CASSQQGQGFDEQYF

SEQ ID NO: 57497 - protein, 14 aa, Homo sapiens
  CDR3 for alpha chain variable domain of TCR clone 28749 (TRAV29/DV5, TRAJ36)
CAARRKTGANNLFF

SEQ ID NO: 57498 - protein, 14 aa, Homo sapiens
  CDR3 for beta chain variable domain of TCR clone 28749 (TRBV12-5, TRBJ2-5)
CASGSRTHQDTQYF

SEQ ID NO: 57499 - protein, 14 aa, Homo sapiens
  CDR3 for alpha chain variable domain of TCR clone 28750 (TRAV21, TRAJ35)
CAVMPIGFGNVLRC

SEQ ID NO: 57500 - protein, 14 aa, Homo sapiens
  CDR3 for beta chain variable domain of TCR clone 28750 (TRBV20-1, TRBJ1-5)
CSARDDRGNQPQHF

SEQ ID NO: 57501 - protein, 11 aa, Homo sapiens
  CDR3 for alpha chain variable domain of TCR clone 28751 (TRAV2, TRAJ13)
CASGGYQKVTF

SEQ ID NO: 57502 - protein, 15 aa, Homo sapiens
  CDR3 for beta chain variable domain of TCR clone 28751 (TRBV4-1, TRBJ2-7)
CASSQQGQGFDEQYF

SEQ ID NO: 57503 - protein, 16 aa, Homo sapiens
  CDR3 for alpha chain variable domain of TCR clone 28752 (TRAV20, TRAJ22)
CAVQASSSGSARQLTF

SEQ ID NO: 57504 - protein, 14 aa, Homo sapiens
  CDR3 for beta chain variable domain of TCR clone 28752 (TRBV19, TRBJ2-1)
CASPTFVLSGEQFF

SEQ ID NO: 57505 - protein, 12 aa, Homo sapiens
  CDR3 for alpha chain variable domain of TCR clone 28753 (TRAV12-3, TRAJ17)
CAMTLTGNKLTF

SEQ ID NO: 57506 - protein, 18 aa, Homo sapiens
  CDR3 for beta chain variable domain of TCR clone 28753 (TRBV20-1, TRBJ2-3)
CSASGLAGGPGTTDTQYF

SEQ ID NO: 57507 - protein, 19 aa, Homo sapiens
  CDR3 for alpha chain variable domain of TCR clone 28754 (TRAV27, TRAJ53)
ASTSVQSRNSGGSNYKLTL

SEQ ID NO: 57508 - protein, 14 aa, Homo sapiens
  CDR3 for beta chain variable domain of TCR clone 28754 (TRBV11-1, TRBJ2-7)
CASTFAVPSYEQYF

SEQ ID NO: 57509 - protein, 12 aa, Homo sapiens
  CDR3 for alpha chain variable domain of TCR clone 28755 (TRAV12-2, TRAJ33)
CAKMDSNYQLIW

SEQ ID NO: 57510 - protein, 14 aa, Homo sapiens
  CDR3 for beta chain variable domain of TCR clone 28755 (TRBV2, TRBJ2-7)
CASSLTSGGYEQYF

SEQ ID NO: 57511 - protein, 13 aa, Homo sapiens
  CDR3 for alpha chain variable domain of TCR clone 28756 (TRAV8-4, TRAJ48)
CAVSPFGNEKLTF

SEQ ID NO: 57512 - protein, 15 aa, Homo sapiens
  CDR3 for beta chain variable domain of TCR clone 28756 (TRBV20-1, TRBJ2-7)
CSARKGLAESYEQYF

SEQ ID NO: 57513 - protein, 12 aa, Homo sapiens
  CDR3 for alpha chain variable domain of TCR clone 28757 (TRAV8-3, TRAJ20)
CAVGANDYKLNF

SEQ ID NO: 57514 - protein, 16 aa, Homo sapiens
  CDR3 for beta chain variable domain of TCR clone 28757 (TRBV19, TRBJ2-2)
CASRSPGTGATGELFF

SEQ ID NO: 57515 - protein, 14 aa, Homo sapiens
  CDR3 for alpha chain variable domain of TCR clone 28758 (TRAV35, TRAJ33)
CAGSSQDSNYQLIW

SEQ ID NO: 57516 - protein, 15 aa, Homo sapiens
  CDR3 for beta chain variable domain of TCR clone 28758 (TRBV20-1, TRBJ2-7)
CSAEFGTSGAYEQYF

SEQ ID NO: 57517 - protein, 11 aa, Homo sapiens
  CDR3 for alpha chain variable domain of TCR clone 28759 (TRAV2, TRAJ13)
CASGGYQKVTF

SEQ ID NO: 57518 - protein, 14 aa, Homo sapiens
  CDR3 for beta chain variable domain of TCR clone 28759 (TRBV24-1, TRBJ1-1)
CATSIPRGDTEAFF

SEQ ID NO: 57519 - protein, 15 aa, Homo sapiens
  CDR3 for alpha chain variable domain of TCR clone 28760 (TRAV3, TRAJ36)
CAVRASQTRANNLFF

SEQ ID NO: 57520 - protein, 15 aa, Homo sapiens
  CDR3 for beta chain variable domain of TCR clone 28760 (TRBV3-1, TRBJ2-1)
CASSQDYTPRGEQFF

SEQ ID NO: 57521 - protein, 14 aa, Homo sapiens
  CDR3 for alpha chain variable domain of TCR clone 28761 (TRAV1-2, TRAJ16)
CAVNRFSDGQKLLF

SEQ ID NO: 57522 - protein, 13 aa, Homo sapiens
  CDR3 for beta chain variable domain of TCR clone 28761 (TRBV7-9, TRBJ1-2)
CASSLKQNYGHTF

SEQ ID NO: 57523 - protein, 14 aa, Homo sapiens
  CDR3 for alpha chain variable domain of TCR clone 28762 (TRAV17, TRAJ54)
CATDANQGAQKLVF

SEQ ID NO: 57524 - protein, 12 aa, Homo sapiens
  CDR3 for beta chain variable domain of TCR clone 28762 (TRBV6-3, TRBJ2-1)
CASSGAYNEQFF

SEQ ID NO: 57525 - protein, 13 aa, Homo sapiens
  CDR3 for alpha chain variable domain of TCR clone 28763 (TRAV2, TRAJ40)
CAVVTSGTYKYIF

SEQ ID NO: 57526 - protein, 14 aa, Homo sapiens
  CDR3 for beta chain variable domain of TCR clone 28763 (TRBV11-2, TRBJ2-5)
CASSRTGGIETQYF

SEQ ID NO: 57527 - protein, 14 aa, Homo sapiens
  CDR3 for alpha chain variable domain of TCR clone 28764 (TRAV26-1, TRAJ38)
CIADNAGNNRRLIW

SEQ ID NO: 57528 - protein, 14 aa, Homo sapiens
  CDR3 for beta chain variable domain of TCR clone 28764 (TRBV18, TRBJ2-7)
CASSPRGGSYEQYF

SEQ ID NO: 57529 - protein, 11 aa, Homo sapiens
  CDR3 for alpha chain variable domain of TCR clone 28765 (TRAV4, TRAJ23)
CLVAPGGKLIF

SEQ ID NO: 57530 - protein, 15 aa, Homo sapiens
  CDR3 for beta chain variable domain of TCR clone 28765 (TRBV7-2, TRBJ2-1)
CASSFQADEYNEQFL

SEQ ID NO: 57531 - protein, 14 aa, Homo sapiens
  CDR3 for alpha chain variable domain of TCR clone 28766 (TRAV2, TRAJ37)
CAVDFTSDTGKLIF

SEQ ID NO: 57532 - protein, 13 aa, Homo sapiens
  CDR3 for beta chain variable domain of TCR clone 28766 (TRBV20-1, TRBJ1-1)
CSAPLGGGTEAFF

SEQ ID NO: 57533 - protein, 15 aa, Homo sapiens
  CDR3 for alpha chain variable domain of TCR clone 28767 (TRAV35, TRAJ50)
CAVQLRKTSYDKVIF

SEQ ID NO: 57534 - protein, 12 aa, Homo sapiens
  CDR3 for beta chain variable domain of TCR clone 28767 (TRBV5-1, TRBJ2-5)
CASSLGLETQYF

SEQ ID NO: 57535 - protein, 14 aa, Homo sapiens
  CDR3 for alpha chain variable domain of TCR clone 28768 (TRAV1-2, TRAJ8)
CAVREDTGFQKLVF

SEQ ID NO: 57536 - protein, 11 aa, Homo sapiens
  CDR3 for beta chain variable domain of TCR clone 28768 (TRBV7-8, TRBJ2-7)
CASSLSLEQYF

SEQ ID NO: 57537 - protein, 17 aa, Homo sapiens
  CDR3 for alpha chain variable domain of TCR clone 28769 (TRAV3, TRAJ42)
CAVRDRDYGGSQGNLIF

SEQ ID NO: 57538 - protein, 15 aa, Homo sapiens
  CDR3 for beta chain variable domain of TCR clone 28769 (TRBV6-6, TRBJ2-7)
CASSYSYGGAYEQYF

SEQ ID NO: 57539 - protein, 15 aa, Homo sapiens
  CDR3 for alpha chain variable domain of TCR clone 28770 (TRAV16, TRAJ20)
CAVRDIKLSDYKLSF

SEQ ID NO: 57540 - protein, 15 aa, Homo sapiens
  CDR3 for beta chain variable domain of TCR clone 28770 (TRBV7-9, TRBJ1-6)
CASSSPGRGNSPLHF

SEQ ID NO: 57541 - protein, 15 aa, Homo sapiens
  CDR3 for alpha chain variable domain of TCR clone 28771 (TRAV12-2, TRAJ57)
CAVSRGQGGSEKLGF

SEQ ID NO: 57542 - protein, 14 aa, Homo sapiens
  CDR3 for beta chain variable domain of TCR clone 28771 (TRBV20-1, TRBJ2-1)
CSAHPGLPYNEQFF

SEQ ID NO: 57543 - protein, 14 aa, Homo sapiens
  CDR3 for alpha chain variable domain of TCR clone 28772 (TRAV1-2, TRAJ8)
CAVREDTDFQKLVF

SEQ ID NO: 57544 - protein, 14 aa, Homo sapiens
  CDR3 for beta chain variable domain of TCR clone 28772 (TRBV15, TRBJ2-3)
CATRSGTSTDTQYF

SEQ ID NO: 57545 - protein, 16 aa, Homo sapiens
  CDR3 for alpha chain variable domain of TCR clone 28773 (TRAV30, TRAJ24)
CGTEIVDADSWGKFQF

SEQ ID NO: 57546 - protein, 13 aa, Homo sapiens
  CDR3 for beta chain variable domain of TCR clone 28773 (TRBV7-2, TRBJ2-4)
CASSREHANIQYF

SEQ ID NO: 57547 - protein, 14 aa, Homo sapiens
  CDR3 for alpha chain variable domain of TCR clone 28774 (TRAV12-2, TRAJ13)
CAVKKTGGYQKVTF

SEQ ID NO: 57548 - protein, 13 aa, Homo sapiens
  CDR3 for beta chain variable domain of TCR clone 28774 (TRBV12-4, TRBJ2-7)
CASSPTETYEQYF

SEQ ID NO: 57549 - protein, 15 aa, Homo sapiens
  CDR3 for alpha chain variable domain of TCR clone 28775 (TRAV8-3, TRAJ11)
CAVGLLNSGYGTLTF

SEQ ID NO: 57550 - protein, 16 aa, Homo sapiens
  CDR3 for beta chain variable domain of TCR clone 28775 (TRBV7-9, TRBJ1-2)
CASSLGFSSGEDGYTF

SEQ ID NO: 57551 - protein, 18 aa, Homo sapiens
  CDR3 for alpha chain variable domain of TCR clone 28776 (TRAV26-2, TRAJ54)
CILRDVEVGIQGAQKLVF

SEQ ID NO: 57552 - protein, 16 aa, Homo sapiens
  CDR3 for beta chain variable domain of TCR clone 28776 (TRBV6-1, TRBJ2-5)
CASSETLDRGAEAQYF

SEQ ID NO: 57553 - protein, 12 aa, Homo sapiens
  CDR3 for alpha chain variable domain of TCR clone 28777 (TRAV12-1, TRAJ40)
CVVYSGTYKYIF

SEQ ID NO: 57554 - protein, 15 aa, Homo sapiens
  CDR3 for beta chain variable domain of TCR clone 28777 (TRBV6-5, TRBJ2-1)
CASSYDAGAGNEQFF

SEQ ID NO: 57555 - protein, 14 aa, Homo sapiens
  CDR3 for alpha chain variable domain of TCR clone 28778 (TRAV8-2, TRAJ4)
CVVSPSGDYNKLIF

SEQ ID NO: 57556 - protein, 16 aa, Homo sapiens
  CDR3 for beta chain variable domain of TCR clone 28778 (TRBV15, TRBJ2-7)
CATSARQARSSYEQYF

SEQ ID NO: 57557 - protein, 16 aa, Homo sapiens
  CDR3 for alpha chain variable domain of TCR clone 28779 (TRAV12-3, TRAJ53)
CAMSPGSGGSNYKLTF

SEQ ID NO: 57558 - protein, 13 aa, Homo sapiens
  CDR3 for beta chain variable domain of TCR clone 28779 (TRBV27, TRBJ1-1)
CASSLSIGAEAFF

SEQ ID NO: 57559 - protein, 13 aa, Homo sapiens
  CDR3 for alpha chain variable domain of TCR clone 28780 (TRAV23/DV6, TRAJ45)
CAARRGGADGLIF

SEQ ID NO: 57560 - protein, 14 aa, Homo sapiens
  CDR3 for beta chain variable domain of TCR clone 28780 (TRBV7-2, TRBJ2-3)
CASSLARGTDTQYF

SEQ ID NO: 57561 - protein, 11 aa, Homo sapiens
  CDR3 for alpha chain variable domain of TCR clone 28781 (TRAV1-2, TRAJ31)
YAVNNNARLMF

SEQ ID NO: 57562 - protein, 15 aa, Homo sapiens
  CDR3 for beta chain variable domain of TCR clone 28781 (TRBV28, TRBJ2-1)
CASSIIAGGRSEQFF

SEQ ID NO: 57563 - protein, 10 aa, Homo sapiens
  CDR3 for alpha chain variable domain of TCR clone 28782 (TRAV16, TRAJ22)
SAMYLRQLTF

SEQ ID NO: 57564 - protein, 15 aa, Homo sapiens
  CDR3 for beta chain variable domain of TCR clone 28782 (TRBV7-9, TRBJ1-6)
CASSSPGRGNSPLPF

SEQ ID NO: 57565 - protein, 13 aa, Homo sapiens
  CDR3 for alpha chain variable domain of TCR clone 28783 (TRAV35, TRAJ42)
CAGFPGIQGNLIF

SEQ ID NO: 57566 - protein, 13 aa, Homo sapiens
  CDR3 for beta chain variable domain of TCR clone 28783 (TRBV29-1, TRBJ2-1)
CSVEGGRVNEQFF

SEQ ID NO: 57567 - protein, 13 aa, Homo sapiens
  CDR3 for alpha chain variable domain of TCR clone 28784 (TRAV8-6, TRAJ13)
CAVSSGGYQKVTF

SEQ ID NO: 57568 - protein, 15 aa, Homo sapiens
  CDR3 for beta chain variable domain of TCR clone 28784 (TRBV7-9, TRBJ2-7)
CDSSLPMGQANEQYF

SEQ ID NO: 57569 - protein, 14 aa, Homo sapiens
  CDR3 for alpha chain variable domain of TCR clone 28785 (TRAV17, TRAJ22)
CATSPSGSARQLTF

SEQ ID NO: 57570 - protein, 15 aa, Homo sapiens
  CDR3 for beta chain variable domain of TCR clone 28785 (TRBV4-1, TRBJ2-5)
CASSQWGLYQETQYF

SEQ ID NO: 57571 - protein, 14 aa, Homo sapiens
  CDR3 for alpha chain variable domain of TCR clone 28786 (TRAV13-1, TRAJ35)
CAASKGGFGNVLHC

SEQ ID NO: 57572 - protein, 17 aa, Homo sapiens
  CDR3 for beta chain variable domain of TCR clone 28786 (TRBV7-8, TRBJ2-6)
CASSAGTGGAGANVLTF

SEQ ID NO: 57573 - protein, 12 aa, Homo sapiens
  CDR3 for alpha chain variable domain of TCR clone 28787 (TRAV13-1, TRAJ21)
CAAKEGFNKFYF

SEQ ID NO: 57574 - protein, 15 aa, Homo sapiens
  CDR3 for beta chain variable domain of TCR clone 28787 (TRBV27, TRBJ2-7)
CASRFWGQGADEQYF

SEQ ID NO: 57575 - protein, 12 aa, Homo sapiens
  CDR3 for alpha chain variable domain of TCR clone 28788 (TRAV21, TRAJ31)
CAVWGNNARLMF

SEQ ID NO: 57576 - protein, 15 aa, Homo sapiens
  CDR3 for beta chain variable domain of TCR clone 28788 (TRBV13, TRBJ2-1)
CASSSQGGTYNEQFF

SEQ ID NO: 57577 - protein, 15 aa, Homo sapiens
  CDR3 for alpha chain variable domain of TCR clone 28789 (TRAV3, TRAJ3)
CAVRDRDSSASKIIF

SEQ ID NO: 57578 - protein, 18 aa, Homo sapiens
  CDR3 for beta chain variable domain of TCR clone 28789 (TRBV25-1, TRBJ1-2)
CASSGLQNGQGLILGYTF

SEQ ID NO: 57579 - protein, 13 aa, Homo sapiens
  CDR3 for alpha chain variable domain of TCR clone 28790 (TRAV12-2, TRAJ10)
CAVPTGGGNKPTF

SEQ ID NO: 57580 - protein, 11 aa, Homo sapiens
  CDR3 for beta chain variable domain of TCR clone 28790 (TRBV6-1, TRBJ2-1)
CASISSNEQFF

SEQ ID NO: 57581 - protein, 15 aa, Homo sapiens
  CDR3 for alpha chain variable domain of TCR clone 28791 (TRAV2, TRAJ9)
CAVAALNTGGFKTIF

SEQ ID NO: 57582 - protein, 13 aa, Homo sapiens
  CDR3 for beta chain variable domain of TCR clone 28791 (TRBV7-9, TRBJ1-2)
CASSLKQNYGYTF

SEQ ID NO: 57583 - protein, 14 aa, Homo sapiens
  CDR3 for alpha chain variable domain of TCR clone 28792 (TRAV12-2, TRAJ13)
CAVKKTGGYQKVTF

SEQ ID NO: 57584 - protein, 12 aa, Homo sapiens
  CDR3 for beta chain variable domain of TCR clone 28792 (TRBV12-4, TRBJ1-2)
CASSFIWLRLRF

SEQ ID NO: 57585 - protein, 14 aa, Homo sapiens
  CDR3 for alpha chain variable domain of TCR clone 28793 (TRAV2, TRAJ37)
CAVDFTSNTGKLIF

SEQ ID NO: 57586 - protein, 15 aa, Homo sapiens
  CDR3 for beta chain variable domain of TCR clone 28793 (TRBV20-1, TRBJ1-1)
CSASRGMTGNTEAFF

SEQ ID NO: 57587 - protein, 15 aa, Homo sapiens
  CDR3 for alpha chain variable domain of TCR clone 28794 (TRAV8-3, TRAJ27)
CAVGPSKTNAGKSTF

SEQ ID NO: 57588 - protein, 14 aa, Homo sapiens
  CDR3 for beta chain variable domain of TCR clone 28794 (TRBV7-2, TRBJ2-7)
CASSPKTSFYEQYF

SEQ ID NO: 57589 - protein, 13 aa, Homo sapiens
  CDR3 for alpha chain variable domain of TCR clone 28795 (TRAV2, TRAJ40)
CAVVTSGTYKYIF

SEQ ID NO: 57590 - protein, 15 aa, Homo sapiens
  CDR3 for beta chain variable domain of TCR clone 28795 (TRBV11-3, TRBJ2-3)
CASLKDGREGDTQHF

SEQ ID NO: 57591 - protein, 14 aa, Homo sapiens
  CDR3 for alpha chain variable domain of TCR clone 28796 (TRAV17, TRAJ22)
CATSPSGSARQQTF

SEQ ID NO: 57592 - protein, 15 aa, Homo sapiens
  CDR3 for beta chain variable domain of TCR clone 28796 (TRBV4-1, TRBJ2-5)
CASSQWDLYQETQYF

SEQ ID NO: 57593 - protein, 13 aa, Homo sapiens
  CDR3 for alpha chain variable domain of TCR clone 28797 (TRAV12-3, TRAJ33)
CAMSVNSNYQLIW

SEQ ID NO: 57594 - protein, 13 aa, Homo sapiens
  CDR3 for beta chain variable domain of TCR clone 28797 (TRBV4-2, TRBJ1-1)
CASSQAGNTEAFF

SEQ ID NO: 57595 - protein, 15 aa, Homo sapiens
  CDR3 for alpha chain variable domain of TCR clone 28798 (TRAV12-1, TRAJ9)
CVVSFGDTGGFKTIF

SEQ ID NO: 57596 - protein, 13 aa, Homo sapiens
  CDR3 for beta chain variable domain of TCR clone 28798 (TRBV2, TRBJ1-4)
CASSGRAGEKLFF

SEQ ID NO: 57597 - protein, 13 aa, Homo sapiens
  CDR3 for alpha chain variable domain of TCR clone 28799 (TRAV21, TRAJ20)
CAVGLRVDYKLSF

SEQ ID NO: 57598 - protein, 15 aa, Homo sapiens
  CDR3 for beta chain variable domain of TCR clone 28799 (TRBV7-9, TRBJ1-6)
CASSSPGRGNSPLHF

SEQ ID NO: 57599 - protein, 16 aa, Homo sapiens
  CDR3 for alpha chain variable domain of TCR clone 28800 (TRAV30, TRAJ24)
CGTEIVDADSWGKFQF

SEQ ID NO: 57600 - protein, 13 aa, Homo sapiens
  CDR3 for beta chain variable domain of TCR clone 28800 (TRBV5-5, TRBJ1-2)
CASSFWRGEDYTF

SEQ ID NO: 57601 - protein, 14 aa, Homo sapiens
  CDR3 for alpha chain variable domain of TCR clone 28801 (TRAV1-2, TRAJ16)
CAVNRFSDGQKLLF

SEQ ID NO: 57602 - protein, 13 aa, Homo sapiens
  CDR3 for beta chain variable domain of TCR clone 28801 (TRBV29-1, TRBJ2-5)
CSAGTGGYETQYF

SEQ ID NO: 57603 - protein, 11 aa, Homo sapiens
  CDR3 for alpha chain variable domain of TCR clone 28802 (TRAV17, TRAJ9)
CATTGGFKSIF

SEQ ID NO: 57604 - protein, 14 aa, Homo sapiens
  CDR3 for beta chain variable domain of TCR clone 28802 (TRBV7-9, TRBJ2-2)
CASSGLADTGELFF

SEQ ID NO: 57605 - protein, 15 aa, Homo sapiens
  CDR3 for alpha chain variable domain of TCR clone 28803 (TRAV17, TRAJ6)
CATDLPSGGSYIPTF

SEQ ID NO: 57606 - protein, 16 aa, Homo sapiens
  CDR3 for beta chain variable domain of TCR clone 28803 (TRBV4-1, TRBJ2-7)
CASSQDPTGYSYEQYS

SEQ ID NO: 57607 - protein, 14 aa, Homo sapiens
  CDR3 for alpha chain variable domain of TCR clone 28804 (TRAV17, TRAJ16)
CATADFSDGQKLLF

SEQ ID NO: 57608 - protein, 12 aa, Homo sapiens
  CDR3 for beta chain variable domain of TCR clone 28804 (TRBV11-2, TRBJ2-2)
CASSLGGGELFF

SEQ ID NO: 57609 - protein, 12 aa, Homo sapiens
  CDR3 for alpha chain variable domain of TCR clone 28805 (TRAV23/DV6, TRAJ30)
CAASKGEDKIIF

SEQ ID NO: 57610 - protein, 18 aa, Homo sapiens
  CDR3 for beta chain variable domain of TCR clone 28805 (TRBV10-3, TRBJ2-3)
CAISESRVGPMRGDTQYF

SEQ ID NO: 57611 - protein, 15 aa, Homo sapiens
  CDR3 for alpha chain variable domain of TCR clone 28806 (TRAV13-1, TRAJ11)
CAASNRNSGYSTPTF

SEQ ID NO: 57612 - protein, 11 aa, Homo sapiens
  CDR3 for beta chain variable domain of TCR clone 28806 (TRBV20-1, TRBJ2-7)
CSARLSYEQYF

SEQ ID NO: 57613 - protein, 14 aa, Homo sapiens
  CDR3 for alpha chain variable domain of TCR clone 28807 (TRAV12-2, TRAJ13)
CAVKKTGGYQKVAF

SEQ ID NO: 57614 - protein, 15 aa, Homo sapiens
  CDR3 for beta chain variable domain of TCR clone 28807 (TRBV27, TRBJ2-1)
CASSNGGGSSNEHFF

SEQ ID NO: 57615 - protein, 15 aa, Homo sapiens
  CDR3 for alpha chain variable domain of TCR clone 28808 (TRAV4, TRAJ3)
CLVGDSDSSASKIIF

SEQ ID NO: 57616 - protein, 14 aa, Homo sapiens
  CDR3 for beta chain variable domain of TCR clone 28808 (TRBV7-9, TRBJ2-7)
CASSLQQGGYERYF

SEQ ID NO: 57617 - protein, 11 aa, Homo sapiens
  CDR3 for alpha chain variable domain of TCR clone 28809 (TRAV3, TRAJ21)
CAVGNFNKFYF

SEQ ID NO: 57618 - protein, 18 aa, Homo sapiens
  CDR3 for beta chain variable domain of TCR clone 28809 (TRBV7-9, TRBJ2-7)
CASSLTTSGSRTWYEQYF

SEQ ID NO: 57619 - protein, 13 aa, Homo sapiens
  CDR3 for alpha chain variable domain of TCR clone 28810 (TRAV22, TRAJ29)
CAVGGSGNTPLVL

SEQ ID NO: 57620 - protein, 13 aa, Homo sapiens
  CDR3 for beta chain variable domain of TCR clone 28810 (TRBV4-2, TRBJ1-1)
CASSQAGNTEAFF

SEQ ID NO: 57621 - protein, 16 aa, Homo sapiens
  CDR3 for alpha chain variable domain of TCR clone 28811 (TRAV30, TRAJ24)
CGTEIVDADSWGKFQF

SEQ ID NO: 57622 - protein, 15 aa, Homo sapiens
  CDR3 for beta chain variable domain of TCR clone 28811 (TRBV20-1, TRBJ2-7)
CSARVPAAYFYEQYF

SEQ ID NO: 57623 - protein, 16 aa, Homo sapiens
  CDR3 for alpha chain variable domain of TCR clone 28812 (TRAV3, TRAJ37)
CAVRGKGSGNTGKLIF

SEQ ID NO: 57624 - protein, 13 aa, Homo sapiens
  CDR3 for beta chain variable domain of TCR clone 28812 (TRBV14, TRBJ2-7)
CASSQDHRYEQYF

SEQ ID NO: 57625 - protein, 10 aa, Homo sapiens
  CDR3 for alpha chain variable domain of TCR clone 28813 (TRAV12-1, TRAJ43)
CVVHSNDMRF

SEQ ID NO: 57626 - protein, 13 aa, Homo sapiens
  CDR3 for beta chain variable domain of TCR clone 28813 (TRBV12-4, TRBJ1-2)
CASSSGLTVISTF

SEQ ID NO: 57627 - protein, 18 aa, Homo sapiens
  CDR3 for alpha chain variable domain of TCR clone 28814 (TRAV26-1, TRAJ52)
CIVRVEGAGGTSYGKLTF

SEQ ID NO: 57628 - protein, 15 aa, Homo sapiens
  CDR3 for beta chain variable domain of TCR clone 28814 (TRBV15, TRBJ1-3)
CATSRDRGPGNTIYF

SEQ ID NO: 57629 - protein, 15 aa, Homo sapiens
  CDR3 for alpha chain variable domain of TCR clone 28815 (TRAV2, TRAJ15)
CAVEDRGQAGTALIS

SEQ ID NO: 57630 - protein, 13 aa, Homo sapiens
  CDR3 for beta chain variable domain of TCR clone 28815 (TRBV10-2, TRBJ2-7)
CASGASGGYEQYF

SEQ ID NO: 57631 - protein, 14 aa, Homo sapiens
  CDR3 for alpha chain variable domain of TCR clone 28816 (TRAV9-2, TRAJ39)
CALYIYNAGNMLTF

SEQ ID NO: 57632 - protein, 15 aa, Homo sapiens
  CDR3 for beta chain variable domain of TCR clone 28816 (TRBV7-8, TRBJ2-1)
CASSLADSLYNEQFF

SEQ ID NO: 57633 - protein, 14 aa, Homo sapiens
  CDR3 for alpha chain variable domain of TCR clone 28817 (TRAV1-2, TRAJ8)
CAVREDTGFQKLVF

SEQ ID NO: 57634 - protein, 15 aa, Homo sapiens
  CDR3 for beta chain variable domain of TCR clone 28817 (TRBV11-2, TRBJ1-3)
CASSAHSSSGNTIYF

SEQ ID NO: 57635 - protein, 10 aa, Homo sapiens
  CDR3 for alpha chain variable domain of TCR clone 28818 (TRAV8-4, TRAJ43)
CAMSADDMRF

SEQ ID NO: 57636 - protein, 15 aa, Homo sapiens
  CDR3 for beta chain variable domain of TCR clone 28818 (TRBV5-1, TRBJ2-3)
CASSVTSGSTDTQYF

SEQ ID NO: 57637 - protein, 18 aa, Homo sapiens
  CDR3 for alpha chain variable domain of TCR clone 28819 (TRAV29/DV5, TRAJ52)
FAAGFRGAGGTSYGKLTF

SEQ ID NO: 57638 - protein, 16 aa, Homo sapiens
  CDR3 for beta chain variable domain of TCR clone 28819 (TRBV7-3, TRBJ2-2)
CASSLKRGTLSGELFF

SEQ ID NO: 57639 - protein, 14 aa, Homo sapiens
  CDR3 for alpha chain variable domain of TCR clone 28820 (TRAV1-2, TRAJ8)
CAVREDTGFQKLVF

SEQ ID NO: 57640 - protein, 19 aa, Homo sapiens
  CDR3 for beta chain variable domain of TCR clone 28820 (TRBV19, TRBJ2-5)
CASSIGQVTDFFLGETQYF

SEQ ID NO: 57641 - protein, 14 aa, Homo sapiens
  CDR3 for alpha chain variable domain of TCR clone 28821 (TRAV12-3, TRAJ29)
CAMILLSGNTPLVF

SEQ ID NO: 57642 - protein, 13 aa, Homo sapiens
  CDR3 for beta chain variable domain of TCR clone 28821 (TRBV5-7, TRBJ2-3)
CASSLGRTDTQYF

SEQ ID NO: 57643 - protein, 10 aa, Homo sapiens
  CDR3 for alpha chain variable domain of TCR clone 28822 (TRAV30, TRAJ48)
CGTGNEKLTF

SEQ ID NO: 57644 - protein, 15 aa, Homo sapiens
  CDR3 for beta chain variable domain of TCR clone 28822 (TRBV28, TRBJ2-5)
CASSPPWSYQETQYF

SEQ ID NO: 57645 - protein, 13 aa, Homo sapiens
  CDR3 for alpha chain variable domain of TCR clone 28823 (TRAV8-3, TRAJ48)
CAVVPFGNEKLTF

SEQ ID NO: 57646 - protein, 15 aa, Homo sapiens
  CDR3 for beta chain variable domain of TCR clone 28823 (TRBV11-2, TRBJ2-1)
CASSSPSTRHNEQFF

SEQ ID NO: 57647 - protein, 12 aa, Homo sapiens
  CDR3 for alpha chain variable domain of TCR clone 28824 (TRAV30, TRAJ39)
CGRGNAGNMLTF

SEQ ID NO: 57648 - protein, 15 aa, Homo sapiens
  CDR3 for beta chain variable domain of TCR clone 28824 (TRBV5-1, TRBJ1-1)
CASSWKGRGNTEAFF

SEQ ID NO: 57649 - protein, 14 aa, Homo sapiens
  CDR3 for alpha chain variable domain of TCR clone 28825 (TRAV4, TRAJ32)
CLVNYGGATNKLIF

SEQ ID NO: 57650 - protein, 14 aa, Homo sapiens
  CDR3 for beta chain variable domain of TCR clone 28825 (TRBV15, TRBJ2-5)
CATSGGTRAETQYF

SEQ ID NO: 57651 - protein, 12 aa, Homo sapiens
  CDR3 for alpha chain variable domain of TCR clone 28826 (TRAV13-2, TRAJ23)
CAERHRGGKLIF

SEQ ID NO: 57652 - protein, 17 aa, Homo sapiens
  CDR3 for beta chain variable domain of TCR clone 28826 (TRBV13, TRBJ2-3)
CASSLSRVAGGRNTQYF

SEQ ID NO: 57653 - protein, 17 aa, Homo sapiens
  CDR3 for alpha chain variable domain of TCR clone 28827 (TRAV3, TRAJ12)
CAVRDGGRMDSSYKLIF

SEQ ID NO: 57654 - protein, 16 aa, Homo sapiens
  CDR3 for beta chain variable domain of TCR clone 28827 (TRBV27, TRBJ2-2)
CASSFRGLVRTGELFF

SEQ ID NO: 57655 - protein, 15 aa, Homo sapiens
  CDR3 for alpha chain variable domain of TCR clone 28828 (TRAV26-1, TRAJ29)
CIVRVEGSGNTPLVF

SEQ ID NO: 57656 - protein, 11 aa, Homo sapiens
  CDR3 for beta chain variable domain of TCR clone 28828 (TRBV11-2, TRBJ2-2)
CASSLPGELFF

SEQ ID NO: 57657 - protein, 14 aa, Homo sapiens
  CDR3 for alpha chain variable domain of TCR clone 28829 (TRAV1-2, TRAJ6)
CAVSLSGGSYIPTF

SEQ ID NO: 57658 - protein, 13 aa, Homo sapiens
  CDR3 for beta chain variable domain of TCR clone 28829 (TRBV7-9, TRBJ1-2)
CASSLKQNYGYTF

SEQ ID NO: 57659 - protein, 16 aa, Homo sapiens
  CDR3 for alpha chain variable domain of TCR clone 28830 (TRAV30, TRAJ24)
CGTEIVDADRWGKFQF

SEQ ID NO: 57660 - protein, 13 aa, Homo sapiens
  CDR3 for beta chain variable domain of TCR clone 28830 (TRBV11-2, TRBJ2-5)
CASSSTGEETQYF

SEQ ID NO: 57661 - protein, 13 aa, Homo sapiens
  CDR3 for alpha chain variable domain of TCR clone 28831 (TRAV2, TRAJ40)
CAVVTSGTCKYIF

SEQ ID NO: 57662 - protein, 16 aa, Homo sapiens
  CDR3 for beta chain variable domain of TCR clone 28831 (TRBV19, TRBJ2-2)
CASRSPGTGATGELFF

SEQ ID NO: 57663 - protein, 13 aa, Homo sapiens
  CDR3 for alpha chain variable domain of TCR clone 28832 (TRAV21, TRAJ15)
CAVANQAGTALIF

SEQ ID NO: 57664 - protein, 14 aa, Homo sapiens
  CDR3 for beta chain variable domain of TCR clone 28832 (TRBV27, TRBJ2-2)
CASSSGAATGELFF

SEQ ID NO: 57665 - protein, 16 aa, Homo sapiens
  CDR3 for alpha chain variable domain of TCR clone 28833 (TRAV30, TRAJ24)
CGTEIVDADSWGKFQF

SEQ ID NO: 57666 - protein, 15 aa, Homo sapiens
  CDR3 for beta chain variable domain of TCR clone 28833 (TRBV7-9, TRBJ1-4)
CASSARIGGNEKLFF

SEQ ID NO: 57667 - protein, 15 aa, Homo sapiens
  CDR3 for alpha chain variable domain of TCR clone 28834 (TRAV26-1, TRAJ15)
CIVRAANQAGTALIF

SEQ ID NO: 57668 - protein, 15 aa, Homo sapiens
  CDR3 for beta chain variable domain of TCR clone 28834 (TRBV20-1, TRBJ1-1)
CSARSAATSNTGAFF

SEQ ID NO: 57669 - protein, 15 aa, Homo sapiens
  CDR3 for alpha chain variable domain of TCR clone 28835 (TRAV25, TRAJ52)
CAGRPGGTSYGKLTF

SEQ ID NO: 57670 - protein, 17 aa, Homo sapiens
  CDR3 for beta chain variable domain of TCR clone 28835 (TRBV7-8, TRBJ2-6)
CASSAGTGGAGANVLTC

SEQ ID NO: 57671 - protein, 14 aa, Homo sapiens
  CDR3 for alpha chain variable domain of TCR clone 28836 (TRAV1-2, TRAJ8)
CAVREDTGFQKLVF

SEQ ID NO: 57672 - protein, 12 aa, Homo sapiens
  CDR3 for beta chain variable domain of TCR clone 28836 (TRBV7-9, TRBJ1-5)
CASSPQGQPQHF

SEQ ID NO: 57673 - protein, 16 aa, Homo sapiens
  CDR3 for alpha chain variable domain of TCR clone 28837 (TRAV23/DV6, TRAJ48)
CAASGVVNFGNEKLTF

SEQ ID NO: 57674 - protein, 15 aa, Homo sapiens
  CDR3 for beta chain variable domain of TCR clone 28837 (TRBV20-1, TRBJ2-5)
CSAGLAGVSQEIQYF

SEQ ID NO: 57675 - protein, 13 aa, Homo sapiens
  CDR3 for alpha chain variable domain of TCR clone 28838 (TRAV20, TRAJ34)
CAVSPYNTDKLIF

SEQ ID NO: 57676 - protein, 13 aa, Homo sapiens
  CDR3 for beta chain variable domain of TCR clone 28838 (TRBV7-9, TRBJ1-2)
CASSLKQNYGYTF

SEQ ID NO: 57677 - protein, 15 aa, Homo sapiens
  CDR3 for alpha chain variable domain of TCR clone 28839 (TRAV12-1, TRAJ44)
CVADLPTGTASKITF

SEQ ID NO: 57678 - protein, 13 aa, Homo sapiens
  CDR3 for beta chain variable domain of TCR clone 28839 (TRBV6-5, TRBJ2-5)
CASSPQGGETQYF

SEQ ID NO: 57679 - protein, 10 aa, Homo sapiens
  CDR3 for alpha chain variable domain of TCR clone 28840 (TRAV8-4, TRAJ43)
CAVSADDMRF

SEQ ID NO: 57680 - protein, 13 aa, Homo sapiens
  CDR3 for beta chain variable domain of TCR clone 28840 (TRBV7-3, TRBJ1-1)
CASSQDWGAEAFF

SEQ ID NO: 57681 - protein, 15 aa, Homo sapiens
  CDR3 for alpha chain variable domain of TCR clone 28841 (TRAV17, TRAJ16)
CATALRFSDVQKLLF

SEQ ID NO: 57682 - protein, 15 aa, Homo sapiens
  CDR3 for beta chain variable domain of TCR clone 28841 (TRBV13, TRBJ1-5)
CASSFGQGGVQPQHF

SEQ ID NO: 57683 - protein, 13 aa, Homo sapiens
  CDR3 for alpha chain variable domain of TCR clone 28842 (TRAV35, TRAJ42)
CAGFPGSQGNLIF

SEQ ID NO: 57684 - protein, 14 aa, Homo sapiens
  CDR3 for beta chain variable domain of TCR clone 28842 (TRBV19, TRBJ2-1)
CASPTFVLGGEQFF

SEQ ID NO: 57685 - protein, 13 aa, Homo sapiens
  CDR3 for alpha chain variable domain of TCR clone 28843 (TRAV21, TRAJ20)
CAVGLRVDYKLSF

SEQ ID NO: 57686 - protein, 13 aa, Homo sapiens
  CDR3 for beta chain variable domain of TCR clone 28843 (TRBV4-2, TRBJ1-1)
CASSQAGNTEAFF

SEQ ID NO: 57687 - protein, 14 aa, Homo sapiens
  CDR3 for alpha chain variable domain of TCR clone 28844 (TRAV12-2, TRAJ17)
CAVLFKAAGNKLTF

SEQ ID NO: 57688 - protein, 17 aa, Homo sapiens
  CDR3 for beta chain variable domain of TCR clone 28844 (TRBV20-1, TRBJ2-2)
CSASGSGQGGLTWELFF

SEQ ID NO: 57689 - protein, 13 aa, Homo sapiens
  CDR3 for alpha chain variable domain of TCR clone 28845 (TRAV13-1, TRAJ39)
CSKYSNAGNMLTF

SEQ ID NO: 57690 - protein, 16 aa, Homo sapiens
  CDR3 for beta chain variable domain of TCR clone 28845 (TRBV7-3, TRBJ2-2)
CASSLKRGTLSGELFF

SEQ ID NO: 57691 - protein, 11 aa, Homo sapiens
  CDR3 for alpha chain variable domain of TCR clone 28846 (TRAV2, TRAJ33)
CAVESNYQLIW

SEQ ID NO: 57692 - protein, 16 aa, Homo sapiens
  CDR3 for beta chain variable domain of TCR clone 28846 (TRBV7-3, TRBJ2-2)
CASSLKRGTLSGELFF

SEQ ID NO: 57693 - protein, 14 aa, Homo sapiens
  CDR3 for alpha chain variable domain of TCR clone 28847 (TRAV12-3, TRAJ29)
CAMILLSGNTPLVF

SEQ ID NO: 57694 - protein, 16 aa, Homo sapiens
  CDR3 for beta chain variable domain of TCR clone 28847 (TRBV28, TRBJ2-7)
CASSPGTSGRGYEQYF

SEQ ID NO: 57695 - protein, 15 aa, Homo sapiens
  CDR3 for alpha chain variable domain of TCR clone 28848 (TRAV12-3, TRAJ6)
CAMSATTGGSYIPTF

SEQ ID NO: 57696 - protein, 17 aa, Homo sapiens
  CDR3 for beta chain variable domain of TCR clone 28848 (TRBV11-2, TRBJ2-1)
CASSLYPPGVEYNEQFF

SEQ ID NO: 57697 - protein, 16 aa, Homo sapiens
  CDR3 for alpha chain variable domain of TCR clone 28849 (TRAV3, TRAJ21)
CAVRDIERGNFNKFYF

SEQ ID NO: 57698 - protein, 13 aa, Homo sapiens
  CDR3 for beta chain variable domain of TCR clone 28849 (TRBV7-3, TRBJ1-1)
CASSQDWGAEAFF

SEQ ID NO: 57699 - protein, 16 aa, Homo sapiens
  CDR3 for alpha chain variable domain of TCR clone 28850 (TRAV3, TRAJ5)
CAVRNLMDTCRRALTF

SEQ ID NO: 57700 - protein, 16 aa, Homo sapiens
  CDR3 for beta chain variable domain of TCR clone 28850 (TRBV4-2, TRBJ2-7)
CASSQEGLANSYEQYF

SEQ ID NO: 57701 - protein, 13 aa, Homo sapiens
  CDR3 for alpha chain variable domain of TCR clone 28851 (TRAV35, TRAJ42)
CAGFPGSQGNLIF

SEQ ID NO: 57702 - protein, 14 aa, Homo sapiens
  CDR3 for beta chain variable domain of TCR clone 28851 (TRBV12-5, TRBJ2-5)
CASGSRTHQETQYF

SEQ ID NO: 57703 - protein, 11 aa, Homo sapiens
  CDR3 for alpha chain variable domain of TCR clone 28852 (TRAV1-1, TRAJ23)
CAVRLGGKLIF

SEQ ID NO: 57704 - protein, 20 aa, Homo sapiens
  CDR3 for beta chain variable domain of TCR clone 28852 (TRBV7-8, TRBJ2-2)
CASSHLFPGPTIHITGELFF

SEQ ID NO: 57705 - protein, 13 aa, Homo sapiens
  CDR3 for alpha chain variable domain of TCR clone 28853 (TRAV8-3, TRAJ36)
CAVGATGANNLFF

SEQ ID NO: 57706 - protein, 15 aa, Homo sapiens
  CDR3 for beta chain variable domain of TCR clone 28853 (TRBV7-2, TRBJ1-2)
CASSPRAGWNYGCTF

SEQ ID NO: 57707 - protein, 12 aa, Homo sapiens
  CDR3 for alpha chain variable domain of TCR clone 28854 (TRAV2, TRAJ9)
CAVGAGGFKTIF

SEQ ID NO: 57708 - protein, 16 aa, Homo sapiens
  CDR3 for beta chain variable domain of TCR clone 28854 (TRBV13, TRBJ2-2)
CASSPRTGEHTVELFF

SEQ ID NO: 57709 - protein, 11 aa, Homo sapiens
  CDR3 for alpha chain variable domain of TCR clone 28855 (TRAV3, TRAJ21)
CAVGNFNKFYF

SEQ ID NO: 57710 - protein, 13 aa, Homo sapiens
  CDR3 for beta chain variable domain of TCR clone 28855 (TRBV19, TRBJ1-2)
CASSQGQVYGYTF

SEQ ID NO: 57711 - protein, 15 aa, Homo sapiens
  CDR3 for alpha chain variable domain of TCR clone 28856 (TRAV27, TRAJ38)
CAARRNAGNNRKLIW

SEQ ID NO: 57712 - protein, 14 aa, Homo sapiens
  CDR3 for beta chain variable domain of TCR clone 28856 (TRBV18, TRBJ2-5)
CASSPGVSQETQYF

SEQ ID NO: 57713 - protein, 12 aa, Homo sapiens
  CDR3 for alpha chain variable domain of TCR clone 28857 (TRAV12-3, TRAJ17)
CAMTLTGNKLTF

SEQ ID NO: 57714 - protein, 14 aa, Homo sapiens
  CDR3 for beta chain variable domain of TCR clone 28857 (TRBV5-5, TRBJ1-5)
CASSGQGVDQPQHF

SEQ ID NO: 57715 - protein, 12 aa, Homo sapiens
  CDR3 for alpha chain variable domain of TCR clone 28858 (TRAV12-2, TRAJ10)
WGVTGGGNKLTF

SEQ ID NO: 57716 - protein, 16 aa, Homo sapiens
  CDR3 for beta chain variable domain of TCR clone 28858 (TRBV6-4, TRBJ1-2)
CASSEAVGGPNYGYTF

SEQ ID NO: 57717 - protein, 16 aa, Homo sapiens
  CDR3 for alpha chain variable domain of TCR clone 28859 (TRAV3, TRAJ37)
FAVRPHGSGNTGKLIF

SEQ ID NO: 57718 - protein, 16 aa, Homo sapiens
  CDR3 for beta chain variable domain of TCR clone 28859 (TRBV9, TRBJ1-2)
CASSVEEKVSPYGYTF

SEQ ID NO: 57719 - protein, 15 aa, Homo sapiens
  CDR3 for alpha chain variable domain of TCR clone 28860 (TRAV29/DV5, TRAJ29)
CSASERSSGNTPLVF

SEQ ID NO: 57720 - protein, 17 aa, Homo sapiens
  CDR3 for beta chain variable domain of TCR clone 28860 (TRBV4-1, TRBJ1-4)
CASSQEGPRGVEEKLFF

SEQ ID NO: 57721 - protein, 23 aa, Homo sapiens
  CDR3 for alpha chain variable domain of TCR clone 28861 (TRAV26-1, TRAJ38)
CIADNAGNNHIQNPDPAVYQLRD

SEQ ID NO: 57722 - protein, 13 aa, Homo sapiens
  CDR3 for beta chain variable domain of TCR clone 28861 (TRBV20-1, TRBJ1-1)
CSAGGGGNTEAFF

SEQ ID NO: 57723 - protein, 12 aa, Homo sapiens
  CDR3 for alpha chain variable domain of TCR clone 28862 (TRAV2, TRAJ9)
CAVGAGGFKTIF

SEQ ID NO: 57724 - protein, 16 aa, Homo sapiens
  CDR3 for beta chain variable domain of TCR clone 28862 (TRBV13, TRBJ2-2)
CASSPRKGEHTGELFF

SEQ ID NO: 57725 - protein, 12 aa, Homo sapiens
  CDR3 for alpha chain variable domain of TCR clone 28863 (TRAV26-2, TRAJ47)
CILVEYGNKLVF

SEQ ID NO: 57726 - protein, 16 aa, Homo sapiens
  CDR3 for beta chain variable domain of TCR clone 28863 (TRBV18, TRBJ1-4)
CASSPLVGDRAEKLFL

SEQ ID NO: 57727 - protein, 13 aa, Homo sapiens
  CDR3 for alpha chain variable domain of TCR clone 28864 (TRAV12-2, TRAJ20)
CAVYPSNDYKLSF

SEQ ID NO: 57728 - protein, 15 aa, Homo sapiens
  CDR3 for beta chain variable domain of TCR clone 28864 (TRBV27, TRBJ2-5)
CAGSLYPRGGETQYF

SEQ ID NO: 57729 - protein, 16 aa, Homo sapiens
  CDR3 for alpha chain variable domain of TCR clone 28865 (TRAV3, TRAJ18)
CAVRDGRGSTLGRLYF

SEQ ID NO: 57730 - protein, 17 aa, Homo sapiens
  CDR3 for beta chain variable domain of TCR clone 28865 (TRBV5-1, TRBJ2-3)
CASSKIGLVDRTDTQYL

SEQ ID NO: 57731 - protein, 12 aa, Homo sapiens
  CDR3 for alpha chain variable domain of TCR clone 28866 (TRAV1-1, TRAJ39)
CAVPVVGNMLTF

SEQ ID NO: 57732 - protein, 15 aa, Homo sapiens
  CDR3 for beta chain variable domain of TCR clone 28866 (TRBV19, TRBJ1-6)
CASSTQGAVGSPLYF

SEQ ID NO: 57733 - protein, 15 aa, Homo sapiens
  CDR3 for alpha chain variable domain of TCR clone 28867 (TRAV12-1, TRAJ45)
CVVLSGGGGADGLTL

SEQ ID NO: 57734 - protein, 15 aa, Homo sapiens
  CDR3 for beta chain variable domain of TCR clone 28867 (TRBV12-5, TRBJ2-5)
CASGSGLAGRETQYF

SEQ ID NO: 57735 - protein, 15 aa, Homo sapiens
  CDR3 for alpha chain variable domain of TCR clone 28868 (TRAV17, TRAJ23)
CATDAEDNQGGKLSF

SEQ ID NO: 57736 - protein, 12 aa, Homo sapiens
  CDR3 for beta chain variable domain of TCR clone 28868 (TRBV2, TRBJ2-1)
CAKREGYNEQFF

SEQ ID NO: 57737 - protein, 15 aa, Homo sapiens
  CDR3 for alpha chain variable domain of TCR clone 28869 (TRAV8-3, TRAJ45)
CASPYSGGGADGLTF

SEQ ID NO: 57738 - protein, 18 aa, Homo sapiens
  CDR3 for beta chain variable domain of TCR clone 28869 (TRBV18, TRBJ1-3)
CASSPRGGAGPSGNTIYF

SEQ ID NO: 57739 - protein, 15 aa, Homo sapiens
  CDR3 for alpha chain variable domain of TCR clone 28870 (TRAV17, TRAJ57)
CATGPSQSGSEKLVF

SEQ ID NO: 57740 - protein, 16 aa, Homo sapiens
  CDR3 for beta chain variable domain of TCR clone 28870 (TRBV12-4, TRBJ1-5)
CASSRPVGGSNQPQHF

SEQ ID NO: 57741 - protein, 14 aa, Homo sapiens
  CDR3 for alpha chain variable domain of TCR clone 28871 (TRAV12-1, TRAJ45)
CVVNIGGGADGLTF

SEQ ID NO: 57742 - protein, 15 aa, Homo sapiens
  CDR3 for beta chain variable domain of TCR clone 28871 (TRBV7-2, TRBJ2-7)
CASSLKGALTYGQYF

SEQ ID NO: 57743 - protein, 16 aa, Homo sapiens
  CDR3 for alpha chain variable domain of TCR clone 28872 (TRAV4, TRAJ18)
CCVLLIGGSTLGRLYF

SEQ ID NO: 57744 - protein, 13 aa, Homo sapiens
  CDR3 for beta chain variable domain of TCR clone 28872 (TRBV7-9, TRBJ1-2)
CASSLKQNYGYTF

SEQ ID NO: 57745 - protein, 16 aa, Homo sapiens
  CDR3 for alpha chain variable domain of TCR clone 28873 (TRAV21, TRAJ52)
CAVTNAGGTSYGKLTF

SEQ ID NO: 57746 - protein, 13 aa, Homo sapiens
  CDR3 for beta chain variable domain of TCR clone 28873 (TRBV20-1, TRBJ2-3)
RSARLAGTDTQYF

SEQ ID NO: 57747 - protein, 14 aa, Homo sapiens
  CDR3 for alpha chain variable domain of TCR clone 28874 (TRAV9-2, TRAJ39)
CALYIYNAGNMLTF

SEQ ID NO: 57748 - protein, 14 aa, Homo sapiens
  CDR3 for beta chain variable domain of TCR clone 28874 (TRBV12-4, TRBJ1-1)
CASSLGTGGTEAFF

SEQ ID NO: 57749 - protein, 18 aa, Homo sapiens
  CDR3 for alpha chain variable domain of TCR clone 28875 (TRAV13-1, TRAJ52)
CAASKRSAGGTSYGKLTF

SEQ ID NO: 57750 - protein, 15 aa, Homo sapiens
  CDR3 for beta chain variable domain of TCR clone 28875 (TRBV11-3, TRBJ2-3)
CASLKDGREGDTQYF

SEQ ID NO: 57751 - protein, 14 aa, Homo sapiens
  CDR3 for alpha chain variable domain of TCR clone 28876 (TRAV16, TRAJ15)
CAPSGPQAGTALIF

SEQ ID NO: 57752 - protein, 12 aa, Homo sapiens
  CDR3 for beta chain variable domain of TCR clone 28876 (TRBV18, TRBJ2-5)
CASSPSKETQYF

SEQ ID NO: 57753 - protein, 16 aa, Homo sapiens
  CDR3 for alpha chain variable domain of TCR clone 28877 (TRAV26-1, TRAJ52)
CIVSNAGGTSYGKLTF

SEQ ID NO: 57754 - protein, 16 aa, Homo sapiens
  CDR3 for beta chain variable domain of TCR clone 28877 (TRBV5-1, TRBJ2-1)
CASSWEGRGLYNEQFF

SEQ ID NO: 57755 - protein, 11 aa, Homo sapiens
  CDR3 for alpha chain variable domain of TCR clone 28878 (TRAV17, TRAJ9)
CATTGSFKTIF

SEQ ID NO: 57756 - protein, 14 aa, Homo sapiens
  CDR3 for beta chain variable domain of TCR clone 28878 (TRBV7-9, TRBJ2-2)
CASSGLADTGELFF

SEQ ID NO: 57757 - protein, 14 aa, Homo sapiens
  CDR3 for alpha chain variable domain of TCR clone 28879 (TRAV8-6, TRAJ39)
CAVSERDAGNMLTF

SEQ ID NO: 57758 - protein, 15 aa, Homo sapiens
  CDR3 for beta chain variable domain of TCR clone 28879 (TRBV6-1, TRBJ2-7)
CASSVQRGVYYEQYF

SEQ ID NO: 57759 - protein, 14 aa, Homo sapiens
  CDR3 for alpha chain variable domain of TCR clone 28880 (TRAV12-2, TRAJ48)
CAVNAFFGNEKLAF

SEQ ID NO: 57760 - protein, 13 aa, Homo sapiens
  CDR3 for beta chain variable domain of TCR clone 28880 (TRBV28, TRBJ2-7)
CAGAQQGLDEQYF

SEQ ID NO: 57761 - protein, 16 aa, Homo sapiens
  CDR3 for alpha chain variable domain of TCR clone 28881 (TRAV30, TRAJ24)
CGTGIVDADSWGKFQF

SEQ ID NO: 57762 - protein, 14 aa, Homo sapiens
  CDR3 for beta chain variable domain of TCR clone 28881 (TRBV7-8, TRBJ2-3)
CASSLEAGTDTQYF

SEQ ID NO: 57763 - protein, 11 aa, Homo sapiens
  CDR3 for alpha chain variable domain of TCR clone 28882 (TRAV17, TRAJ9)
CGFTGGFKTIF

SEQ ID NO: 57764 - protein, 14 aa, Homo sapiens
  CDR3 for beta chain variable domain of TCR clone 28882 (TRBV7-9, TRBJ2-2)
CASCLVQDTGELFF

SEQ ID NO: 57765 - protein, 12 aa, Homo sapiens
  CDR3 for alpha chain variable domain of TCR clone 28883 (TRAV12-1, TRAJ40)
CVFYSGTYKYTF

SEQ ID NO: 57766 - protein, 18 aa, Homo sapiens
  CDR3 for beta chain variable domain of TCR clone 28883 (TRBV12-4, TRBJ2-2)
CASSLVAGTRGRTGELFF

SEQ ID NO: 57767 - protein, 13 aa, Homo sapiens
  CDR3 for alpha chain variable domain of TCR clone 28884 (TRAV3, TRAJ27)
CAVRPLGAGKSTF

SEQ ID NO: 57768 - protein, 14 aa, Homo sapiens
  CDR3 for beta chain variable domain of TCR clone 28884 (TRBV7-2, TRBJ2-7)
CASRSQGAAYEQYF

SEQ ID NO: 57769 - protein, 12 aa, Homo sapiens
  CDR3 for alpha chain variable domain of TCR clone 28885 (TRAV8-3, TRAJ26)
CAGDNYGQNFVF

SEQ ID NO: 57770 - protein, 15 aa, Homo sapiens
  CDR3 for beta chain variable domain of TCR clone 28885 (TRBV20-1, TRBJ1-1)
CSAPLGGGTEASLDK

SEQ ID NO: 57771 - protein, 23 aa, Homo sapiens
  CDR3 for alpha chain variable domain of TCR clone 28886 (TRAV1-1, TRAJ29)
LLQELQMKDSASYFLGGNTPLVF

SEQ ID NO: 57772 - protein, 13 aa, Homo sapiens
  CDR3 for beta chain variable domain of TCR clone 28886 (TRBV25-1, TRBJ2-7)
CASSEGGDYEQYF

SEQ ID NO: 57773 - protein, 12 aa, Homo sapiens
  CDR3 for alpha chain variable domain of TCR clone 28887 (TRAV2, TRAJ9)
CAVGAGVFKTIF

SEQ ID NO: 57774 - protein, 16 aa, Homo sapiens
  CDR3 for beta chain variable domain of TCR clone 28887 (TRBV13, TRBJ2-2)
CASSPRTGEHTGELFF

SEQ ID NO: 57775 - protein, 14 aa, Homo sapiens
  CDR3 for alpha chain variable domain of TCR clone 28888 (TRAV38-1, TRAJ45)
FASHSGGGADGLTF

SEQ ID NO: 57776 - protein, 13 aa, Homo sapiens
  CDR3 for beta chain variable domain of TCR clone 28888 (TRBV10-3, TRBJ1-2)
CAISERDSYGYTF

SEQ ID NO: 57777 - protein, 22 aa, Homo sapiens
  CDR3 for alpha chain variable domain of TCR clone 28889 (TRAV12-3, TRAJ53)
SPVIQPPTSVQASGGSNYKLTF

SEQ ID NO: 57778 - protein, 15 aa, Homo sapiens
  CDR3 for beta chain variable domain of TCR clone 28889 (TRBV9, TRBJ2-1)
CASSLAGSSYNEQFF

SEQ ID NO: 57779 - protein, 20 aa, Homo sapiens
  CDR3 for alpha chain variable domain of TCR clone 28890 (TRAV26-1, TRAJ42)
CCVLLHRQTYYGGSQGNLIF

SEQ ID NO: 57780 - protein, 16 aa, Homo sapiens
  CDR3 for beta chain variable domain of TCR clone 28890 (TRBV7-3, TRBJ2-2)
CASSLTRGTLSGELFF

SEQ ID NO: 57781 - protein, 14 aa, Homo sapiens
  CDR3 for alpha chain variable domain of TCR clone 28891 (TRAV12-3, TRAJ10)
SHLPLTGGGNKLTF

SEQ ID NO: 57782 - protein, 14 aa, Homo sapiens
  CDR3 for beta chain variable domain of TCR clone 28891 (TRBV18, TRBJ1-1)
CASSQGQGNTEAFF

SEQ ID NO: 57783 - protein, 11 aa, Homo sapiens
  CDR3 for alpha chain variable domain of TCR clone 28892 (TRAV1-1, TRAJ5)
SALRFRRALTF

SEQ ID NO: 57784 - protein, 15 aa, Homo sapiens
  CDR3 for beta chain variable domain of TCR clone 28892 (TRBV4-1, TRBJ1-4)
CASSDTGGTNEKLFF

SEQ ID NO: 57785 - protein, 12 aa, Homo sapiens
  CDR3 for alpha chain variable domain of TCR clone 28893 (TRAV13-1, TRAJ21)
CAAKEGFNKFYF

SEQ ID NO: 57786 - protein, 15 aa, Homo sapiens
  CDR3 for beta chain variable domain of TCR clone 28893 (TRBV25-1, TRBJ1-4)
CASSPGDSTNEKPFF

SEQ ID NO: 57787 - protein, 11 aa, Homo sapiens
  CDR3 for alpha chain variable domain of TCR clone 28894 (TRAV21, TRAJ11)
CAVNGYSTLTF

SEQ ID NO: 57788 - protein, 15 aa, Homo sapiens
  CDR3 for beta chain variable domain of TCR clone 28894 (TRBV6-3, TRBJ2-7)
CASSSPGKVFYEQYF

SEQ ID NO: 57789 - protein, 11 aa, Homo sapiens
  CDR3 for alpha chain variable domain of TCR clone 28895 (TRAV21, TRAJ34)
CAHYNTDKLIF

SEQ ID NO: 57790 - protein, 13 aa, Homo sapiens
  CDR3 for beta chain variable domain of TCR clone 28895 (TRBV7-6, TRBJ1-2)
CDSSLVADYGYTF

SEQ ID NO: 57791 - protein, 17 aa, Homo sapiens
  CDR3 for alpha chain variable domain of TCR clone 28896 (TRAV3, TRAJ6)
CDVRDGPRAGGSYIPTF

SEQ ID NO: 57792 - protein, 20 aa, Homo sapiens
  CDR3 for beta chain variable domain of TCR clone 28896 (TRBV28, TRBJ2-1)
CASTPIGRSPGLAGGNEQFF

SEQ ID NO: 57793 - protein, 13 aa, Homo sapiens
  CDR3 for alpha chain variable domain of TCR clone 28897 (TRAV1-2, TRAJ9)
CAALNTGSFKTIF

SEQ ID NO: 57794 - protein, 13 aa, Homo sapiens
  CDR3 for beta chain variable domain of TCR clone 28897 (TRBV19, TRBJ1-2)
CASSVPGQDGYTF

SEQ ID NO: 57795 - protein, 15 aa, Homo sapiens
  CDR3 for alpha chain variable domain of TCR clone 28898 (TRAV12-2, TRAJ53)
CAVNGGGGSNYKLTF

SEQ ID NO: 57796 - protein, 13 aa, Homo sapiens
  CDR3 for beta chain variable domain of TCR clone 28898 (TRBV3-1, TRBJ1-1)
CASSPGVVTEAFF

SEQ ID NO: 57797 - protein, 16 aa, Homo sapiens
  CDR3 for alpha chain variable domain of TCR clone 28899 (TRAV21, TRAJ45)
CAVSWGSGGGADGLTF

SEQ ID NO: 57798 - protein, 14 aa, Homo sapiens
  CDR3 for beta chain variable domain of TCR clone 28899 (TRBV4-2, TRBJ1-2)
CASSPGGYNYGYTF

SEQ ID NO: 57799 - protein, 13 aa, Homo sapiens
  CDR3 for alpha chain variable domain of TCR clone 28900 (TRAV3, TRAJ27)
CAVRPLGAGKSTF

SEQ ID NO: 57800 - protein, 13 aa, Homo sapiens
  CDR3 for beta chain variable domain of TCR clone 28900 (TRBV7-9, TRBJ2-3)
CASSPGSTYTQYF

SEQ ID NO: 57801 - protein, 12 aa, Homo sapiens
  CDR3 for alpha chain variable domain of TCR clone 28901 (TRAV1-1, TRAJ8)
CAGGTGFQKLVF

SEQ ID NO: 57802 - protein, 15 aa, Homo sapiens
  CDR3 for beta chain variable domain of TCR clone 28901 (TRBV7-9, TRBJ1-6)
CASSSPGRGNSPLHF

SEQ ID NO: 57803 - protein, 11 aa, Homo sapiens
  CDR3 for alpha chain variable domain of TCR clone 28902 (TRAV3, TRAJ21)
CAVGNFNKFYF

SEQ ID NO: 57804 - protein, 13 aa, Homo sapiens
  CDR3 for beta chain variable domain of TCR clone 28902 (TRBV12-4, TRBJ2-2)
CASSPLPPGELFF

SEQ ID NO: 57805 - protein, 14 aa, Homo sapiens
  CDR3 for alpha chain variable domain of TCR clone 28903 (TRAV12-2, TRAJ10)
SHLPLTGGGNKLTF

SEQ ID NO: 57806 - protein, 15 aa, Homo sapiens
  CDR3 for beta chain variable domain of TCR clone 28903 (TRBV11-2, TRBJ1-3)
CASSLDGTVGNTIYF

SEQ ID NO: 57807 - protein, 15 aa, Homo sapiens
  CDR3 for alpha chain variable domain of TCR clone 28904 (TRAV12-1, TRAJ37)
CVVNGGSGNTGKLIF

SEQ ID NO: 57808 - protein, 13 aa, Homo sapiens
  CDR3 for beta chain variable domain of TCR clone 28904 (TRBV12-4, TRBJ1-2)
CASSLRQGKGYTF

SEQ ID NO: 57809 - protein, 11 aa, Homo sapiens
  CDR3 for alpha chain variable domain of TCR clone 28905 (TRAV17, TRAJ9)
CGFTGGFNTIF

SEQ ID NO: 57810 - protein, 14 aa, Homo sapiens
  CDR3 for beta chain variable domain of TCR clone 28905 (TRBV7-9, TRBJ2-2)
CASSLVQDTGELFF

SEQ ID NO: 57811 - protein, 18 aa, Homo sapiens
  CDR3 for alpha chain variable domain of TCR clone 28906 (TRAV21, TRAJ52)
CAVRPSPAGGTGYGKLTF

SEQ ID NO: 57812 - protein, 13 aa, Homo sapiens
  CDR3 for beta chain variable domain of TCR clone 28906 (TRBV7-3, TRBJ1-1)
CASSQDWGAEAFF

SEQ ID NO: 57813 - protein, 13 aa, Homo sapiens
  CDR3 for alpha chain variable domain of TCR clone 28907 (TRAV12-2, TRAJ20)
CAVYPSNDYKLSF

SEQ ID NO: 57814 - protein, 15 aa, Homo sapiens
  CDR3 for beta chain variable domain of TCR clone 28907 (TRBV11-2, TRBJ1-1)
CASSSRSSLLLSLDK

SEQ ID NO: 57815 - protein, 13 aa, Homo sapiens
  CDR3 for alpha chain variable domain of TCR clone 28908 (TRAV2, TRAJ16)
CAVEFGDGQRLLF

SEQ ID NO: 57816 - protein, 14 aa, Homo sapiens
  CDR3 for beta chain variable domain of TCR clone 28908 (TRBV6-3, TRBJ2-5)
CASSYSLREKTQYF

SEQ ID NO: 57817 - protein, 12 aa, Homo sapiens
  CDR3 for alpha chain variable domain of TCR clone 28909 (TRAV4, TRAJ18)
CLVGERSVGSTL

SEQ ID NO: 57818 - protein, 14 aa, Homo sapiens
  CDR3 for beta chain variable domain of TCR clone 28909 (TRBV6-5, TRBJ1-2)
CASSYDGTGGGYTF

SEQ ID NO: 57819 - protein, 13 aa, Homo sapiens
  CDR3 for alpha chain variable domain of TCR clone 28910 (TRAV27, TRAJ42)
CAGARGSQGNLIF

SEQ ID NO: 57820 - protein, 13 aa, Homo sapiens
  CDR3 for beta chain variable domain of TCR clone 28910 (TRBV7-9, TRBJ1-2)
CASSLKQNYGYTF

SEQ ID NO: 57821 - protein, 13 aa, Homo sapiens
  CDR3 for alpha chain variable domain of TCR clone 28911 (TRAV16, TRAJ28)
CAPTGAGSYQLTF

SEQ ID NO: 57822 - protein, 16 aa, Homo sapiens
  CDR3 for beta chain variable domain of TCR clone 28911 (TRBV28, TRBJ1-5)
CASGLTGQGWNQPQHF

SEQ ID NO: 57823 - protein, 16 aa, Homo sapiens
  CDR3 for alpha chain variable domain of TCR clone 28912 (TRAV2, TRAJ13)
CAARLLGVTRKLPLEL

SEQ ID NO: 57824 - protein, 14 aa, Homo sapiens
  CDR3 for beta chain variable domain of TCR clone 28912 (TRBV19, TRBJ2-1)
CASEVTGARNEQFF

SEQ ID NO: 57825 - protein, 14 aa, Homo sapiens
  CDR3 for alpha chain variable domain of TCR clone 28913 (TRAV12-3, TRAJ10)
SHLPLTGGGNKLTF

SEQ ID NO: 57826 - protein, 15 aa, Homo sapiens
  CDR3 for beta chain variable domain of TCR clone 28913 (TRBV19, TRBJ2-7)
CASSPAGSGEALRYF

SEQ ID NO: 57827 - protein, 12 aa, Homo sapiens
  CDR3 for alpha chain variable domain of TCR clone 28914 (TRAV23/DV6, TRAJ58)
CAARLLRGETSG

SEQ ID NO: 57828 - protein, 14 aa, Homo sapiens
  CDR3 for beta chain variable domain of TCR clone 28914 (TRBV2, TRBJ2-7)
CASSLTSGGYEQYF

SEQ ID NO: 57829 - protein, 11 aa, Homo sapiens
  CDR3 for alpha chain variable domain of TCR clone 28915 (TRAV2, TRAJ33)
CAVDSNYQLIW

SEQ ID NO: 57830 - protein, 15 aa, Homo sapiens
  CDR3 for beta chain variable domain of TCR clone 28915 (TRBV7-9, TRBJ1-6)
CASSSPGRGNSPLHF

SEQ ID NO: 57831 - protein, 14 aa, Homo sapiens
  CDR3 for alpha chain variable domain of TCR clone 28916 (TRAV2, TRAJ22)
CAVGRGGSARQLTL

SEQ ID NO: 57832 - protein, 12 aa, Homo sapiens
  CDR3 for beta chain variable domain of TCR clone 28916 (TRBV19, TRBJ2-1)
CASSMQDTEQFF

SEQ ID NO: 57833 - protein, 13 aa, Homo sapiens
  CDR3 for alpha chain variable domain of TCR clone 28917 (TRAV13-1, TRAJ20)
CAARVANDYKLSF

SEQ ID NO: 57834 - protein, 12 aa, Homo sapiens
  CDR3 for beta chain variable domain of TCR clone 28917 (TRBV20-1, TRBJ2-1)
CSARLGTDEQFF

SEQ ID NO: 57835 - protein, 12 aa, Homo sapiens
  CDR3 for alpha chain variable domain of TCR clone 28918 (TRAV2, TRAJ36)
CADLTGANNLFF

SEQ ID NO: 57836 - protein, 14 aa, Homo sapiens
  CDR3 for beta chain variable domain of TCR clone 28918 (TRBV18, TRBJ2-7)
CASSPRGGAYEQYF

SEQ ID NO: 57837 - protein, 16 aa, Homo sapiens
  CDR3 for alpha chain variable domain of TCR clone 28919 (TRAV30, TRAJ24)
CGTEIVDADSWGKFSL

SEQ ID NO: 57838 - protein, 14 aa, Homo sapiens
  CDR3 for beta chain variable domain of TCR clone 28919 (TRBV12-5, TRBJ2-5)
CASGSRTHQETQYF

SEQ ID NO: 57839 - protein, 16 aa, Homo sapiens
  CDR3 for alpha chain variable domain of TCR clone 28920 (TRAV4, TRAJ9)
CLVGDPIGLEASKLSL

SEQ ID NO: 57840 - protein, 16 aa, Homo sapiens
  CDR3 for beta chain variable domain of TCR clone 28920 (TRBV28, TRBJ1-4)
CASSPPYRGRSEKLFF

SEQ ID NO: 57841 - protein, 14 aa, Homo sapiens
  CDR3 for alpha chain variable domain of TCR clone 28921 (TRAV12-2, TRAJ13)
CAVKKTGGYQKVTF

SEQ ID NO: 57842 - protein, 16 aa, Homo sapiens
  CDR3 for beta chain variable domain of TCR clone 28921 (TRBV4-2, TRBJ2-3)
CASSQELAGDTDTQYF

SEQ ID NO: 57843 - protein, 14 aa, Homo sapiens
  CDR3 for alpha chain variable domain of TCR clone 28922 (TRAV35, TRAJ22)
CAGLRPGSARQLTF

SEQ ID NO: 57844 - protein, 18 aa, Homo sapiens
  CDR3 for beta chain variable domain of TCR clone 28922 (TRBV7-9, TRBJ2-7)
CASSLTTSGSRTWYEQYF

SEQ ID NO: 57845 - protein, 18 aa, Homo sapiens
  CDR3 for alpha chain variable domain of TCR clone 28923 (TRAV13-1, TRAJ52)
CAAKNPNAGGTSYGKLTF

SEQ ID NO: 57846 - protein, 14 aa, Homo sapiens
  CDR3 for beta chain variable domain of TCR clone 28923 (TRBV18, TRBJ2-5)
CASSPGVSQETQYF

SEQ ID NO: 57847 - protein, 15 aa, Homo sapiens
  CDR3 for alpha chain variable domain of TCR clone 28924 (TRAV8-3, TRAJ27)
CAVGPSKTNAGKSTF

SEQ ID NO: 57848 - protein, 15 aa, Homo sapiens
  CDR3 for beta chain variable domain of TCR clone 28924 (TRBV7-2, TRBJ2-1)
CASSSGLAGCNEQFF

SEQ ID NO: 57849 - protein, 11 aa, Homo sapiens
  CDR3 for alpha chain variable domain of TCR clone 28925 (TRAV12-3, TRAJ43)
CAMSVSNDMRF

SEQ ID NO: 57850 - protein, 20 aa, Homo sapiens
  CDR3 for beta chain variable domain of TCR clone 28925 (TRBV7-8, TRBJ2-2)
CASSHLFPGPTIHITGELFF

SEQ ID NO: 57851 - protein, 13 aa, Homo sapiens
  CDR3 for alpha chain variable domain of TCR clone 28926 (TRAV8-6, TRAJ21)
CAVSPSSLNKFYF

SEQ ID NO: 57852 - protein, 17 aa, Homo sapiens
  CDR3 for beta chain variable domain of TCR clone 28926 (TRBV11-2, TRBJ2-3)
CQQLRGASRGAPNTQYF

SEQ ID NO: 57853 - protein, 12 aa, Homo sapiens
  CDR3 for alpha chain variable domain of TCR clone 28927 (TRAV8-3, TRAJ20)
CAVGANDYKLSF

SEQ ID NO: 57854 - protein, 16 aa, Homo sapiens
  CDR3 for beta chain variable domain of TCR clone 28927 (TRBV12-4, TRBJ1-5)
CASSRPVGGSNQPQHF

SEQ ID NO: 57855 - protein, 17 aa, Homo sapiens
  CDR3 for alpha chain variable domain of TCR clone 28928 (TRAV26-1, TRAJ27)
CVVSTPWINTNAGKSTF

SEQ ID NO: 57856 - protein, 13 aa, Homo sapiens
  CDR3 for beta chain variable domain of TCR clone 28928 (TRBV15, TRBJ2-7)
CATSTTGHYEQYF

SEQ ID NO: 57857 - protein, 14 aa, Homo sapiens
  CDR3 for alpha chain variable domain of TCR clone 28929 (TRAV12-3, TRAJ10)
SHLPLTGGGNKLTF

SEQ ID NO: 57858 - protein, 15 aa, Homo sapiens
  CDR3 for beta chain variable domain of TCR clone 28929 (TRBV7-3, TRBJ2-2)
CASSETGQGAGELFF

SEQ ID NO: 57859 - protein, 14 aa, Homo sapiens
  CDR3 for alpha chain variable domain of TCR clone 28930 (TRAV35, TRAJ13)
CAGSPSGGYQEVTF

SEQ ID NO: 57860 - protein, 17 aa, Homo sapiens
  CDR3 for beta chain variable domain of TCR clone 28930 (TRBV7-6, TRBJ2-5)
CASSPGLADPWGETQYF

SEQ ID NO: 57861 - protein, 14 aa, Homo sapiens
  CDR3 for alpha chain variable domain of TCR clone 28931 (TRAV12-3, TRAJ10)
SHLPLTGGGNKLTF

SEQ ID NO: 57862 - protein, 13 aa, Homo sapiens
  CDR3 for beta chain variable domain of TCR clone 28931 (TRBV27, TRBJ1-4)
CASSLMGDEKLFF

SEQ ID NO: 57863 - protein, 13 aa, Homo sapiens
  CDR3 for alpha chain variable domain of TCR clone 28932 (TRAV26-2, TRAJ43)
CILRAVNNNDMRF

SEQ ID NO: 57864 - protein, 15 aa, Homo sapiens
  CDR3 for beta chain variable domain of TCR clone 28932 (TRBV7-2, TRBJ2-1)
CASTHGTVIYNEQFF

SEQ ID NO: 57865 - protein, 13 aa, Homo sapiens
  CDR3 for alpha chain variable domain of TCR clone 28933 (TRAV21, TRAJ27)
CAERPGNAGKSTH

SEQ ID NO: 57866 - protein, 20 aa, Homo sapiens
  CDR3 for beta chain variable domain of TCR clone 28933 (TRBV7-8, TRBJ2-2)
CASSHLFPGPTIHITGELFF

SEQ ID NO: 57867 - protein, 14 aa, Homo sapiens
  CDR3 for alpha chain variable domain of TCR clone 28934 (TRAV12-1, TRAJ9)
CVVTGYTGGLKTIF

SEQ ID NO: 57868 - protein, 13 aa, Homo sapiens
  CDR3 for beta chain variable domain of TCR clone 28934 (TRBV20-1, TRBJ1-1)
CSARAGGNTEAFF

SEQ ID NO: 57869 - protein, 13 aa, Homo sapiens
  CDR3 for alpha chain variable domain of TCR clone 28935 (TRAV24, TRAJ22)
CAFGSGSARQLTF

SEQ ID NO: 57870 - protein, 13 aa, Homo sapiens
  CDR3 for beta chain variable domain of TCR clone 28935 (TRBV7-6, TRBJ1-3)
CASSSQQGNTIYF

SEQ ID NO: 57871 - protein, 15 aa, Homo sapiens
  CDR3 for alpha chain variable domain of TCR clone 28936 (TRAV4, TRAJ39)
CLVVPNNNAGNMLTF

SEQ ID NO: 57872 - protein, 13 aa, Homo sapiens
  CDR3 for beta chain variable domain of TCR clone 28936 (TRBV11-2, TRBJ2-5)
CASSSTGEETQYF

SEQ ID NO: 57873 - protein, 12 aa, Homo sapiens
  CDR3 for alpha chain variable domain of TCR clone 28937 (TRAV12-3, TRAJ17)
CAMTLTGNKLTF

SEQ ID NO: 57874 - protein, 15 aa, Homo sapiens
  CDR3 for beta chain variable domain of TCR clone 28937 (TRBV20-1, TRBJ2-7)
CSARDQVSGMGEQYF

SEQ ID NO: 57875 - protein, 11 aa, Homo sapiens
  CDR3 for alpha chain variable domain of TCR clone 28938 (TRAV3, TRAJ21)
CAVGNFNKFYF

SEQ ID NO: 57876 - protein, 15 aa, Homo sapiens
  CDR3 for beta chain variable domain of TCR clone 28938 (TRBV28, TRBJ1-3)
CASSMGWASGNTIYF

SEQ ID NO: 57877 - protein, 14 aa, Homo sapiens
  CDR3 for alpha chain variable domain of TCR clone 28939 (TRAV8-2, TRAJ4)
CVVSPSGGYNKPIF

SEQ ID NO: 57878 - protein, 15 aa, Homo sapiens
  CDR3 for beta chain variable domain of TCR clone 28939 (TRBV4-1, TRBJ1-4)
CASSDTGGTNEKLFF

SEQ ID NO: 57879 - protein, 16 aa, Homo sapiens
  CDR3 for alpha chain variable domain of TCR clone 28940 (TRAV20, TRAJ22)
CAVQASSSGSASQLTF

SEQ ID NO: 57880 - protein, 13 aa, Homo sapiens
  CDR3 for beta chain variable domain of TCR clone 28940 (TRBV7-2, TRBJ2-5)
CASSQTSVETQYF

SEQ ID NO: 57881 - protein, 17 aa, Homo sapiens
  CDR3 for alpha chain variable domain of TCR clone 28941 (TRAV3, TRAJ6)
CSVRDGPRAGGSYIPTF

SEQ ID NO: 57882 - protein, 20 aa, Homo sapiens
  CDR3 for beta chain variable domain of TCR clone 28941 (TRBV28, TRBJ2-1)
CASTPIGRSPGLAGGNEQFF

SEQ ID NO: 57883 - protein, 12 aa, Homo sapiens
  CDR3 for alpha chain variable domain of TCR clone 28942 (TRAV27, TRAJ9)
CAGESGGFKTIF

SEQ ID NO: 57884 - protein, 15 aa, Homo sapiens
  CDR3 for beta chain variable domain of TCR clone 28942 (TRBV20-1, TRBJ2-7)
CSARDRVSGMDEQYF

SEQ ID NO: 57885 - protein, 12 aa, Homo sapiens
  CDR3 for alpha chain variable domain of TCR clone 28943 (TRAV12-2, TRAJ43)
CAVNVNNNDIRF

SEQ ID NO: 57886 - protein, 14 aa, Homo sapiens
  CDR3 for beta chain variable domain of TCR clone 28943 (TRBV7-2, TRBJ2-7)
CASSFLGRVYEQYF

SEQ ID NO: 57887 - protein, 14 aa, Homo sapiens
  CDR3 for alpha chain variable domain of TCR clone 28944 (TRAV26-1, TRAJ34)
CIVRVAYNTDRLIF

SEQ ID NO: 57888 - protein, 15 aa, Homo sapiens
  CDR3 for beta chain variable domain of TCR clone 28944 (TRBV20-1, TRBJ2-7)
CSARVPAAYFYEQYF

SEQ ID NO: 57889 - protein, 15 aa, Homo sapiens
  CDR3 for alpha chain variable domain of TCR clone 28945 (TRAV8-3, TRAJ45)
CPSSYSGGGADGLTF

SEQ ID NO: 57890 - protein, 13 aa, Homo sapiens
  CDR3 for beta chain variable domain of TCR clone 28945 (TRBV10-3, TRBJ2-7)
CASKLAVNYEQYF

SEQ ID NO: 57891 - protein, 11 aa, Homo sapiens
  CDR3 for alpha chain variable domain of TCR clone 28946 (TRAV2, TRAJ33)
CAVESNYQLIL

SEQ ID NO: 57892 - protein, 15 aa, Homo sapiens
  CDR3 for beta chain variable domain of TCR clone 28946 (TRBV19, TRBJ1-1)
CASTSGQIQNTEAFF

SEQ ID NO: 57893 - protein, 14 aa, Homo sapiens
  CDR3 for alpha chain variable domain of TCR clone 28947 (TRAV38-1, TRAJ45)
CASHSGGGADVLTF

SEQ ID NO: 57894 - protein, 13 aa, Homo sapiens
  CDR3 for beta chain variable domain of TCR clone 28947 (TRBV10-3, TRBJ1-2)
CAISERDSYGYTF

SEQ ID NO: 57895 - protein, 20 aa, Homo sapiens
  CDR3 for alpha chain variable domain of TCR clone 28948 (TRAV12-1, TRAJ42)
SSVIQPPTSVKGGSQGNLIF

SEQ ID NO: 57896 - protein, 14 aa, Homo sapiens
  CDR3 for beta chain variable domain of TCR clone 28948 (TRBV6-5, TRBJ1-2)
CASSYDGTGGGYTF

SEQ ID NO: 57897 - protein, 11 aa, Homo sapiens
  CDR3 for alpha chain variable domain of TCR clone 28949 (TRAV1-2, TRAJ20)
CAVSNDYKLSF

SEQ ID NO: 57898 - protein, 16 aa, Homo sapiens
  CDR3 for beta chain variable domain of TCR clone 28949 (TRBV29-1, TRBJ2-6)
CSVEGITYSGANVLTF

SEQ ID NO: 57899 - protein, 14 aa, Homo sapiens
  CDR3 for alpha chain variable domain of TCR clone 28950 (TRAV26-1, TRAJ45)
CIVRVVGGADGPTF

SEQ ID NO: 57900 - protein, 16 aa, Homo sapiens
  CDR3 for beta chain variable domain of TCR clone 28950 (TRBV7-9, TRBJ1-1)
CASSLTQVRSNTEAFF

SEQ ID NO: 57901 - protein, 11 aa, Homo sapiens
  CDR3 for alpha chain variable domain of TCR clone 28951 (TRAV3, TRAJ21)
CAVGNFNKFYF

SEQ ID NO: 57902 - protein, 14 aa, Homo sapiens
  CDR3 for beta chain variable domain of TCR clone 28951 (TRBV12-4, TRBJ1-1)
CASSLGTGGTEAFF

SEQ ID NO: 57903 - protein, 17 aa, Homo sapiens
  CDR3 for alpha chain variable domain of TCR clone 28952 (TRAV3, TRAJ6)
CAVRDGPRAGRSYIPTF

SEQ ID NO: 57904 - protein, 15 aa, Homo sapiens
  CDR3 for beta chain variable domain of TCR clone 28952 (TRBV20-1, TRBJ1-1)
CSASWDRFLNTEAFF

SEQ ID NO: 57905 - protein, 15 aa, Homo sapiens
  CDR3 for alpha chain variable domain of TCR clone 28953 (TRAV3, TRAJ47)
CAVSDIGEYGNKLVF

SEQ ID NO: 57906 - protein, 14 aa, Homo sapiens
  CDR3 for beta chain variable domain of TCR clone 28953 (TRBV13, TRBJ2-5)
CASSLERVGETQYF

SEQ ID NO: 57907 - protein, 16 aa, Homo sapiens
  CDR3 for alpha chain variable domain of TCR clone 28954 (TRAV1-2, TRAJ10)
CAVRGVLTGGGNKLTF

SEQ ID NO: 57908 - protein, 15 aa, Homo sapiens
  CDR3 for beta chain variable domain of TCR clone 28954 (TRBV27, TRBJ2-7)
CASSPIVTGVYEQYF

SEQ ID NO: 57909 - protein, 14 aa, Homo sapiens
  CDR3 for alpha chain variable domain of TCR clone 28955 (TRAV6, TRAJ37)
CALGSQGNTGKLIF

SEQ ID NO: 57910 - protein, 15 aa, Homo sapiens
  CDR3 for beta chain variable domain of TCR clone 28955 (TRBV2, TRBJ2-1)
CASSEEREGDNEQLF

SEQ ID NO: 57911 - protein, 11 aa, Homo sapiens
  CDR3 for alpha chain variable domain of TCR clone 28956 (TRAV35, TRAJ30)
CAGPGDDKIIF

SEQ ID NO: 57912 - protein, 18 aa, Homo sapiens
  CDR3 for beta chain variable domain of TCR clone 28956 (TRBV7-6, TRBJ2-1)
CASSPRTSGMSSHNEQFF

SEQ ID NO: 57913 - protein, 14 aa, Homo sapiens
  CDR3 for alpha chain variable domain of TCR clone 28957 (TRAV26-1, TRAJ45)
CIEVTGGGADGLTF

SEQ ID NO: 57914 - protein, 13 aa, Homo sapiens
  CDR3 for beta chain variable domain of TCR clone 28957 (TRBV7-6, TRBJ1-2)
CASSLVVDYGYTF

SEQ ID NO: 57915 - protein, 13 aa, Homo sapiens
  CDR3 for alpha chain variable domain of TCR clone 28958 (TRAV8-6, TRAJ49)
CAVITNTGNQFYF

SEQ ID NO: 57916 - protein, 15 aa, Homo sapiens
  CDR3 for beta chain variable domain of TCR clone 28958 (TRBV7-9, TRBJ1-6)
CASSSPGRGNSPLHF

SEQ ID NO: 57917 - protein, 12 aa, Homo sapiens
  CDR3 for alpha chain variable domain of TCR clone 28959 (TRAV13-2, TRAJ23)
CAERHRGGKRIF

SEQ ID NO: 57918 - protein, 16 aa, Homo sapiens
  CDR3 for beta chain variable domain of TCR clone 28959 (TRBV20-1, TRBJ1-4)
CSAPGQGLLTNEKLFF

SEQ ID NO: 57919 - protein, 12 aa, Homo sapiens
  CDR3 for alpha chain variable domain of TCR clone 28960 (TRAV20, TRAJ39)
CAVGNAGNMLTL

SEQ ID NO: 57920 - protein, 16 aa, Homo sapiens
  CDR3 for beta chain variable domain of TCR clone 28960 (TRBV15, TRBJ1-2)
CATSRGPRTGGGGYTF

SEQ ID NO: 57921 - protein, 13 aa, Homo sapiens
  CDR3 for alpha chain variable domain of TCR clone 28961 (TRAV1-1, TRAJ13)
CAVNSGGYQKVTF

SEQ ID NO: 57922 - protein, 12 aa, Homo sapiens
  CDR3 for beta chain variable domain of TCR clone 28961 (TRBV28, TRBJ2-1)
CASSAQINEQFF

SEQ ID NO: 57923 - protein, 13 aa, Homo sapiens
  CDR3 for alpha chain variable domain of TCR clone 28962 (TRAV23/DV6, TRAJ13)
CAERPGGYQKVTF

SEQ ID NO: 57924 - protein, 14 aa, Homo sapiens
  CDR3 for beta chain variable domain of TCR clone 28962 (TRBV4-1, TRBJ2-2)
CASSQAVNTGELFF

SEQ ID NO: 57925 - protein, 14 aa, Homo sapiens
  CDR3 for alpha chain variable domain of TCR clone 28963 (TRAV12-1, TRAJ42)
CVVIYGGSQGNLIF

SEQ ID NO: 57926 - protein, 13 aa, Homo sapiens
  CDR3 for beta chain variable domain of TCR clone 28963 (TRBV18, TRBJ2-5)
CASSPPGKGTQYF

SEQ ID NO: 57927 - protein, 13 aa, Homo sapiens
  CDR3 for alpha chain variable domain of TCR clone 28964 (TRAV35, TRAJ43)
CAGYPYNNNDMRF

SEQ ID NO: 57928 - protein, 15 aa, Homo sapiens
  CDR3 for beta chain variable domain of TCR clone 28964 (TRBV25-1, TRBJ1-4)
CASSKRIATNENLFF

SEQ ID NO: 57929 - protein, 14 aa, Homo sapiens
  CDR3 for alpha chain variable domain of TCR clone 28965 (TRAV1-2, TRAJ16)
CAVNRFSDVQKLLF

SEQ ID NO: 57930 - protein, 12 aa, Homo sapiens
  CDR3 for beta chain variable domain of TCR clone 28965 (TRBV11-2, TRBJ2-2)
CASSLGGGELFF

SEQ ID NO: 57931 - protein, 10 aa, Homo sapiens
  CDR3 for alpha chain variable domain of TCR clone 28966 (TRAV5, TRAJ34)
CAEDTDKLIF

SEQ ID NO: 57932 - protein, 14 aa, Homo sapiens
  CDR3 for beta chain variable domain of TCR clone 28966 (TRBV11-2, TRBJ2-5)
RASSRTGGIETQYF

SEQ ID NO: 57933 - protein, 14 aa, Homo sapiens
  CDR3 for alpha chain variable domain of TCR clone 28967 (TRAV13-1, TRAJ44)
CAAKATGTASKLTF

SEQ ID NO: 57934 - protein, 17 aa, Homo sapiens
  CDR3 for beta chain variable domain of TCR clone 28967 (TRBV7-3, TRBJ2-3)
CASSLMKRMRGADAQYF

SEQ ID NO: 57935 - protein, 12 aa, Homo sapiens
  CDR3 for alpha chain variable domain of TCR clone 28968 (TRAV14/DV4, TRAJ9)
CAMNPGGLKTIF

SEQ ID NO: 57936 - protein, 16 aa, Homo sapiens
  CDR3 for beta chain variable domain of TCR clone 28968 (TRBV28, TRBJ2-5)
CASSFSPAGGWETQYF

SEQ ID NO: 57937 - protein, 14 aa, Homo sapiens
  CDR3 for alpha chain variable domain of TCR clone 28969 (TRAV12-1, TRAJ12)
CVVTRMDSSYKLIF

SEQ ID NO: 57938 - protein, 13 aa, Homo sapiens
  CDR3 for beta chain variable domain of TCR clone 28969 (TRBV20-1, TRBJ1-1)
RSARGGGNTEAFF

SEQ ID NO: 57939 - protein, 11 aa, Homo sapiens
  CDR3 for alpha chain variable domain of TCR clone 28970 (TRAV3, TRAJ21)
CAVGNFNKFYF

SEQ ID NO: 57940 - protein, 16 aa, Homo sapiens
  CDR3 for beta chain variable domain of TCR clone 28970 (TRBV19, TRBJ2-1)
CASSKAGPSSYHEQFF

SEQ ID NO: 57941 - protein, 13 aa, Homo sapiens
  CDR3 for alpha chain variable domain of TCR clone 28971 (TRAV12-2, TRAJ42)
CAVKRGSQGNLIF

SEQ ID NO: 57942 - protein, 15 aa, Homo sapiens
  CDR3 for beta chain variable domain of TCR clone 28971 (TRBV9, TRBJ2-2)
CQQRHGKGNTGELFF

SEQ ID NO: 57943 - protein, 16 aa, Homo sapiens
  CDR3 for alpha chain variable domain of TCR clone 28972 (TRAV16, TRAJ52)
CALSAAGGTSYGKLTF

SEQ ID NO: 57944 - protein, 16 aa, Homo sapiens
  CDR3 for beta chain variable domain of TCR clone 28972 (TRBV12-5, TRBJ2-5)
CASGPRTSGNQETQYF

SEQ ID NO: 57945 - protein, 16 aa, Homo sapiens
  CDR3 for alpha chain variable domain of TCR clone 28973 (TRAV12-3, TRAJ53)
CAMSPGSGGSNYKLTF

SEQ ID NO: 57946 - protein, 13 aa, Homo sapiens
  CDR3 for beta chain variable domain of TCR clone 28973 (TRBV20-1, TRBJ1-1)
CSAPLGGGTEAFF

SEQ ID NO: 57947 - protein, 16 aa, Homo sapiens
  CDR3 for alpha chain variable domain of TCR clone 28974 (TRAV12-3, TRAJ53)
CAMSPGSGGSNYKLTF

SEQ ID NO: 57948 - protein, 16 aa, Homo sapiens
  CDR3 for beta chain variable domain of TCR clone 28974 (TRBV4-2, TRBJ1-1)
CDSSQAGFGMNTEAFF

SEQ ID NO: 57949 - protein, 10 aa, Homo sapiens
  CDR3 for alpha chain variable domain of TCR clone 28975 (TRAV12-3, TRAJ49)
CAMNDDQCYF

SEQ ID NO: 57950 - protein, 13 aa, Homo sapiens
  CDR3 for beta chain variable domain of TCR clone 28975 (TRBV12-4, TRBJ1-1)
CASSPGTGFEAFF

SEQ ID NO: 57951 - protein, 15 aa, Homo sapiens
  CDR3 for alpha chain variable domain of TCR clone 28976 (TRAV27, TRAJ38)
CAGRFNAGNNRKLIG

SEQ ID NO: 57952 - protein, 13 aa, Homo sapiens
  CDR3 for beta chain variable domain of TCR clone 28976 (TRBV12-5, TRBJ2-3)
CASQNRGTDTQYF

SEQ ID NO: 57953 - protein, 17 aa, Homo sapiens
  CDR3 for alpha chain variable domain of TCR clone 28977 (TRAV13-1, TRAJ52)
CAASSGAGGTSYVKLTF

SEQ ID NO: 57954 - protein, 15 aa, Homo sapiens
  CDR3 for beta chain variable domain of TCR clone 28977 (TRBV2, TRBJ2-1)
CASSELAGSYNEQFF

SEQ ID NO: 57955 - protein, 14 aa, Homo sapiens
  CDR3 for alpha chain variable domain of TCR clone 28978 (TRAV35, TRAJ22)
CTGLRPGSARQLTF

SEQ ID NO: 57956 - protein, 15 aa, Homo sapiens
  CDR3 for beta chain variable domain of TCR clone 28978 (TRBV12-4, TRBJ2-5)
CASSPPAGLQETQYF

SEQ ID NO: 57957 - protein, 14 aa, Homo sapiens
  CDR3 for alpha chain variable domain of TCR clone 28979 (TRAV13-1, TRAJ44)
CAAKATGTASNLTF

SEQ ID NO: 57958 - protein, 17 aa, Homo sapiens
  CDR3 for beta chain variable domain of TCR clone 28979 (TRBV7-3, TRBJ2-3)
CASSLMKRMRGADTQYF

SEQ ID NO: 57959 - protein, 15 aa, Homo sapiens
  CDR3 for alpha chain variable domain of TCR clone 28980 (TRAV25, TRAJ52)
CAGRPGGTSYGKLTF

SEQ ID NO: 57960 - protein, 17 aa, Homo sapiens
  CDR3 for beta chain variable domain of TCR clone 28980 (TRBV7-8, TRBJ2-6)
CASSAGTGGAGANVMTF

SEQ ID NO: 57961 - protein, 15 aa, Homo sapiens
  CDR3 for alpha chain variable domain of TCR clone 28981 (TRAV8-3, TRAJ27)
CAVGPSKTNAGKSTF

SEQ ID NO: 57962 - protein, 15 aa, Homo sapiens
  CDR3 for beta chain variable domain of TCR clone 28981 (TRBV7-2, TRBJ2-1)
CASSSGLAGGNEQFS

SEQ ID NO: 57963 - protein, 15 aa, Homo sapiens
  CDR3 for alpha chain variable domain of TCR clone 28982 (TRAV12-1, TRAJ4)
CVVNPFSGGYSKLIF

SEQ ID NO: 57964 - protein, 13 aa, Homo sapiens
  CDR3 for beta chain variable domain of TCR clone 28982 (TRBV20-1, TRBJ1-2)
CSARGTADYGYTF

SEQ ID NO: 57965 - protein, 13 aa, Homo sapiens
  CDR3 for alpha chain variable domain of TCR clone 28983 (TRAV8-3, TRAJ4)
CCGCSCGYNKLIF

SEQ ID NO: 57966 - protein, 15 aa, Homo sapiens
  CDR3 for beta chain variable domain of TCR clone 28983 (TRBV6-5, TRBJ2-1)
CASSYDAGAGNEQFF

SEQ ID NO: 57967 - protein, 14 aa, Homo sapiens
  CDR3 for alpha chain variable domain of TCR clone 28984 (TRAV2, TRAJ37)
CAVEDQGNTGKLIF

SEQ ID NO: 57968 - protein, 14 aa, Homo sapiens
  CDR3 for beta chain variable domain of TCR clone 28984 (TRBV18, TRBJ2-1)
CASSPQGRFNGQFF

SEQ ID NO: 57969 - protein, 13 aa, Homo sapiens
  CDR3 for alpha chain variable domain of TCR clone 28985 (TRAV8-3, TRAJ36)
CAVGATGANNLFF

SEQ ID NO: 57970 - protein, 16 aa, Homo sapiens
  CDR3 for beta chain variable domain of TCR clone 28985 (TRBV7-3, TRBJ2-2)
CASSLKRGTLSGELFF

SEQ ID NO: 57971 - protein, 15 aa, Homo sapiens
  CDR3 for alpha chain variable domain of TCR clone 28986 (TRAV23/DV6, TRAJ52)
CAASSPGTSYGKLTF

SEQ ID NO: 57972 - protein, 10 aa, Homo sapiens
  CDR3 for beta chain variable domain of TCR clone 28986 (TRBV28, TRBJ1-2)
CASSSDRAVF

SEQ ID NO: 57973 - protein, 12 aa, Homo sapiens
  CDR3 for alpha chain variable domain of TCR clone 28987 (TRAV3, TRAJ20)
CAVRDPDYKLSF

SEQ ID NO: 57974 - protein, 13 aa, Homo sapiens
  CDR3 for beta chain variable domain of TCR clone 28987 (TRBV9, TRBJ2-1)
RASSVGQGGEQFF

SEQ ID NO: 57975 - protein, 12 aa, Homo sapiens
  CDR3 for alpha chain variable domain of TCR clone 28988 (TRAV17, TRAJ20)
CSTDRYDYKLSF

SEQ ID NO: 57976 - protein, 14 aa, Homo sapiens
  CDR3 for beta chain variable domain of TCR clone 28988 (TRBV19, TRBJ2-1)
CASPTFVLSGEQFF

SEQ ID NO: 57977 - protein, 21 aa, Homo sapiens
  CDR3 for alpha chain variable domain of TCR clone 28989 (TRAV6, TRAJ36)
CARQTTSSLGLERDSPLFPIS

SEQ ID NO: 57978 - protein, 14 aa, Homo sapiens
  CDR3 for beta chain variable domain of TCR clone 28989 (TRBV10-2, TRBJ1-5)
CASGSTGRNQPQHF

SEQ ID NO: 57979 - protein, 13 aa, Homo sapiens
  CDR3 for alpha chain variable domain of TCR clone 28990 (TRAV21, TRAJ20)
CAVGLRVDYKLSF

SEQ ID NO: 57980 - protein, 14 aa, Homo sapiens
  CDR3 for beta chain variable domain of TCR clone 28990 (TRBV7-2, TRBJ1-1)
CASSFLTGTTEAFF

SEQ ID NO: 57981 - protein, 15 aa, Homo sapiens
  CDR3 for alpha chain variable domain of TCR clone 28991 (TRAV12-1, TRAJ9)
CVVSFGDTGGFKTIF

SEQ ID NO: 57982 - protein, 13 aa, Homo sapiens
  CDR3 for beta chain variable domain of TCR clone 28991 (TRBV2, TRBJ1-4)
CASSEWAGEKLFF

SEQ ID NO: 57983 - protein, 12 aa, Homo sapiens
  CDR3 for alpha chain variable domain of TCR clone 28992 (TRAV17, TRAJ30)
CVLERRDDKTIF

SEQ ID NO: 57984 - protein, 14 aa, Homo sapiens
  CDR3 for beta chain variable domain of TCR clone 28992 (TRBV7-7, TRBJ2-2)
CASSRDRSTGELFF

SEQ ID NO: 57985 - protein, 11 aa, Homo sapiens
  CDR3 for alpha chain variable domain of TCR clone 28993 (TRAV17, TRAJ39)
CATNPYNMLTC

SEQ ID NO: 57986 - protein, 13 aa, Homo sapiens
  CDR3 for beta chain variable domain of TCR clone 28993 (TRBV7-8, TRBJ2-1)
CASTRDAVDEQFF

SEQ ID NO: 57987 - protein, 15 aa, Homo sapiens
  CDR3 for alpha chain variable domain of TCR clone 28994 (TRAV12-3, TRAJ6)
CAMSATTGGSYIPTF

SEQ ID NO: 57988 - protein, 16 aa, Homo sapiens
  CDR3 for beta chain variable domain of TCR clone 28994 (TRBV20-1, TRBJ1-2)
CSASMGQGVANYGYTI

SEQ ID NO: 57989 - protein, 18 aa, Homo sapiens
  CDR3 for alpha chain variable domain of TCR clone 28995 (TRAV12-3, TRAJ52)
CAISVGGAGGTSYGKLTF

SEQ ID NO: 57990 - protein, 15 aa, Homo sapiens
  CDR3 for beta chain variable domain of TCR clone 28995 (TRBV27, TRBJ1-6)
CASSFDRGLGSPLHF

SEQ ID NO: 57991 - protein, 13 aa, Homo sapiens
  CDR3 for alpha chain variable domain of TCR clone 28996 (TRAV17, TRAJ9)
CSTDYTGGFKTIF

SEQ ID NO: 57992 - protein, 14 aa, Homo sapiens
  CDR3 for beta chain variable domain of TCR clone 28996 (TRBV19, TRBJ2-5)
CASSMTGQQETQYF

SEQ ID NO: 57993 - protein, 11 aa, Homo sapiens
  CDR3 for alpha chain variable domain of TCR clone 28997 (TRAV1-2, TRAJ31)
CAVNNNARLMS

SEQ ID NO: 57994 - protein, 15 aa, Homo sapiens
  CDR3 for beta chain variable domain of TCR clone 28997 (TRBV28, TRBJ2-1)
CASSIIAGGRSEQFF

SEQ ID NO: 57995 - protein, 16 aa, Homo sapiens
  CDR3 for alpha chain variable domain of TCR clone 28998 (TRAV13-1, TRAJ48)
CAASIFGNFGNEKLTF

SEQ ID NO: 57996 - protein, 12 aa, Homo sapiens
  CDR3 for beta chain variable domain of TCR clone 28998 (TRBV14, TRBJ2-4)
CASSNLKSSQYF

SEQ ID NO: 57997 - protein, 13 aa, Homo sapiens
  CDR3 for alpha chain variable domain of TCR clone 28999 (TRAV30, TRAJ6)
CGSIEGGSYIPTF

SEQ ID NO: 57998 - protein, 16 aa, Homo sapiens
  CDR3 for beta chain variable domain of TCR clone 28999 (TRBV7-6, TRBJ2-3)
CASSARTSRGTDTQYF

SEQ ID NO: 57999 - protein, 14 aa, Homo sapiens
  CDR3 for alpha chain variable domain of TCR clone 29000 (TRAV34, TRAJ44)
CGADGTGTASKLTF

SEQ ID NO: 58000 - protein, 12 aa, Homo sapiens
  CDR3 for beta chain variable domain of TCR clone 29000 (TRBV11-2, TRBJ2-2)
CASSLGGGELFL

SEQ ID NO: 58001 - protein, 15 aa, Homo sapiens
  CDR3 for alpha chain variable domain of TCR clone 29001 (TRAV26-1, TRAJ29)
GIVRVEGSGNTPLVF

SEQ ID NO: 58002 - protein, 15 aa, Homo sapiens
  CDR3 for beta chain variable domain of TCR clone 29001 (TRBV7-9, TRBJ1-5)
CASSQGHQPNQPQHF

SEQ ID NO: 58003 - protein, 15 aa, Homo sapiens
  CDR3 for alpha chain variable domain of TCR clone 29002 (TRAV2, TRAJ9)
CAVEDRGTGGFETIF

SEQ ID NO: 58004 - protein, 16 aa, Homo sapiens
  CDR3 for beta chain variable domain of TCR clone 29002 (TRBV24-1, TRBJ2-3)
CATSDPGTGATDTQYF

SEQ ID NO: 58005 - protein, 11 aa, Homo sapiens
  CDR3 for alpha chain variable domain of TCR clone 29003 (TRAV21, TRAJ34)
CAHYNTDKLIF

SEQ ID NO: 58006 - protein, 16 aa, Homo sapiens
  CDR3 for beta chain variable domain of TCR clone 29003 (TRBV10-2, TRBJ1-1)
CASGEFGEGASTEAFF

SEQ ID NO: 58007 - protein, 12 aa, Homo sapiens
  CDR3 for alpha chain variable domain of TCR clone 29004 (TRAV1-1, TRAJ20)
CAVRDRTTSSAF

SEQ ID NO: 58008 - protein, 18 aa, Homo sapiens
  CDR3 for beta chain variable domain of TCR clone 29004 (TRBV20-1, TRBJ2-6)
CSAETTPTHGSGANVLTF

SEQ ID NO: 58009 - protein, 14 aa, Homo sapiens
  CDR3 for alpha chain variable domain of TCR clone 29005 (TRAV13-1, TRAJ44)
CAAKATGTASKLTF

SEQ ID NO: 58010 - protein, 17 aa, Homo sapiens
  CDR3 for beta chain variable domain of TCR clone 29005 (TRBV7-3, TRBJ2-3)
RASSLMKGMRGADTQYF

SEQ ID NO: 58011 - protein, 13 aa, Homo sapiens
  CDR3 for alpha chain variable domain of TCR clone 29006 (TRAV21, TRAJ27)
CAARPGNAGKSTF

SEQ ID NO: 58012 - protein, 20 aa, Homo sapiens
  CDR3 for beta chain variable domain of TCR clone 29006 (TRBV28, TRBJ2-1)
CASTPIGRSPGLAGGNEQFF

SEQ ID NO: 58013 - protein, 13 aa, Homo sapiens
  CDR3 for alpha chain variable domain of TCR clone 29007 (TRAV30, TRAJ6)
CGFIEGGSYIPPF

SEQ ID NO: 58014 - protein, 13 aa, Homo sapiens
  CDR3 for beta chain variable domain of TCR clone 29007 (TRBV5-4, TRBJ2-5)
CASSPVSQETQYF

SEQ ID NO: 58015 - protein, 11 aa, Homo sapiens
  CDR3 for alpha chain variable domain of TCR clone 29008 (TRAV2, TRAJ13)
CASGGYQKVTF

SEQ ID NO: 58016 - protein, 16 aa, Homo sapiens
  CDR3 for beta chain variable domain of TCR clone 29008 (TRBV6-1, TRBJ2-5)
CASSETLDRGAGTQYF

SEQ ID NO: 58017 - protein, 17 aa, Homo sapiens
  CDR3 for alpha chain variable domain of TCR clone 29009 (TRAV8-6, TRAJ58)
CAVSSWVGETSGSRLTF

SEQ ID NO: 58018 - protein, 16 aa, Homo sapiens
  CDR3 for beta chain variable domain of TCR clone 29009 (TRBV20-1, TRBJ1-4)
CSAPGQGLLTNEKLLF

SEQ ID NO: 58019 - protein, 13 aa, Homo sapiens
  CDR3 for alpha chain variable domain of TCR clone 29010 (TRAV36/DV7, TRAJ37)
CAVFSSNTGKLIF

SEQ ID NO: 58020 - protein, 16 aa, Homo sapiens
  CDR3 for beta chain variable domain of TCR clone 29010 (TRBV3-1, TRBJ2-5)
CASNPGQFNGFGTQYF

SEQ ID NO: 58021 - protein, 14 aa, Homo sapiens
  CDR3 for alpha chain variable domain of TCR clone 29011 (TRAV29/DV5, TRAJ45)
CAASFRGGADGRTF

SEQ ID NO: 58022 - protein, 11 aa, Homo sapiens
  CDR3 for beta chain variable domain of TCR clone 29011 (TRBV11-2, TRBJ2-2)
CASSLPGELFF

SEQ ID NO: 58023 - protein, 12 aa, Homo sapiens
  CDR3 for alpha chain variable domain of TCR clone 29012 (TRAV21, TRAJ33)
CAKMDSNYQIIW

SEQ ID NO: 58024 - protein, 14 aa, Homo sapiens
  CDR3 for beta chain variable domain of TCR clone 29012 (TRBV2, TRBJ2-7)
CASSLTSGGYEQYF

SEQ ID NO: 58025 - protein, 17 aa, Homo sapiens
  CDR3 for alpha chain variable domain of TCR clone 29013 (TRAV3, TRAJ6)
CAVRDGPRAGGSYIPTF

SEQ ID NO: 58026 - protein, 14 aa, Homo sapiens
  CDR3 for beta chain variable domain of TCR clone 29013 (TRBV7-2, TRBJ2-7)
CASSPQTSFYEQYF

SEQ ID NO: 58027 - protein, 14 aa, Homo sapiens
  CDR3 for alpha chain variable domain of TCR clone 29014 (TRAV8-4, TRAJ9)
CAVRINTGGFKTNF

SEQ ID NO: 58028 - protein, 15 aa, Homo sapiens
  CDR3 for beta chain variable domain of TCR clone 29014 (TRBV10-2, TRBJ2-6)
CASSEQGTGANVLTF

SEQ ID NO: 58029 - protein, 22 aa, Homo sapiens
  CDR3 for alpha chain variable domain of TCR clone 29015 (TRAV27, TRAJ38)
CAARRNAGNNHTQNPDPAVYQL

SEQ ID NO: 58030 - protein, 13 aa, Homo sapiens
  CDR3 for beta chain variable domain of TCR clone 29015 (TRBV12-5, TRBJ2-3)
CASGDRQSDTQYF

SEQ ID NO: 58031 - protein, 11 aa, Homo sapiens
  CDR3 for alpha chain variable domain of TCR clone 29016 (TRAV12-3, TRAJ27)
CAMANAGKSTF

SEQ ID NO: 58032 - protein, 11 aa, Homo sapiens
  CDR3 for beta chain variable domain of TCR clone 29016 (TRBV6-3, TRBJ2-3)
CATGQADTQYF

SEQ ID NO: 58033 - protein, 14 aa, Homo sapiens
  CDR3 for alpha chain variable domain of TCR clone 29017 (TRAV17, TRAJ57)
CATDPQGGSEKLVF

SEQ ID NO: 58034 - protein, 14 aa, Homo sapiens
  CDR3 for beta chain variable domain of TCR clone 29017 (TRBV15, TRBJ2-5)
CATSGDRGQETQYF

SEQ ID NO: 58035 - protein, 14 aa, Homo sapiens
  CDR3 for alpha chain variable domain of TCR clone 29018 (TRAV13-1, TRAJ44)
CAAKATGTASKLTF

SEQ ID NO: 58036 - protein, 14 aa, Homo sapiens
  CDR3 for beta chain variable domain of TCR clone 29018 (TRBV19, TRBJ2-2)
CAGSTLHRSGELFF

SEQ ID NO: 58037 - protein, 15 aa, Homo sapiens
  CDR3 for alpha chain variable domain of TCR clone 29019 (TRAV17, TRAJ23)
CATDAEDNQGGRLIF

SEQ ID NO: 58038 - protein, 12 aa, Homo sapiens
  CDR3 for beta chain variable domain of TCR clone 29019 (TRBV2, TRBJ2-1)
CAKREGYNEQFF

SEQ ID NO: 58039 - protein, 16 aa, Homo sapiens
  CDR3 for alpha chain variable domain of TCR clone 29020 (TRAV16, TRAJ4)
CARSRMFSGGYNKLIF

SEQ ID NO: 58040 - protein, 16 aa, Homo sapiens
  CDR3 for beta chain variable domain of TCR clone 29020 (TRBV24-1, TRBJ2-3)
CATRDPGTGATDTQYF

SEQ ID NO: 58041 - protein, 14 aa, Homo sapiens
  CDR3 for alpha chain variable domain of TCR clone 29021 (TRAV2, TRAJ37)
CAVDFTSNTGKLIF

SEQ ID NO: 58042 - protein, 15 aa, Homo sapiens
  CDR3 for beta chain variable domain of TCR clone 29021 (TRBV20-1, TRBJ1-1)
YSASRGVTGNTEAFF

SEQ ID NO: 58043 - protein, 14 aa, Homo sapiens
  CDR3 for alpha chain variable domain of TCR clone 29022 (TRAV13-1, TRAJ35)
CAASKGGFGNVLHC

SEQ ID NO: 58044 - protein, 15 aa, Homo sapiens
  CDR3 for beta chain variable domain of TCR clone 29022 (TRBV4-1, TRBJ2-1)
CASSQVGLGSDEQFF

SEQ ID NO: 58045 - protein, 15 aa, Homo sapiens
  CDR3 for alpha chain variable domain of TCR clone 29023 (TRAV1-2, TRAJ30)
CAVRPHGDRDDKIIF

SEQ ID NO: 58046 - protein, 13 aa, Homo sapiens
  CDR3 for beta chain variable domain of TCR clone 29023 (TRBV4-1, TRBJ2-7)
CASSQGQAYEQYF

SEQ ID NO: 58047 - protein, 15 aa, Homo sapiens
  CDR3 for alpha chain variable domain of TCR clone 29024 (TRAV3, TRAJ4)
CAVRDGTGGYNKLIF

SEQ ID NO: 58048 - protein, 16 aa, Homo sapiens
  CDR3 for beta chain variable domain of TCR clone 29024 (TRBV27, TRBJ2-2)
CASSSSGVSNTGEMFF

SEQ ID NO: 58049 - protein, 12 aa, Homo sapiens
  CDR3 for alpha chain variable domain of TCR clone 29025 (TRAV26-1, TRAJ36)
CIVRVRADNLFF

SEQ ID NO: 58050 - protein, 17 aa, Homo sapiens
  CDR3 for beta chain variable domain of TCR clone 29025 (TRBV7-8, TRBJ2-6)
CASSAGTGGAGANVLTF

SEQ ID NO: 58051 - protein, 17 aa, Homo sapiens
  CDR3 for alpha chain variable domain of TCR clone 29026 (TRAV8-6, TRAJ58)
CAVSSWVGETSGSRLTF

SEQ ID NO: 58052 - protein, 16 aa, Homo sapiens
  CDR3 for beta chain variable domain of TCR clone 29026 (TRBV12-4, TRBJ1-5)
CASSRPVGGSNQPQHF

SEQ ID NO: 58053 - protein, 16 aa, Homo sapiens
  CDR3 for alpha chain variable domain of TCR clone 29027 (TRAV30, TRAJ24)
CGTEIVNADSWGKFQF

SEQ ID NO: 58054 - protein, 12 aa, Homo sapiens
  CDR3 for beta chain variable domain of TCR clone 29027 (TRBV11-2, TRBJ2-2)
CASSLGGGELFF

SEQ ID NO: 58055 - protein, 15 aa, Homo sapiens
  CDR3 for alpha chain variable domain of TCR clone 29028 (TRAV35, TRAJ41)
CAGQLFSNSVYALNF

SEQ ID NO: 58056 - protein, 14 aa, Homo sapiens
  CDR3 for beta chain variable domain of TCR clone 29028 (TRBV7-2, TRBJ1-2)
CASSRGGTNYGYTF

SEQ ID NO: 58057 - protein, 12 aa, Homo sapiens
  CDR3 for alpha chain variable domain of TCR clone 29029 (TRAV12-3, TRAJ40)
CVMSSGTYKYIF

SEQ ID NO: 58058 - protein, 15 aa, Homo sapiens
  CDR3 for beta chain variable domain of TCR clone 29029 (TRBV7-3, TRBJ2-2)
CASSETGQGTGELFF

SEQ ID NO: 58059 - protein, 16 aa, Homo sapiens
  CDR3 for alpha chain variable domain of TCR clone 29030 (TRAV4, TRAJ22)
CLVGDLYSGSARQLTL

SEQ ID NO: 58060 - protein, 16 aa, Homo sapiens
  CDR3 for beta chain variable domain of TCR clone 29030 (TRBV7-9, TRBJ2-1)
CASSDVAGGSYNEQFF

SEQ ID NO: 58061 - protein, 14 aa, Homo sapiens
  CDR3 for alpha chain variable domain of TCR clone 29031 (TRAV9-2, TRAJ39)
CALYIYNAGNMLTF

SEQ ID NO: 58062 - protein, 15 aa, Homo sapiens
  CDR3 for beta chain variable domain of TCR clone 29031 (TRBV19, TRBJ2-1)
CASNAQGLAGREQFF

SEQ ID NO: 58063 - protein, 10 aa, Homo sapiens
  CDR3 for alpha chain variable domain of TCR clone 29032 (TRAV8-4, TRAJ43)
CAVSADDMRF

SEQ ID NO: 58064 - protein, 15 aa, Homo sapiens
  CDR3 for beta chain variable domain of TCR clone 29032 (TRBV5-1, TRBJ2-3)
CASSVTSGSTETQYF

SEQ ID NO: 58065 - protein, 14 aa, Homo sapiens
  CDR3 for alpha chain variable domain of TCR clone 29033 (TRAV17, TRAJ16)
CATADFLDGQKLLF

SEQ ID NO: 58066 - protein, 15 aa, Homo sapiens
  CDR3 for beta chain variable domain of TCR clone 29033 (TRBV18, TRBJ2-1)
CASSPPSASYNEQFF

SEQ ID NO: 58067 - protein, 11 aa, Homo sapiens
  CDR3 for alpha chain variable domain of TCR clone 29034 (TRAV12-1, TRAJ26)
CVVAYGQNFVF

SEQ ID NO: 58068 - protein, 15 aa, Homo sapiens
  CDR3 for beta chain variable domain of TCR clone 29034 (TRBV12-4, TRBJ2-5)
CAGSGTGQAQETQYF

SEQ ID NO: 58069 - protein, 16 aa, Homo sapiens
  CDR3 for alpha chain variable domain of TCR clone 29035 (TRAV12-2, TRAJ10)
CAVNRVLTGGGNKLTF

SEQ ID NO: 58070 - protein, 12 aa, Homo sapiens
  CDR3 for beta chain variable domain of TCR clone 29035 (TRBV28, TRBJ2-7)
CASSFSSYERYF

SEQ ID NO: 58071 - protein, 15 aa, Homo sapiens
  CDR3 for alpha chain variable domain of TCR clone 29036 (TRAV3, TRAJ9)
CAVRARNTGGFKTIF

SEQ ID NO: 58072 - protein, 12 aa, Homo sapiens
  CDR3 for beta chain variable domain of TCR clone 29036 (TRBV11-2, TRBJ2-7)
CASSLPTYEQYL

SEQ ID NO: 58073 - protein, 15 aa, Homo sapiens
  CDR3 for alpha chain variable domain of TCR clone 29037 (TRAV21, TRAJ24)
CAARSSTDSWGKLQF

SEQ ID NO: 58074 - protein, 14 aa, Homo sapiens
  CDR3 for beta chain variable domain of TCR clone 29037 (TRBV6-5, TRBJ2-1)
CASSSSVRPRDQFF

SEQ ID NO: 58075 - protein, 16 aa, Homo sapiens
  CDR3 for alpha chain variable domain of TCR clone 29038 (TRAV3, TRAJ37)
CAVRGKGSGNTGKLIF

SEQ ID NO: 58076 - protein, 13 aa, Homo sapiens
  CDR3 for beta chain variable domain of TCR clone 29038 (TRBV20-1, TRBJ1-1)
CSARGGGNTEAFF

SEQ ID NO: 58077 - protein, 15 aa, Homo sapiens
  CDR3 for alpha chain variable domain of TCR clone 29039 (TRAV25, TRAJ52)
CAGTSGGTSYGKPTF

SEQ ID NO: 58078 - protein, 13 aa, Homo sapiens
  CDR3 for beta chain variable domain of TCR clone 29039 (TRBV6-5, TRBJ2-5)
CASSPQGGETQYF

SEQ ID NO: 58079 - protein, 14 aa, Homo sapiens
  CDR3 for alpha chain variable domain of TCR clone 29040 (TRAV1-2, TRAJ8)
CTVREDTGFQELVF

SEQ ID NO: 58080 - protein, 17 aa, Homo sapiens
  CDR3 for beta chain variable domain of TCR clone 29040 (TRBV11-2, TRBJ2-1)
CASSLYPPGVEYNEQFF

SEQ ID NO: 58081 - protein, 14 aa, Homo sapiens
  CDR3 for alpha chain variable domain of TCR clone 29041 (TRAV26-1, TRAJ52)
CIVKGGTSYGKLTF

SEQ ID NO: 58082 - protein, 13 aa, Homo sapiens
  CDR3 for beta chain variable domain of TCR clone 29041 (TRBV7-3, TRBJ2-1)
CASSLDSYNEQFF

SEQ ID NO: 58083 - protein, 10 aa, Homo sapiens
  CDR3 for alpha chain variable domain of TCR clone 29042 (TRAV20, TRAJ22)
CAAPARQLTF

SEQ ID NO: 58084 - protein, 14 aa, Homo sapiens
  CDR3 for beta chain variable domain of TCR clone 29042 (TRBV19, TRBJ2-1)
CDSSMGSGATEQFF

SEQ ID NO: 58085 - protein, 14 aa, Homo sapiens
  CDR3 for alpha chain variable domain of TCR clone 29043 (TRAV2, TRAJ22)
CCPLPGGSARQLTF

SEQ ID NO: 58086 - protein, 11 aa, Homo sapiens
  CDR3 for beta chain variable domain of TCR clone 29043 (TRBV27, TRBJ2-3)
CASSLGDTQYF

SEQ ID NO: 58087 - protein, 19 aa, Homo sapiens
  CDR3 for alpha chain variable domain of TCR clone 29044 (TRAV25, TRAJ43)
TATQTTDVGTYFCAVFMRF

SEQ ID NO: 58088 - protein, 13 aa, Homo sapiens
  CDR3 for beta chain variable domain of TCR clone 29044 (TRBV7-9, TRBJ1-2)
CASSLKQNYGYAF

SEQ ID NO: 58089 - protein, 17 aa, Homo sapiens
  CDR3 for alpha chain variable domain of TCR clone 29045 (TRAV22, TRAJ52)
CAVERRAGGTSYGKLTF

SEQ ID NO: 58090 - protein, 14 aa, Homo sapiens
  CDR3 for beta chain variable domain of TCR clone 29045 (TRBV27, TRBJ2-1)
CASSRRGAFNEQFF

SEQ ID NO: 58091 - protein, 16 aa, Homo sapiens
  CDR3 for alpha chain variable domain of TCR clone 29046 (TRAV23/DV6, TRAJ9)
CAASIGGNTGGFKTIF

SEQ ID NO: 58092 - protein, 14 aa, Homo sapiens
  CDR3 for beta chain variable domain of TCR clone 29046 (TRBV9, TRBJ2-7)
RASSVGVGSCEQYF

SEQ ID NO: 58093 - protein, 12 aa, Homo sapiens
  CDR3 for alpha chain variable domain of TCR clone 29047 (TRAV12-3, TRAJ31)
CAMSVPNARLMF

SEQ ID NO: 58094 - protein, 12 aa, Homo sapiens
  CDR3 for beta chain variable domain of TCR clone 29047 (TRBV11-2, TRBJ2-1)
CASSVQREEQFF

SEQ ID NO: 58095 - protein, 13 aa, Homo sapiens
  CDR3 for alpha chain variable domain of TCR clone 29048 (TRAV13-2, TRAJ48)
CAEMDFGNEKLTF

SEQ ID NO: 58096 - protein, 15 aa, Homo sapiens
  CDR3 for beta chain variable domain of TCR clone 29048 (TRBV7-9, TRBJ1-6)
CASSFPGRGNSPLHF

SEQ ID NO: 58097 - protein, 15 aa, Homo sapiens
  CDR3 for alpha chain variable domain of TCR clone 29049 (TRAV8-4, TRAJ36)
CAVRKSWTGANNLFS

SEQ ID NO: 58098 - protein, 17 aa, Homo sapiens
  CDR3 for beta chain variable domain of TCR clone 29049 (TRBV3-1, TRBJ2-2)
CASSQDSQGPNTGELFF

SEQ ID NO: 58099 - protein, 16 aa, Homo sapiens
  CDR3 for alpha chain variable domain of TCR clone 29050 (TRAV1-2, TRAJ10)
CAVRGVLTRGGNKLTF

SEQ ID NO: 58100 - protein, 12 aa, Homo sapiens
  CDR3 for beta chain variable domain of TCR clone 29050 (TRBV7-8, TRBJ2-7)
CASSLGDREQYF

SEQ ID NO: 58101 - protein, 14 aa, Homo sapiens
  CDR3 for alpha chain variable domain of TCR clone 29051 (TRAV3, TRAJ22)
CAVRDYGSASQLTF

SEQ ID NO: 58102 - protein, 13 aa, Homo sapiens
  CDR3 for beta chain variable domain of TCR clone 29051 (TRBV11-2, TRBJ2-5)
CASGHGAKETQYF

SEQ ID NO: 58103 - protein, 11 aa, Homo sapiens
  CDR3 for alpha chain variable domain of TCR clone 29052 (TRAV21, TRAJ34)
CAPLDTDKLIF

SEQ ID NO: 58104 - protein, 16 aa, Homo sapiens
  CDR3 for beta chain variable domain of TCR clone 29052 (TRBV5-1, TRBJ2-3)
CASSWAGDRGTDTQYF

SEQ ID NO: 58105 - protein, 16 aa, Homo sapiens
  CDR3 for alpha chain variable domain of TCR clone 29053 (TRAV30, TRAJ24)
CGTEIVDADSWGKFQF

SEQ ID NO: 58106 - protein, 15 aa, Homo sapiens
  CDR3 for beta chain variable domain of TCR clone 29053 (TRBV20-1, TRBJ2-6)
CSARDRGPGANVLTF

SEQ ID NO: 58107 - protein, 12 aa, Homo sapiens
  CDR3 for alpha chain variable domain of TCR clone 29054 (TRAV12-1, TRAJ40)
FVVYSGTYKYIF

SEQ ID NO: 58108 - protein, 18 aa, Homo sapiens
  CDR3 for beta chain variable domain of TCR clone 29054 (TRBV11-2, TRBJ2-3)
CASSLGGASRGAPNTQYF

SEQ ID NO: 58109 - protein, 15 aa, Homo sapiens
  CDR3 for alpha chain variable domain of TCR clone 29055 (TRAV8-3, TRAJ11)
CAVGLLNSGYSTLTF

SEQ ID NO: 58110 - protein, 17 aa, Homo sapiens
  CDR3 for beta chain variable domain of TCR clone 29055 (TRBV13, TRBJ2-3)
CASSLSRVAGGRNTQYF

SEQ ID NO: 58111 - protein, 13 aa, Homo sapiens
  CDR3 for alpha chain variable domain of TCR clone 29056 (TRAV21, TRAJ27)
CAARPGNAGKSTF

SEQ ID NO: 58112 - protein, 13 aa, Homo sapiens
  CDR3 for beta chain variable domain of TCR clone 29056 (TRBV7-3, TRBJ2-7)
CASSQAGGYEQHF

SEQ ID NO: 58113 - protein, 15 aa, Homo sapiens
  CDR3 for alpha chain variable domain of TCR clone 29057 (TRAV20, TRAJ4)
CAMEGSSGGYNKLIF

SEQ ID NO: 58114 - protein, 14 aa, Homo sapiens
  CDR3 for beta chain variable domain of TCR clone 29057 (TRBV7-8, TRBJ2-7)
CASTLGGALGEQYF

SEQ ID NO: 58115 - protein, 12 aa, Homo sapiens
  CDR3 for alpha chain variable domain of TCR clone 29058 (TRAV21, TRAJ23)
FAVMLQGGKLIF

SEQ ID NO: 58116 - protein, 14 aa, Homo sapiens
  CDR3 for beta chain variable domain of TCR clone 29058 (TRBV7-9, TRBJ1-4)
CAITEGEANEKLFF

SEQ ID NO: 58117 - protein, 15 aa, Homo sapiens
  CDR3 for alpha chain variable domain of TCR clone 29059 (TRAV27, TRAJ38)
CAARRNVGNNRKLIW

SEQ ID NO: 58118 - protein, 13 aa, Homo sapiens
  CDR3 for beta chain variable domain of TCR clone 29059 (TRBV12-5, TRBJ2-3)
CASGDRQSDTQYF

SEQ ID NO: 58119 - protein, 14 aa, Homo sapiens
  CDR3 for alpha chain variable domain of TCR clone 29060 (TRAV12-1, TRAJ39)
CVVSLNNAGIMLTF

SEQ ID NO: 58120 - protein, 13 aa, Homo sapiens
  CDR3 for beta chain variable domain of TCR clone 29060 (TRBV9, TRBJ2-7)
CASSVLQAGEQYF

SEQ ID NO: 58121 - protein, 17 aa, Homo sapiens
  CDR3 for alpha chain variable domain of TCR clone 29061 (TRAV4, TRAJ13)
CLVGVQGSSGGYQKVTF

SEQ ID NO: 58122 - protein, 18 aa, Homo sapiens
  CDR3 for beta chain variable domain of TCR clone 29061 (TRBV15, TRBJ2-3)
CATSRDGARSWGTDTQYF

SEQ ID NO: 58123 - protein, 14 aa, Homo sapiens
  CDR3 for alpha chain variable domain of TCR clone 29062 (TRAV12-2, TRAJ36)
CAVNPPTGANNLFF

SEQ ID NO: 58124 - protein, 13 aa, Homo sapiens
  CDR3 for beta chain variable domain of TCR clone 29062 (TRBV20-1, TRBJ1-6)
CSAPTGLGSPLLF

SEQ ID NO: 58125 - protein, 14 aa, Homo sapiens
  CDR3 for alpha chain variable domain of TCR clone 29063 (TRAV26-1, TRAJ45)
CIEVTGGGADGLTF

SEQ ID NO: 58126 - protein, 16 aa, Homo sapiens
  CDR3 for beta chain variable domain of TCR clone 29063 (TRBV6-3, TRBJ1-2)
CASSYSRRASNYGYTF

SEQ ID NO: 58127 - protein, 16 aa, Homo sapiens
  CDR3 for alpha chain variable domain of TCR clone 29064 (TRAV3, TRAJ10)
CAVRDMRAGGGNKLTS

SEQ ID NO: 58128 - protein, 14 aa, Homo sapiens
  CDR3 for beta chain variable domain of TCR clone 29064 (TRBV7-2, TRBJ1-1)
CASSFLTGTTEAFF

SEQ ID NO: 58129 - protein, 13 aa, Homo sapiens
  CDR3 for alpha chain variable domain of TCR clone 29065 (TRAV20, TRAJ21)
CAVEGYNFNKFYF

SEQ ID NO: 58130 - protein, 14 aa, Homo sapiens
  CDR3 for beta chain variable domain of TCR clone 29065 (TRBV3-1, TRBJ2-5)
CASSQGPDQETQHF

SEQ ID NO: 58131 - protein, 15 aa, Homo sapiens
  CDR3 for alpha chain variable domain of TCR clone 29066 (TRAV3, TRAJ4)
CAVRDGTGGYTKLIF

SEQ ID NO: 58132 - protein, 16 aa, Homo sapiens
  CDR3 for beta chain variable domain of TCR clone 29066 (TRBV27, TRBJ2-2)
CASSSSGVSNTGELFF

SEQ ID NO: 58133 - protein, 13 aa, Homo sapiens
  CDR3 for alpha chain variable domain of TCR clone 29067 (TRAV8-6, TRAJ21)
CAVSPSSLNKFYF

SEQ ID NO: 58134 - protein, 12 aa, Homo sapiens
  CDR3 for beta chain variable domain of TCR clone 29067 (TRBV7-9, TRBJ1-4)
CASSTDREKLFF

SEQ ID NO: 58135 - protein, 13 aa, Homo sapiens
  CDR3 for alpha chain variable domain of TCR clone 29068 (TRAV2, TRAJ40)
CAVVTSGTYKYIF

SEQ ID NO: 58136 - protein, 14 aa, Homo sapiens
  CDR3 for beta chain variable domain of TCR clone 29068 (TRBV2, TRBJ2-7)
CASSLTSGGYEQYF

SEQ ID NO: 58137 - protein, 13 aa, Homo sapiens
  CDR3 for alpha chain variable domain of TCR clone 29069 (TRAV12-3, TRAJ33)
CAMIVNSNYQLIW

SEQ ID NO: 58138 - protein, 13 aa, Homo sapiens
  CDR3 for beta chain variable domain of TCR clone 29069 (TRBV7-2, TRBJ2-2)
CASSLAVTGELFF

SEQ ID NO: 58139 - protein, 15 aa, Homo sapiens
  CDR3 for alpha chain variable domain of TCR clone 29070 (TRAV35, TRAJ40)
CAGQLGTSGTYKYIF

SEQ ID NO: 58140 - protein, 14 aa, Homo sapiens
  CDR3 for beta chain variable domain of TCR clone 29070 (TRBV7-3, TRBJ2-1)
CARSLAGGTNEQFF

SEQ ID NO: 58141 - protein, 12 aa, Homo sapiens
  CDR3 for alpha chain variable domain of TCR clone 29071 (TRAV26-2, TRAJ21)
CIPKGNFNKFYF

SEQ ID NO: 58142 - protein, 14 aa, Homo sapiens
  CDR3 for beta chain variable domain of TCR clone 29071 (TRBV12-4, TRBJ1-1)
CASSLGTGGTEAFF

SEQ ID NO: 58143 - protein, 13 aa, Homo sapiens
  CDR3 for alpha chain variable domain of TCR clone 29072 (TRAV19, TRAJ57)
CALLQGGSEKLVS

SEQ ID NO: 58144 - protein, 14 aa, Homo sapiens
  CDR3 for beta chain variable domain of TCR clone 29072 (TRBV7-2, TRBJ1-1)
CASSFLTGTTEAFF

SEQ ID NO: 58145 - protein, 13 aa, Homo sapiens
  CDR3 for alpha chain variable domain of TCR clone 29073 (TRAV12-3, TRAJ7)
CAMSASGNNRLAF

SEQ ID NO: 58146 - protein, 14 aa, Homo sapiens
  CDR3 for beta chain variable domain of TCR clone 29073 (TRBV13, TRBJ2-5)
CARSLGPRGETQYF

SEQ ID NO: 58147 - protein, 15 aa, Homo sapiens
  CDR3 for alpha chain variable domain of TCR clone 29074 (TRAV17, )
CSMGGRLHPACATVF

SEQ ID NO: 58148 - protein, 11 aa, Homo sapiens
  CDR3 for beta chain variable domain of TCR clone 29074 (TRBV29-1, TRBJ2-5)
CSEDRTGTQYF

SEQ ID NO: 58149 - protein, 16 aa, Homo sapiens
  CDR3 for alpha chain variable domain of TCR clone 29075 (TRAV3, TRAJ21)
CAVRDIERGNFNKFYF

SEQ ID NO: 58150 - protein, 14 aa, Homo sapiens
  CDR3 for beta chain variable domain of TCR clone 29075 (TRBV25-1, TRBJ1-1)
CASTHLGGNTEAFF

SEQ ID NO: 58151 - protein, 13 aa, Homo sapiens
  CDR3 for alpha chain variable domain of TCR clone 29076 (TRAV23/DV6, TRAJ12)
CAPRVDSSYKLIF

SEQ ID NO: 58152 - protein, 15 aa, Homo sapiens
  CDR3 for beta chain variable domain of TCR clone 29076 (TRBV20-1, TRBJ2-7)
CSARDRVSGMDEQYF

SEQ ID NO: 58153 - protein, 15 aa, Homo sapiens
  CDR3 for alpha chain variable domain of TCR clone 29077 (TRAV25, TRAJ53)
CAATGGGGSNYKLKF

SEQ ID NO: 58154 - protein, 19 aa, Homo sapiens
  CDR3 for beta chain variable domain of TCR clone 29077 (TRBV7-2, TRBJ2-3)
CASSFLSRNWGGGTDTQYF

SEQ ID NO: 58155 - protein, 12 aa, Homo sapiens
  CDR3 for alpha chain variable domain of TCR clone 29078 (TRAV17, TRAJ4)
CATDGGYNKLIV

SEQ ID NO: 58156 - protein, 13 aa, Homo sapiens
  CDR3 for beta chain variable domain of TCR clone 29078 (TRBV29-1, TRBJ2-2)
CSTTGVNTGELFF

SEQ ID NO: 58157 - protein, 11 aa, Homo sapiens
  CDR3 for alpha chain variable domain of TCR clone 29079 (TRAV17, TRAJ9)
CATTGGFKTIF

SEQ ID NO: 58158 - protein, 14 aa, Homo sapiens
  CDR3 for beta chain variable domain of TCR clone 29079 (TRBV7-9, TRBJ2-2)
CASSVLADTGELFF

SEQ ID NO: 58159 - protein, 14 aa, Homo sapiens
  CDR3 for alpha chain variable domain of TCR clone 29080 (TRAV12-3, TRAJ22)
CAMSLFGSARRLTF

SEQ ID NO: 58160 - protein, 11 aa, Homo sapiens
  CDR3 for beta chain variable domain of TCR clone 29080 (TRBV12-4, TRBJ2-2)
CASSSAGELFF

SEQ ID NO: 58161 - protein, 11 aa, Homo sapiens
  CDR3 for alpha chain variable domain of TCR clone 29081 (TRAV2, TRAJ21)
CAVFSFNKFYF

SEQ ID NO: 58162 - protein, 14 aa, Homo sapiens
  CDR3 for beta chain variable domain of TCR clone 29081 (TRBV15, TRBJ2-3)
CATRSGTSTDTQYF

SEQ ID NO: 58163 - protein, 14 aa, Homo sapiens
  CDR3 for alpha chain variable domain of TCR clone 29082 (TRAV13-1, TRAJ20)
CATRPGSNDYKLSF

SEQ ID NO: 58164 - protein, 13 aa, Homo sapiens
  CDR3 for beta chain variable domain of TCR clone 29082 (TRBV20-1, TRBJ1-1)
CSAPPGGHTEAFF

SEQ ID NO: 58165 - protein, 14 aa, Homo sapiens
  CDR3 for alpha chain variable domain of TCR clone 29083 (TRAV12-1, TRAJ9)
CVVTGYTGGFKTIF

SEQ ID NO: 58166 - protein, 13 aa, Homo sapiens
  CDR3 for beta chain variable domain of TCR clone 29083 (TRBV20-1, TRBJ1-1)
CSAGAGGNTEAFF

SEQ ID NO: 58167 - protein, 14 aa, Homo sapiens
  CDR3 for alpha chain variable domain of TCR clone 29084 (TRAV20, TRAJ56)
CAVQFGGANSKLTF

SEQ ID NO: 58168 - protein, 14 aa, Homo sapiens
  CDR3 for beta chain variable domain of TCR clone 29084 (TRBV20-1, TRBJ2-7)
CSAKRGRSSYERYF

SEQ ID NO: 58169 - protein, 13 aa, Homo sapiens
  CDR3 for alpha chain variable domain of TCR clone 29085 (TRAV13-2, TRAJ48)
CAVMDFGNEKLTF

SEQ ID NO: 58170 - protein, 15 aa, Homo sapiens
  CDR3 for beta chain variable domain of TCR clone 29085 (TRBV7-9, TRBJ1-6)
CASSSPGRGNSPLHF

SEQ ID NO: 58171 - protein, 15 aa, Homo sapiens
  CDR3 for alpha chain variable domain of TCR clone 29086 (TRAV26-2, TRAJ57)
CILRDIRGGSEKLVF

SEQ ID NO: 58172 - protein, 15 aa, Homo sapiens
  CDR3 for beta chain variable domain of TCR clone 29086 (TRBV2, TRBJ2-1)
CASDIGLAGEGERFF

SEQ ID NO: 58173 - protein, 14 aa, Homo sapiens
  CDR3 for alpha chain variable domain of TCR clone 29087 (TRAV9-2, TRAJ39)
CALYIYNAGNMLTF

SEQ ID NO: 58174 - protein, 13 aa, Homo sapiens
  CDR3 for beta chain variable domain of TCR clone 29087 (TRBV19, TRBJ1-1)
CASSFGRMPEAFF

SEQ ID NO: 58175 - protein, 13 aa, Homo sapiens
  CDR3 for alpha chain variable domain of TCR clone 29088 (TRAV16, TRAJ5)
CALTNTGRRALTF

SEQ ID NO: 58176 - protein, 15 aa, Homo sapiens
  CDR3 for beta chain variable domain of TCR clone 29088 (TRBV11-2, TRBJ2-4)
CASSRSGTGINIQYF

SEQ ID NO: 58177 - protein, 14 aa, Homo sapiens
  CDR3 for alpha chain variable domain of TCR clone 29089 (TRAV1-2, TRAJ8)
CAVGEDTGFQKLVF

SEQ ID NO: 58178 - protein, 16 aa, Homo sapiens
  CDR3 for beta chain variable domain of TCR clone 29089 (TRBV29-1, TRBJ1-2)
CSVEANRDIANYGYTF

SEQ ID NO: 58179 - protein, 16 aa, Homo sapiens
  CDR3 for alpha chain variable domain of TCR clone 29090 (TRAV3, TRAJ10)
CAVRDMRAGGGNKPTF

SEQ ID NO: 58180 - protein, 14 aa, Homo sapiens
  CDR3 for beta chain variable domain of TCR clone 29090 (TRBV25-1, TRBJ1-1)
CASTHLGGNTEAFF

SEQ ID NO: 58181 - protein, 11 aa, Homo sapiens
  CDR3 for alpha chain variable domain of TCR clone 29091 (TRAV12-1, TRAJ21)
CVVNNFNKLYF

SEQ ID NO: 58182 - protein, 14 aa, Homo sapiens
  CDR3 for beta chain variable domain of TCR clone 29091 (TRBV15, TRBJ1-5)
CATSREQSNQPQHF

SEQ ID NO: 58183 - protein, 12 aa, Homo sapiens
  CDR3 for alpha chain variable domain of TCR clone 29092 (TRAV1-1, TRAJ39)
CAVPVVGNMLTF

SEQ ID NO: 58184 - protein, 17 aa, Homo sapiens
  CDR3 for beta chain variable domain of TCR clone 29092 (TRBV28, TRBJ2-5)
CASSTPEGDALQETQYL

SEQ ID NO: 58185 - protein, 12 aa, Homo sapiens
  CDR3 for alpha chain variable domain of TCR clone 29093 (TRAV2, TRAJ10)
CASTGGGNKPTF

SEQ ID NO: 58186 - protein, 14 aa, Homo sapiens
  CDR3 for beta chain variable domain of TCR clone 29093 (TRBV7-2, TRBJ2-2)
CASRGQGAAGELFF

SEQ ID NO: 58187 - protein, 12 aa, Homo sapiens
  CDR3 for alpha chain variable domain of TCR clone 29094 (TRAV16, TRAJ10)
CSRTGGGNKLTF

SEQ ID NO: 58188 - protein, 13 aa, Homo sapiens
  CDR3 for beta chain variable domain of TCR clone 29094 (TRBV12-4, TRBJ1-2)
CASSLRQGKGYTF

SEQ ID NO: 58189 - protein, 10 aa, Homo sapiens
  CDR3 for alpha chain variable domain of TCR clone 29095 (TRAV30, TRAJ48)
CGIGNGKLTF

SEQ ID NO: 58190 - protein, 15 aa, Homo sapiens
  CDR3 for beta chain variable domain of TCR clone 29095 (TRBV28, TRBJ2-5)
CASSPPWSYQETQYF

SEQ ID NO: 58191 - protein, 12 aa, Homo sapiens
  CDR3 for alpha chain variable domain of TCR clone 29096 (TRAV17, TRAJ20)
CATDGDDYKLSF

SEQ ID NO: 58192 - protein, 13 aa, Homo sapiens
  CDR3 for beta chain variable domain of TCR clone 29096 (TRBV7-3, TRBJ1-1)
CASSQDWGAEAFF

SEQ ID NO: 58193 - protein, 13 aa, Homo sapiens
  CDR3 for alpha chain variable domain of TCR clone 29097 (TRAV2, TRAJ40)
CAVVTSGTYKYIF

SEQ ID NO: 58194 - protein, 16 aa, Homo sapiens
  CDR3 for beta chain variable domain of TCR clone 29097 (TRBV12-4, TRBJ1-5)
CASSRPVGGSNQPQHF

SEQ ID NO: 58195 - protein, 12 aa, Homo sapiens
  CDR3 for alpha chain variable domain of TCR clone 29098 (TRAV8-1, TRAJ31)
CAVINNNARLMF

SEQ ID NO: 58196 - protein, 15 aa, Homo sapiens
  CDR3 for beta chain variable domain of TCR clone 29098 (TRBV20-1, TRBJ2-2)
CSAKGGQGNTGELFF

SEQ ID NO: 58197 - protein, 16 aa, Homo sapiens
  CDR3 for alpha chain variable domain of TCR clone 29099 (TRAV30, TRAJ24)
RGTEIVDADSWGKFQF

SEQ ID NO: 58198 - protein, 13 aa, Homo sapiens
  CDR3 for beta chain variable domain of TCR clone 29099 (TRBV11-2, TRBJ2-5)
CASSSTGEETQYF

SEQ ID NO: 58199 - protein, 13 aa, Homo sapiens
  CDR3 for alpha chain variable domain of TCR clone 29100 (TRAV1-2, TRAJ9)
CAALDTGGFKTIF

SEQ ID NO: 58200 - protein, 15 aa, Homo sapiens
  CDR3 for beta chain variable domain of TCR clone 29100 (TRBV24-1, TRBJ2-1)
CATSGSGGFYNEQFF

SEQ ID NO: 58201 - protein, 14 aa, Homo sapiens
  CDR3 for alpha chain variable domain of TCR clone 29101 (TRAV13-1, TRAJ35)
CAASKGGFGNVLHC

SEQ ID NO: 58202 - protein, 13 aa, Homo sapiens
  CDR3 for beta chain variable domain of TCR clone 29101 (TRBV7-3, TRBJ1-1)
CASSQDWGAVAFF

SEQ ID NO: 58203 - protein, 11 aa, Homo sapiens
  CDR3 for alpha chain variable domain of TCR clone 29102 (TRAV2, TRAJ13)
CASGGYQKVTF

SEQ ID NO: 58204 - protein, 14 aa, Homo sapiens
  CDR3 for beta chain variable domain of TCR clone 29102 (TRBV2, TRBJ2-7)
CASSLTSGGYEQYF

SEQ ID NO: 58205 - protein, 14 aa, Homo sapiens
  CDR3 for alpha chain variable domain of TCR clone 29103 (TRAV35, TRAJ22)
CAGLRPGSARQLTF

SEQ ID NO: 58206 - protein, 15 aa, Homo sapiens
  CDR3 for beta chain variable domain of TCR clone 29103 (TRBV12-4, TRBJ2-5)
CASSPPTGLQDTQYF

SEQ ID NO: 58207 - protein, 11 aa, Homo sapiens
  CDR3 for alpha chain variable domain of TCR clone 29104 (TRAV2, TRAJ33)
CAVDSNYQLIW

SEQ ID NO: 58208 - protein, 19 aa, Homo sapiens
  CDR3 for beta chain variable domain of TCR clone 29104 (TRBV25-1, TRBJ2-2)
CAILVYRVDRGRKTGELFF

SEQ ID NO: 58209 - protein, 13 aa, Homo sapiens
  CDR3 for alpha chain variable domain of TCR clone 29105 (TRAV12-1, TRAJ6)
CVVFPGGSYIPTF

SEQ ID NO: 58210 - protein, 14 aa, Homo sapiens
  CDR3 for beta chain variable domain of TCR clone 29105 (TRBV20-1, TRBJ1-3)
CSASPTGAGSTIYF

SEQ ID NO: 58211 - protein, 13 aa, Homo sapiens
  CDR3 for alpha chain variable domain of TCR clone 29106 (TRAV21, TRAJ27)
CAARPGNAGKSTF

SEQ ID NO: 58212 - protein, 18 aa, Homo sapiens
  CDR3 for beta chain variable domain of TCR clone 29106 (TRBV4-2, TRBJ2-7)
CISVPAAKLAGGTYEQYF

SEQ ID NO: 58213 - protein, 13 aa, Homo sapiens
  CDR3 for alpha chain variable domain of TCR clone 29107 (TRAV38-1, TRAJ42)
CARWGGSQGNLIF

SEQ ID NO: 58214 - protein, 16 aa, Homo sapiens
  CDR3 for beta chain variable domain of TCR clone 29107 (TRBV12-5, TRBJ2-5)
CASGPRTSGNQETQYF

SEQ ID NO: 58215 - protein, 15 aa, Homo sapiens
  CDR3 for alpha chain variable domain of TCR clone 29108 (TRAV12-3, TRAJ6)
CAMSAASGGSYVPTF

SEQ ID NO: 58216 - protein, 13 aa, Homo sapiens
  CDR3 for beta chain variable domain of TCR clone 29108 (TRBV20-1, TRBJ1-2)
CSASTERIYGYTF

SEQ ID NO: 58217 - protein, 13 aa, Homo sapiens
  CDR3 for alpha chain variable domain of TCR clone 29109 (TRAV12-2, TRAJ47)
CAVFMEYGNKLVF

SEQ ID NO: 58218 - protein, 14 aa, Homo sapiens
  CDR3 for beta chain variable domain of TCR clone 29109 (TRBV4-1, TRBJ1-5)
CASSQGPTNQTQHF

SEQ ID NO: 58219 - protein, 15 aa, Homo sapiens
  CDR3 for alpha chain variable domain of TCR clone 29110 (TRAV3, TRAJ4)
CAQNMFSGGYNKLIF

SEQ ID NO: 58220 - protein, 16 aa, Homo sapiens
  CDR3 for beta chain variable domain of TCR clone 29110 (TRBV3-1, TRBJ1-6)
CASNQEFQGSYSPLHF

SEQ ID NO: 58221 - protein, 15 aa, Homo sapiens
  CDR3 for alpha chain variable domain of TCR clone 29111 (TRAV8-3, TRAJ6)
CAVGPLGGGSYIPTF

SEQ ID NO: 58222 - protein, 14 aa, Homo sapiens
  CDR3 for beta chain variable domain of TCR clone 29111 (TRBV19, TRBJ2-2)
CASSTGQGAGELFF

SEQ ID NO: 58223 - protein, 13 aa, Homo sapiens
  CDR3 for alpha chain variable domain of TCR clone 29112 (TRAV17, TRAJ54)
CATSWGGARKLVF

SEQ ID NO: 58224 - protein, 15 aa, Homo sapiens
  CDR3 for beta chain variable domain of TCR clone 29112 (TRBV4-3, TRBJ2-3)
CASSPSLLSTDTQYF

SEQ ID NO: 58225 - protein, 15 aa, Homo sapiens
  CDR3 for alpha chain variable domain of TCR clone 29113 (TRAV23/DV6, TRAJ13)
CAAWPGGGGYQKVTF

SEQ ID NO: 58226 - protein, 14 aa, Homo sapiens
  CDR3 for beta chain variable domain of TCR clone 29113 (TRBV11-2, TRBJ2-5)
CASSRTGGIETQYF

SEQ ID NO: 58227 - protein, 15 aa, Homo sapiens
  CDR3 for alpha chain variable domain of TCR clone 29114 (TRAV29/DV5, TRAJ29)
CAASERSSGNTPLVF

SEQ ID NO: 58228 - protein, 13 aa, Homo sapiens
  CDR3 for beta chain variable domain of TCR clone 29114 (TRBV7-9, TRBJ1-2)
CASSLKQNYGYTF

SEQ ID NO: 58229 - protein, 14 aa, Homo sapiens
  CDR3 for alpha chain variable domain of TCR clone 29115 (TRAV2, TRAJ9)
CAVEDRSGGFKTIF

SEQ ID NO: 58230 - protein, 18 aa, Homo sapiens
  CDR3 for beta chain variable domain of TCR clone 29115 (TRBV7-3, TRBJ2-5)
CASSFRGGGDPVLRARHA

SEQ ID NO: 58231 - protein, 12 aa, Homo sapiens
  CDR3 for alpha chain variable domain of TCR clone 29116 (TRAV25, TRAJ20)
CAGRSNDYKPSF

SEQ ID NO: 58232 - protein, 15 aa, Homo sapiens
  CDR3 for beta chain variable domain of TCR clone 29116 (TRBV7-6, TRBJ2-7)
CASSGRRDTFGEQYF

SEQ ID NO: 58233 - protein, 14 aa, Homo sapiens
  CDR3 for alpha chain variable domain of TCR clone 29117 (TRAV12-1, TRAJ17)
CVVNYKAAGIKLTF

SEQ ID NO: 58234 - protein, 17 aa, Homo sapiens
  CDR3 for beta chain variable domain of TCR clone 29117 (TRBV20-1, TRBJ2-1)
CSASSSGLAGSYNEQFF

SEQ ID NO: 58235 - protein, 13 aa, Homo sapiens
  CDR3 for alpha chain variable domain of TCR clone 29118 (TRAV12-1, TRAJ22)
CVVYSSSARQLTF

SEQ ID NO: 58236 - protein, 10 aa, Homo sapiens
  CDR3 for beta chain variable domain of TCR clone 29118 (TRBV6-3, TRBJ2-2)
CASRDGELFF

SEQ ID NO: 58237 - protein, 12 aa, Homo sapiens
  CDR3 for alpha chain variable domain of TCR clone 29119 (TRAV30, TRAJ43)
CGTEERGNDMRF

SEQ ID NO: 58238 - protein, 13 aa, Homo sapiens
  CDR3 for beta chain variable domain of TCR clone 29119 (TRBV27, TRBJ2-7)
CASSFSQDYEQYF

SEQ ID NO: 58239 - protein, 14 aa, Homo sapiens
  CDR3 for alpha chain variable domain of TCR clone 29120 (TRAV23/DV6, TRAJ24)
CAASLSDSWGKLQV

SEQ ID NO: 58240 - protein, 16 aa, Homo sapiens
  CDR3 for beta chain variable domain of TCR clone 29120 (TRBV7-9, TRBJ2-6)
CASSLKGPLRANVLTF

SEQ ID NO: 58241 - protein, 15 aa, Homo sapiens
  CDR3 for alpha chain variable domain of TCR clone 29121 (TRAV26-1, TRAJ29)
CIVRVEGSGNTPLVF

SEQ ID NO: 58242 - protein, 18 aa, Homo sapiens
  CDR3 for beta chain variable domain of TCR clone 29121 (TRBV5-5, TRBJ1-5)
CASSLWQVKGSSNQPQHF

SEQ ID NO: 58243 - protein, 16 aa, Homo sapiens
  CDR3 for alpha chain variable domain of TCR clone 29122 (TRAV12-3, TRAJ53)
CAMSPGSGGSNYKLTF

SEQ ID NO: 58244 - protein, 16 aa, Homo sapiens
  CDR3 for beta chain variable domain of TCR clone 29122 (TRBV4-2, TRBJ1-1)
CASSRAGFGMNTEAFF

SEQ ID NO: 58245 - protein, 13 aa, Homo sapiens
  CDR3 for alpha chain variable domain of TCR clone 29123 (TRAV13-2, TRAJ40)
CAESTSGTYKYIF

SEQ ID NO: 58246 - protein, 14 aa, Homo sapiens
  CDR3 for beta chain variable domain of TCR clone 29123 (TRBV10-2, TRBJ1-5)
CASSSTGRNQPQHF

SEQ ID NO: 58247 - protein, 12 aa, Homo sapiens
  CDR3 for alpha chain variable domain of TCR clone 29124 (TRAV13-1, TRAJ39)
CAASNSGNMLTF

SEQ ID NO: 58248 - protein, 15 aa, Homo sapiens
  CDR3 for beta chain variable domain of TCR clone 29124 (TRBV29-1, TRBJ2-5)
CSVAGASGTQETQYF

SEQ ID NO: 58249 - protein, 14 aa, Homo sapiens
  CDR3 for alpha chain variable domain of TCR clone 29125 (TRAV12-2, TRAJ9)
CAVNMEGGGFNTIF

SEQ ID NO: 58250 - protein, 14 aa, Homo sapiens
  CDR3 for beta chain variable domain of TCR clone 29125 (TRBV2, TRBJ2-5)
CASSEVLAQETQYF

SEQ ID NO: 58251 - protein, 14 aa, Homo sapiens
  CDR3 for alpha chain variable domain of TCR clone 29126 (TRAV12-2, TRAJ45)
CALPERGGADGLTF

SEQ ID NO: 58252 - protein, 14 aa, Homo sapiens
  CDR3 for beta chain variable domain of TCR clone 29126 (TRBV18, TRBJ1-5)
CASSPGNSNQAQHF

SEQ ID NO: 58253 - protein, 12 aa, Homo sapiens
  CDR3 for alpha chain variable domain of TCR clone 29127 (TRAV12-3, TRAJ17)
CAMTLTGNKLTL

SEQ ID NO: 58254 - protein, 14 aa, Homo sapiens
  CDR3 for beta chain variable domain of TCR clone 29127 (TRBV7-3, TRBJ2-1)
CASSLAGGTNEQFF

SEQ ID NO: 58255 - protein, 13 aa, Homo sapiens
  CDR3 for alpha chain variable domain of TCR clone 29128 (TRAV8-6, TRAJ49)
CAVITNTGNQFYF

SEQ ID NO: 58256 - protein, 14 aa, Homo sapiens
  CDR3 for beta chain variable domain of TCR clone 29128 (TRBV6-1, TRBJ1-3)
CASVQGGGGNTIYF

SEQ ID NO: 58257 - protein, 15 aa, Homo sapiens
  CDR3 for alpha chain variable domain of TCR clone 29129 (TRAV2, TRAJ24)
CAVVRLKDSWGKLQF

SEQ ID NO: 58258 - protein, 16 aa, Homo sapiens
  CDR3 for beta chain variable domain of TCR clone 29129 (TRBV7-7, TRBJ2-3)
CASSPGTSGSTDTQYF

SEQ ID NO: 58259 - protein, 14 aa, Homo sapiens
  CDR3 for alpha chain variable domain of TCR clone 29130 (TRAV13-1, TRAJ35)
CAASKAGFGNVLHC

SEQ ID NO: 58260 - protein, 13 aa, Homo sapiens
  CDR3 for beta chain variable domain of TCR clone 29130 (TRBV7-3, TRBJ1-1)
CASSQDWGAEAFF

SEQ ID NO: 58261 - protein, 13 aa, Homo sapiens
  CDR3 for alpha chain variable domain of TCR clone 29131 (TRAV8-6, TRAJ49)
CAVITDTGNQFYF

SEQ ID NO: 58262 - protein, 14 aa, Homo sapiens
  CDR3 for beta chain variable domain of TCR clone 29131 (TRBV5-1, TRBJ2-7)
CASSRGESLYEQYF

SEQ ID NO: 58263 - protein, 15 aa, Homo sapiens
  CDR3 for alpha chain variable domain of TCR clone 29132 (TRAV12-2, TRAJ53)
CAVNGGGGSNYKLTF

SEQ ID NO: 58264 - protein, 12 aa, Homo sapiens
  CDR3 for beta chain variable domain of TCR clone 29132 (TRBV11-2, TRBJ2-2)
CASSLGGGELFL

SEQ ID NO: 58265 - protein, 15 aa, Homo sapiens
  CDR3 for alpha chain variable domain of TCR clone 29133 (TRAV29/DV5, TRAJ29)
CAASERSSGNKPLVF

SEQ ID NO: 58266 - protein, 17 aa, Homo sapiens
  CDR3 for beta chain variable domain of TCR clone 29133 (TRBV4-1, TRBJ1-4)
CASSQEGPRGVEEKLFF

SEQ ID NO: 58267 - protein, 12 aa, Homo sapiens
  CDR3 for alpha chain variable domain of TCR clone 29134 (TRAV2, TRAJ9)
CAVGAGGFKTIF

SEQ ID NO: 58268 - protein, 16 aa, Homo sapiens
  CDR3 for beta chain variable domain of TCR clone 29134 (TRBV13, TRBJ2-2)
CASSPRTGKHTGELFF

SEQ ID NO: 58269 - protein, 14 aa, Homo sapiens
  CDR3 for alpha chain variable domain of TCR clone 29135 (TRAV1-2, TRAJ8)
CAVREDTGFQKLVF

SEQ ID NO: 58270 - protein, 13 aa, Homo sapiens
  CDR3 for beta chain variable domain of TCR clone 29135 (TRBV5-1, TRBJ1-2)
CASSSTGVYGYTF

SEQ ID NO: 58271 - protein, 13 aa, Homo sapiens
  CDR3 for alpha chain variable domain of TCR clone 29136 (TRAV22, TRAJ29)
CAVGGSGNTPLVF

SEQ ID NO: 58272 - protein, 13 aa, Homo sapiens
  CDR3 for beta chain variable domain of TCR clone 29136 (TRBV4-2, TRBJ1-1)
CASSQAGNTGAFF

SEQ ID NO: 58273 - protein, 15 aa, Homo sapiens
  CDR3 for alpha chain variable domain of TCR clone 29137 (TRAV21, TRAJ53)
CATLNSGGSNYKLTF

SEQ ID NO: 58274 - protein, 15 aa, Homo sapiens
  CDR3 for beta chain variable domain of TCR clone 29137 (TRBV9, TRBJ2-1)
CASSLAGSSYNEQFF

SEQ ID NO: 58275 - protein, 13 aa, Homo sapiens
  CDR3 for alpha chain variable domain of TCR clone 29138 (TRAV2, TRAJ15)
CAVASQAGTALIF

SEQ ID NO: 58276 - protein, 16 aa, Homo sapiens
  CDR3 for beta chain variable domain of TCR clone 29138 (TRBV5-1, TRBJ1-1)
CASSSGGNSLNTETFF

SEQ ID NO: 58277 - protein, 22 aa, Homo sapiens
  CDR3 for alpha chain variable domain of TCR clone 29139 (TRAV8-2, TRAJ45)
HLTKPSAHMSDAAEYSADGLTF

SEQ ID NO: 58278 - protein, 13 aa, Homo sapiens
  CDR3 for beta chain variable domain of TCR clone 29139 (TRBV7-3, TRBJ2-1)
CASSPIAYNEQFF

SEQ ID NO: 58279 - protein, 16 aa, Homo sapiens
  CDR3 for alpha chain variable domain of TCR clone 29140 (TRAV21, TRAJ37)
CAVRTAGSSNTGELIF

SEQ ID NO: 58280 - protein, 13 aa, Homo sapiens
  CDR3 for beta chain variable domain of TCR clone 29140 (TRBV7-9, TRBJ2-5)
CASLPSGRETQYF

SEQ ID NO: 58281 - protein, 15 aa, Homo sapiens
  CDR3 for alpha chain variable domain of TCR clone 29141 (TRAV25, TRAJ52)
CAGTSGGTSYGKLTF

SEQ ID NO: 58282 - protein, 16 aa, Homo sapiens
  CDR3 for beta chain variable domain of TCR clone 29141 (TRBV15, TRBJ1-2)
CSTSRGPRTGGGGYTF

SEQ ID NO: 58283 - protein, 13 aa, Homo sapiens
  CDR3 for alpha chain variable domain of TCR clone 29142 (TRAV8-3, TRAJ43)
CAVVPYNNNDMRF

SEQ ID NO: 58284 - protein, 17 aa, Homo sapiens
  CDR3 for beta chain variable domain of TCR clone 29142 (TRBV7-7, TRBJ1-1)
CAGIGDRPNLGVTEAFF

SEQ ID NO: 58285 - protein, 11 aa, Homo sapiens
  CDR3 for alpha chain variable domain of TCR clone 29143 (TRAV2, TRAJ13)
CASGGYQKVTF

SEQ ID NO: 58286 - protein, 14 aa, Homo sapiens
  CDR3 for beta chain variable domain of TCR clone 29143 (TRBV11-2, TRBJ2-7)
CASSLGAGAYEQYF

SEQ ID NO: 58287 - protein, 14 aa, Homo sapiens
  CDR3 for alpha chain variable domain of TCR clone 29144 (TRAV16, TRAJ33)
CALSAMDSNHQLIW

SEQ ID NO: 58288 - protein, 12 aa, Homo sapiens
  CDR3 for beta chain variable domain of TCR clone 29144 (TRBV5-1, TRBJ1-2)
CASSQDTYGYTF

SEQ ID NO: 58289 - protein, 14 aa, Homo sapiens
  CDR3 for alpha chain variable domain of TCR clone 29145 (TRAV8-3, TRAJ35)
CAVVPQGFGNVLHC

SEQ ID NO: 58290 - protein, 16 aa, Homo sapiens
  CDR3 for beta chain variable domain of TCR clone 29145 (TRBV20-1, TRBJ2-3)
CSARLHSAGAIDTQYF

SEQ ID NO: 58291 - protein, 13 aa, Homo sapiens
  CDR3 for alpha chain variable domain of TCR clone 29146 (TRAV27, TRAJ41)
CAGEGNSGYALNF

SEQ ID NO: 58292 - protein, 14 aa, Homo sapiens
  CDR3 for beta chain variable domain of TCR clone 29146 (TRBV7-2, TRBJ1-1)
CASSYLTGTTEAFF

SEQ ID NO: 58293 - protein, 12 aa, Homo sapiens
  CDR3 for alpha chain variable domain of TCR clone 29147 (TRAV3, TRAJ31)
CAVRDGNARLMF

SEQ ID NO: 58294 - protein, 18 aa, Homo sapiens
  CDR3 for beta chain variable domain of TCR clone 29147 (TRBV7-2, TRBJ2-3)
CASSFKREGSGITDTQYF

SEQ ID NO: 58295 - protein, 15 aa, Homo sapiens
  CDR3 for alpha chain variable domain of TCR clone 29148 (TRAV8-3, TRAJ45)
CASSYSGGGADGLTF

SEQ ID NO: 58296 - protein, 16 aa, Homo sapiens
  CDR3 for beta chain variable domain of TCR clone 29148 (TRBV7-9, TRBJ2-2)
CAGSGFGGANTGELFF

SEQ ID NO: 58297 - protein, 14 aa, Homo sapiens
  CDR3 for alpha chain variable domain of TCR clone 29149 (TRAV30, TRAJ26)
CGTEIVSYGQNFVF

SEQ ID NO: 58298 - protein, 13 aa, Homo sapiens
  CDR3 for beta chain variable domain of TCR clone 29149 (TRBV7-9, TRBJ1-2)
CASSLKQNYGYTF

SEQ ID NO: 58299 - protein, 13 aa, Homo sapiens
  CDR3 for alpha chain variable domain of TCR clone 29150 (TRAV12-2, TRAJ20)
CAVNRFDDYKLSF

SEQ ID NO: 58300 - protein, 13 aa, Homo sapiens
  CDR3 for beta chain variable domain of TCR clone 29150 (TRBV15, TRBJ1-6)
CATSGGLNSPLHF

SEQ ID NO: 58301 - protein, 11 aa, Homo sapiens
  CDR3 for alpha chain variable domain of TCR clone 29151 (TRAV21, TRAJ11)
CAVNGYSTLTF

SEQ ID NO: 58302 - protein, 11 aa, Homo sapiens
  CDR3 for beta chain variable domain of TCR clone 29151 (TRBV19, TRBJ1-1)
CASSIESEAFF

SEQ ID NO: 58303 - protein, 14 aa, Homo sapiens
  CDR3 for alpha chain variable domain of TCR clone 29152 (TRAV35, TRAJ50)
CAGHRKTSYDKVIF

SEQ ID NO: 58304 - protein, 17 aa, Homo sapiens
  CDR3 for beta chain variable domain of TCR clone 29152 (TRBV13, TRBJ2-3)
CASSLSRVAGGRNTQYF

SEQ ID NO: 58305 - protein, 18 aa, Homo sapiens
  CDR3 for alpha chain variable domain of TCR clone 29153 (TRAV21, TRAJ52)
CAVRPSPAGGTSYGKLTF

SEQ ID NO: 58306 - protein, 14 aa, Homo sapiens
  CDR3 for beta chain variable domain of TCR clone 29153 (TRBV20-1, TRBJ2-7)
CSAKRGRSSYEQYF

SEQ ID NO: 58307 - protein, 14 aa, Homo sapiens
  CDR3 for alpha chain variable domain of TCR clone 29154 (TRAV12-3, TRAJ37)
CVSEGSSNTGKLIF

SEQ ID NO: 58308 - protein, 14 aa, Homo sapiens
  CDR3 for beta chain variable domain of TCR clone 29154 (TRBV20-1, TRBJ1-1)
CSAQTRVGGTEAFF

SEQ ID NO: 58309 - protein, 13 aa, Homo sapiens
  CDR3 for alpha chain variable domain of TCR clone 29155 (TRAV8-3, TRAJ28)
CAVGEVGSYQLTF

SEQ ID NO: 58310 - protein, 15 aa, Homo sapiens
  CDR3 for beta chain variable domain of TCR clone 29155 (TRBV7-9, TRBJ1-5)
CASSQGHQPNQPQHF

SEQ ID NO: 58311 - protein, 14 aa, Homo sapiens
  CDR3 for alpha chain variable domain of TCR clone 29156 (TRAV8-1, TRAJ5)
CAVRTDTGRRALTF

SEQ ID NO: 58312 - protein, 14 aa, Homo sapiens
  CDR3 for beta chain variable domain of TCR clone 29156 (TRBV7-8, TRBJ2-3)
CASSFQDGQDTQYF

SEQ ID NO: 58313 - protein, 14 aa, Homo sapiens
  CDR3 for alpha chain variable domain of TCR clone 29157 (TRAV38-1, TRAJ45)
CASHSGGGADGFTF

SEQ ID NO: 58314 - protein, 13 aa, Homo sapiens
  CDR3 for beta chain variable domain of TCR clone 29157 (TRBV10-3, TRBJ1-2)
CAISERDSYGYTF

SEQ ID NO: 58315 - protein, 12 aa, Homo sapiens
  CDR3 for alpha chain variable domain of TCR clone 29158 (TRAV17, TRAJ57)
CATDGGSEKLVF

SEQ ID NO: 58316 - protein, 14 aa, Homo sapiens
  CDR3 for beta chain variable domain of TCR clone 29158 (TRBV28, TRBJ2-7)
CASTLYGRAHEQYF

SEQ ID NO: 58317 - protein, 14 aa, Homo sapiens
  CDR3 for alpha chain variable domain of TCR clone 29159 (TRAV20, TRAJ42)
CAVQAGGSQGNLIF

SEQ ID NO: 58318 - protein, 14 aa, Homo sapiens
  CDR3 for beta chain variable domain of TCR clone 29159 (TRBV28, TRBJ1-2)
CASRVQGANYGYTF

SEQ ID NO: 58319 - protein, 12 aa, Homo sapiens
  CDR3 for alpha chain variable domain of TCR clone 29160 (TRAV12-2, TRAJ31)
CAVNTPDARLMS

SEQ ID NO: 58320 - protein, 17 aa, Homo sapiens
  CDR3 for beta chain variable domain of TCR clone 29160 (TRBV20-1, TRBJ1-6)
CSARGGYTFSYNSPLHF

SEQ ID NO: 58321 - protein, 13 aa, Homo sapiens
  CDR3 for alpha chain variable domain of TCR clone 29161 (TRAV16, TRAJ54)
CALMVQGAQKLVF

SEQ ID NO: 58322 - protein, 12 aa, Homo sapiens
  CDR3 for beta chain variable domain of TCR clone 29161 (TRBV18, TRBJ2-7)
CASATAMGEQYF

SEQ ID NO: 58323 - protein, 14 aa, Homo sapiens
  CDR3 for alpha chain variable domain of TCR clone 29162 (TRAV8-2, TRAJ4)
CVVSLSGGYNKLIF

SEQ ID NO: 58324 - protein, 15 aa, Homo sapiens
  CDR3 for beta chain variable domain of TCR clone 29162 (TRBV4-1, TRBJ1-4)
CASSDTGGTNEKLFF

SEQ ID NO: 58325 - protein, 14 aa, Homo sapiens
  CDR3 for alpha chain variable domain of TCR clone 29163 (TRAV26-2, TRAJ32)
CCVGYGGATNKLIF

SEQ ID NO: 58326 - protein, 14 aa, Homo sapiens
  CDR3 for beta chain variable domain of TCR clone 29163 (TRBV4-2, TRBJ2-1)
CASGLGRAYNEQFF

SEQ ID NO: 58327 - protein, 19 aa, Homo sapiens
  CDR3 for alpha chain variable domain of TCR clone 29164 (TRAV3, TRAJ6)
CAVRDRNPSRSGGSYIPTF

SEQ ID NO: 58328 - protein, 15 aa, Homo sapiens
  CDR3 for beta chain variable domain of TCR clone 29164 (TRBV18, TRBJ2-7)
CASSPTFIDSYEQYF

SEQ ID NO: 58329 - protein, 15 aa, Homo sapiens
  CDR3 for alpha chain variable domain of TCR clone 29165 (TRAV26-1, TRAJ29)
CIVRVEGSGNTPLVF

SEQ ID NO: 58330 - protein, 14 aa, Homo sapiens
  CDR3 for beta chain variable domain of TCR clone 29165 (TRBV18, TRBJ2-5)
CASSPGVSQETHYF

SEQ ID NO: 58331 - protein, 11 aa, Homo sapiens
  CDR3 for alpha chain variable domain of TCR clone 29166 (TRAV2, TRAJ33)
CAVDSNYQLIW

SEQ ID NO: 58332 - protein, 15 aa, Homo sapiens
  CDR3 for beta chain variable domain of TCR clone 29166 (TRBV19, TRBJ1-2)
CASSVGQVLNYGYTV

SEQ ID NO: 58333 - protein, 13 aa, Homo sapiens
  CDR3 for alpha chain variable domain of TCR clone 29167 (TRAV21, TRAJ20)
CAVGLRVDYKLRF

SEQ ID NO: 58334 - protein, 13 aa, Homo sapiens
  CDR3 for beta chain variable domain of TCR clone 29167 (TRBV6-1, TRBJ1-1)
CASSRQGNTEAFF

SEQ ID NO: 58335 - protein, 11 aa, Homo sapiens
  CDR3 for alpha chain variable domain of TCR clone 29168 (TRAV3, TRAJ21)
CAVGNFNKFYF

SEQ ID NO: 58336 - protein, 12 aa, Homo sapiens
  CDR3 for beta chain variable domain of TCR clone 29168 (TRBV19, TRBJ2-1)
KAGPSSYNEQFF

SEQ ID NO: 58337 - protein, 14 aa, Homo sapiens
  CDR3 for alpha chain variable domain of TCR clone 29169 (TRAV12-2, TRAJ40)
CAVKIPSGTYKYIF

SEQ ID NO: 58338 - protein, 12 aa, Homo sapiens
  CDR3 for beta chain variable domain of TCR clone 29169 (TRBV19, TRBJ1-5)
CASSIAQQPQHF

SEQ ID NO: 58339 - protein, 14 aa, Homo sapiens
  CDR3 for alpha chain variable domain of TCR clone 29170 (TRAV1-2, TRAJ16)
CAVNRFSDGQKLLL

SEQ ID NO: 58340 - protein, 12 aa, Homo sapiens
  CDR3 for beta chain variable domain of TCR clone 29170 (TRBV7-9, TRBJ2-7)
CASSLEGYEQYF

SEQ ID NO: 58341 - protein, 11 aa, Homo sapiens
  CDR3 for alpha chain variable domain of TCR clone 29171 (TRAV39, TRAJ49)
FAVDISTQFYF

SEQ ID NO: 58342 - protein, 11 aa, Homo sapiens
  CDR3 for beta chain variable domain of TCR clone 29171 (TRBV7-8, TRBJ2-7)
CASSLSLEQYF

SEQ ID NO: 58343 - protein, 13 aa, Homo sapiens
  CDR3 for alpha chain variable domain of TCR clone 29172 (TRAV8-6, TRAJ49)
CAVITNTGNHFYF

SEQ ID NO: 58344 - protein, 15 aa, Homo sapiens
  CDR3 for beta chain variable domain of TCR clone 29172 (TRBV9, TRBJ1-6)
CASSVAGTGDSPLHF

SEQ ID NO: 58345 - protein, 16 aa, Homo sapiens
  CDR3 for alpha chain variable domain of TCR clone 29173 (TRAV12-2, TRAJ40)
CAVTRGGTSGTYKYIF

SEQ ID NO: 58346 - protein, 14 aa, Homo sapiens
  CDR3 for beta chain variable domain of TCR clone 29173 (TRBV20-1, TRBJ2-5)
CSARDGRAGETQYF

SEQ ID NO: 58347 - protein, 11 aa, Homo sapiens
  CDR3 for alpha chain variable domain of TCR clone 29174 (TRAV3, TRAJ13)
CAVTSYQKVTF

SEQ ID NO: 58348 - protein, 15 aa, Homo sapiens
  CDR3 for beta chain variable domain of TCR clone 29174 (TRBV7-9, TRBJ2-7)
CASSSSGIAVYEQYF

SEQ ID NO: 58349 - protein, 14 aa, Homo sapiens
  CDR3 for alpha chain variable domain of TCR clone 29175 (TRAV13-1, TRAJ44)
CAAKATGTASKLTF

SEQ ID NO: 58350 - protein, 14 aa, Homo sapiens
  CDR3 for beta chain variable domain of TCR clone 29175 (TRBV25-1, TRBJ1-1)
CASTHLGGSTEAFF

SEQ ID NO: 58351 - protein, 14 aa, Homo sapiens
  CDR3 for alpha chain variable domain of TCR clone 29176 (TRAV17, TRAJ34)
CSTDSLEGTDKLIF

SEQ ID NO: 58352 - protein, 13 aa, Homo sapiens
  CDR3 for beta chain variable domain of TCR clone 29176 (TRBV11-2, TRBJ2-7)
CASSGTRPYEQYF

SEQ ID NO: 58353 - protein, 14 aa, Homo sapiens
  CDR3 for alpha chain variable domain of TCR clone 29177 (TRAV12-3, TRAJ10)
SHLPLTGGGNKLTF

SEQ ID NO: 58354 - protein, 13 aa, Homo sapiens
  CDR3 for beta chain variable domain of TCR clone 29177 (TRBV9, TRBJ2-1)
CASSPSGGKEQFF

SEQ ID NO: 58355 - protein, 14 aa, Homo sapiens
  CDR3 for alpha chain variable domain of TCR clone 29178 (TRAV1-2, TRAJ16)
CAVNRFSDGQKLLL

SEQ ID NO: 58356 - protein, 14 aa, Homo sapiens
  CDR3 for beta chain variable domain of TCR clone 29178 (TRBV13, TRBJ2-5)
CASSLGRGQETQYF

SEQ ID NO: 58357 - protein, 13 aa, Homo sapiens
  CDR3 for alpha chain variable domain of TCR clone 29179 (TRAV8-3, TRAJ36)
CAVGATGANNLFF

SEQ ID NO: 58358 - protein, 17 aa, Homo sapiens
  CDR3 for beta chain variable domain of TCR clone 29179 (TRBV7-8, TRBJ2-6)
CASSAGTGGAGANVLTF

SEQ ID NO: 58359 - protein, 16 aa, Homo sapiens
  CDR3 for alpha chain variable domain of TCR clone 29180 (TRAV12-2, TRAJ32)
CAVNLGQGGATNKLIF

SEQ ID NO: 58360 - protein, 15 aa, Homo sapiens
  CDR3 for beta chain variable domain of TCR clone 29180 (TRBV20-1, TRBJ2-7)
CSARGPRAGGREQYF

SEQ ID NO: 58361 - protein, 13 aa, Homo sapiens
  CDR3 for alpha chain variable domain of TCR clone 29181 (TRAV20, TRAJ37)
CAGCSSNTGKLSF

SEQ ID NO: 58362 - protein, 11 aa, Homo sapiens
  CDR3 for beta chain variable domain of TCR clone 29181 (TRBV12-4, TRBJ2-3)
CASTATDTQYF

SEQ ID NO: 58363 - protein, 12 aa, Homo sapiens
  CDR3 for alpha chain variable domain of TCR clone 29182 (TRAV12-3, TRAJ20)
SAMVRGDYKLSF

SEQ ID NO: 58364 - protein, 14 aa, Homo sapiens
  CDR3 for beta chain variable domain of TCR clone 29182 (TRBV5-5, TRBJ1-5)
CASSGQGVDQPQHF

SEQ ID NO: 58365 - protein, 12 aa, Homo sapiens
  CDR3 for alpha chain variable domain of TCR clone 29183 (TRAV12-3, TRAJ17)
CAMTLTGNKLTF

SEQ ID NO: 58366 - protein, 15 aa, Homo sapiens
  CDR3 for beta chain variable domain of TCR clone 29183 (TRBV20-1, TRBJ2-7)
CSARGQVSGMDEQYF

SEQ ID NO: 58367 - protein, 13 aa, Homo sapiens
  CDR3 for alpha chain variable domain of TCR clone 29184 (TRAV2, TRAJ24)
CAVTTDSWGKLQF

SEQ ID NO: 58368 - protein, 14 aa, Homo sapiens
  CDR3 for beta chain variable domain of TCR clone 29184 (TRBV13, TRBJ2-5)
CASILGRGQETQYF

SEQ ID NO: 58369 - protein, 13 aa, Homo sapiens
  CDR3 for alpha chain variable domain of TCR clone 29185 (TRAV17, TRAJ9)
CATFLTGGFKTIF

SEQ ID NO: 58370 - protein, 16 aa, Homo sapiens
  CDR3 for beta chain variable domain of TCR clone 29185 (TRBV5-7, TRBJ1-4)
CASSPSGGLKTGKLFS

SEQ ID NO: 58371 - protein, 14 aa, Homo sapiens
  CDR3 for alpha chain variable domain of TCR clone 29186 (TRAV20, TRAJ10)
CAVRVEGGGDKLTF

SEQ ID NO: 58372 - protein, 18 aa, Homo sapiens
  CDR3 for beta chain variable domain of TCR clone 29186 (TRBV24-1, TRBJ2-1)
CATSDLMFLGRGVHEQFF

SEQ ID NO: 58373 - protein, 15 aa, Homo sapiens
  CDR3 for alpha chain variable domain of TCR clone 29187 (TRAV21, TRAJ53)
CATLNSGGSNYKLTF

SEQ ID NO: 58374 - protein, 16 aa, Homo sapiens
  CDR3 for beta chain variable domain of TCR clone 29187 (TRBV9, TRBJ2-1)
CASSVGGGGNYNEQLF

SEQ ID NO: 58375 - protein, 12 aa, Homo sapiens
  CDR3 for alpha chain variable domain of TCR clone 29188 (TRAV35, TRAJ39)
LAPNNAGNMLTF

SEQ ID NO: 58376 - protein, 16 aa, Homo sapiens
  CDR3 for beta chain variable domain of TCR clone 29188 (TRBV2, TRBJ2-3)
CASSTPVEGVTDTQYF

SEQ ID NO: 58377 - protein, 10 aa, Homo sapiens
  CDR3 for alpha chain variable domain of TCR clone 29189 (TRAV12-3, TRAJ49)
CAVNDDQFYF

SEQ ID NO: 58378 - protein, 13 aa, Homo sapiens
  CDR3 for beta chain variable domain of TCR clone 29189 (TRBV12-4, TRBJ1-1)
CASSPGTGFEAFF

SEQ ID NO: 58379 - protein, 14 aa, Homo sapiens
  CDR3 for alpha chain variable domain of TCR clone 29190 (TRAV1-2, TRAJ6)
CAVRLSGGSYIPTF

SEQ ID NO: 58380 - protein, 15 aa, Homo sapiens
  CDR3 for beta chain variable domain of TCR clone 29190 (TRBV28, TRBJ2-7)
CASSPGGRGFYEQYF

SEQ ID NO: 58381 - protein, 15 aa, Homo sapiens
  CDR3 for alpha chain variable domain of TCR clone 29191 (TRAV17, TRAJ37)
CATDHGSSNTGKLIF

SEQ ID NO: 58382 - protein, 14 aa, Homo sapiens
  CDR3 for beta chain variable domain of TCR clone 29191 (TRBV7-2, TRBJ2-3)
CASSRTSGADTRYF

SEQ ID NO: 58383 - protein, 13 aa, Homo sapiens
  CDR3 for alpha chain variable domain of TCR clone 29192 (TRAV20, TRAJ54)
CAVQAGGAQKLVF

SEQ ID NO: 58384 - protein, 14 aa, Homo sapiens
  CDR3 for beta chain variable domain of TCR clone 29192 (TRBV20-1, TRBJ2-7)
RSAKTGTGGYEQYF

SEQ ID NO: 58385 - protein, 21 aa, Homo sapiens
  CDR3 for alpha chain variable domain of TCR clone 29193 (TRAV1-1, TRAJ6)
CLLLLRCERLEGTGGSYIPTF

SEQ ID NO: 58386 - protein, 13 aa, Homo sapiens
  CDR3 for beta chain variable domain of TCR clone 29193 (TRBV10-2, TRBJ2-7)
CASGASGGYEQYF

SEQ ID NO: 58387 - protein, 14 aa, Homo sapiens
  CDR3 for alpha chain variable domain of TCR clone 29194 (TRAV12-2, TRAJ40)
CAVKIPSGTYKYIF

SEQ ID NO: 58388 - protein, 19 aa, Homo sapiens
  CDR3 for beta chain variable domain of TCR clone 29194 (TRBV25-1, TRBJ2-2)
CAILVYRVDRGRKTGELFF

SEQ ID NO: 58389 - protein, 17 aa, Homo sapiens
  CDR3 for alpha chain variable domain of TCR clone 29195 (TRAV8-2, TRAJ17)
CVVRDRRFKAAGNKLTF

SEQ ID NO: 58390 - protein, 18 aa, Homo sapiens
  CDR3 for beta chain variable domain of TCR clone 29195 (TRBV7-9, TRBJ2-7)
CASSLTTSGSRTWYEQYF

SEQ ID NO: 58391 - protein, 18 aa, Homo sapiens
  CDR3 for alpha chain variable domain of TCR clone 29196 (TRAV26-1, TRAJ5)
CIVRVVPPRDTGRSALTF

SEQ ID NO: 58392 - protein, 15 aa, Homo sapiens
  CDR3 for beta chain variable domain of TCR clone 29196 (TRBV7-9, TRBJ2-7)
CASSLPMGQANEQYF

SEQ ID NO: 58393 - protein, 10 aa, Homo sapiens
  CDR3 for alpha chain variable domain of TCR clone 29197 (TRAV26-1, TRAJ40)
CIAGTYKYIF

SEQ ID NO: 58394 - protein, 15 aa, Homo sapiens
  CDR3 for beta chain variable domain of TCR clone 29197 (TRBV19, TRBJ2-1)
CASSSPGVPIDEQFF

SEQ ID NO: 58395 - protein, 15 aa, Homo sapiens
  CDR3 for alpha chain variable domain of TCR clone 29198 (TRAV17, TRAJ57)
CATCPSQGGSEKLVF

SEQ ID NO: 58396 - protein, 14 aa, Homo sapiens
  CDR3 for beta chain variable domain of TCR clone 29198 (TRBV12-5, TRBJ2-5)
CASGSRTHQETQYF

SEQ ID NO: 58397 - protein, 13 aa, Homo sapiens
  CDR3 for alpha chain variable domain of TCR clone 29199 (TRAV12-3, TRAJ13)
CAMWTGGYQKVTF

SEQ ID NO: 58398 - protein, 14 aa, Homo sapiens
  CDR3 for beta chain variable domain of TCR clone 29199 (TRBV7-2, TRBJ2-5)
CASSTGGELKTQYF

SEQ ID NO: 58399 - protein, 18 aa, Homo sapiens
  CDR3 for alpha chain variable domain of TCR clone 29200 (TRAV21, TRAJ52)
CAVRPSPAGGTSYGKLTF

SEQ ID NO: 58400 - protein, 17 aa, Homo sapiens
  CDR3 for beta chain variable domain of TCR clone 29200 (TRBV20-1, TRBJ2-7)
CSATRAGGVAGVEEQYF

SEQ ID NO: 58401 - protein, 14 aa, Homo sapiens
  CDR3 for alpha chain variable domain of TCR clone 29201 (TRAV1-2, TRAJ8)
CAVRVDTGFQKLVF

SEQ ID NO: 58402 - protein, 15 aa, Homo sapiens
  CDR3 for beta chain variable domain of TCR clone 29201 (TRBV6-3, TRBJ2-7)
CASSSPGTVFYEQYF

SEQ ID NO: 58403 - protein, 14 aa, Homo sapiens
  CDR3 for alpha chain variable domain of TCR clone 29202 (TRAV2, TRAJ9)
CAVEDRSGGFETIF

SEQ ID NO: 58404 - protein, 16 aa, Homo sapiens
  CDR3 for beta chain variable domain of TCR clone 29202 (TRBV7-3, TRBJ2-1)
CASSLEGYRSYNEQFF

SEQ ID NO: 58405 - protein, 12 aa, Homo sapiens
  CDR3 for alpha chain variable domain of TCR clone 29203 (TRAV16, TRAJ10)
CSRTGGGNKLTF

SEQ ID NO: 58406 - protein, 15 aa, Homo sapiens
  CDR3 for beta chain variable domain of TCR clone 29203 (TRBV6-3, TRBJ2-7)
CASSYPGTVFYEQYF

SEQ ID NO: 58407 - protein, 12 aa, Homo sapiens
  CDR3 for alpha chain variable domain of TCR clone 29204 (TRAV21, TRAJ11)
CAATSGYSTLTF

SEQ ID NO: 58408 - protein, 16 aa, Homo sapiens
  CDR3 for beta chain variable domain of TCR clone 29204 (TRBV28, TRBJ2-2)
CASSLEGGSDTGELFF

SEQ ID NO: 58409 - protein, 16 aa, Homo sapiens
  CDR3 for alpha chain variable domain of TCR clone 29205 (TRAV3, TRAJ10)
CAVRDMRAGGGNKLTF

SEQ ID NO: 58410 - protein, 15 aa, Homo sapiens
  CDR3 for beta chain variable domain of TCR clone 29205 (TRBV19, TRBJ1-1)
CASTSGQIQNTEAFF

SEQ ID NO: 58411 - protein, 13 aa, Homo sapiens
  CDR3 for alpha chain variable domain of TCR clone 29206 (TRAV2, TRAJ40)
CAVVISGTYKYIF

SEQ ID NO: 58412 - protein, 14 aa, Homo sapiens
  CDR3 for beta chain variable domain of TCR clone 29206 (TRBV7-2, TRBJ1-1)
CASSFLTGTTEAFF

SEQ ID NO: 58413 - protein, 13 aa, Homo sapiens
  CDR3 for alpha chain variable domain of TCR clone 29207 (TRAV8-4, TRAJ9)
CAVSETGGFKTVF

SEQ ID NO: 58414 - protein, 14 aa, Homo sapiens
  CDR3 for beta chain variable domain of TCR clone 29207 (TRBV18, TRBJ2-3)
CASSGLADTDTQYF

SEQ ID NO: 58415 - protein, 12 aa, Homo sapiens
  CDR3 for alpha chain variable domain of TCR clone 29208 (TRAV12-2, TRAJ10)
WGVTGGGNKLTF

SEQ ID NO: 58416 - protein, 13 aa, Homo sapiens
  CDR3 for beta chain variable domain of TCR clone 29208 (TRBV5-7, TRBJ1-1)
CASSLFQNTEAFF

SEQ ID NO: 58417 - protein, 16 aa, Homo sapiens
  CDR3 for alpha chain variable domain of TCR clone 29209 (TRAV21, TRAJ37)
CAVRTAGSINTGKLIF

SEQ ID NO: 58418 - protein, 13 aa, Homo sapiens
  CDR3 for beta chain variable domain of TCR clone 29209 (TRBV7-9, TRBJ2-5)
CASLPSGRETQYF

SEQ ID NO: 58419 - protein, 15 aa, Homo sapiens
  CDR3 for alpha chain variable domain of TCR clone 29210 (TRAV2, TRAJ15)
CAVEDRGQAGTALIF

SEQ ID NO: 58420 - protein, 13 aa, Homo sapiens
  CDR3 for beta chain variable domain of TCR clone 29210 (TRBV10-2, TRBJ2-7)
CASGASGGYGQYF

SEQ ID NO: 58421 - protein, 15 aa, Homo sapiens
  CDR3 for alpha chain variable domain of TCR clone 29211 (TRAV21, TRAJ24)
CAVRSSTDSWGKLQF

SEQ ID NO: 58422 - protein, 13 aa, Homo sapiens
  CDR3 for beta chain variable domain of TCR clone 29211 (TRBV11-2, TRBJ2-5)
CASSSTGEETQYF

SEQ ID NO: 58423 - protein, 13 aa, Homo sapiens
  CDR3 for alpha chain variable domain of TCR clone 29212 (TRAV12-2, TRAJ6)
CAVNVPRKLHTYI

SEQ ID NO: 58424 - protein, 12 aa, Homo sapiens
  CDR3 for beta chain variable domain of TCR clone 29212 (TRBV29-1, TRBJ2-3)
CSVTGGADTQYF

SEQ ID NO: 58425 - protein, 16 aa, Homo sapiens
  CDR3 for alpha chain variable domain of TCR clone 29213 (TRAV17, TRAJ28)
CATDEYSGAGSYQLTF

SEQ ID NO: 58426 - protein, 13 aa, Homo sapiens
  CDR3 for beta chain variable domain of TCR clone 29213 (TRBV7-9, TRBJ1-2)
CASRTGPNYGYTS

SEQ ID NO: 58427 - protein, 13 aa, Homo sapiens
  CDR3 for alpha chain variable domain of TCR clone 29214 (TRAV8-1, TRAJ30)
CAVIMNRDDKIIF

SEQ ID NO: 58428 - protein, 14 aa, Homo sapiens
  CDR3 for beta chain variable domain of TCR clone 29214 (TRBV7-2, TRBJ1-6)
CASSLQGANSPLHL

SEQ ID NO: 58429 - protein, 11 aa, Homo sapiens
  CDR3 for alpha chain variable domain of TCR clone 29215 (TRAV13-1, TRAJ6)
CATLGSYIPTF

SEQ ID NO: 58430 - protein, 12 aa, Homo sapiens
  CDR3 for beta chain variable domain of TCR clone 29215 (TRBV11-2, TRBJ2-1)
CASSPGNNEQSF

SEQ ID NO: 58431 - protein, 17 aa, Homo sapiens
  CDR3 for alpha chain variable domain of TCR clone 29216 (TRAV2, TRAJ36)
CAVEDRGNWGKQPLLWD

SEQ ID NO: 58432 - protein, 14 aa, Homo sapiens
  CDR3 for beta chain variable domain of TCR clone 29216 (TRBV7-9, TRBJ2-5)
CASSLDTAQEAQYF

SEQ ID NO: 58433 - protein, 13 aa, Homo sapiens
  CDR3 for alpha chain variable domain of TCR clone 29217 (TRAV4, TRAJ16)
CLVGDPNGQKLLF

SEQ ID NO: 58434 - protein, 14 aa, Homo sapiens
  CDR3 for beta chain variable domain of TCR clone 29217 (TRBV3-1, TRBJ1-1)
CASSPQSRDTEAFF

SEQ ID NO: 58435 - protein, 16 aa, Homo sapiens
  CDR3 for alpha chain variable domain of TCR clone 29218 (TRAV23/DV6, TRAJ21)
CAASSGGGPTSTNFTL

SEQ ID NO: 58436 - protein, 11 aa, Homo sapiens
  CDR3 for beta chain variable domain of TCR clone 29218 (TRBV7-8, TRBJ2-7)
CASSLSLEQYF

SEQ ID NO: 58437 - protein, 13 aa, Homo sapiens
  CDR3 for alpha chain variable domain of TCR clone 29219 (TRAV27, TRAJ57)
CRRAQGGSEKLVF

SEQ ID NO: 58438 - protein, 11 aa, Homo sapiens
  CDR3 for beta chain variable domain of TCR clone 29219 (TRBV11-2, TRBJ1-1)
CASSINTEAFF

SEQ ID NO: 58439 - protein, 11 aa, Homo sapiens
  CDR3 for alpha chain variable domain of TCR clone 29220 (TRAV12-3, TRAJ17)
CAVTLTGKLTF

SEQ ID NO: 58440 - protein, 15 aa, Homo sapiens
  CDR3 for beta chain variable domain of TCR clone 29220 (TRBV20-1, TRBJ2-7)
CSARDRVSGMDEQYF

SEQ ID NO: 58441 - protein, 12 aa, Homo sapiens
  CDR3 for alpha chain variable domain of TCR clone 29221 (TRAV35, TRAJ39)
LAPNNAGNMLTF

SEQ ID NO: 58442 - protein, 15 aa, Homo sapiens
  CDR3 for beta chain variable domain of TCR clone 29221 (TRBV7-3, TRBJ2-2)
CASSETGQGTGELFF

SEQ ID NO: 58443 - protein, 17 aa, Homo sapiens
  CDR3 for alpha chain variable domain of TCR clone 29222 (TRAV3, TRAJ6)
CAVRDGPRSGGSYIPTF

SEQ ID NO: 58444 - protein, 20 aa, Homo sapiens
  CDR3 for beta chain variable domain of TCR clone 29222 (TRBV28, TRBJ2-1)
CASTPIGRSPGLAGGNEQFF

SEQ ID NO: 58445 - protein, 16 aa, Homo sapiens
  CDR3 for alpha chain variable domain of TCR clone 29223 (TRAV8-3, TRAJ13)
CAVGAYPSGGYQKVTF

SEQ ID NO: 58446 - protein, 15 aa, Homo sapiens
  CDR3 for beta chain variable domain of TCR clone 29223 (TRBV19, TRBJ1-5)
CASSIVWADDQPQHF

SEQ ID NO: 58447 - protein, 12 aa, Homo sapiens
  CDR3 for alpha chain variable domain of TCR clone 29224 (TRAV12-1, TRAJ31)
CVSWNNNARLMF

SEQ ID NO: 58448 - protein, 15 aa, Homo sapiens
  CDR3 for beta chain variable domain of TCR clone 29224 (TRBV7-2, TRBJ1-5)
CASSLDRGQDQTQHF

SEQ ID NO: 58449 - protein, 15 aa, Homo sapiens
  CDR3 for alpha chain variable domain of TCR clone 29225 (TRAV20, TRAJ43)
CAVQAGKSSNNGMRF

SEQ ID NO: 58450 - protein, 14 aa, Homo sapiens
  CDR3 for beta chain variable domain of TCR clone 29225 (TRBV27, TRBJ2-1)
CASRHLGGGKEQFF

SEQ ID NO: 58451 - protein, 13 aa, Homo sapiens
  CDR3 for alpha chain variable domain of TCR clone 29226 (TRAV8-3, TRAJ28)
CAVGAVGSYQLTF

SEQ ID NO: 58452 - protein, 12 aa, Homo sapiens
  CDR3 for beta chain variable domain of TCR clone 29226 (TRBV29-1, TRBJ2-3)
CSVTGGADTQYF

SEQ ID NO: 58453 - protein, 15 aa, Homo sapiens
  CDR3 for alpha chain variable domain of TCR clone 29227 (TRAV26-2, TRAJ13)
CILRDLSGGYQKVTF

SEQ ID NO: 58454 - protein, 14 aa, Homo sapiens
  CDR3 for beta chain variable domain of TCR clone 29227 (TRBV4-1, TRBJ2-3)
CASSQEGSTDTQYV

SEQ ID NO: 58455 - protein, 13 aa, Homo sapiens
  CDR3 for alpha chain variable domain of TCR clone 29228 (TRAV13-1, TRAJ39)
CAASIWAGNMLTF

SEQ ID NO: 58456 - protein, 15 aa, Homo sapiens
  CDR3 for beta chain variable domain of TCR clone 29228 (TRBV7-9, TRBJ1-1)
RASSLLEQGGTEAFF

SEQ ID NO: 58457 - protein, 15 aa, Homo sapiens
  CDR3 for alpha chain variable domain of TCR clone 29229 (TRAV3, TRAJ22)
CAVRDRGGSARQLTF

SEQ ID NO: 58458 - protein, 12 aa, Homo sapiens
  CDR3 for beta chain variable domain of TCR clone 29229 (TRBV12-4, TRBJ2-7)
CASSLGGYEQYF

SEQ ID NO: 58459 - protein, 16 aa, Homo sapiens
  CDR3 for alpha chain variable domain of TCR clone 29230 (TRAV4, TRAJ18)
CCVLLIGGSTLGRLSF

SEQ ID NO: 58460 - protein, 12 aa, Homo sapiens
  CDR3 for beta chain variable domain of TCR clone 29230 (TRBV6-3, TRBJ2-7)
CASSLTPYEQYF

SEQ ID NO: 58461 - protein, 13 aa, Homo sapiens
  CDR3 for alpha chain variable domain of TCR clone 29231 (TRAV36/DV7, TRAJ37)
CAVFPSNTGKLIF

SEQ ID NO: 58462 - protein, 15 aa, Homo sapiens
  CDR3 for beta chain variable domain of TCR clone 29231 (TRBV12-4, TRBJ2-5)
CQQFFVRGRQETQYF

SEQ ID NO: 58463 - protein, 14 aa, Homo sapiens
  CDR3 for alpha chain variable domain of TCR clone 29232 (TRAV1-2, TRAJ8)
CAVREDTGFQKLVF

SEQ ID NO: 58464 - protein, 15 aa, Homo sapiens
  CDR3 for beta chain variable domain of TCR clone 29232 (TRBV6-3, TRBJ2-7)
CASSSPGTVFYEQYY

SEQ ID NO: 58465 - protein, 15 aa, Homo sapiens
  CDR3 for alpha chain variable domain of TCR clone 29233 (TRAV23/DV6, TRAJ18)
YAARYRGSTLGRLYF

SEQ ID NO: 58466 - protein, 12 aa, Homo sapiens
  CDR3 for beta chain variable domain of TCR clone 29233 (TRBV7-8, TRBJ2-7)
CASSLGDREQYF

SEQ ID NO: 58467 - protein, 14 aa, Homo sapiens
  CDR3 for alpha chain variable domain of TCR clone 29234 (TRAV35, TRAJ50)
CAGHRKTSYDKLIF

SEQ ID NO: 58468 - protein, 13 aa, Homo sapiens
  CDR3 for beta chain variable domain of TCR clone 29234 (TRBV7-7, TRBJ2-3)
CASSLSRADTQYF

SEQ ID NO: 58469 - protein, 17 aa, Homo sapiens
  CDR3 for alpha chain variable domain of TCR clone 29235 (TRAV4, TRAJ13)
CLVGVQGSSGGYQKVTF

SEQ ID NO: 58470 - protein, 18 aa, Homo sapiens
  CDR3 for beta chain variable domain of TCR clone 29235 (TRBV15, TRBJ2-3)
CAASRDGARSWDTDTQYF

SEQ ID NO: 58471 - protein, 13 aa, Homo sapiens
  CDR3 for alpha chain variable domain of TCR clone 29236 (TRAV13-2, TRAJ48)
CAEMDFGNEKLTS

SEQ ID NO: 58472 - protein, 13 aa, Homo sapiens
  CDR3 for beta chain variable domain of TCR clone 29236 (TRBV13, TRBJ2-5)
CASSPEVGETQYF

SEQ ID NO: 58473 - protein, 14 aa, Homo sapiens
  CDR3 for alpha chain variable domain of TCR clone 29237 (TRAV12-2, TRAJ11)
YAVRENSGYSTLTF

SEQ ID NO: 58474 - protein, 14 aa, Homo sapiens
  CDR3 for beta chain variable domain of TCR clone 29237 (TRBV7-2, TRBJ2-5)
CASWQERFRETQYF

SEQ ID NO: 58475 - protein, 14 aa, Homo sapiens
  CDR3 for alpha chain variable domain of TCR clone 29238 (TRAV17, TRAJ6)
CATDASGGSYIPTF

SEQ ID NO: 58476 - protein, 19 aa, Homo sapiens
  CDR3 for beta chain variable domain of TCR clone 29238 (TRBV4-3, TRBJ2-7)
CASSQGFIGWQVTPYEQYF

SEQ ID NO: 58477 - protein, 11 aa, Homo sapiens
  CDR3 for alpha chain variable domain of TCR clone 29239 (TRAV12-1, TRAJ34)
CVVNKGREPIF

SEQ ID NO: 58478 - protein, 12 aa, Homo sapiens
  CDR3 for beta chain variable domain of TCR clone 29239 (TRBV2, TRBJ2-1)
CAYGPPGNEQFF

SEQ ID NO: 58479 - protein, 14 aa, Homo sapiens
  CDR3 for alpha chain variable domain of TCR clone 29240 (TRAV13-1, TRAJ35)
CAASIGGFGNVLHC

SEQ ID NO: 58480 - protein, 13 aa, Homo sapiens
  CDR3 for beta chain variable domain of TCR clone 29240 (TRBV7-3, TRBJ1-1)
CASSQDWGAEAFF

SEQ ID NO: 58481 - protein, 12 aa, Homo sapiens
  CDR3 for alpha chain variable domain of TCR clone 29241 (TRAV1-1, TRAJ8)
CAGGTGFQKLVF

SEQ ID NO: 58482 - protein, 15 aa, Homo sapiens
  CDR3 for beta chain variable domain of TCR clone 29241 (TRBV7-9, TRBJ1-4)
CASSRTWGFNEKLFF

SEQ ID NO: 58483 - protein, 14 aa, Homo sapiens
  CDR3 for alpha chain variable domain of TCR clone 29242 (TRAV12-1, TRAJ17)
CVVNYKAAGNKLTF

SEQ ID NO: 58484 - protein, 17 aa, Homo sapiens
  CDR3 for beta chain variable domain of TCR clone 29242 (TRBV20-1, TRBJ2-1)
CSACSSGLAGSYNEQFF

SEQ ID NO: 58485 - protein, 13 aa, Homo sapiens
  CDR3 for alpha chain variable domain of TCR clone 29243 (TRAV20, TRAJ48)
CDVQGVGNEKLTF

SEQ ID NO: 58486 - protein, 18 aa, Homo sapiens
  CDR3 for beta chain variable domain of TCR clone 29243 (TRBV2, TRBJ2-2)
CQQSTGTSGGGNTGELFF

SEQ ID NO: 58487 - protein, 12 aa, Homo sapiens
  CDR3 for alpha chain variable domain of TCR clone 29244 (TRAV21, TRAJ58)
CALSASGSRLTF

SEQ ID NO: 58488 - protein, 13 aa, Homo sapiens
  CDR3 for beta chain variable domain of TCR clone 29244 (TRBV5-6, TRBJ1-2)
CASSLGVFNGYTF

SEQ ID NO: 58489 - protein, 11 aa, Homo sapiens
  CDR3 for alpha chain variable domain of TCR clone 29245 (TRAV1-1, TRAJ23)
CAVRQGGKVIF

SEQ ID NO: 58490 - protein, 20 aa, Homo sapiens
  CDR3 for beta chain variable domain of TCR clone 29245 (TRBV7-8, TRBJ2-2)
CASSHLFPGPTIHITGELFF

SEQ ID NO: 58491 - protein, 10 aa, Homo sapiens
  CDR3 for alpha chain variable domain of TCR clone 29246 (TRAV20, TRAJ22)
CAAPARQPTF

SEQ ID NO: 58492 - protein, 14 aa, Homo sapiens
  CDR3 for beta chain variable domain of TCR clone 29246 (TRBV19, TRBJ2-1)
CASSMGSGATEQFF

SEQ ID NO: 58493 - protein, 16 aa, Homo sapiens
  CDR3 for alpha chain variable domain of TCR clone 29247 (TRAV30, TRAJ24)
CGTEIVDADSWGKFQF

SEQ ID NO: 58494 - protein, 15 aa, Homo sapiens
  CDR3 for beta chain variable domain of TCR clone 29247 (TRBV4-1, TRBJ2-7)
CASSQNTGRLYEQYF

SEQ ID NO: 58495 - protein, 15 aa, Homo sapiens
  CDR3 for alpha chain variable domain of TCR clone 29248 (TRAV12-3, TRAJ49)
CAMAATPNTGNQFYF

SEQ ID NO: 58496 - protein, 18 aa, Homo sapiens
  CDR3 for beta chain variable domain of TCR clone 29248 (TRBV4-1, TRBJ1-5)
CASSQDPRGQGLNQPQHF

SEQ ID NO: 58497 - protein, 13 aa, Homo sapiens
  CDR3 for alpha chain variable domain of TCR clone 29249 (TRAV3, TRAJ21)
CAVREPDFNKFYF

SEQ ID NO: 58498 - protein, 17 aa, Homo sapiens
  CDR3 for beta chain variable domain of TCR clone 29249 (TRBV7-8, TRBJ2-6)
CASSAGTGGAGANVLTL

SEQ ID NO: 58499 - protein, 14 aa, Homo sapiens
  CDR3 for alpha chain variable domain of TCR clone 29250 (TRAV12-2, TRAJ13)
CAVKKTGGHQKVTF

SEQ ID NO: 58500 - protein, 15 aa, Homo sapiens
  CDR3 for beta chain variable domain of TCR clone 29250 (TRBV6-3, TRBJ2-7)
CASSSPGTVFYEQYF

SEQ ID NO: 58501 - protein, 12 aa, Homo sapiens
  CDR3 for alpha chain variable domain of TCR clone 29251 (TRAV29/DV5, TRAJ49)
CAATDTGNQFYF

SEQ ID NO: 58502 - protein, 13 aa, Homo sapiens
  CDR3 for beta chain variable domain of TCR clone 29251 (TRBV24-1, TRBJ2-2)
CATSDWSTGELFF

SEQ ID NO: 58503 - protein, 13 aa, Homo sapiens
  CDR3 for alpha chain variable domain of TCR clone 29252 (TRAV13-1, TRAJ12)
CAASPDSSYKLIF

SEQ ID NO: 58504 - protein, 16 aa, Homo sapiens
  CDR3 for beta chain variable domain of TCR clone 29252 (TRBV15, TRBJ2-1)
CATSRERLAVAYEQFF

SEQ ID NO: 58505 - protein, 14 aa, Homo sapiens
  CDR3 for alpha chain variable domain of TCR clone 29253 (TRAV12-1, TRAJ13)
CVVIDSGGYQKVTF

SEQ ID NO: 58506 - protein, 12 aa, Homo sapiens
  CDR3 for beta chain variable domain of TCR clone 29253 (TRBV29-1, TRBJ2-3)
CSVTGGSDTQYF

SEQ ID NO: 58507 - protein, 19 aa, Homo sapiens
  CDR3 for alpha chain variable domain of TCR clone 29254 (TRAV26-1, TRAJ52)
CIVRAHRNAGGTSYGKLTF

SEQ ID NO: 58508 - protein, 15 aa, Homo sapiens
  CDR3 for beta chain variable domain of TCR clone 29254 (TRBV29-1, TRBJ2-1)
RSGRDRKSSYNEQFF

SEQ ID NO: 58509 - protein, 13 aa, Homo sapiens
  CDR3 for alpha chain variable domain of TCR clone 29255 (TRAV3, TRAJ15)
CAVRDQAGTALIF

SEQ ID NO: 58510 - protein, 15 aa, Homo sapiens
  CDR3 for beta chain variable domain of TCR clone 29255 (TRBV11-1, TRBJ2-7)
CASSLNYGASYEQYL

SEQ ID NO: 58511 - protein, 13 aa, Homo sapiens
  CDR3 for alpha chain variable domain of TCR clone 29256 (TRAV12-3, TRAJ33)
CAMSVNSNYQLIW

SEQ ID NO: 58512 - protein, 13 aa, Homo sapiens
  CDR3 for beta chain variable domain of TCR clone 29256 (TRBV4-1, TRBJ2-2)
CASSQVNTGELFF

SEQ ID NO: 58513 - protein, 16 aa, Homo sapiens
  CDR3 for alpha chain variable domain of TCR clone 29257 (TRAV3, TRAJ37)
CAVRGKGSGNTGKLIF

SEQ ID NO: 58514 - protein, 13 aa, Homo sapiens
  CDR3 for beta chain variable domain of TCR clone 29257 (TRBV7-9, TRBJ2-7)
CASSFAGAYEQYF

SEQ ID NO: 58515 - protein, 15 aa, Homo sapiens
  CDR3 for alpha chain variable domain of TCR clone 29258 (TRAV35, TRAJ40)
CAGQLGTSGTYTYIF

SEQ ID NO: 58516 - protein, 14 aa, Homo sapiens
  CDR3 for beta chain variable domain of TCR clone 29258 (TRBV7-3, TRBJ2-1)
CASSLAGGTNEQFF

SEQ ID NO: 58517 - protein, 12 aa, Homo sapiens
  CDR3 for alpha chain variable domain of TCR clone 29259 (TRAV2, TRAJ24)
CAATDSWGKFQF

SEQ ID NO: 58518 - protein, 12 aa, Homo sapiens
  CDR3 for beta chain variable domain of TCR clone 29259 (TRBV5-8, TRBJ1-1)
PAAWGGGTEAFF

SEQ ID NO: 58519 - protein, 15 aa, Homo sapiens
  CDR3 for alpha chain variable domain of TCR clone 29260 (TRAV8-3, TRAJ45)
RASSYSGGGADGLTF

SEQ ID NO: 58520 - protein, 13 aa, Homo sapiens
  CDR3 for beta chain variable domain of TCR clone 29260 (TRBV7-9, TRBJ2-7)
CASSFAGAYEQYF

SEQ ID NO: 58521 - protein, 14 aa, Homo sapiens
  CDR3 for alpha chain variable domain of TCR clone 29261 (TRAV8-4, TRAJ13)
CAVTLSGGYQKVTF

SEQ ID NO: 58522 - protein, 14 aa, Homo sapiens
  CDR3 for beta chain variable domain of TCR clone 29261 (TRBV7-2, TRBJ1-2)
CASSQTESTYGYTF

SEQ ID NO: 58523 - protein, 15 aa, Homo sapiens
  CDR3 for alpha chain variable domain of TCR clone 29262 (TRAV20, TRAJ39)
CAVQALLVAGNMLTF

SEQ ID NO: 58524 - protein, 20 aa, Homo sapiens
  CDR3 for beta chain variable domain of TCR clone 29262 (TRBV9, TRBJ2-2)
CASSAKPGTQKGQNTGELFF

SEQ ID NO: 58525 - protein, 13 aa, Homo sapiens
  CDR3 for alpha chain variable domain of TCR clone 29263 (TRAV36/DV7, TRAJ37)
CAVFSSSTGKLIF

SEQ ID NO: 58526 - protein, 16 aa, Homo sapiens
  CDR3 for beta chain variable domain of TCR clone 29263 (TRBV3-1, TRBJ2-5)
CASSPGQFNGFGTQYF

SEQ ID NO: 58527 - protein, 13 aa, Homo sapiens
  CDR3 for alpha chain variable domain of TCR clone 29264 (TRAV21, TRAJ57)
CAVTPGGSEKLVF

SEQ ID NO: 58528 - protein, 16 aa, Homo sapiens
  CDR3 for beta chain variable domain of TCR clone 29264 (TRBV29-1, TRBJ2-7)
CSVEDAEDGTAYEQYF

SEQ ID NO: 58529 - protein, 12 aa, Homo sapiens
  CDR3 for alpha chain variable domain of TCR clone 29265 (TRAV41, TRAJ58)
CAVETSGSKLTF

SEQ ID NO: 58530 - protein, 15 aa, Homo sapiens
  CDR3 for beta chain variable domain of TCR clone 29265 (TRBV29-1, TRBJ2-6)
CSVGDRGSGANVLTF

SEQ ID NO: 58531 - protein, 12 aa, Homo sapiens
  CDR3 for alpha chain variable domain of TCR clone 29266 (TRAV30, TRAJ43)
CGTEERGNDMRF

SEQ ID NO: 58532 - protein, 13 aa, Homo sapiens
  CDR3 for beta chain variable domain of TCR clone 29266 (TRBV27, TRBJ2-7)
CASSFSQGYGQYF

SEQ ID NO: 58533 - protein, 13 aa, Homo sapiens
  CDR3 for alpha chain variable domain of TCR clone 29267 (TRAV2, TRAJ40)
CAMVTSGTYKYIF

SEQ ID NO: 58534 - protein, 16 aa, Homo sapiens
  CDR3 for beta chain variable domain of TCR clone 29267 (TRBV19, TRBJ2-2)
CASRSPGTGATGELFF

SEQ ID NO: 58535 - protein, 13 aa, Homo sapiens
  CDR3 for alpha chain variable domain of TCR clone 29268 (TRAV27, TRAJ39)
CAGDTPAGNMLTF

SEQ ID NO: 58536 - protein, 13 aa, Homo sapiens
  CDR3 for beta chain variable domain of TCR clone 29268 (TRBV4-1, TRBJ2-4)
CASSQVGIDMQYF

SEQ ID NO: 58537 - protein, 13 aa, Homo sapiens
  CDR3 for alpha chain variable domain of TCR clone 29269 (TRAV12-3, TRAJ9)
CAMRNTGGFKTTF

SEQ ID NO: 58538 - protein, 14 aa, Homo sapiens
  CDR3 for beta chain variable domain of TCR clone 29269 (TRBV11-2, TRBJ2-7)
CASSSTGEGYEQYF

SEQ ID NO: 58539 - protein, 13 aa, Homo sapiens
  CDR3 for alpha chain variable domain of TCR clone 29270 (TRAV12-3, TRAJ39)
CAMIDNTGNMLTF

SEQ ID NO: 58540 - protein, 18 aa, Homo sapiens
  CDR3 for beta chain variable domain of TCR clone 29270 (TRBV9, TRBJ2-5)
CASSVAEGTNAFGETQYF

SEQ ID NO: 58541 - protein, 11 aa, Homo sapiens
  CDR3 for alpha chain variable domain of TCR clone 29271 (TRAV17, TRAJ9)
CTTTGGFKTIF

SEQ ID NO: 58542 - protein, 14 aa, Homo sapiens
  CDR3 for beta chain variable domain of TCR clone 29271 (TRBV7-9, TRBJ2-2)
CASSGLADTGELFF

SEQ ID NO: 58543 - protein, 12 aa, Homo sapiens
  CDR3 for alpha chain variable domain of TCR clone 29272 (TRAV13-1, TRAJ49)
CAASPVGNQFYF

SEQ ID NO: 58544 - protein, 13 aa, Homo sapiens
  CDR3 for beta chain variable domain of TCR clone 29272 (TRBV20-1, TRBJ2-2)
CSASAAGTGELFF

SEQ ID NO: 58545 - protein, 17 aa, Homo sapiens
  CDR3 for alpha chain variable domain of TCR clone 29273 (TRAV13-1, TRAJ31)
CAPRDRLMFEDGTQLVV

SEQ ID NO: 58546 - protein, 12 aa, Homo sapiens
  CDR3 for beta chain variable domain of TCR clone 29273 (TRBV7-9, TRBJ2-7)
CASSLEGYEQYF

SEQ ID NO: 58547 - protein, 15 aa, Homo sapiens
  CDR3 for alpha chain variable domain of TCR clone 29274 (TRAV20, TRAJ4)
CAVEGSSGGYNKLIF

SEQ ID NO: 58548 - protein, 14 aa, Homo sapiens
  CDR3 for beta chain variable domain of TCR clone 29274 (TRBV7-8, TRBJ2-7)
CASTLEGALGEQYF

SEQ ID NO: 58549 - protein, 14 aa, Homo sapiens
  CDR3 for alpha chain variable domain of TCR clone 29275 (TRAV35, TRAJ33)
CAGSSQGSNYQLIW

SEQ ID NO: 58550 - protein, 15 aa, Homo sapiens
  CDR3 for beta chain variable domain of TCR clone 29275 (TRBV5-1, TRBJ1-4)
FAPAAWKDGNEKLFF

SEQ ID NO: 58551 - protein, 14 aa, Homo sapiens
  CDR3 for alpha chain variable domain of TCR clone 29276 (TRAV12-2, TRAJ40)
CAVKIPSGTYKYIF

SEQ ID NO: 58552 - protein, 12 aa, Homo sapiens
  CDR3 for beta chain variable domain of TCR clone 29276 (TRBV27, TRBJ2-1)
CASRGFYNEQFF

SEQ ID NO: 58553 - protein, 14 aa, Homo sapiens
  CDR3 for alpha chain variable domain of TCR clone 29277 (TRAV2, TRAJ9)
CAVEDRSGGFKTIF

SEQ ID NO: 58554 - protein, 15 aa, Homo sapiens
  CDR3 for beta chain variable domain of TCR clone 29277 (TRBV20-1, TRBJ2-7)
CSAESGTSGAYEQYF

SEQ ID NO: 58555 - protein, 13 aa, Homo sapiens
  CDR3 for alpha chain variable domain of TCR clone 29278 (TRAV12-1, TRAJ34)
CVVTGYNTDKLIF

SEQ ID NO: 58556 - protein, 13 aa, Homo sapiens
  CDR3 for beta chain variable domain of TCR clone 29278 (TRBV28, TRBJ2-7)
CASKARGVYEQYF

SEQ ID NO: 58557 - protein, 15 aa, Homo sapiens
  CDR3 for alpha chain variable domain of TCR clone 29279 (TRAV26-1, TRAJ29)
CIVRVEGSGNTPLVF

SEQ ID NO: 58558 - protein, 16 aa, Homo sapiens
  CDR3 for beta chain variable domain of TCR clone 29279 (TRBV7-3, TRBJ2-2)
CASSLKRGTLSGELFF

SEQ ID NO: 58559 - protein, 12 aa, Homo sapiens
  CDR3 for alpha chain variable domain of TCR clone 29280 (TRAV25, TRAJ7)
CAGSYGNNRLTF

SEQ ID NO: 58560 - protein, 12 aa, Homo sapiens
  CDR3 for beta chain variable domain of TCR clone 29280 (TRBV5-1, TRBJ1-2)
CASSQDTYGYTF

SEQ ID NO: 58561 - protein, 12 aa, Homo sapiens
  CDR3 for alpha chain variable domain of TCR clone 29281 (TRAV13-1, TRAJ23)
CAERHRGGKLIF

SEQ ID NO: 58562 - protein, 16 aa, Homo sapiens
  CDR3 for beta chain variable domain of TCR clone 29281 (TRBV4-1, TRBJ2-5)
CASSHADRAGGETQYF

SEQ ID NO: 58563 - protein, 14 aa, Homo sapiens
  CDR3 for alpha chain variable domain of TCR clone 29282 (TRAV12-1, TRAJ17)
CVVNYKAAGNKLTF

SEQ ID NO: 58564 - protein, 15 aa, Homo sapiens
  CDR3 for beta chain variable domain of TCR clone 29282 (TRBV20-1, TRBJ2-7)
CSARDRVPGMDEQYF

SEQ ID NO: 58565 - protein, 13 aa, Homo sapiens
  CDR3 for alpha chain variable domain of TCR clone 29283 (TRAV27, TRAJ3)
ASLRGSSASKIIF

SEQ ID NO: 58566 - protein, 15 aa, Homo sapiens
  CDR3 for beta chain variable domain of TCR clone 29283 (TRBV28, TRBJ1-3)
CASSTGWASGNTIYF

SEQ ID NO: 58567 - protein, 14 aa, Homo sapiens
  CDR3 for alpha chain variable domain of TCR clone 29284 (TRAV17, TRAJ32)
CATDPGGATNKLIF

SEQ ID NO: 58568 - protein, 14 aa, Homo sapiens
  CDR3 for beta chain variable domain of TCR clone 29284 (TRBV2, TRBJ1-5)
CASSEYRGGQPQHF

SEQ ID NO: 58569 - protein, 12 aa, Homo sapiens
  CDR3 for alpha chain variable domain of TCR clone 29285 (TRAV27, TRAJ9)
CAGESGGFKTIF

SEQ ID NO: 58570 - protein, 14 aa, Homo sapiens
  CDR3 for beta chain variable domain of TCR clone 29285 (TRBV6-1, TRBJ2-1)
CASAKDGFYSEQFF

SEQ ID NO: 58571 - protein, 14 aa, Homo sapiens
  CDR3 for alpha chain variable domain of TCR clone 29286 (TRAV12-3, TRAJ13)
CAMRNSGGYQKVAF

SEQ ID NO: 58572 - protein, 14 aa, Homo sapiens
  CDR3 for beta chain variable domain of TCR clone 29286 (TRBV4-1, TRBJ1-6)
CASSPGSDSSPLHF

SEQ ID NO: 58573 - protein, 13 aa, Homo sapiens
  CDR3 for alpha chain variable domain of TCR clone 29287 (TRAV12-1, TRAJ6)
CVVFPGGSYIPTF

SEQ ID NO: 58574 - protein, 14 aa, Homo sapiens
  CDR3 for beta chain variable domain of TCR clone 29287 (TRBV20-1, TRBJ1-3)
CSANPTGAGNTIYF

SEQ ID NO: 58575 - protein, 14 aa, Homo sapiens
  CDR3 for alpha chain variable domain of TCR clone 29288 (TRAV2, TRAJ37)
CAVDFTSNTGKLIF

SEQ ID NO: 58576 - protein, 15 aa, Homo sapiens
  CDR3 for beta chain variable domain of TCR clone 29288 (TRBV20-1, TRBJ1-1)
CSASRGLTGNTEAFF

SEQ ID NO: 58577 - protein, 14 aa, Homo sapiens
  CDR3 for alpha chain variable domain of TCR clone 29289 (TRAV1-2, TRAJ8)
CAVREDTGFQKLVF

SEQ ID NO: 58578 - protein, 13 aa, Homo sapiens
  CDR3 for beta chain variable domain of TCR clone 29289 (TRBV7-9, TRBJ2-1)
CASSLDVGNEQFF

SEQ ID NO: 58579 - protein, 14 aa, Homo sapiens
  CDR3 for alpha chain variable domain of TCR clone 29290 (TRAV12-2, TRAJ40)
CAVKIPSGTYKYIF

SEQ ID NO: 58580 - protein, 15 aa, Homo sapiens
  CDR3 for beta chain variable domain of TCR clone 29290 (TRBV7-9, TRBJ1-6)
CASSSPGRGNSPLHF

SEQ ID NO: 58581 - protein, 12 aa, Homo sapiens
  CDR3 for alpha chain variable domain of TCR clone 29291 (TRAV13-1, TRAJ11)
CAGPSGYGTLTF

SEQ ID NO: 58582 - protein, 13 aa, Homo sapiens
  CDR3 for beta chain variable domain of TCR clone 29291 (TRBV12-4, TRBJ2-1)
CASSLSPSNEQFF

SEQ ID NO: 58583 - protein, 14 aa, Homo sapiens
  CDR3 for alpha chain variable domain of TCR clone 29292 (TRAV2, TRAJ37)
CAVDFTSNTGRLIF

SEQ ID NO: 58584 - protein, 15 aa, Homo sapiens
  CDR3 for beta chain variable domain of TCR clone 29292 (TRBV20-1, TRBJ1-1)
CGASRGVTGNTEAFF

SEQ ID NO: 58585 - protein, 16 aa, Homo sapiens
  CDR3 for alpha chain variable domain of TCR clone 29293 (TRAV23/DV6, TRAJ9)
CAASIGGNTGGFKAIF

SEQ ID NO: 58586 - protein, 14 aa, Homo sapiens
  CDR3 for beta chain variable domain of TCR clone 29293 (TRBV9, TRBJ2-7)
CASSVGVGSYEQYF

SEQ ID NO: 58587 - protein, 10 aa, Homo sapiens
  CDR3 for alpha chain variable domain of TCR clone 29294 (TRAV36/DV7, TRAJ48)
CAVGNEKLTF

SEQ ID NO: 58588 - protein, 14 aa, Homo sapiens
  CDR3 for beta chain variable domain of TCR clone 29294 (TRBV19, TRBJ2-1)
CASPTFVLSGEQFF

SEQ ID NO: 58589 - protein, 14 aa, Homo sapiens
  CDR3 for alpha chain variable domain of TCR clone 29295 (TRAV16, TRAJ33)
CALSAMDSNYQLIW

SEQ ID NO: 58590 - protein, 13 aa, Homo sapiens
  CDR3 for beta chain variable domain of TCR clone 29295 (TRBV19, TRBJ1-2)
CASSVPGQDGYTF

SEQ ID NO: 58591 - protein, 15 aa, Homo sapiens
  CDR3 for alpha chain variable domain of TCR clone 29296 (TRAV13-1, TRAJ44)
CAASRGGGTASKLTS

SEQ ID NO: 58592 - protein, 14 aa, Homo sapiens
  CDR3 for beta chain variable domain of TCR clone 29296 (TRBV7-2, TRBJ2-5)
CASSPRGSSETQYF

SEQ ID NO: 58593 - protein, 17 aa, Homo sapiens
  CDR3 for alpha chain variable domain of TCR clone 29297 (TRAV8-2, TRAJ17)
CVVSDRRFKAAGNKLTF

SEQ ID NO: 58594 - protein, 18 aa, Homo sapiens
  CDR3 for beta chain variable domain of TCR clone 29297 (TRBV7-9, TRBJ2-7)
CASSLTTSGSRTWYEQCF

SEQ ID NO: 58595 - protein, 13 aa, Homo sapiens
  CDR3 for alpha chain variable domain of TCR clone 29298 (TRAV12-3, TRAJ33)
CAMSVNSNYQLIW

SEQ ID NO: 58596 - protein, 14 aa, Homo sapiens
  CDR3 for beta chain variable domain of TCR clone 29298 (TRBV25-1, TRBJ1-1)
CASTHLGGNTEAFF

SEQ ID NO: 58597 - protein, 14 aa, Homo sapiens
  CDR3 for alpha chain variable domain of TCR clone 29299 (TRAV12-2, TRAJ13)
CAVKKTGGYQKVTF

SEQ ID NO: 58598 - protein, 14 aa, Homo sapiens
  CDR3 for beta chain variable domain of TCR clone 29299 (TRBV5-5, TRBJ2-7)
CASSLGQGTYEQYL

SEQ ID NO: 58599 - protein, 16 aa, Homo sapiens
  CDR3 for alpha chain variable domain of TCR clone 29300 (TRAV16, TRAJ52)
CALSAAGGTSYGKLTF

SEQ ID NO: 58600 - protein, 15 aa, Homo sapiens
  CDR3 for beta chain variable domain of TCR clone 29300 (TRBV19, TRBJ1-1)
CASTSGQIQNTEAFF

SEQ ID NO: 58601 - protein, 12 aa, Homo sapiens
  CDR3 for alpha chain variable domain of TCR clone 29301 (TRAV8-3, TRAJ20)
CAVGANDYKLSF

SEQ ID NO: 58602 - protein, 16 aa, Homo sapiens
  CDR3 for beta chain variable domain of TCR clone 29301 (TRBV19, TRBJ2-2)
CASRTPGTGATGELFF

SEQ ID NO: 58603 - protein, 14 aa, Homo sapiens
  CDR3 for alpha chain variable domain of TCR clone 29302 (TRAV29/DV5, TRAJ48)
CAAMALFGNEKLTF

SEQ ID NO: 58604 - protein, 12 aa, Homo sapiens
  CDR3 for beta chain variable domain of TCR clone 29302 (TRBV7-8, TRBJ2-7)
CASSLGDREQYF

SEQ ID NO: 58605 - protein, 17 aa, Homo sapiens
  CDR3 for alpha chain variable domain of TCR clone 29303 (TRAV3, TRAJ42)
CAVRDRDYGGIQGNLIF

SEQ ID NO: 58606 - protein, 15 aa, Homo sapiens
  CDR3 for beta chain variable domain of TCR clone 29303 (TRBV6-6, TRBJ2-7)
CASSYSYGGSYEQYF

SEQ ID NO: 58607 - protein, 10 aa, Homo sapiens
  CDR3 for alpha chain variable domain of TCR clone 29304 (TRAV30, TRAJ48)
CGIGNEKLAF

SEQ ID NO: 58608 - protein, 14 aa, Homo sapiens
  CDR3 for beta chain variable domain of TCR clone 29304 (TRBV7-6, TRBJ2-3)
CASSVAGGTDTQYF

SEQ ID NO: 58609 - protein, 13 aa, Homo sapiens
  CDR3 for alpha chain variable domain of TCR clone 29305 (TRAV22, TRAJ29)
CAVWGSGNTPLVF

SEQ ID NO: 58610 - protein, 13 aa, Homo sapiens
  CDR3 for beta chain variable domain of TCR clone 29305 (TRBV4-2, TRBJ1-1)
CASSQAGNTEAFF

SEQ ID NO: 58611 - protein, 18 aa, Homo sapiens
  CDR3 for alpha chain variable domain of TCR clone 29306 (TRAV26-1, TRAJ5)
CIVRVVPPRETGRRALTF

SEQ ID NO: 58612 - protein, 15 aa, Homo sapiens
  CDR3 for beta chain variable domain of TCR clone 29306 (TRBV7-9, TRBJ2-7)
CASSLPMGQANEQYF

SEQ ID NO: 58613 - protein, 15 aa, Homo sapiens
  CDR3 for alpha chain variable domain of TCR clone 29307 (TRAV12-1, TRAJ9)
CVVSFGDTGGFKTIF

SEQ ID NO: 58614 - protein, 14 aa, Homo sapiens
  CDR3 for beta chain variable domain of TCR clone 29307 (TRBV25-1, TRBJ1-1)
CASTHLGGNTEAFF

SEQ ID NO: 58615 - protein, 14 aa, Homo sapiens
  CDR3 for alpha chain variable domain of TCR clone 29308 (TRAV12-2, TRAJ13)
CAVKKTGGHQKVTF

SEQ ID NO: 58616 - protein, 11 aa, Homo sapiens
  CDR3 for beta chain variable domain of TCR clone 29308 (TRBV11-2, TRBJ2-2)
CASSLPGELFF

SEQ ID NO: 58617 - protein, 17 aa, Homo sapiens
  CDR3 for alpha chain variable domain of TCR clone 29309 (TRAV14/DV4, TRAJ33)
CAMREGLWIDSNYQLIW

SEQ ID NO: 58618 - protein, 18 aa, Homo sapiens
  CDR3 for beta chain variable domain of TCR clone 29309 (TRBV20-1, TRBJ2-6)
CSARGSGTTRSGANVLTF

SEQ ID NO: 58619 - protein, 19 aa, Homo sapiens
  CDR3 for alpha chain variable domain of TCR clone 29310 (TRAV1-2, TRAJ26)
CLLPLCCERPDNYGQNFVF

SEQ ID NO: 58620 - protein, 14 aa, Homo sapiens
  CDR3 for beta chain variable domain of TCR clone 29310 (TRBV19, TRBJ2-1)
CASPTFVLSGEQFF

SEQ ID NO: 58621 - protein, 12 aa, Homo sapiens
  CDR3 for alpha chain variable domain of TCR clone 29311 (TRAV17, TRAJ48)
CALNFGNENLTF

SEQ ID NO: 58622 - protein, 13 aa, Homo sapiens
  CDR3 for beta chain variable domain of TCR clone 29311 (TRBV6-5, TRBJ2-5)
CASSSPGGETQYF

SEQ ID NO: 58623 - protein, 10 aa, Homo sapiens
  CDR3 for alpha chain variable domain of TCR clone 29312 (TRAV2, TRAJ34)
CAVVNDKLIF

SEQ ID NO: 58624 - protein, 14 aa, Homo sapiens
  CDR3 for beta chain variable domain of TCR clone 29312 (TRBV11-2, TRBJ2-3)
CASSRLARTDTQYL

SEQ ID NO: 58625 - protein, 15 aa, Homo sapiens
  CDR3 for alpha chain variable domain of TCR clone 29313 (TRAV12-1, TRAJ48)
CVVNKVNFGNEKLTF

SEQ ID NO: 58626 - protein, 17 aa, Homo sapiens
  CDR3 for beta chain variable domain of TCR clone 29313 (TRBV11-2, TRBJ2-1)
CASSLYPPGVEYNEQFF

SEQ ID NO: 58627 - protein, 22 aa, Homo sapiens
  CDR3 for alpha chain variable domain of TCR clone 29314 (TRAV8-2, TRAJ45)
HLTKPSAHMSDAAEYSADGPTF

SEQ ID NO: 58628 - protein, 13 aa, Homo sapiens
  CDR3 for beta chain variable domain of TCR clone 29314 (TRBV7-3, TRBJ2-1)
CASSPVAYNEQFF

SEQ ID NO: 58629 - protein, 14 aa, Homo sapiens
  CDR3 for alpha chain variable domain of TCR clone 29315 (TRAV12-1, TRAJ17)
CVVNYKAAGNKLTF

SEQ ID NO: 58630 - protein, 15 aa, Homo sapiens
  CDR3 for beta chain variable domain of TCR clone 29315 (TRBV6-3, TRBJ2-7)
CASSSPGTVFYEQYF

SEQ ID NO: 58631 - protein, 16 aa, Homo sapiens
  CDR3 for alpha chain variable domain of TCR clone 29316 (TRAV3, TRAJ37)
CVVRPHGSGNTGKLIF

SEQ ID NO: 58632 - protein, 16 aa, Homo sapiens
  CDR3 for beta chain variable domain of TCR clone 29316 (TRBV9, TRBJ1-2)
CASSVEEKVSPYGYTF

SEQ ID NO: 58633 - protein, 13 aa, Homo sapiens
  CDR3 for alpha chain variable domain of TCR clone 29317 (TRAV2, TRAJ40)
CAVVTSGTYKYIF

SEQ ID NO: 58634 - protein, 12 aa, Homo sapiens
  CDR3 for beta chain variable domain of TCR clone 29317 (TRBV11-2, TRBJ2-1)
CASSPGNNEQFL

SEQ ID NO: 58635 - protein, 14 aa, Homo sapiens
  CDR3 for alpha chain variable domain of TCR clone 29318 (TRAV2, TRAJ9)
CAVEDRSGGFKTIF

SEQ ID NO: 58636 - protein, 15 aa, Homo sapiens
  CDR3 for beta chain variable domain of TCR clone 29318 (TRBV19, TRBJ1-2)
CASSVGQVLNYGYTF

SEQ ID NO: 58637 - protein, 16 aa, Homo sapiens
  CDR3 for alpha chain variable domain of TCR clone 29319 (TRAV3, TRAJ10)
CAVRDMRAGGGNKLAF

SEQ ID NO: 58638 - protein, 14 aa, Homo sapiens
  CDR3 for beta chain variable domain of TCR clone 29319 (TRBV7-2, TRBJ1-1)
CASSFLTGTTEAFF

SEQ ID NO: 58639 - protein, 15 aa, Homo sapiens
  CDR3 for alpha chain variable domain of TCR clone 29320 (TRAV2, TRAJ9)
CAVEDRGTGGFKTIF

SEQ ID NO: 58640 - protein, 16 aa, Homo sapiens
  CDR3 for beta chain variable domain of TCR clone 29320 (TRBV24-1, TRBJ2-3)
CAPSDPGTGATDTQYF

SEQ ID NO: 58641 - protein, 12 aa, Homo sapiens
  CDR3 for alpha chain variable domain of TCR clone 29321 (TRAV12-2, TRAJ9)
CAVYNGGFKTIF

SEQ ID NO: 58642 - protein, 15 aa, Homo sapiens
  CDR3 for beta chain variable domain of TCR clone 29321 (TRBV9, TRBJ2-1)
CASSLAGSSYNEQFF

SEQ ID NO: 58643 - protein, 16 aa, Homo sapiens
  CDR3 for alpha chain variable domain of TCR clone 29322 (TRAV4, TRAJ22)
CLVGDLYSGSARQLTF

SEQ ID NO: 58644 - protein, 16 aa, Homo sapiens
  CDR3 for beta chain variable domain of TCR clone 29322 (TRBV7-9, TRBJ2-1)
CASSGVAGGSYNEQFF

SEQ ID NO: 58645 - protein, 14 aa, Homo sapiens
  CDR3 for alpha chain variable domain of TCR clone 29323 (TRAV16, TRAJ42)
CALLAGGSQGNLIF

SEQ ID NO: 58646 - protein, 15 aa, Homo sapiens
  CDR3 for beta chain variable domain of TCR clone 29323 (TRBV20-1, TRBJ2-7)
CSARDRVSGMDEQYF

SEQ ID NO: 58647 - protein, 12 aa, Homo sapiens
  CDR3 for alpha chain variable domain of TCR clone 29324 (TRAV13-1, TRAJ27)
CAAHTNAGKSTF

SEQ ID NO: 58648 - protein, 14 aa, Homo sapiens
  CDR3 for beta chain variable domain of TCR clone 29324 (TRBV19, TRBJ2-2)
CASSGQGIAGELFL

SEQ ID NO: 58649 - protein, 13 aa, Homo sapiens
  CDR3 for alpha chain variable domain of TCR clone 29325 (TRAV3, TRAJ27)
CAVRPLGAGKSTF

SEQ ID NO: 58650 - protein, 13 aa, Homo sapiens
  CDR3 for beta chain variable domain of TCR clone 29325 (TRBV7-9, TRBJ2-3)
CASSPGSTDMQYF

SEQ ID NO: 58651 - protein, 13 aa, Homo sapiens
  CDR3 for alpha chain variable domain of TCR clone 29326 (TRAV16, TRAJ37)
CALRGSNTGKLIF

SEQ ID NO: 58652 - protein, 15 aa, Homo sapiens
  CDR3 for beta chain variable domain of TCR clone 29326 (TRBV20-1, TRBJ2-1)
CSARGRGLSYNEQFL

SEQ ID NO: 58653 - protein, 18 aa, Homo sapiens
  CDR3 for alpha chain variable domain of TCR clone 29327 (TRAV13-1, TRAJ52)
CAASKRSACGTSYGKLTF

SEQ ID NO: 58654 - protein, 13 aa, Homo sapiens
  CDR3 for beta chain variable domain of TCR clone 29327 (TRBV12-4, TRBJ1-2)
CASSLRQGKGYTF

SEQ ID NO: 58655 - protein, 14 aa, Homo sapiens
  CDR3 for alpha chain variable domain of TCR clone 29328 (TRAV3, TRAJ21)
CAVESQANFNKFYF

SEQ ID NO: 58656 - protein, 15 aa, Homo sapiens
  CDR3 for beta chain variable domain of TCR clone 29328 (TRBV9, TRBJ1-6)
CASSVAGTGDSPLHF

SEQ ID NO: 58657 - protein, 14 aa, Homo sapiens
  CDR3 for alpha chain variable domain of TCR clone 29329 (TRAV12-2, TRAJ45)
CAVYSGGGADGLTF

SEQ ID NO: 58658 - protein, 14 aa, Homo sapiens
  CDR3 for beta chain variable domain of TCR clone 29329 (TRBV6-5, TRBJ1-2)
RASTRGGGSDGYTF

SEQ ID NO: 58659 - protein, 10 aa, Homo sapiens
  CDR3 for alpha chain variable domain of TCR clone 29330 (TRAV23/DV6, TRAJ57)
CAASSTLSQG

SEQ ID NO: 58660 - protein, 14 aa, Homo sapiens
  CDR3 for beta chain variable domain of TCR clone 29330 (TRBV13, TRBJ2-5)
CAGSLGQGKETQYF

SEQ ID NO: 58661 - protein, 10 aa, Homo sapiens
  CDR3 for alpha chain variable domain of TCR clone 29331 (TRAV23/DV6, TRAJ57)
CAASSTLSQG

SEQ ID NO: 58662 - protein, 14 aa, Homo sapiens
  CDR3 for beta chain variable domain of TCR clone 29331 (TRBV18, TRBJ2-5)
CASSPGVSQETQYF

SEQ ID NO: 58663 - protein, 16 aa, Homo sapiens
  CDR3 for alpha chain variable domain of TCR clone 29332 (TRAV38-1, TRAJ45)
CAFMKGSEGGADGLTF

SEQ ID NO: 58664 - protein, 15 aa, Homo sapiens
  CDR3 for beta chain variable domain of TCR clone 29332 (TRBV20-1, TRBJ2-7)
CSAREGRDSLYEQYF

SEQ ID NO: 58665 - protein, 12 aa, Homo sapiens
  CDR3 for alpha chain variable domain of TCR clone 29333 (TRAV17, TRAJ49)
CATDVTGNQFYF

SEQ ID NO: 58666 - protein, 16 aa, Homo sapiens
  CDR3 for beta chain variable domain of TCR clone 29333 (TRBV18, TRBJ2-5)
CASSPPLAHSRETQYF

SEQ ID NO: 58667 - protein, 16 aa, Homo sapiens
  CDR3 for alpha chain variable domain of TCR clone 29334 (TRAV1-2, TRAJ10)
CAVRGVLTGGGNRLTF

SEQ ID NO: 58668 - protein, 12 aa, Homo sapiens
  CDR3 for beta chain variable domain of TCR clone 29334 (TRBV7-8, TRBJ2-7)
CASSLGDREQYF

SEQ ID NO: 58669 - protein, 15 aa, Homo sapiens
  CDR3 for alpha chain variable domain of TCR clone 29335 (TRAV3, TRAJ3)
CAVRDRDSSASKIIF

SEQ ID NO: 58670 - protein, 18 aa, Homo sapiens
  CDR3 for beta chain variable domain of TCR clone 29335 (TRBV25-1, TRBJ1-2)
CASSGLQNGQGLIFCYTF

SEQ ID NO: 58671 - protein, 17 aa, Homo sapiens
  CDR3 for alpha chain variable domain of TCR clone 29336 (TRAV13-1, TRAJ31)
CAHRDRLMFGDGTQLVV

SEQ ID NO: 58672 - protein, 12 aa, Homo sapiens
  CDR3 for beta chain variable domain of TCR clone 29336 (TRBV7-9, TRBJ2-7)
CASSLEGYEQYF

SEQ ID NO: 58673 - protein, 12 aa, Homo sapiens
  CDR3 for alpha chain variable domain of TCR clone 29337 (TRAV27, TRAJ36)
CAGMTGANNLLF

SEQ ID NO: 58674 - protein, 14 aa, Homo sapiens
  CDR3 for beta chain variable domain of TCR clone 29337 (TRBV12-4, TRBJ2-3)
CASSLVPSTDTQYF

SEQ ID NO: 58675 - protein, 14 aa, Homo sapiens
  CDR3 for alpha chain variable domain of TCR clone 29338 (TRAV1-2, TRAJ8)
CAVREDTGFQKLVF

SEQ ID NO: 58676 - protein, 13 aa, Homo sapiens
  CDR3 for beta chain variable domain of TCR clone 29338 (TRBV24-1, TRBJ2-2)
CATSDWSTGGLFF

SEQ ID NO: 58677 - protein, 16 aa, Homo sapiens
  CDR3 for alpha chain variable domain of TCR clone 29339 (TRAV3, TRAJ37)
CAVRGKGSGNTGKLIF

SEQ ID NO: 58678 - protein, 15 aa, Homo sapiens
  CDR3 for beta chain variable domain of TCR clone 29339 (TRBV20-1, TRBJ2-1)
CSARGGTRYYNEQFS

SEQ ID NO: 58679 - protein, 17 aa, Homo sapiens
  CDR3 for alpha chain variable domain of TCR clone 29340 (TRAV3, TRAJ38)
CAVRDCLNAGNNRKLIW

SEQ ID NO: 58680 - protein, 14 aa, Homo sapiens
  CDR3 for beta chain variable domain of TCR clone 29340 (TRBV25-1, TRBJ1-1)
CASTHLGGNTEAFF

SEQ ID NO: 58681 - protein, 15 aa, Homo sapiens
  CDR3 for alpha chain variable domain of TCR clone 29341 (TRAV20, TRAJ40)
CAVQRGTSGTYKYIF

SEQ ID NO: 58682 - protein, 19 aa, Homo sapiens
  CDR3 for beta chain variable domain of TCR clone 29341 (TRBV28, TRBJ2-7)
CAGSYSGTSRLGWVYEQYF

SEQ ID NO: 58683 - protein, 14 aa, Homo sapiens
  CDR3 for alpha chain variable domain of TCR clone 29342 (TRAV38-2/DV8, TRAJ30)
CAYMDGLGGDKIIF

SEQ ID NO: 58684 - protein, 15 aa, Homo sapiens
  CDR3 for beta chain variable domain of TCR clone 29342 (TRBV7-9, TRBJ2-2)
CASRPADRDAGELFF

SEQ ID NO: 58685 - protein, 10 aa, Homo sapiens
  CDR3 for alpha chain variable domain of TCR clone 29343 (TRAV1-2, TRAJ31)
CAFFDARLMF

SEQ ID NO: 58686 - protein, 15 aa, Homo sapiens
  CDR3 for beta chain variable domain of TCR clone 29343 (TRBV2, TRBJ2-2)
CASSRETVGTGELFF

SEQ ID NO: 58687 - protein, 12 aa, Homo sapiens
  CDR3 for alpha chain variable domain of TCR clone 29344 (TRAV12-3, TRAJ17)
CAMTLTGNKLTF

SEQ ID NO: 58688 - protein, 13 aa, Homo sapiens
  CDR3 for beta chain variable domain of TCR clone 29344 (TRBV7-9, TRBJ1-2)
CASSLKQNYGYAF

SEQ ID NO: 58689 - protein, 14 aa, Homo sapiens
  CDR3 for alpha chain variable domain of TCR clone 29345 (TRAV1-2, TRAJ8)
CAVREDTGSQKLVF

SEQ ID NO: 58690 - protein, 15 aa, Homo sapiens
  CDR3 for beta chain variable domain of TCR clone 29345 (TRBV28, TRBJ2-6)
CASSLAGSGANVLTF

SEQ ID NO: 58691 - protein, 15 aa, Homo sapiens
  CDR3 for alpha chain variable domain of TCR clone 29346 (TRAV3, TRAJ22)
CAVRDRGGSARQLTF

SEQ ID NO: 58692 - protein, 19 aa, Homo sapiens
  CDR3 for beta chain variable domain of TCR clone 29346 (TRBV25-1, TRBJ2-2)
CAILVYRVDRGRKTGELFF

SEQ ID NO: 58693 - protein, 14 aa, Homo sapiens
  CDR3 for alpha chain variable domain of TCR clone 29347 (TRAV12-2, TRAJ13)
CAVKKTGGYQKVTF

SEQ ID NO: 58694 - protein, 14 aa, Homo sapiens
  CDR3 for beta chain variable domain of TCR clone 29347 (TRBV19, TRBJ2-1)
CASPTVVLSGEQFF

SEQ ID NO: 58695 - protein, 16 aa, Homo sapiens
  CDR3 for alpha chain variable domain of TCR clone 29348 (TRAV16, TRAJ4)
CALSRMLSGGYSKLIF

SEQ ID NO: 58696 - protein, 16 aa, Homo sapiens
  CDR3 for beta chain variable domain of TCR clone 29348 (TRBV24-1, TRBJ2-3)
CATSDPGTGATDTQYF

SEQ ID NO: 58697 - protein, 13 aa, Homo sapiens
  CDR3 for alpha chain variable domain of TCR clone 29349 (TRAV21, TRAJ57)
CAVTQGGSEKLVF

SEQ ID NO: 58698 - protein, 15 aa, Homo sapiens
  CDR3 for beta chain variable domain of TCR clone 29349 (TRBV9, TRBJ1-6)
CASSVAGTGDSPLHF

SEQ ID NO: 58699 - protein, 18 aa, Homo sapiens
  CDR3 for alpha chain variable domain of TCR clone 29350 (TRAV13-1, TRAJ52)
CAAKNPNAGGTSYGKLTF

SEQ ID NO: 58700 - protein, 16 aa, Homo sapiens
  CDR3 for beta chain variable domain of TCR clone 29350 (TRBV19, TRBJ2-1)
CASSKAGPSSYNEQFF

SEQ ID NO: 58701 - protein, 13 aa, Homo sapiens
  CDR3 for alpha chain variable domain of TCR clone 29351 (TRAV26-2, TRAJ54)
CIPRVGGAQKLVF

SEQ ID NO: 58702 - protein, 16 aa, Homo sapiens
  CDR3 for beta chain variable domain of TCR clone 29351 (TRBV4-1, TRBJ1-1)
CASSSMSEWPNTEAFF

SEQ ID NO: 58703 - protein, 16 aa, Homo sapiens
  CDR3 for alpha chain variable domain of TCR clone 29352 (TRAV30, TRAJ24)
CGTEIVDADSWWKFQF

SEQ ID NO: 58704 - protein, 12 aa, Homo sapiens
  CDR3 for beta chain variable domain of TCR clone 29352 (TRBV11-2, TRBJ2-2)
CASSLPTGELFF

SEQ ID NO: 58705 - protein, 11 aa, Homo sapiens
  CDR3 for alpha chain variable domain of TCR clone 29353 (TRAV8-4, TRAJ26)
CAGGEGQNFVF

SEQ ID NO: 58706 - protein, 17 aa, Homo sapiens
  CDR3 for beta chain variable domain of TCR clone 29353 (TRBV7-9, TRBJ2-3)
CASSPTVAGDLADTQYF

SEQ ID NO: 58707 - protein, 16 aa, Homo sapiens
  CDR3 for alpha chain variable domain of TCR clone 29354 (TRAV30, TRAJ24)
CGTEIVDADSWGKFQF

SEQ ID NO: 58708 - protein, 16 aa, Homo sapiens
  CDR3 for beta chain variable domain of TCR clone 29354 (TRBV25-1, TRBJ1-1)
CASSGDRDRGRIEAFF

SEQ ID NO: 58709 - protein, 15 aa, Homo sapiens
  CDR3 for alpha chain variable domain of TCR clone 29355 (TRAV25, TRAJ52)
CAGRPGGTSYGKLAF

SEQ ID NO: 58710 - protein, 17 aa, Homo sapiens
  CDR3 for beta chain variable domain of TCR clone 29355 (TRBV7-8, TRBJ2-6)
CASSAGTGGAGANVLTF

SEQ ID NO: 58711 - protein, 11 aa, Homo sapiens
  CDR3 for alpha chain variable domain of TCR clone 29356 (TRAV1-2, TRAJ20)
CAVANDYKLSF

SEQ ID NO: 58712 - protein, 12 aa, Homo sapiens
  CDR3 for beta chain variable domain of TCR clone 29356 (TRBV5-1, TRBJ2-5)
CASSFSWETQYF

SEQ ID NO: 58713 - protein, 14 aa, Homo sapiens
  CDR3 for alpha chain variable domain of TCR clone 29357 (TRAV1-2, TRAJ16)
CAVNRFSDGQKLLF

SEQ ID NO: 58714 - protein, 10 aa, Homo sapiens
  CDR3 for beta chain variable domain of TCR clone 29357 (TRBV20-1, TRBJ2-7)
RVSGMDEQYF

SEQ ID NO: 58715 - protein, 18 aa, Homo sapiens
  CDR3 for alpha chain variable domain of TCR clone 29358 (TRAV26-1, TRAJ52)
GIVRVEGAGGTSYGKLTF

SEQ ID NO: 58716 - protein, 13 aa, Homo sapiens
  CDR3 for beta chain variable domain of TCR clone 29358 (TRBV7-3, TRBJ1-2)
CASSLKRGYGYTF

SEQ ID NO: 58717 - protein, 18 aa, Homo sapiens
  CDR3 for alpha chain variable domain of TCR clone 29359 (TRAV29/DV5, TRAJ52)
CAAGFRGAGGTSYGKLTF

SEQ ID NO: 58718 - protein, 15 aa, Homo sapiens
  CDR3 for beta chain variable domain of TCR clone 29359 (TRBV9, TRBJ1-6)
CASSVAGTGDSPLHF

SEQ ID NO: 58719 - protein, 12 aa, Homo sapiens
  CDR3 for alpha chain variable domain of TCR clone 29360 (TRAV16, TRAJ17)
CAPSAAGNKLTF

SEQ ID NO: 58720 - protein, 15 aa, Homo sapiens
  CDR3 for beta chain variable domain of TCR clone 29360 (TRBV7-2, TRBJ2-1)
CASSLASGRVNEQFF

SEQ ID NO: 58721 - protein, 17 aa, Homo sapiens
  CDR3 for alpha chain variable domain of TCR clone 29361 (TRAV3, TRAJ6)
CAVRDGPRAGGGYIPTF

SEQ ID NO: 58722 - protein, 16 aa, Homo sapiens
  CDR3 for beta chain variable domain of TCR clone 29361 (TRBV4-1, TRBJ2-7)
CASSLTAGQATYEQYF

SEQ ID NO: 58723 - protein, 13 aa, Homo sapiens
  CDR3 for alpha chain variable domain of TCR clone 29362 (TRAV12-1, TRAJ40)
CVVPTSGTYKYTF

SEQ ID NO: 58724 - protein, 18 aa, Homo sapiens
  CDR3 for beta chain variable domain of TCR clone 29362 (TRBV7-6, TRBJ2-1)
CASSPRTSGMSSYNEQFF

SEQ ID NO: 58725 - protein, 13 aa, Homo sapiens
  CDR3 for alpha chain variable domain of TCR clone 29363 (TRAV3, TRAJ21)
YAVREPDFNKFYF

SEQ ID NO: 58726 - protein, 18 aa, Homo sapiens
  CDR3 for beta chain variable domain of TCR clone 29363 (TRBV11-2, TRBJ2-3)
CASSLGGASRGAPNTQYF

SEQ ID NO: 58727 - protein, 13 aa, Homo sapiens
  CDR3 for alpha chain variable domain of TCR clone 29364 (TRAV13-2, TRAJ53)
CAENMGSNYKLTF

SEQ ID NO: 58728 - protein, 13 aa, Homo sapiens
  CDR3 for beta chain variable domain of TCR clone 29364 (TRBV4-1, TRBJ2-2)
CASSQENTGELSF

SEQ ID NO: 58729 - protein, 14 aa, Homo sapiens
  CDR3 for alpha chain variable domain of TCR clone 29365 (TRAV12-1, TRAJ12)
CVVTRMDSSYKLIF

SEQ ID NO: 58730 - protein, 13 aa, Homo sapiens
  CDR3 for beta chain variable domain of TCR clone 29365 (TRBV20-1, TRBJ1-1)
CSAGGGGNTEAFF

SEQ ID NO: 58731 - protein, 15 aa, Homo sapiens
  CDR3 for alpha chain variable domain of TCR clone 29366 (TRAV21, TRAJ40)
CAVRPQTSGTYKYIF

SEQ ID NO: 58732 - protein, 13 aa, Homo sapiens
  CDR3 for beta chain variable domain of TCR clone 29366 (TRBV7-2, TRBJ2-2)
CASSSVRAGELLF

SEQ ID NO: 58733 - protein, 16 aa, Homo sapiens
  CDR3 for alpha chain variable domain of TCR clone 29367 (TRAV21, TRAJ45)
CAVTMYSGGDADGLTF

SEQ ID NO: 58734 - protein, 16 aa, Homo sapiens
  CDR3 for beta chain variable domain of TCR clone 29367 (TRBV24-1, TRBJ2-3)
CATSDAISGITDTQYF

SEQ ID NO: 58735 - protein, 13 aa, Homo sapiens
  CDR3 for alpha chain variable domain of TCR clone 29368 (TRAV8-3, TRAJ36)
CAVGATGANNLCF

SEQ ID NO: 58736 - protein, 15 aa, Homo sapiens
  CDR3 for beta chain variable domain of TCR clone 29368 (TRBV7-2, TRBJ1-2)
CASSPRAGWNYGYTF

SEQ ID NO: 58737 - protein, 16 aa, Homo sapiens
  CDR3 for alpha chain variable domain of TCR clone 29369 (TRAV3, TRAJ10)
CAVRDMRAGGGNKLTF

SEQ ID NO: 58738 - protein, 16 aa, Homo sapiens
  CDR3 for beta chain variable domain of TCR clone 29369 (TRBV2, TRBJ1-4)
CASNLLQGATNEKLFF

SEQ ID NO: 58739 - protein, 22 aa, Homo sapiens
  CDR3 for alpha chain variable domain of TCR clone 29370 (TRAV26-2, TRAJ45)
CCVLPHPERQGRSGGGADGLTF

SEQ ID NO: 58740 - protein, 15 aa, Homo sapiens
  CDR3 for beta chain variable domain of TCR clone 29370 (TRBV7-6, TRBJ2-5)
CASSKPTGPQETQYF

SEQ ID NO: 58741 - protein, 18 aa, Homo sapiens
  CDR3 for alpha chain variable domain of TCR clone 29371 (TRAV21, TRAJ52)
CAVRPSPAGGTRYGKLTF

SEQ ID NO: 58742 - protein, 16 aa, Homo sapiens
  CDR3 for beta chain variable domain of TCR clone 29371 (TRBV7-3, TRBJ2-1)
CASSLEGYRSYNEQFF

SEQ ID NO: 58743 - protein, 12 aa, Homo sapiens
  CDR3 for alpha chain variable domain of TCR clone 29372 (TRAV2, TRAJ5)
CALDTGRRALTF

SEQ ID NO: 58744 - protein, 15 aa, Homo sapiens
  CDR3 for beta chain variable domain of TCR clone 29372 (TRBV10-3, TRBJ2-1)
CAISDVQDRAYEQLF

SEQ ID NO: 58745 - protein, 13 aa, Homo sapiens
  CDR3 for alpha chain variable domain of TCR clone 29373 (TRAV12-2, TRAJ37)
CAGGSGNAGKLIF

SEQ ID NO: 58746 - protein, 14 aa, Homo sapiens
  CDR3 for beta chain variable domain of TCR clone 29373 (TRBV6-1, TRBJ2-6)
CASQQGAGANVLTF

SEQ ID NO: 58747 - protein, 11 aa, Homo sapiens
  CDR3 for alpha chain variable domain of TCR clone 29374 (TRAV3, TRAJ21)
CAVGNFNKFYF

SEQ ID NO: 58748 - protein, 16 aa, Homo sapiens
  CDR3 for beta chain variable domain of TCR clone 29374 (TRBV19, TRBJ2-1)
CASSKAGPSSFNEQFF

SEQ ID NO: 58749 - protein, 12 aa, Homo sapiens
  CDR3 for alpha chain variable domain of TCR clone 29375 (TRAV27, TRAJ36)
ASTPAGANNLFF

SEQ ID NO: 58750 - protein, 13 aa, Homo sapiens
  CDR3 for beta chain variable domain of TCR clone 29375 (TRBV7-9, TRBJ2-3)
CASSPGSTNTQYF

SEQ ID NO: 58751 - protein, 12 aa, Homo sapiens
  CDR3 for alpha chain variable domain of TCR clone 29376 (TRAV17, TRAJ4)
CATEGGYNKLIF

SEQ ID NO: 58752 - protein, 13 aa, Homo sapiens
  CDR3 for beta chain variable domain of TCR clone 29376 (TRBV29-1, TRBJ2-2)
CSTTGVNTGELFF

SEQ ID NO: 58753 - protein, 14 aa, Homo sapiens
  CDR3 for alpha chain variable domain of TCR clone 29377 (TRAV12-1, TRAJ12)
CVVTRMDSSYKLIF

SEQ ID NO: 58754 - protein, 15 aa, Homo sapiens
  CDR3 for beta chain variable domain of TCR clone 29377 (TRBV4-1, TRBJ1-4)
CASSDTGGTNEKLFF

SEQ ID NO: 58755 - protein, 14 aa, Homo sapiens
  CDR3 for alpha chain variable domain of TCR clone 29378 (TRAV1-2, TRAJ6)
CVVSLSGGSYIPTF

SEQ ID NO: 58756 - protein, 15 aa, Homo sapiens
  CDR3 for beta chain variable domain of TCR clone 29378 (TRBV28, TRBJ2-7)
CASSPGGRGFYEQYF

SEQ ID NO: 58757 - protein, 14 aa, Homo sapiens
  CDR3 for alpha chain variable domain of TCR clone 29379 (TRAV1-2, TRAJ16)
CAVNRFSDGQKLLF

SEQ ID NO: 58758 - protein, 18 aa, Homo sapiens
  CDR3 for beta chain variable domain of TCR clone 29379 (TRBV20-1, TRBJ2-6)
CGAETTPTHGSGANVLTF

SEQ ID NO: 58759 - protein, 14 aa, Homo sapiens
  CDR3 for alpha chain variable domain of TCR clone 29380 (TRAV34, TRAJ44)
CGADGTGTASRLTF

SEQ ID NO: 58760 - protein, 15 aa, Homo sapiens
  CDR3 for beta chain variable domain of TCR clone 29380 (TRBV5-1, TRBJ2-1)
CASSPPRAPYNEQFF

SEQ ID NO: 58761 - protein, 16 aa, Homo sapiens
  CDR3 for alpha chain variable domain of TCR clone 29381 (TRAV1-2, TRAJ16)
CAVNRFQMARSCSLQG

SEQ ID NO: 58762 - protein, 15 aa, Homo sapiens
  CDR3 for beta chain variable domain of TCR clone 29381 (TRBV7-9, TRBJ1-6)
CASSSPGRGNSPLHF

SEQ ID NO: 58763 - protein, 14 aa, Homo sapiens
  CDR3 for alpha chain variable domain of TCR clone 29382 (TRAV12-2, TRAJ13)
CAVKKTGGYQKVTF

SEQ ID NO: 58764 - protein, 15 aa, Homo sapiens
  CDR3 for beta chain variable domain of TCR clone 29382 (TRBV27, TRBJ2-1)
CASSNGGGSSNEQFI

SEQ ID NO: 58765 - protein, 16 aa, Homo sapiens
  CDR3 for alpha chain variable domain of TCR clone 29383 (TRAV3, TRAJ21)
CAVRDIERGNFNKFYF

SEQ ID NO: 58766 - protein, 12 aa, Homo sapiens
  CDR3 for beta chain variable domain of TCR clone 29383 (TRBV11-2, TRBJ2-2)
CASSLGGGELFF

SEQ ID NO: 58767 - protein, 11 aa, Homo sapiens
  CDR3 for alpha chain variable domain of TCR clone 29384 (TRAV21, TRAJ11)
CAVNGYSTITF

SEQ ID NO: 58768 - protein, 11 aa, Homo sapiens
  CDR3 for beta chain variable domain of TCR clone 29384 (TRBV19, TRBJ1-1)
CASSIGSEAFF

SEQ ID NO: 58769 - protein, 16 aa, Homo sapiens
  CDR3 for alpha chain variable domain of TCR clone 29385 (TRAV8-3, TRAJ52)
CAVQLAGGTSYGKLTF

SEQ ID NO: 58770 - protein, 15 aa, Homo sapiens
  CDR3 for beta chain variable domain of TCR clone 29385 (TRBV11-2, TRBJ2-7)
CASSLAGGVATEQYF

SEQ ID NO: 58771 - protein, 15 aa, Homo sapiens
  CDR3 for alpha chain variable domain of TCR clone 29386 (TRAV25, TRAJ52)
CAGTSGSTSYGKLTF

SEQ ID NO: 58772 - protein, 16 aa, Homo sapiens
  CDR3 for beta chain variable domain of TCR clone 29386 (TRBV15, TRBJ1-2)
CATSRGPRTGGDGYTF

SEQ ID NO: 58773 - protein, 13 aa, Homo sapiens
  CDR3 for alpha chain variable domain of TCR clone 29387 (TRAV1-2, TRAJ9)
CAVLNTGGFKTIF

SEQ ID NO: 58774 - protein, 14 aa, Homo sapiens
  CDR3 for beta chain variable domain of TCR clone 29387 (TRBV20-1, TRBJ2-3)
CSARGGTSADTQYF

SEQ ID NO: 58775 - protein, 13 aa, Homo sapiens
  CDR3 for alpha chain variable domain of TCR clone 29388 (TRAV12-3, TRAJ33)
CAMSVNSNYQLIW

SEQ ID NO: 58776 - protein, 16 aa, Homo sapiens
  CDR3 for beta chain variable domain of TCR clone 29388 (TRBV13, TRBJ2-2)
CASSPRTGEHTGELFF

SEQ ID NO: 58777 - protein, 11 aa, Homo sapiens
  CDR3 for alpha chain variable domain of TCR clone 29389 (TRAV13-1, TRAJ39)
CASHAGNMLTF

SEQ ID NO: 58778 - protein, 14 aa, Homo sapiens
  CDR3 for beta chain variable domain of TCR clone 29389 (TRBV11-2, TRBJ1-5)
CAGSLDRGRQPQHF

SEQ ID NO: 58779 - protein, 14 aa, Homo sapiens
  CDR3 for alpha chain variable domain of TCR clone 29390 (TRAV16, TRAJ33)
CALSAMDSNYHLIW

SEQ ID NO: 58780 - protein, 12 aa, Homo sapiens
  CDR3 for beta chain variable domain of TCR clone 29390 (TRBV5-1, TRBJ1-2)
CASSQDTYGYTF

SEQ ID NO: 58781 - protein, 14 aa, Homo sapiens
  CDR3 for alpha chain variable domain of TCR clone 29391 (TRAV12-2, TRAJ45)
CAVYSGGGADGLTF

SEQ ID NO: 58782 - protein, 15 aa, Homo sapiens
  CDR3 for beta chain variable domain of TCR clone 29391 (TRBV13, TRBJ2-7)
CASSLRPDRGHEQYF

SEQ ID NO: 58783 - protein, 12 aa, Homo sapiens
  CDR3 for alpha chain variable domain of TCR clone 29392 (TRAV29/DV5, TRAJ49)
CAATDTGNKFYF

SEQ ID NO: 58784 - protein, 12 aa, Homo sapiens
  CDR3 for beta chain variable domain of TCR clone 29392 (TRBV12-4, TRBJ2-7)
CASSLGGYEQYF

SEQ ID NO: 58785 - protein, 14 aa, Homo sapiens
  CDR3 for alpha chain variable domain of TCR clone 29393 (TRAV12-3, TRAJ42)
CAMNYGGSQGNLIF

SEQ ID NO: 58786 - protein, 13 aa, Homo sapiens
  CDR3 for beta chain variable domain of TCR clone 29393 (TRBV7-9, TRBJ1-2)
CASSLKQNYGYTF

SEQ ID NO: 58787 - protein, 10 aa, Homo sapiens
  CDR3 for alpha chain variable domain of TCR clone 29394 (TRAV2, TRAJ34)
RAVVNDKLIF

SEQ ID NO: 58788 - protein, 15 aa, Homo sapiens
  CDR3 for beta chain variable domain of TCR clone 29394 (TRBV3-1, TRBJ2-2)
CASSQDWTRAGELFF

SEQ ID NO: 58789 - protein, 13 aa, Homo sapiens
  CDR3 for alpha chain variable domain of TCR clone 29395 (TRAV8-3, TRAJ44)
CAVVPGTASKLTF

SEQ ID NO: 58790 - protein, 12 aa, Homo sapiens
  CDR3 for beta chain variable domain of TCR clone 29395 (TRBV11-2, TRBJ2-2)
CASSLGGGELFF

SEQ ID NO: 58791 - protein, 14 aa, Homo sapiens
  CDR3 for alpha chain variable domain of TCR clone 29396 (TRAV29/DV5, TRAJ36)
CAARRKTGANNLFF

SEQ ID NO: 58792 - protein, 14 aa, Homo sapiens
  CDR3 for beta chain variable domain of TCR clone 29396 (TRBV12-5, TRBJ2-5)
CASGSRTRQETQYF

SEQ ID NO: 58793 - protein, 16 aa, Homo sapiens
  CDR3 for alpha chain variable domain of TCR clone 29397 (TRAV27, TRAJ53)
CAAPEGRGGSNYKLTF

SEQ ID NO: 58794 - protein, 14 aa, Homo sapiens
  CDR3 for beta chain variable domain of TCR clone 29397 (TRBV4-3, TRBJ1-5)
CASSQGGQGWPQHF

SEQ ID NO: 58795 - protein, 14 aa, Homo sapiens
  CDR3 for alpha chain variable domain of TCR clone 29398 (TRAV1-2, TRAJ16)
CAVNRSSDGQKLLF

SEQ ID NO: 58796 - protein, 14 aa, Homo sapiens
  CDR3 for beta chain variable domain of TCR clone 29398 (TRBV7-3, TRBJ1-1)
CASSLGTGYTEAFF

SEQ ID NO: 58797 - protein, 13 aa, Homo sapiens
  CDR3 for alpha chain variable domain of TCR clone 29399 (TRAV21, TRAJ36)
CAARPGNAGKSTF

SEQ ID NO: 58798 - protein, 14 aa, Homo sapiens
  CDR3 for beta chain variable domain of TCR clone 29399 (TRBV7-6, TRBJ2-3)
CASSLGTVTDTQYF

SEQ ID NO: 58799 - protein, 15 aa, Homo sapiens
  CDR3 for alpha chain variable domain of TCR clone 29400 (TRAV4, TRAJ39)
CLVGPNNNAGNMLTF

SEQ ID NO: 58800 - protein, 17 aa, Homo sapiens
  CDR3 for beta chain variable domain of TCR clone 29400 (TRBV11-2, TRBJ2-1)
CASSLYPPGVEYNEQFF

SEQ ID NO: 58801 - protein, 14 aa, Homo sapiens
  CDR3 for alpha chain variable domain of TCR clone 29401 (TRAV8-3, TRAJ9)
CAVVYNTGGFETIF

SEQ ID NO: 58802 - protein, 14 aa, Homo sapiens
  CDR3 for beta chain variable domain of TCR clone 29401 (TRBV7-3, TRBJ2-2)
CASSSGGYTGELFF

SEQ ID NO: 58803 - protein, 11 aa, Homo sapiens
  CDR3 for alpha chain variable domain of TCR clone 29402 (TRAV3, TRAJ21)
CAVGNFNKFYF

SEQ ID NO: 58804 - protein, 17 aa, Homo sapiens
  CDR3 for beta chain variable domain of TCR clone 29402 (TRBV24-1, TRBJ2-1)
CATSDVSTSGTHNEQFF

SEQ ID NO: 58805 - protein, 15 aa, Homo sapiens
  CDR3 for alpha chain variable domain of TCR clone 29403 (TRAV21, TRAJ24)
CAARSSTVSWGKLQF

SEQ ID NO: 58806 - protein, 13 aa, Homo sapiens
  CDR3 for beta chain variable domain of TCR clone 29403 (TRBV11-2, TRBJ2-5)
CASSSTGEETQYF

SEQ ID NO: 58807 - protein, 12 aa, Homo sapiens
  CDR3 for alpha chain variable domain of TCR clone 29404 (TRAV1-1, TRAJ30)
CAVRGRDDKIIF

SEQ ID NO: 58808 - protein, 14 aa, Homo sapiens
  CDR3 for beta chain variable domain of TCR clone 29404 (TRBV6-1, TRBJ1-3)
CASVQGGGGNTMYF

SEQ ID NO: 58809 - protein, 16 aa, Homo sapiens
  CDR3 for alpha chain variable domain of TCR clone 29405 (TRAV30, TRAJ48)
CGTEIKSNFRNEKLTF

SEQ ID NO: 58810 - protein, 17 aa, Homo sapiens
  CDR3 for beta chain variable domain of TCR clone 29405 (TRBV27, TRBJ2-1)
CASSSERGGQSADEQFF

SEQ ID NO: 58811 - protein, 16 aa, Homo sapiens
  CDR3 for alpha chain variable domain of TCR clone 29406 (TRAV23/DV6, TRAJ9)
CAASIGGNNGGFKTIF

SEQ ID NO: 58812 - protein, 14 aa, Homo sapiens
  CDR3 for beta chain variable domain of TCR clone 29406 (TRBV9, TRBJ2-7)
CASSVGVGSYEQYF

SEQ ID NO: 58813 - protein, 14 aa, Homo sapiens
  CDR3 for alpha chain variable domain of TCR clone 29407 (TRAV20, TRAJ42)
CAVQAVGSQGNLIF

SEQ ID NO: 58814 - protein, 14 aa, Homo sapiens
  CDR3 for beta chain variable domain of TCR clone 29407 (TRBV28, TRBJ1-2)
CASRIQGANYGYTF

SEQ ID NO: 58815 - protein, 12 aa, Homo sapiens
  CDR3 for alpha chain variable domain of TCR clone 29408 (TRAV13-1, TRAJ21)
CAAKEGFNKSYF

SEQ ID NO: 58816 - protein, 16 aa, Homo sapiens
  CDR3 for beta chain variable domain of TCR clone 29408 (TRBV7-3, TRBJ2-2)
CASSLKRGTLSGELFF

SEQ ID NO: 58817 - protein, 13 aa, Homo sapiens
  CDR3 for alpha chain variable domain of TCR clone 29409 (TRAV26-2, TRAJ43)
CILRAVNNNDMRF

SEQ ID NO: 58818 - protein, 14 aa, Homo sapiens
  CDR3 for beta chain variable domain of TCR clone 29409 (TRBV20-1, TRBJ1-1)
CSAQTRVGGTEAFF

SEQ ID NO: 58819 - protein, 14 aa, Homo sapiens
  CDR3 for alpha chain variable domain of TCR clone 29410 (TRAV12-2, TRAJ40)
CAVKIPSGTYKYIF

SEQ ID NO: 58820 - protein, 13 aa, Homo sapiens
  CDR3 for beta chain variable domain of TCR clone 29410 (TRBV10-3, TRBJ2-7)
CASKLAVNYEQYF

SEQ ID NO: 58821 - protein, 14 aa, Homo sapiens
  CDR3 for alpha chain variable domain of TCR clone 29411 (TRAV13-1, TRAJ44)
CAAKATGAASKLTF

SEQ ID NO: 58822 - protein, 14 aa, Homo sapiens
  CDR3 for beta chain variable domain of TCR clone 29411 (TRBV19, TRBJ2-2)
CASSTLHRSGELFF

SEQ ID NO: 58823 - protein, 14 aa, Homo sapiens
  CDR3 for alpha chain variable domain of TCR clone 29412 (TRAV12-1, TRAJ17)
CVVNYKAAGNKLTF

SEQ ID NO: 58824 - protein, 16 aa, Homo sapiens
  CDR3 for beta chain variable domain of TCR clone 29412 (TRBV12-4, TRBJ1-5)
CASSRPVGGSNQTQHF

SEQ ID NO: 58825 - protein, 12 aa, Homo sapiens
  CDR3 for alpha chain variable domain of TCR clone 29413 (TRAV16, TRAJ10)
CSRTGGGNKLTF

SEQ ID NO: 58826 - protein, 14 aa, Homo sapiens
  CDR3 for beta chain variable domain of TCR clone 29413 (TRBV4-1, TRBJ2-2)
CASSQAVNTGELFF

SEQ ID NO: 58827 - protein, 15 aa, Homo sapiens
  CDR3 for alpha chain variable domain of TCR clone 29414 (TRAV13-2, TRAJ35)
CAESPNIGFGNVLHC

SEQ ID NO: 58828 - protein, 13 aa, Homo sapiens
  CDR3 for beta chain variable domain of TCR clone 29414 (TRBV10-2, TRBJ2-5)
CASSTLARETRYF

SEQ ID NO: 58829 - protein, 16 aa, Homo sapiens
  CDR3 for alpha chain variable domain of TCR clone 29415 (TRAV1-2, TRAJ10)
CAVRGVLTGGGNKLTF

SEQ ID NO: 58830 - protein, 17 aa, Homo sapiens
  CDR3 for beta chain variable domain of TCR clone 29415 (TRBV15, TRBJ1-5)
CATSRAPPGTRNQHQHF

SEQ ID NO: 58831 - protein, 17 aa, Homo sapiens
  CDR3 for alpha chain variable domain of TCR clone 29416 (TRAV8-6, TRAJ58)
CAVSSWVGETSGSRLTF

SEQ ID NO: 58832 - protein, 14 aa, Homo sapiens
  CDR3 for beta chain variable domain of TCR clone 29416 (TRBV4-2, TRBJ2-1)
CASGLGRAYNEQFF

SEQ ID NO: 58833 - protein, 18 aa, Homo sapiens
  CDR3 for alpha chain variable domain of TCR clone 29417 (TRAV26-1, TRAJ22)
CIVRVALISTGSARQLTF

SEQ ID NO: 58834 - protein, 13 aa, Homo sapiens
  CDR3 for beta chain variable domain of TCR clone 29417 (TRBV13, TRBJ2-5)
CASSPEVGETQYF

SEQ ID NO: 58835 - protein, 14 aa, Homo sapiens
  CDR3 for alpha chain variable domain of TCR clone 29418 (TRAV17, TRAJ57)
CATDPRGGSEKLVF

SEQ ID NO: 58836 - protein, 18 aa, Homo sapiens
  CDR3 for beta chain variable domain of TCR clone 29418 (TRBV6-6, TRBJ1-3)
CASSYSKWDSISGNTIYF

SEQ ID NO: 58837 - protein, 17 aa, Homo sapiens
  CDR3 for alpha chain variable domain of TCR clone 29419 (TRAV3, TRAJ12)
CAVRDGGRMDSSYKLIL

SEQ ID NO: 58838 - protein, 14 aa, Homo sapiens
  CDR3 for beta chain variable domain of TCR clone 29419 (TRBV7-9, TRBJ1-2)
CASSRQGANYGYTF

SEQ ID NO: 58839 - protein, 13 aa, Homo sapiens
  CDR3 for alpha chain variable domain of TCR clone 29420 (TRAV17, TRAJ9)
CATNYTGGFKTIF

SEQ ID NO: 58840 - protein, 14 aa, Homo sapiens
  CDR3 for beta chain variable domain of TCR clone 29420 (TRBV19, TRBJ2-5)
CASSMTGQQETQYF

SEQ ID NO: 58841 - protein, 16 aa, Homo sapiens
  CDR3 for alpha chain variable domain of TCR clone 29421 (TRAV12-2, TRAJ10)
CAVNRVPTGGGNKLTF

SEQ ID NO: 58842 - protein, 12 aa, Homo sapiens
  CDR3 for beta chain variable domain of TCR clone 29421 (TRBV28, TRBJ2-7)
CASSFSSYEQYF

SEQ ID NO: 58843 - protein, 18 aa, Homo sapiens
  CDR3 for alpha chain variable domain of TCR clone 29422 (TRAV13-1, TRAJ52)
CAVSKRSAGGTSYGKLTF

SEQ ID NO: 58844 - protein, 13 aa, Homo sapiens
  CDR3 for beta chain variable domain of TCR clone 29422 (TRBV12-4, TRBJ1-2)
CASSLRQGKGYTF

SEQ ID NO: 58845 - protein, 14 aa, Homo sapiens
  CDR3 for alpha chain variable domain of TCR clone 29423 (TRAV12-3, TRAJ6)
CAMSATGGSYIPTF

SEQ ID NO: 58846 - protein, 16 aa, Homo sapiens
  CDR3 for beta chain variable domain of TCR clone 29423 (TRBV4-2, TRBJ2-1)
CASSPRAGQGANEQSF

SEQ ID NO: 58847 - protein, 16 aa, Homo sapiens
  CDR3 for alpha chain variable domain of TCR clone 29424 (TRAV30, TRAJ24)
CGTEIVDADSWGKFQL

SEQ ID NO: 58848 - protein, 13 aa, Homo sapiens
  CDR3 for beta chain variable domain of TCR clone 29424 (TRBV20-1, TRBJ1-1)
CSAPPGGHTEAFF

SEQ ID NO: 58849 - protein, 13 aa, Homo sapiens
  CDR3 for alpha chain variable domain of TCR clone 29425 (TRAV2, TRAJ16)
CAVEFGGGQKLLF

SEQ ID NO: 58850 - protein, 14 aa, Homo sapiens
  CDR3 for beta chain variable domain of TCR clone 29425 (TRBV6-3, TRBJ2-5)
CASSYSLREETQYF

SEQ ID NO: 58851 - protein, 17 aa, Homo sapiens
  CDR3 for alpha chain variable domain of TCR clone 29426 (TRAV19, TRAJ32)
CALSERPYGGATNKLIF

SEQ ID NO: 58852 - protein, 14 aa, Homo sapiens
  CDR3 for beta chain variable domain of TCR clone 29426 (TRBV7-2, TRBJ1-6)
CASSLQGANSPLHF

SEQ ID NO: 58853 - protein, 13 aa, Homo sapiens
  CDR3 for alpha chain variable domain of TCR clone 29427 (TRAV12-1, TRAJ16)
CVVNGPDGQKMLF

SEQ ID NO: 58854 - protein, 13 aa, Homo sapiens
  CDR3 for beta chain variable domain of TCR clone 29427 (TRBV2, TRBJ1-1)
CARNPTGGFHAFF

SEQ ID NO: 58855 - protein, 14 aa, Homo sapiens
  CDR3 for alpha chain variable domain of TCR clone 29428 (TRAV2, TRAJ9)
CAVEDRSGGLKTIF

SEQ ID NO: 58856 - protein, 14 aa, Homo sapiens
  CDR3 for beta chain variable domain of TCR clone 29428 (TRBV18, TRBJ1-5)
CASSRQQRNQPQHF

SEQ ID NO: 58857 - protein, 17 aa, Homo sapiens
  CDR3 for alpha chain variable domain of TCR clone 29429 (TRAV26-1, TRAJ53)
CIVRVDDSGGSNYNLTF

SEQ ID NO: 58858 - protein, 15 aa, Homo sapiens
  CDR3 for beta chain variable domain of TCR clone 29429 (TRBV20-1, TRBJ2-7)
CSARVPAAYFYEQYF

SEQ ID NO: 58859 - protein, 14 aa, Homo sapiens
  CDR3 for alpha chain variable domain of TCR clone 29430 (TRAV1-1, TRAJ30)
CAVRSLNRDDKIIF

SEQ ID NO: 58860 - protein, 14 aa, Homo sapiens
  CDR3 for beta chain variable domain of TCR clone 29430 (TRBV12-5, TRBJ2-5)
CASGSRTHQEAQYF

SEQ ID NO: 58861 - protein, 12 aa, Homo sapiens
  CDR3 for alpha chain variable domain of TCR clone 29431 (TRAV21, TRAJ11)
CAVRGGNSTLTF

SEQ ID NO: 58862 - protein, 15 aa, Homo sapiens
  CDR3 for beta chain variable domain of TCR clone 29431 (TRBV6-1, TRBJ2-7)
CASSEPIAATTGQYF

SEQ ID NO: 58863 - protein, 14 aa, Homo sapiens
  CDR3 for alpha chain variable domain of TCR clone 29432 (TRAV38-1, TRAJ40)
YALRPTSGTYKYIF

SEQ ID NO: 58864 - protein, 14 aa, Homo sapiens
  CDR3 for beta chain variable domain of TCR clone 29432 (TRBV25-1, TRBJ1-1)
CASTHLGGNTEAFF

SEQ ID NO: 58865 - protein, 14 aa, Homo sapiens
  CDR3 for alpha chain variable domain of TCR clone 29433 (TRAV12-3, TRAJ9)
CAMSPNTGGFKTIF

SEQ ID NO: 58866 - protein, 12 aa, Homo sapiens
  CDR3 for beta chain variable domain of TCR clone 29433 (TRBV19, TRBJ1-5)
CASSIAKQPQHF

SEQ ID NO: 58867 - protein, 20 aa, Homo sapiens
  CDR3 for alpha chain variable domain of TCR clone 29434 (TRAV12-3, TRAJ41)
SLFIRDSQPSDLATPEALNF

SEQ ID NO: 58868 - protein, 15 aa, Homo sapiens
  CDR3 for beta chain variable domain of TCR clone 29434 (TRBV5-1, TRBJ2-7)
CASSLDLTSSYEQYF

SEQ ID NO: 58869 - protein, 14 aa, Homo sapiens
  CDR3 for alpha chain variable domain of TCR clone 29435 (TRAV12-1, TRAJ27)
CGEHIRTNAGKSTF

SEQ ID NO: 58870 - protein, 15 aa, Homo sapiens
  CDR3 for beta chain variable domain of TCR clone 29435 (TRBV19, TRBJ1-1)
CASTSGQVQNTEAFF

SEQ ID NO: 58871 - protein, 18 aa, Homo sapiens
  CDR3 for alpha chain variable domain of TCR clone 29436 (TRAV12-2, )
CAVEDIQNPDPAVYQLRD

SEQ ID NO: 58872 - protein, 18 aa, Homo sapiens
  CDR3 for beta chain variable domain of TCR clone 29436 (TRBV11-3, TRBJ2-3)
CASSLGGASRGAPNTQYF

SEQ ID NO: 58873 - protein, 16 aa, Homo sapiens
  CDR3 for alpha chain variable domain of TCR clone 29437 (TRAV12-2, TRAJ28)
CAVITDSGAGSYQLTF

SEQ ID NO: 58874 - protein, 14 aa, Homo sapiens
  CDR3 for beta chain variable domain of TCR clone 29437 (TRBV12-5, TRBJ2-5)
CASGSRTHQETQYF

SEQ ID NO: 58875 - protein, 14 aa, Homo sapiens
  CDR3 for alpha chain variable domain of TCR clone 29438 (TRAV1-2, TRAJ16)
CAVNRFSDGQKLLF

SEQ ID NO: 58876 - protein, 13 aa, Homo sapiens
  CDR3 for beta chain variable domain of TCR clone 29438 (TRBV10-3, TRBJ2-7)
CASKLAVNYGQYF

SEQ ID NO: 58877 - protein, 11 aa, Homo sapiens
  CDR3 for alpha chain variable domain of TCR clone 29439 (TRAV12-3, TRAJ43)
CAMSVSNDMRF

SEQ ID NO: 58878 - protein, 12 aa, Homo sapiens
  CDR3 for beta chain variable domain of TCR clone 29439 (TRBV13, TRBJ2-2)
CASSWAPGELFF

SEQ ID NO: 58879 - protein, 20 aa, Homo sapiens
  CDR3 for alpha chain variable domain of TCR clone 29440 (TRAV26-1, TRAJ42)
CCVLLNRQTYYGGSQGNLIF

SEQ ID NO: 58880 - protein, 16 aa, Homo sapiens
  CDR3 for beta chain variable domain of TCR clone 29440 (TRBV7-3, TRBJ2-2)
CASSLKRGTLSGELFF

SEQ ID NO: 58881 - protein, 11 aa, Homo sapiens
  CDR3 for alpha chain variable domain of TCR clone 29441 (TRAV2, TRAJ33)
CAVESNYQLIW

SEQ ID NO: 58882 - protein, 13 aa, Homo sapiens
  CDR3 for beta chain variable domain of TCR clone 29441 (TRBV10-3, TRBJ2-7)
CASKLAVNYEQYF

SEQ ID NO: 58883 - protein, 14 aa, Homo sapiens
  CDR3 for alpha chain variable domain of TCR clone 29442 (TRAV35, TRAJ22)
YAGLRPGSARQLTF

SEQ ID NO: 58884 - protein, 15 aa, Homo sapiens
  CDR3 for beta chain variable domain of TCR clone 29442 (TRBV12-4, TRBJ2-5)
CASSTPTGLQETQYF

SEQ ID NO: 58885 - protein, 14 aa, Homo sapiens
  CDR3 for alpha chain variable domain of TCR clone 29443 (TRAV1-2, TRAJ8)
CAVREDTGFQKLVF

SEQ ID NO: 58886 - protein, 15 aa, Homo sapiens
  CDR3 for beta chain variable domain of TCR clone 29443 (TRBV20-1, TRBJ2-1)
CSARGSGTYYNEQFF

SEQ ID NO: 58887 - protein, 17 aa, Homo sapiens
  CDR3 for alpha chain variable domain of TCR clone 29444 (TRAV3, TRAJ6)
CAVRDGPRAGGSYIPTF

SEQ ID NO: 58888 - protein, 19 aa, Homo sapiens
  CDR3 for beta chain variable domain of TCR clone 29444 (TRBV6-3, TRBJ1-2)
CASSYSKGRTGPPNYGYTF

SEQ ID NO: 58889 - protein, 14 aa, Homo sapiens
  CDR3 for alpha chain variable domain of TCR clone 29445 (TRAV26-1, TRAJ39)
CIVRGSRAGNMLTF

SEQ ID NO: 58890 - protein, 15 aa, Homo sapiens
  CDR3 for beta chain variable domain of TCR clone 29445 (TRBV7-9, TRBJ1-5)
CASSQGHQPNQPLHF

SEQ ID NO: 58891 - protein, 18 aa, Homo sapiens
  CDR3 for alpha chain variable domain of TCR clone 29446 (TRAV21, TRAJ52)
WAVRPSPAGGTSYGKLTF

SEQ ID NO: 58892 - protein, 17 aa, Homo sapiens
  CDR3 for beta chain variable domain of TCR clone 29446 (TRBV13, TRBJ2-3)
CASSLSRVAGGRNTQYF

SEQ ID NO: 58893 - protein, 14 aa, Homo sapiens
  CDR3 for alpha chain variable domain of TCR clone 29447 (TRAV21, TRAJ35)
CAVMPIGFGNVLHC

SEQ ID NO: 58894 - protein, 12 aa, Homo sapiens
  CDR3 for beta chain variable domain of TCR clone 29447 (TRBV7-9, TRBJ2-7)
CASSIKREELYF

SEQ ID NO: 58895 - protein, 12 aa, Homo sapiens
  CDR3 for alpha chain variable domain of TCR clone 29448 (TRAV30, TRAJ43)
CGTEERGNDMRF

SEQ ID NO: 58896 - protein, 13 aa, Homo sapiens
  CDR3 for beta chain variable domain of TCR clone 29448 (TRBV27, TRBJ2-7)
CASSFSQSYEQYF

SEQ ID NO: 58897 - protein, 16 aa, Homo sapiens
  CDR3 for alpha chain variable domain of TCR clone 29449 (TRAV21, TRAJ52)
CAVTNAGGTSYGKLTF

SEQ ID NO: 58898 - protein, 13 aa, Homo sapiens
  CDR3 for beta chain variable domain of TCR clone 29449 (TRBV20-1, TRBJ2-3)
YSARLAGTDTQYF

SEQ ID NO: 58899 - protein, 16 aa, Homo sapiens
  CDR3 for alpha chain variable domain of TCR clone 29450 (TRAV3, TRAJ21)
CAVRDIERGNFNRFYF

SEQ ID NO: 58900 - protein, 13 aa, Homo sapiens
  CDR3 for beta chain variable domain of TCR clone 29450 (TRBV27, TRBJ2-7)
CASSLTTGYEQYF

SEQ ID NO: 58901 - protein, 13 aa, Homo sapiens
  CDR3 for alpha chain variable domain of TCR clone 29451 (TRAV21, TRAJ20)
CAVGLRVDYKLSF

SEQ ID NO: 58902 - protein, 15 aa, Homo sapiens
  CDR3 for beta chain variable domain of TCR clone 29451 (TRBV4-1, TRBJ1-4)
CASSDTGGTNEKLFF

SEQ ID NO: 58903 - protein, 14 aa, Homo sapiens
  CDR3 for alpha chain variable domain of TCR clone 29452 (TRAV39, TRAJ42)
CAVDIARSRGNLIF

SEQ ID NO: 58904 - protein, 15 aa, Homo sapiens
  CDR3 for beta chain variable domain of TCR clone 29452 (TRBV27, TRBJ2-7)
CASSLFGTGLDEQYF

SEQ ID NO: 58905 - protein, 12 aa, Homo sapiens
  CDR3 for alpha chain variable domain of TCR clone 29453 (TRAV1-2, TRAJ33)
CAALDSNYQLIW

SEQ ID NO: 58906 - protein, 13 aa, Homo sapiens
  CDR3 for beta chain variable domain of TCR clone 29453 (TRBV12-4, TRBJ1-1)
CASSPGTGFEAFF

SEQ ID NO: 58907 - protein, 14 aa, Homo sapiens
  CDR3 for alpha chain variable domain of TCR clone 29454 (TRAV12-3, TRAJ18)
CNERRGSTLGRLYF

SEQ ID NO: 58908 - protein, 13 aa, Homo sapiens
  CDR3 for beta chain variable domain of TCR clone 29454 (TRBV15, TRBJ1-6)
CATSGGLNSPLHF

SEQ ID NO: 58909 - protein, 15 aa, Homo sapiens
  CDR3 for alpha chain variable domain of TCR clone 29455 (TRAV12-1, TRAJ44)
RVADLPTGTASKLTF

SEQ ID NO: 58910 - protein, 13 aa, Homo sapiens
  CDR3 for beta chain variable domain of TCR clone 29455 (TRBV6-5, TRBJ2-5)
CASSPQGGETQYF

SEQ ID NO: 58911 - protein, 18 aa, Homo sapiens
  CDR3 for alpha chain variable domain of TCR clone 29456 (TRAV26-2, TRAJ54)
CILRDVEVGIQGAQKLVF

SEQ ID NO: 58912 - protein, 15 aa, Homo sapiens
  CDR3 for beta chain variable domain of TCR clone 29456 (TRBV19, TRBJ1-1)
CASSRGGALNTEAFF

SEQ ID NO: 58913 - protein, 13 aa, Homo sapiens
  CDR3 for alpha chain variable domain of TCR clone 29457 (TRAV17, TRAJ15)
CATDARAGTALIS

SEQ ID NO: 58914 - protein, 15 aa, Homo sapiens
  CDR3 for beta chain variable domain of TCR clone 29457 (TRBV20-1, TRBJ2-7)
CSARDRVSGMDEQYF

SEQ ID NO: 58915 - protein, 12 aa, Homo sapiens
  CDR3 for alpha chain variable domain of TCR clone 29458 (TRAV17, TRAJ39)
CATGAAGNMLTF

SEQ ID NO: 58916 - protein, 14 aa, Homo sapiens
  CDR3 for beta chain variable domain of TCR clone 29458 (TRBV7-9, TRBJ1-2)
CASSRQGANYGYIF

SEQ ID NO: 58917 - protein, 12 aa, Homo sapiens
  CDR3 for alpha chain variable domain of TCR clone 29459 (TRAV35, TRAJ39)
LAPNNAGNMLTF

SEQ ID NO: 58918 - protein, 16 aa, Homo sapiens
  CDR3 for beta chain variable domain of TCR clone 29459 (TRBV2, TRBJ2-3)
CASSTSVEGLTDTQYF

SEQ ID NO: 58919 - protein, 15 aa, Homo sapiens
  CDR3 for alpha chain variable domain of TCR clone 29460 (TRAV3, TRAJ3)
CAVRDRDSSASKIIF

SEQ ID NO: 58920 - protein, 14 aa, Homo sapiens
  CDR3 for beta chain variable domain of TCR clone 29460 (TRBV7-8, TRBJ2-3)
CASSLEAGTDTQYF

SEQ ID NO: 58921 - protein, 14 aa, Homo sapiens
  CDR3 for alpha chain variable domain of TCR clone 29461 (TRAV1-2, TRAJ8)
CAVREDTRFQKLVF

SEQ ID NO: 58922 - protein, 15 aa, Homo sapiens
  CDR3 for beta chain variable domain of TCR clone 29461 (TRBV6-3, TRBJ2-7)
CASSSPGTVFYEQYF

SEQ ID NO: 58923 - protein, 13 aa, Homo sapiens
  CDR3 for alpha chain variable domain of TCR clone 29462 (TRAV8-3, TRAJ36)
FAVGATGANNLFF

SEQ ID NO: 58924 - protein, 15 aa, Homo sapiens
  CDR3 for beta chain variable domain of TCR clone 29462 (TRBV7-2, TRBJ1-2)
CASSPRAGWNYGYTF

SEQ ID NO: 58925 - protein, 16 aa, Homo sapiens
  CDR3 for alpha chain variable domain of TCR clone 29463 (TRAV8-2, TRAJ7)
CVVSEGPHYGNNRLAF

SEQ ID NO: 58926 - protein, 15 aa, Homo sapiens
  CDR3 for beta chain variable domain of TCR clone 29463 (TRBV27, TRBJ2-3)
CASSLGLAATDTQYF

SEQ ID NO: 58927 - protein, 15 aa, Homo sapiens
  CDR3 for alpha chain variable domain of TCR clone 29464 (TRAV12-1, TRAJ45)
CVVLSGRGGADGLTF

SEQ ID NO: 58928 - protein, 15 aa, Homo sapiens
  CDR3 for beta chain variable domain of TCR clone 29464 (TRBV7-2, TRBJ2-1)
CASTHGTGIYNEQFF

SEQ ID NO: 58929 - protein, 15 aa, Homo sapiens
  CDR3 for alpha chain variable domain of TCR clone 29465 (TRAV3, TRAJ5)
CAVRDLDTGRRALTF

SEQ ID NO: 58930 - protein, 12 aa, Homo sapiens
  CDR3 for beta chain variable domain of TCR clone 29465 (TRBV7-9, TRBJ1-4)
CASSTDREKLFF

SEQ ID NO: 58931 - protein, 16 aa, Homo sapiens
  CDR3 for alpha chain variable domain of TCR clone 29466 (TRAV30, TRAJ24)
CGTEIVNADSWGKFQF

SEQ ID NO: 58932 - protein, 16 aa, Homo sapiens
  CDR3 for beta chain variable domain of TCR clone 29466 (TRBV12-5, TRBJ2-5)
CASGPRTSGNQETQYF

SEQ ID NO: 58933 - protein, 14 aa, Homo sapiens
  CDR3 for alpha chain variable domain of TCR clone 29467 (TRAV26-1, TRAJ34)
CIVRVAYNTDRLIF

SEQ ID NO: 58934 - protein, 17 aa, Homo sapiens
  CDR3 for beta chain variable domain of TCR clone 29467 (TRBV4-2, TRBJ1-1)
CASTQFGGGSGNTEAFF

SEQ ID NO: 58935 - protein, 13 aa, Homo sapiens
  CDR3 for alpha chain variable domain of TCR clone 29468 (TRAV2, TRAJ29)
CAEQSSGNTPLVF

SEQ ID NO: 58936 - protein, 13 aa, Homo sapiens
  CDR3 for beta chain variable domain of TCR clone 29468 (TRBV28, TRBJ1-2)
CASSPGSRNGYTF

SEQ ID NO: 58937 - protein, 14 aa, Homo sapiens
  CDR3 for alpha chain variable domain of TCR clone 29469 (TRAV9-2, TRAJ39)
CALYIYNAGNMLTF

SEQ ID NO: 58938 - protein, 17 aa, Homo sapiens
  CDR3 for beta chain variable domain of TCR clone 29469 (TRBV3-1, TRBJ2-5)
CASSNWGGTSGQETQYF

SEQ ID NO: 58939 - protein, 11 aa, Homo sapiens
  CDR3 for alpha chain variable domain of TCR clone 29470 (TRAV17, TRAJ9)
CATTGGFKTIF

SEQ ID NO: 58940 - protein, 14 aa, Homo sapiens
  CDR3 for beta chain variable domain of TCR clone 29470 (TRBV7-9, TRBJ2-2)
CASNGLADTGELFF

SEQ ID NO: 58941 - protein, 12 aa, Homo sapiens
  CDR3 for alpha chain variable domain of TCR clone 29471 (TRAV21, TRAJ49)
CAVNDGGNQSYF

SEQ ID NO: 58942 - protein, 14 aa, Homo sapiens
  CDR3 for beta chain variable domain of TCR clone 29471 (TRBV18, TRBJ2-7)
CASSPRGGSYEQYF

SEQ ID NO: 58943 - protein, 13 aa, Homo sapiens
  CDR3 for alpha chain variable domain of TCR clone 29472 (TRAV21, TRAJ27)
CAARPGNAGKSAF

SEQ ID NO: 58944 - protein, 13 aa, Homo sapiens
  CDR3 for beta chain variable domain of TCR clone 29472 (TRBV13, TRBJ2-1)
CASILGGRGEQFF

SEQ ID NO: 58945 - protein, 13 aa, Homo sapiens
  CDR3 for alpha chain variable domain of TCR clone 29473 (TRAV8-3, TRAJ48)
CAVVPFGHEKLTF

SEQ ID NO: 58946 - protein, 15 aa, Homo sapiens
  CDR3 for beta chain variable domain of TCR clone 29473 (TRBV11-2, TRBJ2-1)
CASSSPSTRYNEQFF

SEQ ID NO: 58947 - protein, 13 aa, Homo sapiens
  CDR3 for alpha chain variable domain of TCR clone 29474 (TRAV27, TRAJ42)
CAGARGSQGNLIF

SEQ ID NO: 58948 - protein, 15 aa, Homo sapiens
  CDR3 for beta chain variable domain of TCR clone 29474 (TRBV10-3, TRBJ2-2)
CAIRTDGEDTGELFF

SEQ ID NO: 58949 - protein, 12 aa, Homo sapiens
  CDR3 for alpha chain variable domain of TCR clone 29475 (TRAV17, TRAJ43)
CATDAFPADMRF

SEQ ID NO: 58950 - protein, 12 aa, Homo sapiens
  CDR3 for beta chain variable domain of TCR clone 29475 (TRBV12-4, TRBJ1-1)
CASSLVDTEAFF

SEQ ID NO: 58951 - protein, 10 aa, Homo sapiens
  CDR3 for alpha chain variable domain of TCR clone 29476 (TRAV12-1, TRAJ43)
CVVHNNDMRF

SEQ ID NO: 58952 - protein, 13 aa, Homo sapiens
  CDR3 for beta chain variable domain of TCR clone 29476 (TRBV12-4, TRBJ1-2)
CTSSSGLTVISTF

SEQ ID NO: 58953 - protein, 13 aa, Homo sapiens
  CDR3 for alpha chain variable domain of TCR clone 29477 (TRAV21, TRAJ57)
CAVTQRGSEKLVF

SEQ ID NO: 58954 - protein, 16 aa, Homo sapiens
  CDR3 for beta chain variable domain of TCR clone 29477 (TRBV29-1, TRBJ2-7)
CSVEDAEDGTAYEQYF

SEQ ID NO: 58955 - protein, 14 aa, Homo sapiens
  CDR3 for alpha chain variable domain of TCR clone 29478 (TRAV4, TRAJ9)
CLVGSGAGGFKTIF

SEQ ID NO: 58956 - protein, 15 aa, Homo sapiens
  CDR3 for beta chain variable domain of TCR clone 29478 (TRBV7-2, TRBJ2-1)
CASSLASGRVNEQFF

SEQ ID NO: 58957 - protein, 11 aa, Homo sapiens
  CDR3 for alpha chain variable domain of TCR clone 29479 (TRAV1-2, TRAJ31)
CAVNNNARLMF

SEQ ID NO: 58958 - protein, 15 aa, Homo sapiens
  CDR3 for beta chain variable domain of TCR clone 29479 (TRBV28, TRBJ2-1)
CASSIIAGGKSEQFF

SEQ ID NO: 58959 - protein, 12 aa, Homo sapiens
  CDR3 for alpha chain variable domain of TCR clone 29480 (TRAV13-2, TRAJ8)
CAPWLGFQKLVF

SEQ ID NO: 58960 - protein, 15 aa, Homo sapiens
  CDR3 for beta chain variable domain of TCR clone 29480 (TRBV4-1, TRBJ2-3)
CASSRGQGIPDTQYF

SEQ ID NO: 58961 - protein, 15 aa, Homo sapiens
  CDR3 for alpha chain variable domain of TCR clone 29481 (TRAV26-1, TRAJ22)
CIVRVSFWFCKATDL

SEQ ID NO: 58962 - protein, 14 aa, Homo sapiens
  CDR3 for beta chain variable domain of TCR clone 29481 (TRBV19, TRBJ2-1)
CASPTFVLSGEQFF

SEQ ID NO: 58963 - protein, 14 aa, Homo sapiens
  CDR3 for alpha chain variable domain of TCR clone 29482 (TRAV4, TRAJ26)
CLVGPHNYGQNFGF

SEQ ID NO: 58964 - protein, 17 aa, Homo sapiens
  CDR3 for beta chain variable domain of TCR clone 29482 (TRBV24-1, TRBJ2-1)
CATSDVSTSGTYNEQFF

SEQ ID NO: 58965 - protein, 11 aa, Homo sapiens
  CDR3 for alpha chain variable domain of TCR clone 29483 (TRAV12-3, TRAJ43)
CAMSVSNDMRF

SEQ ID NO: 58966 - protein, 13 aa, Homo sapiens
  CDR3 for beta chain variable domain of TCR clone 29483 (TRBV20-1, TRBJ1-1)
CSAPLGVGTEAFF

SEQ ID NO: 58967 - protein, 12 aa, Homo sapiens
  CDR3 for alpha chain variable domain of TCR clone 29484 (TRAV12-3, TRAJ17)
CAMTLTGNKLTF

SEQ ID NO: 58968 - protein, 13 aa, Homo sapiens
  CDR3 for beta chain variable domain of TCR clone 29484 (TRBV19, TRBJ1-1)
CASTRRGDTEAFF

SEQ ID NO: 58969 - protein, 16 aa, Homo sapiens
  CDR3 for alpha chain variable domain of TCR clone 29485 (TRAV3, TRAJ34)
CAVRARGTPTSPSLGL

SEQ ID NO: 58970 - protein, 15 aa, Homo sapiens
  CDR3 for beta chain variable domain of TCR clone 29485 (TRBV6-3, TRBJ2-7)
CASSSPGTVFYEQYF

SEQ ID NO: 58971 - protein, 17 aa, Homo sapiens
  CDR3 for alpha chain variable domain of TCR clone 29486 (TRAV13-1, TRAJ28)
CAASPPYSGAGSYQLTF

SEQ ID NO: 58972 - protein, 12 aa, Homo sapiens
  CDR3 for beta chain variable domain of TCR clone 29486 (TRBV11-2, TRBJ2-2)
CAGSLPTGELFF

SEQ ID NO: 58973 - protein, 14 aa, Homo sapiens
  CDR3 for alpha chain variable domain of TCR clone 29487 (TRAV1-2, TRAJ16)
CAVNRFSDGQKLLF

SEQ ID NO: 58974 - protein, 15 aa, Homo sapiens
  CDR3 for beta chain variable domain of TCR clone 29487 (TRBV7-9, TRBJ1-6)
CACSSPGRGNSPLHF

SEQ ID NO: 58975 - protein, 13 aa, Homo sapiens
  CDR3 for alpha chain variable domain of TCR clone 29488 (TRAV12-1, TRAJ33)
CGDAPDGNYQLIW

SEQ ID NO: 58976 - protein, 15 aa, Homo sapiens
  CDR3 for beta chain variable domain of TCR clone 29488 (TRBV27, TRBJ2-1)
CASSNGGGSSNEQFF

SEQ ID NO: 58977 - protein, 15 aa, Homo sapiens
  CDR3 for alpha chain variable domain of TCR clone 29489 (TRAV29/DV5, TRAJ48)
CAMTLSNFGNEKLTF

SEQ ID NO: 58978 - protein, 16 aa, Homo sapiens
  CDR3 for beta chain variable domain of TCR clone 29489 (TRBV12-4, TRBJ2-1)
CASSAVGQGNGDEQFF

SEQ ID NO: 58979 - protein, 13 aa, Homo sapiens
  CDR3 for alpha chain variable domain of TCR clone 29490 (TRAV1-2, TRAJ30)
CAVRDPGDDKIIF

SEQ ID NO: 58980 - protein, 15 aa, Homo sapiens
  CDR3 for beta chain variable domain of TCR clone 29490 (TRBV18, TRBJ1-1)
CASSPTSGAGTEAFF

SEQ ID NO: 58981 - protein, 11 aa, Homo sapiens
  CDR3 for alpha chain variable domain of TCR clone 29491 (TRAV2, TRAJ13)
CASGGYQKVSF

SEQ ID NO: 58982 - protein, 16 aa, Homo sapiens
  CDR3 for beta chain variable domain of TCR clone 29491 (TRBV6-1, TRBJ2-5)
CASSETLDRGAETQYF

SEQ ID NO: 58983 - protein, 13 aa, Homo sapiens
  CDR3 for alpha chain variable domain of TCR clone 29492 (TRAV13-1, TRAJ5)
CAARVTGRRAFTF

SEQ ID NO: 58984 - protein, 15 aa, Homo sapiens
  CDR3 for beta chain variable domain of TCR clone 29492 (TRBV7-9, TRBJ2-7)
CASSPGGGLTYEQYF

SEQ ID NO: 58985 - protein, 14 aa, Homo sapiens
  CDR3 for alpha chain variable domain of TCR clone 29493 (TRAV16, TRAJ39)
CVLSKNNAGNMLTF

SEQ ID NO: 58986 - protein, 17 aa, Homo sapiens
  CDR3 for beta chain variable domain of TCR clone 29493 (TRBV23-1, TRBJ1-2)
CASSNTGGGLLWLHLRF

SEQ ID NO: 58987 - protein, 23 aa, Homo sapiens
  CDR3 for alpha chain variable domain of TCR clone 29494 (TRAV26-1, TRAJ38)
CIANNAGNNHIQNPDPAVYQLRD

SEQ ID NO: 58988 - protein, 13 aa, Homo sapiens
  CDR3 for beta chain variable domain of TCR clone 29494 (TRBV20-1, TRBJ1-1)
CSARGGGNTEAFF

SEQ ID NO: 58989 - protein, 14 aa, Homo sapiens
  CDR3 for alpha chain variable domain of TCR clone 29495 (TRAV16, TRAJ33)
CALSAMDSNYQLIW

SEQ ID NO: 58990 - protein, 17 aa, Homo sapiens
  CDR3 for beta chain variable domain of TCR clone 29495 (TRBV25-1, TRBJ2-7)
CASSDARVVFSSYEQYL

SEQ ID NO: 58991 - protein, 14 aa, Homo sapiens
  CDR3 for alpha chain variable domain of TCR clone 29496 (TRAV13-1, TRAJ44)
CAAKATGTASKLTL

SEQ ID NO: 58992 - protein, 14 aa, Homo sapiens
  CDR3 for beta chain variable domain of TCR clone 29496 (TRBV19, TRBJ2-2)
CASSTLHRSGELFF

SEQ ID NO: 58993 - protein, 15 aa, Homo sapiens
  CDR3 for alpha chain variable domain of TCR clone 29497 (TRAV26-1, TRAJ29)
CIVRVEGSGNTPLVF

SEQ ID NO: 58994 - protein, 14 aa, Homo sapiens
  CDR3 for beta chain variable domain of TCR clone 29497 (TRBV18, TRBJ2-5)
GASSPGVSQETQYF

SEQ ID NO: 58995 - protein, 18 aa, Homo sapiens
  CDR3 for alpha chain variable domain of TCR clone 29498 (TRAV1-2, TRAJ10)
CAVRALTPVTGGGNKLTF

SEQ ID NO: 58996 - protein, 13 aa, Homo sapiens
  CDR3 for beta chain variable domain of TCR clone 29498 (TRBV7-9, TRBJ1-2)
CASSLKQNYGYTF

SEQ ID NO: 58997 - protein, 15 aa, Homo sapiens
  CDR3 for alpha chain variable domain of TCR clone 29499 (TRAV12-2, TRAJ53)
CAVNGGGGSNYKLTF

SEQ ID NO: 58998 - protein, 16 aa, Homo sapiens
  CDR3 for beta chain variable domain of TCR clone 29499 (TRBV5-1, TRBJ1-1)
CASSSGGNSLNTEAFF

SEQ ID NO: 58999 - protein, 13 aa, Homo sapiens
  CDR3 for alpha chain variable domain of TCR clone 29500 (TRAV12-2, TRAJ42)
CAVKRGSQGNLIF

SEQ ID NO: 59000 - protein, 13 aa, Homo sapiens
  CDR3 for beta chain variable domain of TCR clone 29500 (TRBV7-3, TRBJ1-1)
CASSQDWGAEAFF

SEQ ID NO: 59001 - protein, 14 aa, Homo sapiens
  CDR3 for alpha chain variable domain of TCR clone 29501 (TRAV29/DV5, TRAJ36)
CAARRKTGSNNLFF

SEQ ID NO: 59002 - protein, 14 aa, Homo sapiens
  CDR3 for beta chain variable domain of TCR clone 29501 (TRBV12-5, TRBJ2-5)
CASGSRTHQETQYF

SEQ ID NO: 59003 - protein, 14 aa, Homo sapiens
  CDR3 for alpha chain variable domain of TCR clone 29502 (TRAV12-2, TRAJ5)
CAVNRSTGRRALTL

SEQ ID NO: 59004 - protein, 12 aa, Homo sapiens
  CDR3 for beta chain variable domain of TCR clone 29502 (TRBV19, TRBJ1-5)
CASSIAQQPQHF

SEQ ID NO: 59005 - protein, 13 aa, Homo sapiens
  CDR3 for alpha chain variable domain of TCR clone 29503 (TRAV17, TRAJ40)
CAGALGGTYKYIF

SEQ ID NO: 59006 - protein, 16 aa, Homo sapiens
  CDR3 for beta chain variable domain of TCR clone 29503 (TRBV11-2, TRBJ1-2)
CASSLDTGGADYGYAF

SEQ ID NO: 59007 - protein, 13 aa, Homo sapiens
  CDR3 for alpha chain variable domain of TCR clone 29504 (TRAV12-3, TRAJ33)
CAMSANSNYQLIW

SEQ ID NO: 59008 - protein, 13 aa, Homo sapiens
  CDR3 for beta chain variable domain of TCR clone 29504 (TRBV7-2, TRBJ2-2)
CASSLAVTGELFF

SEQ ID NO: 59009 - protein, 14 aa, Homo sapiens
  CDR3 for alpha chain variable domain of TCR clone 29505 (TRAV26-1, TRAJ38)
CIADNADNNRKLIW

SEQ ID NO: 59010 - protein, 16 aa, Homo sapiens
  CDR3 for beta chain variable domain of TCR clone 29505 (TRBV19, TRBJ2-1)
CASSKAGPSSYNEQFF

SEQ ID NO: 59011 - protein, 12 aa, Homo sapiens
  CDR3 for alpha chain variable domain of TCR clone 29506 (TRAV2, TRAJ9)
CAVGAGGFKTIF

SEQ ID NO: 59012 - protein, 16 aa, Homo sapiens
  CDR3 for beta chain variable domain of TCR clone 29506 (TRBV13, TRBJ2-2)
CDSSPRTGEHTGELFF

SEQ ID NO: 59013 - protein, 14 aa, Homo sapiens
  CDR3 for alpha chain variable domain of TCR clone 29507 (TRAV1-2, TRAJ16)
CAVNRFSDGQKLLF

SEQ ID NO: 59014 - protein, 16 aa, Homo sapiens
  CDR3 for beta chain variable domain of TCR clone 29507 (TRBV7-9, TRBJ1-4)
CAITEGEANEKLFLAV

SEQ ID NO: 59015 - protein, 13 aa, Homo sapiens
  CDR3 for alpha chain variable domain of TCR clone 29508 (TRAV17, TRAJ9)
CATDYTGGFKTNF

SEQ ID NO: 59016 - protein, 14 aa, Homo sapiens
  CDR3 for beta chain variable domain of TCR clone 29508 (TRBV19, TRBJ2-5)
CASSMTGQQETQYF

SEQ ID NO: 59017 - protein, 16 aa, Homo sapiens
  CDR3 for alpha chain variable domain of TCR clone 29509 (TRAV2, TRAJ26)
TTVLGPPGDYGQNFVF

SEQ ID NO: 59018 - protein, 13 aa, Homo sapiens
  CDR3 for beta chain variable domain of TCR clone 29509 (TRBV7-9, TRBJ1-2)
CASSLKQNYGYTF

SEQ ID NO: 59019 - protein, 13 aa, Homo sapiens
  CDR3 for alpha chain variable domain of TCR clone 29510 (TRAV2, TRAJ40)
CAVVTSGTYKYIF

SEQ ID NO: 59020 - protein, 17 aa, Homo sapiens
  CDR3 for beta chain variable domain of TCR clone 29510 (TRBV15, TRBJ1-4)
CATSRYGTGDPNEKLFF

SEQ ID NO: 59021 - protein, 15 aa, Homo sapiens
  CDR3 for alpha chain variable domain of TCR clone 29511 (TRAV8-6, TRAJ26)
CAVSVQSPGGQNFVF

SEQ ID NO: 59022 - protein, 13 aa, Homo sapiens
  CDR3 for beta chain variable domain of TCR clone 29511 (TRBV27, TRBJ2-7)
CASSLRHRYEQYF

SEQ ID NO: 59023 - protein, 16 aa, Homo sapiens
  CDR3 for alpha chain variable domain of TCR clone 29512 (TRAV13-1, TRAJ45)
CAASWESGGGADGLTF

SEQ ID NO: 59024 - protein, 14 aa, Homo sapiens
  CDR3 for beta chain variable domain of TCR clone 29512 (TRBV12-4, TRBJ1-3)
CASGQTVSGNTMYF

SEQ ID NO: 59025 - protein, 14 aa, Homo sapiens
  CDR3 for alpha chain variable domain of TCR clone 29513 (TRAV38-1, TRAJ40)
CALRPTSGTYKYIF

SEQ ID NO: 59026 - protein, 15 aa, Homo sapiens
  CDR3 for beta chain variable domain of TCR clone 29513 (TRBV11-3, TRBJ2-3)
CASLKDGREGDTQYF

SEQ ID NO: 59027 - protein, 12 aa, Homo sapiens
  CDR3 for alpha chain variable domain of TCR clone 29514 (TRAV17, TRAJ12)
CAGGDSSYKLIF

SEQ ID NO: 59028 - protein, 13 aa, Homo sapiens
  CDR3 for beta chain variable domain of TCR clone 29514 (TRBV7-3, TRBJ1-1)
CASSQDWGAEAFF

SEQ ID NO: 59029 - protein, 12 aa, Homo sapiens
  CDR3 for alpha chain variable domain of TCR clone 29515 (TRAV16, TRAJ10)
CSRTGGGNKLTF

SEQ ID NO: 59030 - protein, 15 aa, Homo sapiens
  CDR3 for beta chain variable domain of TCR clone 29515 (TRBV6-3, TRBJ2-7)
CAGSSPGTVFYEQYF

SEQ ID NO: 59031 - protein, 14 aa, Homo sapiens
  CDR3 for alpha chain variable domain of TCR clone 29516 (TRAV26-1, TRAJ45)
CIVRVVGGADGLTF

SEQ ID NO: 59032 - protein, 16 aa, Homo sapiens
  CDR3 for beta chain variable domain of TCR clone 29516 (TRBV7-9, TRBJ1-1)
CASILTQVRSNTEAFF

SEQ ID NO: 59033 - protein, 17 aa, Homo sapiens
  CDR3 for alpha chain variable domain of TCR clone 29517 (TRAV3, TRAJ6)
CAVRDGPRAGGSYIPTF

SEQ ID NO: 59034 - protein, 13 aa, Homo sapiens
  CDR3 for beta chain variable domain of TCR clone 29517 (TRBV20-1, TRBJ2-2)
CSASAAGTGELFF

SEQ ID NO: 59035 - protein, 16 aa, Homo sapiens
  CDR3 for alpha chain variable domain of TCR clone 29518 (TRAV12-3, TRAJ53)
CAMSPGSGGCNYKLTF

SEQ ID NO: 59036 - protein, 11 aa, Homo sapiens
  CDR3 for beta chain variable domain of TCR clone 29518 (TRBV29-1, TRBJ2-5)
CSEDRTGTQYF

SEQ ID NO: 59037 - protein, 14 aa, Homo sapiens
  CDR3 for alpha chain variable domain of TCR clone 29519 (TRAV30, TRAJ26)
CGTEMVSYGQNFVF

SEQ ID NO: 59038 - protein, 13 aa, Homo sapiens
  CDR3 for beta chain variable domain of TCR clone 29519 (TRBV19, TRBJ1-3)
CASRLSLGNTIYF

SEQ ID NO: 59039 - protein, 14 aa, Homo sapiens
  CDR3 for alpha chain variable domain of TCR clone 29520 (TRAV2, TRAJ3)
CAVDRYSSASKVIF

SEQ ID NO: 59040 - protein, 16 aa, Homo sapiens
  CDR3 for beta chain variable domain of TCR clone 29520 (TRBV20-1, TRBJ1-5)
CSAELPGQQTNQPQHF

SEQ ID NO: 59041 - protein, 15 aa, Homo sapiens
  CDR3 for alpha chain variable domain of TCR clone 29521 (TRAV26-1, TRAJ38)
CIASSNACNNRKLIW

SEQ ID NO: 59042 - protein, 12 aa, Homo sapiens
  CDR3 for beta chain variable domain of TCR clone 29521 (TRBV5-8, TRBJ1-2)
CASSFGVYGYTF

SEQ ID NO: 59043 - protein, 12 aa, Homo sapiens
  CDR3 for alpha chain variable domain of TCR clone 29522 (TRAV12-3, TRAJ40)
CAMSSGTYKYII

SEQ ID NO: 59044 - protein, 15 aa, Homo sapiens
  CDR3 for beta chain variable domain of TCR clone 29522 (TRBV7-3, TRBJ2-2)
CASSETGQGTGELFF

SEQ ID NO: 59045 - protein, 15 aa, Homo sapiens
  CDR3 for alpha chain variable domain of TCR clone 29523 (TRAV8-3, TRAJ45)
CASSYSGGGADGLTF

SEQ ID NO: 59046 - protein, 13 aa, Homo sapiens
  CDR3 for beta chain variable domain of TCR clone 29523 (TRBV10-3, TRBJ2-7)
CASKLAENYEQYF

SEQ ID NO: 59047 - protein, 15 aa, Homo sapiens
  CDR3 for alpha chain variable domain of TCR clone 29524 (TRAV26-1, TRAJ44)
CIVRANTGTASKFTF

SEQ ID NO: 59048 - protein, 16 aa, Homo sapiens
  CDR3 for beta chain variable domain of TCR clone 29524 (TRBV7-7, TRBJ2-1)
CASSLASGTSYNEQFF

SEQ ID NO: 59049 - protein, 14 aa, Homo sapiens
  CDR3 for alpha chain variable domain of TCR clone 29525 (TRAV26-2, TRAJ38)
CILYSAGNNRKLIW

SEQ ID NO: 59050 - protein, 14 aa, Homo sapiens
  CDR3 for beta chain variable domain of TCR clone 29525 (TRBV19, TRBJ2-1)
CASPTFVLSGEQFF

SEQ ID NO: 59051 - protein, 12 aa, Homo sapiens
  CDR3 for alpha chain variable domain of TCR clone 29526 (TRAV8-3, TRAJ26)
CAGDNHGQNFVF

SEQ ID NO: 59052 - protein, 15 aa, Homo sapiens
  CDR3 for beta chain variable domain of TCR clone 29526 (TRBV9, TRBJ2-1)
CASSLAGSSYNEQFF

SEQ ID NO: 59053 - protein, 15 aa, Homo sapiens
  CDR3 for alpha chain variable domain of TCR clone 29527 (TRAV21, TRAJ24)
CAARSSTDSWGKLQF

SEQ ID NO: 59054 - protein, 13 aa, Homo sapiens
  CDR3 for beta chain variable domain of TCR clone 29527 (TRBV11-2, TRBJ2-5)
CAGSSTGEETQYF

SEQ ID NO: 59055 - protein, 13 aa, Homo sapiens
  CDR3 for alpha chain variable domain of TCR clone 29528 (TRAV29/DV5, TRAJ31)
CAASRNNNARLMF

SEQ ID NO: 59056 - protein, 15 aa, Homo sapiens
  CDR3 for beta chain variable domain of TCR clone 29528 (TRBV20-1, TRBJ2-7)
CSARDRVSGMDEQYF

SEQ ID NO: 59057 - protein, 11 aa, Homo sapiens
  CDR3 for alpha chain variable domain of TCR clone 29529 (TRAV12-2, TRAJ39)
CAVNNMLTFGG

SEQ ID NO: 59058 - protein, 15 aa, Homo sapiens
  CDR3 for beta chain variable domain of TCR clone 29529 (TRBV5-3, TRBJ2-2)
CQKLRDRYEHRGAVF

SEQ ID NO: 59059 - protein, 15 aa, Homo sapiens
  CDR3 for alpha chain variable domain of TCR clone 29530 (TRAV3, TRAJ3)
CAVRDRRSSASKIIF

SEQ ID NO: 59060 - protein, 13 aa, Homo sapiens
  CDR3 for beta chain variable domain of TCR clone 29530 (TRBV9, TRBJ2-5)
CASSPAGLGTKYF

SEQ ID NO: 59061 - protein, 14 aa, Homo sapiens
  CDR3 for alpha chain variable domain of TCR clone 29531 (TRAV8-4, TRAJ9)
CAVRINTGGFKTIF

SEQ ID NO: 59062 - protein, 15 aa, Homo sapiens
  CDR3 for beta chain variable domain of TCR clone 29531 (TRBV10-2, TRBJ2-6)
YASSEQGTGANVLTF

SEQ ID NO: 59063 - protein, 14 aa, Homo sapiens
  CDR3 for alpha chain variable domain of TCR clone 29532 (TRAV13-1, TRAJ44)
CAAKATGTASKPTF

SEQ ID NO: 59064 - protein, 14 aa, Homo sapiens
  CDR3 for beta chain variable domain of TCR clone 29532 (TRBV19, TRBJ2-2)
CASSTLHRSGELFF

SEQ ID NO: 59065 - protein, 15 aa, Homo sapiens
  CDR3 for alpha chain variable domain of TCR clone 29533 (TRAV12-3, TRAJ52)
CNGSAGGTSYGKLTF

SEQ ID NO: 59066 - protein, 13 aa, Homo sapiens
  CDR3 for beta chain variable domain of TCR clone 29533 (TRBV20-1, TRBJ2-5)
CSARGDYQETQYF

SEQ ID NO: 59067 - protein, 12 aa, Homo sapiens
  CDR3 for alpha chain variable domain of TCR clone 29534 (TRAV36/DV7, TRAJ54)
CAVVRGAQKLAF

SEQ ID NO: 59068 - protein, 14 aa, Homo sapiens
  CDR3 for beta chain variable domain of TCR clone 29534 (TRBV7-3, TRBJ1-1)
CASSLKGGNTEAFF

SEQ ID NO: 59069 - protein, 16 aa, Homo sapiens
  CDR3 for alpha chain variable domain of TCR clone 29535 (TRAV13-1, TRAJ48)
CSASIFGNFGNEKLTF

SEQ ID NO: 59070 - protein, 12 aa, Homo sapiens
  CDR3 for beta chain variable domain of TCR clone 29535 (TRBV14, TRBJ2-4)
CASSNLKSIQYF

SEQ ID NO: 59071 - protein, 13 aa, Homo sapiens
  CDR3 for alpha chain variable domain of TCR clone 29536 (TRAV22, TRAJ26)
CAVEHNYGQNFVF

SEQ ID NO: 59072 - protein, 16 aa, Homo sapiens
  CDR3 for beta chain variable domain of TCR clone 29536 (TRBV7-2, TRBJ2-6)
CASSERRASGANDLTF

SEQ ID NO: 59073 - protein, 14 aa, Homo sapiens
  CDR3 for alpha chain variable domain of TCR clone 29537 (TRAV12-2, TRAJ13)
CAVKKTGGYQKVTF

SEQ ID NO: 59074 - protein, 13 aa, Homo sapiens
  CDR3 for beta chain variable domain of TCR clone 29537 (TRBV7-9, TRBJ2-7)
CASSFAGAYEQYF

SEQ ID NO: 59075 - protein, 11 aa, Homo sapiens
  CDR3 for alpha chain variable domain of TCR clone 29538 (TRAV2, TRAJ33)
CAVESNYQLIW

SEQ ID NO: 59076 - protein, 16 aa, Homo sapiens
  CDR3 for beta chain variable domain of TCR clone 29538 (TRBV19, TRBJ2-1)
CASSKAGPSSYNEQFF

SEQ ID NO: 59077 - protein, 13 aa, Homo sapiens
  CDR3 for alpha chain variable domain of TCR clone 29539 (TRAV3, TRAJ21)
CAVREPDFNKFYF

SEQ ID NO: 59078 - protein, 16 aa, Homo sapiens
  CDR3 for beta chain variable domain of TCR clone 29539 (TRBV19, TRBJ2-2)
CASRSPGTGATGELFF

SEQ ID NO: 59079 - protein, 11 aa, Homo sapiens
  CDR3 for alpha chain variable domain of TCR clone 29540 (TRAV3, TRAJ21)
CAVGNFNKFYF

SEQ ID NO: 59080 - protein, 14 aa, Homo sapiens
  CDR3 for beta chain variable domain of TCR clone 29540 (TRBV7-9, TRBJ2-2)
CASSLGHRTGELFF

SEQ ID NO: 59081 - protein, 12 aa, Homo sapiens
  CDR3 for alpha chain variable domain of TCR clone 29541 (TRAV16, TRAJ10)
CSRTGGGKKLTF

SEQ ID NO: 59082 - protein, 15 aa, Homo sapiens
  CDR3 for beta chain variable domain of TCR clone 29541 (TRBV6-3, TRBJ2-7)
CASSSPGTVFYEQYF

SEQ ID NO: 59083 - protein, 15 aa, Homo sapiens
  CDR3 for alpha chain variable domain of TCR clone 29542 (TRAV23/DV6, TRAJ13)
CAAWPGGGGYQKVTF

SEQ ID NO: 59084 - protein, 12 aa, Homo sapiens
  CDR3 for beta chain variable domain of TCR clone 29542 (TRBV11-2, TRBJ2-2)
CASSLGGGELFF

SEQ ID NO: 59085 - protein, 14 aa, Homo sapiens
  CDR3 for alpha chain variable domain of TCR clone 29543 (TRAV8-1, TRAJ23)
CAVGTYNQGGKLIF

SEQ ID NO: 59086 - protein, 16 aa, Homo sapiens
  CDR3 for beta chain variable domain of TCR clone 29543 (TRBV18, TRBJ1-5)
CASSPGTGNSNQPQHF

SEQ ID NO: 59087 - protein, 10 aa, Homo sapiens
  CDR3 for alpha chain variable domain of TCR clone 29544 (TRAV8-1, TRAJ21)
CAVNGTKFYF

SEQ ID NO: 59088 - protein, 16 aa, Homo sapiens
  CDR3 for beta chain variable domain of TCR clone 29544 (TRBV7-3, TRBJ2-2)
CASSLKRGTLSGELFF

SEQ ID NO: 59089 - protein, 14 aa, Homo sapiens
  CDR3 for alpha chain variable domain of TCR clone 29545 (TRAV12-3, TRAJ29)
CAMILPSGNTPLVF

SEQ ID NO: 59090 - protein, 16 aa, Homo sapiens
  CDR3 for beta chain variable domain of TCR clone 29545 (TRBV28, TRBJ2-7)
CASSSGTSGRGYEQYF

SEQ ID NO: 59091 - protein, 15 aa, Homo sapiens
  CDR3 for alpha chain variable domain of TCR clone 29546 (TRAV17, TRAJ22)
CATVAPSGSARQLTF

SEQ ID NO: 59092 - protein, 15 aa, Homo sapiens
  CDR3 for beta chain variable domain of TCR clone 29546 (TRBV27, TRBJ1-6)
CASSFDRGLGPPLHF

SEQ ID NO: 59093 - protein, 12 aa, Homo sapiens
  CDR3 for alpha chain variable domain of TCR clone 29547 (TRAV8-3, TRAJ6)
CAVAGGSYTPTF

SEQ ID NO: 59094 - protein, 14 aa, Homo sapiens
  CDR3 for beta chain variable domain of TCR clone 29547 (TRBV27, TRBJ2-7)
CASATGTERREQYF

SEQ ID NO: 59095 - protein, 14 aa, Homo sapiens
  CDR3 for alpha chain variable domain of TCR clone 29548 (TRAV12-3, TRAJ10)
SHLPLTGGGNKLTF

SEQ ID NO: 59096 - protein, 17 aa, Homo sapiens
  CDR3 for beta chain variable domain of TCR clone 29548 (TRBV4-1, TRBJ2-5)
CASSSRSGSGGQETQYF

SEQ ID NO: 59097 - protein, 12 aa, Homo sapiens
  CDR3 for alpha chain variable domain of TCR clone 29549 (TRAV22, TRAJ29)
FAPPSGNTPLVF

SEQ ID NO: 59098 - protein, 14 aa, Homo sapiens
  CDR3 for beta chain variable domain of TCR clone 29549 (TRBV11-2, TRBJ2-7)
CASSLGAGAYEQYF

SEQ ID NO: 59099 - protein, 15 aa, Homo sapiens
  CDR3 for alpha chain variable domain of TCR clone 29550 (TRAV3, TRAJ5)
CAVRDLDTGRRALTF

SEQ ID NO: 59100 - protein, 16 aa, Homo sapiens
  CDR3 for beta chain variable domain of TCR clone 29550 (TRBV12-5, TRBJ2-5)
CASGPRTSGNQETQYF

SEQ ID NO: 59101 - protein, 13 aa, Homo sapiens
  CDR3 for alpha chain variable domain of TCR clone 29551 (TRAV1-1, TRAJ9)
CAAKNTGGFKTIF

SEQ ID NO: 59102 - protein, 16 aa, Homo sapiens
  CDR3 for beta chain variable domain of TCR clone 29551 (TRBV19, TRBJ2-1)
CASSKAGPSSYNEQFF

SEQ ID NO: 59103 - protein, 12 aa, Homo sapiens
  CDR3 for alpha chain variable domain of TCR clone 29552 (TRAV4, TRAJ26)
CLVGDYGQNFVF

SEQ ID NO: 59104 - protein, 14 aa, Homo sapiens
  CDR3 for beta chain variable domain of TCR clone 29552 (TRBV7-2, TRBJ2-7)
CASSPKTSFYEQYF

SEQ ID NO: 59105 - protein, 15 aa, Homo sapiens
  CDR3 for alpha chain variable domain of TCR clone 29553 (TRAV8-6, TRAJ10)
CAVSDQAGRGNKLTF

SEQ ID NO: 59106 - protein, 13 aa, Homo sapiens
  CDR3 for beta chain variable domain of TCR clone 29553 (TRBV10-2, TRBJ2-3)
CASSESGDHTQYF

SEQ ID NO: 59107 - protein, 16 aa, Homo sapiens
  CDR3 for alpha chain variable domain of TCR clone 29554 (TRAV13-1, TRAJ8)
CAAFYLLSTGFQKLVF

SEQ ID NO: 59108 - protein, 14 aa, Homo sapiens
  CDR3 for beta chain variable domain of TCR clone 29554 (TRBV29-1, TRBJ2-5)
CSVGPAGGQETQYF

SEQ ID NO: 59109 - protein, 12 aa, Homo sapiens
  CDR3 for alpha chain variable domain of TCR clone 29555 (TRAV20, TRAJ37)
CALPSNTGKLIF

SEQ ID NO: 59110 - protein, 14 aa, Homo sapiens
  CDR3 for beta chain variable domain of TCR clone 29555 (TRBV19, TRBJ2-1)
CASPTVVLSGEQFF

SEQ ID NO: 59111 - protein, 12 aa, Homo sapiens
  CDR3 for alpha chain variable domain of TCR clone 29556 (TRAV2, TRAJ31)
CAVEDNSARLMF

SEQ ID NO: 59112 - protein, 16 aa, Homo sapiens
  CDR3 for beta chain variable domain of TCR clone 29556 (TRBV10-3, TRBJ2-1)
CAISGVGDGGGGEQFF

SEQ ID NO: 59113 - protein, 14 aa, Homo sapiens
  CDR3 for alpha chain variable domain of TCR clone 29557 (TRAV8-3, TRAJ4)
CAVGAAGGYNKLIF

SEQ ID NO: 59114 - protein, 15 aa, Homo sapiens
  CDR3 for beta chain variable domain of TCR clone 29557 (TRBV6-5, TRBJ2-1)
CASSHDAGAGNEQFF

SEQ ID NO: 59115 - protein, 16 aa, Homo sapiens
  CDR3 for alpha chain variable domain of TCR clone 29558 (TRAV26-1, )
CIDIQNPDPAVYQLRD

SEQ ID NO: 59116 - protein, 19 aa, Homo sapiens
  CDR3 for beta chain variable domain of TCR clone 29558 (TRBV19, TRBJ2-5)
CASSIGQVTDSFLGETQYF

SEQ ID NO: 59117 - protein, 15 aa, Homo sapiens
  CDR3 for alpha chain variable domain of TCR clone 29559 (TRAV17, TRAJ56)
CATDANTGANSKLTF

SEQ ID NO: 59118 - protein, 14 aa, Homo sapiens
  CDR3 for beta chain variable domain of TCR clone 29559 (TRBV19, TRBJ1-5)
CASSIGTGGQPQHF

SEQ ID NO: 59119 - protein, 11 aa, Homo sapiens
  CDR3 for alpha chain variable domain of TCR clone 29560 (TRAV1-2, TRAJ31)
CAVNKNARLMF

SEQ ID NO: 59120 - protein, 15 aa, Homo sapiens
  CDR3 for beta chain variable domain of TCR clone 29560 (TRBV28, TRBJ2-1)
CASSIIAGGRSEQFF

SEQ ID NO: 59121 - protein, 13 aa, Homo sapiens
  CDR3 for alpha chain variable domain of TCR clone 29561 (TRAV2, TRAJ40)
CAVVTSGAYKYIF

SEQ ID NO: 59122 - protein, 16 aa, Homo sapiens
  CDR3 for beta chain variable domain of TCR clone 29561 (TRBV19, TRBJ2-2)
CASRSPGTGATGELFF

SEQ ID NO: 59123 - protein, 13 aa, Homo sapiens
  CDR3 for alpha chain variable domain of TCR clone 29562 (TRAV12-3, TRAJ33)
CAMSVNSNYQLIW

SEQ ID NO: 59124 - protein, 13 aa, Homo sapiens
  CDR3 for beta chain variable domain of TCR clone 29562 (TRBV7-2, TRBJ2-2)
CASSLAVTGELFF

SEQ ID NO: 59125 - protein, 13 aa, Homo sapiens
  CDR3 for alpha chain variable domain of TCR clone 29563 (TRAV16, TRAJ26)
CITVLCLGQNFVF

SEQ ID NO: 59126 - protein, 12 aa, Homo sapiens
  CDR3 for beta chain variable domain of TCR clone 29563 (TRBV11-2, TRBJ2-1)
CASSPGNNGQFF

SEQ ID NO: 59127 - protein, 12 aa, Homo sapiens
  CDR3 for alpha chain variable domain of TCR clone 29564 (TRAV27, TRAJ9)
CAGESGGLKTIF

SEQ ID NO: 59128 - protein, 18 aa, Homo sapiens
  CDR3 for beta chain variable domain of TCR clone 29564 (TRBV10-2, TRBJ2-2)
CISAPAVHRQADAGELFF

SEQ ID NO: 59129 - protein, 14 aa, Homo sapiens
  CDR3 for alpha chain variable domain of TCR clone 29565 (TRAV29/DV5, TRAJ36)
CSARRKTGANNLFF

SEQ ID NO: 59130 - protein, 14 aa, Homo sapiens
  CDR3 for beta chain variable domain of TCR clone 29565 (TRBV12-5, TRBJ2-5)
CASGSRTHQETQYF

SEQ ID NO: 59131 - protein, 13 aa, Homo sapiens
  CDR3 for alpha chain variable domain of TCR clone 29566 (TRAV27, TRAJ57)
CRSAQGGSEKLVF

SEQ ID NO: 59132 - protein, 11 aa, Homo sapiens
  CDR3 for beta chain variable domain of TCR clone 29566 (TRBV11-2, TRBJ1-1)
CASRINTEAFF

SEQ ID NO: 59133 - protein, 13 aa, Homo sapiens
  CDR3 for alpha chain variable domain of TCR clone 29567 (TRAV12-3, TRAJ43)
CAMIRPNSNDMRF

SEQ ID NO: 59134 - protein, 12 aa, Homo sapiens
  CDR3 for beta chain variable domain of TCR clone 29567 (TRBV11-2, TRBJ2-5)
CASSLGQETQYF

SEQ ID NO: 59135 - protein, 19 aa, Homo sapiens
  CDR3 for alpha chain variable domain of TCR clone 29568 (TRAV26-1, TRAJ28)
CIVRVAHACSGAGSYQLTF

SEQ ID NO: 59136 - protein, 15 aa, Homo sapiens
  CDR3 for beta chain variable domain of TCR clone 29568 (TRBV5-1, TRBJ1-3)
CASSSKTGAGNTIYF

SEQ ID NO: 59137 - protein, 12 aa, Homo sapiens
  CDR3 for alpha chain variable domain of TCR clone 29569 (TRAV12-2, TRAJ10)
WGVAGGGNKLTF

SEQ ID NO: 59138 - protein, 16 aa, Homo sapiens
  CDR3 for beta chain variable domain of TCR clone 29569 (TRBV6-4, TRBJ1-2)
CASSEAVGDPNYGYTF

SEQ ID NO: 59139 - protein, 15 aa, Homo sapiens
  CDR3 for alpha chain variable domain of TCR clone 29570 (TRAV17, TRAJ52)
CATEAGGTSYGKLTF

SEQ ID NO: 59140 - protein, 14 aa, Homo sapiens
  CDR3 for beta chain variable domain of TCR clone 29570 (TRBV28, TRBJ1-5)
CASSLGVLVKHQHF

SEQ ID NO: 59141 - protein, 15 aa, Homo sapiens
  CDR3 for alpha chain variable domain of TCR clone 29571 (TRAV26-1, TRAJ48)
CIVRAGDFGNEKLTF

SEQ ID NO: 59142 - protein, 16 aa, Homo sapiens
  CDR3 for beta chain variable domain of TCR clone 29571 (TRBV4-1, TRBJ2-3)
CASSQRAGGLTDTQYF

SEQ ID NO: 59143 - protein, 19 aa, Homo sapiens
  CDR3 for alpha chain variable domain of TCR clone 29572 (TRAV26-1, TRAJ52)
CIVRAHRNAGGTSYGKMTF

SEQ ID NO: 59144 - protein, 15 aa, Homo sapiens
  CDR3 for beta chain variable domain of TCR clone 29572 (TRBV29-1, TRBJ2-1)
CSGRDRKSSYNEQFF

SEQ ID NO: 59145 - protein, 12 aa, Homo sapiens
  CDR3 for alpha chain variable domain of TCR clone 29573 (TRAV12-3, TRAJ17)
CAMTLTGNKLTF

SEQ ID NO: 59146 - protein, 16 aa, Homo sapiens
  CDR3 for beta chain variable domain of TCR clone 29573 (TRBV9, TRBJ2-2)
CASSAMGKGNTGELFF

SEQ ID NO: 59147 - protein, 14 aa, Homo sapiens
  CDR3 for alpha chain variable domain of TCR clone 29574 (TRAV1-2, TRAJ16)
CAVKRFSDGQKLLF

SEQ ID NO: 59148 - protein, 18 aa, Homo sapiens
  CDR3 for beta chain variable domain of TCR clone 29574 (TRBV20-1, TRBJ2-6)
CSAETTPTHGSGANVLTF

SEQ ID NO: 59149 - protein, 13 aa, Homo sapiens
  CDR3 for alpha chain variable domain of TCR clone 29575 (TRAV21, TRAJ27)
CAARSGNAGKSTF

SEQ ID NO: 59150 - protein, 14 aa, Homo sapiens
  CDR3 for beta chain variable domain of TCR clone 29575 (TRBV7-7, TRBJ2-3)
CASSLGTVTDTQYF

SEQ ID NO: 59151 - protein, 15 aa, Homo sapiens
  CDR3 for alpha chain variable domain of TCR clone 29576 (TRAV8-2, TRAJ16)
CVVSDGFSDGQKLPF

SEQ ID NO: 59152 - protein, 14 aa, Homo sapiens
  CDR3 for beta chain variable domain of TCR clone 29576 (TRBV7-3, TRBJ1-1)
CASSLGTGYTEAFF

SEQ ID NO: 59153 - protein, 12 aa, Homo sapiens
  CDR3 for alpha chain variable domain of TCR clone 29577 (TRAV20, TRAJ20)
CTVRFNDYKLSF

SEQ ID NO: 59154 - protein, 14 aa, Homo sapiens
  CDR3 for beta chain variable domain of TCR clone 29577 (TRBV20-1, TRBJ2-1)
CSAQIGGSANEQFF

SEQ ID NO: 59155 - protein, 15 aa, Homo sapiens
  CDR3 for alpha chain variable domain of TCR clone 29578 (TRAV26-1, TRAJ29)
CIVRVEGSGNTPLVF

SEQ ID NO: 59156 - protein, 13 aa, Homo sapiens
  CDR3 for beta chain variable domain of TCR clone 29578 (TRBV12-5, TRBJ1-1)
CASGLVQGPEAFF

SEQ ID NO: 59157 - protein, 16 aa, Homo sapiens
  CDR3 for alpha chain variable domain of TCR clone 29579 (TRAV12-3, TRAJ53)
CAMSPGRGGSNYKLTF

SEQ ID NO: 59158 - protein, 14 aa, Homo sapiens
  CDR3 for beta chain variable domain of TCR clone 29579 (TRBV4-2, TRBJ2-1)
CASGLDRAYNEQFF

SEQ ID NO: 59159 - protein, 15 aa, Homo sapiens
  CDR3 for alpha chain variable domain of TCR clone 29580 (TRAV35, TRAJ50)
CAGQLRKTSYDKVLF

SEQ ID NO: 59160 - protein, 12 aa, Homo sapiens
  CDR3 for beta chain variable domain of TCR clone 29580 (TRBV5-1, TRBJ2-5)
CASSLGLETQYF

SEQ ID NO: 59161 - protein, 14 aa, Homo sapiens
  CDR3 for alpha chain variable domain of TCR clone 29581 (TRAV1-1, TRAJ27)
CAVIYNTNAGKSTF

SEQ ID NO: 59162 - protein, 13 aa, Homo sapiens
  CDR3 for beta chain variable domain of TCR clone 29581 (TRBV19, TRBJ1-1)
CASSPSNGGEAFF

SEQ ID NO: 59163 - protein, 14 aa, Homo sapiens
  CDR3 for alpha chain variable domain of TCR clone 29582 (TRAV26-1, TRAJ38)
CIADNAGNNRKLIW

SEQ ID NO: 59164 - protein, 12 aa, Homo sapiens
  CDR3 for beta chain variable domain of TCR clone 29582 (TRBV5-1, TRBJ2-7)
CAGSFRGYEQYF

SEQ ID NO: 59165 - protein, 13 aa, Homo sapiens
  CDR3 for alpha chain variable domain of TCR clone 29583 (TRAV2, TRAJ40)
CAVVTSGTYKYIF

SEQ ID NO: 59166 - protein, 15 aa, Homo sapiens
  CDR3 for beta chain variable domain of TCR clone 29583 (TRBV11-3, TRBJ2-3)
CASLKVGREGDTQYF

SEQ ID NO: 59167 - protein, 17 aa, Homo sapiens
  CDR3 for alpha chain variable domain of TCR clone 29584 (TRAV12-2, TRAJ52)
CAVNPYAGGTSYGKLTF

SEQ ID NO: 59168 - protein, 15 aa, Homo sapiens
  CDR3 for beta chain variable domain of TCR clone 29584 (TRBV10-2, TRBJ2-6)
CASSEQGTGANVLTF

SEQ ID NO: 59169 - protein, 13 aa, Homo sapiens
  CDR3 for alpha chain variable domain of TCR clone 29585 (TRAV12-3, TRAJ13)
CAMGTGGYQKATF

SEQ ID NO: 59170 - protein, 14 aa, Homo sapiens
  CDR3 for beta chain variable domain of TCR clone 29585 (TRBV7-2, TRBJ2-5)
CASSTGGELKTQYF

SEQ ID NO: 59171 - protein, 14 aa, Homo sapiens
  CDR3 for alpha chain variable domain of TCR clone 29586 (TRAV12-1, TRAJ12)
CVVTRMDSSYKLIF

SEQ ID NO: 59172 - protein, 16 aa, Homo sapiens
  CDR3 for beta chain variable domain of TCR clone 29586 (TRBV12-4, TRBJ2-3)
CASSFGTGGISDTQYF

SEQ ID NO: 59173 - protein, 16 aa, Homo sapiens
  CDR3 for alpha chain variable domain of TCR clone 29587 (TRAV30, TRAJ24)
CGTEIVDADSWGKFQF

SEQ ID NO: 59174 - protein, 19 aa, Homo sapiens
  CDR3 for beta chain variable domain of TCR clone 29587 (TRBV25-1, TRBJ2-2)
CAILVYRVDGGRKTGELFF

SEQ ID NO: 59175 - protein, 14 aa, Homo sapiens
  CDR3 for alpha chain variable domain of TCR clone 29588 (TRAV1-2, TRAJ8)
CAVREDTGFQKLVF

SEQ ID NO: 59176 - protein, 14 aa, Homo sapiens
  CDR3 for beta chain variable domain of TCR clone 29588 (TRBV7-9, TRBJ1-2)
CASSRQGANYGYTF

SEQ ID NO: 59177 - protein, 12 aa, Homo sapiens
  CDR3 for alpha chain variable domain of TCR clone 29589 (TRAV3, TRAJ39)
RAVIERSNMLTF

SEQ ID NO: 59178 - protein, 14 aa, Homo sapiens
  CDR3 for beta chain variable domain of TCR clone 29589 (TRBV7-8, TRBJ2-3)
CASSFPDGQDTQYF

SEQ ID NO: 59179 - protein, 12 aa, Homo sapiens
  CDR3 for alpha chain variable domain of TCR clone 29590 (TRAV22, TRAJ29)
CAPPSGNTPLVF

SEQ ID NO: 59180 - protein, 15 aa, Homo sapiens
  CDR3 for beta chain variable domain of TCR clone 29590 (TRBV19, TRBJ1-1)
CASTSGQIQNTEAFF

SEQ ID NO: 59181 - protein, 15 aa, Homo sapiens
  CDR3 for alpha chain variable domain of TCR clone 29591 (TRAV3, TRAJ13)
CAVRVYSGGYQKVTF

SEQ ID NO: 59182 - protein, 14 aa, Homo sapiens
  CDR3 for beta chain variable domain of TCR clone 29591 (TRBV19, TRBJ2-1)
CASPTFVLSGEQFF

SEQ ID NO: 59183 - protein, 18 aa, Homo sapiens
  CDR3 for alpha chain variable domain of TCR clone 29592 (TRAV29/DV5, TRAJ52)
CAAGFRGAGGTSDGKLTF

SEQ ID NO: 59184 - protein, 16 aa, Homo sapiens
  CDR3 for beta chain variable domain of TCR clone 29592 (TRBV7-3, TRBJ2-2)
CASSLKRGTLSGELFF

SEQ ID NO: 59185 - protein, 15 aa, Homo sapiens
  CDR3 for alpha chain variable domain of TCR clone 29593 (TRAV3, TRAJ22)
CAARDRGGSARQLTF

SEQ ID NO: 59186 - protein, 13 aa, Homo sapiens
  CDR3 for beta chain variable domain of TCR clone 29593 (TRBV7-3, TRBJ2-5)
CASSFRGGETQYF

SEQ ID NO: 59187 - protein, 12 aa, Homo sapiens
  CDR3 for alpha chain variable domain of TCR clone 29594 (TRAV12-1, TRAJ40)
CVVYSGTYKYIF

SEQ ID NO: 59188 - protein, 18 aa, Homo sapiens
  CDR3 for beta chain variable domain of TCR clone 29594 (TRBV11-2, TRBJ2-3)
CASSLGGASRGAPNTQYL

SEQ ID NO: 59189 - protein, 17 aa, Homo sapiens
  CDR3 for alpha chain variable domain of TCR clone 29595 (TRAV23/DV6, TRAJ28)
CAALLAYSGAGSYQLTF

SEQ ID NO: 59190 - protein, 13 aa, Homo sapiens
  CDR3 for beta chain variable domain of TCR clone 29595 (TRBV4-2, TRBJ2-3)
CACSQGNTDTQYF

SEQ ID NO: 59191 - protein, 18 aa, Homo sapiens
  CDR3 for alpha chain variable domain of TCR clone 29596 (TRAV26-1, TRAJ22)
CIVRVALISSGSARQLTF

SEQ ID NO: 59192 - protein, 13 aa, Homo sapiens
  CDR3 for beta chain variable domain of TCR clone 29596 (TRBV13, TRBJ2-5)
CASSPEMGETQYF

SEQ ID NO: 59193 - protein, 12 aa, Homo sapiens
  CDR3 for alpha chain variable domain of TCR clone 29597 (TRAV1-1, TRAJ8)
CAGGTGFQKLVF

SEQ ID NO: 59194 - protein, 15 aa, Homo sapiens
  CDR3 for beta chain variable domain of TCR clone 29597 (TRBV7-9, TRBJ1-4)
CASSRTGGVNEKLFF

SEQ ID NO: 59195 - protein, 15 aa, Homo sapiens
  CDR3 for alpha chain variable domain of TCR clone 29598 (TRAV27, TRAJ38)
CAERRNAGNNRKLIW

SEQ ID NO: 59196 - protein, 13 aa, Homo sapiens
  CDR3 for beta chain variable domain of TCR clone 29598 (TRBV12-5, TRBJ2-3)
CASGDRQSDTQYF

SEQ ID NO: 59197 - protein, 23 aa, Homo sapiens
  CDR3 for alpha chain variable domain of TCR clone 29599 (TRAV26-1, TRAJ38)
CIADNAGNNHIQNPDPAVYQLRD

SEQ ID NO: 59198 - protein, 16 aa, Homo sapiens
  CDR3 for beta chain variable domain of TCR clone 29599 (TRBV7-3, TRBJ2-2)
CASSLKRGTLSGELFF

SEQ ID NO: 59199 - protein, 11 aa, Homo sapiens
  CDR3 for alpha chain variable domain of TCR clone 29600 (TRAV2, TRAJ33)
CAVDSNYQLIW

SEQ ID NO: 59200 - protein, 17 aa, Homo sapiens
  CDR3 for beta chain variable domain of TCR clone 29600 (TRBV25-1, TRBJ2-7)
CASSDARVVFSSYEQYF

SEQ ID NO: 59201 - protein, 23 aa, Homo sapiens
  CDR3 for alpha chain variable domain of TCR clone 29601 (TRAV26-1, )
CIADNAGNKHIQNPDPAVYQLRD

SEQ ID NO: 59202 - protein, 13 aa, Homo sapiens
  CDR3 for beta chain variable domain of TCR clone 29601 (TRBV20-1, TRBJ1-1)
CSARGGGNTEAFF

SEQ ID NO: 59203 - protein, 14 aa, Homo sapiens
  CDR3 for alpha chain variable domain of TCR clone 29602 (TRAV3, TRAJ20)
CAVRPSVTTTSSAF

SEQ ID NO: 59204 - protein, 15 aa, Homo sapiens
  CDR3 for beta chain variable domain of TCR clone 29602 (TRBV19, TRBJ2-6)
CASVRRDSGANVLTF

SEQ ID NO: 59205 - protein, 16 aa, Homo sapiens
  CDR3 for alpha chain variable domain of TCR clone 29603 (TRAV14/DV4, TRAJ54)
CAMREGRIQGAQKLVF

SEQ ID NO: 59206 - protein, 14 aa, Homo sapiens
  CDR3 for beta chain variable domain of TCR clone 29603 (TRBV7-2, TRBJ2-1)
CASSLSGVYNEQFF

SEQ ID NO: 59207 - protein, 15 aa, Homo sapiens
  CDR3 for alpha chain variable domain of TCR clone 29604 (TRAV3, TRAJ20)
CAVRDIKLSDYKLSF

SEQ ID NO: 59208 - protein, 15 aa, Homo sapiens
  CDR3 for beta chain variable domain of TCR clone 29604 (TRBV7-9, TRBJ1-6)
CASSSLGRGNSPLHF

SEQ ID NO: 59209 - protein, 17 aa, Homo sapiens
  CDR3 for alpha chain variable domain of TCR clone 29605 (TRAV4, TRAJ18)
CLVGERSVGSTLGRPYF

SEQ ID NO: 59210 - protein, 15 aa, Homo sapiens
  CDR3 for beta chain variable domain of TCR clone 29605 (TRBV10-3, TRBJ2-3)
CAISLTSGGTDTQYF

SEQ ID NO: 59211 - protein, 12 aa, Homo sapiens
  CDR3 for alpha chain variable domain of TCR clone 29606 (TRAV12-1, TRAJ40)
CVFYSGTYKYIV

SEQ ID NO: 59212 - protein, 18 aa, Homo sapiens
  CDR3 for beta chain variable domain of TCR clone 29606 (TRBV12-4, TRBJ2-2)
CASSLVAGTRGRTGELFF

SEQ ID NO: 59213 - protein, 15 aa, Homo sapiens
  CDR3 for alpha chain variable domain of TCR clone 29607 (TRAV23/DV6, TRAJ18)
CAARYRGSTLGRIYF

SEQ ID NO: 59214 - protein, 13 aa, Homo sapiens
  CDR3 for beta chain variable domain of TCR clone 29607 (TRBV7-2, TRBJ2-7)
CASSSPSGSEQYF

SEQ ID NO: 59215 - protein, 14 aa, Homo sapiens
  CDR3 for alpha chain variable domain of TCR clone 29608 (TRAV8-3, TRAJ4)
CAVGAAGGYNKLIF

SEQ ID NO: 59216 - protein, 16 aa, Homo sapiens
  CDR3 for beta chain variable domain of TCR clone 29608 (TRBV24-1, TRBJ2-3)
CATSDPGTGATDTQYF

SEQ ID NO: 59217 - protein, 14 aa, Homo sapiens
  CDR3 for alpha chain variable domain of TCR clone 29609 (TRAV20, TRAJ42)
CAVQAGGSQGNLIF

SEQ ID NO: 59218 - protein, 14 aa, Homo sapiens
  CDR3 for beta chain variable domain of TCR clone 29609 (TRBV28, TRBJ1-2)
CASRIQGANYGYTF

SEQ ID NO: 59219 - protein, 16 aa, Homo sapiens
  CDR3 for alpha chain variable domain of TCR clone 29610 (TRAV3, TRAJ23)
CAVKIGLYNQGGKLIF

SEQ ID NO: 59220 - protein, 17 aa, Homo sapiens
  CDR3 for beta chain variable domain of TCR clone 29610 (TRBV10-3, TRBJ2-6)
CAISESTAPSGANVLTF

SEQ ID NO: 59221 - protein, 15 aa, Homo sapiens
  CDR3 for alpha chain variable domain of TCR clone 29611 (TRAV20, TRAJ53)
CAVQASGGSNYRLTF

SEQ ID NO: 59222 - protein, 12 aa, Homo sapiens
  CDR3 for beta chain variable domain of TCR clone 29611 (TRBV7-8, TRBJ2-7)
CASSLGDREQYF

SEQ ID NO: 59223 - protein, 14 aa, Homo sapiens
  CDR3 for alpha chain variable domain of TCR clone 29612 (TRAV26-1, TRAJ45)
CIEVTGGGADGLTF

SEQ ID NO: 59224 - protein, 12 aa, Homo sapiens
  CDR3 for beta chain variable domain of TCR clone 29612 (TRBV11-2, TRBJ2-2)
CASSLGGGELFF

SEQ ID NO: 59225 - protein, 13 aa, Homo sapiens
  CDR3 for alpha chain variable domain of TCR clone 29613 (TRAV2, TRAJ40)
CAVVTSGTYKYIF

SEQ ID NO: 59226 - protein, 15 aa, Homo sapiens
  CDR3 for beta chain variable domain of TCR clone 29613 (TRBV7-9, TRBJ1-4)
CASSRTGGFNEKLFF

SEQ ID NO: 59227 - protein, 13 aa, Homo sapiens
  CDR3 for alpha chain variable domain of TCR clone 29614 (TRAV13-2, TRAJ48)
CAEMDFGNEKLTF

SEQ ID NO: 59228 - protein, 16 aa, Homo sapiens
  CDR3 for beta chain variable domain of TCR clone 29614 (TRBV5-1, TRBJ1-1)
CASSSGGNSLNTEAFF

SEQ ID NO: 59229 - protein, 14 aa, Homo sapiens
  CDR3 for alpha chain variable domain of TCR clone 29615 (TRAV35, TRAJ22)
CAGLMPGSARQLTF

SEQ ID NO: 59230 - protein, 15 aa, Homo sapiens
  CDR3 for beta chain variable domain of TCR clone 29615 (TRBV12-4, TRBJ2-5)
CASSPPTGLQETQYF

SEQ ID NO: 59231 - protein, 14 aa, Homo sapiens
  CDR3 for alpha chain variable domain of TCR clone 29616 (TRAV12-2, TRAJ13)
CAVKKTGGYQKVTF

SEQ ID NO: 59232 - protein, 15 aa, Homo sapiens
  CDR3 for beta chain variable domain of TCR clone 29616 (TRBV27, TRBJ2-1)
CASSNCGGSSNEQFF

SEQ ID NO: 59233 - protein, 13 aa, Homo sapiens
  CDR3 for alpha chain variable domain of TCR clone 29617 (TRAV17, TRAJ39)
CATDYGAGNVLTF

SEQ ID NO: 59234 - protein, 15 aa, Homo sapiens
  CDR3 for beta chain variable domain of TCR clone 29617 (TRBV10-1, TRBJ1-1)
CASSESQGGNTEAFF

SEQ ID NO: 59235 - protein, 14 aa, Homo sapiens
  CDR3 for alpha chain variable domain of TCR clone 29618 (TRAV1-1, TRAJ27)
CAVIYNTNAGKSTF

SEQ ID NO: 59236 - protein, 15 aa, Homo sapiens
  CDR3 for beta chain variable domain of TCR clone 29618 (TRBV7-2, TRBJ2-1)
CVSSSGLAGGNEQFF

SEQ ID NO: 59237 - protein, 14 aa, Homo sapiens
  CDR3 for alpha chain variable domain of TCR clone 29619 (TRAV12-1, TRAJ17)
CVVNYKAAGNRLTF

SEQ ID NO: 59238 - protein, 14 aa, Homo sapiens
  CDR3 for beta chain variable domain of TCR clone 29619 (TRBV7-8, TRBJ2-3)
CASSLEAGTDTQYF

SEQ ID NO: 59239 - protein, 13 aa, Homo sapiens
  CDR3 for alpha chain variable domain of TCR clone 29620 (TRAV8-3, TRAJ36)
CAVGATGAHNLFF

SEQ ID NO: 59240 - protein, 15 aa, Homo sapiens
  CDR3 for beta chain variable domain of TCR clone 29620 (TRBV7-2, TRBJ1-2)
CASSPRAGWNYGYTF

SEQ ID NO: 59241 - protein, 17 aa, Homo sapiens
  CDR3 for alpha chain variable domain of TCR clone 29621 (TRAV23/DV6, TRAJ57)
CAASSTLSQGGSEKLVF

SEQ ID NO: 59242 - protein, 13 aa, Homo sapiens
  CDR3 for beta chain variable domain of TCR clone 29621 (TRBV7-9, TRBJ1-2)
CASSLKQNYGYTF

SEQ ID NO: 59243 - protein, 14 aa, Homo sapiens
  CDR3 for alpha chain variable domain of TCR clone 29622 (TRAV12-1, TRAJ17)
CVVNYKAAGNKLTF

SEQ ID NO: 59244 - protein, 13 aa, Homo sapiens
  CDR3 for beta chain variable domain of TCR clone 29622 (TRBV10-3, TRBJ2-7)
CASKLAVNYEQYF

SEQ ID NO: 59245 - protein, 11 aa, Homo sapiens
  CDR3 for alpha chain variable domain of TCR clone 29623 (TRAV13-2, TRAJ36)
CAETGANNLFF

SEQ ID NO: 59246 - protein, 13 aa, Homo sapiens
  CDR3 for beta chain variable domain of TCR clone 29623 (TRBV7-9, TRBJ2-4)
CATEGLAGDIQYF

SEQ ID NO: 59247 - protein, 14 aa, Homo sapiens
  CDR3 for alpha chain variable domain of TCR clone 29624 (TRAV8-4, TRAJ5)
CAVSTDTGRRALTF

SEQ ID NO: 59248 - protein, 15 aa, Homo sapiens
  CDR3 for beta chain variable domain of TCR clone 29624 (TRBV6-3, TRBJ2-7)
CASSSPGTVFYEQYF

SEQ ID NO: 59249 - protein, 16 aa, Homo sapiens
  CDR3 for alpha chain variable domain of TCR clone 29625 (TRAV4, TRAJ22)
CLVGDLYSGSARQLTF

SEQ ID NO: 59250 - protein, 16 aa, Homo sapiens
  CDR3 for beta chain variable domain of TCR clone 29625 (TRBV7-9, TRBJ2-1)
CASGDVAGGSYNEQFF

SEQ ID NO: 59251 - protein, 14 aa, Homo sapiens
  CDR3 for alpha chain variable domain of TCR clone 29626 (TRAV13-1, TRAJ44)
CAAKATGTASKLTF

SEQ ID NO: 59252 - protein, 15 aa, Homo sapiens
  CDR3 for beta chain variable domain of TCR clone 29626 (TRBV5-1, TRBJ2-1)
CASSPPRAPYNEQFF

SEQ ID NO: 59253 - protein, 14 aa, Homo sapiens
  CDR3 for alpha chain variable domain of TCR clone 29627 (TRAV12-3, TRAJ10)
SHLPLTGGGNKLTF

SEQ ID NO: 59254 - protein, 14 aa, Homo sapiens
  CDR3 for beta chain variable domain of TCR clone 29627 (TRBV6-1, TRBJ1-3)
FASVQGGGGNTIYF

SEQ ID NO: 59255 - protein, 15 aa, Homo sapiens
  CDR3 for alpha chain variable domain of TCR clone 29628 (TRAV12-1, TRAJ9)
CVVSFGDTGGFKTIF

SEQ ID NO: 59256 - protein, 13 aa, Homo sapiens
  CDR3 for beta chain variable domain of TCR clone 29628 (TRBV12-4, TRBJ1-2)
CASSSGSKDGYTF

SEQ ID NO: 59257 - protein, 13 aa, Homo sapiens
  CDR3 for alpha chain variable domain of TCR clone 29629 (TRAV26-2, TRAJ43)
CILRAVNNNDMRF

SEQ ID NO: 59258 - protein, 15 aa, Homo sapiens
  CDR3 for beta chain variable domain of TCR clone 29629 (TRBV19, TRBJ1-1)
CASTSGQIQNTEAFF

SEQ ID NO: 59259 - protein, 16 aa, Homo sapiens
  CDR3 for alpha chain variable domain of TCR clone 29630 (TRAV3, TRAJ10)
CSVRDMRAGGGNKLTF

SEQ ID NO: 59260 - protein, 14 aa, Homo sapiens
  CDR3 for beta chain variable domain of TCR clone 29630 (TRBV25-1, TRBJ1-1)
CASTHLGGNTEAFF

SEQ ID NO: 59261 - protein, 18 aa, Homo sapiens
  CDR3 for alpha chain variable domain of TCR clone 29631 (TRAV21, TRAJ52)
CAVRPSPAAGTSYGKLTF

SEQ ID NO: 59262 - protein, 17 aa, Homo sapiens
  CDR3 for beta chain variable domain of TCR clone 29631 (TRBV13, TRBJ2-3)
CASSLSRVAGGRNTQYF

SEQ ID NO: 59263 - protein, 14 aa, Homo sapiens
  CDR3 for alpha chain variable domain of TCR clone 29632 (TRAV12-3, TRAJ10)
SHLPLAGGGNKLTF

SEQ ID NO: 59264 - protein, 13 aa, Homo sapiens
  CDR3 for beta chain variable domain of TCR clone 29632 (TRBV9, TRBJ2-1)
CASSPSGGNEQFF

SEQ ID NO: 59265 - protein, 16 aa, Homo sapiens
  CDR3 for alpha chain variable domain of TCR clone 29633 (TRAV14/DV4, TRAJ20)
CAMREGRSRDDYKLSF

SEQ ID NO: 59266 - protein, 19 aa, Homo sapiens
  CDR3 for beta chain variable domain of TCR clone 29633 (TRBV25-1, TRBJ2-2)
CAILVYRVDRGRKTGELFF

SEQ ID NO: 59267 - protein, 15 aa, Homo sapiens
  CDR3 for alpha chain variable domain of TCR clone 29634 (TRAV3, TRAJ4)
CAVRDGTGGYNKLIF

SEQ ID NO: 59268 - protein, 16 aa, Homo sapiens
  CDR3 for beta chain variable domain of TCR clone 29634 (TRBV27, TRBJ2-2)
CASSSSGVLNTGELFF

SEQ ID NO: 59269 - protein, 16 aa, Homo sapiens
  CDR3 for alpha chain variable domain of TCR clone 29635 (TRAV30, TRAJ33)
CGTEIVDADSWGKFQF

SEQ ID NO: 59270 - protein, 14 aa, Homo sapiens
  CDR3 for beta chain variable domain of TCR clone 29635 (TRBV11-2, TRBJ2-3)
CASSRLARTDTQYF

SEQ ID NO: 59271 - protein, 12 aa, Homo sapiens
  CDR3 for alpha chain variable domain of TCR clone 29636 (TRAV21, TRAJ23)
CAVMLQGGKLIF

SEQ ID NO: 59272 - protein, 14 aa, Homo sapiens
  CDR3 for beta chain variable domain of TCR clone 29636 (TRBV7-9, TRBJ1-4)
CAITDGEANEKLFF

SEQ ID NO: 59273 - protein, 14 aa, Homo sapiens
  CDR3 for alpha chain variable domain of TCR clone 29637 (TRAV38-1, TRAJ29)
CAFITPSGNTPLVF

SEQ ID NO: 59274 - protein, 14 aa, Homo sapiens
  CDR3 for beta chain variable domain of TCR clone 29637 (TRBV18, TRBJ2-7)
CASSPRRGAYEQYF

SEQ ID NO: 59275 - protein, 14 aa, Homo sapiens
  CDR3 for alpha chain variable domain of TCR clone 29638 (TRAV13-1, TRAJ35)
CAASKGGFGNVLHC

SEQ ID NO: 59276 - protein, 13 aa, Homo sapiens
  CDR3 for beta chain variable domain of TCR clone 29638 (TRBV7-3, TRBJ1-1)
CASSQDWGAEAIF

SEQ ID NO: 59277 - protein, 16 aa, Homo sapiens
  CDR3 for alpha chain variable domain of TCR clone 29639 (TRAV12-3, TRAJ18)
CAMRGSRGSTLGRLHF

SEQ ID NO: 59278 - protein, 19 aa, Homo sapiens
  CDR3 for beta chain variable domain of TCR clone 29639 (TRBV6-3, TRBJ2-7)
CASSYRTGLAGGVSGEQYF

SEQ ID NO: 59279 - protein, 13 aa, Homo sapiens
  CDR3 for alpha chain variable domain of TCR clone 29640 (TRAV23/DV6, TRAJ16)
CAASISDGQKLLF

SEQ ID NO: 59280 - protein, 15 aa, Homo sapiens
  CDR3 for beta chain variable domain of TCR clone 29640 (TRBV2, TRBJ2-2)
CASNRETVGTGELFF

SEQ ID NO: 59281 - protein, 17 aa, Homo sapiens
  CDR3 for alpha chain variable domain of TCR clone 29641 (TRAV3, TRAJ42)
CAVRDRGYGGSQGNLIF

SEQ ID NO: 59282 - protein, 12 aa, Homo sapiens
  CDR3 for beta chain variable domain of TCR clone 29641 (TRBV11-2, TRBJ2-1)
CASSPGNNEQFF

SEQ ID NO: 59283 - protein, 15 aa, Homo sapiens
  CDR3 for alpha chain variable domain of TCR clone 29642 (TRAV27, TRAJ38)
CAARRNAGNNRKLIW

SEQ ID NO: 59284 - protein, 16 aa, Homo sapiens
  CDR3 for beta chain variable domain of TCR clone 29642 (TRBV12-5, TRBJ2-5)
CASGPRTSGNQETQYF

SEQ ID NO: 59285 - protein, 11 aa, Homo sapiens
  CDR3 for alpha chain variable domain of TCR clone 29643 (TRAV23/DV6, TRAJ58)
CAARLLRGETS

SEQ ID NO: 59286 - protein, 17 aa, Homo sapiens
  CDR3 for beta chain variable domain of TCR clone 29643 (TRBV13, TRBJ2-3)
CASSLSRVAGGRNTQYF

SEQ ID NO: 59287 - protein, 15 aa, Homo sapiens
  CDR3 for alpha chain variable domain of TCR clone 29644 (TRAV14/DV4, TRAJ10)
CAMRKLTGGGNKLTF

SEQ ID NO: 59288 - protein, 18 aa, Homo sapiens
  CDR3 for beta chain variable domain of TCR clone 29644 (TRBV7-9, TRBJ2-7)
CASSLTTSGSRTWYEQYF

SEQ ID NO: 59289 - protein, 12 aa, Homo sapiens
  CDR3 for alpha chain variable domain of TCR clone 29645 (TRAV17, TRAJ57)
CATEGGSEKLVF

SEQ ID NO: 59290 - protein, 13 aa, Homo sapiens
  CDR3 for beta chain variable domain of TCR clone 29645 (TRBV7-9, TRBJ2-7)
CASSFAGAYEQYF

SEQ ID NO: 59291 - protein, 17 aa, Homo sapiens
  CDR3 for alpha chain variable domain of TCR clone 29646 (TRAV13-1, TRAJ28)
CAASPPYSGAGSYQLTF

SEQ ID NO: 59292 - protein, 15 aa, Homo sapiens
  CDR3 for beta chain variable domain of TCR clone 29646 (TRBV11-3, TRBJ2-3)
CASLKDGREGDTQYF

SEQ ID NO: 59293 - protein, 15 aa, Homo sapiens
  CDR3 for alpha chain variable domain of TCR clone 29647 (TRAV12-3, TRAJ27)
CAMRAYNTNAGKSNF

SEQ ID NO: 59294 - protein, 13 aa, Homo sapiens
  CDR3 for beta chain variable domain of TCR clone 29647 (TRBV11-2, TRBJ2-5)
CASSRGPSETQYF

SEQ ID NO: 59295 - protein, 14 aa, Homo sapiens
  CDR3 for alpha chain variable domain of TCR clone 29648 (TRAV9-2, TRAJ39)
CALYIYNAGNMLTF

SEQ ID NO: 59296 - protein, 13 aa, Homo sapiens
  CDR3 for beta chain variable domain of TCR clone 29648 (TRBV24-1, TRBJ2-2)
CATSDWSTGELFF

SEQ ID NO: 59297 - protein, 15 aa, Homo sapiens
  CDR3 for alpha chain variable domain of TCR clone 29649 (TRAV26-2, TRAJ45)
CILRDRVDQEEVLTD

SEQ ID NO: 59298 - protein, 15 aa, Homo sapiens
  CDR3 for beta chain variable domain of TCR clone 29649 (TRBV7-6, TRBJ2-5)
RASSKPTGPQETQYF

SEQ ID NO: 59299 - protein, 13 aa, Homo sapiens
  CDR3 for alpha chain variable domain of TCR clone 29650 (TRAV21, TRAJ27)
CAARPGNAGKSTF

SEQ ID NO: 59300 - protein, 14 aa, Homo sapiens
  CDR3 for beta chain variable domain of TCR clone 29650 (TRBV7-2, TRBJ2-5)
CASSPRGSSETQYF

SEQ ID NO: 59301 - protein, 16 aa, Homo sapiens
  CDR3 for alpha chain variable domain of TCR clone 29651 (TRAV26-1, TRAJ38)
CIVRVELGGNNRKLIW

SEQ ID NO: 59302 - protein, 14 aa, Homo sapiens
  CDR3 for beta chain variable domain of TCR clone 29651 (TRBV5-1, TRBJ2-3)
CASSPGLVADTQYF

SEQ ID NO: 59303 - protein, 14 aa, Homo sapiens
  CDR3 for alpha chain variable domain of TCR clone 29652 (TRAV16, TRAJ33)
CALSAMDSNYQLIW

SEQ ID NO: 59304 - protein, 12 aa, Homo sapiens
  CDR3 for beta chain variable domain of TCR clone 29652 (TRBV5-1, TRBJ1-2)
CASSQDTYGCTF

SEQ ID NO: 59305 - protein, 23 aa, Homo sapiens
  CDR3 for alpha chain variable domain of TCR clone 29653 (TRAV13-1, TRAJ41)
CAASGPRRTQIPDIQNPDPAVYQ

SEQ ID NO: 59306 - protein, 16 aa, Homo sapiens
  CDR3 for beta chain variable domain of TCR clone 29653 (TRBV18, TRBJ2-3)
CASSPPAGGPRKYAVF

SEQ ID NO: 59307 - protein, 11 aa, Homo sapiens
  CDR3 for alpha chain variable domain of TCR clone 29654 (TRAV17, TRAJ9)
CGFTGGFKTIF

SEQ ID NO: 59308 - protein, 14 aa, Homo sapiens
  CDR3 for beta chain variable domain of TCR clone 29654 (TRBV7-9, TRBJ2-2)
CASSLVQDTGELLF

SEQ ID NO: 59309 - protein, 13 aa, Homo sapiens
  CDR3 for alpha chain variable domain of TCR clone 29655 (TRAV8-6, TRAJ40)
CAVSVTGTYKYIL

SEQ ID NO: 59310 - protein, 15 aa, Homo sapiens
  CDR3 for beta chain variable domain of TCR clone 29655 (TRBV4-1, TRBJ2-3)
CASGRGQGIPDTQYF

SEQ ID NO: 59311 - protein, 19 aa, Homo sapiens
  CDR3 for alpha chain variable domain of TCR clone 29656 (TRAV3, TRAJ6)
CAVRDRNPSRSGGSHIPTF

SEQ ID NO: 59312 - protein, 15 aa, Homo sapiens
  CDR3 for beta chain variable domain of TCR clone 29656 (TRBV18, TRBJ2-7)
CASSPTFMDSYEQYF

SEQ ID NO: 59313 - protein, 15 aa, Homo sapiens
  CDR3 for alpha chain variable domain of TCR clone 29657 (TRAV1-2, TRAJ13)
CAVRGSSGGYQKVTF

SEQ ID NO: 59314 - protein, 15 aa, Homo sapiens
  CDR3 for beta chain variable domain of TCR clone 29657 (TRBV11-2, TRBJ1-3)
CASSLDGTVGNTIYF

SEQ ID NO: 59315 - protein, 13 aa, Homo sapiens
  CDR3 for alpha chain variable domain of TCR clone 29658 (TRAV12-3, TRAJ33)
CAMSVNSNYQLIW

SEQ ID NO: 59316 - protein, 13 aa, Homo sapiens
  CDR3 for beta chain variable domain of TCR clone 29658 (TRBV7-2, TRBJ2-2)
CASSLAVTGELFV

SEQ ID NO: 59317 - protein, 14 aa, Homo sapiens
  CDR3 for alpha chain variable domain of TCR clone 29659 (TRAV21, TRAJ45)
CAVSSGGGADGLTF

SEQ ID NO: 59318 - protein, 14 aa, Homo sapiens
  CDR3 for beta chain variable domain of TCR clone 29659 (TRBV13, TRBJ2-7)
CASSLKGASYEQYF

SEQ ID NO: 59319 - protein, 13 aa, Homo sapiens
  CDR3 for alpha chain variable domain of TCR clone 29660 (TRAV27, TRAJ41)
CAGEGNSGYALNF

SEQ ID NO: 59320 - protein, 15 aa, Homo sapiens
  CDR3 for beta chain variable domain of TCR clone 29660 (TRBV7-2, TRBJ2-1)
CASSSGLAGGNEQFF

SEQ ID NO: 59321 - protein, 12 aa, Homo sapiens
  CDR3 for alpha chain variable domain of TCR clone 29661 (TRAV1-1, TRAJ8)
CAGGTGFQKLVF

SEQ ID NO: 59322 - protein, 15 aa, Homo sapiens
  CDR3 for beta chain variable domain of TCR clone 29661 (TRBV7-9, TRBJ1-4)
CASSRTGGFNEKLSF

SEQ ID NO: 59323 - protein, 15 aa, Homo sapiens
  CDR3 for alpha chain variable domain of TCR clone 29662 (TRAV8-3, TRAJ11)
CAVGLLNSGYSNLTF

SEQ ID NO: 59324 - protein, 16 aa, Homo sapiens
  CDR3 for beta chain variable domain of TCR clone 29662 (TRBV7-9, TRBJ1-2)
CASSLGFSSGEDGYTF

SEQ ID NO: 59325 - protein, 13 aa, Homo sapiens
  CDR3 for alpha chain variable domain of TCR clone 29663 (TRAV17, TRAJ26)
CATVDNYGQNFVF

SEQ ID NO: 59326 - protein, 16 aa, Homo sapiens
  CDR3 for beta chain variable domain of TCR clone 29663 (TRBV2, TRBJ2-1)
CASSAGGSLSYNEQFF

SEQ ID NO: 59327 - protein, 12 aa, Homo sapiens
  CDR3 for alpha chain variable domain of TCR clone 29664 (TRAV12-2, TRAJ36)
CAAPRGANNLFF

SEQ ID NO: 59328 - protein, 15 aa, Homo sapiens
  CDR3 for beta chain variable domain of TCR clone 29664 (TRBV11-2, TRBJ1-3)
CASSLDGTVGNTMYF

SEQ ID NO: 59329 - protein, 15 aa, Homo sapiens
  CDR3 for alpha chain variable domain of TCR clone 29665 (TRAV12-2, TRAJ53)
CAVNGGGGSNYKLTF

SEQ ID NO: 59330 - protein, 13 aa, Homo sapiens
  CDR3 for beta chain variable domain of TCR clone 29665 (TRBV3-1, TRBJ1-1)
CASSPGVITEDFF

SEQ ID NO: 59331 - protein, 14 aa, Homo sapiens
  CDR3 for alpha chain variable domain of TCR clone 29666 (TRAV16, TRAJ33)
CALSAMDSNYQLIW

SEQ ID NO: 59332 - protein, 14 aa, Homo sapiens
  CDR3 for beta chain variable domain of TCR clone 29666 (TRBV5-7, TRBJ2-7)
CASSGGLSSYEQYF

SEQ ID NO: 59333 - protein, 14 aa, Homo sapiens
  CDR3 for alpha chain variable domain of TCR clone 29667 (TRAV35, TRAJ22)
CAGLRPGSARQLTF

SEQ ID NO: 59334 - protein, 15 aa, Homo sapiens
  CDR3 for beta chain variable domain of TCR clone 29667 (TRBV12-4, TRBJ2-5)
CASSPPTGLQETQYV

SEQ ID NO: 59335 - protein, 15 aa, Homo sapiens
  CDR3 for alpha chain variable domain of TCR clone 29668 (TRAV38-1, TRAJ45)
CAFMKPFGGADGLTF

SEQ ID NO: 59336 - protein, 15 aa, Homo sapiens
  CDR3 for beta chain variable domain of TCR clone 29668 (TRBV12-4, TRBJ2-1)
CASSQDRGSYNEQFF

SEQ ID NO: 59337 - protein, 17 aa, Homo sapiens
  CDR3 for alpha chain variable domain of TCR clone 29669 (TRAV3, TRAJ6)
CAVRDGPRAGGSYIPTF

SEQ ID NO: 59338 - protein, 13 aa, Homo sapiens
  CDR3 for beta chain variable domain of TCR clone 29669 (TRBV10-2, TRBJ2-7)
CASGASGGYEQYF

SEQ ID NO: 59339 - protein, 11 aa, Homo sapiens
  CDR3 for alpha chain variable domain of TCR clone 29670 (TRAV8-4, TRAJ34)
CAVSWTDKPIF

SEQ ID NO: 59340 - protein, 14 aa, Homo sapiens
  CDR3 for beta chain variable domain of TCR clone 29670 (TRBV7-9, TRBJ2-3)
CASSLEDGTDTQYF

SEQ ID NO: 59341 - protein, 13 aa, Homo sapiens
  CDR3 for alpha chain variable domain of TCR clone 29671 (TRAV8-3, TRAJ28)
CAVGAVGSYQLTF

SEQ ID NO: 59342 - protein, 14 aa, Homo sapiens
  CDR3 for beta chain variable domain of TCR clone 29671 (TRBV7-2, TRBJ2-7)
CARRSQGAAYEQYF

SEQ ID NO: 59343 - protein, 12 aa, Homo sapiens
  CDR3 for alpha chain variable domain of TCR clone 29672 (TRAV12-3, TRAJ17)
CAMTLTGNKLTF

SEQ ID NO: 59344 - protein, 16 aa, Homo sapiens
  CDR3 for beta chain variable domain of TCR clone 29672 (TRBV12-4, TRBJ2-5)
CASSCFVRGRQETQYF

SEQ ID NO: 59345 - protein, 12 aa, Homo sapiens
  CDR3 for alpha chain variable domain of TCR clone 29673 (TRAV2, TRAJ9)
CAVGAGGFKTIF

SEQ ID NO: 59346 - protein, 12 aa, Homo sapiens
  CDR3 for beta chain variable domain of TCR clone 29673 (TRBV11-2, TRBJ2-2)
CASSLGGGELFF

SEQ ID NO: 59347 - protein, 11 aa, Homo sapiens
  CDR3 for alpha chain variable domain of TCR clone 29674 (TRAV2, TRAJ33)
CAVDSNYQLIR

SEQ ID NO: 59348 - protein, 15 aa, Homo sapiens
  CDR3 for beta chain variable domain of TCR clone 29674 (TRBV19, TRBJ1-2)
CASSVGQVLNYGYTF

SEQ ID NO: 59349 - protein, 14 aa, Homo sapiens
  CDR3 for alpha chain variable domain of TCR clone 29675 (TRAV21, TRAJ35)
CAVMPIGFENVLHC

SEQ ID NO: 59350 - protein, 12 aa, Homo sapiens
  CDR3 for beta chain variable domain of TCR clone 29675 (TRBV7-9, TRBJ2-7)
CASSIKREEQYF

SEQ ID NO: 59351 - protein, 16 aa, Homo sapiens
  CDR3 for alpha chain variable domain of TCR clone 29676 (TRAV27, TRAJ52)
CAGAPAGGTSDGKLTF

SEQ ID NO: 59352 - protein, 12 aa, Homo sapiens
  CDR3 for beta chain variable domain of TCR clone 29676 (TRBV27, TRBJ2-1)
CASRGFYNEQFF

SEQ ID NO: 59353 - protein, 14 aa, Homo sapiens
  CDR3 for alpha chain variable domain of TCR clone 29677 (TRAV12-3, TRAJ42)
CAMNYGGSQGNLIF

SEQ ID NO: 59354 - protein, 15 aa, Homo sapiens
  CDR3 for beta chain variable domain of TCR clone 29677 (TRBV5-7, TRBJ1-5)
CASSYGKVWDQPQHF

SEQ ID NO: 59355 - protein, 15 aa, Homo sapiens
  CDR3 for alpha chain variable domain of TCR clone 29678 (TRAV26-1, TRAJ29)
CIVRVEGSGNTPLVF

SEQ ID NO: 59356 - protein, 15 aa, Homo sapiens
  CDR3 for beta chain variable domain of TCR clone 29678 (TRBV7-9, TRBJ1-5)
CASNQGHQPNQPQHF

SEQ ID NO: 59357 - protein, 13 aa, Homo sapiens
  CDR3 for alpha chain variable domain of TCR clone 29679 (TRAV12-1, TRAJ7)
CMVNMRGNNRLAF

SEQ ID NO: 59358 - protein, 15 aa, Homo sapiens
  CDR3 for beta chain variable domain of TCR clone 29679 (TRBV27, TRBJ2-3)
CASSLGLAATDTQYF

SEQ ID NO: 59359 - protein, 15 aa, Homo sapiens
  CDR3 for alpha chain variable domain of TCR clone 29680 (TRAV26-1, TRAJ23)
CTVRVAGYQGGKLIF

SEQ ID NO: 59360 - protein, 18 aa, Homo sapiens
  CDR3 for beta chain variable domain of TCR clone 29680 (TRBV28, TRBJ2-1)
CASSSTSGRANSYNEQFF

SEQ ID NO: 59361 - protein, 11 aa, Homo sapiens
  CDR3 for alpha chain variable domain of TCR clone 29681 (TRAV1-2, TRAJ20)
CAVANDYKLSF

SEQ ID NO: 59362 - protein, 18 aa, Homo sapiens
  CDR3 for beta chain variable domain of TCR clone 29681 (TRBV20-1, TRBJ2-6)
CSAETTPTHVSGANVLTF

SEQ ID NO: 59363 - protein, 16 aa, Homo sapiens
  CDR3 for alpha chain variable domain of TCR clone 29682 (TRAV3, TRAJ37)
CAVRGKGSGNTGKLIF

SEQ ID NO: 59364 - protein, 11 aa, Homo sapiens
  CDR3 for beta chain variable domain of TCR clone 29682 (TRBV11-2, TRBJ2-2)
CASSLPGELFF

SEQ ID NO: 59365 - protein, 19 aa, Homo sapiens
  CDR3 for alpha chain variable domain of TCR clone 29683 (TRAV6, TRAJ31)
TASQPADSATYLYWARLMF

SEQ ID NO: 59366 - protein, 15 aa, Homo sapiens
  CDR3 for beta chain variable domain of TCR clone 29683 (TRBV28, TRBJ2-1)
CASSIIAGGRSEQFF

SEQ ID NO: 59367 - protein, 13 aa, Homo sapiens
  CDR3 for alpha chain variable domain of TCR clone 29684 (TRAV20, TRAJ37)
CAGCSSNTGKLIF

SEQ ID NO: 59368 - protein, 16 aa, Homo sapiens
  CDR3 for beta chain variable domain of TCR clone 29684 (TRBV12-5, TRBJ2-5)
CASGPRTSGNQETQYF

SEQ ID NO: 59369 - protein, 13 aa, Homo sapiens
  CDR3 for alpha chain variable domain of TCR clone 29685 (TRAV3, TRAJ15)
CAVRDQAGTALIF

SEQ ID NO: 59370 - protein, 15 aa, Homo sapiens
  CDR3 for beta chain variable domain of TCR clone 29685 (TRBV11-1, TRBJ2-7)
CASSLNYGASYEQYS

SEQ ID NO: 59371 - protein, 13 aa, Homo sapiens
  CDR3 for alpha chain variable domain of TCR clone 29686 (TRAV2, TRAJ40)
CAVVTSGTYKYIF

SEQ ID NO: 59372 - protein, 15 aa, Homo sapiens
  CDR3 for beta chain variable domain of TCR clone 29686 (TRBV11-3, TRBJ2-3)
CASLKDGREGDTQYL

SEQ ID NO: 59373 - protein, 13 aa, Homo sapiens
  CDR3 for alpha chain variable domain of TCR clone 29687 (TRAV26-1, TRAJ33)
CIVRVEGNYQLIC

SEQ ID NO: 59374 - protein, 16 aa, Homo sapiens
  CDR3 for beta chain variable domain of TCR clone 29687 (TRBV15, TRBJ2-7)
CATSRDRGRRRGEQYF

SEQ ID NO: 59375 - protein, 13 aa, Homo sapiens
  CDR3 for alpha chain variable domain of TCR clone 29688 (TRAV2, TRAJ13)
CCPNSGGYQKVTF

SEQ ID NO: 59376 - protein, 14 aa, Homo sapiens
  CDR3 for beta chain variable domain of TCR clone 29688 (TRBV19, TRBJ2-1)
CASEVTGARNEQFF

SEQ ID NO: 59377 - protein, 14 aa, Homo sapiens
  CDR3 for alpha chain variable domain of TCR clone 29689 (TRAV1-1, TRAJ27)
CAVIYNTNAGKSTF

SEQ ID NO: 59378 - protein, 15 aa, Homo sapiens
  CDR3 for beta chain variable domain of TCR clone 29689 (TRBV12-4, TRBJ1-1)
CASSLAVSRGAEAFF

SEQ ID NO: 59379 - protein, 16 aa, Homo sapiens
  CDR3 for alpha chain variable domain of TCR clone 29690 (TRAV26-1, TRAJ32)
CIVWTNYGGATNKLIF

SEQ ID NO: 59380 - protein, 14 aa, Homo sapiens
  CDR3 for beta chain variable domain of TCR clone 29690 (TRBV27, TRBJ1-1)
CASSLLSGLSEAFF

SEQ ID NO: 59381 - protein, 13 aa, Homo sapiens
  CDR3 for alpha chain variable domain of TCR clone 29691 (TRAV2, TRAJ21)
CAVEDLNFNNFYF

SEQ ID NO: 59382 - protein, 15 aa, Homo sapiens
  CDR3 for beta chain variable domain of TCR clone 29691 (TRBV28, TRBJ2-5)
CASSPGQGSIETQYF

SEQ ID NO: 59383 - protein, 13 aa, Homo sapiens
  CDR3 for alpha chain variable domain of TCR clone 29692 (TRAV20, TRAJ20)
CAVRWVRDYKLSF

SEQ ID NO: 59384 - protein, 14 aa, Homo sapiens
  CDR3 for beta chain variable domain of TCR clone 29692 (TRBV19, TRBJ2-1)
CASPTFVLSGEQFF

SEQ ID NO: 59385 - protein, 15 aa, Homo sapiens
  CDR3 for alpha chain variable domain of TCR clone 29693 (TRAV21, TRAJ53)
CATLNSGGSNYKLTF

SEQ ID NO: 59386 - protein, 14 aa, Homo sapiens
  CDR3 for beta chain variable domain of TCR clone 29693 (TRBV7-2, TRBJ2-7)
CASNLPPGQGPQYF

SEQ ID NO: 59387 - protein, 15 aa, Homo sapiens
  CDR3 for alpha chain variable domain of TCR clone 29694 (TRAV17, TRAJ52)
CATEAGGTSYGKLTF

SEQ ID NO: 59388 - protein, 14 aa, Homo sapiens
  CDR3 for beta chain variable domain of TCR clone 29694 (TRBV28, TRBJ1-5)
FASSLGVLVKPQHF

SEQ ID NO: 59389 - protein, 10 aa, Homo sapiens
  CDR3 for alpha chain variable domain of TCR clone 29695 (TRAV12-2, TRAJ48)
CAGANEKLTF

SEQ ID NO: 59390 - protein, 16 aa, Homo sapiens
  CDR3 for beta chain variable domain of TCR clone 29695 (TRBV6-5, TRBJ2-5)
CASSSVGRWGRETQYF

SEQ ID NO: 59391 - protein, 15 aa, Homo sapiens
  CDR3 for alpha chain variable domain of TCR clone 29696 (TRAV21, TRAJ52)
CAVRGGGTSYGKLTF

SEQ ID NO: 59392 - protein, 15 aa, Homo sapiens
  CDR3 for beta chain variable domain of TCR clone 29696 (TRBV18, TRBJ1-5)
CASSPSDGSNQPQHF

SEQ ID NO: 59393 - protein, 12 aa, Homo sapiens
  CDR3 for alpha chain variable domain of TCR clone 29697 (TRAV2, TRAJ10)
CASTGGGNKLTF

SEQ ID NO: 59394 - protein, 14 aa, Homo sapiens
  CDR3 for beta chain variable domain of TCR clone 29697 (TRBV25-1, TRBJ1-1)
CASTHLGGNTEAFF

SEQ ID NO: 59395 - protein, 15 aa, Homo sapiens
  CDR3 for alpha chain variable domain of TCR clone 29698 (TRAV25, TRAJ52)
CAGRPGGTSYGKLTF

SEQ ID NO: 59396 - protein, 17 aa, Homo sapiens
  CDR3 for beta chain variable domain of TCR clone 29698 (TRBV7-8, TRBJ2-6)
CASSAGTGGAGADVLTF

SEQ ID NO: 59397 - protein, 15 aa, Homo sapiens
  CDR3 for alpha chain variable domain of TCR clone 29699 (TRAV3, TRAJ22)
CAVRDRGGSARQLTF

SEQ ID NO: 59398 - protein, 16 aa, Homo sapiens
  CDR3 for beta chain variable domain of TCR clone 29699 (TRBV5-4, TRBJ2-3)
CASKQPGAGGSDTQYF

SEQ ID NO: 59399 - protein, 15 aa, Homo sapiens
  CDR3 for alpha chain variable domain of TCR clone 29700 (TRAV17, TRAJ13)
FATDAGSGGYQKVTF

SEQ ID NO: 59400 - protein, 17 aa, Homo sapiens
  CDR3 for beta chain variable domain of TCR clone 29700 (TRBV11-2, TRBJ2-1)
CASSLYPPGVEYNEQFF

SEQ ID NO: 59401 - protein, 17 aa, Homo sapiens
  CDR3 for alpha chain variable domain of TCR clone 29701 (TRAV12-2, TRAJ39)
CAVNNMLTSGGGTRLMV

SEQ ID NO: 59402 - protein, 16 aa, Homo sapiens
  CDR3 for beta chain variable domain of TCR clone 29701 (TRBV9, TRBJ2-7)
CASSAGPDRSPYEQYF

SEQ ID NO: 59403 - protein, 13 aa, Homo sapiens
  CDR3 for alpha chain variable domain of TCR clone 29702 (TRAV13-1, TRAJ29)
CAASIGLNTPLVL

SEQ ID NO: 59404 - protein, 14 aa, Homo sapiens
  CDR3 for beta chain variable domain of TCR clone 29702 (TRBV20-1, TRBJ2-5)
CSASDSGSGETQYF

SEQ ID NO: 59405 - protein, 13 aa, Homo sapiens
  CDR3 for alpha chain variable domain of TCR clone 29703 (TRAV8-6, TRAJ8)
CAFMNTGFQKLVF

SEQ ID NO: 59406 - protein, 15 aa, Homo sapiens
  CDR3 for beta chain variable domain of TCR clone 29703 (TRBV28, TRBJ2-5)
CASSSGGVIQETQYF

SEQ ID NO: 59407 - protein, 12 aa, Homo sapiens
  CDR3 for alpha chain variable domain of TCR clone 29704 (TRAV12-2, TRAJ20)
CAVRPSDYKLSF

SEQ ID NO: 59408 - protein, 13 aa, Homo sapiens
  CDR3 for beta chain variable domain of TCR clone 29704 (TRBV10-3, TRBJ2-7)
CASKLAVNYEQYF

SEQ ID NO: 59409 - protein, 15 aa, Homo sapiens
  CDR3 for alpha chain variable domain of TCR clone 29705 (TRAV25, TRAJ52)
CAGTSGGTSYGKLTF

SEQ ID NO: 59410 - protein, 14 aa, Homo sapiens
  CDR3 for beta chain variable domain of TCR clone 29705 (TRBV19, TRBJ2-1)
CASPTFVLSGEQFF

SEQ ID NO: 59411 - protein, 19 aa, Homo sapiens
  CDR3 for alpha chain variable domain of TCR clone 29706 (TRAV3, TRAJ6)
CAVRDRNPSRPGGSYIPTF

SEQ ID NO: 59412 - protein, 15 aa, Homo sapiens
  CDR3 for beta chain variable domain of TCR clone 29706 (TRBV18, TRBJ2-7)
CASSPTFMDSYEQYF

SEQ ID NO: 59413 - protein, 14 aa, Homo sapiens
  CDR3 for alpha chain variable domain of TCR clone 29707 (TRAV35, TRAJ40)
CAGSTTSGAYKYIF

SEQ ID NO: 59414 - protein, 13 aa, Homo sapiens
  CDR3 for beta chain variable domain of TCR clone 29707 (TRBV20-1, TRBJ1-6)
CSAPLGVGSPLHF

SEQ ID NO: 59415 - protein, 12 aa, Homo sapiens
  CDR3 for alpha chain variable domain of TCR clone 29708 (TRAV27, TRAJ35)
CAGADFVNVLHC

SEQ ID NO: 59416 - protein, 16 aa, Homo sapiens
  CDR3 for beta chain variable domain of TCR clone 29708 (TRBV6-1, TRBJ2-1)
CASILRQGSSYNEQFF

SEQ ID NO: 59417 - protein, 15 aa, Homo sapiens
  CDR3 for alpha chain variable domain of TCR clone 29709 (TRAV13-1, TRAJ44)
CAASRNTGNASKLTF

SEQ ID NO: 59418 - protein, 14 aa, Homo sapiens
  CDR3 for beta chain variable domain of TCR clone 29709 (TRBV11-2, TRBJ1-2)
CASSLYRGNYGYTF

SEQ ID NO: 59419 - protein, 16 aa, Homo sapiens
  CDR3 for alpha chain variable domain of TCR clone 29710 (TRAV30, TRAJ24)
CGTEIVDADSWGKFQF

SEQ ID NO: 59420 - protein, 13 aa, Homo sapiens
  CDR3 for beta chain variable domain of TCR clone 29710 (TRBV20-1, TRBJ1-1)
CSAPPGGHTETFF

SEQ ID NO: 59421 - protein, 13 aa, Homo sapiens
  CDR3 for alpha chain variable domain of TCR clone 29711 (TRAV1-2, TRAJ9)
CAALNTGGFKTIF

SEQ ID NO: 59422 - protein, 14 aa, Homo sapiens
  CDR3 for beta chain variable domain of TCR clone 29711 (TRBV20-1, TRBJ1-1)
CSAQTRIGGTEAFF

SEQ ID NO: 59423 - protein, 15 aa, Homo sapiens
  CDR3 for alpha chain variable domain of TCR clone 29712 (TRAV3, TRAJ3)
CAVRDRDSSASKIIF

SEQ ID NO: 59424 - protein, 18 aa, Homo sapiens
  CDR3 for beta chain variable domain of TCR clone 29712 (TRBV25-1, TRBJ1-2)
CASSGLQNGQGLIFGYTL

SEQ ID NO: 59425 - protein, 13 aa, Homo sapiens
  CDR3 for alpha chain variable domain of TCR clone 29713 (TRAV16, TRAJ48)
CSPLNFGNEKLTF

SEQ ID NO: 59426 - protein, 11 aa, Homo sapiens
  CDR3 for beta chain variable domain of TCR clone 29713 (TRBV7-9, TRBJ2-3)
CAGSPTDTQYF

SEQ ID NO: 59427 - protein, 15 aa, Homo sapiens
  CDR3 for alpha chain variable domain of TCR clone 29714 (TRAV27, TRAJ38)
CAGRFNASNNRKLIW

SEQ ID NO: 59428 - protein, 13 aa, Homo sapiens
  CDR3 for beta chain variable domain of TCR clone 29714 (TRBV12-5, TRBJ2-3)
CASQNRGTDTQYF

SEQ ID NO: 59429 - protein, 16 aa, Homo sapiens
  CDR3 for alpha chain variable domain of TCR clone 29715 (TRAV3, TRAJ37)
CAVRGKGPGNTGKLIF

SEQ ID NO: 59430 - protein, 14 aa, Homo sapiens
  CDR3 for beta chain variable domain of TCR clone 29715 (TRBV7-2, TRBJ2-7)
CASSPKTSFYEQYF

SEQ ID NO: 59431 - protein, 14 aa, Homo sapiens
  CDR3 for alpha chain variable domain of TCR clone 29716 (TRAV1-2, TRAJ6)
CAVSLSGGSYILTF

SEQ ID NO: 59432 - protein, 15 aa, Homo sapiens
  CDR3 for beta chain variable domain of TCR clone 29716 (TRBV28, TRBJ2-7)
CASSPGGRGFYEQYF

SEQ ID NO: 59433 - protein, 13 aa, Homo sapiens
  CDR3 for alpha chain variable domain of TCR clone 29717 (TRAV35, TRAJ36)
CAGPRIGANNLFF

SEQ ID NO: 59434 - protein, 15 aa, Homo sapiens
  CDR3 for beta chain variable domain of TCR clone 29717 (TRBV28, TRBJ2-5)
CASSPPWSYKETQYF

SEQ ID NO: 59435 - protein, 14 aa, Homo sapiens
  CDR3 for alpha chain variable domain of TCR clone 29718 (TRAV13-1, TRAJ35)
CAASKGGFGNVLHC

SEQ ID NO: 59436 - protein, 20 aa, Homo sapiens
  CDR3 for beta chain variable domain of TCR clone 29718 (TRBV28, TRBJ2-1)
CASTPIGRSPGLAGGNEQFF

SEQ ID NO: 59437 - protein, 12 aa, Homo sapiens
  CDR3 for alpha chain variable domain of TCR clone 29719 (TRAV22, TRAJ29)
CAPPSGNTPLVF

SEQ ID NO: 59438 - protein, 14 aa, Homo sapiens
  CDR3 for beta chain variable domain of TCR clone 29719 (TRBV7-6, TRBJ2-3)
CASSLGTVTDTQYF

SEQ ID NO: 59439 - protein, 14 aa, Homo sapiens
  CDR3 for alpha chain variable domain of TCR clone 29720 (TRAV12-2, TRAJ13)
CAVKKTGGYQKVTF

SEQ ID NO: 59440 - protein, 16 aa, Homo sapiens
  CDR3 for beta chain variable domain of TCR clone 29720 (TRBV7-3, TRBJ2-3)
CASSLSGYRPEDTQYF

SEQ ID NO: 59441 - protein, 17 aa, Homo sapiens
  CDR3 for alpha chain variable domain of TCR clone 29721 (TRAV13-1, TRAJ31)
CAPRDRLMFGDGAQLVV

SEQ ID NO: 59442 - protein, 12 aa, Homo sapiens
  CDR3 for beta chain variable domain of TCR clone 29721 (TRBV7-9, TRBJ2-7)
CASSLEGYEQYF

SEQ ID NO: 59443 - protein, 16 aa, Homo sapiens
  CDR3 for alpha chain variable domain of TCR clone 29722 (TRAV13-2, TRAJ53)
CAENANSGGSNYKLTF

SEQ ID NO: 59444 - protein, 19 aa, Homo sapiens
  CDR3 for beta chain variable domain of TCR clone 29722 (TRBV28, TRBJ2-7)
CASSYSGTSRPGWVYEQYF

SEQ ID NO: 59445 - protein, 12 aa, Homo sapiens
  CDR3 for alpha chain variable domain of TCR clone 29723 (TRAV17, TRAJ12)
CATLRSSYKLMF

SEQ ID NO: 59446 - protein, 16 aa, Homo sapiens
  CDR3 for beta chain variable domain of TCR clone 29723 (TRBV28, TRBJ2-7)
CASSLFFETGGPEQYF

SEQ ID NO: 59447 - protein, 12 aa, Homo sapiens
  CDR3 for alpha chain variable domain of TCR clone 29724 (TRAV1-1, TRAJ20)
CAVREDDYKLCF

SEQ ID NO: 59448 - protein, 15 aa, Homo sapiens
  CDR3 for beta chain variable domain of TCR clone 29724 (TRBV5-7, TRBJ2-7)
CASSLPGQVFYEQYF

SEQ ID NO: 59449 - protein, 12 aa, Homo sapiens
  CDR3 for alpha chain variable domain of TCR clone 29725 (TRAV12-2, TRAJ52)
IGGGTSYGKLTF

SEQ ID NO: 59450 - protein, 13 aa, Homo sapiens
  CDR3 for beta chain variable domain of TCR clone 29725 (TRBV12-4, TRBJ1-1)
CASSPGTGCEAFF

SEQ ID NO: 59451 - protein, 14 aa, Homo sapiens
  CDR3 for alpha chain variable domain of TCR clone 29726 (TRAV12-1, TRAJ15)
CVVDRNQAGTALIF

SEQ ID NO: 59452 - protein, 14 aa, Homo sapiens
  CDR3 for beta chain variable domain of TCR clone 29726 (TRBV19, TRBJ1-1)
CATTSGTRGTEAFF

SEQ ID NO: 59453 - protein, 14 aa, Homo sapiens
  CDR3 for alpha chain variable domain of TCR clone 29727 (TRAV8-3, TRAJ4)
CAVGAAGGHNKLIF

SEQ ID NO: 59454 - protein, 15 aa, Homo sapiens
  CDR3 for beta chain variable domain of TCR clone 29727 (TRBV6-5, TRBJ2-1)
CASSYDAGAGNEQFF

SEQ ID NO: 59455 - protein, 13 aa, Homo sapiens
  CDR3 for alpha chain variable domain of TCR clone 29728 (TRAV8-4, TRAJ48)
CAVSLFGNEKLTF

SEQ ID NO: 59456 - protein, 12 aa, Homo sapiens
  CDR3 for beta chain variable domain of TCR clone 29728 (TRBV14, TRBJ2-5)
CASSQLKETQYF

SEQ ID NO: 59457 - protein, 12 aa, Homo sapiens
  CDR3 for alpha chain variable domain of TCR clone 29729 (TRAV20, TRAJ39)
CAVGNAGNMLTF

SEQ ID NO: 59458 - protein, 13 aa, Homo sapiens
  CDR3 for beta chain variable domain of TCR clone 29729 (TRBV2, TRBJ2-7)
CASSGGIAYEQYF

SEQ ID NO: 59459 - protein, 13 aa, Homo sapiens
  CDR3 for alpha chain variable domain of TCR clone 29730 (TRAV27, TRAJ45)
CRSSGGGADGLTF

SEQ ID NO: 59460 - protein, 17 aa, Homo sapiens
  CDR3 for beta chain variable domain of TCR clone 29730 (TRBV10-3, TRBJ2-4)
CTSVPSGNKGSKNIQYF

SEQ ID NO: 59461 - protein, 15 aa, Homo sapiens
  CDR3 for alpha chain variable domain of TCR clone 29731 (TRAV20, TRAJ6)
CAVRLQSGVSYIPTF

SEQ ID NO: 59462 - protein, 14 aa, Homo sapiens
  CDR3 for beta chain variable domain of TCR clone 29731 (TRBV12-4, TRBJ2-7)
CASSASGGWYEQYF

SEQ ID NO: 59463 - protein, 14 aa, Homo sapiens
  CDR3 for alpha chain variable domain of TCR clone 29732 (TRAV8-2, TRAJ4)
CVVSPSGGYNKLIF

SEQ ID NO: 59464 - protein, 15 aa, Homo sapiens
  CDR3 for beta chain variable domain of TCR clone 29732 (TRBV4-1, TRBJ1-4)
CASSDTGETNEKLFF

SEQ ID NO: 59465 - protein, 11 aa, Homo sapiens
  CDR3 for alpha chain variable domain of TCR clone 29733 (TRAV12-2, TRAJ31)
CAILNNARLMF

SEQ ID NO: 59466 - protein, 13 aa, Homo sapiens
  CDR3 for beta chain variable domain of TCR clone 29733 (TRBV20-1, TRBJ1-1)
CSARLGQGTEAFF

SEQ ID NO: 59467 - protein, 15 aa, Homo sapiens
  CDR3 for alpha chain variable domain of TCR clone 29734 (TRAV34, TRAJ38)
CGADFTPGNNRKLIL

SEQ ID NO: 59468 - protein, 16 aa, Homo sapiens
  CDR3 for beta chain variable domain of TCR clone 29734 (TRBV12-5, TRBJ2-5)
CASGPRTSGNQETQYF

SEQ ID NO: 59469 - protein, 13 aa, Homo sapiens
  CDR3 for alpha chain variable domain of TCR clone 29735 (TRAV38-1, TRAJ42)
CVRWGGSQGNLIF

SEQ ID NO: 59470 - protein, 17 aa, Homo sapiens
  CDR3 for beta chain variable domain of TCR clone 29735 (TRBV20-1, TRBJ2-1)
CSARDPLAGVWDNEQFF

SEQ ID NO: 59471 - protein, 14 aa, Homo sapiens
  CDR3 for alpha chain variable domain of TCR clone 29736 (TRAV20, TRAJ37)
CAVQSSSNTGKLIF

SEQ ID NO: 59472 - protein, 14 aa, Homo sapiens
  CDR3 for beta chain variable domain of TCR clone 29736 (TRBV7-3, TRBJ2-2)
CASSLNSNTGELSF

SEQ ID NO: 59473 - protein, 15 aa, Homo sapiens
  CDR3 for alpha chain variable domain of TCR clone 29737 (TRAV30, TRAJ32)
CGTEVLGGATNKLIF

SEQ ID NO: 59474 - protein, 13 aa, Homo sapiens
  CDR3 for beta chain variable domain of TCR clone 29737 (TRBV6-3, TRBJ2-7)
CASSFSGGYEQYF

SEQ ID NO: 59475 - protein, 13 aa, Homo sapiens
  CDR3 for alpha chain variable domain of TCR clone 29738 (TRAV16, TRAJ5)
CALTNTGRRALTF

SEQ ID NO: 59476 - protein, 15 aa, Homo sapiens
  CDR3 for beta chain variable domain of TCR clone 29738 (TRBV11-2, TRBJ2-4)
CASSRPGTGIDIQYF

SEQ ID NO: 59477 - protein, 16 aa, Homo sapiens
  CDR3 for alpha chain variable domain of TCR clone 29739 (TRAV26-1, TRAJ37)
CIVRGDGSGNTDKLIF

SEQ ID NO: 59478 - protein, 17 aa, Homo sapiens
  CDR3 for beta chain variable domain of TCR clone 29739 (TRBV4-1, TRBJ2-7)
CASSRDPLGVRGGEQYF

SEQ ID NO: 59479 - protein, 16 aa, Homo sapiens
  CDR3 for alpha chain variable domain of TCR clone 29740 (TRAV26-1, TRAJ32)
CIVRTNYGGATNKLIF

SEQ ID NO: 59480 - protein, 14 aa, Homo sapiens
  CDR3 for beta chain variable domain of TCR clone 29740 (TRBV27, TRBJ1-1)
CASSLLSGLSEAFL

SEQ ID NO: 59481 - protein, 11 aa, Homo sapiens
  CDR3 for alpha chain variable domain of TCR clone 29741 (TRAV1-2, TRAJ31)
CAVNDNARLMF

SEQ ID NO: 59482 - protein, 15 aa, Homo sapiens
  CDR3 for beta chain variable domain of TCR clone 29741 (TRBV28, TRBJ2-1)
CASSIIAGGRSEQFF

SEQ ID NO: 59483 - protein, 16 aa, Homo sapiens
  CDR3 for alpha chain variable domain of TCR clone 29742 (TRAV8-3, TRAJ13)
SAVGAYPSGGYQKVTF

SEQ ID NO: 59484 - protein, 15 aa, Homo sapiens
  CDR3 for beta chain variable domain of TCR clone 29742 (TRBV19, TRBJ1-5)
CASSIVWADNQPQHF

SEQ ID NO: 59485 - protein, 12 aa, Homo sapiens
  CDR3 for alpha chain variable domain of TCR clone 29743 (TRAV1-2, TRAJ33)
CAALDSNYQLIW

SEQ ID NO: 59486 - protein, 12 aa, Homo sapiens
  CDR3 for beta chain variable domain of TCR clone 29743 (TRBV5-1, TRBJ2-7)
CASSFRGYEQYF

SEQ ID NO: 59487 - protein, 12 aa, Homo sapiens
  CDR3 for alpha chain variable domain of TCR clone 29744 (TRAV3, TRAJ34)
CAVLGNTDKPIF

SEQ ID NO: 59488 - protein, 13 aa, Homo sapiens
  CDR3 for beta chain variable domain of TCR clone 29744 (TRBV19, TRBJ2-1)
CASSIGTGNEQFF

SEQ ID NO: 59489 - protein, 13 aa, Homo sapiens
  CDR3 for alpha chain variable domain of TCR clone 29745 (TRAV29/DV5, TRAJ31)
CAASRNNNARLMF

SEQ ID NO: 59490 - protein, 12 aa, Homo sapiens
  CDR3 for beta chain variable domain of TCR clone 29745 (TRBV14, TRBJ1-1)
CASSQRKGLAFF

SEQ ID NO: 59491 - protein, 12 aa, Homo sapiens
  CDR3 for alpha chain variable domain of TCR clone 29746 (TRAV13-1, TRAJ27)
CAAHTNAGKSNF

SEQ ID NO: 59492 - protein, 14 aa, Homo sapiens
  CDR3 for beta chain variable domain of TCR clone 29746 (TRBV19, TRBJ2-2)
CASSGQGIAGELFF

SEQ ID NO: 59493 - protein, 11 aa, Homo sapiens
  CDR3 for alpha chain variable domain of TCR clone 29747 (TRAV2, TRAJ13)
YASGGYQKVTF

SEQ ID NO: 59494 - protein, 16 aa, Homo sapiens
  CDR3 for beta chain variable domain of TCR clone 29747 (TRBV6-1, TRBJ2-5)
CASSETLDRGAETQYF

SEQ ID NO: 59495 - protein, 11 aa, Homo sapiens
  CDR3 for alpha chain variable domain of TCR clone 29748 (TRAV3, TRAJ21)
CAVGNFNKFYF

SEQ ID NO: 59496 - protein, 11 aa, Homo sapiens
  CDR3 for beta chain variable domain of TCR clone 29748 (TRBV12-4, TRBJ2-3)
CASTATDTQYF

SEQ ID NO: 59497 - protein, 12 aa, Homo sapiens
  CDR3 for alpha chain variable domain of TCR clone 29749 (TRAV17, TRAJ12)
CDTLRSSYKLIF

SEQ ID NO: 59498 - protein, 16 aa, Homo sapiens
  CDR3 for beta chain variable domain of TCR clone 29749 (TRBV28, TRBJ2-7)
CASSLFFETGGPEQYF

SEQ ID NO: 59499 - protein, 15 aa, Homo sapiens
  CDR3 for alpha chain variable domain of TCR clone 29750 (TRAV38-2/DV8, TRAJ26)
CAYRSRDNYGQNFVF

SEQ ID NO: 59500 - protein, 15 aa, Homo sapiens
  CDR3 for beta chain variable domain of TCR clone 29750 (TRBV28, TRBJ2-1)
CASSIIAGGRSEQFF

SEQ ID NO: 59501 - protein, 13 aa, Homo sapiens
  CDR3 for alpha chain variable domain of TCR clone 29751 (TRAV26-1, TRAJ31)
CIVRVDGNARLMF

SEQ ID NO: 59502 - protein, 17 aa, Homo sapiens
  CDR3 for beta chain variable domain of TCR clone 29751 (TRBV11-2, TRBJ2-1)
CASSLYPPGVEYNEQLF

SEQ ID NO: 59503 - protein, 18 aa, Homo sapiens
  CDR3 for alpha chain variable domain of TCR clone 29752 (TRAV26-1, TRAJ23)
CIVRVGLEVWNQGGKLIF

SEQ ID NO: 59504 - protein, 16 aa, Homo sapiens
  CDR3 for beta chain variable domain of TCR clone 29752 (TRBV12-4, TRBJ2-5)
CASSFFVRGRQETQYV

SEQ ID NO: 59505 - protein, 17 aa, Homo sapiens
  CDR3 for alpha chain variable domain of TCR clone 29753 (TRAV2, TRAJ36)
CAVEDRGNWGNQPLLWD

SEQ ID NO: 59506 - protein, 14 aa, Homo sapiens
  CDR3 for beta chain variable domain of TCR clone 29753 (TRBV7-9, TRBJ2-5)
CASSLDTAQETQYF

SEQ ID NO: 59507 - protein, 14 aa, Homo sapiens
  CDR3 for alpha chain variable domain of TCR clone 29754 (TRAV13-1, TRAJ44)
CAAKATGTASKLAF

SEQ ID NO: 59508 - protein, 13 aa, Homo sapiens
  CDR3 for beta chain variable domain of TCR clone 29754 (TRBV5-5, TRBJ1-2)
CASSFWRGEDYTF

SEQ ID NO: 59509 - protein, 15 aa, Homo sapiens
  CDR3 for alpha chain variable domain of TCR clone 29755 (TRAV21, TRAJ53)
CATLNSGGSNYKLTF

SEQ ID NO: 59510 - protein, 19 aa, Homo sapiens
  CDR3 for beta chain variable domain of TCR clone 29755 (TRBV7-2, TRBJ2-3)
CASSFLSRNWGGGTDTQYF

SEQ ID NO: 59511 - protein, 18 aa, Homo sapiens
  CDR3 for alpha chain variable domain of TCR clone 29756 (TRAV21, TRAJ52)
CAVRPSPAGGTSYGKLTF

SEQ ID NO: 59512 - protein, 18 aa, Homo sapiens
  CDR3 for beta chain variable domain of TCR clone 29756 (TRBV25-1, TRBJ1-2)
CASSGLQNGQGLIFGYTF

SEQ ID NO: 59513 - protein, 14 aa, Homo sapiens
  CDR3 for alpha chain variable domain of TCR clone 29757 (TRAV12-2, TRAJ45)
CALPERGGAGGLTF

SEQ ID NO: 59514 - protein, 14 aa, Homo sapiens
  CDR3 for beta chain variable domain of TCR clone 29757 (TRBV18, TRBJ1-5)
CASSPGNSNQPQHF

SEQ ID NO: 59515 - protein, 12 aa, Homo sapiens
  CDR3 for alpha chain variable domain of TCR clone 29758 (TRAV3, TRAJ20)
CAVRDGDYKRSF

SEQ ID NO: 59516 - protein, 13 aa, Homo sapiens
  CDR3 for beta chain variable domain of TCR clone 29758 (TRBV9, TRBJ2-1)
CASSVGQGGEQFF

SEQ ID NO: 59517 - protein, 12 aa, Homo sapiens
  CDR3 for alpha chain variable domain of TCR clone 29759 (TRAV16, TRAJ10)
CSRTGGGNKLTF

SEQ ID NO: 59518 - protein, 14 aa, Homo sapiens
  CDR3 for beta chain variable domain of TCR clone 29759 (TRBV6-1, TRBJ1-3)
CASVQGGGGNTIYF

SEQ ID NO: 59519 - protein, 14 aa, Homo sapiens
  CDR3 for alpha chain variable domain of TCR clone 29760 (TRAV38-1, TRAJ45)
GAYYSGGGADGLTF

SEQ ID NO: 59520 - protein, 20 aa, Homo sapiens
  CDR3 for beta chain variable domain of TCR clone 29760 (TRBV28, TRBJ2-1)
CASTPIGRSPGLAGGNEQFF

SEQ ID NO: 59521 - protein, 15 aa, Homo sapiens
  CDR3 for alpha chain variable domain of TCR clone 29761 (TRAV8-2, TRAJ40)
CVVLGTTSGTYNYIF

SEQ ID NO: 59522 - protein, 16 aa, Homo sapiens
  CDR3 for beta chain variable domain of TCR clone 29761 (TRBV7-3, TRBJ2-1)
CASSLEGYRSYNEQFF

SEQ ID NO: 59523 - protein, 15 aa, Homo sapiens
  CDR3 for alpha chain variable domain of TCR clone 29762 (TRAV26-1, TRAJ44)
CIVRIGTGTASKLTF

SEQ ID NO: 59524 - protein, 14 aa, Homo sapiens
  CDR3 for beta chain variable domain of TCR clone 29762 (TRBV7-2, TRBJ2-7)
CASSLYPGRYEQYF

SEQ ID NO: 59525 - protein, 12 aa, Homo sapiens
  CDR3 for alpha chain variable domain of TCR clone 29763 (TRAV8-3, TRAJ26)
CAGDNYGQNFVF

SEQ ID NO: 59526 - protein, 14 aa, Homo sapiens
  CDR3 for beta chain variable domain of TCR clone 29763 (TRBV10-3, TRBJ1-3)
CAIRGQRAGNTIYF

SEQ ID NO: 59527 - protein, 13 aa, Homo sapiens
  CDR3 for alpha chain variable domain of TCR clone 29764 (TRAV35, TRAJ32)
CAGVGGATNKLIF

SEQ ID NO: 59528 - protein, 17 aa, Homo sapiens
  CDR3 for beta chain variable domain of TCR clone 29764 (TRBV4-3, TRBJ2-1)
CASSQCSSGRASGEQFF

SEQ ID NO: 59529 - protein, 13 aa, Homo sapiens
  CDR3 for alpha chain variable domain of TCR clone 29765 (TRAV2, TRAJ15)
CAVASQAGTALIF

SEQ ID NO: 59530 - protein, 16 aa, Homo sapiens
  CDR3 for beta chain variable domain of TCR clone 29765 (TRBV5-1, TRBJ1-1)
CASSSVGNSLNTEAFF

SEQ ID NO: 59531 - protein, 16 aa, Homo sapiens
  CDR3 for alpha chain variable domain of TCR clone 29766 (TRAV21, TRAJ37)
CAVRPRGPSNTGKLIF

SEQ ID NO: 59532 - protein, 13 aa, Homo sapiens
  CDR3 for beta chain variable domain of TCR clone 29766 (TRBV7-9, TRBJ2-5)
CASLSPGQETQYF

SEQ ID NO: 59533 - protein, 14 aa, Homo sapiens
  CDR3 for alpha chain variable domain of TCR clone 29767 (TRAV1-2, TRAJ16)
CAVNRFSDGQKLLF

SEQ ID NO: 59534 - protein, 15 aa, Homo sapiens
  CDR3 for beta chain variable domain of TCR clone 29767 (TRBV7-9, TRBJ1-1)
CASSLLEQGGTEAFF

SEQ ID NO: 59535 - protein, 15 aa, Homo sapiens
  CDR3 for alpha chain variable domain of TCR clone 29768 (TRAV17, TRAJ57)
CATGPSQGGSEKLVF

SEQ ID NO: 59536 - protein, 16 aa, Homo sapiens
  CDR3 for beta chain variable domain of TCR clone 29768 (TRBV12-4, TRBJ1-5)
CASSRPVGGSNQPKHF

SEQ ID NO: 59537 - protein, 16 aa, Homo sapiens
  CDR3 for alpha chain variable domain of TCR clone 29769 (TRAV20, TRAJ22)
CAVQASSSGSVRQLTF

SEQ ID NO: 59538 - protein, 13 aa, Homo sapiens
  CDR3 for beta chain variable domain of TCR clone 29769 (TRBV7-2, TRBJ2-5)
CASSQTSVETQYF

SEQ ID NO: 59539 - protein, 13 aa, Homo sapiens
  CDR3 for alpha chain variable domain of TCR clone 29770 (TRAV35, TRAJ42)
CAGFPGSQGNLIF

SEQ ID NO: 59540 - protein, 15 aa, Homo sapiens
  CDR3 for beta chain variable domain of TCR clone 29770 (TRBV27, TRBJ2-1)
CASSNGGGSSNEQFF

SEQ ID NO: 59541 - protein, 16 aa, Homo sapiens
  CDR3 for alpha chain variable domain of TCR clone 29771 (TRAV8-3, TRAJ13)
CAVGSYPSGGYQKVTF

SEQ ID NO: 59542 - protein, 15 aa, Homo sapiens
  CDR3 for beta chain variable domain of TCR clone 29771 (TRBV19, TRBJ1-5)
CASSIVWADNQPQHF

SEQ ID NO: 59543 - protein, 14 aa, Homo sapiens
  CDR3 for alpha chain variable domain of TCR clone 29772 (TRAV1-2, TRAJ16)
CAVNRFSDGQKLLF

SEQ ID NO: 59544 - protein, 13 aa, Homo sapiens
  CDR3 for beta chain variable domain of TCR clone 29772 (TRBV11-3, TRBJ2-3)
CASSHDTKDTQYF

SEQ ID NO: 59545 - protein, 12 aa, Homo sapiens
  CDR3 for alpha chain variable domain of TCR clone 29773 (TRAV2, TRAJ9)
CAVGAGGFKTIF

SEQ ID NO: 59546 - protein, 16 aa, Homo sapiens
  CDR3 for beta chain variable domain of TCR clone 29773 (TRBV27, TRBJ2-7)
CASSSERRDSAYEQYF

SEQ ID NO: 59547 - protein, 14 aa, Homo sapiens
  CDR3 for alpha chain variable domain of TCR clone 29774 (TRAV2, TRAJ41)
CAVVTSNSGYALNF

SEQ ID NO: 59548 - protein, 13 aa, Homo sapiens
  CDR3 for beta chain variable domain of TCR clone 29774 (TRBV4-1, TRBJ2-1)
CASSQEVQYEQFF

SEQ ID NO: 59549 - protein, 12 aa, Homo sapiens
  CDR3 for alpha chain variable domain of TCR clone 29775 (TRAV13-2, TRAJ58)
CAERRLDSRLTF

SEQ ID NO: 59550 - protein, 15 aa, Homo sapiens
  CDR3 for beta chain variable domain of TCR clone 29775 (TRBV5-1, TRBJ2-5)
CASSSGREMVEIQYF

SEQ ID NO: 59551 - protein, 13 aa, Homo sapiens
  CDR3 for alpha chain variable domain of TCR clone 29776 (TRAV21, TRAJ27)
CAARPGNAGKSTF

SEQ ID NO: 59552 - protein, 14 aa, Homo sapiens
  CDR3 for beta chain variable domain of TCR clone 29776 (TRBV11-2, TRBJ2-7)
CASSSTGEGYEQYF

SEQ ID NO: 59553 - protein, 13 aa, Homo sapiens
  CDR3 for alpha chain variable domain of TCR clone 29777 (TRAV21, TRAJ20)
CAVGLRVDYKLSF

SEQ ID NO: 59554 - protein, 15 aa, Homo sapiens
  CDR3 for beta chain variable domain of TCR clone 29777 (TRBV29-1, TRBJ2-1)
CSVPTGLALYNEQFL

SEQ ID NO: 59555 - protein, 14 aa, Homo sapiens
  CDR3 for alpha chain variable domain of TCR clone 29778 (TRAV12-1, TRAJ30)
CVVNIGGRDDKIIF

SEQ ID NO: 59556 - protein, 15 aa, Homo sapiens
  CDR3 for beta chain variable domain of TCR clone 29778 (TRBV18, TRBJ1-2)
CASSPSNTPNYGDTF

SEQ ID NO: 59557 - protein, 16 aa, Homo sapiens
  CDR3 for alpha chain variable domain of TCR clone 29779 (TRAV23/DV6, TRAJ9)
CAASIGGNTGDFKTIF

SEQ ID NO: 59558 - protein, 14 aa, Homo sapiens
  CDR3 for beta chain variable domain of TCR clone 29779 (TRBV9, TRBJ2-7)
CASSVGVGSYEQYF

SEQ ID NO: 59559 - protein, 14 aa, Homo sapiens
  CDR3 for alpha chain variable domain of TCR clone 29780 (TRAV16, TRAJ32)
CALKSGGATNNLIF

SEQ ID NO: 59560 - protein, 13 aa, Homo sapiens
  CDR3 for beta chain variable domain of TCR clone 29780 (TRBV15, TRBJ1-6)
CATSGGLNSPLHF

SEQ ID NO: 59561 - protein, 14 aa, Homo sapiens
  CDR3 for alpha chain variable domain of TCR clone 29781 (TRAV1-2, TRAJ16)
CAVNRFSDGQKLLF

SEQ ID NO: 59562 - protein, 15 aa, Homo sapiens
  CDR3 for beta chain variable domain of TCR clone 29781 (TRBV20-1, TRBJ2-7)
RSARDRVSGMDEQYF

SEQ ID NO: 59563 - protein, 16 aa, Homo sapiens
  CDR3 for alpha chain variable domain of TCR clone 29782 (TRAV30, TRAJ24)
CGTEIADADSWGKFQF

SEQ ID NO: 59564 - protein, 14 aa, Homo sapiens
  CDR3 for beta chain variable domain of TCR clone 29782 (TRBV13, TRBJ2-1)
CASSPRPRYNEQFF

SEQ ID NO: 59565 - protein, 12 aa, Homo sapiens
  CDR3 for alpha chain variable domain of TCR clone 29783 (TRAV12-3, TRAJ17)
CAMTLTGNKLTF

SEQ ID NO: 59566 - protein, 13 aa, Homo sapiens
  CDR3 for beta chain variable domain of TCR clone 29783 (TRBV4-1, TRBJ2-1)
CASSQAGGDEQFF

SEQ ID NO: 59567 - protein, 12 aa, Homo sapiens
  CDR3 for alpha chain variable domain of TCR clone 29784 (TRAV12-3, TRAJ20)
CAMVRGDYKLSF

SEQ ID NO: 59568 - protein, 14 aa, Homo sapiens
  CDR3 for beta chain variable domain of TCR clone 29784 (TRBV5-5, TRBJ1-5)
CASSGQGVDQHQHF

SEQ ID NO: 59569 - protein, 15 aa, Homo sapiens
  CDR3 for alpha chain variable domain of TCR clone 29785 (TRAV3, TRAJ47)
CAVRDIGEYGNKLVF

SEQ ID NO: 59570 - protein, 14 aa, Homo sapiens
  CDR3 for beta chain variable domain of TCR clone 29785 (TRBV13, TRBJ2-5)
CASRLERVGETQYF

SEQ ID NO: 59571 - protein, 13 aa, Homo sapiens
  CDR3 for alpha chain variable domain of TCR clone 29786 (TRAV20, TRAJ34)
CAVRFYNTDKLIF

SEQ ID NO: 59572 - protein, 12 aa, Homo sapiens
  CDR3 for beta chain variable domain of TCR clone 29786 (TRBV11-2, TRBJ2-1)
CASSPGNNEQFF

SEQ ID NO: 59573 - protein, 14 aa, Homo sapiens
  CDR3 for alpha chain variable domain of TCR clone 29787 (TRAV1-2, TRAJ16)
CAVNRFSDGQKLLF

SEQ ID NO: 59574 - protein, 16 aa, Homo sapiens
  CDR3 for beta chain variable domain of TCR clone 29787 (TRBV7-9, TRBJ2-3)
CASSPWREVGTDTQYF

SEQ ID NO: 59575 - protein, 14 aa, Homo sapiens
  CDR3 for alpha chain variable domain of TCR clone 29788 (TRAV21, TRAJ45)
CAVSSGGGADGLTF

SEQ ID NO: 59576 - protein, 15 aa, Homo sapiens
  CDR3 for beta chain variable domain of TCR clone 29788 (TRBV4-1, TRBJ1-4)
CASSDTGGTNEKLFF

SEQ ID NO: 59577 - protein, 15 aa, Homo sapiens
  CDR3 for alpha chain variable domain of TCR clone 29789 (TRAV1-2, TRAJ28)
CAVQYSGAGSYQLTF

SEQ ID NO: 59578 - protein, 15 aa, Homo sapiens
  CDR3 for beta chain variable domain of TCR clone 29789 (TRBV28, TRBJ2-7)
CASKAGGYTSSTSGR

SEQ ID NO: 59579 - protein, 14 aa, Homo sapiens
  CDR3 for alpha chain variable domain of TCR clone 29790 (TRAV12-2, TRAJ13)
CAVKKTGGYQKVTF

SEQ ID NO: 59580 - protein, 17 aa, Homo sapiens
  CDR3 for beta chain variable domain of TCR clone 29790 (TRBV13, TRBJ2-3)
CACSLSRVAGGRNTQYF

SEQ ID NO: 59581 - protein, 13 aa, Homo sapiens
  CDR3 for alpha chain variable domain of TCR clone 29791 (TRAV8-6, TRAJ49)
CAVITNTGNQFYF

SEQ ID NO: 59582 - protein, 17 aa, Homo sapiens
  CDR3 for beta chain variable domain of TCR clone 29791 (TRBV11-2, TRBJ2-1)
CASSLYPPGVEYSEQFF

SEQ ID NO: 59583 - protein, 11 aa, Homo sapiens
  CDR3 for alpha chain variable domain of TCR clone 29792 (TRAV12-3, TRAJ49)
CAANTGSQFYF

SEQ ID NO: 59584 - protein, 12 aa, Homo sapiens
  CDR3 for beta chain variable domain of TCR clone 29792 (TRBV6-3, TRBJ2-7)
CASSEPGFEQYF

SEQ ID NO: 59585 - protein, 13 aa, Homo sapiens
  CDR3 for alpha chain variable domain of TCR clone 29793 (TRAV9-2, TRAJ53)
CALSGGSNYKLTF

SEQ ID NO: 59586 - protein, 13 aa, Homo sapiens
  CDR3 for beta chain variable domain of TCR clone 29793 (TRBV7-9, TRBJ1-2)
CASSLKQNYGYTF

SEQ ID NO: 59587 - protein, 15 aa, Homo sapiens
  CDR3 for alpha chain variable domain of TCR clone 29794 (TRAV22, TRAJ28)
CAARRSGAGSYQLTF

SEQ ID NO: 59588 - protein, 14 aa, Homo sapiens
  CDR3 for beta chain variable domain of TCR clone 29794 (TRBV18, TRBJ2-5)
CASSPRASSETQYF

SEQ ID NO: 59589 - protein, 13 aa, Homo sapiens
  CDR3 for alpha chain variable domain of TCR clone 29795 (TRAV8-6, TRAJ50)
CAVIKTSYDKVIF

SEQ ID NO: 59590 - protein, 13 aa, Homo sapiens
  CDR3 for beta chain variable domain of TCR clone 29795 (TRBV4-2, TRBJ1-1)
CASGQAGNTEAFF

SEQ ID NO: 59591 - protein, 14 aa, Homo sapiens
  CDR3 for alpha chain variable domain of TCR clone 29796 (TRAV13-1, TRAJ35)
CAASKGGFGNVLHC

SEQ ID NO: 59592 - protein, 13 aa, Homo sapiens
  CDR3 for beta chain variable domain of TCR clone 29796 (TRBV7-3, TRBJ1-1)
CASSQDWGSEAFF

SEQ ID NO: 59593 - protein, 22 aa, Homo sapiens
  CDR3 for alpha chain variable domain of TCR clone 29797 (TRAV12-1, TRAJ30)
CVVNIGGEMTRSSLEKGHDFIF

SEQ ID NO: 59594 - protein, 13 aa, Homo sapiens
  CDR3 for beta chain variable domain of TCR clone 29797 (TRBV12-5, TRBJ2-1)
CASGLGRGNEQFF

SEQ ID NO: 59595 - protein, 14 aa, Homo sapiens
  CDR3 for alpha chain variable domain of TCR clone 29798 (TRAV4, TRAJ17)
CLVGDMAVGNKLTF

SEQ ID NO: 59596 - protein, 14 aa, Homo sapiens
  CDR3 for beta chain variable domain of TCR clone 29798 (TRBV4-1, TRBJ2-7)
CASSPVAGGDEQYF

SEQ ID NO: 59597 - protein, 15 aa, Homo sapiens
  CDR3 for alpha chain variable domain of TCR clone 29799 (TRAV38-1, TRAJ37)
CAFIFGSGNAGKLIF

SEQ ID NO: 59598 - protein, 12 aa, Homo sapiens
  CDR3 for beta chain variable domain of TCR clone 29799 (TRBV7-9, TRBJ2-7)
CASSLEGYEQYF

SEQ ID NO: 59599 - protein, 15 aa, Homo sapiens
  CDR3 for alpha chain variable domain of TCR clone 29800 (TRAV1-2, TRAJ39)
CAVRDRDNAGNMLTF

SEQ ID NO: 59600 - protein, 15 aa, Homo sapiens
  CDR3 for beta chain variable domain of TCR clone 29800 (TRBV13, TRBJ1-3)
CASSPNRGSGNTICF

SEQ ID NO: 59601 - protein, 16 aa, Homo sapiens
  CDR3 for alpha chain variable domain of TCR clone 29801 (TRAV16, TRAJ4)
CALSRMFSGGYNKLIF

SEQ ID NO: 59602 - protein, 18 aa, Homo sapiens
  CDR3 for beta chain variable domain of TCR clone 29801 (TRBV11-2, TRBJ2-3)
CASSLGGASRGAPNTQYF

SEQ ID NO: 59603 - protein, 11 aa, Homo sapiens
  CDR3 for alpha chain variable domain of TCR clone 29802 (TRAV12-1, TRAJ21)
CVAYNFNKFYF

SEQ ID NO: 59604 - protein, 14 aa, Homo sapiens
  CDR3 for beta chain variable domain of TCR clone 29802 (TRBV19, TRBJ2-7)
CASSMGQGAIEQYF

SEQ ID NO: 59605 - protein, 15 aa, Homo sapiens
  CDR3 for alpha chain variable domain of TCR clone 29803 (TRAV27, TRAJ38)
CAARRNAGNNRKLIW

SEQ ID NO: 59606 - protein, 13 aa, Homo sapiens
  CDR3 for beta chain variable domain of TCR clone 29803 (TRBV12-5, TRBJ2-3)
CASGDRHSDTQYF

SEQ ID NO: 59607 - protein, 17 aa, Homo sapiens
  CDR3 for alpha chain variable domain of TCR clone 29804 (TRAV3, TRAJ6)
CAVRDGPRAGGSYIPTF

SEQ ID NO: 59608 - protein, 18 aa, Homo sapiens
  CDR3 for beta chain variable domain of TCR clone 29804 (TRBV7-9, TRBJ2-7)
CASSLTTSGSRTWYEQCF

SEQ ID NO: 59609 - protein, 23 aa, Homo sapiens
  CDR3 for alpha chain variable domain of TCR clone 29805 (TRAV30, TRAJ43)
CTLRPPSSVTQEPTSAALSDMRF

SEQ ID NO: 59610 - protein, 13 aa, Homo sapiens
  CDR3 for beta chain variable domain of TCR clone 29805 (TRBV12-4, TRBJ2-2)
CASSSTGSGELFF

SEQ ID NO: 59611 - protein, 15 aa, Homo sapiens
  CDR3 for alpha chain variable domain of TCR clone 29806 (TRAV38-1, TRAJ37)
CAFIHGPGNTGKLIF

SEQ ID NO: 59612 - protein, 12 aa, Homo sapiens
  CDR3 for beta chain variable domain of TCR clone 29806 (TRBV7-9, TRBJ2-7)
CASSFGSYEQYF

SEQ ID NO: 59613 - protein, 16 aa, Homo sapiens
  CDR3 for alpha chain variable domain of TCR clone 29807 (TRAV27, TRAJ52)
CAGAPAGGTSYGKLTF

SEQ ID NO: 59614 - protein, 12 aa, Homo sapiens
  CDR3 for beta chain variable domain of TCR clone 29807 (TRBV27, TRBJ2-1)
CASRGFCNEQFF

SEQ ID NO: 59615 - protein, 13 aa, Homo sapiens
  CDR3 for alpha chain variable domain of TCR clone 29808 (TRAV35, TRAJ20)
CAGPLSNDYKLSF

SEQ ID NO: 59616 - protein, 14 aa, Homo sapiens
  CDR3 for beta chain variable domain of TCR clone 29808 (TRBV9, TRBJ2-7)
CASSVGVGFYEQYF

SEQ ID NO: 59617 - protein, 14 aa, Homo sapiens
  CDR3 for alpha chain variable domain of TCR clone 29809 (TRAV17, TRAJ16)
CATADFSDGQKLLF

SEQ ID NO: 59618 - protein, 15 aa, Homo sapiens
  CDR3 for beta chain variable domain of TCR clone 29809 (TRBV18, TRBJ2-1)
CASSPPSSSYNEQFF

SEQ ID NO: 59619 - protein, 13 aa, Homo sapiens
  CDR3 for alpha chain variable domain of TCR clone 29810 (TRAV1-2, TRAJ9)
RAALNTGGFKTIF

SEQ ID NO: 59620 - protein, 16 aa, Homo sapiens
  CDR3 for beta chain variable domain of TCR clone 29810 (TRBV11-2, TRBJ2-1)
CASSPRLAGVYNEQFF

SEQ ID NO: 59621 - protein, 16 aa, Homo sapiens
  CDR3 for alpha chain variable domain of TCR clone 29811 (TRAV30, TRAJ24)
CGTEIVDADSWGKFQF

SEQ ID NO: 59622 - protein, 19 aa, Homo sapiens
  CDR3 for beta chain variable domain of TCR clone 29811 (TRBV25-1, TRBJ2-2)
CAILVCRVDRGRKTGELFF

SEQ ID NO: 59623 - protein, 14 aa, Homo sapiens
  CDR3 for alpha chain variable domain of TCR clone 29812 (TRAV1-2, TRAJ16)
CAVNRFSDGQKLLF

SEQ ID NO: 59624 - protein, 14 aa, Homo sapiens
  CDR3 for beta chain variable domain of TCR clone 29812 (TRBV19, TRBJ2-7)
CASSTTRSSYEQYF

SEQ ID NO: 59625 - protein, 15 aa, Homo sapiens
  CDR3 for alpha chain variable domain of TCR clone 29813 (TRAV29/DV5, TRAJ40)
CAASAQGSGTYKYIF

SEQ ID NO: 59626 - protein, 13 aa, Homo sapiens
  CDR3 for beta chain variable domain of TCR clone 29813 (TRBV10-3, TRBJ2-7)
CASKLAVNYEQYF

SEQ ID NO: 59627 - protein, 18 aa, Homo sapiens
  CDR3 for alpha chain variable domain of TCR clone 29814 (TRAV26-2, TRAJ45)
CILRLWGYSGGGAEGLTF

SEQ ID NO: 59628 - protein, 17 aa, Homo sapiens
  CDR3 for beta chain variable domain of TCR clone 29814 (TRBV28, TRBJ2-3)
CASSPTPAGGRVDTQYF

SEQ ID NO: 59629 - protein, 15 aa, Homo sapiens
  CDR3 for alpha chain variable domain of TCR clone 29815 (TRAV25, TRAJ52)
CAGTSGGTSYGKLTF

SEQ ID NO: 59630 - protein, 12 aa, Homo sapiens
  CDR3 for beta chain variable domain of TCR clone 29815 (TRBV6-5, TRBJ2-5)
CQQSQGGETQYF

SEQ ID NO: 59631 - protein, 14 aa, Homo sapiens
  CDR3 for alpha chain variable domain of TCR clone 29816 (TRAV12-2, TRAJ11)
CAVNRESGYSTLPF

SEQ ID NO: 59632 - protein, 10 aa, Homo sapiens
  CDR3 for beta chain variable domain of TCR clone 29816 (TRBV20-1, TRBJ2-5)
CSARFETQYF

SEQ ID NO: 59633 - protein, 11 aa, Homo sapiens
  CDR3 for alpha chain variable domain of TCR clone 29817 (TRAV21, TRAJ31)
CAVRTNARLMF

SEQ ID NO: 59634 - protein, 17 aa, Homo sapiens
  CDR3 for beta chain variable domain of TCR clone 29817 (TRBV28, TRBJ1-5)
CASSLSWLVSSNQPQHF

SEQ ID NO: 59635 - protein, 14 aa, Homo sapiens
  CDR3 for alpha chain variable domain of TCR clone 29818 (TRAV29/DV5, TRAJ48)
CAAMALFGNEKLTF

SEQ ID NO: 59636 - protein, 13 aa, Homo sapiens
  CDR3 for beta chain variable domain of TCR clone 29818 (TRBV7-3, TRBJ1-1)
CASSQDWGAEAFF

SEQ ID NO: 59637 - protein, 11 aa, Homo sapiens
  CDR3 for alpha chain variable domain of TCR clone 29819 (TRAV16, TRAJ31)
CALFNNARLML

SEQ ID NO: 59638 - protein, 15 aa, Homo sapiens
  CDR3 for beta chain variable domain of TCR clone 29819 (TRBV18, TRBJ1-1)
CASSPRQGENTEAFF

SEQ ID NO: 59639 - protein, 11 aa, Homo sapiens
  CDR3 for alpha chain variable domain of TCR clone 29820 (TRAV35, TRAJ30)
CAGPGDDKIIF

SEQ ID NO: 59640 - protein, 12 aa, Homo sapiens
  CDR3 for beta chain variable domain of TCR clone 29820 (TRBV27, TRBJ2-1)
CAGRGFYNEQFF

SEQ ID NO: 59641 - protein, 13 aa, Homo sapiens
  CDR3 for alpha chain variable domain of TCR clone 29821 (TRAV30, TRAJ34)
CGTVGYNTDKLIL

SEQ ID NO: 59642 - protein, 16 aa, Homo sapiens
  CDR3 for beta chain variable domain of TCR clone 29821 (TRBV7-9, TRBJ1-2)
CASSLGFSSGEDGYTF

SEQ ID NO: 59643 - protein, 13 aa, Homo sapiens
  CDR3 for alpha chain variable domain of TCR clone 29822 (TRAV16, TRAJ52)
CALRGTSYGKLTF

SEQ ID NO: 59644 - protein, 15 aa, Homo sapiens
  CDR3 for beta chain variable domain of TCR clone 29822 (TRBV19, TRBJ2-7)
CASRPTPGLSIEQYF

SEQ ID NO: 59645 - protein, 19 aa, Homo sapiens
  CDR3 for alpha chain variable domain of TCR clone 29823 (TRAV8-4, TRAJ3)
CAVTGENLVQQCFHDNLWI

SEQ ID NO: 59646 - protein, 16 aa, Homo sapiens
  CDR3 for beta chain variable domain of TCR clone 29823 (TRBV4-2, TRBJ1-1)
CASSQAGFGMNTEAFF

SEQ ID NO: 59647 - protein, 12 aa, Homo sapiens
  CDR3 for alpha chain variable domain of TCR clone 29824 (TRAV17, TRAJ15)
CAASQAGTALIF

SEQ ID NO: 59648 - protein, 18 aa, Homo sapiens
  CDR3 for beta chain variable domain of TCR clone 29824 (TRBV7-9, TRBJ2-3)
CASSLPINGQISTDTQYF

SEQ ID NO: 59649 - protein, 12 aa, Homo sapiens
  CDR3 for alpha chain variable domain of TCR clone 29825 (TRAV1-2, TRAJ26)
CAVRDLITMVRI

SEQ ID NO: 59650 - protein, 15 aa, Homo sapiens
  CDR3 for beta chain variable domain of TCR clone 29825 (TRBV27, TRBJ2-1)
CASSNGGGSSNEQFF

SEQ ID NO: 59651 - protein, 16 aa, Homo sapiens
  CDR3 for alpha chain variable domain of TCR clone 29826 (TRAV3, TRAJ10)
CAVRDMRAGGGNKLTF

SEQ ID NO: 59652 - protein, 19 aa, Homo sapiens
  CDR3 for beta chain variable domain of TCR clone 29826 (TRBV6-3, TRBJ1-2)
CASSYSKGRTGPPNYGYAF

SEQ ID NO: 59653 - protein, 19 aa, Homo sapiens
  CDR3 for alpha chain variable domain of TCR clone 29827 (TRAV26-1, TRAJ52)
CIVRAHRNAGGTSYGKPTF

SEQ ID NO: 59654 - protein, 15 aa, Homo sapiens
  CDR3 for beta chain variable domain of TCR clone 29827 (TRBV12-4, TRBJ2-5)
CASSPPTGLQETQYF

SEQ ID NO: 59655 - protein, 15 aa, Homo sapiens
  CDR3 for alpha chain variable domain of TCR clone 29828 (TRAV12-3, TRAJ10)
CASYILTGGGNKLTF

SEQ ID NO: 59656 - protein, 15 aa, Homo sapiens
  CDR3 for beta chain variable domain of TCR clone 29828 (TRBV7-2, TRBJ1-6)
CASSLGPDRGMPLLF

SEQ ID NO: 59657 - protein, 14 aa, Homo sapiens
  CDR3 for alpha chain variable domain of TCR clone 29829 (TRAV1-2, TRAJ16)
CAVNRFSDGQKLLL

SEQ ID NO: 59658 - protein, 12 aa, Homo sapiens
  CDR3 for beta chain variable domain of TCR clone 29829 (TRBV11-2, TRBJ2-2)
CASSLGGGELFF

SEQ ID NO: 59659 - protein, 14 aa, Homo sapiens
  CDR3 for alpha chain variable domain of TCR clone 29830 (TRAV1-2, TRAJ8)
CAVREDTGFQKLVF

SEQ ID NO: 59660 - protein, 13 aa, Homo sapiens
  CDR3 for beta chain variable domain of TCR clone 29830 (TRBV7-3, TRBJ2-1)
CAGSLDSYNEQFF

SEQ ID NO: 59661 - protein, 13 aa, Homo sapiens
  CDR3 for alpha chain variable domain of TCR clone 29831 (TRAV26-1, TRAJ30)
CIVNMNRDDEIIF

SEQ ID NO: 59662 - protein, 16 aa, Homo sapiens
  CDR3 for beta chain variable domain of TCR clone 29831 (TRBV16, TRBJ2-7)
CASSRPAGGSSYEQYF

SEQ ID NO: 59663 - protein, 14 aa, Homo sapiens
  CDR3 for alpha chain variable domain of TCR clone 29832 (TRAV1-2, TRAJ8)
CAVREDTGFQKPVF

SEQ ID NO: 59664 - protein, 14 aa, Homo sapiens
  CDR3 for beta chain variable domain of TCR clone 29832 (TRBV12-5, TRBJ2-5)
CASGSRTHQETQYF

SEQ ID NO: 59665 - protein, 13 aa, Homo sapiens
  CDR3 for alpha chain variable domain of TCR clone 29833 (TRAV23/DV6, TRAJ22)
AAGEAGSARQLTF

SEQ ID NO: 59666 - protein, 15 aa, Homo sapiens
  CDR3 for beta chain variable domain of TCR clone 29833 (TRBV10-3, TRBJ2-3)
CAIDTSGRRTDTQYF

SEQ ID NO: 59667 - protein, 14 aa, Homo sapiens
  CDR3 for alpha chain variable domain of TCR clone 29834 (TRAV1-2, TRAJ8)
CAVREDTGFQKLVF

SEQ ID NO: 59668 - protein, 17 aa, Homo sapiens
  CDR3 for beta chain variable domain of TCR clone 29834 (TRBV7-3, TRBJ2-5)
CASSLGSGRSGSETQYF

SEQ ID NO: 59669 - protein, 18 aa, Homo sapiens
  CDR3 for alpha chain variable domain of TCR clone 29835 (TRAV26-2, TRAJ45)
CILRVDKYSGGGADGLTF

SEQ ID NO: 59670 - protein, 18 aa, Homo sapiens
  CDR3 for beta chain variable domain of TCR clone 29835 (TRBV2, TRBJ1-4)
CASNLLQGATNEKLFLAV

SEQ ID NO: 59671 - protein, 17 aa, Homo sapiens
  CDR3 for alpha chain variable domain of TCR clone 29836 (TRAV8-6, TRAJ58)
CAVSSCVGETSGSRLTF

SEQ ID NO: 59672 - protein, 14 aa, Homo sapiens
  CDR3 for beta chain variable domain of TCR clone 29836 (TRBV4-2, TRBJ2-1)
CASGLDRAYNEQFF

SEQ ID NO: 59673 - protein, 16 aa, Homo sapiens
  CDR3 for alpha chain variable domain of TCR clone 29837 (TRAV12-3, TRAJ53)
CAMSPGSGGSNYKLTF

SEQ ID NO: 59674 - protein, 12 aa, Homo sapiens
  CDR3 for beta chain variable domain of TCR clone 29837 (TRBV12-4, TRBJ2-7)
CASSLGGYEQYF

SEQ ID NO: 59675 - protein, 12 aa, Homo sapiens
  CDR3 for alpha chain variable domain of TCR clone 29838 (TRAV1-1, TRAJ8)
CAGGTGFQRLVF

SEQ ID NO: 59676 - protein, 15 aa, Homo sapiens
  CDR3 for beta chain variable domain of TCR clone 29838 (TRBV7-9, TRBJ1-4)
CASSRTGGFNEKLFF

SEQ ID NO: 59677 - protein, 14 aa, Homo sapiens
  CDR3 for alpha chain variable domain of TCR clone 29839 (TRAV1-2, TRAJ27)
CAPAEYANAGKSTF

SEQ ID NO: 59678 - protein, 18 aa, Homo sapiens
  CDR3 for beta chain variable domain of TCR clone 29839 (TRBV28, TRBJ1-2)
CASRQQQGKRGSNYGYTF

SEQ ID NO: 59679 - protein, 14 aa, Homo sapiens
  CDR3 for alpha chain variable domain of TCR clone 29840 (TRAV5, TRAJ21)
CAESILDNFNKFYF

SEQ ID NO: 59680 - protein, 15 aa, Homo sapiens
  CDR3 for beta chain variable domain of TCR clone 29840 (TRBV25-1, TRBJ1-4)
CASSPGDSTNEKLFF

SEQ ID NO: 59681 - protein, 16 aa, Homo sapiens
  CDR3 for alpha chain variable domain of TCR clone 29841 (TRAV12-1, TRAJ42)
CVVTPYYGGSQGNLIF

SEQ ID NO: 59682 - protein, 18 aa, Homo sapiens
  CDR3 for beta chain variable domain of TCR clone 29841 (TRBV24-1, TRBJ2-3)
CATSDLPRLAVGADTQYF

SEQ ID NO: 59683 - protein, 10 aa, Homo sapiens
  CDR3 for alpha chain variable domain of TCR clone 29842 (TRAV30, TRAJ48)
CGIGNEKLTF

SEQ ID NO: 59684 - protein, 14 aa, Homo sapiens
  CDR3 for beta chain variable domain of TCR clone 29842 (TRBV7-6, TRBJ2-3)
CASSGAGGTDTQYF

SEQ ID NO: 59685 - protein, 10 aa, Homo sapiens
  CDR3 for alpha chain variable domain of TCR clone 29843 (TRAV1-2, TRAJ20)
CACNDYKLSF

SEQ ID NO: 59686 - protein, 16 aa, Homo sapiens
  CDR3 for beta chain variable domain of TCR clone 29843 (TRBV20-1, TRBJ2-1)
CSARDLEQGMNNEQFF

SEQ ID NO: 59687 - protein, 11 aa, Homo sapiens
  CDR3 for alpha chain variable domain of TCR clone 29844 (TRAV13-1, TRAJ43)
CAAHNNNDMRF

SEQ ID NO: 59688 - protein, 12 aa, Homo sapiens
  CDR3 for beta chain variable domain of TCR clone 29844 (TRBV19, TRBJ2-1)
CASSMQDTEQFF

SEQ ID NO: 59689 - protein, 12 aa, Homo sapiens
  CDR3 for alpha chain variable domain of TCR clone 29845 (TRAV3, TRAJ26)
CAVRDYGQNFVF

SEQ ID NO: 59690 - protein, 16 aa, Homo sapiens
  CDR3 for beta chain variable domain of TCR clone 29845 (TRBV11-2, TRBJ1-2)
CASSPSGREANYGYSF

SEQ ID NO: 59691 - protein, 14 aa, Homo sapiens
  CDR3 for alpha chain variable domain of TCR clone 29846 (TRAV16, TRAJ15)
CALSFNQAGTALIF

SEQ ID NO: 59692 - protein, 16 aa, Homo sapiens
  CDR3 for beta chain variable domain of TCR clone 29846 (TRBV9, TRBJ2-7)
CASRAGPDRSPYEQYF

SEQ ID NO: 59693 - protein, 14 aa, Homo sapiens
  CDR3 for alpha chain variable domain of TCR clone 29847 (TRAV1-2, TRAJ29)
CAVRELTSATPLDF

SEQ ID NO: 59694 - protein, 16 aa, Homo sapiens
  CDR3 for beta chain variable domain of TCR clone 29847 (TRBV19, TRBJ1-5)
CASSTWAGGGNQPQHF

SEQ ID NO: 59695 - protein, 16 aa, Homo sapiens
  CDR3 for alpha chain variable domain of TCR clone 29848 (TRAV8-6, TRAJ4)
CAVTKILSGGYNKLIS

SEQ ID NO: 59696 - protein, 17 aa, Homo sapiens
  CDR3 for beta chain variable domain of TCR clone 29848 (TRBV20-1, TRBJ2-1)
CSASSSGLAGSYNEQFF

SEQ ID NO: 59697 - protein, 14 aa, Homo sapiens
  CDR3 for alpha chain variable domain of TCR clone 29849 (TRAV14/DV4, TRAJ34)
CAMREGRPHRQAHL

SEQ ID NO: 59698 - protein, 15 aa, Homo sapiens
  CDR3 for beta chain variable domain of TCR clone 29849 (TRBV11-3, TRBJ2-3)
CASLKDGREGDTQYF

SEQ ID NO: 59699 - protein, 10 aa, Homo sapiens
  CDR3 for alpha chain variable domain of TCR clone 29850 (TRAV21, TRAJ43)
CAVRIGDMRF

SEQ ID NO: 59700 - protein, 13 aa, Homo sapiens
  CDR3 for beta chain variable domain of TCR clone 29850 (TRBV20-1, TRBJ2-7)
CSAPGLVDYEQYF

SEQ ID NO: 59701 - protein, 13 aa, Homo sapiens
  CDR3 for alpha chain variable domain of TCR clone 29851 (TRAV35, TRAJ42)
CAGFPGSQGNLIF

SEQ ID NO: 59702 - protein, 13 aa, Homo sapiens
  CDR3 for beta chain variable domain of TCR clone 29851 (TRBV29-1, TRBJ2-1)
CSVEGGSVNEQFF

SEQ ID NO: 59703 - protein, 16 aa, Homo sapiens
  CDR3 for alpha chain variable domain of TCR clone 29852 (TRAV3, TRAJ10)
CAVRDMRAGGGNKPTF

SEQ ID NO: 59704 - protein, 16 aa, Homo sapiens
  CDR3 for beta chain variable domain of TCR clone 29852 (TRBV20-1, TRBJ1-4)
CSAPGQGLLTNEKLFF

SEQ ID NO: 59705 - protein, 14 aa, Homo sapiens
  CDR3 for alpha chain variable domain of TCR clone 29853 (TRAV12-2, TRAJ33)
CAVKRARSNYQLIW

SEQ ID NO: 59706 - protein, 12 aa, Homo sapiens
  CDR3 for beta chain variable domain of TCR clone 29853 (TRBV24-1, TRBJ2-3)
CATSDSTDTQYL

SEQ ID NO: 59707 - protein, 14 aa, Homo sapiens
  CDR3 for alpha chain variable domain of TCR clone 29854 (TRAV1-2, TRAJ8)
CAVREDTGFQKLVF

SEQ ID NO: 59708 - protein, 15 aa, Homo sapiens
  CDR3 for beta chain variable domain of TCR clone 29854 (TRBV7-2, TRBJ2-2)
CASRRPGQNTGELFF

SEQ ID NO: 59709 - protein, 14 aa, Homo sapiens
  CDR3 for alpha chain variable domain of TCR clone 29855 (TRAV17, TRAJ57)
CATDSQGGSEKLVF

SEQ ID NO: 59710 - protein, 18 aa, Homo sapiens
  CDR3 for beta chain variable domain of TCR clone 29855 (TRBV6-6, TRBJ1-3)
CASSYSKWDSISGNTIYF

SEQ ID NO: 59711 - protein, 14 aa, Homo sapiens
  CDR3 for alpha chain variable domain of TCR clone 29856 (TRAV16, TRAJ42)
RALLAGGSQGNLIF

SEQ ID NO: 59712 - protein, 13 aa, Homo sapiens
  CDR3 for beta chain variable domain of TCR clone 29856 (TRBV7-9, TRBJ1-2)
CASSLKQNYGYTF

SEQ ID NO: 59713 - protein, 10 aa, Homo sapiens
  CDR3 for alpha chain variable domain of TCR clone 29857 (TRAV16, TRAJ22)
SAMYLRQLTF

SEQ ID NO: 59714 - protein, 15 aa, Homo sapiens
  CDR3 for beta chain variable domain of TCR clone 29857 (TRBV7-9, TRBJ1-6)
CASSSPGRGNSPLHL

SEQ ID NO: 59715 - protein, 15 aa, Homo sapiens
  CDR3 for alpha chain variable domain of TCR clone 29858 (TRAV20, TRAJ58)
CAVQDLETSGSRLTF

SEQ ID NO: 59716 - protein, 12 aa, Homo sapiens
  CDR3 for beta chain variable domain of TCR clone 29858 (TRBV9, TRBJ2-2)
CASSARTGELFL

SEQ ID NO: 59717 - protein, 11 aa, Homo sapiens
  CDR3 for alpha chain variable domain of TCR clone 29859 (TRAV21, TRAJ34)
CAVTNTDKLIF

SEQ ID NO: 59718 - protein, 17 aa, Homo sapiens
  CDR3 for beta chain variable domain of TCR clone 29859 (TRBV20-1, TRBJ2-1)
CSARSPSGGPPIMSSSS

SEQ ID NO: 59719 - protein, 14 aa, Homo sapiens
  CDR3 for alpha chain variable domain of TCR clone 29860 (TRAV2, TRAJ9)
CAVEDRSGGFKTIF

SEQ ID NO: 59720 - protein, 16 aa, Homo sapiens
  CDR3 for beta chain variable domain of TCR clone 29860 (TRBV2, TRBJ2-1)
CASSVGGSLSYNEQFF

SEQ ID NO: 59721 - protein, 15 aa, Homo sapiens
  CDR3 for alpha chain variable domain of TCR clone 29861 (TRAV34, TRAJ38)
CGADFTTGNNRKLIW

SEQ ID NO: 59722 - protein, 16 aa, Homo sapiens
  CDR3 for beta chain variable domain of TCR clone 29861 (TRBV12-5, TRBJ2-5)
CASGPRTSGNQETQYF

SEQ ID NO: 59723 - protein, 19 aa, Homo sapiens
  CDR3 for alpha chain variable domain of TCR clone 29862 (TRAV38-1, TRAJ43)
CAFMKHNSGRHALWSRDQT

SEQ ID NO: 59724 - protein, 11 aa, Homo sapiens
  CDR3 for beta chain variable domain of TCR clone 29862 (TRBV7-9, TRBJ2-3)
CASSYTDTQYF

SEQ ID NO: 59725 - protein, 13 aa, Homo sapiens
  CDR3 for alpha chain variable domain of TCR clone 29863 (TRAV3, TRAJ21)
CAVREPDFNKFYF

SEQ ID NO: 59726 - protein, 15 aa, Homo sapiens
  CDR3 for beta chain variable domain of TCR clone 29863 (TRBV5-1, TRBJ2-4)
CASSFPTSGRVDQKH

SEQ ID NO: 59727 - protein, 13 aa, Homo sapiens
  CDR3 for alpha chain variable domain of TCR clone 29864 (TRAV8-3, TRAJ6)
CAVGSGGSYMPTF

SEQ ID NO: 59728 - protein, 14 aa, Homo sapiens
  CDR3 for beta chain variable domain of TCR clone 29864 (TRBV11-2, TRBJ1-1)
CASSTQRGRTEAFF

SEQ ID NO: 59729 - protein, 14 aa, Homo sapiens
  CDR3 for alpha chain variable domain of TCR clone 29865 (TRAV8-3, TRAJ4)
CAVGAAGGYNRLIF

SEQ ID NO: 59730 - protein, 14 aa, Homo sapiens
  CDR3 for beta chain variable domain of TCR clone 29865 (TRBV12-5, TRBJ2-5)
CASGSRTHQETQYF

SEQ ID NO: 59731 - protein, 12 aa, Homo sapiens
  CDR3 for alpha chain variable domain of TCR clone 29866 (TRAV13-2, TRAJ23)
CAERHRGGKLIF

SEQ ID NO: 59732 - protein, 16 aa, Homo sapiens
  CDR3 for beta chain variable domain of TCR clone 29866 (TRBV20-1, TRBJ1-4)
CSAPGQGLLTNEKMFF

SEQ ID NO: 59733 - protein, 14 aa, Homo sapiens
  CDR3 for alpha chain variable domain of TCR clone 29867 (TRAV16, TRAJ17)
CALSGRAAGSKLTF

SEQ ID NO: 59734 - protein, 15 aa, Homo sapiens
  CDR3 for beta chain variable domain of TCR clone 29867 (TRBV3-1, TRBJ1-2)
CASSPTRLPEGGYTF

SEQ ID NO: 59735 - protein, 13 aa, Homo sapiens
  CDR3 for alpha chain variable domain of TCR clone 29868 (TRAV2, TRAJ29)
CAAGNSGNTPLVF

SEQ ID NO: 59736 - protein, 16 aa, Homo sapiens
  CDR3 for beta chain variable domain of TCR clone 29868 (TRBV7-9, TRBJ1-2)
CASSPGGGAINYGYAF

SEQ ID NO: 59737 - protein, 14 aa, Homo sapiens
  CDR3 for alpha chain variable domain of TCR clone 29869 (TRAV1-2, TRAJ16)
CAVNRFSDGQKLLF

SEQ ID NO: 59738 - protein, 14 aa, Homo sapiens
  CDR3 for beta chain variable domain of TCR clone 29869 (TRBV19, TRBJ2-2)
CASSGQGIAGELFF

SEQ ID NO: 59739 - protein, 14 aa, Homo sapiens
  CDR3 for alpha chain variable domain of TCR clone 29870 (TRAV1-2, TRAJ16)
CAVNRFSDGQKLLF

SEQ ID NO: 59740 - protein, 14 aa, Homo sapiens
  CDR3 for beta chain variable domain of TCR clone 29870 (TRBV18, TRBJ1-4)
CASSPGPNGEKLFF

SEQ ID NO: 59741 - protein, 18 aa, Homo sapiens
  CDR3 for alpha chain variable domain of TCR clone 29871 (TRAV29/DV5, TRAJ52)
CAAGFRGAGGTSYGKLTF

SEQ ID NO: 59742 - protein, 14 aa, Homo sapiens
  CDR3 for beta chain variable domain of TCR clone 29871 (TRBV28, TRBJ1-1)
CASSPRTRWAEAFF

SEQ ID NO: 59743 - protein, 13 aa, Homo sapiens
  CDR3 for alpha chain variable domain of TCR clone 29872 (TRAV13-1, TRAJ5)
CAASDTGRRALTV

SEQ ID NO: 59744 - protein, 12 aa, Homo sapiens
  CDR3 for beta chain variable domain of TCR clone 29872 (TRBV28, TRBJ2-3)
CASSLYRDTQYF

SEQ ID NO: 59745 - protein, 14 aa, Homo sapiens
  CDR3 for alpha chain variable domain of TCR clone 29873 (TRAV20, TRAJ56)
CAVQFGGANSKLTF

SEQ ID NO: 59746 - protein, 14 aa, Homo sapiens
  CDR3 for beta chain variable domain of TCR clone 29873 (TRBV20-1, TRBJ2-7)
CSAKRGKSSYEQYF

SEQ ID NO: 59747 - protein, 16 aa, Homo sapiens
  CDR3 for alpha chain variable domain of TCR clone 29874 (TRAV16, TRAJ4)
CALSRMFSGGYNKLIF

SEQ ID NO: 59748 - protein, 13 aa, Homo sapiens
  CDR3 for beta chain variable domain of TCR clone 29874 (TRBV3-1, TRBJ1-1)
CASSPGVITEAFF

SEQ ID NO: 59749 - protein, 15 aa, Homo sapiens
  CDR3 for alpha chain variable domain of TCR clone 29875 (TRAV8-3, TRAJ6)
CAVGEDRGGSYIPTF

SEQ ID NO: 59750 - protein, 14 aa, Homo sapiens
  CDR3 for beta chain variable domain of TCR clone 29875 (TRBV27, TRBJ2-2)
CASLRSPPSGELFF

SEQ ID NO: 59751 - protein, 11 aa, Homo sapiens
  CDR3 for alpha chain variable domain of TCR clone 29876 (TRAV1-2, TRAJ31)
CAANNNARLMF

SEQ ID NO: 59752 - protein, 15 aa, Homo sapiens
  CDR3 for beta chain variable domain of TCR clone 29876 (TRBV28, TRBJ2-1)
CASSIIAGGRSEQFF

SEQ ID NO: 59753 - protein, 13 aa, Homo sapiens
  CDR3 for alpha chain variable domain of TCR clone 29877 (TRAV1-2, TRAJ9)
CAALNTGGFKAIF

SEQ ID NO: 59754 - protein, 15 aa, Homo sapiens
  CDR3 for beta chain variable domain of TCR clone 29877 (TRBV19, TRBJ1-1)
CASTSGQIQNTEAFF

SEQ ID NO: 59755 - protein, 12 aa, Homo sapiens
  CDR3 for alpha chain variable domain of TCR clone 29878 (TRAV8-3, TRAJ20)
CAVGANDYKLSF

SEQ ID NO: 59756 - protein, 16 aa, Homo sapiens
  CDR3 for beta chain variable domain of TCR clone 29878 (TRBV19, TRBJ2-2)
CASRSPGTGATGELIF

SEQ ID NO: 59757 - protein, 18 aa, Homo sapiens
  CDR3 for alpha chain variable domain of TCR clone 29879 (TRAV13-1, TRAJ52)
CAASKRSAGGTSYGKLTF

SEQ ID NO: 59758 - protein, 13 aa, Homo sapiens
  CDR3 for beta chain variable domain of TCR clone 29879 (TRBV12-4, TRBJ1-2)
CASSLRQGKGYTI

SEQ ID NO: 59759 - protein, 14 aa, Homo sapiens
  CDR3 for alpha chain variable domain of TCR clone 29880 (TRAV1-2, TRAJ16)
CAVNRFSDGQKLLF

SEQ ID NO: 59760 - protein, 17 aa, Homo sapiens
  CDR3 for beta chain variable domain of TCR clone 29880 (TRBV2, TRBJ1-4)
CASSKRELTQGEEKLFF

SEQ ID NO: 59761 - protein, 13 aa, Homo sapiens
  CDR3 for alpha chain variable domain of TCR clone 29881 (TRAV35, TRAJ43)
CAGYPYNNNDMRF

SEQ ID NO: 59762 - protein, 15 aa, Homo sapiens
  CDR3 for beta chain variable domain of TCR clone 29881 (TRBV25-1, TRBJ1-4)
CDSSKRIATNEKLFF

SEQ ID NO: 59763 - protein, 13 aa, Homo sapiens
  CDR3 for alpha chain variable domain of TCR clone 29882 (TRAV30, TRAJ24)
CGTVTDSWGKLQF

SEQ ID NO: 59764 - protein, 15 aa, Homo sapiens
  CDR3 for beta chain variable domain of TCR clone 29882 (TRBV4-1, TRBJ2-1)
CASSQDPGNYDEQFF

SEQ ID NO: 59765 - protein, 16 aa, Homo sapiens
  CDR3 for alpha chain variable domain of TCR clone 29883 (TRAV3, TRAJ37)
CAVRVRGSGNTGKLIF

SEQ ID NO: 59766 - protein, 16 aa, Homo sapiens
  CDR3 for beta chain variable domain of TCR clone 29883 (TRBV7-2, TRBJ2-5)
CASSYKTGISLETQYF

SEQ ID NO: 59767 - protein, 14 aa, Homo sapiens
  CDR3 for alpha chain variable domain of TCR clone 29884 (TRAV17, TRAJ22)
CVTSPSGSARQLTF

SEQ ID NO: 59768 - protein, 15 aa, Homo sapiens
  CDR3 for beta chain variable domain of TCR clone 29884 (TRBV4-1, TRBJ2-5)
CASSQWDLYQETQYF

SEQ ID NO: 59769 - protein, 13 aa, Homo sapiens
  CDR3 for alpha chain variable domain of TCR clone 29885 (TRAV3, TRAJ21)
CAVREPDFNTFYF

SEQ ID NO: 59770 - protein, 13 aa, Homo sapiens
  CDR3 for beta chain variable domain of TCR clone 29885 (TRBV9, TRBJ2-1)
CASSPSGGNEQFF

SEQ ID NO: 59771 - protein, 13 aa, Homo sapiens
  CDR3 for alpha chain variable domain of TCR clone 29886 (TRAV1-2, TRAJ9)
RAALNTGGFKTIF

SEQ ID NO: 59772 - protein, 14 aa, Homo sapiens
  CDR3 for beta chain variable domain of TCR clone 29886 (TRBV13, TRBJ2-3)
CASSSGSPTDTQYF

SEQ ID NO: 59773 - protein, 13 aa, Homo sapiens
  CDR3 for alpha chain variable domain of TCR clone 29887 (TRAV12-2, TRAJ20)
CVVYPSNDYKLSF

SEQ ID NO: 59774 - protein, 15 aa, Homo sapiens
  CDR3 for beta chain variable domain of TCR clone 29887 (TRBV27, TRBJ2-5)
CASSLYPRGGETQYF

SEQ ID NO: 59775 - protein, 11 aa, Homo sapiens
  CDR3 for alpha chain variable domain of TCR clone 29888 (TRAV12-3, TRAJ27)
CAMANAGKSTF

SEQ ID NO: 59776 - protein, 13 aa, Homo sapiens
  CDR3 for beta chain variable domain of TCR clone 29888 (TRBV20-1, TRBJ1-1)
CGARVGGNTEAFF

SEQ ID NO: 59777 - protein, 14 aa, Homo sapiens
  CDR3 for alpha chain variable domain of TCR clone 29889 (TRAV8-4, TRAJ9)
CAVRINTGGFKTIF

SEQ ID NO: 59778 - protein, 15 aa, Homo sapiens
  CDR3 for beta chain variable domain of TCR clone 29889 (TRBV10-2, TRBJ2-6)
CASSEQGTGASVLTF

SEQ ID NO: 59779 - protein, 15 aa, Homo sapiens
  CDR3 for alpha chain variable domain of TCR clone 29890 (TRAV3, TRAJ22)
CAVRDRGGSARQLTF

SEQ ID NO: 59780 - protein, 14 aa, Homo sapiens
  CDR3 for beta chain variable domain of TCR clone 29890 (TRBV11-2, TRBJ2-3)
CASSRLARTDTQYF

SEQ ID NO: 59781 - protein, 11 aa, Homo sapiens
  CDR3 for alpha chain variable domain of TCR clone 29891 (TRAV3, TRAJ21)
CAVGNFNKFYF

SEQ ID NO: 59782 - protein, 16 aa, Homo sapiens
  CDR3 for beta chain variable domain of TCR clone 29891 (TRBV19, TRBJ2-1)
CASSKAGPSSYNQQFF

SEQ ID NO: 59783 - protein, 14 aa, Homo sapiens
  CDR3 for alpha chain variable domain of TCR clone 29892 (TRAV1-2, TRAJ16)
CAVNRFSGGQKLLF

SEQ ID NO: 59784 - protein, 13 aa, Homo sapiens
  CDR3 for beta chain variable domain of TCR clone 29892 (TRBV20-1, TRBJ1-1)
CSARVGGNTEAFF

SEQ ID NO: 59785 - protein, 12 aa, Homo sapiens
  CDR3 for alpha chain variable domain of TCR clone 29893 (TRAV20, TRAJ33)
CAVRGSNYQSIW

SEQ ID NO: 59786 - protein, 13 aa, Homo sapiens
  CDR3 for beta chain variable domain of TCR clone 29893 (TRBV4-3, TRBJ1-1)
CASSPTGNTEAFF

SEQ ID NO: 59787 - protein, 13 aa, Homo sapiens
  CDR3 for alpha chain variable domain of TCR clone 29894 (TRAV26-2, TRAJ43)
CILRAVNNNDMRF

SEQ ID NO: 59788 - protein, 15 aa, Homo sapiens
  CDR3 for beta chain variable domain of TCR clone 29894 (TRBV7-2, TRBJ2-1)
CASTHGTGIYNEQFL

SEQ ID NO: 59789 - protein, 12 aa, Homo sapiens
  CDR3 for alpha chain variable domain of TCR clone 29895 (TRAV13-2, TRAJ8)
CAPWLGFQKLVF

SEQ ID NO: 59790 - protein, 14 aa, Homo sapiens
  CDR3 for beta chain variable domain of TCR clone 29895 (TRBV25-1, TRBJ1-1)
CASTHLGGNTEAFF

SEQ ID NO: 59791 - protein, 18 aa, Homo sapiens
  CDR3 for alpha chain variable domain of TCR clone 29896 (TRAV26-1, TRAJ52)
CIVRVEGAGGTSYGKLTF

SEQ ID NO: 59792 - protein, 13 aa, Homo sapiens
  CDR3 for beta chain variable domain of TCR clone 29896 (TRBV7-3, TRBJ1-2)
CASSLKRGYGYTV

SEQ ID NO: 59793 - protein, 16 aa, Homo sapiens
  CDR3 for alpha chain variable domain of TCR clone 29897 (TRAV30, TRAJ24)
CGTEIVDADSWGKFQF

SEQ ID NO: 59794 - protein, 15 aa, Homo sapiens
  CDR3 for beta chain variable domain of TCR clone 29897 (TRBV7-9, TRBJ1-4)
CASRARTGGNEKLFF

SEQ ID NO: 59795 - protein, 16 aa, Homo sapiens
  CDR3 for alpha chain variable domain of TCR clone 29898 (TRAV16, TRAJ4)
CALSRMFSGGYNKLIF

SEQ ID NO: 59796 - protein, 16 aa, Homo sapiens
  CDR3 for beta chain variable domain of TCR clone 29898 (TRBV24-1, TRBJ2-3)
CATSDPGTGVTDTQYF

SEQ ID NO: 59797 - protein, 11 aa, Homo sapiens
  CDR3 for alpha chain variable domain of TCR clone 29899 (TRAV6, TRAJ41)
CALNSGYALNF

SEQ ID NO: 59798 - protein, 15 aa, Homo sapiens
  CDR3 for beta chain variable domain of TCR clone 29899 (TRBV9, TRBJ1-6)
CASSVAGTGDSPLHF

SEQ ID NO: 59799 - protein, 13 aa, Homo sapiens
  CDR3 for alpha chain variable domain of TCR clone 29900 (TRAV9-2, TRAJ17)
CAPFKAAGNKLTF

SEQ ID NO: 59800 - protein, 12 aa, Homo sapiens
  CDR3 for beta chain variable domain of TCR clone 29900 (TRBV13, TRBJ2-1)
CASSLGAQEQFF

SEQ ID NO: 59801 - protein, 13 aa, Homo sapiens
  CDR3 for alpha chain variable domain of TCR clone 29901 (TRAV13-1, TRAJ5)
CAASDTGRRALTF

SEQ ID NO: 59802 - protein, 12 aa, Homo sapiens
  CDR3 for beta chain variable domain of TCR clone 29901 (TRBV2, TRBJ2-1)
GRGPPSYNEQFF

SEQ ID NO: 59803 - protein, 13 aa, Homo sapiens
  CDR3 for alpha chain variable domain of TCR clone 29902 (TRAV8-3, TRAJ28)
CAVGAVGSYQLTI

SEQ ID NO: 59804 - protein, 15 aa, Homo sapiens
  CDR3 for beta chain variable domain of TCR clone 29902 (TRBV7-9, TRBJ1-5)
CASSQGHQPNQPQHF

SEQ ID NO: 59805 - protein, 16 aa, Homo sapiens
  CDR3 for alpha chain variable domain of TCR clone 29903 (TRAV26-1, TRAJ37)
CIVRGDGSGNTGKLIF

SEQ ID NO: 59806 - protein, 17 aa, Homo sapiens
  CDR3 for beta chain variable domain of TCR clone 29903 (TRBV4-1, TRBJ2-7)
CAGSRDPLGVRGGEQYF

SEQ ID NO: 59807 - protein, 15 aa, Homo sapiens
  CDR3 for alpha chain variable domain of TCR clone 29904 (TRAV2, TRAJ36)
CAVEDRGNWGKQPLL

SEQ ID NO: 59808 - protein, 14 aa, Homo sapiens
  CDR3 for beta chain variable domain of TCR clone 29904 (TRBV7-9, TRBJ2-5)
CASSLDTAQETQYF

SEQ ID NO: 59809 - protein, 12 aa, Homo sapiens
  CDR3 for alpha chain variable domain of TCR clone 29905 (TRAV12-1, TRAJ40)
CVVYSGTYKYIF

SEQ ID NO: 59810 - protein, 13 aa, Homo sapiens
  CDR3 for beta chain variable domain of TCR clone 29905 (TRBV12-4, TRBJ1-2)
CASSLRQGKGYTF

SEQ ID NO: 59811 - protein, 17 aa, Homo sapiens
  CDR3 for alpha chain variable domain of TCR clone 29906 (TRAV23/DV6, TRAJ57)
CAASSTLSQGGSEMLVF

SEQ ID NO: 59812 - protein, 14 aa, Homo sapiens
  CDR3 for beta chain variable domain of TCR clone 29906 (TRBV25-1, TRBJ1-1)
CASTHLGGNTEAFF

SEQ ID NO: 59813 - protein, 16 aa, Homo sapiens
  CDR3 for alpha chain variable domain of TCR clone 29907 (TRAV12-2, TRAJ6)
CAAPLAGSGGSYIPTF

SEQ ID NO: 59814 - protein, 13 aa, Homo sapiens
  CDR3 for beta chain variable domain of TCR clone 29907 (TRBV12-4, TRBJ1-2)
CASRTDGNYGYTF

SEQ ID NO: 59815 - protein, 17 aa, Homo sapiens
  CDR3 for alpha chain variable domain of TCR clone 29908 (TRAV3, TRAJ6)
CAVGDGPRAGGSYIPTF

SEQ ID NO: 59816 - protein, 18 aa, Homo sapiens
  CDR3 for beta chain variable domain of TCR clone 29908 (TRBV7-9, TRBJ2-7)
CASSLTTSGSRTWYEQYF

SEQ ID NO: 59817 - protein, 12 aa, Homo sapiens
  CDR3 for alpha chain variable domain of TCR clone 29909 (TRAV36/DV7, TRAJ54)
CAVVRGAQKLVF

SEQ ID NO: 59818 - protein, 13 aa, Homo sapiens
  CDR3 for beta chain variable domain of TCR clone 29909 (TRBV14, TRBJ2-7)
CASSQDRRYEQYF

SEQ ID NO: 59819 - protein, 13 aa, Homo sapiens
  CDR3 for alpha chain variable domain of TCR clone 29910 (TRAV29/DV5, TRAJ52)
CAAGFRGAGGTSY

SEQ ID NO: 59820 - protein, 16 aa, Homo sapiens
  CDR3 for beta chain variable domain of TCR clone 29910 (TRBV7-3, TRBJ2-2)
CASSLKRGTLSGELFF

SEQ ID NO: 59821 - protein, 15 aa, Homo sapiens
  CDR3 for alpha chain variable domain of TCR clone 29911 (TRAV12-3, TRAJ27)
CAMRAYNTNAGKSTF

SEQ ID NO: 59822 - protein, 13 aa, Homo sapiens
  CDR3 for beta chain variable domain of TCR clone 29911 (TRBV11-2, TRBJ2-5)
CASRRGPSETQYF

SEQ ID NO: 59823 - protein, 14 aa, Homo sapiens
  CDR3 for alpha chain variable domain of TCR clone 29912 (TRAV21, TRAJ35)
CAVMPIGFGNVLQC

SEQ ID NO: 59824 - protein, 12 aa, Homo sapiens
  CDR3 for beta chain variable domain of TCR clone 29912 (TRBV7-9, TRBJ2-7)
CASSIKREEQYF

SEQ ID NO: 59825 - protein, 14 aa, Homo sapiens
  CDR3 for alpha chain variable domain of TCR clone 29913 (TRAV17, TRAJ57)
CATDPQGGSEKLVF

SEQ ID NO: 59826 - protein, 12 aa, Homo sapiens
  CDR3 for beta chain variable domain of TCR clone 29913 (TRBV7-8, TRBJ2-7)
CASSLGDREQYF

SEQ ID NO: 59827 - protein, 13 aa, Homo sapiens
  CDR3 for alpha chain variable domain of TCR clone 29914 (TRAV29/DV5, TRAJ31)
CAASRNNNARLMF

SEQ ID NO: 59828 - protein, 17 aa, Homo sapiens
  CDR3 for beta chain variable domain of TCR clone 29914 (TRBV13, TRBJ2-3)
CASSLSRVAGGRNTQYF

SEQ ID NO: 59829 - protein, 12 aa, Homo sapiens
  CDR3 for alpha chain variable domain of TCR clone 29915 (TRAV12-3, TRAJ17)
CAMTFTGNKLTF

SEQ ID NO: 59830 - protein, 20 aa, Homo sapiens
  CDR3 for beta chain variable domain of TCR clone 29915 (TRBV7-8, TRBJ2-2)
CASSHLFPGPTIHITGELFF

SEQ ID NO: 59831 - protein, 12 aa, Homo sapiens
  CDR3 for alpha chain variable domain of TCR clone 29916 (TRAV2, TRAJ10)
CASTGGGNKLTF

SEQ ID NO: 59832 - protein, 14 aa, Homo sapiens
  CDR3 for beta chain variable domain of TCR clone 29916 (TRBV7-2, TRBJ2-2)
CASRGRGAAGELFF

SEQ ID NO: 59833 - protein, 13 aa, Homo sapiens
  CDR3 for alpha chain variable domain of TCR clone 29917 (TRAV8-4, TRAJ30)
CAVSVNRDDKIIF

SEQ ID NO: 59834 - protein, 13 aa, Homo sapiens
  CDR3 for beta chain variable domain of TCR clone 29917 (TRBV3-1, TRBJ2-2)
CASLARGSGGLFF

SEQ ID NO: 59835 - protein, 20 aa, Homo sapiens
  CDR3 for alpha chain variable domain of TCR clone 29918 (TRAV26-1, TRAJ42)
CCVLLHRQTYYGGSQGTLIF

SEQ ID NO: 59836 - protein, 16 aa, Homo sapiens
  CDR3 for beta chain variable domain of TCR clone 29918 (TRBV7-3, TRBJ2-2)
CASSLKRGTLSGELFF

SEQ ID NO: 59837 - protein, 14 aa, Homo sapiens
  CDR3 for alpha chain variable domain of TCR clone 29919 (TRAV12-2, TRAJ13)
CAVRKTGGYQKVTF

SEQ ID NO: 59838 - protein, 13 aa, Homo sapiens
  CDR3 for beta chain variable domain of TCR clone 29919 (TRBV19, TRBJ1-2)
CASSVPGQDGYTF

SEQ ID NO: 59839 - protein, 20 aa, Homo sapiens
  CDR3 for alpha chain variable domain of TCR clone 29920 (TRAV26-1, TRAJ42)
CCVLLHRQTYYGGSQGNLIF

SEQ ID NO: 59840 - protein, 16 aa, Homo sapiens
  CDR3 for beta chain variable domain of TCR clone 29920 (TRBV7-3, TRBJ2-2)
CASSLKRGTLSWELFF

SEQ ID NO: 59841 - protein, 11 aa, Homo sapiens
  CDR3 for alpha chain variable domain of TCR clone 29921 (TRAV26-1, TRAJ37)
CIVRVGRKLIF

SEQ ID NO: 59842 - protein, 15 aa, Homo sapiens
  CDR3 for beta chain variable domain of TCR clone 29921 (TRBV7-9, TRBJ1-6)
CASSSPGRGNSPLHF

SEQ ID NO: 59843 - protein, 12 aa, Homo sapiens
  CDR3 for alpha chain variable domain of TCR clone 29922 (TRAV12-3, TRAJ17)
CAMTLAGNELTF

SEQ ID NO: 59844 - protein, 15 aa, Homo sapiens
  CDR3 for beta chain variable domain of TCR clone 29922 (TRBV20-1, TRBJ2-7)
CSARDRVSGMDEQYF

SEQ ID NO: 59845 - protein, 13 aa, Homo sapiens
  CDR3 for alpha chain variable domain of TCR clone 29923 (TRAV21, TRAJ57)
CAVTQGGSEKLVF

SEQ ID NO: 59846 - protein, 14 aa, Homo sapiens
  CDR3 for beta chain variable domain of TCR clone 29923 (TRBV7-2, TRBJ2-7)
CASSPKTSFYEQYF

SEQ ID NO: 59847 - protein, 11 aa, Homo sapiens
  CDR3 for alpha chain variable domain of TCR clone 29924 (TRAV13-1, TRAJ6)
CATLGSYIPTF

SEQ ID NO: 59848 - protein, 17 aa, Homo sapiens
  CDR3 for beta chain variable domain of TCR clone 29924 (TRBV15, TRBJ1-4)
CATSRYGTGDPNEKLFF

SEQ ID NO: 59849 - protein, 14 aa, Homo sapiens
  CDR3 for alpha chain variable domain of TCR clone 29925 (TRAV13-1, TRAJ40)
CAASMTSGTYKYIF

SEQ ID NO: 59850 - protein, 15 aa, Homo sapiens
  CDR3 for beta chain variable domain of TCR clone 29925 (TRBV7-3, TRBJ2-1)
CASSPTGGGGVEQFF

SEQ ID NO: 59851 - protein, 14 aa, Homo sapiens
  CDR3 for alpha chain variable domain of TCR clone 29926 (TRAV1-1, TRAJ27)
CAVIYNTTAGKSTF

SEQ ID NO: 59852 - protein, 15 aa, Homo sapiens
  CDR3 for beta chain variable domain of TCR clone 29926 (TRBV7-2, TRBJ2-1)
CASSSGLAGGNEQFF

SEQ ID NO: 59853 - protein, 16 aa, Homo sapiens
  CDR3 for alpha chain variable domain of TCR clone 29927 (TRAV1-2, TRAJ10)
CAVRGVLTGGGNKLTF

SEQ ID NO: 59854 - protein, 15 aa, Homo sapiens
  CDR3 for beta chain variable domain of TCR clone 29927 (TRBV27, TRBJ2-1)
CASSNGGGSSNEQFF

SEQ ID NO: 59855 - protein, 15 aa, Homo sapiens
  CDR3 for alpha chain variable domain of TCR clone 29928 (TRAV21, TRAJ13)
CAVPRSFWGLPESYL

SEQ ID NO: 59856 - protein, 14 aa, Homo sapiens
  CDR3 for beta chain variable domain of TCR clone 29928 (TRBV20-1, TRBJ2-7)
CSAKDRKGAYEQYF

SEQ ID NO: 59857 - protein, 12 aa, Homo sapiens
  CDR3 for alpha chain variable domain of TCR clone 29929 (TRAV12-2, TRAJ39)
CAVNNNAGNMLT

SEQ ID NO: 59858 - protein, 13 aa, Homo sapiens
  CDR3 for beta chain variable domain of TCR clone 29929 (TRBV2, TRBJ1-5)
CATAGPGNQPQHF

SEQ ID NO: 59859 - protein, 15 aa, Homo sapiens
  CDR3 for alpha chain variable domain of TCR clone 29930 (TRAV4, TRAJ39)
CLVGPNNNAGNMLNF

SEQ ID NO: 59860 - protein, 13 aa, Homo sapiens
  CDR3 for beta chain variable domain of TCR clone 29930 (TRBV11-2, TRBJ2-5)
CASSSTGEETQYF

SEQ ID NO: 59861 - protein, 16 aa, Homo sapiens
  CDR3 for alpha chain variable domain of TCR clone 29931 (TRAV16, TRAJ4)
CTTVLPFSGGYNKLIF

SEQ ID NO: 59862 - protein, 14 aa, Homo sapiens
  CDR3 for beta chain variable domain of TCR clone 29931 (TRBV19, TRBJ2-7)
CASSMGQGAIEQYF

SEQ ID NO: 59863 - protein, 14 aa, Homo sapiens
  CDR3 for alpha chain variable domain of TCR clone 29932 (TRAV38-1, TRAJ45)
CASHSGGGADGRTF

SEQ ID NO: 59864 - protein, 13 aa, Homo sapiens
  CDR3 for beta chain variable domain of TCR clone 29932 (TRBV10-3, TRBJ1-2)
CAISERDSYGYTF

SEQ ID NO: 59865 - protein, 14 aa, Homo sapiens
  CDR3 for alpha chain variable domain of TCR clone 29933 (TRAV1-2, TRAJ8)
CAVGEDTGFQKLVF

SEQ ID NO: 59866 - protein, 17 aa, Homo sapiens
  CDR3 for beta chain variable domain of TCR clone 29933 (TRBV11-2, TRBJ2-1)
CASSLYPPGVEYNEQFF

SEQ ID NO: 59867 - protein, 16 aa, Homo sapiens
  CDR3 for alpha chain variable domain of TCR clone 29934 (TRAV12-3, TRAJ53)
CAMSPGSAGSNYKLTF

SEQ ID NO: 59868 - protein, 11 aa, Homo sapiens
  CDR3 for beta chain variable domain of TCR clone 29934 (TRBV29-1, TRBJ2-5)
CSEDRTGTQYF

SEQ ID NO: 59869 - protein, 14 aa, Homo sapiens
  CDR3 for alpha chain variable domain of TCR clone 29935 (TRAV1-2, TRAJ16)
CAVNRFSDGQKLLF

SEQ ID NO: 59870 - protein, 14 aa, Homo sapiens
  CDR3 for beta chain variable domain of TCR clone 29935 (TRBV5-5, TRBJ1-5)
CASSGQGVDQPQHF

SEQ ID NO: 59871 - protein, 15 aa, Homo sapiens
  CDR3 for alpha chain variable domain of TCR clone 29936 (TRAV29/DV5, TRAJ24)
CAASGATDSWGKFPF

SEQ ID NO: 59872 - protein, 12 aa, Homo sapiens
  CDR3 for beta chain variable domain of TCR clone 29936 (TRBV11-2, TRBJ2-2)
CASSLPTGELFF

SEQ ID NO: 59873 - protein, 12 aa, Homo sapiens
  CDR3 for alpha chain variable domain of TCR clone 29937 (TRAV1-1, TRAJ39)
CAVPVVGNILTF

SEQ ID NO: 59874 - protein, 15 aa, Homo sapiens
  CDR3 for beta chain variable domain of TCR clone 29937 (TRBV19, TRBJ1-6)
CASSTQGAVGSPLHF

SEQ ID NO: 59875 - protein, 13 aa, Homo sapiens
  CDR3 for alpha chain variable domain of TCR clone 29938 (TRAV13-2, TRAJ53)
CAENMGRNYKLTF

SEQ ID NO: 59876 - protein, 13 aa, Homo sapiens
  CDR3 for beta chain variable domain of TCR clone 29938 (TRBV4-1, TRBJ2-2)
CASSQENTGELFF

SEQ ID NO: 59877 - protein, 15 aa, Homo sapiens
  CDR3 for alpha chain variable domain of TCR clone 29939 (TRAV3, TRAJ5)
CAVRDRKTGRRALTF

SEQ ID NO: 59878 - protein, 15 aa, Homo sapiens
  CDR3 for beta chain variable domain of TCR clone 29939 (TRBV7-8, TRBJ2-1)
CASSLADSLHNEQFF

SEQ ID NO: 59879 - protein, 14 aa, Homo sapiens
  CDR3 for alpha chain variable domain of TCR clone 29940 (TRAV21, TRAJ42)
CAVLGGGSQGNLIF

SEQ ID NO: 59880 - protein, 13 aa, Homo sapiens
  CDR3 for beta chain variable domain of TCR clone 29940 (TRBV7-9, TRBJ1-2)
CASSLKQNYGYTF

SEQ ID NO: 59881 - protein, 11 aa, Homo sapiens
  CDR3 for alpha chain variable domain of TCR clone 29941 (TRAV12-3, TRAJ27)
CAMANAGKPTF

SEQ ID NO: 59882 - protein, 13 aa, Homo sapiens
  CDR3 for beta chain variable domain of TCR clone 29941 (TRBV20-1, TRBJ1-1)
CSARVGGNTEAFF

SEQ ID NO: 59883 - protein, 14 aa, Homo sapiens
  CDR3 for alpha chain variable domain of TCR clone 29942 (TRAV14/DV4, TRAJ42)
CPRGSLRSQGNLIF

SEQ ID NO: 59884 - protein, 14 aa, Homo sapiens
  CDR3 for beta chain variable domain of TCR clone 29942 (TRBV19, TRBJ2-1)
CASPTFVLSGEQFF

SEQ ID NO: 59885 - protein, 16 aa, Homo sapiens
  CDR3 for alpha chain variable domain of TCR clone 29943 (TRAV17, TRAJ35)
CATAEGGIGFGNVLHF

SEQ ID NO: 59886 - protein, 16 aa, Homo sapiens
  CDR3 for beta chain variable domain of TCR clone 29943 (TRBV6-5, TRBJ2-7)
CASSSDPTSGFYEQYF

SEQ ID NO: 59887 - protein, 11 aa, Homo sapiens
  CDR3 for alpha chain variable domain of TCR clone 29944 (TRAV13-1, TRAJ40)
CAVSGTYKYIF

SEQ ID NO: 59888 - protein, 14 aa, Homo sapiens
  CDR3 for beta chain variable domain of TCR clone 29944 (TRBV7-3, TRBJ2-3)
CASSPGASRDTQYF

SEQ ID NO: 59889 - protein, 16 aa, Homo sapiens
  CDR3 for alpha chain variable domain of TCR clone 29945 (TRAV30, TRAJ26)
CGTESVGDNYGQNFVL

SEQ ID NO: 59890 - protein, 13 aa, Homo sapiens
  CDR3 for beta chain variable domain of TCR clone 29945 (TRBV19, TRBJ1-2)
CASSTSEDYGYTF

SEQ ID NO: 59891 - protein, 13 aa, Homo sapiens
  CDR3 for alpha chain variable domain of TCR clone 29946 (TRAV22, TRAJ26)
CAVEHNYGQNFVF

SEQ ID NO: 59892 - protein, 16 aa, Homo sapiens
  CDR3 for beta chain variable domain of TCR clone 29946 (TRBV7-2, TRBJ2-6)
RASSERRASGANVLTF

SEQ ID NO: 59893 - protein, 16 aa, Homo sapiens
  CDR3 for alpha chain variable domain of TCR clone 29947 (TRAV12-3, TRAJ53)
CVMSPGSGGSNYKLTF

SEQ ID NO: 59894 - protein, 16 aa, Homo sapiens
  CDR3 for beta chain variable domain of TCR clone 29947 (TRBV4-2, TRBJ1-1)
CASSQAGFGMNTEAFF

SEQ ID NO: 59895 - protein, 15 aa, Homo sapiens
  CDR3 for alpha chain variable domain of TCR clone 29948 (TRAV14/DV4, TRAJ36)
CAMREPQTGANNLFF

SEQ ID NO: 59896 - protein, 15 aa, Homo sapiens
  CDR3 for beta chain variable domain of TCR clone 29948 (TRBV3-1, TRBJ2-7)
CASSQGVGVKVEQYF

SEQ ID NO: 59897 - protein, 15 aa, Homo sapiens
  CDR3 for alpha chain variable domain of TCR clone 29949 (TRAV27, TRAJ50)
CAGVGRGTSYDKVIF

SEQ ID NO: 59898 - protein, 14 aa, Homo sapiens
  CDR3 for beta chain variable domain of TCR clone 29949 (TRBV7-2, TRBJ1-1)
CASSFYDLNTEALF

SEQ ID NO: 59899 - protein, 14 aa, Homo sapiens
  CDR3 for alpha chain variable domain of TCR clone 29950 (TRAV26-1, TRAJ45)
CIVRVVGGADGLTF

SEQ ID NO: 59900 - protein, 16 aa, Homo sapiens
  CDR3 for beta chain variable domain of TCR clone 29950 (TRBV7-9, TRBJ1-1)
RASSLTQVRSNTEAFF

SEQ ID NO: 59901 - protein, 12 aa, Homo sapiens
  CDR3 for alpha chain variable domain of TCR clone 29951 (TRAV17, TRAJ12)
CATLRSSYKLIF

SEQ ID NO: 59902 - protein, 16 aa, Homo sapiens
  CDR3 for beta chain variable domain of TCR clone 29951 (TRBV28, TRBJ2-7)
CASSLFFETGGPERYF

SEQ ID NO: 59903 - protein, 16 aa, Homo sapiens
  CDR3 for alpha chain variable domain of TCR clone 29952 (TRAV26-1, )
CIDIQNPDPAVYQLRD

SEQ ID NO: 59904 - protein, 19 aa, Homo sapiens
  CDR3 for beta chain variable domain of TCR clone 29952 (TRBV19, TRBJ2-5)
CASSIGQVTDLFLGETQYF

SEQ ID NO: 59905 - protein, 17 aa, Homo sapiens
  CDR3 for alpha chain variable domain of TCR clone 29953 (TRAV12-2, TRAJ48)
CASNEKLTFGTGTRLTI

SEQ ID NO: 59906 - protein, 16 aa, Homo sapiens
  CDR3 for beta chain variable domain of TCR clone 29953 (TRBV7-3, TRBJ2-2)
CASSLKRGTLSGELSF

SEQ ID NO: 59907 - protein, 20 aa, Homo sapiens
  CDR3 for alpha chain variable domain of TCR clone 29954 (TRAV29/DV5, TRAJ48)
CSVLLCSTQNTLFGNEKLTF

SEQ ID NO: 59908 - protein, 13 aa, Homo sapiens
  CDR3 for beta chain variable domain of TCR clone 29954 (TRBV27, TRBJ1-4)
CASSLMGDEKLFF

SEQ ID NO: 59909 - protein, 17 aa, Homo sapiens
  CDR3 for alpha chain variable domain of TCR clone 29955 (TRAV23/DV6, TRAJ57)
CAASSTLSQGGSKKLVF

SEQ ID NO: 59910 - protein, 14 aa, Homo sapiens
  CDR3 for beta chain variable domain of TCR clone 29955 (TRBV25-1, TRBJ1-1)
CASTHLGGNTEAFF

SEQ ID NO: 59911 - protein, 15 aa, Homo sapiens
  CDR3 for alpha chain variable domain of TCR clone 29956 (TRAV12-2, TRAJ32)
CAVNHYGGATNKLIF

SEQ ID NO: 59912 - protein, 13 aa, Homo sapiens
  CDR3 for beta chain variable domain of TCR clone 29956 (TRBV7-9, TRBJ1-2)
CASSLKQSYGYTF

SEQ ID NO: 59913 - protein, 10 aa, Homo sapiens
  CDR3 for alpha chain variable domain of TCR clone 29957 (TRAV16, TRAJ26)
CALSGTEFCL

SEQ ID NO: 59914 - protein, 12 aa, Homo sapiens
  CDR3 for beta chain variable domain of TCR clone 29957 (TRBV11-2, TRBJ2-1)
CASSPGNNEQFF

SEQ ID NO: 59915 - protein, 17 aa, Homo sapiens
  CDR3 for alpha chain variable domain of TCR clone 29958 (TRAV14/DV4, TRAJ4)
CAMRGASGRGGYNKLIF

SEQ ID NO: 59916 - protein, 14 aa, Homo sapiens
  CDR3 for beta chain variable domain of TCR clone 29958 (TRBV19, TRBJ2-7)
CASSMGQGAIEQYF

SEQ ID NO: 59917 - protein, 14 aa, Homo sapiens
  CDR3 for alpha chain variable domain of TCR clone 29959 (TRAV1-2, TRAJ16)
CAVNRFSDGQKLLF

SEQ ID NO: 59918 - protein, 15 aa, Homo sapiens
  CDR3 for beta chain variable domain of TCR clone 29959 (TRBV27, TRBJ2-1)
CTSSNGGGSSNEQFF

SEQ ID NO: 59919 - protein, 18 aa, Homo sapiens
  CDR3 for alpha chain variable domain of TCR clone 29960 (TRAV2, TRAJ20)
LQVREADAAVYRDCKLSF

SEQ ID NO: 59920 - protein, 12 aa, Homo sapiens
  CDR3 for beta chain variable domain of TCR clone 29960 (TRBV11-2, TRBJ2-2)
CASSLGGGELFF

SEQ ID NO: 59921 - protein, 14 aa, Homo sapiens
  CDR3 for alpha chain variable domain of TCR clone 29961 (TRAV12-2, TRAJ13)
CAVKKTGGYQKVTF

SEQ ID NO: 59922 - protein, 12 aa, Homo sapiens
  CDR3 for beta chain variable domain of TCR clone 29961 (TRBV6-1, TRBJ2-7)
CASSDYSYEQYF

SEQ ID NO: 59923 - protein, 16 aa, Homo sapiens
  CDR3 for alpha chain variable domain of TCR clone 29962 (TRAV21, TRAJ37)
CAVRTAGSSSTGKLIF

SEQ ID NO: 59924 - protein, 13 aa, Homo sapiens
  CDR3 for beta chain variable domain of TCR clone 29962 (TRBV7-9, TRBJ2-5)
CASLPSGRETQYF

SEQ ID NO: 59925 - protein, 15 aa, Homo sapiens
  CDR3 for alpha chain variable domain of TCR clone 29963 (TRAV12-2, TRAJ53)
CAVNGGGGSNYKLKF

SEQ ID NO: 59926 - protein, 17 aa, Homo sapiens
  CDR3 for beta chain variable domain of TCR clone 29963 (TRBV7-3, TRBJ2-3)
CASSLMKRMRGADTQYF

SEQ ID NO: 59927 - protein, 14 aa, Homo sapiens
  CDR3 for alpha chain variable domain of TCR clone 29964 (TRAV8-1, TRAJ5)
CAVRTDTGRRALTF

SEQ ID NO: 59928 - protein, 14 aa, Homo sapiens
  CDR3 for beta chain variable domain of TCR clone 29964 (TRBV5-5, TRBJ1-2)
CASSLDPHNYGYTF

SEQ ID NO: 59929 - protein, 16 aa, Homo sapiens
  CDR3 for alpha chain variable domain of TCR clone 29965 (TRAV3, TRAJ37)
CALRPHGSGNTGKLIF

SEQ ID NO: 59930 - protein, 16 aa, Homo sapiens
  CDR3 for beta chain variable domain of TCR clone 29965 (TRBV9, TRBJ1-2)
CASSVEEKVSPYGYTF

SEQ ID NO: 59931 - protein, 15 aa, Homo sapiens
  CDR3 for alpha chain variable domain of TCR clone 29966 (TRAV10, TRAJ34)
CVVSGKHRQAHLWDW

SEQ ID NO: 59932 - protein, 14 aa, Homo sapiens
  CDR3 for beta chain variable domain of TCR clone 29966 (TRBV19, TRBJ2-1)
CASPTFVLSGEQFF

SEQ ID NO: 59933 - protein, 13 aa, Homo sapiens
  CDR3 for alpha chain variable domain of TCR clone 29967 (TRAV2, TRAJ40)
CAEVTSGTYKYIF

SEQ ID NO: 59934 - protein, 15 aa, Homo sapiens
  CDR3 for beta chain variable domain of TCR clone 29967 (TRBV11-3, TRBJ2-3)
CASLKDGREGDTQYF

SEQ ID NO: 59935 - protein, 10 aa, Homo sapiens
  CDR3 for alpha chain variable domain of TCR clone 29968 (TRAV12-3, TRAJ49)
CAMNDDQFYF

SEQ ID NO: 59936 - protein, 13 aa, Homo sapiens
  CDR3 for beta chain variable domain of TCR clone 29968 (TRBV12-4, TRBJ1-1)
CASSPGTGFGAFF

SEQ ID NO: 59937 - protein, 16 aa, Homo sapiens
  CDR3 for alpha chain variable domain of TCR clone 29969 (TRAV30, TRAJ24)
CGTEIVDADSWGKFQF

SEQ ID NO: 59938 - protein, 15 aa, Homo sapiens
  CDR3 for beta chain variable domain of TCR clone 29969 (TRBV11-2, TRBJ1-1)
CASSSRSSLLLSLDK

SEQ ID NO: 59939 - protein, 13 aa, Homo sapiens
  CDR3 for alpha chain variable domain of TCR clone 29970 (TRAV17, TRAJ34)
CATDLYNTDKPIF

SEQ ID NO: 59940 - protein, 12 aa, Homo sapiens
  CDR3 for beta chain variable domain of TCR clone 29970 (TRBV11-2, TRBJ2-2)
CASSLGGGELFF

SEQ ID NO: 59941 - protein, 12 aa, Homo sapiens
  CDR3 for alpha chain variable domain of TCR clone 29971 (TRAV27, TRAJ35)
CAGADFGNVLHC

SEQ ID NO: 59942 - protein, 16 aa, Homo sapiens
  CDR3 for beta chain variable domain of TCR clone 29971 (TRBV6-1, TRBJ2-1)
CASILRRGSSYNEQFF

SEQ ID NO: 59943 - protein, 12 aa, Homo sapiens
  CDR3 for alpha chain variable domain of TCR clone 29972 (TRAV12-2, TRAJ31)
CAVNTPDARPMF

SEQ ID NO: 59944 - protein, 12 aa, Homo sapiens
  CDR3 for beta chain variable domain of TCR clone 29972 (TRBV12-4, TRBJ2-7)
CASSLGGYEQYF

SEQ ID NO: 59945 - protein, 14 aa, Homo sapiens
  CDR3 for alpha chain variable domain of TCR clone 29973 (TRAV35, TRAJ22)
CAGLRPGSARQLTF

SEQ ID NO: 59946 - protein, 15 aa, Homo sapiens
  CDR3 for beta chain variable domain of TCR clone 29973 (TRBV12-4, TRBJ2-5)
CASSAPTGLQETQYF

SEQ ID NO: 59947 - protein, 13 aa, Homo sapiens
  CDR3 for alpha chain variable domain of TCR clone 29974 (TRAV21, TRAJ36)
CAVIKTGANNLFF

SEQ ID NO: 59948 - protein, 13 aa, Homo sapiens
  CDR3 for beta chain variable domain of TCR clone 29974 (TRBV29-1, TRBJ2-3)
CSATRGGRGTQYF

SEQ ID NO: 59949 - protein, 10 aa, Homo sapiens
  CDR3 for alpha chain variable domain of TCR clone 29975 (TRAV30, TRAJ48)
CGIGNEKLTF

SEQ ID NO: 59950 - protein, 14 aa, Homo sapiens
  CDR3 for beta chain variable domain of TCR clone 29975 (TRBV7-6, TRBJ2-3)
CASSVAGGTDTQYF

SEQ ID NO: 59951 - protein, 14 aa, Homo sapiens
  CDR3 for alpha chain variable domain of TCR clone 29976 (TRAV2, TRAJ23)
CAVGLRNQGGKLIF

SEQ ID NO: 59952 - protein, 12 aa, Homo sapiens
  CDR3 for beta chain variable domain of TCR clone 29976 (TRBV12-4, TRBJ2-7)
CASSLGGYEQYF

SEQ ID NO: 59953 - protein, 22 aa, Homo sapiens
  CDR3 for alpha chain variable domain of TCR clone 29977 (TRAV26-1, TRAJ42)
CIVRPIIEEAKEISSLEKALNS

SEQ ID NO: 59954 - protein, 16 aa, Homo sapiens
  CDR3 for beta chain variable domain of TCR clone 29977 (TRBV7-3, TRBJ2-2)
CASSLKRGTLSGELFF

SEQ ID NO: 59955 - protein, 13 aa, Homo sapiens
  CDR3 for alpha chain variable domain of TCR clone 29978 (TRAV29/DV5, TRAJ31)
CAASRNNNARLMF

SEQ ID NO: 59956 - protein, 16 aa, Homo sapiens
  CDR3 for beta chain variable domain of TCR clone 29978 (TRBV12-4, TRBJ1-5)
CASSRPVGGSNQPQHF

SEQ ID NO: 59957 - protein, 13 aa, Homo sapiens
  CDR3 for alpha chain variable domain of TCR clone 29979 (TRAV17, TRAJ9)
CATDYTGGFKTIF

SEQ ID NO: 59958 - protein, 16 aa, Homo sapiens
  CDR3 for beta chain variable domain of TCR clone 29979 (TRBV7-7, TRBJ2-1)
CANSLASGTSYNEQFF

SEQ ID NO: 59959 - protein, 13 aa, Homo sapiens
  CDR3 for alpha chain variable domain of TCR clone 29980 (TRAV12-1, TRAJ29)
CVVRNSGNIPLVF

SEQ ID NO: 59960 - protein, 14 aa, Homo sapiens
  CDR3 for beta chain variable domain of TCR clone 29980 (TRBV7-2, TRBJ2-7)
CASRSQGAAYEQYF

SEQ ID NO: 59961 - protein, 12 aa, Homo sapiens
  CDR3 for alpha chain variable domain of TCR clone 29981 (TRAV12-3, TRAJ17)
CAMTPTGNKLTF

SEQ ID NO: 59962 - protein, 15 aa, Homo sapiens
  CDR3 for beta chain variable domain of TCR clone 29981 (TRBV29-1, TRBJ2-6)
CSFTGGRSGANVLTF

SEQ ID NO: 59963 - protein, 11 aa, Homo sapiens
  CDR3 for alpha chain variable domain of TCR clone 29982 (TRAV2, TRAJ33)
CAVDSNYQLIW

SEQ ID NO: 59964 - protein, 14 aa, Homo sapiens
  CDR3 for beta chain variable domain of TCR clone 29982 (TRBV11-2, TRBJ2-3)
CAGSRLARTDTQYF

SEQ ID NO: 59965 - protein, 16 aa, Homo sapiens
  CDR3 for alpha chain variable domain of TCR clone 29983 (TRAV21, TRAJ17)
CAVRPGEEAAGNKLTF

SEQ ID NO: 59966 - protein, 16 aa, Homo sapiens
  CDR3 for beta chain variable domain of TCR clone 29983 (TRBV2, TRBJ2-7)
CASSEPWTGPSYEQYL

SEQ ID NO: 59967 - protein, 16 aa, Homo sapiens
  CDR3 for alpha chain variable domain of TCR clone 29984 (TRAV12-3, TRAJ53)
CAMSPGSGGSNYKLIF

SEQ ID NO: 59968 - protein, 12 aa, Homo sapiens
  CDR3 for beta chain variable domain of TCR clone 29984 (TRBV11-2, TRBJ2-2)
CASSLGGGELFF

SEQ ID NO: 59969 - protein, 19 aa, Homo sapiens
  CDR3 for alpha chain variable domain of TCR clone 29985 (TRAV3, TRAJ6)
FAVRDRNPSRSGGSYIPTF

SEQ ID NO: 59970 - protein, 15 aa, Homo sapiens
  CDR3 for beta chain variable domain of TCR clone 29985 (TRBV18, TRBJ2-7)
CASSPTFMDSYEQYF

SEQ ID NO: 59971 - protein, 12 aa, Homo sapiens
  CDR3 for alpha chain variable domain of TCR clone 29986 (TRAV12-3, TRAJ17)
CAMTLTGNKLTF

SEQ ID NO: 59972 - protein, 15 aa, Homo sapiens
  CDR3 for beta chain variable domain of TCR clone 29986 (TRBV28, TRBJ2-1)
CASSGLAEVDNEQFF

SEQ ID NO: 59973 - protein, 14 aa, Homo sapiens
  CDR3 for alpha chain variable domain of TCR clone 29987 (TRAV17, TRAJ31)
CATVLRNNNARLMF

SEQ ID NO: 59974 - protein, 14 aa, Homo sapiens
  CDR3 for beta chain variable domain of TCR clone 29987 (TRBV12-4, TRBJ2-5)
CASSLRQKQETQYF

SEQ ID NO: 59975 - protein, 14 aa, Homo sapiens
  CDR3 for alpha chain variable domain of TCR clone 29988 (TRAV1-1, TRAJ27)
CAVIYNTNAGKSTF

SEQ ID NO: 59976 - protein, 15 aa, Homo sapiens
  CDR3 for beta chain variable domain of TCR clone 29988 (TRBV7-2, TRBJ2-1)
CASSSGLAGGNEQFL

SEQ ID NO: 59977 - protein, 12 aa, Homo sapiens
  CDR3 for alpha chain variable domain of TCR clone 29989 (TRAV13-1, TRAJ49)
CAASPMGNQFYF

SEQ ID NO: 59978 - protein, 13 aa, Homo sapiens
  CDR3 for beta chain variable domain of TCR clone 29989 (TRBV7-9, TRBJ1-2)
CASSLKQNYGYTF

SEQ ID NO: 59979 - protein, 15 aa, Homo sapiens
  CDR3 for alpha chain variable domain of TCR clone 29990 (TRAV17, TRAJ57)
CATGPSQGGYEKLVF

SEQ ID NO: 59980 - protein, 11 aa, Homo sapiens
  CDR3 for beta chain variable domain of TCR clone 29990 (TRBV11-2, TRBJ2-2)
CASSLPGELFF

SEQ ID NO: 59981 - protein, 12 aa, Homo sapiens
  CDR3 for alpha chain variable domain of TCR clone 29991 (TRAV21, TRAJ11)
CAATSGYSTLTF

SEQ ID NO: 59982 - protein, 14 aa, Homo sapiens
  CDR3 for beta chain variable domain of TCR clone 29991 (TRBV20-1, TRBJ2-7)
CSAPELAVVGEQYF

SEQ ID NO: 59983 - protein, 14 aa, Homo sapiens
  CDR3 for alpha chain variable domain of TCR clone 29992 (TRAV12-1, TRAJ17)
CVVNFKAAGNKLTF

SEQ ID NO: 59984 - protein, 17 aa, Homo sapiens
  CDR3 for beta chain variable domain of TCR clone 29992 (TRBV20-1, TRBJ2-1)
CSASASGLAGSYNEQSF

SEQ ID NO: 59985 - protein, 13 aa, Homo sapiens
  CDR3 for alpha chain variable domain of TCR clone 29993 (TRAV13-1, TRAJ21)
CAASIYNFNKFYF

SEQ ID NO: 59986 - protein, 12 aa, Homo sapiens
  CDR3 for beta chain variable domain of TCR clone 29993 (TRBV11-2, TRBJ2-1)
CASSPGNNEQSF

SEQ ID NO: 59987 - protein, 16 aa, Homo sapiens
  CDR3 for alpha chain variable domain of TCR clone 29994 (TRAV8-3, TRAJ8)
CAVPRDGNTGFQKLVF

SEQ ID NO: 59988 - protein, 14 aa, Homo sapiens
  CDR3 for beta chain variable domain of TCR clone 29994 (TRBV28, TRBJ1-1)
CASSEAGRGTEAFF

SEQ ID NO: 59989 - protein, 17 aa, Homo sapiens
  CDR3 for alpha chain variable domain of TCR clone 29995 (TRAV36/DV7, TRAJ44)
CAVEQIPALPVNSPLGL

SEQ ID NO: 59990 - protein, 16 aa, Homo sapiens
  CDR3 for beta chain variable domain of TCR clone 29995 (TRBV7-9, TRBJ1-2)
CASSLGFSSGEDGYTF

SEQ ID NO: 59991 - protein, 11 aa, Homo sapiens
  CDR3 for alpha chain variable domain of TCR clone 29996 (TRAV12-1, TRAJ30)
CVVNGQDKIIF

SEQ ID NO: 59992 - protein, 12 aa, Homo sapiens
  CDR3 for beta chain variable domain of TCR clone 29996 (TRBV27, TRBJ2-2)
CASKLFTGELFS

SEQ ID NO: 59993 - protein, 14 aa, Homo sapiens
  CDR3 for alpha chain variable domain of TCR clone 29997 (TRAV12-2, TRAJ44)
CAANPAGTASKLTF

SEQ ID NO: 59994 - protein, 16 aa, Homo sapiens
  CDR3 for beta chain variable domain of TCR clone 29997 (TRBV2, TRBJ2-6)
CASSEVGGAGANVLTF

SEQ ID NO: 59995 - protein, 10 aa, Homo sapiens
  CDR3 for alpha chain variable domain of TCR clone 29998 (TRAV12-3, TRAJ49)
CAMNDDQFNF

SEQ ID NO: 59996 - protein, 13 aa, Homo sapiens
  CDR3 for beta chain variable domain of TCR clone 29998 (TRBV12-4, TRBJ1-1)
CASSPGTGFEAFF

SEQ ID NO: 59997 - protein, 11 aa, Homo sapiens
  CDR3 for alpha chain variable domain of TCR clone 29999 (TRAV23/DV6, TRAJ48)
CAPRWGEQLTF

SEQ ID NO: 59998 - protein, 13 aa, Homo sapiens
  CDR3 for beta chain variable domain of TCR clone 29999 (TRBV12-4, TRBJ2-5)
CASSPGTEETQYF

SEQ ID NO: 59999 - protein, 15 aa, Homo sapiens
  CDR3 for alpha chain variable domain of TCR clone 30000 (TRAV21, TRAJ45)
CAVSYSGGGADELTF

SEQ ID NO: 60000 - protein, 12 aa, Homo sapiens
  CDR3 for beta chain variable domain of TCR clone 30000 (TRBV11-2, TRBJ2-1)
CASSPGNNEQFF

SEQ ID NO: 60001 - protein, 12 aa, Homo sapiens
  CDR3 for alpha chain variable domain of TCR clone 30001 (TRAV2, TRAJ10)
CASTGGGNKLTF

SEQ ID NO: 60002 - protein, 14 aa, Homo sapiens
  CDR3 for beta chain variable domain of TCR clone 30001 (TRBV7-8, TRBJ2-2)
CASRGQGAAGELFF

SEQ ID NO: 60003 - protein, 12 aa, Homo sapiens
  CDR3 for alpha chain variable domain of TCR clone 30002 (TRAV16, TRAJ10)
CSCTGGGNKLTF

SEQ ID NO: 60004 - protein, 15 aa, Homo sapiens
  CDR3 for beta chain variable domain of TCR clone 30002 (TRBV6-3, TRBJ2-7)
CASSSPGTVFYEQYF

SEQ ID NO: 60005 - protein, 16 aa, Homo sapiens
  CDR3 for alpha chain variable domain of TCR clone 30003 (TRAV3, TRAJ37)
CAVRPHGPGNTGKLIF

SEQ ID NO: 60006 - protein, 11 aa, Homo sapiens
  CDR3 for beta chain variable domain of TCR clone 30003 (TRBV10-3, TRBJ2-7)
CAISEGLEQYF

SEQ ID NO: 60007 - protein, 14 aa, Homo sapiens
  CDR3 for alpha chain variable domain of TCR clone 30004 (TRAV26-1, TRAJ16)
CIAVPFSDGQKLLF

SEQ ID NO: 60008 - protein, 12 aa, Homo sapiens
  CDR3 for beta chain variable domain of TCR clone 30004 (TRBV4-2, TRBJ2-1)
CARSAQKNEQSF

SEQ ID NO: 60009 - protein, 14 aa, Homo sapiens
  CDR3 for alpha chain variable domain of TCR clone 30005 (TRAV16, TRAJ33)
CALSAMDSNYQLIW

SEQ ID NO: 60010 - protein, 16 aa, Homo sapiens
  CDR3 for beta chain variable domain of TCR clone 30005 (TRBV25-1, TRBJ2-7)
CASSELTGGEIYEQYF

SEQ ID NO: 60011 - protein, 14 aa, Homo sapiens
  CDR3 for alpha chain variable domain of TCR clone 30006 (TRAV26-1, TRAJ45)
CIVRAVGGADGLTF

SEQ ID NO: 60012 - protein, 16 aa, Homo sapiens
  CDR3 for beta chain variable domain of TCR clone 30006 (TRBV7-9, TRBJ1-1)
CASSLTQVRSNTEAFF

SEQ ID NO: 60013 - protein, 11 aa, Homo sapiens
  CDR3 for alpha chain variable domain of TCR clone 30007 (TRAV1-1, TRAJ23)
CAVRQGGKLIF

SEQ ID NO: 60014 - protein, 20 aa, Homo sapiens
  CDR3 for beta chain variable domain of TCR clone 30007 (TRBV7-8, TRBJ2-2)
CASSHLFPGPTIHINGELFF

SEQ ID NO: 60015 - protein, 20 aa, Homo sapiens
  CDR3 for alpha chain variable domain of TCR clone 30008 (TRAV26-1, TRAJ42)
CCVLLHRQTYYGGSQGNLIF

SEQ ID NO: 60016 - protein, 16 aa, Homo sapiens
  CDR3 for beta chain variable domain of TCR clone 30008 (TRBV7-3, TRBJ2-2)
CASSLKRGTLSGELVF

SEQ ID NO: 60017 - protein, 13 aa, Homo sapiens
  CDR3 for alpha chain variable domain of TCR clone 30009 (TRAV13-1, TRAJ39)
CSKYSNAGNMLTF

SEQ ID NO: 60018 - protein, 13 aa, Homo sapiens
  CDR3 for beta chain variable domain of TCR clone 30009 (TRBV4-2, TRBJ1-1)
CASSQAGNTEAFF

SEQ ID NO: 60019 - protein, 14 aa, Homo sapiens
  CDR3 for alpha chain variable domain of TCR clone 30010 (TRAV35, TRAJ22)
CAGLRPGSARQLTF

SEQ ID NO: 60020 - protein, 15 aa, Homo sapiens
  CDR3 for beta chain variable domain of TCR clone 30010 (TRBV12-3, TRBJ2-5)
CASSPPTGLQETQYF

SEQ ID NO: 60021 - protein, 12 aa, Homo sapiens
  CDR3 for alpha chain variable domain of TCR clone 30011 (TRAV1-1, TRAJ8)
CAGGTGFQKVVF

SEQ ID NO: 60022 - protein, 15 aa, Homo sapiens
  CDR3 for beta chain variable domain of TCR clone 30011 (TRBV7-9, TRBJ1-4)
CASSRTGGFNEKLFF

SEQ ID NO: 60023 - protein, 15 aa, Homo sapiens
  CDR3 for alpha chain variable domain of TCR clone 30012 (TRAV3, TRAJ26)
CAVRDGDNYGQNFVF

SEQ ID NO: 60024 - protein, 13 aa, Homo sapiens
  CDR3 for beta chain variable domain of TCR clone 30012 (TRBV6-5, TRBJ2-3)
CASSYLRGGTQYF

SEQ ID NO: 60025 - protein, 15 aa, Homo sapiens
  CDR3 for alpha chain variable domain of TCR clone 30013 (TRAV12-3, TRAJ27)
CAMRAYNTNAGKSTF

SEQ ID NO: 60026 - protein, 13 aa, Homo sapiens
  CDR3 for beta chain variable domain of TCR clone 30013 (TRBV11-2, TRBJ2-5)
CASSRGPSEAQYF

SEQ ID NO: 60027 - protein, 17 aa, Homo sapiens
  CDR3 for alpha chain variable domain of TCR clone 30014 (TRAV12-3, TRAJ6)
CAMSARGGAGGSYIPTF

SEQ ID NO: 60028 - protein, 12 aa, Homo sapiens
  CDR3 for beta chain variable domain of TCR clone 30014 (TRBV19, TRBJ1-5)
CASSIAQQPQHF

SEQ ID NO: 60029 - protein, 16 aa, Homo sapiens
  CDR3 for alpha chain variable domain of TCR clone 30015 (TRAV12-3, TRAJ45)
CAMGSGSGGGADGLTF

SEQ ID NO: 60030 - protein, 18 aa, Homo sapiens
  CDR3 for beta chain variable domain of TCR clone 30015 (TRBV12-4, TRBJ2-2)
CASSLVAGTRGRTGELFF

SEQ ID NO: 60031 - protein, 11 aa, Homo sapiens
  CDR3 for alpha chain variable domain of TCR clone 30016 (TRAV2, TRAJ33)
CAVDSNYQLIW

SEQ ID NO: 60032 - protein, 14 aa, Homo sapiens
  CDR3 for beta chain variable domain of TCR clone 30016 (TRBV7-6, TRBJ2-3)
CASSLGTVTDTQYF

SEQ ID NO: 60033 - protein, 11 aa, Homo sapiens
  CDR3 for alpha chain variable domain of TCR clone 30017 (TRAV3, TRAJ21)
CAVGNFNKFYF

SEQ ID NO: 60034 - protein, 13 aa, Homo sapiens
  CDR3 for beta chain variable domain of TCR clone 30017 (TRBV19, TRBJ1-5)
CASSMRGYQPQHF

SEQ ID NO: 60035 - protein, 12 aa, Homo sapiens
  CDR3 for alpha chain variable domain of TCR clone 30018 (TRAV17, TRAJ20)
CATLANDYKLSF

SEQ ID NO: 60036 - protein, 14 aa, Homo sapiens
  CDR3 for beta chain variable domain of TCR clone 30018 (TRBV10-3, TRBJ1-2)
CAISEDAPYYGYTF

SEQ ID NO: 60037 - protein, 15 aa, Homo sapiens
  CDR3 for alpha chain variable domain of TCR clone 30019 (TRAV8-3, TRAJ11)
CAVGLLNSGYSTLTF

SEQ ID NO: 60038 - protein, 14 aa, Homo sapiens
  CDR3 for beta chain variable domain of TCR clone 30019 (TRBV4-1, TRBJ2-5)
CASSRSGGGETQYF

SEQ ID NO: 60039 - protein, 13 aa, Homo sapiens
  CDR3 for alpha chain variable domain of TCR clone 30020 (TRAV4, TRAJ28)
CLFIWGWELPTHF

SEQ ID NO: 60040 - protein, 14 aa, Homo sapiens
  CDR3 for beta chain variable domain of TCR clone 30020 (TRBV7-9, TRBJ2-5)
CASSLDTAQEAQYF

SEQ ID NO: 60041 - protein, 13 aa, Homo sapiens
  CDR3 for alpha chain variable domain of TCR clone 30021 (TRAV17, TRAJ26)
CATVDNYVQNFVF

SEQ ID NO: 60042 - protein, 16 aa, Homo sapiens
  CDR3 for beta chain variable domain of TCR clone 30021 (TRBV2, TRBJ2-1)
CASSVGGSLSYNEQFF

SEQ ID NO: 60043 - protein, 16 aa, Homo sapiens
  CDR3 for alpha chain variable domain of TCR clone 30022 (TRAV8-3, TRAJ13)
CAVGAYPSGGYQKVTF

SEQ ID NO: 60044 - protein, 15 aa, Homo sapiens
  CDR3 for beta chain variable domain of TCR clone 30022 (TRBV19, TRBJ1-5)
CASSIVWAGNQPQHF

SEQ ID NO: 60045 - protein, 14 aa, Homo sapiens
  CDR3 for alpha chain variable domain of TCR clone 30023 (TRAV1-2, TRAJ8)
CAVREDTGFQKLVF

SEQ ID NO: 60046 - protein, 13 aa, Homo sapiens
  CDR3 for beta chain variable domain of TCR clone 30023 (TRBV15, TRBJ1-6)
CATSGGLNSPLHF

SEQ ID NO: 60047 - protein, 13 aa, Homo sapiens
  CDR3 for alpha chain variable domain of TCR clone 30024 (TRAV23/DV6, TRAJ16)
CAASGSDGQKLLF

SEQ ID NO: 60048 - protein, 16 aa, Homo sapiens
  CDR3 for beta chain variable domain of TCR clone 30024 (TRBV7-3, TRBJ2-2)
CASSLKRGTLSGELFF

SEQ ID NO: 60049 - protein, 14 aa, Homo sapiens
  CDR3 for alpha chain variable domain of TCR clone 30025 (TRAV20, TRAJ42)
CAVQAGGSQGNLIF

SEQ ID NO: 60050 - protein, 14 aa, Homo sapiens
  CDR3 for beta chain variable domain of TCR clone 30025 (TRBV28, TRBJ1-2)
CTSRIQGANYGYTF

SEQ ID NO: 60051 - protein, 14 aa, Homo sapiens
  CDR3 for alpha chain variable domain of TCR clone 30026 (TRAV12-1, TRAJ17)
CVVNYKAAGNQLTF

SEQ ID NO: 60052 - protein, 17 aa, Homo sapiens
  CDR3 for beta chain variable domain of TCR clone 30026 (TRBV20-1, TRBJ2-1)
CSASSSGLAGSYNEQFF

SEQ ID NO: 60053 - protein, 17 aa, Homo sapiens
  CDR3 for alpha chain variable domain of TCR clone 30027 (TRAV8-3, TRAJ10)
EASNAVILTGGGNKLTF

SEQ ID NO: 60054 - protein, 16 aa, Homo sapiens
  CDR3 for beta chain variable domain of TCR clone 30027 (TRBV7-9, TRBJ1-2)
CASSLGFSSGEDGYTF

SEQ ID NO: 60055 - protein, 12 aa, Homo sapiens
  CDR3 for alpha chain variable domain of TCR clone 30028 (TRAV21, TRAJ58)
CAAETSGSRLTF

SEQ ID NO: 60056 - protein, 17 aa, Homo sapiens
  CDR3 for beta chain variable domain of TCR clone 30028 (TRBV28, TRBJ2-5)
CASSTPEGDALQETQYF

SEQ ID NO: 60057 - protein, 13 aa, Homo sapiens
  CDR3 for alpha chain variable domain of TCR clone 30029 (TRAV17, TRAJ5)
CALRGTGRRALTF

SEQ ID NO: 60058 - protein, 12 aa, Homo sapiens
  CDR3 for beta chain variable domain of TCR clone 30029 (TRBV11-2, TRBJ2-2)
CASSLGGGELFF

SEQ ID NO: 60059 - protein, 12 aa, Homo sapiens
  CDR3 for alpha chain variable domain of TCR clone 30030 (TRAV13-1, TRAJ49)
CAASPMGNKFYF

SEQ ID NO: 60060 - protein, 13 aa, Homo sapiens
  CDR3 for beta chain variable domain of TCR clone 30030 (TRBV20-1, TRBJ2-2)
CSASAAGTGELFF

SEQ ID NO: 60061 - protein, 16 aa, Homo sapiens
  CDR3 for alpha chain variable domain of TCR clone 30031 (TRAV30, TRAJ24)
CGTEIVDADSWGKFQF

SEQ ID NO: 60062 - protein, 14 aa, Homo sapiens
  CDR3 for beta chain variable domain of TCR clone 30031 (TRBV12-5, TRBJ2-5)
CASGSRTHQETQYI

SEQ ID NO: 60063 - protein, 17 aa, Homo sapiens
  CDR3 for alpha chain variable domain of TCR clone 30032 (TRAV13-1, TRAJ31)
CAPRDRLMFGDVTQLVV

SEQ ID NO: 60064 - protein, 12 aa, Homo sapiens
  CDR3 for beta chain variable domain of TCR clone 30032 (TRBV7-9, TRBJ2-7)
CASSLEGYEQYF

SEQ ID NO: 60065 - protein, 14 aa, Homo sapiens
  CDR3 for alpha chain variable domain of TCR clone 30033 (TRAV8-3, TRAJ9)
CAVVYNTGGFKIIF

SEQ ID NO: 60066 - protein, 14 aa, Homo sapiens
  CDR3 for beta chain variable domain of TCR clone 30033 (TRBV7-3, TRBJ2-2)
CASSSGGYTGELFF

SEQ ID NO: 60067 - protein, 10 aa, Homo sapiens
  CDR3 for alpha chain variable domain of TCR clone 30034 (TRAV23/DV6, TRAJ57)
CAASSTHSQG

SEQ ID NO: 60068 - protein, 14 aa, Homo sapiens
  CDR3 for beta chain variable domain of TCR clone 30034 (TRBV25-1, TRBJ1-1)
CASTHLGGNTEAFF

SEQ ID NO: 60069 - protein, 12 aa, Homo sapiens
  CDR3 for alpha chain variable domain of TCR clone 30035 (TRAV3, TRAJ43)
CAVRDPNNGMRF

SEQ ID NO: 60070 - protein, 15 aa, Homo sapiens
  CDR3 for beta chain variable domain of TCR clone 30035 (TRBV27, TRBJ1-5)
CASSLGTGFDQPQHF

SEQ ID NO: 60071 - protein, 16 aa, Homo sapiens
  CDR3 for alpha chain variable domain of TCR clone 30036 (TRAV26-1, TRAJ38)
CIVRVELGGNNRKLIW

SEQ ID NO: 60072 - protein, 14 aa, Homo sapiens
  CDR3 for beta chain variable domain of TCR clone 30036 (TRBV5-1, TRBJ2-3)
CASSPGLAADTRYF

SEQ ID NO: 60073 - protein, 14 aa, Homo sapiens
  CDR3 for alpha chain variable domain of TCR clone 30037 (TRAV16, TRAJ26)
CALSSANYGQNFVF

SEQ ID NO: 60074 - protein, 14 aa, Homo sapiens
  CDR3 for beta chain variable domain of TCR clone 30037 (TRBV28, TRBJ2-1)
CASSLNGRNNEQFF

SEQ ID NO: 60075 - protein, 16 aa, Homo sapiens
  CDR3 for alpha chain variable domain of TCR clone 30038 (TRAV30, TRAJ24)
CGTEIVDADSWGKLQF

SEQ ID NO: 60076 - protein, 19 aa, Homo sapiens
  CDR3 for beta chain variable domain of TCR clone 30038 (TRBV25-1, TRBJ2-2)
CAILVYRVDRGRKTGELFF

SEQ ID NO: 60077 - protein, 13 aa, Homo sapiens
  CDR3 for alpha chain variable domain of TCR clone 30039 (TRAV3, TRAJ27)
CAVRPLGAGKSTF

SEQ ID NO: 60078 - protein, 17 aa, Homo sapiens
  CDR3 for beta chain variable domain of TCR clone 30039 (TRBV4-1, TRBJ2-1)
CASSHRDSGSSYNEQFF

SEQ ID NO: 60079 - protein, 13 aa, Homo sapiens
  CDR3 for alpha chain variable domain of TCR clone 30040 (TRAV13-1, TRAJ39)
CAASIWAGNMLTF

SEQ ID NO: 60080 - protein, 13 aa, Homo sapiens
  CDR3 for beta chain variable domain of TCR clone 30040 (TRBV11-2, TRBJ1-3)
CASSLEPVNTMYF

SEQ ID NO: 60081 - protein, 18 aa, Homo sapiens
  CDR3 for alpha chain variable domain of TCR clone 30041 (TRAV12-3, TRAJ52)
CAMSRTNAGGTSYGKLTF

SEQ ID NO: 60082 - protein, 17 aa, Homo sapiens
  CDR3 for beta chain variable domain of TCR clone 30041 (TRBV7-3, TRBJ2-3)
CASSLMKRMRGADTQCF

SEQ ID NO: 60083 - protein, 12 aa, Homo sapiens
  CDR3 for alpha chain variable domain of TCR clone 30042 (TRAV13-2, TRAJ39)
CAENSERNMLTF

SEQ ID NO: 60084 - protein, 14 aa, Homo sapiens
  CDR3 for beta chain variable domain of TCR clone 30042 (TRBV20-1, TRBJ1-1)
CNAMGGTANTEAFF

SEQ ID NO: 60085 - protein, 14 aa, Homo sapiens
  CDR3 for alpha chain variable domain of TCR clone 30043 (TRAV26-1, TRAJ34)
CIVRESYNTDKPIF

SEQ ID NO: 60086 - protein, 13 aa, Homo sapiens
  CDR3 for beta chain variable domain of TCR clone 30043 (TRBV19, TRBJ2-1)
CATSRGVYNEQFF

SEQ ID NO: 60087 - protein, 14 aa, Homo sapiens
  CDR3 for alpha chain variable domain of TCR clone 30044 (TRAV1-2, TRAJ16)
CAVNRFSDGQKLPF

SEQ ID NO: 60088 - protein, 14 aa, Homo sapiens
  CDR3 for beta chain variable domain of TCR clone 30044 (TRBV13, TRBJ2-5)
CASSLGRGQETQYF

SEQ ID NO: 60089 - protein, 14 aa, Homo sapiens
  CDR3 for alpha chain variable domain of TCR clone 30045 (TRAV13-1, TRAJ40)
CAASMTSGTYKYIF

SEQ ID NO: 60090 - protein, 12 aa, Homo sapiens
  CDR3 for beta chain variable domain of TCR clone 30045 (TRBV11-2, TRBJ2-2)
CASSLGGGELFF

SEQ ID NO: 60091 - protein, 15 aa, Homo sapiens
  CDR3 for alpha chain variable domain of TCR clone 30046 (TRAV17, TRAJ57)
CATGPSQGGSEKLVF

SEQ ID NO: 60092 - protein, 16 aa, Homo sapiens
  CDR3 for beta chain variable domain of TCR clone 30046 (TRBV12-4, TRBJ1-5)
CDSSRPVGGSNQPQHF

SEQ ID NO: 60093 - protein, 18 aa, Homo sapiens
  CDR3 for alpha chain variable domain of TCR clone 30047 (TRAV13-1, TRAJ52)
CAAKNPNAGGTRYGKLTF

SEQ ID NO: 60094 - protein, 15 aa, Homo sapiens
  CDR3 for beta chain variable domain of TCR clone 30047 (TRBV6-1, TRBJ2-3)
CASSERGGITDTQYF

SEQ ID NO: 60095 - protein, 12 aa, Homo sapiens
  CDR3 for alpha chain variable domain of TCR clone 30048 (TRAV16, TRAJ56)
CAPTGANSKLTF

SEQ ID NO: 60096 - protein, 13 aa, Homo sapiens
  CDR3 for beta chain variable domain of TCR clone 30048 (TRBV7-9, TRBJ1-2)
CASSLKQNYGYTF

SEQ ID NO: 60097 - protein, 12 aa, Homo sapiens
  CDR3 for alpha chain variable domain of TCR clone 30049 (TRAV21, TRAJ11)
CAATSGYSILTF

SEQ ID NO: 60098 - protein, 14 aa, Homo sapiens
  CDR3 for beta chain variable domain of TCR clone 30049 (TRBV20-1, TRBJ2-7)
CSAPELAGVGEQYF

SEQ ID NO: 60099 - protein, 15 aa, Homo sapiens
  CDR3 for alpha chain variable domain of TCR clone 30050 (TRAV21, TRAJ32)
CAAAPYGGATNRLIF

SEQ ID NO: 60100 - protein, 17 aa, Homo sapiens
  CDR3 for beta chain variable domain of TCR clone 30050 (TRBV18, TRBJ2-3)
CASSPFGDGGFTDTQYF

SEQ ID NO: 60101 - protein, 15 aa, Homo sapiens
  CDR3 for alpha chain variable domain of TCR clone 30051 (TRAV8-3, TRAJ11)
CAVGLLNSGYSTLTF

SEQ ID NO: 60102 - protein, 16 aa, Homo sapiens
  CDR3 for beta chain variable domain of TCR clone 30051 (TRBV7-9, TRBJ1-2)
CASSLGFSSVEDGYTF

SEQ ID NO: 60103 - protein, 11 aa, Homo sapiens
  CDR3 for alpha chain variable domain of TCR clone 30052 (TRAV17, TRAJ39)
CATGACNMLTF

SEQ ID NO: 60104 - protein, 16 aa, Homo sapiens
  CDR3 for beta chain variable domain of TCR clone 30052 (TRBV5-1, TRBJ2-1)
CASSFGVSGSYNEQLF

SEQ ID NO: 60105 - protein, 14 aa, Homo sapiens
  CDR3 for alpha chain variable domain of TCR clone 30053 (TRAV29/DV5, TRAJ36)
CAARRKTGANNLFF

SEQ ID NO: 60106 - protein, 13 aa, Homo sapiens
  CDR3 for beta chain variable domain of TCR clone 30053 (TRBV7-9, TRBJ2-3)
CASSPGSTDTQYF

SEQ ID NO: 60107 - protein, 18 aa, Homo sapiens
  CDR3 for alpha chain variable domain of TCR clone 30054 (TRAV13-1, TRAJ52)
CAAKNPNAGGTSYGKLTF

SEQ ID NO: 60108 - protein, 17 aa, Homo sapiens
  CDR3 for beta chain variable domain of TCR clone 30054 (TRBV7-8, TRBJ2-6)
CASSAGTGGAGANVLTF

SEQ ID NO: 60109 - protein, 16 aa, Homo sapiens
  CDR3 for alpha chain variable domain of TCR clone 30055 (TRAV20, TRAJ10)
CAVLRGLTGGGNELTF

SEQ ID NO: 60110 - protein, 14 aa, Homo sapiens
  CDR3 for beta chain variable domain of TCR clone 30055 (TRBV19, TRBJ1-5)
CASRAPDSFLSQHF

SEQ ID NO: 60111 - protein, 11 aa, Homo sapiens
  CDR3 for alpha chain variable domain of TCR clone 30056 (TRAV2, TRAJ13)
CASGGYQKVTF

SEQ ID NO: 60112 - protein, 17 aa, Homo sapiens
  CDR3 for beta chain variable domain of TCR clone 30056 (TRBV4-1, TRBJ1-4)
CASSQEGPRGVEEKLFF

SEQ ID NO: 60113 - protein, 14 aa, Homo sapiens
  CDR3 for alpha chain variable domain of TCR clone 30057 (TRAV29/DV5, TRAJ36)
CAARRKTGANNLFV

SEQ ID NO: 60114 - protein, 14 aa, Homo sapiens
  CDR3 for beta chain variable domain of TCR clone 30057 (TRBV12-5, TRBJ2-5)
CASGSRTHQETQYF

SEQ ID NO: 60115 - protein, 12 aa, Homo sapiens
  CDR3 for alpha chain variable domain of TCR clone 30058 (TRAV3, TRAJ21)
CALGRGSTNFTL

SEQ ID NO: 60116 - protein, 14 aa, Homo sapiens
  CDR3 for beta chain variable domain of TCR clone 30058 (TRBV7-9, TRBJ2-4)
CASSLAMGGNIQYF

SEQ ID NO: 60117 - protein, 16 aa, Homo sapiens
  CDR3 for alpha chain variable domain of TCR clone 30059 (TRAV3, TRAJ37)
CAVRPHGSGNTGKRIF

SEQ ID NO: 60118 - protein, 16 aa, Homo sapiens
  CDR3 for beta chain variable domain of TCR clone 30059 (TRBV9, TRBJ1-2)
CASSVEEKVSPYGYTF

SEQ ID NO: 60119 - protein, 11 aa, Homo sapiens
  CDR3 for alpha chain variable domain of TCR clone 30060 (TRAV2, TRAJ13)
CASGGYQKVTF

SEQ ID NO: 60120 - protein, 17 aa, Homo sapiens
  CDR3 for beta chain variable domain of TCR clone 30060 (TRBV24-1, TRBJ2-1)
CATSDVSTSGTYNEQFF

SEQ ID NO: 60121 - protein, 12 aa, Homo sapiens
  CDR3 for alpha chain variable domain of TCR clone 30061 (TRAV2, TRAJ24)
CAAADSWGKFQF

SEQ ID NO: 60122 - protein, 15 aa, Homo sapiens
  CDR3 for beta chain variable domain of TCR clone 30061 (TRBV10-3, TRBJ2-2)
CAIYTGGTGTGELFF

SEQ ID NO: 60123 - protein, 14 aa, Homo sapiens
  CDR3 for alpha chain variable domain of TCR clone 30062 (TRAV13-1, TRAJ26)
CAASRGNYGQNFVF

SEQ ID NO: 60124 - protein, 16 aa, Homo sapiens
  CDR3 for beta chain variable domain of TCR clone 30062 (TRBV11-2, TRBJ2-7)
CASSTVTAPKTYEQYF

SEQ ID NO: 60125 - protein, 13 aa, Homo sapiens
  CDR3 for alpha chain variable domain of TCR clone 30063 (TRAV3, TRAJ27)
CAVRPLGAGKSTF

SEQ ID NO: 60126 - protein, 13 aa, Homo sapiens
  CDR3 for beta chain variable domain of TCR clone 30063 (TRBV7-9, TRBJ2-3)
CASSPGSPDTQYF

SEQ ID NO: 60127 - protein, 14 aa, Homo sapiens
  CDR3 for alpha chain variable domain of TCR clone 30064 (TRAV13-2, TRAJ17)
CAENSKAAGNKLTF

SEQ ID NO: 60128 - protein, 17 aa, Homo sapiens
  CDR3 for beta chain variable domain of TCR clone 30064 (TRBV13, TRBJ2-3)
CASSLSRVAGGRNTQYF

SEQ ID NO: 60129 - protein, 14 aa, Homo sapiens
  CDR3 for alpha chain variable domain of TCR clone 30065 (TRAV12-2, TRAJ13)
CAVKKTGGYQKVTF

SEQ ID NO: 60130 - protein, 16 aa, Homo sapiens
  CDR3 for beta chain variable domain of TCR clone 30065 (TRBV19, TRBJ1-1)
CASSPTRFWPGTEAFF

SEQ ID NO: 60131 - protein, 14 aa, Homo sapiens
  CDR3 for alpha chain variable domain of TCR clone 30066 (TRAV35, TRAJ22)
CAGLRPGSARQLTF

SEQ ID NO: 60132 - protein, 15 aa, Homo sapiens
  CDR3 for beta chain variable domain of TCR clone 30066 (TRBV9, TRBJ1-6)
CASSVAGTGDSPLHF

SEQ ID NO: 60133 - protein, 14 aa, Homo sapiens
  CDR3 for alpha chain variable domain of TCR clone 30067 (TRAV1-2, TRAJ8)
CAVREDTGFQKLVF

SEQ ID NO: 60134 - protein, 12 aa, Homo sapiens
  CDR3 for beta chain variable domain of TCR clone 30067 (TRBV5-5, TRBJ2-5)
CASSYFGETQYF

SEQ ID NO: 60135 - protein, 16 aa, Homo sapiens
  CDR3 for alpha chain variable domain of TCR clone 30068 (TRAV20, TRAJ22)
CAVQASSSGSARQLTF

SEQ ID NO: 60136 - protein, 13 aa, Homo sapiens
  CDR3 for beta chain variable domain of TCR clone 30068 (TRBV7-2, TRBJ2-5)
CASSQTSVETKYF

SEQ ID NO: 60137 - protein, 14 aa, Homo sapiens
  CDR3 for alpha chain variable domain of TCR clone 30069 (TRAV12-3, TRAJ9)
CAMSPNTGGFKTIF

SEQ ID NO: 60138 - protein, 12 aa, Homo sapiens
  CDR3 for beta chain variable domain of TCR clone 30069 (TRBV19, TRBJ1-5)
CASRIAQQPQHF

SEQ ID NO: 60139 - protein, 16 aa, Homo sapiens
  CDR3 for alpha chain variable domain of TCR clone 30070 (TRAV16, TRAJ4)
CALSRMFSGGYNKLIF

SEQ ID NO: 60140 - protein, 12 aa, Homo sapiens
  CDR3 for beta chain variable domain of TCR clone 30070 (TRBV11-2, TRBJ2-2)
CASSLPTGELFF

SEQ ID NO: 60141 - protein, 12 aa, Homo sapiens
  CDR3 for alpha chain variable domain of TCR clone 30071 (TRAV12-3, TRAJ17)
CAMTLTGNKLTF

SEQ ID NO: 60142 - protein, 13 aa, Homo sapiens
  CDR3 for beta chain variable domain of TCR clone 30071 (TRBV19, TRBJ2-2)
CASSIWSTGELFF

SEQ ID NO: 60143 - protein, 15 aa, Homo sapiens
  CDR3 for alpha chain variable domain of TCR clone 30072 (TRAV21, TRAJ32)
CAVNSYGGATNKLIF

SEQ ID NO: 60144 - protein, 18 aa, Homo sapiens
  CDR3 for beta chain variable domain of TCR clone 30072 (TRBV7-9, TRBJ2-1)
CASSTGLAEGSSYNEQLF

SEQ ID NO: 60145 - protein, 17 aa, Homo sapiens
  CDR3 for alpha chain variable domain of TCR clone 30073 (TRAV3, TRAJ38)
CAVRDRLNAGNNRKLIW

SEQ ID NO: 60146 - protein, 14 aa, Homo sapiens
  CDR3 for beta chain variable domain of TCR clone 30073 (TRBV5-5, TRBJ1-5)
CASSGQGVDQPQHF

SEQ ID NO: 60147 - protein, 15 aa, Homo sapiens
  CDR3 for alpha chain variable domain of TCR clone 30074 (TRAV3, TRAJ5)
CAVRDLDTGRRALTF

SEQ ID NO: 60148 - protein, 13 aa, Homo sapiens
  CDR3 for beta chain variable domain of TCR clone 30074 (TRBV12-4, TRBJ2-7)
CASSPTETYEKYF

SEQ ID NO: 60149 - protein, 16 aa, Homo sapiens
  CDR3 for alpha chain variable domain of TCR clone 30075 (TRAV30, TRAJ24)
CGTEIVDADSGGKFQF

SEQ ID NO: 60150 - protein, 15 aa, Homo sapiens
  CDR3 for beta chain variable domain of TCR clone 30075 (TRBV7-9, TRBJ1-4)
CASSARTGGNEKLFF

SEQ ID NO: 60151 - protein, 14 aa, Homo sapiens
  CDR3 for alpha chain variable domain of TCR clone 30076 (TRAV12-1, TRAJ30)
CVPTGTNRDDKNIF

SEQ ID NO: 60152 - protein, 11 aa, Homo sapiens
  CDR3 for beta chain variable domain of TCR clone 30076 (TRBV4-1, TRBJ2-2)
CASEHTGELFF

SEQ ID NO: 60153 - protein, 16 aa, Homo sapiens
  CDR3 for alpha chain variable domain of TCR clone 30077 (TRAV21, TRAJ52)
CAVTNAGGTSYGKLTL

SEQ ID NO: 60154 - protein, 13 aa, Homo sapiens
  CDR3 for beta chain variable domain of TCR clone 30077 (TRBV20-1, TRBJ2-3)
CSARLAGTDTQYF

SEQ ID NO: 60155 - protein, 14 aa, Homo sapiens
  CDR3 for alpha chain variable domain of TCR clone 30078 (TRAV8-2, TRAJ11)
CVVSEKSGYSTPTF

SEQ ID NO: 60156 - protein, 16 aa, Homo sapiens
  CDR3 for beta chain variable domain of TCR clone 30078 (TRBV28, TRBJ2-1)
CASSSPEYPRDNEQFF

SEQ ID NO: 60157 - protein, 15 aa, Homo sapiens
  CDR3 for alpha chain variable domain of TCR clone 30079 (TRAV17, TRAJ13)
CATDAGSGGYQTVTF

SEQ ID NO: 60158 - protein, 17 aa, Homo sapiens
  CDR3 for beta chain variable domain of TCR clone 30079 (TRBV11-2, TRBJ2-1)
CASSLYPPGVEYNEQFF

SEQ ID NO: 60159 - protein, 15 aa, Homo sapiens
  CDR3 for alpha chain variable domain of TCR clone 30080 (TRAV8-3, TRAJ27)
CAVGPSKTNAGESTF

SEQ ID NO: 60160 - protein, 15 aa, Homo sapiens
  CDR3 for beta chain variable domain of TCR clone 30080 (TRBV7-2, TRBJ2-1)
CASSSGLAGGNEQFF

SEQ ID NO: 60161 - protein, 16 aa, Homo sapiens
  CDR3 for alpha chain variable domain of TCR clone 30081 (TRAV13-1, TRAJ45)
CAARGSRKGGADGLTF

SEQ ID NO: 60162 - protein, 13 aa, Homo sapiens
  CDR3 for beta chain variable domain of TCR clone 30081 (TRBV12-4, TRBJ2-5)
CASGKRGKETQYF

SEQ ID NO: 60163 - protein, 14 aa, Homo sapiens
  CDR3 for alpha chain variable domain of TCR clone 30082 (TRAV1-2, TRAJ24)
CAVLTTDSWGKFQF

SEQ ID NO: 60164 - protein, 21 aa, Homo sapiens
  CDR3 for beta chain variable domain of TCR clone 30082 (TRBV6-5, TRBJ1-3)
CASSYWEKIAQGMSPGNTIYF

SEQ ID NO: 60165 - protein, 12 aa, Homo sapiens
  CDR3 for alpha chain variable domain of TCR clone 30083 (TRAV21, TRAJ33)
CAKMDSNYQLIW

SEQ ID NO: 60166 - protein, 20 aa, Homo sapiens
  CDR3 for beta chain variable domain of TCR clone 30083 (TRBV7-8, TRBJ2-2)
CASSHLFPGPTIHITGELFF

SEQ ID NO: 60167 - protein, 11 aa, Homo sapiens
  CDR3 for alpha chain variable domain of TCR clone 30084 (TRAV12-3, TRAJ43)
CAMSVSNDMRF

SEQ ID NO: 60168 - protein, 13 aa, Homo sapiens
  CDR3 for beta chain variable domain of TCR clone 30084 (TRBV20-1, TRBJ1-1)
CSAPLGGGTDAFF

SEQ ID NO: 60169 - protein, 14 aa, Homo sapiens
  CDR3 for alpha chain variable domain of TCR clone 30085 (TRAV12-1, TRAJ23)
CVVIVYNQGGKLIF

SEQ ID NO: 60170 - protein, 15 aa, Homo sapiens
  CDR3 for beta chain variable domain of TCR clone 30085 (TRBV20-1, TRBJ1-5)
CSAKPPGQGPQPQYF

SEQ ID NO: 60171 - protein, 12 aa, Homo sapiens
  CDR3 for alpha chain variable domain of TCR clone 30086 (TRAV10, TRAJ43)
CVVVRVGNDIRF

SEQ ID NO: 60172 - protein, 15 aa, Homo sapiens
  CDR3 for beta chain variable domain of TCR clone 30086 (TRBV2, TRBJ2-7)
CASSEGLARSYEQYF

SEQ ID NO: 60173 - protein, 14 aa, Homo sapiens
  CDR3 for alpha chain variable domain of TCR clone 30087 (TRAV29/DV5, TRAJ36)
CAARRKTGANNPFF

SEQ ID NO: 60174 - protein, 15 aa, Homo sapiens
  CDR3 for beta chain variable domain of TCR clone 30087 (TRBV6-3, TRBJ2-7)
CASSSPGTVFYEQYF

SEQ ID NO: 60175 - protein, 16 aa, Homo sapiens
  CDR3 for alpha chain variable domain of TCR clone 30088 (TRAV12-1, TRAJ26)
CALWSEFCLWSRNQIV

SEQ ID NO: 60176 - protein, 14 aa, Homo sapiens
  CDR3 for beta chain variable domain of TCR clone 30088 (TRBV5-4, TRBJ2-1)
CASSLDQGLNEQFF

SEQ ID NO: 60177 - protein, 11 aa, Homo sapiens
  CDR3 for alpha chain variable domain of TCR clone 30089 (TRAV1-1, TRAJ23)
CAVRQGGKLIF

SEQ ID NO: 60178 - protein, 20 aa, Homo sapiens
  CDR3 for beta chain variable domain of TCR clone 30089 (TRBV7-8, TRBJ2-2)
CASSHLFPGPTIHITGEMFF

SEQ ID NO: 60179 - protein, 11 aa, Homo sapiens
  CDR3 for alpha chain variable domain of TCR clone 30090 (TRAV17, TRAJ9)
CGFTGGFKSIF

SEQ ID NO: 60180 - protein, 14 aa, Homo sapiens
  CDR3 for beta chain variable domain of TCR clone 30090 (TRBV7-9, TRBJ2-2)
CASSLVQDTGELFF

SEQ ID NO: 60181 - protein, 17 aa, Homo sapiens
  CDR3 for alpha chain variable domain of TCR clone 30091 (TRAV13-2, TRAJ5)
CAESVVIVGHGQESTYF

SEQ ID NO: 60182 - protein, 18 aa, Homo sapiens
  CDR3 for beta chain variable domain of TCR clone 30091 (TRBV4-1, TRBJ2-3)
CASSHQLAGGRSTDTRYF

SEQ ID NO: 60183 - protein, 14 aa, Homo sapiens
  CDR3 for alpha chain variable domain of TCR clone 30092 (TRAV12-2, TRAJ3)
CAVNSYSSASKIIF

SEQ ID NO: 60184 - protein, 12 aa, Homo sapiens
  CDR3 for beta chain variable domain of TCR clone 30092 (TRBV7-9, TRBJ2-2)
CASSLDTGELFF

SEQ ID NO: 60185 - protein, 14 aa, Homo sapiens
  CDR3 for alpha chain variable domain of TCR clone 30093 (TRAV38-1, TRAJ40)
CALRPTSGTYKYIF

SEQ ID NO: 60186 - protein, 14 aa, Homo sapiens
  CDR3 for beta chain variable domain of TCR clone 30093 (TRBV25-1, TRBJ1-1)
CACTHLGGNTEAFF

SEQ ID NO: 60187 - protein, 14 aa, Homo sapiens
  CDR3 for alpha chain variable domain of TCR clone 30094 (TRAV17, TRAJ39)
CATDPVRAGNMLTF

SEQ ID NO: 60188 - protein, 14 aa, Homo sapiens
  CDR3 for beta chain variable domain of TCR clone 30094 (TRBV13, TRBJ1-5)
CQQLRTGGVQPQHF

SEQ ID NO: 60189 - protein, 14 aa, Homo sapiens
  CDR3 for alpha chain variable domain of TCR clone 30095 (TRAV12-2, TRAJ13)
CAVKKTGGYQKVTF

SEQ ID NO: 60190 - protein, 15 aa, Homo sapiens
  CDR3 for beta chain variable domain of TCR clone 30095 (TRBV5-1, TRBJ2-1)
CASSLASPYSNEQFF

SEQ ID NO: 60191 - protein, 15 aa, Homo sapiens
  CDR3 for alpha chain variable domain of TCR clone 30096 (TRAV12-1, TRAJ44)
CVAGLPTGTASKLTF

SEQ ID NO: 60192 - protein, 13 aa, Homo sapiens
  CDR3 for beta chain variable domain of TCR clone 30096 (TRBV6-5, TRBJ2-5)
CASSPQGGETQYF

SEQ ID NO: 60193 - protein, 13 aa, Homo sapiens
  CDR3 for alpha chain variable domain of TCR clone 30097 (TRAV8-6, TRAJ34)
CAVSDQGTDKLIS

SEQ ID NO: 60194 - protein, 13 aa, Homo sapiens
  CDR3 for beta chain variable domain of TCR clone 30097 (TRBV20-1, TRBJ1-1)
CSARGGGNTEAFF

SEQ ID NO: 60195 - protein, 11 aa, Homo sapiens
  CDR3 for alpha chain variable domain of TCR clone 30098 (TRAV13-1, TRAJ52)
PGCTSYGKLTF

SEQ ID NO: 60196 - protein, 16 aa, Homo sapiens
  CDR3 for beta chain variable domain of TCR clone 30098 (TRBV28, TRBJ2-7)
CASSPWVATGDLSQYF

SEQ ID NO: 60197 - protein, 17 aa, Homo sapiens
  CDR3 for alpha chain variable domain of TCR clone 30099 (TRAV3, TRAJ6)
CAVRDGPRAGGSYIPTS

SEQ ID NO: 60198 - protein, 17 aa, Homo sapiens
  CDR3 for beta chain variable domain of TCR clone 30099 (TRBV11-2, TRBJ2-1)
CASSLYPPGVEYNEQFF

SEQ ID NO: 60199 - protein, 13 aa, Homo sapiens
  CDR3 for alpha chain variable domain of TCR clone 30100 (TRAV12-1, TRAJ11)
CVVNRAGYSTLTF

SEQ ID NO: 60200 - protein, 16 aa, Homo sapiens
  CDR3 for beta chain variable domain of TCR clone 30100 (TRBV27, TRBJ2-2)
CASSLQPGGAPGELFF

SEQ ID NO: 60201 - protein, 13 aa, Homo sapiens
  CDR3 for alpha chain variable domain of TCR clone 30101 (TRAV29/DV5, TRAJ31)
CAASRNNNARLMF

SEQ ID NO: 60202 - protein, 16 aa, Homo sapiens
  CDR3 for beta chain variable domain of TCR clone 30101 (TRBV19, TRBJ1-1)
CASSPTRFWPGTEAFF

SEQ ID NO: 60203 - protein, 17 aa, Homo sapiens
  CDR3 for alpha chain variable domain of TCR clone 30102 (TRAV3, TRAJ42)
CAVRDRDYGGSQGNLIF

SEQ ID NO: 60204 - protein, 17 aa, Homo sapiens
  CDR3 for beta chain variable domain of TCR clone 30102 (TRBV28, TRBJ2-5)
CASSTPEGDALQETQYF

SEQ ID NO: 60205 - protein, 15 aa, Homo sapiens
  CDR3 for alpha chain variable domain of TCR clone 30103 (TRAV3, TRAJ3)
CAVRDRDSSASKIIF

SEQ ID NO: 60206 - protein, 14 aa, Homo sapiens
  CDR3 for beta chain variable domain of TCR clone 30103 (TRBV6-1, TRBJ1-3)
CASVQGGGGNTIYF

SEQ ID NO: 60207 - protein, 12 aa, Homo sapiens
  CDR3 for alpha chain variable domain of TCR clone 30104 (TRAV12-1, )
CVVNSWISRTLT

SEQ ID NO: 60208 - protein, 15 aa, Homo sapiens
  CDR3 for beta chain variable domain of TCR clone 30104 (TRBV2, TRBJ2-2)
CASSGFGAGTGELFF

SEQ ID NO: 60209 - protein, 15 aa, Homo sapiens
  CDR3 for alpha chain variable domain of TCR clone 30105 (TRAV3, TRAJ45)
CAVRTPWGGADGLTF

SEQ ID NO: 60210 - protein, 16 aa, Homo sapiens
  CDR3 for beta chain variable domain of TCR clone 30105 (TRBV6-1, TRBJ2-2)
CASSFGQGANTGELVF

SEQ ID NO: 60211 - protein, 13 aa, Homo sapiens
  CDR3 for alpha chain variable domain of TCR clone 30106 (TRAV2, TRAJ24)
CAVEDSGRGKFQF

SEQ ID NO: 60212 - protein, 13 aa, Homo sapiens
  CDR3 for beta chain variable domain of TCR clone 30106 (TRBV10-3, TRBJ2-7)
CASKLAANYEQYF

SEQ ID NO: 60213 - protein, 14 aa, Homo sapiens
  CDR3 for alpha chain variable domain of TCR clone 30107 (TRAV35, TRAJ50)
CAGHRKTSYDRVIF

SEQ ID NO: 60214 - protein, 13 aa, Homo sapiens
  CDR3 for beta chain variable domain of TCR clone 30107 (TRBV7-7, TRBJ2-3)
CASSLSRADTQYF

SEQ ID NO: 60215 - protein, 14 aa, Homo sapiens
  CDR3 for alpha chain variable domain of TCR clone 30108 (TRAV26-2, TRAJ32)
CCVGYGGATNKLIF

SEQ ID NO: 60216 - protein, 14 aa, Homo sapiens
  CDR3 for beta chain variable domain of TCR clone 30108 (TRBV4-3, TRBJ2-1)
CASGLDRAYNEQFF

SEQ ID NO: 60217 - protein, 14 aa, Homo sapiens
  CDR3 for alpha chain variable domain of TCR clone 30109 (TRAV12-3, TRAJ58)
CAMSTETSGSRLTF

SEQ ID NO: 60218 - protein, 12 aa, Homo sapiens
  CDR3 for beta chain variable domain of TCR clone 30109 (TRBV11-3, TRBJ2-7)
CASSLGDREQYF

SEQ ID NO: 60219 - protein, 12 aa, Homo sapiens
  CDR3 for alpha chain variable domain of TCR clone 30110 (TRAV16, TRAJ56)
CAPTGANSKLTF

SEQ ID NO: 60220 - protein, 16 aa, Homo sapiens
  CDR3 for beta chain variable domain of TCR clone 30110 (TRBV19, TRBJ2-2)
CASRSPGTGATGELFF

SEQ ID NO: 60221 - protein, 16 aa, Homo sapiens
  CDR3 for alpha chain variable domain of TCR clone 30111 (TRAV12-2, TRAJ32)
CAVNLGQGGATNKLIF

SEQ ID NO: 60222 - protein, 13 aa, Homo sapiens
  CDR3 for beta chain variable domain of TCR clone 30111 (TRBV7-9, TRBJ1-2)
CASSLKQNYGYTF

SEQ ID NO: 60223 - protein, 16 aa, Homo sapiens
  CDR3 for alpha chain variable domain of TCR clone 30112 (TRAV30, TRAJ24)
CGTEIVDADSWGKFQF

SEQ ID NO: 60224 - protein, 14 aa, Homo sapiens
  CDR3 for beta chain variable domain of TCR clone 30112 (TRBV2, TRBJ2-7)
CASSLTSGGYEQYF

SEQ ID NO: 60225 - protein, 12 aa, Homo sapiens
  CDR3 for alpha chain variable domain of TCR clone 30113 (TRAV13-2, TRAJ8)
CAPWLGFQKLVF

SEQ ID NO: 60226 - protein, 14 aa, Homo sapiens
  CDR3 for beta chain variable domain of TCR clone 30113 (TRBV12-5, TRBJ2-5)
CASGSRTHQETQYF

SEQ ID NO: 60227 - protein, 12 aa, Homo sapiens
  CDR3 for alpha chain variable domain of TCR clone 30114 (TRAV26-1, TRAJ36)
CIVRVRADNPFF

SEQ ID NO: 60228 - protein, 13 aa, Homo sapiens
  CDR3 for beta chain variable domain of TCR clone 30114 (TRBV11-2, TRBJ2-5)
CASSRGPSETQYF

SEQ ID NO: 60229 - protein, 14 aa, Homo sapiens
  CDR3 for alpha chain variable domain of TCR clone 30115 (TRAV38-1, TRAJ40)
CALRPTSGTYKYIS

SEQ ID NO: 60230 - protein, 14 aa, Homo sapiens
  CDR3 for beta chain variable domain of TCR clone 30115 (TRBV25-1, TRBJ1-1)
CASTHLGGNTEAFF

SEQ ID NO: 60231 - protein, 10 aa, Homo sapiens
  CDR3 for alpha chain variable domain of TCR clone 30116 (TRAV23/DV6, TRAJ57)
CAASSTLSQG

SEQ ID NO: 60232 - protein, 14 aa, Homo sapiens
  CDR3 for beta chain variable domain of TCR clone 30116 (TRBV25-1, TRBJ1-1)
CASTHLGGNTEVFF

SEQ ID NO: 60233 - protein, 12 aa, Homo sapiens
  CDR3 for alpha chain variable domain of TCR clone 30117 (TRAV21, TRAJ23)
CAVMLQGVKLIF

SEQ ID NO: 60234 - protein, 14 aa, Homo sapiens
  CDR3 for beta chain variable domain of TCR clone 30117 (TRBV7-9, TRBJ1-4)
CAITEGEANEKLFF

SEQ ID NO: 60235 - protein, 14 aa, Homo sapiens
  CDR3 for alpha chain variable domain of TCR clone 30118 (TRAV12-2, TRAJ13)
CAVKKTGGYQKVTF

SEQ ID NO: 60236 - protein, 15 aa, Homo sapiens
  CDR3 for beta chain variable domain of TCR clone 30118 (TRBV13, TRBJ2-1)
CASSNGGGSSNEQFF

SEQ ID NO: 60237 - protein, 14 aa, Homo sapiens
  CDR3 for alpha chain variable domain of TCR clone 30119 (TRAV25, TRAJ35)
CARRMEGFGNVLHC

SEQ ID NO: 60238 - protein, 13 aa, Homo sapiens
  CDR3 for beta chain variable domain of TCR clone 30119 (TRBV7-2, TRBJ1-4)
RASSLAGLEKLFF

SEQ ID NO: 60239 - protein, 13 aa, Homo sapiens
  CDR3 for alpha chain variable domain of TCR clone 30120 (TRAV21, TRAJ56)
CAVRTGANSKLTF

SEQ ID NO: 60240 - protein, 13 aa, Homo sapiens
  CDR3 for beta chain variable domain of TCR clone 30120 (TRBV7-9, TRBJ1-2)
CASSLKQNYGYTF

SEQ ID NO: 60241 - protein, 16 aa, Homo sapiens
  CDR3 for alpha chain variable domain of TCR clone 30121 (TRAV8-6, TRAJ4)
CAVTKILSGGYNKLIF

SEQ ID NO: 60242 - protein, 13 aa, Homo sapiens
  CDR3 for beta chain variable domain of TCR clone 30121 (TRBV29-1, TRBJ2-1)
CSEGTSGYNEQFF

SEQ ID NO: 60243 - protein, 16 aa, Homo sapiens
  CDR3 for alpha chain variable domain of TCR clone 30122 (TRAV30, TRAJ24)
CGTEIVDADSWGKFQF

SEQ ID NO: 60244 - protein, 15 aa, Homo sapiens
  CDR3 for beta chain variable domain of TCR clone 30122 (TRBV2, TRBJ2-7)
CASSEGLARSYEQYF

SEQ ID NO: 60245 - protein, 14 aa, Homo sapiens
  CDR3 for alpha chain variable domain of TCR clone 30123 (TRAV26-1, TRAJ38)
CIADNAGNNRKLIW

SEQ ID NO: 60246 - protein, 13 aa, Homo sapiens
  CDR3 for beta chain variable domain of TCR clone 30123 (TRBV12-5, TRBJ2-3)
CASGDRQSDTQYF

SEQ ID NO: 60247 - protein, 12 aa, Homo sapiens
  CDR3 for alpha chain variable domain of TCR clone 30124 (TRAV17, TRAJ57)
SATDGGSEKLVF

SEQ ID NO: 60248 - protein, 13 aa, Homo sapiens
  CDR3 for beta chain variable domain of TCR clone 30124 (TRBV7-9, TRBJ2-7)
CASSFAGAYEQYF

SEQ ID NO: 60249 - protein, 11 aa, Homo sapiens
  CDR3 for alpha chain variable domain of TCR clone 30125 (TRAV12-3, TRAJ17)
CNDAYRQQLTF

SEQ ID NO: 60250 - protein, 15 aa, Homo sapiens
  CDR3 for beta chain variable domain of TCR clone 30125 (TRBV20-1, TRBJ2-7)
CSARDRVSGMDEQYF

SEQ ID NO: 60251 - protein, 20 aa, Homo sapiens
  CDR3 for alpha chain variable domain of TCR clone 30126 (TRAV26-1, TRAJ42)
CCVLLHRQTYYGGSQVNLIF

SEQ ID NO: 60252 - protein, 16 aa, Homo sapiens
  CDR3 for beta chain variable domain of TCR clone 30126 (TRBV7-3, TRBJ2-2)
CASSLKRGTLSGELFF

SEQ ID NO: 60253 - protein, 16 aa, Homo sapiens
  CDR3 for alpha chain variable domain of TCR clone 30127 (TRAV30, TRAJ24)
CGTEIVDADSWGKFQF

SEQ ID NO: 60254 - protein, 13 aa, Homo sapiens
  CDR3 for beta chain variable domain of TCR clone 30127 (TRBV27, TRBJ2-1)
CASRTLGVGEQFF

SEQ ID NO: 60255 - protein, 13 aa, Homo sapiens
  CDR3 for alpha chain variable domain of TCR clone 30128 (TRAV1-2, TRAJ9)
CAALNTGGFKTIF

SEQ ID NO: 60256 - protein, 16 aa, Homo sapiens
  CDR3 for beta chain variable domain of TCR clone 30128 (TRBV15, TRBJ2-3)
CATSSPTGLFADTQYF

SEQ ID NO: 60257 - protein, 15 aa, Homo sapiens
  CDR3 for alpha chain variable domain of TCR clone 30129 (TRAV3, TRAJ22)
CAVRDRGGSARQLTF

SEQ ID NO: 60258 - protein, 13 aa, Homo sapiens
  CDR3 for beta chain variable domain of TCR clone 30129 (TRBV12-4, TRBJ2-7)
CASSPTETYEQYF

SEQ ID NO: 60259 - protein, 13 aa, Homo sapiens
  CDR3 for alpha chain variable domain of TCR clone 30130 (TRAV40, TRAJ43)
SAVYYRPNNDMRF

SEQ ID NO: 60260 - protein, 15 aa, Homo sapiens
  CDR3 for beta chain variable domain of TCR clone 30130 (TRBV7-9, TRBJ1-4)
CASGGQRQGTEKLFF

SEQ ID NO: 60261 - protein, 16 aa, Homo sapiens
  CDR3 for alpha chain variable domain of TCR clone 30131 (TRAV12-3, TRAJ53)
CAMSPGSGGSNYKLTF

SEQ ID NO: 60262 - protein, 19 aa, Homo sapiens
  CDR3 for beta chain variable domain of TCR clone 30131 (TRBV25-1, TRBJ2-2)
CAILVYRVDRGRKTGELFF

SEQ ID NO: 60263 - protein, 12 aa, Homo sapiens
  CDR3 for alpha chain variable domain of TCR clone 30132 (TRAV3, TRAJ20)
CAVRDHDYKLSF

SEQ ID NO: 60264 - protein, 15 aa, Homo sapiens
  CDR3 for beta chain variable domain of TCR clone 30132 (TRBV9, TRBJ1-6)
CASSVAGTGDSPLHL

SEQ ID NO: 60265 - protein, 12 aa, Homo sapiens
  CDR3 for alpha chain variable domain of TCR clone 30133 (TRAV21, TRAJ33)
CAKMDSNYQLIG

SEQ ID NO: 60266 - protein, 14 aa, Homo sapiens
  CDR3 for beta chain variable domain of TCR clone 30133 (TRBV2, TRBJ2-7)
CASSLTSGGYEQYF

SEQ ID NO: 60267 - protein, 14 aa, Homo sapiens
  CDR3 for alpha chain variable domain of TCR clone 30134 (TRAV12-2, TRAJ13)
CAVKKTGGYQKVTF

SEQ ID NO: 60268 - protein, 18 aa, Homo sapiens
  CDR3 for beta chain variable domain of TCR clone 30134 (TRBV15, TRBJ2-3)
CATSRDGARSWDTDTQYF

SEQ ID NO: 60269 - protein, 15 aa, Homo sapiens
  CDR3 for alpha chain variable domain of TCR clone 30135 (TRAV1-2, TRAJ36)
WAASADQTGANNLFF

SEQ ID NO: 60270 - protein, 15 aa, Homo sapiens
  CDR3 for beta chain variable domain of TCR clone 30135 (TRBV5-1, TRBJ2-7)
CASSFSTDSVYEQCF

SEQ ID NO: 60271 - protein, 22 aa, Homo sapiens
  CDR3 for alpha chain variable domain of TCR clone 30136 (TRAV26-1, TRAJ30)
CIVRVRTEMTRSSLEKGNDFIF

SEQ ID NO: 60272 - protein, 18 aa, Homo sapiens
  CDR3 for beta chain variable domain of TCR clone 30136 (TRBV4-1, TRBJ1-5)
CASSQDPRGQGLNQPQHF

SEQ ID NO: 60273 - protein, 14 aa, Homo sapiens
  CDR3 for alpha chain variable domain of TCR clone 30137 (TRAV12-2, TRAJ13)
CAVKKTGGYQKVTF

SEQ ID NO: 60274 - protein, 16 aa, Homo sapiens
  CDR3 for beta chain variable domain of TCR clone 30137 (TRBV11-2, TRBJ2-7)
CASSPLAGGPRYEQYF

SEQ ID NO: 60275 - protein, 16 aa, Homo sapiens
  CDR3 for alpha chain variable domain of TCR clone 30138 (TRAV30, TRAJ24)
CGTEIVDADSWGKFRF

SEQ ID NO: 60276 - protein, 16 aa, Homo sapiens
  CDR3 for beta chain variable domain of TCR clone 30138 (TRBV7-3, TRBJ2-2)
CASSLKRGTLSGELFF

SEQ ID NO: 60277 - protein, 13 aa, Homo sapiens
  CDR3 for alpha chain variable domain of TCR clone 30139 (TRAV21, TRAJ27)
CAARPGNAGKSTF

SEQ ID NO: 60278 - protein, 14 aa, Homo sapiens
  CDR3 for beta chain variable domain of TCR clone 30139 (TRBV7-2, TRBJ1-2)
CASSQTGSTYGYTF

SEQ ID NO: 60279 - protein, 12 aa, Homo sapiens
  CDR3 for alpha chain variable domain of TCR clone 30140 (TRAV13-2, TRAJ23)
CAERRRGGKLIF

SEQ ID NO: 60280 - protein, 13 aa, Homo sapiens
  CDR3 for beta chain variable domain of TCR clone 30140 (TRBV7-9, TRBJ1-2)
CASSLKQNYGYTF

SEQ ID NO: 60281 - protein, 17 aa, Homo sapiens
  CDR3 for alpha chain variable domain of TCR clone 30141 (TRAV2, TRAJ22)
ILQVREADAAEQRQLTF

SEQ ID NO: 60282 - protein, 16 aa, Homo sapiens
  CDR3 for beta chain variable domain of TCR clone 30141 (TRBV2, TRBJ2-5)
CASSETRGVGEETQYF

SEQ ID NO: 60283 - protein, 20 aa, Homo sapiens
  CDR3 for alpha chain variable domain of TCR clone 30142 (TRAV26-1, TRAJ42)
CCVLLHRQTYYGGSQGKLIF

SEQ ID NO: 60284 - protein, 16 aa, Homo sapiens
  CDR3 for beta chain variable domain of TCR clone 30142 (TRBV7-3, TRBJ2-2)
CASSLKRGTLSGELFF

SEQ ID NO: 60285 - protein, 16 aa, Homo sapiens
  CDR3 for alpha chain variable domain of TCR clone 30143 (TRAV3, TRAJ10)
CAVRDMRAGGGNKLTF

SEQ ID NO: 60286 - protein, 15 aa, Homo sapiens
  CDR3 for beta chain variable domain of TCR clone 30143 (TRBV7-6, TRBJ2-5)
CASSKPTGPQETQYF

SEQ ID NO: 60287 - protein, 12 aa, Homo sapiens
  CDR3 for alpha chain variable domain of TCR clone 30144 (TRAV17, TRAJ57)
CATDGGSEKLAF

SEQ ID NO: 60288 - protein, 13 aa, Homo sapiens
  CDR3 for beta chain variable domain of TCR clone 30144 (TRBV7-9, TRBJ2-7)
CASSFAGAYEQYF

SEQ ID NO: 60289 - protein, 13 aa, Homo sapiens
  CDR3 for alpha chain variable domain of TCR clone 30145 (TRAV3, TRAJ21)
CAVREPDFNKFYF

SEQ ID NO: 60290 - protein, 14 aa, Homo sapiens
  CDR3 for beta chain variable domain of TCR clone 30145 (TRBV11-2, TRBJ2-3)
CASSRLARTDTQYF

SEQ ID NO: 60291 - protein, 13 aa, Homo sapiens
  CDR3 for alpha chain variable domain of TCR clone 30146 (TRAV3, TRAJ21)
CAVREPDFNKFYF

SEQ ID NO: 60292 - protein, 13 aa, Homo sapiens
  CDR3 for beta chain variable domain of TCR clone 30146 (TRBV9, TRBJ2-1)
CVSSPSGGNEQFF

SEQ ID NO: 60293 - protein, 14 aa, Homo sapiens
  CDR3 for alpha chain variable domain of TCR clone 30147 (TRAV35, TRAJ13)
CAGSPSEGYQKVTF

SEQ ID NO: 60294 - protein, 13 aa, Homo sapiens
  CDR3 for beta chain variable domain of TCR clone 30147 (TRBV29-1, TRBJ1-1)
CSVGDSRNTEAFF

SEQ ID NO: 60295 - protein, 13 aa, Homo sapiens
  CDR3 for alpha chain variable domain of TCR clone 30148 (TRAV13-2, TRAJ48)
CAEMDFGNEKLTF

SEQ ID NO: 60296 - protein, 15 aa, Homo sapiens
  CDR3 for beta chain variable domain of TCR clone 30148 (TRBV7-9, TRBJ1-6)
CASSYPGRGNSPLHF

SEQ ID NO: 60297 - protein, 18 aa, Homo sapiens
  CDR3 for alpha chain variable domain of TCR clone 30149 (TRAV26-2, TRAJ45)
CILRLWGYSGGGADGITF

SEQ ID NO: 60298 - protein, 17 aa, Homo sapiens
  CDR3 for beta chain variable domain of TCR clone 30149 (TRBV28, TRBJ2-3)
CASSPTPAGGRVDTQYF

SEQ ID NO: 60299 - protein, 17 aa, Homo sapiens
  CDR3 for alpha chain variable domain of TCR clone 30150 (TRAV4, TRAJ13)
CLVGVQGSSGGYQKVTF

SEQ ID NO: 60300 - protein, 18 aa, Homo sapiens
  CDR3 for beta chain variable domain of TCR clone 30150 (TRBV15, TRBJ2-3)
CATSRDGAGSWDTDTQYF

SEQ ID NO: 60301 - protein, 12 aa, Homo sapiens
  CDR3 for alpha chain variable domain of TCR clone 30151 (TRAV13-1, TRAJ21)
CAAKEGFNKFYF

SEQ ID NO: 60302 - protein, 14 aa, Homo sapiens
  CDR3 for beta chain variable domain of TCR clone 30151 (TRBV7-9, TRBJ2-1)
CASSPRDSLYEQFF

SEQ ID NO: 60303 - protein, 13 aa, Homo sapiens
  CDR3 for alpha chain variable domain of TCR clone 30152 (TRAV2, TRAJ15)
CAVASQAGTALIF

SEQ ID NO: 60304 - protein, 17 aa, Homo sapiens
  CDR3 for beta chain variable domain of TCR clone 30152 (TRBV11-2, TRBJ2-1)
CASSLYPPGVEYNEQFF

SEQ ID NO: 60305 - protein, 13 aa, Homo sapiens
  CDR3 for alpha chain variable domain of TCR clone 30153 (TRAV3, TRAJ27)
CAVRPLGAGKSTF

SEQ ID NO: 60306 - protein, 13 aa, Homo sapiens
  CDR3 for beta chain variable domain of TCR clone 30153 (TRBV7-9, TRBJ2-3)
CASSPGSTDTRYF

SEQ ID NO: 60307 - protein, 18 aa, Homo sapiens
  CDR3 for alpha chain variable domain of TCR clone 30154 (TRAV13-1, TRAJ52)
CAAKNPNTGGTSYGKLTF

SEQ ID NO: 60308 - protein, 15 aa, Homo sapiens
  CDR3 for beta chain variable domain of TCR clone 30154 (TRBV6-1, TRBJ2-3)
CASSERGGITDTQYF

SEQ ID NO: 60309 - protein, 14 aa, Homo sapiens
  CDR3 for alpha chain variable domain of TCR clone 30155 (TRAV1-2, TRAJ16)
CAVNRFSDVQKLLF

SEQ ID NO: 60310 - protein, 13 aa, Homo sapiens
  CDR3 for beta chain variable domain of TCR clone 30155 (TRBV7-9, TRBJ1-2)
CASSLKQNYGYTF

SEQ ID NO: 60311 - protein, 13 aa, Homo sapiens
  CDR3 for alpha chain variable domain of TCR clone 30156 (TRAV1-2, TRAJ9)
CTALNTGGFKTIF

SEQ ID NO: 60312 - protein, 13 aa, Homo sapiens
  CDR3 for beta chain variable domain of TCR clone 30156 (TRBV19, TRBJ1-2)
CASSVPGQDGYTF

SEQ ID NO: 60313 - protein, 14 aa, Homo sapiens
  CDR3 for alpha chain variable domain of TCR clone 30157 (TRAV26-1, TRAJ22)
CIVRVYGSARQLTF

SEQ ID NO: 60314 - protein, 17 aa, Homo sapiens
  CDR3 for beta chain variable domain of TCR clone 30157 (TRBV7-3, TRBJ2-3)
CASSPGGLAGLGDTQYF

SEQ ID NO: 60315 - protein, 15 aa, Homo sapiens
  CDR3 for alpha chain variable domain of TCR clone 30158 (TRAV8-3, TRAJ23)
CVVGDRYNQGGKLIF

SEQ ID NO: 60316 - protein, 22 aa, Homo sapiens
  CDR3 for beta chain variable domain of TCR clone 30158 (TRBV29-1, TRBJ2-5)
TVSNMSPEDSSIYLCSAGTQYF

SEQ ID NO: 60317 - protein, 13 aa, Homo sapiens
  CDR3 for alpha chain variable domain of TCR clone 30159 (TRAV8-3, TRAJ48)
CAMVPFGNEKLTF

SEQ ID NO: 60318 - protein, 15 aa, Homo sapiens
  CDR3 for beta chain variable domain of TCR clone 30159 (TRBV11-2, TRBJ2-1)
CASSSPSTRYNEQFF

SEQ ID NO: 60319 - protein, 15 aa, Homo sapiens
  CDR3 for alpha chain variable domain of TCR clone 30160 (TRAV8-3, TRAJ45)
CASSYSGGGADGLTF

SEQ ID NO: 60320 - protein, 13 aa, Homo sapiens
  CDR3 for beta chain variable domain of TCR clone 30160 (TRBV10-3, TRBJ2-7)
CASKLAVNYEQYC

SEQ ID NO: 60321 - protein, 13 aa, Homo sapiens
  CDR3 for alpha chain variable domain of TCR clone 30161 (TRAV12-3, TRAJ13)
CAMSSGGYQKVTF

SEQ ID NO: 60322 - protein, 15 aa, Homo sapiens
  CDR3 for beta chain variable domain of TCR clone 30161 (TRBV5-1, TRBJ2-7)
CASSLNGGPAREQYF

SEQ ID NO: 60323 - protein, 11 aa, Homo sapiens
  CDR3 for alpha chain variable domain of TCR clone 30162 (TRAV12-3, TRAJ43)
CAMSVSNDMRF

SEQ ID NO: 60324 - protein, 16 aa, Homo sapiens
  CDR3 for beta chain variable domain of TCR clone 30162 (TRBV20-1, TRBJ2-1)
CSARDSLGAAYNEQFF

SEQ ID NO: 60325 - protein, 12 aa, Homo sapiens
  CDR3 for alpha chain variable domain of TCR clone 30163 (TRAV29/DV5, TRAJ15)
CASNKAGTALIF

SEQ ID NO: 60326 - protein, 15 aa, Homo sapiens
  CDR3 for beta chain variable domain of TCR clone 30163 (TRBV11-2, TRBJ2-2)
CASSSDRVNAGELFF

SEQ ID NO: 60327 - protein, 14 aa, Homo sapiens
  CDR3 for alpha chain variable domain of TCR clone 30164 (TRAV1-1, TRAJ8)
CAVVTNTGFQKLVF

SEQ ID NO: 60328 - protein, 14 aa, Homo sapiens
  CDR3 for beta chain variable domain of TCR clone 30164 (TRBV6-1, TRBJ1-3)
CASVQGGGGNTIYF

SEQ ID NO: 60329 - protein, 17 aa, Homo sapiens
  CDR3 for alpha chain variable domain of TCR clone 30165 (TRAV23/DV6, TRAJ57)
SAASSTLSQGGSEKLVF

SEQ ID NO: 60330 - protein, 14 aa, Homo sapiens
  CDR3 for beta chain variable domain of TCR clone 30165 (TRBV25-1, TRBJ1-1)
CASTHLGGNTEAFF

SEQ ID NO: 60331 - protein, 13 aa, Homo sapiens
  CDR3 for alpha chain variable domain of TCR clone 30166 (TRAV8-3, TRAJ44)
CAVVSGTASKLTF

SEQ ID NO: 60332 - protein, 14 aa, Homo sapiens
  CDR3 for beta chain variable domain of TCR clone 30166 (TRBV11-2, TRBJ2-3)
CASSRLARTDTQYF

SEQ ID NO: 60333 - protein, 15 aa, Homo sapiens
  CDR3 for alpha chain variable domain of TCR clone 30167 (TRAV12-3, TRAJ22)
CAMRSSSGSARQLTF

SEQ ID NO: 60334 - protein, 11 aa, Homo sapiens
  CDR3 for beta chain variable domain of TCR clone 30167 (TRBV29-1, TRBJ2-5)
CSEDRTGTQYF

SEQ ID NO: 60335 - protein, 14 aa, Homo sapiens
  CDR3 for alpha chain variable domain of TCR clone 30168 (TRAV12-1, TRAJ17)
CVVNYKAAGNKLTV

SEQ ID NO: 60336 - protein, 17 aa, Homo sapiens
  CDR3 for beta chain variable domain of TCR clone 30168 (TRBV20-1, TRBJ2-1)
CSASSSGLAGSYNEQFF

SEQ ID NO: 60337 - protein, 12 aa, Homo sapiens
  CDR3 for alpha chain variable domain of TCR clone 30169 (TRAV12-1, TRAJ40)
CVVYSGTYKYIF

SEQ ID NO: 60338 - protein, 17 aa, Homo sapiens
  CDR3 for beta chain variable domain of TCR clone 30169 (TRBV7-8, TRBJ2-6)
CASSAGTGGAGANVLTF

SEQ ID NO: 60339 - protein, 12 aa, Homo sapiens
  CDR3 for alpha chain variable domain of TCR clone 30170 (TRAV12-1, TRAJ40)
CVVYSGTYKYIF

SEQ ID NO: 60340 - protein, 16 aa, Homo sapiens
  CDR3 for beta chain variable domain of TCR clone 30170 (TRBV28, TRBJ2-7)
CASSFPDRRLTYEQYF

SEQ ID NO: 60341 - protein, 15 aa, Homo sapiens
  CDR3 for alpha chain variable domain of TCR clone 30171 (TRAV3, TRAJ22)
CAVRDRGGSARQLTF

SEQ ID NO: 60342 - protein, 16 aa, Homo sapiens
  CDR3 for beta chain variable domain of TCR clone 30171 (TRBV5-4, TRBJ2-3)
CASQQPVAGGADTQYF

SEQ ID NO: 60343 - protein, 14 aa, Homo sapiens
  CDR3 for alpha chain variable domain of TCR clone 30172 (TRAV3, TRAJ9)
CAVRLNTGGFNTIF

SEQ ID NO: 60344 - protein, 15 aa, Homo sapiens
  CDR3 for beta chain variable domain of TCR clone 30172 (TRBV7-2, TRBJ2-1)
CASSLASGRVNEQFF

SEQ ID NO: 60345 - protein, 15 aa, Homo sapiens
  CDR3 for alpha chain variable domain of TCR clone 30173 (TRAV1-2, TRAJ26)
CAVRDLITMVRILSL

SEQ ID NO: 60346 - protein, 12 aa, Homo sapiens
  CDR3 for beta chain variable domain of TCR clone 30173 (TRBV20-1, TRBJ2-1)
CSAQYTYNEQFF

SEQ ID NO: 60347 - protein, 14 aa, Homo sapiens
  CDR3 for alpha chain variable domain of TCR clone 30174 (TRAV9-2, TRAJ39)
CALYIYNAGNMLTF

SEQ ID NO: 60348 - protein, 16 aa, Homo sapiens
  CDR3 for beta chain variable domain of TCR clone 30174 (TRBV2, TRBJ2-1)
CASSVGGSLSYNEQFF

SEQ ID NO: 60349 - protein, 11 aa, Homo sapiens
  CDR3 for alpha chain variable domain of TCR clone 30175 (TRAV3, TRAJ21)
CAVGNFNKFYF

SEQ ID NO: 60350 - protein, 12 aa, Homo sapiens
  CDR3 for beta chain variable domain of TCR clone 30175 (TRBV5-7, TRBJ1-1)
CASSLGRGKAFF

SEQ ID NO: 60351 - protein, 18 aa, Homo sapiens
  CDR3 for alpha chain variable domain of TCR clone 30176 (TRAV12-3, TRAJ52)
CAMSVGGAGGTSYGKLTF

SEQ ID NO: 60352 - protein, 15 aa, Homo sapiens
  CDR3 for beta chain variable domain of TCR clone 30176 (TRBV27, TRBJ1-6)
CASSFDRGLGSPLHV

SEQ ID NO: 60353 - protein, 13 aa, Homo sapiens
  CDR3 for alpha chain variable domain of TCR clone 30177 (TRAV27, TRAJ29)
CAGAHSRNTPLVF

SEQ ID NO: 60354 - protein, 14 aa, Homo sapiens
  CDR3 for beta chain variable domain of TCR clone 30177 (TRBV7-9, TRBJ2-7)
CASSIGQGAGEQYF

SEQ ID NO: 60355 - protein, 15 aa, Homo sapiens
  CDR3 for alpha chain variable domain of TCR clone 30178 (TRAV2, TRAJ9)
CAVEDRGTGGFKTIF

SEQ ID NO: 60356 - protein, 16 aa, Homo sapiens
  CDR3 for beta chain variable domain of TCR clone 30178 (TRBV24-1, TRBJ2-3)
CATSAPGTGATDTQYF

SEQ ID NO: 60357 - protein, 12 aa, Homo sapiens
  CDR3 for alpha chain variable domain of TCR clone 30179 (TRAV8-3, TRAJ26)
CAGDNYGQNFVF

SEQ ID NO: 60358 - protein, 15 aa, Homo sapiens
  CDR3 for beta chain variable domain of TCR clone 30179 (TRBV9, TRBJ2-1)
CASSLAGSSYDEQFF

SEQ ID NO: 60359 - protein, 14 aa, Homo sapiens
  CDR3 for alpha chain variable domain of TCR clone 30180 (TRAV17, TRAJ16)
CATADFSDGQKLLF

SEQ ID NO: 60360 - protein, 12 aa, Homo sapiens
  CDR3 for beta chain variable domain of TCR clone 30180 (TRBV24-1, TRBJ1-1)
CATLYPDTEAVF

SEQ ID NO: 60361 - protein, 11 aa, Homo sapiens
  CDR3 for alpha chain variable domain of TCR clone 30181 (TRAV12-1, TRAJ3)
CVVSSASKIIF

SEQ ID NO: 60362 - protein, 16 aa, Homo sapiens
  CDR3 for beta chain variable domain of TCR clone 30181 (TRBV20-1, TRBJ2-5)
SAVLVGLAGGGETQYF

SEQ ID NO: 60363 - protein, 20 aa, Homo sapiens
  CDR3 for alpha chain variable domain of TCR clone 30182 (TRAV12-1, TRAJ42)
SSVIQPPTSVKGGSQGNLIF

SEQ ID NO: 60364 - protein, 18 aa, Homo sapiens
  CDR3 for beta chain variable domain of TCR clone 30182 (TRBV11-2, TRBJ2-3)
CASSLGGASWGAPNTQYF

SEQ ID NO: 60365 - protein, 11 aa, Homo sapiens
  CDR3 for alpha chain variable domain of TCR clone 30183 (TRAV21, TRAJ11)
CAVHGYSTLTF

SEQ ID NO: 60366 - protein, 11 aa, Homo sapiens
  CDR3 for beta chain variable domain of TCR clone 30183 (TRBV19, TRBJ1-1)
CASSIGSEAFF

SEQ ID NO: 60367 - protein, 17 aa, Homo sapiens
  CDR3 for alpha chain variable domain of TCR clone 30184 (TRAV3, TRAJ6)
CAVRDGPRAGGSYIPTF

SEQ ID NO: 60368 - protein, 15 aa, Homo sapiens
  CDR3 for beta chain variable domain of TCR clone 30184 (TRBV19, TRBJ1-2)
CASSVGQVLNYGYTF

SEQ ID NO: 60369 - protein, 16 aa, Homo sapiens
  CDR3 for alpha chain variable domain of TCR clone 30185 (TRAV3, TRAJ21)
CAVRDIKRGNFNKFYF

SEQ ID NO: 60370 - protein, 13 aa, Homo sapiens
  CDR3 for beta chain variable domain of TCR clone 30185 (TRBV27, TRBJ2-7)
CASSLTTGYEQYF

SEQ ID NO: 60371 - protein, 12 aa, Homo sapiens
  CDR3 for alpha chain variable domain of TCR clone 30186 (TRAV25, TRAJ38)
CAGTGNNRKLIW

SEQ ID NO: 60372 - protein, 14 aa, Homo sapiens
  CDR3 for beta chain variable domain of TCR clone 30186 (TRBV19, TRBJ1-5)
CASSKMTGPKPQHF

SEQ ID NO: 60373 - protein, 11 aa, Homo sapiens
  CDR3 for alpha chain variable domain of TCR clone 30187 (TRAV4, TRAJ23)
CLVAPGGRLIF

SEQ ID NO: 60374 - protein, 15 aa, Homo sapiens
  CDR3 for beta chain variable domain of TCR clone 30187 (TRBV7-2, TRBJ2-1)
CASSFQADEYNEQFF

SEQ ID NO: 60375 - protein, 14 aa, Homo sapiens
  CDR3 for alpha chain variable domain of TCR clone 30188 (TRAV1-2, TRAJ8)
CAVREDTGFQKLVF

SEQ ID NO: 60376 - protein, 13 aa, Homo sapiens
  CDR3 for beta chain variable domain of TCR clone 30188 (TRBV7-3, TRBJ2-5)
CASSFRGGETQYF

SEQ ID NO: 60377 - protein, 16 aa, Homo sapiens
  CDR3 for alpha chain variable domain of TCR clone 30189 (TRAV16, TRAJ4)
CALSRMFSGGYTKLIF

SEQ ID NO: 60378 - protein, 16 aa, Homo sapiens
  CDR3 for beta chain variable domain of TCR clone 30189 (TRBV24-1, TRBJ2-3)
CATSDPGTGATDTQYF

SEQ ID NO: 60379 - protein, 15 aa, Homo sapiens
  CDR3 for alpha chain variable domain of TCR clone 30190 (TRAV17, TRAJ16)
CATALRFSDGHKLLF

SEQ ID NO: 60380 - protein, 15 aa, Homo sapiens
  CDR3 for beta chain variable domain of TCR clone 30190 (TRBV20-1, TRBJ1-1)
CSASRGVTGNTEAFF

SEQ ID NO: 60381 - protein, 13 aa, Homo sapiens
  CDR3 for alpha chain variable domain of TCR clone 30191 (TRAV1-2, TRAJ9)
CVALNTGGFKTIF

SEQ ID NO: 60382 - protein, 13 aa, Homo sapiens
  CDR3 for beta chain variable domain of TCR clone 30191 (TRBV19, TRBJ1-2)
CASSVPGQDGYTF

SEQ ID NO: 60383 - protein, 13 aa, Homo sapiens
  CDR3 for alpha chain variable domain of TCR clone 30192 (TRAV8-3, TRAJ28)
CAVGAVGSYQLTF

SEQ ID NO: 60384 - protein, 12 aa, Homo sapiens
  CDR3 for beta chain variable domain of TCR clone 30192 (TRBV11-2, TRBJ2-2)
CASSLPTGELFF

SEQ ID NO: 60385 - protein, 11 aa, Homo sapiens
  CDR3 for alpha chain variable domain of TCR clone 30193 (TRAV2, TRAJ33)
CAVESNYQLIW

SEQ ID NO: 60386 - protein, 15 aa, Homo sapiens
  CDR3 for beta chain variable domain of TCR clone 30193 (TRBV19, TRBJ1-1)
CASTSGQIQNTEAFS

SEQ ID NO: 60387 - protein, 13 aa, Homo sapiens
  CDR3 for alpha chain variable domain of TCR clone 30194 (TRAV8-3, TRAJ48)
CAVVPFGNEKLTF

SEQ ID NO: 60388 - protein, 15 aa, Homo sapiens
  CDR3 for beta chain variable domain of TCR clone 30194 (TRBV3-1, TRBJ2-5)
CASRANLGGPETQYF

SEQ ID NO: 60389 - protein, 11 aa, Homo sapiens
  CDR3 for alpha chain variable domain of TCR clone 30195 (TRAV12-2, TRAJ49)
CALQGGNQFYF

SEQ ID NO: 60390 - protein, 13 aa, Homo sapiens
  CDR3 for beta chain variable domain of TCR clone 30195 (TRBV4-1, TRBJ1-1)
CASSQVGTGEAFF

SEQ ID NO: 60391 - protein, 11 aa, Homo sapiens
  CDR3 for alpha chain variable domain of TCR clone 30196 (TRAV2, TRAJ13)
CASGGYQKVTF

SEQ ID NO: 60392 - protein, 11 aa, Homo sapiens
  CDR3 for beta chain variable domain of TCR clone 30196 (TRBV6-1, TRBJ2-1)
CASISSNGQFL

SEQ ID NO: 60393 - protein, 14 aa, Homo sapiens
  CDR3 for alpha chain variable domain of TCR clone 30197 (TRAV8-3, TRAJ6)
CAVGASGGSYIPKF

SEQ ID NO: 60394 - protein, 17 aa, Homo sapiens
  CDR3 for beta chain variable domain of TCR clone 30197 (TRBV18, TRBJ2-2)
CASSPSDPWQNTGELFF

SEQ ID NO: 60395 - protein, 12 aa, Homo sapiens
  CDR3 for alpha chain variable domain of TCR clone 30198 (TRAV12-1, TRAJ9)
CVVHTGGFKTIF

SEQ ID NO: 60396 - protein, 16 aa, Homo sapiens
  CDR3 for beta chain variable domain of TCR clone 30198 (TRBV6-1, TRBJ2-1)
CASSARLAGSYNEQFS

SEQ ID NO: 60397 - protein, 14 aa, Homo sapiens
  CDR3 for alpha chain variable domain of TCR clone 30199 (TRAV38-1, TRAJ45)
CAYYSGGGADGLTF

SEQ ID NO: 60398 - protein, 20 aa, Homo sapiens
  CDR3 for beta chain variable domain of TCR clone 30199 (TRBV28, TRBJ2-1)
CASTPIGRSPGLAGGNERFF

SEQ ID NO: 60399 - protein, 13 aa, Homo sapiens
  CDR3 for alpha chain variable domain of TCR clone 30200 (TRAV1-2, TRAJ12)
CAVSMDSSYKLIF

SEQ ID NO: 60400 - protein, 15 aa, Homo sapiens
  CDR3 for beta chain variable domain of TCR clone 30200 (TRBV27, TRBJ2-5)
CASSLIPSGGEAQYF

SEQ ID NO: 60401 - protein, 14 aa, Homo sapiens
  CDR3 for alpha chain variable domain of TCR clone 30201 (TRAV12-2, TRAJ13)
CAVKKTGGYQKVTF

SEQ ID NO: 60402 - protein, 13 aa, Homo sapiens
  CDR3 for beta chain variable domain of TCR clone 30201 (TRBV4-1, TRBJ2-2)
CASSQENTGELFF

SEQ ID NO: 60403 - protein, 15 aa, Homo sapiens
  CDR3 for alpha chain variable domain of TCR clone 30202 (TRAV12-2, TRAJ43)
CAFDMRFGAGTRLTV

SEQ ID NO: 60404 - protein, 18 aa, Homo sapiens
  CDR3 for beta chain variable domain of TCR clone 30202 (TRBV20-1, TRBJ2-3)
CSASGLAVGPGTTDTQYF

SEQ ID NO: 60405 - protein, 14 aa, Homo sapiens
  CDR3 for alpha chain variable domain of TCR clone 30203 (TRAV38-1, TRAJ45)
CAYYSGGGADGLTF

SEQ ID NO: 60406 - protein, 20 aa, Homo sapiens
  CDR3 for beta chain variable domain of TCR clone 30203 (TRBV28, TRBJ2-1)
CASTPIGRSTGLAGGNEQFF

SEQ ID NO: 60407 - protein, 11 aa, Homo sapiens
  CDR3 for alpha chain variable domain of TCR clone 30204 (TRAV3, TRAJ21)
CAVGNFNKFYF

SEQ ID NO: 60408 - protein, 13 aa, Homo sapiens
  CDR3 for beta chain variable domain of TCR clone 30204 (TRBV4-2, TRBJ2-1)
CASSPGTYNEQFS

SEQ ID NO: 60409 - protein, 12 aa, Homo sapiens
  CDR3 for alpha chain variable domain of TCR clone 30205 (TRAV3, TRAJ43)
CAVRGPNNDMRF

SEQ ID NO: 60410 - protein, 16 aa, Homo sapiens
  CDR3 for beta chain variable domain of TCR clone 30205 (TRBV7-3, TRBJ2-1)
CASSLEGYRSYNEQFF

SEQ ID NO: 60411 - protein, 12 aa, Homo sapiens
  CDR3 for alpha chain variable domain of TCR clone 30206 (TRAV12-3, TRAJ17)
CAMTLTGNKLTF

SEQ ID NO: 60412 - protein, 16 aa, Homo sapiens
  CDR3 for beta chain variable domain of TCR clone 30206 (TRBV19, TRBJ2-1)
CASSKAGPSSYDEQFF

SEQ ID NO: 60413 - protein, 15 aa, Homo sapiens
  CDR3 for alpha chain variable domain of TCR clone 30207 (TRAV3, TRAJ20)
CAVRDIKLSDYKLSF

SEQ ID NO: 60414 - protein, 15 aa, Homo sapiens
  CDR3 for beta chain variable domain of TCR clone 30207 (TRBV7-9, TRBJ1-6)
CASSSPGRGNSALHF

SEQ ID NO: 60415 - protein, 16 aa, Homo sapiens
  CDR3 for alpha chain variable domain of TCR clone 30208 (TRAV20, TRAJ22)
CAVQASSSGSAGQLTF

SEQ ID NO: 60416 - protein, 13 aa, Homo sapiens
  CDR3 for beta chain variable domain of TCR clone 30208 (TRBV7-2, TRBJ2-5)
CASSQTSVETQYF

SEQ ID NO: 60417 - protein, 13 aa, Homo sapiens
  CDR3 for alpha chain variable domain of TCR clone 30209 (TRAV12-3, TRAJ13)
CAMSSGGYQKVTF

SEQ ID NO: 60418 - protein, 16 aa, Homo sapiens
  CDR3 for beta chain variable domain of TCR clone 30209 (TRBV9, TRBJ1-2)
CASSVEEKVSPYGYTF

SEQ ID NO: 60419 - protein, 16 aa, Homo sapiens
  CDR3 for alpha chain variable domain of TCR clone 30210 (TRAV3, TRAJ37)
CAVRVRGSGNTGKLIF

SEQ ID NO: 60420 - protein, 13 aa, Homo sapiens
  CDR3 for beta chain variable domain of TCR clone 30210 (TRBV14, TRBJ2-1)
CASSQDRRNEQFL

SEQ ID NO: 60421 - protein, 12 aa, Homo sapiens
  CDR3 for alpha chain variable domain of TCR clone 30211 (TRAV16, TRAJ10)
CSRTGGVNKLTF

SEQ ID NO: 60422 - protein, 15 aa, Homo sapiens
  CDR3 for beta chain variable domain of TCR clone 30211 (TRBV6-3, TRBJ2-7)
CASSSPGTVFYEQYF

SEQ ID NO: 60423 - protein, 10 aa, Homo sapiens
  CDR3 for alpha chain variable domain of TCR clone 30212 (TRAV12-3, TRAJ49)
CAMNDDQFYF

SEQ ID NO: 60424 - protein, 13 aa, Homo sapiens
  CDR3 for beta chain variable domain of TCR clone 30212 (TRBV12-4, TRBJ1-1)
CASSPGKGFEAFF

SEQ ID NO: 60425 - protein, 10 aa, Homo sapiens
  CDR3 for alpha chain variable domain of TCR clone 30213 (TRAV12-2, TRAJ41)
CAVTGYALDF

SEQ ID NO: 60426 - protein, 15 aa, Homo sapiens
  CDR3 for beta chain variable domain of TCR clone 30213 (TRBV4-2, TRBJ2-1)
CASSQDVGLAGEQFF

SEQ ID NO: 60427 - protein, 16 aa, Homo sapiens
  CDR3 for alpha chain variable domain of TCR clone 30214 (TRAV21, TRAJ33)
CAVSPASMDSNYQLIW

SEQ ID NO: 60428 - protein, 17 aa, Homo sapiens
  CDR3 for beta chain variable domain of TCR clone 30214 (TRBV2, TRBJ1-4)
CASSKRELIQGEEKLFF

SEQ ID NO: 60429 - protein, 14 aa, Homo sapiens
  CDR3 for alpha chain variable domain of TCR clone 30215 (TRAV1-2, TRAJ15)
CAVRDRQAGTALIF

SEQ ID NO: 60430 - protein, 16 aa, Homo sapiens
  CDR3 for beta chain variable domain of TCR clone 30215 (TRBV7-3, TRBJ2-2)
CASSLKRGTLSGELFF

SEQ ID NO: 60431 - protein, 10 aa, Homo sapiens
  CDR3 for alpha chain variable domain of TCR clone 30216 (TRAV23/DV6, TRAJ31)
CARGGARLVF

SEQ ID NO: 60432 - protein, 14 aa, Homo sapiens
  CDR3 for beta chain variable domain of TCR clone 30216 (TRBV7-8, TRBJ1-2)
CASSPDSLSYGYTF

SEQ ID NO: 60433 - protein, 13 aa, Homo sapiens
  CDR3 for alpha chain variable domain of TCR clone 30217 (TRAV13-2, TRAJ48)
CAEMDFGNEKLTF

SEQ ID NO: 60434 - protein, 15 aa, Homo sapiens
  CDR3 for beta chain variable domain of TCR clone 30217 (TRBV7-9, TRBJ1-6)
CASSSPGRGNSPLHV

SEQ ID NO: 60435 - protein, 18 aa, Homo sapiens
  CDR3 for alpha chain variable domain of TCR clone 30218 (TRAV21, TRAJ52)
CAVRPSPAGGTSYGKLTF

SEQ ID NO: 60436 - protein, 18 aa, Homo sapiens
  CDR3 for beta chain variable domain of TCR clone 30218 (TRBV6-6, TRBJ1-3)
CASSYSKWDSISGNTIYF

SEQ ID NO: 60437 - protein, 14 aa, Homo sapiens
  CDR3 for alpha chain variable domain of TCR clone 30219 (TRAV21, TRAJ35)
CAVMTIGFGNVLHC

SEQ ID NO: 60438 - protein, 12 aa, Homo sapiens
  CDR3 for beta chain variable domain of TCR clone 30219 (TRBV7-9, TRBJ2-7)
CASSIKREEQYF

SEQ ID NO: 60439 - protein, 14 aa, Homo sapiens
  CDR3 for alpha chain variable domain of TCR clone 30220 (TRAV26-1, TRAJ38)
CIVDNAGNNRKLIW

SEQ ID NO: 60440 - protein, 13 aa, Homo sapiens
  CDR3 for beta chain variable domain of TCR clone 30220 (TRBV20-1, TRBJ1-1)
CSARGGGNTEAFF

SEQ ID NO: 60441 - protein, 14 aa, Homo sapiens
  CDR3 for alpha chain variable domain of TCR clone 30221 (TRAV13-1, TRAJ9)
CAASALTGGFKTIF

SEQ ID NO: 60442 - protein, 13 aa, Homo sapiens
  CDR3 for beta chain variable domain of TCR clone 30221 (TRBV20-1, TRBJ1-1)
CSAGTVGNTEAFL

SEQ ID NO: 60443 - protein, 16 aa, Homo sapiens
  CDR3 for alpha chain variable domain of TCR clone 30222 (TRAV1-2, TRAJ10)
CAVRGLLTGGGNKLTF

SEQ ID NO: 60444 - protein, 12 aa, Homo sapiens
  CDR3 for beta chain variable domain of TCR clone 30222 (TRBV7-8, TRBJ2-7)
CASSLGDREQYF

SEQ ID NO: 60445 - protein, 16 aa, Homo sapiens
  CDR3 for alpha chain variable domain of TCR clone 30223 (TRAV26-1, TRAJ32)
CIVRANYGGATNKLIF

SEQ ID NO: 60446 - protein, 14 aa, Homo sapiens
  CDR3 for beta chain variable domain of TCR clone 30223 (TRBV27, TRBJ1-1)
CASSLLSGLSEAFF

SEQ ID NO: 60447 - protein, 13 aa, Homo sapiens
  CDR3 for alpha chain variable domain of TCR clone 30224 (TRAV12-1, TRAJ40)
CVVPTSGAYKYIF

SEQ ID NO: 60448 - protein, 18 aa, Homo sapiens
  CDR3 for beta chain variable domain of TCR clone 30224 (TRBV7-6, TRBJ2-1)
CASSPRTSGMSSYNEQFF

SEQ ID NO: 60449 - protein, 11 aa, Homo sapiens
  CDR3 for alpha chain variable domain of TCR clone 30225 (TRAV2, TRAJ33)
CAVDSNYQLIW

SEQ ID NO: 60450 - protein, 15 aa, Homo sapiens
  CDR3 for beta chain variable domain of TCR clone 30225 (TRBV19, TRBJ1-2)
CASSVGQVLNYGYTF

SEQ ID NO: 60451 - protein, 11 aa, Homo sapiens
  CDR3 for alpha chain variable domain of TCR clone 30226 (TRAV12-1, TRAJ30)
CVVNGQDKIIF

SEQ ID NO: 60452 - protein, 16 aa, Homo sapiens
  CDR3 for beta chain variable domain of TCR clone 30226 (TRBV5-1, TRBJ1-1)
CASSSGGNSLNTEAFF

SEQ ID NO: 60453 - protein, 13 aa, Homo sapiens
  CDR3 for alpha chain variable domain of TCR clone 30227 (TRAV20, TRAJ34)
CAVRSYNPDKLIF

SEQ ID NO: 60454 - protein, 12 aa, Homo sapiens
  CDR3 for beta chain variable domain of TCR clone 30227 (TRBV11-2, TRBJ2-1)
CASSPGNNEQFF

SEQ ID NO: 60455 - protein, 14 aa, Homo sapiens
  CDR3 for alpha chain variable domain of TCR clone 30228 (TRAV2, TRAJ37)
CAVDFTSNTGKLIF

SEQ ID NO: 60456 - protein, 12 aa, Homo sapiens
  CDR3 for beta chain variable domain of TCR clone 30228 (TRBV11-2, TRBJ2-2)
CASSLPTGELFF

SEQ ID NO: 60457 - protein, 15 aa, Homo sapiens
  CDR3 for alpha chain variable domain of TCR clone 30229 (TRAV13-1, TRAJ10)
CAASPRTGGGNKLTF

SEQ ID NO: 60458 - protein, 13 aa, Homo sapiens
  CDR3 for beta chain variable domain of TCR clone 30229 (TRBV11-2, TRBJ2-5)
CASTRDRGETQYF

SEQ ID NO: 60459 - protein, 11 aa, Homo sapiens
  CDR3 for alpha chain variable domain of TCR clone 30230 (TRAV21, TRAJ11)
CAVNGYSTLTF

SEQ ID NO: 60460 - protein, 11 aa, Homo sapiens
  CDR3 for beta chain variable domain of TCR clone 30230 (TRBV19, TRBJ1-1)
CASGIGSEAFF

SEQ ID NO: 60461 - protein, 15 aa, Homo sapiens
  CDR3 for alpha chain variable domain of TCR clone 30231 (TRAV12-1, TRAJ44)
CVVDTPQGTASKLTF

SEQ ID NO: 60462 - protein, 13 aa, Homo sapiens
  CDR3 for beta chain variable domain of TCR clone 30231 (TRBV27, TRBJ2-1)
CASSSGSYNEQLF

SEQ ID NO: 60463 - protein, 12 aa, Homo sapiens
  CDR3 for alpha chain variable domain of TCR clone 30232 (TRAV27, TRAJ35)
CAGAGFGNVLHC

SEQ ID NO: 60464 - protein, 16 aa, Homo sapiens
  CDR3 for beta chain variable domain of TCR clone 30232 (TRBV6-1, TRBJ2-1)
CASILRQGSSYNEQFF

SEQ ID NO: 60465 - protein, 14 aa, Homo sapiens
  CDR3 for alpha chain variable domain of TCR clone 30233 (TRAV1-2, TRAJ16)
CAVNRFSDGQKLLF

SEQ ID NO: 60466 - protein, 11 aa, Homo sapiens
  CDR3 for beta chain variable domain of TCR clone 30233 (TRBV29-1, TRBJ2-5)
CSEDRTGTHYF

SEQ ID NO: 60467 - protein, 13 aa, Homo sapiens
  CDR3 for alpha chain variable domain of TCR clone 30234 (TRAV12-2, TRAJ20)
CAVYPSNDYRLSF

SEQ ID NO: 60468 - protein, 15 aa, Homo sapiens
  CDR3 for beta chain variable domain of TCR clone 30234 (TRBV27, TRBJ2-5)
CASSLYPRGGETQYF

SEQ ID NO: 60469 - protein, 11 aa, Homo sapiens
  CDR3 for alpha chain variable domain of TCR clone 30235 (TRAV26-1, TRAJ37)
CIVRVGRKLIF

SEQ ID NO: 60470 - protein, 13 aa, Homo sapiens
  CDR3 for beta chain variable domain of TCR clone 30235 (TRBV10-3, TRBJ2-7)
CASKLAVNYEQYF

SEQ ID NO: 60471 - protein, 14 aa, Homo sapiens
  CDR3 for alpha chain variable domain of TCR clone 30236 (TRAV8-4, TRAJ9)
CAVRINTGGFKAIF

SEQ ID NO: 60472 - protein, 15 aa, Homo sapiens
  CDR3 for beta chain variable domain of TCR clone 30236 (TRBV20-1, TRBJ2-7)
CSARDRVSGMDEQYF

SEQ ID NO: 60473 - protein, 13 aa, Homo sapiens
  CDR3 for alpha chain variable domain of TCR clone 30237 (TRAV26-1, TRAJ48)
CIVRVVGDEKLTF

SEQ ID NO: 60474 - protein, 17 aa, Homo sapiens
  CDR3 for beta chain variable domain of TCR clone 30237 (TRBV11-3, TRBJ2-2)
CASSLSGTSGGTGELFF

SEQ ID NO: 60475 - protein, 16 aa, Homo sapiens
  CDR3 for alpha chain variable domain of TCR clone 30238 (TRAV3, TRAJ37)
CAVRGKGSGKTGKLIF

SEQ ID NO: 60476 - protein, 13 aa, Homo sapiens
  CDR3 for beta chain variable domain of TCR clone 30238 (TRBV14, TRBJ2-7)
CASSQDRRYEQYF

SEQ ID NO: 60477 - protein, 15 aa, Homo sapiens
  CDR3 for alpha chain variable domain of TCR clone 30239 (TRAV3, TRAJ4)
CAVRDGTGGYNKLIF

SEQ ID NO: 60478 - protein, 14 aa, Homo sapiens
  CDR3 for beta chain variable domain of TCR clone 30239 (TRBV5-5, TRBJ2-7)
CASSLGQGTYEQYF

SEQ ID NO: 60479 - protein, 14 aa, Homo sapiens
  CDR3 for alpha chain variable domain of TCR clone 30240 (TRAV17, TRAJ35)
CATDRPGLGNVLHC

SEQ ID NO: 60480 - protein, 19 aa, Homo sapiens
  CDR3 for beta chain variable domain of TCR clone 30240 (TRBV11-3, TRBJ2-2)
CASSTRPGAKTTNTGELFF

SEQ ID NO: 60481 - protein, 13 aa, Homo sapiens
  CDR3 for alpha chain variable domain of TCR clone 30241 (TRAV20, TRAJ37)
CAGCSSNTGKLIF

SEQ ID NO: 60482 - protein, 15 aa, Homo sapiens
  CDR3 for beta chain variable domain of TCR clone 30241 (TRBV20-1, TRBJ2-7)
CSARDRVSGMDEQYF

SEQ ID NO: 60483 - protein, 14 aa, Homo sapiens
  CDR3 for alpha chain variable domain of TCR clone 30242 (TRAV35, TRAJ33)
CAGSSQDSNYQLVW

SEQ ID NO: 60484 - protein, 15 aa, Homo sapiens
  CDR3 for beta chain variable domain of TCR clone 30242 (TRBV20-1, TRBJ2-7)
CSAESGTSGAYEQYF

SEQ ID NO: 60485 - protein, 15 aa, Homo sapiens
  CDR3 for alpha chain variable domain of TCR clone 30243 (TRAV3, TRAJ47)
CAVRDIGEYGNKLVF

SEQ ID NO: 60486 - protein, 14 aa, Homo sapiens
  CDR3 for beta chain variable domain of TCR clone 30243 (TRBV13, TRBJ2-5)
RASSLERVGETQYF

SEQ ID NO: 60487 - protein, 16 aa, Homo sapiens
  CDR3 for alpha chain variable domain of TCR clone 30244 (TRAV3, TRAJ32)
RAVRENYGGATNKLIF

SEQ ID NO: 60488 - protein, 12 aa, Homo sapiens
  CDR3 for beta chain variable domain of TCR clone 30244 (TRBV20-1, TRBJ1-2)
CSVTPEGYGYTF

SEQ ID NO: 60489 - protein, 16 aa, Homo sapiens
  CDR3 for alpha chain variable domain of TCR clone 30245 (TRAV3, TRAJ10)
CAVRDTRAGGGNKLTF

SEQ ID NO: 60490 - protein, 11 aa, Homo sapiens
  CDR3 for beta chain variable domain of TCR clone 30245 (TRBV29-1, TRBJ2-5)
CSEDRTGTQYF

SEQ ID NO: 60491 - protein, 13 aa, Homo sapiens
  CDR3 for alpha chain variable domain of TCR clone 30246 (TRAV13-2, TRAJ48)
CAEVDFGNEKLTF

SEQ ID NO: 60492 - protein, 13 aa, Homo sapiens
  CDR3 for beta chain variable domain of TCR clone 30246 (TRBV13, TRBJ2-5)
CASSPEVGETQYF

SEQ ID NO: 60493 - protein, 11 aa, Homo sapiens
  CDR3 for alpha chain variable domain of TCR clone 30247 (TRAV12-2, TRAJ43)
CAAYNNNDMRL

SEQ ID NO: 60494 - protein, 14 aa, Homo sapiens
  CDR3 for beta chain variable domain of TCR clone 30247 (TRBV7-8, TRBJ1-2)
CASSAGTAIYGYTF

SEQ ID NO: 60495 - protein, 12 aa, Homo sapiens
  CDR3 for alpha chain variable domain of TCR clone 30248 (TRAV23/DV6, TRAJ32)
CSMPGATNKLIF

SEQ ID NO: 60496 - protein, 17 aa, Homo sapiens
  CDR3 for beta chain variable domain of TCR clone 30248 (TRBV13, TRBJ2-3)
CASSSLGTGGLTDTQYF

SEQ ID NO: 60497 - protein, 14 aa, Homo sapiens
  CDR3 for alpha chain variable domain of TCR clone 30249 (TRAV23/DV6, TRAJ4)
CAANLSGGYNKLIF

SEQ ID NO: 60498 - protein, 11 aa, Homo sapiens
  CDR3 for beta chain variable domain of TCR clone 30249 (TRBV7-9, TRBJ2-3)
CAGSPTDTQYF

SEQ ID NO: 60499 - protein, 14 aa, Homo sapiens
  CDR3 for alpha chain variable domain of TCR clone 30250 (TRAV1-2, TRAJ16)
CAVNRFSGGQKLLF

SEQ ID NO: 60500 - protein, 16 aa, Homo sapiens
  CDR3 for beta chain variable domain of TCR clone 30250 (TRBV9, TRBJ2-1)
CASSVGGGGNYDEQFF

SEQ ID NO: 60501 - protein, 12 aa, Homo sapiens
  CDR3 for alpha chain variable domain of TCR clone 30251 (TRAV16, TRAJ10)
CSRTGGGNKLTF

SEQ ID NO: 60502 - protein, 15 aa, Homo sapiens
  CDR3 for beta chain variable domain of TCR clone 30251 (TRBV6-3, TRBJ2-7)
CARSSPGTVFYEQYF

SEQ ID NO: 60503 - protein, 13 aa, Homo sapiens
  CDR3 for alpha chain variable domain of TCR clone 30252 (TRAV27, TRAJ29)
CAGAHSGNKPLVF

SEQ ID NO: 60504 - protein, 14 aa, Homo sapiens
  CDR3 for beta chain variable domain of TCR clone 30252 (TRBV7-9, TRBJ2-7)
CASSIGQGAGEQYF

SEQ ID NO: 60505 - protein, 14 aa, Homo sapiens
  CDR3 for alpha chain variable domain of TCR clone 30253 (TRAV1-2, TRAJ16)
CAVNRFSDGQKLLF

SEQ ID NO: 60506 - protein, 13 aa, Homo sapiens
  CDR3 for beta chain variable domain of TCR clone 30253 (TRBV29-1, TRBJ2-1)
CSVEGGRVNEQFF

SEQ ID NO: 60507 - protein, 13 aa, Homo sapiens
  CDR3 for alpha chain variable domain of TCR clone 30254 (TRAV1-2, TRAJ9)
CAALNTGGFKTIF

SEQ ID NO: 60508 - protein, 13 aa, Homo sapiens
  CDR3 for beta chain variable domain of TCR clone 30254 (TRBV19, TRBJ1-2)
FASSVPGQDGYTF

SEQ ID NO: 60509 - protein, 15 aa, Homo sapiens
  CDR3 for alpha chain variable domain of TCR clone 30255 (TRAV12-3, TRAJ6)
CAMSATTGGSYIPAF

SEQ ID NO: 60510 - protein, 16 aa, Homo sapiens
  CDR3 for beta chain variable domain of TCR clone 30255 (TRBV20-1, TRBJ1-2)
CSASMGQGVANYGYTF

SEQ ID NO: 60511 - protein, 13 aa, Homo sapiens
  CDR3 for alpha chain variable domain of TCR clone 30256 (TRAV1-1, TRAJ13)
CAVNPGGYQKVTF

SEQ ID NO: 60512 - protein, 12 aa, Homo sapiens
  CDR3 for beta chain variable domain of TCR clone 30256 (TRBV28, TRBJ2-1)
CASSVQINEQFF

SEQ ID NO: 60513 - protein, 17 aa, Homo sapiens
  CDR3 for alpha chain variable domain of TCR clone 30257 (TRAV26-1, TRAJ53)
CIVRVDDSGGSNYKLTF

SEQ ID NO: 60514 - protein, 15 aa, Homo sapiens
  CDR3 for beta chain variable domain of TCR clone 30257 (TRBV20-1, TRBJ2-7)
GSARVPAAYFYEQYF

SEQ ID NO: 60515 - protein, 17 aa, Homo sapiens
  CDR3 for alpha chain variable domain of TCR clone 30258 (TRAV3, TRAJ38)
CAVRDCLNAGNNRKLTW

SEQ ID NO: 60516 - protein, 13 aa, Homo sapiens
  CDR3 for beta chain variable domain of TCR clone 30258 (TRBV23-1, TRBJ1-4)
CASRGKFNEKLFF

SEQ ID NO: 60517 - protein, 14 aa, Homo sapiens
  CDR3 for alpha chain variable domain of TCR clone 30259 (TRAV12-2, TRAJ13)
CAVKKTGGYQKVTF

SEQ ID NO: 60518 - protein, 18 aa, Homo sapiens
  CDR3 for beta chain variable domain of TCR clone 30259 (TRBV25-1, TRBJ1-2)
CASSGLQNGQGLIFGYTF

SEQ ID NO: 60519 - protein, 11 aa, Homo sapiens
  CDR3 for alpha chain variable domain of TCR clone 30260 (TRAV1-2, TRAJ40)
CAVPGTYKYIF

SEQ ID NO: 60520 - protein, 16 aa, Homo sapiens
  CDR3 for beta chain variable domain of TCR clone 30260 (TRBV29-1, TRBJ2-7)
CSVEVVGTSGSYEQYS

SEQ ID NO: 60521 - protein, 14 aa, Homo sapiens
  CDR3 for alpha chain variable domain of TCR clone 30261 (TRAV13-1, TRAJ35)
CAASKGGFGNVLHC

SEQ ID NO: 60522 - protein, 13 aa, Homo sapiens
  CDR3 for beta chain variable domain of TCR clone 30261 (TRBV7-3, TRBJ1-1)
CASSQDWGTEAFF

SEQ ID NO: 60523 - protein, 15 aa, Homo sapiens
  CDR3 for alpha chain variable domain of TCR clone 30262 (TRAV17, TRAJ54)
CATARSEQGAQKLVF

SEQ ID NO: 60524 - protein, 16 aa, Homo sapiens
  CDR3 for beta chain variable domain of TCR clone 30262 (TRBV12-4, TRBJ2-3)
CASSLRLAETTDTQYF

SEQ ID NO: 60525 - protein, 16 aa, Homo sapiens
  CDR3 for alpha chain variable domain of TCR clone 30263 (TRAV4, TRAJ9)
CLVGDPNRPGGFKNIF

SEQ ID NO: 60526 - protein, 16 aa, Homo sapiens
  CDR3 for beta chain variable domain of TCR clone 30263 (TRBV28, TRBJ1-4)
CASSPPYRGRSEKLFF

SEQ ID NO: 60527 - protein, 13 aa, Homo sapiens
  CDR3 for alpha chain variable domain of TCR clone 30264 (TRAV39, TRAJ58)
CAGEETSGSRLTF

SEQ ID NO: 60528 - protein, 15 aa, Homo sapiens
  CDR3 for beta chain variable domain of TCR clone 30264 (TRBV4-1, TRBJ2-7)
CASSQNAGRLYEQYF

SEQ ID NO: 60529 - protein, 12 aa, Homo sapiens
  CDR3 for alpha chain variable domain of TCR clone 30265 (TRAV13-1, TRAJ15)
CAASQAGTALIF

SEQ ID NO: 60530 - protein, 14 aa, Homo sapiens
  CDR3 for beta chain variable domain of TCR clone 30265 (TRBV19, TRBJ2-2)
CASSTLHRSGELSF

SEQ ID NO: 60531 - protein, 11 aa, Homo sapiens
  CDR3 for alpha chain variable domain of TCR clone 30266 (TRAV21, TRAJ48)
CAVDGNEKLAF

SEQ ID NO: 60532 - protein, 16 aa, Homo sapiens
  CDR3 for beta chain variable domain of TCR clone 30266 (TRBV12-4, TRBJ1-5)
CASSSGPRGSNQPQHF

SEQ ID NO: 60533 - protein, 12 aa, Homo sapiens
  CDR3 for alpha chain variable domain of TCR clone 30267 (TRAV13-2, TRAJ32)
RVYGGATNKLIF

SEQ ID NO: 60534 - protein, 16 aa, Homo sapiens
  CDR3 for beta chain variable domain of TCR clone 30267 (TRBV7-9, TRBJ1-2)
CASNISLDRGGYGYTF

SEQ ID NO: 60535 - protein, 13 aa, Homo sapiens
  CDR3 for alpha chain variable domain of TCR clone 30268 (TRAV12-3, TRAJ13)
CAMGTGGYQKVTF

SEQ ID NO: 60536 - protein, 14 aa, Homo sapiens
  CDR3 for beta chain variable domain of TCR clone 30268 (TRBV7-2, TRBJ2-5)
CASGTGGELKTQYF

SEQ ID NO: 60537 - protein, 12 aa, Homo sapiens
  CDR3 for alpha chain variable domain of TCR clone 30269 (TRAV35, TRAJ39)
LAPNNAGNMLTF

SEQ ID NO: 60538 - protein, 16 aa, Homo sapiens
  CDR3 for beta chain variable domain of TCR clone 30269 (TRBV2, TRBJ2-3)
CASSTSVEGVTDTRYF

SEQ ID NO: 60539 - protein, 15 aa, Homo sapiens
  CDR3 for alpha chain variable domain of TCR clone 30270 (TRAV4, TRAJ32)
CLVGEDGGATNKLIF

SEQ ID NO: 60540 - protein, 17 aa, Homo sapiens
  CDR3 for beta chain variable domain of TCR clone 30270 (TRBV7-3, TRBJ2-3)
CASSPRGQGYGTDTQYF

SEQ ID NO: 60541 - protein, 13 aa, Homo sapiens
  CDR3 for alpha chain variable domain of TCR clone 30271 (TRAV12-3, TRAJ54)
RAMTLQGAQKLVF

SEQ ID NO: 60542 - protein, 14 aa, Homo sapiens
  CDR3 for beta chain variable domain of TCR clone 30271 (TRBV4-1, TRBJ2-2)
CASSQAVNTGELFF

SEQ ID NO: 60543 - protein, 13 aa, Homo sapiens
  CDR3 for alpha chain variable domain of TCR clone 30272 (TRAV12-3, TRAJ33)
CAMSVNGNYQLIW

SEQ ID NO: 60544 - protein, 15 aa, Homo sapiens
  CDR3 for beta chain variable domain of TCR clone 30272 (TRBV20-1, TRBJ2-7)
CSARDRVSGMDEQYF

SEQ ID NO: 60545 - protein, 12 aa, Homo sapiens
  CDR3 for alpha chain variable domain of TCR clone 30273 (TRAV17, TRAJ4)
CATDGGYNKLIF

SEQ ID NO: 60546 - protein, 13 aa, Homo sapiens
  CDR3 for beta chain variable domain of TCR clone 30273 (TRBV14, TRBJ2-7)
CASSRGQAYEQYF

SEQ ID NO: 60547 - protein, 13 aa, Homo sapiens
  CDR3 for alpha chain variable domain of TCR clone 30274 (TRAV21, TRAJ57)
CAVTQGGSEKLVF

SEQ ID NO: 60548 - protein, 13 aa, Homo sapiens
  CDR3 for beta chain variable domain of TCR clone 30274 (TRBV7-3, TRBJ1-1)
CASSQDWGAEAFF

SEQ ID NO: 60549 - protein, 13 aa, Homo sapiens
  CDR3 for alpha chain variable domain of TCR clone 30275 (TRAV1-2, TRAJ9)
CAALNTGGFKTIF

SEQ ID NO: 60550 - protein, 15 aa, Homo sapiens
  CDR3 for beta chain variable domain of TCR clone 30275 (TRBV11-3, TRBJ2-3)
CASLKDGREGDTQYF

SEQ ID NO: 60551 - protein, 16 aa, Homo sapiens
  CDR3 for alpha chain variable domain of TCR clone 30276 (TRAV26-1, TRAJ32)
CIVRANYGGATNKPIF

SEQ ID NO: 60552 - protein, 14 aa, Homo sapiens
  CDR3 for beta chain variable domain of TCR clone 30276 (TRBV27, TRBJ1-1)
CASSLLSGLSEAFF

SEQ ID NO: 60553 - protein, 14 aa, Homo sapiens
  CDR3 for alpha chain variable domain of TCR clone 30277 (TRAV12-3, TRAJ10)
SHLPLTGGGNKLTF

SEQ ID NO: 60554 - protein, 14 aa, Homo sapiens
  CDR3 for beta chain variable domain of TCR clone 30277 (TRBV6-1, TRBJ1-3)
CDSVQGGGGNTIYF

SEQ ID NO: 60555 - protein, 13 aa, Homo sapiens
  CDR3 for alpha chain variable domain of TCR clone 30278 (TRAV8-3, TRAJ44)
CAVVPGTASKPTF

SEQ ID NO: 60556 - protein, 14 aa, Homo sapiens
  CDR3 for beta chain variable domain of TCR clone 30278 (TRBV11-2, TRBJ2-3)
CASSRLARTDTQYF

SEQ ID NO: 60557 - protein, 13 aa, Homo sapiens
  CDR3 for alpha chain variable domain of TCR clone 30279 (TRAV8-3, TRAJ44)
CAVVPGTASKLTF

SEQ ID NO: 60558 - protein, 14 aa, Homo sapiens
  CDR3 for beta chain variable domain of TCR clone 30279 (TRBV19, TRBJ2-5)
CASSMTGQQETQYF

SEQ ID NO: 60559 - protein, 15 aa, Homo sapiens
  CDR3 for alpha chain variable domain of TCR clone 30280 (TRAV8-3, TRAJ15)
CAVGAPNQAGTALIF

SEQ ID NO: 60560 - protein, 14 aa, Homo sapiens
  CDR3 for beta chain variable domain of TCR clone 30280 (TRBV20-1, TRBJ2-1)
CSPNDEDSYNEQFF

SEQ ID NO: 60561 - protein, 14 aa, Homo sapiens
  CDR3 for alpha chain variable domain of TCR clone 30281 (TRAV17, TRAJ57)
CATDPQGGSEKLVF

SEQ ID NO: 60562 - protein, 17 aa, Homo sapiens
  CDR3 for beta chain variable domain of TCR clone 30281 (TRBV7-3, TRBJ2-3)
CASSLMKRMRGADTQYF

SEQ ID NO: 60563 - protein, 12 aa, Homo sapiens
  CDR3 for alpha chain variable domain of TCR clone 30282 (TRAV8-3, TRAJ10)
AILTGGGNKLTF

SEQ ID NO: 60564 - protein, 10 aa, Homo sapiens
  CDR3 for beta chain variable domain of TCR clone 30282 (TRBV20-1, TRBJ2-5)
CSARFETQYF

SEQ ID NO: 60565 - protein, 15 aa, Homo sapiens
  CDR3 for alpha chain variable domain of TCR clone 30283 (TRAV12-3, TRAJ6)
CAMSATTGGSYIPTF

SEQ ID NO: 60566 - protein, 14 aa, Homo sapiens
  CDR3 for beta chain variable domain of TCR clone 30283 (TRBV7-2, TRBJ2-7)
CASRSQGAAYEQYF

SEQ ID NO: 60567 - protein, 13 aa, Homo sapiens
  CDR3 for alpha chain variable domain of TCR clone 30284 (TRAV17, TRAJ9)
CATDYTGGIKTIF

SEQ ID NO: 60568 - protein, 14 aa, Homo sapiens
  CDR3 for beta chain variable domain of TCR clone 30284 (TRBV19, TRBJ2-5)
CASSMTGQQETQYF

SEQ ID NO: 60569 - protein, 18 aa, Homo sapiens
  CDR3 for alpha chain variable domain of TCR clone 30285 (TRAV26-2, TRAJ45)
CILRVDKYSGGGADGFTF

SEQ ID NO: 60570 - protein, 16 aa, Homo sapiens
  CDR3 for beta chain variable domain of TCR clone 30285 (TRBV2, TRBJ1-4)
CASNLLQGATNEKLFF

SEQ ID NO: 60571 - protein, 14 aa, Homo sapiens
  CDR3 for alpha chain variable domain of TCR clone 30286 (TRAV1-2, TRAJ16)
CAVNRFSDDQKLLF

SEQ ID NO: 60572 - protein, 15 aa, Homo sapiens
  CDR3 for beta chain variable domain of TCR clone 30286 (TRBV7-9, TRBJ1-6)
CASSSPGRGNSPLHF

SEQ ID NO: 60573 - protein, 14 aa, Homo sapiens
  CDR3 for alpha chain variable domain of TCR clone 30287 (TRAV17, TRAJ39)
CATDPVRAGNMHTF

SEQ ID NO: 60574 - protein, 15 aa, Homo sapiens
  CDR3 for beta chain variable domain of TCR clone 30287 (TRBV13, TRBJ1-5)
CASSFGQGGVQPQHF

SEQ ID NO: 60575 - protein, 14 aa, Homo sapiens
  CDR3 for alpha chain variable domain of TCR clone 30288 (TRAV2, TRAJ9)
CAAEDRSGGFKTIF

SEQ ID NO: 60576 - protein, 13 aa, Homo sapiens
  CDR3 for beta chain variable domain of TCR clone 30288 (TRBV27, TRBJ1-1)
CASSLSIGAEAFF

SEQ ID NO: 60577 - protein, 12 aa, Homo sapiens
  CDR3 for alpha chain variable domain of TCR clone 30289 (TRAV12-3, TRAJ40)
CAISSGTYKYIF

SEQ ID NO: 60578 - protein, 15 aa, Homo sapiens
  CDR3 for beta chain variable domain of TCR clone 30289 (TRBV7-3, TRBJ2-2)
CASSETGQGTGELFF

SEQ ID NO: 60579 - protein, 11 aa, Homo sapiens
  CDR3 for alpha chain variable domain of TCR clone 30290 (TRAV1-2, TRAJ40)
CAVPGTYKYIF

SEQ ID NO: 60580 - protein, 16 aa, Homo sapiens
  CDR3 for beta chain variable domain of TCR clone 30290 (TRBV29-1, TRBJ2-7)
CSVEVVGTSGSYEQFF

SEQ ID NO: 60581 - protein, 13 aa, Homo sapiens
  CDR3 for alpha chain variable domain of TCR clone 30291 (TRAV25, TRAJ10)
CAGRTGGGNKLTF

SEQ ID NO: 60582 - protein, 15 aa, Homo sapiens
  CDR3 for beta chain variable domain of TCR clone 30291 (TRBV19, TRBJ2-1)
CASSSPGMPLDEQFF

SEQ ID NO: 60583 - protein, 16 aa, Homo sapiens
  CDR3 for alpha chain variable domain of TCR clone 30292 (TRAV12-2, TRAJ50)
CAVGTATKTSYDKGIF

SEQ ID NO: 60584 - protein, 12 aa, Homo sapiens
  CDR3 for beta chain variable domain of TCR clone 30292 (TRBV12-4, TRBJ1-5)
CASSLGRQPQHF

SEQ ID NO: 60585 - protein, 14 aa, Homo sapiens
  CDR3 for alpha chain variable domain of TCR clone 30293 (TRAV38-1, TRAJ40)
CALRPTSGTYKYIF

SEQ ID NO: 60586 - protein, 13 aa, Homo sapiens
  CDR3 for beta chain variable domain of TCR clone 30293 (TRBV10-3, TRBJ2-7)
CASKLAVNYEQYF

SEQ ID NO: 60587 - protein, 18 aa, Homo sapiens
  CDR3 for alpha chain variable domain of TCR clone 30294 (TRAV12-3, TRAJ52)
CAMSRTNAGGTSYGKLTF

SEQ ID NO: 60588 - protein, 17 aa, Homo sapiens
  CDR3 for beta chain variable domain of TCR clone 30294 (TRBV7-3, TRBJ2-3)
CVSSLMKRMRGADTQYF

SEQ ID NO: 60589 - protein, 12 aa, Homo sapiens
  CDR3 for alpha chain variable domain of TCR clone 30295 (TRAV1-1, TRAJ39)
FAVPVVGNMLTF

SEQ ID NO: 60590 - protein, 15 aa, Homo sapiens
  CDR3 for beta chain variable domain of TCR clone 30295 (TRBV19, TRBJ1-6)
CASSTQGAVGSPLHF

SEQ ID NO: 60591 - protein, 18 aa, Homo sapiens
  CDR3 for alpha chain variable domain of TCR clone 30296 (TRAV21, TRAJ52)
CAVRPSPAGGTSYGKLTF

SEQ ID NO: 60592 - protein, 12 aa, Homo sapiens
  CDR3 for beta chain variable domain of TCR clone 30296 (TRBV29-1, TRBJ2-3)
CSVTGGADTQYF

SEQ ID NO: 60593 - protein, 12 aa, Homo sapiens
  CDR3 for alpha chain variable domain of TCR clone 30297 (TRAV13-1, TRAJ23)
CAERHRGGKLIF

SEQ ID NO: 60594 - protein, 15 aa, Homo sapiens
  CDR3 for beta chain variable domain of TCR clone 30297 (TRBV7-9, TRBJ1-6)
CASSSPGRGNSPLHF

SEQ ID NO: 60595 - protein, 16 aa, Homo sapiens
  CDR3 for alpha chain variable domain of TCR clone 30298 (TRAV3, TRAJ4)
CAVRPSPSGGYNKLLF

SEQ ID NO: 60596 - protein, 12 aa, Homo sapiens
  CDR3 for beta chain variable domain of TCR clone 30298 (TRBV7-9, TRBJ2-7)
CASSQGVYEQYF

SEQ ID NO: 60597 - protein, 13 aa, Homo sapiens
  CDR3 for alpha chain variable domain of TCR clone 30299 (TRAV12-1, TRAJ31)
CVVNMNNNARLMF

SEQ ID NO: 60598 - protein, 15 aa, Homo sapiens
  CDR3 for beta chain variable domain of TCR clone 30299 (TRBV4-1, TRBJ1-2)
CASSQGRGAAYGYTF

SEQ ID NO: 60599 - protein, 14 aa, Homo sapiens
  CDR3 for alpha chain variable domain of TCR clone 30300 (TRAV2, TRAJ9)
CAVEDRSGGFKTIF

SEQ ID NO: 60600 - protein, 15 aa, Homo sapiens
  CDR3 for beta chain variable domain of TCR clone 30300 (TRBV7-2, TRBJ2-5)
CASSFLRGGEETQYF

SEQ ID NO: 60601 - protein, 13 aa, Homo sapiens
  CDR3 for alpha chain variable domain of TCR clone 30301 (TRAV38-2/DV8, TRAJ34)
CAYRTWNTDKLIF

SEQ ID NO: 60602 - protein, 15 aa, Homo sapiens
  CDR3 for beta chain variable domain of TCR clone 30301 (TRBV27, TRBJ2-7)
CASSTAGTGSYEQYF

SEQ ID NO: 60603 - protein, 14 aa, Homo sapiens
  CDR3 for alpha chain variable domain of TCR clone 30302 (TRAV2, TRAJ22)
RAVEVKRAARQLTF

SEQ ID NO: 60604 - protein, 14 aa, Homo sapiens
  CDR3 for beta chain variable domain of TCR clone 30302 (TRBV19, TRBJ2-2)
CASTPGYSGGELFF

SEQ ID NO: 60605 - protein, 15 aa, Homo sapiens
  CDR3 for alpha chain variable domain of TCR clone 30303 (TRAV17, TRAJ57)
CATGPSQGGSEKLVC

SEQ ID NO: 60606 - protein, 14 aa, Homo sapiens
  CDR3 for beta chain variable domain of TCR clone 30303 (TRBV12-5, TRBJ2-5)
CASGSRTHQETQYF

SEQ ID NO: 60607 - protein, 13 aa, Homo sapiens
  CDR3 for alpha chain variable domain of TCR clone 30304 (TRAV20, TRAJ37)
CAGCSSNTGKLIF

SEQ ID NO: 60608 - protein, 11 aa, Homo sapiens
  CDR3 for beta chain variable domain of TCR clone 30304 (TRBV12-4, TRBJ2-3)
CARTATDTQYF

SEQ ID NO: 60609 - protein, 17 aa, Homo sapiens
  CDR3 for alpha chain variable domain of TCR clone 30305 (TRAV3, TRAJ42)
CAVRDRDYGGSQGNLIF

SEQ ID NO: 60610 - protein, 14 aa, Homo sapiens
  CDR3 for beta chain variable domain of TCR clone 30305 (TRBV20-1, TRBJ2-3)
RTSGGPGTTDTQYF

SEQ ID NO: 60611 - protein, 13 aa, Homo sapiens
  CDR3 for alpha chain variable domain of TCR clone 30306 (TRAV3, TRAJ27)
CAVRPLGAGKSTF

SEQ ID NO: 60612 - protein, 16 aa, Homo sapiens
  CDR3 for beta chain variable domain of TCR clone 30306 (TRBV7-3, TRBJ2-2)
CASSLKRGTLSGELFF

SEQ ID NO: 60613 - protein, 14 aa, Homo sapiens
  CDR3 for alpha chain variable domain of TCR clone 30307 (TRAV1-2, TRAJ8)
CAVREDTGFQKLVF

SEQ ID NO: 60614 - protein, 15 aa, Homo sapiens
  CDR3 for beta chain variable domain of TCR clone 30307 (TRBV12-4, TRBJ2-5)
CASSPPTGLQGTQYF

SEQ ID NO: 60615 - protein, 14 aa, Homo sapiens
  CDR3 for alpha chain variable domain of TCR clone 30308 (TRAV1-2, TRAJ16)
CAVTRFSDGQKLLF

SEQ ID NO: 60616 - protein, 15 aa, Homo sapiens
  CDR3 for beta chain variable domain of TCR clone 30308 (TRBV9, TRBJ1-6)
CASSVAGTGDSPLHF

SEQ ID NO: 60617 - protein, 14 aa, Homo sapiens
  CDR3 for alpha chain variable domain of TCR clone 30309 (TRAV8-2, TRAJ23)
CVVSDDDQGGKLIF

SEQ ID NO: 60618 - protein, 16 aa, Homo sapiens
  CDR3 for beta chain variable domain of TCR clone 30309 (TRBV4-2, TRBJ2-5)
CASSQELVGSQETQYF

SEQ ID NO: 60619 - protein, 16 aa, Homo sapiens
  CDR3 for alpha chain variable domain of TCR clone 30310 (TRAV13-1, TRAJ37)
CAASSLGSSNTGKLIF

SEQ ID NO: 60620 - protein, 12 aa, Homo sapiens
  CDR3 for beta chain variable domain of TCR clone 30310 (TRBV6-1, TRBJ2-5)
CASREGRETQYF

SEQ ID NO: 60621 - protein, 14 aa, Homo sapiens
  CDR3 for alpha chain variable domain of TCR clone 30311 (TRAV13-1, TRAJ24)
CAASRTDSWGKLQF

SEQ ID NO: 60622 - protein, 15 aa, Homo sapiens
  CDR3 for beta chain variable domain of TCR clone 30311 (TRBV6-1, TRBJ2-7)
CASSEPIAATTEQYF

SEQ ID NO: 60623 - protein, 17 aa, Homo sapiens
  CDR3 for alpha chain variable domain of TCR clone 30312 (TRAV12-1, TRAJ32)
RVVNMQGYGGATNELIF

SEQ ID NO: 60624 - protein, 13 aa, Homo sapiens
  CDR3 for beta chain variable domain of TCR clone 30312 (TRBV6-6, TRBJ2-1)
CASSLHQGDEQFF

SEQ ID NO: 60625 - protein, 10 aa, Homo sapiens
  CDR3 for alpha chain variable domain of TCR clone 30313 (TRAV21, TRAJ31)
CAVDNARLMF

SEQ ID NO: 60626 - protein, 13 aa, Homo sapiens
  CDR3 for beta chain variable domain of TCR clone 30313 (TRBV4-1, TRBJ1-1)
CASSRKMNTEASF

SEQ ID NO: 60627 - protein, 14 aa, Homo sapiens
  CDR3 for alpha chain variable domain of TCR clone 30314 (TRAV17, TRAJ35)
CATDRPGFGNVLHC

SEQ ID NO: 60628 - protein, 19 aa, Homo sapiens
  CDR3 for beta chain variable domain of TCR clone 30314 (TRBV11-3, TRBJ2-2)
CASSTRPGAKTTNTGELFV

SEQ ID NO: 60629 - protein, 18 aa, Homo sapiens
  CDR3 for alpha chain variable domain of TCR clone 30315 (TRAV17, TRAJ45)
CATSLDLYSGGGSDGLTF

SEQ ID NO: 60630 - protein, 15 aa, Homo sapiens
  CDR3 for beta chain variable domain of TCR clone 30315 (TRBV11-2, TRBJ2-1)
CASSKNRGLIYEQFF

SEQ ID NO: 60631 - protein, 11 aa, Homo sapiens
  CDR3 for alpha chain variable domain of TCR clone 30316 (TRAV3, TRAJ21)
CAVGNFNKFYF

SEQ ID NO: 60632 - protein, 16 aa, Homo sapiens
  CDR3 for beta chain variable domain of TCR clone 30316 (TRBV7-6, TRBJ2-1)
CASSAPGPGSYNEQFF

SEQ ID NO: 60633 - protein, 12 aa, Homo sapiens
  CDR3 for alpha chain variable domain of TCR clone 30317 (TRAV17, TRAJ53)
CAFGGSNYKLTF

SEQ ID NO: 60634 - protein, 16 aa, Homo sapiens
  CDR3 for beta chain variable domain of TCR clone 30317 (TRBV11-2, TRBJ2-4)
CASSQEGRGGLDIQYL

SEQ ID NO: 60635 - protein, 14 aa, Homo sapiens
  CDR3 for alpha chain variable domain of TCR clone 30318 (TRAV1-2, TRAJ16)
CAVNRFSDGQKLLF

SEQ ID NO: 60636 - protein, 19 aa, Homo sapiens
  CDR3 for beta chain variable domain of TCR clone 30318 (TRBV12-4, TRBJ2-1)
CASTLAFDPRDKEANEQFF

SEQ ID NO: 60637 - protein, 14 aa, Homo sapiens
  CDR3 for alpha chain variable domain of TCR clone 30319 (TRAV1-2, TRAJ16)
CAVNRFSDGQKLLF

SEQ ID NO: 60638 - protein, 15 aa, Homo sapiens
  CDR3 for beta chain variable domain of TCR clone 30319 (TRBV9, TRBJ1-6)
CASIVAGTGDSPLHF

SEQ ID NO: 60639 - protein, 12 aa, Homo sapiens
  CDR3 for alpha chain variable domain of TCR clone 30320 (TRAV13-1, TRAJ21)
CAAKEGFNKFYF

SEQ ID NO: 60640 - protein, 15 aa, Homo sapiens
  CDR3 for beta chain variable domain of TCR clone 30320 (TRBV7-7, TRBJ2-5)
CASSQLGRAEETQYF

SEQ ID NO: 60641 - protein, 15 aa, Homo sapiens
  CDR3 for alpha chain variable domain of TCR clone 30321 (TRAV17, TRAJ23)
CATDAEDNQGGKLIF

SEQ ID NO: 60642 - protein, 12 aa, Homo sapiens
  CDR3 for beta chain variable domain of TCR clone 30321 (TRBV2, TRBJ2-1)
CARREGYNEQFF

SEQ ID NO: 60643 - protein, 13 aa, Homo sapiens
  CDR3 for alpha chain variable domain of TCR clone 30322 (TRAV38-1, TRAJ42)
CARWGGSQGNLIF

SEQ ID NO: 60644 - protein, 10 aa, Homo sapiens
  CDR3 for beta chain variable domain of TCR clone 30322 (TRBV2, TRBJ2-5)
RASSAATQYF

SEQ ID NO: 60645 - protein, 13 aa, Homo sapiens
  CDR3 for alpha chain variable domain of TCR clone 30323 (TRAV27, TRAJ56)
CAGKPGANSKLTF

SEQ ID NO: 60646 - protein, 18 aa, Homo sapiens
  CDR3 for beta chain variable domain of TCR clone 30323 (TRBV11-2, TRBJ2-3)
CASSFGGASRGAPNTQYF

SEQ ID NO: 60647 - protein, 14 aa, Homo sapiens
  CDR3 for alpha chain variable domain of TCR clone 30324 (TRAV1-2, TRAJ16)
CAVNRFSDGRKLLF

SEQ ID NO: 60648 - protein, 14 aa, Homo sapiens
  CDR3 for beta chain variable domain of TCR clone 30324 (TRBV7-9, TRBJ2-3)
CASSLEDGTDTQYF

SEQ ID NO: 60649 - protein, 13 aa, Homo sapiens
  CDR3 for alpha chain variable domain of TCR clone 30325 (TRAV3, TRAJ21)
CAVREPDFNNFYF

SEQ ID NO: 60650 - protein, 17 aa, Homo sapiens
  CDR3 for beta chain variable domain of TCR clone 30325 (TRBV7-8, TRBJ2-6)
CASSAGTGGAGANVLTF

SEQ ID NO: 60651 - protein, 14 aa, Homo sapiens
  CDR3 for alpha chain variable domain of TCR clone 30326 (TRAV12-2, TRAJ17)
CAVNIKAAGNKLTF

SEQ ID NO: 60652 - protein, 16 aa, Homo sapiens
  CDR3 for beta chain variable domain of TCR clone 30326 (TRBV20-1, TRBJ2-6)
CSASSQGYDGANGLTF

SEQ ID NO: 60653 - protein, 14 aa, Homo sapiens
  CDR3 for alpha chain variable domain of TCR clone 30327 (TRAV1-1, TRAJ27)
CAVIYNSNAGKSTF

SEQ ID NO: 60654 - protein, 15 aa, Homo sapiens
  CDR3 for beta chain variable domain of TCR clone 30327 (TRBV7-2, TRBJ2-1)
CASSSGLAGGNEQFF

SEQ ID NO: 60655 - protein, 14 aa, Homo sapiens
  CDR3 for alpha chain variable domain of TCR clone 30328 (TRAV2, TRAJ9)
CAVEDRSGGFKTIF

SEQ ID NO: 60656 - protein, 15 aa, Homo sapiens
  CDR3 for beta chain variable domain of TCR clone 30328 (TRBV12-4, TRBJ2-5)
CASSPPTGLQETQYF

SEQ ID NO: 60657 - protein, 16 aa, Homo sapiens
  CDR3 for alpha chain variable domain of TCR clone 30329 (TRAV3, TRAJ21)
CAVRDIERGNFNKFYF

SEQ ID NO: 60658 - protein, 13 aa, Homo sapiens
  CDR3 for beta chain variable domain of TCR clone 30329 (TRBV27, TRBJ2-7)
CASGLTTGYEQYF

SEQ ID NO: 60659 - protein, 17 aa, Homo sapiens
  CDR3 for alpha chain variable domain of TCR clone 30330 (TRAV3, TRAJ6)
CAVRDGPRAGGSYIPTF

SEQ ID NO: 60660 - protein, 12 aa, Homo sapiens
  CDR3 for beta chain variable domain of TCR clone 30330 (TRBV6-3, TRBJ2-7)
CASSLTPYEQYF

SEQ ID NO: 60661 - protein, 13 aa, Homo sapiens
  CDR3 for alpha chain variable domain of TCR clone 30331 (TRAV2, TRAJ40)
CAVVTSGTYKYIF

SEQ ID NO: 60662 - protein, 16 aa, Homo sapiens
  CDR3 for beta chain variable domain of TCR clone 30331 (TRBV20-1, TRBJ1-4)
CSAPGQGLLTNEKLFF

SEQ ID NO: 60663 - protein, 14 aa, Homo sapiens
  CDR3 for alpha chain variable domain of TCR clone 30332 (TRAV16, TRAJ33)
CALSAMDSNYQLIW

SEQ ID NO: 60664 - protein, 12 aa, Homo sapiens
  CDR3 for beta chain variable domain of TCR clone 30332 (TRBV5-1, TRBJ1-2)
CASSQYTYGYTF

SEQ ID NO: 60665 - protein, 19 aa, Homo sapiens
  CDR3 for alpha chain variable domain of TCR clone 30333 (TRAV1-2, TRAJ26)
CLLPLCCERPDNYGQNFVF

SEQ ID NO: 60666 - protein, 17 aa, Homo sapiens
  CDR3 for beta chain variable domain of TCR clone 30333 (TRBV13, TRBJ2-3)
CASSLSRVAGGRNTQYL

SEQ ID NO: 60667 - protein, 14 aa, Homo sapiens
  CDR3 for alpha chain variable domain of TCR clone 30334 (TRAV17, TRAJ34)
CATDSLAGTDKLIF

SEQ ID NO: 60668 - protein, 13 aa, Homo sapiens
  CDR3 for beta chain variable domain of TCR clone 30334 (TRBV11-2, TRBJ2-7)
CASSGTRPYEQYF

SEQ ID NO: 60669 - protein, 14 aa, Homo sapiens
  CDR3 for alpha chain variable domain of TCR clone 30335 (TRAV1-2, TRAJ16)
CAVNRFPDGQKLLF

SEQ ID NO: 60670 - protein, 16 aa, Homo sapiens
  CDR3 for beta chain variable domain of TCR clone 30335 (TRBV12-5, TRBJ2-5)
CASGPRTSGNQETQYF

SEQ ID NO: 60671 - protein, 14 aa, Homo sapiens
  CDR3 for alpha chain variable domain of TCR clone 30336 (TRAV13-1, TRAJ44)
CAAKATGPASKLTF

SEQ ID NO: 60672 - protein, 14 aa, Homo sapiens
  CDR3 for beta chain variable domain of TCR clone 30336 (TRBV19, TRBJ2-2)
CASSTLHRSGELFF

SEQ ID NO: 60673 - protein, 15 aa, Homo sapiens
  CDR3 for alpha chain variable domain of TCR clone 30337 (TRAV25, TRAJ52)
CAGRPGGTSYGKLTF

SEQ ID NO: 60674 - protein, 17 aa, Homo sapiens
  CDR3 for beta chain variable domain of TCR clone 30337 (TRBV7-8, TRBJ2-6)
CSSSAGTGGAGANVLTF

SEQ ID NO: 60675 - protein, 16 aa, Homo sapiens
  CDR3 for alpha chain variable domain of TCR clone 30338 (TRAV12-2, TRAJ10)
CAVNRVLTGGGNKLTS

SEQ ID NO: 60676 - protein, 12 aa, Homo sapiens
  CDR3 for beta chain variable domain of TCR clone 30338 (TRBV28, TRBJ2-7)
CASSFSSYEQYF

SEQ ID NO: 60677 - protein, 15 aa, Homo sapiens
  CDR3 for alpha chain variable domain of TCR clone 30339 (TRAV2, TRAJ9)
CAVEDRGTGGFKTIF

SEQ ID NO: 60678 - protein, 16 aa, Homo sapiens
  CDR3 for beta chain variable domain of TCR clone 30339 (TRBV24-1, TRBJ2-3)
CATSDPGTGATDTKYF

SEQ ID NO: 60679 - protein, 11 aa, Homo sapiens
  CDR3 for alpha chain variable domain of TCR clone 30340 (TRAV21, TRAJ34)
CAHYNTDKLIF

SEQ ID NO: 60680 - protein, 13 aa, Homo sapiens
  CDR3 for beta chain variable domain of TCR clone 30340 (TRBV10-3, TRBJ2-7)
CASKLAVNYEQYF

SEQ ID NO: 60681 - protein, 10 aa, Homo sapiens
  CDR3 for alpha chain variable domain of TCR clone 30341 (TRAV25, TRAJ17)
CQAAGNKLTF

SEQ ID NO: 60682 - protein, 15 aa, Homo sapiens
  CDR3 for beta chain variable domain of TCR clone 30341 (TRBV2, TRBJ2-1)
CASSETGGNYNEQFF

SEQ ID NO: 60683 - protein, 11 aa, Homo sapiens
  CDR3 for alpha chain variable domain of TCR clone 30342 (TRAV3, TRAJ21)
CAVGNFNKFYF

SEQ ID NO: 60684 - protein, 17 aa, Homo sapiens
  CDR3 for beta chain variable domain of TCR clone 30342 (TRBV20-1, TRBJ2-1)
CNASSSGLAGSYNEQFF

SEQ ID NO: 60685 - protein, 11 aa, Homo sapiens
  CDR3 for alpha chain variable domain of TCR clone 30343 (TRAV1-2, TRAJ20)
CAVANDYKLSF

SEQ ID NO: 60686 - protein, 18 aa, Homo sapiens
  CDR3 for beta chain variable domain of TCR clone 30343 (TRBV20-1, TRBJ2-6)
CSAETTPTHGSGAKVLTF

SEQ ID NO: 60687 - protein, 14 aa, Homo sapiens
  CDR3 for alpha chain variable domain of TCR clone 30344 (TRAV17, TRAJ53)
CATDAGGSNYKLTF

SEQ ID NO: 60688 - protein, 16 aa, Homo sapiens
  CDR3 for beta chain variable domain of TCR clone 30344 (TRBV4-1, TRBJ1-1)
CASGQDAGMGNTEAFF

SEQ ID NO: 60689 - protein, 15 aa, Homo sapiens
  CDR3 for alpha chain variable domain of TCR clone 30345 (TRAV35, TRAJ23)
CAGQRGYNQGGKLIF

SEQ ID NO: 60690 - protein, 16 aa, Homo sapiens
  CDR3 for beta chain variable domain of TCR clone 30345 (TRBV27, TRBJ2-1)
CDSSSRLAGNYNEQFF

SEQ ID NO: 60691 - protein, 15 aa, Homo sapiens
  CDR3 for alpha chain variable domain of TCR clone 30346 (TRAV12-3, TRAJ49)
CAMAVTPNTGNQFYF

SEQ ID NO: 60692 - protein, 18 aa, Homo sapiens
  CDR3 for beta chain variable domain of TCR clone 30346 (TRBV4-1, TRBJ1-5)
CASSQDPRGQGLSQPQHF

SEQ ID NO: 60693 - protein, 13 aa, Homo sapiens
  CDR3 for alpha chain variable domain of TCR clone 30347 (TRAV3, TRAJ27)
CAVRPLGAGKSTF

SEQ ID NO: 60694 - protein, 16 aa, Homo sapiens
  CDR3 for beta chain variable domain of TCR clone 30347 (TRBV24-1, TRBJ2-3)
CATSDPGTGATDTQYF

SEQ ID NO: 60695 - protein, 16 aa, Homo sapiens
  CDR3 for alpha chain variable domain of TCR clone 30348 (TRAV3, TRAJ10)
CAVRDMRAGGGNKLTL

SEQ ID NO: 60696 - protein, 19 aa, Homo sapiens
  CDR3 for beta chain variable domain of TCR clone 30348 (TRBV6-3, TRBJ1-2)
CASSYSKGRTGPPNYGYTF

SEQ ID NO: 60697 - protein, 13 aa, Homo sapiens
  CDR3 for alpha chain variable domain of TCR clone 30349 (TRAV13-1, TRAJ5)
CAARVTGRRALTV

SEQ ID NO: 60698 - protein, 15 aa, Homo sapiens
  CDR3 for beta chain variable domain of TCR clone 30349 (TRBV7-9, TRBJ2-7)
CASSPGGGLTYEQYF

SEQ ID NO: 60699 - protein, 15 aa, Homo sapiens
  CDR3 for alpha chain variable domain of TCR clone 30350 (TRAV12-1, TRAJ44)
CVVFVDTGTASKLTF

SEQ ID NO: 60700 - protein, 16 aa, Homo sapiens
  CDR3 for beta chain variable domain of TCR clone 30350 (TRBV20-1, TRBJ2-5)
CSPGGTSGGYMETQYF

SEQ ID NO: 60701 - protein, 11 aa, Homo sapiens
  CDR3 for alpha chain variable domain of TCR clone 30351 (TRAV23/DV6, TRAJ43)
CAASPGNDMRF

SEQ ID NO: 60702 - protein, 14 aa, Homo sapiens
  CDR3 for beta chain variable domain of TCR clone 30351 (TRBV4-1, TRBJ1-2)
CASSQDPLPYGYTF

SEQ ID NO: 60703 - protein, 14 aa, Homo sapiens
  CDR3 for alpha chain variable domain of TCR clone 30352 (TRAV35, TRAJ10)
CAGILTGGGNKLTF

SEQ ID NO: 60704 - protein, 14 aa, Homo sapiens
  CDR3 for beta chain variable domain of TCR clone 30352 (TRBV19, TRBJ2-1)
CASPTFVLSGEQFF

SEQ ID NO: 60705 - protein, 15 aa, Homo sapiens
  CDR3 for alpha chain variable domain of TCR clone 30353 (TRAV12-1, TRAJ44)
CVVFVNTGTASKLTF

SEQ ID NO: 60706 - protein, 15 aa, Homo sapiens
  CDR3 for beta chain variable domain of TCR clone 30353 (TRBV6-3, TRBJ2-7)
CASSSPGTVFYEQYF

SEQ ID NO: 60707 - protein, 12 aa, Homo sapiens
  CDR3 for alpha chain variable domain of TCR clone 30354 (TRAV29/DV5, TRAJ49)
CAATDTGNQFYF

SEQ ID NO: 60708 - protein, 14 aa, Homo sapiens
  CDR3 for beta chain variable domain of TCR clone 30354 (TRBV20-1, TRBJ1-2)
CSATIQQGADGYTF

SEQ ID NO: 60709 - protein, 11 aa, Homo sapiens
  CDR3 for alpha chain variable domain of TCR clone 30355 (TRAV2, TRAJ23)
CAVETRGKLIF

SEQ ID NO: 60710 - protein, 14 aa, Homo sapiens
  CDR3 for beta chain variable domain of TCR clone 30355 (TRBV2, TRBJ2-3)
CASSEGQNTDTQYS

SEQ ID NO: 60711 - protein, 12 aa, Homo sapiens
  CDR3 for alpha chain variable domain of TCR clone 30356 (TRAV12-3, TRAJ40)
CAMSSGTYKYIF

SEQ ID NO: 60712 - protein, 15 aa, Homo sapiens
  CDR3 for beta chain variable domain of TCR clone 30356 (TRBV7-3, TRBJ2-2)
CASSVTGQGTGELFF

SEQ ID NO: 60713 - protein, 14 aa, Homo sapiens
  CDR3 for alpha chain variable domain of TCR clone 30357 (TRAV12-2, TRAJ36)
CAVKISTGANNLFF

SEQ ID NO: 60714 - protein, 14 aa, Homo sapiens
  CDR3 for beta chain variable domain of TCR clone 30357 (TRBV25-1, TRBJ1-2)
CASSDTTGVVGDTF

SEQ ID NO: 60715 - protein, 12 aa, Homo sapiens
  CDR3 for alpha chain variable domain of TCR clone 30358 (TRAV20, TRAJ56)
CAVTGANSKLTF

SEQ ID NO: 60716 - protein, 14 aa, Homo sapiens
  CDR3 for beta chain variable domain of TCR clone 30358 (TRBV20-1, TRBJ2-5)
CSALVPAYQETQYF

SEQ ID NO: 60717 - protein, 16 aa, Homo sapiens
  CDR3 for alpha chain variable domain of TCR clone 30359 (TRAV30, TRAJ24)
CGTEIVDADSWGKFQF

SEQ ID NO: 60718 - protein, 12 aa, Homo sapiens
  CDR3 for beta chain variable domain of TCR clone 30359 (TRBV11-2, TRBJ2-2)
CASSLGGGGLFF

SEQ ID NO: 60719 - protein, 18 aa, Homo sapiens
  CDR3 for alpha chain variable domain of TCR clone 30360 (TRAV13-1, TRAJ52)
CAASKRSAGGTSYGKLTF

SEQ ID NO: 60720 - protein, 14 aa, Homo sapiens
  CDR3 for beta chain variable domain of TCR clone 30360 (TRBV11-2, TRBJ1-2)
CASSLGTANYGYTF

SEQ ID NO: 60721 - protein, 15 aa, Homo sapiens
  CDR3 for alpha chain variable domain of TCR clone 30361 (TRAV21, TRAJ52)
CAVRGGGTSYGKLTF

SEQ ID NO: 60722 - protein, 15 aa, Homo sapiens
  CDR3 for beta chain variable domain of TCR clone 30361 (TRBV18, TRBJ1-5)
CASSPSDRSNQHQHF

SEQ ID NO: 60723 - protein, 11 aa, Homo sapiens
  CDR3 for alpha chain variable domain of TCR clone 30362 (TRAV2, TRAJ13)
CASGGYQKVTF

SEQ ID NO: 60724 - protein, 16 aa, Homo sapiens
  CDR3 for beta chain variable domain of TCR clone 30362 (TRBV2, TRBJ2-1)
CASSVGGSLSYNEQFL

SEQ ID NO: 60725 - protein, 14 aa, Homo sapiens
  CDR3 for alpha chain variable domain of TCR clone 30363 (TRAV29/DV5, TRAJ36)
CAARCKTGANNLFF

SEQ ID NO: 60726 - protein, 14 aa, Homo sapiens
  CDR3 for beta chain variable domain of TCR clone 30363 (TRBV12-5, TRBJ2-5)
CASGSRTHQETQYF

SEQ ID NO: 60727 - protein, 15 aa, Homo sapiens
  CDR3 for alpha chain variable domain of TCR clone 30364 (TRAV21, TRAJ53)
CATLNSGGSNYKLTF

SEQ ID NO: 60728 - protein, 15 aa, Homo sapiens
  CDR3 for beta chain variable domain of TCR clone 30364 (TRBV19, TRBJ1-2)
CASSVGQVLNYGYTF

SEQ ID NO: 60729 - protein, 11 aa, Homo sapiens
  CDR3 for alpha chain variable domain of TCR clone 30365 (TRAV12-1, TRAJ34)
CVVNKGRELIF

SEQ ID NO: 60730 - protein, 12 aa, Homo sapiens
  CDR3 for beta chain variable domain of TCR clone 30365 (TRBV2, TRBJ2-1)
CAYGPPDNEQFF

SEQ ID NO: 60731 - protein, 13 aa, Homo sapiens
  CDR3 for alpha chain variable domain of TCR clone 30366 (TRAV2, TRAJ15)
CAVASQAGTALIF

SEQ ID NO: 60732 - protein, 16 aa, Homo sapiens
  CDR3 for beta chain variable domain of TCR clone 30366 (TRBV5-1, TRBJ1-1)
CASSSGGKSLNTEAFF

SEQ ID NO: 60733 - protein, 18 aa, Homo sapiens
  CDR3 for alpha chain variable domain of TCR clone 30367 (TRAV26-1, TRAJ5)
CIVRVVPPRDTGRRALTF

SEQ ID NO: 60734 - protein, 15 aa, Homo sapiens
  CDR3 for beta chain variable domain of TCR clone 30367 (TRBV7-9, TRBJ2-7)
CASSLPMGQANEQHF

SEQ ID NO: 60735 - protein, 17 aa, Homo sapiens
  CDR3 for alpha chain variable domain of TCR clone 30368 (TRAV26-1, TRAJ37)
CIVRVITVSSNTGKLIF

SEQ ID NO: 60736 - protein, 15 aa, Homo sapiens
  CDR3 for beta chain variable domain of TCR clone 30368 (TRBV20-1, TRBJ2-7)
CSARDRVSGMDEQYF

SEQ ID NO: 60737 - protein, 12 aa, Homo sapiens
  CDR3 for alpha chain variable domain of TCR clone 30369 (TRAV6, TRAJ3)
CSSYSSASKIIF

SEQ ID NO: 60738 - protein, 14 aa, Homo sapiens
  CDR3 for beta chain variable domain of TCR clone 30369 (TRBV12-4, TRBJ1-2)
CASSPLGTVGGYTF

SEQ ID NO: 60739 - protein, 14 aa, Homo sapiens
  CDR3 for alpha chain variable domain of TCR clone 30370 (TRAV8-4, TRAJ13)
CAVTLSGGYQKVTF

SEQ ID NO: 60740 - protein, 17 aa, Homo sapiens
  CDR3 for beta chain variable domain of TCR clone 30370 (TRBV13, TRBJ2-3)
CASSLSRVAGGRNTQYF

SEQ ID NO: 60741 - protein, 12 aa, Homo sapiens
  CDR3 for alpha chain variable domain of TCR clone 30371 (TRAV12-1, TRAJ40)
CVFYSGTYKYIF

SEQ ID NO: 60742 - protein, 12 aa, Homo sapiens
  CDR3 for beta chain variable domain of TCR clone 30371 (TRBV11-2, TRBJ2-2)
CASSLGGGELFF

SEQ ID NO: 60743 - protein, 16 aa, Homo sapiens
  CDR3 for alpha chain variable domain of TCR clone 30372 (TRAV20, TRAJ22)
CAVQASSSGSARQLTS

SEQ ID NO: 60744 - protein, 13 aa, Homo sapiens
  CDR3 for beta chain variable domain of TCR clone 30372 (TRBV7-2, TRBJ2-5)
CASSQTSVETQYF

SEQ ID NO: 60745 - protein, 15 aa, Homo sapiens
  CDR3 for alpha chain variable domain of TCR clone 30373 (TRAV13-2, TRAJ45)
FVQRVTGGGADGLTF

SEQ ID NO: 60746 - protein, 17 aa, Homo sapiens
  CDR3 for beta chain variable domain of TCR clone 30373 (TRBV19, TRBJ1-1)
CASSIAGRGLMNTEAFF

SEQ ID NO: 60747 - protein, 12 aa, Homo sapiens
  CDR3 for alpha chain variable domain of TCR clone 30374 (TRAV16, TRAJ26)
CASRDGGQNFVF

SEQ ID NO: 60748 - protein, 13 aa, Homo sapiens
  CDR3 for beta chain variable domain of TCR clone 30374 (TRBV25-1, TRBJ1-1)
CASSDRGRAEAFF

SEQ ID NO: 60749 - protein, 12 aa, Homo sapiens
  CDR3 for alpha chain variable domain of TCR clone 30375 (TRAV12-3, TRAJ17)
CAMTLTGNKLTF

SEQ ID NO: 60750 - protein, 13 aa, Homo sapiens
  CDR3 for beta chain variable domain of TCR clone 30375 (TRBV7-9, TRBJ1-2)
CATSLKQNYGYTF

SEQ ID NO: 60751 - protein, 12 aa, Homo sapiens
  CDR3 for alpha chain variable domain of TCR clone 30376 (TRAV1-1, TRAJ9)
CAVDTGGFKTTF

SEQ ID NO: 60752 - protein, 15 aa, Homo sapiens
  CDR3 for beta chain variable domain of TCR clone 30376 (TRBV6-3, TRBJ2-7)
CASSSPGTVFYEQYF

SEQ ID NO: 60753 - protein, 15 aa, Homo sapiens
  CDR3 for alpha chain variable domain of TCR clone 30377 (TRAV3, TRAJ13)
CAVRVYSGGYRKVTF

SEQ ID NO: 60754 - protein, 15 aa, Homo sapiens
  CDR3 for beta chain variable domain of TCR clone 30377 (TRBV5-7, TRBJ1-2)
CASSLGVAANYGYTF

SEQ ID NO: 60755 - protein, 17 aa, Homo sapiens
  CDR3 for alpha chain variable domain of TCR clone 30378 (TRAV8-1, TRAJ43)
CAVTNDMRLGAGTRLTV

SEQ ID NO: 60756 - protein, 17 aa, Homo sapiens
  CDR3 for beta chain variable domain of TCR clone 30378 (TRBV5-4, TRBJ2-1)
CASSSAGGRGPYNEQFF

SEQ ID NO: 60757 - protein, 12 aa, Homo sapiens
  CDR3 for alpha chain variable domain of TCR clone 30379 (TRAV12-2, TRAJ45)
CASGGGADGLAF

SEQ ID NO: 60758 - protein, 16 aa, Homo sapiens
  CDR3 for beta chain variable domain of TCR clone 30379 (TRBV19, TRBJ2-3)
CASSPGLLASTDTQYF

SEQ ID NO: 60759 - protein, 14 aa, Homo sapiens
  CDR3 for alpha chain variable domain of TCR clone 30380 (TRAV20, TRAJ22)
CAVTLGGSARQLTF

SEQ ID NO: 60760 - protein, 15 aa, Homo sapiens
  CDR3 for beta chain variable domain of TCR clone 30380 (TRBV7-2, TRBJ1-1)
CASSFAGDRDTEAFF

SEQ ID NO: 60761 - protein, 13 aa, Homo sapiens
  CDR3 for alpha chain variable domain of TCR clone 30381 (TRAV13-1, TRAJ11)
CAAVLAGHSTLTF

SEQ ID NO: 60762 - protein, 17 aa, Homo sapiens
  CDR3 for beta chain variable domain of TCR clone 30381 (TRBV25-1, TRBJ2-7)
CASSDARVVFSSYEQYF

SEQ ID NO: 60763 - protein, 12 aa, Homo sapiens
  CDR3 for alpha chain variable domain of TCR clone 30382 (TRAV8-3, TRAJ20)
CAVGANDYKLSF

SEQ ID NO: 60764 - protein, 14 aa, Homo sapiens
  CDR3 for beta chain variable domain of TCR clone 30382 (TRBV4-1, TRBJ2-2)
CASSQAVNTGELFF

SEQ ID NO: 60765 - protein, 12 aa, Homo sapiens
  CDR3 for alpha chain variable domain of TCR clone 30383 (TRAV17, TRAJ57)
CATDGGSEKLVF

SEQ ID NO: 60766 - protein, 13 aa, Homo sapiens
  CDR3 for beta chain variable domain of TCR clone 30383 (TRBV7-9, TRBJ2-7)
RASSFAGAYEQYF

SEQ ID NO: 60767 - protein, 10 aa, Homo sapiens
  CDR3 for alpha chain variable domain of TCR clone 30384 (TRAV21, TRAJ49)
CAVNGNQFYF

SEQ ID NO: 60768 - protein, 14 aa, Homo sapiens
  CDR3 for beta chain variable domain of TCR clone 30384 (TRBV18, TRBJ1-2)
CASSPSGRDYGCTF

SEQ ID NO: 60769 - protein, 15 aa, Homo sapiens
  CDR3 for alpha chain variable domain of TCR clone 30385 (TRAV8-3, TRAJ27)
CAVGLSKTNAGKSTF

SEQ ID NO: 60770 - protein, 15 aa, Homo sapiens
  CDR3 for beta chain variable domain of TCR clone 30385 (TRBV7-2, TRBJ2-1)
CASSSGLAGGNEQFF

SEQ ID NO: 60771 - protein, 17 aa, Homo sapiens
  CDR3 for alpha chain variable domain of TCR clone 30386 (TRAV27, TRAJ36)
SLVIQASTPAGANNLFF

SEQ ID NO: 60772 - protein, 13 aa, Homo sapiens
  CDR3 for beta chain variable domain of TCR clone 30386 (TRBV7-9, TRBJ2-3)
CASSPGSTDTQYF

SEQ ID NO: 60773 - protein, 15 aa, Homo sapiens
  CDR3 for alpha chain variable domain of TCR clone 30387 (TRAV12-2, TRAJ53)
CAVNGGGGSNYKLTF

SEQ ID NO: 60774 - protein, 17 aa, Homo sapiens
  CDR3 for beta chain variable domain of TCR clone 30387 (TRBV7-3, TRBJ2-3)
RASSLMKRMRGVDTQYF

SEQ ID NO: 60775 - protein, 15 aa, Homo sapiens
  CDR3 for alpha chain variable domain of TCR clone 30388 (TRAV3, TRAJ3)
FAVRDRDSSASKIIF

SEQ ID NO: 60776 - protein, 18 aa, Homo sapiens
  CDR3 for beta chain variable domain of TCR clone 30388 (TRBV25-1, TRBJ1-2)
CASSGLQNGQGLIFGYTF

SEQ ID NO: 60777 - protein, 14 aa, Homo sapiens
  CDR3 for alpha chain variable domain of TCR clone 30389 (TRAV13-1, TRAJ35)
CAASQGGFGNVLHC

SEQ ID NO: 60778 - protein, 13 aa, Homo sapiens
  CDR3 for beta chain variable domain of TCR clone 30389 (TRBV7-3, TRBJ1-1)
CASSQDWGAEAFF

SEQ ID NO: 60779 - protein, 13 aa, Homo sapiens
  CDR3 for alpha chain variable domain of TCR clone 30390 (TRAV8-6, TRAJ49)
CAVITNAGNQFYF

SEQ ID NO: 60780 - protein, 14 aa, Homo sapiens
  CDR3 for beta chain variable domain of TCR clone 30390 (TRBV19, TRBJ2-1)
CASPTFVLSGEQFF

SEQ ID NO: 60781 - protein, 14 aa, Homo sapiens
  CDR3 for alpha chain variable domain of TCR clone 30391 (TRAV27, TRAJ15)
CTGFDNQAGTALIF

SEQ ID NO: 60782 - protein, 11 aa, Homo sapiens
  CDR3 for beta chain variable domain of TCR clone 30391 (TRBV29-1, TRBJ1-1)
CSVEVGTRTFF

SEQ ID NO: 60783 - protein, 16 aa, Homo sapiens
  CDR3 for alpha chain variable domain of TCR clone 30392 (TRAV27, TRAJ13)
CAGAKSDSGGYQNVTF

SEQ ID NO: 60784 - protein, 15 aa, Homo sapiens
  CDR3 for beta chain variable domain of TCR clone 30392 (TRBV29-1, TRBJ2-1)
CSVGRHALFYNEQFF

SEQ ID NO: 60785 - protein, 15 aa, Homo sapiens
  CDR3 for alpha chain variable domain of TCR clone 30393 (TRAV12-1, TRAJ44)
CVVLVNTGTASKLTF

SEQ ID NO: 60786 - protein, 17 aa, Homo sapiens
  CDR3 for beta chain variable domain of TCR clone 30393 (TRBV7-8, TRBJ2-6)
CASSAGTGGAGANVLTF

SEQ ID NO: 60787 - protein, 16 aa, Homo sapiens
  CDR3 for alpha chain variable domain of TCR clone 30394 (TRAV16, TRAJ21)
CACGWATTSTNFTLDL

SEQ ID NO: 60788 - protein, 15 aa, Homo sapiens
  CDR3 for beta chain variable domain of TCR clone 30394 (TRBV19, TRBJ2-1)
CASSIQATSCNEQFF

SEQ ID NO: 60789 - protein, 14 aa, Homo sapiens
  CDR3 for alpha chain variable domain of TCR clone 30395 (TRAV12-2, TRAJ11)
CAVEGGSGYSTLTF

SEQ ID NO: 60790 - protein, 16 aa, Homo sapiens
  CDR3 for beta chain variable domain of TCR clone 30395 (TRBV6-1, TRBJ1-2)
CASSGAWQGRSHGYAF

SEQ ID NO: 60791 - protein, 13 aa, Homo sapiens
  CDR3 for alpha chain variable domain of TCR clone 30396 (TRAV20, TRAJ37)
CARCSSNTGKLIF

SEQ ID NO: 60792 - protein, 14 aa, Homo sapiens
  CDR3 for beta chain variable domain of TCR clone 30396 (TRBV20-1, TRBJ2-5)
CSARDGRAGETQYF

SEQ ID NO: 60793 - protein, 12 aa, Homo sapiens
  CDR3 for alpha chain variable domain of TCR clone 30397 (TRAV38-2/DV8, TRAJ48)
RALLSGNEKLTF

SEQ ID NO: 60794 - protein, 15 aa, Homo sapiens
  CDR3 for beta chain variable domain of TCR clone 30397 (TRBV6-1, TRBJ2-1)
CASSELRGQYNEQFF

SEQ ID NO: 60795 - protein, 12 aa, Homo sapiens
  CDR3 for alpha chain variable domain of TCR clone 30398 (TRAV13-1, TRAJ9)
CASHTGGFKTIF

SEQ ID NO: 60796 - protein, 14 aa, Homo sapiens
  CDR3 for beta chain variable domain of TCR clone 30398 (TRBV6-1, TRBJ1-3)
CASVQGGGGNTIYF

SEQ ID NO: 60797 - protein, 13 aa, Homo sapiens
  CDR3 for alpha chain variable domain of TCR clone 30399 (TRAV20, TRAJ34)
CAVSSYNTDKLIF

SEQ ID NO: 60798 - protein, 13 aa, Homo sapiens
  CDR3 for beta chain variable domain of TCR clone 30399 (TRBV7-9, TRBJ1-2)
CASSLKQNYGYSF

SEQ ID NO: 60799 - protein, 14 aa, Homo sapiens
  CDR3 for alpha chain variable domain of TCR clone 30400 (TRAV12-3, TRAJ9)
CAMSPTTGGFKTIF

SEQ ID NO: 60800 - protein, 12 aa, Homo sapiens
  CDR3 for beta chain variable domain of TCR clone 30400 (TRBV19, TRBJ1-5)
CASSIAQQPQHF

SEQ ID NO: 60801 - protein, 14 aa, Homo sapiens
  CDR3 for alpha chain variable domain of TCR clone 30401 (TRAV1-2, TRAJ8)
CAVREDTGFQKLVF

SEQ ID NO: 60802 - protein, 16 aa, Homo sapiens
  CDR3 for beta chain variable domain of TCR clone 30401 (TRBV7-9, TRBJ2-1)
CASSDVAGGSYNEQSF

SEQ ID NO: 60803 - protein, 14 aa, Homo sapiens
  CDR3 for alpha chain variable domain of TCR clone 30402 (TRAV21, TRAJ45)
CAVSSGGGADGLTF

SEQ ID NO: 60804 - protein, 15 aa, Homo sapiens
  CDR3 for beta chain variable domain of TCR clone 30402 (TRBV6-1, TRBJ2-4)
CASSEAVWTINIQHF

SEQ ID NO: 60805 - protein, 15 aa, Homo sapiens
  CDR3 for alpha chain variable domain of TCR clone 30403 (TRAV3, TRAJ22)
CAVRDRGGSARQLTF

SEQ ID NO: 60806 - protein, 14 aa, Homo sapiens
  CDR3 for beta chain variable domain of TCR clone 30403 (TRBV7-2, TRBJ2-5)
CASSFTQGQETQYF

SEQ ID NO: 60807 - protein, 17 aa, Homo sapiens
  CDR3 for alpha chain variable domain of TCR clone 30404 (TRAV3, TRAJ38)
CAVRDCLNAGNNRKLIC

SEQ ID NO: 60808 - protein, 13 aa, Homo sapiens
  CDR3 for beta chain variable domain of TCR clone 30404 (TRBV23-1, TRBJ1-4)
CASRGKFNEKLFF

SEQ ID NO: 60809 - protein, 17 aa, Homo sapiens
  CDR3 for alpha chain variable domain of TCR clone 30405 (TRAV3, TRAJ42)
CAVRDRDYGGSQGNPIF

SEQ ID NO: 60810 - protein, 14 aa, Homo sapiens
  CDR3 for beta chain variable domain of TCR clone 30405 (TRBV25-1, TRBJ1-1)
CASTHLGGNTEAFF

SEQ ID NO: 60811 - protein, 13 aa, Homo sapiens
  CDR3 for alpha chain variable domain of TCR clone 30406 (TRAV8-3, TRAJ28)
CAVGAIGSYQLTF

SEQ ID NO: 60812 - protein, 15 aa, Homo sapiens
  CDR3 for beta chain variable domain of TCR clone 30406 (TRBV7-9, TRBJ1-5)
CASSQGHQPNQPQHF

SEQ ID NO: 60813 - protein, 17 aa, Homo sapiens
  CDR3 for alpha chain variable domain of TCR clone 30407 (TRAV3, TRAJ6)
CAVRDGPRAGGSYIPTF

SEQ ID NO: 60814 - protein, 15 aa, Homo sapiens
  CDR3 for beta chain variable domain of TCR clone 30407 (TRBV6-6, TRBJ2-2)
CASSRTSGNTGELFF

SEQ ID NO: 60815 - protein, 15 aa, Homo sapiens
  CDR3 for alpha chain variable domain of TCR clone 30408 (TRAV3, TRAJ22)
CAVRDRGGSARQLTF

SEQ ID NO: 60816 - protein, 16 aa, Homo sapiens
  CDR3 for beta chain variable domain of TCR clone 30408 (TRBV13, TRBJ2-2)
CASSPRTGEHTGELFF

SEQ ID NO: 60817 - protein, 13 aa, Homo sapiens
  CDR3 for alpha chain variable domain of TCR clone 30409 (TRAV1-2, TRAJ9)
CAALNTGGFKTIF

SEQ ID NO: 60818 - protein, 13 aa, Homo sapiens
  CDR3 for beta chain variable domain of TCR clone 30409 (TRBV19, TRBJ1-2)
CAISVPGQDGYTF

SEQ ID NO: 60819 - protein, 15 aa, Homo sapiens
  CDR3 for alpha chain variable domain of TCR clone 30410 (TRAV21, TRAJ53)
CATLNSGGSNYKLTF

SEQ ID NO: 60820 - protein, 16 aa, Homo sapiens
  CDR3 for beta chain variable domain of TCR clone 30410 (TRBV19, TRBJ2-1)
CASSKAGPSSYNEQFF

SEQ ID NO: 60821 - protein, 14 aa, Homo sapiens
  CDR3 for alpha chain variable domain of TCR clone 30411 (TRAV12-2, TRAJ13)
CAVKKTGGYQKVTF

SEQ ID NO: 60822 - protein, 14 aa, Homo sapiens
  CDR3 for beta chain variable domain of TCR clone 30411 (TRBV11-2, TRBJ2-7)
CASSSTGEGYEQYF

SEQ ID NO: 60823 - protein, 14 aa, Homo sapiens
  CDR3 for alpha chain variable domain of TCR clone 30412 (TRAV1-2, TRAJ8)
CAVREDTGFQKLVF

SEQ ID NO: 60824 - protein, 15 aa, Homo sapiens
  CDR3 for beta chain variable domain of TCR clone 30412 (TRBV20-1, TRBJ2-3)
CSAEPLAGHGDTQYF

SEQ ID NO: 60825 - protein, 14 aa, Homo sapiens
  CDR3 for alpha chain variable domain of TCR clone 30413 (TRAV17, TRAJ6)
CATDTSGGSYIPTF

SEQ ID NO: 60826 - protein, 19 aa, Homo sapiens
  CDR3 for beta chain variable domain of TCR clone 30413 (TRBV4-3, TRBJ2-7)
CASSQEFIGWQVTPYEQYF

SEQ ID NO: 60827 - protein, 13 aa, Homo sapiens
  CDR3 for alpha chain variable domain of TCR clone 30414 (TRAV9-2, TRAJ53)
CALSGGSNYKLTF

SEQ ID NO: 60828 - protein, 18 aa, Homo sapiens
  CDR3 for beta chain variable domain of TCR clone 30414 (TRBV7-9, TRBJ2-7)
CASSLTTSGSRTWYEQYF

SEQ ID NO: 60829 - protein, 14 aa, Homo sapiens
  CDR3 for alpha chain variable domain of TCR clone 30415 (TRAV12-2, TRAJ13)
CAVKKTGGYQKVTF

SEQ ID NO: 60830 - protein, 16 aa, Homo sapiens
  CDR3 for beta chain variable domain of TCR clone 30415 (TRBV7-6, TRBJ2-6)
CASSLPGLSGANVLTF

SEQ ID NO: 60831 - protein, 14 aa, Homo sapiens
  CDR3 for alpha chain variable domain of TCR clone 30416 (TRAV17, TRAJ12)
CATDEKDRSYKLIF

SEQ ID NO: 60832 - protein, 16 aa, Homo sapiens
  CDR3 for beta chain variable domain of TCR clone 30416 (TRBV11-2, TRBJ2-1)
CASSPRLAGVYNEQFF

SEQ ID NO: 60833 - protein, 15 aa, Homo sapiens
  CDR3 for alpha chain variable domain of TCR clone 30417 (TRAV3, TRAJ33)
CPYERLLLWNYQLIW

SEQ ID NO: 60834 - protein, 15 aa, Homo sapiens
  CDR3 for beta chain variable domain of TCR clone 30417 (TRBV20-1, TRBJ1-1)
CSASRGVTGNTEAFF

SEQ ID NO: 60835 - protein, 18 aa, Homo sapiens
  CDR3 for alpha chain variable domain of TCR clone 30418 (TRAV29/DV5, TRAJ52)
CAAGFRGAGGTRYGKLTF

SEQ ID NO: 60836 - protein, 16 aa, Homo sapiens
  CDR3 for beta chain variable domain of TCR clone 30418 (TRBV7-3, TRBJ2-2)
CASSLKRGTLSGELFF

SEQ ID NO: 60837 - protein, 18 aa, Homo sapiens
  CDR3 for alpha chain variable domain of TCR clone 30419 (TRAV1-2, TRAJ18)
CAVRDMGDRGSTLGRPYF

SEQ ID NO: 60838 - protein, 16 aa, Homo sapiens
  CDR3 for beta chain variable domain of TCR clone 30419 (TRBV29-1, TRBJ1-2)
CSVEANRDIANYGYTF

SEQ ID NO: 60839 - protein, 13 aa, Homo sapiens
  CDR3 for alpha chain variable domain of TCR clone 30420 (TRAV27, TRAJ45)
CRSSGGGADGLTF

SEQ ID NO: 60840 - protein, 17 aa, Homo sapiens
  CDR3 for beta chain variable domain of TCR clone 30420 (TRBV11-2, TRBJ2-1)
CASSFYPPGVEYNEQFF

SEQ ID NO: 60841 - protein, 15 aa, Homo sapiens
  CDR3 for alpha chain variable domain of TCR clone 30421 (TRAV25, TRAJ52)
CAGTSGGTSYGKLTF

SEQ ID NO: 60842 - protein, 16 aa, Homo sapiens
  CDR3 for beta chain variable domain of TCR clone 30421 (TRBV15, TRBJ1-2)
CATSRGPRKGGGGYTF

SEQ ID NO: 60843 - protein, 13 aa, Homo sapiens
  CDR3 for alpha chain variable domain of TCR clone 30422 (TRAV3, TRAJ21)
CAVREPDFNKFYF

SEQ ID NO: 60844 - protein, 16 aa, Homo sapiens
  CDR3 for beta chain variable domain of TCR clone 30422 (TRBV5-5, TRBJ2-2)
CASSGRREGATGELFF

SEQ ID NO: 60845 - protein, 12 aa, Homo sapiens
  CDR3 for alpha chain variable domain of TCR clone 30423 (TRAV13-1, TRAJ21)
CAAKEGFNKFYF

SEQ ID NO: 60846 - protein, 15 aa, Homo sapiens
  CDR3 for beta chain variable domain of TCR clone 30423 (TRBV2, TRBJ2-1)
CASSELAGGYNEQFF

SEQ ID NO: 60847 - protein, 11 aa, Homo sapiens
  CDR3 for alpha chain variable domain of TCR clone 30424 (TRAV1-2, TRAJ20)
CAVANDYKLSF

SEQ ID NO: 60848 - protein, 18 aa, Homo sapiens
  CDR3 for beta chain variable domain of TCR clone 30424 (TRBV20-1, TRBJ2-6)
CSVETTPTHGSGANVLTF

SEQ ID NO: 60849 - protein, 18 aa, Homo sapiens
  CDR3 for alpha chain variable domain of TCR clone 30425 (TRAV26-2, TRAJ45)
CILRLWGYSGGGAGGLTF

SEQ ID NO: 60850 - protein, 17 aa, Homo sapiens
  CDR3 for beta chain variable domain of TCR clone 30425 (TRBV28, TRBJ2-3)
CASSPTPAGGRVDTQYF

SEQ ID NO: 60851 - protein, 14 aa, Homo sapiens
  CDR3 for alpha chain variable domain of TCR clone 30426 (TRAV1-2, TRAJ16)
CAVNRFSDGQKLLF

SEQ ID NO: 60852 - protein, 17 aa, Homo sapiens
  CDR3 for beta chain variable domain of TCR clone 30426 (TRBV10-3, TRBJ2-4)
CTSVPSVNKGSKNMQYF

SEQ ID NO: 60853 - protein, 14 aa, Homo sapiens
  CDR3 for alpha chain variable domain of TCR clone 30427 (TRAV12-2, TRAJ9)
CAVNMEGGGFKTIF

SEQ ID NO: 60854 - protein, 14 aa, Homo sapiens
  CDR3 for beta chain variable domain of TCR clone 30427 (TRBV27, TRBJ2-3)
CASREGGRTDTQYF

SEQ ID NO: 60855 - protein, 16 aa, Homo sapiens
  CDR3 for alpha chain variable domain of TCR clone 30428 (TRAV23/DV6, TRAJ9)
CAASIGGNTGGFKTIF

SEQ ID NO: 60856 - protein, 14 aa, Homo sapiens
  CDR3 for beta chain variable domain of TCR clone 30428 (TRBV9, TRBJ2-7)
CASSVGVGSYGQYF

SEQ ID NO: 60857 - protein, 14 aa, Homo sapiens
  CDR3 for alpha chain variable domain of TCR clone 30429 (TRAV13-1, TRAJ44)
CAAKATGTANKLTF

SEQ ID NO: 60858 - protein, 17 aa, Homo sapiens
  CDR3 for beta chain variable domain of TCR clone 30429 (TRBV7-3, TRBJ2-3)
CASSLMKRMRGADTQYF

SEQ ID NO: 60859 - protein, 14 aa, Homo sapiens
  CDR3 for alpha chain variable domain of TCR clone 30430 (TRAV12-3, TRAJ9)
CAMSVETGGFKTIF

SEQ ID NO: 60860 - protein, 14 aa, Homo sapiens
  CDR3 for beta chain variable domain of TCR clone 30430 (TRBV7-2, TRBJ2-7)
CTSRSQGAAYEQYF

SEQ ID NO: 60861 - protein, 16 aa, Homo sapiens
  CDR3 for alpha chain variable domain of TCR clone 30431 (TRAV21, TRAJ17)
CAVRPGEEAAGNKRTF

SEQ ID NO: 60862 - protein, 16 aa, Homo sapiens
  CDR3 for beta chain variable domain of TCR clone 30431 (TRBV2, TRBJ2-7)
CASSEPWTGPSYEQYF

SEQ ID NO: 60863 - protein, 13 aa, Homo sapiens
  CDR3 for alpha chain variable domain of TCR clone 30432 (TRAV8-3, TRAJ44)
CAVVPGTASKLTF

SEQ ID NO: 60864 - protein, 14 aa, Homo sapiens
  CDR3 for beta chain variable domain of TCR clone 30432 (TRBV11-2, TRBJ2-3)
CASSRLASTDTQYF

SEQ ID NO: 60865 - protein, 15 aa, Homo sapiens
  CDR3 for alpha chain variable domain of TCR clone 30433 (TRAV8-3, TRAJ45)
CASSYSGGGADGLTF

SEQ ID NO: 60866 - protein, 17 aa, Homo sapiens
  CDR3 for beta chain variable domain of TCR clone 30433 (TRBV7-8, TRBJ1-2)
CASSLRPLQGQLYGYTF

SEQ ID NO: 60867 - protein, 19 aa, Homo sapiens
  CDR3 for alpha chain variable domain of TCR clone 30434 (TRAV38-1, TRAJ53)
CAFMKHRLESGGSNYKLTF

SEQ ID NO: 60868 - protein, 13 aa, Homo sapiens
  CDR3 for beta chain variable domain of TCR clone 30434 (TRBV19, TRBJ2-7)
CASSPRQSYEQYF

SEQ ID NO: 60869 - protein, 16 aa, Homo sapiens
  CDR3 for alpha chain variable domain of TCR clone 30435 (TRAV27, TRAJ13)
CAGAKSDSGGYQKDTF

SEQ ID NO: 60870 - protein, 15 aa, Homo sapiens
  CDR3 for beta chain variable domain of TCR clone 30435 (TRBV29-1, TRBJ2-1)
CSVGRHALFYNEQFF

SEQ ID NO: 60871 - protein, 19 aa, Homo sapiens
  CDR3 for alpha chain variable domain of TCR clone 30436 (TRAV1-2, TRAJ26)
CLLPLCCERPDNYGQNFVF

SEQ ID NO: 60872 - protein, 16 aa, Homo sapiens
  CDR3 for beta chain variable domain of TCR clone 30436 (TRBV6-3, TRBJ2-2)
CASSSPDRGDTGELFF

SEQ ID NO: 60873 - protein, 18 aa, Homo sapiens
  CDR3 for alpha chain variable domain of TCR clone 30437 (TRAV26-1, TRAJ23)
CIVRVGLEVWNQGGKLIF

SEQ ID NO: 60874 - protein, 16 aa, Homo sapiens
  CDR3 for beta chain variable domain of TCR clone 30437 (TRBV12-4, TRBJ2-5)
CASSFFVRGRQGTQYF

SEQ ID NO: 60875 - protein, 16 aa, Homo sapiens
  CDR3 for alpha chain variable domain of TCR clone 30438 (TRAV26-1, TRAJ23)
CIVRVYPYNQGGKLIF

SEQ ID NO: 60876 - protein, 15 aa, Homo sapiens
  CDR3 for beta chain variable domain of TCR clone 30438 (TRBV5-7, TRBJ2-7)
CASSPYFEGSYEQYF

SEQ ID NO: 60877 - protein, 16 aa, Homo sapiens
  CDR3 for alpha chain variable domain of TCR clone 30439 (TRAV16, TRAJ4)
CALSRMFSGGYNKLIF

SEQ ID NO: 60878 - protein, 16 aa, Homo sapiens
  CDR3 for beta chain variable domain of TCR clone 30439 (TRBV24-1, TRBJ2-3)
CDTSDPGTGATDTQYF

SEQ ID NO: 60879 - protein, 10 aa, Homo sapiens
  CDR3 for alpha chain variable domain of TCR clone 30440 (TRAV12-2, TRAJ52)
RSTSYGKLTF

SEQ ID NO: 60880 - protein, 13 aa, Homo sapiens
  CDR3 for beta chain variable domain of TCR clone 30440 (TRBV7-3, TRBJ1-1)
CASSQDWGAEAFF

SEQ ID NO: 60881 - protein, 15 aa, Homo sapiens
  CDR3 for alpha chain variable domain of TCR clone 30441 (TRAV3, TRAJ22)
CAVRDRGGSARKLTF

SEQ ID NO: 60882 - protein, 16 aa, Homo sapiens
  CDR3 for beta chain variable domain of TCR clone 30441 (TRBV5-4, TRBJ2-3)
CASQQPGAGGADTQYF

SEQ ID NO: 60883 - protein, 12 aa, Homo sapiens
  CDR3 for alpha chain variable domain of TCR clone 30442 (TRAV1-1, TRAJ9)
CAVDTVGFKTIF

SEQ ID NO: 60884 - protein, 14 aa, Homo sapiens
  CDR3 for beta chain variable domain of TCR clone 30442 (TRBV7-8, TRBJ2-5)
CASSATGGQETQYF

SEQ ID NO: 60885 - protein, 14 aa, Homo sapiens
  CDR3 for alpha chain variable domain of TCR clone 30443 (TRAV13-1, TRAJ9)
CAASALTGGFETIF

SEQ ID NO: 60886 - protein, 13 aa, Homo sapiens
  CDR3 for beta chain variable domain of TCR clone 30443 (TRBV20-1, TRBJ1-1)
CSAGTVGNAEAFF

SEQ ID NO: 60887 - protein, 17 aa, Homo sapiens
  CDR3 for alpha chain variable domain of TCR clone 30444 (TRAV3, TRAJ6)
CAVRDGSRAGGSYIPTF

SEQ ID NO: 60888 - protein, 15 aa, Homo sapiens
  CDR3 for beta chain variable domain of TCR clone 30444 (TRBV20-1, TRBJ1-1)
CSASWDRFLNTEAFF

SEQ ID NO: 60889 - protein, 13 aa, Homo sapiens
  CDR3 for alpha chain variable domain of TCR clone 30445 (TRAV12-3, TRAJ9)
CAVRNTGGFKTIF

SEQ ID NO: 60890 - protein, 14 aa, Homo sapiens
  CDR3 for beta chain variable domain of TCR clone 30445 (TRBV11-2, TRBJ2-7)
CASSSTGEGYEQYF

SEQ ID NO: 60891 - protein, 11 aa, Homo sapiens
  CDR3 for alpha chain variable domain of TCR clone 30446 (TRAV1-1, TRAJ23)
CAVRQGGKLIF

SEQ ID NO: 60892 - protein, 14 aa, Homo sapiens
  CDR3 for beta chain variable domain of TCR clone 30446 (TRBV19, TRBJ2-1)
CASPTFVLSGERFF

SEQ ID NO: 60893 - protein, 14 aa, Homo sapiens
  CDR3 for alpha chain variable domain of TCR clone 30447 (TRAV13-1, TRAJ44)
CAAKATGTAGKLTF

SEQ ID NO: 60894 - protein, 17 aa, Homo sapiens
  CDR3 for beta chain variable domain of TCR clone 30447 (TRBV7-3, TRBJ2-3)
RASSLMKRMRGADTQYF

SEQ ID NO: 60895 - protein, 17 aa, Homo sapiens
  CDR3 for alpha chain variable domain of TCR clone 30448 (TRAV26-1, TRAJ58)
CIVRVGAEETSGSRLTF

SEQ ID NO: 60896 - protein, 13 aa, Homo sapiens
  CDR3 for beta chain variable domain of TCR clone 30448 (TRBV12-5, TRBJ1-2)
CASGVRTGNGCTF

SEQ ID NO: 60897 - protein, 12 aa, Homo sapiens
  CDR3 for alpha chain variable domain of TCR clone 30449 (TRAV12-3, TRAJ17)
CAMTLTGNKLTF

SEQ ID NO: 60898 - protein, 13 aa, Homo sapiens
  CDR3 for beta chain variable domain of TCR clone 30449 (TRBV20-1, TRBJ1-6)
CSAPLGVGSPLHF

SEQ ID NO: 60899 - protein, 15 aa, Homo sapiens
  CDR3 for alpha chain variable domain of TCR clone 30450 (TRAV26-1, TRAJ29)
CSVRVEGSGNTPLVF

SEQ ID NO: 60900 - protein, 14 aa, Homo sapiens
  CDR3 for beta chain variable domain of TCR clone 30450 (TRBV18, TRBJ2-5)
CASSPGVSQETQYF

SEQ ID NO: 60901 - protein, 18 aa, Homo sapiens
  CDR3 for alpha chain variable domain of TCR clone 30451 (TRAV13-1, TRAJ52)
CAAKNPNAGGTSYGKLTF

SEQ ID NO: 60902 - protein, 15 aa, Homo sapiens
  CDR3 for beta chain variable domain of TCR clone 30451 (TRBV6-1, TRBJ2-3)
CASGERGGITDTQYF

SEQ ID NO: 60903 - protein, 22 aa, Homo sapiens
  CDR3 for alpha chain variable domain of TCR clone 30452 (TRAV8-3, TRAJ9)
CAVVYNTGGFKTILEQEQDYLL

SEQ ID NO: 60904 - protein, 14 aa, Homo sapiens
  CDR3 for beta chain variable domain of TCR clone 30452 (TRBV7-3, TRBJ2-2)
CASSSGGYTGELFF

SEQ ID NO: 60905 - protein, 12 aa, Homo sapiens
  CDR3 for alpha chain variable domain of TCR clone 30453 (TRAV8-3, TRAJ34)
WASGYSTDKLIF

SEQ ID NO: 60906 - protein, 13 aa, Homo sapiens
  CDR3 for beta chain variable domain of TCR clone 30453 (TRBV6-4, TRBJ2-3)
CASSVSWADTQYF

SEQ ID NO: 60907 - protein, 13 aa, Homo sapiens
  CDR3 for alpha chain variable domain of TCR clone 30454 (TRAV12-3, TRAJ33)
CAMSVNSNYQLIW

SEQ ID NO: 60908 - protein, 14 aa, Homo sapiens
  CDR3 for beta chain variable domain of TCR clone 30454 (TRBV7-2, TRBJ1-1)
CASSFLTGTTEAFF

SEQ ID NO: 60909 - protein, 16 aa, Homo sapiens
  CDR3 for alpha chain variable domain of TCR clone 30455 (TRAV3, TRAJ37)
CAVRGKGSGNTGRLIF

SEQ ID NO: 60910 - protein, 16 aa, Homo sapiens
  CDR3 for beta chain variable domain of TCR clone 30455 (TRBV12-4, TRBJ1-5)
CASSRPVGGSNQPQHF

SEQ ID NO: 60911 - protein, 11 aa, Homo sapiens
  CDR3 for alpha chain variable domain of TCR clone 30456 (TRAV3, TRAJ21)
CAVGNFNKFYF

SEQ ID NO: 60912 - protein, 14 aa, Homo sapiens
  CDR3 for beta chain variable domain of TCR clone 30456 (TRBV29-1, TRBJ2-2)
CSGRGGGNTGELFF

SEQ ID NO: 60913 - protein, 12 aa, Homo sapiens
  CDR3 for alpha chain variable domain of TCR clone 30457 (TRAV17, TRAJ39)
CATCAAGNMLTF

SEQ ID NO: 60914 - protein, 14 aa, Homo sapiens
  CDR3 for beta chain variable domain of TCR clone 30457 (TRBV7-9, TRBJ1-2)
CASSRQGANYGYTF

SEQ ID NO: 60915 - protein, 12 aa, Homo sapiens
  CDR3 for alpha chain variable domain of TCR clone 30458 (TRAV16, TRAJ26)
CALRSYGQNFVF

SEQ ID NO: 60916 - protein, 13 aa, Homo sapiens
  CDR3 for beta chain variable domain of TCR clone 30458 (TRBV19, TRBJ1-1)
CASTRRGDTEAFF

SEQ ID NO: 60917 - protein, 12 aa, Homo sapiens
  CDR3 for alpha chain variable domain of TCR clone 30459 (TRAV27, TRAJ35)
CAGADFGNVLHC

SEQ ID NO: 60918 - protein, 16 aa, Homo sapiens
  CDR3 for beta chain variable domain of TCR clone 30459 (TRBV6-1, TRBJ2-1)
CVSILRQGSSYNEQFF

SEQ ID NO: 60919 - protein, 16 aa, Homo sapiens
  CDR3 for alpha chain variable domain of TCR clone 30460 (TRAV30, TRAJ24)
CGTEIVDADSWGKFQF

SEQ ID NO: 60920 - protein, 13 aa, Homo sapiens
  CDR3 for beta chain variable domain of TCR clone 30460 (TRBV20-1, TRBJ1-1)
CSAPLGGGTEAFF

SEQ ID NO: 60921 - protein, 10 aa, Homo sapiens
  CDR3 for alpha chain variable domain of TCR clone 30461 (TRAV23/DV6, TRAJ57)
CAASSTLSQG

SEQ ID NO: 60922 - protein, 14 aa, Homo sapiens
  CDR3 for beta chain variable domain of TCR clone 30461 (TRBV6-1, TRBJ1-3)
CASVQGGGGNTIYF

SEQ ID NO: 60923 - protein, 23 aa, Homo sapiens
  CDR3 for alpha chain variable domain of TCR clone 30462 (TRAV30, TRAJ43)
CTLRPPSSVTQEPTSAALSDMRL

SEQ ID NO: 60924 - protein, 13 aa, Homo sapiens
  CDR3 for beta chain variable domain of TCR clone 30462 (TRBV12-4, TRBJ2-2)
CASSITGSGELFF

SEQ ID NO: 60925 - protein, 16 aa, Homo sapiens
  CDR3 for alpha chain variable domain of TCR clone 30463 (TRAV19, TRAJ4)
CALSGPLVGGYNKLIF

SEQ ID NO: 60926 - protein, 12 aa, Homo sapiens
  CDR3 for beta chain variable domain of TCR clone 30463 (TRBV6-3, TRBJ2-3)
CASGDWTDTQYF

SEQ ID NO: 60927 - protein, 15 aa, Homo sapiens
  CDR3 for alpha chain variable domain of TCR clone 30464 (TRAV3, TRAJ7)
CAVRDKDNGNNRLAF

SEQ ID NO: 60928 - protein, 19 aa, Homo sapiens
  CDR3 for beta chain variable domain of TCR clone 30464 (TRBV5-8, TRBJ2-3)
CASSFFGTSGSHRTDTQYF

SEQ ID NO: 60929 - protein, 14 aa, Homo sapiens
  CDR3 for alpha chain variable domain of TCR clone 30465 (TRAV8-2, TRAJ11)
CVVSEKSGYSTLTF

SEQ ID NO: 60930 - protein, 16 aa, Homo sapiens
  CDR3 for beta chain variable domain of TCR clone 30465 (TRBV28, TRBJ2-1)
CASSSPEYPRDNKQFF

SEQ ID NO: 60931 - protein, 13 aa, Homo sapiens
  CDR3 for alpha chain variable domain of TCR clone 30466 (TRAV27, TRAJ6)
CAGGTRGSYIPTF

SEQ ID NO: 60932 - protein, 17 aa, Homo sapiens
  CDR3 for beta chain variable domain of TCR clone 30466 (TRBV11-2, TRBJ2-1)
CASSLYPPGVEYNEQFF

SEQ ID NO: 60933 - protein, 15 aa, Homo sapiens
  CDR3 for alpha chain variable domain of TCR clone 30467 (TRAV26-1, TRAJ44)
CIVRANTGTASKLSF

SEQ ID NO: 60934 - protein, 16 aa, Homo sapiens
  CDR3 for beta chain variable domain of TCR clone 30467 (TRBV7-7, TRBJ2-1)
CASSLASGTSYNEQFF

SEQ ID NO: 60935 - protein, 14 aa, Homo sapiens
  CDR3 for alpha chain variable domain of TCR clone 30468 (TRAV1-2, TRAJ8)
CAVREDTGFQKLVF

SEQ ID NO: 60936 - protein, 16 aa, Homo sapiens
  CDR3 for beta chain variable domain of TCR clone 30468 (TRBV12-5, TRBJ2-5)
CASGPRTSRNQETQYF

SEQ ID NO: 60937 - protein, 13 aa, Homo sapiens
  CDR3 for alpha chain variable domain of TCR clone 30469 (TRAV21, TRAJ27)
CAARPGNAGKSTF

SEQ ID NO: 60938 - protein, 16 aa, Homo sapiens
  CDR3 for beta chain variable domain of TCR clone 30469 (TRBV20-1, TRBJ1-2)
CGASMGQGVANYGYAF

SEQ ID NO: 60939 - protein, 17 aa, Homo sapiens
  CDR3 for alpha chain variable domain of TCR clone 30470 (TRAV3, TRAJ38)
CAVRDCLNAVNNRKLIW

SEQ ID NO: 60940 - protein, 13 aa, Homo sapiens
  CDR3 for beta chain variable domain of TCR clone 30470 (TRBV23-1, TRBJ1-4)
CASRGKFNEKLFF

SEQ ID NO: 60941 - protein, 16 aa, Homo sapiens
  CDR3 for alpha chain variable domain of TCR clone 30471 (TRAV23/DV6, TRAJ9)
CAASIGGNTGGFKTIF

SEQ ID NO: 60942 - protein, 13 aa, Homo sapiens
  CDR3 for beta chain variable domain of TCR clone 30471 (TRBV9, TRBJ2-7)
CQQRRRGSYEQYF

SEQ ID NO: 60943 - protein, 15 aa, Homo sapiens
  CDR3 for alpha chain variable domain of TCR clone 30472 (TRAV3, TRAJ5)
CAVRERKTGRRALTF

SEQ ID NO: 60944 - protein, 15 aa, Homo sapiens
  CDR3 for beta chain variable domain of TCR clone 30472 (TRBV7-8, TRBJ2-1)
CASSLADSLYNEQFF

SEQ ID NO: 60945 - protein, 12 aa, Homo sapiens
  CDR3 for alpha chain variable domain of TCR clone 30473 (TRAV12-2, TRAJ21)
CAVRYNFNKFYF

SEQ ID NO: 60946 - protein, 14 aa, Homo sapiens
  CDR3 for beta chain variable domain of TCR clone 30473 (TRBV28, TRBJ2-1)
CASSYYAAYNEQFF

SEQ ID NO: 60947 - protein, 12 aa, Homo sapiens
  CDR3 for alpha chain variable domain of TCR clone 30474 (TRAV26-1, TRAJ36)
CVVRVRADNLFF

SEQ ID NO: 60948 - protein, 14 aa, Homo sapiens
  CDR3 for beta chain variable domain of TCR clone 30474 (TRBV14, TRBJ2-3)
CASSRKLAADTQYF

SEQ ID NO: 60949 - protein, 17 aa, Homo sapiens
  CDR3 for alpha chain variable domain of TCR clone 30475 (TRAV8-6, TRAJ58)
CAVSSWVGETSGSRLTF

SEQ ID NO: 60950 - protein, 13 aa, Homo sapiens
  CDR3 for beta chain variable domain of TCR clone 30475 (TRBV7-9, TRBJ1-2)
CASSLKQNYGYTF

SEQ ID NO: 60951 - protein, 15 aa, Homo sapiens
  CDR3 for alpha chain variable domain of TCR clone 30476 (TRAV25, TRAJ53)
CAATGGGGSNYKLTF

SEQ ID NO: 60952 - protein, 16 aa, Homo sapiens
  CDR3 for beta chain variable domain of TCR clone 30476 (TRBV19, TRBJ2-1)
CASSKAGPSSYNEQFF

SEQ ID NO: 60953 - protein, 14 aa, Homo sapiens
  CDR3 for alpha chain variable domain of TCR clone 30477 (TRAV1-2, TRAJ8)
CAVREDTGFQKLVF

SEQ ID NO: 60954 - protein, 15 aa, Homo sapiens
  CDR3 for beta chain variable domain of TCR clone 30477 (TRBV6-3, TRBJ2-7)
CVSSSPGTVFYEQYF

SEQ ID NO: 60955 - protein, 13 aa, Homo sapiens
  CDR3 for alpha chain variable domain of TCR clone 30478 (TRAV8-3, TRAJ28)
CAVGAVGSYQLTF

SEQ ID NO: 60956 - protein, 14 aa, Homo sapiens
  CDR3 for beta chain variable domain of TCR clone 30478 (TRBV7-2, TRBJ2-7)
CASRSQGGAYEQYF

SEQ ID NO: 60957 - protein, 13 aa, Homo sapiens
  CDR3 for alpha chain variable domain of TCR clone 30479 (TRAV21, TRAJ57)
CAVTQGGSEKLDF

SEQ ID NO: 60958 - protein, 16 aa, Homo sapiens
  CDR3 for beta chain variable domain of TCR clone 30479 (TRBV29-1, TRBJ2-7)
CSVEDAEDGTAYEQYF

SEQ ID NO: 60959 - protein, 13 aa, Homo sapiens
  CDR3 for alpha chain variable domain of TCR clone 30480 (TRAV6, TRAJ5)
CAPADTGRRALTF

SEQ ID NO: 60960 - protein, 16 aa, Homo sapiens
  CDR3 for beta chain variable domain of TCR clone 30480 (TRBV5-7, TRBJ1-5)
CASSLQQDREYQPQHF

SEQ ID NO: 60961 - protein, 14 aa, Homo sapiens
  CDR3 for alpha chain variable domain of TCR clone 30481 (TRAV16, TRAJ33)
CALSAMDSNYQLIW

SEQ ID NO: 60962 - protein, 12 aa, Homo sapiens
  CDR3 for beta chain variable domain of TCR clone 30481 (TRBV5-1, TRBJ1-2)
CASNQDTYGYTF

SEQ ID NO: 60963 - protein, 14 aa, Homo sapiens
  CDR3 for alpha chain variable domain of TCR clone 30482 (TRAV12-2, TRAJ45)
CAVYLGGGADGLTF

SEQ ID NO: 60964 - protein, 14 aa, Homo sapiens
  CDR3 for beta chain variable domain of TCR clone 30482 (TRBV6-5, TRBJ1-2)
CASTRGGGSDGYTF

SEQ ID NO: 60965 - protein, 13 aa, Homo sapiens
  CDR3 for alpha chain variable domain of TCR clone 30483 (TRAV13-1, TRAJ54)
CAASSQGAQKLVF

SEQ ID NO: 60966 - protein, 14 aa, Homo sapiens
  CDR3 for beta chain variable domain of TCR clone 30483 (TRBV12-4, TRBJ1-1)
CASSLGAGFTKAFF

SEQ ID NO: 60967 - protein, 12 aa, Homo sapiens
  CDR3 for alpha chain variable domain of TCR clone 30484 (TRAV12-1, TRAJ40)
CVFYSVTYKYIF

SEQ ID NO: 60968 - protein, 18 aa, Homo sapiens
  CDR3 for beta chain variable domain of TCR clone 30484 (TRBV12-4, TRBJ2-2)
CASSLVAGTRGRTGELFF

SEQ ID NO: 60969 - protein, 15 aa, Homo sapiens
  CDR3 for alpha chain variable domain of TCR clone 30485 (TRAV2, TRAJ24)
CAVEVLTDSWGNSSL

SEQ ID NO: 60970 - protein, 14 aa, Homo sapiens
  CDR3 for beta chain variable domain of TCR clone 30485 (TRBV19, TRBJ2-1)
CASSMGSGRRSSSS

SEQ ID NO: 60971 - protein, 13 aa, Homo sapiens
  CDR3 for alpha chain variable domain of TCR clone 30486 (TRAV27, TRAJ45)
CRGSGGGADGLTF

SEQ ID NO: 60972 - protein, 15 aa, Homo sapiens
  CDR3 for beta chain variable domain of TCR clone 30486 (TRBV9, TRBJ2-2)
CASSDFAGASGELFF

SEQ ID NO: 60973 - protein, 17 aa, Homo sapiens
  CDR3 for alpha chain variable domain of TCR clone 30487 (TRAV3, TRAJ6)
CAVRDGPRAGGSYIPTF

SEQ ID NO: 60974 - protein, 20 aa, Homo sapiens
  CDR3 for beta chain variable domain of TCR clone 30487 (TRBV28, TRBJ2-1)
CASTPIGRSPGLAGVNEQFF

SEQ ID NO: 60975 - protein, 16 aa, Homo sapiens
  CDR3 for alpha chain variable domain of TCR clone 30488 (TRAV3, TRAJ5)
CAVRNLMATGRRALTF

SEQ ID NO: 60976 - protein, 16 aa, Homo sapiens
  CDR3 for beta chain variable domain of TCR clone 30488 (TRBV4-2, TRBJ2-7)
CASSQEGLANSYEQYF

SEQ ID NO: 60977 - protein, 15 aa, Homo sapiens
  CDR3 for alpha chain variable domain of TCR clone 30489 (TRAV12-3, TRAJ6)
CAMSATTGGSYISTF

SEQ ID NO: 60978 - protein, 16 aa, Homo sapiens
  CDR3 for beta chain variable domain of TCR clone 30489 (TRBV20-1, TRBJ1-2)
CSASMGQGVANYGYTF

SEQ ID NO: 60979 - protein, 15 aa, Homo sapiens
  CDR3 for alpha chain variable domain of TCR clone 30490 (TRAV13-1, TRAJ17)
CAASIERAAGNKLTF

SEQ ID NO: 60980 - protein, 12 aa, Homo sapiens
  CDR3 for beta chain variable domain of TCR clone 30490 (TRBV5-7, TRBJ1-1)
CASSVGRGKAFF

SEQ ID NO: 60981 - protein, 16 aa, Homo sapiens
  CDR3 for alpha chain variable domain of TCR clone 30491 (TRAV26-1, TRAJ53)
CIVRVAMGGSNYKLTF

SEQ ID NO: 60982 - protein, 12 aa, Homo sapiens
  CDR3 for beta chain variable domain of TCR clone 30491 (TRBV7-9, TRBJ1-5)
CASSPQGKPQHF

SEQ ID NO: 60983 - protein, 11 aa, Homo sapiens
  CDR3 for alpha chain variable domain of TCR clone 30492 (TRAV1-2, TRAJ31)
CAVNNNARFMF

SEQ ID NO: 60984 - protein, 15 aa, Homo sapiens
  CDR3 for beta chain variable domain of TCR clone 30492 (TRBV28, TRBJ2-1)
CASSIIAGGRSEQFF

SEQ ID NO: 60985 - protein, 14 aa, Homo sapiens
  CDR3 for alpha chain variable domain of TCR clone 30493 (TRAV12-2, TRAJ44)
CAVNPAGTASKLTF

SEQ ID NO: 60986 - protein, 15 aa, Homo sapiens
  CDR3 for beta chain variable domain of TCR clone 30493 (TRBV20-1, TRBJ2-7)
CSARDRVSGMDEQYF

SEQ ID NO: 60987 - protein, 14 aa, Homo sapiens
  CDR3 for alpha chain variable domain of TCR clone 30494 (TRAV9-2, TRAJ39)
CALYIYNAGNMLTF

SEQ ID NO: 60988 - protein, 13 aa, Homo sapiens
  CDR3 for beta chain variable domain of TCR clone 30494 (TRBV7-2, TRBJ1-1)
CASNLKGAKVAFF

SEQ ID NO: 60989 - protein, 15 aa, Homo sapiens
  CDR3 for alpha chain variable domain of TCR clone 30495 (TRAV26-1, TRAJ44)
CIVRANTGTASKLTF

SEQ ID NO: 60990 - protein, 14 aa, Homo sapiens
  CDR3 for beta chain variable domain of TCR clone 30495 (TRBV25-1, TRBJ1-1)
CASTHLGGNTEAFF

SEQ ID NO: 60991 - protein, 13 aa, Homo sapiens
  CDR3 for alpha chain variable domain of TCR clone 30496 (TRAV13-2, TRAJ40)
CSEFTSGTYKYIF

SEQ ID NO: 60992 - protein, 14 aa, Homo sapiens
  CDR3 for beta chain variable domain of TCR clone 30496 (TRBV10-2, TRBJ1-5)
CASSSTGRNQPQHF

SEQ ID NO: 60993 - protein, 21 aa, Homo sapiens
  CDR3 for alpha chain variable domain of TCR clone 30497 (TRAV12-1, TRAJ32)
SSVIQPPTSMNYGGAANKLIF

SEQ ID NO: 60994 - protein, 18 aa, Homo sapiens
  CDR3 for beta chain variable domain of TCR clone 30497 (TRBV20-1, TRBJ2-3)
CSASGLAGGPGTTDTQYF

SEQ ID NO: 60995 - protein, 18 aa, Homo sapiens
  CDR3 for alpha chain variable domain of TCR clone 30498 (TRAV12-3, TRAJ52)
CAMSVGGAGGTSYGKLTF

SEQ ID NO: 60996 - protein, 15 aa, Homo sapiens
  CDR3 for beta chain variable domain of TCR clone 30498 (TRBV27, TRBJ1-6)
CASSFDRGLGSPLYF

SEQ ID NO: 60997 - protein, 14 aa, Homo sapiens
  CDR3 for alpha chain variable domain of TCR clone 30499 (TRAV16, TRAJ33)
CTLSAMDSNYQLIW

SEQ ID NO: 60998 - protein, 16 aa, Homo sapiens
  CDR3 for beta chain variable domain of TCR clone 30499 (TRBV12-4, TRBJ2-3)
CASSFPSNTNTDTQYF

SEQ ID NO: 60999 - protein, 18 aa, Homo sapiens
  CDR3 for alpha chain variable domain of TCR clone 30500 (TRAV3, TRAJ32)
CAVRDIRGYGGATNKPIF

SEQ ID NO: 61000 - protein, 15 aa, Homo sapiens
  CDR3 for beta chain variable domain of TCR clone 30500 (TRBV12-4, TRBJ2-2)
CASSLGVRHTGELFF

SEQ ID NO: 61001 - protein, 15 aa, Homo sapiens
  CDR3 for alpha chain variable domain of TCR clone 30501 (TRAV29/DV5, TRAJ40)
CAASAQGSGTYKYIF

SEQ ID NO: 61002 - protein, 15 aa, Homo sapiens
  CDR3 for beta chain variable domain of TCR clone 30501 (TRBV20-1, TRBJ2-7)
CSAESGTSGAYEQYF

SEQ ID NO: 61003 - protein, 13 aa, Homo sapiens
  CDR3 for alpha chain variable domain of TCR clone 30502 (TRAV12-2, TRAJ10)
CAVPTGGGNKLTF

SEQ ID NO: 61004 - protein, 11 aa, Homo sapiens
  CDR3 for beta chain variable domain of TCR clone 30502 (TRBV6-1, TRBJ2-1)
CASISSNERFF

SEQ ID NO: 61005 - protein, 13 aa, Homo sapiens
  CDR3 for alpha chain variable domain of TCR clone 30503 (TRAV8-3, TRAJ43)
CAVGPDNNNDMRF

SEQ ID NO: 61006 - protein, 12 aa, Homo sapiens
  CDR3 for beta chain variable domain of TCR clone 30503 (TRBV7-2, TRBJ1-6)
CASSLSSSTLHF

SEQ ID NO: 61007 - protein, 13 aa, Homo sapiens
  CDR3 for alpha chain variable domain of TCR clone 30504 (TRAV8-3, TRAJ48)
CAVVPFGNEKLTF

SEQ ID NO: 61008 - protein, 14 aa, Homo sapiens
  CDR3 for beta chain variable domain of TCR clone 30504 (TRBV18, TRBJ2-7)
CASSSRGGAYEQYF

SEQ ID NO: 61009 - protein, 16 aa, Homo sapiens
  CDR3 for alpha chain variable domain of TCR clone 30505 (TRAV8-1, TRAJ42)
CAVTSRYGGSQGNRIF

SEQ ID NO: 61010 - protein, 12 aa, Homo sapiens
  CDR3 for beta chain variable domain of TCR clone 30505 (TRBV6-3, TRBJ2-7)
CASSLGRRGLYF

SEQ ID NO: 61011 - protein, 13 aa, Homo sapiens
  CDR3 for alpha chain variable domain of TCR clone 30506 (TRAV20, TRAJ11)
CAVQARGYSTLTF

SEQ ID NO: 61012 - protein, 15 aa, Homo sapiens
  CDR3 for beta chain variable domain of TCR clone 30506 (TRBV7-9, TRBJ1-5)
CASSQGHQPNQPQHF

SEQ ID NO: 61013 - protein, 16 aa, Homo sapiens
  CDR3 for alpha chain variable domain of TCR clone 30507 (TRAV3, TRAJ37)
CAVRGKGSGSTGKLIF

SEQ ID NO: 61014 - protein, 13 aa, Homo sapiens
  CDR3 for beta chain variable domain of TCR clone 30507 (TRBV14, TRBJ2-7)
CASSQDRRYEQYF

SEQ ID NO: 61015 - protein, 12 aa, Homo sapiens
  CDR3 for alpha chain variable domain of TCR clone 30508 (TRAV12-2, TRAJ8)
CAVNTGLQKLVF

SEQ ID NO: 61016 - protein, 15 aa, Homo sapiens
  CDR3 for beta chain variable domain of TCR clone 30508 (TRBV7-8, TRBJ1-5)
CASSLERRGLEPQHF

SEQ ID NO: 61017 - protein, 17 aa, Homo sapiens
  CDR3 for alpha chain variable domain of TCR clone 30509 (TRAV13-1, TRAJ31)
CAPRDSLMFGDGTQLVV

SEQ ID NO: 61018 - protein, 12 aa, Homo sapiens
  CDR3 for beta chain variable domain of TCR clone 30509 (TRBV7-9, TRBJ2-7)
CASSLEGYEQYF

SEQ ID NO: 61019 - protein, 16 aa, Homo sapiens
  CDR3 for alpha chain variable domain of TCR clone 30510 (TRAV16, TRAJ57)
CAPYLITQGGAEKLVF

SEQ ID NO: 61020 - protein, 17 aa, Homo sapiens
  CDR3 for beta chain variable domain of TCR clone 30510 (TRBV24-1, TRBJ2-4)
CATSDAEARGVRNIQYF

SEQ ID NO: 61021 - protein, 11 aa, Homo sapiens
  CDR3 for alpha chain variable domain of TCR clone 30511 (TRAV2, TRAJ13)
CASGGYQKVTF

SEQ ID NO: 61022 - protein, 15 aa, Homo sapiens
  CDR3 for beta chain variable domain of TCR clone 30511 (TRBV19, TRBJ1-2)
CASSVGQVLNYGYTF

SEQ ID NO: 61023 - protein, 16 aa, Homo sapiens
  CDR3 for alpha chain variable domain of TCR clone 30512 (TRAV2, TRAJ32)
CAVEDGYGGATNKLIF

SEQ ID NO: 61024 - protein, 14 aa, Homo sapiens
  CDR3 for beta chain variable domain of TCR clone 30512 (TRBV4-1, TRBJ2-2)
CASSQAVNTGELFF

SEQ ID NO: 61025 - protein, 14 aa, Homo sapiens
  CDR3 for alpha chain variable domain of TCR clone 30513 (TRAV8-4, TRAJ13)
CAVTLSWGYQKVTF

SEQ ID NO: 61026 - protein, 14 aa, Homo sapiens
  CDR3 for beta chain variable domain of TCR clone 30513 (TRBV7-2, TRBJ1-2)
CASSQTGSTYGYTF

SEQ ID NO: 61027 - protein, 17 aa, Homo sapiens
  CDR3 for alpha chain variable domain of TCR clone 30514 (TRAV3, TRAJ12)
CAVRDGGRMDSSYKLIF

SEQ ID NO: 61028 - protein, 14 aa, Homo sapiens
  CDR3 for beta chain variable domain of TCR clone 30514 (TRBV9, TRBJ2-1)
CASSVDPRGKEQFF

SEQ ID NO: 61029 - protein, 16 aa, Homo sapiens
  CDR3 for alpha chain variable domain of TCR clone 30515 (TRAV27, TRAJ13)
CAGAKSDSGGYQKVTF

SEQ ID NO: 61030 - protein, 15 aa, Homo sapiens
  CDR3 for beta chain variable domain of TCR clone 30515 (TRBV29-1, TRBJ2-1)
GSVGRHALFYNEQFF

SEQ ID NO: 61031 - protein, 13 aa, Homo sapiens
  CDR3 for alpha chain variable domain of TCR clone 30516 (TRAV13-1, TRAJ21)
RAASIYNFNKFYF

SEQ ID NO: 61032 - protein, 13 aa, Homo sapiens
  CDR3 for beta chain variable domain of TCR clone 30516 (TRBV27, TRBJ1-4)
CASSLMGDEKLFF

SEQ ID NO: 61033 - protein, 13 aa, Homo sapiens
  CDR3 for alpha chain variable domain of TCR clone 30517 (TRAV1-2, TRAJ9)
CAALNTGGFKTIF

SEQ ID NO: 61034 - protein, 14 aa, Homo sapiens
  CDR3 for beta chain variable domain of TCR clone 30517 (TRBV19, TRBJ2-2)
CASSTLHRSGELFF

SEQ ID NO: 61035 - protein, 13 aa, Homo sapiens
  CDR3 for alpha chain variable domain of TCR clone 30518 (TRAV2, TRAJ40)
CAVVTTGTYKYIF

SEQ ID NO: 61036 - protein, 16 aa, Homo sapiens
  CDR3 for beta chain variable domain of TCR clone 30518 (TRBV7-3, TRBJ2-1)
CASSLEGYRSYNEQFF

SEQ ID NO: 61037 - protein, 17 aa, Homo sapiens
  CDR3 for alpha chain variable domain of TCR clone 30519 (TRAV12-3, TRAJ6)
CAMSARGGAGGSYIPKF

SEQ ID NO: 61038 - protein, 12 aa, Homo sapiens
  CDR3 for beta chain variable domain of TCR clone 30519 (TRBV12-4, TRBJ2-3)
CASSTLPDTQYF

SEQ ID NO: 61039 - protein, 12 aa, Homo sapiens
  CDR3 for alpha chain variable domain of TCR clone 30520 (TRAV12-2, TRAJ52)
IGGGTSYGRLTF

SEQ ID NO: 61040 - protein, 13 aa, Homo sapiens
  CDR3 for beta chain variable domain of TCR clone 30520 (TRBV12-4, TRBJ1-1)
CASSPGTGFEAFF

SEQ ID NO: 61041 - protein, 11 aa, Homo sapiens
  CDR3 for alpha chain variable domain of TCR clone 30521 (TRAV2, TRAJ13)
CASGGYQKVAF

SEQ ID NO: 61042 - protein, 18 aa, Homo sapiens
  CDR3 for beta chain variable domain of TCR clone 30521 (TRBV20-1, TRBJ2-6)
CSAETTPTHGSGANVLTF

SEQ ID NO: 61043 - protein, 13 aa, Homo sapiens
  CDR3 for alpha chain variable domain of TCR clone 30522 (TRAV17, TRAJ9)
CATDYTGGFKPIF

SEQ ID NO: 61044 - protein, 14 aa, Homo sapiens
  CDR3 for beta chain variable domain of TCR clone 30522 (TRBV19, TRBJ2-5)
CASSMTGQQETQYF

SEQ ID NO: 61045 - protein, 13 aa, Homo sapiens
  CDR3 for alpha chain variable domain of TCR clone 30523 (TRAV13-2, TRAJ48)
CAEMDFGNEKLTF

SEQ ID NO: 61046 - protein, 14 aa, Homo sapiens
  CDR3 for beta chain variable domain of TCR clone 30523 (TRBV20-1, TRBJ2-4)
CSARDRGQGGIQYF

SEQ ID NO: 61047 - protein, 13 aa, Homo sapiens
  CDR3 for alpha chain variable domain of TCR clone 30524 (TRAV27, TRAJ41)
CAGEGNSGYALNF

SEQ ID NO: 61048 - protein, 15 aa, Homo sapiens
  CDR3 for beta chain variable domain of TCR clone 30524 (TRBV9, TRBJ1-6)
CASSVAGTGDSPLHF

SEQ ID NO: 61049 - protein, 14 aa, Homo sapiens
  CDR3 for alpha chain variable domain of TCR clone 30525 (TRAV12-2, TRAJ17)
CAVLFKAAGNKLTF

SEQ ID NO: 61050 - protein, 14 aa, Homo sapiens
  CDR3 for beta chain variable domain of TCR clone 30525 (TRBV7-9, TRBJ2-1)
CASSPRDSLYEQFF

SEQ ID NO: 61051 - protein, 12 aa, Homo sapiens
  CDR3 for alpha chain variable domain of TCR clone 30526 (TRAV3, TRAJ27)
CAVRYGAGKSTF

SEQ ID NO: 61052 - protein, 13 aa, Homo sapiens
  CDR3 for beta chain variable domain of TCR clone 30526 (TRBV10-3, TRBJ1-2)
CAINADLNYGYTF

SEQ ID NO: 61053 - protein, 13 aa, Homo sapiens
  CDR3 for alpha chain variable domain of TCR clone 30527 (TRAV1-2, TRAJ9)
CAALNTGGFKTIF

SEQ ID NO: 61054 - protein, 19 aa, Homo sapiens
  CDR3 for beta chain variable domain of TCR clone 30527 (TRBV7-2, TRBJ2-3)
CASSFLSRNWGGGTDTQYF

SEQ ID NO: 61055 - protein, 17 aa, Homo sapiens
  CDR3 for alpha chain variable domain of TCR clone 30528 (TRAV3, TRAJ6)
CAVRDGPRAGGSYIPTF

SEQ ID NO: 61056 - protein, 14 aa, Homo sapiens
  CDR3 for beta chain variable domain of TCR clone 30528 (TRBV7-2, TRBJ2-1)
CASSPKTSFYEQYF

SEQ ID NO: 61057 - protein, 15 aa, Homo sapiens
  CDR3 for alpha chain variable domain of TCR clone 30529 (TRAV38-1, TRAJ37)
CALIFGSGNTGKLIF

SEQ ID NO: 61058 - protein, 12 aa, Homo sapiens
  CDR3 for beta chain variable domain of TCR clone 30529 (TRBV7-9, TRBJ2-7)
CASSLEGYEQYF

SEQ ID NO: 61059 - protein, 11 aa, Homo sapiens
  CDR3 for alpha chain variable domain of TCR clone 30530 (TRAV12-3, TRAJ43)
CAMSISNDMRF

SEQ ID NO: 61060 - protein, 13 aa, Homo sapiens
  CDR3 for beta chain variable domain of TCR clone 30530 (TRBV20-1, TRBJ1-1)
CSAPLGGGTEAFF

SEQ ID NO: 61061 - protein, 15 aa, Homo sapiens
  CDR3 for alpha chain variable domain of TCR clone 30531 (TRAV1-2, TRAJ15)
CAVEAANQAGTALIF

SEQ ID NO: 61062 - protein, 13 aa, Homo sapiens
  CDR3 for beta chain variable domain of TCR clone 30531 (TRBV7-9, TRBJ1-2)
CASSLKQNYGYTF

SEQ ID NO: 61063 - protein, 14 aa, Homo sapiens
  CDR3 for alpha chain variable domain of TCR clone 30532 (TRAV1-2, TRAJ8)
SAVREDTGFQKLVF

SEQ ID NO: 61064 - protein, 15 aa, Homo sapiens
  CDR3 for beta chain variable domain of TCR clone 30532 (TRBV6-3, TRBJ2-7)
CASSSPGTVFYEQYF

SEQ ID NO: 61065 - protein, 16 aa, Homo sapiens
  CDR3 for alpha chain variable domain of TCR clone 30533 (TRAV26-1, TRAJ53)
CIVRVAMGGSNYKLTF

SEQ ID NO: 61066 - protein, 11 aa, Homo sapiens
  CDR3 for beta chain variable domain of TCR clone 30533 (TRBV7-9, TRBJ1-5)
CQQPTGTAQHF

SEQ ID NO: 61067 - protein, 17 aa, Homo sapiens
  CDR3 for alpha chain variable domain of TCR clone 30534 (TRAV8-6, TRAJ58)
CAVSSWVGETGGSRLTF

SEQ ID NO: 61068 - protein, 14 aa, Homo sapiens
  CDR3 for beta chain variable domain of TCR clone 30534 (TRBV4-2, TRBJ2-1)
CASGLDRAYNEQFF

SEQ ID NO: 61069 - protein, 14 aa, Homo sapiens
  CDR3 for alpha chain variable domain of TCR clone 30535 (TRAV13-1, TRAJ44)
CAAKATGTASKLTF

SEQ ID NO: 61070 - protein, 15 aa, Homo sapiens
  CDR3 for beta chain variable domain of TCR clone 30535 (TRBV6-3, TRBJ2-7)
CASSSPGTVFYEQYF

SEQ ID NO: 61071 - protein, 11 aa, Homo sapiens
  CDR3 for alpha chain variable domain of TCR clone 30536 (TRAV12-3, TRAJ43)
CAMSVSNDMRF

SEQ ID NO: 61072 - protein, 13 aa, Homo sapiens
  CDR3 for beta chain variable domain of TCR clone 30536 (TRBV20-1, TRBJ1-1)
CSAPLGGGTEAFV

SEQ ID NO: 61073 - protein, 15 aa, Homo sapiens
  CDR3 for alpha chain variable domain of TCR clone 30537 (TRAV14/DV4, TRAJ12)
CAMREERDSSYKLIF

SEQ ID NO: 61074 - protein, 13 aa, Homo sapiens
  CDR3 for beta chain variable domain of TCR clone 30537 (TRBV28, TRBJ1-2)
CAGRDRGNYGYTF

SEQ ID NO: 61075 - protein, 13 aa, Homo sapiens
  CDR3 for alpha chain variable domain of TCR clone 30538 (TRAV13-2, TRAJ13)
CAERPGGYQKVTF

SEQ ID NO: 61076 - protein, 15 aa, Homo sapiens
  CDR3 for beta chain variable domain of TCR clone 30538 (TRBV11-3, TRBJ2-7)
CASSPGQASSYEQYF

SEQ ID NO: 61077 - protein, 15 aa, Homo sapiens
  CDR3 for alpha chain variable domain of TCR clone 30539 (TRAV3, TRAJ7)
CAVRDKDNGNNRLAF

SEQ ID NO: 61078 - protein, 19 aa, Homo sapiens
  CDR3 for beta chain variable domain of TCR clone 30539 (TRBV5-8, TRBJ2-3)
CASGFLGTSGSHRTDTQYF

SEQ ID NO: 61079 - protein, 11 aa, Homo sapiens
  CDR3 for alpha chain variable domain of TCR clone 30540 (TRAV17, TRAJ31)
CATSNNARLIF

SEQ ID NO: 61080 - protein, 16 aa, Homo sapiens
  CDR3 for beta chain variable domain of TCR clone 30540 (TRBV7-8, TRBJ2-4)
CASSAERTLAKNIQYF

SEQ ID NO: 61081 - protein, 13 aa, Homo sapiens
  CDR3 for alpha chain variable domain of TCR clone 30541 (TRAV21, TRAJ20)
CAVVLRVDYKLSF

SEQ ID NO: 61082 - protein, 13 aa, Homo sapiens
  CDR3 for beta chain variable domain of TCR clone 30541 (TRBV6-1, TRBJ1-1)
CASSRQGNTEAFF

SEQ ID NO: 61083 - protein, 12 aa, Homo sapiens
  CDR3 for alpha chain variable domain of TCR clone 30542 (TRAV12-3, TRAJ17)
CAMTLTGNKLTF

SEQ ID NO: 61084 - protein, 12 aa, Homo sapiens
  CDR3 for beta chain variable domain of TCR clone 30542 (TRBV7-9, TRBJ2-7)
CASSLEGYEQYF

SEQ ID NO: 61085 - protein, 12 aa, Homo sapiens
  CDR3 for alpha chain variable domain of TCR clone 30543 (TRAV3, TRAJ20)
CAVRDGDYKLSF

SEQ ID NO: 61086 - protein, 13 aa, Homo sapiens
  CDR3 for beta chain variable domain of TCR clone 30543 (TRBV9, TRBJ2-1)
CASRVGQGGEQFF

SEQ ID NO: 61087 - protein, 11 aa, Homo sapiens
  CDR3 for alpha chain variable domain of TCR clone 30544 (TRAV21, TRAJ9)
CAVPGGFKTIF

SEQ ID NO: 61088 - protein, 15 aa, Homo sapiens
  CDR3 for beta chain variable domain of TCR clone 30544 (TRBV7-9, TRBJ2-5)
CISVPLQGAQETQYF

SEQ ID NO: 61089 - protein, 14 aa, Homo sapiens
  CDR3 for alpha chain variable domain of TCR clone 30545 (TRAV9-2, TRAJ39)
CALYIYNAGNMLTF

SEQ ID NO: 61090 - protein, 14 aa, Homo sapiens
  CDR3 for beta chain variable domain of TCR clone 30545 (TRBV7-2, TRBJ2-2)
CASRGQGAAGELFF

SEQ ID NO: 61091 - protein, 13 aa, Homo sapiens
  CDR3 for alpha chain variable domain of TCR clone 30546 (TRAV20, TRAJ21)
CAVEGYNFNKFYF

SEQ ID NO: 61092 - protein, 17 aa, Homo sapiens
  CDR3 for beta chain variable domain of TCR clone 30546 (TRBV11-2, TRBJ2-1)
CASSLYPPGVEYNEQFF

SEQ ID NO: 61093 - protein, 15 aa, Homo sapiens
  CDR3 for alpha chain variable domain of TCR clone 30547 (TRAV17, TRAJ23)
CATDADDNQGGKLIF

SEQ ID NO: 61094 - protein, 12 aa, Homo sapiens
  CDR3 for beta chain variable domain of TCR clone 30547 (TRBV2, TRBJ2-1)
CAKREGYNEQFF

SEQ ID NO: 61095 - protein, 20 aa, Homo sapiens
  CDR3 for alpha chain variable domain of TCR clone 30548 (TRAV8-3, TRAJ45)
LGTSVLWGSYSGGGADGLTF

SEQ ID NO: 61096 - protein, 11 aa, Homo sapiens
  CDR3 for beta chain variable domain of TCR clone 30548 (TRBV20-1, TRBJ2-5)
CSADRAETQYF

SEQ ID NO: 61097 - protein, 15 aa, Homo sapiens
  CDR3 for alpha chain variable domain of TCR clone 30549 (TRAV26-1, TRAJ44)
CIVRANTGTASKLTF

SEQ ID NO: 61098 - protein, 16 aa, Homo sapiens
  CDR3 for beta chain variable domain of TCR clone 30549 (TRBV7-7, TRBJ2-1)
CASSLASGTSSNEQFF

SEQ ID NO: 61099 - protein, 19 aa, Homo sapiens
  CDR3 for alpha chain variable domain of TCR clone 30550 (TRAV2, TRAJ20)
ILQVREADAAVYRDCKLSL

SEQ ID NO: 61100 - protein, 13 aa, Homo sapiens
  CDR3 for beta chain variable domain of TCR clone 30550 (TRBV15, TRBJ1-6)
CATSGGLNSPLHF

SEQ ID NO: 61101 - protein, 17 aa, Homo sapiens
  CDR3 for alpha chain variable domain of TCR clone 30551 (TRAV17, TRAJ7)
CATLGRLALGKGNQVVV

SEQ ID NO: 61102 - protein, 13 aa, Homo sapiens
  CDR3 for beta chain variable domain of TCR clone 30551 (TRBV12-4, TRBJ2-7)
CASSLERVREQYF

SEQ ID NO: 61103 - protein, 17 aa, Homo sapiens
  CDR3 for alpha chain variable domain of TCR clone 30552 (TRAV13-1, TRAJ52)
CSAGRNAGGTSYGKLTF

SEQ ID NO: 61104 - protein, 13 aa, Homo sapiens
  CDR3 for beta chain variable domain of TCR clone 30552 (TRBV7-2, TRBJ1-1)
CASNLKGAKVAFF

SEQ ID NO: 61105 - protein, 13 aa, Homo sapiens
  CDR3 for alpha chain variable domain of TCR clone 30553 (TRAV26-1, TRAJ36)
CIVVGTGANNLFF

SEQ ID NO: 61106 - protein, 13 aa, Homo sapiens
  CDR3 for beta chain variable domain of TCR clone 30553 (TRBV6-5, TRBJ2-6)
CASSTSGPRRLDF

SEQ ID NO: 61107 - protein, 11 aa, Homo sapiens
  CDR3 for alpha chain variable domain of TCR clone 30554 (TRAV4, TRAJ23)
CLVAPGGKLIF

SEQ ID NO: 61108 - protein, 15 aa, Homo sapiens
  CDR3 for beta chain variable domain of TCR clone 30554 (TRBV7-2, TRBJ2-1)
CASSFQANEYNEQFF

SEQ ID NO: 61109 - protein, 12 aa, Homo sapiens
  CDR3 for alpha chain variable domain of TCR clone 30555 (TRAV12-3, TRAJ17)
CAMMLTGNKLTF

SEQ ID NO: 61110 - protein, 16 aa, Homo sapiens
  CDR3 for beta chain variable domain of TCR clone 30555 (TRBV12-4, TRBJ2-5)
CASSFFVRGRQETQYF

SEQ ID NO: 61111 - protein, 13 aa, Homo sapiens
  CDR3 for alpha chain variable domain of TCR clone 30556 (TRAV17, TRAJ9)
CATDYTGGFKTIF

SEQ ID NO: 61112 - protein, 14 aa, Homo sapiens
  CDR3 for beta chain variable domain of TCR clone 30556 (TRBV19, TRBJ2-5)
CASSMTGQKETQYF

SEQ ID NO: 61113 - protein, 15 aa, Homo sapiens
  CDR3 for alpha chain variable domain of TCR clone 30557 (TRAV3, TRAJ20)
CAVRDIKLSDYKLSF

SEQ ID NO: 61114 - protein, 15 aa, Homo sapiens
  CDR3 for beta chain variable domain of TCR clone 30557 (TRBV7-9, TRBJ1-6)
CACSSPGRGNSPLHF

SEQ ID NO: 61115 - protein, 14 aa, Homo sapiens
  CDR3 for alpha chain variable domain of TCR clone 30558 (TRAV16, TRAJ37)
CALDISGNTGKLIF

SEQ ID NO: 61116 - protein, 15 aa, Homo sapiens
  CDR3 for beta chain variable domain of TCR clone 30558 (TRBV19, TRBJ1-2)
CASSVGQVLNYGYTF

SEQ ID NO: 61117 - protein, 15 aa, Homo sapiens
  CDR3 for alpha chain variable domain of TCR clone 30559 (TRAV8-2, TRAJ13)
CVVSDLSGGYQKVTF

SEQ ID NO: 61118 - protein, 13 aa, Homo sapiens
  CDR3 for beta chain variable domain of TCR clone 30559 (TRBV10-3, TRBJ2-7)
CASKLAVNYEQYF

SEQ ID NO: 61119 - protein, 13 aa, Homo sapiens
  CDR3 for alpha chain variable domain of TCR clone 30560 (TRAV12-3, TRAJ33)
CAMRVNSNYQLIW

SEQ ID NO: 61120 - protein, 13 aa, Homo sapiens
  CDR3 for beta chain variable domain of TCR clone 30560 (TRBV7-2, TRBJ2-2)
CASSLAVTGELFF

SEQ ID NO: 61121 - protein, 11 aa, Homo sapiens
  CDR3 for alpha chain variable domain of TCR clone 30561 (TRAV12-2, TRAJ43)
CASPIGNDIRF

SEQ ID NO: 61122 - protein, 12 aa, Homo sapiens
  CDR3 for beta chain variable domain of TCR clone 30561 (TRBV20-1, TRBJ2-7)
CSAGLKMGEQYF

SEQ ID NO: 61123 - protein, 14 aa, Homo sapiens
  CDR3 for alpha chain variable domain of TCR clone 30562 (TRAV8-4, TRAJ13)
CAVTLSGGYQEVTF

SEQ ID NO: 61124 - protein, 14 aa, Homo sapiens
  CDR3 for beta chain variable domain of TCR clone 30562 (TRBV7-2, TRBJ1-2)
CASSQTGSTYGYTF

SEQ ID NO: 61125 - protein, 14 aa, Homo sapiens
  CDR3 for alpha chain variable domain of TCR clone 30563 (TRAV38-1, TRAJ39)
CAFAYNNAGKMLTF

SEQ ID NO: 61126 - protein, 15 aa, Homo sapiens
  CDR3 for beta chain variable domain of TCR clone 30563 (TRBV19, TRBJ2-6)
CASSIGPSGANVLTF

SEQ ID NO: 61127 - protein, 14 aa, Homo sapiens
  CDR3 for alpha chain variable domain of TCR clone 30564 (TRAV13-1, TRAJ44)
CAAKATGTAGKLTF

SEQ ID NO: 61128 - protein, 17 aa, Homo sapiens
  CDR3 for beta chain variable domain of TCR clone 30564 (TRBV7-3, TRBJ2-3)
CASSLMKRMRGADTQYF

SEQ ID NO: 61129 - protein, 14 aa, Homo sapiens
  CDR3 for alpha chain variable domain of TCR clone 30565 (TRAV10, TRAJ29)
CVVSANSGNTPPVF

SEQ ID NO: 61130 - protein, 16 aa, Homo sapiens
  CDR3 for beta chain variable domain of TCR clone 30565 (TRBV29-1, TRBJ2-7)
CSVEDAEDGTAYEQYF

SEQ ID NO: 61131 - protein, 10 aa, Homo sapiens
  CDR3 for alpha chain variable domain of TCR clone 30566 (TRAV23/DV6, TRAJ57)
CAASSTLSQG

SEQ ID NO: 61132 - protein, 16 aa, Homo sapiens
  CDR3 for beta chain variable domain of TCR clone 30566 (TRBV7-3, TRBJ2-2)
CASSLKRGTLSGELFF

SEQ ID NO: 61133 - protein, 12 aa, Homo sapiens
  CDR3 for alpha chain variable domain of TCR clone 30567 (TRAV21, TRAJ39)
CAADNAGNVLTF

SEQ ID NO: 61134 - protein, 15 aa, Homo sapiens
  CDR3 for beta chain variable domain of TCR clone 30567 (TRBV27, TRBJ2-1)
CASSNGGGSSNEQFF

SEQ ID NO: 61135 - protein, 13 aa, Homo sapiens
  CDR3 for alpha chain variable domain of TCR clone 30568 (TRAV1-2, TRAJ26)
CAVRPNYGQNFVF

SEQ ID NO: 61136 - protein, 14 aa, Homo sapiens
  CDR3 for beta chain variable domain of TCR clone 30568 (TRBV4-1, TRBJ2-5)
CASSQDLTLETQYF

SEQ ID NO: 61137 - protein, 14 aa, Homo sapiens
  CDR3 for alpha chain variable domain of TCR clone 30569 (TRAV13-2, TRAJ10)
CAENITGGGNKPTF

SEQ ID NO: 61138 - protein, 15 aa, Homo sapiens
  CDR3 for beta chain variable domain of TCR clone 30569 (TRBV7-2, TRBJ2-7)
CASSLGGAKSGEQYF

SEQ ID NO: 61139 - protein, 16 aa, Homo sapiens
  CDR3 for alpha chain variable domain of TCR clone 30570 (TRAV23/DV6, TRAJ9)
CAARIGGNTGGFKTIF

SEQ ID NO: 61140 - protein, 14 aa, Homo sapiens
  CDR3 for beta chain variable domain of TCR clone 30570 (TRBV9, TRBJ2-7)
CASSVGVGSYEQYF

SEQ ID NO: 61141 - protein, 16 aa, Homo sapiens
  CDR3 for alpha chain variable domain of TCR clone 30571 (TRAV30, TRAJ24)
CGTEIVDADSCGKFQF

SEQ ID NO: 61142 - protein, 14 aa, Homo sapiens
  CDR3 for beta chain variable domain of TCR clone 30571 (TRBV12-5, TRBJ2-5)
CASGSRTHQEAQYF

SEQ ID NO: 61143 - protein, 23 aa, Homo sapiens
  CDR3 for alpha chain variable domain of TCR clone 30572 (TRAV26-1, )
CIADNASNNHIQNPDPAVYQLRD

SEQ ID NO: 61144 - protein, 13 aa, Homo sapiens
  CDR3 for beta chain variable domain of TCR clone 30572 (TRBV20-1, TRBJ1-1)
CSARGGGNTEAFF

SEQ ID NO: 61145 - protein, 14 aa, Homo sapiens
  CDR3 for alpha chain variable domain of TCR clone 30573 (TRAV13-1, TRAJ40)
CAASMTSGTYKYIF

SEQ ID NO: 61146 - protein, 16 aa, Homo sapiens
  CDR3 for beta chain variable domain of TCR clone 30573 (TRBV20-1, TRBJ1-4)
CSAPGQGLLTNEKLFF

SEQ ID NO: 61147 - protein, 15 aa, Homo sapiens
  CDR3 for alpha chain variable domain of TCR clone 30574 (TRAV17, TRAJ22)
CATVAPSGPARQLTF

SEQ ID NO: 61148 - protein, 16 aa, Homo sapiens
  CDR3 for beta chain variable domain of TCR clone 30574 (TRBV10-3, TRBJ2-7)
CAISADFADRPYEQYF

SEQ ID NO: 61149 - protein, 11 aa, Homo sapiens
  CDR3 for alpha chain variable domain of TCR clone 30575 (TRAV3, TRAJ17)
PRGAAGNKLTF

SEQ ID NO: 61150 - protein, 16 aa, Homo sapiens
  CDR3 for beta chain variable domain of TCR clone 30575 (TRBV7-6, TRBJ2-1)
CASSAPGPSSYNGQFF

SEQ ID NO: 61151 - protein, 13 aa, Homo sapiens
  CDR3 for alpha chain variable domain of TCR clone 30576 (TRAV1-2, TRAJ9)
CAALNTGGFKTIF

SEQ ID NO: 61152 - protein, 13 aa, Homo sapiens
  CDR3 for beta chain variable domain of TCR clone 30576 (TRBV19, TRBJ1-2)
CASSQGQVYGYTF

SEQ ID NO: 61153 - protein, 14 aa, Homo sapiens
  CDR3 for alpha chain variable domain of TCR clone 30577 (TRAV12-2, TRAJ45)
CAVYSGGGADGLTF

SEQ ID NO: 61154 - protein, 14 aa, Homo sapiens
  CDR3 for beta chain variable domain of TCR clone 30577 (TRBV7-2, TRBJ2-7)
CASSPKTSFYEQYF

SEQ ID NO: 61155 - protein, 14 aa, Homo sapiens
  CDR3 for alpha chain variable domain of TCR clone 30578 (TRAV25, TRAJ35)
CARRMEGFGNVLHC

SEQ ID NO: 61156 - protein, 14 aa, Homo sapiens
  CDR3 for beta chain variable domain of TCR clone 30578 (TRBV11-2, TRBJ2-3)
CASSRLARTDTQYF

SEQ ID NO: 61157 - protein, 13 aa, Homo sapiens
  CDR3 for alpha chain variable domain of TCR clone 30579 (TRAV1-2, TRAJ9)
CAVLNTGGFNTIF

SEQ ID NO: 61158 - protein, 14 aa, Homo sapiens
  CDR3 for beta chain variable domain of TCR clone 30579 (TRBV20-1, TRBJ2-3)
CSARGGTSTDTQYF

SEQ ID NO: 61159 - protein, 11 aa, Homo sapiens
  CDR3 for alpha chain variable domain of TCR clone 30580 (TRAV1-1, TRAJ23)
CAVRQGGKLIF

SEQ ID NO: 61160 - protein, 20 aa, Homo sapiens
  CDR3 for beta chain variable domain of TCR clone 30580 (TRBV7-8, TRBJ2-2)
CAISHLFPGPTIHITGELFF

SEQ ID NO: 61161 - protein, 13 aa, Homo sapiens
  CDR3 for alpha chain variable domain of TCR clone 30581 (TRAV27, TRAJ41)
CAGEGNSGYALNF

SEQ ID NO: 61162 - protein, 17 aa, Homo sapiens
  CDR3 for beta chain variable domain of TCR clone 30581 (TRBV20-1, TRBJ2-1)
CSASSSGLAGSYNEQFF

SEQ ID NO: 61163 - protein, 14 aa, Homo sapiens
  CDR3 for alpha chain variable domain of TCR clone 30582 (TRAV9-2, TRAJ39)
CALYIYNAGNMLTF

SEQ ID NO: 61164 - protein, 16 aa, Homo sapiens
  CDR3 for beta chain variable domain of TCR clone 30582 (TRBV28, TRBJ2-7)
CASSFPDRRLTYEQYF

SEQ ID NO: 61165 - protein, 11 aa, Homo sapiens
  CDR3 for alpha chain variable domain of TCR clone 30583 (TRAV8-4, TRAJ26)
CAGGEGQNFVF

SEQ ID NO: 61166 - protein, 11 aa, Homo sapiens
  CDR3 for beta chain variable domain of TCR clone 30583 (TRBV6-3, TRBJ2-3)
CATGQADTQYF

SEQ ID NO: 61167 - protein, 16 aa, Homo sapiens
  CDR3 for alpha chain variable domain of TCR clone 30584 (TRAV30, TRAJ24)
CGTEIVDADSWGNSSL

SEQ ID NO: 61168 - protein, 18 aa, Homo sapiens
  CDR3 for beta chain variable domain of TCR clone 30584 (TRBV11-2, TRBJ2-3)
CASSLGGASRGAPNTQYF

SEQ ID NO: 61169 - protein, 12 aa, Homo sapiens
  CDR3 for alpha chain variable domain of TCR clone 30585 (TRAV21, TRAJ31)
CAVSPARSRLMF

SEQ ID NO: 61170 - protein, 14 aa, Homo sapiens
  CDR3 for beta chain variable domain of TCR clone 30585 (TRBV28, TRBJ2-7)
CASSLLRISYEQYF

SEQ ID NO: 61171 - protein, 12 aa, Homo sapiens
  CDR3 for alpha chain variable domain of TCR clone 30586 (TRAV21, TRAJ33)
CAKMDSNYQLIW

SEQ ID NO: 61172 - protein, 13 aa, Homo sapiens
  CDR3 for beta chain variable domain of TCR clone 30586 (TRBV7-3, TRBJ1-1)
CASSQDWGAEAFF

SEQ ID NO: 61173 - protein, 10 aa, Homo sapiens
  CDR3 for alpha chain variable domain of TCR clone 30587 (TRAV12-3, TRAJ49)
CAMNDDQFYF

SEQ ID NO: 61174 - protein, 12 aa, Homo sapiens
  CDR3 for beta chain variable domain of TCR clone 30587 (TRBV11-2, TRBJ2-2)
CASSLGGGELFF

SEQ ID NO: 61175 - protein, 12 aa, Homo sapiens
  CDR3 for alpha chain variable domain of TCR clone 30588 (TRAV4, TRAJ6)
CLAPGGSYIPTF

SEQ ID NO: 61176 - protein, 17 aa, Homo sapiens
  CDR3 for beta chain variable domain of TCR clone 30588 (TRBV20-1, TRBJ2-2)
CSAGGSGQGGLTGELFF

SEQ ID NO: 61177 - protein, 13 aa, Homo sapiens
  CDR3 for alpha chain variable domain of TCR clone 30589 (TRAV27, TRAJ41)
CAGKGNSGYALNF

SEQ ID NO: 61178 - protein, 14 aa, Homo sapiens
  CDR3 for beta chain variable domain of TCR clone 30589 (TRBV7-2, TRBJ1-1)
CASSFLTGTTEAFF

SEQ ID NO: 61179 - protein, 12 aa, Homo sapiens
  CDR3 for alpha chain variable domain of TCR clone 30590 (TRAV13-1, TRAJ48)
CAANFGNENLTF

SEQ ID NO: 61180 - protein, 20 aa, Homo sapiens
  CDR3 for beta chain variable domain of TCR clone 30590 (TRBV3-1, TRBJ2-6)
CASSPRPGLEGGAGANVLTF

SEQ ID NO: 61181 - protein, 15 aa, Homo sapiens
  CDR3 for alpha chain variable domain of TCR clone 30591 (TRAV3, TRAJ10)
CAVRDGTGGGNKLTF

SEQ ID NO: 61182 - protein, 15 aa, Homo sapiens
  CDR3 for beta chain variable domain of TCR clone 30591 (TRBV4-2, TRBJ1-4)
CASSLVQREVEKLFC

SEQ ID NO: 61183 - protein, 15 aa, Homo sapiens
  CDR3 for alpha chain variable domain of TCR clone 30592 (TRAV21, TRAJ38)
CAVRQDAGNNRKLLW

SEQ ID NO: 61184 - protein, 16 aa, Homo sapiens
  CDR3 for beta chain variable domain of TCR clone 30592 (TRBV4-2, TRBJ1-1)
CASRPLDGGGDTEAFF

SEQ ID NO: 61185 - protein, 14 aa, Homo sapiens
  CDR3 for alpha chain variable domain of TCR clone 30593 (TRAV35, TRAJ10)
CAGILTGGGNKPTF

SEQ ID NO: 61186 - protein, 16 aa, Homo sapiens
  CDR3 for beta chain variable domain of TCR clone 30593 (TRBV12-5, TRBJ2-5)
CASGPRTSGNQETQYF

SEQ ID NO: 61187 - protein, 16 aa, Homo sapiens
  CDR3 for alpha chain variable domain of TCR clone 30594 (TRAV30, TRAJ24)
CGTEIVDADSWGKFQF

SEQ ID NO: 61188 - protein, 15 aa, Homo sapiens
  CDR3 for beta chain variable domain of TCR clone 30594 (TRBV7-2, TRBJ1-2)
CASSPRAGWNYGYTF

SEQ ID NO: 61189 - protein, 12 aa, Homo sapiens
  CDR3 for alpha chain variable domain of TCR clone 30595 (TRAV12-3, TRAJ17)
CAMTPTGNKLTF

SEQ ID NO: 61190 - protein, 15 aa, Homo sapiens
  CDR3 for beta chain variable domain of TCR clone 30595 (TRBV6-3, TRBJ2-7)
CASSSPGTVFYEQYF

SEQ ID NO: 61191 - protein, 14 aa, Homo sapiens
  CDR3 for alpha chain variable domain of TCR clone 30596 (TRAV8-3, TRAJ9)
CAVVYNTEGFKTIF

SEQ ID NO: 61192 - protein, 14 aa, Homo sapiens
  CDR3 for beta chain variable domain of TCR clone 30596 (TRBV7-3, TRBJ2-2)
CASSSGGYTGELFF

SEQ ID NO: 61193 - protein, 15 aa, Homo sapiens
  CDR3 for alpha chain variable domain of TCR clone 30597 (TRAV8-3, TRAJ45)
CASSYSGRGADGLTF

SEQ ID NO: 61194 - protein, 13 aa, Homo sapiens
  CDR3 for beta chain variable domain of TCR clone 30597 (TRBV10-3, TRBJ2-7)
CASKLAVNYEQYF

SEQ ID NO: 61195 - protein, 14 aa, Homo sapiens
  CDR3 for alpha chain variable domain of TCR clone 30598 (TRAV13-1, TRAJ13)
CAASRVGGYQKVTL

SEQ ID NO: 61196 - protein, 17 aa, Homo sapiens
  CDR3 for beta chain variable domain of TCR clone 30598 (TRBV15, TRBJ1-5)
CATSRAPPGTRNQPQHF

SEQ ID NO: 61197 - protein, 16 aa, Homo sapiens
  CDR3 for alpha chain variable domain of TCR clone 30599 (TRAV23/DV6, TRAJ9)
CAASIGGNTGGLKTIF

SEQ ID NO: 61198 - protein, 14 aa, Homo sapiens
  CDR3 for beta chain variable domain of TCR clone 30599 (TRBV9, TRBJ2-7)
CASSVGVGSYEQYF

SEQ ID NO: 61199 - protein, 15 aa, Homo sapiens
  CDR3 for alpha chain variable domain of TCR clone 30600 (TRAV27, TRAJ38)
CAARRNAGNNRKLIW

SEQ ID NO: 61200 - protein, 13 aa, Homo sapiens
  CDR3 for beta chain variable domain of TCR clone 30600 (TRBV12-5, TRBJ2-3)
CASGDRQSYTQYF

SEQ ID NO: 61201 - protein, 14 aa, Homo sapiens
  CDR3 for alpha chain variable domain of TCR clone 30601 (TRAV35, TRAJ33)
CAGSSQDSNYQLIW

SEQ ID NO: 61202 - protein, 15 aa, Homo sapiens
  CDR3 for beta chain variable domain of TCR clone 30601 (TRBV20-1, TRBJ2-7)
RSAESGTSGAYEQYF

SEQ ID NO: 61203 - protein, 12 aa, Homo sapiens
  CDR3 for alpha chain variable domain of TCR clone 30602 (TRAV2, TRAJ9)
YAVGAGGFKTIF

SEQ ID NO: 61204 - protein, 16 aa, Homo sapiens
  CDR3 for beta chain variable domain of TCR clone 30602 (TRBV13, TRBJ2-2)
CASSPRTGEHTGELFF

SEQ ID NO: 61205 - protein, 12 aa, Homo sapiens
  CDR3 for alpha chain variable domain of TCR clone 30603 (TRAV3, TRAJ20)
CAVRGPDYKLSF

SEQ ID NO: 61206 - protein, 14 aa, Homo sapiens
  CDR3 for beta chain variable domain of TCR clone 30603 (TRBV7-2, TRBJ2-7)
CASSPKTSFYEQYF

SEQ ID NO: 61207 - protein, 12 aa, Homo sapiens
  CDR3 for alpha chain variable domain of TCR clone 30604 (TRAV13-1, TRAJ21)
CAAREGFNKFYF

SEQ ID NO: 61208 - protein, 16 aa, Homo sapiens
  CDR3 for beta chain variable domain of TCR clone 30604 (TRBV7-2, TRBJ2-6)
CASSLAGRSGANVLTF

SEQ ID NO: 61209 - protein, 13 aa, Homo sapiens
  CDR3 for alpha chain variable domain of TCR clone 30605 (TRAV12-2, TRAJ42)
CAVKRGSLGNLIF

SEQ ID NO: 61210 - protein, 16 aa, Homo sapiens
  CDR3 for beta chain variable domain of TCR clone 30605 (TRBV9, TRBJ2-2)
CASSAMGKGNTGELFF

SEQ ID NO: 61211 - protein, 12 aa, Homo sapiens
  CDR3 for alpha chain variable domain of TCR clone 30606 (TRAV12-1, TRAJ9)
CVVHTGGFKTIS

SEQ ID NO: 61212 - protein, 14 aa, Homo sapiens
  CDR3 for beta chain variable domain of TCR clone 30606 (TRBV7-2, TRBJ2-7)
CASSPKTSFYEQYF

SEQ ID NO: 61213 - protein, 13 aa, Homo sapiens
  CDR3 for alpha chain variable domain of TCR clone 30607 (TRAV8-3, TRAJ28)
CAVGAVGSYQLTF

SEQ ID NO: 61214 - protein, 15 aa, Homo sapiens
  CDR3 for beta chain variable domain of TCR clone 30607 (TRBV7-9, TRBJ1-5)
CASNQGHQPNQPQHF

SEQ ID NO: 61215 - protein, 18 aa, Homo sapiens
  CDR3 for alpha chain variable domain of TCR clone 30608 (TRAV12-3, TRAJ52)
CAMSLGGAGGTSYGKLTF

SEQ ID NO: 61216 - protein, 15 aa, Homo sapiens
  CDR3 for beta chain variable domain of TCR clone 30608 (TRBV27, TRBJ1-6)
CASSFDRGLGSPLHF

SEQ ID NO: 61217 - protein, 13 aa, Homo sapiens
  CDR3 for alpha chain variable domain of TCR clone 30609 (TRAV2, TRAJ40)
CVVVTSGTYKYIF

SEQ ID NO: 61218 - protein, 15 aa, Homo sapiens
  CDR3 for beta chain variable domain of TCR clone 30609 (TRBV11-3, TRBJ2-3)
CASLKDGREGDTQYF

SEQ ID NO: 61219 - protein, 12 aa, Homo sapiens
  CDR3 for alpha chain variable domain of TCR clone 30610 (TRAV1-1, TRAJ15)
CAVGQAGTALIL

SEQ ID NO: 61220 - protein, 16 aa, Homo sapiens
  CDR3 for beta chain variable domain of TCR clone 30610 (TRBV12-4, TRBJ2-7)
CASSPEGQGSSYEQYF

SEQ ID NO: 61221 - protein, 19 aa, Homo sapiens
  CDR3 for alpha chain variable domain of TCR clone 30611 (TRAV26-1, TRAJ52)
CIVRAHRNAGGTSYGKLPF

SEQ ID NO: 61222 - protein, 15 aa, Homo sapiens
  CDR3 for beta chain variable domain of TCR clone 30611 (TRBV29-1, TRBJ2-1)
CSGRDRKSSYNEQFF

SEQ ID NO: 61223 - protein, 16 aa, Homo sapiens
  CDR3 for alpha chain variable domain of TCR clone 30612 (TRAV30, TRAJ24)
CGTEIVDADSWGKFQF

SEQ ID NO: 61224 - protein, 13 aa, Homo sapiens
  CDR3 for beta chain variable domain of TCR clone 30612 (TRBV27, TRBJ1-4)
CASSLMGDEKLFF

SEQ ID NO: 61225 - protein, 11 aa, Homo sapiens
  CDR3 for alpha chain variable domain of TCR clone 30613 (TRAV12-3, TRAJ27)
CEMANAGKSTF

SEQ ID NO: 61226 - protein, 13 aa, Homo sapiens
  CDR3 for beta chain variable domain of TCR clone 30613 (TRBV20-1, TRBJ1-1)
CSARVGGNTEAFF

SEQ ID NO: 61227 - protein, 17 aa, Homo sapiens
  CDR3 for alpha chain variable domain of TCR clone 30614 (TRAV3, TRAJ6)
CAVRDGPRAGGSYIPTF

SEQ ID NO: 61228 - protein, 14 aa, Homo sapiens
  CDR3 for beta chain variable domain of TCR clone 30614 (TRBV7-2, TRBJ2-7)
CASSPKTSFYELYF

SEQ ID NO: 61229 - protein, 14 aa, Homo sapiens
  CDR3 for alpha chain variable domain of TCR clone 30615 (TRAV8-2, TRAJ37)
CVVSDLGNTGKLIF

SEQ ID NO: 61230 - protein, 18 aa, Homo sapiens
  CDR3 for beta chain variable domain of TCR clone 30615 (TRBV7-2, TRBJ2-7)
CASSLSGRGLAGGYEQYF

SEQ ID NO: 61231 - protein, 12 aa, Homo sapiens
  CDR3 for alpha chain variable domain of TCR clone 30616 (TRAV2, TRAJ33)
CAFIDSNYQLIW

SEQ ID NO: 61232 - protein, 16 aa, Homo sapiens
  CDR3 for beta chain variable domain of TCR clone 30616 (TRBV2, TRBJ2-7)
CASSEPWTGPSYEQYF

SEQ ID NO: 61233 - protein, 11 aa, Homo sapiens
  CDR3 for alpha chain variable domain of TCR clone 30617 (TRAV2, TRAJ13)
CASGGYQKVTF

SEQ ID NO: 61234 - protein, 13 aa, Homo sapiens
  CDR3 for beta chain variable domain of TCR clone 30617 (TRBV7-6, TRBJ1-2)
CASSLVADYGYTF

SEQ ID NO: 61235 - protein, 21 aa, Homo sapiens
  CDR3 for alpha chain variable domain of TCR clone 30618 (TRAV3, TRAJ17)
CAVRARRGGRSCRQQANLWRR

SEQ ID NO: 61236 - protein, 14 aa, Homo sapiens
  CDR3 for beta chain variable domain of TCR clone 30618 (TRBV4-1, TRBJ2-2)
CASSQAVNTGELFF

SEQ ID NO: 61237 - protein, 11 aa, Homo sapiens
  CDR3 for alpha chain variable domain of TCR clone 30619 (TRAV2, TRAJ13)
CASGGYQKVTF

SEQ ID NO: 61238 - protein, 16 aa, Homo sapiens
  CDR3 for beta chain variable domain of TCR clone 30619 (TRBV19, TRBJ2-1)
CTSSKAGPSSYNEQFF

SEQ ID NO: 61239 - protein, 14 aa, Homo sapiens
  CDR3 for alpha chain variable domain of TCR clone 30620 (TRAV9-2, TRAJ39)
CALYTYNAGNMLTF

SEQ ID NO: 61240 - protein, 17 aa, Homo sapiens
  CDR3 for beta chain variable domain of TCR clone 30620 (TRBV20-1, TRBJ2-2)
CSASGSGQGGLTGELFF

SEQ ID NO: 61241 - protein, 15 aa, Homo sapiens
  CDR3 for alpha chain variable domain of TCR clone 30621 (TRAV23/DV6, TRAJ18)
CAARYRGSTLGRLYC

SEQ ID NO: 61242 - protein, 13 aa, Homo sapiens
  CDR3 for beta chain variable domain of TCR clone 30621 (TRBV7-2, TRBJ2-7)
CASSSPSGSEQYF

SEQ ID NO: 61243 - protein, 14 aa, Homo sapiens
  CDR3 for alpha chain variable domain of TCR clone 30622 (TRAV1-2, TRAJ16)
CAVNRFSDGQKLLF

SEQ ID NO: 61244 - protein, 13 aa, Homo sapiens
  CDR3 for beta chain variable domain of TCR clone 30622 (TRBV19, TRBJ2-7)
CASSPRQSYEQYF

SEQ ID NO: 61245 - protein, 15 aa, Homo sapiens
  CDR3 for alpha chain variable domain of TCR clone 30623 (TRAV4, TRAJ10)
CLVGDEEGGGNKLTF

SEQ ID NO: 61246 - protein, 15 aa, Homo sapiens
  CDR3 for beta chain variable domain of TCR clone 30623 (TRBV7-2, TRBJ2-7)
CVSSLTGQGTYEQYF

SEQ ID NO: 61247 - protein, 12 aa, Homo sapiens
  CDR3 for alpha chain variable domain of TCR clone 30624 (TRAV8-3, TRAJ20)
CAVDFNDYKLSF

SEQ ID NO: 61248 - protein, 17 aa, Homo sapiens
  CDR3 for beta chain variable domain of TCR clone 30624 (TRBV7-8, TRBJ2-6)
CASSAGTGGAGANDLTF

SEQ ID NO: 61249 - protein, 13 aa, Homo sapiens
  CDR3 for alpha chain variable domain of TCR clone 30625 (TRAV8-6, TRAJ8)
CAVSNTVFQKLVF

SEQ ID NO: 61250 - protein, 15 aa, Homo sapiens
  CDR3 for beta chain variable domain of TCR clone 30625 (TRBV28, TRBJ2-5)
CASSSGRTIQETQYF

SEQ ID NO: 61251 - protein, 12 aa, Homo sapiens
  CDR3 for alpha chain variable domain of TCR clone 30626 (TRAV21, TRAJ31)
CAVWGNNARLMF

SEQ ID NO: 61252 - protein, 16 aa, Homo sapiens
  CDR3 for beta chain variable domain of TCR clone 30626 (TRBV27, TRBJ2-5)
YASSYGPGGQKETQYF

SEQ ID NO: 61253 - protein, 15 aa, Homo sapiens
  CDR3 for alpha chain variable domain of TCR clone 30627 (TRAV4, TRAJ42)
CLVGGDGGSQGNLIF

SEQ ID NO: 61254 - protein, 16 aa, Homo sapiens
  CDR3 for beta chain variable domain of TCR clone 30627 (TRBV27, TRBJ1-1)
CASSTRTGGVGTEAFF

SEQ ID NO: 61255 - protein, 12 aa, Homo sapiens
  CDR3 for alpha chain variable domain of TCR clone 30628 (TRAV13-1, TRAJ21)
RAAKEGFNKFYF

SEQ ID NO: 61256 - protein, 14 aa, Homo sapiens
  CDR3 for beta chain variable domain of TCR clone 30628 (TRBV5-4, TRBJ1-1)
CASSLDSRRDEAFF

SEQ ID NO: 61257 - protein, 12 aa, Homo sapiens
  CDR3 for alpha chain variable domain of TCR clone 30629 (TRAV29/DV5, TRAJ15)
CASNQAGTVLIF

SEQ ID NO: 61258 - protein, 15 aa, Homo sapiens
  CDR3 for beta chain variable domain of TCR clone 30629 (TRBV11-2, TRBJ2-2)
CASSSDRVNAGELFF

SEQ ID NO: 61259 - protein, 14 aa, Homo sapiens
  CDR3 for alpha chain variable domain of TCR clone 30630 (TRAV17, TRAJ57)
CATDPQGGSEKLVF

SEQ ID NO: 61260 - protein, 13 aa, Homo sapiens
  CDR3 for beta chain variable domain of TCR clone 30630 (TRBV7-9, TRBJ1-2)
CASSLKQNYGYTF

SEQ ID NO: 61261 - protein, 14 aa, Homo sapiens
  CDR3 for alpha chain variable domain of TCR clone 30631 (TRAV1-2, TRAJ16)
CAVNRFSDGQKLLF

SEQ ID NO: 61262 - protein, 15 aa, Homo sapiens
  CDR3 for beta chain variable domain of TCR clone 30631 (TRBV20-1, TRBJ1-1)
CSARSAATSNTEAFF

SEQ ID NO: 61263 - protein, 15 aa, Homo sapiens
  CDR3 for alpha chain variable domain of TCR clone 30632 (TRAV2, TRAJ15)
CAVEDRCQAGTALIF

SEQ ID NO: 61264 - protein, 13 aa, Homo sapiens
  CDR3 for beta chain variable domain of TCR clone 30632 (TRBV10-2, TRBJ2-7)
CASGASGGYEQYF

SEQ ID NO: 61265 - protein, 18 aa, Homo sapiens
  CDR3 for alpha chain variable domain of TCR clone 30633 (TRAV21, TRAJ52)
CAVRPSPAGGTSYGKLTF

SEQ ID NO: 61266 - protein, 17 aa, Homo sapiens
  CDR3 for beta chain variable domain of TCR clone 30633 (TRBV13, TRBJ2-3)
CASSLSRVAGGRNTQYF

SEQ ID NO: 61267 - protein, 12 aa, Homo sapiens
  CDR3 for alpha chain variable domain of TCR clone 30634 (TRAV12-3, TRAJ17)
CAMTLTGNKLTF

SEQ ID NO: 61268 - protein, 13 aa, Homo sapiens
  CDR3 for beta chain variable domain of TCR clone 30634 (TRBV2, TRBJ1-1)
CASRWTVNTEAFF

SEQ ID NO: 61269 - protein, 14 aa, Homo sapiens
  CDR3 for alpha chain variable domain of TCR clone 30635 (TRAV12-3, TRAJ54)
CAMSALQGAQKLVF

SEQ ID NO: 61270 - protein, 15 aa, Homo sapiens
  CDR3 for beta chain variable domain of TCR clone 30635 (TRBV19, TRBJ2-4)
CASNTPGIAKNIQYF

SEQ ID NO: 61271 - protein, 18 aa, Homo sapiens
  CDR3 for alpha chain variable domain of TCR clone 30636 (TRAV4, TRAJ20)
CCVLLPRGGQGNDYKLSF

SEQ ID NO: 61272 - protein, 15 aa, Homo sapiens
  CDR3 for beta chain variable domain of TCR clone 30636 (TRBV18, TRBJ2-7)
CASSPSSTGNYEQYF

SEQ ID NO: 61273 - protein, 13 aa, Homo sapiens
  CDR3 for alpha chain variable domain of TCR clone 30637 (TRAV21, TRAJ27)
CAARPDNAGKSTF

SEQ ID NO: 61274 - protein, 15 aa, Homo sapiens
  CDR3 for beta chain variable domain of TCR clone 30637 (TRBV11-3, TRBJ2-7)
CASSPGPASSYEQYF

SEQ ID NO: 61275 - protein, 13 aa, Homo sapiens
  CDR3 for alpha chain variable domain of TCR clone 30638 (TRAV12-2, TRAJ20)
CAVYPSNDYKLSF

SEQ ID NO: 61276 - protein, 13 aa, Homo sapiens
  CDR3 for beta chain variable domain of TCR clone 30638 (TRBV7-9, TRBJ1-2)
CASSLKQNYGYTF

SEQ ID NO: 61277 - protein, 12 aa, Homo sapiens
  CDR3 for alpha chain variable domain of TCR clone 30639 (TRAV12-3, TRAJ17)
CAMTLTGNKLTF

SEQ ID NO: 61278 - protein, 17 aa, Homo sapiens
  CDR3 for beta chain variable domain of TCR clone 30639 (TRBV20-1, TRBJ2-1)
CSARDPLAGVWDNEQFF

SEQ ID NO: 61279 - protein, 14 aa, Homo sapiens
  CDR3 for alpha chain variable domain of TCR clone 30640 (TRAV8-4, TRAJ9)
RAVRINTGGFKTIF

SEQ ID NO: 61280 - protein, 15 aa, Homo sapiens
  CDR3 for beta chain variable domain of TCR clone 30640 (TRBV10-2, TRBJ2-6)
CASSEQGTGANVLTF

SEQ ID NO: 61281 - protein, 14 aa, Homo sapiens
  CDR3 for alpha chain variable domain of TCR clone 30641 (TRAV35, TRAJ56)
CAGQLTGANSKLTF

SEQ ID NO: 61282 - protein, 13 aa, Homo sapiens
  CDR3 for beta chain variable domain of TCR clone 30641 (TRBV27, TRBJ1-1)
CASSLSIGAEAFF

SEQ ID NO: 61283 - protein, 11 aa, Homo sapiens
  CDR3 for alpha chain variable domain of TCR clone 30642 (TRAV21, TRAJ11)
CAVNGYSSLTF

SEQ ID NO: 61284 - protein, 11 aa, Homo sapiens
  CDR3 for beta chain variable domain of TCR clone 30642 (TRBV19, TRBJ1-1)
CASSIGSEAFF

SEQ ID NO: 61285 - protein, 14 aa, Homo sapiens
  CDR3 for alpha chain variable domain of TCR clone 30643 (TRAV16, TRAJ39)
CALSKNNAGNMLTF

SEQ ID NO: 61286 - protein, 16 aa, Homo sapiens
  CDR3 for beta chain variable domain of TCR clone 30643 (TRBV6-6, TRBJ2-1)
CASSYSFSGSYSEQFF

SEQ ID NO: 61287 - protein, 14 aa, Homo sapiens
  CDR3 for alpha chain variable domain of TCR clone 30644 (TRAV13-1, TRAJ44)
CAAKATGTASKLTF

SEQ ID NO: 61288 - protein, 17 aa, Homo sapiens
  CDR3 for beta chain variable domain of TCR clone 30644 (TRBV7-3, TRBJ2-3)
CASSLMKRIRGADTQYF

SEQ ID NO: 61289 - protein, 14 aa, Homo sapiens
  CDR3 for alpha chain variable domain of TCR clone 30645 (TRAV17, TRAJ22)
CTTSPSGSARQLTF

SEQ ID NO: 61290 - protein, 15 aa, Homo sapiens
  CDR3 for beta chain variable domain of TCR clone 30645 (TRBV4-1, TRBJ2-5)
CASSQWDLYQETQYF

SEQ ID NO: 61291 - protein, 12 aa, Homo sapiens
  CDR3 for alpha chain variable domain of TCR clone 30646 (TRAV12-3, TRAJ20)
CAMVRGDYKLSF

SEQ ID NO: 61292 - protein, 14 aa, Homo sapiens
  CDR3 for beta chain variable domain of TCR clone 30646 (TRBV5-5, TRBJ1-5)
CASGGQGVDQPQHF

SEQ ID NO: 61293 - protein, 14 aa, Homo sapiens
  CDR3 for alpha chain variable domain of TCR clone 30647 (TRAV17, TRAJ22)
CATSPSGSARQLTF

SEQ ID NO: 61294 - protein, 15 aa, Homo sapiens
  CDR3 for beta chain variable domain of TCR clone 30647 (TRBV11-2, TRBJ2-5)
CASSLGAGGVETQYF

SEQ ID NO: 61295 - protein, 16 aa, Homo sapiens
  CDR3 for alpha chain variable domain of TCR clone 30648 (TRAV4, TRAJ9)
CLVGDPNRPGGLKTIF

SEQ ID NO: 61296 - protein, 16 aa, Homo sapiens
  CDR3 for beta chain variable domain of TCR clone 30648 (TRBV28, TRBJ1-4)
CASSPPYRGRSEKLFF

SEQ ID NO: 61297 - protein, 11 aa, Homo sapiens
  CDR3 for alpha chain variable domain of TCR clone 30649 (TRAV12-1, TRAJ43)
CVEYDNNDMRF

SEQ ID NO: 61298 - protein, 15 aa, Homo sapiens
  CDR3 for beta chain variable domain of TCR clone 30649 (TRBV18, TRBJ2-5)
CASSPRASEAETQYS

SEQ ID NO: 61299 - protein, 11 aa, Homo sapiens
  CDR3 for alpha chain variable domain of TCR clone 30650 (TRAV2, TRAJ33)
CAVESNYQLIW

SEQ ID NO: 61300 - protein, 15 aa, Homo sapiens
  CDR3 for beta chain variable domain of TCR clone 30650 (TRBV7-9, TRBJ1-5)
CASSQGHQPNQPQHF

SEQ ID NO: 61301 - protein, 22 aa, Homo sapiens
  CDR3 for alpha chain variable domain of TCR clone 30651 (TRAV2, TRAJ10)
ILQVREADAAVYYTGGVNKLTF

SEQ ID NO: 61302 - protein, 16 aa, Homo sapiens
  CDR3 for beta chain variable domain of TCR clone 30651 (TRBV29-1, TRBJ2-5)
CSVEGLAGDYQETQYF

SEQ ID NO: 61303 - protein, 18 aa, Homo sapiens
  CDR3 for alpha chain variable domain of TCR clone 30652 (TRAV3, TRAJ32)
CAVRDIRGYGGATNKLIL

SEQ ID NO: 61304 - protein, 15 aa, Homo sapiens
  CDR3 for beta chain variable domain of TCR clone 30652 (TRBV12-4, TRBJ2-2)
CASSLGVRHTGELFF

SEQ ID NO: 61305 - protein, 13 aa, Homo sapiens
  CDR3 for alpha chain variable domain of TCR clone 30653 (TRAV27, TRAJ8)
CAGGPTGFQKLVF

SEQ ID NO: 61306 - protein, 15 aa, Homo sapiens
  CDR3 for beta chain variable domain of TCR clone 30653 (TRBV9, TRBJ1-6)
CASSVAGTGDSPLHF

SEQ ID NO: 61307 - protein, 14 aa, Homo sapiens
  CDR3 for alpha chain variable domain of TCR clone 30654 (TRAV1-2, TRAJ16)
CAVNRLSDGQKLLF

SEQ ID NO: 61308 - protein, 12 aa, Homo sapiens
  CDR3 for beta chain variable domain of TCR clone 30654 (TRBV11-2, TRBJ2-2)
CASSLGGGELFF

SEQ ID NO: 61309 - protein, 15 aa, Homo sapiens
  CDR3 for alpha chain variable domain of TCR clone 30655 (TRAV8-3, TRAJ44)
CAVGAGAGTASKLTF

SEQ ID NO: 61310 - protein, 13 aa, Homo sapiens
  CDR3 for beta chain variable domain of TCR clone 30655 (TRBV7-9, TRBJ1-2)
CASSLKQNYGYTF

SEQ ID NO: 61311 - protein, 13 aa, Homo sapiens
  CDR3 for alpha chain variable domain of TCR clone 30656 (TRAV6, TRAJ33)
CALPMDSNYQLIW

SEQ ID NO: 61312 - protein, 11 aa, Homo sapiens
  CDR3 for beta chain variable domain of TCR clone 30656 (TRBV11-2, TRBJ2-2)
CASSLPGELFF

SEQ ID NO: 61313 - protein, 13 aa, Homo sapiens
  CDR3 for alpha chain variable domain of TCR clone 30657 (TRAV2, TRAJ40)
CAVVTSGTYKYIF

SEQ ID NO: 61314 - protein, 15 aa, Homo sapiens
  CDR3 for beta chain variable domain of TCR clone 30657 (TRBV19, TRBJ1-6)
CASSTQGAVGSPLHF

SEQ ID NO: 61315 - protein, 14 aa, Homo sapiens
  CDR3 for alpha chain variable domain of TCR clone 30658 (TRAV21, TRAJ35)
CAVMPIGFGNELHC

SEQ ID NO: 61316 - protein, 12 aa, Homo sapiens
  CDR3 for beta chain variable domain of TCR clone 30658 (TRBV7-9, TRBJ2-7)
CASSIKREEQYF

SEQ ID NO: 61317 - protein, 10 aa, Homo sapiens
  CDR3 for alpha chain variable domain of TCR clone 30659 (TRAV29/DV5, TRAJ31)
CSKRNPRLMF

SEQ ID NO: 61318 - protein, 14 aa, Homo sapiens
  CDR3 for beta chain variable domain of TCR clone 30659 (TRBV7-8, TRBJ2-7)
CASSVGQGAYEQYF

SEQ ID NO: 61319 - protein, 13 aa, Homo sapiens
  CDR3 for alpha chain variable domain of TCR clone 30660 (TRAV12-3, TRAJ9)
CAMRNTGGFKTNF

SEQ ID NO: 61320 - protein, 14 aa, Homo sapiens
  CDR3 for beta chain variable domain of TCR clone 30660 (TRBV11-2, TRBJ2-7)
CASSSTGEGYEQYF

SEQ ID NO: 61321 - protein, 14 aa, Homo sapiens
  CDR3 for alpha chain variable domain of TCR clone 30661 (TRAV17, TRAJ35)
CATDRPGFGNVLHC

SEQ ID NO: 61322 - protein, 15 aa, Homo sapiens
  CDR3 for beta chain variable domain of TCR clone 30661 (TRBV20-1, TRBJ2-7)
CSARDRVSGMDEQYF

SEQ ID NO: 61323 - protein, 22 aa, Homo sapiens
  CDR3 for alpha chain variable domain of TCR clone 30662 (TRAV2, TRAJ22)
SSSLLILRVREADAAEQRQLTF

SEQ ID NO: 61324 - protein, 16 aa, Homo sapiens
  CDR3 for beta chain variable domain of TCR clone 30662 (TRBV2, TRBJ2-5)
CASSETQGVGEETQYF

SEQ ID NO: 61325 - protein, 12 aa, Homo sapiens
  CDR3 for alpha chain variable domain of TCR clone 30663 (TRAV12-1, TRAJ40)
CVVYSGTSKYIF

SEQ ID NO: 61326 - protein, 18 aa, Homo sapiens
  CDR3 for beta chain variable domain of TCR clone 30663 (TRBV11-2, TRBJ2-3)
CASSLGGASRGAPNTQYF

SEQ ID NO: 61327 - protein, 19 aa, Homo sapiens
  CDR3 for alpha chain variable domain of TCR clone 30664 (TRAV26-1, TRAJ52)
CIVRAHCNAGGTSYGKLTF

SEQ ID NO: 61328 - protein, 13 aa, Homo sapiens
  CDR3 for beta chain variable domain of TCR clone 30664 (TRBV19, TRBJ2-7)
CASRKAGGSEQYF

SEQ ID NO: 61329 - protein, 13 aa, Homo sapiens
  CDR3 for alpha chain variable domain of TCR clone 30665 (TRAV6, TRAJ45)
SPFSGGGADGLTF

SEQ ID NO: 61330 - protein, 14 aa, Homo sapiens
  CDR3 for beta chain variable domain of TCR clone 30665 (TRBV12-4, TRBJ2-3)
CASSLRGYTDTQYF

SEQ ID NO: 61331 - protein, 17 aa, Homo sapiens
  CDR3 for alpha chain variable domain of TCR clone 30666 (TRAV3, TRAJ38)
CAVRDCLNAGNNRKLIW

SEQ ID NO: 61332 - protein, 13 aa, Homo sapiens
  CDR3 for beta chain variable domain of TCR clone 30666 (TRBV10-3, TRBJ2-7)
CASKLAVNYEQYF

SEQ ID NO: 61333 - protein, 14 aa, Homo sapiens
  CDR3 for alpha chain variable domain of TCR clone 30667 (TRAV20, TRAJ56)
CAVQFGGANSKLTF

SEQ ID NO: 61334 - protein, 15 aa, Homo sapiens
  CDR3 for beta chain variable domain of TCR clone 30667 (TRBV19, TRBJ1-5)
CASSDSGPRNQPQHF

SEQ ID NO: 61335 - protein, 16 aa, Homo sapiens
  CDR3 for alpha chain variable domain of TCR clone 30668 (TRAV13-1, TRAJ17)
CAASKGVKAAGNKLTF

SEQ ID NO: 61336 - protein, 15 aa, Homo sapiens
  CDR3 for beta chain variable domain of TCR clone 30668 (TRBV20-1, TRBJ1-5)
CSAREGGYSNQPRHF

SEQ ID NO: 61337 - protein, 13 aa, Homo sapiens
  CDR3 for alpha chain variable domain of TCR clone 30669 (TRAV13-1, TRAJ43)
CAASLSNNNDMRF

SEQ ID NO: 61338 - protein, 21 aa, Homo sapiens
  CDR3 for beta chain variable domain of TCR clone 30669 (TRBV5-1, TRBJ2-5)
RGSWCSVSAGCWGAGEKTQYF

SEQ ID NO: 61339 - protein, 12 aa, Homo sapiens
  CDR3 for alpha chain variable domain of TCR clone 30670 (TRAV12-1, TRAJ40)
CVVYSGTYKYIF

SEQ ID NO: 61340 - protein, 21 aa, Homo sapiens
  CDR3 for beta chain variable domain of TCR clone 30670 (TRBV7-6, TRBJ2-1)
SRTRPCIAVPAAWGGADEQFF

SEQ ID NO: 61341 - protein, 13 aa, Homo sapiens
  CDR3 for alpha chain variable domain of TCR clone 30671 (TRAV8-3, TRAJ36)
CAVGATGANNLFF

SEQ ID NO: 61342 - protein, 15 aa, Homo sapiens
  CDR3 for beta chain variable domain of TCR clone 30671 (TRBV7-2, TRBJ1-2)
CAISPRAGWNYGYTF

SEQ ID NO: 61343 - protein, 11 aa, Homo sapiens
  CDR3 for alpha chain variable domain of TCR clone 30672 (TRAV2, TRAJ23)
CAVETRGKLIL

SEQ ID NO: 61344 - protein, 14 aa, Homo sapiens
  CDR3 for beta chain variable domain of TCR clone 30672 (TRBV2, TRBJ2-3)
CASSEGQNTDTQYF

SEQ ID NO: 61345 - protein, 14 aa, Homo sapiens
  CDR3 for alpha chain variable domain of TCR clone 30673 (TRAV20, TRAJ56)
CAVQVGGANSKLAF

SEQ ID NO: 61346 - protein, 14 aa, Homo sapiens
  CDR3 for beta chain variable domain of TCR clone 30673 (TRBV20-1, TRBJ2-7)
CSAKRGRSSYEQYF

SEQ ID NO: 61347 - protein, 13 aa, Homo sapiens
  CDR3 for alpha chain variable domain of TCR clone 30674 (TRAV8-6, TRAJ16)
CAVSSPDGQKLLF

SEQ ID NO: 61348 - protein, 14 aa, Homo sapiens
  CDR3 for beta chain variable domain of TCR clone 30674 (TRBV18, TRBJ1-2)
RVAIFLCANYGYTF

SEQ ID NO: 61349 - protein, 11 aa, Homo sapiens
  CDR3 for alpha chain variable domain of TCR clone 30675 (TRAV3, TRAJ32)
CAVGEGIMVVL

SEQ ID NO: 61350 - protein, 13 aa, Homo sapiens
  CDR3 for beta chain variable domain of TCR clone 30675 (TRBV2, TRBJ1-1)
CASSEGGNTEAFF

SEQ ID NO: 61351 - protein, 16 aa, Homo sapiens
  CDR3 for alpha chain variable domain of TCR clone 30676 (TRAV3, TRAJ21)
CAVGDIERGNFNKFYF

SEQ ID NO: 61352 - protein, 16 aa, Homo sapiens
  CDR3 for beta chain variable domain of TCR clone 30676 (TRBV12-4, TRBJ1-5)
CASSRPVGGSNQPQHF

SEQ ID NO: 61353 - protein, 13 aa, Homo sapiens
  CDR3 for alpha chain variable domain of TCR clone 30677 (TRAV12-1, TRAJ34)
CVVTGYNTDKLIF

SEQ ID NO: 61354 - protein, 13 aa, Homo sapiens
  CDR3 for beta chain variable domain of TCR clone 30677 (TRBV28, TRBJ2-7)
CASKAGGVYGQYF

SEQ ID NO: 61355 - protein, 13 aa, Homo sapiens
  CDR3 for alpha chain variable domain of TCR clone 30678 (TRAV38-1, TRAJ42)
CARWGRSQGNLIF

SEQ ID NO: 61356 - protein, 17 aa, Homo sapiens
  CDR3 for beta chain variable domain of TCR clone 30678 (TRBV20-1, TRBJ2-1)
CSARDPLAGVWDNEQFF

SEQ ID NO: 61357 - protein, 11 aa, Homo sapiens
  CDR3 for alpha chain variable domain of TCR clone 30679 (TRAV21, TRAJ41)
CAVRSGYALNF

SEQ ID NO: 61358 - protein, 13 aa, Homo sapiens
  CDR3 for beta chain variable domain of TCR clone 30679 (TRBV7-9, TRBJ1-2)
CASSLKQNYGDTF

SEQ ID NO: 61359 - protein, 13 aa, Homo sapiens
  CDR3 for alpha chain variable domain of TCR clone 30680 (TRAV8-3, TRAJ28)
CAVGAVGSYQLTF

SEQ ID NO: 61360 - protein, 15 aa, Homo sapiens
  CDR3 for beta chain variable domain of TCR clone 30680 (TRBV7-9, TRBJ1-5)
CASSQGHKPNQPQHF

SEQ ID NO: 61361 - protein, 16 aa, Homo sapiens
  CDR3 for alpha chain variable domain of TCR clone 30681 (TRAV21, TRAJ52)
CAATNAGGTSYGKLTF

SEQ ID NO: 61362 - protein, 13 aa, Homo sapiens
  CDR3 for beta chain variable domain of TCR clone 30681 (TRBV20-1, TRBJ2-3)
CSARLAGTDTQYF

SEQ ID NO: 61363 - protein, 14 aa, Homo sapiens
  CDR3 for alpha chain variable domain of TCR clone 30682 (TRAV17, TRAJ16)
CAKADFSDGQKLLF

SEQ ID NO: 61364 - protein, 15 aa, Homo sapiens
  CDR3 for beta chain variable domain of TCR clone 30682 (TRBV18, TRBJ2-1)
CASSPPSASYNEQFF

SEQ ID NO: 61365 - protein, 19 aa, Homo sapiens
  CDR3 for alpha chain variable domain of TCR clone 30683 (TRAV1-2, TRAJ26)
CLLPLCCERPDNYGQNFVF

SEQ ID NO: 61366 - protein, 17 aa, Homo sapiens
  CDR3 for beta chain variable domain of TCR clone 30683 (TRBV7-8, TRBJ2-6)
CASSAGTGGAGANVLTF

SEQ ID NO: 61367 - protein, 14 aa, Homo sapiens
  CDR3 for alpha chain variable domain of TCR clone 30684 (TRAV13-1, TRAJ44)
CAAKATGAASKLTF

SEQ ID NO: 61368 - protein, 17 aa, Homo sapiens
  CDR3 for beta chain variable domain of TCR clone 30684 (TRBV7-3, TRBJ2-3)
RASSLMKRMRGADTQYF

SEQ ID NO: 61369 - protein, 14 aa, Homo sapiens
  CDR3 for alpha chain variable domain of TCR clone 30685 (TRAV17, TRAJ57)
CATDPQGGSEKLVF

SEQ ID NO: 61370 - protein, 17 aa, Homo sapiens
  CDR3 for beta chain variable domain of TCR clone 30685 (TRBV13, TRBJ2-3)
CASSLSRVAGGRNTQYF

SEQ ID NO: 61371 - protein, 13 aa, Homo sapiens
  CDR3 for alpha chain variable domain of TCR clone 30686 (TRAV8-6, TRAJ49)
CAVITNTGNQFYF

SEQ ID NO: 61372 - protein, 14 aa, Homo sapiens
  CDR3 for beta chain variable domain of TCR clone 30686 (TRBV28, TRBJ2-7)
SAIVGQGNLYEQYF

SEQ ID NO: 61373 - protein, 15 aa, Homo sapiens
  CDR3 for alpha chain variable domain of TCR clone 30687 (TRAV2, TRAJ9)
CALEDRGTGGFKTIF

SEQ ID NO: 61374 - protein, 16 aa, Homo sapiens
  CDR3 for beta chain variable domain of TCR clone 30687 (TRBV24-1, TRBJ2-3)
CATSDPGTGATDTQYF

SEQ ID NO: 61375 - protein, 16 aa, Homo sapiens
  CDR3 for alpha chain variable domain of TCR clone 30688 (TRAV3, TRAJ37)
CAVRPHGSGNTGKLIF

SEQ ID NO: 61376 - protein, 12 aa, Homo sapiens
  CDR3 for beta chain variable domain of TCR clone 30688 (TRBV5-5, TRBJ2-5)
CASSYFGETQYF

SEQ ID NO: 61377 - protein, 13 aa, Homo sapiens
  CDR3 for alpha chain variable domain of TCR clone 30689 (TRAV22, TRAJ29)
CAVVGSGNTPLVF

SEQ ID NO: 61378 - protein, 13 aa, Homo sapiens
  CDR3 for beta chain variable domain of TCR clone 30689 (TRBV4-2, TRBJ1-1)
CASSQAGNTEAFF

SEQ ID NO: 61379 - protein, 14 aa, Homo sapiens
  CDR3 for alpha chain variable domain of TCR clone 30690 (TRAV1-2, TRAJ8)
CAVREDTGFQKLVF

SEQ ID NO: 61380 - protein, 15 aa, Homo sapiens
  CDR3 for beta chain variable domain of TCR clone 30690 (TRBV6-3, TRBJ2-7)
CASSSPGTIFYEQYF

SEQ ID NO: 61381 - protein, 13 aa, Homo sapiens
  CDR3 for alpha chain variable domain of TCR clone 30691 (TRAV3, TRAJ20)
CAVRDTPRSKLSF

SEQ ID NO: 61382 - protein, 16 aa, Homo sapiens
  CDR3 for beta chain variable domain of TCR clone 30691 (TRBV20-1, TRBJ2-7)
CSARAPGLALSYEQYF

SEQ ID NO: 61383 - protein, 13 aa, Homo sapiens
  CDR3 for alpha chain variable domain of TCR clone 30692 (TRAV12-3, TRAJ33)
CAMSVNSNYQLIR

SEQ ID NO: 61384 - protein, 13 aa, Homo sapiens
  CDR3 for beta chain variable domain of TCR clone 30692 (TRBV7-2, TRBJ2-2)
CASSLAVTGELFF

SEQ ID NO: 61385 - protein, 14 aa, Homo sapiens
  CDR3 for alpha chain variable domain of TCR clone 30693 (TRAV12-1, TRAJ22)
CVVTTSGSARQLTF

SEQ ID NO: 61386 - protein, 14 aa, Homo sapiens
  CDR3 for beta chain variable domain of TCR clone 30693 (TRBV27, TRBJ1-1)
CASSLLSGLSEAFF

SEQ ID NO: 61387 - protein, 10 aa, Homo sapiens
  CDR3 for alpha chain variable domain of TCR clone 30694 (TRAV12-3, TRAJ49)
CAMNDDQFYF

SEQ ID NO: 61388 - protein, 13 aa, Homo sapiens
  CDR3 for beta chain variable domain of TCR clone 30694 (TRBV12-4, TRBJ1-1)
CASSPGTGFEDFF

SEQ ID NO: 61389 - protein, 18 aa, Homo sapiens
  CDR3 for alpha chain variable domain of TCR clone 30695 (TRAV21, TRAJ52)
CAVRPSPAGGTSYGKLTF

SEQ ID NO: 61390 - protein, 14 aa, Homo sapiens
  CDR3 for beta chain variable domain of TCR clone 30695 (TRBV11-2, TRBJ2-3)
CASSRLARTDTQYF

SEQ ID NO: 61391 - protein, 16 aa, Homo sapiens
  CDR3 for alpha chain variable domain of TCR clone 30696 (TRAV3, TRAJ23)
CAGKIGIYNQGGKLIF

SEQ ID NO: 61392 - protein, 17 aa, Homo sapiens
  CDR3 for beta chain variable domain of TCR clone 30696 (TRBV10-3, TRBJ2-6)
CAISESTAPSGANVLTF

SEQ ID NO: 61393 - protein, 22 aa, Homo sapiens
  CDR3 for alpha chain variable domain of TCR clone 30697 (TRAV27, TRAJ41)
CAVRTQIPDIQNPDPAVYQLRD

SEQ ID NO: 61394 - protein, 13 aa, Homo sapiens
  CDR3 for beta chain variable domain of TCR clone 30697 (TRBV20-1, TRBJ1-1)
CSARGGGNTEAFF

SEQ ID NO: 61395 - protein, 12 aa, Homo sapiens
  CDR3 for alpha chain variable domain of TCR clone 30698 (TRAV12-3, TRAJ17)
CAMTLTGNKLTF

SEQ ID NO: 61396 - protein, 15 aa, Homo sapiens
  CDR3 for beta chain variable domain of TCR clone 30698 (TRBV20-1, TRBJ2-5)
CSARDRVSGMDEQYF

SEQ ID NO: 61397 - protein, 12 aa, Homo sapiens
  CDR3 for alpha chain variable domain of TCR clone 30699 (TRAV12-3, TRAJ17)
CAMTLTGNKLTF

SEQ ID NO: 61398 - protein, 15 aa, Homo sapiens
  CDR3 for beta chain variable domain of TCR clone 30699 (TRBV20-1, TRBJ2-3)
CSARDRVSGMDEQYF

SEQ ID NO: 61399 - protein, 13 aa, Homo sapiens
  CDR3 for alpha chain variable domain of TCR clone 30700 (TRAV2, TRAJ15)
CAVASQAGTALIF

SEQ ID NO: 61400 - protein, 16 aa, Homo sapiens
  CDR3 for beta chain variable domain of TCR clone 30700 (TRBV5-1, TRBJ1-1)
CASSSGGNPLNTEAFF

SEQ ID NO: 61401 - protein, 15 aa, Homo sapiens
  CDR3 for alpha chain variable domain of TCR clone 30701 (TRAV8-4, TRAJ13)
CAVSDWSGGYQKVTF

SEQ ID NO: 61402 - protein, 15 aa, Homo sapiens
  CDR3 for beta chain variable domain of TCR clone 30701 (TRBV9, TRBJ1-4)
CASSVGGSTNEKLFF

SEQ ID NO: 61403 - protein, 13 aa, Homo sapiens
  CDR3 for alpha chain variable domain of TCR clone 30702 (TRAV8-6, TRAJ49)
CAVITNTGNQFYS

SEQ ID NO: 61404 - protein, 13 aa, Homo sapiens
  CDR3 for beta chain variable domain of TCR clone 30702 (TRBV7-9, TRBJ1-2)
CASSLKQNYGYTF

SEQ ID NO: 61405 - protein, 12 aa, Homo sapiens
  CDR3 for alpha chain variable domain of TCR clone 30703 (TRAV27, TRAJ35)
CAGADFGNVLHC

SEQ ID NO: 61406 - protein, 16 aa, Homo sapiens
  CDR3 for beta chain variable domain of TCR clone 30703 (TRBV6-1, TRBJ2-1)
CASILRQGSPYNEQFF

SEQ ID NO: 61407 - protein, 13 aa, Homo sapiens
  CDR3 for alpha chain variable domain of TCR clone 30704 (TRAV12-1, TRAJ9)
CVVLNTGGFKTIF

SEQ ID NO: 61408 - protein, 13 aa, Homo sapiens
  CDR3 for beta chain variable domain of TCR clone 30704 (TRBV20-1, TRBJ1-1)
CSARSGGNTEAFF

SEQ ID NO: 61409 - protein, 12 aa, Homo sapiens
  CDR3 for alpha chain variable domain of TCR clone 30705 (TRAV12-1, TRAJ40)
CVVYSGTYKYIF

SEQ ID NO: 61410 - protein, 13 aa, Homo sapiens
  CDR3 for beta chain variable domain of TCR clone 30705 (TRBV19, TRBJ1-2)
CASSVPGQDGYTF

SEQ ID NO: 61411 - protein, 15 aa, Homo sapiens
  CDR3 for alpha chain variable domain of TCR clone 30706 (TRAV3, TRAJ22)
CAVRDRGGYARQLTF

SEQ ID NO: 61412 - protein, 16 aa, Homo sapiens
  CDR3 for beta chain variable domain of TCR clone 30706 (TRBV5-4, TRBJ2-3)
CASQQPGAGGADTQYF

SEQ ID NO: 61413 - protein, 12 aa, Homo sapiens
  CDR3 for alpha chain variable domain of TCR clone 30707 (TRAV21, TRAJ31)
CAVWGNNARLIF

SEQ ID NO: 61414 - protein, 16 aa, Homo sapiens
  CDR3 for beta chain variable domain of TCR clone 30707 (TRBV27, TRBJ2-5)
CASSYGPGGQKETQYF

SEQ ID NO: 61415 - protein, 16 aa, Homo sapiens
  CDR3 for alpha chain variable domain of TCR clone 30708 (TRAV3, TRAJ10)
CAVRDMRAGGGNKLTF

SEQ ID NO: 61416 - protein, 15 aa, Homo sapiens
  CDR3 for beta chain variable domain of TCR clone 30708 (TRBV11-3, TRBJ2-7)
CASSPGPASPYEQYF

SEQ ID NO: 61417 - protein, 15 aa, Homo sapiens
  CDR3 for alpha chain variable domain of TCR clone 30709 (TRAV12-2, TRAJ53)
CAVNGGGGSNYKLTF

SEQ ID NO: 61418 - protein, 15 aa, Homo sapiens
  CDR3 for beta chain variable domain of TCR clone 30709 (TRBV12-4, TRBJ2-1)
CASSLLATGNNEQFF

SEQ ID NO: 61419 - protein, 13 aa, Homo sapiens
  CDR3 for alpha chain variable domain of TCR clone 30710 (TRAV13-2, TRAJ48)
CAEMDFGNEKLTF

SEQ ID NO: 61420 - protein, 15 aa, Homo sapiens
  CDR3 for beta chain variable domain of TCR clone 30710 (TRBV27, TRBJ2-1)
CASSNGGGSSNEQFF

SEQ ID NO: 61421 - protein, 15 aa, Homo sapiens
  CDR3 for alpha chain variable domain of TCR clone 30711 (TRAV35, TRAJ40)
CAGQPGTSGTYKYIF

SEQ ID NO: 61422 - protein, 14 aa, Homo sapiens
  CDR3 for beta chain variable domain of TCR clone 30711 (TRBV7-3, TRBJ2-1)
CASSLAGGTNEQFF

SEQ ID NO: 61423 - protein, 10 aa, Homo sapiens
  CDR3 for alpha chain variable domain of TCR clone 30712 (TRAV23/DV6, TRAJ57)
CAASSTLSQG

SEQ ID NO: 61424 - protein, 15 aa, Homo sapiens
  CDR3 for beta chain variable domain of TCR clone 30712 (TRBV11-3, TRBJ2-3)
CASLKDGREGDTQYF

SEQ ID NO: 61425 - protein, 13 aa, Homo sapiens
  CDR3 for alpha chain variable domain of TCR clone 30713 (TRAV29/DV5, TRAJ44)
CAASTGTASKLTF

SEQ ID NO: 61426 - protein, 11 aa, Homo sapiens
  CDR3 for beta chain variable domain of TCR clone 30713 (TRBV29-1, TRBJ2-5)
CSEDRTGTQYF

SEQ ID NO: 61427 - protein, 17 aa, Homo sapiens
  CDR3 for alpha chain variable domain of TCR clone 30714 (TRAV26-2, TRAJ42)
CILRDVGYGGSQGNLIF

SEQ ID NO: 61428 - protein, 16 aa, Homo sapiens
  CDR3 for beta chain variable domain of TCR clone 30714 (TRBV12-4, TRBJ2-7)
CASSLIGGTGSYEQYF

SEQ ID NO: 61429 - protein, 11 aa, Homo sapiens
  CDR3 for alpha chain variable domain of TCR clone 30715 (TRAV21, TRAJ34)
CAHYNTDKLIF

SEQ ID NO: 61430 - protein, 16 aa, Homo sapiens
  CDR3 for beta chain variable domain of TCR clone 30715 (TRBV12-5, TRBJ2-5)
CASGPRTSGNQETQYF

SEQ ID NO: 61431 - protein, 14 aa, Homo sapiens
  CDR3 for alpha chain variable domain of TCR clone 30716 (TRAV17, TRAJ49)
CATDARDTGNQFYF

SEQ ID NO: 61432 - protein, 14 aa, Homo sapiens
  CDR3 for beta chain variable domain of TCR clone 30716 (TRBV5-5, TRBJ1-2)
CASSFGQINYGYTL

SEQ ID NO: 61433 - protein, 13 aa, Homo sapiens
  CDR3 for alpha chain variable domain of TCR clone 30717 (TRAV12-3, TRAJ33)
CAMSANSNYQLIW

SEQ ID NO: 61434 - protein, 12 aa, Homo sapiens
  CDR3 for beta chain variable domain of TCR clone 30717 (TRBV11-2, TRBJ2-2)
CASSLGGGELFF

SEQ ID NO: 61435 - protein, 13 aa, Homo sapiens
  CDR3 for alpha chain variable domain of TCR clone 30718 (TRAV12-3, TRAJ7)
CAITPYGNNRLAF

SEQ ID NO: 61436 - protein, 16 aa, Homo sapiens
  CDR3 for beta chain variable domain of TCR clone 30718 (TRBV20-1, TRBJ1-4)
CSARPYGGELNEKLFF

SEQ ID NO: 61437 - protein, 14 aa, Homo sapiens
  CDR3 for alpha chain variable domain of TCR clone 30719 (TRAV2, TRAJ37)
CAVAFTSNTGKLIF

SEQ ID NO: 61438 - protein, 13 aa, Homo sapiens
  CDR3 for beta chain variable domain of TCR clone 30719 (TRBV20-1, TRBJ1-1)
CSAPLGGGTEAFF

SEQ ID NO: 61439 - protein, 12 aa, Homo sapiens
  CDR3 for alpha chain variable domain of TCR clone 30720 (TRAV1-2, TRAJ9)
CALSSGGFKTIF

SEQ ID NO: 61440 - protein, 14 aa, Homo sapiens
  CDR3 for beta chain variable domain of TCR clone 30720 (TRBV7-9, TRBJ2-1)
CASSLAGPYNEQFF

SEQ ID NO: 61441 - protein, 16 aa, Homo sapiens
  CDR3 for alpha chain variable domain of TCR clone 30721 (TRAV12-3, TRAJ53)
CAMSPGSGGSNYKLTF

SEQ ID NO: 61442 - protein, 17 aa, Homo sapiens
  CDR3 for beta chain variable domain of TCR clone 30721 (TRBV28, TRBJ2-5)
CASSTPEGDALQGTQYF

SEQ ID NO: 61443 - protein, 13 aa, Homo sapiens
  CDR3 for alpha chain variable domain of TCR clone 30722 (TRAV2, TRAJ40)
CAVVTSGTYKYIF

SEQ ID NO: 61444 - protein, 13 aa, Homo sapiens
  CDR3 for beta chain variable domain of TCR clone 30722 (TRBV6-1, TRBJ1-1)
CASSRQGNTEAFF

SEQ ID NO: 61445 - protein, 14 aa, Homo sapiens
  CDR3 for alpha chain variable domain of TCR clone 30723 (TRAV13-1, TRAJ35)
CAASKGGFGNVLHV

SEQ ID NO: 61446 - protein, 13 aa, Homo sapiens
  CDR3 for beta chain variable domain of TCR clone 30723 (TRBV7-3, TRBJ1-1)
CASSQDWGAEAFF

SEQ ID NO: 61447 - protein, 13 aa, Homo sapiens
  CDR3 for alpha chain variable domain of TCR clone 30724 (TRAV3, TRAJ41)
CAVSSNSGYALNF

SEQ ID NO: 61448 - protein, 13 aa, Homo sapiens
  CDR3 for beta chain variable domain of TCR clone 30724 (TRBV20-1, TRBJ2-2)
CSVLSGGAGELFF

SEQ ID NO: 61449 - protein, 14 aa, Homo sapiens
  CDR3 for alpha chain variable domain of TCR clone 30725 (TRAV1-2, TRAJ16)
CAVNRFSDGQKPLF

SEQ ID NO: 61450 - protein, 16 aa, Homo sapiens
  CDR3 for beta chain variable domain of TCR clone 30725 (TRBV20-1, TRBJ1-4)
CSAPGQGLLTNEKLFF

SEQ ID NO: 61451 - protein, 14 aa, Homo sapiens
  CDR3 for alpha chain variable domain of TCR clone 30726 (TRAV16, TRAJ33)
CALSAMDSNYQLIW

SEQ ID NO: 61452 - protein, 16 aa, Homo sapiens
  CDR3 for beta chain variable domain of TCR clone 30726 (TRBV7-3, TRBJ2-2)
CASSSRGGTSTGELFF

SEQ ID NO: 61453 - protein, 11 aa, Homo sapiens
  CDR3 for alpha chain variable domain of TCR clone 30727 (TRAV17, TRAJ9)
CATTGGFKTIF

SEQ ID NO: 61454 - protein, 14 aa, Homo sapiens
  CDR3 for beta chain variable domain of TCR clone 30727 (TRBV7-9, TRBJ2-2)
CGSSGLADTGELFF

SEQ ID NO: 61455 - protein, 13 aa, Homo sapiens
  CDR3 for alpha chain variable domain of TCR clone 30728 (TRAV21, TRAJ27)
CAARPGNAGKSTF

SEQ ID NO: 61456 - protein, 14 aa, Homo sapiens
  CDR3 for beta chain variable domain of TCR clone 30728 (TRBV7-6, TRBJ2-3)
CASSLGRVTDTQYF

SEQ ID NO: 61457 - protein, 11 aa, Homo sapiens
  CDR3 for alpha chain variable domain of TCR clone 30729 (TRAV2, TRAJ33)
CAVESSYQLIW

SEQ ID NO: 61458 - protein, 15 aa, Homo sapiens
  CDR3 for beta chain variable domain of TCR clone 30729 (TRBV19, TRBJ1-1)
CASTSGQIQNTEAFF

SEQ ID NO: 61459 - protein, 14 aa, Homo sapiens
  CDR3 for alpha chain variable domain of TCR clone 30730 (TRAV12-3, TRAJ58)
CAMSTETSGSRLTF

SEQ ID NO: 61460 - protein, 12 aa, Homo sapiens
  CDR3 for beta chain variable domain of TCR clone 30730 (TRBV7-8, TRBJ2-7)
CASSLGDREQYS

SEQ ID NO: 61461 - protein, 16 aa, Homo sapiens
  CDR3 for alpha chain variable domain of TCR clone 30731 (TRAV30, TRAJ24)
CGTKIVDADSWGKFQF

SEQ ID NO: 61462 - protein, 14 aa, Homo sapiens
  CDR3 for beta chain variable domain of TCR clone 30731 (TRBV7-2, TRBJ1-2)
CASSQTGSTYGYTF

SEQ ID NO: 61463 - protein, 18 aa, Homo sapiens
  CDR3 for alpha chain variable domain of TCR clone 30732 (TRAV35, TRAJ28)
CAGHNYPLSGAGSYRLTF

SEQ ID NO: 61464 - protein, 12 aa, Homo sapiens
  CDR3 for beta chain variable domain of TCR clone 30732 (TRBV7-9, TRBJ1-1)
CASSLEGTEAFF

SEQ ID NO: 61465 - protein, 11 aa, Homo sapiens
  CDR3 for alpha chain variable domain of TCR clone 30733 (TRAV27, TRAJ47)
SIVEYGNKLVF

SEQ ID NO: 61466 - protein, 18 aa, Homo sapiens
  CDR3 for beta chain variable domain of TCR clone 30733 (TRBV2, TRBJ2-1)
CASRGPAGGPRTYNEQFF

SEQ ID NO: 61467 - protein, 15 aa, Homo sapiens
  CDR3 for alpha chain variable domain of TCR clone 30734 (TRAV8-3, TRAJ11)
CAVGLLNSGYSTLTF

SEQ ID NO: 61468 - protein, 16 aa, Homo sapiens
  CDR3 for beta chain variable domain of TCR clone 30734 (TRBV12-5, TRBJ2-5)
CASGPRTSGNQETQYF

SEQ ID NO: 61469 - protein, 12 aa, Homo sapiens
  CDR3 for alpha chain variable domain of TCR clone 30735 (TRAV12-3, TRAJ17)
CAMTLTGNKLTF

SEQ ID NO: 61470 - protein, 13 aa, Homo sapiens
  CDR3 for beta chain variable domain of TCR clone 30735 (TRBV28, TRBJ2-5)
CASSFAGGETQYF

SEQ ID NO: 61471 - protein, 16 aa, Homo sapiens
  CDR3 for alpha chain variable domain of TCR clone 30736 (TRAV30, TRAJ24)
CGTEIVDADSWGKFQF

SEQ ID NO: 61472 - protein, 16 aa, Homo sapiens
  CDR3 for beta chain variable domain of TCR clone 30736 (TRBV10-3, TRBJ2-1)
CAISGVGDGGGGEQFF

SEQ ID NO: 61473 - protein, 11 aa, Homo sapiens
  CDR3 for alpha chain variable domain of TCR clone 30737 (TRAV39, TRAJ49)
CAVDISTQVYF

SEQ ID NO: 61474 - protein, 11 aa, Homo sapiens
  CDR3 for beta chain variable domain of TCR clone 30737 (TRBV7-8, TRBJ2-7)
CASSLSLEQYF

SEQ ID NO: 61475 - protein, 12 aa, Homo sapiens
  CDR3 for alpha chain variable domain of TCR clone 30738 (TRAV21, TRAJ31)
CAVWDNNARLMF

SEQ ID NO: 61476 - protein, 16 aa, Homo sapiens
  CDR3 for beta chain variable domain of TCR clone 30738 (TRBV27, TRBJ2-5)
CASSYGPGGQKETQYF

SEQ ID NO: 61477 - protein, 13 aa, Homo sapiens
  CDR3 for alpha chain variable domain of TCR clone 30739 (TRAV21, TRAJ57)
CAVIEGGSEKLAF

SEQ ID NO: 61478 - protein, 15 aa, Homo sapiens
  CDR3 for beta chain variable domain of TCR clone 30739 (TRBV10-3, TRBJ2-5)
CAISEFGRGQETQYF

SEQ ID NO: 61479 - protein, 15 aa, Homo sapiens
  CDR3 for alpha chain variable domain of TCR clone 30740 (TRAV12-1, TRAJ44)
CVADLPTGTASKLTF

SEQ ID NO: 61480 - protein, 13 aa, Homo sapiens
  CDR3 for beta chain variable domain of TCR clone 30740 (TRBV6-5, TRBJ2-5)
CASSPQGGETQFF

SEQ ID NO: 61481 - protein, 11 aa, Homo sapiens
  CDR3 for alpha chain variable domain of TCR clone 30741 (TRAV17, TRAJ43)
CATLRSDDMRF

SEQ ID NO: 61482 - protein, 15 aa, Homo sapiens
  CDR3 for beta chain variable domain of TCR clone 30741 (TRBV11-2, TRBJ2-1)
CASSLGTSGLNEQFF

SEQ ID NO: 61483 - protein, 14 aa, Homo sapiens
  CDR3 for alpha chain variable domain of TCR clone 30742 (TRAV12-1, TRAJ17)
CVVNYKAAGNKLTF

SEQ ID NO: 61484 - protein, 17 aa, Homo sapiens
  CDR3 for beta chain variable domain of TCR clone 30742 (TRBV20-1, TRBJ2-1)
CSVSSSGLAGSYNEQFF

SEQ ID NO: 61485 - protein, 17 aa, Homo sapiens
  CDR3 for alpha chain variable domain of TCR clone 30743 (TRAV29/DV5, TRAJ45)
CAADGPFSGGGADGLTF

SEQ ID NO: 61486 - protein, 15 aa, Homo sapiens
  CDR3 for beta chain variable domain of TCR clone 30743 (TRBV5-1, TRBJ2-1)
CASSPPRAPYNEQFF

SEQ ID NO: 61487 - protein, 13 aa, Homo sapiens
  CDR3 for alpha chain variable domain of TCR clone 30744 (TRAV8-3, TRAJ28)
CAAGAVGSYQLTF

SEQ ID NO: 61488 - protein, 14 aa, Homo sapiens
  CDR3 for beta chain variable domain of TCR clone 30744 (TRBV7-2, TRBJ2-7)
CASRSQGAAYEQYF

SEQ ID NO: 61489 - protein, 17 aa, Homo sapiens
  CDR3 for alpha chain variable domain of TCR clone 30745 (TRAV4, TRAJ13)
CPVGVQGSSGGYQKVTF

SEQ ID NO: 61490 - protein, 18 aa, Homo sapiens
  CDR3 for beta chain variable domain of TCR clone 30745 (TRBV15, TRBJ2-3)
CATSRDGARSWDTDTQYF

SEQ ID NO: 61491 - protein, 23 aa, Homo sapiens
  CDR3 for alpha chain variable domain of TCR clone 30746 (TRAV8-4, )
CARLNAGDNHIQNPDPAVYQLRD

SEQ ID NO: 61492 - protein, 14 aa, Homo sapiens
  CDR3 for beta chain variable domain of TCR clone 30746 (TRBV7-8, TRBJ2-3)
CASSLEAGTDTQYF

SEQ ID NO: 61493 - protein, 11 aa, Homo sapiens
  CDR3 for alpha chain variable domain of TCR clone 30747 (TRAV2, TRAJ13)
CASGGYQKVTF

SEQ ID NO: 61494 - protein, 16 aa, Homo sapiens
  CDR3 for beta chain variable domain of TCR clone 30747 (TRBV6-1, TRBJ2-5)
CASSETLDSGAETQYF

SEQ ID NO: 61495 - protein, 12 aa, Homo sapiens
  CDR3 for alpha chain variable domain of TCR clone 30748 (TRAV17, TRAJ4)
CATDGGYNKLIF

SEQ ID NO: 61496 - protein, 13 aa, Homo sapiens
  CDR3 for beta chain variable domain of TCR clone 30748 (TRBV29-1, TRBJ2-2)
CSTTVVNTGELFF

SEQ ID NO: 61497 - protein, 14 aa, Homo sapiens
  CDR3 for alpha chain variable domain of TCR clone 30749 (TRAV8-4, TRAJ38)
CARLNAGNNRKLTW

SEQ ID NO: 61498 - protein, 12 aa, Homo sapiens
  CDR3 for beta chain variable domain of TCR clone 30749 (TRBV6-1, TRBJ2-7)
CASSEPLYEQYF

SEQ ID NO: 61499 - protein, 16 aa, Homo sapiens
  CDR3 for alpha chain variable domain of TCR clone 30750 (TRAV21, TRAJ37)
CAVRTAGSSNTGKLVF

SEQ ID NO: 61500 - protein, 13 aa, Homo sapiens
  CDR3 for beta chain variable domain of TCR clone 30750 (TRBV7-9, TRBJ2-5)
CASLPSGRETQYF

SEQ ID NO: 61501 - protein, 18 aa, Homo sapiens
  CDR3 for alpha chain variable domain of TCR clone 30751 (TRAV12-2, )
CAVEDIQNPDPAVYQLRD

SEQ ID NO: 61502 - protein, 11 aa, Homo sapiens
  CDR3 for beta chain variable domain of TCR clone 30751 (TRBV12-4, TRBJ2-3)
CASTATDTQYF

SEQ ID NO: 61503 - protein, 13 aa, Homo sapiens
  CDR3 for alpha chain variable domain of TCR clone 30752 (TRAV2, TRAJ40)
CAVVTSGTYKYIF

SEQ ID NO: 61504 - protein, 15 aa, Homo sapiens
  CDR3 for beta chain variable domain of TCR clone 30752 (TRBV11-3, TRBJ2-3)
CASLKDGWEGDTQYF

SEQ ID NO: 61505 - protein, 14 aa, Homo sapiens
  CDR3 for alpha chain variable domain of TCR clone 30753 (TRAV12-2, TRAJ13)
CAMKKTGGYQKVTF

SEQ ID NO: 61506 - protein, 12 aa, Homo sapiens
  CDR3 for beta chain variable domain of TCR clone 30753 (TRBV12-4, TRBJ1-2)
CASSFIWLHLRF

SEQ ID NO: 61507 - protein, 14 aa, Homo sapiens
  CDR3 for alpha chain variable domain of TCR clone 30754 (TRAV8-3, TRAJ9)
CAVVYNTGGFKTSF

SEQ ID NO: 61508 - protein, 14 aa, Homo sapiens
  CDR3 for beta chain variable domain of TCR clone 30754 (TRBV7-3, TRBJ2-2)
CASSSGGYTGELFF

SEQ ID NO: 61509 - protein, 12 aa, Homo sapiens
  CDR3 for alpha chain variable domain of TCR clone 30755 (TRAV13-2, TRAJ23)
YAERHRGGKLIF

SEQ ID NO: 61510 - protein, 16 aa, Homo sapiens
  CDR3 for beta chain variable domain of TCR clone 30755 (TRBV20-1, TRBJ1-4)
CSAPGQGLLTNEKLFF

SEQ ID NO: 61511 - protein, 18 aa, Homo sapiens
  CDR3 for alpha chain variable domain of TCR clone 30756 (TRAV13-1, TRAJ52)
CAAKNPNAGGTSYGKLTF

SEQ ID NO: 61512 - protein, 15 aa, Homo sapiens
  CDR3 for beta chain variable domain of TCR clone 30756 (TRBV7-2, TRBJ2-1)
CASSSGLAGGNEQFF

SEQ ID NO: 61513 - protein, 15 aa, Homo sapiens
  CDR3 for alpha chain variable domain of TCR clone 30757 (TRAV3, TRAJ47)
CAVRDIGEYGNKRVF

SEQ ID NO: 61514 - protein, 14 aa, Homo sapiens
  CDR3 for beta chain variable domain of TCR clone 30757 (TRBV13, TRBJ2-5)
CASSLERVGETQYF

SEQ ID NO: 61515 - protein, 13 aa, Homo sapiens
  CDR3 for alpha chain variable domain of TCR clone 30758 (TRAV17, TRAJ54)
CATSWGGAQKLVF

SEQ ID NO: 61516 - protein, 15 aa, Homo sapiens
  CDR3 for beta chain variable domain of TCR clone 30758 (TRBV4-3, TRBJ2-3)
CASSTSLLSTDTQYF

SEQ ID NO: 61517 - protein, 18 aa, Homo sapiens
  CDR3 for alpha chain variable domain of TCR clone 30759 (TRAV3, TRAJ17)
CAVRARRGGEAAGNKLTF

SEQ ID NO: 61518 - protein, 14 aa, Homo sapiens
  CDR3 for beta chain variable domain of TCR clone 30759 (TRBV4-1, TRBJ2-2)
CASSQAVNTGELFF

SEQ ID NO: 61519 - protein, 18 aa, Homo sapiens
  CDR3 for alpha chain variable domain of TCR clone 30760 (TRAV13-1, TRAJ52)
CAAKNPNAGGTSYGELTF

SEQ ID NO: 61520 - protein, 15 aa, Homo sapiens
  CDR3 for beta chain variable domain of TCR clone 30760 (TRBV2, TRBJ2-2)
CASSRETVGTGELFF

SEQ ID NO: 61521 - protein, 14 aa, Homo sapiens
  CDR3 for alpha chain variable domain of TCR clone 30761 (TRAV8-6, TRAJ54)
CAVSPALGAQKLVF

SEQ ID NO: 61522 - protein, 15 aa, Homo sapiens
  CDR3 for beta chain variable domain of TCR clone 30761 (TRBV4-1, TRBJ1-6)
CASSAGRGYNSPLHF

SEQ ID NO: 61523 - protein, 14 aa, Homo sapiens
  CDR3 for alpha chain variable domain of TCR clone 30762 (TRAV16, TRAJ33)
CALSAMDSNYQLIW

SEQ ID NO: 61524 - protein, 12 aa, Homo sapiens
  CDR3 for beta chain variable domain of TCR clone 30762 (TRBV5-1, TRBJ1-2)
CASSQDTYGYTL

SEQ ID NO: 61525 - protein, 11 aa, Homo sapiens
  CDR3 for alpha chain variable domain of TCR clone 30763 (TRAV1-1, TRAJ23)
CAVRQGGKLIF

SEQ ID NO: 61526 - protein, 20 aa, Homo sapiens
  CDR3 for beta chain variable domain of TCR clone 30763 (TRBV7-8, TRBJ2-2)
CAGSHLFPGPTIHITRELFF

SEQ ID NO: 61527 - protein, 23 aa, Homo sapiens
  CDR3 for alpha chain variable domain of TCR clone 30764 (TRAV41, TRAJ32)
CAVRIMVVLQTSSSLELALCLLS

SEQ ID NO: 61528 - protein, 15 aa, Homo sapiens
  CDR3 for beta chain variable domain of TCR clone 30764 (TRBV11-2, TRBJ2-1)
CASSKDRGLIYEQFF

SEQ ID NO: 61529 - protein, 13 aa, Homo sapiens
  CDR3 for alpha chain variable domain of TCR clone 30765 (TRAV20, TRAJ37)
CAGCSSNTGKLIF

SEQ ID NO: 61530 - protein, 11 aa, Homo sapiens
  CDR3 for beta chain variable domain of TCR clone 30765 (TRBV12-4, TRBJ2-3)
CASTATDAQYF

SEQ ID NO: 61531 - protein, 15 aa, Homo sapiens
  CDR3 for alpha chain variable domain of TCR clone 30766 (TRAV21, TRAJ32)
CAVNSYGGATNKLIF

SEQ ID NO: 61532 - protein, 13 aa, Homo sapiens
  CDR3 for beta chain variable domain of TCR clone 30766 (TRBV7-9, TRBJ1-2)
CASSLKQNYGYTF

SEQ ID NO: 61533 - protein, 13 aa, Homo sapiens
  CDR3 for alpha chain variable domain of TCR clone 30767 (TRAV2, TRAJ21)
CAVGDLNFNKFYF

SEQ ID NO: 61534 - protein, 15 aa, Homo sapiens
  CDR3 for beta chain variable domain of TCR clone 30767 (TRBV28, TRBJ2-5)
CASSPGQGSIETQYF

SEQ ID NO: 61535 - protein, 16 aa, Homo sapiens
  CDR3 for alpha chain variable domain of TCR clone 30768 (TRAV21, TRAJ52)
CAVTNAGGTSYGKLTF

SEQ ID NO: 61536 - protein, 17 aa, Homo sapiens
  CDR3 for beta chain variable domain of TCR clone 30768 (TRBV28, TRBJ2-5)
CASSRQGGLAGAGTQYF

SEQ ID NO: 61537 - protein, 14 aa, Homo sapiens
  CDR3 for alpha chain variable domain of TCR clone 30769 (TRAV29/DV5, TRAJ32)
CAAACGGATNKLIF

SEQ ID NO: 61538 - protein, 15 aa, Homo sapiens
  CDR3 for beta chain variable domain of TCR clone 30769 (TRBV27, TRBJ2-7)
CASSTAGTGSYEQYF

SEQ ID NO: 61539 - protein, 13 aa, Homo sapiens
  CDR3 for alpha chain variable domain of TCR clone 30770 (TRAV13-1, TRAJ5)
CAASDTGRRALTS

SEQ ID NO: 61540 - protein, 12 aa, Homo sapiens
  CDR3 for beta chain variable domain of TCR clone 30770 (TRBV28, TRBJ2-3)
CASSLYRDTQYF

SEQ ID NO: 61541 - protein, 14 aa, Homo sapiens
  CDR3 for alpha chain variable domain of TCR clone 30771 (TRAV1-2, TRAJ8)
CAVREDTGFLKLVF

SEQ ID NO: 61542 - protein, 15 aa, Homo sapiens
  CDR3 for beta chain variable domain of TCR clone 30771 (TRBV6-3, TRBJ2-7)
CASSSPGTVFYEQYF

SEQ ID NO: 61543 - protein, 15 aa, Homo sapiens
  CDR3 for alpha chain variable domain of TCR clone 30772 (TRAV12-1, TRAJ44)
CVADLPTGTASKLTF

SEQ ID NO: 61544 - protein, 13 aa, Homo sapiens
  CDR3 for beta chain variable domain of TCR clone 30772 (TRBV7-9, TRBJ1-2)
CASSLKQNHGYTF

SEQ ID NO: 61545 - protein, 14 aa, Homo sapiens
  CDR3 for alpha chain variable domain of TCR clone 30773 (TRAV9-2, TRAJ39)
CALYIYNAGIMLTF

SEQ ID NO: 61546 - protein, 15 aa, Homo sapiens
  CDR3 for beta chain variable domain of TCR clone 30773 (TRBV9, TRBJ1-6)
CASSVAGTGDSPLHL

SEQ ID NO: 61547 - protein, 18 aa, Homo sapiens
  CDR3 for alpha chain variable domain of TCR clone 30774 (TRAV12-3, TRAJ52)
CAMSVGGAGGTSYGKLTF

SEQ ID NO: 61548 - protein, 14 aa, Homo sapiens
  CDR3 for beta chain variable domain of TCR clone 30774 (TRBV6-1, TRBJ1-3)
CASVQGGGGNTIYF

SEQ ID NO: 61549 - protein, 13 aa, Homo sapiens
  CDR3 for alpha chain variable domain of TCR clone 30775 (TRAV12-2, TRAJ4)
CAVFSGGYNKLIF

SEQ ID NO: 61550 - protein, 13 aa, Homo sapiens
  CDR3 for beta chain variable domain of TCR clone 30775 (TRBV19, TRBJ1-5)
CASSIDRDQPRHF

SEQ ID NO: 61551 - protein, 16 aa, Homo sapiens
  CDR3 for alpha chain variable domain of TCR clone 30776 (TRAV3, TRAJ21)
CAVRDIEKGNFNKFYF

SEQ ID NO: 61552 - protein, 13 aa, Homo sapiens
  CDR3 for beta chain variable domain of TCR clone 30776 (TRBV27, TRBJ2-7)
CASSLTTGYEQYF

SEQ ID NO: 61553 - protein, 13 aa, Homo sapiens
  CDR3 for alpha chain variable domain of TCR clone 30777 (TRAV26-1, TRAJ54)
CIVRVKGAQKLVF

SEQ ID NO: 61554 - protein, 15 aa, Homo sapiens
  CDR3 for beta chain variable domain of TCR clone 30777 (TRBV20-1, TRBJ2-1)
CSAQPGGGPYSEQFF

SEQ ID NO: 61555 - protein, 13 aa, Homo sapiens
  CDR3 for alpha chain variable domain of TCR clone 30778 (TRAV17, TRAJ9)
CATDYTGGFKTIF

SEQ ID NO: 61556 - protein, 16 aa, Homo sapiens
  CDR3 for beta chain variable domain of TCR clone 30778 (TRBV7-7, TRBJ2-1)
CASSLASGTSYNEQFL

SEQ ID NO: 61557 - protein, 16 aa, Homo sapiens
  CDR3 for alpha chain variable domain of TCR clone 30779 (TRAV12-1, TRAJ10)
CVVNLILTGGGNKLTF

SEQ ID NO: 61558 - protein, 16 aa, Homo sapiens
  CDR3 for beta chain variable domain of TCR clone 30779 (TRBV28, TRBJ2-7)
CASSPWVATGDLSQYF

SEQ ID NO: 61559 - protein, 14 aa, Homo sapiens
  CDR3 for alpha chain variable domain of TCR clone 30780 (TRAV13-1, TRAJ44)
CAAKATGTASKLTF

SEQ ID NO: 61560 - protein, 13 aa, Homo sapiens
  CDR3 for beta chain variable domain of TCR clone 30780 (TRBV5-5, TRBJ1-2)
CASGFWRGEDYTF

SEQ ID NO: 61561 - protein, 13 aa, Homo sapiens
  CDR3 for alpha chain variable domain of TCR clone 30781 (TRAV21, TRAJ20)
CAVGLRVDYKLSF

SEQ ID NO: 61562 - protein, 13 aa, Homo sapiens
  CDR3 for beta chain variable domain of TCR clone 30781 (TRBV6-1, TRBJ1-1)
CASRRQGNTEAFF

SEQ ID NO: 61563 - protein, 10 aa, Homo sapiens
  CDR3 for alpha chain variable domain of TCR clone 30782 (TRAV2, TRAJ34)
CAVVHDKLIF

SEQ ID NO: 61564 - protein, 15 aa, Homo sapiens
  CDR3 for beta chain variable domain of TCR clone 30782 (TRBV3-1, TRBJ2-2)
CASSQDWTRAGELFF

SEQ ID NO: 61565 - protein, 12 aa, Homo sapiens
  CDR3 for alpha chain variable domain of TCR clone 30783 (TRAV13-1, TRAJ49)
CAAPNTGNQFYF

SEQ ID NO: 61566 - protein, 17 aa, Homo sapiens
  CDR3 for beta chain variable domain of TCR clone 30783 (TRBV25-1, TRBJ2-7)
CASSDARVVFASYEQYF

SEQ ID NO: 61567 - protein, 13 aa, Homo sapiens
  CDR3 for alpha chain variable domain of TCR clone 30784 (TRAV21, TRAJ27)
CAARPGNAGKSTF

SEQ ID NO: 61568 - protein, 13 aa, Homo sapiens
  CDR3 for beta chain variable domain of TCR clone 30784 (TRBV10-2, TRBJ2-7)
CASGASGGYEQYF

SEQ ID NO: 61569 - protein, 13 aa, Homo sapiens
  CDR3 for alpha chain variable domain of TCR clone 30785 (TRAV12-1, TRAJ31)
CVVNMNNNARLML

SEQ ID NO: 61570 - protein, 15 aa, Homo sapiens
  CDR3 for beta chain variable domain of TCR clone 30785 (TRBV4-1, TRBJ1-2)
CASSQGQGAAYGYTF

SEQ ID NO: 61571 - protein, 21 aa, Homo sapiens
  CDR3 for alpha chain variable domain of TCR clone 30786 (TRAV1-1, TRAJ9)
CAAKNTGGFKTILEQEQDYLL

SEQ ID NO: 61572 - protein, 14 aa, Homo sapiens
  CDR3 for beta chain variable domain of TCR clone 30786 (TRBV20-1, TRBJ2-1)
CSAQIGGSANEQFF

SEQ ID NO: 61573 - protein, 16 aa, Homo sapiens
  CDR3 for alpha chain variable domain of TCR clone 30787 (TRAV35, TRAJ28)
CAGQRYSGAGSYQLTF

SEQ ID NO: 61574 - protein, 13 aa, Homo sapiens
  CDR3 for beta chain variable domain of TCR clone 30787 (TRBV19, TRBJ1-2)
CASSQGQVYGYTL

SEQ ID NO: 61575 - protein, 14 aa, Homo sapiens
  CDR3 for alpha chain variable domain of TCR clone 30788 (TRAV38-1, TRAJ40)
CALRPTSGTYKYIF

SEQ ID NO: 61576 - protein, 14 aa, Homo sapiens
  CDR3 for beta chain variable domain of TCR clone 30788 (TRBV25-1, TRBJ1-1)
CARTHLGGNTEAFF

SEQ ID NO: 61577 - protein, 15 aa, Homo sapiens
  CDR3 for alpha chain variable domain of TCR clone 30789 (TRAV16, TRAJ20)
CALKGGLRADYKLSF

SEQ ID NO: 61578 - protein, 16 aa, Homo sapiens
  CDR3 for beta chain variable domain of TCR clone 30789 (TRBV11-3, TRBJ2-2)
CASSSRTSPGTGELFL

SEQ ID NO: 61579 - protein, 14 aa, Homo sapiens
  CDR3 for alpha chain variable domain of TCR clone 30790 (TRAV14/DV4, TRAJ54)
CAMREAPGAQKLEF

SEQ ID NO: 61580 - protein, 15 aa, Homo sapiens
  CDR3 for beta chain variable domain of TCR clone 30790 (TRBV5-1, TRBJ2-7)
CASSLNGGPAREQYF

SEQ ID NO: 61581 - protein, 14 aa, Homo sapiens
  CDR3 for alpha chain variable domain of TCR clone 30791 (TRAV12-2, TRAJ40)
CAVKIPSGTYKYIF

SEQ ID NO: 61582 - protein, 14 aa, Homo sapiens
  CDR3 for beta chain variable domain of TCR clone 30791 (TRBV20-1, TRBJ1-1)
FSAQTRIGGTEAFF

SEQ ID NO: 61583 - protein, 15 aa, Homo sapiens
  CDR3 for alpha chain variable domain of TCR clone 30792 (TRAV17, TRAJ23)
CATDAEDNQGGKLIF

SEQ ID NO: 61584 - protein, 12 aa, Homo sapiens
  CDR3 for beta chain variable domain of TCR clone 30792 (TRBV2, TRBJ2-1)
CAKQEGYNEQFF

SEQ ID NO: 61585 - protein, 19 aa, Homo sapiens
  CDR3 for alpha chain variable domain of TCR clone 30793 (TRAV21, TRAJ20)
SLVTQPPTSVLPNDYKLSF

SEQ ID NO: 61586 - protein, 14 aa, Homo sapiens
  CDR3 for beta chain variable domain of TCR clone 30793 (TRBV7-2, TRBJ1-3)
CASGRLRSGNTIYF

SEQ ID NO: 61587 - protein, 16 aa, Homo sapiens
  CDR3 for alpha chain variable domain of TCR clone 30794 (TRAV26-2, TRAJ45)
CTTASPIGGGADGLTF

SEQ ID NO: 61588 - protein, 20 aa, Homo sapiens
  CDR3 for beta chain variable domain of TCR clone 30794 (TRBV28, TRBJ2-1)
CASTPIGRSPGLAGGNEKFF

SEQ ID NO: 61589 - protein, 14 aa, Homo sapiens
  CDR3 for alpha chain variable domain of TCR clone 30795 (TRAV12-3, TRAJ10)
SHLPLTGGGNKLTF

SEQ ID NO: 61590 - protein, 14 aa, Homo sapiens
  CDR3 for beta chain variable domain of TCR clone 30795 (TRBV6-1, TRBJ1-3)
CASVQGGGRNTIYF

SEQ ID NO: 61591 - protein, 14 aa, Homo sapiens
  CDR3 for alpha chain variable domain of TCR clone 30796 (TRAV17, TRAJ57)
CATDPQGGSEKLVF

SEQ ID NO: 61592 - protein, 17 aa, Homo sapiens
  CDR3 for beta chain variable domain of TCR clone 30796 (TRBV28, TRBJ2-5)
CASSRQGGLAGAETQYF

SEQ ID NO: 61593 - protein, 14 aa, Homo sapiens
  CDR3 for alpha chain variable domain of TCR clone 30797 (TRAV1-2, TRAJ16)
CAVNRFSDGQKLLF

SEQ ID NO: 61594 - protein, 15 aa, Homo sapiens
  CDR3 for beta chain variable domain of TCR clone 30797 (TRBV10-3, TRBJ1-5)
CAISDTGLGGQPQHF

SEQ ID NO: 61595 - protein, 11 aa, Homo sapiens
  CDR3 for alpha chain variable domain of TCR clone 30798 (TRAV1-1, TRAJ23)
CAVRQGGKLIF

SEQ ID NO: 61596 - protein, 20 aa, Homo sapiens
  CDR3 for beta chain variable domain of TCR clone 30798 (TRBV7-8, TRBJ2-2)
CASSHLFSGPTIHITGELFF

SEQ ID NO: 61597 - protein, 17 aa, Homo sapiens
  CDR3 for alpha chain variable domain of TCR clone 30799 (TRAV26-1, TRAJ53)
CIVRVADSGGSNYKLTF

SEQ ID NO: 61598 - protein, 15 aa, Homo sapiens
  CDR3 for beta chain variable domain of TCR clone 30799 (TRBV20-1, TRBJ2-7)
CSARVPAAYFYEQYF

SEQ ID NO: 61599 - protein, 13 aa, Homo sapiens
  CDR3 for alpha chain variable domain of TCR clone 30800 (TRAV27, TRAJ29)
CAGAHSGNTPLVF

SEQ ID NO: 61600 - protein, 15 aa, Homo sapiens
  CDR3 for beta chain variable domain of TCR clone 30800 (TRBV7-9, TRBJ1-5)
CASSQGHQPNQPQHF

SEQ ID NO: 61601 - protein, 15 aa, Homo sapiens
  CDR3 for alpha chain variable domain of TCR clone 30801 (TRAV25, TRAJ10)
CAGPLLTGGGNKLTF

SEQ ID NO: 61602 - protein, 11 aa, Homo sapiens
  CDR3 for beta chain variable domain of TCR clone 30801 (TRBV12-5, TRBJ2-2)
CASGRLGGEHR

SEQ ID NO: 61603 - protein, 14 aa, Homo sapiens
  CDR3 for alpha chain variable domain of TCR clone 30802 (TRAV29/DV5, TRAJ36)
CAARRKTGANNLFF

SEQ ID NO: 61604 - protein, 15 aa, Homo sapiens
  CDR3 for beta chain variable domain of TCR clone 30802 (TRBV28, TRBJ2-1)
CASSIIAGGRSEQFF

SEQ ID NO: 61605 - protein, 16 aa, Homo sapiens
  CDR3 for alpha chain variable domain of TCR clone 30803 (TRAV22, TRAJ45)
CAVERGKRGGADGLTF

SEQ ID NO: 61606 - protein, 13 aa, Homo sapiens
  CDR3 for beta chain variable domain of TCR clone 30803 (TRBV27, TRBJ1-1)
CASSLSIGAEALF

SEQ ID NO: 61607 - protein, 17 aa, Homo sapiens
  CDR3 for alpha chain variable domain of TCR clone 30804 (TRAV23/DV6, TRAJ57)
CAASPTLSQGGSEKLVF

SEQ ID NO: 61608 - protein, 11 aa, Homo sapiens
  CDR3 for beta chain variable domain of TCR clone 30804 (TRBV11-2, TRBJ1-1)
CASSINTEAFF

SEQ ID NO: 61609 - protein, 13 aa, Homo sapiens
  CDR3 for alpha chain variable domain of TCR clone 30805 (TRAV13-1, TRAJ39)
CSKYSNAGNMLTF

SEQ ID NO: 61610 - protein, 13 aa, Homo sapiens
  CDR3 for beta chain variable domain of TCR clone 30805 (TRBV19, TRBJ1-5)
CASSIGGNQPQHF

SEQ ID NO: 61611 - protein, 15 aa, Homo sapiens
  CDR3 for alpha chain variable domain of TCR clone 30806 (TRAV12-2, TRAJ43)
CAFDMRFGAGTRLTV

SEQ ID NO: 61612 - protein, 18 aa, Homo sapiens
  CDR3 for beta chain variable domain of TCR clone 30806 (TRBV20-1, TRBJ2-3)
CSASGLAGGPGSTDTQYF

SEQ ID NO: 61613 - protein, 20 aa, Homo sapiens
  CDR3 for alpha chain variable domain of TCR clone 30807 (TRAV8-3, )
CAGDNYDIQNPDPAVYQLSD

SEQ ID NO: 61614 - protein, 14 aa, Homo sapiens
  CDR3 for beta chain variable domain of TCR clone 30807 (TRBV5-5, TRBJ1-5)
CASSGQGVDQPQHF

SEQ ID NO: 61615 - protein, 11 aa, Homo sapiens
  CDR3 for alpha chain variable domain of TCR clone 30808 (TRAV27, TRAJ40)
SLTSGTYKYIF

SEQ ID NO: 61616 - protein, 12 aa, Homo sapiens
  CDR3 for beta chain variable domain of TCR clone 30808 (TRBV18, TRBJ2-3)
CRLNQNTDTQYF

SEQ ID NO: 61617 - protein, 13 aa, Homo sapiens
  CDR3 for alpha chain variable domain of TCR clone 30809 (TRAV3, TRAJ29)
CAVRDWGNTPLAF

SEQ ID NO: 61618 - protein, 15 aa, Homo sapiens
  CDR3 for beta chain variable domain of TCR clone 30809 (TRBV12-4, TRBJ2-5)
CASIGRTGEGETQYF

SEQ ID NO: 61619 - protein, 14 aa, Homo sapiens
  CDR3 for alpha chain variable domain of TCR clone 30810 (TRAV8-2, TRAJ4)
CGVSPSGGYNKLIF

SEQ ID NO: 61620 - protein, 15 aa, Homo sapiens
  CDR3 for beta chain variable domain of TCR clone 30810 (TRBV4-1, TRBJ1-4)
CASSDTGGTNEKLFF

SEQ ID NO: 61621 - protein, 13 aa, Homo sapiens
  CDR3 for alpha chain variable domain of TCR clone 30811 (TRAV12-3, TRAJ48)
CAMSLVGNEKLTF

SEQ ID NO: 61622 - protein, 11 aa, Homo sapiens
  CDR3 for beta chain variable domain of TCR clone 30811 (TRBV7-2, TRBJ2-7)
CVSSSGLWQYF

SEQ ID NO: 61623 - protein, 14 aa, Homo sapiens
  CDR3 for alpha chain variable domain of TCR clone 30812 (TRAV12-2, TRAJ17)
CAVLFKAAGNKLTF

SEQ ID NO: 61624 - protein, 14 aa, Homo sapiens
  CDR3 for beta chain variable domain of TCR clone 30812 (TRBV4-1, TRBJ2-2)
CASSQAVNTGELSF

SEQ ID NO: 61625 - protein, 13 aa, Homo sapiens
  CDR3 for alpha chain variable domain of TCR clone 30813 (TRAV36/DV7, TRAJ38)
CVANAGDNRKLIW

SEQ ID NO: 61626 - protein, 14 aa, Homo sapiens
  CDR3 for beta chain variable domain of TCR clone 30813 (TRBV7-2, TRBJ2-7)
CASSLRWEVNEQYF

SEQ ID NO: 61627 - protein, 14 aa, Homo sapiens
  CDR3 for alpha chain variable domain of TCR clone 30814 (TRAV17, TRAJ57)
CATDPQGGSEKLVF

SEQ ID NO: 61628 - protein, 14 aa, Homo sapiens
  CDR3 for beta chain variable domain of TCR clone 30814 (TRBV12-5, TRBJ2-5)
CASGSRTHQETQYF

SEQ ID NO: 61629 - protein, 15 aa, Homo sapiens
  CDR3 for alpha chain variable domain of TCR clone 30815 (TRAV3, TRAJ3)
CAVRDRDSSAPKIIF

SEQ ID NO: 61630 - protein, 18 aa, Homo sapiens
  CDR3 for beta chain variable domain of TCR clone 30815 (TRBV25-1, TRBJ1-2)
CASSGLQNGQGLIFGYTF

SEQ ID NO: 61631 - protein, 16 aa, Homo sapiens
  CDR3 for alpha chain variable domain of TCR clone 30816 (TRAV3, TRAJ37)
CAVRPHGSGNTGKLIF

SEQ ID NO: 61632 - protein, 15 aa, Homo sapiens
  CDR3 for beta chain variable domain of TCR clone 30816 (TRBV5-1, TRBJ2-1)
CASSPPRAPYNEQFF

SEQ ID NO: 61633 - protein, 14 aa, Homo sapiens
  CDR3 for alpha chain variable domain of TCR clone 30817 (TRAV8-3, TRAJ44)
CAVGNTGTASKLTF

SEQ ID NO: 61634 - protein, 13 aa, Homo sapiens
  CDR3 for beta chain variable domain of TCR clone 30817 (TRBV7-9, TRBJ1-2)
CASSLKQNNGYTF

SEQ ID NO: 61635 - protein, 15 aa, Homo sapiens
  CDR3 for alpha chain variable domain of TCR clone 30818 (TRAV27, TRAJ39)
ASTSVQGNAGNMLTF

SEQ ID NO: 61636 - protein, 14 aa, Homo sapiens
  CDR3 for beta chain variable domain of TCR clone 30818 (TRBV15, TRBJ2-7)
CATSPDRGLYEQYF

SEQ ID NO: 61637 - protein, 16 aa, Homo sapiens
  CDR3 for alpha chain variable domain of TCR clone 30819 (TRAV8-3, TRAJ13)
CAVGAYPSGGYQKVTF

SEQ ID NO: 61638 - protein, 17 aa, Homo sapiens
  CDR3 for beta chain variable domain of TCR clone 30819 (TRBV11-2, TRBJ2-1)
CASSLYPPGVEYNEQFF

SEQ ID NO: 61639 - protein, 13 aa, Homo sapiens
  CDR3 for alpha chain variable domain of TCR clone 30820 (TRAV2, TRAJ40)
CAVVTSGTYKYIF

SEQ ID NO: 61640 - protein, 14 aa, Homo sapiens
  CDR3 for beta chain variable domain of TCR clone 30820 (TRBV19, TRBJ2-1)
CASMTFVLSGEQFF

SEQ ID NO: 61641 - protein, 14 aa, Homo sapiens
  CDR3 for alpha chain variable domain of TCR clone 30821 (TRAV1-1, TRAJ27)
CAVIYNTNAGKSTF

SEQ ID NO: 61642 - protein, 15 aa, Homo sapiens
  CDR3 for beta chain variable domain of TCR clone 30821 (TRBV7-2, TRBJ2-1)
CASRSGLAGGNEQFF

SEQ ID NO: 61643 - protein, 15 aa, Homo sapiens
  CDR3 for alpha chain variable domain of TCR clone 30822 (TRAV26-1, TRAJ29)
CIVRVEGSGNTPLVF

SEQ ID NO: 61644 - protein, 14 aa, Homo sapiens
  CDR3 for beta chain variable domain of TCR clone 30822 (TRBV18, TRBJ2-5)
CVSSPGVSQETQYF

SEQ ID NO: 61645 - protein, 19 aa, Homo sapiens
  CDR3 for alpha chain variable domain of TCR clone 30823 (TRAV26-1, TRAJ52)
CIVRAHRNAGGTSYGKLTF

SEQ ID NO: 61646 - protein, 15 aa, Homo sapiens
  CDR3 for beta chain variable domain of TCR clone 30823 (TRBV29-1, TRBJ2-1)
CSGRDRKSSYDEQFF

SEQ ID NO: 61647 - protein, 14 aa, Homo sapiens
  CDR3 for alpha chain variable domain of TCR clone 30824 (TRAV12-2, TRAJ53)
CAVKGGGSNYKLAF

SEQ ID NO: 61648 - protein, 14 aa, Homo sapiens
  CDR3 for beta chain variable domain of TCR clone 30824 (TRBV7-7, TRBJ2-2)
CATRQDSDTGELFF

SEQ ID NO: 61649 - protein, 13 aa, Homo sapiens
  CDR3 for alpha chain variable domain of TCR clone 30825 (TRAV12-3, TRAJ33)
CAMSVNSNYQLIW

SEQ ID NO: 61650 - protein, 13 aa, Homo sapiens
  CDR3 for beta chain variable domain of TCR clone 30825 (TRBV20-1, TRBJ1-1)
CSARGGGNTEAFF

SEQ ID NO: 61651 - protein, 14 aa, Homo sapiens
  CDR3 for alpha chain variable domain of TCR clone 30826 (TRAV12-2, TRAJ13)
CAVKKTGGYQKVTF

SEQ ID NO: 61652 - protein, 15 aa, Homo sapiens
  CDR3 for beta chain variable domain of TCR clone 30826 (TRBV27, TRBJ2-1)
CASSNGGGSSTEQFF

SEQ ID NO: 61653 - protein, 17 aa, Homo sapiens
  CDR3 for alpha chain variable domain of TCR clone 30827 (TRAV8-6, TRAJ58)
CAVSSWVGETSGSRLSF

SEQ ID NO: 61654 - protein, 14 aa, Homo sapiens
  CDR3 for beta chain variable domain of TCR clone 30827 (TRBV4-2, TRBJ2-1)
CASGLDRAYNEQFF

SEQ ID NO: 61655 - protein, 14 aa, Homo sapiens
  CDR3 for alpha chain variable domain of TCR clone 30828 (TRAV35, TRAJ13)
CAGSPSGGYQKVTF

SEQ ID NO: 61656 - protein, 16 aa, Homo sapiens
  CDR3 for beta chain variable domain of TCR clone 30828 (TRBV19, TRBJ2-1)
CAGSKAGPSSYNEQFF

SEQ ID NO: 61657 - protein, 12 aa, Homo sapiens
  CDR3 for alpha chain variable domain of TCR clone 30829 (TRAV12-3, TRAJ4)
CAMTGAGARLAV

SEQ ID NO: 61658 - protein, 14 aa, Homo sapiens
  CDR3 for beta chain variable domain of TCR clone 30829 (TRBV10-3, TRBJ1-1)
CAISDTDRGVEAFF

SEQ ID NO: 61659 - protein, 15 aa, Homo sapiens
  CDR3 for alpha chain variable domain of TCR clone 30830 (TRAV3, TRAJ12)
CAVRDMRDSSYKLIF

SEQ ID NO: 61660 - protein, 15 aa, Homo sapiens
  CDR3 for beta chain variable domain of TCR clone 30830 (TRBV27, TRBJ2-7)
CASSLRNEQGYEQYF

SEQ ID NO: 61661 - protein, 14 aa, Homo sapiens
  CDR3 for alpha chain variable domain of TCR clone 30831 (TRAV12-2, TRAJ11)
CAVNRESGYSTPTF

SEQ ID NO: 61662 - protein, 10 aa, Homo sapiens
  CDR3 for beta chain variable domain of TCR clone 30831 (TRBV20-1, TRBJ2-5)
CSARFETQYF

SEQ ID NO: 61663 - protein, 13 aa, Homo sapiens
  CDR3 for alpha chain variable domain of TCR clone 30832 (TRAV35, TRAJ58)
CAGLETSGSRLTF

SEQ ID NO: 61664 - protein, 15 aa, Homo sapiens
  CDR3 for beta chain variable domain of TCR clone 30832 (TRBV20-1, TRBJ2-1)
CSAKFSAGGLNEQFF

SEQ ID NO: 61665 - protein, 14 aa, Homo sapiens
  CDR3 for alpha chain variable domain of TCR clone 30833 (TRAV8-4, TRAJ48)
CAGSETFGNEKLTF

SEQ ID NO: 61666 - protein, 14 aa, Homo sapiens
  CDR3 for beta chain variable domain of TCR clone 30833 (TRBV13, TRBJ2-7)
CASSLKGASYEQYF

SEQ ID NO: 61667 - protein, 14 aa, Homo sapiens
  CDR3 for alpha chain variable domain of TCR clone 30834 (TRAV12-3, TRAJ10)
SHLPLTGGGNKLTF

SEQ ID NO: 61668 - protein, 18 aa, Homo sapiens
  CDR3 for beta chain variable domain of TCR clone 30834 (TRBV6-6, TRBJ1-3)
CASSYSKWDSISGNTIYF

SEQ ID NO: 61669 - protein, 15 aa, Homo sapiens
  CDR3 for alpha chain variable domain of TCR clone 30835 (TRAV12-1, TRAJ44)
CVAALPTGTASKLTF

SEQ ID NO: 61670 - protein, 13 aa, Homo sapiens
  CDR3 for beta chain variable domain of TCR clone 30835 (TRBV6-5, TRBJ2-5)
CASSPQGGETQYF

SEQ ID NO: 61671 - protein, 12 aa, Homo sapiens
  CDR3 for alpha chain variable domain of TCR clone 30836 (TRAV2, TRAJ33)
CVVWGSNYQLIW

SEQ ID NO: 61672 - protein, 16 aa, Homo sapiens
  CDR3 for beta chain variable domain of TCR clone 30836 (TRBV20-1, TRBJ1-4)
CSAPGQGLLTNEKLFF

SEQ ID NO: 61673 - protein, 12 aa, Homo sapiens
  CDR3 for alpha chain variable domain of TCR clone 30837 (TRAV21, TRAJ31)
CVLAGDNARLMF

SEQ ID NO: 61674 - protein, 16 aa, Homo sapiens
  CDR3 for beta chain variable domain of TCR clone 30837 (TRBV27, TRBJ2-5)
CASSFGPGGTKETQYF

SEQ ID NO: 61675 - protein, 14 aa, Homo sapiens
  CDR3 for alpha chain variable domain of TCR clone 30838 (TRAV12-2, TRAJ13)
CAVKKTRGYQKVTF

SEQ ID NO: 61676 - protein, 13 aa, Homo sapiens
  CDR3 for beta chain variable domain of TCR clone 30838 (TRBV10-3, TRBJ2-7)
CASKLAVNYEQYF

SEQ ID NO: 61677 - protein, 15 aa, Homo sapiens
  CDR3 for alpha chain variable domain of TCR clone 30839 (TRAV2, TRAJ15)
CAVEDRGQAGTALIF

SEQ ID NO: 61678 - protein, 13 aa, Homo sapiens
  CDR3 for beta chain variable domain of TCR clone 30839 (TRBV10-2, TRBJ2-7)
RASGASGGYEQYF

SEQ ID NO: 61679 - protein, 17 aa, Homo sapiens
  CDR3 for alpha chain variable domain of TCR clone 30840 (TRAV3, TRAJ28)
CAVREAYSGAGSYQLTF

SEQ ID NO: 61680 - protein, 14 aa, Homo sapiens
  CDR3 for beta chain variable domain of TCR clone 30840 (TRBV19, TRBJ2-1)
CASPTFVLSGEQFF

SEQ ID NO: 61681 - protein, 17 aa, Homo sapiens
  CDR3 for alpha chain variable domain of TCR clone 30841 (TRAV12-2, TRAJ48)
CASNEKSTFGTGTRLTI

SEQ ID NO: 61682 - protein, 14 aa, Homo sapiens
  CDR3 for beta chain variable domain of TCR clone 30841 (TRBV5-1, TRBJ2-5)
CASSLAGKQETQYF

SEQ ID NO: 61683 - protein, 15 aa, Homo sapiens
  CDR3 for alpha chain variable domain of TCR clone 30842 (TRAV8-4, TRAJ3)
CAVTGENLVQQFFQD

SEQ ID NO: 61684 - protein, 16 aa, Homo sapiens
  CDR3 for beta chain variable domain of TCR clone 30842 (TRBV4-2, TRBJ1-1)
CASSQAGFGMNTEAFF

SEQ ID NO: 61685 - protein, 11 aa, Homo sapiens
  CDR3 for alpha chain variable domain of TCR clone 30843 (TRAV1-2, TRAJ20)
CAVANDYKLSF

SEQ ID NO: 61686 - protein, 15 aa, Homo sapiens
  CDR3 for beta chain variable domain of TCR clone 30843 (TRBV4-1, TRBJ1-4)
CASSDTGGTNEKLFF

SEQ ID NO: 61687 - protein, 13 aa, Homo sapiens
  CDR3 for alpha chain variable domain of TCR clone 30844 (TRAV8-4, TRAJ30)
CAVSVNRDDKIIF

SEQ ID NO: 61688 - protein, 17 aa, Homo sapiens
  CDR3 for beta chain variable domain of TCR clone 30844 (TRBV11-2, TRBJ2-1)
CASSLYPPGVEYNEQFF

SEQ ID NO: 61689 - protein, 16 aa, Homo sapiens
  CDR3 for alpha chain variable domain of TCR clone 30845 (TRAV30, TRAJ24)
CGTEIVDADSWGKFQF

SEQ ID NO: 61690 - protein, 16 aa, Homo sapiens
  CDR3 for beta chain variable domain of TCR clone 30845 (TRBV11-2, TRBJ2-7)
CASSPTTGGVSYEQYF

SEQ ID NO: 61691 - protein, 12 aa, Homo sapiens
  CDR3 for alpha chain variable domain of TCR clone 30846 (TRAV3, TRAJ20)
CAVRDPDYKLSF

SEQ ID NO: 61692 - protein, 14 aa, Homo sapiens
  CDR3 for beta chain variable domain of TCR clone 30846 (TRBV20-1, TRBJ1-1)
CSAQTRIGGTEAFF

SEQ ID NO: 61693 - protein, 13 aa, Homo sapiens
  CDR3 for alpha chain variable domain of TCR clone 30847 (TRAV8-3, TRAJ36)
CAVGATGANNLVF

SEQ ID NO: 61694 - protein, 15 aa, Homo sapiens
  CDR3 for beta chain variable domain of TCR clone 30847 (TRBV7-2, TRBJ1-2)
CASSPRAGWNYGYTF

SEQ ID NO: 61695 - protein, 18 aa, Homo sapiens
  CDR3 for alpha chain variable domain of TCR clone 30848 (TRAV12-3, TRAJ52)
CAMSVGGAGGTSYGKLTF

SEQ ID NO: 61696 - protein, 15 aa, Homo sapiens
  CDR3 for beta chain variable domain of TCR clone 30848 (TRBV27, TRBJ1-6)
CASSFDRGLGSPPHF

SEQ ID NO: 61697 - protein, 16 aa, Homo sapiens
  CDR3 for alpha chain variable domain of TCR clone 30849 (TRAV12-3, TRAJ53)
CAMSPGSGGSNYKLTF

SEQ ID NO: 61698 - protein, 14 aa, Homo sapiens
  CDR3 for beta chain variable domain of TCR clone 30849 (TRBV19, TRBJ1-6)
CASSSGTGYSPLHF

SEQ ID NO: 61699 - protein, 16 aa, Homo sapiens
  CDR3 for alpha chain variable domain of TCR clone 30850 (TRAV3, TRAJ37)
CAVRVRGSGNTGKLIL

SEQ ID NO: 61700 - protein, 11 aa, Homo sapiens
  CDR3 for beta chain variable domain of TCR clone 30850 (TRBV11-2, TRBJ2-2)
CASSLPGELFF

SEQ ID NO: 61701 - protein, 18 aa, Homo sapiens
  CDR3 for alpha chain variable domain of TCR clone 30851 (TRAV13-1, TRAJ52)
CVASKRSAGGTSYGKLTF

SEQ ID NO: 61702 - protein, 13 aa, Homo sapiens
  CDR3 for beta chain variable domain of TCR clone 30851 (TRBV12-4, TRBJ1-2)
CASSLRQGKGYTF

SEQ ID NO: 61703 - protein, 14 aa, Homo sapiens
  CDR3 for alpha chain variable domain of TCR clone 30852 (TRAV12-2, TRAJ45)
CAANIGGGADGLTF

SEQ ID NO: 61704 - protein, 13 aa, Homo sapiens
  CDR3 for beta chain variable domain of TCR clone 30852 (TRBV19, TRBJ2-2)
CASSIWSTGELFF

SEQ ID NO: 61705 - protein, 13 aa, Homo sapiens
  CDR3 for alpha chain variable domain of TCR clone 30853 (TRAV26-1, TRAJ33)
CIVRVEGNYQLIW

SEQ ID NO: 61706 - protein, 16 aa, Homo sapiens
  CDR3 for beta chain variable domain of TCR clone 30853 (TRBV15, TRBJ2-7)
CATSRDRGRGRGEQYF

SEQ ID NO: 61707 - protein, 12 aa, Homo sapiens
  CDR3 for alpha chain variable domain of TCR clone 30854 (TRAV13-2, TRAJ8)
CAPWLGFQKLVF

SEQ ID NO: 61708 - protein, 14 aa, Homo sapiens
  CDR3 for beta chain variable domain of TCR clone 30854 (TRBV18, TRBJ1-5)
RASSRQQRNQPQHF

SEQ ID NO: 61709 - protein, 12 aa, Homo sapiens
  CDR3 for alpha chain variable domain of TCR clone 30855 (TRAV13-2, TRAJ8)
CAPWLGFQKLAF

SEQ ID NO: 61710 - protein, 13 aa, Homo sapiens
  CDR3 for beta chain variable domain of TCR clone 30855 (TRBV24-1, TRBJ2-2)
CATSDWSTGELFF

SEQ ID NO: 61711 - protein, 16 aa, Homo sapiens
  CDR3 for alpha chain variable domain of TCR clone 30856 (TRAV26-1, TRAJ45)
CTVEKYSGGGADGLTF

SEQ ID NO: 61712 - protein, 15 aa, Homo sapiens
  CDR3 for beta chain variable domain of TCR clone 30856 (TRBV15, TRBJ2-7)
CHQQRPIQQAYEQYF

SEQ ID NO: 61713 - protein, 15 aa, Homo sapiens
  CDR3 for alpha chain variable domain of TCR clone 30857 (TRAV3, TRAJ5)
CAVRDLYTGRRALTF

SEQ ID NO: 61714 - protein, 14 aa, Homo sapiens
  CDR3 for beta chain variable domain of TCR clone 30857 (TRBV25-1, TRBJ1-1)
CASTHLGGNTEAFF

SEQ ID NO: 61715 - protein, 21 aa, Homo sapiens
  CDR3 for alpha chain variable domain of TCR clone 30858 (TRAV1-1, TRAJ6)
CLLLLRCERLERTGGSYIPTF

SEQ ID NO: 61716 - protein, 15 aa, Homo sapiens
  CDR3 for beta chain variable domain of TCR clone 30858 (TRBV6-3, TRBJ2-7)
CASSSPGTVFYEQYF

SEQ ID NO: 61717 - protein, 15 aa, Homo sapiens
  CDR3 for alpha chain variable domain of TCR clone 30859 (TRAV26-1, TRAJ22)
CIVRVSFWFGKATDL

SEQ ID NO: 61718 - protein, 13 aa, Homo sapiens
  CDR3 for beta chain variable domain of TCR clone 30859 (TRBV7-9, TRBJ1-2)
CASSLKQNYGYTF

SEQ ID NO: 61719 - protein, 17 aa, Homo sapiens
  CDR3 for alpha chain variable domain of TCR clone 30860 (TRAV3, TRAJ12)
CAVREIGGMDSSYKLIF

SEQ ID NO: 61720 - protein, 16 aa, Homo sapiens
  CDR3 for beta chain variable domain of TCR clone 30860 (TRBV7-7, TRBJ2-1)
CASSLASGTSYNEQFF

SEQ ID NO: 61721 - protein, 15 aa, Homo sapiens
  CDR3 for alpha chain variable domain of TCR clone 30861 (TRAV4, TRAJ27)
CLVGDEGTNAGKSTF

SEQ ID NO: 61722 - protein, 16 aa, Homo sapiens
  CDR3 for beta chain variable domain of TCR clone 30861 (TRBV6-5, TRBJ2-1)
CASSYSLAGGYNEQFF

SEQ ID NO: 61723 - protein, 14 aa, Homo sapiens
  CDR3 for alpha chain variable domain of TCR clone 30862 (TRAV1-2, TRAJ16)
CAVNRFSDGQKLLS

SEQ ID NO: 61724 - protein, 17 aa, Homo sapiens
  CDR3 for beta chain variable domain of TCR clone 30862 (TRBV13, TRBJ2-3)
CASSLSRVAGGRNTQYF

SEQ ID NO: 61725 - protein, 11 aa, Homo sapiens
  CDR3 for alpha chain variable domain of TCR clone 30863 (TRAV17, TRAJ9)
CATTGGFKTIF

SEQ ID NO: 61726 - protein, 16 aa, Homo sapiens
  CDR3 for beta chain variable domain of TCR clone 30863 (TRBV12-5, TRBJ2-5)
CASGPRTSGNQETQYF

SEQ ID NO: 61727 - protein, 14 aa, Homo sapiens
  CDR3 for alpha chain variable domain of TCR clone 30864 (TRAV1-2, TRAJ16)
CAVNRFSDGQKLLF

SEQ ID NO: 61728 - protein, 14 aa, Homo sapiens
  CDR3 for beta chain variable domain of TCR clone 30864 (TRBV25-1, TRBJ1-1)
CASTHLGENTEAFF

SEQ ID NO: 61729 - protein, 11 aa, Homo sapiens
  CDR3 for alpha chain variable domain of TCR clone 30865 (TRAV13-1, TRAJ40)
CAVSGTYKYIF

SEQ ID NO: 61730 - protein, 13 aa, Homo sapiens
  CDR3 for beta chain variable domain of TCR clone 30865 (TRBV19, TRBJ1-5)
CASSIGGNQHQHF

SEQ ID NO: 61731 - protein, 14 aa, Homo sapiens
  CDR3 for alpha chain variable domain of TCR clone 30866 (TRAV1-2, TRAJ16)
CAVNRFSDGQKLLF

SEQ ID NO: 61732 - protein, 15 aa, Homo sapiens
  CDR3 for beta chain variable domain of TCR clone 30866 (TRBV9, TRBJ1-6)
CASSVGGTGDSPLHF

SEQ ID NO: 61733 - protein, 15 aa, Homo sapiens
  CDR3 for alpha chain variable domain of TCR clone 30867 (TRAV26-1, TRAJ29)
CIVRVEGSGNTPLVF

SEQ ID NO: 61734 - protein, 14 aa, Homo sapiens
  CDR3 for beta chain variable domain of TCR clone 30867 (TRBV25-1, TRBJ1-1)
CSSTHLGGNTEAFF

SEQ ID NO: 61735 - protein, 11 aa, Homo sapiens
  CDR3 for alpha chain variable domain of TCR clone 30868 (TRAV13-1, TRAJ6)
CATLGSYIPKF

SEQ ID NO: 61736 - protein, 12 aa, Homo sapiens
  CDR3 for beta chain variable domain of TCR clone 30868 (TRBV11-2, TRBJ2-1)
CASSPGNNEQFF

SEQ ID NO: 61737 - protein, 13 aa, Homo sapiens
  CDR3 for alpha chain variable domain of TCR clone 30869 (TRAV2, TRAJ40)
CAVVTSGTYKYIF

SEQ ID NO: 61738 - protein, 16 aa, Homo sapiens
  CDR3 for beta chain variable domain of TCR clone 30869 (TRBV7-9, TRBJ1-3)
CASSLGAGSSGNTIFF

SEQ ID NO: 61739 - protein, 17 aa, Homo sapiens
  CDR3 for alpha chain variable domain of TCR clone 30870 (TRAV3, TRAJ6)
CAVRDGPRAGGSYVPTF

SEQ ID NO: 61740 - protein, 15 aa, Homo sapiens
  CDR3 for beta chain variable domain of TCR clone 30870 (TRBV11-3, TRBJ2-7)
CASSPGPASSYEQYF

SEQ ID NO: 61741 - protein, 14 aa, Homo sapiens
  CDR3 for alpha chain variable domain of TCR clone 30871 (TRAV27, TRAJ22)
CAGLPSGSARQLTF

SEQ ID NO: 61742 - protein, 14 aa, Homo sapiens
  CDR3 for beta chain variable domain of TCR clone 30871 (TRBV19, TRBJ2-1)
CASPTFVLSGEQFF

SEQ ID NO: 61743 - protein, 13 aa, Homo sapiens
  CDR3 for alpha chain variable domain of TCR clone 30872 (TRAV21, TRAJ15)
CAVANQAGTALIF

SEQ ID NO: 61744 - protein, 14 aa, Homo sapiens
  CDR3 for beta chain variable domain of TCR clone 30872 (TRBV27, TRBJ2-2)
RASSLGAATGEPFF

SEQ ID NO: 61745 - protein, 13 aa, Homo sapiens
  CDR3 for alpha chain variable domain of TCR clone 30873 (TRAV8-3, TRAJ36)
CAVGATGASNLFF

SEQ ID NO: 61746 - protein, 15 aa, Homo sapiens
  CDR3 for beta chain variable domain of TCR clone 30873 (TRBV7-2, TRBJ1-2)
CASSPRAGWNYGYTF

SEQ ID NO: 61747 - protein, 12 aa, Homo sapiens
  CDR3 for alpha chain variable domain of TCR clone 30874 (TRAV2, TRAJ9)
CAVGAGGFKTIF

SEQ ID NO: 61748 - protein, 14 aa, Homo sapiens
  CDR3 for beta chain variable domain of TCR clone 30874 (TRBV7-2, TRBJ2-7)
CASSPKTSFYEQYF

SEQ ID NO: 61749 - protein, 13 aa, Homo sapiens
  CDR3 for alpha chain variable domain of TCR clone 30875 (TRAV3, TRAJ8)
CAVRFTGFQKHVF

SEQ ID NO: 61750 - protein, 12 aa, Homo sapiens
  CDR3 for beta chain variable domain of TCR clone 30875 (TRBV2, TRBJ1-2)
CASSGQTYGYTF

SEQ ID NO: 61751 - protein, 13 aa, Homo sapiens
  CDR3 for alpha chain variable domain of TCR clone 30876 (TRAV1-2, TRAJ9)
CAALNTGGFKTIF

SEQ ID NO: 61752 - protein, 18 aa, Homo sapiens
  CDR3 for beta chain variable domain of TCR clone 30876 (TRBV11-2, TRBJ2-3)
CASSLGGASRGAPNTQYF

SEQ ID NO: 61753 - protein, 13 aa, Homo sapiens
  CDR3 for alpha chain variable domain of TCR clone 30877 (TRAV16, TRAJ22)
SAMLAGSARQLTF

SEQ ID NO: 61754 - protein, 18 aa, Homo sapiens
  CDR3 for beta chain variable domain of TCR clone 30877 (TRBV7-2, TRBJ2-3)
CASSLDTSRGRKADTQYF

SEQ ID NO: 61755 - protein, 12 aa, Homo sapiens
  CDR3 for alpha chain variable domain of TCR clone 30878 (TRAV38-2/DV8, TRAJ47)
CVLMEYGNKLVF

SEQ ID NO: 61756 - protein, 14 aa, Homo sapiens
  CDR3 for beta chain variable domain of TCR clone 30878 (TRBV20-1, TRBJ1-5)
CSATDRGSNQTQHF

SEQ ID NO: 61757 - protein, 14 aa, Homo sapiens
  CDR3 for alpha chain variable domain of TCR clone 30879 (TRAV9-2, TRAJ39)
CALYIYNAGNMLTF

SEQ ID NO: 61758 - protein, 17 aa, Homo sapiens
  CDR3 for beta chain variable domain of TCR clone 30879 (TRBV5-1, TRBJ2-2)
CASSLAGLSGGTGELFF

SEQ ID NO: 61759 - protein, 10 aa, Homo sapiens
  CDR3 for alpha chain variable domain of TCR clone 30880 (TRAV5, TRAJ34)
CAEDADKLIF

SEQ ID NO: 61760 - protein, 16 aa, Homo sapiens
  CDR3 for beta chain variable domain of TCR clone 30880 (TRBV7-3, TRBJ2-2)
CASSLKRGTLSGELFF

SEQ ID NO: 61761 - protein, 11 aa, Homo sapiens
  CDR3 for alpha chain variable domain of TCR clone 30881 (TRAV12-2, TRAJ39)
CAVNNMLTFGG

SEQ ID NO: 61762 - protein, 16 aa, Homo sapiens
  CDR3 for beta chain variable domain of TCR clone 30881 (TRBV5-3, TRBJ2-2)
CARSCGTGTNTGELFF

SEQ ID NO: 61763 - protein, 15 aa, Homo sapiens
  CDR3 for alpha chain variable domain of TCR clone 30882 (TRAV26-1, TRAJ48)
CIVRVRDFGNEKLTF

SEQ ID NO: 61764 - protein, 16 aa, Homo sapiens
  CDR3 for beta chain variable domain of TCR clone 30882 (TRBV4-1, TRBJ2-3)
CASSQRAGGLTDTQYF

SEQ ID NO: 61765 - protein, 11 aa, Homo sapiens
  CDR3 for alpha chain variable domain of TCR clone 30883 (TRAV1-1, TRAJ23)
CAVRQGGKLIF

SEQ ID NO: 61766 - protein, 16 aa, Homo sapiens
  CDR3 for beta chain variable domain of TCR clone 30883 (TRBV27, TRBJ2-2)
CASSFRGLVRTGELFF

SEQ ID NO: 61767 - protein, 13 aa, Homo sapiens
  CDR3 for alpha chain variable domain of TCR clone 30884 (TRAV8-6, TRAJ50)
YAVIKTSYDKVIF

SEQ ID NO: 61768 - protein, 15 aa, Homo sapiens
  CDR3 for beta chain variable domain of TCR clone 30884 (TRBV7-2, TRBJ2-2)
CASRRPGQNTGELFF

SEQ ID NO: 61769 - protein, 14 aa, Homo sapiens
  CDR3 for alpha chain variable domain of TCR clone 30885 (TRAV8-2, TRAJ4)
CVVSPSGGYNKMIF

SEQ ID NO: 61770 - protein, 15 aa, Homo sapiens
  CDR3 for beta chain variable domain of TCR clone 30885 (TRBV4-1, TRBJ1-4)
CASSDTGGTNEKLFF

SEQ ID NO: 61771 - protein, 15 aa, Homo sapiens
  CDR3 for alpha chain variable domain of TCR clone 30886 (TRAV26-2, TRAJ13)
CILRDLSGGYQEVTF

SEQ ID NO: 61772 - protein, 11 aa, Homo sapiens
  CDR3 for beta chain variable domain of TCR clone 30886 (TRBV7-9, TRBJ2-5)
CASSLSATQYF

SEQ ID NO: 61773 - protein, 11 aa, Homo sapiens
  CDR3 for alpha chain variable domain of TCR clone 30887 (TRAV21, TRAJ11)
CAVNGYSTLTF

SEQ ID NO: 61774 - protein, 12 aa, Homo sapiens
  CDR3 for beta chain variable domain of TCR clone 30887 (TRBV11-2, TRBJ2-1)
CASSPGNNEQFF

SEQ ID NO: 61775 - protein, 15 aa, Homo sapiens
  CDR3 for alpha chain variable domain of TCR clone 30888 (TRAV21, TRAJ37)
CAVRPTLSNTGKLIF

SEQ ID NO: 61776 - protein, 16 aa, Homo sapiens
  CDR3 for beta chain variable domain of TCR clone 30888 (TRBV24-1, TRBJ2-3)
CATSGRRQDLTDTQYF

SEQ ID NO: 61777 - protein, 13 aa, Homo sapiens
  CDR3 for alpha chain variable domain of TCR clone 30889 (TRAV21, TRAJ37)
CAVSSGNTGKLIF

SEQ ID NO: 61778 - protein, 17 aa, Homo sapiens
  CDR3 for beta chain variable domain of TCR clone 30889 (TRBV5-1, TRBJ2-5)
CASSLRGLAANQETQYF

SEQ ID NO: 61779 - protein, 15 aa, Homo sapiens
  CDR3 for alpha chain variable domain of TCR clone 30890 (TRAV26-1, TRAJ44)
RIVRANTGTASKLTF

SEQ ID NO: 61780 - protein, 16 aa, Homo sapiens
  CDR3 for beta chain variable domain of TCR clone 30890 (TRBV7-7, TRBJ2-1)
CASSLASGTSYNEQFF

SEQ ID NO: 61781 - protein, 17 aa, Homo sapiens
  CDR3 for alpha chain variable domain of TCR clone 30891 (TRAV23/DV6, TRAJ57)
CAASSTLSQGGSEKLVF

SEQ ID NO: 61782 - protein, 14 aa, Homo sapiens
  CDR3 for beta chain variable domain of TCR clone 30891 (TRBV25-1, TRBJ1-1)
CASPHLGGNTEAFF

SEQ ID NO: 61783 - protein, 21 aa, Homo sapiens
  CDR3 for alpha chain variable domain of TCR clone 30892 (TRAV2, TRAJ20)
AAHPQVREADAAVYRDCKLSF

SEQ ID NO: 61784 - protein, 16 aa, Homo sapiens
  CDR3 for beta chain variable domain of TCR clone 30892 (TRBV20-1, TRBJ1-4)
CSAPGQGLLTNEKLFF

SEQ ID NO: 61785 - protein, 11 aa, Homo sapiens
  CDR3 for alpha chain variable domain of TCR clone 30893 (TRAV13-1, TRAJ24)
CAASDWGKLQF

SEQ ID NO: 61786 - protein, 14 aa, Homo sapiens
  CDR3 for beta chain variable domain of TCR clone 30893 (TRBV7-7, TRBJ2-2)
CATRQDSDTGELFF

SEQ ID NO: 61787 - protein, 14 aa, Homo sapiens
  CDR3 for alpha chain variable domain of TCR clone 30894 (TRAV12-1, TRAJ17)
CVVNYKAAGNKLTF

SEQ ID NO: 61788 - protein, 16 aa, Homo sapiens
  CDR3 for beta chain variable domain of TCR clone 30894 (TRBV12-4, TRBJ1-5)
CARSRPVGGSNQPQHF

SEQ ID NO: 61789 - protein, 12 aa, Homo sapiens
  CDR3 for alpha chain variable domain of TCR clone 30895 (TRAV12-1, TRAJ40)
CVVYSGTYKYIF

SEQ ID NO: 61790 - protein, 11 aa, Homo sapiens
  CDR3 for beta chain variable domain of TCR clone 30895 (TRBV11-2, TRBJ2-2)
CASSLPGELFF

SEQ ID NO: 61791 - protein, 11 aa, Homo sapiens
  CDR3 for alpha chain variable domain of TCR clone 30896 (TRAV2, TRAJ13)
CASGGYQKVTF

SEQ ID NO: 61792 - protein, 13 aa, Homo sapiens
  CDR3 for beta chain variable domain of TCR clone 30896 (TRBV19, TRBJ2-7)
CASRKAGGSEQYF

SEQ ID NO: 61793 - protein, 13 aa, Homo sapiens
  CDR3 for alpha chain variable domain of TCR clone 30897 (TRAV1-1, TRAJ9)
CAAKNTGGFKTIF

SEQ ID NO: 61794 - protein, 15 aa, Homo sapiens
  CDR3 for beta chain variable domain of TCR clone 30897 (TRBV19, TRBJ2-1)
CASSIQATSYNEQFF

SEQ ID NO: 61795 - protein, 14 aa, Homo sapiens
  CDR3 for alpha chain variable domain of TCR clone 30898 (TRAV36/DV7, TRAJ57)
CAVGFPGGSEKPVF

SEQ ID NO: 61796 - protein, 12 aa, Homo sapiens
  CDR3 for beta chain variable domain of TCR clone 30898 (TRBV19, TRBJ2-7)
CASTSGTYEQYF

SEQ ID NO: 61797 - protein, 11 aa, Homo sapiens
  CDR3 for alpha chain variable domain of TCR clone 30899 (TRAV8-3, TRAJ4)
GAAGGYNKLIF

SEQ ID NO: 61798 - protein, 17 aa, Homo sapiens
  CDR3 for beta chain variable domain of TCR clone 30899 (TRBV13, TRBJ2-3)
CASSLSRVAGGRNTQYF

SEQ ID NO: 61799 - protein, 12 aa, Homo sapiens
  CDR3 for alpha chain variable domain of TCR clone 30900 (TRAV30, TRAJ43)
CGTEERGNDTRF

SEQ ID NO: 61800 - protein, 13 aa, Homo sapiens
  CDR3 for beta chain variable domain of TCR clone 30900 (TRBV27, TRBJ2-7)
CASSFSQGYEQYF

SEQ ID NO: 61801 - protein, 15 aa, Homo sapiens
  CDR3 for alpha chain variable domain of TCR clone 30901 (TRAV25, TRAJ53)
CPTSSSGGSNYKLTF

SEQ ID NO: 61802 - protein, 14 aa, Homo sapiens
  CDR3 for beta chain variable domain of TCR clone 30901 (TRBV11-2, TRBJ2-3)
CASSRLARTDTQYF

SEQ ID NO: 61803 - protein, 14 aa, Homo sapiens
  CDR3 for alpha chain variable domain of TCR clone 30902 (TRAV8-3, TRAJ39)
CAVGANNAGNMLTS

SEQ ID NO: 61804 - protein, 12 aa, Homo sapiens
  CDR3 for beta chain variable domain of TCR clone 30902 (TRBV28, TRBJ1-3)
CASVSSGNTIYF

SEQ ID NO: 61805 - protein, 15 aa, Homo sapiens
  CDR3 for alpha chain variable domain of TCR clone 30903 (TRAV27, TRAJ38)
CAARHNAGNNRKLIW

SEQ ID NO: 61806 - protein, 15 aa, Homo sapiens
  CDR3 for beta chain variable domain of TCR clone 30903 (TRBV12-4, TRBJ2-5)
CASSPPTGLQETQYF

SEQ ID NO: 61807 - protein, 13 aa, Homo sapiens
  CDR3 for alpha chain variable domain of TCR clone 30904 (TRAV26-1, TRAJ43)
CILRAVNNNDMRF

SEQ ID NO: 61808 - protein, 15 aa, Homo sapiens
  CDR3 for beta chain variable domain of TCR clone 30904 (TRBV7-2, TRBJ2-1)
CASTHGTGIYNEQFF

SEQ ID NO: 61809 - protein, 16 aa, Homo sapiens
  CDR3 for alpha chain variable domain of TCR clone 30905 (TRAV17, TRAJ28)
CASYAYSGAGSHQLTF

SEQ ID NO: 61810 - protein, 15 aa, Homo sapiens
  CDR3 for beta chain variable domain of TCR clone 30905 (TRBV4-2, TRBJ2-1)
CASSPSGGLYNEQFF

SEQ ID NO: 61811 - protein, 14 aa, Homo sapiens
  CDR3 for alpha chain variable domain of TCR clone 30906 (TRAV13-2, TRAJ22)
CADGTLGSARQLTF

SEQ ID NO: 61812 - protein, 16 aa, Homo sapiens
  CDR3 for beta chain variable domain of TCR clone 30906 (TRBV19, TRBJ2-1)
CAGSSKGTRSYNEQFF

SEQ ID NO: 61813 - protein, 14 aa, Homo sapiens
  CDR3 for alpha chain variable domain of TCR clone 30907 (TRAV1-2, TRAJ6)
CAVSLSGGSYIPTF

SEQ ID NO: 61814 - protein, 15 aa, Homo sapiens
  CDR3 for beta chain variable domain of TCR clone 30907 (TRBV28, TRBJ2-7)
CASSPDGRGFYEQYF

SEQ ID NO: 61815 - protein, 15 aa, Homo sapiens
  CDR3 for alpha chain variable domain of TCR clone 30908 (TRAV29/DV5, TRAJ29)
CAASERSSGNTPLVF

SEQ ID NO: 61816 - protein, 13 aa, Homo sapiens
  CDR3 for beta chain variable domain of TCR clone 30908 (TRBV12-4, TRBJ2-2)
CASSITGSGELFF

SEQ ID NO: 61817 - protein, 13 aa, Homo sapiens
  CDR3 for alpha chain variable domain of TCR clone 30909 (TRAV2, TRAJ40)
CAVVTSGTYKYIF

SEQ ID NO: 61818 - protein, 13 aa, Homo sapiens
  CDR3 for beta chain variable domain of TCR clone 30909 (TRBV7-3, TRBJ1-2)
CASSLKRGYGYTF

SEQ ID NO: 61819 - protein, 15 aa, Homo sapiens
  CDR3 for alpha chain variable domain of TCR clone 30910 (TRAV4, TRAJ39)
CLVGTNNNAGNMLTF

SEQ ID NO: 61820 - protein, 13 aa, Homo sapiens
  CDR3 for beta chain variable domain of TCR clone 30910 (TRBV11-2, TRBJ2-5)
CASSSTGEETQYF

SEQ ID NO: 61821 - protein, 13 aa, Homo sapiens
  CDR3 for alpha chain variable domain of TCR clone 30911 (TRAV1-2, TRAJ9)
CAALSTGGFKTIF

SEQ ID NO: 61822 - protein, 14 aa, Homo sapiens
  CDR3 for beta chain variable domain of TCR clone 30911 (TRBV13, TRBJ2-3)
CASSSGSPTDTQYF

SEQ ID NO: 61823 - protein, 13 aa, Homo sapiens
  CDR3 for alpha chain variable domain of TCR clone 30912 (TRAV8-2, TRAJ29)
CALPGAGNTPLVS

SEQ ID NO: 61824 - protein, 16 aa, Homo sapiens
  CDR3 for beta chain variable domain of TCR clone 30912 (TRBV5-1, TRBJ2-5)
CASSSSGLGGAETQYF

SEQ ID NO: 61825 - protein, 14 aa, Homo sapiens
  CDR3 for alpha chain variable domain of TCR clone 30913 (TRAV20, TRAJ56)
CAVQFGGANSQLTF

SEQ ID NO: 61826 - protein, 14 aa, Homo sapiens
  CDR3 for beta chain variable domain of TCR clone 30913 (TRBV20-1, TRBJ2-7)
CSAKRGRSSYEQYF

SEQ ID NO: 61827 - protein, 13 aa, Homo sapiens
  CDR3 for alpha chain variable domain of TCR clone 30914 (TRAV9-2, TRAJ53)
CALSGGSNYKLTF

SEQ ID NO: 61828 - protein, 17 aa, Homo sapiens
  CDR3 for beta chain variable domain of TCR clone 30914 (TRBV11-3, TRBJ2-1)
CASSLYPPGVEYNEQFF

SEQ ID NO: 61829 - protein, 14 aa, Homo sapiens
  CDR3 for alpha chain variable domain of TCR clone 30915 (TRAV1-2, TRAJ8)
CAVREDTGYQKLVF

SEQ ID NO: 61830 - protein, 15 aa, Homo sapiens
  CDR3 for beta chain variable domain of TCR clone 30915 (TRBV6-3, TRBJ2-7)
CASSSPGTVFYEQYF

SEQ ID NO: 61831 - protein, 16 aa, Homo sapiens
  CDR3 for alpha chain variable domain of TCR clone 30916 (TRAV14/DV4, TRAJ10)
CAMREGRAGGGNKLTF

SEQ ID NO: 61832 - protein, 16 aa, Homo sapiens
  CDR3 for beta chain variable domain of TCR clone 30916 (TRBV7-9, TRBJ2-5)
CASSPSGQGVKGTQYF

SEQ ID NO: 61833 - protein, 15 aa, Homo sapiens
  CDR3 for alpha chain variable domain of TCR clone 30917 (TRAV12-3, TRAJ49)
CAMAVTPNTGNQVYF

SEQ ID NO: 61834 - protein, 18 aa, Homo sapiens
  CDR3 for beta chain variable domain of TCR clone 30917 (TRBV4-1, TRBJ1-5)
CASSQDPRGQGLNQPQHF

SEQ ID NO: 61835 - protein, 14 aa, Homo sapiens
  CDR3 for alpha chain variable domain of TCR clone 30918 (TRAV1-1, TRAJ27)
RAVIYNTNAGKSTF

SEQ ID NO: 61836 - protein, 15 aa, Homo sapiens
  CDR3 for beta chain variable domain of TCR clone 30918 (TRBV7-2, TRBJ2-1)
CASSSGLAGGNEQFF

SEQ ID NO: 61837 - protein, 12 aa, Homo sapiens
  CDR3 for alpha chain variable domain of TCR clone 30919 (TRAV35, TRAJ49)
RAGWNTGNQFYF

SEQ ID NO: 61838 - protein, 16 aa, Homo sapiens
  CDR3 for beta chain variable domain of TCR clone 30919 (TRBV5-1, TRBJ2-2)
CASSLWDTTNTGELFF

SEQ ID NO: 61839 - protein, 15 aa, Homo sapiens
  CDR3 for alpha chain variable domain of TCR clone 30920 (TRAV25, TRAJ52)
CAGRPGGTSYRKLTF

SEQ ID NO: 61840 - protein, 17 aa, Homo sapiens
  CDR3 for beta chain variable domain of TCR clone 30920 (TRBV7-8, TRBJ2-6)
CASSAGTGGAGANVLTF

SEQ ID NO: 61841 - protein, 15 aa, Homo sapiens
  CDR3 for alpha chain variable domain of TCR clone 30921 (TRAV12-1, TRAJ44)
CVADLPTGTASKLTF

SEQ ID NO: 61842 - protein, 13 aa, Homo sapiens
  CDR3 for beta chain variable domain of TCR clone 30921 (TRBV6-5, TRBJ2-5)
CASSPQGGETQYC

SEQ ID NO: 61843 - protein, 13 aa, Homo sapiens
  CDR3 for alpha chain variable domain of TCR clone 30922 (TRAV8-3, TRAJ44)
CAVVPGTASKLTF

SEQ ID NO: 61844 - protein, 16 aa, Homo sapiens
  CDR3 for beta chain variable domain of TCR clone 30922 (TRBV28, TRBJ2-6)
CASSNRRGSGANVLTF

SEQ ID NO: 61845 - protein, 17 aa, Homo sapiens
  CDR3 for alpha chain variable domain of TCR clone 30923 (TRAV3, TRAJ6)
CAVRDGPRAGGSYIPTF

SEQ ID NO: 61846 - protein, 14 aa, Homo sapiens
  CDR3 for beta chain variable domain of TCR clone 30923 (TRBV6-1, TRBJ1-3)
CASVQGRGGNTIYF

SEQ ID NO: 61847 - protein, 13 aa, Homo sapiens
  CDR3 for alpha chain variable domain of TCR clone 30924 (TRAV12-3, TRAJ13)
CAMTSGGYQKVTF

SEQ ID NO: 61848 - protein, 13 aa, Homo sapiens
  CDR3 for beta chain variable domain of TCR clone 30924 (TRBV7-9, TRBJ1-2)
CASSLKQNYGDTF

SEQ ID NO: 61849 - protein, 10 aa, Homo sapiens
  CDR3 for alpha chain variable domain of TCR clone 30925 (TRAV26-1, TRAJ40)
FIAGTYKYIF

SEQ ID NO: 61850 - protein, 15 aa, Homo sapiens
  CDR3 for beta chain variable domain of TCR clone 30925 (TRBV19, TRBJ2-1)
CASSSPGVPLDEQFF

SEQ ID NO: 61851 - protein, 12 aa, Homo sapiens
  CDR3 for alpha chain variable domain of TCR clone 30926 (TRAV3, TRAJ43)
CAVRDPNNDMRF

SEQ ID NO: 61852 - protein, 13 aa, Homo sapiens
  CDR3 for beta chain variable domain of TCR clone 30926 (TRBV7-3, TRBJ1-1)
CASSQDWGAEAFF

SEQ ID NO: 61853 - protein, 17 aa, Homo sapiens
  CDR3 for alpha chain variable domain of TCR clone 30927 (TRAV4, TRAJ42)
CLVGVLNYGGSQGKLIF

SEQ ID NO: 61854 - protein, 12 aa, Homo sapiens
  CDR3 for beta chain variable domain of TCR clone 30927 (TRBV20-1, TRBJ2-1)
CSAQYTYNEQFF

SEQ ID NO: 61855 - protein, 14 aa, Homo sapiens
  CDR3 for alpha chain variable domain of TCR clone 30928 (TRAV8-2, TRAJ45)
CVVSAGGGADGLTF

SEQ ID NO: 61856 - protein, 12 aa, Homo sapiens
  CDR3 for beta chain variable domain of TCR clone 30928 (TRBV12-4, TRBJ2-1)
CASSLVRVEQSF

SEQ ID NO: 61857 - protein, 13 aa, Homo sapiens
  CDR3 for alpha chain variable domain of TCR clone 30929 (TRAV21, TRAJ27)
CAARPGNAGKSTF

SEQ ID NO: 61858 - protein, 14 aa, Homo sapiens
  CDR3 for beta chain variable domain of TCR clone 30929 (TRBV11-2, TRBJ2-7)
CASGLGAGAYEQYF

SEQ ID NO: 61859 - protein, 21 aa, Homo sapiens
  CDR3 for alpha chain variable domain of TCR clone 30930 (TRAV17, TRAJ7)
TASRAADTASCFCATLGRLAF

SEQ ID NO: 61860 - protein, 13 aa, Homo sapiens
  CDR3 for beta chain variable domain of TCR clone 30930 (TRBV12-4, TRBJ2-7)
CASSLERVREQYF

SEQ ID NO: 61861 - protein, 17 aa, Homo sapiens
  CDR3 for alpha chain variable domain of TCR clone 30931 (TRAV26-1, TRAJ46)
IASSESEKKSSGDKLTF

SEQ ID NO: 61862 - protein, 17 aa, Homo sapiens
  CDR3 for beta chain variable domain of TCR clone 30931 (TRBV4-1, TRBJ1-4)
CASSQEGPRGVEEKLFF

SEQ ID NO: 61863 - protein, 18 aa, Homo sapiens
  CDR3 for alpha chain variable domain of TCR clone 30932 (TRAV21, TRAJ52)
CAVRPSPAGGTSYGKLTF

SEQ ID NO: 61864 - protein, 15 aa, Homo sapiens
  CDR3 for beta chain variable domain of TCR clone 30932 (TRBV6-5, TRBJ2-1)
CASSYDAGAGNEQFF

SEQ ID NO: 61865 - protein, 10 aa, Homo sapiens
  CDR3 for alpha chain variable domain of TCR clone 30933 (TRAV13-1, TRAJ27)
CAPLARRINL

SEQ ID NO: 61866 - protein, 13 aa, Homo sapiens
  CDR3 for beta chain variable domain of TCR clone 30933 (TRBV28, TRBJ1-1)
CASSKQGWTEAFF

SEQ ID NO: 61867 - protein, 13 aa, Homo sapiens
  CDR3 for alpha chain variable domain of TCR clone 30934 (TRAV21, TRAJ27)
CAARPGNAGKSTF

SEQ ID NO: 61868 - protein, 11 aa, Homo sapiens
  CDR3 for beta chain variable domain of TCR clone 30934 (TRBV7-6, TRBJ2-1)
CASSLGGGQMS

SEQ ID NO: 61869 - protein, 11 aa, Homo sapiens
  CDR3 for alpha chain variable domain of TCR clone 30935 (TRAV12-3, TRAJ27)
CAMANAGKSTF

SEQ ID NO: 61870 - protein, 13 aa, Homo sapiens
  CDR3 for beta chain variable domain of TCR clone 30935 (TRBV20-1, TRBJ1-1)
CSARVCGNTEAFF

SEQ ID NO: 61871 - protein, 14 aa, Homo sapiens
  CDR3 for alpha chain variable domain of TCR clone 30936 (TRAV1-2, TRAJ16)
CAVNRFSDGQKLLF

SEQ ID NO: 61872 - protein, 15 aa, Homo sapiens
  CDR3 for beta chain variable domain of TCR clone 30936 (TRBV5-1, TRBJ2-7)
CASSLDLTSSYEQYF

SEQ ID NO: 61873 - protein, 15 aa, Homo sapiens
  CDR3 for alpha chain variable domain of TCR clone 30937 (TRAV2, TRAJ9)
CAVEDRGTGGFKTIF

SEQ ID NO: 61874 - protein, 16 aa, Homo sapiens
  CDR3 for beta chain variable domain of TCR clone 30937 (TRBV24-1, TRBJ2-3)
CATSDPGTGETDTQYF

SEQ ID NO: 61875 - protein, 14 aa, Homo sapiens
  CDR3 for alpha chain variable domain of TCR clone 30938 (TRAV12-3, TRAJ10)
SHLPLAGGGNKLTF

SEQ ID NO: 61876 - protein, 14 aa, Homo sapiens
  CDR3 for beta chain variable domain of TCR clone 30938 (TRBV11-3, TRBJ2-7)
CASSPDRNTYEQYF

SEQ ID NO: 61877 - protein, 13 aa, Homo sapiens
  CDR3 for alpha chain variable domain of TCR clone 30939 (TRAV8-3, TRAJ36)
CAVGATGANNLFF

SEQ ID NO: 61878 - protein, 13 aa, Homo sapiens
  CDR3 for beta chain variable domain of TCR clone 30939 (TRBV19, TRBJ1-2)
CASSVPGQDGYTF

SEQ ID NO: 61879 - protein, 16 aa, Homo sapiens
  CDR3 for alpha chain variable domain of TCR clone 30940 (TRAV4, TRAJ9)
CLVGDPNRPGGFKTIF

SEQ ID NO: 61880 - protein, 16 aa, Homo sapiens
  CDR3 for beta chain variable domain of TCR clone 30940 (TRBV28, TRBJ1-4)
CASSPPYRGRSENLFF

SEQ ID NO: 61881 - protein, 14 aa, Homo sapiens
  CDR3 for alpha chain variable domain of TCR clone 30941 (TRAV13-1, TRAJ10)
CATKEPGGGNKLTF

SEQ ID NO: 61882 - protein, 14 aa, Homo sapiens
  CDR3 for beta chain variable domain of TCR clone 30941 (TRBV6-6, TRBJ2-7)
CASSDSGAGYEQYF

SEQ ID NO: 61883 - protein, 14 aa, Homo sapiens
  CDR3 for alpha chain variable domain of TCR clone 30942 (TRAV14/DV4, TRAJ49)
CAFNRYLTGNQFYF

SEQ ID NO: 61884 - protein, 15 aa, Homo sapiens
  CDR3 for beta chain variable domain of TCR clone 30942 (TRBV20-1, TRBJ2-1)
CSARGGTRYYNEQFF

SEQ ID NO: 61885 - protein, 13 aa, Homo sapiens
  CDR3 for alpha chain variable domain of TCR clone 30943 (TRAV21, TRAJ27)
CAALNTNAGKSTF

SEQ ID NO: 61886 - protein, 14 aa, Homo sapiens
  CDR3 for beta chain variable domain of TCR clone 30943 (TRBV27, TRBJ1-1)
CASSLLSGPSEAFF

SEQ ID NO: 61887 - protein, 14 aa, Homo sapiens
  CDR3 for alpha chain variable domain of TCR clone 30944 (TRAV25, TRAJ27)
CAGPGNTNAGKSAF

SEQ ID NO: 61888 - protein, 16 aa, Homo sapiens
  CDR3 for beta chain variable domain of TCR clone 30944 (TRBV4-1, TRBJ2-6)
CASSQDGGPGANVLTF

SEQ ID NO: 61889 - protein, 13 aa, Homo sapiens
  CDR3 for alpha chain variable domain of TCR clone 30945 (TRAV20, TRAJ48)
CAVHPFGNEKLTF

SEQ ID NO: 61890 - protein, 15 aa, Homo sapiens
  CDR3 for beta chain variable domain of TCR clone 30945 (TRBV6-5, TRBJ2-6)
CAISQWEAGANVLTF

SEQ ID NO: 61891 - protein, 13 aa, Homo sapiens
  CDR3 for alpha chain variable domain of TCR clone 30946 (TRAV8-6, TRAJ49)
CAVITNTGNQFYF

SEQ ID NO: 61892 - protein, 14 aa, Homo sapiens
  CDR3 for beta chain variable domain of TCR clone 30946 (TRBV5-1, TRBJ2-7)
CAGSRGESLYEQYF

SEQ ID NO: 61893 - protein, 15 aa, Homo sapiens
  CDR3 for alpha chain variable domain of TCR clone 30947 (TRAV26-1, TRAJ23)
CIVRVAGYQRGKLIF

SEQ ID NO: 61894 - protein, 18 aa, Homo sapiens
  CDR3 for beta chain variable domain of TCR clone 30947 (TRBV28, TRBJ2-1)
CASSSTSGRANSYNEQFF

SEQ ID NO: 61895 - protein, 16 aa, Homo sapiens
  CDR3 for alpha chain variable domain of TCR clone 30948 (TRAV30, TRAJ24)
CGTEIVDADSWGKFQS

SEQ ID NO: 61896 - protein, 13 aa, Homo sapiens
  CDR3 for beta chain variable domain of TCR clone 30948 (TRBV20-1, TRBJ1-1)
CSARGGGNTEAFF

SEQ ID NO: 61897 - protein, 13 aa, Homo sapiens
  CDR3 for alpha chain variable domain of TCR clone 30949 (TRAV12-2, TRAJ20)
CAVYPSNDYKLSF

SEQ ID NO: 61898 - protein, 15 aa, Homo sapiens
  CDR3 for beta chain variable domain of TCR clone 30949 (TRBV27, TRBJ2-5)
CASSLYPRGGETQYL

SEQ ID NO: 61899 - protein, 13 aa, Homo sapiens
  CDR3 for alpha chain variable domain of TCR clone 30950 (TRAV1-1, TRAJ9)
CAAKNTGGFKTIF

SEQ ID NO: 61900 - protein, 14 aa, Homo sapiens
  CDR3 for beta chain variable domain of TCR clone 30950 (TRBV20-1, TRBJ2-1)
CSTQIGGSANEQFF

SEQ ID NO: 61901 - protein, 13 aa, Homo sapiens
  CDR3 for alpha chain variable domain of TCR clone 30951 (TRAV3, TRAJ15)
CAVRDQAGTALIS

SEQ ID NO: 61902 - protein, 15 aa, Homo sapiens
  CDR3 for beta chain variable domain of TCR clone 30951 (TRBV11-1, TRBJ2-7)
CASSLNYGASYEQYF

SEQ ID NO: 61903 - protein, 12 aa, Homo sapiens
  CDR3 for alpha chain variable domain of TCR clone 30952 (TRAV17, TRAJ30)
CVPERSDDKIIF

SEQ ID NO: 61904 - protein, 14 aa, Homo sapiens
  CDR3 for beta chain variable domain of TCR clone 30952 (TRBV7-7, TRBJ2-2)
CASSRDRSTGELFF

SEQ ID NO: 61905 - protein, 15 aa, Homo sapiens
  CDR3 for alpha chain variable domain of TCR clone 30953 (TRAV19, TRAJ9)
CALSEARTGGFKTIF

SEQ ID NO: 61906 - protein, 15 aa, Homo sapiens
  CDR3 for beta chain variable domain of TCR clone 30953 (TRBV19, TRBJ1-1)
CASTSGQIQNTEAFF

SEQ ID NO: 61907 - protein, 14 aa, Homo sapiens
  CDR3 for alpha chain variable domain of TCR clone 30954 (TRAV34, TRAJ44)
CGADGTGTASKLTF

SEQ ID NO: 61908 - protein, 15 aa, Homo sapiens
  CDR3 for beta chain variable domain of TCR clone 30954 (TRBV5-1, TRBJ2-1)
CASSQPRAPYNEQFF

SEQ ID NO: 61909 - protein, 12 aa, Homo sapiens
  CDR3 for alpha chain variable domain of TCR clone 30955 (TRAV9-2, TRAJ36)
CALKKGANNLFF

SEQ ID NO: 61910 - protein, 14 aa, Homo sapiens
  CDR3 for beta chain variable domain of TCR clone 30955 (TRBV25-1, TRBJ1-1)
CASTHLGGNTEAFF

SEQ ID NO: 61911 - protein, 15 aa, Homo sapiens
  CDR3 for alpha chain variable domain of TCR clone 30956 (TRAV12-3, TRAJ11)
CAMSEENSGYSTLTF

SEQ ID NO: 61912 - protein, 20 aa, Homo sapiens
  CDR3 for beta chain variable domain of TCR clone 30956 (TRBV7-8, TRBJ2-2)
CASSHLFPGPTIHITGELSF

SEQ ID NO: 61913 - protein, 15 aa, Homo sapiens
  CDR3 for alpha chain variable domain of TCR clone 30957 (TRAV1-2, TRAJ30)
CAVRPHGNSDDKIIF

SEQ ID NO: 61914 - protein, 13 aa, Homo sapiens
  CDR3 for beta chain variable domain of TCR clone 30957 (TRBV4-1, TRBJ2-7)
CASSQGQAYEQYF

SEQ ID NO: 61915 - protein, 11 aa, Homo sapiens
  CDR3 for alpha chain variable domain of TCR clone 30958 (TRAV2, TRAJ13)
CASGGYQKVTF

SEQ ID NO: 61916 - protein, 13 aa, Homo sapiens
  CDR3 for beta chain variable domain of TCR clone 30958 (TRBV4-1, TRBJ2-1)
CASSQAGGDEQFF

SEQ ID NO: 61917 - protein, 16 aa, Homo sapiens
  CDR3 for alpha chain variable domain of TCR clone 30959 (TRAV1-2, TRAJ10)
CAVRGVLTGGGNKLTF

SEQ ID NO: 61918 - protein, 12 aa, Homo sapiens
  CDR3 for beta chain variable domain of TCR clone 30959 (TRBV7-8, TRBJ2-7)
CASILGDREQYF

SEQ ID NO: 61919 - protein, 15 aa, Homo sapiens
  CDR3 for alpha chain variable domain of TCR clone 30960 (TRAV17, TRAJ57)
CATGPSQGGSEKLDF

SEQ ID NO: 61920 - protein, 16 aa, Homo sapiens
  CDR3 for beta chain variable domain of TCR clone 30960 (TRBV12-4, TRBJ1-5)
CASSRPVGGSNQPQHF

SEQ ID NO: 61921 - protein, 13 aa, Homo sapiens
  CDR3 for alpha chain variable domain of TCR clone 30961 (TRAV25, TRAJ26)
CAGMDNYGQNFVF

SEQ ID NO: 61922 - protein, 15 aa, Homo sapiens
  CDR3 for beta chain variable domain of TCR clone 30961 (TRBV10-3, TRBJ2-1)
CAIRNGTSGHNERFF

SEQ ID NO: 61923 - protein, 11 aa, Homo sapiens
  CDR3 for alpha chain variable domain of TCR clone 30962 (TRAV3, TRAJ21)
CAVGNFNKFYF

SEQ ID NO: 61924 - protein, 12 aa, Homo sapiens
  CDR3 for beta chain variable domain of TCR clone 30962 (TRBV19, TRBJ2-1)
CASSMQDTEQFF

SEQ ID NO: 61925 - protein, 12 aa, Homo sapiens
  CDR3 for alpha chain variable domain of TCR clone 30963 (TRAV13-1, TRAJ49)
CVASIRSNQFYF

SEQ ID NO: 61926 - protein, 14 aa, Homo sapiens
  CDR3 for beta chain variable domain of TCR clone 30963 (TRBV7-2, TRBJ2-1)
CASSPGLAGNEQFF

SEQ ID NO: 61927 - protein, 12 aa, Homo sapiens
  CDR3 for alpha chain variable domain of TCR clone 30964 (TRAV12-3, TRAJ17)
CAMTPTGNKLTF

SEQ ID NO: 61928 - protein, 15 aa, Homo sapiens
  CDR3 for beta chain variable domain of TCR clone 30964 (TRBV20-1, TRBJ2-7)
CSARDQVSGMDEQYF

SEQ ID NO: 61929 - protein, 12 aa, Homo sapiens
  CDR3 for alpha chain variable domain of TCR clone 30965 (TRAV27, TRAJ35)
CAGADFGDVLHC

SEQ ID NO: 61930 - protein, 16 aa, Homo sapiens
  CDR3 for beta chain variable domain of TCR clone 30965 (TRBV6-1, TRBJ2-1)
CASILRQGSSYNEQFF

SEQ ID NO: 61931 - protein, 14 aa, Homo sapiens
  CDR3 for alpha chain variable domain of TCR clone 30966 (TRAV12-2, TRAJ5)
CAVSRSTGRRALTF

SEQ ID NO: 61932 - protein, 12 aa, Homo sapiens
  CDR3 for beta chain variable domain of TCR clone 30966 (TRBV19, TRBJ1-5)
CASSIAQQPQHF

SEQ ID NO: 61933 - protein, 13 aa, Homo sapiens
  CDR3 for alpha chain variable domain of TCR clone 30967 (TRAV8-6, TRAJ49)
CAVITNTGNQFYF

SEQ ID NO: 61934 - protein, 14 aa, Homo sapiens
  CDR3 for beta chain variable domain of TCR clone 30967 (TRBV5-1, TRBJ2-7)
CASSRGGSLYEQYF

SEQ ID NO: 61935 - protein, 13 aa, Homo sapiens
  CDR3 for alpha chain variable domain of TCR clone 30968 (TRAV17, TRAJ4)
CATKSGGYNKLIF

SEQ ID NO: 61936 - protein, 14 aa, Homo sapiens
  CDR3 for beta chain variable domain of TCR clone 30968 (TRBV20-1, TRBJ1-5)
CSAGDDRGNQPQHF

SEQ ID NO: 61937 - protein, 11 aa, Homo sapiens
  CDR3 for alpha chain variable domain of TCR clone 30969 (TRAV2, TRAJ33)
CAVDSNYQLIW

SEQ ID NO: 61938 - protein, 15 aa, Homo sapiens
  CDR3 for beta chain variable domain of TCR clone 30969 (TRBV19, TRBJ1-2)
CASRVGQVLNYGYTF

SEQ ID NO: 61939 - protein, 15 aa, Homo sapiens
  CDR3 for alpha chain variable domain of TCR clone 30970 (TRAV9-2, TRAJ31)
CALSDQVGNNARLMF

SEQ ID NO: 61940 - protein, 14 aa, Homo sapiens
  CDR3 for beta chain variable domain of TCR clone 30970 (TRBV7-2, TRBJ2-7)
CASSPKTSFYEQYF

SEQ ID NO: 61941 - protein, 13 aa, Homo sapiens
  CDR3 for alpha chain variable domain of TCR clone 30971 (TRAV12-3, TRAJ53)
CAMRGGSNYKLTF

SEQ ID NO: 61942 - protein, 15 aa, Homo sapiens
  CDR3 for beta chain variable domain of TCR clone 30971 (TRBV2, TRBJ2-1)
CATQARLVMIGEQFV

SEQ ID NO: 61943 - protein, 14 aa, Homo sapiens
  CDR3 for alpha chain variable domain of TCR clone 30972 (TRAV13-1, TRAJ23)
CAASRLGRGGKLIF

SEQ ID NO: 61944 - protein, 12 aa, Homo sapiens
  CDR3 for beta chain variable domain of TCR clone 30972 (TRBV11-2, TRBJ2-2)
CASSLPTGELFF

SEQ ID NO: 61945 - protein, 18 aa, Homo sapiens
  CDR3 for alpha chain variable domain of TCR clone 30973 (TRAV35, TRAJ28)
CAGHNYPLSGAGSYQLTS

SEQ ID NO: 61946 - protein, 12 aa, Homo sapiens
  CDR3 for beta chain variable domain of TCR clone 30973 (TRBV7-9, TRBJ1-1)
CASSLEGTEAFF

SEQ ID NO: 61947 - protein, 12 aa, Homo sapiens
  CDR3 for alpha chain variable domain of TCR clone 30974 (TRAV8-3, TRAJ41)
CAVALSGYALNF

SEQ ID NO: 61948 - protein, 16 aa, Homo sapiens
  CDR3 for beta chain variable domain of TCR clone 30974 (TRBV27, TRBJ2-7)
CASSSERRDSAHEQYF

SEQ ID NO: 61949 - protein, 16 aa, Homo sapiens
  CDR3 for alpha chain variable domain of TCR clone 30975 (TRAV16, TRAJ52)
CALSAAGGTSYGKLTF

SEQ ID NO: 61950 - protein, 15 aa, Homo sapiens
  CDR3 for beta chain variable domain of TCR clone 30975 (TRBV7-9, TRBJ1-6)
CASSSPGRGNSPLHF

SEQ ID NO: 61951 - protein, 13 aa, Homo sapiens
  CDR3 for alpha chain variable domain of TCR clone 30976 (TRAV12-1, TRAJ16)
CVVNTRNGQKLLF

SEQ ID NO: 61952 - protein, 13 aa, Homo sapiens
  CDR3 for beta chain variable domain of TCR clone 30976 (TRBV7-9, TRBJ1-2)
CASSLKQNYGYTF

SEQ ID NO: 61953 - protein, 15 aa, Homo sapiens
  CDR3 for alpha chain variable domain of TCR clone 30977 (TRAV3, TRAJ17)
CAVSPKEAAGNKLTF

SEQ ID NO: 61954 - protein, 13 aa, Homo sapiens
  CDR3 for beta chain variable domain of TCR clone 30977 (TRBV7-9, TRBJ1-2)
CASSLKQNYGYTF

SEQ ID NO: 61955 - protein, 14 aa, Homo sapiens
  CDR3 for alpha chain variable domain of TCR clone 30978 (TRAV38-1, TRAJ40)
CALRPTSGTYKYIF

SEQ ID NO: 61956 - protein, 14 aa, Homo sapiens
  CDR3 for beta chain variable domain of TCR clone 30978 (TRBV25-1, TRBJ1-1)
CASTPLGGNTEAFF

SEQ ID NO: 61957 - protein, 18 aa, Homo sapiens
  CDR3 for alpha chain variable domain of TCR clone 30979 (TRAV8-3, TRAJ4)
STSVLWVFYSGGYNKLIF

SEQ ID NO: 61958 - protein, 14 aa, Homo sapiens
  CDR3 for beta chain variable domain of TCR clone 30979 (TRBV7-9, TRBJ2-3)
CASSLEDGTDTQYF

SEQ ID NO: 61959 - protein, 11 aa, Homo sapiens
  CDR3 for alpha chain variable domain of TCR clone 30980 (TRAV21, TRAJ48)
CAVDGNEKLTF

SEQ ID NO: 61960 - protein, 15 aa, Homo sapiens
  CDR3 for beta chain variable domain of TCR clone 30980 (TRBV20-1, TRBJ2-7)
CSARDRVSGMDEQYF

SEQ ID NO: 61961 - protein, 12 aa, Homo sapiens
  CDR3 for alpha chain variable domain of TCR clone 30981 (TRAV2, TRAJ9)
CAVGAGGFKTIF

SEQ ID NO: 61962 - protein, 16 aa, Homo sapiens
  CDR3 for beta chain variable domain of TCR clone 30981 (TRBV13, TRBJ2-2)
CASSPMTGEHTGELFF

SEQ ID NO: 61963 - protein, 15 aa, Homo sapiens
  CDR3 for alpha chain variable domain of TCR clone 30982 (TRAV21, TRAJ52)
CSVRGGGTSYGKLTF

SEQ ID NO: 61964 - protein, 15 aa, Homo sapiens
  CDR3 for beta chain variable domain of TCR clone 30982 (TRBV18, TRBJ1-5)
CASSPSDRSNQPQHF

SEQ ID NO: 61965 - protein, 12 aa, Homo sapiens
  CDR3 for alpha chain variable domain of TCR clone 30983 (TRAV13-1, TRAJ21)
CAAKEGLNKFYF

SEQ ID NO: 61966 - protein, 13 aa, Homo sapiens
  CDR3 for beta chain variable domain of TCR clone 30983 (TRBV19, TRBJ1-2)
CASSVPGQDGYTF

SEQ ID NO: 61967 - protein, 18 aa, Homo sapiens
  CDR3 for alpha chain variable domain of TCR clone 30984 (TRAV12-3, TRAJ52)
CAMSRTNAGGTSYGKLTF

SEQ ID NO: 61968 - protein, 17 aa, Homo sapiens
  CDR3 for beta chain variable domain of TCR clone 30984 (TRBV7-3, TRBJ2-3)
CASSLVKRMRGADTQYF

SEQ ID NO: 61969 - protein, 14 aa, Homo sapiens
  CDR3 for alpha chain variable domain of TCR clone 30985 (TRAV17, TRAJ16)
CATADFSGGQKLLF

SEQ ID NO: 61970 - protein, 15 aa, Homo sapiens
  CDR3 for beta chain variable domain of TCR clone 30985 (TRBV18, TRBJ2-1)
CASSPPGASYNEQFF

SEQ ID NO: 61971 - protein, 14 aa, Homo sapiens
  CDR3 for alpha chain variable domain of TCR clone 30986 (TRAV16, TRAJ15)
CALSGPQAGTALIF

SEQ ID NO: 61972 - protein, 12 aa, Homo sapiens
  CDR3 for beta chain variable domain of TCR clone 30986 (TRBV18, TRBJ2-5)
CASSPSEETQYF

SEQ ID NO: 61973 - protein, 11 aa, Homo sapiens
  CDR3 for alpha chain variable domain of TCR clone 30987 (TRAV12-2, TRAJ31)
CAILNNARPMF

SEQ ID NO: 61974 - protein, 13 aa, Homo sapiens
  CDR3 for beta chain variable domain of TCR clone 30987 (TRBV20-1, TRBJ1-1)
CSARLGQGTEAFF

SEQ ID NO: 61975 - protein, 13 aa, Homo sapiens
  CDR3 for alpha chain variable domain of TCR clone 30988 (TRAV8-3, TRAJ43)
CAVVPYTNNDMRF

SEQ ID NO: 61976 - protein, 16 aa, Homo sapiens
  CDR3 for beta chain variable domain of TCR clone 30988 (TRBV7-2, TRBJ2-5)
CASSPFPTGGEETQYF

SEQ ID NO: 61977 - protein, 13 aa, Homo sapiens
  CDR3 for alpha chain variable domain of TCR clone 30989 (TRAV2, TRAJ40)
CSVVTSGTYKYIF

SEQ ID NO: 61978 - protein, 15 aa, Homo sapiens
  CDR3 for beta chain variable domain of TCR clone 30989 (TRBV11-3, TRBJ2-3)
CASLKDGREGDTQYF

SEQ ID NO: 61979 - protein, 11 aa, Homo sapiens
  CDR3 for alpha chain variable domain of TCR clone 30990 (TRAV21, TRAJ34)
CAHYNTDKLIF

SEQ ID NO: 61980 - protein, 14 aa, Homo sapiens
  CDR3 for beta chain variable domain of TCR clone 30990 (TRBV19, TRBJ2-1)
CASPTFVLSGEQFF

SEQ ID NO: 61981 - protein, 12 aa, Homo sapiens
  CDR3 for alpha chain variable domain of TCR clone 30991 (TRAV13-1, TRAJ20)
CAASMGNYKLSF

SEQ ID NO: 61982 - protein, 15 aa, Homo sapiens
  CDR3 for beta chain variable domain of TCR clone 30991 (TRBV11-3, TRBJ2-3)
CASNGGLDSTDTQYF

SEQ ID NO: 61983 - protein, 18 aa, Homo sapiens
  CDR3 for alpha chain variable domain of TCR clone 30992 (TRAV26-1, TRAJ45)
CCVLLHRGNGRGADGLTF

SEQ ID NO: 61984 - protein, 13 aa, Homo sapiens
  CDR3 for beta chain variable domain of TCR clone 30992 (TRBV7-6, TRBJ1-2)
CASSLVADYGYTF

SEQ ID NO: 61985 - protein, 14 aa, Homo sapiens
  CDR3 for alpha chain variable domain of TCR clone 30993 (TRAV1-2, TRAJ16)
CAVNRFSDGQKLLF

SEQ ID NO: 61986 - protein, 16 aa, Homo sapiens
  CDR3 for beta chain variable domain of TCR clone 30993 (TRBV19, TRBJ1-1)
CASRFGGPVTGTEAFF

SEQ ID NO: 61987 - protein, 13 aa, Homo sapiens
  CDR3 for alpha chain variable domain of TCR clone 30994 (TRAV9-2, TRAJ9)
CALSDTGGFKTIF

SEQ ID NO: 61988 - protein, 16 aa, Homo sapiens
  CDR3 for beta chain variable domain of TCR clone 30994 (TRBV3-1, TRBJ1-2)
CASSQGQGVQRDGYTF

SEQ ID NO: 61989 - protein, 14 aa, Homo sapiens
  CDR3 for alpha chain variable domain of TCR clone 30995 (TRAV1-2, TRAJ8)
CAVREDTGSQKLVF

SEQ ID NO: 61990 - protein, 15 aa, Homo sapiens
  CDR3 for beta chain variable domain of TCR clone 30995 (TRBV5-5, TRBJ1-5)
CASSSTPGSNQPQHF

SEQ ID NO: 61991 - protein, 14 aa, Homo sapiens
  CDR3 for alpha chain variable domain of TCR clone 30996 (TRAV12-1, TRAJ17)
CVVNYKAAGNKLTF

SEQ ID NO: 61992 - protein, 17 aa, Homo sapiens
  CDR3 for beta chain variable domain of TCR clone 30996 (TRBV20-1, TRBJ2-1)
CSASSSGLGGSYNEQFF

SEQ ID NO: 61993 - protein, 15 aa, Homo sapiens
  CDR3 for alpha chain variable domain of TCR clone 30997 (TRAV26-1, TRAJ29)
CIVRVEASGNTPLVF

SEQ ID NO: 61994 - protein, 15 aa, Homo sapiens
  CDR3 for beta chain variable domain of TCR clone 30997 (TRBV7-9, TRBJ1-5)
CASSQGHQPNQPQHF

SEQ ID NO: 61995 - protein, 13 aa, Homo sapiens
  CDR3 for alpha chain variable domain of TCR clone 30998 (TRAV8-3, TRAJ5)
CAVGPRGRRALTC

SEQ ID NO: 61996 - protein, 16 aa, Homo sapiens
  CDR3 for beta chain variable domain of TCR clone 30998 (TRBV11-3, TRBJ2-3)
CASSPGGLLGTDTQYF

SEQ ID NO: 61997 - protein, 15 aa, Homo sapiens
  CDR3 for alpha chain variable domain of TCR clone 30999 (TRAV21, TRAJ32)
CAAAPYGGATNKLIF

SEQ ID NO: 61998 - protein, 17 aa, Homo sapiens
  CDR3 for beta chain variable domain of TCR clone 30999 (TRBV18, TRBJ2-3)
CASSPCGDGGFTDTQYF

SEQ ID NO: 61999 - protein, 13 aa, Homo sapiens
  CDR3 for alpha chain variable domain of TCR clone 31000 (TRAV21, TRAJ27)
CAALNTNAGKSTF

SEQ ID NO: 62000 - protein, 14 aa, Homo sapiens
  CDR3 for beta chain variable domain of TCR clone 31000 (TRBV27, TRBJ1-1)
CASSLLSGLSEAFS

SEQ ID NO: 62001 - protein, 17 aa, Homo sapiens
  CDR3 for alpha chain variable domain of TCR clone 31001 (TRAV3, TRAJ42)
CAVRDRDYGGSQGNLIF

SEQ ID NO: 62002 - protein, 12 aa, Homo sapiens
  CDR3 for beta chain variable domain of TCR clone 31001 (TRBV11-2, TRBJ2-1)
CVSSPGNNEQFF

SEQ ID NO: 62003 - protein, 13 aa, Homo sapiens
  CDR3 for alpha chain variable domain of TCR clone 31002 (TRAV26-2, TRAJ57)
CILSRGGSEKLVF

SEQ ID NO: 62004 - protein, 14 aa, Homo sapiens
  CDR3 for beta chain variable domain of TCR clone 31002 (TRBV2, TRBJ1-5)
CASLGSRDNQPQHF

SEQ ID NO: 62005 - protein, 16 aa, Homo sapiens
  CDR3 for alpha chain variable domain of TCR clone 31003 (TRAV12-3, TRAJ53)
CAMSPGSGGSNYKLTF

SEQ ID NO: 62006 - protein, 17 aa, Homo sapiens
  CDR3 for beta chain variable domain of TCR clone 31003 (TRBV28, TRBJ2-5)
CASGTPEGDALQETQYF

SEQ ID NO: 62007 - protein, 14 aa, Homo sapiens
  CDR3 for alpha chain variable domain of TCR clone 31004 (TRAV12-2, TRAJ33)
CAVKRARSNYQLIW

SEQ ID NO: 62008 - protein, 14 aa, Homo sapiens
  CDR3 for beta chain variable domain of TCR clone 31004 (TRBV13, TRBJ2-7)
CASSLKGASYEKYF

SEQ ID NO: 62009 - protein, 17 aa, Homo sapiens
  CDR3 for alpha chain variable domain of TCR clone 31005 (TRAV3, TRAJ6)
CAVRDGPRAGGSYIPTF

SEQ ID NO: 62010 - protein, 13 aa, Homo sapiens
  CDR3 for beta chain variable domain of TCR clone 31005 (TRBV27, TRBJ2-1)
CASRTLGAGEQFF

SEQ ID NO: 62011 - protein, 14 aa, Homo sapiens
  CDR3 for alpha chain variable domain of TCR clone 31006 (TRAV9-2, TRAJ39)
CALYIYNAGNMLTF

SEQ ID NO: 62012 - protein, 13 aa, Homo sapiens
  CDR3 for beta chain variable domain of TCR clone 31006 (TRBV4-1, TRBJ1-1)
CASSRKMNTEAFF

SEQ ID NO: 62013 - protein, 12 aa, Homo sapiens
  CDR3 for alpha chain variable domain of TCR clone 31007 (TRAV3, TRAJ31)
CAVRPRGPRLMF

SEQ ID NO: 62014 - protein, 17 aa, Homo sapiens
  CDR3 for beta chain variable domain of TCR clone 31007 (TRBV7-9, TRBJ1-5)
CASSASQGGYSNQTQHF

SEQ ID NO: 62015 - protein, 14 aa, Homo sapiens
  CDR3 for alpha chain variable domain of TCR clone 31008 (TRAV17, TRAJ39)
CATDPVRAGNMLPF

SEQ ID NO: 62016 - protein, 15 aa, Homo sapiens
  CDR3 for beta chain variable domain of TCR clone 31008 (TRBV13, TRBJ1-5)
CASSFGQGGVQPQHF

SEQ ID NO: 62017 - protein, 15 aa, Homo sapiens
  CDR3 for alpha chain variable domain of TCR clone 31009 (TRAV17, TRAJ54)
CATEKLGQGAQKLVF

SEQ ID NO: 62018 - protein, 16 aa, Homo sapiens
  CDR3 for beta chain variable domain of TCR clone 31009 (TRBV9, TRBJ1-2)
CASSIEEKVSPYGYTF

SEQ ID NO: 62019 - protein, 11 aa, Homo sapiens
  CDR3 for alpha chain variable domain of TCR clone 31010 (TRAV2, TRAJ13)
CASGGYQKVTF

SEQ ID NO: 62020 - protein, 14 aa, Homo sapiens
  CDR3 for beta chain variable domain of TCR clone 31010 (TRBV7-2, TRBJ1-3)
CASSLGTAGNTIYF

SEQ ID NO: 62021 - protein, 13 aa, Homo sapiens
  CDR3 for alpha chain variable domain of TCR clone 31011 (TRAV16, TRAJ31)
CALRAHNNARLMF

SEQ ID NO: 62022 - protein, 17 aa, Homo sapiens
  CDR3 for beta chain variable domain of TCR clone 31011 (TRBV12-4, TRBJ2-1)
CASSPGLAGGRINEQFF

SEQ ID NO: 62023 - protein, 18 aa, Homo sapiens
  CDR3 for alpha chain variable domain of TCR clone 31012 (TRAV12-3, TRAJ52)
CSMSVGGAGGTSYGKLTF

SEQ ID NO: 62024 - protein, 15 aa, Homo sapiens
  CDR3 for beta chain variable domain of TCR clone 31012 (TRBV27, TRBJ1-6)
CASSFDRGLGSPLHF

SEQ ID NO: 62025 - protein, 11 aa, Homo sapiens
  CDR3 for alpha chain variable domain of TCR clone 31013 (TRAV13-1, TRAJ49)
RACVGGNQFYF

SEQ ID NO: 62026 - protein, 16 aa, Homo sapiens
  CDR3 for beta chain variable domain of TCR clone 31013 (TRBV11-2, TRBJ2-2)
CASSLRTGNLIGELFF

SEQ ID NO: 62027 - protein, 16 aa, Homo sapiens
  CDR3 for alpha chain variable domain of TCR clone 31014 (TRAV26-1, TRAJ37)
CIVRGDGSGNPGKLIF

SEQ ID NO: 62028 - protein, 17 aa, Homo sapiens
  CDR3 for beta chain variable domain of TCR clone 31014 (TRBV4-1, TRBJ2-7)
CASSRDPLGVRGGEQYF

SEQ ID NO: 62029 - protein, 13 aa, Homo sapiens
  CDR3 for alpha chain variable domain of TCR clone 31015 (TRAV12-1, TRAJ33)
CGDAPDSNYQLIW

SEQ ID NO: 62030 - protein, 15 aa, Homo sapiens
  CDR3 for beta chain variable domain of TCR clone 31015 (TRBV27, TRBJ2-1)
CASSNGGGSSNEQSF

SEQ ID NO: 62031 - protein, 13 aa, Homo sapiens
  CDR3 for alpha chain variable domain of TCR clone 31016 (TRAV8-3, TRAJ43)
CAVGPDNNNDTRF

SEQ ID NO: 62032 - protein, 12 aa, Homo sapiens
  CDR3 for beta chain variable domain of TCR clone 31016 (TRBV7-2, TRBJ1-6)
CASSLSSSPLHF

SEQ ID NO: 62033 - protein, 11 aa, Homo sapiens
  CDR3 for alpha chain variable domain of TCR clone 31017 (TRAV20, TRAJ23)
CACNQGGKLIF

SEQ ID NO: 62034 - protein, 16 aa, Homo sapiens
  CDR3 for beta chain variable domain of TCR clone 31017 (TRBV7-8, TRBJ2-5)
CASSFGGQPAQETQYL

SEQ ID NO: 62035 - protein, 15 aa, Homo sapiens
  CDR3 for alpha chain variable domain of TCR clone 31018 (TRAV12-2, TRAJ43)
CAFDMRFGAGTRLTV

SEQ ID NO: 62036 - protein, 18 aa, Homo sapiens
  CDR3 for beta chain variable domain of TCR clone 31018 (TRBV20-1, TRBJ2-3)
CSASGLAGGPGTTDMQYF

SEQ ID NO: 62037 - protein, 17 aa, Homo sapiens
  CDR3 for alpha chain variable domain of TCR clone 31019 (TRAV26-1, TRAJ53)
CIVRVDDSGGSNYKLTS

SEQ ID NO: 62038 - protein, 15 aa, Homo sapiens
  CDR3 for beta chain variable domain of TCR clone 31019 (TRBV20-1, TRBJ2-7)
CSARVPAAYFYEQYF

SEQ ID NO: 62039 - protein, 14 aa, Homo sapiens
  CDR3 for alpha chain variable domain of TCR clone 31020 (TRAV27, TRAJ15)
CAGFDNQAGTALIF

SEQ ID NO: 62040 - protein, 15 aa, Homo sapiens
  CDR3 for beta chain variable domain of TCR clone 31020 (TRBV11-1, TRBJ2-1)
CASSLTSGRPNEQFF

SEQ ID NO: 62041 - protein, 14 aa, Homo sapiens
  CDR3 for alpha chain variable domain of TCR clone 31021 (TRAV12-3, TRAJ10)
SHLPLTGGGKKLTF

SEQ ID NO: 62042 - protein, 14 aa, Homo sapiens
  CDR3 for beta chain variable domain of TCR clone 31021 (TRBV6-1, TRBJ1-3)
CASVQGGGGNTIYF

SEQ ID NO: 62043 - protein, 16 aa, Homo sapiens
  CDR3 for alpha chain variable domain of TCR clone 31022 (TRAV8-4, TRAJ5)
CAVSPLTDTGRRALAF

SEQ ID NO: 62044 - protein, 14 aa, Homo sapiens
  CDR3 for beta chain variable domain of TCR clone 31022 (TRBV19, TRBJ1-6)
CASSTDGWNSPLHF

SEQ ID NO: 62045 - protein, 12 aa, Homo sapiens
  CDR3 for alpha chain variable domain of TCR clone 31023 (TRAV25, TRAJ35)
CAGIGLGNVLHC

SEQ ID NO: 62046 - protein, 15 aa, Homo sapiens
  CDR3 for beta chain variable domain of TCR clone 31023 (TRBV20-1, TRBJ2-5)
CSAPPRTGFGETQYF

SEQ ID NO: 62047 - protein, 16 aa, Homo sapiens
  CDR3 for alpha chain variable domain of TCR clone 31024 (TRAV16, TRAJ4)
CALSRMFSGGNNKLIF

SEQ ID NO: 62048 - protein, 16 aa, Homo sapiens
  CDR3 for beta chain variable domain of TCR clone 31024 (TRBV24-1, TRBJ2-3)
CATSDPGTGATDTQYF

SEQ ID NO: 62049 - protein, 14 aa, Homo sapiens
  CDR3 for alpha chain variable domain of TCR clone 31025 (TRAV38-1, TRAJ45)
CASHSRGGADGLTF

SEQ ID NO: 62050 - protein, 13 aa, Homo sapiens
  CDR3 for beta chain variable domain of TCR clone 31025 (TRBV10-3, TRBJ1-2)
CAISERDSYGYTF

SEQ ID NO: 62051 - protein, 18 aa, Homo sapiens
  CDR3 for alpha chain variable domain of TCR clone 31026 (TRAV26-2, TRAJ18)
CILRDVNHRGSTLGRLYF

SEQ ID NO: 62052 - protein, 14 aa, Homo sapiens
  CDR3 for beta chain variable domain of TCR clone 31026 (TRBV4-1, TRBJ2-1)
CASRTSGVFHEQFF

SEQ ID NO: 62053 - protein, 13 aa, Homo sapiens
  CDR3 for alpha chain variable domain of TCR clone 31027 (TRAV17, TRAJ9)
CATEYTGGFKTIF

SEQ ID NO: 62054 - protein, 16 aa, Homo sapiens
  CDR3 for beta chain variable domain of TCR clone 31027 (TRBV7-7, TRBJ2-1)
CASSLASGTSYNEQFF

SEQ ID NO: 62055 - protein, 16 aa, Homo sapiens
  CDR3 for alpha chain variable domain of TCR clone 31028 (TRAV27, TRAJ13)
CAGAKSDSRGYQKVTF

SEQ ID NO: 62056 - protein, 15 aa, Homo sapiens
  CDR3 for beta chain variable domain of TCR clone 31028 (TRBV29-1, TRBJ2-1)
CSVGRHALFYNEQFF

SEQ ID NO: 62057 - protein, 14 aa, Homo sapiens
  CDR3 for alpha chain variable domain of TCR clone 31029 (TRAV16, TRAJ15)
CALSFNQAGAALIF

SEQ ID NO: 62058 - protein, 16 aa, Homo sapiens
  CDR3 for beta chain variable domain of TCR clone 31029 (TRBV9, TRBJ2-7)
CASSAGPDRSPYEQYF

SEQ ID NO: 62059 - protein, 15 aa, Homo sapiens
  CDR3 for alpha chain variable domain of TCR clone 31030 (TRAV8-3, TRAJ45)
CASSYSGGGADGHTF

SEQ ID NO: 62060 - protein, 13 aa, Homo sapiens
  CDR3 for beta chain variable domain of TCR clone 31030 (TRBV10-3, TRBJ2-7)
CASKLAVNYEQYF

SEQ ID NO: 62061 - protein, 12 aa, Homo sapiens
  CDR3 for alpha chain variable domain of TCR clone 31031 (TRAV3, TRAJ39)
CAVIEWSNMLTF

SEQ ID NO: 62062 - protein, 14 aa, Homo sapiens
  CDR3 for beta chain variable domain of TCR clone 31031 (TRBV7-8, TRBJ2-3)
CASSCPDGQDTQYF

SEQ ID NO: 62063 - protein, 12 aa, Homo sapiens
  CDR3 for alpha chain variable domain of TCR clone 31032 (TRAV12-1, TRAJ40)
CVVYSGTYKYIF

SEQ ID NO: 62064 - protein, 18 aa, Homo sapiens
  CDR3 for beta chain variable domain of TCR clone 31032 (TRBV11-2, TRBJ2-3)
CGSSLGGASRGAPNTQYF

SEQ ID NO: 62065 - protein, 17 aa, Homo sapiens
  CDR3 for alpha chain variable domain of TCR clone 31033 (TRAV3, TRAJ6)
CAVRDGPRTGGSYIPTF

SEQ ID NO: 62066 - protein, 20 aa, Homo sapiens
  CDR3 for beta chain variable domain of TCR clone 31033 (TRBV28, TRBJ2-1)
CASTPIGRSPGLAGGNEQFF

SEQ ID NO: 62067 - protein, 15 aa, Homo sapiens
  CDR3 for alpha chain variable domain of TCR clone 31034 (TRAV4, TRAJ10)
CLVGDEGGGGNKLTF

SEQ ID NO: 62068 - protein, 15 aa, Homo sapiens
  CDR3 for beta chain variable domain of TCR clone 31034 (TRBV7-2, TRBJ2-7)
CASSLTGQGTYEQYF

SEQ ID NO: 62069 - protein, 11 aa, Homo sapiens
  CDR3 for alpha chain variable domain of TCR clone 31035 (TRAV21, TRAJ20)
CCRVNDYKLSF

SEQ ID NO: 62070 - protein, 15 aa, Homo sapiens
  CDR3 for beta chain variable domain of TCR clone 31035 (TRBV2, TRBJ2-2)
CASSRRGPNTGELFF

SEQ ID NO: 62071 - protein, 13 aa, Homo sapiens
  CDR3 for alpha chain variable domain of TCR clone 31036 (TRAV13-1, TRAJ39)
CAASIVMQATCPP

SEQ ID NO: 62072 - protein, 16 aa, Homo sapiens
  CDR3 for beta chain variable domain of TCR clone 31036 (TRBV20-1, TRBJ1-4)
CSAPGQGLLTNEKLFF

SEQ ID NO: 62073 - protein, 16 aa, Homo sapiens
  CDR3 for alpha chain variable domain of TCR clone 31037 (TRAV23/DV6, TRAJ9)
CAASIGGNTGGFKTIF

SEQ ID NO: 62074 - protein, 14 aa, Homo sapiens
  CDR3 for beta chain variable domain of TCR clone 31037 (TRBV9, TRBJ2-7)
CASSVGVSSYGQYF

SEQ ID NO: 62075 - protein, 14 aa, Homo sapiens
  CDR3 for alpha chain variable domain of TCR clone 31038 (TRAV26-1, TRAJ34)
CIVRVTYNTDKLIF

SEQ ID NO: 62076 - protein, 15 aa, Homo sapiens
  CDR3 for beta chain variable domain of TCR clone 31038 (TRBV20-1, TRBJ2-7)
CSARVPAAYFYEQYF

SEQ ID NO: 62077 - protein, 13 aa, Homo sapiens
  CDR3 for alpha chain variable domain of TCR clone 31039 (TRAV26-1, TRAJ35)
CIVSRRVGKCCIA

SEQ ID NO: 62078 - protein, 17 aa, Homo sapiens
  CDR3 for beta chain variable domain of TCR clone 31039 (TRBV7-9, TRBJ2-7)
CASSFDGSRGGAYEQYF

SEQ ID NO: 62079 - protein, 14 aa, Homo sapiens
  CDR3 for alpha chain variable domain of TCR clone 31040 (TRAV12-1, TRAJ17)
CVVNYKAAGNKLTF

SEQ ID NO: 62080 - protein, 17 aa, Homo sapiens
  CDR3 for beta chain variable domain of TCR clone 31040 (TRBV20-1, TRBJ2-1)
CSASSSGLAGSYNEQFF

SEQ ID NO: 62081 - protein, 13 aa, Homo sapiens
  CDR3 for alpha chain variable domain of TCR clone 31041 (TRAV38-1, TRAJ42)
CSRWGGSQGNLIF

SEQ ID NO: 62082 - protein, 17 aa, Homo sapiens
  CDR3 for beta chain variable domain of TCR clone 31041 (TRBV20-1, TRBJ2-1)
CSARDPLAGVWDNEQFF

SEQ ID NO: 62083 - protein, 13 aa, Homo sapiens
  CDR3 for alpha chain variable domain of TCR clone 31042 (TRAV8-3, TRAJ48)
CAVVPFGNEKLTF

SEQ ID NO: 62084 - protein, 15 aa, Homo sapiens
  CDR3 for beta chain variable domain of TCR clone 31042 (TRBV11-2, TRBJ2-1)
CASSSPSTRYNELFF

SEQ ID NO: 62085 - protein, 15 aa, Homo sapiens
  CDR3 for alpha chain variable domain of TCR clone 31043 (TRAV2, TRAJ15)
CAVEDREQAGTALIF

SEQ ID NO: 62086 - protein, 13 aa, Homo sapiens
  CDR3 for beta chain variable domain of TCR clone 31043 (TRBV10-2, TRBJ2-3)
CASSELGDHTQYF

SEQ ID NO: 62087 - protein, 13 aa, Homo sapiens
  CDR3 for alpha chain variable domain of TCR clone 31044 (TRAV21, TRAJ57)
CAVIEGGSEKLVF

SEQ ID NO: 62088 - protein, 15 aa, Homo sapiens
  CDR3 for beta chain variable domain of TCR clone 31044 (TRBV10-3, TRBJ2-5)
CAISECGRGQETQYF

SEQ ID NO: 62089 - protein, 15 aa, Homo sapiens
  CDR3 for alpha chain variable domain of TCR clone 31045 (TRAV3, TRAJ22)
CAVRDRGGSARQLTF

SEQ ID NO: 62090 - protein, 14 aa, Homo sapiens
  CDR3 for beta chain variable domain of TCR clone 31045 (TRBV20-1, TRBJ2-5)
CSALVPGSQETQYF

SEQ ID NO: 62091 - protein, 12 aa, Homo sapiens
  CDR3 for alpha chain variable domain of TCR clone 31046 (TRAV13-1, TRAJ21)
CAAKEGVNKFYF

SEQ ID NO: 62092 - protein, 14 aa, Homo sapiens
  CDR3 for beta chain variable domain of TCR clone 31046 (TRBV5-4, TRBJ1-1)
CASSLDSRRDEAFF

SEQ ID NO: 62093 - protein, 10 aa, Homo sapiens
  CDR3 for alpha chain variable domain of TCR clone 31047 (TRAV23/DV6, TRAJ57)
CVESSTLSQG

SEQ ID NO: 62094 - protein, 14 aa, Homo sapiens
  CDR3 for beta chain variable domain of TCR clone 31047 (TRBV25-1, TRBJ1-1)
CASTHLGGNTEAFF

SEQ ID NO: 62095 - protein, 16 aa, Homo sapiens
  CDR3 for alpha chain variable domain of TCR clone 31048 (TRAV12-3, TRAJ53)
CAMSPGSGGSNYKLTF

SEQ ID NO: 62096 - protein, 16 aa, Homo sapiens
  CDR3 for beta chain variable domain of TCR clone 31048 (TRBV4-2, TRBJ1-1)
CASSQAGLGMNTEAFF

SEQ ID NO: 62097 - protein, 15 aa, Homo sapiens
  CDR3 for alpha chain variable domain of TCR clone 31049 (TRAV2, TRAJ24)
CAVVRLKSSWGKLQF

SEQ ID NO: 62098 - protein, 16 aa, Homo sapiens
  CDR3 for beta chain variable domain of TCR clone 31049 (TRBV7-7, TRBJ2-3)
CASSPGTSGSTDTQYF

SEQ ID NO: 62099 - protein, 14 aa, Homo sapiens
  CDR3 for alpha chain variable domain of TCR clone 31050 (TRAV12-2, TRAJ13)
CAVKKTGRYQKVTF

SEQ ID NO: 62100 - protein, 15 aa, Homo sapiens
  CDR3 for beta chain variable domain of TCR clone 31050 (TRBV27, TRBJ2-1)
CASSNGGGSSNEQFF

SEQ ID NO: 62101 - protein, 11 aa, Homo sapiens
  CDR3 for alpha chain variable domain of TCR clone 31051 (TRAV35, TRAJ30)
CAGPGDDKIIF

SEQ ID NO: 62102 - protein, 15 aa, Homo sapiens
  CDR3 for beta chain variable domain of TCR clone 31051 (TRBV6-3, TRBJ2-7)
CASSSPGTVFYEQYF

SEQ ID NO: 62103 - protein, 15 aa, Homo sapiens
  CDR3 for alpha chain variable domain of TCR clone 31052 (TRAV3, TRAJ47)
CAVRDIGEYGNKLVF

SEQ ID NO: 62104 - protein, 15 aa, Homo sapiens
  CDR3 for beta chain variable domain of TCR clone 31052 (TRBV28, TRBJ2-1)
CASSGLAEVDNEQFF

SEQ ID NO: 62105 - protein, 13 aa, Homo sapiens
  CDR3 for alpha chain variable domain of TCR clone 31053 (TRAV21, TRAJ49)
CAVRPSTGNQFYF

SEQ ID NO: 62106 - protein, 13 aa, Homo sapiens
  CDR3 for beta chain variable domain of TCR clone 31053 (TRBV6-6, TRBJ1-5)
CASRAYQDQPQHF

SEQ ID NO: 62107 - protein, 14 aa, Homo sapiens
  CDR3 for alpha chain variable domain of TCR clone 31054 (TRAV35, TRAJ33)
CAGSSQDSNYQLIW

SEQ ID NO: 62108 - protein, 15 aa, Homo sapiens
  CDR3 for beta chain variable domain of TCR clone 31054 (TRBV20-1, TRBJ2-7)
CSAESVTSGAYEQYF

SEQ ID NO: 62109 - protein, 13 aa, Homo sapiens
  CDR3 for alpha chain variable domain of TCR clone 31055 (TRAV8-3, TRAJ28)
CAMGAVGSYQLTF

SEQ ID NO: 62110 - protein, 15 aa, Homo sapiens
  CDR3 for beta chain variable domain of TCR clone 31055 (TRBV28, TRBJ2-5)
CASSPGQGSIETQYF

SEQ ID NO: 62111 - protein, 16 aa, Homo sapiens
  CDR3 for alpha chain variable domain of TCR clone 31056 (TRAV3, TRAJ37)
CAMRVRGSGNTGKLIF

SEQ ID NO: 62112 - protein, 11 aa, Homo sapiens
  CDR3 for beta chain variable domain of TCR clone 31056 (TRBV11-2, TRBJ2-2)
CASSLPGELFF

SEQ ID NO: 62113 - protein, 14 aa, Homo sapiens
  CDR3 for alpha chain variable domain of TCR clone 31057 (TRAV12-2, TRAJ40)
CAVKIPPGTYKYIF

SEQ ID NO: 62114 - protein, 17 aa, Homo sapiens
  CDR3 for beta chain variable domain of TCR clone 31057 (TRBV13, TRBJ2-3)
CASSLSRVAGGRNTQYF

SEQ ID NO: 62115 - protein, 15 aa, Homo sapiens
  CDR3 for alpha chain variable domain of TCR clone 31058 (TRAV35, TRAJ58)
CAGRRQETSGSRLTL

SEQ ID NO: 62116 - protein, 11 aa, Homo sapiens
  CDR3 for beta chain variable domain of TCR clone 31058 (TRBV11-2, TRBJ1-1)
CASSINTEAFF

SEQ ID NO: 62117 - protein, 16 aa, Homo sapiens
  CDR3 for alpha chain variable domain of TCR clone 31059 (TRAV30, TRAJ24)
CGTEIVDADSWGNPSL

SEQ ID NO: 62118 - protein, 14 aa, Homo sapiens
  CDR3 for beta chain variable domain of TCR clone 31059 (TRBV12-5, TRBJ2-5)
CASGSRTHQETQYF

SEQ ID NO: 62119 - protein, 13 aa, Homo sapiens
  CDR3 for alpha chain variable domain of TCR clone 31060 (TRAV21, TRAJ20)
CAVSRLGDYKLSF

SEQ ID NO: 62120 - protein, 13 aa, Homo sapiens
  CDR3 for beta chain variable domain of TCR clone 31060 (TRBV7-3, TRBJ1-1)
CASSPAGGREAFF

SEQ ID NO: 62121 - protein, 15 aa, Homo sapiens
  CDR3 for alpha chain variable domain of TCR clone 31061 (TRAV17, TRAJ13)
CATDAGSGGYKKVTF

SEQ ID NO: 62122 - protein, 17 aa, Homo sapiens
  CDR3 for beta chain variable domain of TCR clone 31061 (TRBV11-2, TRBJ2-1)
CASSLYPPGVEYNEQFF

SEQ ID NO: 62123 - protein, 18 aa, Homo sapiens
  CDR3 for alpha chain variable domain of TCR clone 31062 (TRAV21, TRAJ52)
CAVRPSPAGGTSYGKLTF

SEQ ID NO: 62124 - protein, 13 aa, Homo sapiens
  CDR3 for beta chain variable domain of TCR clone 31062 (TRBV27, TRBJ1-4)
CASSLMGDEKLFF

SEQ ID NO: 62125 - protein, 11 aa, Homo sapiens
  CDR3 for alpha chain variable domain of TCR clone 31063 (TRAV12-2, TRAJ33)
CAVTSNYQLIW

SEQ ID NO: 62126 - protein, 14 aa, Homo sapiens
  CDR3 for beta chain variable domain of TCR clone 31063 (TRBV12-4, TRBJ2-2)
CASSQGANTGELFF

SEQ ID NO: 62127 - protein, 15 aa, Homo sapiens
  CDR3 for alpha chain variable domain of TCR clone 31064 (TRAV12-1, TRAJ4)
CVVNPFSGGYNKLIF

SEQ ID NO: 62128 - protein, 13 aa, Homo sapiens
  CDR3 for beta chain variable domain of TCR clone 31064 (TRBV20-1, TRBJ1-2)
RSARGTADYGYTF

SEQ ID NO: 62129 - protein, 13 aa, Homo sapiens
  CDR3 for alpha chain variable domain of TCR clone 31065 (TRAV12-3, TRAJ7)
CAMTPYGNNRLAF

SEQ ID NO: 62130 - protein, 17 aa, Homo sapiens
  CDR3 for beta chain variable domain of TCR clone 31065 (TRBV20-1, TRBJ1-4)
SAVLDLTGGELNEKLFF

SEQ ID NO: 62131 - protein, 14 aa, Homo sapiens
  CDR3 for alpha chain variable domain of TCR clone 31066 (TRAV1-2, TRAJ8)
CAVREDTGLQKLVF

SEQ ID NO: 62132 - protein, 13 aa, Homo sapiens
  CDR3 for beta chain variable domain of TCR clone 31066 (TRBV27, TRBJ1-1)
CASSLSIGAEAFF

SEQ ID NO: 62133 - protein, 18 aa, Homo sapiens
  CDR3 for alpha chain variable domain of TCR clone 31067 (TRAV26-2, TRAJ54)
CILRDVEVGIQGAQKLVF

SEQ ID NO: 62134 - protein, 13 aa, Homo sapiens
  CDR3 for beta chain variable domain of TCR clone 31067 (TRBV7-9, TRBJ1-2)
CASSLKQNYGYTF

SEQ ID NO: 62135 - protein, 12 aa, Homo sapiens
  CDR3 for alpha chain variable domain of TCR clone 31068 (TRAV21, TRAJ27)
CAPPGNAGKSTF

SEQ ID NO: 62136 - protein, 13 aa, Homo sapiens
  CDR3 for beta chain variable domain of TCR clone 31068 (TRBV2, TRBJ1-1)
CARNPTGGCHAFF

SEQ ID NO: 62137 - protein, 13 aa, Homo sapiens
  CDR3 for alpha chain variable domain of TCR clone 31069 (TRAV21, TRAJ15)
CAVANQAGNALIF

SEQ ID NO: 62138 - protein, 14 aa, Homo sapiens
  CDR3 for beta chain variable domain of TCR clone 31069 (TRBV27, TRBJ2-2)
CASSLGAATGELFF

SEQ ID NO: 62139 - protein, 14 aa, Homo sapiens
  CDR3 for alpha chain variable domain of TCR clone 31070 (TRAV35, TRAJ38)
CAGSNAGNNRKLIW

SEQ ID NO: 62140 - protein, 12 aa, Homo sapiens
  CDR3 for beta chain variable domain of TCR clone 31070 (TRBV19, TRBJ2-7)
CVSTDRGYEQYF

SEQ ID NO: 62141 - protein, 14 aa, Homo sapiens
  CDR3 for alpha chain variable domain of TCR clone 31071 (TRAV1-2, TRAJ8)
CAVREDTGFQKLVF

SEQ ID NO: 62142 - protein, 18 aa, Homo sapiens
  CDR3 for beta chain variable domain of TCR clone 31071 (TRBV12-4, TRBJ2-2)
CASSLVAGTRGRTGELFF

SEQ ID NO: 62143 - protein, 14 aa, Homo sapiens
  CDR3 for alpha chain variable domain of TCR clone 31072 (TRAV17, TRAJ57)
CATDPQGGSEKLVF

SEQ ID NO: 62144 - protein, 16 aa, Homo sapiens
  CDR3 for beta chain variable domain of TCR clone 31072 (TRBV20-1, TRBJ1-4)
CSAPGQGLLTNEKLFL

SEQ ID NO: 62145 - protein, 13 aa, Homo sapiens
  CDR3 for alpha chain variable domain of TCR clone 31073 (TRAV12-3, TRAJ40)
CAMSDSGTYEYIF

SEQ ID NO: 62146 - protein, 14 aa, Homo sapiens
  CDR3 for beta chain variable domain of TCR clone 31073 (TRBV7-2, TRBJ1-5)
CASSTQGAGQPQHF

SEQ ID NO: 62147 - protein, 14 aa, Homo sapiens
  CDR3 for alpha chain variable domain of TCR clone 31074 (TRAV1-2, TRAJ16)
CAVNRFSDGQKLLF

SEQ ID NO: 62148 - protein, 13 aa, Homo sapiens
  CDR3 for beta chain variable domain of TCR clone 31074 (TRBV7-9, TRBJ1-2)
CASSLKQNYGYTV

SEQ ID NO: 62149 - protein, 15 aa, Homo sapiens
  CDR3 for alpha chain variable domain of TCR clone 31075 (TRAV12-2, TRAJ43)
CAFDMRFGAGTRLTV

SEQ ID NO: 62150 - protein, 18 aa, Homo sapiens
  CDR3 for beta chain variable domain of TCR clone 31075 (TRBV20-1, TRBJ2-3)
CSASGRAGGPGTTDTQYF

SEQ ID NO: 62151 - protein, 15 aa, Homo sapiens
  CDR3 for alpha chain variable domain of TCR clone 31076 (TRAV12-2, TRAJ43)
CAFDMRFGAGTRLTV

SEQ ID NO: 62152 - protein, 18 aa, Homo sapiens
  CDR3 for beta chain variable domain of TCR clone 31076 (TRBV20-1, TRBJ2-3)
CSASRLAGGPGTTDTQYF

SEQ ID NO: 62153 - protein, 12 aa, Homo sapiens
  CDR3 for alpha chain variable domain of TCR clone 31077 (TRAV8-3, TRAJ32)
CCGGGATNKLIF

SEQ ID NO: 62154 - protein, 12 aa, Homo sapiens
  CDR3 for beta chain variable domain of TCR clone 31077 (TRBV7-8, TRBJ2-7)
CASSLGDREQYF

SEQ ID NO: 62155 - protein, 12 aa, Homo sapiens
  CDR3 for alpha chain variable domain of TCR clone 31078 (TRAV35, TRAJ30)
CAGLNRDDKIIF

SEQ ID NO: 62156 - protein, 15 aa, Homo sapiens
  CDR3 for beta chain variable domain of TCR clone 31078 (TRBV9, TRBJ1-6)
CASSVAGTGDSPPHF

SEQ ID NO: 62157 - protein, 13 aa, Homo sapiens
  CDR3 for alpha chain variable domain of TCR clone 31079 (TRAV12-3, TRAJ33)
CAMSVNSNYQLIW

SEQ ID NO: 62158 - protein, 14 aa, Homo sapiens
  CDR3 for beta chain variable domain of TCR clone 31079 (TRBV27, TRBJ2-5)
CASSSLRGWETQYF

SEQ ID NO: 62159 - protein, 13 aa, Homo sapiens
  CDR3 for alpha chain variable domain of TCR clone 31080 (TRAV12-1, TRAJ11)
CVVNRAGYGTLTF

SEQ ID NO: 62160 - protein, 15 aa, Homo sapiens
  CDR3 for beta chain variable domain of TCR clone 31080 (TRBV7-3, TRBJ2-2)
CASSETGQGTGELFF

SEQ ID NO: 62161 - protein, 13 aa, Homo sapiens
  CDR3 for alpha chain variable domain of TCR clone 31081 (TRAV2, TRAJ24)
CDLQLTAGGNSSL

SEQ ID NO: 62162 - protein, 13 aa, Homo sapiens
  CDR3 for beta chain variable domain of TCR clone 31081 (TRBV7-9, TRBJ1-2)
CASSLKQDYGYTF

SEQ ID NO: 62163 - protein, 13 aa, Homo sapiens
  CDR3 for alpha chain variable domain of TCR clone 31082 (TRAV8-3, TRAJ28)
CAVGAVESYQLTF

SEQ ID NO: 62164 - protein, 15 aa, Homo sapiens
  CDR3 for beta chain variable domain of TCR clone 31082 (TRBV7-9, TRBJ1-5)
CASSQGHQPNQPQHF

SEQ ID NO: 62165 - protein, 14 aa, Homo sapiens
  CDR3 for alpha chain variable domain of TCR clone 31083 (TRAV38-1, TRAJ45)
CAYYSGVGADGLTF

SEQ ID NO: 62166 - protein, 20 aa, Homo sapiens
  CDR3 for beta chain variable domain of TCR clone 31083 (TRBV28, TRBJ2-1)
CASTPIGRSPGLAGGNEQFF

SEQ ID NO: 62167 - protein, 16 aa, Homo sapiens
  CDR3 for alpha chain variable domain of TCR clone 31084 (TRAV4, TRAJ9)
CLVGDPNRPGGFKTIF

SEQ ID NO: 62168 - protein, 16 aa, Homo sapiens
  CDR3 for beta chain variable domain of TCR clone 31084 (TRBV28, TRBJ1-4)
CASSPPYRWRSEKLFF

SEQ ID NO: 62169 - protein, 12 aa, Homo sapiens
  CDR3 for alpha chain variable domain of TCR clone 31085 (TRAV2, TRAJ9)
CAVGAGGFKTIF

SEQ ID NO: 62170 - protein, 16 aa, Homo sapiens
  CDR3 for beta chain variable domain of TCR clone 31085 (TRBV13, TRBJ2-2)
CASSPRTGEHTEELFF

SEQ ID NO: 62171 - protein, 12 aa, Homo sapiens
  CDR3 for alpha chain variable domain of TCR clone 31086 (TRAV8-1, TRAJ26)
CAVNNYGQNFIF

SEQ ID NO: 62172 - protein, 12 aa, Homo sapiens
  CDR3 for beta chain variable domain of TCR clone 31086 (TRBV5-5, TRBJ2-5)
CVSSYFGETQYF

SEQ ID NO: 62173 - protein, 14 aa, Homo sapiens
  CDR3 for alpha chain variable domain of TCR clone 31087 (TRAV34, TRAJ44)
CGADGTGTASKLTF

SEQ ID NO: 62174 - protein, 15 aa, Homo sapiens
  CDR3 for beta chain variable domain of TCR clone 31087 (TRBV5-1, TRBJ2-1)
CASSPPRAPYSEQFF

SEQ ID NO: 62175 - protein, 14 aa, Homo sapiens
  CDR3 for alpha chain variable domain of TCR clone 31088 (TRAV12-1, TRAJ17)
CVVNYKAAGNKLTF

SEQ ID NO: 62176 - protein, 14 aa, Homo sapiens
  CDR3 for beta chain variable domain of TCR clone 31088 (TRBV7-8, TRBJ2-3)
CASSLEAGTDTQYS

SEQ ID NO: 62177 - protein, 14 aa, Homo sapiens
  CDR3 for alpha chain variable domain of TCR clone 31089 (TRAV12-3, TRAJ10)
SHLPLPGGGNKLTF

SEQ ID NO: 62178 - protein, 15 aa, Homo sapiens
  CDR3 for beta chain variable domain of TCR clone 31089 (TRBV27, TRBJ1-5)
CASSLGTGFDQPQHF

SEQ ID NO: 62179 - protein, 15 aa, Homo sapiens
  CDR3 for alpha chain variable domain of TCR clone 31090 (TRAV26-1, TRAJ29)
CIVRVEGSGNTPFVF

SEQ ID NO: 62180 - protein, 15 aa, Homo sapiens
  CDR3 for beta chain variable domain of TCR clone 31090 (TRBV7-9, TRBJ1-5)
CASSQGHQPNQPQHF

SEQ ID NO: 62181 - protein, 15 aa, Homo sapiens
  CDR3 for alpha chain variable domain of TCR clone 31091 (TRAV3, TRAJ5)
CAVRDRKTGRRALTF

SEQ ID NO: 62182 - protein, 15 aa, Homo sapiens
  CDR3 for beta chain variable domain of TCR clone 31091 (TRBV7-8, TRBJ2-1)
CASSLADSLYNEKFF

SEQ ID NO: 62183 - protein, 14 aa, Homo sapiens
  CDR3 for alpha chain variable domain of TCR clone 31092 (TRAV17, TRAJ22)
CATSPSGSARQLTS

SEQ ID NO: 62184 - protein, 15 aa, Homo sapiens
  CDR3 for beta chain variable domain of TCR clone 31092 (TRBV4-1, TRBJ2-5)
CASSQWDLYQETQYF

SEQ ID NO: 62185 - protein, 18 aa, Homo sapiens
  CDR3 for alpha chain variable domain of TCR clone 31093 (TRAV21, TRAJ52)
CAVRPSPAGGTSYGKLTF

SEQ ID NO: 62186 - protein, 15 aa, Homo sapiens
  CDR3 for beta chain variable domain of TCR clone 31093 (TRBV19, TRBJ2-1)
CASSSPGVPLDEQFF

SEQ ID NO: 62187 - protein, 17 aa, Homo sapiens
  CDR3 for alpha chain variable domain of TCR clone 31094 (TRAV2, TRAJ22)
ILQVREADAAEQRQLTL

SEQ ID NO: 62188 - protein, 16 aa, Homo sapiens
  CDR3 for beta chain variable domain of TCR clone 31094 (TRBV2, TRBJ2-5)
CASSETQGVGEETQYF

SEQ ID NO: 62189 - protein, 13 aa, Homo sapiens
  CDR3 for alpha chain variable domain of TCR clone 31095 (TRAV8-3, TRAJ28)
CAVGAVGSYQLTF

SEQ ID NO: 62190 - protein, 14 aa, Homo sapiens
  CDR3 for beta chain variable domain of TCR clone 31095 (TRBV7-2, TRBJ2-7)
SASRSQGAAYEQYF

SEQ ID NO: 62191 - protein, 16 aa, Homo sapiens
  CDR3 for alpha chain variable domain of TCR clone 31096 (TRAV27, TRAJ13)
CAGAKSDSGGYHKVTF

SEQ ID NO: 62192 - protein, 15 aa, Homo sapiens
  CDR3 for beta chain variable domain of TCR clone 31096 (TRBV29-1, TRBJ2-1)
CSVGRHALFYNEQFF

SEQ ID NO: 62193 - protein, 13 aa, Homo sapiens
  CDR3 for alpha chain variable domain of TCR clone 31097 (TRAV27, TRAJ49)
CAPRPYTGNPFYF

SEQ ID NO: 62194 - protein, 16 aa, Homo sapiens
  CDR3 for beta chain variable domain of TCR clone 31097 (TRBV4-1, TRBJ1-2)
CASSQDAGQVLYGYTF

SEQ ID NO: 62195 - protein, 12 aa, Homo sapiens
  CDR3 for alpha chain variable domain of TCR clone 31098 (TRAV8-3, TRAJ20)
CAVGANDYKLSF

SEQ ID NO: 62196 - protein, 16 aa, Homo sapiens
  CDR3 for beta chain variable domain of TCR clone 31098 (TRBV19, TRBJ2-2)
CASRSPGTGATEELFF

SEQ ID NO: 62197 - protein, 12 aa, Homo sapiens
  CDR3 for alpha chain variable domain of TCR clone 31099 (TRAV25, TRAJ11)
CAGASGYSTLTF

SEQ ID NO: 62198 - protein, 14 aa, Homo sapiens
  CDR3 for beta chain variable domain of TCR clone 31099 (TRBV5-8, TRBJ2-3)
CASGLGQGTDTQYF

SEQ ID NO: 62199 - protein, 13 aa, Homo sapiens
  CDR3 for alpha chain variable domain of TCR clone 31100 (TRAV27, TRAJ45)
CRSSGGGADGLTF

SEQ ID NO: 62200 - protein, 13 aa, Homo sapiens
  CDR3 for beta chain variable domain of TCR clone 31100 (TRBV7-3, TRBJ1-1)
CASSQDWGAEAFF

SEQ ID NO: 62201 - protein, 12 aa, Homo sapiens
  CDR3 for alpha chain variable domain of TCR clone 31101 (TRAV8-3, TRAJ20)
CAVDFSDYKLSF

SEQ ID NO: 62202 - protein, 12 aa, Homo sapiens
  CDR3 for beta chain variable domain of TCR clone 31101 (TRBV29-1, TRBJ2-3)
CSVTGGADTQYF

SEQ ID NO: 62203 - protein, 14 aa, Homo sapiens
  CDR3 for alpha chain variable domain of TCR clone 31102 (TRAV13-1, TRAJ40)
CAARSTPGTYKYIF

SEQ ID NO: 62204 - protein, 15 aa, Homo sapiens
  CDR3 for beta chain variable domain of TCR clone 31102 (TRBV18, TRBJ1-5)
CASSETGGNNQPQHF

SEQ ID NO: 62205 - protein, 16 aa, Homo sapiens
  CDR3 for alpha chain variable domain of TCR clone 31103 (TRAV27, TRAJ52)
CAGAPAGGTRYGKLTF

SEQ ID NO: 62206 - protein, 12 aa, Homo sapiens
  CDR3 for beta chain variable domain of TCR clone 31103 (TRBV27, TRBJ2-1)
CASRGFYNEQFF

SEQ ID NO: 62207 - protein, 13 aa, Homo sapiens
  CDR3 for alpha chain variable domain of TCR clone 31104 (TRAV12-2, TRAJ15)
CAVFNQAGTALIF

SEQ ID NO: 62208 - protein, 14 aa, Homo sapiens
  CDR3 for beta chain variable domain of TCR clone 31104 (TRBV7-8, TRBJ1-5)
CASGRGGADQPQHF

SEQ ID NO: 62209 - protein, 14 aa, Homo sapiens
  CDR3 for alpha chain variable domain of TCR clone 31105 (TRAV29/DV5, TRAJ36)
CAARRKTGANNLFF

SEQ ID NO: 62210 - protein, 15 aa, Homo sapiens
  CDR3 for beta chain variable domain of TCR clone 31105 (TRBV6-3, TRBJ2-7)
CASSSPGTVSYEQYF

SEQ ID NO: 62211 - protein, 15 aa, Homo sapiens
  CDR3 for alpha chain variable domain of TCR clone 31106 (TRAV17, TRAJ37)
CATDGGSSNTGKLIF

SEQ ID NO: 62212 - protein, 15 aa, Homo sapiens
  CDR3 for beta chain variable domain of TCR clone 31106 (TRBV28, TRBJ2-5)
CASSSGRTIKETQYF

SEQ ID NO: 62213 - protein, 13 aa, Homo sapiens
  CDR3 for alpha chain variable domain of TCR clone 31107 (TRAV20, TRAJ40)
CAVPFSGTYKYIF

SEQ ID NO: 62214 - protein, 13 aa, Homo sapiens
  CDR3 for beta chain variable domain of TCR clone 31107 (TRBV15, TRBJ2-5)
CATSQSGEETQYF

SEQ ID NO: 62215 - protein, 12 aa, Homo sapiens
  CDR3 for alpha chain variable domain of TCR clone 31108 (TRAV17, TRAJ57)
CATDGGSEKLVF

SEQ ID NO: 62216 - protein, 13 aa, Homo sapiens
  CDR3 for beta chain variable domain of TCR clone 31108 (TRBV7-9, TRBJ2-7)
CANSFAGAYEQYF

SEQ ID NO: 62217 - protein, 15 aa, Homo sapiens
  CDR3 for alpha chain variable domain of TCR clone 31109 (TRAV29/DV5, TRAJ29)
CAASERSSGNTPLVF

SEQ ID NO: 62218 - protein, 17 aa, Homo sapiens
  CDR3 for beta chain variable domain of TCR clone 31109 (TRBV4-1, TRBJ1-4)
CASSQGGPRGVEEKLFF

SEQ ID NO: 62219 - protein, 13 aa, Homo sapiens
  CDR3 for alpha chain variable domain of TCR clone 31110 (TRAV27, TRAJ27)
CAGGITNAGKSTF

SEQ ID NO: 62220 - protein, 13 aa, Homo sapiens
  CDR3 for beta chain variable domain of TCR clone 31110 (TRBV20-1, TRBJ1-2)
CSASVGVGYGYTF

SEQ ID NO: 62221 - protein, 19 aa, Homo sapiens
  CDR3 for alpha chain variable domain of TCR clone 31111 (TRAV3, TRAJ6)
CAARDRNPSRSGGSYIPTF

SEQ ID NO: 62222 - protein, 15 aa, Homo sapiens
  CDR3 for beta chain variable domain of TCR clone 31111 (TRBV18, TRBJ2-7)
CASSPTFMDSYEQYF

SEQ ID NO: 62223 - protein, 14 aa, Homo sapiens
  CDR3 for alpha chain variable domain of TCR clone 31112 (TRAV1-2, TRAJ16)
CAVNRFSDGQKLLF

SEQ ID NO: 62224 - protein, 15 aa, Homo sapiens
  CDR3 for beta chain variable domain of TCR clone 31112 (TRBV7-9, TRBJ1-6)
CASSSTGRGNSPLHF

SEQ ID NO: 62225 - protein, 13 aa, Homo sapiens
  CDR3 for alpha chain variable domain of TCR clone 31113 (TRAV27, TRAJ49)
CAPRPYTGNQFYF

SEQ ID NO: 62226 - protein, 16 aa, Homo sapiens
  CDR3 for beta chain variable domain of TCR clone 31113 (TRBV4-1, TRBJ1-2)
RASSQDAGQVLYGYTF

SEQ ID NO: 62227 - protein, 13 aa, Homo sapiens
  CDR3 for alpha chain variable domain of TCR clone 31114 (TRAV36/DV7, TRAJ37)
CAVFSGNTGKLIF

SEQ ID NO: 62228 - protein, 16 aa, Homo sapiens
  CDR3 for beta chain variable domain of TCR clone 31114 (TRBV3-1, TRBJ2-5)
CASSPGQFNGFGTQYF

SEQ ID NO: 62229 - protein, 14 aa, Homo sapiens
  CDR3 for alpha chain variable domain of TCR clone 31115 (TRAV8-4, TRAJ54)
CAVSEVLGAQKLVF

SEQ ID NO: 62230 - protein, 17 aa, Homo sapiens
  CDR3 for beta chain variable domain of TCR clone 31115 (TRBV4-1, TRBJ1-4)
CASSQEGPRRVEEKLFF

SEQ ID NO: 62231 - protein, 13 aa, Homo sapiens
  CDR3 for alpha chain variable domain of TCR clone 31116 (TRAV3, TRAJ21)
CAVREPDFNKFYF

SEQ ID NO: 62232 - protein, 13 aa, Homo sapiens
  CDR3 for beta chain variable domain of TCR clone 31116 (TRBV9, TRBJ2-1)
CASCPSGGNEQFF

SEQ ID NO: 62233 - protein, 13 aa, Homo sapiens
  CDR3 for alpha chain variable domain of TCR clone 31117 (TRAV21, TRAJ37)
CAVSSGNTGKLIF

SEQ ID NO: 62234 - protein, 15 aa, Homo sapiens
  CDR3 for beta chain variable domain of TCR clone 31117 (TRBV19, TRBJ2-4)
CASRGPRRGENIQYF

SEQ ID NO: 62235 - protein, 13 aa, Homo sapiens
  CDR3 for alpha chain variable domain of TCR clone 31118 (TRAV17, TRAJ9)
CATDYTGGFKTIF

SEQ ID NO: 62236 - protein, 14 aa, Homo sapiens
  CDR3 for beta chain variable domain of TCR clone 31118 (TRBV19, TRBJ2-5)
CASSTTGQQETQYF

SEQ ID NO: 62237 - protein, 14 aa, Homo sapiens
  CDR3 for alpha chain variable domain of TCR clone 31119 (TRAV38-1, TRAJ29)
CSFITPSGNTPLVF

SEQ ID NO: 62238 - protein, 14 aa, Homo sapiens
  CDR3 for beta chain variable domain of TCR clone 31119 (TRBV18, TRBJ2-7)
CASSPRGGAYEQYF

SEQ ID NO: 62239 - protein, 18 aa, Homo sapiens
  CDR3 for alpha chain variable domain of TCR clone 31120 (TRAV13-1, TRAJ52)
CAAKNPNAGGTSYGKLTF

SEQ ID NO: 62240 - protein, 14 aa, Homo sapiens
  CDR3 for beta chain variable domain of TCR clone 31120 (TRBV7-2, TRBJ2-7)
CASRSQWAAYEQYF

SEQ ID NO: 62241 - protein, 13 aa, Homo sapiens
  CDR3 for alpha chain variable domain of TCR clone 31121 (TRAV17, TRAJ5)
CAPTDTGRRALTF

SEQ ID NO: 62242 - protein, 15 aa, Homo sapiens
  CDR3 for beta chain variable domain of TCR clone 31121 (TRBV6-6, TRBJ2-5)
CASSPGGGLEETQYF

SEQ ID NO: 62243 - protein, 14 aa, Homo sapiens
  CDR3 for alpha chain variable domain of TCR clone 31122 (TRAV20, TRAJ6)
CAVQERGGSYIPTF

SEQ ID NO: 62244 - protein, 15 aa, Homo sapiens
  CDR3 for beta chain variable domain of TCR clone 31122 (TRBV27, TRBJ2-1)
CASSNGGGSSNEQFF

SEQ ID NO: 62245 - protein, 15 aa, Homo sapiens
  CDR3 for alpha chain variable domain of TCR clone 31123 (TRAV4, TRAJ17)
CLVGDIGAAGSKLTF

SEQ ID NO: 62246 - protein, 14 aa, Homo sapiens
  CDR3 for beta chain variable domain of TCR clone 31123 (TRBV6-3, TRBJ2-7)
CASSYSVRVYEQYF

SEQ ID NO: 62247 - protein, 13 aa, Homo sapiens
  CDR3 for alpha chain variable domain of TCR clone 31124 (TRAV20, TRAJ37)
CAGCSSNTGKQIF

SEQ ID NO: 62248 - protein, 11 aa, Homo sapiens
  CDR3 for beta chain variable domain of TCR clone 31124 (TRBV12-4, TRBJ2-3)
CASTATDTQYF

SEQ ID NO: 62249 - protein, 14 aa, Homo sapiens
  CDR3 for alpha chain variable domain of TCR clone 31125 (TRAV12-3, TRAJ12)
CAMSEVDSSYKLIF

SEQ ID NO: 62250 - protein, 14 aa, Homo sapiens
  CDR3 for beta chain variable domain of TCR clone 31125 (TRBV18, TRBJ1-4)
CASSPSREKLFLAV

SEQ ID NO: 62251 - protein, 14 aa, Homo sapiens
  CDR3 for alpha chain variable domain of TCR clone 31126 (TRAV12-3, TRAJ10)
SHLPLTGGGNKLTF

SEQ ID NO: 62252 - protein, 17 aa, Homo sapiens
  CDR3 for beta chain variable domain of TCR clone 31126 (TRBV15, TRBJ1-5)
CATSRAPPGTRNQPQHF

SEQ ID NO: 62253 - protein, 18 aa, Homo sapiens
  CDR3 for alpha chain variable domain of TCR clone 31127 (TRAV12-3, TRAJ52)
CAMSRTNAGGTGYGKLTF

SEQ ID NO: 62254 - protein, 17 aa, Homo sapiens
  CDR3 for beta chain variable domain of TCR clone 31127 (TRBV7-3, TRBJ2-3)
CASSLMKRMRGADTQYF

SEQ ID NO: 62255 - protein, 12 aa, Homo sapiens
  CDR3 for alpha chain variable domain of TCR clone 31128 (TRAV12-3, TRAJ40)
CAMSSGTHKYIF

SEQ ID NO: 62256 - protein, 15 aa, Homo sapiens
  CDR3 for beta chain variable domain of TCR clone 31128 (TRBV7-3, TRBJ2-2)
CASSETGQGTGELFF

SEQ ID NO: 62257 - protein, 14 aa, Homo sapiens
  CDR3 for alpha chain variable domain of TCR clone 31129 (TRAV12-3, TRAJ22)
CAMSLFGSASQLTF

SEQ ID NO: 62258 - protein, 11 aa, Homo sapiens
  CDR3 for beta chain variable domain of TCR clone 31129 (TRBV12-4, TRBJ2-2)
CASSSAGELFF

SEQ ID NO: 62259 - protein, 15 aa, Homo sapiens
  CDR3 for alpha chain variable domain of TCR clone 31130 (TRAV17, TRAJ57)
CATGPSLGGSEKLVF

SEQ ID NO: 62260 - protein, 14 aa, Homo sapiens
  CDR3 for beta chain variable domain of TCR clone 31130 (TRBV12-5, TRBJ2-5)
CASGSRTHQETQYF

SEQ ID NO: 62261 - protein, 17 aa, Homo sapiens
  CDR3 for alpha chain variable domain of TCR clone 31131 (TRAV3, TRAJ38)
CAVRDCLNAGNNHIQNP

SEQ ID NO: 62262 - protein, 19 aa, Homo sapiens
  CDR3 for beta chain variable domain of TCR clone 31131 (TRBV7-2, TRBJ2-3)
CASSFLSRNWGGGTDTQYF

SEQ ID NO: 62263 - protein, 15 aa, Homo sapiens
  CDR3 for alpha chain variable domain of TCR clone 31132 (TRAV21, TRAJ24)
CAARSSTDSWGKLQF

SEQ ID NO: 62264 - protein, 16 aa, Homo sapiens
  CDR3 for beta chain variable domain of TCR clone 31132 (TRBV12-5, TRBJ2-5)
CASGPRTSGNQETQYF

SEQ ID NO: 62265 - protein, 18 aa, Homo sapiens
  CDR3 for alpha chain variable domain of TCR clone 31133 (TRAV26-1, TRAJ22)
CIVRVALISSGSARQLTF

SEQ ID NO: 62266 - protein, 13 aa, Homo sapiens
  CDR3 for beta chain variable domain of TCR clone 31133 (TRBV13, TRBJ2-5)
CASSPGVGETQYF

SEQ ID NO: 62267 - protein, 16 aa, Homo sapiens
  CDR3 for alpha chain variable domain of TCR clone 31134 (TRAV21, TRAJ37)
CAVRTAGSSNTGKRIF

SEQ ID NO: 62268 - protein, 13 aa, Homo sapiens
  CDR3 for beta chain variable domain of TCR clone 31134 (TRBV7-9, TRBJ2-5)
CASLPSGRETQYF

SEQ ID NO: 62269 - protein, 13 aa, Homo sapiens
  CDR3 for alpha chain variable domain of TCR clone 31135 (TRAV27, TRAJ49)
CAPRPYTGNQFYF

SEQ ID NO: 62270 - protein, 16 aa, Homo sapiens
  CDR3 for beta chain variable domain of TCR clone 31135 (TRBV4-1, TRBJ1-2)
CASSQEAGQVLYGYTF

SEQ ID NO: 62271 - protein, 18 aa, Homo sapiens
  CDR3 for alpha chain variable domain of TCR clone 31136 (TRAV26-1, TRAJ52)
CIVRVEGAGGTSYGKLKF

SEQ ID NO: 62272 - protein, 13 aa, Homo sapiens
  CDR3 for beta chain variable domain of TCR clone 31136 (TRBV7-3, TRBJ1-2)
CASSLKRGYGYTF

SEQ ID NO: 62273 - protein, 17 aa, Homo sapiens
  CDR3 for alpha chain variable domain of TCR clone 31137 (TRAV4, TRAJ18)
CLVGERSVGSTLGRLYF

SEQ ID NO: 62274 - protein, 17 aa, Homo sapiens
  CDR3 for beta chain variable domain of TCR clone 31137 (TRBV13, TRBJ2-3)
CASSLSRVAGGRNTQYF

SEQ ID NO: 62275 - protein, 17 aa, Homo sapiens
  CDR3 for alpha chain variable domain of TCR clone 31138 (TRAV4, TRAJ18)
CLVGERSVGSTLGRLYF

SEQ ID NO: 62276 - protein, 15 aa, Homo sapiens
  CDR3 for beta chain variable domain of TCR clone 31138 (TRBV9, TRBJ1-6)
CASSVAGTGDSPLHF

SEQ ID NO: 62277 - protein, 11 aa, Homo sapiens
  CDR3 for alpha chain variable domain of TCR clone 31139 (TRAV17, TRAJ9)
CGFTGGVKTIF

SEQ ID NO: 62278 - protein, 14 aa, Homo sapiens
  CDR3 for beta chain variable domain of TCR clone 31139 (TRBV7-9, TRBJ2-2)
CASSLVQDTGELFF

SEQ ID NO: 62279 - protein, 18 aa, Homo sapiens
  CDR3 for alpha chain variable domain of TCR clone 31140 (TRAV13-1, TRAJ52)
CAAKNPNAGGTSYGKLTF

SEQ ID NO: 62280 - protein, 15 aa, Homo sapiens
  CDR3 for beta chain variable domain of TCR clone 31140 (TRBV6-3, TRBJ2-7)
CASSSPGTVFYEQYF

SEQ ID NO: 62281 - protein, 13 aa, Homo sapiens
  CDR3 for alpha chain variable domain of TCR clone 31141 (TRAV30, TRAJ20)
CGTEDRSDYKLSF

SEQ ID NO: 62282 - protein, 15 aa, Homo sapiens
  CDR3 for beta chain variable domain of TCR clone 31141 (TRBV2, TRBJ1-2)
CASTQVQDSKYGYTF

SEQ ID NO: 62283 - protein, 12 aa, Homo sapiens
  CDR3 for alpha chain variable domain of TCR clone 31142 (TRAV12-2, TRAJ31)
CAVNTPDARPMF

SEQ ID NO: 62284 - protein, 15 aa, Homo sapiens
  CDR3 for beta chain variable domain of TCR clone 31142 (TRBV4-2, TRBJ1-1)
CASSQDQGLNTEAFF

SEQ ID NO: 62285 - protein, 14 aa, Homo sapiens
  CDR3 for alpha chain variable domain of TCR clone 31143 (TRAV16, TRAJ37)
CALDISGNTGKLIF

SEQ ID NO: 62286 - protein, 14 aa, Homo sapiens
  CDR3 for beta chain variable domain of TCR clone 31143 (TRBV7-6, TRBJ2-7)
CASSFRQGADEQYL

SEQ ID NO: 62287 - protein, 12 aa, Homo sapiens
  CDR3 for alpha chain variable domain of TCR clone 31144 (TRAV16, TRAJ10)
CSRTGGGNQLTF

SEQ ID NO: 62288 - protein, 15 aa, Homo sapiens
  CDR3 for beta chain variable domain of TCR clone 31144 (TRBV6-3, TRBJ2-7)
CASSSPGTVFYEQYF

SEQ ID NO: 62289 - protein, 14 aa, Homo sapiens
  CDR3 for alpha chain variable domain of TCR clone 31145 (TRAV35, TRAJ13)
CAGRSPGGYQKVTF

SEQ ID NO: 62290 - protein, 14 aa, Homo sapiens
  CDR3 for beta chain variable domain of TCR clone 31145 (TRBV19, TRBJ2-2)
CANSMVGLSGELFF

SEQ ID NO: 62291 - protein, 11 aa, Homo sapiens
  CDR3 for alpha chain variable domain of TCR clone 31146 (TRAV2, TRAJ13)
CASGGYQKVTF

SEQ ID NO: 62292 - protein, 15 aa, Homo sapiens
  CDR3 for beta chain variable domain of TCR clone 31146 (TRBV7-3, TRBJ2-1)
CASSPTGGGEVEQFF

SEQ ID NO: 62293 - protein, 14 aa, Homo sapiens
  CDR3 for alpha chain variable domain of TCR clone 31147 (TRAV8-4, TRAJ13)
CAVTLSGGYQKVTF

SEQ ID NO: 62294 - protein, 14 aa, Homo sapiens
  CDR3 for beta chain variable domain of TCR clone 31147 (TRBV7-2, TRBJ1-2)
CASRQTGSTYGYTF

SEQ ID NO: 62295 - protein, 12 aa, Homo sapiens
  CDR3 for alpha chain variable domain of TCR clone 31148 (TRAV2, TRAJ5)
CALDTGRRALTF

SEQ ID NO: 62296 - protein, 15 aa, Homo sapiens
  CDR3 for beta chain variable domain of TCR clone 31148 (TRBV10-3, TRBJ2-1)
CAISGVQDRAYEQFF

SEQ ID NO: 62297 - protein, 13 aa, Homo sapiens
  CDR3 for alpha chain variable domain of TCR clone 31149 (TRAV8-6, TRAJ21)
RAVSPSSLNKFYF

SEQ ID NO: 62298 - protein, 14 aa, Homo sapiens
  CDR3 for beta chain variable domain of TCR clone 31149 (TRBV7-9, TRBJ2-5)
CASSLDTAQETQYF

SEQ ID NO: 62299 - protein, 14 aa, Homo sapiens
  CDR3 for alpha chain variable domain of TCR clone 31150 (TRAV38-1, TRAJ45)
CASHSGGGADGLTF

SEQ ID NO: 62300 - protein, 16 aa, Homo sapiens
  CDR3 for beta chain variable domain of TCR clone 31150 (TRBV27, TRBJ2-2)
CASSSRGLVRTGELFF

SEQ ID NO: 62301 - protein, 13 aa, Homo sapiens
  CDR3 for alpha chain variable domain of TCR clone 31151 (TRAV8-3, TRAJ36)
CAVGAIGANNLFF

SEQ ID NO: 62302 - protein, 15 aa, Homo sapiens
  CDR3 for beta chain variable domain of TCR clone 31151 (TRBV7-2, TRBJ1-2)
CASSPRAGWNYGYTF

SEQ ID NO: 62303 - protein, 16 aa, Homo sapiens
  CDR3 for alpha chain variable domain of TCR clone 31152 (TRAV1-2, TRAJ10)
CAVRGVLTGGGNKFTF

SEQ ID NO: 62304 - protein, 12 aa, Homo sapiens
  CDR3 for beta chain variable domain of TCR clone 31152 (TRBV7-8, TRBJ2-7)
CASSLGDREQYF

SEQ ID NO: 62305 - protein, 13 aa, Homo sapiens
  CDR3 for alpha chain variable domain of TCR clone 31153 (TRAV13-1, TRAJ5)
CAARVTGRSALTF

SEQ ID NO: 62306 - protein, 15 aa, Homo sapiens
  CDR3 for beta chain variable domain of TCR clone 31153 (TRBV7-9, TRBJ2-7)
CASSPGGGLTYEQYF

SEQ ID NO: 62307 - protein, 13 aa, Homo sapiens
  CDR3 for alpha chain variable domain of TCR clone 31154 (TRAV12-1, TRAJ6)
CVVFPGGSYIPTL

SEQ ID NO: 62308 - protein, 14 aa, Homo sapiens
  CDR3 for beta chain variable domain of TCR clone 31154 (TRBV20-1, TRBJ1-3)
CSASPTGAGNTIYF

SEQ ID NO: 62309 - protein, 15 aa, Homo sapiens
  CDR3 for alpha chain variable domain of TCR clone 31155 (TRAV13-1, TRAJ32)
CAASICGGATNKLIF

SEQ ID NO: 62310 - protein, 12 aa, Homo sapiens
  CDR3 for beta chain variable domain of TCR clone 31155 (TRBV7-6, TRBJ2-3)
CASSTGTDTQYF

SEQ ID NO: 62311 - protein, 12 aa, Homo sapiens
  CDR3 for alpha chain variable domain of TCR clone 31156 (TRAV13-2, TRAJ23)
CAERHRGGKLIF

SEQ ID NO: 62312 - protein, 14 aa, Homo sapiens
  CDR3 for beta chain variable domain of TCR clone 31156 (TRBV4-1, TRBJ2-2)
CASSQAVNTGELFF

SEQ ID NO: 62313 - protein, 16 aa, Homo sapiens
  CDR3 for alpha chain variable domain of TCR clone 31157 (TRAV38-2/DV8, TRAJ47)
YAYRSAIMEYGNKLVF

SEQ ID NO: 62314 - protein, 14 aa, Homo sapiens
  CDR3 for beta chain variable domain of TCR clone 31157 (TRBV19, TRBJ2-7)
CASSIFAGTYEQYF

SEQ ID NO: 62315 - protein, 15 aa, Homo sapiens
  CDR3 for alpha chain variable domain of TCR clone 31158 (TRAV8-4, TRAJ37)
CAVSRDSGNAGKLIF

SEQ ID NO: 62316 - protein, 16 aa, Homo sapiens
  CDR3 for beta chain variable domain of TCR clone 31158 (TRBV7-3, TRBJ2-3)
CASSLSGYRPEDTQYF

SEQ ID NO: 62317 - protein, 13 aa, Homo sapiens
  CDR3 for alpha chain variable domain of TCR clone 31159 (TRAV29/DV5, TRAJ31)
CAASRNNNARLMF

SEQ ID NO: 62318 - protein, 13 aa, Homo sapiens
  CDR3 for beta chain variable domain of TCR clone 31159 (TRBV27, TRBJ2-1)
CTSRTLGVGEQFF

SEQ ID NO: 62319 - protein, 11 aa, Homo sapiens
  CDR3 for alpha chain variable domain of TCR clone 31160 (TRAV1-2, TRAJ31)
CAVNNNARRMF

SEQ ID NO: 62320 - protein, 15 aa, Homo sapiens
  CDR3 for beta chain variable domain of TCR clone 31160 (TRBV28, TRBJ2-1)
CASSIIAGGRSEQFF

SEQ ID NO: 62321 - protein, 12 aa, Homo sapiens
  CDR3 for alpha chain variable domain of TCR clone 31161 (TRAV17, TRAJ53)
CATEGSNYKLTF

SEQ ID NO: 62322 - protein, 11 aa, Homo sapiens
  CDR3 for beta chain variable domain of TCR clone 31161 (TRBV11-2, TRBJ2-2)
CASSLPGELFF

SEQ ID NO: 62323 - protein, 14 aa, Homo sapiens
  CDR3 for alpha chain variable domain of TCR clone 31162 (TRAV12-1, TRAJ17)
CVVNYKAAGNKLTF

SEQ ID NO: 62324 - protein, 15 aa, Homo sapiens
  CDR3 for beta chain variable domain of TCR clone 31162 (TRBV7-9, TRBJ1-4)
CASSRTGGFNEKLFF

SEQ ID NO: 62325 - protein, 17 aa, Homo sapiens
  CDR3 for alpha chain variable domain of TCR clone 31163 (TRAV4, TRAJ42)
CLVGVLNYGGSQGNLLF

SEQ ID NO: 62326 - protein, 12 aa, Homo sapiens
  CDR3 for beta chain variable domain of TCR clone 31163 (TRBV20-1, TRBJ2-1)
CSAQYTYNEQFF

SEQ ID NO: 62327 - protein, 18 aa, Homo sapiens
  CDR3 for alpha chain variable domain of TCR clone 31164 (TRAV26-1, TRAJ5)
CIVRVVPPRDTGRGALTF

SEQ ID NO: 62328 - protein, 15 aa, Homo sapiens
  CDR3 for beta chain variable domain of TCR clone 31164 (TRBV7-9, TRBJ2-7)
CASSLPMGQANEQYF

SEQ ID NO: 62329 - protein, 16 aa, Homo sapiens
  CDR3 for alpha chain variable domain of TCR clone 31165 (TRAV8-3, TRAJ13)
CAVGAYPSGGYQKVTF

SEQ ID NO: 62330 - protein, 15 aa, Homo sapiens
  CDR3 for beta chain variable domain of TCR clone 31165 (TRBV19, TRBJ1-5)
CASIIVWADNQPQHF

SEQ ID NO: 62331 - protein, 11 aa, Homo sapiens
  CDR3 for alpha chain variable domain of TCR clone 31166 (TRAV12-3, TRAJ27)
CAMANAGKSTF

SEQ ID NO: 62332 - protein, 13 aa, Homo sapiens
  CDR3 for beta chain variable domain of TCR clone 31166 (TRBV20-1, TRBJ1-1)
CSARVGGNTEAFS

SEQ ID NO: 62333 - protein, 13 aa, Homo sapiens
  CDR3 for alpha chain variable domain of TCR clone 31167 (TRAV16, TRAJ10)
CAPAREEETNTPL

SEQ ID NO: 62334 - protein, 15 aa, Homo sapiens
  CDR3 for beta chain variable domain of TCR clone 31167 (TRBV6-3, TRBJ2-7)
CASSSPGTVFYEQYF

SEQ ID NO: 62335 - protein, 14 aa, Homo sapiens
  CDR3 for alpha chain variable domain of TCR clone 31168 (TRAV12-2, TRAJ13)
CAVKKTGGYQKVTF

SEQ ID NO: 62336 - protein, 14 aa, Homo sapiens
  CDR3 for beta chain variable domain of TCR clone 31168 (TRBV27, TRBJ2-1)
CSSNGGGSSNEQFF

SEQ ID NO: 62337 - protein, 14 aa, Homo sapiens
  CDR3 for alpha chain variable domain of TCR clone 31169 (TRAV13-1, TRAJ35)
CAASKGGFGNVLHC

SEQ ID NO: 62338 - protein, 12 aa, Homo sapiens
  CDR3 for beta chain variable domain of TCR clone 31169 (TRBV5-5, TRBJ2-5)
CASSYFGETQYF

SEQ ID NO: 62339 - protein, 12 aa, Homo sapiens
  CDR3 for alpha chain variable domain of TCR clone 31170 (TRAV36/DV7, TRAJ54)
CAVVRGAQKLVF

SEQ ID NO: 62340 - protein, 14 aa, Homo sapiens
  CDR3 for beta chain variable domain of TCR clone 31170 (TRBV7-3, TRBJ1-1)
CSSSLKGGNTEAFF

SEQ ID NO: 62341 - protein, 14 aa, Homo sapiens
  CDR3 for alpha chain variable domain of TCR clone 31171 (TRAV21, TRAJ35)
CAVMPIGFGKVLHC

SEQ ID NO: 62342 - protein, 12 aa, Homo sapiens
  CDR3 for beta chain variable domain of TCR clone 31171 (TRBV7-9, TRBJ2-7)
CASSIKREEQYF

SEQ ID NO: 62343 - protein, 12 aa, Homo sapiens
  CDR3 for alpha chain variable domain of TCR clone 31172 (TRAV8-3, TRAJ26)
CAGDNYGQNFVF

SEQ ID NO: 62344 - protein, 15 aa, Homo sapiens
  CDR3 for beta chain variable domain of TCR clone 31172 (TRBV2, TRBJ2-2)
CASSGFGAGTGELFF

SEQ ID NO: 62345 - protein, 15 aa, Homo sapiens
  CDR3 for alpha chain variable domain of TCR clone 31173 (TRAV4, TRAJ39)
CLVGPNSNAGNMLTF

SEQ ID NO: 62346 - protein, 13 aa, Homo sapiens
  CDR3 for beta chain variable domain of TCR clone 31173 (TRBV11-2, TRBJ2-5)
CASSSTGEETQYF

SEQ ID NO: 62347 - protein, 12 aa, Homo sapiens
  CDR3 for alpha chain variable domain of TCR clone 31174 (TRAV13-1, TRAJ44)
VGGGGTASKLTF

SEQ ID NO: 62348 - protein, 14 aa, Homo sapiens
  CDR3 for beta chain variable domain of TCR clone 31174 (TRBV7-2, TRBJ2-5)
CASSPRGSSETQYF

SEQ ID NO: 62349 - protein, 17 aa, Homo sapiens
  CDR3 for alpha chain variable domain of TCR clone 31175 (TRAV13-1, TRAJ28)
CAVSPPYSGAGSYQLTF

SEQ ID NO: 62350 - protein, 12 aa, Homo sapiens
  CDR3 for beta chain variable domain of TCR clone 31175 (TRBV11-2, TRBJ2-2)
CASSLPTGELFF

SEQ ID NO: 62351 - protein, 12 aa, Homo sapiens
  CDR3 for alpha chain variable domain of TCR clone 31176 (TRAV35, TRAJ49)
CAGWNTGNQFYF

SEQ ID NO: 62352 - protein, 16 aa, Homo sapiens
  CDR3 for beta chain variable domain of TCR clone 31176 (TRBV5-1, TRBJ2-2)
CASSLWDTTNTGELFS

SEQ ID NO: 62353 - protein, 13 aa, Homo sapiens
  CDR3 for alpha chain variable domain of TCR clone 31177 (TRAV17, TRAJ9)
CATDYTGGFKTIF

SEQ ID NO: 62354 - protein, 14 aa, Homo sapiens
  CDR3 for beta chain variable domain of TCR clone 31177 (TRBV19, TRBJ2-5)
YASSMTGQQETQYF

SEQ ID NO: 62355 - protein, 13 aa, Homo sapiens
  CDR3 for alpha chain variable domain of TCR clone 31178 (TRAV16, TRAJ29)
CALSRRGNTLLVF

SEQ ID NO: 62356 - protein, 15 aa, Homo sapiens
  CDR3 for beta chain variable domain of TCR clone 31178 (TRBV4-1, TRBJ2-3)
CASSRGQGIPDTQYF

SEQ ID NO: 62357 - protein, 18 aa, Homo sapiens
  CDR3 for alpha chain variable domain of TCR clone 31179 (TRAV29/DV5, TRAJ52)
CAAGFRGAGGTSYGRLTF

SEQ ID NO: 62358 - protein, 16 aa, Homo sapiens
  CDR3 for beta chain variable domain of TCR clone 31179 (TRBV7-3, TRBJ2-2)
CASSLKRGTLSGELFF

SEQ ID NO: 62359 - protein, 14 aa, Homo sapiens
  CDR3 for alpha chain variable domain of TCR clone 31180 (TRAV4, TRAJ9)
CLVGSGTGGFKTIF

SEQ ID NO: 62360 - protein, 17 aa, Homo sapiens
  CDR3 for beta chain variable domain of TCR clone 31180 (TRBV11-2, TRBJ2-1)
CASSLYPPGVEYNEQFF

SEQ ID NO: 62361 - protein, 17 aa, Homo sapiens
  CDR3 for alpha chain variable domain of TCR clone 31181 (TRAV17, TRAJ28)
CATDPRRGGAGSDQLTF

SEQ ID NO: 62362 - protein, 16 aa, Homo sapiens
  CDR3 for beta chain variable domain of TCR clone 31181 (TRBV25-1, TRBJ1-1)
CASSGDRDRGRIEAFF

SEQ ID NO: 62363 - protein, 14 aa, Homo sapiens
  CDR3 for alpha chain variable domain of TCR clone 31182 (TRAV1-2, TRAJ17)
CALRRGAAGNKLTF

SEQ ID NO: 62364 - protein, 16 aa, Homo sapiens
  CDR3 for beta chain variable domain of TCR clone 31182 (TRBV7-3, TRBJ2-2)
CASSLKRGTLSGELFF

SEQ ID NO: 62365 - protein, 10 aa, Homo sapiens
  CDR3 for alpha chain variable domain of TCR clone 31183 (TRAV12-3, TRAJ49)
CAMNDDQFYF

SEQ ID NO: 62366 - protein, 14 aa, Homo sapiens
  CDR3 for beta chain variable domain of TCR clone 31183 (TRBV25-1, TRBJ1-1)
CASTHLGGNTEAFF

SEQ ID NO: 62367 - protein, 13 aa, Homo sapiens
  CDR3 for alpha chain variable domain of TCR clone 31184 (TRAV8-3, TRAJ36)
CAVGATGANNLFF

SEQ ID NO: 62368 - protein, 14 aa, Homo sapiens
  CDR3 for beta chain variable domain of TCR clone 31184 (TRBV7-2, TRBJ2-7)
CASSPKTSFYEQYF

SEQ ID NO: 62369 - protein, 17 aa, Homo sapiens
  CDR3 for alpha chain variable domain of TCR clone 31185 (TRAV4, TRAJ42)
CLLGVLNYGGSQGNLIF

SEQ ID NO: 62370 - protein, 12 aa, Homo sapiens
  CDR3 for beta chain variable domain of TCR clone 31185 (TRBV20-1, TRBJ2-1)
CSAQYTYNEQFF

SEQ ID NO: 62371 - protein, 13 aa, Homo sapiens
  CDR3 for alpha chain variable domain of TCR clone 31186 (TRAV26-1, TRAJ36)
CIVVGTGANNLLF

SEQ ID NO: 62372 - protein, 13 aa, Homo sapiens
  CDR3 for beta chain variable domain of TCR clone 31186 (TRBV6-5, TRBJ2-6)
CASSTSGPLRLDF

SEQ ID NO: 62373 - protein, 11 aa, Homo sapiens
  CDR3 for alpha chain variable domain of TCR clone 31187 (TRAV2, TRAJ33)
CAVDSNYQLIW

SEQ ID NO: 62374 - protein, 12 aa, Homo sapiens
  CDR3 for beta chain variable domain of TCR clone 31187 (TRBV7-8, TRBJ2-7)
CASSLGDREQYF

SEQ ID NO: 62375 - protein, 17 aa, Homo sapiens
  CDR3 for alpha chain variable domain of TCR clone 31188 (TRAV12-3, TRAJ6)
CAMSARGGAGGSYVPTF

SEQ ID NO: 62376 - protein, 12 aa, Homo sapiens
  CDR3 for beta chain variable domain of TCR clone 31188 (TRBV12-4, TRBJ2-3)
CASSTLPDTQYF

SEQ ID NO: 62377 - protein, 13 aa, Homo sapiens
  CDR3 for alpha chain variable domain of TCR clone 31189 (TRAV22, TRAJ29)
CAVRGSGNTPLVF

SEQ ID NO: 62378 - protein, 18 aa, Homo sapiens
  CDR3 for beta chain variable domain of TCR clone 31189 (TRBV10-3, TRBJ2-3)
CAISESRVGPMRGDTQYF

SEQ ID NO: 62379 - protein, 13 aa, Homo sapiens
  CDR3 for alpha chain variable domain of TCR clone 31190 (TRAV12-1, TRAJ40)
RVVPTSGTYKYIF

SEQ ID NO: 62380 - protein, 18 aa, Homo sapiens
  CDR3 for beta chain variable domain of TCR clone 31190 (TRBV7-6, TRBJ2-1)
CASSPRTSGMSSYNEQFF

SEQ ID NO: 62381 - protein, 14 aa, Homo sapiens
  CDR3 for alpha chain variable domain of TCR clone 31191 (TRAV1-2, TRAJ16)
CAVSRFSDGQKLLF

SEQ ID NO: 62382 - protein, 11 aa, Homo sapiens
  CDR3 for beta chain variable domain of TCR clone 31191 (TRBV29-1, TRBJ2-5)
CSEDRTGTQYF

SEQ ID NO: 62383 - protein, 12 aa, Homo sapiens
  CDR3 for alpha chain variable domain of TCR clone 31192 (TRAV9-2, TRAJ26)
CALRGYGKNFVF

SEQ ID NO: 62384 - protein, 12 aa, Homo sapiens
  CDR3 for beta chain variable domain of TCR clone 31192 (TRBV29-1, TRBJ2-3)
CSVTGGADTQYF

SEQ ID NO: 62385 - protein, 13 aa, Homo sapiens
  CDR3 for alpha chain variable domain of TCR clone 31193 (TRAV26-2, TRAJ27)
CILRSTNAGKSTF

SEQ ID NO: 62386 - protein, 16 aa, Homo sapiens
  CDR3 for beta chain variable domain of TCR clone 31193 (TRBV2, TRBJ2-3)
CASSTSVEGVTDTQYF

SEQ ID NO: 62387 - protein, 13 aa, Homo sapiens
  CDR3 for alpha chain variable domain of TCR clone 31194 (TRAV26-1, TRAJ48)
CIVRVVGDEKLTF

SEQ ID NO: 62388 - protein, 19 aa, Homo sapiens
  CDR3 for beta chain variable domain of TCR clone 31194 (TRBV11-3, TRBJ2-2)
CASSTRPGAKTTNTGELLF

SEQ ID NO: 62389 - protein, 12 aa, Homo sapiens
  CDR3 for alpha chain variable domain of TCR clone 31195 (TRAV13-1, TRAJ48)
CAANFGNEKLTL

SEQ ID NO: 62390 - protein, 13 aa, Homo sapiens
  CDR3 for beta chain variable domain of TCR clone 31195 (TRBV7-3, TRBJ1-1)
CASSQDWGAEAFF

SEQ ID NO: 62391 - protein, 13 aa, Homo sapiens
  CDR3 for alpha chain variable domain of TCR clone 31196 (TRAV21, TRAJ20)
CAVGLRVDYKLSF

SEQ ID NO: 62392 - protein, 13 aa, Homo sapiens
  CDR3 for beta chain variable domain of TCR clone 31196 (TRBV6-1, TRBJ1-1)
CASSRQGNTEDFF

SEQ ID NO: 62393 - protein, 18 aa, Homo sapiens
  CDR3 for alpha chain variable domain of TCR clone 31197 (TRAV29/DV5, TRAJ52)
CAAGFRGAGGTSYGKMTF

SEQ ID NO: 62394 - protein, 16 aa, Homo sapiens
  CDR3 for beta chain variable domain of TCR clone 31197 (TRBV7-3, TRBJ2-2)
CASSLKRGTLSGELFF

SEQ ID NO: 62395 - protein, 14 aa, Homo sapiens
  CDR3 for alpha chain variable domain of TCR clone 31198 (TRAV16, TRAJ15)
CALSFNQAGTALIF

SEQ ID NO: 62396 - protein, 16 aa, Homo sapiens
  CDR3 for beta chain variable domain of TCR clone 31198 (TRBV9, TRBJ2-7)
CASSAGPDRSPYEHYF

SEQ ID NO: 62397 - protein, 11 aa, Homo sapiens
  CDR3 for alpha chain variable domain of TCR clone 31199 (TRAV2, TRAJ33)
CAVDSNYQLIW

SEQ ID NO: 62398 - protein, 15 aa, Homo sapiens
  CDR3 for beta chain variable domain of TCR clone 31199 (TRBV19, TRBJ1-2)
CAWSVGQVLNYGYTF

SEQ ID NO: 62399 - protein, 13 aa, Homo sapiens
  CDR3 for alpha chain variable domain of TCR clone 31200 (TRAV21, TRAJ57)
CAVTQGGSEKLVF

SEQ ID NO: 62400 - protein, 16 aa, Homo sapiens
  CDR3 for beta chain variable domain of TCR clone 31200 (TRBV19, TRBJ2-1)
CASSKAGPSSYNEQFF

SEQ ID NO: 62401 - protein, 14 aa, Homo sapiens
  CDR3 for alpha chain variable domain of TCR clone 31201 (TRAV13-1, TRAJ44)
CVAKATGTASKLTF

SEQ ID NO: 62402 - protein, 17 aa, Homo sapiens
  CDR3 for beta chain variable domain of TCR clone 31201 (TRBV7-3, TRBJ2-3)
CASSLMKRMRGADTQYF

SEQ ID NO: 62403 - protein, 17 aa, Homo sapiens
  CDR3 for alpha chain variable domain of TCR clone 31202 (TRAV9-2, TRAJ45)
CALSGYYSGGGADGLTF

SEQ ID NO: 62404 - protein, 17 aa, Homo sapiens
  CDR3 for beta chain variable domain of TCR clone 31202 (TRBV28, TRBJ2-7)
CASSPLHRASGVYEQYF

SEQ ID NO: 62405 - protein, 15 aa, Homo sapiens
  CDR3 for alpha chain variable domain of TCR clone 31203 (TRAV3, TRAJ22)
CAVRDRGGSARQLTF

SEQ ID NO: 62406 - protein, 13 aa, Homo sapiens
  CDR3 for beta chain variable domain of TCR clone 31203 (TRBV12-4, TRBJ1-2)
CTSMPAVSYGYTF

SEQ ID NO: 62407 - protein, 17 aa, Homo sapiens
  CDR3 for alpha chain variable domain of TCR clone 31204 (TRAV3, TRAJ38)
CAVRDCLNAGNKRKLIW

SEQ ID NO: 62408 - protein, 14 aa, Homo sapiens
  CDR3 for beta chain variable domain of TCR clone 31204 (TRBV5-5, TRBJ1-5)
CASSGQGVDQPQHF

SEQ ID NO: 62409 - protein, 15 aa, Homo sapiens
  CDR3 for alpha chain variable domain of TCR clone 31205 (TRAV26-1, TRAJ44)
CIVRANTGTASTLTF

SEQ ID NO: 62410 - protein, 16 aa, Homo sapiens
  CDR3 for beta chain variable domain of TCR clone 31205 (TRBV7-7, TRBJ2-1)
CASSLASGTSYNEQFF

SEQ ID NO: 62411 - protein, 16 aa, Homo sapiens
  CDR3 for alpha chain variable domain of TCR clone 31206 (TRAV4, TRAJ22)
CLVGDLYSGSARQLTF

SEQ ID NO: 62412 - protein, 16 aa, Homo sapiens
  CDR3 for beta chain variable domain of TCR clone 31206 (TRBV7-9, TRBJ2-1)
CASSDVAGGSYNGQFF

SEQ ID NO: 62413 - protein, 14 aa, Homo sapiens
  CDR3 for alpha chain variable domain of TCR clone 31207 (TRAV17, TRAJ6)
CATDASGGSYIPTF

SEQ ID NO: 62414 - protein, 19 aa, Homo sapiens
  CDR3 for beta chain variable domain of TCR clone 31207 (TRBV4-3, TRBJ2-7)
CASSQEFIGWQVTPYGQYF

SEQ ID NO: 62415 - protein, 15 aa, Homo sapiens
  CDR3 for alpha chain variable domain of TCR clone 31208 (TRAV17, TRAJ57)
CATGPSQGGSEKLVF

SEQ ID NO: 62416 - protein, 13 aa, Homo sapiens
  CDR3 for beta chain variable domain of TCR clone 31208 (TRBV5-5, TRBJ1-2)
CASSFWRGEDYTF

SEQ ID NO: 62417 - protein, 14 aa, Homo sapiens
  CDR3 for alpha chain variable domain of TCR clone 31209 (TRAV12-1, TRAJ26)
CVVKGSSYGQNFVF

SEQ ID NO: 62418 - protein, 17 aa, Homo sapiens
  CDR3 for beta chain variable domain of TCR clone 31209 (TRBV11-2, TRBJ2-6)
CASSQRDIFSGANVLTF

SEQ ID NO: 62419 - protein, 16 aa, Homo sapiens
  CDR3 for alpha chain variable domain of TCR clone 31210 (TRAV3, TRAJ21)
CAVRDIERGNCNKFYF

SEQ ID NO: 62420 - protein, 13 aa, Homo sapiens
  CDR3 for beta chain variable domain of TCR clone 31210 (TRBV27, TRBJ2-7)
CASSLTTGYEQYF

SEQ ID NO: 62421 - protein, 14 aa, Homo sapiens
  CDR3 for alpha chain variable domain of TCR clone 31211 (TRAV13-1, TRAJ40)
CAASMTSGTYKNIF

SEQ ID NO: 62422 - protein, 15 aa, Homo sapiens
  CDR3 for beta chain variable domain of TCR clone 31211 (TRBV7-3, TRBJ2-1)
CASSPTGGGEVEQFF

SEQ ID NO: 62423 - protein, 13 aa, Homo sapiens
  CDR3 for alpha chain variable domain of TCR clone 31212 (TRAV12-2, TRAJ9)
CAVWNTGGFKTIF

SEQ ID NO: 62424 - protein, 14 aa, Homo sapiens
  CDR3 for beta chain variable domain of TCR clone 31212 (TRBV7-2, TRBJ2-7)
CASRSQGAAYEQYF

SEQ ID NO: 62425 - protein, 13 aa, Homo sapiens
  CDR3 for alpha chain variable domain of TCR clone 31213 (TRAV23/DV6, TRAJ15)
CAALPAGRNCSAL

SEQ ID NO: 62426 - protein, 14 aa, Homo sapiens
  CDR3 for beta chain variable domain of TCR clone 31213 (TRBV7-9, TRBJ1-2)
CASSRQGANYGYTF

SEQ ID NO: 62427 - protein, 15 aa, Homo sapiens
  CDR3 for alpha chain variable domain of TCR clone 31214 (TRAV2, TRAJ15)
CAVEDREQAGAALIF

SEQ ID NO: 62428 - protein, 14 aa, Homo sapiens
  CDR3 for beta chain variable domain of TCR clone 31214 (TRBV11-2, TRBJ2-7)
CASSLGAGAYEQYF

SEQ ID NO: 62429 - protein, 19 aa, Homo sapiens
  CDR3 for alpha chain variable domain of TCR clone 31215 (TRAV26-1, TRAJ28)
CIVRVAHAYSGAGSYQLTF

SEQ ID NO: 62430 - protein, 15 aa, Homo sapiens
  CDR3 for beta chain variable domain of TCR clone 31215 (TRBV20-1, TRBJ1-1)
CSASRGVTGNTGAFF

SEQ ID NO: 62431 - protein, 14 aa, Homo sapiens
  CDR3 for alpha chain variable domain of TCR clone 31216 (TRAV2, TRAJ9)
CAVEDRSGGFKTIF

SEQ ID NO: 62432 - protein, 13 aa, Homo sapiens
  CDR3 for beta chain variable domain of TCR clone 31216 (TRBV11-2, TRBJ2-5)
CASSSTGEETQYF

SEQ ID NO: 62433 - protein, 13 aa, Homo sapiens
  CDR3 for alpha chain variable domain of TCR clone 31217 (TRAV8-3, TRAJ28)
CAVGAVGSYELTF

SEQ ID NO: 62434 - protein, 14 aa, Homo sapiens
  CDR3 for beta chain variable domain of TCR clone 31217 (TRBV7-2, TRBJ2-7)
CASRSQGAAYEQYF

SEQ ID NO: 62435 - protein, 14 aa, Homo sapiens
  CDR3 for alpha chain variable domain of TCR clone 31218 (TRAV17, TRAJ35)
CATDKPGFGNVLHC

SEQ ID NO: 62436 - protein, 19 aa, Homo sapiens
  CDR3 for beta chain variable domain of TCR clone 31218 (TRBV11-3, TRBJ2-2)
CASSTRPGAKTTNTGELFF

SEQ ID NO: 62437 - protein, 18 aa, Homo sapiens
  CDR3 for alpha chain variable domain of TCR clone 31219 (TRAV26-1, TRAJ23)
CIVRVGLEVWNKGGKLIF

SEQ ID NO: 62438 - protein, 16 aa, Homo sapiens
  CDR3 for beta chain variable domain of TCR clone 31219 (TRBV12-4, TRBJ2-5)
CASSFFVRGRQETQYF

SEQ ID NO: 62439 - protein, 13 aa, Homo sapiens
  CDR3 for alpha chain variable domain of TCR clone 31220 (TRAV13-2, TRAJ13)
CAERPGGYQKVTF

SEQ ID NO: 62440 - protein, 14 aa, Homo sapiens
  CDR3 for beta chain variable domain of TCR clone 31220 (TRBV25-1, TRBJ1-1)
CASTHLGGNTEAFF

SEQ ID NO: 62441 - protein, 14 aa, Homo sapiens
  CDR3 for alpha chain variable domain of TCR clone 31221 (TRAV12-2, TRAJ13)
CAVKRTGGYQKVTF

SEQ ID NO: 62442 - protein, 15 aa, Homo sapiens
  CDR3 for beta chain variable domain of TCR clone 31221 (TRBV9, TRBJ1-6)
CASSVAGTGDSPLHF

SEQ ID NO: 62443 - protein, 12 aa, Homo sapiens
  CDR3 for alpha chain variable domain of TCR clone 31222 (TRAV29/DV5, TRAJ49)
CAATYTGNQFYF

SEQ ID NO: 62444 - protein, 19 aa, Homo sapiens
  CDR3 for beta chain variable domain of TCR clone 31222 (TRBV25-1, TRBJ2-2)
CAILVYRVDRGRKTGELFF

SEQ ID NO: 62445 - protein, 13 aa, Homo sapiens
  CDR3 for alpha chain variable domain of TCR clone 31223 (TRAV8-3, TRAJ43)
CAVVPYNNSDMRF

SEQ ID NO: 62446 - protein, 15 aa, Homo sapiens
  CDR3 for beta chain variable domain of TCR clone 31223 (TRBV2, TRBJ2-7)
CASTLLGSGATEQYF

SEQ ID NO: 62447 - protein, 13 aa, Homo sapiens
  CDR3 for alpha chain variable domain of TCR clone 31224 (TRAV9-2, TRAJ53)
CALGGGSNYKLTF

SEQ ID NO: 62448 - protein, 17 aa, Homo sapiens
  CDR3 for beta chain variable domain of TCR clone 31224 (TRBV11-2, TRBJ2-1)
CASSLYPPGVEYNEQFF

SEQ ID NO: 62449 - protein, 15 aa, Homo sapiens
  CDR3 for alpha chain variable domain of TCR clone 31225 (TRAV26-1, TRAJ12)
IASSELIDSSYKLIF

SEQ ID NO: 62450 - protein, 11 aa, Homo sapiens
  CDR3 for beta chain variable domain of TCR clone 31225 (TRBV7-9, TRBJ2-3)
CASSPPDTQYF

SEQ ID NO: 62451 - protein, 15 aa, Homo sapiens
  CDR3 for alpha chain variable domain of TCR clone 31226 (TRAV23/DV6, TRAJ18)
CAARYRGSTLGRLDF

SEQ ID NO: 62452 - protein, 13 aa, Homo sapiens
  CDR3 for beta chain variable domain of TCR clone 31226 (TRBV7-2, TRBJ2-7)
CASSSPSGSEQYF

SEQ ID NO: 62453 - protein, 14 aa, Homo sapiens
  CDR3 for alpha chain variable domain of TCR clone 31227 (TRAV38-1, TRAJ29)
CAFITPSGNPPLVF

SEQ ID NO: 62454 - protein, 14 aa, Homo sapiens
  CDR3 for beta chain variable domain of TCR clone 31227 (TRBV18, TRBJ2-7)
CASSPRGGAYEQYF

SEQ ID NO: 62455 - protein, 14 aa, Homo sapiens
  CDR3 for alpha chain variable domain of TCR clone 31228 (TRAV26-1, TRAJ38)
CIADNAGNNRKLIW

SEQ ID NO: 62456 - protein, 13 aa, Homo sapiens
  CDR3 for beta chain variable domain of TCR clone 31228 (TRBV20-1, TRBJ1-1)
CSTRGGGNTEAFF

SEQ ID NO: 62457 - protein, 10 aa, Homo sapiens
  CDR3 for alpha chain variable domain of TCR clone 31229 (TRAV1-2, TRAJ20)
CALNDYKLSF

SEQ ID NO: 62458 - protein, 14 aa, Homo sapiens
  CDR3 for beta chain variable domain of TCR clone 31229 (TRBV19, TRBJ2-1)
CASPTFVLSGERFF

SEQ ID NO: 62459 - protein, 12 aa, Homo sapiens
  CDR3 for alpha chain variable domain of TCR clone 31230 (TRAV29/DV5, TRAJ49)
CAATDTGNQFYF

SEQ ID NO: 62460 - protein, 12 aa, Homo sapiens
  CDR3 for beta chain variable domain of TCR clone 31230 (TRBV12-4, TRBJ2-7)
CASSLGGYELYF

SEQ ID NO: 62461 - protein, 13 aa, Homo sapiens
  CDR3 for alpha chain variable domain of TCR clone 31231 (TRAV8-1, TRAJ30)
CAVIMNRDDKIIF

SEQ ID NO: 62462 - protein, 14 aa, Homo sapiens
  CDR3 for beta chain variable domain of TCR clone 31231 (TRBV7-2, TRBJ1-6)
CASSLQGANSHLHF

SEQ ID NO: 62463 - protein, 20 aa, Homo sapiens
  CDR3 for alpha chain variable domain of TCR clone 31232 (TRAV14/DV4, TRAJ22)
CAMREGPFSISSGSARQLTF

SEQ ID NO: 62464 - protein, 13 aa, Homo sapiens
  CDR3 for beta chain variable domain of TCR clone 31232 (TRBV4-2, TRBJ2-3)
CASSQDWRHTQYF

SEQ ID NO: 62465 - protein, 15 aa, Homo sapiens
  CDR3 for alpha chain variable domain of TCR clone 31233 (TRAV2, TRAJ15)
CAVEDRGEAGTALIF

SEQ ID NO: 62466 - protein, 13 aa, Homo sapiens
  CDR3 for beta chain variable domain of TCR clone 31233 (TRBV10-2, TRBJ2-7)
CASGASGGYEQYF

SEQ ID NO: 62467 - protein, 16 aa, Homo sapiens
  CDR3 for alpha chain variable domain of TCR clone 31234 (TRAV3, TRAJ10)
CAVRDMRAGGGNKLTF

SEQ ID NO: 62468 - protein, 17 aa, Homo sapiens
  CDR3 for beta chain variable domain of TCR clone 31234 (TRBV7-8, TRBJ2-6)
CASSAGTGGAGANVLTF

SEQ ID NO: 62469 - protein, 12 aa, Homo sapiens
  CDR3 for alpha chain variable domain of TCR clone 31235 (TRAV12-3, TRAJ20)
CAMVRGDYKLSF

SEQ ID NO: 62470 - protein, 15 aa, Homo sapiens
  CDR3 for beta chain variable domain of TCR clone 31235 (TRBV27, TRBJ2-1)
CASSNGGGSSNEQFF

SEQ ID NO: 62471 - protein, 13 aa, Homo sapiens
  CDR3 for alpha chain variable domain of TCR clone 31236 (TRAV27, TRAJ29)
CAGAHSGNTPLVF

SEQ ID NO: 62472 - protein, 14 aa, Homo sapiens
  CDR3 for beta chain variable domain of TCR clone 31236 (TRBV7-9, TRBJ2-7)
CASSMGQGAGEQYF

SEQ ID NO: 62473 - protein, 14 aa, Homo sapiens
  CDR3 for alpha chain variable domain of TCR clone 31237 (TRAV12-1, TRAJ17)
CVVNYKAAGNKLTF

SEQ ID NO: 62474 - protein, 14 aa, Homo sapiens
  CDR3 for beta chain variable domain of TCR clone 31237 (TRBV28, TRBJ2-1)
CASSPSTGYNEQSF

SEQ ID NO: 62475 - protein, 12 aa, Homo sapiens
  CDR3 for alpha chain variable domain of TCR clone 31238 (TRAV2, TRAJ31)
CAVEDNNARLIF

SEQ ID NO: 62476 - protein, 16 aa, Homo sapiens
  CDR3 for beta chain variable domain of TCR clone 31238 (TRBV10-3, TRBJ2-1)
CAISGVGDGGGGEQFF

SEQ ID NO: 62477 - protein, 12 aa, Homo sapiens
  CDR3 for alpha chain variable domain of TCR clone 31239 (TRAV2, TRAJ9)
CAVGAGGFKTIF

SEQ ID NO: 62478 - protein, 16 aa, Homo sapiens
  CDR3 for beta chain variable domain of TCR clone 31239 (TRBV13, TRBJ2-2)
CASSARTGEHTGELFF

SEQ ID NO: 62479 - protein, 15 aa, Homo sapiens
  CDR3 for alpha chain variable domain of TCR clone 31240 (TRAV2, TRAJ15)
CAVEDRGQAGTAMIF

SEQ ID NO: 62480 - protein, 13 aa, Homo sapiens
  CDR3 for beta chain variable domain of TCR clone 31240 (TRBV10-2, TRBJ2-7)
CASGASGGYEQYF

SEQ ID NO: 62481 - protein, 14 aa, Homo sapiens
  CDR3 for alpha chain variable domain of TCR clone 31241 (TRAV17, TRAJ39)
CATDPVRAGNMLTF

SEQ ID NO: 62482 - protein, 15 aa, Homo sapiens
  CDR3 for beta chain variable domain of TCR clone 31241 (TRBV13, TRBJ1-5)
CASSFGQGGAQPQHF

SEQ ID NO: 62483 - protein, 16 aa, Homo sapiens
  CDR3 for alpha chain variable domain of TCR clone 31242 (TRAV12-2, TRAJ28)
CAVITDSGAGSYQLTF

SEQ ID NO: 62484 - protein, 14 aa, Homo sapiens
  CDR3 for beta chain variable domain of TCR clone 31242 (TRBV25-1, TRBJ1-1)
CASTHLGGNTGAFF

SEQ ID NO: 62485 - protein, 11 aa, Homo sapiens
  CDR3 for alpha chain variable domain of TCR clone 31243 (TRAV12-2, TRAJ31)
CDVTRWARLMF

SEQ ID NO: 62486 - protein, 15 aa, Homo sapiens
  CDR3 for beta chain variable domain of TCR clone 31243 (TRBV19, TRBJ2-7)
CASSIGGGLVNEQYF

SEQ ID NO: 62487 - protein, 11 aa, Homo sapiens
  CDR3 for alpha chain variable domain of TCR clone 31244 (TRAV2, TRAJ33)
CAVDSNYQLIW

SEQ ID NO: 62488 - protein, 17 aa, Homo sapiens
  CDR3 for beta chain variable domain of TCR clone 31244 (TRBV20-1, TRBJ2-3)
CSARDGWNAKEGDTQYF

SEQ ID NO: 62489 - protein, 16 aa, Homo sapiens
  CDR3 for alpha chain variable domain of TCR clone 31245 (TRAV26-1, TRAJ37)
CIVRGDGSGNTGKLIF

SEQ ID NO: 62490 - protein, 16 aa, Homo sapiens
  CDR3 for beta chain variable domain of TCR clone 31245 (TRBV5-1, TRBJ1-3)
CASSPWAPSSGNTIYF

SEQ ID NO: 62491 - protein, 15 aa, Homo sapiens
  CDR3 for alpha chain variable domain of TCR clone 31246 (TRAV8-2, TRAJ40)
CVVLGATSGTYKYIF

SEQ ID NO: 62492 - protein, 16 aa, Homo sapiens
  CDR3 for beta chain variable domain of TCR clone 31246 (TRBV7-3, TRBJ2-1)
CASSLEGYRSYNEQFF

SEQ ID NO: 62493 - protein, 13 aa, Homo sapiens
  CDR3 for alpha chain variable domain of TCR clone 31247 (TRAV26-2, TRAJ54)
CIPRVGGAQKLVF

SEQ ID NO: 62494 - protein, 16 aa, Homo sapiens
  CDR3 for beta chain variable domain of TCR clone 31247 (TRBV4-1, TRBJ1-1)
CASSPMSERPNTEAFF

SEQ ID NO: 62495 - protein, 17 aa, Homo sapiens
  CDR3 for alpha chain variable domain of TCR clone 31248 (TRAV3, TRAJ38)
CAVRDCLNAGNNRKLIW

SEQ ID NO: 62496 - protein, 13 aa, Homo sapiens
  CDR3 for beta chain variable domain of TCR clone 31248 (TRBV7-3, TRBJ1-1)
CASSQDWGAEAFF

SEQ ID NO: 62497 - protein, 13 aa, Homo sapiens
  CDR3 for alpha chain variable domain of TCR clone 31249 (TRAV21, TRAJ27)
CAARPGNAGKSTF

SEQ ID NO: 62498 - protein, 13 aa, Homo sapiens
  CDR3 for beta chain variable domain of TCR clone 31249 (TRBV12-4, TRBJ2-5)
CASRLAVQETQYF

SEQ ID NO: 62499 - protein, 14 aa, Homo sapiens
  CDR3 for alpha chain variable domain of TCR clone 31250 (TRAV1-2, TRAJ16)
CAVNRFSDGQKLLF

SEQ ID NO: 62500 - protein, 15 aa, Homo sapiens
  CDR3 for beta chain variable domain of TCR clone 31250 (TRBV2, TRBJ2-3)
CASSDFEKATDTQYF

SEQ ID NO: 62501 - protein, 11 aa, Homo sapiens
  CDR3 for alpha chain variable domain of TCR clone 31251 (TRAV13-2, TRAJ36)
CAETGANNLFF

SEQ ID NO: 62502 - protein, 13 aa, Homo sapiens
  CDR3 for beta chain variable domain of TCR clone 31251 (TRBV7-9, TRBJ2-4)
CATEGLAGNSQYF

SEQ ID NO: 62503 - protein, 15 aa, Homo sapiens
  CDR3 for alpha chain variable domain of TCR clone 31252 (TRAV12-3, TRAJ6)
CAMSATTGGSYIPTF

SEQ ID NO: 62504 - protein, 15 aa, Homo sapiens
  CDR3 for beta chain variable domain of TCR clone 31252 (TRBV19, TRBJ1-6)
CASSTQGAVGSPLHF

SEQ ID NO: 62505 - protein, 20 aa, Homo sapiens
  CDR3 for alpha chain variable domain of TCR clone 31253 (TRAV12-1, TRAJ42)
SSVIQPPTSAKGGSQGNLIF

SEQ ID NO: 62506 - protein, 18 aa, Homo sapiens
  CDR3 for beta chain variable domain of TCR clone 31253 (TRBV11-2, TRBJ2-3)
CASSLGGASRGAPNTQYF

SEQ ID NO: 62507 - protein, 14 aa, Homo sapiens
  CDR3 for alpha chain variable domain of TCR clone 31254 (TRAV23/DV6, TRAJ24)
CAASLSDSWGKLQF

SEQ ID NO: 62508 - protein, 18 aa, Homo sapiens
  CDR3 for beta chain variable domain of TCR clone 31254 (TRBV7-9, TRBJ1-2)
CASSSIAGTSQANYGYTF

SEQ ID NO: 62509 - protein, 16 aa, Homo sapiens
  CDR3 for alpha chain variable domain of TCR clone 31255 (TRAV3, TRAJ18)
CAVRDGRGSTLGRLYF

SEQ ID NO: 62510 - protein, 17 aa, Homo sapiens
  CDR3 for beta chain variable domain of TCR clone 31255 (TRBV5-1, TRBJ2-3)
CASSRIGLADRTDTQYF

SEQ ID NO: 62511 - protein, 14 aa, Homo sapiens
  CDR3 for alpha chain variable domain of TCR clone 31256 (TRAV1-2, TRAJ16)
CAVNRFSDGQKLLF

SEQ ID NO: 62512 - protein, 15 aa, Homo sapiens
  CDR3 for beta chain variable domain of TCR clone 31256 (TRBV7-9, TRBJ1-6)
CASSSRGRGNSPLHF

SEQ ID NO: 62513 - protein, 16 aa, Homo sapiens
  CDR3 for alpha chain variable domain of TCR clone 31257 (TRAV3, TRAJ37)
CAVRPHGSGDTGKLIF

SEQ ID NO: 62514 - protein, 16 aa, Homo sapiens
  CDR3 for beta chain variable domain of TCR clone 31257 (TRBV9, TRBJ1-2)
CASSVEEKVSPYGYTF

SEQ ID NO: 62515 - protein, 12 aa, Homo sapiens
  CDR3 for alpha chain variable domain of TCR clone 31258 (TRAV12-3, TRAJ17)
CAMTLTGNKLTF

SEQ ID NO: 62516 - protein, 15 aa, Homo sapiens
  CDR3 for beta chain variable domain of TCR clone 31258 (TRBV20-1, TRBJ2-7)
CSASDRVAGMDEQYF

SEQ ID NO: 62517 - protein, 13 aa, Homo sapiens
  CDR3 for alpha chain variable domain of TCR clone 31259 (TRAV27, TRAJ45)
CRSSGVGADGLTF

SEQ ID NO: 62518 - protein, 17 aa, Homo sapiens
  CDR3 for beta chain variable domain of TCR clone 31259 (TRBV11-2, TRBJ2-1)
CASSLYPPGVEYNEQFF

SEQ ID NO: 62519 - protein, 10 aa, Homo sapiens
  CDR3 for alpha chain variable domain of TCR clone 31260 (TRAV30, TRAJ34)
CGTNPDKLIF

SEQ ID NO: 62520 - protein, 12 aa, Homo sapiens
  CDR3 for beta chain variable domain of TCR clone 31260 (TRBV19, TRBJ1-1)
CASSLSDTEALF

SEQ ID NO: 62521 - protein, 14 aa, Homo sapiens
  CDR3 for alpha chain variable domain of TCR clone 31261 (TRAV12-1, TRAJ10)
CVVNSAGGGKKLTF

SEQ ID NO: 62522 - protein, 14 aa, Homo sapiens
  CDR3 for beta chain variable domain of TCR clone 31261 (TRBV12-4, TRBJ1-1)
CASSLGTGGTEAFF

SEQ ID NO: 62523 - protein, 18 aa, Homo sapiens
  CDR3 for alpha chain variable domain of TCR clone 31262 (TRAV13-1, TRAJ52)
CAAKNPNAGGTSYGKLTI

SEQ ID NO: 62524 - protein, 15 aa, Homo sapiens
  CDR3 for beta chain variable domain of TCR clone 31262 (TRBV6-1, TRBJ2-3)
CASSERGGITDTQYF

SEQ ID NO: 62525 - protein, 16 aa, Homo sapiens
  CDR3 for alpha chain variable domain of TCR clone 31263 (TRAV8-1, TRAJ39)
CAVNVPSYNAGNMLTF

SEQ ID NO: 62526 - protein, 15 aa, Homo sapiens
  CDR3 for beta chain variable domain of TCR clone 31263 (TRBV4-1, TRBJ2-3)
CASRSTRAGIDTQYF

SEQ ID NO: 62527 - protein, 14 aa, Homo sapiens
  CDR3 for alpha chain variable domain of TCR clone 31264 (TRAV8-3, TRAJ6)
CAVGASGGRYIPTF

SEQ ID NO: 62528 - protein, 17 aa, Homo sapiens
  CDR3 for beta chain variable domain of TCR clone 31264 (TRBV18, TRBJ2-2)
CASSPSDPWQNTGELFF

SEQ ID NO: 62529 - protein, 14 aa, Homo sapiens
  CDR3 for alpha chain variable domain of TCR clone 31265 (TRAV12-1, TRAJ23)
CVVTVYNQGGKLIF

SEQ ID NO: 62530 - protein, 13 aa, Homo sapiens
  CDR3 for beta chain variable domain of TCR clone 31265 (TRBV11-2, TRBJ2-5)
CASSFSSQETQYF

SEQ ID NO: 62531 - protein, 16 aa, Homo sapiens
  CDR3 for alpha chain variable domain of TCR clone 31266 (TRAV35, TRAJ28)
CAGQRYSGAGSYQLTF

SEQ ID NO: 62532 - protein, 14 aa, Homo sapiens
  CDR3 for beta chain variable domain of TCR clone 31266 (TRBV28, TRBJ1-1)
CASSPPHWGTEAFF

SEQ ID NO: 62533 - protein, 17 aa, Homo sapiens
  CDR3 for alpha chain variable domain of TCR clone 31267 (TRAV12-3, TRAJ6)
CAMSAKGGAGGSYIPTF

SEQ ID NO: 62534 - protein, 12 aa, Homo sapiens
  CDR3 for beta chain variable domain of TCR clone 31267 (TRBV12-4, TRBJ2-3)
CASSTLPDTQYF

SEQ ID NO: 62535 - protein, 13 aa, Homo sapiens
  CDR3 for alpha chain variable domain of TCR clone 31268 (TRAV13-1, TRAJ48)
CARSNFGNEKLTF

SEQ ID NO: 62536 - protein, 14 aa, Homo sapiens
  CDR3 for beta chain variable domain of TCR clone 31268 (TRBV7-3, TRBJ2-2)
CASILLGSTGELFF

SEQ ID NO: 62537 - protein, 13 aa, Homo sapiens
  CDR3 for alpha chain variable domain of TCR clone 31269 (TRAV2, TRAJ11)
CAVEEIGYSTLTF

SEQ ID NO: 62538 - protein, 17 aa, Homo sapiens
  CDR3 for beta chain variable domain of TCR clone 31269 (TRBV7-2, TRBJ2-1)
CASGRGTSGAVGWEQFF

SEQ ID NO: 62539 - protein, 12 aa, Homo sapiens
  CDR3 for alpha chain variable domain of TCR clone 31270 (TRAV6, TRAJ37)
RALGSNTGKLIF

SEQ ID NO: 62540 - protein, 17 aa, Homo sapiens
  CDR3 for beta chain variable domain of TCR clone 31270 (TRBV19, TRBJ2-2)
CASSTLVGDRVSGELFF

SEQ ID NO: 62541 - protein, 15 aa, Homo sapiens
  CDR3 for alpha chain variable domain of TCR clone 31271 (TRAV26-1, TRAJ29)
CIVRVEGSGNTPLVF

SEQ ID NO: 62542 - protein, 16 aa, Homo sapiens
  CDR3 for beta chain variable domain of TCR clone 31271 (TRBV13, TRBJ2-2)
CASSPRTGEHTGELFF

SEQ ID NO: 62543 - protein, 12 aa, Homo sapiens
  CDR3 for alpha chain variable domain of TCR clone 31272 (TRAV26-2, TRAJ21)
CILKGNFNKFYF

SEQ ID NO: 62544 - protein, 14 aa, Homo sapiens
  CDR3 for beta chain variable domain of TCR clone 31272 (TRBV7-9, TRBJ1-1)
CACTPLQSYTEAFF

SEQ ID NO: 62545 - protein, 11 aa, Homo sapiens
  CDR3 for alpha chain variable domain of TCR clone 31273 (TRAV8-6, TRAJ13)
CALGIYQKVTF

SEQ ID NO: 62546 - protein, 16 aa, Homo sapiens
  CDR3 for beta chain variable domain of TCR clone 31273 (TRBV18, TRBJ1-1)
CASSPGVGGRGGEAFF

SEQ ID NO: 62547 - protein, 15 aa, Homo sapiens
  CDR3 for alpha chain variable domain of TCR clone 31274 (TRAV21, TRAJ52)
CAVRGGGTSYGKLTS

SEQ ID NO: 62548 - protein, 15 aa, Homo sapiens
  CDR3 for beta chain variable domain of TCR clone 31274 (TRBV18, TRBJ1-5)
CASSPSDRSNQPQHF

SEQ ID NO: 62549 - protein, 12 aa, Homo sapiens
  CDR3 for alpha chain variable domain of TCR clone 31275 (TRAV29/DV5, TRAJ15)
CASNQAGPALIF

SEQ ID NO: 62550 - protein, 15 aa, Homo sapiens
  CDR3 for beta chain variable domain of TCR clone 31275 (TRBV11-2, TRBJ2-2)
CASSSDRVNAGELFF

SEQ ID NO: 62551 - protein, 13 aa, Homo sapiens
  CDR3 for alpha chain variable domain of TCR clone 31276 (TRAV13-2, TRAJ48)
RAEMDFGNEKLTF

SEQ ID NO: 62552 - protein, 15 aa, Homo sapiens
  CDR3 for beta chain variable domain of TCR clone 31276 (TRBV7-9, TRBJ1-6)
CASSSPGRGNSPLHF

SEQ ID NO: 62553 - protein, 13 aa, Homo sapiens
  CDR3 for alpha chain variable domain of TCR clone 31277 (TRAV38-2/DV8, TRAJ34)
CAYRTWNTDKLIF

SEQ ID NO: 62554 - protein, 15 aa, Homo sapiens
  CDR3 for beta chain variable domain of TCR clone 31277 (TRBV3-1, TRBJ2-7)
CASSQVAGAQYEQYF

SEQ ID NO: 62555 - protein, 15 aa, Homo sapiens
  CDR3 for alpha chain variable domain of TCR clone 31278 (TRAV21, TRAJ24)
FAARSSTDSWGKLQF

SEQ ID NO: 62556 - protein, 13 aa, Homo sapiens
  CDR3 for beta chain variable domain of TCR clone 31278 (TRBV11-2, TRBJ2-5)
CASSSTGEETQYF

SEQ ID NO: 62557 - protein, 15 aa, Homo sapiens
  CDR3 for alpha chain variable domain of TCR clone 31279 (TRAV17, TRAJ28)
CATDAYGAGSYQLTF

SEQ ID NO: 62558 - protein, 16 aa, Homo sapiens
  CDR3 for beta chain variable domain of TCR clone 31279 (TRBV2, TRBJ1-5)
CASSELHKSGFQPQHF

SEQ ID NO: 62559 - protein, 15 aa, Homo sapiens
  CDR3 for alpha chain variable domain of TCR clone 31280 (TRAV8-3, TRAJ11)
CAVGLLNSGYSTITF

SEQ ID NO: 62560 - protein, 16 aa, Homo sapiens
  CDR3 for beta chain variable domain of TCR clone 31280 (TRBV7-9, TRBJ1-2)
CASSLGFSSGEDGYTF

SEQ ID NO: 62561 - protein, 19 aa, Homo sapiens
  CDR3 for alpha chain variable domain of TCR clone 31281 (TRAV38-1, TRAJ53)
CAFMKHGLESGGGNYKLTF

SEQ ID NO: 62562 - protein, 13 aa, Homo sapiens
  CDR3 for beta chain variable domain of TCR clone 31281 (TRBV19, TRBJ2-7)
CASSPRQSYEQYF

SEQ ID NO: 62563 - protein, 14 aa, Homo sapiens
  CDR3 for alpha chain variable domain of TCR clone 31282 (TRAV16, TRAJ17)
CALSGRAAGNKITF

SEQ ID NO: 62564 - protein, 15 aa, Homo sapiens
  CDR3 for beta chain variable domain of TCR clone 31282 (TRBV3-1, TRBJ1-2)
CASSPTRLPEGGYTF

SEQ ID NO: 62565 - protein, 11 aa, Homo sapiens
  CDR3 for alpha chain variable domain of TCR clone 31283 (TRAV4, TRAJ31)
CLGGDNARLMF

SEQ ID NO: 62566 - protein, 16 aa, Homo sapiens
  CDR3 for beta chain variable domain of TCR clone 31283 (TRBV7-2, TRBJ2-5)
CASSSKWLSGQETQYF

SEQ ID NO: 62567 - protein, 12 aa, Homo sapiens
  CDR3 for alpha chain variable domain of TCR clone 31284 (TRAV12-1, TRAJ22)
CGLFCSARQLTF

SEQ ID NO: 62568 - protein, 10 aa, Homo sapiens
  CDR3 for beta chain variable domain of TCR clone 31284 (TRBV6-3, TRBJ2-2)
CASRDGELFF

SEQ ID NO: 62569 - protein, 12 aa, Homo sapiens
  CDR3 for alpha chain variable domain of TCR clone 31285 (TRAV13-1, TRAJ49)
CAASPMGNQSYF

SEQ ID NO: 62570 - protein, 13 aa, Homo sapiens
  CDR3 for beta chain variable domain of TCR clone 31285 (TRBV20-1, TRBJ2-2)
RSASAAGTGELFF

SEQ ID NO: 62571 - protein, 14 aa, Homo sapiens
  CDR3 for alpha chain variable domain of TCR clone 31286 (TRAV12-2, TRAJ13)
CAVKKTGGYQKVTF

SEQ ID NO: 62572 - protein, 15 aa, Homo sapiens
  CDR3 for beta chain variable domain of TCR clone 31286 (TRBV19, TRBJ1-6)
CASSTQGAVGPPLHF

SEQ ID NO: 62573 - protein, 14 aa, Homo sapiens
  CDR3 for alpha chain variable domain of TCR clone 31287 (TRAV12-2, TRAJ45)
CAVNIGGGADGLTF

SEQ ID NO: 62574 - protein, 13 aa, Homo sapiens
  CDR3 for beta chain variable domain of TCR clone 31287 (TRBV19, TRBJ2-2)
CASSIWSTGELFL

SEQ ID NO: 62575 - protein, 15 aa, Homo sapiens
  CDR3 for alpha chain variable domain of TCR clone 31288 (TRAV38-2/DV8, TRAJ45)
CAYWDSGGGADGLAF

SEQ ID NO: 62576 - protein, 16 aa, Homo sapiens
  CDR3 for beta chain variable domain of TCR clone 31288 (TRBV19, TRBJ1-1)
CASSPTRFWPGTEAFF

SEQ ID NO: 62577 - protein, 12 aa, Homo sapiens
  CDR3 for alpha chain variable domain of TCR clone 31289 (TRAV3, TRAJ20)
CAVRDPDYKLSF

SEQ ID NO: 62578 - protein, 12 aa, Homo sapiens
  CDR3 for beta chain variable domain of TCR clone 31289 (TRBV12-5, TRBJ2-3)
CASGGAADTQYF

SEQ ID NO: 62579 - protein, 13 aa, Homo sapiens
  CDR3 for alpha chain variable domain of TCR clone 31290 (TRAV3, TRAJ21)
CVVATSTNFTLDL

SEQ ID NO: 62580 - protein, 16 aa, Homo sapiens
  CDR3 for beta chain variable domain of TCR clone 31290 (TRBV19, TRBJ2-1)
CASSKAGPSSYNEQFF

SEQ ID NO: 62581 - protein, 14 aa, Homo sapiens
  CDR3 for alpha chain variable domain of TCR clone 31291 (TRAV20, TRAJ42)
CAVQAGGSQGNLIF

SEQ ID NO: 62582 - protein, 14 aa, Homo sapiens
  CDR3 for beta chain variable domain of TCR clone 31291 (TRBV7-2, TRBJ2-5)
CASSTGGELKTQYF

SEQ ID NO: 62583 - protein, 14 aa, Homo sapiens
  CDR3 for alpha chain variable domain of TCR clone 31292 (TRAV35, TRAJ13)
CAGSPSGGYHKVTF

SEQ ID NO: 62584 - protein, 13 aa, Homo sapiens
  CDR3 for beta chain variable domain of TCR clone 31292 (TRBV29-1, TRBJ1-1)
CSVGDSRNTEAFF

SEQ ID NO: 62585 - protein, 14 aa, Homo sapiens
  CDR3 for alpha chain variable domain of TCR clone 31293 (TRAV12-2, TRAJ13)
CAVKKTGGYQKVTF

SEQ ID NO: 62586 - protein, 13 aa, Homo sapiens
  CDR3 for beta chain variable domain of TCR clone 31293 (TRBV11-2, TRBJ2-5)
CASSFSSQETQYF

SEQ ID NO: 62587 - protein, 12 aa, Homo sapiens
  CDR3 for alpha chain variable domain of TCR clone 31294 (TRAV13-1, TRAJ49)
CAASPLGNQFYF

SEQ ID NO: 62588 - protein, 13 aa, Homo sapiens
  CDR3 for beta chain variable domain of TCR clone 31294 (TRBV20-1, TRBJ2-2)
CSASAAGTGELFF

SEQ ID NO: 62589 - protein, 13 aa, Homo sapiens
  CDR3 for alpha chain variable domain of TCR clone 31295 (TRAV3, TRAJ20)
CAVGDTGDYKLSF

SEQ ID NO: 62590 - protein, 15 aa, Homo sapiens
  CDR3 for beta chain variable domain of TCR clone 31295 (TRBV6-1, TRBJ2-7)
CASSEGGGVSYEQYF

SEQ ID NO: 62591 - protein, 13 aa, Homo sapiens
  CDR3 for alpha chain variable domain of TCR clone 31296 (TRAV20, TRAJ54)
CAVQAGGSQKLVF

SEQ ID NO: 62592 - protein, 14 aa, Homo sapiens
  CDR3 for beta chain variable domain of TCR clone 31296 (TRBV20-1, TRBJ2-7)
CSAKTGTGGYEQYF

SEQ ID NO: 62593 - protein, 12 aa, Homo sapiens
  CDR3 for alpha chain variable domain of TCR clone 31297 (TRAV12-3, TRAJ17)
CAMTLTGNKLTF

SEQ ID NO: 62594 - protein, 15 aa, Homo sapiens
  CDR3 for beta chain variable domain of TCR clone 31297 (TRBV5-1, TRBJ2-2)
CASSSQGGNTGELFF

SEQ ID NO: 62595 - protein, 11 aa, Homo sapiens
  CDR3 for alpha chain variable domain of TCR clone 31298 (TRAV16, TRAJ31)
CALFNNARLMF

SEQ ID NO: 62596 - protein, 15 aa, Homo sapiens
  CDR3 for beta chain variable domain of TCR clone 31298 (TRBV18, TRBJ1-1)
SASSPRQGENTEAFF

SEQ ID NO: 62597 - protein, 15 aa, Homo sapiens
  CDR3 for alpha chain variable domain of TCR clone 31299 (TRAV8-3, TRAJ6)
CAVGPLGGGSYIPTF

SEQ ID NO: 62598 - protein, 14 aa, Homo sapiens
  CDR3 for beta chain variable domain of TCR clone 31299 (TRBV19, TRBJ2-2)
CASSTVQGAGELFF

SEQ ID NO: 62599 - protein, 17 aa, Homo sapiens
  CDR3 for alpha chain variable domain of TCR clone 31300 (TRAV12-2, TRAJ6)
CSPQGPPRAGGSYIPTF

SEQ ID NO: 62600 - protein, 16 aa, Homo sapiens
  CDR3 for beta chain variable domain of TCR clone 31300 (TRBV19, TRBJ2-2)
CASSTARASNTGELFF

SEQ ID NO: 62601 - protein, 13 aa, Homo sapiens
  CDR3 for alpha chain variable domain of TCR clone 31301 (TRAV27, TRAJ41)
CAGEGNSGYALNF

SEQ ID NO: 62602 - protein, 11 aa, Homo sapiens
  CDR3 for beta chain variable domain of TCR clone 31301 (TRBV19, TRBJ1-1)
CASSIGSEAFF

SEQ ID NO: 62603 - protein, 12 aa, Homo sapiens
  CDR3 for alpha chain variable domain of TCR clone 31302 (TRAV13-1, TRAJ49)
CAAPNTGNKFYF

SEQ ID NO: 62604 - protein, 17 aa, Homo sapiens
  CDR3 for beta chain variable domain of TCR clone 31302 (TRBV25-1, TRBJ2-7)
CASSDARVVFSSYEQYF

SEQ ID NO: 62605 - protein, 15 aa, Homo sapiens
  CDR3 for alpha chain variable domain of TCR clone 31303 (TRAV4, TRAJ39)
CLVGPNNNAGNMLTF

SEQ ID NO: 62606 - protein, 13 aa, Homo sapiens
  CDR3 for beta chain variable domain of TCR clone 31303 (TRBV11-2, TRBJ2-5)
CASSSTGEETRYF

SEQ ID NO: 62607 - protein, 13 aa, Homo sapiens
  CDR3 for alpha chain variable domain of TCR clone 31304 (TRAV27, TRAJ42)
CAGARGGQGNLIF

SEQ ID NO: 62608 - protein, 15 aa, Homo sapiens
  CDR3 for beta chain variable domain of TCR clone 31304 (TRBV10-3, TRBJ2-2)
CAIRTDREDTGELFF

SEQ ID NO: 62609 - protein, 13 aa, Homo sapiens
  CDR3 for alpha chain variable domain of TCR clone 31305 (TRAV21, TRAJ20)
CAVGLRVDYKLSF

SEQ ID NO: 62610 - protein, 13 aa, Homo sapiens
  CDR3 for beta chain variable domain of TCR clone 31305 (TRBV6-1, TRBJ1-1)
CASSRQGNTETFF

SEQ ID NO: 62611 - protein, 11 aa, Homo sapiens
  CDR3 for alpha chain variable domain of TCR clone 31306 (TRAV1-1, TRAJ16)
CAAGDGQKLLF

SEQ ID NO: 62612 - protein, 15 aa, Homo sapiens
  CDR3 for beta chain variable domain of TCR clone 31306 (TRBV28, TRBJ1-2)
CASIPQGSDDYGYTL

SEQ ID NO: 62613 - protein, 15 aa, Homo sapiens
  CDR3 for alpha chain variable domain of TCR clone 31307 (TRAV27, TRAJ38)
CAACRNAGNNHKLIW

SEQ ID NO: 62614 - protein, 13 aa, Homo sapiens
  CDR3 for beta chain variable domain of TCR clone 31307 (TRBV12-5, TRBJ2-3)
CASGDRQSDTQYF

SEQ ID NO: 62615 - protein, 14 aa, Homo sapiens
  CDR3 for alpha chain variable domain of TCR clone 31308 (TRAV9-2, TRAJ27)
CALGRNTNAGKSTF

SEQ ID NO: 62616 - protein, 15 aa, Homo sapiens
  CDR3 for beta chain variable domain of TCR clone 31308 (TRBV20-1, TRBJ2-1)
CSAEGGLLAGDEQFF

SEQ ID NO: 62617 - protein, 18 aa, Homo sapiens
  CDR3 for alpha chain variable domain of TCR clone 31309 (TRAV26-1, TRAJ52)
CIVRVEGAGGTSYGKLTF

SEQ ID NO: 62618 - protein, 13 aa, Homo sapiens
  CDR3 for beta chain variable domain of TCR clone 31309 (TRBV7-3, TRBJ1-2)
CASSLKRGYGCTF

SEQ ID NO: 62619 - protein, 14 aa, Homo sapiens
  CDR3 for alpha chain variable domain of TCR clone 31310 (TRAV35, TRAJ22)
CAGLRPGSARQLTF

SEQ ID NO: 62620 - protein, 13 aa, Homo sapiens
  CDR3 for beta chain variable domain of TCR clone 31310 (TRBV20-1, TRBJ1-1)
CSARGGGNTEALF

SEQ ID NO: 62621 - protein, 12 aa, Homo sapiens
  CDR3 for alpha chain variable domain of TCR clone 31311 (TRAV8-6, TRAJ43)
CAVPNNNNDMRF

SEQ ID NO: 62622 - protein, 15 aa, Homo sapiens
  CDR3 for beta chain variable domain of TCR clone 31311 (TRBV7-3, TRBJ2-6)
CASSLGGSGANVLTF

SEQ ID NO: 62623 - protein, 12 aa, Homo sapiens
  CDR3 for alpha chain variable domain of TCR clone 31312 (TRAV21, TRAJ29)
CAVTSGNTPLVF

SEQ ID NO: 62624 - protein, 15 aa, Homo sapiens
  CDR3 for beta chain variable domain of TCR clone 31312 (TRBV12-4, TRBJ1-2)
CARRLGVAGSYGYTF

SEQ ID NO: 62625 - protein, 21 aa, Homo sapiens
  CDR3 for alpha chain variable domain of TCR clone 31313 (TRAV30, TRAJ43)
GLPAQLLRNLLPIIELNDMRF

SEQ ID NO: 62626 - protein, 16 aa, Homo sapiens
  CDR3 for beta chain variable domain of TCR clone 31313 (TRBV19, TRBJ2-1)
CASSKAGPSSYNEQFF

SEQ ID NO: 62627 - protein, 13 aa, Homo sapiens
  CDR3 for alpha chain variable domain of TCR clone 31314 (TRAV16, TRAJ11)
CALTQSGYSGLTF

SEQ ID NO: 62628 - protein, 14 aa, Homo sapiens
  CDR3 for beta chain variable domain of TCR clone 31314 (TRBV19, TRBJ2-7)
CASSTTRSSYEQYF

SEQ ID NO: 62629 - protein, 12 aa, Homo sapiens
  CDR3 for alpha chain variable domain of TCR clone 31315 (TRAV21, TRAJ49)
CAVNDGGNQFYF

SEQ ID NO: 62630 - protein, 14 aa, Homo sapiens
  CDR3 for beta chain variable domain of TCR clone 31315 (TRBV18, TRBJ2-7)
CASSPRGGTYEQYF

SEQ ID NO: 62631 - protein, 12 aa, Homo sapiens
  CDR3 for alpha chain variable domain of TCR clone 31316 (TRAV13-1, TRAJ49)
CAASPMGNQVYF

SEQ ID NO: 62632 - protein, 13 aa, Homo sapiens
  CDR3 for beta chain variable domain of TCR clone 31316 (TRBV20-1, TRBJ2-2)
CSASAAGTGELFF

SEQ ID NO: 62633 - protein, 14 aa, Homo sapiens
  CDR3 for alpha chain variable domain of TCR clone 31317 (TRAV16, TRAJ33)
CALSAMDSNYQLIW

SEQ ID NO: 62634 - protein, 15 aa, Homo sapiens
  CDR3 for beta chain variable domain of TCR clone 31317 (TRBV28, TRBJ2-7)
CASSLEAYHIYEQYF

SEQ ID NO: 62635 - protein, 17 aa, Homo sapiens
  CDR3 for alpha chain variable domain of TCR clone 31318 (TRAV26-1, TRAJ10)
CIVSFRGPTGGGNKLTF

SEQ ID NO: 62636 - protein, 13 aa, Homo sapiens
  CDR3 for beta chain variable domain of TCR clone 31318 (TRBV20-1, TRBJ2-3)
CSASRQAADTQYF

SEQ ID NO: 62637 - protein, 16 aa, Homo sapiens
  CDR3 for alpha chain variable domain of TCR clone 31319 (TRAV16, TRAJ52)
CALSAAGGTSYGKLTF

SEQ ID NO: 62638 - protein, 20 aa, Homo sapiens
  CDR3 for beta chain variable domain of TCR clone 31319 (TRBV7-8, TRBJ2-2)
CASSHLFPGPTIHITGELFF

SEQ ID NO: 62639 - protein, 11 aa, Homo sapiens
  CDR3 for alpha chain variable domain of TCR clone 31320 (TRAV21, TRAJ34)
CAHYNTDKLIF

SEQ ID NO: 62640 - protein, 13 aa, Homo sapiens
  CDR3 for beta chain variable domain of TCR clone 31320 (TRBV7-6, TRBJ1-2)
RASSLVADYGYTF

SEQ ID NO: 62641 - protein, 13 aa, Homo sapiens
  CDR3 for alpha chain variable domain of TCR clone 31321 (TRAV21, TRAJ57)
CAVTQGVSEKLVF

SEQ ID NO: 62642 - protein, 16 aa, Homo sapiens
  CDR3 for beta chain variable domain of TCR clone 31321 (TRBV29-1, TRBJ2-7)
CSVEDAEDGTAYEQYF

SEQ ID NO: 62643 - protein, 23 aa, Homo sapiens
  CDR3 for alpha chain variable domain of TCR clone 31322 (TRAV2, TRAJ32)
CAFTMVVLQTRSSLELALCLLSS

SEQ ID NO: 62644 - protein, 16 aa, Homo sapiens
  CDR3 for beta chain variable domain of TCR clone 31322 (TRBV7-9, TRBJ2-7)
CASSYPDREGGYEQYF

SEQ ID NO: 62645 - protein, 13 aa, Homo sapiens
  CDR3 for alpha chain variable domain of TCR clone 31323 (TRAV12-3, TRAJ13)
CAMTSGGYQKVTF

SEQ ID NO: 62646 - protein, 13 aa, Homo sapiens
  CDR3 for beta chain variable domain of TCR clone 31323 (TRBV20-1, TRBJ2-2)
CSALSGGAGELFS

SEQ ID NO: 62647 - protein, 15 aa, Homo sapiens
  CDR3 for alpha chain variable domain of TCR clone 31324 (TRAV23/DV6, TRAJ13)
CAASIGSGGYQKVTF

SEQ ID NO: 62648 - protein, 17 aa, Homo sapiens
  CDR3 for beta chain variable domain of TCR clone 31324 (TRBV13, TRBJ2-3)
CASSLSRVAGGRNTQYF

SEQ ID NO: 62649 - protein, 16 aa, Homo sapiens
  CDR3 for alpha chain variable domain of TCR clone 31325 (TRAV12-1, TRAJ28)
CVVIAYSGAGSYQLTF

SEQ ID NO: 62650 - protein, 17 aa, Homo sapiens
  CDR3 for beta chain variable domain of TCR clone 31325 (TRBV7-9, TRBJ2-1)
CASSLVASYPSYNEQFF

SEQ ID NO: 62651 - protein, 11 aa, Homo sapiens
  CDR3 for alpha chain variable domain of TCR clone 31326 (TRAV3, TRAJ32)
CAVSPKGMVVL

SEQ ID NO: 62652 - protein, 14 aa, Homo sapiens
  CDR3 for beta chain variable domain of TCR clone 31326 (TRBV7-2, TRBJ2-7)
CASSLDPGGGEQYF

SEQ ID NO: 62653 - protein, 11 aa, Homo sapiens
  CDR3 for alpha chain variable domain of TCR clone 31327 (TRAV35, TRAJ30)
CAGERDDKIIF

SEQ ID NO: 62654 - protein, 14 aa, Homo sapiens
  CDR3 for beta chain variable domain of TCR clone 31327 (TRBV15, TRBJ2-5)
CATSGDRGQETQYS

SEQ ID NO: 62655 - protein, 15 aa, Homo sapiens
  CDR3 for alpha chain variable domain of TCR clone 31328 (TRAV12-1, TRAJ42)
CVVTRDGGGQGNLIF

SEQ ID NO: 62656 - protein, 14 aa, Homo sapiens
  CDR3 for beta chain variable domain of TCR clone 31328 (TRBV11-2, TRBJ2-3)
CASSLGGGANTQYF

SEQ ID NO: 62657 - protein, 14 aa, Homo sapiens
  CDR3 for alpha chain variable domain of TCR clone 31329 (TRAV12-2, TRAJ40)
CAGKIPSGTYKYIF

SEQ ID NO: 62658 - protein, 20 aa, Homo sapiens
  CDR3 for beta chain variable domain of TCR clone 31329 (TRBV28, TRBJ2-1)
CASTPIGRSPGLAGGNEQFF

SEQ ID NO: 62659 - protein, 18 aa, Homo sapiens
  CDR3 for alpha chain variable domain of TCR clone 31330 (TRAV13-1, TRAJ52)
CAAKNPNAGGTSYGKLTF

SEQ ID NO: 62660 - protein, 16 aa, Homo sapiens
  CDR3 for beta chain variable domain of TCR clone 31330 (TRBV20-1, TRBJ1-4)
CSAPGQGLLTNEKLFF

SEQ ID NO: 62661 - protein, 16 aa, Homo sapiens
  CDR3 for alpha chain variable domain of TCR clone 31331 (TRAV3, TRAJ37)
CAVRGEGSGNTGKLIF

SEQ ID NO: 62662 - protein, 14 aa, Homo sapiens
  CDR3 for beta chain variable domain of TCR clone 31331 (TRBV7-2, TRBJ2-7)
CASSPKTSFYEQYF

SEQ ID NO: 62663 - protein, 14 aa, Homo sapiens
  CDR3 for alpha chain variable domain of TCR clone 31332 (TRAV12-2, TRAJ5)
CAVNRSTGRRALTF

SEQ ID NO: 62664 - protein, 12 aa, Homo sapiens
  CDR3 for beta chain variable domain of TCR clone 31332 (TRBV19, TRBJ1-5)
CASSIAQRPQHF

SEQ ID NO: 62665 - protein, 15 aa, Homo sapiens
  CDR3 for alpha chain variable domain of TCR clone 31333 (TRAV21, TRAJ53)
CATLNSGDSNYKLTF

SEQ ID NO: 62666 - protein, 13 aa, Homo sapiens
  CDR3 for beta chain variable domain of TCR clone 31333 (TRBV7-3, TRBJ1-1)
CASSQDWGAEAFF

SEQ ID NO: 62667 - protein, 11 aa, Homo sapiens
  CDR3 for alpha chain variable domain of TCR clone 31334 (TRAV2, TRAJ33)
CAVESNYQLIW

SEQ ID NO: 62668 - protein, 15 aa, Homo sapiens
  CDR3 for beta chain variable domain of TCR clone 31334 (TRBV19, TRBJ1-1)
CASTSGQIQNSEAFF

SEQ ID NO: 62669 - protein, 14 aa, Homo sapiens
  CDR3 for alpha chain variable domain of TCR clone 31335 (TRAV12-3, TRAJ12)
CAMSEVDCSYKLIF

SEQ ID NO: 62670 - protein, 12 aa, Homo sapiens
  CDR3 for beta chain variable domain of TCR clone 31335 (TRBV18, TRBJ1-4)
CASSPSREKLFF

SEQ ID NO: 62671 - protein, 15 aa, Homo sapiens
  CDR3 for alpha chain variable domain of TCR clone 31336 (TRAV8-3, TRAJ11)
CSVGLLNSGYSTLTF

SEQ ID NO: 62672 - protein, 16 aa, Homo sapiens
  CDR3 for beta chain variable domain of TCR clone 31336 (TRBV7-9, TRBJ1-2)
CASSLGFSSGEDGYTF

SEQ ID NO: 62673 - protein, 15 aa, Homo sapiens
  CDR3 for alpha chain variable domain of TCR clone 31337 (TRAV8-2, TRAJ40)
CVVLGTTSGPYKYIF

SEQ ID NO: 62674 - protein, 16 aa, Homo sapiens
  CDR3 for beta chain variable domain of TCR clone 31337 (TRBV7-3, TRBJ2-1)
CASSLEGYRSYNEQFF

SEQ ID NO: 62675 - protein, 12 aa, Homo sapiens
  CDR3 for alpha chain variable domain of TCR clone 31338 (TRAV21, TRAJ11)
CAVRGGNSTLTF

SEQ ID NO: 62676 - protein, 15 aa, Homo sapiens
  CDR3 for beta chain variable domain of TCR clone 31338 (TRBV7-2, TRBJ2-2)
CASRRPGQNTGELFF

SEQ ID NO: 62677 - protein, 20 aa, Homo sapiens
  CDR3 for alpha chain variable domain of TCR clone 31339 (TRAV1-1, TRAJ39)
CLLLLRCESSAYNAGNMLTF

SEQ ID NO: 62678 - protein, 13 aa, Homo sapiens
  CDR3 for beta chain variable domain of TCR clone 31339 (TRBV12-4, TRBJ1-5)
CASGPDRAQPQHF

SEQ ID NO: 62679 - protein, 13 aa, Homo sapiens
  CDR3 for alpha chain variable domain of TCR clone 31340 (TRAV2, TRAJ40)
CAVVTSGTYKYIF

SEQ ID NO: 62680 - protein, 14 aa, Homo sapiens
  CDR3 for beta chain variable domain of TCR clone 31340 (TRBV19, TRBJ2-1)
CASPTFLLSGEQFF

SEQ ID NO: 62681 - protein, 14 aa, Homo sapiens
  CDR3 for alpha chain variable domain of TCR clone 31341 (TRAV8-3, TRAJ21)
YAVDARDNFNKFYF

SEQ ID NO: 62682 - protein, 16 aa, Homo sapiens
  CDR3 for beta chain variable domain of TCR clone 31341 (TRBV20-1, TRBJ2-1)
CSARDLAGHSYNEQFF

SEQ ID NO: 62683 - protein, 15 aa, Homo sapiens
  CDR3 for alpha chain variable domain of TCR clone 31342 (TRAV4, TRAJ39)
CLVGPNNNAGNMLTF

SEQ ID NO: 62684 - protein, 13 aa, Homo sapiens
  CDR3 for beta chain variable domain of TCR clone 31342 (TRBV11-3, TRBJ2-5)
CASSSTGGETQYF

SEQ ID NO: 62685 - protein, 16 aa, Homo sapiens
  CDR3 for alpha chain variable domain of TCR clone 31343 (TRAV26-1, TRAJ22)
IASSEYRSGSARQLTF

SEQ ID NO: 62686 - protein, 13 aa, Homo sapiens
  CDR3 for beta chain variable domain of TCR clone 31343 (TRBV7-9, TRBJ1-2)
CASSLKQNYGYTF

SEQ ID NO: 62687 - protein, 13 aa, Homo sapiens
  CDR3 for alpha chain variable domain of TCR clone 31344 (TRAV1-2, TRAJ12)
CAVYMDSSYKLIF

SEQ ID NO: 62688 - protein, 15 aa, Homo sapiens
  CDR3 for beta chain variable domain of TCR clone 31344 (TRBV27, TRBJ2-5)
CASSLIPSGGETQYF

SEQ ID NO: 62689 - protein, 13 aa, Homo sapiens
  CDR3 for alpha chain variable domain of TCR clone 31345 (TRAV12-3, TRAJ40)
CAMSDSGTYKYII

SEQ ID NO: 62690 - protein, 14 aa, Homo sapiens
  CDR3 for beta chain variable domain of TCR clone 31345 (TRBV7-2, TRBJ1-5)
CASSTQGAGQPQHF

SEQ ID NO: 62691 - protein, 10 aa, Homo sapiens
  CDR3 for alpha chain variable domain of TCR clone 31346 (TRAV12-1, TRAJ43)
CVAHNNDMRF

SEQ ID NO: 62692 - protein, 13 aa, Homo sapiens
  CDR3 for beta chain variable domain of TCR clone 31346 (TRBV12-4, TRBJ1-2)
CASSSGLTVISTF

SEQ ID NO: 62693 - protein, 14 aa, Homo sapiens
  CDR3 for alpha chain variable domain of TCR clone 31347 (TRAV1-2, TRAJ8)
CAVREDTGFQKLVF

SEQ ID NO: 62694 - protein, 15 aa, Homo sapiens
  CDR3 for beta chain variable domain of TCR clone 31347 (TRBV19, TRBJ2-7)
CASSPAGSGEALRYF

SEQ ID NO: 62695 - protein, 14 aa, Homo sapiens
  CDR3 for alpha chain variable domain of TCR clone 31348 (TRAV13-1, TRAJ35)
CAASKGGFGNVLDC

SEQ ID NO: 62696 - protein, 13 aa, Homo sapiens
  CDR3 for beta chain variable domain of TCR clone 31348 (TRBV7-3, TRBJ1-1)
CASSQDWGAEAFF

SEQ ID NO: 62697 - protein, 18 aa, Homo sapiens
  CDR3 for alpha chain variable domain of TCR clone 31349 (TRAV13-1, TRAJ52)
CAAKNPNAVGTSYGKLTF

SEQ ID NO: 62698 - protein, 15 aa, Homo sapiens
  CDR3 for beta chain variable domain of TCR clone 31349 (TRBV6-1, TRBJ2-3)
CASSERGGITDTQYF

SEQ ID NO: 62699 - protein, 13 aa, Homo sapiens
  CDR3 for alpha chain variable domain of TCR clone 31350 (TRAV3, TRAJ41)
CAVSSNSGCALNF

SEQ ID NO: 62700 - protein, 13 aa, Homo sapiens
  CDR3 for beta chain variable domain of TCR clone 31350 (TRBV20-1, TRBJ2-2)
YSALSGGAGELFF

SEQ ID NO: 62701 - protein, 14 aa, Homo sapiens
  CDR3 for alpha chain variable domain of TCR clone 31351 (TRAV13-2, TRAJ17)
CAENSKAAGNKPTF

SEQ ID NO: 62702 - protein, 11 aa, Homo sapiens
  CDR3 for beta chain variable domain of TCR clone 31351 (TRBV6-3, TRBJ2-3)
CATGQADTQYF

SEQ ID NO: 62703 - protein, 11 aa, Homo sapiens
  CDR3 for alpha chain variable domain of TCR clone 31352 (TRAV2, TRAJ13)
CASGGYQKVTF

SEQ ID NO: 62704 - protein, 19 aa, Homo sapiens
  CDR3 for beta chain variable domain of TCR clone 31352 (TRBV7-2, TRBJ2-3)
CASSFLSRNWGGGTDTQYF

SEQ ID NO: 62705 - protein, 14 aa, Homo sapiens
  CDR3 for alpha chain variable domain of TCR clone 31353 (TRAV12-2, TRAJ4)
CAEDLSGGYNKLIF

SEQ ID NO: 62706 - protein, 13 aa, Homo sapiens
  CDR3 for beta chain variable domain of TCR clone 31353 (TRBV7-9, TRBJ1-2)
CASSLKQNYGYAF

SEQ ID NO: 62707 - protein, 13 aa, Homo sapiens
  CDR3 for alpha chain variable domain of TCR clone 31354 (TRAV30, TRAJ24)
CGTVTDSWGKLQF

SEQ ID NO: 62708 - protein, 15 aa, Homo sapiens
  CDR3 for beta chain variable domain of TCR clone 31354 (TRBV25-1, TRBJ1-4)
CAGSPGDSTNEKLFF

SEQ ID NO: 62709 - protein, 14 aa, Homo sapiens
  CDR3 for alpha chain variable domain of TCR clone 31355 (TRAV8-4, TRAJ13)
CAVALSGGYQKVTF

SEQ ID NO: 62710 - protein, 14 aa, Homo sapiens
  CDR3 for beta chain variable domain of TCR clone 31355 (TRBV7-2, TRBJ1-2)
CASSQTGSTYGYTF

SEQ ID NO: 62711 - protein, 14 aa, Homo sapiens
  CDR3 for alpha chain variable domain of TCR clone 31356 (TRAV16, TRAJ33)
CSLSAMDSNYQLIW

SEQ ID NO: 62712 - protein, 12 aa, Homo sapiens
  CDR3 for beta chain variable domain of TCR clone 31356 (TRBV5-1, TRBJ1-2)
CASSQDTYGYTF

SEQ ID NO: 62713 - protein, 15 aa, Homo sapiens
  CDR3 for alpha chain variable domain of TCR clone 31357 (TRAV12-2, TRAJ11)
CAVNLGNSGYSTLTF

SEQ ID NO: 62714 - protein, 18 aa, Homo sapiens
  CDR3 for beta chain variable domain of TCR clone 31357 (TRBV7-2, TRBJ2-2)
CASSLASRGAGGPGELFF

SEQ ID NO: 62715 - protein, 11 aa, Homo sapiens
  CDR3 for alpha chain variable domain of TCR clone 31358 (TRAV12-1, TRAJ15)
CVVNAGTALIF

SEQ ID NO: 62716 - protein, 16 aa, Homo sapiens
  CDR3 for beta chain variable domain of TCR clone 31358 (TRBV20-1, TRBJ2-3)
CSALAFDTGDPDTQYF

SEQ ID NO: 62717 - protein, 12 aa, Homo sapiens
  CDR3 for alpha chain variable domain of TCR clone 31359 (TRAV26-1, TRAJ31)
CIVRNNNARLMF

SEQ ID NO: 62718 - protein, 15 aa, Homo sapiens
  CDR3 for beta chain variable domain of TCR clone 31359 (TRBV20-1, TRBJ2-4)
CSARYLTGGPNIQYF

SEQ ID NO: 62719 - protein, 13 aa, Homo sapiens
  CDR3 for alpha chain variable domain of TCR clone 31360 (TRAV3, TRAJ27)
CAVRPLGAGKSTF

SEQ ID NO: 62720 - protein, 13 aa, Homo sapiens
  CDR3 for beta chain variable domain of TCR clone 31360 (TRBV7-3, TRBJ1-1)
CASSQDWGAEAFF

SEQ ID NO: 62721 - protein, 12 aa, Homo sapiens
  CDR3 for alpha chain variable domain of TCR clone 31361 (TRAV13-1, TRAJ23)
CAASKKGGKLIF

SEQ ID NO: 62722 - protein, 13 aa, Homo sapiens
  CDR3 for beta chain variable domain of TCR clone 31361 (TRBV12-4, TRBJ1-1)
CASSPGTGFEAFF

SEQ ID NO: 62723 - protein, 13 aa, Homo sapiens
  CDR3 for alpha chain variable domain of TCR clone 31362 (TRAV25, TRAJ10)
CAGRTGGGNKLTF

SEQ ID NO: 62724 - protein, 14 aa, Homo sapiens
  CDR3 for beta chain variable domain of TCR clone 31362 (TRBV3-1, TRBJ2-5)
CASSQAGPPETQYF

SEQ ID NO: 62725 - protein, 15 aa, Homo sapiens
  CDR3 for alpha chain variable domain of TCR clone 31363 (TRAV21, TRAJ40)
CAVRPQTSGTYKYIF

SEQ ID NO: 62726 - protein, 14 aa, Homo sapiens
  CDR3 for beta chain variable domain of TCR clone 31363 (TRBV28, TRBJ1-5)
CASSLGVLVKPQHF

SEQ ID NO: 62727 - protein, 14 aa, Homo sapiens
  CDR3 for alpha chain variable domain of TCR clone 31364 (TRAV30, TRAJ26)
CGTELVSYGQNFVF

SEQ ID NO: 62728 - protein, 13 aa, Homo sapiens
  CDR3 for beta chain variable domain of TCR clone 31364 (TRBV19, TRBJ1-3)
CASRLSLGNTIYF

SEQ ID NO: 62729 - protein, 15 aa, Homo sapiens
  CDR3 for alpha chain variable domain of TCR clone 31365 (TRAV21, TRAJ37)
CAVRPALSNTGKLIF

SEQ ID NO: 62730 - protein, 16 aa, Homo sapiens
  CDR3 for beta chain variable domain of TCR clone 31365 (TRBV24-1, TRBJ2-3)
CATSDRRQDLTDTQYF

SEQ ID NO: 62731 - protein, 17 aa, Homo sapiens
  CDR3 for alpha chain variable domain of TCR clone 31366 (TRAV13-1, TRAJ28)
CAASPPYSGAGRYQLTF

SEQ ID NO: 62732 - protein, 12 aa, Homo sapiens
  CDR3 for beta chain variable domain of TCR clone 31366 (TRBV11-2, TRBJ2-2)
CASSLPTGELFF

SEQ ID NO: 62733 - protein, 18 aa, Homo sapiens
  CDR3 for alpha chain variable domain of TCR clone 31367 (TRAV26-2, TRAJ45)
CILRVDKYSGGGADGLTF

SEQ ID NO: 62734 - protein, 16 aa, Homo sapiens
  CDR3 for beta chain variable domain of TCR clone 31367 (TRBV2, TRBJ1-4)
CASNPLQGATNEKLFF

SEQ ID NO: 62735 - protein, 16 aa, Homo sapiens
  CDR3 for alpha chain variable domain of TCR clone 31368 (TRAV16, TRAJ4)
CITVLPFSGGYNKLIF

SEQ ID NO: 62736 - protein, 14 aa, Homo sapiens
  CDR3 for beta chain variable domain of TCR clone 31368 (TRBV19, TRBJ2-7)
CASSMGQGAIEQYL

SEQ ID NO: 62737 - protein, 13 aa, Homo sapiens
  CDR3 for alpha chain variable domain of TCR clone 31369 (TRAV2, TRAJ20)
CAVEGPSGYKLSF

SEQ ID NO: 62738 - protein, 16 aa, Homo sapiens
  CDR3 for beta chain variable domain of TCR clone 31369 (TRBV25-1, TRBJ2-7)
CASSELTGGGIYEQYF

SEQ ID NO: 62739 - protein, 13 aa, Homo sapiens
  CDR3 for alpha chain variable domain of TCR clone 31370 (TRAV12-2, TRAJ34)
CAVRGYNADKLIF

SEQ ID NO: 62740 - protein, 15 aa, Homo sapiens
  CDR3 for beta chain variable domain of TCR clone 31370 (TRBV28, TRBJ2-1)
CASRTGAGVIARQFF

SEQ ID NO: 62741 - protein, 15 aa, Homo sapiens
  CDR3 for alpha chain variable domain of TCR clone 31371 (TRAV17, TRAJ56)
CATDANTGANSKLPF

SEQ ID NO: 62742 - protein, 14 aa, Homo sapiens
  CDR3 for beta chain variable domain of TCR clone 31371 (TRBV19, TRBJ1-5)
CASSLGTGGQPQHF

SEQ ID NO: 62743 - protein, 11 aa, Homo sapiens
  CDR3 for alpha chain variable domain of TCR clone 31372 (TRAV1-2, TRAJ20)
CAVANDYKLSF

SEQ ID NO: 62744 - protein, 16 aa, Homo sapiens
  CDR3 for beta chain variable domain of TCR clone 31372 (TRBV4-3, TRBJ1-6)
CASSQDPGVYDSPLHF

SEQ ID NO: 62745 - protein, 13 aa, Homo sapiens
  CDR3 for alpha chain variable domain of TCR clone 31373 (TRAV21, TRAJ27)
CAARPGNAGKSTF

SEQ ID NO: 62746 - protein, 16 aa, Homo sapiens
  CDR3 for beta chain variable domain of TCR clone 31373 (TRBV20-1, TRBJ1-2)
CSASMGQGVANYGYTL

SEQ ID NO: 62747 - protein, 13 aa, Homo sapiens
  CDR3 for alpha chain variable domain of TCR clone 31374 (TRAV12-1, TRAJ37)
CVVNAGNTGKLIL

SEQ ID NO: 62748 - protein, 14 aa, Homo sapiens
  CDR3 for beta chain variable domain of TCR clone 31374 (TRBV7-2, TRBJ2-3)
CASRRGLAADTQYF

SEQ ID NO: 62749 - protein, 15 aa, Homo sapiens
  CDR3 for alpha chain variable domain of TCR clone 31375 (TRAV8-3, TRAJ45)
CASSYSGGGADGPTF

SEQ ID NO: 62750 - protein, 12 aa, Homo sapiens
  CDR3 for beta chain variable domain of TCR clone 31375 (TRBV10-3, TRBJ2-2)
CAIRENTGELFF

SEQ ID NO: 62751 - protein, 16 aa, Homo sapiens
  CDR3 for alpha chain variable domain of TCR clone 31376 (TRAV3, TRAJ37)
CAVRPHGSGHTGKLIF

SEQ ID NO: 62752 - protein, 16 aa, Homo sapiens
  CDR3 for beta chain variable domain of TCR clone 31376 (TRBV9, TRBJ1-2)
CASSVEEKVSPYGYTF

SEQ ID NO: 62753 - protein, 14 aa, Homo sapiens
  CDR3 for alpha chain variable domain of TCR clone 31377 (TRAV12-2, TRAJ17)
CAVLFKAAGNKLTF

SEQ ID NO: 62754 - protein, 14 aa, Homo sapiens
  CDR3 for beta chain variable domain of TCR clone 31377 (TRBV28, TRBJ1-1)
CASSLGQGNTEAFF

SEQ ID NO: 62755 - protein, 14 aa, Homo sapiens
  CDR3 for alpha chain variable domain of TCR clone 31378 (TRAV17, TRAJ50)
CATMMKTSYDKVIF

SEQ ID NO: 62756 - protein, 11 aa, Homo sapiens
  CDR3 for beta chain variable domain of TCR clone 31378 (TRBV19, TRBJ1-1)
CASSIGSEAFF

SEQ ID NO: 62757 - protein, 12 aa, Homo sapiens
  CDR3 for alpha chain variable domain of TCR clone 31379 (TRAV13-1, TRAJ9)
CASHTGGFKTIF

SEQ ID NO: 62758 - protein, 17 aa, Homo sapiens
  CDR3 for beta chain variable domain of TCR clone 31379 (TRBV11-2, TRBJ2-1)
CASSLYPPGVEYNEQFF

SEQ ID NO: 62759 - protein, 13 aa, Homo sapiens
  CDR3 for alpha chain variable domain of TCR clone 31380 (TRAV2, TRAJ15)
FAVASQAGTALIF

SEQ ID NO: 62760 - protein, 16 aa, Homo sapiens
  CDR3 for beta chain variable domain of TCR clone 31380 (TRBV5-1, TRBJ1-1)
CASSSGGNSLNTEAFF

SEQ ID NO: 62761 - protein, 12 aa, Homo sapiens
  CDR3 for alpha chain variable domain of TCR clone 31381 (TRAV27, TRAJ9)
CAGESGGFKTIF

SEQ ID NO: 62762 - protein, 16 aa, Homo sapiens
  CDR3 for beta chain variable domain of TCR clone 31381 (TRBV10-2, TRBJ2-2)
SAPAVHRQADAGELFF

SEQ ID NO: 62763 - protein, 14 aa, Homo sapiens
  CDR3 for alpha chain variable domain of TCR clone 31382 (TRAV12-2, TRAJ13)
CAVKKTGGLPESYL

SEQ ID NO: 62764 - protein, 13 aa, Homo sapiens
  CDR3 for beta chain variable domain of TCR clone 31382 (TRBV10-3, TRBJ2-7)
CASKLAVNYEQYF

SEQ ID NO: 62765 - protein, 15 aa, Homo sapiens
  CDR3 for alpha chain variable domain of TCR clone 31383 (TRAV8-4, TRAJ3)
CAATGENLVQQCFQD

SEQ ID NO: 62766 - protein, 16 aa, Homo sapiens
  CDR3 for beta chain variable domain of TCR clone 31383 (TRBV4-2, TRBJ1-1)
CASSQAGFGMNTEAFF

SEQ ID NO: 62767 - protein, 13 aa, Homo sapiens
  CDR3 for alpha chain variable domain of TCR clone 31384 (TRAV2, TRAJ20)
CAVPDQDDYKLSF

SEQ ID NO: 62768 - protein, 15 aa, Homo sapiens
  CDR3 for beta chain variable domain of TCR clone 31384 (TRBV18, TRBJ2-1)
CASSPPSASYNEQFF

SEQ ID NO: 62769 - protein, 14 aa, Homo sapiens
  CDR3 for alpha chain variable domain of TCR clone 31385 (TRAV1-2, TRAJ16)
CAVNRFSDGQKLLL

SEQ ID NO: 62770 - protein, 14 aa, Homo sapiens
  CDR3 for beta chain variable domain of TCR clone 31385 (TRBV6-1, TRBJ1-3)
CASVQGGGGNTIYF

SEQ ID NO: 62771 - protein, 10 aa, Homo sapiens
  CDR3 for alpha chain variable domain of TCR clone 31386 (TRAV13-1, TRAJ30)
CAARDDKIIF

SEQ ID NO: 62772 - protein, 15 aa, Homo sapiens
  CDR3 for beta chain variable domain of TCR clone 31386 (TRBV9, TRBJ1-6)
CASSVAGTGDSPLYF

SEQ ID NO: 62773 - protein, 14 aa, Homo sapiens
  CDR3 for alpha chain variable domain of TCR clone 31387 (TRAV23/DV6, TRAJ57)
CAASNQGGSEKLVL

SEQ ID NO: 62774 - protein, 13 aa, Homo sapiens
  CDR3 for beta chain variable domain of TCR clone 31387 (TRBV11-2, TRBJ2-7)
CASSSYPSYEQYF

SEQ ID NO: 62775 - protein, 17 aa, Homo sapiens
  CDR3 for alpha chain variable domain of TCR clone 31388 (TRAV13-1, TRAJ28)
CAASPPYSGAGSYQLTF

SEQ ID NO: 62776 - protein, 14 aa, Homo sapiens
  CDR3 for beta chain variable domain of TCR clone 31388 (TRBV19, TRBJ2-7)
CASTVQGRPYEQYF

SEQ ID NO: 62777 - protein, 13 aa, Homo sapiens
  CDR3 for alpha chain variable domain of TCR clone 31389 (TRAV8-3, TRAJ48)
CAVGPFGNEKLTF

SEQ ID NO: 62778 - protein, 15 aa, Homo sapiens
  CDR3 for beta chain variable domain of TCR clone 31389 (TRBV11-2, TRBJ2-1)
CASSSPSTRYNEQFF

SEQ ID NO: 62779 - protein, 13 aa, Homo sapiens
  CDR3 for alpha chain variable domain of TCR clone 31390 (TRAV3, TRAJ21)
CAVREPDFNKFYF

SEQ ID NO: 62780 - protein, 14 aa, Homo sapiens
  CDR3 for beta chain variable domain of TCR clone 31390 (TRBV19, TRBJ2-2)
CASSTLHRSGELFF

SEQ ID NO: 62781 - protein, 20 aa, Homo sapiens
  CDR3 for alpha chain variable domain of TCR clone 31391 (TRAV14/DV4, TRAJ22)
CAMGEGPFSISSGSARQLTF

SEQ ID NO: 62782 - protein, 13 aa, Homo sapiens
  CDR3 for beta chain variable domain of TCR clone 31391 (TRBV4-2, TRBJ2-3)
CASSQDWQHTQYF

SEQ ID NO: 62783 - protein, 14 aa, Homo sapiens
  CDR3 for alpha chain variable domain of TCR clone 31392 (TRAV21, TRAJ28)
CDVGSGAGSYQLTF

SEQ ID NO: 62784 - protein, 14 aa, Homo sapiens
  CDR3 for beta chain variable domain of TCR clone 31392 (TRBV18, TRBJ1-4)
CASSPGPNGEKLFF

SEQ ID NO: 62785 - protein, 11 aa, Homo sapiens
  CDR3 for alpha chain variable domain of TCR clone 31393 (TRAV1-2, TRAJ20)
CAVANDYKLSF

SEQ ID NO: 62786 - protein, 18 aa, Homo sapiens
  CDR3 for beta chain variable domain of TCR clone 31393 (TRBV20-1, TRBJ2-6)
CSAETTPTHGSGANVPTF

SEQ ID NO: 62787 - protein, 17 aa, Homo sapiens
  CDR3 for alpha chain variable domain of TCR clone 31394 (TRAV2, TRAJ36)
CAVEDRGNWGKQHLLWD

SEQ ID NO: 62788 - protein, 14 aa, Homo sapiens
  CDR3 for beta chain variable domain of TCR clone 31394 (TRBV7-9, TRBJ2-5)
CASSLDTAQETQYF

SEQ ID NO: 62789 - protein, 14 aa, Homo sapiens
  CDR3 for alpha chain variable domain of TCR clone 31395 (TRAV8-4, TRAJ34)
CAVSGPGDTDKLIF

SEQ ID NO: 62790 - protein, 13 aa, Homo sapiens
  CDR3 for beta chain variable domain of TCR clone 31395 (TRBV7-9, TRBJ2-5)
CARLSPGQETQYF

SEQ ID NO: 62791 - protein, 12 aa, Homo sapiens
  CDR3 for alpha chain variable domain of TCR clone 31396 (TRAV13-2, TRAJ23)
CAERHRGGKLNF

SEQ ID NO: 62792 - protein, 16 aa, Homo sapiens
  CDR3 for beta chain variable domain of TCR clone 31396 (TRBV20-1, TRBJ1-4)
CSAPGQGLLTNEKLFF

SEQ ID NO: 62793 - protein, 15 aa, Homo sapiens
  CDR3 for alpha chain variable domain of TCR clone 31397 (TRAV12-1, TRAJ9)
CVVRFGDTGGFKTIF

SEQ ID NO: 62794 - protein, 13 aa, Homo sapiens
  CDR3 for beta chain variable domain of TCR clone 31397 (TRBV2, TRBJ1-4)
CASSERAGEKLFF

SEQ ID NO: 62795 - protein, 13 aa, Homo sapiens
  CDR3 for alpha chain variable domain of TCR clone 31398 (TRAV12-2, TRAJ9)
CAVKWAGGFKTIF

SEQ ID NO: 62796 - protein, 15 aa, Homo sapiens
  CDR3 for beta chain variable domain of TCR clone 31398 (TRBV5-1, IGLJ4)
CASSLTADSDEKLFF

SEQ ID NO: 62797 - protein, 17 aa, Homo sapiens
  CDR3 for alpha chain variable domain of TCR clone 31399 (TRAV14/DV4, TRAJ12)
CAMRELPWMDSSYKLIF

SEQ ID NO: 62798 - protein, 14 aa, Homo sapiens
  CDR3 for beta chain variable domain of TCR clone 31399 (TRBV18, TRBJ2-7)
CASSPRGGAYEQYF

SEQ ID NO: 62799 - protein, 14 aa, Homo sapiens
  CDR3 for alpha chain variable domain of TCR clone 31400 (TRAV1-2, TRAJ16)
CAVNRFSDGQKLLF

SEQ ID NO: 62800 - protein, 12 aa, Homo sapiens
  CDR3 for beta chain variable domain of TCR clone 31400 (TRBV12-4, TRBJ2-3)
CASSLGQDTQYF

SEQ ID NO: 62801 - protein, 15 aa, Homo sapiens
  CDR3 for alpha chain variable domain of TCR clone 31401 (TRAV12-2, TRAJ53)
CAVNGGGGGNYKLTF

SEQ ID NO: 62802 - protein, 13 aa, Homo sapiens
  CDR3 for beta chain variable domain of TCR clone 31401 (TRBV3-1, TRBJ1-1)
CASSPGVITEAFF

SEQ ID NO: 62803 - protein, 15 aa, Homo sapiens
  CDR3 for alpha chain variable domain of TCR clone 31402 (TRAV2, TRAJ24)
CAVVRLKNSWGKLQF

SEQ ID NO: 62804 - protein, 16 aa, Homo sapiens
  CDR3 for beta chain variable domain of TCR clone 31402 (TRBV7-2, TRBJ2-1)
CASSYPSGGAGDEQFF

SEQ ID NO: 62805 - protein, 16 aa, Homo sapiens
  CDR3 for alpha chain variable domain of TCR clone 31403 (TRAV23/DV6, TRAJ9)
CAASIGGNTGGFKTIF

SEQ ID NO: 62806 - protein, 13 aa, Homo sapiens
  CDR3 for beta chain variable domain of TCR clone 31403 (TRBV12-3, TRBJ1-2)
CASSLRQGKGHTF

SEQ ID NO: 62807 - protein, 16 aa, Homo sapiens
  CDR3 for alpha chain variable domain of TCR clone 31404 (TRAV8-3, TRAJ13)
CAVVAYPSGGYQKVTF

SEQ ID NO: 62808 - protein, 15 aa, Homo sapiens
  CDR3 for beta chain variable domain of TCR clone 31404 (TRBV19, TRBJ1-5)
CASSIVWADNQPQHF

SEQ ID NO: 62809 - protein, 13 aa, Homo sapiens
  CDR3 for alpha chain variable domain of TCR clone 31405 (TRAV13-1, TRAJ37)
CAARSGNTGKLIF

SEQ ID NO: 62810 - protein, 13 aa, Homo sapiens
  CDR3 for beta chain variable domain of TCR clone 31405 (TRBV6-1, TRBJ1-1)
CASSRQGNTEAFF

SEQ ID NO: 62811 - protein, 14 aa, Homo sapiens
  CDR3 for alpha chain variable domain of TCR clone 31406 (TRAV1-2, TRAJ16)
CAVNRFSDGQKLLF

SEQ ID NO: 62812 - protein, 14 aa, Homo sapiens
  CDR3 for beta chain variable domain of TCR clone 31406 (TRBV18, TRBJ1-5)
CASSPGNSNQPQHF

SEQ ID NO: 62813 - protein, 14 aa, Homo sapiens
  CDR3 for alpha chain variable domain of TCR clone 31407 (TRAV8-3, TRAJ35)
CAVVPQGFGNVLHC

SEQ ID NO: 62814 - protein, 15 aa, Homo sapiens
  CDR3 for beta chain variable domain of TCR clone 31407 (TRBV6-1, TRBJ2-2)
CASSAGQGYAGELFF

SEQ ID NO: 62815 - protein, 23 aa, Homo sapiens
  CDR3 for alpha chain variable domain of TCR clone 31408 (TRAV26-1, TRAJ38)
CIADNAGNNHIQNTDPAVYQLRD

SEQ ID NO: 62816 - protein, 13 aa, Homo sapiens
  CDR3 for beta chain variable domain of TCR clone 31408 (TRBV20-1, TRBJ1-1)
CSARGGGNTEAFF

SEQ ID NO: 62817 - protein, 13 aa, Homo sapiens
  CDR3 for alpha chain variable domain of TCR clone 31409 (TRAV8-3, TRAJ15)
CAVGIQAGTALIF

SEQ ID NO: 62818 - protein, 14 aa, Homo sapiens
  CDR3 for beta chain variable domain of TCR clone 31409 (TRBV19, TRBJ2-1)
CASPTFVLSGEQLF

SEQ ID NO: 62819 - protein, 11 aa, Homo sapiens
  CDR3 for alpha chain variable domain of TCR clone 31410 (TRAV27, TRAJ40)
SLTSGTYKYIF

SEQ ID NO: 62820 - protein, 18 aa, Homo sapiens
  CDR3 for beta chain variable domain of TCR clone 31410 (TRBV11-2, TRBJ2-3)
CASSLGGASRGAPNTQYF

SEQ ID NO: 62821 - protein, 15 aa, Homo sapiens
  CDR3 for alpha chain variable domain of TCR clone 31411 (TRAV26-1, TRAJ29)
CIVRVEGSGNTPLVF

SEQ ID NO: 62822 - protein, 15 aa, Homo sapiens
  CDR3 for beta chain variable domain of TCR clone 31411 (TRBV7-9, TRBJ1-5)
CASSQGHQPNQRQHF

SEQ ID NO: 62823 - protein, 12 aa, Homo sapiens
  CDR3 for alpha chain variable domain of TCR clone 31412 (TRAV1-1, TRAJ39)
CAVPVVGNMLTF

SEQ ID NO: 62824 - protein, 16 aa, Homo sapiens
  CDR3 for beta chain variable domain of TCR clone 31412 (TRBV19, TRBJ2-1)
CASSKAGPSSYNEQFF

SEQ ID NO: 62825 - protein, 14 aa, Homo sapiens
  CDR3 for alpha chain variable domain of TCR clone 31413 (TRAV3, TRAJ21)
WAVRDKYNFNKFYF

SEQ ID NO: 62826 - protein, 14 aa, Homo sapiens
  CDR3 for beta chain variable domain of TCR clone 31413 (TRBV27, TRBJ2-3)
CASRDSPITDTQYF

SEQ ID NO: 62827 - protein, 13 aa, Homo sapiens
  CDR3 for alpha chain variable domain of TCR clone 31414 (TRAV3, TRAJ15)
CAVRDQEGTALIF

SEQ ID NO: 62828 - protein, 15 aa, Homo sapiens
  CDR3 for beta chain variable domain of TCR clone 31414 (TRBV11-1, TRBJ2-7)
CASSLNYGASYEQYF

SEQ ID NO: 62829 - protein, 14 aa, Homo sapiens
  CDR3 for alpha chain variable domain of TCR clone 31415 (TRAV13-1, TRAJ40)
CAASMTSGTYKYIF

SEQ ID NO: 62830 - protein, 17 aa, Homo sapiens
  CDR3 for beta chain variable domain of TCR clone 31415 (TRBV7-8, TRBJ2-6)
CASSAGTGGAGANVLTF

SEQ ID NO: 62831 - protein, 13 aa, Homo sapiens
  CDR3 for alpha chain variable domain of TCR clone 31416 (TRAV13-1, TRAJ11)
CAAVLAGYSTLTF

SEQ ID NO: 62832 - protein, 17 aa, Homo sapiens
  CDR3 for beta chain variable domain of TCR clone 31416 (TRBV28, TRBJ2-5)
CASSRQGGLAGAETQYF

SEQ ID NO: 62833 - protein, 11 aa, Homo sapiens
  CDR3 for alpha chain variable domain of TCR clone 31417 (TRAV2, TRAJ33)
CAVDSNYKLIW

SEQ ID NO: 62834 - protein, 14 aa, Homo sapiens
  CDR3 for beta chain variable domain of TCR clone 31417 (TRBV11-2, TRBJ2-3)
CASSRLARTDTQYF

SEQ ID NO: 62835 - protein, 15 aa, Homo sapiens
  CDR3 for alpha chain variable domain of TCR clone 31418 (TRAV16, TRAJ12)
CSKWPLRDSSYKLIF

SEQ ID NO: 62836 - protein, 13 aa, Homo sapiens
  CDR3 for beta chain variable domain of TCR clone 31418 (TRBV7-9, TRBJ1-2)
CASSLKQNYGYTF

SEQ ID NO: 62837 - protein, 12 aa, Homo sapiens
  CDR3 for alpha chain variable domain of TCR clone 31419 (TRAV21, TRAJ39)
CAADNAGNMPTF

SEQ ID NO: 62838 - protein, 12 aa, Homo sapiens
  CDR3 for beta chain variable domain of TCR clone 31419 (TRBV5-4, TRBJ2-7)
CASSWAGQGENF

SEQ ID NO: 62839 - protein, 11 aa, Homo sapiens
  CDR3 for alpha chain variable domain of TCR clone 31420 (TRAV17, TRAJ43)
CATPRSNDMRF

SEQ ID NO: 62840 - protein, 15 aa, Homo sapiens
  CDR3 for beta chain variable domain of TCR clone 31420 (TRBV11-2, TRBJ2-1)
CASSLGTSGLDEQFF

SEQ ID NO: 62841 - protein, 12 aa, Homo sapiens
  CDR3 for alpha chain variable domain of TCR clone 31421 (TRAV12-3, TRAJ17)
CAMTLIGNRLTF

SEQ ID NO: 62842 - protein, 15 aa, Homo sapiens
  CDR3 for beta chain variable domain of TCR clone 31421 (TRBV20-1, TRBJ2-7)
CSARDRVSGMDEQYF

SEQ ID NO: 62843 - protein, 12 aa, Homo sapiens
  CDR3 for alpha chain variable domain of TCR clone 31422 (TRAV12-2, TRAJ21)
CAVRYNLNKFYF

SEQ ID NO: 62844 - protein, 14 aa, Homo sapiens
  CDR3 for beta chain variable domain of TCR clone 31422 (TRBV28, TRBJ2-1)
CASSYYTAYNEQFF

SEQ ID NO: 62845 - protein, 12 aa, Homo sapiens
  CDR3 for alpha chain variable domain of TCR clone 31423 (TRAV8-3, TRAJ26)
CAGDNYGQNFVF

SEQ ID NO: 62846 - protein, 16 aa, Homo sapiens
  CDR3 for beta chain variable domain of TCR clone 31423 (TRBV13, TRBJ2-2)
CASSPRTGEHTGELFF

SEQ ID NO: 62847 - protein, 17 aa, Homo sapiens
  CDR3 for alpha chain variable domain of TCR clone 31424 (TRAV26-1, TRAJ53)
CIARVDDSGGSNYKLTF

SEQ ID NO: 62848 - protein, 15 aa, Homo sapiens
  CDR3 for beta chain variable domain of TCR clone 31424 (TRBV20-1, TRBJ2-7)
CSARVPAAYFYEQYF

SEQ ID NO: 62849 - protein, 14 aa, Homo sapiens
  CDR3 for alpha chain variable domain of TCR clone 31425 (TRAV3, TRAJ9)
CAVRLNNGGFKTIF

SEQ ID NO: 62850 - protein, 15 aa, Homo sapiens
  CDR3 for beta chain variable domain of TCR clone 31425 (TRBV7-2, TRBJ2-1)
CASSLASGRVNEQFF

SEQ ID NO: 62851 - protein, 13 aa, Homo sapiens
  CDR3 for alpha chain variable domain of TCR clone 31426 (TRAV13-2, TRAJ48)
CAEMDFVNEKLTF

SEQ ID NO: 62852 - protein, 15 aa, Homo sapiens
  CDR3 for beta chain variable domain of TCR clone 31426 (TRBV7-9, TRBJ1-6)
CASSSPGRGNSPLHF

SEQ ID NO: 62853 - protein, 14 aa, Homo sapiens
  CDR3 for alpha chain variable domain of TCR clone 31427 (TRAV20, TRAJ34)
SVPCTRDNTDKLIF

SEQ ID NO: 62854 - protein, 15 aa, Homo sapiens
  CDR3 for beta chain variable domain of TCR clone 31427 (TRBV2, TRBJ2-1)
CASSVTSEGTDEQFF

SEQ ID NO: 62855 - protein, 13 aa, Homo sapiens
  CDR3 for alpha chain variable domain of TCR clone 31428 (TRAV3, TRAJ21)
CAVREPDFNKFYF

SEQ ID NO: 62856 - protein, 12 aa, Homo sapiens
  CDR3 for beta chain variable domain of TCR clone 31428 (TRBV5-1, TRBJ2-4)
LAGEWTKNMQYF

SEQ ID NO: 62857 - protein, 11 aa, Homo sapiens
  CDR3 for alpha chain variable domain of TCR clone 31429 (TRAV1-2, TRAJ31)
CAVNNNARLMF

SEQ ID NO: 62858 - protein, 15 aa, Homo sapiens
  CDR3 for beta chain variable domain of TCR clone 31429 (TRBV28, TRBJ2-1)
CASSIIAGGRREQFF

SEQ ID NO: 62859 - protein, 18 aa, Homo sapiens
  CDR3 for alpha chain variable domain of TCR clone 31430 (TRAV21, TRAJ52)
CAVRPSPAGGTSYGKLTF

SEQ ID NO: 62860 - protein, 12 aa, Homo sapiens
  CDR3 for beta chain variable domain of TCR clone 31430 (TRBV7-9, TRBJ2-7)
CASSFGSYEQYF

SEQ ID NO: 62861 - protein, 13 aa, Homo sapiens
  CDR3 for alpha chain variable domain of TCR clone 31431 (TRAV20, TRAJ56)
CCAVGGANSKLTF

SEQ ID NO: 62862 - protein, 14 aa, Homo sapiens
  CDR3 for beta chain variable domain of TCR clone 31431 (TRBV20-1, TRBJ2-7)
CSAKRGRSSYEQYF

SEQ ID NO: 62863 - protein, 13 aa, Homo sapiens
  CDR3 for alpha chain variable domain of TCR clone 31432 (TRAV12-1, TRAJ40)
CVVPTSGTYKYIF

SEQ ID NO: 62864 - protein, 16 aa, Homo sapiens
  CDR3 for beta chain variable domain of TCR clone 31432 (TRBV7-9, TRBJ1-2)
RASSLGFSSGEDGYTF

SEQ ID NO: 62865 - protein, 12 aa, Homo sapiens
  CDR3 for alpha chain variable domain of TCR clone 31433 (TRAV1-1, TRAJ39)
CAVPVVGNMLTF

SEQ ID NO: 62866 - protein, 13 aa, Homo sapiens
  CDR3 for beta chain variable domain of TCR clone 31433 (TRBV28, TRBJ2-3)
CASSLPQADTQYF

SEQ ID NO: 62867 - protein, 14 aa, Homo sapiens
  CDR3 for alpha chain variable domain of TCR clone 31434 (TRAV13-1, TRAJ44)
CAAEAAGTASKLTF

SEQ ID NO: 62868 - protein, 13 aa, Homo sapiens
  CDR3 for beta chain variable domain of TCR clone 31434 (TRBV5-5, TRBJ1-2)
CASSFWRGEDCTF

SEQ ID NO: 62869 - protein, 11 aa, Homo sapiens
  CDR3 for alpha chain variable domain of TCR clone 31435 (TRAV12-3, TRAJ43)
CAMSVSNDMRF

SEQ ID NO: 62870 - protein, 14 aa, Homo sapiens
  CDR3 for beta chain variable domain of TCR clone 31435 (TRBV5-1, TRBJ2-7)
CASSRGESLYEQYF

SEQ ID NO: 62871 - protein, 14 aa, Homo sapiens
  CDR3 for alpha chain variable domain of TCR clone 31436 (TRAV1-2, TRAJ16)
CAVNRFSDGQKLLF

SEQ ID NO: 62872 - protein, 13 aa, Homo sapiens
  CDR3 for beta chain variable domain of TCR clone 31436 (TRBV7-9, TRBJ1-1)
CASSRRDTRRAFF

SEQ ID NO: 62873 - protein, 14 aa, Homo sapiens
  CDR3 for alpha chain variable domain of TCR clone 31437 (TRAV1-2, TRAJ16)
CAVNRFSDGQKLLF

SEQ ID NO: 62874 - protein, 13 aa, Homo sapiens
  CDR3 for beta chain variable domain of TCR clone 31437 (TRBV11-2, TRBJ2-5)
CASGHGAKETQYF

SEQ ID NO: 62875 - protein, 15 aa, Homo sapiens
  CDR3 for alpha chain variable domain of TCR clone 31438 (TRAV17, TRAJ57)
CATGPFQGGSEKLVF

SEQ ID NO: 62876 - protein, 14 aa, Homo sapiens
  CDR3 for beta chain variable domain of TCR clone 31438 (TRBV12-5, TRBJ2-5)
CASGSRTHQETQYF

SEQ ID NO: 62877 - protein, 15 aa, Homo sapiens
  CDR3 for alpha chain variable domain of TCR clone 31439 (TRAV34, TRAJ38)
CGADFTPGNNRKLIW

SEQ ID NO: 62878 - protein, 14 aa, Homo sapiens
  CDR3 for beta chain variable domain of TCR clone 31439 (TRBV19, TRBJ2-1)
CASPTFVLSGEQSF

SEQ ID NO: 62879 - protein, 14 aa, Homo sapiens
  CDR3 for alpha chain variable domain of TCR clone 31440 (TRAV2, TRAJ9)
CAVEDRSGGFKTIF

SEQ ID NO: 62880 - protein, 16 aa, Homo sapiens
  CDR3 for beta chain variable domain of TCR clone 31440 (TRBV12-4, TRBJ2-7)
CASSLIGGTGTYEQYF

SEQ ID NO: 62881 - protein, 14 aa, Homo sapiens
  CDR3 for alpha chain variable domain of TCR clone 31441 (TRAV12-3, TRAJ9)
CAMSPNTGGFKTIF

SEQ ID NO: 62882 - protein, 14 aa, Homo sapiens
  CDR3 for beta chain variable domain of TCR clone 31441 (TRBV7-2, TRBJ2-7)
CASSPKTSFYEQYF

SEQ ID NO: 62883 - protein, 12 aa, Homo sapiens
  CDR3 for alpha chain variable domain of TCR clone 31442 (TRAV12-1, TRAJ40)
CVVPSGTYKYIF

SEQ ID NO: 62884 - protein, 15 aa, Homo sapiens
  CDR3 for beta chain variable domain of TCR clone 31442 (TRBV12-4, TRBJ2-1)
CAGSPLSGKNSEQFF

SEQ ID NO: 62885 - protein, 11 aa, Homo sapiens
  CDR3 for alpha chain variable domain of TCR clone 31443 (TRAV12-3, TRAJ27)
CAMANAGKSTF

SEQ ID NO: 62886 - protein, 14 aa, Homo sapiens
  CDR3 for beta chain variable domain of TCR clone 31443 (TRBV7-6, TRBJ2-3)
CASSLGTVTDTQYF

SEQ ID NO: 62887 - protein, 12 aa, Homo sapiens
  CDR3 for alpha chain variable domain of TCR clone 31444 (TRAV30, TRAJ43)
CGTEERGNDMRF

SEQ ID NO: 62888 - protein, 16 aa, Homo sapiens
  CDR3 for beta chain variable domain of TCR clone 31444 (TRBV7-3, TRBJ2-2)
CASSLKRGTLSGELFF

SEQ ID NO: 62889 - protein, 13 aa, Homo sapiens
  CDR3 for alpha chain variable domain of TCR clone 31445 (TRAV8-6, TRAJ21)
CAVSPSSLNKFYF

SEQ ID NO: 62890 - protein, 17 aa, Homo sapiens
  CDR3 for beta chain variable domain of TCR clone 31445 (TRBV11-2, TRBJ2-3)
CQQLRGGLAGAPNTQYF

SEQ ID NO: 62891 - protein, 16 aa, Homo sapiens
  CDR3 for alpha chain variable domain of TCR clone 31446 (TRAV3, TRAJ37)
CAVRPHGSGNTGKLIF

SEQ ID NO: 62892 - protein, 17 aa, Homo sapiens
  CDR3 for beta chain variable domain of TCR clone 31446 (TRBV7-8, TRBJ2-6)
CASSAGTGGAGANVLTF

SEQ ID NO: 62893 - protein, 12 aa, Homo sapiens
  CDR3 for alpha chain variable domain of TCR clone 31447 (TRAV12-3, TRAJ17)
CAMTLTGNKLTF

SEQ ID NO: 62894 - protein, 14 aa, Homo sapiens
  CDR3 for beta chain variable domain of TCR clone 31447 (TRBV6-1, TRBJ1-3)
CASVQGGGGNTMYF

SEQ ID NO: 62895 - protein, 14 aa, Homo sapiens
  CDR3 for alpha chain variable domain of TCR clone 31448 (TRAV1-2, TRAJ16)
CAVNRFSDGQKLLF

SEQ ID NO: 62896 - protein, 16 aa, Homo sapiens
  CDR3 for beta chain variable domain of TCR clone 31448 (TRBV19, TRBJ2-1)
CASSKAGPSSYNEKFF

SEQ ID NO: 62897 - protein, 14 aa, Homo sapiens
  CDR3 for alpha chain variable domain of TCR clone 31449 (TRAV8-2, TRAJ4)
CVVSPSGGYNKLIF

SEQ ID NO: 62898 - protein, 15 aa, Homo sapiens
  CDR3 for beta chain variable domain of TCR clone 31449 (TRBV4-1, TRBJ1-4)
CASSDTGGTNEKLVF

SEQ ID NO: 62899 - protein, 17 aa, Homo sapiens
  CDR3 for alpha chain variable domain of TCR clone 31450 (TRAV26-1, TRAJ53)
CIVRVDDSGDSNYKLTF

SEQ ID NO: 62900 - protein, 15 aa, Homo sapiens
  CDR3 for beta chain variable domain of TCR clone 31450 (TRBV20-1, TRBJ2-7)
CSARVPAAYFYEQYF

SEQ ID NO: 62901 - protein, 14 aa, Homo sapiens
  CDR3 for alpha chain variable domain of TCR clone 31451 (TRAV2, TRAJ37)
CAVDFTSNTGKLIF

SEQ ID NO: 62902 - protein, 13 aa, Homo sapiens
  CDR3 for beta chain variable domain of TCR clone 31451 (TRBV7-9, TRBJ2-3)
CASSPGSTDTQYF

SEQ ID NO: 62903 - protein, 13 aa, Homo sapiens
  CDR3 for alpha chain variable domain of TCR clone 31452 (TRAV3, TRAJ16)
CAVRDRNGQKLLF

SEQ ID NO: 62904 - protein, 15 aa, Homo sapiens
  CDR3 for beta chain variable domain of TCR clone 31452 (TRBV5-1, TRBJ2-1)
CASSPPRAPCNEQFF

SEQ ID NO: 62905 - protein, 11 aa, Homo sapiens
  CDR3 for alpha chain variable domain of TCR clone 31453 (TRAV13-1, TRAJ39)
CASHAGNMLTF

SEQ ID NO: 62906 - protein, 14 aa, Homo sapiens
  CDR3 for beta chain variable domain of TCR clone 31453 (TRBV11-2, TRBJ1-5)
CASSLDRGRQPQYF

SEQ ID NO: 62907 - protein, 14 aa, Homo sapiens
  CDR3 for alpha chain variable domain of TCR clone 31454 (TRAV1-2, TRAJ16)
CAFNRFSDGQKLLF

SEQ ID NO: 62908 - protein, 15 aa, Homo sapiens
  CDR3 for beta chain variable domain of TCR clone 31454 (TRBV7-9, TRBJ1-6)
CASSSPGRGNSPLHF

SEQ ID NO: 62909 - protein, 21 aa, Homo sapiens
  CDR3 for alpha chain variable domain of TCR clone 31455 (TRAV26-1, TRAJ38)
CIADNAGNNHIQNPDPAVYQL

SEQ ID NO: 62910 - protein, 15 aa, Homo sapiens
  CDR3 for beta chain variable domain of TCR clone 31455 (TRBV27, TRBJ2-1)
CASSNGGGSSNEQFF

SEQ ID NO: 62911 - protein, 21 aa, Homo sapiens
  CDR3 for alpha chain variable domain of TCR clone 31456 (TRAV12-1, TRAJ32)
SSVIQPPTSMNYGGATNKLIF

SEQ ID NO: 62912 - protein, 15 aa, Homo sapiens
  CDR3 for beta chain variable domain of TCR clone 31456 (TRBV7-9, TRBJ2-2)
CASGPLDTFPGELSF

SEQ ID NO: 62913 - protein, 12 aa, Homo sapiens
  CDR3 for alpha chain variable domain of TCR clone 31457 (TRAV12-3, TRAJ17)
CAMTLTGNKLTF

SEQ ID NO: 62914 - protein, 13 aa, Homo sapiens
  CDR3 for beta chain variable domain of TCR clone 31457 (TRBV6-6, TRBJ2-7)
CASSLHQGDEQFF

SEQ ID NO: 62915 - protein, 14 aa, Homo sapiens
  CDR3 for alpha chain variable domain of TCR clone 31458 (TRAV16, TRAJ37)
CALDISGKTGKLIF

SEQ ID NO: 62916 - protein, 14 aa, Homo sapiens
  CDR3 for beta chain variable domain of TCR clone 31458 (TRBV7-6, TRBJ2-7)
CASSFRQGADEQYF

SEQ ID NO: 62917 - protein, 19 aa, Homo sapiens
  CDR3 for alpha chain variable domain of TCR clone 31459 (TRAV25, TRAJ20)
TATQTTDVGILPHDYKLSF

SEQ ID NO: 62918 - protein, 14 aa, Homo sapiens
  CDR3 for beta chain variable domain of TCR clone 31459 (TRBV2, TRBJ2-7)
CASSLTSGGYEQYF

SEQ ID NO: 62919 - protein, 14 aa, Homo sapiens
  CDR3 for alpha chain variable domain of TCR clone 31460 (TRAV1-2, TRAJ6)
CALSLSGGSYIPTF

SEQ ID NO: 62920 - protein, 15 aa, Homo sapiens
  CDR3 for beta chain variable domain of TCR clone 31460 (TRBV28, TRBJ2-7)
CASSPGGRGFYEQYF

SEQ ID NO: 62921 - protein, 11 aa, Homo sapiens
  CDR3 for alpha chain variable domain of TCR clone 31461 (TRAV1-2, TRAJ31)
CAVNNNARLMF

SEQ ID NO: 62922 - protein, 15 aa, Homo sapiens
  CDR3 for beta chain variable domain of TCR clone 31461 (TRBV28, TRBJ2-1)
FASSIIAGGRSEQFF

SEQ ID NO: 62923 - protein, 14 aa, Homo sapiens
  CDR3 for alpha chain variable domain of TCR clone 31462 (TRAV12-2, TRAJ11)
CAVEGGSGYSTLTF

SEQ ID NO: 62924 - protein, 16 aa, Homo sapiens
  CDR3 for beta chain variable domain of TCR clone 31462 (TRBV6-1, TRBJ1-2)
CACSGAWQGRSHGYTF

SEQ ID NO: 62925 - protein, 12 aa, Homo sapiens
  CDR3 for alpha chain variable domain of TCR clone 31463 (TRAV3, TRAJ43)
FAVRDPNNDMRF

SEQ ID NO: 62926 - protein, 15 aa, Homo sapiens
  CDR3 for beta chain variable domain of TCR clone 31463 (TRBV27, TRBJ1-5)
CASSLGTGFDQPQHF

SEQ ID NO: 62927 - protein, 10 aa, Homo sapiens
  CDR3 for alpha chain variable domain of TCR clone 31464 (TRAV12-1, TRAJ43)
CVVHNNDMRF

SEQ ID NO: 62928 - protein, 13 aa, Homo sapiens
  CDR3 for beta chain variable domain of TCR clone 31464 (TRBV12-4, TRBJ1-2)
SASSSGLTVISTF

SEQ ID NO: 62929 - protein, 12 aa, Homo sapiens
  CDR3 for alpha chain variable domain of TCR clone 31465 (TRAV10, TRAJ34)
CVVSGKYRQAHL

SEQ ID NO: 62930 - protein, 14 aa, Homo sapiens
  CDR3 for beta chain variable domain of TCR clone 31465 (TRBV19, TRBJ2-1)
CASPTFVLSGEQFF

SEQ ID NO: 62931 - protein, 14 aa, Homo sapiens
  CDR3 for alpha chain variable domain of TCR clone 31466 (TRAV9-2, TRAJ38)
CALSNAGNNRKLIW

SEQ ID NO: 62932 - protein, 16 aa, Homo sapiens
  CDR3 for beta chain variable domain of TCR clone 31466 (TRBV19, TRBJ2-1)
CASSKAGPSSYNEQFF

SEQ ID NO: 62933 - protein, 11 aa, Homo sapiens
  CDR3 for alpha chain variable domain of TCR clone 31467 (TRAV2, TRAJ33)
CAVYSNYQLIW

SEQ ID NO: 62934 - protein, 15 aa, Homo sapiens
  CDR3 for beta chain variable domain of TCR clone 31467 (TRBV19, TRBJ1-2)
CASSVGQVLNYGYTF

SEQ ID NO: 62935 - protein, 12 aa, Homo sapiens
  CDR3 for alpha chain variable domain of TCR clone 31468 (TRAV21, TRAJ49)
CAVNDGGNQFYF

SEQ ID NO: 62936 - protein, 13 aa, Homo sapiens
  CDR3 for beta chain variable domain of TCR clone 31468 (TRBV29-1, TRBJ2-7)
CSVGPSGGYEQYF

SEQ ID NO: 62937 - protein, 16 aa, Homo sapiens
  CDR3 for alpha chain variable domain of TCR clone 31469 (TRAV4, TRAJ22)
CLVGDLYSGSARQLTF

SEQ ID NO: 62938 - protein, 16 aa, Homo sapiens
  CDR3 for beta chain variable domain of TCR clone 31469 (TRBV7-9, TRBJ2-1)
CASSDAAGGSYNEQFF

SEQ ID NO: 62939 - protein, 14 aa, Homo sapiens
  CDR3 for alpha chain variable domain of TCR clone 31470 (TRAV1-2, TRAJ8)
CAVREDTGSQKLVF

SEQ ID NO: 62940 - protein, 15 aa, Homo sapiens
  CDR3 for beta chain variable domain of TCR clone 31470 (TRBV5-7, TRBJ2-3)
CASSPGLATTDTQYF

SEQ ID NO: 62941 - protein, 12 aa, Homo sapiens
  CDR3 for alpha chain variable domain of TCR clone 31471 (TRAV13-1, TRAJ21)
CAAKEGFNKFYF

SEQ ID NO: 62942 - protein, 13 aa, Homo sapiens
  CDR3 for beta chain variable domain of TCR clone 31471 (TRBV2, TRBJ1-5)
CATAGPGNQPQHF

SEQ ID NO: 62943 - protein, 14 aa, Homo sapiens
  CDR3 for alpha chain variable domain of TCR clone 31472 (TRAV1-2, TRAJ8)
CAVREDTGFQKLVF

SEQ ID NO: 62944 - protein, 13 aa, Homo sapiens
  CDR3 for beta chain variable domain of TCR clone 31472 (TRBV2, TRBJ2-7)
CASSVGGSGEQYF

SEQ ID NO: 62945 - protein, 13 aa, Homo sapiens
  CDR3 for alpha chain variable domain of TCR clone 31473 (TRAV23/DV6, TRAJ22)
CAPSSGSARQLTF

SEQ ID NO: 62946 - protein, 15 aa, Homo sapiens
  CDR3 for beta chain variable domain of TCR clone 31473 (TRBV11-2, TRBJ1-6)
CASSLDPWAVSPLHF

SEQ ID NO: 62947 - protein, 12 aa, Homo sapiens
  CDR3 for alpha chain variable domain of TCR clone 31474 (TRAV21, TRAJ3)
CCFYSSASEIIF

SEQ ID NO: 62948 - protein, 16 aa, Homo sapiens
  CDR3 for beta chain variable domain of TCR clone 31474 (TRBV19, TRBJ2-1)
CASSKAGPSPTMSSSS

SEQ ID NO: 62949 - protein, 16 aa, Homo sapiens
  CDR3 for alpha chain variable domain of TCR clone 31475 (TRAV30, TRAJ24)
CGTEIVDADSWGKFQF

SEQ ID NO: 62950 - protein, 13 aa, Homo sapiens
  CDR3 for beta chain variable domain of TCR clone 31475 (TRBV20-1, TRBJ2-7)
CSATHTSGYEQYF

SEQ ID NO: 62951 - protein, 18 aa, Homo sapiens
  CDR3 for alpha chain variable domain of TCR clone 31476 (TRAV21, TRAJ52)
CAVRPSPAGGTCYGKLTF

SEQ ID NO: 62952 - protein, 17 aa, Homo sapiens
  CDR3 for beta chain variable domain of TCR clone 31476 (TRBV13, TRBJ2-3)
CASSLSRVAGGRNTQYF

SEQ ID NO: 62953 - protein, 17 aa, Homo sapiens
  CDR3 for alpha chain variable domain of TCR clone 31477 (TRAV4, TRAJ13)
CLVGVQGASGGYQKVTF

SEQ ID NO: 62954 - protein, 18 aa, Homo sapiens
  CDR3 for beta chain variable domain of TCR clone 31477 (TRBV15, TRBJ2-3)
CATSRDGARSWDTDTQYF

SEQ ID NO: 62955 - protein, 16 aa, Homo sapiens
  CDR3 for alpha chain variable domain of TCR clone 31478 (TRAV26-1, TRAJ38)
CIVRPLNAGNNRKLIW

SEQ ID NO: 62956 - protein, 13 aa, Homo sapiens
  CDR3 for beta chain variable domain of TCR clone 31478 (TRBV18, TRBJ1-1)
CASSPNGDTEAFF

SEQ ID NO: 62957 - protein, 14 aa, Homo sapiens
  CDR3 for alpha chain variable domain of TCR clone 31479 (TRAV12-2, TRAJ17)
CAVLFKAAGNKLTF

SEQ ID NO: 62958 - protein, 15 aa, Homo sapiens
  CDR3 for beta chain variable domain of TCR clone 31479 (TRBV9, TRBJ2-1)
CASSLAGSSYNEQFF

SEQ ID NO: 62959 - protein, 14 aa, Homo sapiens
  CDR3 for alpha chain variable domain of TCR clone 31480 (TRAV29/DV5, TRAJ45)
CAASFRGGADGLTF

SEQ ID NO: 62960 - protein, 11 aa, Homo sapiens
  CDR3 for beta chain variable domain of TCR clone 31480 (TRBV11-2, TRBJ2-2)
CASSLPGEMFF

SEQ ID NO: 62961 - protein, 13 aa, Homo sapiens
  CDR3 for alpha chain variable domain of TCR clone 31481 (TRAV8-3, TRAJ44)
CAVVCGTASKLTF

SEQ ID NO: 62962 - protein, 13 aa, Homo sapiens
  CDR3 for beta chain variable domain of TCR clone 31481 (TRBV10-3, TRBJ1-2)
CAISERDSYGYTF

SEQ ID NO: 62963 - protein, 15 aa, Homo sapiens
  CDR3 for alpha chain variable domain of TCR clone 31482 (TRAV12-2, TRAJ53)
CAVNGGGGSNYKLTF

SEQ ID NO: 62964 - protein, 17 aa, Homo sapiens
  CDR3 for beta chain variable domain of TCR clone 31482 (TRBV7-3, TRBJ2-3)
LASSLMKRMRGADTQYF

SEQ ID NO: 62965 - protein, 14 aa, Homo sapiens
  CDR3 for alpha chain variable domain of TCR clone 31483 (TRAV1-2, TRAJ16)
CAVNRLSDGQKLLF

SEQ ID NO: 62966 - protein, 14 aa, Homo sapiens
  CDR3 for beta chain variable domain of TCR clone 31483 (TRBV19, TRBJ2-1)
CASPTFVLSGEQFF

SEQ ID NO: 62967 - protein, 14 aa, Homo sapiens
  CDR3 for alpha chain variable domain of TCR clone 31484 (TRAV8-2, TRAJ4)
CVVSPSGGYNKLIF

SEQ ID NO: 62968 - protein, 11 aa, Homo sapiens
  CDR3 for beta chain variable domain of TCR clone 31484 (TRBV6-1, TRBJ2-1)
CASISSNEQFF

SEQ ID NO: 62969 - protein, 14 aa, Homo sapiens
  CDR3 for alpha chain variable domain of TCR clone 31485 (TRAV12-2, TRAJ40)
CAVKIPSGTYKYIF

SEQ ID NO: 62970 - protein, 15 aa, Homo sapiens
  CDR3 for beta chain variable domain of TCR clone 31485 (TRBV7-9, TRBJ2-7)
CASSLDLDRGYEQYF

SEQ ID NO: 62971 - protein, 12 aa, Homo sapiens
  CDR3 for alpha chain variable domain of TCR clone 31486 (TRAV21, TRAJ11)
CAATSGYSTLTF

SEQ ID NO: 62972 - protein, 15 aa, Homo sapiens
  CDR3 for beta chain variable domain of TCR clone 31486 (TRBV9, TRBJ1-6)
CASSVAGTGDSPLHF

SEQ ID NO: 62973 - protein, 14 aa, Homo sapiens
  CDR3 for alpha chain variable domain of TCR clone 31487 (TRAV17, TRAJ31)
CATVLRNNNARLMF

SEQ ID NO: 62974 - protein, 14 aa, Homo sapiens
  CDR3 for beta chain variable domain of TCR clone 31487 (TRBV12-4, TRBJ2-5)
CASSLWQKQETQCF

SEQ ID NO: 62975 - protein, 14 aa, Homo sapiens
  CDR3 for alpha chain variable domain of TCR clone 31488 (TRAV12-2, TRAJ17)
CAANIKAAGNKLTF

SEQ ID NO: 62976 - protein, 16 aa, Homo sapiens
  CDR3 for beta chain variable domain of TCR clone 31488 (TRBV20-1, TRBJ2-6)
CSASSQGYDGANVLTF

SEQ ID NO: 62977 - protein, 11 aa, Homo sapiens
  CDR3 for alpha chain variable domain of TCR clone 31489 (TRAV20, TRAJ23)
CACNQGGKLIF

SEQ ID NO: 62978 - protein, 16 aa, Homo sapiens
  CDR3 for beta chain variable domain of TCR clone 31489 (TRBV7-8, TRBJ2-5)
CASSVGGQPAQETQYF

SEQ ID NO: 62979 - protein, 15 aa, Homo sapiens
  CDR3 for alpha chain variable domain of TCR clone 31490 (TRAV26-1, TRAJ56)
CIVRVDNGANSKLTF

SEQ ID NO: 62980 - protein, 15 aa, Homo sapiens
  CDR3 for beta chain variable domain of TCR clone 31490 (TRBV20-1, TRBJ2-7)
CSARDPTEVGHEQHF

SEQ ID NO: 62981 - protein, 12 aa, Homo sapiens
  CDR3 for alpha chain variable domain of TCR clone 31491 (TRAV13-1, TRAJ53)
CAAGGSNYKLTF

SEQ ID NO: 62982 - protein, 15 aa, Homo sapiens
  CDR3 for beta chain variable domain of TCR clone 31491 (TRBV20-1, TRBJ2-7)
CSARDRVSGMDEQYF

SEQ ID NO: 62983 - protein, 16 aa, Homo sapiens
  CDR3 for alpha chain variable domain of TCR clone 31492 (TRAV8-6, TRAJ28)
CAVTSKPGAGSYQLTF

SEQ ID NO: 62984 - protein, 16 aa, Homo sapiens
  CDR3 for beta chain variable domain of TCR clone 31492 (TRBV12-4, TRBJ2-5)
CASSWRPSGDLETRYF

SEQ ID NO: 62985 - protein, 11 aa, Homo sapiens
  CDR3 for alpha chain variable domain of TCR clone 31493 (TRAV1-1, TRAJ23)
CAVRQGGKLIF

SEQ ID NO: 62986 - protein, 15 aa, Homo sapiens
  CDR3 for beta chain variable domain of TCR clone 31493 (TRBV7-2, TRBJ2-1)
CASTHGTGIYNEQFF

SEQ ID NO: 62987 - protein, 15 aa, Homo sapiens
  CDR3 for alpha chain variable domain of TCR clone 31494 (TRAV26-1, TRAJ29)
CIVRVEGSGNTPLLF

SEQ ID NO: 62988 - protein, 15 aa, Homo sapiens
  CDR3 for beta chain variable domain of TCR clone 31494 (TRBV7-9, TRBJ1-5)
CASSQGHQPNQPQHF

SEQ ID NO: 62989 - protein, 12 aa, Homo sapiens
  CDR3 for alpha chain variable domain of TCR clone 31495 (TRAV9-2, TRAJ24)
CAQTDSWGKLQF

SEQ ID NO: 62990 - protein, 13 aa, Homo sapiens
  CDR3 for beta chain variable domain of TCR clone 31495 (TRBV12-4, TRBJ2-1)
CASSLQGYNEQFF

SEQ ID NO: 62991 - protein, 15 aa, Homo sapiens
  CDR3 for alpha chain variable domain of TCR clone 31496 (TRAV27, TRAJ38)
CAARRNAGNNRKLIW

SEQ ID NO: 62992 - protein, 17 aa, Homo sapiens
  CDR3 for beta chain variable domain of TCR clone 31496 (TRBV4-1, TRBJ2-3)
CASSQWGESYRPDTQYF

SEQ ID NO: 62993 - protein, 16 aa, Homo sapiens
  CDR3 for alpha chain variable domain of TCR clone 31497 (TRAV3, TRAJ10)
CAVRDMRAGGGNKLTF

SEQ ID NO: 62994 - protein, 15 aa, Homo sapiens
  CDR3 for beta chain variable domain of TCR clone 31497 (TRBV11-3, TRBJ1-6)
CASTGFGTAVSPLHF

SEQ ID NO: 62995 - protein, 17 aa, Homo sapiens
  CDR3 for alpha chain variable domain of TCR clone 31498 (TRAV3, TRAJ6)
CAVRDGPRAGGSYIPTF

SEQ ID NO: 62996 - protein, 20 aa, Homo sapiens
  CDR3 for beta chain variable domain of TCR clone 31498 (TRBV28, TRBJ2-1)
CASTPIGRAPGLAGGNEQFF

SEQ ID NO: 62997 - protein, 16 aa, Homo sapiens
  CDR3 for alpha chain variable domain of TCR clone 31499 (TRAV30, TRAJ57)
CGTGWAPQGESEKLVF

SEQ ID NO: 62998 - protein, 14 aa, Homo sapiens
  CDR3 for beta chain variable domain of TCR clone 31499 (TRBV18, TRBJ1-1)
CASSPGFQGVEAFF

SEQ ID NO: 62999 - protein, 15 aa, Homo sapiens
  CDR3 for alpha chain variable domain of TCR clone 31500 (TRAV3, TRAJ3)
CAVRDRDRSASKIIF

SEQ ID NO: 63000 - protein, 18 aa, Homo sapiens
  CDR3 for beta chain variable domain of TCR clone 31500 (TRBV25-1, TRBJ1-2)
CASSGLQNGQGLIFGYTF

SEQ ID NO: 63001 - protein, 14 aa, Homo sapiens
  CDR3 for alpha chain variable domain of TCR clone 31501 (TRAV12-1, TRAJ17)
CVVNYKAAGNKLTS

SEQ ID NO: 63002 - protein, 15 aa, Homo sapiens
  CDR3 for beta chain variable domain of TCR clone 31501 (TRBV7-2, TRBJ2-1)
CASTHGTGIYNEQFF

SEQ ID NO: 63003 - protein, 14 aa, Homo sapiens
  CDR3 for alpha chain variable domain of TCR clone 31502 (TRAV38-1, TRAJ43)
CAFMKHNNNNDMRF

SEQ ID NO: 63004 - protein, 17 aa, Homo sapiens
  CDR3 for beta chain variable domain of TCR clone 31502 (TRBV7-7, TRBJ1-4)
CASSLVRQGASNEKLFF

SEQ ID NO: 63005 - protein, 11 aa, Homo sapiens
  CDR3 for alpha chain variable domain of TCR clone 31503 (TRAV2, TRAJ33)
CALDSNYQLIW

SEQ ID NO: 63006 - protein, 15 aa, Homo sapiens
  CDR3 for beta chain variable domain of TCR clone 31503 (TRBV19, TRBJ1-2)
CASSVGQVLNYGYTF

SEQ ID NO: 63007 - protein, 11 aa, Homo sapiens
  CDR3 for alpha chain variable domain of TCR clone 31504 (TRAV35, TRAJ34)
CWARNTDKLIF

SEQ ID NO: 63008 - protein, 13 aa, Homo sapiens
  CDR3 for beta chain variable domain of TCR clone 31504 (TRBV19, TRBJ2-7)
CASSIDRTYERYF

SEQ ID NO: 63009 - protein, 15 aa, Homo sapiens
  CDR3 for alpha chain variable domain of TCR clone 31505 (TRAV2, TRAJ9)
CAVEDRGTGGFKTIF

SEQ ID NO: 63010 - protein, 15 aa, Homo sapiens
  CDR3 for beta chain variable domain of TCR clone 31505 (TRBV24-1, TRBJ2-3)
CTSDPGTGATDTQYF

SEQ ID NO: 63011 - protein, 15 aa, Homo sapiens
  CDR3 for alpha chain variable domain of TCR clone 31506 (TRAV13-1, TRAJ5)
CAASPRGHGQESTYF

SEQ ID NO: 63012 - protein, 17 aa, Homo sapiens
  CDR3 for beta chain variable domain of TCR clone 31506 (TRBV3-1, TRBJ2-2)
CASSQFRDKVDTGELFF

SEQ ID NO: 63013 - protein, 14 aa, Homo sapiens
  CDR3 for alpha chain variable domain of TCR clone 31507 (TRAV23/DV6, TRAJ4)
CAANLSGGYTKLIF

SEQ ID NO: 63014 - protein, 11 aa, Homo sapiens
  CDR3 for beta chain variable domain of TCR clone 31507 (TRBV7-9, TRBJ2-3)
CASSPTDTQYF

SEQ ID NO: 63015 - protein, 11 aa, Homo sapiens
  CDR3 for alpha chain variable domain of TCR clone 31508 (TRAV35, TRAJ30)
CAGPGDNKIIF

SEQ ID NO: 63016 - protein, 14 aa, Homo sapiens
  CDR3 for beta chain variable domain of TCR clone 31508 (TRBV7-6, TRBJ1-6)
CASSQAGGGSPLHF

SEQ ID NO: 63017 - protein, 13 aa, Homo sapiens
  CDR3 for alpha chain variable domain of TCR clone 31509 (TRAV21, TRAJ32)
CAVSGGATNKLIF

SEQ ID NO: 63018 - protein, 18 aa, Homo sapiens
  CDR3 for beta chain variable domain of TCR clone 31509 (TRBV23-1, TRBJ2-1)
TVSLRQQSMAPAHNEQFF

SEQ ID NO: 63019 - protein, 15 aa, Homo sapiens
  CDR3 for alpha chain variable domain of TCR clone 31510 (TRAV17, TRAJ57)
CATGPSRGGSEKLVF

SEQ ID NO: 63020 - protein, 14 aa, Homo sapiens
  CDR3 for beta chain variable domain of TCR clone 31510 (TRBV12-5, TRBJ2-5)
CASGSRTHQETQYF

SEQ ID NO: 63021 - protein, 15 aa, Homo sapiens
  CDR3 for alpha chain variable domain of TCR clone 31511 (TRAV21, TRAJ53)
CATLNSGGSNYKLTF

SEQ ID NO: 63022 - protein, 15 aa, Homo sapiens
  CDR3 for beta chain variable domain of TCR clone 31511 (TRBV4-1, TRBJ1-4)
CASSDTGGTNEKLFF

SEQ ID NO: 63023 - protein, 13 aa, Homo sapiens
  CDR3 for alpha chain variable domain of TCR clone 31512 (TRAV1-2, TRAJ9)
CAVPNTGGFKTIF

SEQ ID NO: 63024 - protein, 14 aa, Homo sapiens
  CDR3 for beta chain variable domain of TCR clone 31512 (TRBV20-1, TRBJ2-3)
CSARGGTSTDTQYF

SEQ ID NO: 63025 - protein, 15 aa, Homo sapiens
  CDR3 for alpha chain variable domain of TCR clone 31513 (TRAV26-1, TRAJ29)
CIVRVEGSGNTSLVF

SEQ ID NO: 63026 - protein, 14 aa, Homo sapiens
  CDR3 for beta chain variable domain of TCR clone 31513 (TRBV18, TRBJ2-5)
CASSPGVSQETQYF

SEQ ID NO: 63027 - protein, 14 aa, Homo sapiens
  CDR3 for alpha chain variable domain of TCR clone 31514 (TRAV12-2, TRAJ13)
CAVKKTGGYQKVTF

SEQ ID NO: 63028 - protein, 14 aa, Homo sapiens
  CDR3 for beta chain variable domain of TCR clone 31514 (TRBV12-5, TRBJ2-5)
CASGPRTHQETQYF

SEQ ID NO: 63029 - protein, 16 aa, Homo sapiens
  CDR3 for alpha chain variable domain of TCR clone 31515 (TRAV23/DV6, TRAJ9)
CAAIIGGNTGGFKTIF

SEQ ID NO: 63030 - protein, 14 aa, Homo sapiens
  CDR3 for beta chain variable domain of TCR clone 31515 (TRBV9, TRBJ2-7)
CASSVGVGSYEQYF

SEQ ID NO: 63031 - protein, 17 aa, Homo sapiens
  CDR3 for alpha chain variable domain of TCR clone 31516 (TRAV3, TRAJ6)
CAVRDGPRAGGSYIPTF

SEQ ID NO: 63032 - protein, 14 aa, Homo sapiens
  CDR3 for beta chain variable domain of TCR clone 31516 (TRBV5-4, TRBJ1-1)
CASSLDSRRDEAFF

SEQ ID NO: 63033 - protein, 15 aa, Homo sapiens
  CDR3 for alpha chain variable domain of TCR clone 31517 (TRAV8-3, TRAJ41)
CAVGSNANSGYALNF

SEQ ID NO: 63034 - protein, 17 aa, Homo sapiens
  CDR3 for beta chain variable domain of TCR clone 31517 (TRBV25-1, TRBJ2-1)
CASSAYGQGRGVYEQFF

SEQ ID NO: 63035 - protein, 16 aa, Homo sapiens
  CDR3 for alpha chain variable domain of TCR clone 31518 (TRAV3, TRAJ6)
CAVRDGMGSRKLHTYI

SEQ ID NO: 63036 - protein, 15 aa, Homo sapiens
  CDR3 for beta chain variable domain of TCR clone 31518 (TRBV9, TRBJ2-1)
CASSLAGSSYNEQFF

SEQ ID NO: 63037 - protein, 12 aa, Homo sapiens
  CDR3 for alpha chain variable domain of TCR clone 31519 (TRAV13-1, TRAJ53)
AASGGSNYKLTF

SEQ ID NO: 63038 - protein, 15 aa, Homo sapiens
  CDR3 for beta chain variable domain of TCR clone 31519 (TRBV5-1, TRBJ2-1)
CASSPPGAPYNEQFF

SEQ ID NO: 63039 - protein, 15 aa, Homo sapiens
  CDR3 for alpha chain variable domain of TCR clone 31520 (TRAV21, TRAJ32)
CAVNSYGGATNKLIF

SEQ ID NO: 63040 - protein, 18 aa, Homo sapiens
  CDR3 for beta chain variable domain of TCR clone 31520 (TRBV7-9, TRBJ2-1)
CASSTGRAEGSSYNEQFF

SEQ ID NO: 63041 - protein, 15 aa, Homo sapiens
  CDR3 for alpha chain variable domain of TCR clone 31521 (TRAV3, TRAJ22)
CAVRDRGGSARPLTF

SEQ ID NO: 63042 - protein, 13 aa, Homo sapiens
  CDR3 for beta chain variable domain of TCR clone 31521 (TRBV7-3, TRBJ2-1)
CASSPVAYNEQFF

SEQ ID NO: 63043 - protein, 13 aa, Homo sapiens
  CDR3 for alpha chain variable domain of TCR clone 31522 (TRAV8-3, TRAJ44)
CAVVPGTASKLAF

SEQ ID NO: 63044 - protein, 14 aa, Homo sapiens
  CDR3 for beta chain variable domain of TCR clone 31522 (TRBV11-2, TRBJ2-3)
CASSRLARTDTQYF

SEQ ID NO: 63045 - protein, 15 aa, Homo sapiens
  CDR3 for alpha chain variable domain of TCR clone 31523 (TRAV3, TRAJ4)
CAQNMFSGGYNKLIF

SEQ ID NO: 63046 - protein, 14 aa, Homo sapiens
  CDR3 for beta chain variable domain of TCR clone 31523 (TRBV19, TRBJ2-1)
CASPTFVLSGEQFF

SEQ ID NO: 63047 - protein, 14 aa, Homo sapiens
  CDR3 for alpha chain variable domain of TCR clone 31524 (TRAV3, TRAJ36)
CAVRDGTGANNLSF

SEQ ID NO: 63048 - protein, 16 aa, Homo sapiens
  CDR3 for beta chain variable domain of TCR clone 31524 (TRBV20-1, TRBJ2-6)
CSAREGPGVGANVLTF

SEQ ID NO: 63049 - protein, 13 aa, Homo sapiens
  CDR3 for alpha chain variable domain of TCR clone 31525 (TRAV12-3, TRAJ7)
CAMSASGNTRLAF

SEQ ID NO: 63050 - protein, 14 aa, Homo sapiens
  CDR3 for beta chain variable domain of TCR clone 31525 (TRBV13, TRBJ2-5)
CASSLGPRGETQYF

SEQ ID NO: 63051 - protein, 10 aa, Homo sapiens
  CDR3 for alpha chain variable domain of TCR clone 31526 (TRAV25, TRAJ20)
CAVNDYKLSF

SEQ ID NO: 63052 - protein, 18 aa, Homo sapiens
  CDR3 for beta chain variable domain of TCR clone 31526 (TRBV20-1, TRBJ2-6)
CGAETTPTHGSGANVLTF

SEQ ID NO: 63053 - protein, 10 aa, Homo sapiens
  CDR3 for alpha chain variable domain of TCR clone 31527 (TRAV8-4, TRAJ43)
CAVSADDMRF

SEQ ID NO: 63054 - protein, 13 aa, Homo sapiens
  CDR3 for beta chain variable domain of TCR clone 31527 (TRBV10-3, TRBJ2-7)
CASKLAVNYEQYF

SEQ ID NO: 63055 - protein, 13 aa, Homo sapiens
  CDR3 for alpha chain variable domain of TCR clone 31528 (TRAV8-3, TRAJ44)
CAVVPGTASKLTF

SEQ ID NO: 63056 - protein, 15 aa, Homo sapiens
  CDR3 for beta chain variable domain of TCR clone 31528 (TRBV5-1, TRBJ2-1)
CASSPPRAPYNEQFF

SEQ ID NO: 63057 - protein, 16 aa, Homo sapiens
  CDR3 for alpha chain variable domain of TCR clone 31529 (TRAV30, TRAJ24)
CGTEIVDADSWGKFQF

SEQ ID NO: 63058 - protein, 16 aa, Homo sapiens
  CDR3 for beta chain variable domain of TCR clone 31529 (TRBV28, TRBJ2-1)
CASSSPEYPRDNEQFF

SEQ ID NO: 63059 - protein, 12 aa, Homo sapiens
  CDR3 for alpha chain variable domain of TCR clone 31530 (TRAV16, TRAJ56)
CAPTGANSKLTF

SEQ ID NO: 63060 - protein, 17 aa, Homo sapiens
  CDR3 for beta chain variable domain of TCR clone 31530 (TRBV27, TRBJ2-6)
CVSSLTGFASGANVLTF

SEQ ID NO: 63061 - protein, 16 aa, Homo sapiens
  CDR3 for alpha chain variable domain of TCR clone 31531 (TRAV30, TRAJ24)
CGTEIVDADSWGKFQF

SEQ ID NO: 63062 - protein, 15 aa, Homo sapiens
  CDR3 for beta chain variable domain of TCR clone 31531 (TRBV27, TRBJ2-1)
CASSNGGGSFNEQFF

SEQ ID NO: 63063 - protein, 15 aa, Homo sapiens
  CDR3 for alpha chain variable domain of TCR clone 31532 (TRAV12-3, TRAJ6)
CAMSAASGGSYIPTL

SEQ ID NO: 63064 - protein, 13 aa, Homo sapiens
  CDR3 for beta chain variable domain of TCR clone 31532 (TRBV20-1, TRBJ1-2)
CSASTERIYGYTF

SEQ ID NO: 63065 - protein, 14 aa, Homo sapiens
  CDR3 for alpha chain variable domain of TCR clone 31533 (TRAV12-2, TRAJ4)
CAEDLSGGYNKLIF

SEQ ID NO: 63066 - protein, 13 aa, Homo sapiens
  CDR3 for beta chain variable domain of TCR clone 31533 (TRBV7-9, TRBJ1-2)
CASSLKQNYGDTF

SEQ ID NO: 63067 - protein, 14 aa, Homo sapiens
  CDR3 for alpha chain variable domain of TCR clone 31534 (TRAV17, TRAJ54)
CATDANQGAQKLVF

SEQ ID NO: 63068 - protein, 12 aa, Homo sapiens
  CDR3 for beta chain variable domain of TCR clone 31534 (TRBV7-9, TRBJ2-7)
CASSIKREEQYS

SEQ ID NO: 63069 - protein, 13 aa, Homo sapiens
  CDR3 for alpha chain variable domain of TCR clone 31535 (TRAV12-3, TRAJ7)
CAMTPYGNNRLAF

SEQ ID NO: 63070 - protein, 16 aa, Homo sapiens
  CDR3 for beta chain variable domain of TCR clone 31535 (TRBV20-1, TRBJ1-4)
CSARPYGGKLNEKLFF

SEQ ID NO: 63071 - protein, 15 aa, Homo sapiens
  CDR3 for alpha chain variable domain of TCR clone 31536 (TRAV17, TRAJ57)
CATGPSQGGSEKLVF

SEQ ID NO: 63072 - protein, 13 aa, Homo sapiens
  CDR3 for beta chain variable domain of TCR clone 31536 (TRBV7-3, TRBJ1-1)
CASSQDWGAEAFF

SEQ ID NO: 63073 - protein, 13 aa, Homo sapiens
  CDR3 for alpha chain variable domain of TCR clone 31537 (TRAV12-3, TRAJ13)
CAMGTGGYQKVTF

SEQ ID NO: 63074 - protein, 14 aa, Homo sapiens
  CDR3 for beta chain variable domain of TCR clone 31537 (TRBV7-2, TRBJ2-5)
CASSTGGGLKTQYF

SEQ ID NO: 63075 - protein, 17 aa, Homo sapiens
  CDR3 for alpha chain variable domain of TCR clone 31538 (TRAV3, TRAJ42)
CAVRDRDYGGSQGNLIF

SEQ ID NO: 63076 - protein, 13 aa, Homo sapiens
  CDR3 for beta chain variable domain of TCR clone 31538 (TRBV2, TRBJ1-1)
CASSVLMNTEAFF

SEQ ID NO: 63077 - protein, 12 aa, Homo sapiens
  CDR3 for alpha chain variable domain of TCR clone 31539 (TRAV23/DV6, TRAJ49)
CAATYTGNQFYF

SEQ ID NO: 63078 - protein, 14 aa, Homo sapiens
  CDR3 for beta chain variable domain of TCR clone 31539 (TRBV7-9, TRBJ2-1)
CASSPRDSLYEQFF

SEQ ID NO: 63079 - protein, 14 aa, Homo sapiens
  CDR3 for alpha chain variable domain of TCR clone 31540 (TRAV21, TRAJ15)
CAVSLNQAGTALIF

SEQ ID NO: 63080 - protein, 11 aa, Homo sapiens
  CDR3 for beta chain variable domain of TCR clone 31540 (TRBV20-1, TRBJ2-7)
YSARTSYEQYF

SEQ ID NO: 63081 - protein, 12 aa, Homo sapiens
  CDR3 for alpha chain variable domain of TCR clone 31541 (TRAV21, TRAJ33)
CAKMDSNYQLIW

SEQ ID NO: 63082 - protein, 14 aa, Homo sapiens
  CDR3 for beta chain variable domain of TCR clone 31541 (TRBV2, TRBJ2-7)
CARSLTSGGYEQYF

SEQ ID NO: 63083 - protein, 12 aa, Homo sapiens
  CDR3 for alpha chain variable domain of TCR clone 31542 (TRAV4, TRAJ26)
CLVGDYGQNFVF

SEQ ID NO: 63084 - protein, 16 aa, Homo sapiens
  CDR3 for beta chain variable domain of TCR clone 31542 (TRBV7-2, TRBJ1-2)
CASSSNQDGRGHGYTF

SEQ ID NO: 63085 - protein, 13 aa, Homo sapiens
  CDR3 for alpha chain variable domain of TCR clone 31543 (TRAV2, TRAJ12)
CAVGADSSYKLIF

SEQ ID NO: 63086 - protein, 13 aa, Homo sapiens
  CDR3 for beta chain variable domain of TCR clone 31543 (TRBV20-1, TRBJ2-1)
CSARSSPRDEQFS

SEQ ID NO: 63087 - protein, 15 aa, Homo sapiens
  CDR3 for alpha chain variable domain of TCR clone 31544 (TRAV21, TRAJ53)
CAVNGGGGSNYKLTF

SEQ ID NO: 63088 - protein, 12 aa, Homo sapiens
  CDR3 for beta chain variable domain of TCR clone 31544 (TRBV11-2, TRBJ2-1)
CASSPGNNEQFF

SEQ ID NO: 63089 - protein, 15 aa, Homo sapiens
  CDR3 for alpha chain variable domain of TCR clone 31545 (TRAV8-3, TRAJ6)
CAVGPLGGGSYIPTF

SEQ ID NO: 63090 - protein, 14 aa, Homo sapiens
  CDR3 for beta chain variable domain of TCR clone 31545 (TRBV19, TRBJ2-2)
CASSTGQDAGELFF

SEQ ID NO: 63091 - protein, 14 aa, Homo sapiens
  CDR3 for alpha chain variable domain of TCR clone 31546 (TRAV1-2, TRAJ16)
CAVNRFSDGQKLLF

SEQ ID NO: 63092 - protein, 15 aa, Homo sapiens
  CDR3 for beta chain variable domain of TCR clone 31546 (TRBV4-2, TRBJ1-2)
CASSQRTGGRDGYTF

SEQ ID NO: 63093 - protein, 14 aa, Homo sapiens
  CDR3 for alpha chain variable domain of TCR clone 31547 (TRAV38-2/DV8, TRAJ29)
CAYRSRSGNTPLVF

SEQ ID NO: 63094 - protein, 17 aa, Homo sapiens
  CDR3 for beta chain variable domain of TCR clone 31547 (TRBV28, TRBJ2-5)
CASSTPEGDALQETQYF

SEQ ID NO: 63095 - protein, 14 aa, Homo sapiens
  CDR3 for alpha chain variable domain of TCR clone 31548 (TRAV1-2, TRAJ8)
CAVREDTGFQKLVF

SEQ ID NO: 63096 - protein, 13 aa, Homo sapiens
  CDR3 for beta chain variable domain of TCR clone 31548 (TRBV10-2, TRBJ2-7)
CASGASGGYEQYF

SEQ ID NO: 63097 - protein, 12 aa, Homo sapiens
  CDR3 for alpha chain variable domain of TCR clone 31549 (TRAV3, TRAJ43)
CAVRDPNNDMRF

SEQ ID NO: 63098 - protein, 14 aa, Homo sapiens
  CDR3 for beta chain variable domain of TCR clone 31549 (TRBV5-1, TRBJ2-3)
CASSLFGLTDTQYF

SEQ ID NO: 63099 - protein, 14 aa, Homo sapiens
  CDR3 for alpha chain variable domain of TCR clone 31550 (TRAV38-1, TRAJ45)
CVSHSGGGADGLTF

SEQ ID NO: 63100 - protein, 13 aa, Homo sapiens
  CDR3 for beta chain variable domain of TCR clone 31550 (TRBV10-3, TRBJ1-2)
CAISERDSYGYTF

SEQ ID NO: 63101 - protein, 16 aa, Homo sapiens
  CDR3 for alpha chain variable domain of TCR clone 31551 (TRAV12-2, TRAJ45)
CAVILLSGGGADGLTF

SEQ ID NO: 63102 - protein, 19 aa, Homo sapiens
  CDR3 for beta chain variable domain of TCR clone 31551 (TRBV28, TRBJ2-4)
CASSFQPGGPAHSKNIQYF

SEQ ID NO: 63103 - protein, 12 aa, Homo sapiens
  CDR3 for alpha chain variable domain of TCR clone 31552 (TRAV21, TRAJ49)
CAANDGGNQFYF

SEQ ID NO: 63104 - protein, 14 aa, Homo sapiens
  CDR3 for beta chain variable domain of TCR clone 31552 (TRBV18, TRBJ2-7)
CASSPRGGSYEQYF

SEQ ID NO: 63105 - protein, 12 aa, Homo sapiens
  CDR3 for alpha chain variable domain of TCR clone 31553 (TRAV22, TRAJ36)
CAVGTGANNLFF

SEQ ID NO: 63106 - protein, 17 aa, Homo sapiens
  CDR3 for beta chain variable domain of TCR clone 31553 (TRBV7-8, TRBJ2-6)
CASSAGTGGAGANVLTF

SEQ ID NO: 63107 - protein, 18 aa, Homo sapiens
  CDR3 for alpha chain variable domain of TCR clone 31554 (TRAV26-1, TRAJ23)
CIVRVGLEVWNQGGKLIF

SEQ ID NO: 63108 - protein, 12 aa, Homo sapiens
  CDR3 for beta chain variable domain of TCR clone 31554 (TRBV11-2, TRBJ2-2)
CASSLGGGELFF

SEQ ID NO: 63109 - protein, 14 aa, Homo sapiens
  CDR3 for alpha chain variable domain of TCR clone 31555 (TRAV13-1, TRAJ39)
CAASYNNAGNMLTF

SEQ ID NO: 63110 - protein, 14 aa, Homo sapiens
  CDR3 for beta chain variable domain of TCR clone 31555 (TRBV11-2, TRBJ2-7)
CQQLTGTESYEQYF

SEQ ID NO: 63111 - protein, 11 aa, Homo sapiens
  CDR3 for alpha chain variable domain of TCR clone 31556 (TRAV2, TRAJ13)
CASGGYQKVTF

SEQ ID NO: 63112 - protein, 16 aa, Homo sapiens
  CDR3 for beta chain variable domain of TCR clone 31556 (TRBV6-1, TRBJ2-5)
CASSETRDRGAETQYF

SEQ ID NO: 63113 - protein, 16 aa, Homo sapiens
  CDR3 for alpha chain variable domain of TCR clone 31557 (TRAV30, TRAJ24)
CGTEIVDADSWGKFQL

SEQ ID NO: 63114 - protein, 16 aa, Homo sapiens
  CDR3 for beta chain variable domain of TCR clone 31557 (TRBV6-1, TRBJ2-1)
CASILRQGSSYNEQFF

SEQ ID NO: 63115 - protein, 14 aa, Homo sapiens
  CDR3 for alpha chain variable domain of TCR clone 31558 (TRAV1-2, TRAJ16)
CAANRFSDGQKLLF

SEQ ID NO: 63116 - protein, 16 aa, Homo sapiens
  CDR3 for beta chain variable domain of TCR clone 31558 (TRBV20-1, TRBJ1-4)
CSAPGQGLLTNEKLFF

SEQ ID NO: 63117 - protein, 13 aa, Homo sapiens
  CDR3 for alpha chain variable domain of TCR clone 31559 (TRAV12-1, TRAJ31)
CVVNMNNNARPMF

SEQ ID NO: 63118 - protein, 15 aa, Homo sapiens
  CDR3 for beta chain variable domain of TCR clone 31559 (TRBV4-1, TRBJ1-2)
CASSQGQGAAYGYTF

SEQ ID NO: 63119 - protein, 13 aa, Homo sapiens
  CDR3 for alpha chain variable domain of TCR clone 31560 (TRAV20, TRAJ49)
CAVRARTGNQFYF

SEQ ID NO: 63120 - protein, 14 aa, Homo sapiens
  CDR3 for beta chain variable domain of TCR clone 31560 (TRBV5-1, TRBJ1-1)
CASSLQGASTEAFF

SEQ ID NO: 63121 - protein, 23 aa, Homo sapiens
  CDR3 for alpha chain variable domain of TCR clone 31561 (TRAV26-1, TRAJ38)
CIADNAGNNHIQNPDPAVYQLRD

SEQ ID NO: 63122 - protein, 15 aa, Homo sapiens
  CDR3 for beta chain variable domain of TCR clone 31561 (TRBV20-1, TRBJ2-7)
CSARDRVSGMDEQYF

SEQ ID NO: 63123 - protein, 14 aa, Homo sapiens
  CDR3 for alpha chain variable domain of TCR clone 31562 (TRAV9-2, TRAJ6)
CALSDPGGSYIPTF

SEQ ID NO: 63124 - protein, 16 aa, Homo sapiens
  CDR3 for beta chain variable domain of TCR clone 31562 (TRBV19, TRBJ2-2)
CASRSPGTGATGGLFF

SEQ ID NO: 63125 - protein, 13 aa, Homo sapiens
  CDR3 for alpha chain variable domain of TCR clone 31563 (TRAV3, TRAJ15)
CAGRDQAGTALIF

SEQ ID NO: 63126 - protein, 15 aa, Homo sapiens
  CDR3 for beta chain variable domain of TCR clone 31563 (TRBV11-1, TRBJ2-7)
CASSLNYGASYEQYF

SEQ ID NO: 63127 - protein, 14 aa, Homo sapiens
  CDR3 for alpha chain variable domain of TCR clone 31564 (TRAV35, TRAJ13)
CAGRSPVGYQKVTF

SEQ ID NO: 63128 - protein, 14 aa, Homo sapiens
  CDR3 for beta chain variable domain of TCR clone 31564 (TRBV19, TRBJ2-2)
CASSMVGLSGELFF

SEQ ID NO: 63129 - protein, 13 aa, Homo sapiens
  CDR3 for alpha chain variable domain of TCR clone 31565 (TRAV25, TRAJ30)
CAGRVDRDDKNIF

SEQ ID NO: 63130 - protein, 17 aa, Homo sapiens
  CDR3 for beta chain variable domain of TCR clone 31565 (TRBV7-9, TRBJ2-6)
CASSFGAGYSGANVLTF

SEQ ID NO: 63131 - protein, 16 aa, Homo sapiens
  CDR3 for alpha chain variable domain of TCR clone 31566 (TRAV30, TRAJ24)
CGTEIVDADSWGKFQF

SEQ ID NO: 63132 - protein, 16 aa, Homo sapiens
  CDR3 for beta chain variable domain of TCR clone 31566 (TRBV7-2, TRBJ2-7)
CASSLEAGGPWYEQYF

SEQ ID NO: 63133 - protein, 12 aa, Homo sapiens
  CDR3 for alpha chain variable domain of TCR clone 31567 (TRAV2, TRAJ5)
CALDTGGRALTF

SEQ ID NO: 63134 - protein, 15 aa, Homo sapiens
  CDR3 for beta chain variable domain of TCR clone 31567 (TRBV10-3, TRBJ2-1)
CAISDVQARAYEQFF

SEQ ID NO: 63135 - protein, 12 aa, Homo sapiens
  CDR3 for alpha chain variable domain of TCR clone 31568 (TRAV8-3, TRAJ26)
CAGDNYGQNFVF

SEQ ID NO: 63136 - protein, 13 aa, Homo sapiens
  CDR3 for beta chain variable domain of TCR clone 31568 (TRBV20-1, TRBJ1-1)
CSAPLGGGTEASF

SEQ ID NO: 63137 - protein, 14 aa, Homo sapiens
  CDR3 for alpha chain variable domain of TCR clone 31569 (TRAV2, TRAJ9)
CAVEDRGGGFKTIF

SEQ ID NO: 63138 - protein, 13 aa, Homo sapiens
  CDR3 for beta chain variable domain of TCR clone 31569 (TRBV19, TRBJ1-2)
CASSVPGQDGYTF

SEQ ID NO: 63139 - protein, 12 aa, Homo sapiens
  CDR3 for alpha chain variable domain of TCR clone 31570 (TRAV12-3, TRAJ17)
SAMTLTGNKLTF

SEQ ID NO: 63140 - protein, 15 aa, Homo sapiens
  CDR3 for beta chain variable domain of TCR clone 31570 (TRBV19, TRBJ2-1)
CASSILGEGRNEQFF

SEQ ID NO: 63141 - protein, 10 aa, Homo sapiens
  CDR3 for alpha chain variable domain of TCR clone 31571 (TRAV26-1, TRAJ22)
CIVSLNFFWF

SEQ ID NO: 63142 - protein, 15 aa, Homo sapiens
  CDR3 for beta chain variable domain of TCR clone 31571 (TRBV4-1, TRBJ2-1)
CASSQVLAGGDEQFF

SEQ ID NO: 63143 - protein, 11 aa, Homo sapiens
  CDR3 for alpha chain variable domain of TCR clone 31572 (TRAV17, TRAJ31)
RATDRTARLMF

SEQ ID NO: 63144 - protein, 14 aa, Homo sapiens
  CDR3 for beta chain variable domain of TCR clone 31572 (TRBV4-1, TRBJ2-2)
CASSQAVNTGELFF

SEQ ID NO: 63145 - protein, 14 aa, Homo sapiens
  CDR3 for alpha chain variable domain of TCR clone 31573 (TRAV35, TRAJ42)
CAGRYGGSQGNPIF

SEQ ID NO: 63146 - protein, 15 aa, Homo sapiens
  CDR3 for beta chain variable domain of TCR clone 31573 (TRBV7-9, TRBJ2-1)
CASSLGWGRANEQFF

SEQ ID NO: 63147 - protein, 15 aa, Homo sapiens
  CDR3 for alpha chain variable domain of TCR clone 31574 (TRAV8-3, TRAJ44)
CAVGAGAGTASKLTF

SEQ ID NO: 63148 - protein, 12 aa, Homo sapiens
  CDR3 for beta chain variable domain of TCR clone 31574 (TRBV7-8, TRBJ2-4)
CASSLGGNSQYF

SEQ ID NO: 63149 - protein, 15 aa, Homo sapiens
  CDR3 for alpha chain variable domain of TCR clone 31575 (TRAV27, TRAJ50)
CAGRERGTSYDKGIF

SEQ ID NO: 63150 - protein, 16 aa, Homo sapiens
  CDR3 for beta chain variable domain of TCR clone 31575 (TRBV10-3, TRBJ1-5)
CAISDQVGAPNQPQHF

SEQ ID NO: 63151 - protein, 14 aa, Homo sapiens
  CDR3 for alpha chain variable domain of TCR clone 31576 (TRAV17, TRAJ54)
CAADANQGAQKLVF

SEQ ID NO: 63152 - protein, 12 aa, Homo sapiens
  CDR3 for beta chain variable domain of TCR clone 31576 (TRBV6-3, TRBJ2-1)
CASSGSYNEQFF

SEQ ID NO: 63153 - protein, 15 aa, Homo sapiens
  CDR3 for alpha chain variable domain of TCR clone 31577 (TRAV26-1, TRAJ22)
CIVRVSFWFCKATDL

SEQ ID NO: 63154 - protein, 17 aa, Homo sapiens
  CDR3 for beta chain variable domain of TCR clone 31577 (TRBV13, TRBJ2-3)
CASSLSRVAGGRNTQYF

SEQ ID NO: 63155 - protein, 13 aa, Homo sapiens
  CDR3 for alpha chain variable domain of TCR clone 31578 (TRAV1-2, TRAJ9)
CAALNTGGFKTIF

SEQ ID NO: 63156 - protein, 14 aa, Homo sapiens
  CDR3 for beta chain variable domain of TCR clone 31578 (TRBV7-3, TRBJ2-1)
CASSLAGGTNEQLF

SEQ ID NO: 63157 - protein, 12 aa, Homo sapiens
  CDR3 for alpha chain variable domain of TCR clone 31579 (TRAV12-3, TRAJ17)
CAMTLTGNKLTF

SEQ ID NO: 63158 - protein, 15 aa, Homo sapiens
  CDR3 for beta chain variable domain of TCR clone 31579 (TRBV19, TRBJ2-1)
CASSILGEGRNEQFL

SEQ ID NO: 63159 - protein, 16 aa, Homo sapiens
  CDR3 for alpha chain variable domain of TCR clone 31580 (TRAV3, TRAJ21)
CAVRDVERGNFNKFYF

SEQ ID NO: 63160 - protein, 13 aa, Homo sapiens
  CDR3 for beta chain variable domain of TCR clone 31580 (TRBV27, TRBJ2-7)
CASSLTTGYEQYF

SEQ ID NO: 63161 - protein, 17 aa, Homo sapiens
  CDR3 for alpha chain variable domain of TCR clone 31581 (TRAV8-6, TRAJ58)
CAVSSWVGETSGSRLTF

SEQ ID NO: 63162 - protein, 14 aa, Homo sapiens
  CDR3 for beta chain variable domain of TCR clone 31581 (TRBV25-1, TRBJ1-1)
CASTHLGGNTEAFF

SEQ ID NO: 63163 - protein, 12 aa, Homo sapiens
  CDR3 for alpha chain variable domain of TCR clone 31582 (TRAV3, TRAJ31)
CAVRDGNARLMF

SEQ ID NO: 63164 - protein, 18 aa, Homo sapiens
  CDR3 for beta chain variable domain of TCR clone 31582 (TRBV7-2, TRBJ2-3)
CASSLTREGSGITDTQYF

SEQ ID NO: 63165 - protein, 15 aa, Homo sapiens
  CDR3 for alpha chain variable domain of TCR clone 31583 (TRAV12-3, TRAJ6)
CAMSATTGGSYIPTF

SEQ ID NO: 63166 - protein, 13 aa, Homo sapiens
  CDR3 for beta chain variable domain of TCR clone 31583 (TRBV7-3, TRBJ1-1)
CASSQDWGAEAFF

SEQ ID NO: 63167 - protein, 12 aa, Homo sapiens
  CDR3 for alpha chain variable domain of TCR clone 31584 (TRAV12-3, TRAJ17)
CAMTLTGNKLTF

SEQ ID NO: 63168 - protein, 14 aa, Homo sapiens
  CDR3 for beta chain variable domain of TCR clone 31584 (TRBV19, TRBJ2-7)
CASSMGQGAIEQYF

SEQ ID NO: 63169 - protein, 15 aa, Homo sapiens
  CDR3 for alpha chain variable domain of TCR clone 31585 (TRAV12-2, TRAJ53)
CAVNGGGGSNYKLTF

SEQ ID NO: 63170 - protein, 15 aa, Homo sapiens
  CDR3 for beta chain variable domain of TCR clone 31585 (TRBV20-1, TRBJ2-7)
CSARDRVSGMDGQYF

SEQ ID NO: 63171 - protein, 12 aa, Homo sapiens
  CDR3 for alpha chain variable domain of TCR clone 31586 (TRAV36/DV7, TRAJ40)
CAVGTGAYKYIF

SEQ ID NO: 63172 - protein, 14 aa, Homo sapiens
  CDR3 for beta chain variable domain of TCR clone 31586 (TRBV19, TRBJ2-3)
CASSIDLGGDTQYF

SEQ ID NO: 63173 - protein, 18 aa, Homo sapiens
  CDR3 for alpha chain variable domain of TCR clone 31587 (TRAV21, TRAJ53)
CAVKGGENSGGSNYKLTF

SEQ ID NO: 63174 - protein, 11 aa, Homo sapiens
  CDR3 for beta chain variable domain of TCR clone 31587 (TRBV12-4, TRBJ2-3)
CASTATDTQYF

SEQ ID NO: 63175 - protein, 14 aa, Homo sapiens
  CDR3 for alpha chain variable domain of TCR clone 31588 (TRAV12-1, TRAJ17)
CVVNYKAAGNKLTF

SEQ ID NO: 63176 - protein, 16 aa, Homo sapiens
  CDR3 for beta chain variable domain of TCR clone 31588 (TRBV12-5, TRBJ2-5)
CASGPRTSGNQETQYF

SEQ ID NO: 63177 - protein, 14 aa, Homo sapiens
  CDR3 for alpha chain variable domain of TCR clone 31589 (TRAV12-3, TRAJ9)
FAMSPNTGGFKTIF

SEQ ID NO: 63178 - protein, 12 aa, Homo sapiens
  CDR3 for beta chain variable domain of TCR clone 31589 (TRBV19, TRBJ1-5)
CASSIAQQPQHF

SEQ ID NO: 63179 - protein, 14 aa, Homo sapiens
  CDR3 for alpha chain variable domain of TCR clone 31590 (TRAV21, TRAJ21)
CAVRPRDNFNKFYF

SEQ ID NO: 63180 - protein, 15 aa, Homo sapiens
  CDR3 for beta chain variable domain of TCR clone 31590 (TRBV6-1, TRBJ2-3)
CASSEHGGITDTQYF

SEQ ID NO: 63181 - protein, 12 aa, Homo sapiens
  CDR3 for alpha chain variable domain of TCR clone 31591 (TRAV8-3, TRAJ20)
CAVGANDYKLSF

SEQ ID NO: 63182 - protein, 15 aa, Homo sapiens
  CDR3 for beta chain variable domain of TCR clone 31591 (TRBV19, TRBJ2-2)
CQPISRDGATGELFF

SEQ ID NO: 63183 - protein, 15 aa, Homo sapiens
  CDR3 for alpha chain variable domain of TCR clone 31592 (TRAV29/DV5, TRAJ29)
CAASERGSGNTPLVF

SEQ ID NO: 63184 - protein, 17 aa, Homo sapiens
  CDR3 for beta chain variable domain of TCR clone 31592 (TRBV4-1, TRBJ1-4)
CASSQEGPRGVEEKLFF

SEQ ID NO: 63185 - protein, 11 aa, Homo sapiens
  CDR3 for alpha chain variable domain of TCR clone 31593 (TRAV12-2, TRAJ31)
CAIPNNARLMF

SEQ ID NO: 63186 - protein, 13 aa, Homo sapiens
  CDR3 for beta chain variable domain of TCR clone 31593 (TRBV20-1, TRBJ1-1)
CSARLGQGTEAFF

SEQ ID NO: 63187 - protein, 14 aa, Homo sapiens
  CDR3 for alpha chain variable domain of TCR clone 31594 (TRAV8-4, TRAJ16)
CAVSPVGRWPEAAL

SEQ ID NO: 63188 - protein, 17 aa, Homo sapiens
  CDR3 for beta chain variable domain of TCR clone 31594 (TRBV7-3, TRBJ1-6)
CASSLGRGPVHPSTLGM

SEQ ID NO: 63189 - protein, 20 aa, Homo sapiens
  CDR3 for alpha chain variable domain of TCR clone 31595 (TRAV26-1, TRAJ42)
CCVLLHRQTYYGGSKGNLIF

SEQ ID NO: 63190 - protein, 16 aa, Homo sapiens
  CDR3 for beta chain variable domain of TCR clone 31595 (TRBV7-3, TRBJ2-2)
CASSLKRGTLSGELFF

SEQ ID NO: 63191 - protein, 14 aa, Homo sapiens
  CDR3 for alpha chain variable domain of TCR clone 31596 (TRAV12-1, TRAJ23)
CVVMIYNQGGELIF

SEQ ID NO: 63192 - protein, 23 aa, Homo sapiens
  CDR3 for beta chain variable domain of TCR clone 31596 (TRBV7-3, TRBJ1-6)
CASSLTSRDEASDPSSYNSPLHF

SEQ ID NO: 63193 - protein, 14 aa, Homo sapiens
  CDR3 for alpha chain variable domain of TCR clone 31597 (TRAV12-2, TRAJ40)
CAVKIPSGTYKHIF

SEQ ID NO: 63194 - protein, 17 aa, Homo sapiens
  CDR3 for beta chain variable domain of TCR clone 31597 (TRBV13, TRBJ2-3)
CASSLSRVAGGRNTQYF

SEQ ID NO: 63195 - protein, 12 aa, Homo sapiens
  CDR3 for alpha chain variable domain of TCR clone 31598 (TRAV13-1, TRAJ21)
CAAKEGFNKSYF

SEQ ID NO: 63196 - protein, 14 aa, Homo sapiens
  CDR3 for beta chain variable domain of TCR clone 31598 (TRBV5-4, TRBJ1-1)
CASSLDSRRDEAFF

SEQ ID NO: 63197 - protein, 15 aa, Homo sapiens
  CDR3 for alpha chain variable domain of TCR clone 31599 (TRAV3, TRAJ20)
CAVRDIKLSDYTLSF

SEQ ID NO: 63198 - protein, 15 aa, Homo sapiens
  CDR3 for beta chain variable domain of TCR clone 31599 (TRBV7-9, TRBJ1-6)
CASSSPGRGNSPLHF

SEQ ID NO: 63199 - protein, 14 aa, Homo sapiens
  CDR3 for alpha chain variable domain of TCR clone 31600 (TRAV1-2, TRAJ8)
CAVREDTGFQKLVF

SEQ ID NO: 63200 - protein, 14 aa, Homo sapiens
  CDR3 for beta chain variable domain of TCR clone 31600 (TRBV12-5, TRBJ2-7)
CASGQTGNSYDQYF

SEQ ID NO: 63201 - protein, 14 aa, Homo sapiens
  CDR3 for alpha chain variable domain of TCR clone 31601 (TRAV12-2, TRAJ4)
CAEDLSGGYNKLVF

SEQ ID NO: 63202 - protein, 13 aa, Homo sapiens
  CDR3 for beta chain variable domain of TCR clone 31601 (TRBV7-9, TRBJ1-2)
CASSLKQNYGYTF

SEQ ID NO: 63203 - protein, 15 aa, Homo sapiens
  CDR3 for alpha chain variable domain of TCR clone 31602 (TRAV35, TRAJ23)
CAGQRGYNQGGKLIF

SEQ ID NO: 63204 - protein, 12 aa, Homo sapiens
  CDR3 for beta chain variable domain of TCR clone 31602 (TRBV11-2, TRBJ2-2)
CASSLGGGELFF

SEQ ID NO: 63205 - protein, 12 aa, Homo sapiens
  CDR3 for alpha chain variable domain of TCR clone 31603 (TRAV12-3, TRAJ17)
CAMTLTGNKLTF

SEQ ID NO: 63206 - protein, 15 aa, Homo sapiens
  CDR3 for beta chain variable domain of TCR clone 31603 (TRBV20-1, TRBJ2-7)
CSARDRSSGMDEQYF

SEQ ID NO: 63207 - protein, 16 aa, Homo sapiens
  CDR3 for alpha chain variable domain of TCR clone 31604 (TRAV12-3, TRAJ53)
CAMSPGSGGSNYKLTF

SEQ ID NO: 63208 - protein, 14 aa, Homo sapiens
  CDR3 for beta chain variable domain of TCR clone 31604 (TRBV15, TRBJ2-5)
CATSIGGLGGTQYF

SEQ ID NO: 63209 - protein, 14 aa, Homo sapiens
  CDR3 for alpha chain variable domain of TCR clone 31605 (TRAV12-1, TRAJ26)
CVVKGSNYGQNFVF

SEQ ID NO: 63210 - protein, 17 aa, Homo sapiens
  CDR3 for beta chain variable domain of TCR clone 31605 (TRBV11-2, TRBJ2-6)
CASSQRGIFSGANVLTF

SEQ ID NO: 63211 - protein, 13 aa, Homo sapiens
  CDR3 for alpha chain variable domain of TCR clone 31606 (TRAV13-1, TRAJ5)
CAASDTGRRALTF

SEQ ID NO: 63212 - protein, 12 aa, Homo sapiens
  CDR3 for beta chain variable domain of TCR clone 31606 (TRBV28, TRBJ2-3)
CASSLYRDTHYF

SEQ ID NO: 63213 - protein, 12 aa, Homo sapiens
  CDR3 for alpha chain variable domain of TCR clone 31607 (TRAV13-1, TRAJ27)
CAAHTNAGKSTY

SEQ ID NO: 63214 - protein, 14 aa, Homo sapiens
  CDR3 for beta chain variable domain of TCR clone 31607 (TRBV19, TRBJ2-2)
CASSGQGIAGELFF

SEQ ID NO: 63215 - protein, 14 aa, Homo sapiens
  CDR3 for alpha chain variable domain of TCR clone 31608 (TRAV12-3, TRAJ10)
SHLPLTGGGNKLTF

SEQ ID NO: 63216 - protein, 16 aa, Homo sapiens
  CDR3 for beta chain variable domain of TCR clone 31608 (TRBV24-1, TRBJ2-3)
CATSDPGTGATDTQYF

SEQ ID NO: 63217 - protein, 13 aa, Homo sapiens
  CDR3 for alpha chain variable domain of TCR clone 31609 (TRAV13-2, TRAJ13)
CAERPGGYQKVTF

SEQ ID NO: 63218 - protein, 15 aa, Homo sapiens
  CDR3 for beta chain variable domain of TCR clone 31609 (TRBV4-1, TRBJ1-4)
CASSHTGGTNEKLFF

SEQ ID NO: 63219 - protein, 16 aa, Homo sapiens
  CDR3 for alpha chain variable domain of TCR clone 31610 (TRAV12-1, TRAJ43)
CVVNPHRFGAGTRLAV

SEQ ID NO: 63220 - protein, 13 aa, Homo sapiens
  CDR3 for beta chain variable domain of TCR clone 31610 (TRBV20-1, TRBJ1-1)
CSARGGGNTEAFF

SEQ ID NO: 63221 - protein, 18 aa, Homo sapiens
  CDR3 for alpha chain variable domain of TCR clone 31611 (TRAV17, TRAJ28)
CATDPPRGSGAGSYQPTF

SEQ ID NO: 63222 - protein, 14 aa, Homo sapiens
  CDR3 for beta chain variable domain of TCR clone 31611 (TRBV13, TRBJ2-5)
CASSLDYPQETQYF

SEQ ID NO: 63223 - protein, 13 aa, Homo sapiens
  CDR3 for alpha chain variable domain of TCR clone 31612 (TRAV12-2, TRAJ20)
CAVYPSNDCKLSF

SEQ ID NO: 63224 - protein, 15 aa, Homo sapiens
  CDR3 for beta chain variable domain of TCR clone 31612 (TRBV27, TRBJ2-5)
CASSLYPRGGETQYF

SEQ ID NO: 63225 - protein, 14 aa, Homo sapiens
  CDR3 for alpha chain variable domain of TCR clone 31613 (TRAV8-2, TRAJ11)
CVVSEKSGYSTLTF

SEQ ID NO: 63226 - protein, 13 aa, Homo sapiens
  CDR3 for beta chain variable domain of TCR clone 31613 (TRBV27, TRBJ2-3)
CASSWGRTDTQYF

SEQ ID NO: 63227 - protein, 14 aa, Homo sapiens
  CDR3 for alpha chain variable domain of TCR clone 31614 (TRAV17, TRAJ57)
CATDPQGGSEKLVF

SEQ ID NO: 63228 - protein, 15 aa, Homo sapiens
  CDR3 for beta chain variable domain of TCR clone 31614 (TRBV9, TRBJ1-6)
CASSVAGTGDSPLHF

SEQ ID NO: 63229 - protein, 12 aa, Homo sapiens
  CDR3 for alpha chain variable domain of TCR clone 31615 (TRAV1-1, TRAJ9)
CAVDTGGFQTIF

SEQ ID NO: 63230 - protein, 14 aa, Homo sapiens
  CDR3 for beta chain variable domain of TCR clone 31615 (TRBV7-8, TRBJ2-5)
CASSATGGQETQYF

SEQ ID NO: 63231 - protein, 14 aa, Homo sapiens
  CDR3 for alpha chain variable domain of TCR clone 31616 (TRAV1-2, TRAJ15)
CAVRDRQAGTALIF

SEQ ID NO: 63232 - protein, 15 aa, Homo sapiens
  CDR3 for beta chain variable domain of TCR clone 31616 (TRBV7-2, TRBJ2-1)
CASSLASGRVNGQFF

SEQ ID NO: 63233 - protein, 11 aa, Homo sapiens
  CDR3 for alpha chain variable domain of TCR clone 31617 (TRAV3, TRAJ21)
CAVGNFNKFYF

SEQ ID NO: 63234 - protein, 15 aa, Homo sapiens
  CDR3 for beta chain variable domain of TCR clone 31617 (TRBV5-1, TRBJ2-3)
CASSVTSGSTDTQYF

SEQ ID NO: 63235 - protein, 14 aa, Homo sapiens
  CDR3 for alpha chain variable domain of TCR clone 31618 (TRAV8-3, TRAJ4)
CAVGSAGGYNKLIF

SEQ ID NO: 63236 - protein, 15 aa, Homo sapiens
  CDR3 for beta chain variable domain of TCR clone 31618 (TRBV6-5, TRBJ2-1)
CASSYDAGAGNEQFF

SEQ ID NO: 63237 - protein, 13 aa, Homo sapiens
  CDR3 for alpha chain variable domain of TCR clone 31619 (TRAV2, TRAJ24)
TTVPLVSWGKLQF

SEQ ID NO: 63238 - protein, 14 aa, Homo sapiens
  CDR3 for beta chain variable domain of TCR clone 31619 (TRBV12-5, TRBJ2-5)
CASGSRTHQETQYF

SEQ ID NO: 63239 - protein, 15 aa, Homo sapiens
  CDR3 for alpha chain variable domain of TCR clone 31620 (TRAV3, TRAJ4)
CAVRDWTGGYNKLIF

SEQ ID NO: 63240 - protein, 16 aa, Homo sapiens
  CDR3 for beta chain variable domain of TCR clone 31620 (TRBV27, TRBJ2-2)
CASSSSGVSNTGELFF

SEQ ID NO: 63241 - protein, 18 aa, Homo sapiens
  CDR3 for alpha chain variable domain of TCR clone 31621 (TRAV21, TRAJ52)
CAVRPSPAGGTSYGKLTF

SEQ ID NO: 63242 - protein, 13 aa, Homo sapiens
  CDR3 for beta chain variable domain of TCR clone 31621 (TRBV19, TRBJ1-2)
CASSQGQVYGYTF

SEQ ID NO: 63243 - protein, 15 aa, Homo sapiens
  CDR3 for alpha chain variable domain of TCR clone 31622 (TRAV4, TRAJ39)
CLVGPNNNAGNMLTF

SEQ ID NO: 63244 - protein, 13 aa, Homo sapiens
  CDR3 for beta chain variable domain of TCR clone 31622 (TRBV4-2, TRBJ1-1)
CASSQAGNTEAFF

SEQ ID NO: 63245 - protein, 12 aa, Homo sapiens
  CDR3 for alpha chain variable domain of TCR clone 31623 (TRAV17, TRAJ39)
CATGAAGNMLTF

SEQ ID NO: 63246 - protein, 14 aa, Homo sapiens
  CDR3 for beta chain variable domain of TCR clone 31623 (TRBV7-9, TRBJ1-2)
CASSRQGANCGYTF

SEQ ID NO: 63247 - protein, 15 aa, Homo sapiens
  CDR3 for alpha chain variable domain of TCR clone 31624 (TRAV17, TRAJ52)
CATEAGGTSYGKLTS

SEQ ID NO: 63248 - protein, 14 aa, Homo sapiens
  CDR3 for beta chain variable domain of TCR clone 31624 (TRBV28, TRBJ1-5)
CASSLGVLVKPQHF

SEQ ID NO: 63249 - protein, 12 aa, Homo sapiens
  CDR3 for alpha chain variable domain of TCR clone 31625 (TRAV30, TRAJ20)
CGTEGNDYKLSF

SEQ ID NO: 63250 - protein, 15 aa, Homo sapiens
  CDR3 for beta chain variable domain of TCR clone 31625 (TRBV20-1, TRBJ2-7)
CSARDRVSGMDEQYF

SEQ ID NO: 63251 - protein, 16 aa, Homo sapiens
  CDR3 for alpha chain variable domain of TCR clone 31626 (TRAV3, TRAJ37)
CAVRPHGSGNTGKLIF

SEQ ID NO: 63252 - protein, 15 aa, Homo sapiens
  CDR3 for beta chain variable domain of TCR clone 31626 (TRBV9, TRBJ1-2)
CQQRRGKVSPYGYTF

SEQ ID NO: 63253 - protein, 14 aa, Homo sapiens
  CDR3 for alpha chain variable domain of TCR clone 31627 (TRAV3, TRAJ9)
CAVRRNTGGFKTIF

SEQ ID NO: 63254 - protein, 15 aa, Homo sapiens
  CDR3 for beta chain variable domain of TCR clone 31627 (TRBV7-2, TRBJ2-1)
CASSLASGRVNEQFF

SEQ ID NO: 63255 - protein, 13 aa, Homo sapiens
  CDR3 for alpha chain variable domain of TCR clone 31628 (TRAV12-1, TRAJ3)
CVVNPRGAPKIIF

SEQ ID NO: 63256 - protein, 13 aa, Homo sapiens
  CDR3 for beta chain variable domain of TCR clone 31628 (TRBV28, TRBJ1-5)
CASSDRGNQPQHF

SEQ ID NO: 63257 - protein, 15 aa, Homo sapiens
  CDR3 for alpha chain variable domain of TCR clone 31629 (TRAV14/DV4, TRAJ46)
CAMREKKSSGDKLTF

SEQ ID NO: 63258 - protein, 13 aa, Homo sapiens
  CDR3 for beta chain variable domain of TCR clone 31629 (TRBV7-9, TRBJ1-2)
CASSLKQNYGYTF

SEQ ID NO: 63259 - protein, 15 aa, Homo sapiens
  CDR3 for alpha chain variable domain of TCR clone 31630 (TRAV12-3, TRAJ6)
CAMSATSGGSYIPTF

SEQ ID NO: 63260 - protein, 13 aa, Homo sapiens
  CDR3 for beta chain variable domain of TCR clone 31630 (TRBV20-1, TRBJ1-2)
CSASTERIYGYTF

SEQ ID NO: 63261 - protein, 10 aa, Homo sapiens
  CDR3 for alpha chain variable domain of TCR clone 31631 (TRAV30, TRAJ48)
CGIGNEKLTF

SEQ ID NO: 63262 - protein, 14 aa, Homo sapiens
  CDR3 for beta chain variable domain of TCR clone 31631 (TRBV7-7, TRBJ2-3)
CASSVAGGTDTQYF

SEQ ID NO: 63263 - protein, 16 aa, Homo sapiens
  CDR3 for alpha chain variable domain of TCR clone 31632 (TRAV20, TRAJ22)
CALQASSSGSARQLTF

SEQ ID NO: 63264 - protein, 13 aa, Homo sapiens
  CDR3 for beta chain variable domain of TCR clone 31632 (TRBV7-2, TRBJ2-5)
CASSQTSVETQYF

SEQ ID NO: 63265 - protein, 11 aa, Homo sapiens
  CDR3 for alpha chain variable domain of TCR clone 31633 (TRAV2, TRAJ13)
CASGGYQKVTF

SEQ ID NO: 63266 - protein, 16 aa, Homo sapiens
  CDR3 for beta chain variable domain of TCR clone 31633 (TRBV7-3, TRBJ2-1)
CASSLEGYRSYNEQFF

SEQ ID NO: 63267 - protein, 15 aa, Homo sapiens
  CDR3 for alpha chain variable domain of TCR clone 31634 (TRAV17, TRAJ57)
CATGPSQGGSEKLVF

SEQ ID NO: 63268 - protein, 16 aa, Homo sapiens
  CDR3 for beta chain variable domain of TCR clone 31634 (TRBV12-5, TRBJ2-5)
CASGPRTSGNQETQYF

SEQ ID NO: 63269 - protein, 12 aa, Homo sapiens
  CDR3 for alpha chain variable domain of TCR clone 31635 (TRAV12-3, TRAJ21)
CAMFNNFNKFYF

SEQ ID NO: 63270 - protein, 14 aa, Homo sapiens
  CDR3 for beta chain variable domain of TCR clone 31635 (TRBV28, TRBJ2-1)
CASSIQGTVGEQFL

SEQ ID NO: 63271 - protein, 11 aa, Homo sapiens
  CDR3 for alpha chain variable domain of TCR clone 31636 (TRAV2, TRAJ33)
CAVDSNYKLIW

SEQ ID NO: 63272 - protein, 13 aa, Homo sapiens
  CDR3 for beta chain variable domain of TCR clone 31636 (TRBV7-2, TRBJ2-7)
CASSSPSGSEQYF

SEQ ID NO: 63273 - protein, 11 aa, Homo sapiens
  CDR3 for alpha chain variable domain of TCR clone 31637 (TRAV13-1, TRAJ43)
CAAHNNNDMRF

SEQ ID NO: 63274 - protein, 15 aa, Homo sapiens
  CDR3 for beta chain variable domain of TCR clone 31637 (TRBV4-3, TRBJ1-5)
CASSQEAVGGQPQHF

SEQ ID NO: 63275 - protein, 12 aa, Homo sapiens
  CDR3 for alpha chain variable domain of TCR clone 31638 (TRAV5, TRAJ3)
CAEDSSASKIIF

SEQ ID NO: 63276 - protein, 17 aa, Homo sapiens
  CDR3 for beta chain variable domain of TCR clone 31638 (TRBV5-1, TRBJ2-3)
FASSMGRTGPATDTQYF

SEQ ID NO: 63277 - protein, 15 aa, Homo sapiens
  CDR3 for alpha chain variable domain of TCR clone 31639 (TRAV13-1, TRAJ52)
CAATSPRTSYGKLTF

SEQ ID NO: 63278 - protein, 16 aa, Homo sapiens
  CDR3 for beta chain variable domain of TCR clone 31639 (TRBV7-3, TRBJ2-2)
CASSLRRGTLSGELFF

SEQ ID NO: 63279 - protein, 15 aa, Homo sapiens
  CDR3 for alpha chain variable domain of TCR clone 31640 (TRAV12-1, TRAJ45)
CVVLSGGGGADGLTF

SEQ ID NO: 63280 - protein, 16 aa, Homo sapiens
  CDR3 for beta chain variable domain of TCR clone 31640 (TRBV6-5, TRBJ2-1)
CASSEALAGHYNEQFF

SEQ ID NO: 63281 - protein, 12 aa, Homo sapiens
  CDR3 for alpha chain variable domain of TCR clone 31641 (TRAV8-3, TRAJ20)
CAVGANDYKLSF

SEQ ID NO: 63282 - protein, 16 aa, Homo sapiens
  CDR3 for beta chain variable domain of TCR clone 31641 (TRBV19, TRBJ2-2)
CASRSSGTGATGELFF

SEQ ID NO: 63283 - protein, 14 aa, Homo sapiens
  CDR3 for alpha chain variable domain of TCR clone 31642 (TRAV17, TRAJ34)
CATDSLEGTDKLIF

SEQ ID NO: 63284 - protein, 13 aa, Homo sapiens
  CDR3 for beta chain variable domain of TCR clone 31642 (TRBV11-2, TRBJ2-7)
CARSGTRPYEQYF

SEQ ID NO: 63285 - protein, 14 aa, Homo sapiens
  CDR3 for alpha chain variable domain of TCR clone 31643 (TRAV12-1, TRAJ17)
CVVYYKAAGNKLTF

SEQ ID NO: 63286 - protein, 17 aa, Homo sapiens
  CDR3 for beta chain variable domain of TCR clone 31643 (TRBV20-1, TRBJ2-1)
CSASSSGLAGSYNEQFF

SEQ ID NO: 63287 - protein, 17 aa, Homo sapiens
  CDR3 for alpha chain variable domain of TCR clone 31644 (TRAV3, TRAJ38)
CAVRDCLNAGNNRKLIW

SEQ ID NO: 63288 - protein, 13 aa, Homo sapiens
  CDR3 for beta chain variable domain of TCR clone 31644 (TRBV7-9, TRBJ1-2)
CASSLKQNYGYTF

SEQ ID NO: 63289 - protein, 12 aa, Homo sapiens
  CDR3 for alpha chain variable domain of TCR clone 31645 (TRAV13-1, TRAJ49)
CAASPMGNQFYF

SEQ ID NO: 63290 - protein, 13 aa, Homo sapiens
  CDR3 for beta chain variable domain of TCR clone 31645 (TRBV20-1, TRBJ2-2)
CSAGAAGTGELFF

SEQ ID NO: 63291 - protein, 11 aa, Homo sapiens
  CDR3 for alpha chain variable domain of TCR clone 31646 (TRAV3, TRAJ21)
CAVGNFNKFYF

SEQ ID NO: 63292 - protein, 14 aa, Homo sapiens
  CDR3 for beta chain variable domain of TCR clone 31646 (TRBV7-2, TRBJ1-5)
CASSTQGAGQPQHF

SEQ ID NO: 63293 - protein, 15 aa, Homo sapiens
  CDR3 for alpha chain variable domain of TCR clone 31647 (TRAV17, TRAJ35)
CATALVIGFGNVLHC

SEQ ID NO: 63294 - protein, 15 aa, Homo sapiens
  CDR3 for beta chain variable domain of TCR clone 31647 (TRBV7-9, TRBJ2-7)
CASSLALAEAYEQYF

SEQ ID NO: 63295 - protein, 14 aa, Homo sapiens
  CDR3 for alpha chain variable domain of TCR clone 31648 (TRAV13-1, TRAJ44)
CAAKATGTASKITF

SEQ ID NO: 63296 - protein, 13 aa, Homo sapiens
  CDR3 for beta chain variable domain of TCR clone 31648 (TRBV5-5, TRBJ1-2)
CASSFWRGEDYTF

SEQ ID NO: 63297 - protein, 14 aa, Homo sapiens
  CDR3 for alpha chain variable domain of TCR clone 31649 (TRAV2, TRAJ9)
CAVEDRSGGFETIF

SEQ ID NO: 63298 - protein, 19 aa, Homo sapiens
  CDR3 for beta chain variable domain of TCR clone 31649 (TRBV25-1, TRBJ2-2)
CAILVYRVDRGRKTGELFF

SEQ ID NO: 63299 - protein, 18 aa, Homo sapiens
  CDR3 for alpha chain variable domain of TCR clone 31650 (TRAV12-3, TRAJ52)
CAMSRTNAGGTSYGKLPF

SEQ ID NO: 63300 - protein, 17 aa, Homo sapiens
  CDR3 for beta chain variable domain of TCR clone 31650 (TRBV7-3, TRBJ2-3)
CASSLMKRMRGADTQYF

SEQ ID NO: 63301 - protein, 15 aa, Homo sapiens
  CDR3 for alpha chain variable domain of TCR clone 31651 (TRAV26-1, TRAJ40)
CIVRVTTSGTYKYIF

SEQ ID NO: 63302 - protein, 14 aa, Homo sapiens
  CDR3 for beta chain variable domain of TCR clone 31651 (TRBV12-5, TRBJ2-5)
CASGSRTHQETQYF

SEQ ID NO: 63303 - protein, 15 aa, Homo sapiens
  CDR3 for alpha chain variable domain of TCR clone 31652 (TRAV4, TRAJ39)
CLVGPNNSAGNMPTF

SEQ ID NO: 63304 - protein, 16 aa, Homo sapiens
  CDR3 for beta chain variable domain of TCR clone 31652 (TRBV13, TRBJ2-2)
CASSPRTGEHTGELFF

SEQ ID NO: 63305 - protein, 14 aa, Homo sapiens
  CDR3 for alpha chain variable domain of TCR clone 31653 (TRAV1-2, TRAJ16)
CAVNRFSDGQKLLF

SEQ ID NO: 63306 - protein, 12 aa, Homo sapiens
  CDR3 for beta chain variable domain of TCR clone 31653 (TRBV27, TRBJ2-7)
CASSGGFYEQYF

SEQ ID NO: 63307 - protein, 16 aa, Homo sapiens
  CDR3 for alpha chain variable domain of TCR clone 31654 (TRAV3, TRAJ18)
CAVRDGRGSTLGRLYL

SEQ ID NO: 63308 - protein, 17 aa, Homo sapiens
  CDR3 for beta chain variable domain of TCR clone 31654 (TRBV5-1, TRBJ2-3)
CASSKIGLADRTDTQYF

SEQ ID NO: 63309 - protein, 14 aa, Homo sapiens
  CDR3 for alpha chain variable domain of TCR clone 31655 (TRAV2, TRAJ37)
CAVDFTSNTGKLIF

SEQ ID NO: 63310 - protein, 15 aa, Homo sapiens
  CDR3 for beta chain variable domain of TCR clone 31655 (TRBV20-1, TRBJ1-1)
CNASRGVTGNTEAFF

SEQ ID NO: 63311 - protein, 22 aa, Homo sapiens
  CDR3 for alpha chain variable domain of TCR clone 31656 (TRAV1-1, TRAJ30)
CAVRDQTEMTRSSLEKGHDFIF

SEQ ID NO: 63312 - protein, 15 aa, Homo sapiens
  CDR3 for beta chain variable domain of TCR clone 31656 (TRBV9, TRBJ1-6)
CASSVAGTGDSPLHF

SEQ ID NO: 63313 - protein, 13 aa, Homo sapiens
  CDR3 for alpha chain variable domain of TCR clone 31657 (TRAV1-2, TRAJ9)
CAALNTGGFKTIY

SEQ ID NO: 63314 - protein, 13 aa, Homo sapiens
  CDR3 for beta chain variable domain of TCR clone 31657 (TRBV19, TRBJ1-2)
CASSVPGQDGYTF

SEQ ID NO: 63315 - protein, 18 aa, Homo sapiens
  CDR3 for alpha chain variable domain of TCR clone 31658 (TRAV13-1, TRAJ52)
CAASKRSADGTSYGKLTF

SEQ ID NO: 63316 - protein, 15 aa, Homo sapiens
  CDR3 for beta chain variable domain of TCR clone 31658 (TRBV6-3, TRBJ2-7)
CASSSPGTVFYEQYF

SEQ ID NO: 63317 - protein, 13 aa, Homo sapiens
  CDR3 for alpha chain variable domain of TCR clone 31659 (TRAV21, TRAJ27)
CAARPGNAGKSTF

SEQ ID NO: 63318 - protein, 14 aa, Homo sapiens
  CDR3 for beta chain variable domain of TCR clone 31659 (TRBV7-8, TRBJ2-1)
CASSSQGTYNEQFF

SEQ ID NO: 63319 - protein, 14 aa, Homo sapiens
  CDR3 for alpha chain variable domain of TCR clone 31660 (TRAV3, TRAJ17)
CAVRDAAAGNKLTF

SEQ ID NO: 63320 - protein, 15 aa, Homo sapiens
  CDR3 for beta chain variable domain of TCR clone 31660 (TRBV9, TRBJ1-6)
CASSVAGTGDSLLHF

SEQ ID NO: 63321 - protein, 14 aa, Homo sapiens
  CDR3 for alpha chain variable domain of TCR clone 31661 (TRAV17, TRAJ57)
CATDPQGGSEKLVF

SEQ ID NO: 63322 - protein, 16 aa, Homo sapiens
  CDR3 for beta chain variable domain of TCR clone 31661 (TRBV12-4, TRBJ1-5)
CASSRPVGGSNQPQHF

SEQ ID NO: 63323 - protein, 15 aa, Homo sapiens
  CDR3 for alpha chain variable domain of TCR clone 31662 (TRAV12-2, TRAJ43)
CAFDMRFGAGTRLTV

SEQ ID NO: 63324 - protein, 18 aa, Homo sapiens
  CDR3 for beta chain variable domain of TCR clone 31662 (TRBV20-1, TRBJ2-3)
CSAYGLAGGPGTTDTQYF

SEQ ID NO: 63325 - protein, 14 aa, Homo sapiens
  CDR3 for alpha chain variable domain of TCR clone 31663 (TRAV35, TRAJ33)
CAVSSQDSNYQLIW

SEQ ID NO: 63326 - protein, 15 aa, Homo sapiens
  CDR3 for beta chain variable domain of TCR clone 31663 (TRBV20-1, TRBJ2-7)
CSAESGTSGAYEQYF

SEQ ID NO: 63327 - protein, 11 aa, Homo sapiens
  CDR3 for alpha chain variable domain of TCR clone 31664 (TRAV13-1, TRAJ43)
CAAHNNNDMRF

SEQ ID NO: 63328 - protein, 15 aa, Homo sapiens
  CDR3 for beta chain variable domain of TCR clone 31664 (TRBV6-1, TRBJ2-2)
CASSRLRGDTGGLFF

SEQ ID NO: 63329 - protein, 14 aa, Homo sapiens
  CDR3 for alpha chain variable domain of TCR clone 31665 (TRAV26-2, TRAJ23)
CSRTLYNQGGKLIF

SEQ ID NO: 63330 - protein, 15 aa, Homo sapiens
  CDR3 for beta chain variable domain of TCR clone 31665 (TRBV20-1, TRBJ2-7)
CSARDRVSRMDEQYF

SEQ ID NO: 63331 - protein, 14 aa, Homo sapiens
  CDR3 for alpha chain variable domain of TCR clone 31666 (TRAV12-3, TRAJ10)
SHLPLTGGGNKLTF

SEQ ID NO: 63332 - protein, 14 aa, Homo sapiens
  CDR3 for beta chain variable domain of TCR clone 31666 (TRBV19, TRBJ2-5)
CASSMTGQQETQYF

SEQ ID NO: 63333 - protein, 11 aa, Homo sapiens
  CDR3 for alpha chain variable domain of TCR clone 31667 (TRAV1-2, TRAJ20)
CAVANDYKLSF

SEQ ID NO: 63334 - protein, 16 aa, Homo sapiens
  CDR3 for beta chain variable domain of TCR clone 31667 (TRBV12-4, TRBJ1-5)
CASSRPVGGSNQPQHF

SEQ ID NO: 63335 - protein, 14 aa, Homo sapiens
  CDR3 for alpha chain variable domain of TCR clone 31668 (TRAV26-1, TRAJ38)
CIADNAGNNRKLIW

SEQ ID NO: 63336 - protein, 13 aa, Homo sapiens
  CDR3 for beta chain variable domain of TCR clone 31668 (TRBV7-2, TRBJ2-7)
CASSSPSGSEQYF

SEQ ID NO: 63337 - protein, 14 aa, Homo sapiens
  CDR3 for alpha chain variable domain of TCR clone 31669 (TRAV1-2, TRAJ8)
CAVREDTGFQKLVS

SEQ ID NO: 63338 - protein, 15 aa, Homo sapiens
  CDR3 for beta chain variable domain of TCR clone 31669 (TRBV9, TRBJ1-6)
CASSVAGTGDSPLHF

SEQ ID NO: 63339 - protein, 15 aa, Homo sapiens
  CDR3 for alpha chain variable domain of TCR clone 31670 (TRAV14/DV4, TRAJ48)
CAMRAPNFGNEKLTF

SEQ ID NO: 63340 - protein, 16 aa, Homo sapiens
  CDR3 for beta chain variable domain of TCR clone 31670 (TRBV27, TRBJ2-7)
CASSLTGTGGSYEQYF

SEQ ID NO: 63341 - protein, 11 aa, Homo sapiens
  CDR3 for alpha chain variable domain of TCR clone 31671 (TRAV21, TRAJ34)
CAVTNTDKLIF

SEQ ID NO: 63342 - protein, 14 aa, Homo sapiens
  CDR3 for beta chain variable domain of TCR clone 31671 (TRBV20-1, TRBJ1-1)
CSAQTRIGGTEAFF

SEQ ID NO: 63343 - protein, 15 aa, Homo sapiens
  CDR3 for alpha chain variable domain of TCR clone 31672 (TRAV9-2, TRAJ49)
CALSPPDHTGNPFYF

SEQ ID NO: 63344 - protein, 14 aa, Homo sapiens
  CDR3 for beta chain variable domain of TCR clone 31672 (TRBV12-4, TRBJ1-1)
CASSLGTGGTEAFF

SEQ ID NO: 63345 - protein, 13 aa, Homo sapiens
  CDR3 for alpha chain variable domain of TCR clone 31673 (TRAV22, TRAJ29)
CAVGGSGNTPLVF

SEQ ID NO: 63346 - protein, 13 aa, Homo sapiens
  CDR3 for beta chain variable domain of TCR clone 31673 (TRBV4-2, TRBJ1-1)
CASSQAGNTEAFC

SEQ ID NO: 63347 - protein, 11 aa, Homo sapiens
  CDR3 for alpha chain variable domain of TCR clone 31674 (TRAV13-2, TRAJ54)
RAVQGAQKLVF

SEQ ID NO: 63348 - protein, 15 aa, Homo sapiens
  CDR3 for beta chain variable domain of TCR clone 31674 (TRBV4-1, TRBJ1-4)
CASSDTGGTNEKLFF

SEQ ID NO: 63349 - protein, 12 aa, Homo sapiens
  CDR3 for alpha chain variable domain of TCR clone 31675 (TRAV21, TRAJ11)
CAATSGYSTLTF

SEQ ID NO: 63350 - protein, 14 aa, Homo sapiens
  CDR3 for beta chain variable domain of TCR clone 31675 (TRBV20-1, TRBJ2-7)
CSATELAGVGEQYF

SEQ ID NO: 63351 - protein, 14 aa, Homo sapiens
  CDR3 for alpha chain variable domain of TCR clone 31676 (TRAV21, TRAJ3)
CAVTGYSSASKIIF

SEQ ID NO: 63352 - protein, 15 aa, Homo sapiens
  CDR3 for beta chain variable domain of TCR clone 31676 (TRBV7-3, TRBJ2-3)
CASSLTSGETDTQYF

SEQ ID NO: 63353 - protein, 14 aa, Homo sapiens
  CDR3 for alpha chain variable domain of TCR clone 31677 (TRAV29/DV5, TRAJ48)
CAAIALFGNEKLTF

SEQ ID NO: 63354 - protein, 15 aa, Homo sapiens
  CDR3 for beta chain variable domain of TCR clone 31677 (TRBV7-2, TRBJ2-1)
CASTHGTGIYNEQFF

SEQ ID NO: 63355 - protein, 11 aa, Homo sapiens
  CDR3 for alpha chain variable domain of TCR clone 31678 (TRAV3, TRAJ21)
CAVGSFNKFYF

SEQ ID NO: 63356 - protein, 16 aa, Homo sapiens
  CDR3 for beta chain variable domain of TCR clone 31678 (TRBV12-4, TRBJ1-5)
CASRQPVEGSNQLQHF

SEQ ID NO: 63357 - protein, 14 aa, Homo sapiens
  CDR3 for alpha chain variable domain of TCR clone 31679 (TRAV17, TRAJ57)
CATDPQGGSEKLVF

SEQ ID NO: 63358 - protein, 16 aa, Homo sapiens
  CDR3 for beta chain variable domain of TCR clone 31679 (TRBV12-5, TRBJ2-5)
CASGPRTSGNQETQYF

SEQ ID NO: 63359 - protein, 13 aa, Homo sapiens
  CDR3 for alpha chain variable domain of TCR clone 31680 (TRAV1-2, TRAJ9)
CAALNTGGFETIF

SEQ ID NO: 63360 - protein, 13 aa, Homo sapiens
  CDR3 for beta chain variable domain of TCR clone 31680 (TRBV19, TRBJ1-2)
RASSVPGQDGYTF

SEQ ID NO: 63361 - protein, 13 aa, Homo sapiens
  CDR3 for alpha chain variable domain of TCR clone 31681 (TRAV29/DV5, TRAJ54)
CAAHLQGAQKLVF

SEQ ID NO: 63362 - protein, 13 aa, Homo sapiens
  CDR3 for beta chain variable domain of TCR clone 31681 (TRBV7-9, TRBJ1-2)
CASSLKQNYGYTF

SEQ ID NO: 63363 - protein, 11 aa, Homo sapiens
  CDR3 for alpha chain variable domain of TCR clone 31682 (TRAV13-1, TRAJ40)
CAVPGTYKYIF

SEQ ID NO: 63364 - protein, 13 aa, Homo sapiens
  CDR3 for beta chain variable domain of TCR clone 31682 (TRBV19, TRBJ1-5)
CASSIGGNQPQHF

SEQ ID NO: 63365 - protein, 17 aa, Homo sapiens
  CDR3 for alpha chain variable domain of TCR clone 31683 (TRAV2, TRAJ10)
CAVEDQRSREEETNSPL

SEQ ID NO: 63366 - protein, 16 aa, Homo sapiens
  CDR3 for beta chain variable domain of TCR clone 31683 (TRBV18, TRBJ1-5)
CASSPSTGNSNQPQHF

SEQ ID NO: 63367 - protein, 13 aa, Homo sapiens
  CDR3 for alpha chain variable domain of TCR clone 31684 (TRAV16, TRAJ28)
CALTGAGSYQLTF

SEQ ID NO: 63368 - protein, 16 aa, Homo sapiens
  CDR3 for beta chain variable domain of TCR clone 31684 (TRBV28, TRBJ1-5)
CASSLTGQGWNQTQHF

SEQ ID NO: 63369 - protein, 15 aa, Homo sapiens
  CDR3 for alpha chain variable domain of TCR clone 31685 (TRAV3, TRAJ5)
CAVRDLDTGRRALTF

SEQ ID NO: 63370 - protein, 13 aa, Homo sapiens
  CDR3 for beta chain variable domain of TCR clone 31685 (TRBV12-4, TRBJ2-7)
CAISPTETYEQYF

SEQ ID NO: 63371 - protein, 12 aa, Homo sapiens
  CDR3 for alpha chain variable domain of TCR clone 31686 (TRAV8-2, TRAJ45)
CVQGGGADGLTF

SEQ ID NO: 63372 - protein, 15 aa, Homo sapiens
  CDR3 for beta chain variable domain of TCR clone 31686 (TRBV19, TRBJ1-1)
CASSIRRQMNTGAFF

SEQ ID NO: 63373 - protein, 16 aa, Homo sapiens
  CDR3 for alpha chain variable domain of TCR clone 31687 (TRAV38-1, TRAJ37)
CAFKGDGSSNTGKLIF

SEQ ID NO: 63374 - protein, 13 aa, Homo sapiens
  CDR3 for beta chain variable domain of TCR clone 31687 (TRBV12-4, TRBJ2-5)
CASSLFRRETQYL

SEQ ID NO: 63375 - protein, 14 aa, Homo sapiens
  CDR3 for alpha chain variable domain of TCR clone 31688 (TRAV29/DV5, TRAJ57)
CAASEMGGSEKLVF

SEQ ID NO: 63376 - protein, 14 aa, Homo sapiens
  CDR3 for beta chain variable domain of TCR clone 31688 (TRBV5-4, TRBJ1-4)
CASSLNLGREKLFF

SEQ ID NO: 63377 - protein, 14 aa, Homo sapiens
  CDR3 for alpha chain variable domain of TCR clone 31689 (TRAV1-2, TRAJ8)
CAVREDTGFQKLVF

SEQ ID NO: 63378 - protein, 15 aa, Homo sapiens
  CDR3 for beta chain variable domain of TCR clone 31689 (TRBV7-3, TRBJ2-1)
CASSLSSGSFDEQFF

SEQ ID NO: 63379 - protein, 14 aa, Homo sapiens
  CDR3 for alpha chain variable domain of TCR clone 31690 (TRAV35, TRAJ13)
CAGSPSGGYQKATF

SEQ ID NO: 63380 - protein, 17 aa, Homo sapiens
  CDR3 for beta chain variable domain of TCR clone 31690 (TRBV7-6, TRBJ2-5)
CASSPGLADPWGETQYF

SEQ ID NO: 63381 - protein, 13 aa, Homo sapiens
  CDR3 for alpha chain variable domain of TCR clone 31691 (TRAV13-1, TRAJ11)
CAASIRGYSTLTF

SEQ ID NO: 63382 - protein, 14 aa, Homo sapiens
  CDR3 for beta chain variable domain of TCR clone 31691 (TRBV4-3, TRBJ2-1)
YASGLDRAYNEQFF

SEQ ID NO: 63383 - protein, 14 aa, Homo sapiens
  CDR3 for alpha chain variable domain of TCR clone 31692 (TRAV1-1, TRAJ27)
CAVIYNTNAGKSTF

SEQ ID NO: 63384 - protein, 14 aa, Homo sapiens
  CDR3 for beta chain variable domain of TCR clone 31692 (TRBV4-1, TRBJ2-5)
CASSRSGSGETQYF

SEQ ID NO: 63385 - protein, 16 aa, Homo sapiens
  CDR3 for alpha chain variable domain of TCR clone 31693 (TRAV30, TRAJ24)
CGTEIVDADSWGKFQF

SEQ ID NO: 63386 - protein, 12 aa, Homo sapiens
  CDR3 for beta chain variable domain of TCR clone 31693 (TRBV12-4, TRBJ2-3)
CASSLGQDTQYF

SEQ ID NO: 63387 - protein, 14 aa, Homo sapiens
  CDR3 for alpha chain variable domain of TCR clone 31694 (TRAV21, TRAJ23)
CAIMIYNQGGKLIS

SEQ ID NO: 63388 - protein, 13 aa, Homo sapiens
  CDR3 for beta chain variable domain of TCR clone 31694 (TRBV29-1, TRBJ2-1)
CSVEGGRVNEQFF

SEQ ID NO: 63389 - protein, 14 aa, Homo sapiens
  CDR3 for alpha chain variable domain of TCR clone 31695 (TRAV29/DV5, TRAJ32)
CAAAYGGATNKLIF

SEQ ID NO: 63390 - protein, 11 aa, Homo sapiens
  CDR3 for beta chain variable domain of TCR clone 31695 (TRBV11-2, TRBJ2-2)
CASSLPGKLFF

SEQ ID NO: 63391 - protein, 18 aa, Homo sapiens
  CDR3 for alpha chain variable domain of TCR clone 31696 (TRAV21, TRAJ52)
CAVRPSPAGGTSYGKLTF

SEQ ID NO: 63392 - protein, 17 aa, Homo sapiens
  CDR3 for beta chain variable domain of TCR clone 31696 (TRBV7-2, TRBJ2-7)
CASSLVGAGGARNEQYF

SEQ ID NO: 63393 - protein, 16 aa, Homo sapiens
  CDR3 for alpha chain variable domain of TCR clone 31697 (TRAV30, TRAJ48)
CGTEIKSNFGNEKLTF

SEQ ID NO: 63394 - protein, 17 aa, Homo sapiens
  CDR3 for beta chain variable domain of TCR clone 31697 (TRBV27, TRBJ2-1)
CASSSERGGQSEDEQFF

SEQ ID NO: 63395 - protein, 14 aa, Homo sapiens
  CDR3 for alpha chain variable domain of TCR clone 31698 (TRAV8-3, TRAJ4)
CAVGAAGGYNKLIF

SEQ ID NO: 63396 - protein, 15 aa, Homo sapiens
  CDR3 for beta chain variable domain of TCR clone 31698 (TRBV6-5, TRBJ2-1)
CTSSYDAGAGNEQFF

SEQ ID NO: 63397 - protein, 14 aa, Homo sapiens
  CDR3 for alpha chain variable domain of TCR clone 31699 (TRAV34, TRAJ44)
CGAGGTGTASKLTF

SEQ ID NO: 63398 - protein, 15 aa, Homo sapiens
  CDR3 for beta chain variable domain of TCR clone 31699 (TRBV5-1, TRBJ2-1)
CASSPPRAPYNEQFF

SEQ ID NO: 63399 - protein, 10 aa, Homo sapiens
  CDR3 for alpha chain variable domain of TCR clone 31700 (TRAV17, TRAJ36)
CATVAGNLFF

SEQ ID NO: 63400 - protein, 12 aa, Homo sapiens
  CDR3 for beta chain variable domain of TCR clone 31700 (TRBV11-2, TRBJ2-4)
CAGSSASGSEYF

SEQ ID NO: 63401 - protein, 12 aa, Homo sapiens
  CDR3 for alpha chain variable domain of TCR clone 31701 (TRAV21, TRAJ49)
CVVNDGGNQFYF

SEQ ID NO: 63402 - protein, 14 aa, Homo sapiens
  CDR3 for beta chain variable domain of TCR clone 31701 (TRBV18, TRBJ2-7)
CASSPRGGSYEQYF

SEQ ID NO: 63403 - protein, 12 aa, Homo sapiens
  CDR3 for alpha chain variable domain of TCR clone 31702 (TRAV25, TRAJ48)
CAGDFGNEKLTF

SEQ ID NO: 63404 - protein, 12 aa, Homo sapiens
  CDR3 for beta chain variable domain of TCR clone 31702 (TRBV2, TRBJ2-5)
CASKEYGETQCF

SEQ ID NO: 63405 - protein, 11 aa, Homo sapiens
  CDR3 for alpha chain variable domain of TCR clone 31703 (TRAV17, TRAJ43)
CATPRSNDMRF

SEQ ID NO: 63406 - protein, 12 aa, Homo sapiens
  CDR3 for beta chain variable domain of TCR clone 31703 (TRBV11-2, TRBJ2-2)
CASSLGGGELFF

SEQ ID NO: 63407 - protein, 15 aa, Homo sapiens
  CDR3 for alpha chain variable domain of TCR clone 31704 (TRAV8-2, TRAJ16)
WVVSDGFSDGQKLLF

SEQ ID NO: 63408 - protein, 14 aa, Homo sapiens
  CDR3 for beta chain variable domain of TCR clone 31704 (TRBV7-3, TRBJ1-1)
CASSLGTGYTEAFF

SEQ ID NO: 63409 - protein, 13 aa, Homo sapiens
  CDR3 for alpha chain variable domain of TCR clone 31705 (TRAV8-3, TRAJ43)
CAAGPDSNNDMRF

SEQ ID NO: 63410 - protein, 14 aa, Homo sapiens
  CDR3 for beta chain variable domain of TCR clone 31705 (TRBV19, TRBJ2-1)
CASPTFVLSGEQFF

SEQ ID NO: 63411 - protein, 14 aa, Homo sapiens
  CDR3 for alpha chain variable domain of TCR clone 31706 (TRAV12-2, TRAJ17)
CAVLFKAAGNKLTF

SEQ ID NO: 63412 - protein, 17 aa, Homo sapiens
  CDR3 for beta chain variable domain of TCR clone 31706 (TRBV20-1, TRBJ2-2)
CNASGSGQGGLTGELFF

SEQ ID NO: 63413 - protein, 14 aa, Homo sapiens
  CDR3 for alpha chain variable domain of TCR clone 31707 (TRAV9-2, TRAJ35)
CALRSIGFGNVLHC

SEQ ID NO: 63414 - protein, 15 aa, Homo sapiens
  CDR3 for beta chain variable domain of TCR clone 31707 (TRBV25-1, TRBJ1-4)
CASSKRIATNEKLFF

SEQ ID NO: 63415 - protein, 12 aa, Homo sapiens
  CDR3 for alpha chain variable domain of TCR clone 31708 (TRAV12-2, TRAJ10)
WGVTGGGNKLTF

SEQ ID NO: 63416 - protein, 14 aa, Homo sapiens
  CDR3 for beta chain variable domain of TCR clone 31708 (TRBV18, TRBJ2-7)
CASSPRGGAYEQYF

SEQ ID NO: 63417 - protein, 12 aa, Homo sapiens
  CDR3 for alpha chain variable domain of TCR clone 31709 (TRAV3, TRAJ39)
CAVIEWSNMLTF

SEQ ID NO: 63418 - protein, 14 aa, Homo sapiens
  CDR3 for beta chain variable domain of TCR clone 31709 (TRBV7-8, TRBJ2-3)
CASSFPDRQDTQYF

SEQ ID NO: 63419 - protein, 10 aa, Homo sapiens
  CDR3 for alpha chain variable domain of TCR clone 31710 (TRAV16, TRAJ22)
SAMYLRQLTF

SEQ ID NO: 63420 - protein, 15 aa, Homo sapiens
  CDR3 for beta chain variable domain of TCR clone 31710 (TRBV7-9, TRBJ1-6)
CASSSPGRGNSPLHV

SEQ ID NO: 63421 - protein, 14 aa, Homo sapiens
  CDR3 for alpha chain variable domain of TCR clone 31711 (TRAV12-3, TRAJ42)
CAMNYGGSQGNLIF

SEQ ID NO: 63422 - protein, 13 aa, Homo sapiens
  CDR3 for beta chain variable domain of TCR clone 31711 (TRBV4-1, TRBJ2-2)
CASSQENTGELVF

SEQ ID NO: 63423 - protein, 16 aa, Homo sapiens
  CDR3 for alpha chain variable domain of TCR clone 31712 (TRAV30, TRAJ24)
CGTEIVDADSWGKFQF

SEQ ID NO: 63424 - protein, 14 aa, Homo sapiens
  CDR3 for beta chain variable domain of TCR clone 31712 (TRBV12-5, TRBJ2-5)
GASGSRTHQETQYF

SEQ ID NO: 63425 - protein, 18 aa, Homo sapiens
  CDR3 for alpha chain variable domain of TCR clone 31713 (TRAV13-1, TRAJ52)
CAASKRSAGGTSYGKLTF

SEQ ID NO: 63426 - protein, 13 aa, Homo sapiens
  CDR3 for beta chain variable domain of TCR clone 31713 (TRBV12-3, TRBJ1-2)
CASSLRQGKGHTF

SEQ ID NO: 63427 - protein, 10 aa, Homo sapiens
  CDR3 for alpha chain variable domain of TCR clone 31714 (TRAV1-2, TRAJ23)
CAAWAGKLIF

SEQ ID NO: 63428 - protein, 17 aa, Homo sapiens
  CDR3 for beta chain variable domain of TCR clone 31714 (TRBV7-3, TRBJ2-3)
CASSPGGLAGFGDTQYF

SEQ ID NO: 63429 - protein, 14 aa, Homo sapiens
  CDR3 for alpha chain variable domain of TCR clone 31715 (TRAV13-1, TRAJ33)
CAASSRDSNYQLIW

SEQ ID NO: 63430 - protein, 13 aa, Homo sapiens
  CDR3 for beta chain variable domain of TCR clone 31715 (TRBV7-9, TRBJ2-3)
CASSLPGTDTQYF

SEQ ID NO: 63431 - protein, 12 aa, Homo sapiens
  CDR3 for alpha chain variable domain of TCR clone 31716 (TRAV23/DV6, TRAJ30)
CAASKGDDKIIF

SEQ ID NO: 63432 - protein, 17 aa, Homo sapiens
  CDR3 for beta chain variable domain of TCR clone 31716 (TRBV13, TRBJ2-3)
CVSSLSRVAGGRNTQYF

SEQ ID NO: 63433 - protein, 15 aa, Homo sapiens
  CDR3 for alpha chain variable domain of TCR clone 31717 (TRAV25, TRAJ53)
CPTSNSGGRNYKLTF

SEQ ID NO: 63434 - protein, 14 aa, Homo sapiens
  CDR3 for beta chain variable domain of TCR clone 31717 (TRBV11-2, TRBJ2-3)
CASSRLARTDTQYF

SEQ ID NO: 63435 - protein, 13 aa, Homo sapiens
  CDR3 for alpha chain variable domain of TCR clone 31718 (TRAV12-2, TRAJ39)
CAVNNNAGNMLTF

SEQ ID NO: 63436 - protein, 13 aa, Homo sapiens
  CDR3 for beta chain variable domain of TCR clone 31718 (TRBV2, TRBJ1-5)
CATAGQGNQPQHF

SEQ ID NO: 63437 - protein, 12 aa, Homo sapiens
  CDR3 for alpha chain variable domain of TCR clone 31719 (TRAV16, TRAJ10)
CSRTGGGNKLTF

SEQ ID NO: 63438 - protein, 15 aa, Homo sapiens
  CDR3 for beta chain variable domain of TCR clone 31719 (TRBV6-3, TRBJ2-7)
CASSSPGTVFYGQYF

SEQ ID NO: 63439 - protein, 11 aa, Homo sapiens
  CDR3 for alpha chain variable domain of TCR clone 31720 (TRAV1-2, TRAJ31)
CAVNNTARLMF

SEQ ID NO: 63440 - protein, 15 aa, Homo sapiens
  CDR3 for beta chain variable domain of TCR clone 31720 (TRBV28, TRBJ2-1)
CASSIIAGGRSEQFF

SEQ ID NO: 63441 - protein, 12 aa, Homo sapiens
  CDR3 for alpha chain variable domain of TCR clone 31721 (TRAV12-1, TRAJ40)
CVFYSGTYKYIF

SEQ ID NO: 63442 - protein, 18 aa, Homo sapiens
  CDR3 for beta chain variable domain of TCR clone 31721 (TRBV12-4, TRBJ2-2)
CASSLVAGTRGRTGEQFF

SEQ ID NO: 63443 - protein, 13 aa, Homo sapiens
  CDR3 for alpha chain variable domain of TCR clone 31722 (TRAV16, TRAJ10)
CDPAREEETNSPL

SEQ ID NO: 63444 - protein, 15 aa, Homo sapiens
  CDR3 for beta chain variable domain of TCR clone 31722 (TRBV6-3, TRBJ2-7)
CASSSPGTVFYEQYF

SEQ ID NO: 63445 - protein, 14 aa, Homo sapiens
  CDR3 for alpha chain variable domain of TCR clone 31723 (TRAV1-2, TRAJ8)
CAVREDTGFQKLVF

SEQ ID NO: 63446 - protein, 14 aa, Homo sapiens
  CDR3 for beta chain variable domain of TCR clone 31723 (TRBV20-1, TRBJ2-7)
CSAKRGRSSYEQYF

SEQ ID NO: 63447 - protein, 11 aa, Homo sapiens
  CDR3 for alpha chain variable domain of TCR clone 31724 (TRAV2, TRAJ33)
CAVESNYQLIW

SEQ ID NO: 63448 - protein, 15 aa, Homo sapiens
  CDR3 for beta chain variable domain of TCR clone 31724 (TRBV19, TRBJ1-1)
YASTSGQIQNTEAFF

SEQ ID NO: 63449 - protein, 12 aa, Homo sapiens
  CDR3 for alpha chain variable domain of TCR clone 31725 (TRAV12-3, TRAJ17)
CAMTLTGNKLTF

SEQ ID NO: 63450 - protein, 12 aa, Homo sapiens
  CDR3 for beta chain variable domain of TCR clone 31725 (TRBV28, TRBJ2-7)
CASSFSSYEQYF

SEQ ID NO: 63451 - protein, 13 aa, Homo sapiens
  CDR3 for alpha chain variable domain of TCR clone 31726 (TRAV12-1, TRAJ16)
CVVNGPDGQKLLF

SEQ ID NO: 63452 - protein, 13 aa, Homo sapiens
  CDR3 for beta chain variable domain of TCR clone 31726 (TRBV2, TRBJ1-1)
CARSPTGGFHAFF

SEQ ID NO: 63453 - protein, 16 aa, Homo sapiens
  CDR3 for alpha chain variable domain of TCR clone 31727 (TRAV26-1, TRAJ42)
CIVRVATGGSQGNLIF

SEQ ID NO: 63454 - protein, 14 aa, Homo sapiens
  CDR3 for beta chain variable domain of TCR clone 31727 (TRBV7-2, TRBJ2-7)
CASSPKTSFYEQYF

SEQ ID NO: 63455 - protein, 14 aa, Homo sapiens
  CDR3 for alpha chain variable domain of TCR clone 31728 (TRAV35, TRAJ33)
CAGSSQDSNYQLIW

SEQ ID NO: 63456 - protein, 15 aa, Homo sapiens
  CDR3 for beta chain variable domain of TCR clone 31728 (TRBV9, TRBJ1-6)
CASSVAGTGDSPLHF

SEQ ID NO: 63457 - protein, 13 aa, Homo sapiens
  CDR3 for alpha chain variable domain of TCR clone 31729 (TRAV8-6, TRAJ49)
CAVITNTGNQFYF

SEQ ID NO: 63458 - protein, 12 aa, Homo sapiens
  CDR3 for beta chain variable domain of TCR clone 31729 (TRBV7-8, TRBJ2-7)
CASSLGDREQYF

SEQ ID NO: 63459 - protein, 15 aa, Homo sapiens
  CDR3 for alpha chain variable domain of TCR clone 31730 (TRAV17, TRAJ35)
CATAFVVGFGNVLHC

SEQ ID NO: 63460 - protein, 15 aa, Homo sapiens
  CDR3 for beta chain variable domain of TCR clone 31730 (TRBV7-9, TRBJ2-7)
CASSLALAEAYEQYF

SEQ ID NO: 63461 - protein, 15 aa, Homo sapiens
  CDR3 for alpha chain variable domain of TCR clone 31731 (TRAV2, TRAJ22)
CAVPSRGGAARQLTF

SEQ ID NO: 63462 - protein, 11 aa, Homo sapiens
  CDR3 for beta chain variable domain of TCR clone 31731 (TRBV27, TRBJ2-3)
CASSLGDTQYF

SEQ ID NO: 63463 - protein, 14 aa, Homo sapiens
  CDR3 for alpha chain variable domain of TCR clone 31732 (TRAV35, TRAJ13)
CAGSPSGGYQKVTF

SEQ ID NO: 63464 - protein, 13 aa, Homo sapiens
  CDR3 for beta chain variable domain of TCR clone 31732 (TRBV29-1, TRBJ1-1)
CSVGDRRNTEAFF

SEQ ID NO: 63465 - protein, 14 aa, Homo sapiens
  CDR3 for alpha chain variable domain of TCR clone 31733 (TRAV9-2, TRAJ39)
CALYIYNAGNVLTF

SEQ ID NO: 63466 - protein, 14 aa, Homo sapiens
  CDR3 for beta chain variable domain of TCR clone 31733 (TRBV6-1, TRBJ1-3)
CASVQGGGGNTIYF

SEQ ID NO: 63467 - protein, 14 aa, Homo sapiens
  CDR3 for alpha chain variable domain of TCR clone 31734 (TRAV12-1, TRAJ9)
CVVNRGTGGFKTIF

SEQ ID NO: 63468 - protein, 15 aa, Homo sapiens
  CDR3 for beta chain variable domain of TCR clone 31734 (TRBV5-7, TRBJ2-7)
CASSLGPGRGHEQYF

SEQ ID NO: 63469 - protein, 11 aa, Homo sapiens
  CDR3 for alpha chain variable domain of TCR clone 31735 (TRAV2, TRAJ33)
CAVESNYQLIW

SEQ ID NO: 63470 - protein, 13 aa, Homo sapiens
  CDR3 for beta chain variable domain of TCR clone 31735 (TRBV19, TRBJ1-2)
CASSVPGQDGYTF

SEQ ID NO: 63471 - protein, 14 aa, Homo sapiens
  CDR3 for alpha chain variable domain of TCR clone 31736 (TRAV8-6, TRAJ54)
CAVSSALGAQKLVF

SEQ ID NO: 63472 - protein, 15 aa, Homo sapiens
  CDR3 for beta chain variable domain of TCR clone 31736 (TRBV4-1, TRBJ1-6)
CASSAGQGYNSPLHF

SEQ ID NO: 63473 - protein, 14 aa, Homo sapiens
  CDR3 for alpha chain variable domain of TCR clone 31737 (TRAV9-2, TRAJ39)
CALYIYNAGNMLTF

SEQ ID NO: 63474 - protein, 18 aa, Homo sapiens
  CDR3 for beta chain variable domain of TCR clone 31737 (TRBV27, TRBJ2-1)
CASGNRAVGVGSKNEQFF

SEQ ID NO: 63475 - protein, 15 aa, Homo sapiens
  CDR3 for alpha chain variable domain of TCR clone 31738 (TRAV4, TRAJ39)
CLAGPNNNAGNMLTF

SEQ ID NO: 63476 - protein, 14 aa, Homo sapiens
  CDR3 for beta chain variable domain of TCR clone 31738 (TRBV19, TRBJ2-1)
CASPTFVLSGEQFF

SEQ ID NO: 63477 - protein, 15 aa, Homo sapiens
  CDR3 for alpha chain variable domain of TCR clone 31739 (TRAV12-3, TRAJ6)
CAMIATTGGSYIPTF

SEQ ID NO: 63478 - protein, 16 aa, Homo sapiens
  CDR3 for beta chain variable domain of TCR clone 31739 (TRBV20-1, TRBJ1-2)
CSASMGQGVANYGYTF

SEQ ID NO: 63479 - protein, 13 aa, Homo sapiens
  CDR3 for alpha chain variable domain of TCR clone 31740 (TRAV27, TRAJ49)
CVPRPYTGNQFYF

SEQ ID NO: 63480 - protein, 16 aa, Homo sapiens
  CDR3 for beta chain variable domain of TCR clone 31740 (TRBV4-1, TRBJ1-2)
CASSQDAGQVLYGYTF

SEQ ID NO: 63481 - protein, 15 aa, Homo sapiens
  CDR3 for alpha chain variable domain of TCR clone 31741 (TRAV12-1, TRAJ44)
CVAELPTGTASKLTF

SEQ ID NO: 63482 - protein, 13 aa, Homo sapiens
  CDR3 for beta chain variable domain of TCR clone 31741 (TRBV6-5, TRBJ2-5)
CASSPQGGETQYF

SEQ ID NO: 63483 - protein, 14 aa, Homo sapiens
  CDR3 for alpha chain variable domain of TCR clone 31742 (TRAV1-2, TRAJ16)
CAVNRFSDGQKLLF

SEQ ID NO: 63484 - protein, 15 aa, Homo sapiens
  CDR3 for beta chain variable domain of TCR clone 31742 (TRBV20-1, TRBJ1-5)
CSAFKNGRRNQPQHF

SEQ ID NO: 63485 - protein, 11 aa, Homo sapiens
  CDR3 for alpha chain variable domain of TCR clone 31743 (TRAV21, TRAJ48)
CAVDGNENLTF

SEQ ID NO: 63486 - protein, 16 aa, Homo sapiens
  CDR3 for beta chain variable domain of TCR clone 31743 (TRBV12-4, TRBJ1-5)
CASSSGPRGSNQPQHF

SEQ ID NO: 63487 - protein, 17 aa, Homo sapiens
  CDR3 for alpha chain variable domain of TCR clone 31744 (TRAV26-2, TRAJ42)
CILRDVGYGGSQGNLIC

SEQ ID NO: 63488 - protein, 16 aa, Homo sapiens
  CDR3 for beta chain variable domain of TCR clone 31744 (TRBV12-4, TRBJ2-7)
CASSLIGGTGTYEQYF

SEQ ID NO: 63489 - protein, 15 aa, Homo sapiens
  CDR3 for alpha chain variable domain of TCR clone 31745 (TRAV21, TRAJ53)
CATLNSGGSNYKLTF

SEQ ID NO: 63490 - protein, 11 aa, Homo sapiens
  CDR3 for beta chain variable domain of TCR clone 31745 (TRBV19, TRBJ1-1)
CASSIGSEAFF

SEQ ID NO: 63491 - protein, 14 aa, Homo sapiens
  CDR3 for alpha chain variable domain of TCR clone 31746 (TRAV12-2, TRAJ5)
CAVDRSTGRRALTF

SEQ ID NO: 63492 - protein, 12 aa, Homo sapiens
  CDR3 for beta chain variable domain of TCR clone 31746 (TRBV19, TRBJ1-5)
CASSIAQQPQHF

SEQ ID NO: 63493 - protein, 15 aa, Homo sapiens
  CDR3 for alpha chain variable domain of TCR clone 31747 (TRAV8-2, TRAJ40)
CVVLGTTSGTYKYTF

SEQ ID NO: 63494 - protein, 16 aa, Homo sapiens
  CDR3 for beta chain variable domain of TCR clone 31747 (TRBV7-3, TRBJ2-1)
CASSLEGYRSYNEQFF

SEQ ID NO: 63495 - protein, 18 aa, Homo sapiens
  CDR3 for alpha chain variable domain of TCR clone 31748 (TRAV3, TRAJ21)
CAVRDIERGNFNKFYLDL

SEQ ID NO: 63496 - protein, 13 aa, Homo sapiens
  CDR3 for beta chain variable domain of TCR clone 31748 (TRBV27, TRBJ2-7)
CASSLTTGYEQYF

SEQ ID NO: 63497 - protein, 13 aa, Homo sapiens
  CDR3 for alpha chain variable domain of TCR clone 31749 (TRAV22, TRAJ29)
CAVGGIRKHTSCL

SEQ ID NO: 63498 - protein, 13 aa, Homo sapiens
  CDR3 for beta chain variable domain of TCR clone 31749 (TRBV4-2, TRBJ1-1)
CASSQAGNTEAFF

SEQ ID NO: 63499 - protein, 14 aa, Homo sapiens
  CDR3 for alpha chain variable domain of TCR clone 31750 (TRAV12-2, TRAJ5)
CAANRSTGRRALTF

SEQ ID NO: 63500 - protein, 12 aa, Homo sapiens
  CDR3 for beta chain variable domain of TCR clone 31750 (TRBV19, TRBJ1-5)
CASSIAQQPQHF

SEQ ID NO: 63501 - protein, 16 aa, Homo sapiens
  CDR3 for alpha chain variable domain of TCR clone 31751 (TRAV30, TRAJ24)
CGTEIVDADSWGKFQF

SEQ ID NO: 63502 - protein, 15 aa, Homo sapiens
  CDR3 for beta chain variable domain of TCR clone 31751 (TRBV7-2, TRBJ1-2)
CASSLVSGGDYGYTF

SEQ ID NO: 63503 - protein, 14 aa, Homo sapiens
  CDR3 for alpha chain variable domain of TCR clone 31752 (TRAV8-2, TRAJ4)
CVVSPSGGYNKLIF

SEQ ID NO: 63504 - protein, 15 aa, Homo sapiens
  CDR3 for beta chain variable domain of TCR clone 31752 (TRBV4-1, TRBJ1-4)
CASSDTGGANEKLFF

SEQ ID NO: 63505 - protein, 17 aa, Homo sapiens
  CDR3 for alpha chain variable domain of TCR clone 31753 (TRAV3, TRAJ6)
CAVRDGPRAGGSYIPTF

SEQ ID NO: 63506 - protein, 13 aa, Homo sapiens
  CDR3 for beta chain variable domain of TCR clone 31753 (TRBV7-3, TRBJ1-2)
CASSLKRGYGYTF

SEQ ID NO: 63507 - protein, 10 aa, Homo sapiens
  CDR3 for alpha chain variable domain of TCR clone 31754 (TRAV30, TRAJ48)
CGIGNEKLTF

SEQ ID NO: 63508 - protein, 14 aa, Homo sapiens
  CDR3 for beta chain variable domain of TCR clone 31754 (TRBV7-6, TRBJ2-3)
CSSSVAGGTDTQYF

SEQ ID NO: 63509 - protein, 12 aa, Homo sapiens
  CDR3 for alpha chain variable domain of TCR clone 31755 (TRAV21, TRAJ42)
CAVGGGQGNLIF

SEQ ID NO: 63510 - protein, 14 aa, Homo sapiens
  CDR3 for beta chain variable domain of TCR clone 31755 (TRBV12-4, TRBJ1-1)
CASSLGTGGTEAFF

SEQ ID NO: 63511 - protein, 11 aa, Homo sapiens
  CDR3 for alpha chain variable domain of TCR clone 31756 (TRAV21, TRAJ41)
CAVRSGYAPNF

SEQ ID NO: 63512 - protein, 13 aa, Homo sapiens
  CDR3 for beta chain variable domain of TCR clone 31756 (TRBV7-2, TRBJ2-5)
CASSQTSVETQYF

SEQ ID NO: 63513 - protein, 16 aa, Homo sapiens
  CDR3 for alpha chain variable domain of TCR clone 31757 (TRAV3, TRAJ3)
CAVRDRAKSSASKIIF

SEQ ID NO: 63514 - protein, 16 aa, Homo sapiens
  CDR3 for beta chain variable domain of TCR clone 31757 (TRBV20-1, TRBJ2-4)
CSAASLAELAKNIQYF

SEQ ID NO: 63515 - protein, 13 aa, Homo sapiens
  CDR3 for alpha chain variable domain of TCR clone 31758 (TRAV2, TRAJ40)
CAVVTSGTYKYIF

SEQ ID NO: 63516 - protein, 16 aa, Homo sapiens
  CDR3 for beta chain variable domain of TCR clone 31758 (TRBV10-3, TRBJ2-1)
CAISGVGDGGGGEQFF

SEQ ID NO: 63517 - protein, 14 aa, Homo sapiens
  CDR3 for alpha chain variable domain of TCR clone 31759 (TRAV27, TRAJ22)
CAGLPSGSARQLTF

SEQ ID NO: 63518 - protein, 14 aa, Homo sapiens
  CDR3 for beta chain variable domain of TCR clone 31759 (TRBV7-2, TRBJ2-7)
CASSPKTSFYEQYF

SEQ ID NO: 63519 - protein, 15 aa, Homo sapiens
  CDR3 for alpha chain variable domain of TCR clone 31760 (TRAV21, TRAJ24)
CTARSSTDSWGKLQF

SEQ ID NO: 63520 - protein, 13 aa, Homo sapiens
  CDR3 for beta chain variable domain of TCR clone 31760 (TRBV11-2, TRBJ2-5)
CASSSTGEETQYF

SEQ ID NO: 63521 - protein, 16 aa, Homo sapiens
  CDR3 for alpha chain variable domain of TCR clone 31761 (TRAV12-2, TRAJ10)
CAVNRVLTGGGNKLPF

SEQ ID NO: 63522 - protein, 12 aa, Homo sapiens
  CDR3 for beta chain variable domain of TCR clone 31761 (TRBV28, TRBJ2-7)
CASSFSSYEQYF

SEQ ID NO: 63523 - protein, 10 aa, Homo sapiens
  CDR3 for alpha chain variable domain of TCR clone 31762 (TRAV3, TRAJ20)
CAVRPSVTTT

SEQ ID NO: 63524 - protein, 15 aa, Homo sapiens
  CDR3 for beta chain variable domain of TCR clone 31762 (TRBV6-5, TRBJ2-1)
CASSYDAGAGNEQFF

SEQ ID NO: 63525 - protein, 12 aa, Homo sapiens
  CDR3 for alpha chain variable domain of TCR clone 31763 (TRAV30, TRAJ43)
CGTEERGNDMRF

SEQ ID NO: 63526 - protein, 13 aa, Homo sapiens
  CDR3 for beta chain variable domain of TCR clone 31763 (TRBV27, TRBJ2-7)
CASSFSQGYEQYV

SEQ ID NO: 63527 - protein, 13 aa, Homo sapiens
  CDR3 for alpha chain variable domain of TCR clone 31764 (TRAV12-2, TRAJ42)
CAVKRGSQGNLIF

SEQ ID NO: 63528 - protein, 16 aa, Homo sapiens
  CDR3 for beta chain variable domain of TCR clone 31764 (TRBV9, TRBJ2-2)
CASSATGKGNTGELFF

SEQ ID NO: 63529 - protein, 13 aa, Homo sapiens
  CDR3 for alpha chain variable domain of TCR clone 31765 (TRAV12-2, TRAJ39)
CAVNSNAGNMLTF

SEQ ID NO: 63530 - protein, 13 aa, Homo sapiens
  CDR3 for beta chain variable domain of TCR clone 31765 (TRBV2, TRBJ1-5)
CATAGPGNQPQHF

SEQ ID NO: 63531 - protein, 16 aa, Homo sapiens
  CDR3 for alpha chain variable domain of TCR clone 31766 (TRAV16, TRAJ52)
CALSAAGGTSYGRLTF

SEQ ID NO: 63532 - protein, 16 aa, Homo sapiens
  CDR3 for beta chain variable domain of TCR clone 31766 (TRBV12-4, TRBJ1-5)
CASSRPVGGSNQPQHF

SEQ ID NO: 63533 - protein, 13 aa, Homo sapiens
  CDR3 for alpha chain variable domain of TCR clone 31767 (TRAV12-2, TRAJ34)
CAVMGYNTDKLIF

SEQ ID NO: 63534 - protein, 15 aa, Homo sapiens
  CDR3 for beta chain variable domain of TCR clone 31767 (TRBV28, TRBJ2-1)
CASRTGAGVIARQFF

SEQ ID NO: 63535 - protein, 15 aa, Homo sapiens
  CDR3 for alpha chain variable domain of TCR clone 31768 (TRAV17, TRAJ52)
CATAAGGTSYGKLTF

SEQ ID NO: 63536 - protein, 14 aa, Homo sapiens
  CDR3 for beta chain variable domain of TCR clone 31768 (TRBV28, TRBJ1-5)
CASSLGVLVKPQHF

SEQ ID NO: 63537 - protein, 13 aa, Homo sapiens
  CDR3 for alpha chain variable domain of TCR clone 31769 (TRAV35, TRAJ53)
CAGQESSNYKLTF

SEQ ID NO: 63538 - protein, 11 aa, Homo sapiens
  CDR3 for beta chain variable domain of TCR clone 31769 (TRBV29-1, TRBJ2-5)
CREDRTGTQYF

SEQ ID NO: 63539 - protein, 14 aa, Homo sapiens
  CDR3 for alpha chain variable domain of TCR clone 31770 (TRAV3, TRAJ17)
CAVRERSCRQQANF

SEQ ID NO: 63540 - protein, 17 aa, Homo sapiens
  CDR3 for beta chain variable domain of TCR clone 31770 (TRBV13, TRBJ2-3)
CSSSLSRVAGGRNTQYF

SEQ ID NO: 63541 - protein, 15 aa, Homo sapiens
  CDR3 for alpha chain variable domain of TCR clone 31771 (TRAV3, TRAJ5)
CAVRDLDTGRRALTF

SEQ ID NO: 63542 - protein, 15 aa, Homo sapiens
  CDR3 for beta chain variable domain of TCR clone 31771 (TRBV20-1, TRBJ2-1)
CSARPPGGPGNEQFF

SEQ ID NO: 63543 - protein, 14 aa, Homo sapiens
  CDR3 for alpha chain variable domain of TCR clone 31772 (TRAV12-1, TRAJ3)
CGAARYSSASEIIF

SEQ ID NO: 63544 - protein, 15 aa, Homo sapiens
  CDR3 for beta chain variable domain of TCR clone 31772 (TRBV7-2, TRBJ2-6)
CASSREGSGANVLTF

SEQ ID NO: 63545 - protein, 11 aa, Homo sapiens
  CDR3 for alpha chain variable domain of TCR clone 31773 (TRAV3, TRAJ21)
CAVGNFNKFYF

SEQ ID NO: 63546 - protein, 15 aa, Homo sapiens
  CDR3 for beta chain variable domain of TCR clone 31773 (TRBV6-3, TRBJ2-1)
CASSAGLAGNNEQFF

SEQ ID NO: 63547 - protein, 14 aa, Homo sapiens
  CDR3 for alpha chain variable domain of TCR clone 31774 (TRAV12-2, TRAJ5)
CALNRSTGRRALTF

SEQ ID NO: 63548 - protein, 12 aa, Homo sapiens
  CDR3 for beta chain variable domain of TCR clone 31774 (TRBV19, TRBJ1-5)
CASSIAQQPQHF

SEQ ID NO: 63549 - protein, 13 aa, Homo sapiens
  CDR3 for alpha chain variable domain of TCR clone 31775 (TRAV27, TRAJ3)
ASLRSSSASKIIF

SEQ ID NO: 63550 - protein, 15 aa, Homo sapiens
  CDR3 for beta chain variable domain of TCR clone 31775 (TRBV28, TRBJ1-3)
CASSMGWASGNTIYF

SEQ ID NO: 63551 - protein, 14 aa, Homo sapiens
  CDR3 for alpha chain variable domain of TCR clone 31776 (TRAV1-2, TRAJ16)
CAVNRFSDGQKLLF

SEQ ID NO: 63552 - protein, 16 aa, Homo sapiens
  CDR3 for beta chain variable domain of TCR clone 31776 (TRBV7-8, TRBJ2-4)
CASSAERTLAKNIQYF

SEQ ID NO: 63553 - protein, 11 aa, Homo sapiens
  CDR3 for alpha chain variable domain of TCR clone 31777 (TRAV21, TRAJ11)
CAVNGYSTLTF

SEQ ID NO: 63554 - protein, 11 aa, Homo sapiens
  CDR3 for beta chain variable domain of TCR clone 31777 (TRBV19, TRBJ1-1)
CASIIGSEAFF

SEQ ID NO: 63555 - protein, 20 aa, Homo sapiens
  CDR3 for alpha chain variable domain of TCR clone 31778 (TRAV16, TRAJ32)
CSRGRLSHVLGGGATNKLIF

SEQ ID NO: 63556 - protein, 15 aa, Homo sapiens
  CDR3 for beta chain variable domain of TCR clone 31778 (TRBV9, TRBJ1-6)
CASSVVGTGDSPLHF

SEQ ID NO: 63557 - protein, 14 aa, Homo sapiens
  CDR3 for alpha chain variable domain of TCR clone 31779 (TRAV1-2, TRAJ16)
CAVNRFSDGQKLLF

SEQ ID NO: 63558 - protein, 14 aa, Homo sapiens
  CDR3 for beta chain variable domain of TCR clone 31779 (TRBV20-1, TRBJ2-4)
CSASGRVGENSQYF

SEQ ID NO: 63559 - protein, 12 aa, Homo sapiens
  CDR3 for alpha chain variable domain of TCR clone 31780 (TRAV3, TRAJ27)
CAVGDKAGKSTF

SEQ ID NO: 63560 - protein, 13 aa, Homo sapiens
  CDR3 for beta chain variable domain of TCR clone 31780 (TRBV6-5, TRBJ2-5)
CASSPQGGETQYF

SEQ ID NO: 63561 - protein, 15 aa, Homo sapiens
  CDR3 for alpha chain variable domain of TCR clone 31781 (TRAV12-3, TRAJ6)
CAMSATTGGSYIPTF

SEQ ID NO: 63562 - protein, 16 aa, Homo sapiens
  CDR3 for beta chain variable domain of TCR clone 31781 (TRBV20-1, TRBJ1-2)
CSASMGQGVANYSYTF

SEQ ID NO: 63563 - protein, 13 aa, Homo sapiens
  CDR3 for alpha chain variable domain of TCR clone 31782 (TRAV1-1, TRAJ33)
CASHVDSNYQLIW

SEQ ID NO: 63564 - protein, 18 aa, Homo sapiens
  CDR3 for beta chain variable domain of TCR clone 31782 (TRBV20-1, TRBJ2-2)
CSARVQTARPSGTGELFF

SEQ ID NO: 63565 - protein, 15 aa, Homo sapiens
  CDR3 for alpha chain variable domain of TCR clone 31783 (TRAV27, TRAJ38)
CAARRNAGNNRKLIW

SEQ ID NO: 63566 - protein, 16 aa, Homo sapiens
  CDR3 for beta chain variable domain of TCR clone 31783 (TRBV24-1, TRBJ2-3)
CATSDPGTGATDTQYF

SEQ ID NO: 63567 - protein, 17 aa, Homo sapiens
  CDR3 for alpha chain variable domain of TCR clone 31784 (TRAV14/DV4, TRAJ4)
CAMREASGRGGYNKLIF

SEQ ID NO: 63568 - protein, 14 aa, Homo sapiens
  CDR3 for beta chain variable domain of TCR clone 31784 (TRBV19, TRBJ2-7)
CASSMVQGAIEQYF

SEQ ID NO: 63569 - protein, 15 aa, Homo sapiens
  CDR3 for alpha chain variable domain of TCR clone 31785 (TRAV3, TRAJ4)
CAVRDGTGGYNKLIF

SEQ ID NO: 63570 - protein, 13 aa, Homo sapiens
  CDR3 for beta chain variable domain of TCR clone 31785 (TRBV19, TRBJ1-2)
CASSVPGQDGYTF

SEQ ID NO: 63571 - protein, 15 aa, Homo sapiens
  CDR3 for alpha chain variable domain of TCR clone 31786 (TRAV13-1, TRAJ8)
CAASIPNTGFQKLVF

SEQ ID NO: 63572 - protein, 13 aa, Homo sapiens
  CDR3 for beta chain variable domain of TCR clone 31786 (TRBV5-4, TRBJ1-1)
CASSFQVNTGAFF

SEQ ID NO: 63573 - protein, 12 aa, Homo sapiens
  CDR3 for alpha chain variable domain of TCR clone 31787 (TRAV17, TRAJ49)
CATVTTGNQFYF

SEQ ID NO: 63574 - protein, 18 aa, Homo sapiens
  CDR3 for beta chain variable domain of TCR clone 31787 (TRBV11-2, TRBJ2-6)
CASSLSPFLGTGANVLTF

SEQ ID NO: 63575 - protein, 14 aa, Homo sapiens
  CDR3 for alpha chain variable domain of TCR clone 31788 (TRAV2, TRAJ9)
CPVEDRSGGFKTIF

SEQ ID NO: 63576 - protein, 11 aa, Homo sapiens
  CDR3 for beta chain variable domain of TCR clone 31788 (TRBV7-9, TRBJ2-5)
CASSLGETQYF

SEQ ID NO: 63577 - protein, 14 aa, Homo sapiens
  CDR3 for alpha chain variable domain of TCR clone 31789 (TRAV21, TRAJ28)
CAVGSGAGSYQLTF

SEQ ID NO: 63578 - protein, 14 aa, Homo sapiens
  CDR3 for beta chain variable domain of TCR clone 31789 (TRBV18, TRBJ1-4)
CAGSPGPNGEKLFF

SEQ ID NO: 63579 - protein, 13 aa, Homo sapiens
  CDR3 for alpha chain variable domain of TCR clone 31790 (TRAV26-1, TRAJ33)
CIVRVEGNYQLIW

SEQ ID NO: 63580 - protein, 16 aa, Homo sapiens
  CDR3 for beta chain variable domain of TCR clone 31790 (TRBV15, TRBJ2-7)
CATSRDRGRRGGEQYF

SEQ ID NO: 63581 - protein, 13 aa, Homo sapiens
  CDR3 for alpha chain variable domain of TCR clone 31791 (TRAV1-2, TRAJ9)
CAALNTGGFKTIF

SEQ ID NO: 63582 - protein, 17 aa, Homo sapiens
  CDR3 for beta chain variable domain of TCR clone 31791 (TRBV13, TRBJ2-3)
CASSPSRVAGGRNTQYF

SEQ ID NO: 63583 - protein, 13 aa, Homo sapiens
  CDR3 for alpha chain variable domain of TCR clone 31792 (TRAV12-2, TRAJ10)
CAVPTGGGDKLTF

SEQ ID NO: 63584 - protein, 14 aa, Homo sapiens
  CDR3 for beta chain variable domain of TCR clone 31792 (TRBV6-1, TRBJ1-3)
CASVQGGGGNTIYF

SEQ ID NO: 63585 - protein, 14 aa, Homo sapiens
  CDR3 for alpha chain variable domain of TCR clone 31793 (TRAV1-2, TRAJ16)
CAVNRFSDGQKLLF

SEQ ID NO: 63586 - protein, 16 aa, Homo sapiens
  CDR3 for beta chain variable domain of TCR clone 31793 (TRBV2, TRBJ1-4)
CASNLLQGATNEKLFF

SEQ ID NO: 63587 - protein, 16 aa, Homo sapiens
  CDR3 for alpha chain variable domain of TCR clone 31794 (TRAV21, TRAJ45)
CAVSWGSGGGADGFTF

SEQ ID NO: 63588 - protein, 14 aa, Homo sapiens
  CDR3 for beta chain variable domain of TCR clone 31794 (TRBV4-2, TRBJ1-2)
CASSPGGSNYGYTF

SEQ ID NO: 63589 - protein, 17 aa, Homo sapiens
  CDR3 for alpha chain variable domain of TCR clone 31795 (TRAV26-1, TRAJ53)
CIVRVDDSGGSNYKLTF

SEQ ID NO: 63590 - protein, 15 aa, Homo sapiens
  CDR3 for beta chain variable domain of TCR clone 31795 (TRBV4-1, TRBJ1-4)
CASSDTGGTNEKLFF

SEQ ID NO: 63591 - protein, 13 aa, Homo sapiens
  CDR3 for alpha chain variable domain of TCR clone 31796 (TRAV8-3, TRAJ43)
CAVGPDDNNDMRF

SEQ ID NO: 63592 - protein, 13 aa, Homo sapiens
  CDR3 for beta chain variable domain of TCR clone 31796 (TRBV29-1, TRBJ2-1)
CSVEGGRVNEQFF

SEQ ID NO: 63593 - protein, 18 aa, Homo sapiens
  CDR3 for alpha chain variable domain of TCR clone 31797 (TRAV9-2, TRAJ52)
CALSRHNAGGTSYGKLTF

SEQ ID NO: 63594 - protein, 16 aa, Homo sapiens
  CDR3 for beta chain variable domain of TCR clone 31797 (TRBV20-1, TRBJ1-2)
CSASMGQGVANYGYTF

SEQ ID NO: 63595 - protein, 15 aa, Homo sapiens
  CDR3 for alpha chain variable domain of TCR clone 31798 (TRAV3, TRAJ22)
CAVRDRDGSARQLTF

SEQ ID NO: 63596 - protein, 16 aa, Homo sapiens
  CDR3 for beta chain variable domain of TCR clone 31798 (TRBV5-4, TRBJ2-3)
CASQQPGAGGADTQYF

SEQ ID NO: 63597 - protein, 12 aa, Homo sapiens
  CDR3 for alpha chain variable domain of TCR clone 31799 (TRAV2, TRAJ10)
CAFTGGGNKLTF

SEQ ID NO: 63598 - protein, 14 aa, Homo sapiens
  CDR3 for beta chain variable domain of TCR clone 31799 (TRBV7-2, TRBJ2-2)
CASRGQGAAGELFF

SEQ ID NO: 63599 - protein, 12 aa, Homo sapiens
  CDR3 for alpha chain variable domain of TCR clone 31800 (TRAV36/DV7, TRAJ54)
CAVIRGAQKLVF

SEQ ID NO: 63600 - protein, 14 aa, Homo sapiens
  CDR3 for beta chain variable domain of TCR clone 31800 (TRBV7-3, TRBJ1-1)
CASSLKGGNTEAFF

SEQ ID NO: 63601 - protein, 12 aa, Homo sapiens
  CDR3 for alpha chain variable domain of TCR clone 31801 (TRAV17, TRAJ4)
CATYGGYNKLIF

SEQ ID NO: 63602 - protein, 13 aa, Homo sapiens
  CDR3 for beta chain variable domain of TCR clone 31801 (TRBV29-1, TRBJ2-2)
CSTTGVNTGELFF

SEQ ID NO: 63603 - protein, 14 aa, Homo sapiens
  CDR3 for alpha chain variable domain of TCR clone 31802 (TRAV38-1, TRAJ29)
CAFITPSGNTPLVF

SEQ ID NO: 63604 - protein, 14 aa, Homo sapiens
  CDR3 for beta chain variable domain of TCR clone 31802 (TRBV7-2, TRBJ1-1)
CASSFLTGTTEAFF

SEQ ID NO: 63605 - protein, 16 aa, Homo sapiens
  CDR3 for alpha chain variable domain of TCR clone 31803 (TRAV8-3, TRAJ13)
CAVGAYPSGGYQKVTF

SEQ ID NO: 63606 - protein, 15 aa, Homo sapiens
  CDR3 for beta chain variable domain of TCR clone 31803 (TRBV19, TRBJ1-5)
YASSIVWADNQPQHF

SEQ ID NO: 63607 - protein, 11 aa, Homo sapiens
  CDR3 for alpha chain variable domain of TCR clone 31804 (TRAV17, TRAJ9)
CGFTGGFKTIF

SEQ ID NO: 63608 - protein, 15 aa, Homo sapiens
  CDR3 for beta chain variable domain of TCR clone 31804 (TRBV20-1, TRBJ2-7)
CSARDRVSGMDEQYF

SEQ ID NO: 63609 - protein, 14 aa, Homo sapiens
  CDR3 for alpha chain variable domain of TCR clone 31805 (TRAV1-2, TRAJ16)
CSVNRFSDGQKLLF

SEQ ID NO: 63610 - protein, 13 aa, Homo sapiens
  CDR3 for beta chain variable domain of TCR clone 31805 (TRBV7-9, TRBJ1-2)
CASSLKQNYGYTF

SEQ ID NO: 63611 - protein, 14 aa, Homo sapiens
  CDR3 for alpha chain variable domain of TCR clone 31806 (TRAV12-2, TRAJ5)
CAVNWSTGRRALTF

SEQ ID NO: 63612 - protein, 12 aa, Homo sapiens
  CDR3 for beta chain variable domain of TCR clone 31806 (TRBV19, TRBJ1-5)
CASSIAQQPQHF

SEQ ID NO: 63613 - protein, 12 aa, Homo sapiens
  CDR3 for alpha chain variable domain of TCR clone 31807 (TRAV13-2, TRAJ23)
CAERHRGGKLIF

SEQ ID NO: 63614 - protein, 16 aa, Homo sapiens
  CDR3 for beta chain variable domain of TCR clone 31807 (TRBV20-1, TRBJ1-4)
CSAPGQGLLTNEKLVF

SEQ ID NO: 63615 - protein, 14 aa, Homo sapiens
  CDR3 for alpha chain variable domain of TCR clone 31808 (TRAV29/DV5, TRAJ36)
CAARRKTGANNLFF

SEQ ID NO: 63616 - protein, 14 aa, Homo sapiens
  CDR3 for beta chain variable domain of TCR clone 31808 (TRBV12-5, TRBJ2-5)
CVSGSRTHQETQYF

SEQ ID NO: 63617 - protein, 14 aa, Homo sapiens
  CDR3 for alpha chain variable domain of TCR clone 31809 (TRAV12-3, TRAJ10)
SHLPLTGGGNKLTF

SEQ ID NO: 63618 - protein, 14 aa, Homo sapiens
  CDR3 for beta chain variable domain of TCR clone 31809 (TRBV7-3, TRBJ1-1)
CASSLGTGYTEAFF

SEQ ID NO: 63619 - protein, 16 aa, Homo sapiens
  CDR3 for alpha chain variable domain of TCR clone 31810 (TRAV30, TRAJ24)
CGTEIVDADSWGKFQF

SEQ ID NO: 63620 - protein, 15 aa, Homo sapiens
  CDR3 for beta chain variable domain of TCR clone 31810 (TRBV7-9, TRBJ1-4)
CASSARTGGNDKLFF

SEQ ID NO: 63621 - protein, 13 aa, Homo sapiens
  CDR3 for alpha chain variable domain of TCR clone 31811 (TRAV12-2, TRAJ20)
CAVYPSNDYKISF

SEQ ID NO: 63622 - protein, 15 aa, Homo sapiens
  CDR3 for beta chain variable domain of TCR clone 31811 (TRBV27, TRBJ2-5)
CASSLYPRGGETQYF

SEQ ID NO: 63623 - protein, 14 aa, Homo sapiens
  CDR3 for alpha chain variable domain of TCR clone 31812 (TRAV13-1, TRAJ44)
CAAKATGTASKLTF

SEQ ID NO: 63624 - protein, 13 aa, Homo sapiens
  CDR3 for beta chain variable domain of TCR clone 31812 (TRBV27, TRBJ1-1)
CASSLSIGAEAFF

SEQ ID NO: 63625 - protein, 14 aa, Homo sapiens
  CDR3 for alpha chain variable domain of TCR clone 31813 (TRAV1-2, TRAJ16)
CAVNRFSDGQKLLF

SEQ ID NO: 63626 - protein, 16 aa, Homo sapiens
  CDR3 for beta chain variable domain of TCR clone 31813 (TRBV12-4, TRBJ1-5)
CASSRPVGGSNQTQHF

SEQ ID NO: 63627 - protein, 11 aa, Homo sapiens
  CDR3 for alpha chain variable domain of TCR clone 31814 (TRAV12-3, TRAJ27)
CAMDNAGKSTF

SEQ ID NO: 63628 - protein, 13 aa, Homo sapiens
  CDR3 for beta chain variable domain of TCR clone 31814 (TRBV20-1, TRBJ1-1)
CSARVGGNTEAFF

SEQ ID NO: 63629 - protein, 14 aa, Homo sapiens
  CDR3 for alpha chain variable domain of TCR clone 31815 (TRAV35, TRAJ22)
CAGLRPGSARQLTF

SEQ ID NO: 63630 - protein, 11 aa, Homo sapiens
  CDR3 for beta chain variable domain of TCR clone 31815 (TRBV12-4, TRBJ2-3)
CASTATDTQYF

SEQ ID NO: 63631 - protein, 18 aa, Homo sapiens
  CDR3 for alpha chain variable domain of TCR clone 31816 (TRAV12-3, TRAJ52)
CAMSVGGAGGTSYGTLTF

SEQ ID NO: 63632 - protein, 15 aa, Homo sapiens
  CDR3 for beta chain variable domain of TCR clone 31816 (TRBV27, TRBJ1-6)
CASSFDRGLGSPLHF

SEQ ID NO: 63633 - protein, 12 aa, Homo sapiens
  CDR3 for alpha chain variable domain of TCR clone 31817 (TRAV16, TRAJ10)
CPRTGGGNKLTF

SEQ ID NO: 63634 - protein, 15 aa, Homo sapiens
  CDR3 for beta chain variable domain of TCR clone 31817 (TRBV6-3, TRBJ2-7)
CASSSPGTVFYEQYF

SEQ ID NO: 63635 - protein, 12 aa, Homo sapiens
  CDR3 for alpha chain variable domain of TCR clone 31818 (TRAV12-3, TRAJ17)
CAMTLTGNKLTF

SEQ ID NO: 63636 - protein, 15 aa, Homo sapiens
  CDR3 for beta chain variable domain of TCR clone 31818 (TRBV20-1, TRBJ2-7)
CSARDRVPGMDKQYF

SEQ ID NO: 63637 - protein, 12 aa, Homo sapiens
  CDR3 for alpha chain variable domain of TCR clone 31819 (TRAV3, TRAJ31)
CAVRDGNARLML

SEQ ID NO: 63638 - protein, 18 aa, Homo sapiens
  CDR3 for beta chain variable domain of TCR clone 31819 (TRBV7-2, TRBJ2-3)
CASSLKREGSGITDTQYF

SEQ ID NO: 63639 - protein, 14 aa, Homo sapiens
  CDR3 for alpha chain variable domain of TCR clone 31820 (TRAV8-3, TRAJ35)
CAVVPQGFGNVLHC

SEQ ID NO: 63640 - protein, 15 aa, Homo sapiens
  CDR3 for beta chain variable domain of TCR clone 31820 (TRBV27, TRBJ2-1)
CASSNGGGSSNEQFF

SEQ ID NO: 63641 - protein, 14 aa, Homo sapiens
  CDR3 for alpha chain variable domain of TCR clone 31821 (TRAV17, TRAJ16)
CATADFSDGQKLLF

SEQ ID NO: 63642 - protein, 15 aa, Homo sapiens
  CDR3 for beta chain variable domain of TCR clone 31821 (TRBV20-1, TRBJ2-7)
CSARDRVSGMDEQYF

SEQ ID NO: 63643 - protein, 17 aa, Homo sapiens
  CDR3 for alpha chain variable domain of TCR clone 31822 (TRAV4, TRAJ13)
CLVGVQGSSGGYQTVTF

SEQ ID NO: 63644 - protein, 18 aa, Homo sapiens
  CDR3 for beta chain variable domain of TCR clone 31822 (TRBV15, TRBJ2-3)
CATSRDGARSWDTDTQYF

SEQ ID NO: 63645 - protein, 15 aa, Homo sapiens
  CDR3 for alpha chain variable domain of TCR clone 31823 (TRAV38-1, TRAJ57)
CAFMDSQGGSEKLVF

SEQ ID NO: 63646 - protein, 16 aa, Homo sapiens
  CDR3 for beta chain variable domain of TCR clone 31823 (TRBV10-3, TRBJ2-1)
GAIRGGGRGDYNEQFF

SEQ ID NO: 63647 - protein, 14 aa, Homo sapiens
  CDR3 for alpha chain variable domain of TCR clone 31824 (TRAV1-2, TRAJ16)
CAVNRFSYGQKLLF

SEQ ID NO: 63648 - protein, 13 aa, Homo sapiens
  CDR3 for beta chain variable domain of TCR clone 31824 (TRBV10-3, TRBJ2-7)
CASKLAVNYEQYF

SEQ ID NO: 63649 - protein, 11 aa, Homo sapiens
  CDR3 for alpha chain variable domain of TCR clone 31825 (TRAV17, TRAJ31)
CATSNNARLMF

SEQ ID NO: 63650 - protein, 16 aa, Homo sapiens
  CDR3 for beta chain variable domain of TCR clone 31825 (TRBV4-2, TRBJ2-3)
CASSQELAGDTDTRYF

SEQ ID NO: 63651 - protein, 15 aa, Homo sapiens
  CDR3 for alpha chain variable domain of TCR clone 31826 (TRAV26-1, TRAJ29)
CIVRVEGSGNTPLVF

SEQ ID NO: 63652 - protein, 14 aa, Homo sapiens
  CDR3 for beta chain variable domain of TCR clone 31826 (TRBV18, TRBJ2-5)
CTSSPGVSQETQYF

SEQ ID NO: 63653 - protein, 13 aa, Homo sapiens
  CDR3 for alpha chain variable domain of TCR clone 31827 (TRAV12-3, TRAJ43)
CAMIRPSNNDMRF

SEQ ID NO: 63654 - protein, 12 aa, Homo sapiens
  CDR3 for beta chain variable domain of TCR clone 31827 (TRBV11-2, TRBJ2-5)
CASSLGQETQYF

SEQ ID NO: 63655 - protein, 11 aa, Homo sapiens
  CDR3 for alpha chain variable domain of TCR clone 31828 (TRAV2, TRAJ13)
CASGGYQKVTF

SEQ ID NO: 63656 - protein, 13 aa, Homo sapiens
  CDR3 for beta chain variable domain of TCR clone 31828 (TRBV11-2, TRBJ2-5)
CASSFSSQETQYF

SEQ ID NO: 63657 - protein, 11 aa, Homo sapiens
  CDR3 for alpha chain variable domain of TCR clone 31829 (TRAV3, TRAJ21)
CAVGNFNKYYF

SEQ ID NO: 63658 - protein, 16 aa, Homo sapiens
  CDR3 for beta chain variable domain of TCR clone 31829 (TRBV19, TRBJ2-1)
CASSKAGPSSYNEQFF

SEQ ID NO: 63659 - protein, 13 aa, Homo sapiens
  CDR3 for alpha chain variable domain of TCR clone 31830 (TRAV21, TRAJ27)
CAARPGNAGKSTF

SEQ ID NO: 63660 - protein, 15 aa, Homo sapiens
  CDR3 for beta chain variable domain of TCR clone 31830 (TRBV2, TRBJ2-3)
CASSGAGGPPDTQYF

SEQ ID NO: 63661 - protein, 14 aa, Homo sapiens
  CDR3 for alpha chain variable domain of TCR clone 31831 (TRAV3, TRAJ22)
CAARDYGSARQLTF

SEQ ID NO: 63662 - protein, 13 aa, Homo sapiens
  CDR3 for beta chain variable domain of TCR clone 31831 (TRBV11-2, TRBJ2-5)
CASGHGAKETQYF

SEQ ID NO: 63663 - protein, 15 aa, Homo sapiens
  CDR3 for alpha chain variable domain of TCR clone 31832 (TRAV12-3, TRAJ6)
CAMSATTGGSYIPTF

SEQ ID NO: 63664 - protein, 13 aa, Homo sapiens
  CDR3 for beta chain variable domain of TCR clone 31832 (TRBV11-2, TRBJ1-1)
CASSLGNGAEAFF

SEQ ID NO: 63665 - protein, 18 aa, Homo sapiens
  CDR3 for alpha chain variable domain of TCR clone 31833 (TRAV17, TRAJ28)
CATDPPRGSGAGSYQLTF

SEQ ID NO: 63666 - protein, 14 aa, Homo sapiens
  CDR3 for beta chain variable domain of TCR clone 31833 (TRBV13, TRBJ2-5)
CASGLDYPQETQYF

SEQ ID NO: 63667 - protein, 15 aa, Homo sapiens
  CDR3 for alpha chain variable domain of TCR clone 31834 (TRAV26-1, TRAJ44)
CIVRANIGTASKLTF

SEQ ID NO: 63668 - protein, 16 aa, Homo sapiens
  CDR3 for beta chain variable domain of TCR clone 31834 (TRBV7-7, TRBJ2-1)
CASSLASGTSYNEQFF

SEQ ID NO: 63669 - protein, 11 aa, Homo sapiens
  CDR3 for alpha chain variable domain of TCR clone 31835 (TRAV3, TRAJ21)
CAVGNFNKFYF

SEQ ID NO: 63670 - protein, 14 aa, Homo sapiens
  CDR3 for beta chain variable domain of TCR clone 31835 (TRBV7-3, TRBJ1-1)
CASSLKGGNTEAFF

SEQ ID NO: 63671 - protein, 18 aa, Homo sapiens
  CDR3 for alpha chain variable domain of TCR clone 31836 (TRAV21, TRAJ13)
CAVPRSFWGLPESYLWNC

SEQ ID NO: 63672 - protein, 15 aa, Homo sapiens
  CDR3 for beta chain variable domain of TCR clone 31836 (TRBV7-9, TRBJ1-6)
CASSSPGRGNSPLHF

SEQ ID NO: 63673 - protein, 11 aa, Homo sapiens
  CDR3 for alpha chain variable domain of TCR clone 31837 (TRAV1-1, TRAJ23)
CAVRQGGKLIF

SEQ ID NO: 63674 - protein, 15 aa, Homo sapiens
  CDR3 for beta chain variable domain of TCR clone 31837 (TRBV11-3, TRBJ2-3)
CASLKDGREGDTQYF

SEQ ID NO: 63675 - protein, 14 aa, Homo sapiens
  CDR3 for alpha chain variable domain of TCR clone 31838 (TRAV12-3, TRAJ10)
RHLPLTGGGNKLTF

SEQ ID NO: 63676 - protein, 12 aa, Homo sapiens
  CDR3 for beta chain variable domain of TCR clone 31838 (TRBV12-4, TRBJ1-3)
CASSFSGNTIYF

SEQ ID NO: 63677 - protein, 12 aa, Homo sapiens
  CDR3 for alpha chain variable domain of TCR clone 31839 (TRAV13-1, TRAJ21)
CAAKEGFNKFYF

SEQ ID NO: 63678 - protein, 14 aa, Homo sapiens
  CDR3 for beta chain variable domain of TCR clone 31839 (TRBV23-1, TRBJ2-5)
CASSFLRSQETQYL

SEQ ID NO: 63679 - protein, 15 aa, Homo sapiens
  CDR3 for alpha chain variable domain of TCR clone 31840 (TRAV26-1, TRAJ23)
CIVRVAGYQGGKRIF

SEQ ID NO: 63680 - protein, 18 aa, Homo sapiens
  CDR3 for beta chain variable domain of TCR clone 31840 (TRBV28, TRBJ2-1)
CASSSTSGRANSYNEQFF

SEQ ID NO: 63681 - protein, 17 aa, Homo sapiens
  CDR3 for alpha chain variable domain of TCR clone 31841 (TRAV4, TRAJ42)
CFVGVLNYGGSQGNLIF

SEQ ID NO: 63682 - protein, 12 aa, Homo sapiens
  CDR3 for beta chain variable domain of TCR clone 31841 (TRBV20-1, TRBJ2-1)
CSAQYTYNEQFF

SEQ ID NO: 63683 - protein, 13 aa, Homo sapiens
  CDR3 for alpha chain variable domain of TCR clone 31842 (TRAV30, TRAJ6)
CGFVEGGSYIPTF

SEQ ID NO: 63684 - protein, 13 aa, Homo sapiens
  CDR3 for beta chain variable domain of TCR clone 31842 (TRBV5-4, TRBJ2-5)
CASSPVSQETQYF

SEQ ID NO: 63685 - protein, 11 aa, Homo sapiens
  CDR3 for alpha chain variable domain of TCR clone 31843 (TRAV23/DV6, TRAJ58)
CAARLLRGETN

SEQ ID NO: 63686 - protein, 15 aa, Homo sapiens
  CDR3 for beta chain variable domain of TCR clone 31843 (TRBV9, TRBJ1-6)
CASSVAGTGDSPLHF

SEQ ID NO: 63687 - protein, 12 aa, Homo sapiens
  CDR3 for alpha chain variable domain of TCR clone 31844 (TRAV13-1, TRAJ21)
CAAFLNFNKFYF

SEQ ID NO: 63688 - protein, 14 aa, Homo sapiens
  CDR3 for beta chain variable domain of TCR clone 31844 (TRBV4-1, TRBJ2-7)
CASRLTSGSYEQYF

SEQ ID NO: 63689 - protein, 12 aa, Homo sapiens
  CDR3 for alpha chain variable domain of TCR clone 31845 (TRAV12-3, TRAJ17)
CAMTLTGNKLTF

SEQ ID NO: 63690 - protein, 13 aa, Homo sapiens
  CDR3 for beta chain variable domain of TCR clone 31845 (TRBV19, TRBJ2-7)
CASSIDRTDEQYF

SEQ ID NO: 63691 - protein, 14 aa, Homo sapiens
  CDR3 for alpha chain variable domain of TCR clone 31846 (TRAV1-2, TRAJ16)
CAVNRFSDGQKLLF

SEQ ID NO: 63692 - protein, 13 aa, Homo sapiens
  CDR3 for beta chain variable domain of TCR clone 31846 (TRBV19, TRBJ1-2)
RASSVPGQDGYTF

SEQ ID NO: 63693 - protein, 14 aa, Homo sapiens
  CDR3 for alpha chain variable domain of TCR clone 31847 (TRAV13-1, TRAJ40)
CAASMTSGTYKCIF

SEQ ID NO: 63694 - protein, 15 aa, Homo sapiens
  CDR3 for beta chain variable domain of TCR clone 31847 (TRBV7-3, TRBJ2-1)
CASSPTGGGEVEQFF

SEQ ID NO: 63695 - protein, 14 aa, Homo sapiens
  CDR3 for alpha chain variable domain of TCR clone 31848 (TRAV9-2, TRAJ39)
CALYIYNAGNMLTF

SEQ ID NO: 63696 - protein, 14 aa, Homo sapiens
  CDR3 for beta chain variable domain of TCR clone 31848 (TRBV19, TRBJ2-5)
CASSMTGQQETQYF

SEQ ID NO: 63697 - protein, 14 aa, Homo sapiens
  CDR3 for alpha chain variable domain of TCR clone 31849 (TRAV1-2, TRAJ16)
CAVNRFSDGQKLLF

SEQ ID NO: 63698 - protein, 14 aa, Homo sapiens
  CDR3 for beta chain variable domain of TCR clone 31849 (TRBV7-6, TRBJ2-3)
CASNSGGDANTQYF

SEQ ID NO: 63699 - protein, 15 aa, Homo sapiens
  CDR3 for alpha chain variable domain of TCR clone 31850 (TRAV38-1, TRAJ37)
CAFIFGSGNTGKLTF

SEQ ID NO: 63700 - protein, 12 aa, Homo sapiens
  CDR3 for beta chain variable domain of TCR clone 31850 (TRBV7-9, TRBJ2-7)
CASSLEGYEQYF

SEQ ID NO: 63701 - protein, 15 aa, Homo sapiens
  CDR3 for alpha chain variable domain of TCR clone 31851 (TRAV16, TRAJ26)
CITVFQRNYGQNFVF

SEQ ID NO: 63702 - protein, 15 aa, Homo sapiens
  CDR3 for beta chain variable domain of TCR clone 31851 (TRBV7-2, TRBJ2-3)
CASSLTGTSTDTQYF

SEQ ID NO: 63703 - protein, 12 aa, Homo sapiens
  CDR3 for alpha chain variable domain of TCR clone 31852 (TRAV12-1, TRAJ34)
CVEAGATDKLIF

SEQ ID NO: 63704 - protein, 12 aa, Homo sapiens
  CDR3 for beta chain variable domain of TCR clone 31852 (TRBV7-9, TRBJ1-1)
CASSLVRGEAFF

SEQ ID NO: 63705 - protein, 14 aa, Homo sapiens
  CDR3 for alpha chain variable domain of TCR clone 31853 (TRAV8-3, TRAJ4)
CAVGAAGGYNKLIF

SEQ ID NO: 63706 - protein, 15 aa, Homo sapiens
  CDR3 for beta chain variable domain of TCR clone 31853 (TRBV6-5, TRBJ2-1)
CAGSYDAGAGNEQFF

SEQ ID NO: 63707 - protein, 14 aa, Homo sapiens
  CDR3 for alpha chain variable domain of TCR clone 31854 (TRAV12-2, TRAJ17)
CAVNIKAAGNKLTF

SEQ ID NO: 63708 - protein, 13 aa, Homo sapiens
  CDR3 for beta chain variable domain of TCR clone 31854 (TRBV7-9, TRBJ1-2)
CASSLKQNYGYTF

SEQ ID NO: 63709 - protein, 14 aa, Homo sapiens
  CDR3 for alpha chain variable domain of TCR clone 31855 (TRAV3, TRAJ21)
CAVRDKYNFNKFYF

SEQ ID NO: 63710 - protein, 15 aa, Homo sapiens
  CDR3 for beta chain variable domain of TCR clone 31855 (TRBV19, TRBJ1-2)
CASSVGQVLNYGYTF

SEQ ID NO: 63711 - protein, 13 aa, Homo sapiens
  CDR3 for alpha chain variable domain of TCR clone 31856 (TRAV20, TRAJ40)
CAVHFSGTYKYIF

SEQ ID NO: 63712 - protein, 13 aa, Homo sapiens
  CDR3 for beta chain variable domain of TCR clone 31856 (TRBV15, TRBJ2-5)
CATSQIGEETQYF

SEQ ID NO: 63713 - protein, 12 aa, Homo sapiens
  CDR3 for alpha chain variable domain of TCR clone 31857 (TRAV27, TRAJ35)
CAGADFGNVLHC

SEQ ID NO: 63714 - protein, 16 aa, Homo sapiens
  CDR3 for beta chain variable domain of TCR clone 31857 (TRBV6-1, TRBJ2-1)
CASILRQGSSCNEQFF

SEQ ID NO: 63715 - protein, 13 aa, Homo sapiens
  CDR3 for alpha chain variable domain of TCR clone 31858 (TRAV1-2, TRAJ9)
CAALNTGGFKTIF

SEQ ID NO: 63716 - protein, 13 aa, Homo sapiens
  CDR3 for beta chain variable domain of TCR clone 31858 (TRBV19, TRBJ1-2)
RASSVPGQDGCTF

SEQ ID NO: 63717 - protein, 17 aa, Homo sapiens
  CDR3 for alpha chain variable domain of TCR clone 31859 (TRAV8-6, TRAJ58)
CAVSSWVGETSGSRLTF

SEQ ID NO: 63718 - protein, 18 aa, Homo sapiens
  CDR3 for beta chain variable domain of TCR clone 31859 (TRBV11-2, TRBJ2-3)
CASSLGGASRGAPNTQYF

SEQ ID NO: 63719 - protein, 14 aa, Homo sapiens
  CDR3 for alpha chain variable domain of TCR clone 31860 (TRAV38-1, TRAJ45)
CTYYSGGGADGLTF

SEQ ID NO: 63720 - protein, 15 aa, Homo sapiens
  CDR3 for beta chain variable domain of TCR clone 31860 (TRBV15, TRBJ1-4)
CATSRDMGSYEKLFF

SEQ ID NO: 63721 - protein, 12 aa, Homo sapiens
  CDR3 for alpha chain variable domain of TCR clone 31861 (TRAV27, TRAJ9)
CAGESGGFKTIF

SEQ ID NO: 63722 - protein, 14 aa, Homo sapiens
  CDR3 for beta chain variable domain of TCR clone 31861 (TRBV6-1, TRBJ2-1)
CAPAKDGFYNEQFF

SEQ ID NO: 63723 - protein, 13 aa, Homo sapiens
  CDR3 for alpha chain variable domain of TCR clone 31862 (TRAV12-1, TRAJ7)
CVVNMRGNNRLAF

SEQ ID NO: 63724 - protein, 15 aa, Homo sapiens
  CDR3 for beta chain variable domain of TCR clone 31862 (TRBV27, TRBJ2-3)
CASSLGLAATDTQYF

SEQ ID NO: 63725 - protein, 12 aa, Homo sapiens
  CDR3 for alpha chain variable domain of TCR clone 31863 (TRAV6, TRAJ22)
TIPSGSARQLTF

SEQ ID NO: 63726 - protein, 15 aa, Homo sapiens
  CDR3 for beta chain variable domain of TCR clone 31863 (TRBV20-1, TRBJ1-6)
CSARAGGTFNSPLHF

SEQ ID NO: 63727 - protein, 13 aa, Homo sapiens
  CDR3 for alpha chain variable domain of TCR clone 31864 (TRAV3, TRAJ21)
CAVREPDFNKFYF

SEQ ID NO: 63728 - protein, 14 aa, Homo sapiens
  CDR3 for beta chain variable domain of TCR clone 31864 (TRBV27, TRBJ1-1)
CASSPQGKRAEAFF

SEQ ID NO: 63729 - protein, 14 aa, Homo sapiens
  CDR3 for alpha chain variable domain of TCR clone 31865 (TRAV12-2, TRAJ13)
CAVKKTGGYQKVTF

SEQ ID NO: 63730 - protein, 13 aa, Homo sapiens
  CDR3 for beta chain variable domain of TCR clone 31865 (TRBV20-1, TRBJ1-1)
CSAPLGGGTEAFF

SEQ ID NO: 63731 - protein, 14 aa, Homo sapiens
  CDR3 for alpha chain variable domain of TCR clone 31866 (TRAV8-3, TRAJ9)
RAVVYNTGGFKTIF

SEQ ID NO: 63732 - protein, 14 aa, Homo sapiens
  CDR3 for beta chain variable domain of TCR clone 31866 (TRBV7-3, TRBJ2-2)
CASSSGGYTGELFF

SEQ ID NO: 63733 - protein, 15 aa, Homo sapiens
  CDR3 for alpha chain variable domain of TCR clone 31867 (TRAV2, TRAJ9)
CAVEDRGTGGFKTIF

SEQ ID NO: 63734 - protein, 17 aa, Homo sapiens
  CDR3 for beta chain variable domain of TCR clone 31867 (TRBV13, TRBJ2-3)
CASSLSRVAGGRNTQYF

SEQ ID NO: 63735 - protein, 13 aa, Homo sapiens
  CDR3 for alpha chain variable domain of TCR clone 31868 (TRAV2, TRAJ40)
CAVVTSGTYKYIF

SEQ ID NO: 63736 - protein, 17 aa, Homo sapiens
  CDR3 for beta chain variable domain of TCR clone 31868 (TRBV28, TRBJ2-5)
CASSRQGGLAGAETQYF

SEQ ID NO: 63737 - protein, 13 aa, Homo sapiens
  CDR3 for alpha chain variable domain of TCR clone 31869 (TRAV12-1, TRAJ33)
CGDAPDSNYQLIW

SEQ ID NO: 63738 - protein, 13 aa, Homo sapiens
  CDR3 for beta chain variable domain of TCR clone 31869 (TRBV7-9, TRBJ1-2)
CASSLKQNYGYTF

SEQ ID NO: 63739 - protein, 12 aa, Homo sapiens
  CDR3 for alpha chain variable domain of TCR clone 31870 (TRAV21, TRAJ31)
GVLAGNNARLMF

SEQ ID NO: 63740 - protein, 16 aa, Homo sapiens
  CDR3 for beta chain variable domain of TCR clone 31870 (TRBV27, TRBJ2-5)
CASSFGPGGTKETQYF

SEQ ID NO: 63741 - protein, 14 aa, Homo sapiens
  CDR3 for alpha chain variable domain of TCR clone 31871 (TRAV4, TRAJ20)
CLVGRRSNDYKPSF

SEQ ID NO: 63742 - protein, 18 aa, Homo sapiens
  CDR3 for beta chain variable domain of TCR clone 31871 (TRBV2, TRBJ2-5)
CASSGDPQGRGAQETQYF

SEQ ID NO: 63743 - protein, 16 aa, Homo sapiens
  CDR3 for alpha chain variable domain of TCR clone 31872 (TRAV16, TRAJ52)
CALSGVGGTSYGKLTF

SEQ ID NO: 63744 - protein, 22 aa, Homo sapiens
  CDR3 for beta chain variable domain of TCR clone 31872 (TRBV11-2, TRBJ1-4)
CASSLDITRRGIPRKDNEKLFF

SEQ ID NO: 63745 - protein, 15 aa, Homo sapiens
  CDR3 for alpha chain variable domain of TCR clone 31873 (TRAV29/DV5, TRAJ24)
CAASGATDSWGKFQF

SEQ ID NO: 63746 - protein, 12 aa, Homo sapiens
  CDR3 for beta chain variable domain of TCR clone 31873 (TRBV11-2, TRBJ2-2)
CASSLPTGELLF

SEQ ID NO: 63747 - protein, 13 aa, Homo sapiens
  CDR3 for alpha chain variable domain of TCR clone 31874 (TRAV8-3, TRAJ21)
CAVCAYNFNKFYF

SEQ ID NO: 63748 - protein, 16 aa, Homo sapiens
  CDR3 for beta chain variable domain of TCR clone 31874 (TRBV19, TRBJ2-1)
CASSMGGGSSYNEQFF

SEQ ID NO: 63749 - protein, 11 aa, Homo sapiens
  CDR3 for alpha chain variable domain of TCR clone 31875 (TRAV35, TRAJ30)
CAGPGDDKIIF

SEQ ID NO: 63750 - protein, 14 aa, Homo sapiens
  CDR3 for beta chain variable domain of TCR clone 31875 (TRBV7-6, TRBJ1-6)
CASSQAGGGSPLRF

SEQ ID NO: 63751 - protein, 17 aa, Homo sapiens
  CDR3 for alpha chain variable domain of TCR clone 31876 (TRAV26-1, TRAJ47)
CIVPSLLYMEYGNKLVF

SEQ ID NO: 63752 - protein, 14 aa, Homo sapiens
  CDR3 for beta chain variable domain of TCR clone 31876 (TRBV7-3, TRBJ1-5)
RASSLSGCNQPQHF

SEQ ID NO: 63753 - protein, 16 aa, Homo sapiens
  CDR3 for alpha chain variable domain of TCR clone 31877 (TRAV3, TRAJ10)
CAVRDMRAGGGDKLTF

SEQ ID NO: 63754 - protein, 14 aa, Homo sapiens
  CDR3 for beta chain variable domain of TCR clone 31877 (TRBV25-1, TRBJ1-1)
CASTHLGGNTEAFF

SEQ ID NO: 63755 - protein, 15 aa, Homo sapiens
  CDR3 for alpha chain variable domain of TCR clone 31878 (TRAV12-2, TRAJ53)
CAVNGGGGSNYKMTF

SEQ ID NO: 63756 - protein, 13 aa, Homo sapiens
  CDR3 for beta chain variable domain of TCR clone 31878 (TRBV3-1, TRBJ1-1)
CASSPGVITEAFF

SEQ ID NO: 63757 - protein, 13 aa, Homo sapiens
  CDR3 for alpha chain variable domain of TCR clone 31879 (TRAV27, TRAJ41)
CAGEGNSGYALNF

SEQ ID NO: 63758 - protein, 17 aa, Homo sapiens
  CDR3 for beta chain variable domain of TCR clone 31879 (TRBV11-2, TRBJ2-1)
CASSLYPPGVEYNEQFF

SEQ ID NO: 63759 - protein, 14 aa, Homo sapiens
  CDR3 for alpha chain variable domain of TCR clone 31880 (TRAV13-1, TRAJ44)
CAAKATGTASKLTF

SEQ ID NO: 63760 - protein, 17 aa, Homo sapiens
  CDR3 for beta chain variable domain of TCR clone 31880 (TRBV7-3, TRBJ2-3)
CASGLMKRMRGADTQYF

SEQ ID NO: 63761 - protein, 16 aa, Homo sapiens
  CDR3 for alpha chain variable domain of TCR clone 31881 (TRAV21, TRAJ33)
CAVSPASMDCNYQLIW

SEQ ID NO: 63762 - protein, 17 aa, Homo sapiens
  CDR3 for beta chain variable domain of TCR clone 31881 (TRBV2, TRBJ1-4)
CASSKRELTQGEEKLFF

SEQ ID NO: 63763 - protein, 13 aa, Homo sapiens
  CDR3 for alpha chain variable domain of TCR clone 31882 (TRAV17, TRAJ9)
CATDYTGGFKTIF

SEQ ID NO: 63764 - protein, 14 aa, Homo sapiens
  CDR3 for beta chain variable domain of TCR clone 31882 (TRBV19, TRBJ2-5)
CASSMKGQQETQYF

SEQ ID NO: 63765 - protein, 14 aa, Homo sapiens
  CDR3 for alpha chain variable domain of TCR clone 31883 (TRAV20, TRAJ56)
CAVQFGGANSKLTF

SEQ ID NO: 63766 - protein, 13 aa, Homo sapiens
  CDR3 for beta chain variable domain of TCR clone 31883 (TRBV7-7, TRBJ2-3)
CASSLSRADTQYF

SEQ ID NO: 63767 - protein, 16 aa, Homo sapiens
  CDR3 for alpha chain variable domain of TCR clone 31884 (TRAV3, TRAJ37)
CAVRPHGSGNTGKLVF

SEQ ID NO: 63768 - protein, 14 aa, Homo sapiens
  CDR3 for beta chain variable domain of TCR clone 31884 (TRBV20-1, TRBJ2-1)
CSARGGSSYNEQFF

SEQ ID NO: 63769 - protein, 13 aa, Homo sapiens
  CDR3 for alpha chain variable domain of TCR clone 31885 (TRAV2, TRAJ40)
CAVVTSGTYKYIF

SEQ ID NO: 63770 - protein, 15 aa, Homo sapiens
  CDR3 for beta chain variable domain of TCR clone 31885 (TRBV11-3, TRBJ2-3)
CASLKDGRVGDTQYF

SEQ ID NO: 63771 - protein, 18 aa, Homo sapiens
  CDR3 for alpha chain variable domain of TCR clone 31886 (TRAV21, TRAJ52)
CAVRPSPAGGTSDGKLTF

SEQ ID NO: 63772 - protein, 14 aa, Homo sapiens
  CDR3 for beta chain variable domain of TCR clone 31886 (TRBV4-1, TRBJ2-2)
CASSQAVNTGELFF

SEQ ID NO: 63773 - protein, 14 aa, Homo sapiens
  CDR3 for alpha chain variable domain of TCR clone 31887 (TRAV1-2, TRAJ16)
CAVNRFSDGQKLLF

SEQ ID NO: 63774 - protein, 13 aa, Homo sapiens
  CDR3 for beta chain variable domain of TCR clone 31887 (TRBV7-2, TRBJ1-4)
CASSLAGLEKLFF

SEQ ID NO: 63775 - protein, 12 aa, Homo sapiens
  CDR3 for alpha chain variable domain of TCR clone 31888 (TRAV12-2, TRAJ10)
WGVTGGGNKPTF

SEQ ID NO: 63776 - protein, 16 aa, Homo sapiens
  CDR3 for beta chain variable domain of TCR clone 31888 (TRBV6-4, TRBJ1-2)
CASSEAVGDPNYGYTF

SEQ ID NO: 63777 - protein, 12 aa, Homo sapiens
  CDR3 for alpha chain variable domain of TCR clone 31889 (TRAV13-1, TRAJ21)
CAAKEGFNKFYF

SEQ ID NO: 63778 - protein, 15 aa, Homo sapiens
  CDR3 for beta chain variable domain of TCR clone 31889 (TRBV7-9, TRBJ1-4)
CASSRTGGFNEKLFF

SEQ ID NO: 63779 - protein, 16 aa, Homo sapiens
  CDR3 for alpha chain variable domain of TCR clone 31890 (TRAV1-2, TRAJ10)
CAVRGVLTGGGNKLTF

SEQ ID NO: 63780 - protein, 12 aa, Homo sapiens
  CDR3 for beta chain variable domain of TCR clone 31890 (TRBV7-8, TRBJ2-7)
CASSIGDREQYF

SEQ ID NO: 63781 - protein, 19 aa, Homo sapiens
  CDR3 for alpha chain variable domain of TCR clone 31891 (TRAV26-1, TRAJ28)
CIVRVAHAYSGAGSYQLTF

SEQ ID NO: 63782 - protein, 14 aa, Homo sapiens
  CDR3 for beta chain variable domain of TCR clone 31891 (TRBV19, TRBJ2-1)
CASPTFVLSGEQFF

SEQ ID NO: 63783 - protein, 17 aa, Homo sapiens
  CDR3 for alpha chain variable domain of TCR clone 31892 (TRAV8-6, TRAJ8)
CAVKEGIENTGFQKLGF

SEQ ID NO: 63784 - protein, 12 aa, Homo sapiens
  CDR3 for beta chain variable domain of TCR clone 31892 (TRBV19, TRBJ1-4)
CASKDWPGGLFF

SEQ ID NO: 63785 - protein, 12 aa, Homo sapiens
  CDR3 for alpha chain variable domain of TCR clone 31893 (TRAV38-1, TRAJ20)
CAFIWNDYKLSF

SEQ ID NO: 63786 - protein, 14 aa, Homo sapiens
  CDR3 for beta chain variable domain of TCR clone 31893 (TRBV19, TRBJ2-1)
CASSMGSGATEKFF

SEQ ID NO: 63787 - protein, 14 aa, Homo sapiens
  CDR3 for alpha chain variable domain of TCR clone 31894 (TRAV29/DV5, TRAJ57)
CAARSQGGSEELVF

SEQ ID NO: 63788 - protein, 15 aa, Homo sapiens
  CDR3 for beta chain variable domain of TCR clone 31894 (TRBV28, TRBJ2-4)
CAAGSGTLLMGIQYF

SEQ ID NO: 63789 - protein, 18 aa, Homo sapiens
  CDR3 for alpha chain variable domain of TCR clone 31895 (TRAV21, TRAJ52)
CAVRPSPAGGTSYGKLTF

SEQ ID NO: 63790 - protein, 16 aa, Homo sapiens
  CDR3 for beta chain variable domain of TCR clone 31895 (TRBV11-2, TRBJ2-7)
CASSPTTGGVSYEQYF

SEQ ID NO: 63791 - protein, 18 aa, Homo sapiens
  CDR3 for alpha chain variable domain of TCR clone 31896 (TRAV12-3, TRAJ52)
CAMSVGGAGGTRYGKLTF

SEQ ID NO: 63792 - protein, 15 aa, Homo sapiens
  CDR3 for beta chain variable domain of TCR clone 31896 (TRBV27, TRBJ1-6)
CASSFDRGLGSPLHF

SEQ ID NO: 63793 - protein, 13 aa, Homo sapiens
  CDR3 for alpha chain variable domain of TCR clone 31897 (TRAV21, TRAJ27)
CAARPGNAGKSTF

SEQ ID NO: 63794 - protein, 14 aa, Homo sapiens
  CDR3 for beta chain variable domain of TCR clone 31897 (TRBV7-9, TRBJ2-2)
CASSLVQDTGELFF

SEQ ID NO: 63795 - protein, 14 aa, Homo sapiens
  CDR3 for alpha chain variable domain of TCR clone 31898 (TRAV38-1, TRAJ45)
YASHSGGGADGLTF

SEQ ID NO: 63796 - protein, 13 aa, Homo sapiens
  CDR3 for beta chain variable domain of TCR clone 31898 (TRBV10-3, TRBJ1-2)
CAISERDSYGYTF

SEQ ID NO: 63797 - protein, 13 aa, Homo sapiens
  CDR3 for alpha chain variable domain of TCR clone 31899 (TRAV13-1, TRAJ5)
CAESDTGRRALTF

SEQ ID NO: 63798 - protein, 12 aa, Homo sapiens
  CDR3 for beta chain variable domain of TCR clone 31899 (TRBV28, TRBJ2-3)
CASSLYRDTQYF

SEQ ID NO: 63799 - protein, 14 aa, Homo sapiens
  CDR3 for alpha chain variable domain of TCR clone 31900 (TRAV1-2, TRAJ8)
CAVREDTGFQKLVF

SEQ ID NO: 63800 - protein, 13 aa, Homo sapiens
  CDR3 for beta chain variable domain of TCR clone 31900 (TRBV20-1, TRBJ1-1)
CSARVGGNTEAFF

SEQ ID NO: 63801 - protein, 14 aa, Homo sapiens
  CDR3 for alpha chain variable domain of TCR clone 31901 (TRAV16, TRAJ39)
CALSKNDAGNMLTF

SEQ ID NO: 63802 - protein, 19 aa, Homo sapiens
  CDR3 for beta chain variable domain of TCR clone 31901 (TRBV6-6, TRBJ2-1)
AAPSQTSVYFCASSYEQFF

SEQ ID NO: 63803 - protein, 10 aa, Homo sapiens
  CDR3 for alpha chain variable domain of TCR clone 31902 (TRAV12-3, TRAJ49)
CAMNDDQFYF

SEQ ID NO: 63804 - protein, 17 aa, Homo sapiens
  CDR3 for beta chain variable domain of TCR clone 31902 (TRBV11-2, TRBJ2-1)
CASSLYPPGVEYNEQFF

SEQ ID NO: 63805 - protein, 12 aa, Homo sapiens
  CDR3 for alpha chain variable domain of TCR clone 31903 (TRAV13-1, TRAJ36)
WRGGAGANNLFF

SEQ ID NO: 63806 - protein, 16 aa, Homo sapiens
  CDR3 for beta chain variable domain of TCR clone 31903 (TRBV7-9, TRBJ2-5)
CASRLEIGTRKETQYS

SEQ ID NO: 63807 - protein, 15 aa, Homo sapiens
  CDR3 for alpha chain variable domain of TCR clone 31904 (TRAV3, TRAJ22)
CAVRDRCGSARQLTF

SEQ ID NO: 63808 - protein, 13 aa, Homo sapiens
  CDR3 for beta chain variable domain of TCR clone 31904 (TRBV12-4, TRBJ1-2)
CASSLRQGKGYTF

SEQ ID NO: 63809 - protein, 13 aa, Homo sapiens
  CDR3 for alpha chain variable domain of TCR clone 31905 (TRAV24, TRAJ33)
CATTRASNYQLIW

SEQ ID NO: 63810 - protein, 15 aa, Homo sapiens
  CDR3 for beta chain variable domain of TCR clone 31905 (TRBV2, TRBJ1-3)
CASSVELPSGNTIYF

SEQ ID NO: 63811 - protein, 10 aa, Homo sapiens
  CDR3 for alpha chain variable domain of TCR clone 31906 (TRAV21, TRAJ31)
CAVDNARPMF

SEQ ID NO: 63812 - protein, 13 aa, Homo sapiens
  CDR3 for beta chain variable domain of TCR clone 31906 (TRBV4-1, TRBJ1-1)
CASSRKMNTEAFF

SEQ ID NO: 63813 - protein, 15 aa, Homo sapiens
  CDR3 for alpha chain variable domain of TCR clone 31907 (TRAV12-3, TRAJ6)
CAMSATSGGSCIPTF

SEQ ID NO: 63814 - protein, 11 aa, Homo sapiens
  CDR3 for beta chain variable domain of TCR clone 31907 (TRBV20-1, TRBJ1-5)
CSAQGDQPQHF

SEQ ID NO: 63815 - protein, 14 aa, Homo sapiens
  CDR3 for alpha chain variable domain of TCR clone 31908 (TRAV1-2, TRAJ16)
CAVNRFSDGQKPLF

SEQ ID NO: 63816 - protein, 16 aa, Homo sapiens
  CDR3 for beta chain variable domain of TCR clone 31908 (TRBV12-4, TRBJ1-5)
CASSRPVGGSNQPQHF

SEQ ID NO: 63817 - protein, 12 aa, Homo sapiens
  CDR3 for alpha chain variable domain of TCR clone 31909 (TRAV12-3, TRAJ17)
CAMTLTGNKLTF

SEQ ID NO: 63818 - protein, 20 aa, Homo sapiens
  CDR3 for beta chain variable domain of TCR clone 31909 (TRBV19, TRBJ2-1)
CASSISRTVTSTRLDNEQFF

SEQ ID NO: 63819 - protein, 18 aa, Homo sapiens
  CDR3 for alpha chain variable domain of TCR clone 31910 (TRAV12-3, TRAJ52)
FAMSVGGAGGTSYGKLTF

SEQ ID NO: 63820 - protein, 15 aa, Homo sapiens
  CDR3 for beta chain variable domain of TCR clone 31910 (TRBV27, TRBJ1-6)
CASSFDRGLGSPLHF

SEQ ID NO: 63821 - protein, 14 aa, Homo sapiens
  CDR3 for alpha chain variable domain of TCR clone 31911 (TRAV4, TRAJ17)
CLVGPQAAGNKLTL

SEQ ID NO: 63822 - protein, 19 aa, Homo sapiens
  CDR3 for beta chain variable domain of TCR clone 31911 (TRBV6-5, TRBJ2-1)
CASRSGGLAGESSYNEQFF

SEQ ID NO: 63823 - protein, 14 aa, Homo sapiens
  CDR3 for alpha chain variable domain of TCR clone 31912 (TRAV26-1, TRAJ21)
CIVRVVYSFNKFYF

SEQ ID NO: 63824 - protein, 17 aa, Homo sapiens
  CDR3 for beta chain variable domain of TCR clone 31912 (TRBV11-2, TRBJ2-1)
CASSLYPPGVEYNEQFF

SEQ ID NO: 63825 - protein, 15 aa, Homo sapiens
  CDR3 for alpha chain variable domain of TCR clone 31913 (TRAV3, TRAJ3)
CAVRDRRSSASKIIF

SEQ ID NO: 63826 - protein, 12 aa, Homo sapiens
  CDR3 for beta chain variable domain of TCR clone 31913 (TRBV9, TRBJ2-5)
CQQPSSLGTQYF

SEQ ID NO: 63827 - protein, 13 aa, Homo sapiens
  CDR3 for alpha chain variable domain of TCR clone 31914 (TRAV8-3, TRAJ36)
CAGGATGANNLFF

SEQ ID NO: 63828 - protein, 15 aa, Homo sapiens
  CDR3 for beta chain variable domain of TCR clone 31914 (TRBV7-2, TRBJ1-2)
CASSPRAGWNYGYTF

SEQ ID NO: 63829 - protein, 15 aa, Homo sapiens
  CDR3 for alpha chain variable domain of TCR clone 31915 (TRAV8-3, TRAJ45)
CASSYSGGGADGLTF

SEQ ID NO: 63830 - protein, 15 aa, Homo sapiens
  CDR3 for beta chain variable domain of TCR clone 31915 (TRBV6-3, TRBJ2-2)
CASSFLATLTGELFF

SEQ ID NO: 63831 - protein, 14 aa, Homo sapiens
  CDR3 for alpha chain variable domain of TCR clone 31916 (TRAV26-1, TRAJ26)
CIVRAAFLGQNFVF

SEQ ID NO: 63832 - protein, 16 aa, Homo sapiens
  CDR3 for beta chain variable domain of TCR clone 31916 (TRBV12-4, TRBJ2-7)
CASRSTGTGPSYEQYF

SEQ ID NO: 63833 - protein, 13 aa, Homo sapiens
  CDR3 for alpha chain variable domain of TCR clone 31917 (TRAV27, TRAJ53)
CAPSGGSNYKPTF

SEQ ID NO: 63834 - protein, 15 aa, Homo sapiens
  CDR3 for beta chain variable domain of TCR clone 31917 (TRBV6-1, TRBJ2-3)
CASSENWNGGGRQYF

SEQ ID NO: 63835 - protein, 14 aa, Homo sapiens
  CDR3 for alpha chain variable domain of TCR clone 31918 (TRAV26-2, TRAJ27)
CILRDISDAGKSTL

SEQ ID NO: 63836 - protein, 15 aa, Homo sapiens
  CDR3 for beta chain variable domain of TCR clone 31918 (TRBV10-3, TRBJ2-7)
CATREQGLRSYEQHF

SEQ ID NO: 63837 - protein, 14 aa, Homo sapiens
  CDR3 for alpha chain variable domain of TCR clone 31919 (TRAV1-2, TRAJ16)
CAVNRFSDGQRLLF

SEQ ID NO: 63838 - protein, 17 aa, Homo sapiens
  CDR3 for beta chain variable domain of TCR clone 31919 (TRBV7-3, TRBJ2-3)
CASSLMKRMRGADTQYF

SEQ ID NO: 63839 - protein, 16 aa, Homo sapiens
  CDR3 for alpha chain variable domain of TCR clone 31920 (TRAV12-2, TRAJ32)
CAVNLGQGGATNKLIF

SEQ ID NO: 63840 - protein, 12 aa, Homo sapiens
  CDR3 for beta chain variable domain of TCR clone 31920 (TRBV29-1, TRBJ2-3)
CSVTGGADTQHF

SEQ ID NO: 63841 - protein, 15 aa, Homo sapiens
  CDR3 for alpha chain variable domain of TCR clone 31921 (TRAV20, TRAJ53)
CAVQASGGSNYKLTF

SEQ ID NO: 63842 - protein, 12 aa, Homo sapiens
  CDR3 for beta chain variable domain of TCR clone 31921 (TRBV7-6, TRBJ2-5)
CARSLSQETQYF

SEQ ID NO: 63843 - protein, 14 aa, Homo sapiens
  CDR3 for alpha chain variable domain of TCR clone 31922 (TRAV12-2, TRAJ17)
CAVNIKAAGNKLTF

SEQ ID NO: 63844 - protein, 16 aa, Homo sapiens
  CDR3 for beta chain variable domain of TCR clone 31922 (TRBV20-1, TRBJ2-6)
CSASSQGYDGANVVTF

SEQ ID NO: 63845 - protein, 15 aa, Homo sapiens
  CDR3 for alpha chain variable domain of TCR clone 31923 (TRAV4, TRAJ39)
CLVGPNNNAGNMLTF

SEQ ID NO: 63846 - protein, 13 aa, Homo sapiens
  CDR3 for beta chain variable domain of TCR clone 31923 (TRBV11-2, TRBJ2-5)
CASSSAGEETQYF

SEQ ID NO: 63847 - protein, 14 aa, Homo sapiens
  CDR3 for alpha chain variable domain of TCR clone 31924 (TRAV1-2, TRAJ8)
CAVREDTGFQKLVF

SEQ ID NO: 63848 - protein, 13 aa, Homo sapiens
  CDR3 for beta chain variable domain of TCR clone 31924 (TRBV14, TRBJ1-1)
CASSRGFGTEAFF

SEQ ID NO: 63849 - protein, 14 aa, Homo sapiens
  CDR3 for alpha chain variable domain of TCR clone 31925 (TRAV13-1, TRAJ44)
CAAKATGTASKLPF

SEQ ID NO: 63850 - protein, 17 aa, Homo sapiens
  CDR3 for beta chain variable domain of TCR clone 31925 (TRBV7-3, TRBJ2-3)
CASSLMKRMRGADTQYF

SEQ ID NO: 63851 - protein, 13 aa, Homo sapiens
  CDR3 for alpha chain variable domain of TCR clone 31926 (TRAV21, TRAJ56)
CAVRLGANSKLTF

SEQ ID NO: 63852 - protein, 12 aa, Homo sapiens
  CDR3 for beta chain variable domain of TCR clone 31926 (TRBV12-4, TRBJ2-3)
CASSNTTDTQYF

SEQ ID NO: 63853 - protein, 13 aa, Homo sapiens
  CDR3 for alpha chain variable domain of TCR clone 31927 (TRAV27, TRAJ11)
CAGARSGYRTLTF

SEQ ID NO: 63854 - protein, 16 aa, Homo sapiens
  CDR3 for beta chain variable domain of TCR clone 31927 (TRBV10-2, TRBJ2-2)
CASSESRDRGSGELFF

SEQ ID NO: 63855 - protein, 15 aa, Homo sapiens
  CDR3 for alpha chain variable domain of TCR clone 31928 (TRAV27, TRAJ38)
CAARRNAGNNRKLIW

SEQ ID NO: 63856 - protein, 13 aa, Homo sapiens
  CDR3 for beta chain variable domain of TCR clone 31928 (TRBV12-5, TRBJ2-3)
CASGDRQSDTKYF

SEQ ID NO: 63857 - protein, 15 aa, Homo sapiens
  CDR3 for alpha chain variable domain of TCR clone 31929 (TRAV2, TRAJ11)
CAVGGRNSGYSTPTF

SEQ ID NO: 63858 - protein, 12 aa, Homo sapiens
  CDR3 for beta chain variable domain of TCR clone 31929 (TRBV5-4, TRBJ2-7)
CASSLEAYEQYF

SEQ ID NO: 63859 - protein, 15 aa, Homo sapiens
  CDR3 for alpha chain variable domain of TCR clone 31930 (TRAV26-1, TRAJ9)
CIVREGNTGGFKTIF

SEQ ID NO: 63860 - protein, 11 aa, Homo sapiens
  CDR3 for beta chain variable domain of TCR clone 31930 (TRBV7-6, TRBJ2-5)
CASSFQETQYF

SEQ ID NO: 63861 - protein, 18 aa, Homo sapiens
  CDR3 for alpha chain variable domain of TCR clone 31931 (TRAV21, TRAJ52)
CAVRPSPAGGTSYGKLTF

SEQ ID NO: 63862 - protein, 13 aa, Homo sapiens
  CDR3 for beta chain variable domain of TCR clone 31931 (TRBV7-3, TRBJ1-1)
CASSQDWGAEVFF

SEQ ID NO: 63863 - protein, 18 aa, Homo sapiens
  CDR3 for alpha chain variable domain of TCR clone 31932 (TRAV13-1, TRAJ52)
CAAKNPNAGDTSYGKLTF

SEQ ID NO: 63864 - protein, 15 aa, Homo sapiens
  CDR3 for beta chain variable domain of TCR clone 31932 (TRBV6-1, TRBJ2-3)
CASSERGGITDTQYF

SEQ ID NO: 63865 - protein, 15 aa, Homo sapiens
  CDR3 for alpha chain variable domain of TCR clone 31933 (TRAV9-2, TRAJ10)
CALSSLTGGGNKLTF

SEQ ID NO: 63866 - protein, 14 aa, Homo sapiens
  CDR3 for beta chain variable domain of TCR clone 31933 (TRBV7-3, TRBJ1-1)
CQQLRGQMNTEAFF

SEQ ID NO: 63867 - protein, 15 aa, Homo sapiens
  CDR3 for alpha chain variable domain of TCR clone 31934 (TRAV13-1, TRAJ52)
CAATSPRTSYGKLTF

SEQ ID NO: 63868 - protein, 15 aa, Homo sapiens
  CDR3 for beta chain variable domain of TCR clone 31934 (TRBV5-4, TRBJ2-7)
CASSLEWGPSYEQYF

SEQ ID NO: 63869 - protein, 14 aa, Homo sapiens
  CDR3 for alpha chain variable domain of TCR clone 31935 (TRAV8-3, TRAJ9)
CAVVYNTGGFKTIF

SEQ ID NO: 63870 - protein, 14 aa, Homo sapiens
  CDR3 for beta chain variable domain of TCR clone 31935 (TRBV7-3, TRBJ2-2)
CASSSGGYTGELFC

SEQ ID NO: 63871 - protein, 12 aa, Homo sapiens
  CDR3 for alpha chain variable domain of TCR clone 31936 (TRAV30, TRAJ43)
EPTSAALSDMRF

SEQ ID NO: 63872 - protein, 13 aa, Homo sapiens
  CDR3 for beta chain variable domain of TCR clone 31936 (TRBV12-4, TRBJ2-2)
CASSITGSGELFF

SEQ ID NO: 63873 - protein, 14 aa, Homo sapiens
  CDR3 for alpha chain variable domain of TCR clone 31937 (TRAV17, TRAJ57)
CATDPQGGSERLVF

SEQ ID NO: 63874 - protein, 16 aa, Homo sapiens
  CDR3 for beta chain variable domain of TCR clone 31937 (TRBV20-1, TRBJ1-4)
CSAPGQGLLTNEKLFF

SEQ ID NO: 63875 - protein, 14 aa, Homo sapiens
  CDR3 for alpha chain variable domain of TCR clone 31938 (TRAV38-1, TRAJ40)
CALRPTSGTYKYIF

SEQ ID NO: 63876 - protein, 14 aa, Homo sapiens
  CDR3 for beta chain variable domain of TCR clone 31938 (TRBV7-6, TRBJ2-3)
CASSLGTVTDTQYF

SEQ ID NO: 63877 - protein, 11 aa, Homo sapiens
  CDR3 for alpha chain variable domain of TCR clone 31939 (TRAV21, TRAJ34)
CAVTNTDNLIF

SEQ ID NO: 63878 - protein, 13 aa, Homo sapiens
  CDR3 for beta chain variable domain of TCR clone 31939 (TRBV20-1, TRBJ2-1)
CSARSPSGGPPTM

SEQ ID NO: 63879 - protein, 14 aa, Homo sapiens
  CDR3 for alpha chain variable domain of TCR clone 31940 (TRAV26-1, TRAJ45)
CIEVTGGGADGLTF

SEQ ID NO: 63880 - protein, 13 aa, Homo sapiens
  CDR3 for beta chain variable domain of TCR clone 31940 (TRBV7-6, TRBJ1-2)
CASSLVADYGYSF

SEQ ID NO: 63881 - protein, 11 aa, Homo sapiens
  CDR3 for alpha chain variable domain of TCR clone 31941 (TRAV12-2, TRAJ29)
CAVTLRSPLVF

SEQ ID NO: 63882 - protein, 18 aa, Homo sapiens
  CDR3 for beta chain variable domain of TCR clone 31941 (TRBV19, TRBJ1-5)
CASSIDRGGPRQPSILVM

SEQ ID NO: 63883 - protein, 12 aa, Homo sapiens
  CDR3 for alpha chain variable domain of TCR clone 31942 (TRAV12-3, TRAJ40)
CAMSSGTYKYIF

SEQ ID NO: 63884 - protein, 15 aa, Homo sapiens
  CDR3 for beta chain variable domain of TCR clone 31942 (TRBV7-3, TRBJ2-2)
CASSETGQGAGELFF

SEQ ID NO: 63885 - protein, 10 aa, Homo sapiens
  CDR3 for alpha chain variable domain of TCR clone 31943 (TRAV1-2, TRAJ31)
CAFFDARLMF

SEQ ID NO: 63886 - protein, 13 aa, Homo sapiens
  CDR3 for beta chain variable domain of TCR clone 31943 (TRBV7-9, TRBJ1-2)
CASSSKQNYGYTF

SEQ ID NO: 63887 - protein, 14 aa, Homo sapiens
  CDR3 for alpha chain variable domain of TCR clone 31944 (TRAV12-2, TRAJ13)
CAVKKTGGYQKVTF

SEQ ID NO: 63888 - protein, 13 aa, Homo sapiens
  CDR3 for beta chain variable domain of TCR clone 31944 (TRBV19, TRBJ2-7)
CASSPRQSYEQYF

SEQ ID NO: 63889 - protein, 15 aa, Homo sapiens
  CDR3 for alpha chain variable domain of TCR clone 31945 (TRAV38-1, TRAJ37)
CAFIHGSGNTGKLIF

SEQ ID NO: 63890 - protein, 12 aa, Homo sapiens
  CDR3 for beta chain variable domain of TCR clone 31945 (TRBV7-9, TRBJ2-7)
YASSFGSYEQYF

SEQ ID NO: 63891 - protein, 12 aa, Homo sapiens
  CDR3 for alpha chain variable domain of TCR clone 31946 (TRAV17, TRAJ12)
CATLRSSYKLIF

SEQ ID NO: 63892 - protein, 16 aa, Homo sapiens
  CDR3 for beta chain variable domain of TCR clone 31946 (TRBV28, TRBJ2-7)
CASSLFFETGGPEQYV

SEQ ID NO: 63893 - protein, 15 aa, Homo sapiens
  CDR3 for alpha chain variable domain of TCR clone 31947 (TRAV26-1, TRAJ37)
CIVENGSGNTGKLIF

SEQ ID NO: 63894 - protein, 14 aa, Homo sapiens
  CDR3 for beta chain variable domain of TCR clone 31947 (TRBV19, TRBJ2-1)
CASPTFVLSGEQFF

SEQ ID NO: 63895 - protein, 10 aa, Homo sapiens
  CDR3 for alpha chain variable domain of TCR clone 31948 (TRAV2, TRAJ34)
CAVVNGKLIF

SEQ ID NO: 63896 - protein, 12 aa, Homo sapiens
  CDR3 for beta chain variable domain of TCR clone 31948 (TRBV7-8, TRBJ2-7)
CASSLGDREQYF

SEQ ID NO: 63897 - protein, 13 aa, Homo sapiens
  CDR3 for alpha chain variable domain of TCR clone 31949 (TRAV8-6, TRAJ49)
CAVITNTGNQFYF

SEQ ID NO: 63898 - protein, 14 aa, Homo sapiens
  CDR3 for beta chain variable domain of TCR clone 31949 (TRBV5-1, TRBJ2-7)
CASSRGKSLYEQYF

SEQ ID NO: 63899 - protein, 14 aa, Homo sapiens
  CDR3 for alpha chain variable domain of TCR clone 31950 (TRAV13-1, TRAJ44)
CAAKATGTASELTF

SEQ ID NO: 63900 - protein, 17 aa, Homo sapiens
  CDR3 for beta chain variable domain of TCR clone 31950 (TRBV7-3, TRBJ2-3)
CASSLMKRMRGADTQYF

SEQ ID NO: 63901 - protein, 14 aa, Homo sapiens
  CDR3 for alpha chain variable domain of TCR clone 31951 (TRAV12-3, TRAJ54)
CAMRGIQGAQKLVS

SEQ ID NO: 63902 - protein, 13 aa, Homo sapiens
  CDR3 for beta chain variable domain of TCR clone 31951 (TRBV19, TRBJ1-1)
CASSPSNGGEAFF

SEQ ID NO: 63903 - protein, 16 aa, Homo sapiens
  CDR3 for alpha chain variable domain of TCR clone 31952 (TRAV12-2, TRAJ45)
CAMKRNPGGGADGLTF

SEQ ID NO: 63904 - protein, 12 aa, Homo sapiens
  CDR3 for beta chain variable domain of TCR clone 31952 (TRBV6-1, TRBJ2-5)
CASSEGRETQYF

SEQ ID NO: 63905 - protein, 13 aa, Homo sapiens
  CDR3 for alpha chain variable domain of TCR clone 31953 (TRAV12-3, TRAJ13)
CAMSSGGYQEVTF

SEQ ID NO: 63906 - protein, 13 aa, Homo sapiens
  CDR3 for beta chain variable domain of TCR clone 31953 (TRBV20-1, TRBJ1-1)
CSAPPGGHTEAFL

SEQ ID NO: 63907 - protein, 14 aa, Homo sapiens
  CDR3 for alpha chain variable domain of TCR clone 31954 (TRAV1-2, TRAJ8)
CAVREGTGFQKLVF

SEQ ID NO: 63908 - protein, 15 aa, Homo sapiens
  CDR3 for beta chain variable domain of TCR clone 31954 (TRBV6-3, TRBJ2-7)
CASSSPGTAFYEQYF

SEQ ID NO: 63909 - protein, 10 aa, Homo sapiens
  CDR3 for alpha chain variable domain of TCR clone 31955 (TRAV8-4, TRAJ43)
CAGSADDMRF

SEQ ID NO: 63910 - protein, 16 aa, Homo sapiens
  CDR3 for beta chain variable domain of TCR clone 31955 (TRBV12-5, TRBJ2-5)
CASGPRTSGNQETQYF

SEQ ID NO: 63911 - protein, 14 aa, Homo sapiens
  CDR3 for alpha chain variable domain of TCR clone 31956 (TRAV12-2, TRAJ40)
CAVKIPSGTYKYIF

SEQ ID NO: 63912 - protein, 13 aa, Homo sapiens
  CDR3 for beta chain variable domain of TCR clone 31956 (TRBV7-9, TRBJ1-2)
CASSLKQDYGYTF

SEQ ID NO: 63913 - protein, 13 aa, Homo sapiens
  CDR3 for alpha chain variable domain of TCR clone 31957 (TRAV3, TRAJ27)
CAVRPLGAGKSTF

SEQ ID NO: 63914 - protein, 15 aa, Homo sapiens
  CDR3 for beta chain variable domain of TCR clone 31957 (TRBV2, TRBJ2-3)
CASSDFEKATDTQYF

SEQ ID NO: 63915 - protein, 13 aa, Homo sapiens
  CDR3 for alpha chain variable domain of TCR clone 31958 (TRAV35, TRAJ4)
CAGRDGGYNKLIF

SEQ ID NO: 63916 - protein, 16 aa, Homo sapiens
  CDR3 for beta chain variable domain of TCR clone 31958 (TRBV24-1, TRBJ2-3)
CATSDPGTGATDTQYF

SEQ ID NO: 63917 - protein, 12 aa, Homo sapiens
  CDR3 for alpha chain variable domain of TCR clone 31959 (TRAV35, TRAJ49)
CAGRNTGNQFYF

SEQ ID NO: 63918 - protein, 16 aa, Homo sapiens
  CDR3 for beta chain variable domain of TCR clone 31959 (TRBV5-1, TRBJ2-2)
CASSLWDTTNTGELFF

SEQ ID NO: 63919 - protein, 13 aa, Homo sapiens
  CDR3 for alpha chain variable domain of TCR clone 31960 (TRAV21, TRAJ27)
CAARPGKAGKSTF

SEQ ID NO: 63920 - protein, 14 aa, Homo sapiens
  CDR3 for beta chain variable domain of TCR clone 31960 (TRBV7-6, TRBJ2-3)
CASSLGTVTDTQYF

SEQ ID NO: 63921 - protein, 13 aa, Homo sapiens
  CDR3 for alpha chain variable domain of TCR clone 31961 (TRAV8-3, TRAJ48)
CAVVPFGNDKLTF

SEQ ID NO: 63922 - protein, 15 aa, Homo sapiens
  CDR3 for beta chain variable domain of TCR clone 31961 (TRBV11-2, TRBJ2-1)
CASSSPSTRYNEQFF

SEQ ID NO: 63923 - protein, 14 aa, Homo sapiens
  CDR3 for alpha chain variable domain of TCR clone 31962 (TRAV38-1, TRAJ45)
CAYYSGGGADGLTF

SEQ ID NO: 63924 - protein, 20 aa, Homo sapiens
  CDR3 for beta chain variable domain of TCR clone 31962 (TRBV28, TRBJ2-1)
CASTPIGLSPGLAGGNEQFF

SEQ ID NO: 63925 - protein, 17 aa, Homo sapiens
  CDR3 for alpha chain variable domain of TCR clone 31963 (TRAV3, TRAJ6)
CAVRDGPRAGGSYIPTF

SEQ ID NO: 63926 - protein, 12 aa, Homo sapiens
  CDR3 for beta chain variable domain of TCR clone 31963 (TRBV4-1, TRBJ2-2)
CASSQENTGELF

SEQ ID NO: 63927 - protein, 17 aa, Homo sapiens
  CDR3 for alpha chain variable domain of TCR clone 31964 (TRAV3, TRAJ28)
CAVREAYSGAGRYQLTF

SEQ ID NO: 63928 - protein, 18 aa, Homo sapiens
  CDR3 for beta chain variable domain of TCR clone 31964 (TRBV27, TRBJ2-1)
CASGNRAVGVGSKNEQFF

SEQ ID NO: 63929 - protein, 15 aa, Homo sapiens
  CDR3 for alpha chain variable domain of TCR clone 31965 (TRAV12-3, TRAJ13)
CAMSARSGGYQKVTF

SEQ ID NO: 63930 - protein, 11 aa, Homo sapiens
  CDR3 for beta chain variable domain of TCR clone 31965 (TRBV7-2, TRBJ2-7)
CASSSGLWQYF

SEQ ID NO: 63931 - protein, 14 aa, Homo sapiens
  CDR3 for alpha chain variable domain of TCR clone 31966 (TRAV1-2, TRAJ16)
CAVNRFSDGQKLLF

SEQ ID NO: 63932 - protein, 13 aa, Homo sapiens
  CDR3 for beta chain variable domain of TCR clone 31966 (TRBV7-9, TRBJ1-2)
CASSLEQNYGYTF

SEQ ID NO: 63933 - protein, 13 aa, Homo sapiens
  CDR3 for alpha chain variable domain of TCR clone 31967 (TRAV2, TRAJ40)
CAVVTSGTYKYIF

SEQ ID NO: 63934 - protein, 15 aa, Homo sapiens
  CDR3 for beta chain variable domain of TCR clone 31967 (TRBV7-2, TRBJ1-2)
CASSPRAGWNYGYTF

SEQ ID NO: 63935 - protein, 12 aa, Homo sapiens
  CDR3 for alpha chain variable domain of TCR clone 31968 (TRAV21, TRAJ11)
CAVRGGNSALTF

SEQ ID NO: 63936 - protein, 15 aa, Homo sapiens
  CDR3 for beta chain variable domain of TCR clone 31968 (TRBV6-1, TRBJ2-7)
CASSEPIAATTEQYF

SEQ ID NO: 63937 - protein, 15 aa, Homo sapiens
  CDR3 for alpha chain variable domain of TCR clone 31969 (TRAV4, TRAJ10)
CLVGDEEGGGNKLTF

SEQ ID NO: 63938 - protein, 15 aa, Homo sapiens
  CDR3 for beta chain variable domain of TCR clone 31969 (TRBV7-2, TRBJ2-7)
CASSLTGQGTYEHYF

SEQ ID NO: 63939 - protein, 13 aa, Homo sapiens
  CDR3 for alpha chain variable domain of TCR clone 31970 (TRAV12-3, TRAJ33)
CSMSVNSNYQLIW

SEQ ID NO: 63940 - protein, 13 aa, Homo sapiens
  CDR3 for beta chain variable domain of TCR clone 31970 (TRBV7-2, TRBJ2-2)
CASSLAVTGELFF

SEQ ID NO: 63941 - protein, 15 aa, Homo sapiens
  CDR3 for alpha chain variable domain of TCR clone 31971 (TRAV8-3, TRAJ11)
CAVGLLNSGYSTLTC

SEQ ID NO: 63942 - protein, 16 aa, Homo sapiens
  CDR3 for beta chain variable domain of TCR clone 31971 (TRBV7-9, TRBJ1-2)
CASSLGFSSGEDGYTF

SEQ ID NO: 63943 - protein, 16 aa, Homo sapiens
  CDR3 for alpha chain variable domain of TCR clone 31972 (TRAV12-2, TRAJ10)
RAVNRVLTGGGNKLTF

SEQ ID NO: 63944 - protein, 12 aa, Homo sapiens
  CDR3 for beta chain variable domain of TCR clone 31972 (TRBV28, TRBJ2-7)
CASSFSSYEQYF

SEQ ID NO: 63945 - protein, 12 aa, Homo sapiens
  CDR3 for alpha chain variable domain of TCR clone 31973 (TRAV8-3, TRAJ26)
CAGDNYGQNFAF

SEQ ID NO: 63946 - protein, 11 aa, Homo sapiens
  CDR3 for beta chain variable domain of TCR clone 31973 (TRBV29-1, TRBJ2-5)
CSEDRTGTQYF

SEQ ID NO: 63947 - protein, 14 aa, Homo sapiens
  CDR3 for alpha chain variable domain of TCR clone 31974 (TRAV9-2, TRAJ39)
CALYIYNAGNMLTF

SEQ ID NO: 63948 - protein, 12 aa, Homo sapiens
  CDR3 for beta chain variable domain of TCR clone 31974 (TRBV5-4, TRBJ2-5)
CASSSTRETQYF

SEQ ID NO: 63949 - protein, 12 aa, Homo sapiens
  CDR3 for alpha chain variable domain of TCR clone 31975 (TRAV8-3, TRAJ20)
CAVGANDYKLSF

SEQ ID NO: 63950 - protein, 14 aa, Homo sapiens
  CDR3 for beta chain variable domain of TCR clone 31975 (TRBV7-2, TRBJ2-7)
CASSPKTSFYEQYF

SEQ ID NO: 63951 - protein, 13 aa, Homo sapiens
  CDR3 for alpha chain variable domain of TCR clone 31976 (TRAV35, TRAJ57)
CARSQGGSEKLVF

SEQ ID NO: 63952 - protein, 14 aa, Homo sapiens
  CDR3 for beta chain variable domain of TCR clone 31976 (TRBV25-1, TRBJ1-1)
CASTHLGGNTEAFF

SEQ ID NO: 63953 - protein, 12 aa, Homo sapiens
  CDR3 for alpha chain variable domain of TCR clone 31977 (TRAV13-2, TRAJ23)
CAERHRGGKLIF

SEQ ID NO: 63954 - protein, 16 aa, Homo sapiens
  CDR3 for beta chain variable domain of TCR clone 31977 (TRBV20-1, TRBJ1-4)
CSAPGHGLLTNEKLFF

SEQ ID NO: 63955 - protein, 15 aa, Homo sapiens
  CDR3 for alpha chain variable domain of TCR clone 31978 (TRAV3, TRAJ5)
CAMRDRKTGRRALTF

SEQ ID NO: 63956 - protein, 15 aa, Homo sapiens
  CDR3 for beta chain variable domain of TCR clone 31978 (TRBV7-8, TRBJ2-1)
CASSLADSLYNEQFF

SEQ ID NO: 63957 - protein, 15 aa, Homo sapiens
  CDR3 for alpha chain variable domain of TCR clone 31979 (TRAV26-1, TRAJ44)
CIVRANTGTASKLTF

SEQ ID NO: 63958 - protein, 16 aa, Homo sapiens
  CDR3 for beta chain variable domain of TCR clone 31979 (TRBV7-7, TRBJ2-1)
CAGSLASGTSYNEQFF

SEQ ID NO: 63959 - protein, 12 aa, Homo sapiens
  CDR3 for alpha chain variable domain of TCR clone 31980 (TRAV2, TRAJ9)
CAVGAGGFKTIF

SEQ ID NO: 63960 - protein, 11 aa, Homo sapiens
  CDR3 for beta chain variable domain of TCR clone 31980 (TRBV29-1, TRBJ2-5)
CSEDRTGTQYF

SEQ ID NO: 63961 - protein, 15 aa, Homo sapiens
  CDR3 for alpha chain variable domain of TCR clone 31981 (TRAV12-2, TRAJ43)
CAFDMHFGAGTRLTV

SEQ ID NO: 63962 - protein, 18 aa, Homo sapiens
  CDR3 for beta chain variable domain of TCR clone 31981 (TRBV20-1, TRBJ2-3)
CSASGLAGGPGTTDTQYF

SEQ ID NO: 63963 - protein, 12 aa, Homo sapiens
  CDR3 for alpha chain variable domain of TCR clone 31982 (TRAV3, TRAJ20)
CAVRDGYYKLSF

SEQ ID NO: 63964 - protein, 13 aa, Homo sapiens
  CDR3 for beta chain variable domain of TCR clone 31982 (TRBV9, TRBJ2-1)
CASSVGQGGEQFF

SEQ ID NO: 63965 - protein, 16 aa, Homo sapiens
  CDR3 for alpha chain variable domain of TCR clone 31983 (TRAV21, TRAJ37)
CAVRTAGSSNTGKLIF

SEQ ID NO: 63966 - protein, 13 aa, Homo sapiens
  CDR3 for beta chain variable domain of TCR clone 31983 (TRBV7-9, TRBJ2-5)
CASLPSGRETLYF

SEQ ID NO: 63967 - protein, 15 aa, Homo sapiens
  CDR3 for alpha chain variable domain of TCR clone 31984 (TRAV12-2, TRAJ53)
CSVNGGGGSNYKLTF

SEQ ID NO: 63968 - protein, 13 aa, Homo sapiens
  CDR3 for beta chain variable domain of TCR clone 31984 (TRBV3-1, TRBJ1-1)
CASSPGVITEAFF

SEQ ID NO: 63969 - protein, 11 aa, Homo sapiens
  CDR3 for alpha chain variable domain of TCR clone 31985 (TRAV1-1, TRAJ23)
CAVRQGGKLIF

SEQ ID NO: 63970 - protein, 16 aa, Homo sapiens
  CDR3 for beta chain variable domain of TCR clone 31985 (TRBV6-1, TRBJ2-5)
CASSETLDRGAETQYF

SEQ ID NO: 63971 - protein, 17 aa, Homo sapiens
  CDR3 for alpha chain variable domain of TCR clone 31986 (TRAV23/DV6, TRAJ57)
CAASSTLSQGGSEKMVF

SEQ ID NO: 63972 - protein, 14 aa, Homo sapiens
  CDR3 for beta chain variable domain of TCR clone 31986 (TRBV25-1, TRBJ1-1)
CASTHLGGNTEAFF

SEQ ID NO: 63973 - protein, 13 aa, Homo sapiens
  CDR3 for alpha chain variable domain of TCR clone 31987 (TRAV3, TRAJ20)
CCEAFCNDYKLSF

SEQ ID NO: 63974 - protein, 15 aa, Homo sapiens
  CDR3 for beta chain variable domain of TCR clone 31987 (TRBV19, TRBJ2-6)
CASVRRDSGANDLTF

SEQ ID NO: 63975 - protein, 13 aa, Homo sapiens
  CDR3 for alpha chain variable domain of TCR clone 31988 (TRAV12-1, TRAJ7)
CVVNMRGNNRLAF

SEQ ID NO: 63976 - protein, 14 aa, Homo sapiens
  CDR3 for beta chain variable domain of TCR clone 31988 (TRBV4-1, TRBJ2-2)
CASSQAVNTGELFF

SEQ ID NO: 63977 - protein, 14 aa, Homo sapiens
  CDR3 for alpha chain variable domain of TCR clone 31989 (TRAV21, TRAJ12)
CAVRNGDSSYKLIF

SEQ ID NO: 63978 - protein, 14 aa, Homo sapiens
  CDR3 for beta chain variable domain of TCR clone 31989 (TRBV7-6, TRBJ2-7)
CASSLTGAGNEQYF

SEQ ID NO: 63979 - protein, 12 aa, Homo sapiens
  CDR3 for alpha chain variable domain of TCR clone 31990 (TRAV29/DV5, TRAJ34)
CAASGNTDKLIF

SEQ ID NO: 63980 - protein, 12 aa, Homo sapiens
  CDR3 for beta chain variable domain of TCR clone 31990 (TRBV11-2, TRBJ2-2)
CASSLGGGELFF

SEQ ID NO: 63981 - protein, 15 aa, Homo sapiens
  CDR3 for alpha chain variable domain of TCR clone 31991 (TRAV34, TRAJ38)
CGADFTPGTNRKLIW

SEQ ID NO: 63982 - protein, 16 aa, Homo sapiens
  CDR3 for beta chain variable domain of TCR clone 31991 (TRBV12-5, TRBJ2-5)
CASGPRTSGNQETQYF

SEQ ID NO: 63983 - protein, 14 aa, Homo sapiens
  CDR3 for alpha chain variable domain of TCR clone 31992 (TRAV14/DV4, TRAJ26)
CAMREGTYGQNFVF

SEQ ID NO: 63984 - protein, 20 aa, Homo sapiens
  CDR3 for beta chain variable domain of TCR clone 31992 (TRBV28, TRBJ2-1)
CASTPIGRSPGLAGGNEQFF

SEQ ID NO: 63985 - protein, 17 aa, Homo sapiens
  CDR3 for alpha chain variable domain of TCR clone 31993 (TRAV3, TRAJ6)
CAVRDGPRAGGSYIPTF

SEQ ID NO: 63986 - protein, 16 aa, Homo sapiens
  CDR3 for beta chain variable domain of TCR clone 31993 (TRBV29-1, TRBJ2-7)
CSVEVVGTSGSYEQYF

SEQ ID NO: 63987 - protein, 16 aa, Homo sapiens
  CDR3 for alpha chain variable domain of TCR clone 31994 (TRAV16, TRAJ4)
CALSRMFSCGYNKLIF

SEQ ID NO: 63988 - protein, 16 aa, Homo sapiens
  CDR3 for beta chain variable domain of TCR clone 31994 (TRBV24-1, TRBJ2-3)
CATSDPGTGATDTQYF

SEQ ID NO: 63989 - protein, 15 aa, Homo sapiens
  CDR3 for alpha chain variable domain of TCR clone 31995 (TRAV14/DV4, TRAJ10)
CAMRELTGGGNKLTF

SEQ ID NO: 63990 - protein, 18 aa, Homo sapiens
  CDR3 for beta chain variable domain of TCR clone 31995 (TRBV7-9, TRBJ2-7)
RASSLTTSGSRTWYEQYF

SEQ ID NO: 63991 - protein, 14 aa, Homo sapiens
  CDR3 for alpha chain variable domain of TCR clone 31996 (TRAV1-1, TRAJ27)
CAVIYDTNAGKSTF

SEQ ID NO: 63992 - protein, 15 aa, Homo sapiens
  CDR3 for beta chain variable domain of TCR clone 31996 (TRBV7-2, TRBJ2-1)
CASSSGLAGGNEQFF

SEQ ID NO: 63993 - protein, 14 aa, Homo sapiens
  CDR3 for alpha chain variable domain of TCR clone 31997 (TRAV12-1, TRAJ17)
CVVNYKAACNKLTF

SEQ ID NO: 63994 - protein, 17 aa, Homo sapiens
  CDR3 for beta chain variable domain of TCR clone 31997 (TRBV20-1, TRBJ2-1)
CSASSSGLAGSYNEQFF

SEQ ID NO: 63995 - protein, 13 aa, Homo sapiens
  CDR3 for alpha chain variable domain of TCR clone 31998 (TRAV12-1, TRAJ6)
CVLASGGSYIPTF

SEQ ID NO: 63996 - protein, 19 aa, Homo sapiens
  CDR3 for beta chain variable domain of TCR clone 31998 (TRBV28, TRBJ2-5)
CASSLYLRLAGELQETQYF

SEQ ID NO: 63997 - protein, 14 aa, Homo sapiens
  CDR3 for alpha chain variable domain of TCR clone 31999 (TRAV13-1, TRAJ44)
CAAKATGTASKLTF

SEQ ID NO: 63998 - protein, 13 aa, Homo sapiens
  CDR3 for beta chain variable domain of TCR clone 31999 (TRBV15, TRBJ1-2)
CATSRGPRTGAVA

SEQ ID NO: 63999 - protein, 14 aa, Homo sapiens
  CDR3 for alpha chain variable domain of TCR clone 32000 (TRAV12-2, TRAJ40)
CAVKIPSGTYKYIF

SEQ ID NO: 64000 - protein, 20 aa, Homo sapiens
  CDR3 for beta chain variable domain of TCR clone 32000 (TRBV28, TRBJ2-1)
CASTPIGRSPGPAGGNEQFF

SEQ ID NO: 64001 - protein, 15 aa, Homo sapiens
  CDR3 for alpha chain variable domain of TCR clone 32001 (TRAV12-1, TRAJ4)
CVVNPFSGGYNKLIF

SEQ ID NO: 64002 - protein, 13 aa, Homo sapiens
  CDR3 for beta chain variable domain of TCR clone 32001 (TRBV20-1, TRBJ1-2)
CSARGTADYGYAF

SEQ ID NO: 64003 - protein, 15 aa, Homo sapiens
  CDR3 for alpha chain variable domain of TCR clone 32002 (TRAV12-1, TRAJ42)
CVVTRDGGSQGNLIF

SEQ ID NO: 64004 - protein, 14 aa, Homo sapiens
  CDR3 for beta chain variable domain of TCR clone 32002 (TRBV11-2, TRBJ2-3)
RASSLGGGANTQYF

SEQ ID NO: 64005 - protein, 14 aa, Homo sapiens
  CDR3 for alpha chain variable domain of TCR clone 32003 (TRAV1-2, TRAJ8)
CAVREDTGFQKLVF

SEQ ID NO: 64006 - protein, 15 aa, Homo sapiens
  CDR3 for beta chain variable domain of TCR clone 32003 (TRBV20-1, TRBJ2-7)
CSARDRVSRMDDQYF

SEQ ID NO: 64007 - protein, 14 aa, Homo sapiens
  CDR3 for alpha chain variable domain of TCR clone 32004 (TRAV8-3, TRAJ28)
CAVVPGAGSYQLTF

SEQ ID NO: 64008 - protein, 15 aa, Homo sapiens
  CDR3 for beta chain variable domain of TCR clone 32004 (TRBV6-3, TRBJ2-2)
CASRGMTVDTGELFL

SEQ ID NO: 64009 - protein, 13 aa, Homo sapiens
  CDR3 for alpha chain variable domain of TCR clone 32005 (TRAV8-4, TRAJ10)
CAAFTGGGNKLTF

SEQ ID NO: 64010 - protein, 15 aa, Homo sapiens
  CDR3 for beta chain variable domain of TCR clone 32005 (TRBV2, TRBJ2-3)
CASSDFEKAADTQYF

SEQ ID NO: 64011 - protein, 14 aa, Homo sapiens
  CDR3 for alpha chain variable domain of TCR clone 32006 (TRAV1-2, TRAJ8)
CAVREDTGFQKLVF

SEQ ID NO: 64012 - protein, 15 aa, Homo sapiens
  CDR3 for beta chain variable domain of TCR clone 32006 (TRBV5-1, TRBJ2-1)
CASSPGGLAGNEQFF

SEQ ID NO: 64013 - protein, 13 aa, Homo sapiens
  CDR3 for alpha chain variable domain of TCR clone 32007 (TRAV8-3, TRAJ28)
CAVGAVGSDQLTF

SEQ ID NO: 64014 - protein, 15 aa, Homo sapiens
  CDR3 for beta chain variable domain of TCR clone 32007 (TRBV7-9, TRBJ1-5)
CASSQGHQPNQPQHF

SEQ ID NO: 64015 - protein, 13 aa, Homo sapiens
  CDR3 for alpha chain variable domain of TCR clone 32008 (TRAV13-1, TRAJ13)
CAASKGGYQKVTF

SEQ ID NO: 64016 - protein, 16 aa, Homo sapiens
  CDR3 for beta chain variable domain of TCR clone 32008 (TRBV18, TRBJ1-2)
CASSPPERVTIYGHTF

SEQ ID NO: 64017 - protein, 12 aa, Homo sapiens
  CDR3 for alpha chain variable domain of TCR clone 32009 (TRAV8-3, TRAJ20)
CAVGENDYKLSF

SEQ ID NO: 64018 - protein, 16 aa, Homo sapiens
  CDR3 for beta chain variable domain of TCR clone 32009 (TRBV19, TRBJ2-2)
CASRSPGTGATGELFF

SEQ ID NO: 64019 - protein, 12 aa, Homo sapiens
  CDR3 for alpha chain variable domain of TCR clone 32010 (TRAV12-2, TRAJ52)
IGGGASYGKLTF

SEQ ID NO: 64020 - protein, 13 aa, Homo sapiens
  CDR3 for beta chain variable domain of TCR clone 32010 (TRBV12-4, TRBJ1-1)
CASSPGTGFGAFF

SEQ ID NO: 64021 - protein, 15 aa, Homo sapiens
  CDR3 for alpha chain variable domain of TCR clone 32011 (TRAV17, TRAJ37)
CATDHGPSNTGKLIF

SEQ ID NO: 64022 - protein, 14 aa, Homo sapiens
  CDR3 for beta chain variable domain of TCR clone 32011 (TRBV7-2, TRBJ2-3)
CASSRTSGADTQYF

SEQ ID NO: 64023 - protein, 14 aa, Homo sapiens
  CDR3 for alpha chain variable domain of TCR clone 32012 (TRAV17, TRAJ40)
CATALTSETYKYIF

SEQ ID NO: 64024 - protein, 13 aa, Homo sapiens
  CDR3 for beta chain variable domain of TCR clone 32012 (TRBV27, TRBJ2-1)
CASSSGSHNEQFF

SEQ ID NO: 64025 - protein, 13 aa, Homo sapiens
  CDR3 for alpha chain variable domain of TCR clone 32013 (TRAV12-1, TRAJ30)
CVVNTYRDDEIIF

SEQ ID NO: 64026 - protein, 13 aa, Homo sapiens
  CDR3 for beta chain variable domain of TCR clone 32013 (TRBV9, TRBJ1-2)
CASSRLGGGGYTF

SEQ ID NO: 64027 - protein, 13 aa, Homo sapiens
  CDR3 for alpha chain variable domain of TCR clone 32014 (TRAV23/DV6, TRAJ12)
CAPRGDSSYKLIF

SEQ ID NO: 64028 - protein, 12 aa, Homo sapiens
  CDR3 for beta chain variable domain of TCR clone 32014 (TRBV7-6, TRBJ2-5)
CASSLSQETQYF

SEQ ID NO: 64029 - protein, 14 aa, Homo sapiens
  CDR3 for alpha chain variable domain of TCR clone 32015 (TRAV16, TRAJ17)
CAPKIKAAGNKLTF

SEQ ID NO: 64030 - protein, 17 aa, Homo sapiens
  CDR3 for beta chain variable domain of TCR clone 32015 (TRBV7-2, TRBJ2-3)
CASSSYSGTRRADTQYF

SEQ ID NO: 64031 - protein, 16 aa, Homo sapiens
  CDR3 for alpha chain variable domain of TCR clone 32016 (TRAV30, TRAJ24)
CGTEIVDADSWGKFQF

SEQ ID NO: 64032 - protein, 12 aa, Homo sapiens
  CDR3 for beta chain variable domain of TCR clone 32016 (TRBV11-2, TRBJ2-2)
RASSLGGGELFF

SEQ ID NO: 64033 - protein, 12 aa, Homo sapiens
  CDR3 for alpha chain variable domain of TCR clone 32017 (TRAV12-3, TRAJ17)
CAMALTGNKLTF

SEQ ID NO: 64034 - protein, 15 aa, Homo sapiens
  CDR3 for beta chain variable domain of TCR clone 32017 (TRBV20-1, TRBJ2-7)
CSARGRVSGMDEQYF

SEQ ID NO: 64035 - protein, 16 aa, Homo sapiens
  CDR3 for alpha chain variable domain of TCR clone 32018 (TRAV21, TRAJ37)
CAVRTAGSSNTGRLIF

SEQ ID NO: 64036 - protein, 13 aa, Homo sapiens
  CDR3 for beta chain variable domain of TCR clone 32018 (TRBV7-9, TRBJ2-5)
CASLPSGRETHYF

SEQ ID NO: 64037 - protein, 15 aa, Homo sapiens
  CDR3 for alpha chain variable domain of TCR clone 32019 (TRAV8-6, TRAJ10)
CAVSSKGGGGNKLTF

SEQ ID NO: 64038 - protein, 15 aa, Homo sapiens
  CDR3 for beta chain variable domain of TCR clone 32019 (TRBV28, TRBJ1-2)
CASSSHSIANYGYIF

SEQ ID NO: 64039 - protein, 13 aa, Homo sapiens
  CDR3 for alpha chain variable domain of TCR clone 32020 (TRAV16, TRAJ5)
CALTNTGRRALTF

SEQ ID NO: 64040 - protein, 11 aa, Homo sapiens
  CDR3 for beta chain variable domain of TCR clone 32020 (TRBV11-2, TRBJ1-1)
CASSINTEAFF

SEQ ID NO: 64041 - protein, 14 aa, Homo sapiens
  CDR3 for alpha chain variable domain of TCR clone 32021 (TRAV12-2, TRAJ40)
CAVKIPSGTYKYIF

SEQ ID NO: 64042 - protein, 12 aa, Homo sapiens
  CDR3 for beta chain variable domain of TCR clone 32021 (TRBV29-1, TRBJ2-3)
CSVTGGADTQYF

SEQ ID NO: 64043 - protein, 12 aa, Homo sapiens
  CDR3 for alpha chain variable domain of TCR clone 32022 (TRAV13-1, TRAJ49)
CAASPMGKQFYF

SEQ ID NO: 64044 - protein, 13 aa, Homo sapiens
  CDR3 for beta chain variable domain of TCR clone 32022 (TRBV20-1, TRBJ2-2)
CSASAAGTGELFF

SEQ ID NO: 64045 - protein, 14 aa, Homo sapiens
  CDR3 for alpha chain variable domain of TCR clone 32023 (TRAV26-1, TRAJ49)
CIVRPSNTGNQFYF

SEQ ID NO: 64046 - protein, 15 aa, Homo sapiens
  CDR3 for beta chain variable domain of TCR clone 32023 (TRBV19, TRBJ1-1)
CASMGFRDVNTEALF

SEQ ID NO: 64047 - protein, 12 aa, Homo sapiens
  CDR3 for alpha chain variable domain of TCR clone 32024 (TRAV12-2, TRAJ15)
CAVNQAGTALIL

SEQ ID NO: 64048 - protein, 15 aa, Homo sapiens
  CDR3 for beta chain variable domain of TCR clone 32024 (TRBV3-1, TRBJ1-2)
CASSFRTGPNYGYTF

SEQ ID NO: 64049 - protein, 13 aa, Homo sapiens
  CDR3 for alpha chain variable domain of TCR clone 32025 (TRAV22, TRAJ29)
CAVGGSGNTPLVF

SEQ ID NO: 64050 - protein, 13 aa, Homo sapiens
  CDR3 for beta chain variable domain of TCR clone 32025 (TRBV4-2, TRBJ1-1)
CAGSQAGNTEAFF

SEQ ID NO: 64051 - protein, 11 aa, Homo sapiens
  CDR3 for alpha chain variable domain of TCR clone 32026 (TRAV17, TRAJ9)
CATTGGFKTIF

SEQ ID NO: 64052 - protein, 14 aa, Homo sapiens
  CDR3 for beta chain variable domain of TCR clone 32026 (TRBV7-9, TRBJ2-2)
CASGGLADTGELFF

SEQ ID NO: 64053 - protein, 17 aa, Homo sapiens
  CDR3 for alpha chain variable domain of TCR clone 32027 (TRAV3, TRAJ6)
CAVRDGPRAGGSYIPTF

SEQ ID NO: 64054 - protein, 20 aa, Homo sapiens
  CDR3 for beta chain variable domain of TCR clone 32027 (TRBV28, TRBJ2-1)
CASTPIGRSPVLAGGNEQFF

SEQ ID NO: 64055 - protein, 15 aa, Homo sapiens
  CDR3 for alpha chain variable domain of TCR clone 32028 (TRAV21, TRAJ24)
CAARSSPDSWGKLQF

SEQ ID NO: 64056 - protein, 13 aa, Homo sapiens
  CDR3 for beta chain variable domain of TCR clone 32028 (TRBV11-2, TRBJ2-5)
CASSSTGEETQYF

SEQ ID NO: 64057 - protein, 13 aa, Homo sapiens
  CDR3 for alpha chain variable domain of TCR clone 32029 (TRAV1-2, TRAJ9)
CAALNTGGFKTIF

SEQ ID NO: 64058 - protein, 14 aa, Homo sapiens
  CDR3 for beta chain variable domain of TCR clone 32029 (TRBV4-2, TRBJ2-1)
CASGLDRAYNEQFF

SEQ ID NO: 64059 - protein, 11 aa, Homo sapiens
  CDR3 for alpha chain variable domain of TCR clone 32030 (TRAV2, TRAJ33)
CAVDSNYQLIL

SEQ ID NO: 64060 - protein, 15 aa, Homo sapiens
  CDR3 for beta chain variable domain of TCR clone 32030 (TRBV19, TRBJ1-2)
CASSVGQVLNYGYTF

SEQ ID NO: 64061 - protein, 14 aa, Homo sapiens
  CDR3 for alpha chain variable domain of TCR clone 32031 (TRAV17, TRAJ45)
CATASGGGADGRTF

SEQ ID NO: 64062 - protein, 15 aa, Homo sapiens
  CDR3 for beta chain variable domain of TCR clone 32031 (TRBV11-2, TRBJ2-1)
CASSRNRGLMYEQFF

SEQ ID NO: 64063 - protein, 15 aa, Homo sapiens
  CDR3 for alpha chain variable domain of TCR clone 32032 (TRAV12-1, TRAJ8)
CVVNVENTGFRKLVF

SEQ ID NO: 64064 - protein, 15 aa, Homo sapiens
  CDR3 for beta chain variable domain of TCR clone 32032 (TRBV12-4, TRBJ1-6)
CASSLGQGFRSPLHF

SEQ ID NO: 64065 - protein, 14 aa, Homo sapiens
  CDR3 for alpha chain variable domain of TCR clone 32033 (TRAV17, TRAJ22)
CATSPSGSARQLTF

SEQ ID NO: 64066 - protein, 15 aa, Homo sapiens
  CDR3 for beta chain variable domain of TCR clone 32033 (TRBV4-1, TRBJ2-5)
CASSQWDLYQETQYC

SEQ ID NO: 64067 - protein, 14 aa, Homo sapiens
  CDR3 for alpha chain variable domain of TCR clone 32034 (TRAV1-2, TRAJ29)
CAVRIDSGNTPLVF

SEQ ID NO: 64068 - protein, 14 aa, Homo sapiens
  CDR3 for beta chain variable domain of TCR clone 32034 (TRBV7-2, TRBJ2-7)
CASSPKTSFYEQYF

SEQ ID NO: 64069 - protein, 14 aa, Homo sapiens
  CDR3 for alpha chain variable domain of TCR clone 32035 (TRAV35, TRAJ33)
CVGSSQDSNYQLIW

SEQ ID NO: 64070 - protein, 15 aa, Homo sapiens
  CDR3 for beta chain variable domain of TCR clone 32035 (TRBV20-1, TRBJ2-7)
CSAESGTSGAYEQYF

SEQ ID NO: 64071 - protein, 17 aa, Homo sapiens
  CDR3 for alpha chain variable domain of TCR clone 32036 (TRAV2, TRAJ32)
CAFNPPESGWCYKQAHL

SEQ ID NO: 64072 - protein, 12 aa, Homo sapiens
  CDR3 for beta chain variable domain of TCR clone 32036 (TRBV20-1, TRBJ2-7)
CSAITPTKEQYF

SEQ ID NO: 64073 - protein, 13 aa, Homo sapiens
  CDR3 for alpha chain variable domain of TCR clone 32037 (TRAV12-2, TRAJ42)
CAVKRGSQGNLIF

SEQ ID NO: 64074 - protein, 14 aa, Homo sapiens
  CDR3 for beta chain variable domain of TCR clone 32037 (TRBV19, TRBJ2-1)
CASPTFVLSGEQFF

SEQ ID NO: 64075 - protein, 11 aa, Homo sapiens
  CDR3 for alpha chain variable domain of TCR clone 32038 (TRAV17, TRAJ9)
CATTGGFKTIF

SEQ ID NO: 64076 - protein, 14 aa, Homo sapiens
  CDR3 for beta chain variable domain of TCR clone 32038 (TRBV7-9, TRBJ2-2)
CASSRLADTGELFF

SEQ ID NO: 64077 - protein, 15 aa, Homo sapiens
  CDR3 for alpha chain variable domain of TCR clone 32039 (TRAV17, TRAJ57)
CATGPSQGGSEKLVF

SEQ ID NO: 64078 - protein, 14 aa, Homo sapiens
  CDR3 for beta chain variable domain of TCR clone 32039 (TRBV12-4, TRBJ1-1)
CASSLGTGGTEAFF

SEQ ID NO: 64079 - protein, 13 aa, Homo sapiens
  CDR3 for alpha chain variable domain of TCR clone 32040 (TRAV27, TRAJ49)
CAPRPYTGNQFYF

SEQ ID NO: 64080 - protein, 16 aa, Homo sapiens
  CDR3 for beta chain variable domain of TCR clone 32040 (TRBV4-1, TRBJ1-2)
CASSQGAGQVLYGYTF

SEQ ID NO: 64081 - protein, 13 aa, Homo sapiens
  CDR3 for alpha chain variable domain of TCR clone 32041 (TRAV12-3, TRAJ33)
CAVSVNSNYQLIW

SEQ ID NO: 64082 - protein, 16 aa, Homo sapiens
  CDR3 for beta chain variable domain of TCR clone 32041 (TRBV13, TRBJ2-5)
CASSLRTGGSWETQYF

SEQ ID NO: 64083 - protein, 14 aa, Homo sapiens
  CDR3 for alpha chain variable domain of TCR clone 32042 (TRAV38-1, TRAJ29)
CAFITPSGNTPLVF

SEQ ID NO: 64084 - protein, 14 aa, Homo sapiens
  CDR3 for beta chain variable domain of TCR clone 32042 (TRBV18, TRBJ2-7)
CARSPRGGAYEQYF

SEQ ID NO: 64085 - protein, 11 aa, Homo sapiens
  CDR3 for alpha chain variable domain of TCR clone 32043 (TRAV1-1, TRAJ23)
CAVRQGGKLIF

SEQ ID NO: 64086 - protein, 20 aa, Homo sapiens
  CDR3 for beta chain variable domain of TCR clone 32043 (TRBV7-8, TRBJ2-2)
CASSHLFTGPTIHITGELFF

SEQ ID NO: 64087 - protein, 14 aa, Homo sapiens
  CDR3 for alpha chain variable domain of TCR clone 32044 (TRAV35, TRAJ33)
CAGSSQDSNYQLIW

SEQ ID NO: 64088 - protein, 14 aa, Homo sapiens
  CDR3 for beta chain variable domain of TCR clone 32044 (TRBV25-1, TRBJ1-2)
CASSDTTGVVGYTF

SEQ ID NO: 64089 - protein, 13 aa, Homo sapiens
  CDR3 for alpha chain variable domain of TCR clone 32045 (TRAV12-1, TRAJ7)
CVVNMRGNNRLAF

SEQ ID NO: 64090 - protein, 15 aa, Homo sapiens
  CDR3 for beta chain variable domain of TCR clone 32045 (TRBV27, TRBJ2-3)
CASSLGLAATDTQYL

SEQ ID NO: 64091 - protein, 13 aa, Homo sapiens
  CDR3 for alpha chain variable domain of TCR clone 32046 (TRAV8-3, TRAJ28)
SAVGAVGSYQLTF

SEQ ID NO: 64092 - protein, 14 aa, Homo sapiens
  CDR3 for beta chain variable domain of TCR clone 32046 (TRBV7-2, TRBJ2-7)
CASRSQGAAYEQYF

SEQ ID NO: 64093 - protein, 14 aa, Homo sapiens
  CDR3 for alpha chain variable domain of TCR clone 32047 (TRAV20, TRAJ56)
CAVQFGGANSKLTF

SEQ ID NO: 64094 - protein, 14 aa, Homo sapiens
  CDR3 for beta chain variable domain of TCR clone 32047 (TRBV20-1, TRBJ2-7)
CSAKRGRSSYEQYF

SEQ ID NO: 64095 - protein, 16 aa, Homo sapiens
  CDR3 for alpha chain variable domain of TCR clone 32048 (TRAV12-3, TRAJ53)
CAMSPGSGGSNYKLTF

SEQ ID NO: 64096 - protein, 11 aa, Homo sapiens
  CDR3 for beta chain variable domain of TCR clone 32048 (TRBV29-1, TRBJ2-5)
CSEDLTGTQYF

SEQ ID NO: 64097 - protein, 14 aa, Homo sapiens
  CDR3 for alpha chain variable domain of TCR clone 32049 (TRAV12-3, TRAJ6)
CAMSGAGGSYIPTF

SEQ ID NO: 64098 - protein, 13 aa, Homo sapiens
  CDR3 for beta chain variable domain of TCR clone 32049 (TRBV10-3, TRBJ2-7)
CASKLAVNYEQYF

SEQ ID NO: 64099 - protein, 14 aa, Homo sapiens
  CDR3 for alpha chain variable domain of TCR clone 32050 (TRAV1-2, TRAJ16)
CAVNRFLDGQKLLF

SEQ ID NO: 64100 - protein, 15 aa, Homo sapiens
  CDR3 for beta chain variable domain of TCR clone 32050 (TRBV7-9, TRBJ1-6)
CASSSPGRGNSPLHF

SEQ ID NO: 64101 - protein, 15 aa, Homo sapiens
  CDR3 for alpha chain variable domain of TCR clone 32051 (TRAV38-1, TRAJ37)
CAFIHGSGNTGKLIS

SEQ ID NO: 64102 - protein, 12 aa, Homo sapiens
  CDR3 for beta chain variable domain of TCR clone 32051 (TRBV7-9, TRBJ2-7)
CASSFGSYEQYF

SEQ ID NO: 64103 - protein, 17 aa, Homo sapiens
  CDR3 for alpha chain variable domain of TCR clone 32052 (TRAV4, )
CLVDIQNPDPAVYQLRD

SEQ ID NO: 64104 - protein, 15 aa, Homo sapiens
  CDR3 for beta chain variable domain of TCR clone 32052 (TRBV20-1, TRBJ1-5)
CSARVSRVVSQPQHF

SEQ ID NO: 64105 - protein, 12 aa, Homo sapiens
  CDR3 for alpha chain variable domain of TCR clone 32053 (TRAV10, TRAJ33)
CVSGDSNYQLIW

SEQ ID NO: 64106 - protein, 15 aa, Homo sapiens
  CDR3 for beta chain variable domain of TCR clone 32053 (TRBV6-3, TRBJ2-7)
CASSSPGTVFYEQYF

SEQ ID NO: 64107 - protein, 15 aa, Homo sapiens
  CDR3 for alpha chain variable domain of TCR clone 32054 (TRAV8-2, TRAJ40)
CVVSGTTSGTYKYIF

SEQ ID NO: 64108 - protein, 16 aa, Homo sapiens
  CDR3 for beta chain variable domain of TCR clone 32054 (TRBV7-3, TRBJ2-1)
CASSLEGYRSYNEQFF

SEQ ID NO: 64109 - protein, 14 aa, Homo sapiens
  CDR3 for alpha chain variable domain of TCR clone 32055 (TRAV27, TRAJ36)
CAGPPKRGANNLFF

SEQ ID NO: 64110 - protein, 15 aa, Homo sapiens
  CDR3 for beta chain variable domain of TCR clone 32055 (TRBV18, TRBJ2-7)
WASSPASTPNYEQYF

SEQ ID NO: 64111 - protein, 12 aa, Homo sapiens
  CDR3 for alpha chain variable domain of TCR clone 32056 (TRAV12-3, TRAJ17)
CAMTLTGNKLTF

SEQ ID NO: 64112 - protein, 16 aa, Homo sapiens
  CDR3 for beta chain variable domain of TCR clone 32056 (TRBV4-1, TRBJ2-3)
CASSQSTSGAEDTQYF

SEQ ID NO: 64113 - protein, 14 aa, Homo sapiens
  CDR3 for alpha chain variable domain of TCR clone 32057 (TRAV1-2, TRAJ16)
CAVNRFSDGQKLLF

SEQ ID NO: 64114 - protein, 15 aa, Homo sapiens
  CDR3 for beta chain variable domain of TCR clone 32057 (TRBV9, TRBJ1-6)
CASSVAGTVDSPLHF

SEQ ID NO: 64115 - protein, 13 aa, Homo sapiens
  CDR3 for alpha chain variable domain of TCR clone 32058 (TRAV36/DV7, TRAJ37)
CAVFSSNTGRLIF

SEQ ID NO: 64116 - protein, 16 aa, Homo sapiens
  CDR3 for beta chain variable domain of TCR clone 32058 (TRBV3-1, TRBJ2-5)
CASSPGQFNGFGTQYF

SEQ ID NO: 64117 - protein, 14 aa, Homo sapiens
  CDR3 for alpha chain variable domain of TCR clone 32059 (TRAV17, TRAJ16)
CATADFSDGQKLLF

SEQ ID NO: 64118 - protein, 15 aa, Homo sapiens
  CDR3 for beta chain variable domain of TCR clone 32059 (TRBV18, TRBJ2-1)
CASSPPSASYNERFF

SEQ ID NO: 64119 - protein, 12 aa, Homo sapiens
  CDR3 for alpha chain variable domain of TCR clone 32060 (TRAV2, TRAJ33)
CAFMDSNYQLIW

SEQ ID NO: 64120 - protein, 16 aa, Homo sapiens
  CDR3 for beta chain variable domain of TCR clone 32060 (TRBV2, TRBJ2-7)
CASSEPWTGPSYEQHF

SEQ ID NO: 64121 - protein, 12 aa, Homo sapiens
  CDR3 for alpha chain variable domain of TCR clone 32061 (TRAV17, TRAJ20)
CATDSNDYKLSF

SEQ ID NO: 64122 - protein, 12 aa, Homo sapiens
  CDR3 for beta chain variable domain of TCR clone 32061 (TRBV7-9, TRBJ1-1)
CASSLVRGEAFF

SEQ ID NO: 64123 - protein, 13 aa, Homo sapiens
  CDR3 for alpha chain variable domain of TCR clone 32062 (TRAV1-2, TRAJ12)
CAVSMGSSYKLIF

SEQ ID NO: 64124 - protein, 15 aa, Homo sapiens
  CDR3 for beta chain variable domain of TCR clone 32062 (TRBV27, TRBJ2-5)
CASSLIPSGGETQYF

SEQ ID NO: 64125 - protein, 19 aa, Homo sapiens
  CDR3 for alpha chain variable domain of TCR clone 32063 (TRAV2, TRAJ20)
ILQVREADAAVYRDCKLSS

SEQ ID NO: 64126 - protein, 16 aa, Homo sapiens
  CDR3 for beta chain variable domain of TCR clone 32063 (TRBV5-1, TRBJ2-5)
CASSLALLRAGETQYF

SEQ ID NO: 64127 - protein, 13 aa, Homo sapiens
  CDR3 for alpha chain variable domain of TCR clone 32064 (TRAV17, TRAJ9)
CATAITGGFKTIF

SEQ ID NO: 64128 - protein, 18 aa, Homo sapiens
  CDR3 for beta chain variable domain of TCR clone 32064 (TRBV7-9, TRBJ2-1)
CASSTGLAEGSSYNEQFF

SEQ ID NO: 64129 - protein, 14 aa, Homo sapiens
  CDR3 for alpha chain variable domain of TCR clone 32065 (TRAV30, TRAJ33)
CGTVAPRSSYQLIW

SEQ ID NO: 64130 - protein, 14 aa, Homo sapiens
  CDR3 for beta chain variable domain of TCR clone 32065 (TRBV19, TRBJ2-1)
CASPTFVLSGEQFF

SEQ ID NO: 64131 - protein, 19 aa, Homo sapiens
  CDR3 for alpha chain variable domain of TCR clone 32066 (TRAV1-2, TRAJ26)
CLLPLCCERPDNYGQNFVF

SEQ ID NO: 64132 - protein, 16 aa, Homo sapiens
  CDR3 for beta chain variable domain of TCR clone 32066 (TRBV11-2, TRBJ2-1)
CASSLLLLSSYNEQFF

SEQ ID NO: 64133 - protein, 11 aa, Homo sapiens
  CDR3 for alpha chain variable domain of TCR clone 32067 (TRAV1-2, TRAJ40)
CAVPGTYKSIF

SEQ ID NO: 64134 - protein, 16 aa, Homo sapiens
  CDR3 for beta chain variable domain of TCR clone 32067 (TRBV29-1, TRBJ2-7)
CSVEVVGTSGSYEQYF

SEQ ID NO: 64135 - protein, 15 aa, Homo sapiens
  CDR3 for alpha chain variable domain of TCR clone 32068 (TRAV21, TRAJ32)
CAVNSYGGTTNKLIF

SEQ ID NO: 64136 - protein, 18 aa, Homo sapiens
  CDR3 for beta chain variable domain of TCR clone 32068 (TRBV7-9, TRBJ2-1)
CASSTGLAEGSSYNEQFF

SEQ ID NO: 64137 - protein, 15 aa, Homo sapiens
  CDR3 for alpha chain variable domain of TCR clone 32069 (TRAV2, TRAJ15)
CALEDRGQAGTALIF

SEQ ID NO: 64138 - protein, 13 aa, Homo sapiens
  CDR3 for beta chain variable domain of TCR clone 32069 (TRBV10-2, TRBJ2-7)
CASGASGGYEQYF

SEQ ID NO: 64139 - protein, 12 aa, Homo sapiens
  CDR3 for alpha chain variable domain of TCR clone 32070 (TRAV35, TRAJ49)
CAGLNTGNQFYF

SEQ ID NO: 64140 - protein, 16 aa, Homo sapiens
  CDR3 for beta chain variable domain of TCR clone 32070 (TRBV5-1, TRBJ2-2)
CASSLWDTTNTGELFF

SEQ ID NO: 64141 - protein, 15 aa, Homo sapiens
  CDR3 for alpha chain variable domain of TCR clone 32071 (TRAV12-3, TRAJ49)
CAMAVTPNTGNKFYF

SEQ ID NO: 64142 - protein, 18 aa, Homo sapiens
  CDR3 for beta chain variable domain of TCR clone 32071 (TRBV4-1, TRBJ1-5)
CASSQDPRGQGLNQPQHF

SEQ ID NO: 64143 - protein, 15 aa, Homo sapiens
  CDR3 for alpha chain variable domain of TCR clone 32072 (TRAV8-3, TRAJ45)
CASSYSGGGADGLTF

SEQ ID NO: 64144 - protein, 18 aa, Homo sapiens
  CDR3 for beta chain variable domain of TCR clone 32072 (TRBV11-2, TRBJ2-3)
CASSLGGASRGAPNTQYF

SEQ ID NO: 64145 - protein, 14 aa, Homo sapiens
  CDR3 for alpha chain variable domain of TCR clone 32073 (TRAV16, TRAJ33)
CALSAMDSNYQLIW

SEQ ID NO: 64146 - protein, 18 aa, Homo sapiens
  CDR3 for beta chain variable domain of TCR clone 32073 (TRBV25-1, TRBJ2-7)
CASSELTGGESTSSTSGR

SEQ ID NO: 64147 - protein, 14 aa, Homo sapiens
  CDR3 for alpha chain variable domain of TCR clone 32074 (TRAV8-4, TRAJ9)
CAVRINTGGVKTIF

SEQ ID NO: 64148 - protein, 15 aa, Homo sapiens
  CDR3 for beta chain variable domain of TCR clone 32074 (TRBV10-2, TRBJ2-6)
CASSEQGTGANVLTF

SEQ ID NO: 64149 - protein, 12 aa, Homo sapiens
  CDR3 for alpha chain variable domain of TCR clone 32075 (TRAV2, TRAJ10)
CASTVGGNKLTF

SEQ ID NO: 64150 - protein, 14 aa, Homo sapiens
  CDR3 for beta chain variable domain of TCR clone 32075 (TRBV7-2, TRBJ2-2)
CASRGQGAAGELFF

SEQ ID NO: 64151 - protein, 14 aa, Homo sapiens
  CDR3 for alpha chain variable domain of TCR clone 32076 (TRAV26-2, TRAJ38)
CILYNAGNNRKLIW

SEQ ID NO: 64152 - protein, 14 aa, Homo sapiens
  CDR3 for beta chain variable domain of TCR clone 32076 (TRBV19, TRBJ2-1)
CASPTVVLSGEQFF

SEQ ID NO: 64153 - protein, 14 aa, Homo sapiens
  CDR3 for alpha chain variable domain of TCR clone 32077 (TRAV1-1, TRAJ27)
CAVIYNTNAGKSTF

SEQ ID NO: 64154 - protein, 13 aa, Homo sapiens
  CDR3 for beta chain variable domain of TCR clone 32077 (TRBV19, TRBJ1-3)
CASRLSLGNTIYF

SEQ ID NO: 64155 - protein, 14 aa, Homo sapiens
  CDR3 for alpha chain variable domain of TCR clone 32078 (TRAV12-2, TRAJ53)
CAVKGGGSNYKLTF

SEQ ID NO: 64156 - protein, 14 aa, Homo sapiens
  CDR3 for beta chain variable domain of TCR clone 32078 (TRBV7-7, TRBJ2-2)
CATRQDSDTGELVF

SEQ ID NO: 64157 - protein, 14 aa, Homo sapiens
  CDR3 for alpha chain variable domain of TCR clone 32079 (TRAV1-2, TRAJ8)
CAVREDAGFQKLVF

SEQ ID NO: 64158 - protein, 14 aa, Homo sapiens
  CDR3 for beta chain variable domain of TCR clone 32079 (TRBV7-3, TRBJ2-1)
CASSLAGGTNEQFF

SEQ ID NO: 64159 - protein, 14 aa, Homo sapiens
  CDR3 for alpha chain variable domain of TCR clone 32080 (TRAV12-1, TRAJ43)
CVVNSRSNNNDMRF

SEQ ID NO: 64160 - protein, 10 aa, Homo sapiens
  CDR3 for beta chain variable domain of TCR clone 32080 (TRBV28, TRBJ2-5)
CQQSSWTQYF

SEQ ID NO: 64161 - protein, 15 aa, Homo sapiens
  CDR3 for alpha chain variable domain of TCR clone 32081 (TRAV12-2, TRAJ53)
CAVDGGGGSNYKLTF

SEQ ID NO: 64162 - protein, 13 aa, Homo sapiens
  CDR3 for beta chain variable domain of TCR clone 32081 (TRBV3-1, TRBJ1-1)
CASSPGVITEAFF

SEQ ID NO: 64163 - protein, 13 aa, Homo sapiens
  CDR3 for alpha chain variable domain of TCR clone 32082 (TRAV1-1, TRAJ9)
CAAKNTGGFKTIF

SEQ ID NO: 64164 - protein, 20 aa, Homo sapiens
  CDR3 for beta chain variable domain of TCR clone 32082 (TRBV7-8, TRBJ2-2)
CASSHLFPGPTIHITGELFF

SEQ ID NO: 64165 - protein, 14 aa, Homo sapiens
  CDR3 for alpha chain variable domain of TCR clone 32083 (TRAV12-2, TRAJ13)
CAVKKTGGYQKVAF

SEQ ID NO: 64166 - protein, 14 aa, Homo sapiens
  CDR3 for beta chain variable domain of TCR clone 32083 (TRBV5-5, TRBJ2-7)
CASSLGQGTYEQYF

SEQ ID NO: 64167 - protein, 15 aa, Homo sapiens
  CDR3 for alpha chain variable domain of TCR clone 32084 (TRAV17, TRAJ6)
CATDLPSGGSYIPKF

SEQ ID NO: 64168 - protein, 16 aa, Homo sapiens
  CDR3 for beta chain variable domain of TCR clone 32084 (TRBV4-1, TRBJ2-7)
CASSQDPTGYSYEQYF

SEQ ID NO: 64169 - protein, 14 aa, Homo sapiens
  CDR3 for alpha chain variable domain of TCR clone 32085 (TRAV9-2, TRAJ39)
CALYIYNAGNMLTF

SEQ ID NO: 64170 - protein, 15 aa, Homo sapiens
  CDR3 for beta chain variable domain of TCR clone 32085 (TRBV27, TRBJ1-5)
CASSLGTGFDQPRHF

SEQ ID NO: 64171 - protein, 19 aa, Homo sapiens
  CDR3 for alpha chain variable domain of TCR clone 32086 (TRAV1-2, TRAJ26)
CLLPLCCERPDNNGQNFVF

SEQ ID NO: 64172 - protein, 11 aa, Homo sapiens
  CDR3 for beta chain variable domain of TCR clone 32086 (TRBV12-4, TRBJ2-3)
CASTATDTQYF

SEQ ID NO: 64173 - protein, 16 aa, Homo sapiens
  CDR3 for alpha chain variable domain of TCR clone 32087 (TRAV21, TRAJ45)
CAVSWGSGGGADGLTF

SEQ ID NO: 64174 - protein, 16 aa, Homo sapiens
  CDR3 for beta chain variable domain of TCR clone 32087 (TRBV24-1, TRBJ2-3)
CATSDPGTGATDTQYF

SEQ ID NO: 64175 - protein, 13 aa, Homo sapiens
  CDR3 for alpha chain variable domain of TCR clone 32088 (TRAV12-3, TRAJ33)
CAMSVNSNYQLIW

SEQ ID NO: 64176 - protein, 13 aa, Homo sapiens
  CDR3 for beta chain variable domain of TCR clone 32088 (TRBV7-2, TRBJ2-2)
CASSLEVTGELFF

SEQ ID NO: 64177 - protein, 17 aa, Homo sapiens
  CDR3 for alpha chain variable domain of TCR clone 32089 (TRAV3, TRAJ38)
CAVRDCLNAGNNRKLIW

SEQ ID NO: 64178 - protein, 14 aa, Homo sapiens
  CDR3 for beta chain variable domain of TCR clone 32089 (TRBV18, TRBJ2-5)
CASSPGVSQETQYF

SEQ ID NO: 64179 - protein, 15 aa, Homo sapiens
  CDR3 for alpha chain variable domain of TCR clone 32090 (TRAV3, TRAJ22)
CAVRDRGGSARQLTF

SEQ ID NO: 64180 - protein, 16 aa, Homo sapiens
  CDR3 for beta chain variable domain of TCR clone 32090 (TRBV5-4, TRBJ2-3)
CARQQPGAGGADTQYF

SEQ ID NO: 64181 - protein, 16 aa, Homo sapiens
  CDR3 for alpha chain variable domain of TCR clone 32091 (TRAV38-2/DV8, TRAJ47)
CAYRSAIMEYGNKLVF

SEQ ID NO: 64182 - protein, 16 aa, Homo sapiens
  CDR3 for beta chain variable domain of TCR clone 32091 (TRBV20-1, TRBJ2-1)
CSASASGYSSYNEQFF

SEQ ID NO: 64183 - protein, 13 aa, Homo sapiens
  CDR3 for alpha chain variable domain of TCR clone 32092 (TRAV1-2, TRAJ9)
CAALNTGGFKTIF

SEQ ID NO: 64184 - protein, 13 aa, Homo sapiens
  CDR3 for beta chain variable domain of TCR clone 32092 (TRBV19, TRBJ1-2)
CASCVPGQDGYTF

SEQ ID NO: 64185 - protein, 18 aa, Homo sapiens
  CDR3 for alpha chain variable domain of TCR clone 32093 (TRAV12-3, TRAJ52)
CAMSVGGAGGTSYGKLTF

SEQ ID NO: 64186 - protein, 11 aa, Homo sapiens
  CDR3 for beta chain variable domain of TCR clone 32093 (TRBV19, TRBJ2-5)
CASSIKETQYF

SEQ ID NO: 64187 - protein, 12 aa, Homo sapiens
  CDR3 for alpha chain variable domain of TCR clone 32094 (TRAV17, TRAJ12)
CSTLRSSYKLIF

SEQ ID NO: 64188 - protein, 16 aa, Homo sapiens
  CDR3 for beta chain variable domain of TCR clone 32094 (TRBV28, TRBJ2-7)
CASSLFFETGGPEQYF

SEQ ID NO: 64189 - protein, 15 aa, Homo sapiens
  CDR3 for alpha chain variable domain of TCR clone 32095 (TRAV20, TRAJ53)
CAVQASGGSNYKLTF

SEQ ID NO: 64190 - protein, 13 aa, Homo sapiens
  CDR3 for beta chain variable domain of TCR clone 32095 (TRBV7-9, TRBJ1-2)
CASSLKQNYGYTF

SEQ ID NO: 64191 - protein, 15 aa, Homo sapiens
  CDR3 for alpha chain variable domain of TCR clone 32096 (TRAV3, TRAJ4)
CAVRDGTGGSNKLIF

SEQ ID NO: 64192 - protein, 16 aa, Homo sapiens
  CDR3 for beta chain variable domain of TCR clone 32096 (TRBV27, TRBJ2-2)
CASSSSGVSNTGELFF

SEQ ID NO: 64193 - protein, 17 aa, Homo sapiens
  CDR3 for alpha chain variable domain of TCR clone 32097 (TRAV3, TRAJ6)
CAVRDGPRAGGSYIPTF

SEQ ID NO: 64194 - protein, 12 aa, Homo sapiens
  CDR3 for beta chain variable domain of TCR clone 32097 (TRBV6-3, TRBJ2-1)
CASSGSYNEQFF

SEQ ID NO: 64195 - protein, 15 aa, Homo sapiens
  CDR3 for alpha chain variable domain of TCR clone 32098 (TRAV26-1, TRAJ22)
CIVRVSFWFCKATDL

SEQ ID NO: 64196 - protein, 13 aa, Homo sapiens
  CDR3 for beta chain variable domain of TCR clone 32098 (TRBV7-9, TRBJ1-2)
CASSLKQNYSYTF

SEQ ID NO: 64197 - protein, 15 aa, Homo sapiens
  CDR3 for alpha chain variable domain of TCR clone 32099 (TRAV12-1, TRAJ41)
CVVDSRTGSGYALNF

SEQ ID NO: 64198 - protein, 11 aa, Homo sapiens
  CDR3 for beta chain variable domain of TCR clone 32099 (TRBV6-4, TRBJ2-1)
CASSDSYAQFF

SEQ ID NO: 64199 - protein, 13 aa, Homo sapiens
  CDR3 for alpha chain variable domain of TCR clone 32100 (TRAV27, TRAJ3)
ASLRGSSASMIIF

SEQ ID NO: 64200 - protein, 15 aa, Homo sapiens
  CDR3 for beta chain variable domain of TCR clone 32100 (TRBV28, TRBJ1-3)
CASSMGWASGNTIYF

SEQ ID NO: 64201 - protein, 14 aa, Homo sapiens
  CDR3 for alpha chain variable domain of TCR clone 32101 (TRAV8-1, TRAJ5)
CAVRTDTGRRALTF

SEQ ID NO: 64202 - protein, 15 aa, Homo sapiens
  CDR3 for beta chain variable domain of TCR clone 32101 (TRBV28, TRBJ1-2)
CASSLWQPTNYGYTF

SEQ ID NO: 64203 - protein, 14 aa, Homo sapiens
  CDR3 for alpha chain variable domain of TCR clone 32102 (TRAV21, TRAJ35)
CAVMPIDFGNVLHC

SEQ ID NO: 64204 - protein, 12 aa, Homo sapiens
  CDR3 for beta chain variable domain of TCR clone 32102 (TRBV7-9, TRBJ2-7)
CASSIKREEQYF

SEQ ID NO: 64205 - protein, 17 aa, Homo sapiens
  CDR3 for alpha chain variable domain of TCR clone 32103 (TRAV27, TRAJ26)
CAGARAPLDNYGQNFVF

SEQ ID NO: 64206 - protein, 15 aa, Homo sapiens
  CDR3 for beta chain variable domain of TCR clone 32103 (TRBV11-2, TRBJ2-5)
CASSPRSGGLETQYL

SEQ ID NO: 64207 - protein, 23 aa, Homo sapiens
  CDR3 for alpha chain variable domain of TCR clone 32104 (TRAV12-2, TRAJ22)
CAVSFRVHPGPPIVSGSARQLTL

SEQ ID NO: 64208 - protein, 13 aa, Homo sapiens
  CDR3 for beta chain variable domain of TCR clone 32104 (TRBV12-4, TRBJ1-2)
CASSLDSNYGYTF

SEQ ID NO: 64209 - protein, 13 aa, Homo sapiens
  CDR3 for alpha chain variable domain of TCR clone 32105 (TRAV21, TRAJ20)
CAVGLRVGYKLSF

SEQ ID NO: 64210 - protein, 16 aa, Homo sapiens
  CDR3 for beta chain variable domain of TCR clone 32105 (TRBV4-2, TRBJ1-2)
CASSQEIGGASYGYTF

SEQ ID NO: 64211 - protein, 14 aa, Homo sapiens
  CDR3 for alpha chain variable domain of TCR clone 32106 (TRAV21, TRAJ35)
FAVMPIGFGNVLHC

SEQ ID NO: 64212 - protein, 12 aa, Homo sapiens
  CDR3 for beta chain variable domain of TCR clone 32106 (TRBV7-9, TRBJ2-7)
CASSIKREEQYF

SEQ ID NO: 64213 - protein, 18 aa, Homo sapiens
  CDR3 for alpha chain variable domain of TCR clone 32107 (TRAV21, TRAJ52)
CAVRPSPAGGTSYGKLTF

SEQ ID NO: 64214 - protein, 17 aa, Homo sapiens
  CDR3 for beta chain variable domain of TCR clone 32107 (TRBV13, TRBJ2-3)
CASSLSRVAGARNTQYF

SEQ ID NO: 64215 - protein, 13 aa, Homo sapiens
  CDR3 for alpha chain variable domain of TCR clone 32108 (TRAV2, TRAJ40)
CAVVTSGTYKYIF

SEQ ID NO: 64216 - protein, 13 aa, Homo sapiens
  CDR3 for beta chain variable domain of TCR clone 32108 (TRBV29-1, TRBJ2-1)
CSVEGGRVNEQFF

SEQ ID NO: 64217 - protein, 14 aa, Homo sapiens
  CDR3 for alpha chain variable domain of TCR clone 32109 (TRAV8-3, TRAJ44)
CAMGNTGTASKLTF

SEQ ID NO: 64218 - protein, 15 aa, Homo sapiens
  CDR3 for beta chain variable domain of TCR clone 32109 (TRBV28, TRBJ2-7)
CASSFRGQGRYEQYF

SEQ ID NO: 64219 - protein, 12 aa, Homo sapiens
  CDR3 for alpha chain variable domain of TCR clone 32110 (TRAV20, TRAJ56)
CAVTGANSKLTS

SEQ ID NO: 64220 - protein, 14 aa, Homo sapiens
  CDR3 for beta chain variable domain of TCR clone 32110 (TRBV20-1, TRBJ2-5)
CSALVPGYQETQYF

SEQ ID NO: 64221 - protein, 16 aa, Homo sapiens
  CDR3 for alpha chain variable domain of TCR clone 32111 (TRAV3, TRAJ37)
CAVRGRGSGNAGKLIF

SEQ ID NO: 64222 - protein, 13 aa, Homo sapiens
  CDR3 for beta chain variable domain of TCR clone 32111 (TRBV14, TRBJ2-7)
CASSQDRRGEQYF

SEQ ID NO: 64223 - protein, 13 aa, Homo sapiens
  CDR3 for alpha chain variable domain of TCR clone 32112 (TRAV13-1, TRAJ53)
QAARGGSNYKLTF

SEQ ID NO: 64224 - protein, 12 aa, Homo sapiens
  CDR3 for beta chain variable domain of TCR clone 32112 (TRBV18, TRBJ1-4)
CASSPSREKLFF

SEQ ID NO: 64225 - protein, 12 aa, Homo sapiens
  CDR3 for alpha chain variable domain of TCR clone 32113 (TRAV21, TRAJ33)
CAKMDSNYQLIW

SEQ ID NO: 64226 - protein, 14 aa, Homo sapiens
  CDR3 for beta chain variable domain of TCR clone 32113 (TRBV2, TRBJ2-7)
CASILTSGGYEQCS

SEQ ID NO: 64227 - protein, 12 aa, Homo sapiens
  CDR3 for alpha chain variable domain of TCR clone 32114 (TRAV27, TRAJ9)
CAGESGGFKTIF

SEQ ID NO: 64228 - protein, 14 aa, Homo sapiens
  CDR3 for beta chain variable domain of TCR clone 32114 (TRBV10-2, TRBJ2-2)
PAVHRQADAGELFF

SEQ ID NO: 64229 - protein, 15 aa, Homo sapiens
  CDR3 for alpha chain variable domain of TCR clone 32115 (TRAV12-1, TRAJ44)
CVADLPTGAASKLTF

SEQ ID NO: 64230 - protein, 13 aa, Homo sapiens
  CDR3 for beta chain variable domain of TCR clone 32115 (TRBV6-5, TRBJ2-5)
CASSPQGGETQYF

SEQ ID NO: 64231 - protein, 14 aa, Homo sapiens
  CDR3 for alpha chain variable domain of TCR clone 32116 (TRAV35, TRAJ22)
CAGLRPGSARQLTF

SEQ ID NO: 64232 - protein, 14 aa, Homo sapiens
  CDR3 for beta chain variable domain of TCR clone 32116 (TRBV5-1, TRBJ2-7)
CASSRGESLYEHYF

SEQ ID NO: 64233 - protein, 13 aa, Homo sapiens
  CDR3 for alpha chain variable domain of TCR clone 32117 (TRAV17, TRAJ21)
CATDGGNFNKFYF

SEQ ID NO: 64234 - protein, 15 aa, Homo sapiens
  CDR3 for beta chain variable domain of TCR clone 32117 (TRBV7-9, TRBJ2-2)
CASGPLDTFPGELFF

SEQ ID NO: 64235 - protein, 18 aa, Homo sapiens
  CDR3 for alpha chain variable domain of TCR clone 32118 (TRAV21, TRAJ13)
CAVPRSFWGLPESYLCNW

SEQ ID NO: 64236 - protein, 14 aa, Homo sapiens
  CDR3 for beta chain variable domain of TCR clone 32118 (TRBV20-1, TRBJ2-7)
CSAKDRKGAYEQYF

SEQ ID NO: 64237 - protein, 13 aa, Homo sapiens
  CDR3 for alpha chain variable domain of TCR clone 32119 (TRAV26-1, TRAJ48)
CIVRVVGDEKLTF

SEQ ID NO: 64238 - protein, 14 aa, Homo sapiens
  CDR3 for beta chain variable domain of TCR clone 32119 (TRBV18, TRBJ2-7)
CASSPRGGAYEQYF

SEQ ID NO: 64239 - protein, 13 aa, Homo sapiens
  CDR3 for alpha chain variable domain of TCR clone 32120 (TRAV19, TRAJ57)
CALLQGGSEKLVF

SEQ ID NO: 64240 - protein, 13 aa, Homo sapiens
  CDR3 for beta chain variable domain of TCR clone 32120 (TRBV28, TRBJ2-1)
RASRSGGLNEQFF

SEQ ID NO: 64241 - protein, 14 aa, Homo sapiens
  CDR3 for alpha chain variable domain of TCR clone 32121 (TRAV13-1, TRAJ40)
CAASMTSGTYKYIF

SEQ ID NO: 64242 - protein, 16 aa, Homo sapiens
  CDR3 for beta chain variable domain of TCR clone 32121 (TRBV12-5, TRBJ2-5)
CASGPRTSGNQETQYF

SEQ ID NO: 64243 - protein, 17 aa, Homo sapiens
  CDR3 for alpha chain variable domain of TCR clone 32122 (TRAV3, TRAJ42)
CAVRDRDYGGSQGNLIC

SEQ ID NO: 64244 - protein, 15 aa, Homo sapiens
  CDR3 for beta chain variable domain of TCR clone 32122 (TRBV6-6, TRBJ2-7)
CASSYSYGGSYEQYF

SEQ ID NO: 64245 - protein, 17 aa, Homo sapiens
  CDR3 for alpha chain variable domain of TCR clone 32123 (TRAV3, TRAJ28)
CAVREAYSGAGGYQLTF

SEQ ID NO: 64246 - protein, 17 aa, Homo sapiens
  CDR3 for beta chain variable domain of TCR clone 32123 (TRBV20-1, TRBJ2-1)
CSASSSGLAGSYNEQFF

SEQ ID NO: 64247 - protein, 15 aa, Homo sapiens
  CDR3 for alpha chain variable domain of TCR clone 32124 (TRAV21, TRAJ37)
CAVRPTLSNTGKLIF

SEQ ID NO: 64248 - protein, 16 aa, Homo sapiens
  CDR3 for beta chain variable domain of TCR clone 32124 (TRBV24-1, TRBJ2-3)
CATRDRRQDLTDTQYF

SEQ ID NO: 64249 - protein, 14 aa, Homo sapiens
  CDR3 for alpha chain variable domain of TCR clone 32125 (TRAV12-2, TRAJ9)
CAVNALEGGFKTIF

SEQ ID NO: 64250 - protein, 16 aa, Homo sapiens
  CDR3 for beta chain variable domain of TCR clone 32125 (TRBV19, TRBJ1-6)
CASSVAPVAGNSPLRF

SEQ ID NO: 64251 - protein, 17 aa, Homo sapiens
  CDR3 for alpha chain variable domain of TCR clone 32126 (TRAV3, TRAJ6)
CAVRDGPRAGGSYIPKF

SEQ ID NO: 64252 - protein, 14 aa, Homo sapiens
  CDR3 for beta chain variable domain of TCR clone 32126 (TRBV7-2, TRBJ2-7)
CASSPKTSFYEQYF

SEQ ID NO: 64253 - protein, 12 aa, Homo sapiens
  CDR3 for alpha chain variable domain of TCR clone 32127 (TRAV12-3, TRAJ39)
RAMTQAGNMLTF

SEQ ID NO: 64254 - protein, 13 aa, Homo sapiens
  CDR3 for beta chain variable domain of TCR clone 32127 (TRBV20-1, TRBJ1-1)
CSAPEGGNTEAFF

SEQ ID NO: 64255 - protein, 17 aa, Homo sapiens
  CDR3 for alpha chain variable domain of TCR clone 32128 (TRAV3, TRAJ6)
CAVRDGPRAGGSYIPTF

SEQ ID NO: 64256 - protein, 20 aa, Homo sapiens
  CDR3 for beta chain variable domain of TCR clone 32128 (TRBV28, TRBJ2-1)
CASTPIGRSPGLAGGNERFF

SEQ ID NO: 64257 - protein, 14 aa, Homo sapiens
  CDR3 for alpha chain variable domain of TCR clone 32129 (TRAV1-2, TRAJ16)
CAVNRFSDGQKLLF

SEQ ID NO: 64258 - protein, 16 aa, Homo sapiens
  CDR3 for beta chain variable domain of TCR clone 32129 (TRBV7-2, TRBJ2-7)
CASSLEAGGPWYEQYF

SEQ ID NO: 64259 - protein, 11 aa, Homo sapiens
  CDR3 for alpha chain variable domain of TCR clone 32130 (TRAV1-2, TRAJ34)
CAGYNTDKLIF

SEQ ID NO: 64260 - protein, 13 aa, Homo sapiens
  CDR3 for beta chain variable domain of TCR clone 32130 (TRBV11-2, TRBJ1-1)
CASSLGNGAEALF

SEQ ID NO: 64261 - protein, 13 aa, Homo sapiens
  CDR3 for alpha chain variable domain of TCR clone 32131 (TRAV12-2, TRAJ42)
CAVKRGSQGNLIF

SEQ ID NO: 64262 - protein, 14 aa, Homo sapiens
  CDR3 for beta chain variable domain of TCR clone 32131 (TRBV4-2, TRBJ2-1)
CASGLDRAYNEQFF

SEQ ID NO: 64263 - protein, 13 aa, Homo sapiens
  CDR3 for alpha chain variable domain of TCR clone 32132 (TRAV12-3, TRAJ13)
CAMSSGGYQKVTF

SEQ ID NO: 64264 - protein, 13 aa, Homo sapiens
  CDR3 for beta chain variable domain of TCR clone 32132 (TRBV10-3, TRBJ2-7)
CASKLAVNYEQYF

SEQ ID NO: 64265 - protein, 12 aa, Homo sapiens
  CDR3 for alpha chain variable domain of TCR clone 32133 (TRAV17, TRAJ12)
CATLRSSYKLIF

SEQ ID NO: 64266 - protein, 15 aa, Homo sapiens
  CDR3 for beta chain variable domain of TCR clone 32133 (TRBV19, TRBJ1-2)
CASSVGQVLNYGYTF

SEQ ID NO: 64267 - protein, 15 aa, Homo sapiens
  CDR3 for alpha chain variable domain of TCR clone 32134 (TRAV38-1, TRAJ37)
CAFIFGSGNTGKLIF

SEQ ID NO: 64268 - protein, 11 aa, Homo sapiens
  CDR3 for beta chain variable domain of TCR clone 32134 (TRBV7-9, TRBJ2-7)
CQQLEGYEQYF

SEQ ID NO: 64269 - protein, 14 aa, Homo sapiens
  CDR3 for alpha chain variable domain of TCR clone 32135 (TRAV9-2, TRAJ39)
CALYIYNAGNMLTF

SEQ ID NO: 64270 - protein, 13 aa, Homo sapiens
  CDR3 for beta chain variable domain of TCR clone 32135 (TRBV20-1, TRBJ1-2)
CSARDRVYGGYTF

SEQ ID NO: 64271 - protein, 17 aa, Homo sapiens
  CDR3 for alpha chain variable domain of TCR clone 32136 (TRAV3, TRAJ6)
CAVRDGRRAGGSYIPTF

SEQ ID NO: 64272 - protein, 14 aa, Homo sapiens
  CDR3 for beta chain variable domain of TCR clone 32136 (TRBV7-2, TRBJ2-7)
CASSPKTSFYEQYF

SEQ ID NO: 64273 - protein, 13 aa, Homo sapiens
  CDR3 for alpha chain variable domain of TCR clone 32137 (TRAV13-1, TRAJ6)
CAARRGGSYIPTF

SEQ ID NO: 64274 - protein, 14 aa, Homo sapiens
  CDR3 for beta chain variable domain of TCR clone 32137 (TRBV19, TRBJ2-2)
CASSTLHRSGELFF

SEQ ID NO: 64275 - protein, 18 aa, Homo sapiens
  CDR3 for alpha chain variable domain of TCR clone 32138 (TRAV13-1, TRAJ52)
CAASKRSAGGTSYGKLTF

SEQ ID NO: 64276 - protein, 15 aa, Homo sapiens
  CDR3 for beta chain variable domain of TCR clone 32138 (TRBV9, TRBJ1-6)
CASSVAGTGDSPLHF

SEQ ID NO: 64277 - protein, 12 aa, Homo sapiens
  CDR3 for alpha chain variable domain of TCR clone 32139 (TRAV12-1, TRAJ40)
CVVYSGTYKYIF

SEQ ID NO: 64278 - protein, 18 aa, Homo sapiens
  CDR3 for beta chain variable domain of TCR clone 32139 (TRBV11-2, TRBJ2-3)
CAISLGGASRGAPNTQYF

SEQ ID NO: 64279 - protein, 12 aa, Homo sapiens
  CDR3 for alpha chain variable domain of TCR clone 32140 (TRAV13-1, TRAJ48)
CAANFGNEKLTF

SEQ ID NO: 64280 - protein, 14 aa, Homo sapiens
  CDR3 for beta chain variable domain of TCR clone 32140 (TRBV7-2, TRBJ2-2)
CASRGQGAAGELFF

SEQ ID NO: 64281 - protein, 15 aa, Homo sapiens
  CDR3 for alpha chain variable domain of TCR clone 32141 (TRAV17, TRAJ13)
CATDAGSGGYQNVTF

SEQ ID NO: 64282 - protein, 17 aa, Homo sapiens
  CDR3 for beta chain variable domain of TCR clone 32141 (TRBV11-2, TRBJ2-1)
CASSLYPPGVEYNEQFF

SEQ ID NO: 64283 - protein, 18 aa, Homo sapiens
  CDR3 for alpha chain variable domain of TCR clone 32142 (TRAV9-2, TRAJ52)
CALSRHNAGGTSYGKLTF

SEQ ID NO: 64284 - protein, 15 aa, Homo sapiens
  CDR3 for beta chain variable domain of TCR clone 32142 (TRBV10-3, TRBJ2-3)
CAISLTSGGTDTQYF

SEQ ID NO: 64285 - protein, 15 aa, Homo sapiens
  CDR3 for alpha chain variable domain of TCR clone 32143 (TRAV3, TRAJ20)
CAVRDIKLSEYKLSF

SEQ ID NO: 64286 - protein, 15 aa, Homo sapiens
  CDR3 for beta chain variable domain of TCR clone 32143 (TRBV7-9, TRBJ1-6)
CASSSPGRGNSPLHF

SEQ ID NO: 64287 - protein, 12 aa, Homo sapiens
  CDR3 for alpha chain variable domain of TCR clone 32144 (TRAV13-1, TRAJ53)
AASGGSNYKLTF

SEQ ID NO: 64288 - protein, 16 aa, Homo sapiens
  CDR3 for beta chain variable domain of TCR clone 32144 (TRBV28, TRBJ2-6)
CASSNRRGSGANDLTF

SEQ ID NO: 64289 - protein, 18 aa, Homo sapiens
  CDR3 for alpha chain variable domain of TCR clone 32145 (TRAV21, TRAJ13)
CAVPRSFWGLPESYLCNW

SEQ ID NO: 64290 - protein, 15 aa, Homo sapiens
  CDR3 for beta chain variable domain of TCR clone 32145 (TRBV7-9, TRBJ1-6)
CASSSPGRGNSPLHF

SEQ ID NO: 64291 - protein, 14 aa, Homo sapiens
  CDR3 for alpha chain variable domain of TCR clone 32146 (TRAV12-3, TRAJ10)
SHLPLTGGGNKLTF

SEQ ID NO: 64292 - protein, 14 aa, Homo sapiens
  CDR3 for beta chain variable domain of TCR clone 32146 (TRBV11-2, TRBJ1-2)
CASSLGTANYGYTF

SEQ ID NO: 64293 - protein, 17 aa, Homo sapiens
  CDR3 for alpha chain variable domain of TCR clone 32147 (TRAV3, TRAJ6)
CAVRDGPRAGGSYIPTF

SEQ ID NO: 64294 - protein, 14 aa, Homo sapiens
  CDR3 for beta chain variable domain of TCR clone 32147 (TRBV7-2, TRBJ1-2)
CASSQTGSTYGYTF

SEQ ID NO: 64295 - protein, 13 aa, Homo sapiens
  CDR3 for alpha chain variable domain of TCR clone 32148 (TRAV2, TRAJ26)
CAVVGNYGQNFVF

SEQ ID NO: 64296 - protein, 14 aa, Homo sapiens
  CDR3 for beta chain variable domain of TCR clone 32148 (TRBV6-5, TRBJ2-2)
WASTEGQETGELFF

SEQ ID NO: 64297 - protein, 18 aa, Homo sapiens
  CDR3 for alpha chain variable domain of TCR clone 32149 (TRAV26-1, TRAJ23)
CIVRVGLGVWNQGGKLIF

SEQ ID NO: 64298 - protein, 16 aa, Homo sapiens
  CDR3 for beta chain variable domain of TCR clone 32149 (TRBV12-4, TRBJ2-5)
CASSFFVRGRQETQYF

SEQ ID NO: 64299 - protein, 14 aa, Homo sapiens
  CDR3 for alpha chain variable domain of TCR clone 32150 (TRAV1-2, TRAJ16)
CAVNRFSDGQKLLF

SEQ ID NO: 64300 - protein, 15 aa, Homo sapiens
  CDR3 for beta chain variable domain of TCR clone 32150 (TRBV7-9, TRBJ1-2)
CASSLDREPNYGYTF

SEQ ID NO: 64301 - protein, 15 aa, Homo sapiens
  CDR3 for alpha chain variable domain of TCR clone 32151 (TRAV3, TRAJ3)
CAVRDRDSSASKIIF

SEQ ID NO: 64302 - protein, 13 aa, Homo sapiens
  CDR3 for beta chain variable domain of TCR clone 32151 (TRBV7-9, TRBJ1-2)
CASSLKQNYGYTF

SEQ ID NO: 64303 - protein, 12 aa, Homo sapiens
  CDR3 for alpha chain variable domain of TCR clone 32152 (TRAV21, TRAJ31)
GAVWGNNARLMF

SEQ ID NO: 64304 - protein, 16 aa, Homo sapiens
  CDR3 for beta chain variable domain of TCR clone 32152 (TRBV27, TRBJ2-5)
CASSYGPGGQKETQYF

SEQ ID NO: 64305 - protein, 13 aa, Homo sapiens
  CDR3 for alpha chain variable domain of TCR clone 32153 (TRAV8-3, TRAJ28)
CAVGAVGSYQLNF

SEQ ID NO: 64306 - protein, 14 aa, Homo sapiens
  CDR3 for beta chain variable domain of TCR clone 32153 (TRBV7-2, TRBJ2-7)
CASRSQGAAYEQYF

SEQ ID NO: 64307 - protein, 12 aa, Homo sapiens
  CDR3 for alpha chain variable domain of TCR clone 32154 (TRAV2, TRAJ10)
CSSTGGGNKLTF

SEQ ID NO: 64308 - protein, 14 aa, Homo sapiens
  CDR3 for beta chain variable domain of TCR clone 32154 (TRBV7-2, TRBJ2-2)
CASRGQGAAGELFF

SEQ ID NO: 64309 - protein, 14 aa, Homo sapiens
  CDR3 for alpha chain variable domain of TCR clone 32155 (TRAV12-2, TRAJ11)
CAVDRESGYSTLTF

SEQ ID NO: 64310 - protein, 10 aa, Homo sapiens
  CDR3 for beta chain variable domain of TCR clone 32155 (TRBV20-1, TRBJ2-5)
CSARFETQYF

SEQ ID NO: 64311 - protein, 12 aa, Homo sapiens
  CDR3 for alpha chain variable domain of TCR clone 32156 (TRAV8-3, TRAJ41)
CAVGALGYALNF

SEQ ID NO: 64312 - protein, 16 aa, Homo sapiens
  CDR3 for beta chain variable domain of TCR clone 32156 (TRBV7-6, TRBJ2-3)
CASSDSRGECTDTQYF

SEQ ID NO: 64313 - protein, 17 aa, Homo sapiens
  CDR3 for alpha chain variable domain of TCR clone 32157 (TRAV17, TRAJ28)
CATDPRRGGAGSYQLTF

SEQ ID NO: 64314 - protein, 16 aa, Homo sapiens
  CDR3 for beta chain variable domain of TCR clone 32157 (TRBV25-1, TRBJ1-1)
CASSGDRGRGRIEAFF

SEQ ID NO: 64315 - protein, 18 aa, Homo sapiens
  CDR3 for alpha chain variable domain of TCR clone 32158 (TRAV26-2, TRAJ45)
CIPRVDKYSGGGADGLTF

SEQ ID NO: 64316 - protein, 16 aa, Homo sapiens
  CDR3 for beta chain variable domain of TCR clone 32158 (TRBV2, TRBJ1-4)
CASNLLQGATNEKLFF

SEQ ID NO: 64317 - protein, 14 aa, Homo sapiens
  CDR3 for alpha chain variable domain of TCR clone 32159 (TRAV1-2, TRAJ16)
CAVNRFSDGQKLLF

SEQ ID NO: 64318 - protein, 14 aa, Homo sapiens
  CDR3 for beta chain variable domain of TCR clone 32159 (TRBV13, TRBJ2-5)
CASSLGLGQETQYF

SEQ ID NO: 64319 - protein, 12 aa, Homo sapiens
  CDR3 for alpha chain variable domain of TCR clone 32160 (TRAV8-1, TRAJ31)
SAVINNNARLMF

SEQ ID NO: 64320 - protein, 15 aa, Homo sapiens
  CDR3 for beta chain variable domain of TCR clone 32160 (TRBV20-1, TRBJ2-2)
CSARGGQGNTGELFF

SEQ ID NO: 64321 - protein, 12 aa, Homo sapiens
  CDR3 for alpha chain variable domain of TCR clone 32161 (TRAV35, TRAJ39)
LAPNNAGNMITF

SEQ ID NO: 64322 - protein, 16 aa, Homo sapiens
  CDR3 for beta chain variable domain of TCR clone 32161 (TRBV2, TRBJ2-3)
CASSTSVEGVTDTQYF

SEQ ID NO: 64323 - protein, 11 aa, Homo sapiens
  CDR3 for alpha chain variable domain of TCR clone 32162 (TRAV1-2, TRAJ31)
CAVNNNARLMF

SEQ ID NO: 64324 - protein, 15 aa, Homo sapiens
  CDR3 for beta chain variable domain of TCR clone 32162 (TRBV28, TRBJ2-1)
CASSIIAGGRSEQFV

SEQ ID NO: 64325 - protein, 14 aa, Homo sapiens
  CDR3 for alpha chain variable domain of TCR clone 32163 (TRAV20, TRAJ42)
RAVQAGGSQGNLIF

SEQ ID NO: 64326 - protein, 14 aa, Homo sapiens
  CDR3 for beta chain variable domain of TCR clone 32163 (TRBV28, TRBJ1-2)
CASRIQGANYGYTF

SEQ ID NO: 64327 - protein, 16 aa, Homo sapiens
  CDR3 for alpha chain variable domain of TCR clone 32164 (TRAV26-2, TRAJ57)
CILRDVGSGGSEKLVF

SEQ ID NO: 64328 - protein, 13 aa, Homo sapiens
  CDR3 for beta chain variable domain of TCR clone 32164 (TRBV18, TRBJ2-3)
CASSPGVTDTQYL

SEQ ID NO: 64329 - protein, 16 aa, Homo sapiens
  CDR3 for alpha chain variable domain of TCR clone 32165 (TRAV4, TRAJ22)
CLVGDLYSGSARQLTF

SEQ ID NO: 64330 - protein, 16 aa, Homo sapiens
  CDR3 for beta chain variable domain of TCR clone 32165 (TRBV7-9, TRBJ2-1)
CASSDVAGDSYNEQFF

SEQ ID NO: 64331 - protein, 13 aa, Homo sapiens
  CDR3 for alpha chain variable domain of TCR clone 32166 (TRAV21, TRAJ57)
CAVTQGGSEKLAF

SEQ ID NO: 64332 - protein, 15 aa, Homo sapiens
  CDR3 for beta chain variable domain of TCR clone 32166 (TRBV5-1, TRBJ1-1)
CASSSTTGTNTEAFF

SEQ ID NO: 64333 - protein, 14 aa, Homo sapiens
  CDR3 for alpha chain variable domain of TCR clone 32167 (TRAV1-2, TRAJ15)
CAVRDRQAGTALIF

SEQ ID NO: 64334 - protein, 11 aa, Homo sapiens
  CDR3 for beta chain variable domain of TCR clone 32167 (TRBV6-3, TRBJ2-3)
CATGQADTQYF

SEQ ID NO: 64335 - protein, 14 aa, Homo sapiens
  CDR3 for alpha chain variable domain of TCR clone 32168 (TRAV8-3, TRAJ4)
CAVGAAGGYNKLIF

SEQ ID NO: 64336 - protein, 19 aa, Homo sapiens
  CDR3 for beta chain variable domain of TCR clone 32168 (TRBV19, TRBJ2-5)
CASSIGQVTDFFLGETQYF

SEQ ID NO: 64337 - protein, 11 aa, Homo sapiens
  CDR3 for alpha chain variable domain of TCR clone 32169 (TRAV17, TRAJ9)
SATTGGFKTIF

SEQ ID NO: 64338 - protein, 14 aa, Homo sapiens
  CDR3 for beta chain variable domain of TCR clone 32169 (TRBV7-9, TRBJ2-2)
CASSGLADTGELFF

SEQ ID NO: 64339 - protein, 12 aa, Homo sapiens
  CDR3 for alpha chain variable domain of TCR clone 32170 (TRAV2, TRAJ31)
CAVEDNNARLMF

SEQ ID NO: 64340 - protein, 16 aa, Homo sapiens
  CDR3 for beta chain variable domain of TCR clone 32170 (TRBV10-3, TRBJ2-1)
CAISGVGDGGGGEQFV

SEQ ID NO: 64341 - protein, 18 aa, Homo sapiens
  CDR3 for alpha chain variable domain of TCR clone 32171 (TRAV13-1, TRAJ52)
CAASKRIAGGTSYGKLTF

SEQ ID NO: 64342 - protein, 13 aa, Homo sapiens
  CDR3 for beta chain variable domain of TCR clone 32171 (TRBV12-4, TRBJ1-2)
CASSLRQGKGYTF

SEQ ID NO: 64343 - protein, 11 aa, Homo sapiens
  CDR3 for alpha chain variable domain of TCR clone 32172 (TRAV4, TRAJ31)
CLVGDNARLVF

SEQ ID NO: 64344 - protein, 16 aa, Homo sapiens
  CDR3 for beta chain variable domain of TCR clone 32172 (TRBV7-2, TRBJ2-5)
CASSSKWLSGQETQYF

SEQ ID NO: 64345 - protein, 14 aa, Homo sapiens
  CDR3 for alpha chain variable domain of TCR clone 32173 (TRAV13-1, TRAJ13)
CAVKKTGGYQKVTF

SEQ ID NO: 64346 - protein, 15 aa, Homo sapiens
  CDR3 for beta chain variable domain of TCR clone 32173 (TRBV27, TRBJ2-1)
CASSNGGGSSNEQFF

SEQ ID NO: 64347 - protein, 18 aa, Homo sapiens
  CDR3 for alpha chain variable domain of TCR clone 32174 (TRAV26-1, TRAJ23)
CIVRVGLEVWNQGGKLIF

SEQ ID NO: 64348 - protein, 16 aa, Homo sapiens
  CDR3 for beta chain variable domain of TCR clone 32174 (TRBV12-4, TRBJ2-5)
CASSFFVRGRQETQYL

SEQ ID NO: 64349 - protein, 14 aa, Homo sapiens
  CDR3 for alpha chain variable domain of TCR clone 32175 (TRAV12-2, TRAJ44)
CAANKAGTASKLTF

SEQ ID NO: 64350 - protein, 12 aa, Homo sapiens
  CDR3 for beta chain variable domain of TCR clone 32175 (TRBV19, TRBJ1-4)
CASKDWPGGLFF

SEQ ID NO: 64351 - protein, 16 aa, Homo sapiens
  CDR3 for alpha chain variable domain of TCR clone 32176 (TRAV13-2, TRAJ38)
CAELPNNAGNNRKLIW

SEQ ID NO: 64352 - protein, 17 aa, Homo sapiens
  CDR3 for beta chain variable domain of TCR clone 32176 (TRBV5-1, TRBJ1-1)
CASRPIRTGGVNTEAFF

SEQ ID NO: 64353 - protein, 13 aa, Homo sapiens
  CDR3 for alpha chain variable domain of TCR clone 32177 (TRAV21, TRAJ57)
CAVTQGGSEKLVF

SEQ ID NO: 64354 - protein, 16 aa, Homo sapiens
  CDR3 for beta chain variable domain of TCR clone 32177 (TRBV29-1, TRBJ2-7)
CSVEEAEDGTAYEQYF

SEQ ID NO: 64355 - protein, 15 aa, Homo sapiens
  CDR3 for alpha chain variable domain of TCR clone 32178 (TRAV26-1, TRAJ40)
CIVRVTTSGTYTYIF

SEQ ID NO: 64356 - protein, 12 aa, Homo sapiens
  CDR3 for beta chain variable domain of TCR clone 32178 (TRBV7-9, TRBJ1-4)
CASSTDREKLFF

SEQ ID NO: 64357 - protein, 13 aa, Homo sapiens
  CDR3 for alpha chain variable domain of TCR clone 32179 (TRAV2, TRAJ40)
CAVVTSGTYKYIF

SEQ ID NO: 64358 - protein, 15 aa, Homo sapiens
  CDR3 for beta chain variable domain of TCR clone 32179 (TRBV11-3, TRBJ2-3)
CASLKDGREGDTQYF

SEQ ID NO: 64359 - protein, 15 aa, Homo sapiens
  CDR3 for alpha chain variable domain of TCR clone 32180 (TRAV8-2, TRAJ40)
CVVSDRPSGTYKYIF

SEQ ID NO: 64360 - protein, 16 aa, Homo sapiens
  CDR3 for beta chain variable domain of TCR clone 32180 (TRBV7-3, TRBJ2-1)
CASSPNSGSSYNEQFF

SEQ ID NO: 64361 - protein, 14 aa, Homo sapiens
  CDR3 for alpha chain variable domain of TCR clone 32181 (TRAV12-3, TRAJ10)
SHLPLTGGGNKLTF

SEQ ID NO: 64362 - protein, 14 aa, Homo sapiens
  CDR3 for beta chain variable domain of TCR clone 32181 (TRBV6-1, TRBJ1-3)
CARVQGGGGNTIYF

SEQ ID NO: 64363 - protein, 11 aa, Homo sapiens
  CDR3 for alpha chain variable domain of TCR clone 32182 (TRAV12-1, TRAJ30)
CVVNGQDKSIF

SEQ ID NO: 64364 - protein, 12 aa, Homo sapiens
  CDR3 for beta chain variable domain of TCR clone 32182 (TRBV27, TRBJ2-2)
CASKLFTGELFF

SEQ ID NO: 64365 - protein, 14 aa, Homo sapiens
  CDR3 for alpha chain variable domain of TCR clone 32183 (TRAV12-2, TRAJ40)
CAVKIPSGTYKYIF

SEQ ID NO: 64366 - protein, 14 aa, Homo sapiens
  CDR3 for beta chain variable domain of TCR clone 32183 (TRBV7-8, TRBJ2-7)
CASSPRDRVYGQYF

SEQ ID NO: 64367 - protein, 11 aa, Homo sapiens
  CDR3 for alpha chain variable domain of TCR clone 32184 (TRAV16, TRAJ33)
CALHSNYQLIL

SEQ ID NO: 64368 - protein, 15 aa, Homo sapiens
  CDR3 for beta chain variable domain of TCR clone 32184 (TRBV4-1, TRBJ2-7)
CASSQQGQGFDEQYF

SEQ ID NO: 64369 - protein, 13 aa, Homo sapiens
  CDR3 for alpha chain variable domain of TCR clone 32185 (TRAV12-3, TRAJ54)
CALVPQGAQKLVL

SEQ ID NO: 64370 - protein, 15 aa, Homo sapiens
  CDR3 for beta chain variable domain of TCR clone 32185 (TRBV4-1, TRBJ2-2)
CASSQDSRGTGELFF

SEQ ID NO: 64371 - protein, 18 aa, Homo sapiens
  CDR3 for alpha chain variable domain of TCR clone 32186 (TRAV12-3, TRAJ52)
CAMSVGGAGGTSYGKLTF

SEQ ID NO: 64372 - protein, 15 aa, Homo sapiens
  CDR3 for beta chain variable domain of TCR clone 32186 (TRBV20-1, TRBJ2-7)
CSARDRVSGMDEQYF

SEQ ID NO: 64373 - protein, 15 aa, Homo sapiens
  CDR3 for alpha chain variable domain of TCR clone 32187 (TRAV8-3, TRAJ45)
RASSYSGGGADGLTF

SEQ ID NO: 64374 - protein, 15 aa, Homo sapiens
  CDR3 for beta chain variable domain of TCR clone 32187 (TRBV18, TRBJ1-1)
CASSPRQGENTEAFF

SEQ ID NO: 64375 - protein, 13 aa, Homo sapiens
  CDR3 for alpha chain variable domain of TCR clone 32188 (TRAV1-2, TRAJ9)
CAALNTGGFKTII

SEQ ID NO: 64376 - protein, 13 aa, Homo sapiens
  CDR3 for beta chain variable domain of TCR clone 32188 (TRBV19, TRBJ1-2)
CASSVPGQDGYTF

SEQ ID NO: 64377 - protein, 12 aa, Homo sapiens
  CDR3 for alpha chain variable domain of TCR clone 32189 (TRAV12-3, TRAJ17)
CAMTLTGDKLTF

SEQ ID NO: 64378 - protein, 15 aa, Homo sapiens
  CDR3 for beta chain variable domain of TCR clone 32189 (TRBV10-2, TRBJ2-6)
CASSEQGTGANVLTF

SEQ ID NO: 64379 - protein, 15 aa, Homo sapiens
  CDR3 for alpha chain variable domain of TCR clone 32190 (TRAV12-3, TRAJ6)
CAMSATTGGSYKPTF

SEQ ID NO: 64380 - protein, 16 aa, Homo sapiens
  CDR3 for beta chain variable domain of TCR clone 32190 (TRBV20-1, TRBJ1-2)
CSASMGQGVANYGYTF

SEQ ID NO: 64381 - protein, 15 aa, Homo sapiens
  CDR3 for alpha chain variable domain of TCR clone 32191 (TRAV8-2, TRAJ16)
CVVSDGFSDGQKRLF

SEQ ID NO: 64382 - protein, 14 aa, Homo sapiens
  CDR3 for beta chain variable domain of TCR clone 32191 (TRBV7-3, TRBJ1-1)
CASSLGTGYTEAFF

SEQ ID NO: 64383 - protein, 14 aa, Homo sapiens
  CDR3 for alpha chain variable domain of TCR clone 32192 (TRAV1-2, TRAJ8)
CAVREDTGFQKLVF

SEQ ID NO: 64384 - protein, 14 aa, Homo sapiens
  CDR3 for beta chain variable domain of TCR clone 32192 (TRBV7-8, TRBJ2-5)
CASSATGGQETQYF

SEQ ID NO: 64385 - protein, 15 aa, Homo sapiens
  CDR3 for alpha chain variable domain of TCR clone 32193 (TRAV26-1, TRAJ44)
CIVRANTGTASKLTF

SEQ ID NO: 64386 - protein, 16 aa, Homo sapiens
  CDR3 for beta chain variable domain of TCR clone 32193 (TRBV12-5, TRBJ2-5)
CASGPRTSGNQETQYF

SEQ ID NO: 64387 - protein, 11 aa, Homo sapiens
  CDR3 for alpha chain variable domain of TCR clone 32194 (TRAV4, TRAJ23)
CFVAPGGKLIF

SEQ ID NO: 64388 - protein, 15 aa, Homo sapiens
  CDR3 for beta chain variable domain of TCR clone 32194 (TRBV7-2, TRBJ2-1)
CASSFQADEYNEQFF

SEQ ID NO: 64389 - protein, 13 aa, Homo sapiens
  CDR3 for alpha chain variable domain of TCR clone 32195 (TRAV2, TRAJ15)
CVVASQAGTALIF

SEQ ID NO: 64390 - protein, 16 aa, Homo sapiens
  CDR3 for beta chain variable domain of TCR clone 32195 (TRBV5-1, TRBJ1-1)
CASSSGGNSLNTEAFF

SEQ ID NO: 64391 - protein, 14 aa, Homo sapiens
  CDR3 for alpha chain variable domain of TCR clone 32196 (TRAV1-2, TRAJ8)
CAVREDTGFQKLVF

SEQ ID NO: 64392 - protein, 14 aa, Homo sapiens
  CDR3 for beta chain variable domain of TCR clone 32196 (TRBV2, TRBJ1-2)
CASSELQVNYGYTF

SEQ ID NO: 64393 - protein, 14 aa, Homo sapiens
  CDR3 for alpha chain variable domain of TCR clone 32197 (TRAV12-1, TRAJ23)
CVVTVYNQGGKLIF

SEQ ID NO: 64394 - protein, 15 aa, Homo sapiens
  CDR3 for beta chain variable domain of TCR clone 32197 (TRBV20-1, TRBJ1-5)
CSAKPPGQGPQPQHF

SEQ ID NO: 64395 - protein, 15 aa, Homo sapiens
  CDR3 for alpha chain variable domain of TCR clone 32198 (TRAV26-2, TRAJ50)
CILRDEETSYDKVIF

SEQ ID NO: 64396 - protein, 13 aa, Homo sapiens
  CDR3 for beta chain variable domain of TCR clone 32198 (TRBV7-3, TRBJ1-1)
CASGQDWGAEAFF

SEQ ID NO: 64397 - protein, 14 aa, Homo sapiens
  CDR3 for alpha chain variable domain of TCR clone 32199 (TRAV38-1, TRAJ40)
CALRPTSGAYKYIF

SEQ ID NO: 64398 - protein, 14 aa, Homo sapiens
  CDR3 for beta chain variable domain of TCR clone 32199 (TRBV25-1, TRBJ1-1)
CASTHLGGNTEAFL

SEQ ID NO: 64399 - protein, 14 aa, Homo sapiens
  CDR3 for alpha chain variable domain of TCR clone 32200 (TRAV12-2, TRAJ17)
CAVLFKAAGNKLTF

SEQ ID NO: 64400 - protein, 17 aa, Homo sapiens
  CDR3 for beta chain variable domain of TCR clone 32200 (TRBV5-1, TRBJ1-1)
CASRPIRTGGVNTEAFF

SEQ ID NO: 64401 - protein, 12 aa, Homo sapiens
  CDR3 for alpha chain variable domain of TCR clone 32201 (TRAV3, TRAJ26)
CAVRDYGQNFVF

SEQ ID NO: 64402 - protein, 14 aa, Homo sapiens
  CDR3 for beta chain variable domain of TCR clone 32201 (TRBV11-2, TRBJ2-1)
CASSLDLIIDEQFF

SEQ ID NO: 64403 - protein, 13 aa, Homo sapiens
  CDR3 for alpha chain variable domain of TCR clone 32202 (TRAV1-2, TRAJ9)
CAALNTGGFKTIF

SEQ ID NO: 64404 - protein, 13 aa, Homo sapiens
  CDR3 for beta chain variable domain of TCR clone 32202 (TRBV15, TRBJ1-6)
CATSGGLNSPLLF

SEQ ID NO: 64405 - protein, 14 aa, Homo sapiens
  CDR3 for alpha chain variable domain of TCR clone 32203 (TRAV17, TRAJ57)
CATDPQGGSEKLVF

SEQ ID NO: 64406 - protein, 12 aa, Homo sapiens
  CDR3 for beta chain variable domain of TCR clone 32203 (TRBV11-2, TRBJ2-1)
CASSPGNNEQFF

SEQ ID NO: 64407 - protein, 12 aa, Homo sapiens
  CDR3 for alpha chain variable domain of TCR clone 32204 (TRAV36/DV7, TRAJ54)
CAVVRGAQKLVF

SEQ ID NO: 64408 - protein, 15 aa, Homo sapiens
  CDR3 for beta chain variable domain of TCR clone 32204 (TRBV7-2, TRBJ2-1)
CASSSGLAGGNEQFF

SEQ ID NO: 64409 - protein, 14 aa, Homo sapiens
  CDR3 for alpha chain variable domain of TCR clone 32205 (TRAV38-1, TRAJ40)
CALRPTSGTYKFIF

SEQ ID NO: 64410 - protein, 14 aa, Homo sapiens
  CDR3 for beta chain variable domain of TCR clone 32205 (TRBV25-1, TRBJ1-1)
CASTHLGGNTEAFF

SEQ ID NO: 64411 - protein, 11 aa, Homo sapiens
  CDR3 for alpha chain variable domain of TCR clone 32206 (TRAV35, TRAJ34)
CWARNTDKLIF

SEQ ID NO: 64412 - protein, 14 aa, Homo sapiens
  CDR3 for beta chain variable domain of TCR clone 32206 (TRBV19, TRBJ2-2)
CASSTLHRSGELFF

SEQ ID NO: 64413 - protein, 14 aa, Homo sapiens
  CDR3 for alpha chain variable domain of TCR clone 32207 (TRAV12-2, TRAJ13)
RAVKKTGGYQKVTF

SEQ ID NO: 64414 - protein, 13 aa, Homo sapiens
  CDR3 for beta chain variable domain of TCR clone 32207 (TRBV10-3, TRBJ2-7)
CASKLAVNYEQYF

SEQ ID NO: 64415 - protein, 14 aa, Homo sapiens
  CDR3 for alpha chain variable domain of TCR clone 32208 (TRAV1-2, TRAJ8)
CAVREDTGFQKLVF

SEQ ID NO: 64416 - protein, 15 aa, Homo sapiens
  CDR3 for beta chain variable domain of TCR clone 32208 (TRBV4-1, TRBJ2-7)
CASSQSTGRLYEQYF

SEQ ID NO: 64417 - protein, 15 aa, Homo sapiens
  CDR3 for alpha chain variable domain of TCR clone 32209 (TRAV3, TRAJ4)
CAVRDGTGGYNKLIF

SEQ ID NO: 64418 - protein, 16 aa, Homo sapiens
  CDR3 for beta chain variable domain of TCR clone 32209 (TRBV27, TRBJ2-2)
CASSSGGVSNTGELFF

SEQ ID NO: 64419 - protein, 16 aa, Homo sapiens
  CDR3 for alpha chain variable domain of TCR clone 32210 (TRAV13-1, TRAJ28)
CAANGNSGAGSYQLTF

SEQ ID NO: 64420 - protein, 13 aa, Homo sapiens
  CDR3 for beta chain variable domain of TCR clone 32210 (TRBV7-3, TRBJ1-1)
CASSQDWGAEAFF

SEQ ID NO: 64421 - protein, 13 aa, Homo sapiens
  CDR3 for alpha chain variable domain of TCR clone 32211 (TRAV1-1, TRAJ31)
CASYLNNNARLMF

SEQ ID NO: 64422 - protein, 13 aa, Homo sapiens
  CDR3 for beta chain variable domain of TCR clone 32211 (TRBV15, TRBJ1-6)
CATSGGLNSPLHF

SEQ ID NO: 64423 - protein, 10 aa, Homo sapiens
  CDR3 for alpha chain variable domain of TCR clone 32212 (TRAV12-1, TRAJ37)
SRGNTGKLIF

SEQ ID NO: 64424 - protein, 15 aa, Homo sapiens
  CDR3 for beta chain variable domain of TCR clone 32212 (TRBV7-2, TRBJ2-3)
CASSLEQGGTDTQYF

SEQ ID NO: 64425 - protein, 13 aa, Homo sapiens
  CDR3 for alpha chain variable domain of TCR clone 32213 (TRAV2, TRAJ24)
CAVTTDSWGKLQF

SEQ ID NO: 64426 - protein, 14 aa, Homo sapiens
  CDR3 for beta chain variable domain of TCR clone 32213 (TRBV13, TRBJ2-5)
CASSVGRGQETQYF

SEQ ID NO: 64427 - protein, 14 aa, Homo sapiens
  CDR3 for alpha chain variable domain of TCR clone 32214 (TRAV1-2, TRAJ8)
CAVREDTGFQKLVF

SEQ ID NO: 64428 - protein, 13 aa, Homo sapiens
  CDR3 for beta chain variable domain of TCR clone 32214 (TRBV2, TRBJ1-1)
CASRWTVNTEAFF

SEQ ID NO: 64429 - protein, 11 aa, Homo sapiens
  CDR3 for alpha chain variable domain of TCR clone 32215 (TRAV3, TRAJ21)
CAVGNFSKFYF

SEQ ID NO: 64430 - protein, 14 aa, Homo sapiens
  CDR3 for beta chain variable domain of TCR clone 32215 (TRBV29-1, TRBJ2-2)
CSGRGSGNTGELFF

SEQ ID NO: 64431 - protein, 13 aa, Homo sapiens
  CDR3 for alpha chain variable domain of TCR clone 32216 (TRAV13-2, TRAJ53)
CAENMGSNYKLTF

SEQ ID NO: 64432 - protein, 13 aa, Homo sapiens
  CDR3 for beta chain variable domain of TCR clone 32216 (TRBV4-1, TRBJ2-2)
CDSSQENTGELFF

SEQ ID NO: 64433 - protein, 15 aa, Homo sapiens
  CDR3 for alpha chain variable domain of TCR clone 32217 (TRAV16, TRAJ12)
CSKWPLRDSSYKLIF

SEQ ID NO: 64434 - protein, 13 aa, Homo sapiens
  CDR3 for beta chain variable domain of TCR clone 32217 (TRBV7-3, TRBJ2-7)
CASSKRRGGEQYF

SEQ ID NO: 64435 - protein, 15 aa, Homo sapiens
  CDR3 for alpha chain variable domain of TCR clone 32218 (TRAV13-1, TRAJ49)
CAASTEGNTGNQFYF

SEQ ID NO: 64436 - protein, 12 aa, Homo sapiens
  CDR3 for beta chain variable domain of TCR clone 32218 (TRBV11-2, TRBJ2-2)
RASSLGGGELFF

SEQ ID NO: 64437 - protein, 14 aa, Homo sapiens
  CDR3 for alpha chain variable domain of TCR clone 32219 (TRAV12-1, TRAJ10)
CVVNSAGGGNKLTF

SEQ ID NO: 64438 - protein, 13 aa, Homo sapiens
  CDR3 for beta chain variable domain of TCR clone 32219 (TRBV12-4, TRBJ1-1)
CQQSRDRGTEAFF

SEQ ID NO: 64439 - protein, 12 aa, Homo sapiens
  CDR3 for alpha chain variable domain of TCR clone 32220 (TRAV12-3, TRAJ20)
CAMVRGDYKLGF

SEQ ID NO: 64440 - protein, 14 aa, Homo sapiens
  CDR3 for beta chain variable domain of TCR clone 32220 (TRBV5-5, TRBJ1-5)
CASSGQGVDQPQHF

SEQ ID NO: 64441 - protein, 14 aa, Homo sapiens
  CDR3 for alpha chain variable domain of TCR clone 32221 (TRAV20, TRAJ32)
CCGRYGGATNKLTF

SEQ ID NO: 64442 - protein, 16 aa, Homo sapiens
  CDR3 for beta chain variable domain of TCR clone 32221 (TRBV19, TRBJ2-2)
CASRSPGTGATGELFF

SEQ ID NO: 64443 - protein, 16 aa, Homo sapiens
  CDR3 for alpha chain variable domain of TCR clone 32222 (TRAV30, TRAJ24)
CGTEIVDADSWGKFQF

SEQ ID NO: 64444 - protein, 15 aa, Homo sapiens
  CDR3 for beta chain variable domain of TCR clone 32222 (TRBV7-2, TRBJ2-2)
CASRRPGQNTGELFF

SEQ ID NO: 64445 - protein, 13 aa, Homo sapiens
  CDR3 for alpha chain variable domain of TCR clone 32223 (TRAV12-3, TRAJ13)
CAMTSGGYQKATF

SEQ ID NO: 64446 - protein, 13 aa, Homo sapiens
  CDR3 for beta chain variable domain of TCR clone 32223 (TRBV20-1, TRBJ2-2)
CSALSGGAGELFF

SEQ ID NO: 64447 - protein, 10 aa, Homo sapiens
  CDR3 for alpha chain variable domain of TCR clone 32224 (TRAV16, TRAJ22)
PAMYLRQLTF

SEQ ID NO: 64448 - protein, 15 aa, Homo sapiens
  CDR3 for beta chain variable domain of TCR clone 32224 (TRBV7-9, TRBJ1-6)
CASSSPGRGNSPLHF

SEQ ID NO: 64449 - protein, 14 aa, Homo sapiens
  CDR3 for alpha chain variable domain of TCR clone 32225 (TRAV20, TRAJ22)
CAVALGGSARQLTF

SEQ ID NO: 64450 - protein, 13 aa, Homo sapiens
  CDR3 for beta chain variable domain of TCR clone 32225 (TRBV7-6, TRBJ2-3)
CASSLRSDNTQYF

SEQ ID NO: 64451 - protein, 14 aa, Homo sapiens
  CDR3 for alpha chain variable domain of TCR clone 32226 (TRAV12-1, TRAJ12)
CVVNGRDSSYKLIF

SEQ ID NO: 64452 - protein, 13 aa, Homo sapiens
  CDR3 for beta chain variable domain of TCR clone 32226 (TRBV28, TRBJ2-2)
CASIRESTGELSF

SEQ ID NO: 64453 - protein, 12 aa, Homo sapiens
  CDR3 for alpha chain variable domain of TCR clone 32227 (TRAV13-2, TRAJ23)
CAERHRGGKLIF

SEQ ID NO: 64454 - protein, 15 aa, Homo sapiens
  CDR3 for beta chain variable domain of TCR clone 32227 (TRBV3-1, TRBJ2-7)
CASSQGVGVKVEQYF

SEQ ID NO: 64455 - protein, 11 aa, Homo sapiens
  CDR3 for alpha chain variable domain of TCR clone 32228 (TRAV1-1, TRAJ23)
CAVRQGGKLIF

SEQ ID NO: 64456 - protein, 20 aa, Homo sapiens
  CDR3 for beta chain variable domain of TCR clone 32228 (TRBV7-8, TRBJ2-2)
CASCHLFPGPTIHITGELFF

SEQ ID NO: 64457 - protein, 13 aa, Homo sapiens
  CDR3 for alpha chain variable domain of TCR clone 32229 (TRAV3, TRAJ21)
CAVREPDFNKFYF

SEQ ID NO: 64458 - protein, 15 aa, Homo sapiens
  CDR3 for beta chain variable domain of TCR clone 32229 (TRBV19, TRBJ1-5)
CASSIVWADNQPQHF

SEQ ID NO: 64459 - protein, 12 aa, Homo sapiens
  CDR3 for alpha chain variable domain of TCR clone 32230 (TRAV13-1, TRAJ49)
CAASTMGNQFYF

SEQ ID NO: 64460 - protein, 13 aa, Homo sapiens
  CDR3 for beta chain variable domain of TCR clone 32230 (TRBV20-1, TRBJ2-2)
CSASAAGTGELFF

SEQ ID NO: 64461 - protein, 13 aa, Homo sapiens
  CDR3 for alpha chain variable domain of TCR clone 32231 (TRAV8-3, TRAJ21)
RAVGAYNFNKFYF

SEQ ID NO: 64462 - protein, 16 aa, Homo sapiens
  CDR3 for beta chain variable domain of TCR clone 32231 (TRBV19, TRBJ2-1)
CASSMGGGSSYNEQFF

SEQ ID NO: 64463 - protein, 14 aa, Homo sapiens
  CDR3 for alpha chain variable domain of TCR clone 32232 (TRAV2, TRAJ9)
CAVEDRSGGFKTIF

SEQ ID NO: 64464 - protein, 15 aa, Homo sapiens
  CDR3 for beta chain variable domain of TCR clone 32232 (TRBV10-3, TRBJ2-3)
CAISLTSGGTDTQYF

SEQ ID NO: 64465 - protein, 12 aa, Homo sapiens
  CDR3 for alpha chain variable domain of TCR clone 32233 (TRAV12-3, TRAJ17)
CAMTLTGNKLTF

SEQ ID NO: 64466 - protein, 17 aa, Homo sapiens
  CDR3 for beta chain variable domain of TCR clone 32233 (TRBV7-3, TRBJ2-3)
CASSLMRRMRGADTQYF

SEQ ID NO: 64467 - protein, 14 aa, Homo sapiens
  CDR3 for alpha chain variable domain of TCR clone 32234 (TRAV13-1, TRAJ44)
CAAKATGTASKLTF

SEQ ID NO: 64468 - protein, 15 aa, Homo sapiens
  CDR3 for beta chain variable domain of TCR clone 32234 (TRBV12-4, TRBJ2-5)
CASSPPTGLQETQYF

SEQ ID NO: 64469 - protein, 15 aa, Homo sapiens
  CDR3 for alpha chain variable domain of TCR clone 32235 (TRAV1-2, TRAJ35)
CAVRDREGFGNVLHC

SEQ ID NO: 64470 - protein, 14 aa, Homo sapiens
  CDR3 for beta chain variable domain of TCR clone 32235 (TRBV28, TRBJ1-4)
CASSRTVGNEKLFF

SEQ ID NO: 64471 - protein, 16 aa, Homo sapiens
  CDR3 for alpha chain variable domain of TCR clone 32236 (TRAV24, TRAJ53)
CAFNMGGGGSNYKLTF

SEQ ID NO: 64472 - protein, 15 aa, Homo sapiens
  CDR3 for beta chain variable domain of TCR clone 32236 (TRBV4-1, TRBJ2-7)
CASSQNTGRLYEQYF

SEQ ID NO: 64473 - protein, 20 aa, Homo sapiens
  CDR3 for alpha chain variable domain of TCR clone 32237 (TRAV12-1, TRAJ42)
SSVIQPPTSVKGGSQGNLIF

SEQ ID NO: 64474 - protein, 18 aa, Homo sapiens
  CDR3 for beta chain variable domain of TCR clone 32237 (TRBV11-2, TRBJ2-3)
CASGLGGASRGAPNTQYF

SEQ ID NO: 64475 - protein, 13 aa, Homo sapiens
  CDR3 for alpha chain variable domain of TCR clone 32238 (TRAV13-1, TRAJ29)
CAASIGLNTPLVF

SEQ ID NO: 64476 - protein, 14 aa, Homo sapiens
  CDR3 for beta chain variable domain of TCR clone 32238 (TRBV20-1, TRBJ2-5)
CSASDSGSGETQYF

SEQ ID NO: 64477 - protein, 13 aa, Homo sapiens
  CDR3 for alpha chain variable domain of TCR clone 32239 (TRAV13-2, TRAJ48)
CAEMDFGNEKLTF

SEQ ID NO: 64478 - protein, 15 aa, Homo sapiens
  CDR3 for beta chain variable domain of TCR clone 32239 (TRBV11-3, TRBJ2-3)
CASLKDGREGDTQYF

SEQ ID NO: 64479 - protein, 13 aa, Homo sapiens
  CDR3 for alpha chain variable domain of TCR clone 32240 (TRAV23/DV6, TRAJ21)
CAASIGNFNKFYF

SEQ ID NO: 64480 - protein, 14 aa, Homo sapiens
  CDR3 for beta chain variable domain of TCR clone 32240 (TRBV2, TRBJ2-1)
CASRAYGIYNEQFF

SEQ ID NO: 64481 - protein, 13 aa, Homo sapiens
  CDR3 for alpha chain variable domain of TCR clone 32241 (TRAV12-1, TRAJ7)
CVVNMRGNNRLAL

SEQ ID NO: 64482 - protein, 15 aa, Homo sapiens
  CDR3 for beta chain variable domain of TCR clone 32241 (TRBV27, TRBJ2-3)
CASSLGLAATDTQYF

SEQ ID NO: 64483 - protein, 16 aa, Homo sapiens
  CDR3 for alpha chain variable domain of TCR clone 32242 (TRAV3, TRAJ10)
CAVRDMRAGGGNKLTF

SEQ ID NO: 64484 - protein, 15 aa, Homo sapiens
  CDR3 for beta chain variable domain of TCR clone 32242 (TRBV20-1, TRBJ2-7)
CSARVPAAYSYEQYF

SEQ ID NO: 64485 - protein, 10 aa, Homo sapiens
  CDR3 for alpha chain variable domain of TCR clone 32243 (TRAV26-1, TRAJ40)
CMAGTYKYIF

SEQ ID NO: 64486 - protein, 15 aa, Homo sapiens
  CDR3 for beta chain variable domain of TCR clone 32243 (TRBV19, TRBJ2-1)
CASSSPGVPLDEQFF

SEQ ID NO: 64487 - protein, 11 aa, Homo sapiens
  CDR3 for alpha chain variable domain of TCR clone 32244 (TRAV17, TRAJ31)
CATSNNARLMF

SEQ ID NO: 64488 - protein, 14 aa, Homo sapiens
  CDR3 for beta chain variable domain of TCR clone 32244 (TRBV7-6, TRBJ2-3)
CASSLGTVTDTQYF

SEQ ID NO: 64489 - protein, 15 aa, Homo sapiens
  CDR3 for alpha chain variable domain of TCR clone 32245 (TRAV17, TRAJ56)
CATDANTGANGKLTF

SEQ ID NO: 64490 - protein, 12 aa, Homo sapiens
  CDR3 for beta chain variable domain of TCR clone 32245 (TRBV7-8, TRBJ2-7)
CASSLGDREQYF

SEQ ID NO: 64491 - protein, 14 aa, Homo sapiens
  CDR3 for alpha chain variable domain of TCR clone 32246 (TRAV26-1, TRAJ38)
CIADNAGNNRKLIW

SEQ ID NO: 64492 - protein, 12 aa, Homo sapiens
  CDR3 for beta chain variable domain of TCR clone 32246 (TRBV11-2, TRBJ2-2)
CASSLPTGELFF

SEQ ID NO: 64493 - protein, 14 aa, Homo sapiens
  CDR3 for alpha chain variable domain of TCR clone 32247 (TRAV12-2, TRAJ40)
CAVKIPSGTYKYIF

SEQ ID NO: 64494 - protein, 14 aa, Homo sapiens
  CDR3 for beta chain variable domain of TCR clone 32247 (TRBV18, TRBJ2-5)
CASSPGVSQETQYF

SEQ ID NO: 64495 - protein, 15 aa, Homo sapiens
  CDR3 for alpha chain variable domain of TCR clone 32248 (TRAV35, TRAJ40)
CAVQLGTSGTYKYIF

SEQ ID NO: 64496 - protein, 14 aa, Homo sapiens
  CDR3 for beta chain variable domain of TCR clone 32248 (TRBV7-3, TRBJ2-1)
CASSLAGGTNEQFF

SEQ ID NO: 64497 - protein, 13 aa, Homo sapiens
  CDR3 for alpha chain variable domain of TCR clone 32249 (TRAV8-3, TRAJ48)
CAVVPFGNEKLTF

SEQ ID NO: 64498 - protein, 19 aa, Homo sapiens
  CDR3 for beta chain variable domain of TCR clone 32249 (TRBV25-1, TRBJ2-2)
CAILVYRVDRGRKTGEPFF

SEQ ID NO: 64499 - protein, 13 aa, Homo sapiens
  CDR3 for alpha chain variable domain of TCR clone 32250 (TRAV16, TRAJ28)
CALTGARSYQLTF

SEQ ID NO: 64500 - protein, 16 aa, Homo sapiens
  CDR3 for beta chain variable domain of TCR clone 32250 (TRBV28, TRBJ1-5)
CASSLTGQGWNQPQHF

SEQ ID NO: 64501 - protein, 11 aa, Homo sapiens
  CDR3 for alpha chain variable domain of TCR clone 32251 (TRAV12-2, TRAJ31)
CAVTRWAKLMF

SEQ ID NO: 64502 - protein, 15 aa, Homo sapiens
  CDR3 for beta chain variable domain of TCR clone 32251 (TRBV19, TRBJ2-7)
CASSIGGGLVNEQYF

SEQ ID NO: 64503 - protein, 15 aa, Homo sapiens
  CDR3 for alpha chain variable domain of TCR clone 32252 (TRAV12-3, TRAJ6)
CAMSATTGGSYIPTF

SEQ ID NO: 64504 - protein, 15 aa, Homo sapiens
  CDR3 for beta chain variable domain of TCR clone 32252 (TRBV6-3, TRBJ2-7)
CASSSPGTVFYEQYF

SEQ ID NO: 64505 - protein, 15 aa, Homo sapiens
  CDR3 for alpha chain variable domain of TCR clone 32253 (TRAV8-3, TRAJ40)
CAAPSLGSGTYKYIF

SEQ ID NO: 64506 - protein, 16 aa, Homo sapiens
  CDR3 for beta chain variable domain of TCR clone 32253 (TRBV7-3, TRBJ2-3)
CASSLSGYRPEDKQYF

SEQ ID NO: 64507 - protein, 14 aa, Homo sapiens
  CDR3 for alpha chain variable domain of TCR clone 32254 (TRAV17, TRAJ57)
CATDPQGGSEKLAF

SEQ ID NO: 64508 - protein, 18 aa, Homo sapiens
  CDR3 for beta chain variable domain of TCR clone 32254 (TRBV6-6, TRBJ1-3)
CASSYSKWDSISGNTIYF

SEQ ID NO: 64509 - protein, 14 aa, Homo sapiens
  CDR3 for alpha chain variable domain of TCR clone 32255 (TRAV1-2, TRAJ16)
CAVNRFSDGQKLLF

SEQ ID NO: 64510 - protein, 16 aa, Homo sapiens
  CDR3 for beta chain variable domain of TCR clone 32255 (TRBV7-3, TRBJ2-3)
CASSSSGYRPEDTQYF

SEQ ID NO: 64511 - protein, 13 aa, Homo sapiens
  CDR3 for alpha chain variable domain of TCR clone 32256 (TRAV3, TRAJ21)
CAVREPDFNKFYF

SEQ ID NO: 64512 - protein, 14 aa, Homo sapiens
  CDR3 for beta chain variable domain of TCR clone 32256 (TRBV4-1, TRBJ2-2)
CASSQAVNTGELVF

SEQ ID NO: 64513 - protein, 14 aa, Homo sapiens
  CDR3 for alpha chain variable domain of TCR clone 32257 (TRAV1-2, TRAJ16)
RAVNRFSDGQKLLF

SEQ ID NO: 64514 - protein, 14 aa, Homo sapiens
  CDR3 for beta chain variable domain of TCR clone 32257 (TRBV13, TRBJ2-5)
CASSLGRGQETQYF

SEQ ID NO: 64515 - protein, 17 aa, Homo sapiens
  CDR3 for alpha chain variable domain of TCR clone 32258 (TRAV20, TRAJ42)
CAVQAWGYGGSQGNLIF

SEQ ID NO: 64516 - protein, 13 aa, Homo sapiens
  CDR3 for beta chain variable domain of TCR clone 32258 (TRBV23-1, TRBJ1-4)
CASRGKFNEKLFF

SEQ ID NO: 64517 - protein, 17 aa, Homo sapiens
  CDR3 for alpha chain variable domain of TCR clone 32259 (TRAV3, TRAJ6)
CAVRDGPRAGGSYIPTF

SEQ ID NO: 64518 - protein, 14 aa, Homo sapiens
  CDR3 for beta chain variable domain of TCR clone 32259 (TRBV10-2, TRBJ1-5)
CASSSTGRNQPQHF

SEQ ID NO: 64519 - protein, 15 aa, Homo sapiens
  CDR3 for alpha chain variable domain of TCR clone 32260 (TRAV35, TRAJ40)
CAGQLGTSGTYKYIF

SEQ ID NO: 64520 - protein, 14 aa, Homo sapiens
  CDR3 for beta chain variable domain of TCR clone 32260 (TRBV7-3, TRBJ2-1)
CASSLAGGTNEQFC

SEQ ID NO: 64521 - protein, 11 aa, Homo sapiens
  CDR3 for alpha chain variable domain of TCR clone 32261 (TRAV2, TRAJ33)
CAVDSNYQLIW

SEQ ID NO: 64522 - protein, 15 aa, Homo sapiens
  CDR3 for beta chain variable domain of TCR clone 32261 (TRBV19, TRBJ1-2)
CASSVGQVLNYGYIF

SEQ ID NO: 64523 - protein, 12 aa, Homo sapiens
  CDR3 for alpha chain variable domain of TCR clone 32262 (TRAV8-3, TRAJ26)
CAGDNYGQNFVF

SEQ ID NO: 64524 - protein, 13 aa, Homo sapiens
  CDR3 for beta chain variable domain of TCR clone 32262 (TRBV7-9, TRBJ2-5)
CASLPSGRETQYF

SEQ ID NO: 64525 - protein, 15 aa, Homo sapiens
  CDR3 for alpha chain variable domain of TCR clone 32263 (TRAV13-1, TRAJ44)
CAASRSTGTASKLTF

SEQ ID NO: 64526 - protein, 14 aa, Homo sapiens
  CDR3 for beta chain variable domain of TCR clone 32263 (TRBV11-2, TRBJ1-2)
CASSLYRGNYGYTF

SEQ ID NO: 64527 - protein, 11 aa, Homo sapiens
  CDR3 for alpha chain variable domain of TCR clone 32264 (TRAV3, TRAJ21)
CAVGNFNKFYF

SEQ ID NO: 64528 - protein, 14 aa, Homo sapiens
  CDR3 for beta chain variable domain of TCR clone 32264 (TRBV19, TRBJ2-2)
CDSSTLHRSGELFF

SEQ ID NO: 64529 - protein, 15 aa, Homo sapiens
  CDR3 for alpha chain variable domain of TCR clone 32265 (TRAV3, TRAJ3)
CAVRARDSSASKIIF

SEQ ID NO: 64530 - protein, 18 aa, Homo sapiens
  CDR3 for beta chain variable domain of TCR clone 32265 (TRBV25-1, TRBJ1-2)
CASSGLQNGQGLIFGYTF

SEQ ID NO: 64531 - protein, 14 aa, Homo sapiens
  CDR3 for alpha chain variable domain of TCR clone 32266 (TRAV29/DV5, TRAJ36)
CAARRKTGANNLFF

SEQ ID NO: 64532 - protein, 15 aa, Homo sapiens
  CDR3 for beta chain variable domain of TCR clone 32266 (TRBV20-1, TRBJ2-2)
CSARGGQGNTGELFF

SEQ ID NO: 64533 - protein, 11 aa, Homo sapiens
  CDR3 for alpha chain variable domain of TCR clone 32267 (TRAV2, TRAJ33)
CAVDSNYQLIW

SEQ ID NO: 64534 - protein, 15 aa, Homo sapiens
  CDR3 for beta chain variable domain of TCR clone 32267 (TRBV19, TRBJ1-2)
CASNVGQVLNYGYTF

SEQ ID NO: 64535 - protein, 15 aa, Homo sapiens
  CDR3 for alpha chain variable domain of TCR clone 32268 (TRAV13-1, TRAJ9)
CAASTLNTGGFKAIF

SEQ ID NO: 64536 - protein, 15 aa, Homo sapiens
  CDR3 for beta chain variable domain of TCR clone 32268 (TRBV6-5, TRBJ2-4)
CASSLRESPKNIQYF

SEQ ID NO: 64537 - protein, 11 aa, Homo sapiens
  CDR3 for alpha chain variable domain of TCR clone 32269 (TRAV8-4, TRAJ40)
CAVSVNNKYIF

SEQ ID NO: 64538 - protein, 14 aa, Homo sapiens
  CDR3 for beta chain variable domain of TCR clone 32269 (TRBV19, TRBJ2-1)
CASPTFVLSGEQFF

SEQ ID NO: 64539 - protein, 15 aa, Homo sapiens
  CDR3 for alpha chain variable domain of TCR clone 32270 (TRAV26-1, TRAJ22)
CIVRVSFWFCKATDL

SEQ ID NO: 64540 - protein, 20 aa, Homo sapiens
  CDR3 for beta chain variable domain of TCR clone 32270 (TRBV7-8, TRBJ2-2)
CASSHLFPGPTIHITGELFF

SEQ ID NO: 64541 - protein, 11 aa, Homo sapiens
  CDR3 for alpha chain variable domain of TCR clone 32271 (TRAV2, TRAJ33)
CAVESNYQLIW

SEQ ID NO: 64542 - protein, 15 aa, Homo sapiens
  CDR3 for beta chain variable domain of TCR clone 32271 (TRBV19, TRBJ1-1)
CANTSGQIQNTEAFF

SEQ ID NO: 64543 - protein, 16 aa, Homo sapiens
  CDR3 for alpha chain variable domain of TCR clone 32272 (TRAV3, TRAJ13)
CAVRDPNSRGYQKVTF

SEQ ID NO: 64544 - protein, 13 aa, Homo sapiens
  CDR3 for beta chain variable domain of TCR clone 32272 (TRBV7-9, TRBJ2-7)
CASSLQGSYEQYF

SEQ ID NO: 64545 - protein, 14 aa, Homo sapiens
  CDR3 for alpha chain variable domain of TCR clone 32273 (TRAV13-1, TRAJ39)
CAASTGNAGNMLTF

SEQ ID NO: 64546 - protein, 14 aa, Homo sapiens
  CDR3 for beta chain variable domain of TCR clone 32273 (TRBV6-3, TRBJ1-1)
CASSLYTGSVRAFF

SEQ ID NO: 64547 - protein, 16 aa, Homo sapiens
  CDR3 for alpha chain variable domain of TCR clone 32274 (TRAV13-2, TRAJ32)
CAENMNYGGATNKLIF

SEQ ID NO: 64548 - protein, 14 aa, Homo sapiens
  CDR3 for beta chain variable domain of TCR clone 32274 (TRBV15, TRBJ2-5)
CATSSTGYQEAQYF

SEQ ID NO: 64549 - protein, 13 aa, Homo sapiens
  CDR3 for alpha chain variable domain of TCR clone 32275 (TRAV13-1, TRAJ6)
CAASKGGSYIPTF

SEQ ID NO: 64550 - protein, 14 aa, Homo sapiens
  CDR3 for beta chain variable domain of TCR clone 32275 (TRBV7-2, TRBJ2-1)
CASSLGVGYNEQFI

SEQ ID NO: 64551 - protein, 15 aa, Homo sapiens
  CDR3 for alpha chain variable domain of TCR clone 32276 (TRAV26-1, TRAJ29)
CIVRVEGSGNTPLVF

SEQ ID NO: 64552 - protein, 15 aa, Homo sapiens
  CDR3 for beta chain variable domain of TCR clone 32276 (TRBV7-9, TRBJ1-5)
CASSQGHQSNQPQHF

SEQ ID NO: 64553 - protein, 11 aa, Homo sapiens
  CDR3 for alpha chain variable domain of TCR clone 32277 (TRAV1-1, TRAJ23)
CAVRQGGKLIF

SEQ ID NO: 64554 - protein, 14 aa, Homo sapiens
  CDR3 for beta chain variable domain of TCR clone 32277 (TRBV4-2, TRBJ2-1)
CASGLDRAYNEQFF

SEQ ID NO: 64555 - protein, 14 aa, Homo sapiens
  CDR3 for alpha chain variable domain of TCR clone 32278 (TRAV12-2, TRAJ53)
CAVKGGGSNYELTF

SEQ ID NO: 64556 - protein, 14 aa, Homo sapiens
  CDR3 for beta chain variable domain of TCR clone 32278 (TRBV7-7, TRBJ2-2)
CATRQDSDTGELFF

SEQ ID NO: 64557 - protein, 12 aa, Homo sapiens
  CDR3 for alpha chain variable domain of TCR clone 32279 (TRAV3, TRAJ27)
CAVRDGAGKSTF

SEQ ID NO: 64558 - protein, 13 aa, Homo sapiens
  CDR3 for beta chain variable domain of TCR clone 32279 (TRBV10-3, TRBJ1-2)
CAINADLNYGYAF

SEQ ID NO: 64559 - protein, 13 aa, Homo sapiens
  CDR3 for alpha chain variable domain of TCR clone 32280 (TRAV2, TRAJ40)
CAVVTSGTYKYIF

SEQ ID NO: 64560 - protein, 13 aa, Homo sapiens
  CDR3 for beta chain variable domain of TCR clone 32280 (TRBV18, TRBJ2-5)
CASSLQGQETQYF

SEQ ID NO: 64561 - protein, 14 aa, Homo sapiens
  CDR3 for alpha chain variable domain of TCR clone 32281 (TRAV12-2, TRAJ29)
CAVRRNLGNTPLVF

SEQ ID NO: 64562 - protein, 13 aa, Homo sapiens
  CDR3 for beta chain variable domain of TCR clone 32281 (TRBV12-4, TRBJ2-1)
CASSHYTDNEQFF

SEQ ID NO: 64563 - protein, 13 aa, Homo sapiens
  CDR3 for alpha chain variable domain of TCR clone 32282 (TRAV8-6, TRAJ49)
CAVITNTGNQFYF

SEQ ID NO: 64564 - protein, 16 aa, Homo sapiens
  CDR3 for beta chain variable domain of TCR clone 32282 (TRBV13, TRBJ2-2)
CASSPRTGEHTGELFF

SEQ ID NO: 64565 - protein, 13 aa, Homo sapiens
  CDR3 for alpha chain variable domain of TCR clone 32283 (TRAV27, TRAJ3)
ASLRGSSASKTIF

SEQ ID NO: 64566 - protein, 15 aa, Homo sapiens
  CDR3 for beta chain variable domain of TCR clone 32283 (TRBV28, TRBJ1-3)
CASSMGWASGNTIYF

SEQ ID NO: 64567 - protein, 13 aa, Homo sapiens
  CDR3 for alpha chain variable domain of TCR clone 32284 (TRAV12-1, TRAJ40)
CVVPTSGTYKYIF

SEQ ID NO: 64568 - protein, 18 aa, Homo sapiens
  CDR3 for beta chain variable domain of TCR clone 32284 (TRBV7-6, TRBJ2-1)
CANSPRTSGMSSYNEQFF

SEQ ID NO: 64569 - protein, 14 aa, Homo sapiens
  CDR3 for alpha chain variable domain of TCR clone 32285 (TRAV8-3, TRAJ4)
CAVGAAGGYNKLIF

SEQ ID NO: 64570 - protein, 16 aa, Homo sapiens
  CDR3 for beta chain variable domain of TCR clone 32285 (TRBV12-4, TRBJ1-5)
CASSRPVGGSNQPQHF

SEQ ID NO: 64571 - protein, 14 aa, Homo sapiens
  CDR3 for alpha chain variable domain of TCR clone 32286 (TRAV2, TRAJ22)
CAVGRGSSARQLTF

SEQ ID NO: 64572 - protein, 12 aa, Homo sapiens
  CDR3 for beta chain variable domain of TCR clone 32286 (TRBV19, TRBJ2-1)
CASSMQDTEQFF

SEQ ID NO: 64573 - protein, 15 aa, Homo sapiens
  CDR3 for alpha chain variable domain of TCR clone 32287 (TRAV26-1, TRAJ29)
CIVRVEGSGNTPLVF

SEQ ID NO: 64574 - protein, 14 aa, Homo sapiens
  CDR3 for beta chain variable domain of TCR clone 32287 (TRBV18, TRBJ2-5)
CDSSPGVSQETQYF

SEQ ID NO: 64575 - protein, 14 aa, Homo sapiens
  CDR3 for alpha chain variable domain of TCR clone 32288 (TRAV12-3, TRAJ10)
SHLPLTGGGNKLTF

SEQ ID NO: 64576 - protein, 15 aa, Homo sapiens
  CDR3 for beta chain variable domain of TCR clone 32288 (TRBV7-9, TRBJ1-4)
CASSATGGNNEKLFF

SEQ ID NO: 64577 - protein, 11 aa, Homo sapiens
  CDR3 for alpha chain variable domain of TCR clone 32289 (TRAV17, TRAJ9)
CGLTGGFKTIF

SEQ ID NO: 64578 - protein, 14 aa, Homo sapiens
  CDR3 for beta chain variable domain of TCR clone 32289 (TRBV7-9, TRBJ2-2)
CASSLVQDTGELFF

SEQ ID NO: 64579 - protein, 12 aa, Homo sapiens
  CDR3 for alpha chain variable domain of TCR clone 32290 (TRAV12-3, TRAJ17)
CAMTLTGNKLTF

SEQ ID NO: 64580 - protein, 14 aa, Homo sapiens
  CDR3 for beta chain variable domain of TCR clone 32290 (TRBV7-6, TRBJ2-3)
CASSVAGGTDTQYF

SEQ ID NO: 64581 - protein, 15 aa, Homo sapiens
  CDR3 for alpha chain variable domain of TCR clone 32291 (TRAV8-2, TRAJ16)
RVVSDGFSDGQKLLF

SEQ ID NO: 64582 - protein, 14 aa, Homo sapiens
  CDR3 for beta chain variable domain of TCR clone 32291 (TRBV7-3, TRBJ1-1)
CASSLGTGYTEAFF

SEQ ID NO: 64583 - protein, 13 aa, Homo sapiens
  CDR3 for alpha chain variable domain of TCR clone 32292 (TRAV21, TRAJ27)
CAARPGNAGKSTF

SEQ ID NO: 64584 - protein, 14 aa, Homo sapiens
  CDR3 for beta chain variable domain of TCR clone 32292 (TRBV18, TRBJ2-7)
CASSPRGGAYEQYF

SEQ ID NO: 64585 - protein, 17 aa, Homo sapiens
  CDR3 for alpha chain variable domain of TCR clone 32293 (TRAV23/DV6, TRAJ57)
CAASSTLSQGGSEKLVV

SEQ ID NO: 64586 - protein, 14 aa, Homo sapiens
  CDR3 for beta chain variable domain of TCR clone 32293 (TRBV25-1, TRBJ1-1)
CASTHLGGNTEAFF

SEQ ID NO: 64587 - protein, 10 aa, Homo sapiens
  CDR3 for alpha chain variable domain of TCR clone 32294 (TRAV30, TRAJ48)
CGIGNEKLTF

SEQ ID NO: 64588 - protein, 14 aa, Homo sapiens
  CDR3 for beta chain variable domain of TCR clone 32294 (TRBV7-6, TRBJ2-3)
CASSVARGTDTQYF

SEQ ID NO: 64589 - protein, 13 aa, Homo sapiens
  CDR3 for alpha chain variable domain of TCR clone 32295 (TRAV3, TRAJ20)
CAVRDTGDYKLSF

SEQ ID NO: 64590 - protein, 15 aa, Homo sapiens
  CDR3 for beta chain variable domain of TCR clone 32295 (TRBV11-3, TRBJ2-3)
CASLKDGREGDTQYF

SEQ ID NO: 64591 - protein, 12 aa, Homo sapiens
  CDR3 for alpha chain variable domain of TCR clone 32296 (TRAV30, TRAJ43)
CGTEERGNDMRF

SEQ ID NO: 64592 - protein, 13 aa, Homo sapiens
  CDR3 for beta chain variable domain of TCR clone 32296 (TRBV12-4, TRBJ1-2)
CASSSGSKDGDTF

SEQ ID NO: 64593 - protein, 12 aa, Homo sapiens
  CDR3 for alpha chain variable domain of TCR clone 32297 (TRAV12-1, TRAJ40)
CVVYSGTYKYIF

SEQ ID NO: 64594 - protein, 13 aa, Homo sapiens
  CDR3 for beta chain variable domain of TCR clone 32297 (TRBV19, TRBJ2-7)
CASRKAGGSEQYF

SEQ ID NO: 64595 - protein, 18 aa, Homo sapiens
  CDR3 for alpha chain variable domain of TCR clone 32298 (TRAV21, TRAJ52)
CAVRPSPAGGTSYGKLTF

SEQ ID NO: 64596 - protein, 13 aa, Homo sapiens
  CDR3 for beta chain variable domain of TCR clone 32298 (TRBV7-3, TRBJ1-1)
CASRQDWGAEAFF

SEQ ID NO: 64597 - protein, 15 aa, Homo sapiens
  CDR3 for alpha chain variable domain of TCR clone 32299 (TRAV17, TRAJ57)
CATGPSQGGSEKLVF

SEQ ID NO: 64598 - protein, 15 aa, Homo sapiens
  CDR3 for beta chain variable domain of TCR clone 32299 (TRBV12-4, TRBJ1-5)
CSSRPVGGSNQPQHF

SEQ ID NO: 64599 - protein, 15 aa, Homo sapiens
  CDR3 for alpha chain variable domain of TCR clone 32300 (TRAV21, TRAJ53)
CATLNSGGSNYKLAF

SEQ ID NO: 64600 - protein, 12 aa, Homo sapiens
  CDR3 for beta chain variable domain of TCR clone 32300 (TRBV11-2, TRBJ2-2)
CASSLGGGELFF

SEQ ID NO: 64601 - protein, 17 aa, Homo sapiens
  CDR3 for alpha chain variable domain of TCR clone 32301 (TRAV3, TRAJ42)
CTVRDRDYGGSQGNLIF

SEQ ID NO: 64602 - protein, 15 aa, Homo sapiens
  CDR3 for beta chain variable domain of TCR clone 32301 (TRBV6-6, TRBJ2-7)
CASSYSYGGSYEQYF

SEQ ID NO: 64603 - protein, 11 aa, Homo sapiens
  CDR3 for alpha chain variable domain of TCR clone 32302 (TRAV2, TRAJ13)
CASGGYQKVTF

SEQ ID NO: 64604 - protein, 14 aa, Homo sapiens
  CDR3 for beta chain variable domain of TCR clone 32302 (TRBV19, TRBJ2-7)
CASNFRDTFTGMYF

SEQ ID NO: 64605 - protein, 13 aa, Homo sapiens
  CDR3 for alpha chain variable domain of TCR clone 32303 (TRAV27, TRAJ45)
CRSSGGGADGLTF

SEQ ID NO: 64606 - protein, 13 aa, Homo sapiens
  CDR3 for beta chain variable domain of TCR clone 32303 (TRBV11-2, TRBJ1-3)
CASSLEPVNTIYF

SEQ ID NO: 64607 - protein, 11 aa, Homo sapiens
  CDR3 for alpha chain variable domain of TCR clone 32304 (TRAV16, TRAJ20)
CALSEGFKAAL

SEQ ID NO: 64608 - protein, 13 aa, Homo sapiens
  CDR3 for beta chain variable domain of TCR clone 32304 (TRBV7-3, TRBJ2-1)
CASSLDSYNEQLF

SEQ ID NO: 64609 - protein, 15 aa, Homo sapiens
  CDR3 for alpha chain variable domain of TCR clone 32305 (TRAV12-2, TRAJ53)
CAANGGGGSNYKLTF

SEQ ID NO: 64610 - protein, 14 aa, Homo sapiens
  CDR3 for beta chain variable domain of TCR clone 32305 (TRBV18, TRBJ2-7)
CASSPRGGAYEQYF

SEQ ID NO: 64611 - protein, 13 aa, Homo sapiens
  CDR3 for alpha chain variable domain of TCR clone 32306 (TRAV30, TRAJ34)
CGTVGHNTDKLIF

SEQ ID NO: 64612 - protein, 16 aa, Homo sapiens
  CDR3 for beta chain variable domain of TCR clone 32306 (TRBV7-9, TRBJ1-2)
CASSLGFSSGEDGYTF

SEQ ID NO: 64613 - protein, 12 aa, Homo sapiens
  CDR3 for alpha chain variable domain of TCR clone 32307 (TRAV25, TRAJ11)
RAGYSGYSTLTF

SEQ ID NO: 64614 - protein, 13 aa, Homo sapiens
  CDR3 for beta chain variable domain of TCR clone 32307 (TRBV7-9, TRBJ1-2)
CASSLKQNYGYTF

SEQ ID NO: 64615 - protein, 11 aa, Homo sapiens
  CDR3 for alpha chain variable domain of TCR clone 32308 (TRAV1-1, TRAJ23)
CAVRQGGKLIF

SEQ ID NO: 64616 - protein, 20 aa, Homo sapiens
  CDR3 for beta chain variable domain of TCR clone 32308 (TRBV7-8, TRBJ2-2)
CASSHLFPGPTIHITGVLFF

SEQ ID NO: 64617 - protein, 12 aa, Homo sapiens
  CDR3 for alpha chain variable domain of TCR clone 32309 (TRAV12-2, TRAJ52)
IGGGTSYGKLTF

SEQ ID NO: 64618 - protein, 18 aa, Homo sapiens
  CDR3 for beta chain variable domain of TCR clone 32309 (TRBV4-1, TRBJ2-7)
CASSQDTGAGSGLNEQYF

SEQ ID NO: 64619 - protein, 13 aa, Homo sapiens
  CDR3 for alpha chain variable domain of TCR clone 32310 (TRAV12-3, TRAJ33)
CAMSVNSNYQLIW

SEQ ID NO: 64620 - protein, 13 aa, Homo sapiens
  CDR3 for beta chain variable domain of TCR clone 32310 (TRBV7-2, TRBJ2-2)
CASSLAVNGELFF

SEQ ID NO: 64621 - protein, 13 aa, Homo sapiens
  CDR3 for alpha chain variable domain of TCR clone 32311 (TRAV29/DV5, TRAJ48)
CAASYFGNEKLTF

SEQ ID NO: 64622 - protein, 14 aa, Homo sapiens
  CDR3 for beta chain variable domain of TCR clone 32311 (TRBV3-1, TRBJ2-2)
CASSQDWVQGELFF

SEQ ID NO: 64623 - protein, 16 aa, Homo sapiens
  CDR3 for alpha chain variable domain of TCR clone 32312 (TRAV27, TRAJ52)
CAGAGAGGTSYGKLTF

SEQ ID NO: 64624 - protein, 17 aa, Homo sapiens
  CDR3 for beta chain variable domain of TCR clone 32312 (TRBV24-1, TRBJ2-3)
CATSDLPSGEGTDTQYF

SEQ ID NO: 64625 - protein, 15 aa, Homo sapiens
  CDR3 for alpha chain variable domain of TCR clone 32313 (TRAV8-4, TRAJ6)
CAVSAPSGGSYIPTF

SEQ ID NO: 64626 - protein, 15 aa, Homo sapiens
  CDR3 for beta chain variable domain of TCR clone 32313 (TRBV7-3, TRBJ2-2)
CASKANGANTGELFV

SEQ ID NO: 64627 - protein, 13 aa, Homo sapiens
  CDR3 for alpha chain variable domain of TCR clone 32314 (TRAV27, TRAJ49)
CATRPYTGNQFYF

SEQ ID NO: 64628 - protein, 16 aa, Homo sapiens
  CDR3 for beta chain variable domain of TCR clone 32314 (TRBV4-1, TRBJ1-2)
CASSQDAGQVLYGYTF

SEQ ID NO: 64629 - protein, 12 aa, Homo sapiens
  CDR3 for alpha chain variable domain of TCR clone 32315 (TRAV4, TRAJ6)
CLAPGGSYIPTF

SEQ ID NO: 64630 - protein, 18 aa, Homo sapiens
  CDR3 for beta chain variable domain of TCR clone 32315 (TRBV20-1, TRBJ2-3)
CGASGLAGGPGTTDTQYF

SEQ ID NO: 64631 - protein, 15 aa, Homo sapiens
  CDR3 for alpha chain variable domain of TCR clone 32316 (TRAV2, TRAJ32)
CAVANYGGATNKLIF

SEQ ID NO: 64632 - protein, 15 aa, Homo sapiens
  CDR3 for beta chain variable domain of TCR clone 32316 (TRBV7-7, TRBJ2-5)
CASSQLGRAEETQYF

SEQ ID NO: 64633 - protein, 15 aa, Homo sapiens
  CDR3 for alpha chain variable domain of TCR clone 32317 (TRAV13-1, TRAJ45)
QVGRYSGGGADGLTF

SEQ ID NO: 64634 - protein, 13 aa, Homo sapiens
  CDR3 for beta chain variable domain of TCR clone 32317 (TRBV7-8, TRBJ2-7)
CASSFAGLYEQYF

SEQ ID NO: 64635 - protein, 14 aa, Homo sapiens
  CDR3 for alpha chain variable domain of TCR clone 32318 (TRAV4, TRAJ41)
CLVGDGDSGYALNF

SEQ ID NO: 64636 - protein, 15 aa, Homo sapiens
  CDR3 for beta chain variable domain of TCR clone 32318 (TRBV27, TRBJ2-7)
CASSLVGGGDHEQYF

SEQ ID NO: 64637 - protein, 16 aa, Homo sapiens
  CDR3 for alpha chain variable domain of TCR clone 32319 (TRAV3, TRAJ10)
CAVRGMRAGGGNKLTF

SEQ ID NO: 64638 - protein, 13 aa, Homo sapiens
  CDR3 for beta chain variable domain of TCR clone 32319 (TRBV27, TRBJ1-1)
CASSLSIGAEAFF

SEQ ID NO: 64639 - protein, 12 aa, Homo sapiens
  CDR3 for alpha chain variable domain of TCR clone 32320 (TRAV38-2/DV8, TRAJ21)
CAYRSNLNKFYF

SEQ ID NO: 64640 - protein, 15 aa, Homo sapiens
  CDR3 for beta chain variable domain of TCR clone 32320 (TRBV6-1, TRBJ2-7)
CASSDWDKPNYEQYF

SEQ ID NO: 64641 - protein, 16 aa, Homo sapiens
  CDR3 for alpha chain variable domain of TCR clone 32321 (TRAV4, TRAJ22)
CLVGDLYSGSARQLTF

SEQ ID NO: 64642 - protein, 16 aa, Homo sapiens
  CDR3 for beta chain variable domain of TCR clone 32321 (TRBV7-9, TRBJ2-1)
CASSDVAGGSYNEQFC

SEQ ID NO: 64643 - protein, 12 aa, Homo sapiens
  CDR3 for alpha chain variable domain of TCR clone 32322 (TRAV23/DV6, TRAJ36)
CAASNEANNLFF

SEQ ID NO: 64644 - protein, 14 aa, Homo sapiens
  CDR3 for beta chain variable domain of TCR clone 32322 (TRBV24-1, TRBJ1-1)
CATSIPRGDTEAFF

SEQ ID NO: 64645 - protein, 11 aa, Homo sapiens
  CDR3 for alpha chain variable domain of TCR clone 32323 (TRAV2, TRAJ13)
CAYGGYQKVTF

SEQ ID NO: 64646 - protein, 16 aa, Homo sapiens
  CDR3 for beta chain variable domain of TCR clone 32323 (TRBV6-1, TRBJ2-5)
CASSETLDRGAETQYF

SEQ ID NO: 64647 - protein, 12 aa, Homo sapiens
  CDR3 for alpha chain variable domain of TCR clone 32324 (TRAV17, TRAJ57)
CATDGGSEKLVF

SEQ ID NO: 64648 - protein, 15 aa, Homo sapiens
  CDR3 for beta chain variable domain of TCR clone 32324 (TRBV7-9, TRBJ2-7)
CASSFAGPTSSTSGR

SEQ ID NO: 64649 - protein, 17 aa, Homo sapiens
  CDR3 for alpha chain variable domain of TCR clone 32325 (TRAV3, TRAJ42)
CAVRDRDYGGSKGNLIF

SEQ ID NO: 64650 - protein, 14 aa, Homo sapiens
  CDR3 for beta chain variable domain of TCR clone 32325 (TRBV7-2, TRBJ2-5)
CASSPRGSSETQYF

SEQ ID NO: 64651 - protein, 23 aa, Homo sapiens
  CDR3 for alpha chain variable domain of TCR clone 32326 (TRAV26-1, )
CIADNAGNNDIQNPDPAVYQLRD

SEQ ID NO: 64652 - protein, 13 aa, Homo sapiens
  CDR3 for beta chain variable domain of TCR clone 32326 (TRBV20-1, TRBJ1-1)
CSARGGGNTEAFF

SEQ ID NO: 64653 - protein, 11 aa, Homo sapiens
  CDR3 for alpha chain variable domain of TCR clone 32327 (TRAV12-3, TRAJ27)
CAMANAGKSTF

SEQ ID NO: 64654 - protein, 14 aa, Homo sapiens
  CDR3 for beta chain variable domain of TCR clone 32327 (TRBV28, TRBJ2-7)
CASTRSDSSYEQYF

SEQ ID NO: 64655 - protein, 17 aa, Homo sapiens
  CDR3 for alpha chain variable domain of TCR clone 32328 (TRAV3, TRAJ6)
CAVRDGPRAGGSYIPTF

SEQ ID NO: 64656 - protein, 14 aa, Homo sapiens
  CDR3 for beta chain variable domain of TCR clone 32328 (TRBV7-2, TRBJ2-7)
CASSPKTSFYEEYF

SEQ ID NO: 64657 - protein, 13 aa, Homo sapiens
  CDR3 for alpha chain variable domain of TCR clone 32329 (TRAV2, TRAJ40)
CAVVTPGTYKYIF

SEQ ID NO: 64658 - protein, 16 aa, Homo sapiens
  CDR3 for beta chain variable domain of TCR clone 32329 (TRBV7-2, TRBJ1-2)
CASSSSQDRRGHGYTF

SEQ ID NO: 64659 - protein, 17 aa, Homo sapiens
  CDR3 for alpha chain variable domain of TCR clone 32330 (TRAV3, TRAJ42)
CAVRDRDYGGSQGNLIF

SEQ ID NO: 64660 - protein, 15 aa, Homo sapiens
  CDR3 for beta chain variable domain of TCR clone 32330 (TRBV6-6, TRBJ2-7)
CAGSYSYGGSYEQYF

SEQ ID NO: 64661 - protein, 19 aa, Homo sapiens
  CDR3 for alpha chain variable domain of TCR clone 32331 (TRAV16, TRAJ22)
KKPFAQEEDSAMYLRQLTF

SEQ ID NO: 64662 - protein, 15 aa, Homo sapiens
  CDR3 for beta chain variable domain of TCR clone 32331 (TRBV7-9, TRBJ1-6)
CASSSPGRGNSPLHF

SEQ ID NO: 64663 - protein, 14 aa, Homo sapiens
  CDR3 for alpha chain variable domain of TCR clone 32332 (TRAV17, TRAJ31)
CATVLRNNNARIMF

SEQ ID NO: 64664 - protein, 14 aa, Homo sapiens
  CDR3 for beta chain variable domain of TCR clone 32332 (TRBV12-4, TRBJ2-5)
CASSLWQKQETQYF

SEQ ID NO: 64665 - protein, 14 aa, Homo sapiens
  CDR3 for alpha chain variable domain of TCR clone 32333 (TRAV17, TRAJ37)
CATDGSSNTGKLIF

SEQ ID NO: 64666 - protein, 13 aa, Homo sapiens
  CDR3 for beta chain variable domain of TCR clone 32333 (TRBV11-2, TRBJ2-1)
CASSLDLVDEQFF

SEQ ID NO: 64667 - protein, 14 aa, Homo sapiens
  CDR3 for alpha chain variable domain of TCR clone 32334 (TRAV12-2, TRAJ40)
CAVKIPSGTYKYIF

SEQ ID NO: 64668 - protein, 17 aa, Homo sapiens
  CDR3 for beta chain variable domain of TCR clone 32334 (TRBV11-2, TRBJ2-1)
CASSLYPPGVEYNEQLF

SEQ ID NO: 64669 - protein, 16 aa, Homo sapiens
  CDR3 for alpha chain variable domain of TCR clone 32335 (TRAV3, TRAJ37)
CAVRPHGSGNTGKLIF

SEQ ID NO: 64670 - protein, 16 aa, Homo sapiens
  CDR3 for beta chain variable domain of TCR clone 32335 (TRBV5-1, TRBJ1-1)
CASSSGGNSLNTEAFF

SEQ ID NO: 64671 - protein, 13 aa, Homo sapiens
  CDR3 for alpha chain variable domain of TCR clone 32336 (TRAV21, TRAJ37)
CAVSSGNTGELIF

SEQ ID NO: 64672 - protein, 13 aa, Homo sapiens
  CDR3 for beta chain variable domain of TCR clone 32336 (TRBV7-6, TRBJ2-3)
CASSLRSDNTQYF

SEQ ID NO: 64673 - protein, 15 aa, Homo sapiens
  CDR3 for alpha chain variable domain of TCR clone 32337 (TRAV21, TRAJ53)
CATLNSGGSNYKLPF

SEQ ID NO: 64674 - protein, 16 aa, Homo sapiens
  CDR3 for beta chain variable domain of TCR clone 32337 (TRBV9, TRBJ2-1)
CASSVGGGGNYNEQFF

SEQ ID NO: 64675 - protein, 15 aa, Homo sapiens
  CDR3 for alpha chain variable domain of TCR clone 32338 (TRAV25, TRAJ52)
CVGRPGGTSYGKLTF

SEQ ID NO: 64676 - protein, 17 aa, Homo sapiens
  CDR3 for beta chain variable domain of TCR clone 32338 (TRBV7-8, TRBJ2-6)
CASSAGTGGAGANVLTF

SEQ ID NO: 64677 - protein, 14 aa, Homo sapiens
  CDR3 for alpha chain variable domain of TCR clone 32339 (TRAV16, TRAJ37)
CALDISGNTGKLIF

SEQ ID NO: 64678 - protein, 14 aa, Homo sapiens
  CDR3 for beta chain variable domain of TCR clone 32339 (TRBV7-2, TRBJ2-7)
CASSPKTSFYEQYF

SEQ ID NO: 64679 - protein, 14 aa, Homo sapiens
  CDR3 for alpha chain variable domain of TCR clone 32340 (TRAV17, TRAJ22)
CATSPSGSAMQLTF

SEQ ID NO: 64680 - protein, 15 aa, Homo sapiens
  CDR3 for beta chain variable domain of TCR clone 32340 (TRBV4-1, TRBJ2-5)
CASSQWDLYQETQYF

SEQ ID NO: 64681 - protein, 14 aa, Homo sapiens
  CDR3 for alpha chain variable domain of TCR clone 32341 (TRAV12-1, TRAJ17)
CVVNYKAAGNKLTF

SEQ ID NO: 64682 - protein, 15 aa, Homo sapiens
  CDR3 for beta chain variable domain of TCR clone 32341 (TRBV7-2, TRBJ2-1)
CASTHGTGTYNEQFF

SEQ ID NO: 64683 - protein, 13 aa, Homo sapiens
  CDR3 for alpha chain variable domain of TCR clone 32342 (TRAV13-2, TRAJ13)
CAERPGGYQKVTL

SEQ ID NO: 64684 - protein, 17 aa, Homo sapiens
  CDR3 for beta chain variable domain of TCR clone 32342 (TRBV11-2, TRBJ2-1)
CASSLYPPGVEYNEQFF

SEQ ID NO: 64685 - protein, 16 aa, Homo sapiens
  CDR3 for alpha chain variable domain of TCR clone 32343 (TRAV13-1, TRAJ18)
CASSRMRGSTLGRLYF

SEQ ID NO: 64686 - protein, 16 aa, Homo sapiens
  CDR3 for beta chain variable domain of TCR clone 32343 (TRBV27, TRBJ1-1)
CASSSRGRTGYTEAFF

SEQ ID NO: 64687 - protein, 12 aa, Homo sapiens
  CDR3 for alpha chain variable domain of TCR clone 32344 (TRAV12-2, TRAJ21)
CAVRYNFNKFYF

SEQ ID NO: 64688 - protein, 14 aa, Homo sapiens
  CDR3 for beta chain variable domain of TCR clone 32344 (TRBV28, TRBJ2-1)
CASSYYTAYNEQLF

SEQ ID NO: 64689 - protein, 12 aa, Homo sapiens
  CDR3 for alpha chain variable domain of TCR clone 32345 (TRAV12-3, TRAJ17)
RAMTLTGNKLTF

SEQ ID NO: 64690 - protein, 17 aa, Homo sapiens
  CDR3 for beta chain variable domain of TCR clone 32345 (TRBV11-2, TRBJ2-1)
CASSLYPPGVEYNEQFF

SEQ ID NO: 64691 - protein, 13 aa, Homo sapiens
  CDR3 for alpha chain variable domain of TCR clone 32346 (TRAV2, TRAJ40)
CAVVTSGTYKYIF

SEQ ID NO: 64692 - protein, 14 aa, Homo sapiens
  CDR3 for beta chain variable domain of TCR clone 32346 (TRBV18, TRBJ2-3)
CASSRDRGTDTQYF

SEQ ID NO: 64693 - protein, 16 aa, Homo sapiens
  CDR3 for alpha chain variable domain of TCR clone 32347 (TRAV20, TRAJ26)
CAVQHRRDNYGQNFVF

SEQ ID NO: 64694 - protein, 15 aa, Homo sapiens
  CDR3 for beta chain variable domain of TCR clone 32347 (TRBV7-2, TRBJ2-7)
CASSWGQGAIYAQYF

SEQ ID NO: 64695 - protein, 13 aa, Homo sapiens
  CDR3 for alpha chain variable domain of TCR clone 32348 (TRAV8-3, TRAJ36)
CAVGATGANNLFF

SEQ ID NO: 64696 - protein, 14 aa, Homo sapiens
  CDR3 for beta chain variable domain of TCR clone 32348 (TRBV7-6, TRBJ2-3)
CASSLGTVTDTQYF

SEQ ID NO: 64697 - protein, 14 aa, Homo sapiens
  CDR3 for alpha chain variable domain of TCR clone 32349 (TRAV26-1, TRAJ34)
CIVRVAYNTGKLIF

SEQ ID NO: 64698 - protein, 15 aa, Homo sapiens
  CDR3 for beta chain variable domain of TCR clone 32349 (TRBV20-1, TRBJ2-7)
CSARVPAAYFYEQYF

SEQ ID NO: 64699 - protein, 23 aa, Homo sapiens
  CDR3 for alpha chain variable domain of TCR clone 32350 (TRAV8-6, TRAJ36)
CAVSDWLGQTTSSLGLERDSPLF

SEQ ID NO: 64700 - protein, 15 aa, Homo sapiens
  CDR3 for beta chain variable domain of TCR clone 32350 (TRBV6-1, TRBJ2-3)
CASSERGGITDTQYF

SEQ ID NO: 64701 - protein, 13 aa, Homo sapiens
  CDR3 for alpha chain variable domain of TCR clone 32351 (TRAV26-1, TRAJ34)
CIVRPWITDKLIF

SEQ ID NO: 64702 - protein, 13 aa, Homo sapiens
  CDR3 for beta chain variable domain of TCR clone 32351 (TRBV5-1, TRBJ2-1)
CASSLGYYNEQFF

SEQ ID NO: 64703 - protein, 11 aa, Homo sapiens
  CDR3 for alpha chain variable domain of TCR clone 32352 (TRAV3, TRAJ21)
CAVGNFNKFYF

SEQ ID NO: 64704 - protein, 12 aa, Homo sapiens
  CDR3 for beta chain variable domain of TCR clone 32352 (TRBV5-1, TRBJ1-2)
CASSQDTYGYTF

SEQ ID NO: 64705 - protein, 15 aa, Homo sapiens
  CDR3 for alpha chain variable domain of TCR clone 32353 (TRAV17, TRAJ57)
GATGPSQGGSEKLVF

SEQ ID NO: 64706 - protein, 16 aa, Homo sapiens
  CDR3 for beta chain variable domain of TCR clone 32353 (TRBV12-4, TRBJ1-5)
CASSRPVGGSNQPQHF

SEQ ID NO: 64707 - protein, 13 aa, Homo sapiens
  CDR3 for alpha chain variable domain of TCR clone 32354 (TRAV13-2, TRAJ48)
CAEMDFGNEKLTF

SEQ ID NO: 64708 - protein, 15 aa, Homo sapiens
  CDR3 for beta chain variable domain of TCR clone 32354 (TRBV7-9, TRBJ1-6)
CASNSPGRGNSPLHF

SEQ ID NO: 64709 - protein, 12 aa, Homo sapiens
  CDR3 for alpha chain variable domain of TCR clone 32355 (TRAV8-4, TRAJ43)
CAVSVNNNDMRF

SEQ ID NO: 64710 - protein, 14 aa, Homo sapiens
  CDR3 for beta chain variable domain of TCR clone 32355 (TRBV12-4, TRBJ1-1)
CASSPIRRTGEAFF

SEQ ID NO: 64711 - protein, 14 aa, Homo sapiens
  CDR3 for alpha chain variable domain of TCR clone 32356 (TRAV38-1, TRAJ45)
CAYYSGGGADGLTF

SEQ ID NO: 64712 - protein, 20 aa, Homo sapiens
  CDR3 for beta chain variable domain of TCR clone 32356 (TRBV28, TRBJ2-1)
CASTPIGRSPGLAGGNEKFF

SEQ ID NO: 64713 - protein, 13 aa, Homo sapiens
  CDR3 for alpha chain variable domain of TCR clone 32357 (TRAV35, TRAJ21)
CAGQLSNFNKFYF

SEQ ID NO: 64714 - protein, 12 aa, Homo sapiens
  CDR3 for beta chain variable domain of TCR clone 32357 (TRBV12-4, TRBJ1-3)
CASSFSGNTIYV

SEQ ID NO: 64715 - protein, 14 aa, Homo sapiens
  CDR3 for alpha chain variable domain of TCR clone 32358 (TRAV2, TRAJ9)
CAVEDRSGGFKTIF

SEQ ID NO: 64716 - protein, 17 aa, Homo sapiens
  CDR3 for beta chain variable domain of TCR clone 32358 (TRBV11-3, TRBJ2-1)
CASSLYPPGVEYNEQFF

SEQ ID NO: 64717 - protein, 16 aa, Homo sapiens
  CDR3 for alpha chain variable domain of TCR clone 32359 (TRAV23/DV6, TRAJ9)
CAASIGGNTGGFKTIF

SEQ ID NO: 64718 - protein, 15 aa, Homo sapiens
  CDR3 for beta chain variable domain of TCR clone 32359 (TRBV7-9, TRBJ1-6)
CASSSPGRGNSPLHF

SEQ ID NO: 64719 - protein, 13 aa, Homo sapiens
  CDR3 for alpha chain variable domain of TCR clone 32360 (TRAV29/DV5, TRAJ44)
CAASTGTASKLTF

SEQ ID NO: 64720 - protein, 15 aa, Homo sapiens
  CDR3 for beta chain variable domain of TCR clone 32360 (TRBV20-1, TRBJ1-1)
CSASRGVTGNTEAFF

SEQ ID NO: 64721 - protein, 10 aa, Homo sapiens
  CDR3 for alpha chain variable domain of TCR clone 32361 (TRAV12-3, TRAJ18)
CAMSAEAQPW

SEQ ID NO: 64722 - protein, 13 aa, Homo sapiens
  CDR3 for beta chain variable domain of TCR clone 32361 (TRBV15, TRBJ1-6)
CATSGGLNSTLHF

SEQ ID NO: 64723 - protein, 16 aa, Homo sapiens
  CDR3 for alpha chain variable domain of TCR clone 32362 (TRAV30, TRAJ24)
CGTEIVDADSWGKFQF

SEQ ID NO: 64724 - protein, 14 aa, Homo sapiens
  CDR3 for beta chain variable domain of TCR clone 32362 (TRBV7-2, TRBJ2-2)
CASRGQGAAGELFF

SEQ ID NO: 64725 - protein, 14 aa, Homo sapiens
  CDR3 for alpha chain variable domain of TCR clone 32363 (TRAV9-2, TRAJ39)
CALYIYNAGNMLTF

SEQ ID NO: 64726 - protein, 16 aa, Homo sapiens
  CDR3 for beta chain variable domain of TCR clone 32363 (TRBV24-1, TRBJ2-3)
CATSDPGTGATDTQYF

SEQ ID NO: 64727 - protein, 15 aa, Homo sapiens
  CDR3 for alpha chain variable domain of TCR clone 32364 (TRAV12-2, TRAJ53)
RAVNGGGGSNYKLTF

SEQ ID NO: 64728 - protein, 15 aa, Homo sapiens
  CDR3 for beta chain variable domain of TCR clone 32364 (TRBV20-1, TRBJ2-7)
CSARDRVSGMDEQYF

SEQ ID NO: 64729 - protein, 12 aa, Homo sapiens
  CDR3 for alpha chain variable domain of TCR clone 32365 (TRAV13-1, TRAJ9)
RASHTGGFKTIF

SEQ ID NO: 64730 - protein, 13 aa, Homo sapiens
  CDR3 for beta chain variable domain of TCR clone 32365 (TRBV12-4, TRBJ1-2)
CASSSGSKDGYTF

SEQ ID NO: 64731 - protein, 11 aa, Homo sapiens
  CDR3 for alpha chain variable domain of TCR clone 32366 (TRAV21, TRAJ11)
CAVNGYSTLTF

SEQ ID NO: 64732 - protein, 11 aa, Homo sapiens
  CDR3 for beta chain variable domain of TCR clone 32366 (TRBV19, TRBJ1-1)
CASSIVSEAFF

SEQ ID NO: 64733 - protein, 14 aa, Homo sapiens
  CDR3 for alpha chain variable domain of TCR clone 32367 (TRAV13-1, TRAJ44)
CAAKATGTARKLTF

SEQ ID NO: 64734 - protein, 17 aa, Homo sapiens
  CDR3 for beta chain variable domain of TCR clone 32367 (TRBV7-3, TRBJ2-3)
CASSLMKRMRGADTQYF

SEQ ID NO: 64735 - protein, 15 aa, Homo sapiens
  CDR3 for alpha chain variable domain of TCR clone 32368 (TRAV4, TRAJ39)
CLVGPNNNACNMLTF

SEQ ID NO: 64736 - protein, 13 aa, Homo sapiens
  CDR3 for beta chain variable domain of TCR clone 32368 (TRBV11-2, TRBJ2-5)
CASSSTGEETQYF

SEQ ID NO: 64737 - protein, 12 aa, Homo sapiens
  CDR3 for alpha chain variable domain of TCR clone 32369 (TRAV21, TRAJ3)
CRFYSSASKIIF

SEQ ID NO: 64738 - protein, 16 aa, Homo sapiens
  CDR3 for beta chain variable domain of TCR clone 32369 (TRBV19, TRBJ2-1)
CASSKAGPSSYNEQFF

SEQ ID NO: 64739 - protein, 11 aa, Homo sapiens
  CDR3 for alpha chain variable domain of TCR clone 32370 (TRAV17, TRAJ9)
CATTGGFKTIF

SEQ ID NO: 64740 - protein, 14 aa, Homo sapiens
  CDR3 for beta chain variable domain of TCR clone 32370 (TRBV7-9, TRBJ2-2)
CASSGLADTGELFC

SEQ ID NO: 64741 - protein, 17 aa, Homo sapiens
  CDR3 for alpha chain variable domain of TCR clone 32371 (TRAV3, TRAJ42)
CAVRDREYGGSQGNLIF

SEQ ID NO: 64742 - protein, 12 aa, Homo sapiens
  CDR3 for beta chain variable domain of TCR clone 32371 (TRBV11-2, TRBJ2-1)
CASSPGNNEQFF

SEQ ID NO: 64743 - protein, 14 aa, Homo sapiens
  CDR3 for alpha chain variable domain of TCR clone 32372 (TRAV20, TRAJ56)
CAVQFGGANSKLTF

SEQ ID NO: 64744 - protein, 14 aa, Homo sapiens
  CDR3 for beta chain variable domain of TCR clone 32372 (TRBV20-1, TRBJ2-7)
CSAKRGSSSYEQYF

SEQ ID NO: 64745 - protein, 13 aa, Homo sapiens
  CDR3 for alpha chain variable domain of TCR clone 32373 (TRAV8-3, TRAJ36)
RAVGATGANNLFF

SEQ ID NO: 64746 - protein, 15 aa, Homo sapiens
  CDR3 for beta chain variable domain of TCR clone 32373 (TRBV7-2, TRBJ1-2)
CASSPRAGWNYGYTF

SEQ ID NO: 64747 - protein, 12 aa, Homo sapiens
  CDR3 for alpha chain variable domain of TCR clone 32374 (TRAV24, TRAJ37)
CASSSNTGKLIF

SEQ ID NO: 64748 - protein, 13 aa, Homo sapiens
  CDR3 for beta chain variable domain of TCR clone 32374 (TRBV7-7, TRBJ2-5)
CASSRSGQETQYF

SEQ ID NO: 64749 - protein, 11 aa, Homo sapiens
  CDR3 for alpha chain variable domain of TCR clone 32375 (TRAV12-3, TRAJ39)
YLSNAGNMLTF

SEQ ID NO: 64750 - protein, 13 aa, Homo sapiens
  CDR3 for beta chain variable domain of TCR clone 32375 (TRBV28, TRBJ1-2)
CASSPGSRNGYTF

SEQ ID NO: 64751 - protein, 21 aa, Homo sapiens
  CDR3 for alpha chain variable domain of TCR clone 32376 (TRAV8-4, TRAJ47)
HLTKPSAHMSDAAERGNKLVF

SEQ ID NO: 64752 - protein, 14 aa, Homo sapiens
  CDR3 for beta chain variable domain of TCR clone 32376 (TRBV7-9, TRBJ2-1)
CASSPRDSLYKQFF

SEQ ID NO: 64753 - protein, 14 aa, Homo sapiens
  CDR3 for alpha chain variable domain of TCR clone 32377 (TRAV17, TRAJ45)
CATDGRGGADGLTF

SEQ ID NO: 64754 - protein, 12 aa, Homo sapiens
  CDR3 for beta chain variable domain of TCR clone 32377 (TRBV11-2, TRBJ2-2)
CASSLGGGELFF

SEQ ID NO: 64755 - protein, 13 aa, Homo sapiens
  CDR3 for alpha chain variable domain of TCR clone 32378 (TRAV17, TRAJ26)
CATVDNHGQNFVF

SEQ ID NO: 64756 - protein, 16 aa, Homo sapiens
  CDR3 for beta chain variable domain of TCR clone 32378 (TRBV2, TRBJ2-1)
CASSVGGSLSYNEQFF

SEQ ID NO: 64757 - protein, 12 aa, Homo sapiens
  CDR3 for alpha chain variable domain of TCR clone 32379 (TRAV27, TRAJ34)
CAGAKNTDELIF

SEQ ID NO: 64758 - protein, 13 aa, Homo sapiens
  CDR3 for beta chain variable domain of TCR clone 32379 (TRBV4-1, TRBJ2-1)
CASSQEVQYEQFF

SEQ ID NO: 64759 - protein, 14 aa, Homo sapiens
  CDR3 for alpha chain variable domain of TCR clone 32380 (TRAV13-1, TRAJ13)
CAASRGGGYQKVTF

SEQ ID NO: 64760 - protein, 17 aa, Homo sapiens
  CDR3 for beta chain variable domain of TCR clone 32380 (TRBV15, TRBJ1-5)
CATSRAPPGTRNQPQHF

SEQ ID NO: 64761 - protein, 12 aa, Homo sapiens
  CDR3 for alpha chain variable domain of TCR clone 32381 (TRAV12-3, TRAJ17)
CAMTLTGNRLTF

SEQ ID NO: 64762 - protein, 12 aa, Homo sapiens
  CDR3 for beta chain variable domain of TCR clone 32381 (TRBV11-2, TRBJ2-7)
CASSLPTYEQYF

SEQ ID NO: 64763 - protein, 11 aa, Homo sapiens
  CDR3 for alpha chain variable domain of TCR clone 32382 (TRAV1-1, TRAJ23)
CAVRQGGKLIF

SEQ ID NO: 64764 - protein, 18 aa, Homo sapiens
  CDR3 for beta chain variable domain of TCR clone 32382 (TRBV11-2, TRBJ2-3)
CASSLGGASRGAPNTQYF

SEQ ID NO: 64765 - protein, 13 aa, Homo sapiens
  CDR3 for alpha chain variable domain of TCR clone 32383 (TRAV3, TRAJ27)
CAVRPLGAGKSTF

SEQ ID NO: 64766 - protein, 14 aa, Homo sapiens
  CDR3 for beta chain variable domain of TCR clone 32383 (TRBV7-3, TRBJ1-1)
CASSLKGGNTEAFF

SEQ ID NO: 64767 - protein, 16 aa, Homo sapiens
  CDR3 for alpha chain variable domain of TCR clone 32384 (TRAV35, TRAJ37)
CWAFLRGSSNTGKLIF

SEQ ID NO: 64768 - protein, 13 aa, Homo sapiens
  CDR3 for beta chain variable domain of TCR clone 32384 (TRBV2, TRBJ1-2)
CASSVRGNHGYTF

SEQ ID NO: 64769 - protein, 15 aa, Homo sapiens
  CDR3 for alpha chain variable domain of TCR clone 32385 (TRAV8-3, TRAJ15)
CAVGAPDQAGTALIF

SEQ ID NO: 64770 - protein, 14 aa, Homo sapiens
  CDR3 for beta chain variable domain of TCR clone 32385 (TRBV20-1, TRBJ2-1)
CSPNDEASYNEQFF

SEQ ID NO: 64771 - protein, 17 aa, Homo sapiens
  CDR3 for alpha chain variable domain of TCR clone 32386 (TRAV12-3, TRAJ6)
CAMSARGGAGGSYITTF

SEQ ID NO: 64772 - protein, 12 aa, Homo sapiens
  CDR3 for beta chain variable domain of TCR clone 32386 (TRBV12-4, TRBJ2-3)
CASSTLPDTQYF

SEQ ID NO: 64773 - protein, 12 aa, Homo sapiens
  CDR3 for alpha chain variable domain of TCR clone 32387 (TRAV12-3, TRAJ34)
CAMGYNTDKLIF

SEQ ID NO: 64774 - protein, 13 aa, Homo sapiens
  CDR3 for beta chain variable domain of TCR clone 32387 (TRBV10-3, TRBJ2-7)
CASKLAVNYEQYF

SEQ ID NO: 64775 - protein, 13 aa, Homo sapiens
  CDR3 for alpha chain variable domain of TCR clone 32388 (TRAV3, TRAJ21)
CAVREPDFNKFYF

SEQ ID NO: 64776 - protein, 13 aa, Homo sapiens
  CDR3 for beta chain variable domain of TCR clone 32388 (TRBV9, TRBJ2-1)
CARSPSGGNEQFF

SEQ ID NO: 64777 - protein, 14 aa, Homo sapiens
  CDR3 for alpha chain variable domain of TCR clone 32389 (TRAV23/DV6, TRAJ40)
CAARKNSGTYKYIF

SEQ ID NO: 64778 - protein, 14 aa, Homo sapiens
  CDR3 for beta chain variable domain of TCR clone 32389 (TRBV10-3, TRBJ2-5)
CAIGERDYQETQYF

SEQ ID NO: 64779 - protein, 13 aa, Homo sapiens
  CDR3 for alpha chain variable domain of TCR clone 32390 (TRAV35, TRAJ48)
CAGHEFGNEKLTF

SEQ ID NO: 64780 - protein, 13 aa, Homo sapiens
  CDR3 for beta chain variable domain of TCR clone 32390 (TRBV7-9, TRBJ1-2)
CASSLKQNYGYTF

SEQ ID NO: 64781 - protein, 16 aa, Homo sapiens
  CDR3 for alpha chain variable domain of TCR clone 32391 (TRAV30, TRAJ24)
CGTEIVDADSWGKFQF

SEQ ID NO: 64782 - protein, 14 aa, Homo sapiens
  CDR3 for beta chain variable domain of TCR clone 32391 (TRBV12-5, TRBJ2-5)
CASGSRTQQGTQYF

SEQ ID NO: 64783 - protein, 12 aa, Homo sapiens
  CDR3 for alpha chain variable domain of TCR clone 32392 (TRAV8-3, TRAJ26)
CAGDNYGQNFVF

SEQ ID NO: 64784 - protein, 15 aa, Homo sapiens
  CDR3 for beta chain variable domain of TCR clone 32392 (TRBV9, TRBJ2-1)
CASSPAGSSYNEQFF

SEQ ID NO: 64785 - protein, 14 aa, Homo sapiens
  CDR3 for alpha chain variable domain of TCR clone 32393 (TRAV14/DV4, TRAJ27)
CAMRGNTNAGKSTF

SEQ ID NO: 64786 - protein, 16 aa, Homo sapiens
  CDR3 for beta chain variable domain of TCR clone 32393 (TRBV9, TRBJ1-2)
CASSVEEKVSPYGYTF

SEQ ID NO: 64787 - protein, 12 aa, Homo sapiens
  CDR3 for alpha chain variable domain of TCR clone 32394 (TRAV12-3, TRAJ17)
CAMTLTGNKLTF

SEQ ID NO: 64788 - protein, 13 aa, Homo sapiens
  CDR3 for beta chain variable domain of TCR clone 32394 (TRBV10-2, TRBJ2-7)
CASGASGGYEQYF

SEQ ID NO: 64789 - protein, 14 aa, Homo sapiens
  CDR3 for alpha chain variable domain of TCR clone 32395 (TRAV1-2, TRAJ16)
CAVNRFSDGQKLLF

SEQ ID NO: 64790 - protein, 14 aa, Homo sapiens
  CDR3 for beta chain variable domain of TCR clone 32395 (TRBV27, TRBJ2-2)
CASRPGVNTGELFF

SEQ ID NO: 64791 - protein, 14 aa, Homo sapiens
  CDR3 for alpha chain variable domain of TCR clone 32396 (TRAV12-3, TRAJ10)
SHLPLTGGGNKLTF

SEQ ID NO: 64792 - protein, 17 aa, Homo sapiens
  CDR3 for beta chain variable domain of TCR clone 32396 (TRBV28, TRBJ2-5)
CASSTPEGDALQEAQYF

SEQ ID NO: 64793 - protein, 14 aa, Homo sapiens
  CDR3 for alpha chain variable domain of TCR clone 32397 (TRAV23/DV6, TRAJ13)
CAAMYSGGYQKVTF

SEQ ID NO: 64794 - protein, 15 aa, Homo sapiens
  CDR3 for beta chain variable domain of TCR clone 32397 (TRBV19, TRBJ2-1)
CASSSPGVPLDEQFF

SEQ ID NO: 64795 - protein, 11 aa, Homo sapiens
  CDR3 for alpha chain variable domain of TCR clone 32398 (TRAV26-1, TRAJ37)
CIVRVGRKLIF

SEQ ID NO: 64796 - protein, 16 aa, Homo sapiens
  CDR3 for beta chain variable domain of TCR clone 32398 (TRBV20-1, TRBJ1-4)
CSAPGQGLLTNEKLFF

SEQ ID NO: 64797 - protein, 15 aa, Homo sapiens
  CDR3 for alpha chain variable domain of TCR clone 32399 (TRAV38-1, TRAJ37)
CAFIHGSGNTGKLIF

SEQ ID NO: 64798 - protein, 12 aa, Homo sapiens
  CDR3 for beta chain variable domain of TCR clone 32399 (TRBV7-9, TRBJ2-7)
CASSFGRYEQYF

SEQ ID NO: 64799 - protein, 14 aa, Homo sapiens
  CDR3 for alpha chain variable domain of TCR clone 32400 (TRAV16, TRAJ57)
CALSGQGGSEKLVF

SEQ ID NO: 64800 - protein, 13 aa, Homo sapiens
  CDR3 for beta chain variable domain of TCR clone 32400 (TRBV5-4, TRBJ2-1)
CASSLQGPREQSF

SEQ ID NO: 64801 - protein, 21 aa, Homo sapiens
  CDR3 for alpha chain variable domain of TCR clone 32401 (TRAV8-4, TRAJ47)
HLTKPSAHMSDAAERGNKLVF

SEQ ID NO: 64802 - protein, 15 aa, Homo sapiens
  CDR3 for beta chain variable domain of TCR clone 32401 (TRBV7-8, TRBJ1-2)
CASSLVRDGGLGYTF

SEQ ID NO: 64803 - protein, 11 aa, Homo sapiens
  CDR3 for alpha chain variable domain of TCR clone 32402 (TRAV17, TRAJ9)
CPTTGGFKTIF

SEQ ID NO: 64804 - protein, 14 aa, Homo sapiens
  CDR3 for beta chain variable domain of TCR clone 32402 (TRBV7-9, TRBJ2-2)
CASSGLADTGELFF

SEQ ID NO: 64805 - protein, 13 aa, Homo sapiens
  CDR3 for alpha chain variable domain of TCR clone 32403 (TRAV20, TRAJ37)
CAGCSSNTGKLIF

SEQ ID NO: 64806 - protein, 14 aa, Homo sapiens
  CDR3 for beta chain variable domain of TCR clone 32403 (TRBV6-1, TRBJ1-3)
CASVQGGGGNTIYF

SEQ ID NO: 64807 - protein, 12 aa, Homo sapiens
  CDR3 for alpha chain variable domain of TCR clone 32404 (TRAV21, TRAJ11)
CAATSGYSTLTF

SEQ ID NO: 64808 - protein, 14 aa, Homo sapiens
  CDR3 for beta chain variable domain of TCR clone 32404 (TRBV19, TRBJ2-1)
CASPTFVLSGEQFF

SEQ ID NO: 64809 - protein, 14 aa, Homo sapiens
  CDR3 for alpha chain variable domain of TCR clone 32405 (TRAV26-1, TRAJ38)
CIADNAGNNRKLTW

SEQ ID NO: 64810 - protein, 20 aa, Homo sapiens
  CDR3 for beta chain variable domain of TCR clone 32405 (TRBV7-8, TRBJ2-2)
CASSHLFPGPTIHITGELFF

SEQ ID NO: 64811 - protein, 15 aa, Homo sapiens
  CDR3 for alpha chain variable domain of TCR clone 32406 (TRAV8-3, TRAJ11)
CAVGLLNSGYSTLTF

SEQ ID NO: 64812 - protein, 15 aa, Homo sapiens
  CDR3 for beta chain variable domain of TCR clone 32406 (TRBV12-4, TRBJ2-5)
CASSPPTGLQETQYF

SEQ ID NO: 64813 - protein, 14 aa, Homo sapiens
  CDR3 for alpha chain variable domain of TCR clone 32407 (TRAV16, TRAJ26)
FALSSANYGQNFVF

SEQ ID NO: 64814 - protein, 16 aa, Homo sapiens
  CDR3 for beta chain variable domain of TCR clone 32407 (TRBV20-1, TRBJ1-4)
CSAPGQGLLTNEKLFF

SEQ ID NO: 64815 - protein, 11 aa, Homo sapiens
  CDR3 for alpha chain variable domain of TCR clone 32408 (TRAV12-3, TRAJ27)
CAMANAGKSTF

SEQ ID NO: 64816 - protein, 12 aa, Homo sapiens
  CDR3 for beta chain variable domain of TCR clone 32408 (TRBV7-8, TRBJ2-7)
CASEGGPHGQYF

SEQ ID NO: 64817 - protein, 15 aa, Homo sapiens
  CDR3 for alpha chain variable domain of TCR clone 32409 (TRAV27, TRAJ38)
CAARRNAGNNRKRIW

SEQ ID NO: 64818 - protein, 13 aa, Homo sapiens
  CDR3 for beta chain variable domain of TCR clone 32409 (TRBV12-5, TRBJ2-3)
CASGDRQSDTQYF

SEQ ID NO: 64819 - protein, 12 aa, Homo sapiens
  CDR3 for alpha chain variable domain of TCR clone 32410 (TRAV1-1, TRAJ8)
CAGGTGFQKLVF

SEQ ID NO: 64820 - protein, 15 aa, Homo sapiens
  CDR3 for beta chain variable domain of TCR clone 32410 (TRBV7-9, TRBJ1-4)
CASSRTGDFNEKLFF

SEQ ID NO: 64821 - protein, 15 aa, Homo sapiens
  CDR3 for alpha chain variable domain of TCR clone 32411 (TRAV21, TRAJ24)
CAARSSTDSWGKLQF

SEQ ID NO: 64822 - protein, 13 aa, Homo sapiens
  CDR3 for beta chain variable domain of TCR clone 32411 (TRBV11-2, TRBJ2-5)
CASGSTGEETQYF

SEQ ID NO: 64823 - protein, 14 aa, Homo sapiens
  CDR3 for alpha chain variable domain of TCR clone 32412 (TRAV13-1, TRAJ32)
CAARGSGATNRLIF

SEQ ID NO: 64824 - protein, 15 aa, Homo sapiens
  CDR3 for beta chain variable domain of TCR clone 32412 (TRBV5-5, TRBJ1-1)
CASSLVGKDNTEAFF

SEQ ID NO: 64825 - protein, 11 aa, Homo sapiens
  CDR3 for alpha chain variable domain of TCR clone 32413 (TRAV13-2, TRAJ23)
CAESPRGKLIF

SEQ ID NO: 64826 - protein, 14 aa, Homo sapiens
  CDR3 for beta chain variable domain of TCR clone 32413 (TRBV12-5, TRBJ2-5)
CASGSRTHQETQYF

SEQ ID NO: 64827 - protein, 13 aa, Homo sapiens
  CDR3 for alpha chain variable domain of TCR clone 32414 (TRAV12-1, TRAJ17)
CVVNKAAGNKLTF

SEQ ID NO: 64828 - protein, 16 aa, Homo sapiens
  CDR3 for beta chain variable domain of TCR clone 32414 (TRBV11-2, TRBJ2-2)
CASSLRTGNLIGELLF

SEQ ID NO: 64829 - protein, 15 aa, Homo sapiens
  CDR3 for alpha chain variable domain of TCR clone 32415 (TRAV12-2, TRAJ53)
CAVNGGGGSNYRLTF

SEQ ID NO: 64830 - protein, 13 aa, Homo sapiens
  CDR3 for beta chain variable domain of TCR clone 32415 (TRBV3-1, TRBJ1-1)
RASSPGVITEAFF

SEQ ID NO: 64831 - protein, 17 aa, Homo sapiens
  CDR3 for alpha chain variable domain of TCR clone 32416 (TRAV17, TRAJ7)
CATLGRLAFGKGNQVVV

SEQ ID NO: 64832 - protein, 13 aa, Homo sapiens
  CDR3 for beta chain variable domain of TCR clone 32416 (TRBV12-4, TRBJ2-7)
CASSLERVREQYL

SEQ ID NO: 64833 - protein, 12 aa, Homo sapiens
  CDR3 for alpha chain variable domain of TCR clone 32417 (TRAV12-1, TRAJ40)
CVVYSGTYKYIF

SEQ ID NO: 64834 - protein, 17 aa, Homo sapiens
  CDR3 for beta chain variable domain of TCR clone 32417 (TRBV11-3, TRBJ1-5)
CASSPLTGLRGSQPQHF

SEQ ID NO: 64835 - protein, 15 aa, Homo sapiens
  CDR3 for alpha chain variable domain of TCR clone 32418 (TRAV8-3, TRAJ27)
CAVGPSKTNAGKPTF

SEQ ID NO: 64836 - protein, 15 aa, Homo sapiens
  CDR3 for beta chain variable domain of TCR clone 32418 (TRBV27, TRBJ2-1)
CASSNGGGSSNEQFF

SEQ ID NO: 64837 - protein, 12 aa, Homo sapiens
  CDR3 for alpha chain variable domain of TCR clone 32419 (TRAV12-3, TRAJ17)
CAMTLTGNKLTF

SEQ ID NO: 64838 - protein, 15 aa, Homo sapiens
  CDR3 for beta chain variable domain of TCR clone 32419 (TRBV7-9, TRBJ1-4)
CASSATGGNNEKLFF

SEQ ID NO: 64839 - protein, 14 aa, Homo sapiens
  CDR3 for alpha chain variable domain of TCR clone 32420 (TRAV35, TRAJ42)
CAGRYGGSQGNLIF

SEQ ID NO: 64840 - protein, 15 aa, Homo sapiens
  CDR3 for beta chain variable domain of TCR clone 32420 (TRBV7-9, TRBJ2-1)
CTSSLGWGRANEQFF

SEQ ID NO: 64841 - protein, 13 aa, Homo sapiens
  CDR3 for alpha chain variable domain of TCR clone 32421 (TRAV30, TRAJ24)
CGTVTDSWGKLQF

SEQ ID NO: 64842 - protein, 15 aa, Homo sapiens
  CDR3 for beta chain variable domain of TCR clone 32421 (TRBV19, TRBJ1-1)
CASTSGHIQNTEAFF

SEQ ID NO: 64843 - protein, 16 aa, Homo sapiens
  CDR3 for alpha chain variable domain of TCR clone 32422 (TRAV3, TRAJ10)
CAVRDMRAGGGNKLTS

SEQ ID NO: 64844 - protein, 19 aa, Homo sapiens
  CDR3 for beta chain variable domain of TCR clone 32422 (TRBV6-3, TRBJ1-2)
CASSYSKGRTGPPNYGYTF

SEQ ID NO: 64845 - protein, 11 aa, Homo sapiens
  CDR3 for alpha chain variable domain of TCR clone 32423 (TRAV2, TRAJ13)
CASGGYQKVTI

SEQ ID NO: 64846 - protein, 11 aa, Homo sapiens
  CDR3 for beta chain variable domain of TCR clone 32423 (TRBV29-1, TRBJ2-5)
CSEDRTGTQYF

SEQ ID NO: 64847 - protein, 12 aa, Homo sapiens
  CDR3 for alpha chain variable domain of TCR clone 32424 (TRAV8-1, TRAJ26)
CAVNNYSQNFVF

SEQ ID NO: 64848 - protein, 14 aa, Homo sapiens
  CDR3 for beta chain variable domain of TCR clone 32424 (TRBV19, TRBJ1-5)
CASRAPDSFLSQHF

SEQ ID NO: 64849 - protein, 14 aa, Homo sapiens
  CDR3 for alpha chain variable domain of TCR clone 32425 (TRAV20, TRAJ10)
CAVRAEGGGNKLTF

SEQ ID NO: 64850 - protein, 18 aa, Homo sapiens
  CDR3 for beta chain variable domain of TCR clone 32425 (TRBV24-1, TRBJ2-1)
CATSDLMFLGRGVHEQFF

SEQ ID NO: 64851 - protein, 12 aa, Homo sapiens
  CDR3 for alpha chain variable domain of TCR clone 32426 (TRAV13-1, TRAJ26)
CAASLYGQNFVF

SEQ ID NO: 64852 - protein, 14 aa, Homo sapiens
  CDR3 for beta chain variable domain of TCR clone 32426 (TRBV27, TRBJ2-1)
CASSWGQGGNEQFF

SEQ ID NO: 64853 - protein, 13 aa, Homo sapiens
  CDR3 for alpha chain variable domain of TCR clone 32427 (TRAV9-2, TRAJ53)
RALSGGSNYKLTF

SEQ ID NO: 64854 - protein, 17 aa, Homo sapiens
  CDR3 for beta chain variable domain of TCR clone 32427 (TRBV11-2, TRBJ2-1)
CASSLYPPGVEYNEQFF

SEQ ID NO: 64855 - protein, 20 aa, Homo sapiens
  CDR3 for alpha chain variable domain of TCR clone 32428 (TRAV26-1, TRAJ42)
CCVLLHRQTYYGGSQGNLIF

SEQ ID NO: 64856 - protein, 16 aa, Homo sapiens
  CDR3 for beta chain variable domain of TCR clone 32428 (TRBV7-3, TRBJ2-2)
CASSLKRGTLFGELFF

SEQ ID NO: 64857 - protein, 11 aa, Homo sapiens
  CDR3 for alpha chain variable domain of TCR clone 32429 (TRAV1-2, TRAJ20)
CAVSNDYKLSF

SEQ ID NO: 64858 - protein, 16 aa, Homo sapiens
  CDR3 for beta chain variable domain of TCR clone 32429 (TRBV29-1, TRBJ2-6)
CSVEDITYSGANGLTF

SEQ ID NO: 64859 - protein, 12 aa, Homo sapiens
  CDR3 for alpha chain variable domain of TCR clone 32430 (TRAV1-2, TRAJ33)
CAALDSNYQLIW

SEQ ID NO: 64860 - protein, 17 aa, Homo sapiens
  CDR3 for beta chain variable domain of TCR clone 32430 (TRBV11-2, TRBJ2-1)
CASSLYPPGVEYNEQFF

SEQ ID NO: 64861 - protein, 15 aa, Homo sapiens
  CDR3 for alpha chain variable domain of TCR clone 32431 (TRAV12-3, TRAJ6)
CAMSATTGGSYIPTF

SEQ ID NO: 64862 - protein, 15 aa, Homo sapiens
  CDR3 for beta chain variable domain of TCR clone 32431 (TRBV5-1, TRBJ2-7)
CAGSLNGGPAREQYF

SEQ ID NO: 64863 - protein, 15 aa, Homo sapiens
  CDR3 for alpha chain variable domain of TCR clone 32432 (TRAV8-3, TRAJ11)
CAVGLLNSGYSTLTF

SEQ ID NO: 64864 - protein, 16 aa, Homo sapiens
  CDR3 for beta chain variable domain of TCR clone 32432 (TRBV19, TRBJ2-2)
CASSTARASNTGELFF

SEQ ID NO: 64865 - protein, 14 aa, Homo sapiens
  CDR3 for alpha chain variable domain of TCR clone 32433 (TRAV1-2, TRAJ16)
CAVNRFSDGQKLLF

SEQ ID NO: 64866 - protein, 12 aa, Homo sapiens
  CDR3 for beta chain variable domain of TCR clone 32433 (TRBV12-4, TRBJ1-5)
CQQSRQGSAQHF

SEQ ID NO: 64867 - protein, 12 aa, Homo sapiens
  CDR3 for alpha chain variable domain of TCR clone 32434 (TRAV36/DV7, TRAJ54)
CAVARGAQKLVF

SEQ ID NO: 64868 - protein, 14 aa, Homo sapiens
  CDR3 for beta chain variable domain of TCR clone 32434 (TRBV7-3, TRBJ1-1)
CASSLKGGNTEAFF

SEQ ID NO: 64869 - protein, 12 aa, Homo sapiens
  CDR3 for alpha chain variable domain of TCR clone 32435 (TRAV1-2, TRAJ29)
CAVPSGNTPLVF

SEQ ID NO: 64870 - protein, 12 aa, Homo sapiens
  CDR3 for beta chain variable domain of TCR clone 32435 (TRBV12-4, TRBJ2-7)
CASSLGGYEQYL

SEQ ID NO: 64871 - protein, 13 aa, Homo sapiens
  CDR3 for alpha chain variable domain of TCR clone 32436 (TRAV8-3, TRAJ43)
CAVGPDNNNDMRL

SEQ ID NO: 64872 - protein, 12 aa, Homo sapiens
  CDR3 for beta chain variable domain of TCR clone 32436 (TRBV7-2, TRBJ1-6)
CASSLSSSPLHF

SEQ ID NO: 64873 - protein, 11 aa, Homo sapiens
  CDR3 for alpha chain variable domain of TCR clone 32437 (TRAV26-1, TRAJ37)
CIVRVGRKLIF

SEQ ID NO: 64874 - protein, 12 aa, Homo sapiens
  CDR3 for beta chain variable domain of TCR clone 32437 (TRBV7-8, TRBJ2-7)
CASEGGPHGQYF

SEQ ID NO: 64875 - protein, 13 aa, Homo sapiens
  CDR3 for alpha chain variable domain of TCR clone 32438 (TRAV13-2, TRAJ48)
CAEMDFGNEKLTF

SEQ ID NO: 64876 - protein, 13 aa, Homo sapiens
  CDR3 for beta chain variable domain of TCR clone 32438 (TRBV13, TRBJ2-5)
CASSSEVGETQYF

SEQ ID NO: 64877 - protein, 13 aa, Homo sapiens
  CDR3 for alpha chain variable domain of TCR clone 32439 (TRAV12-3, TRAJ7)
CAMSAYGNNRLAF

SEQ ID NO: 64878 - protein, 14 aa, Homo sapiens
  CDR3 for beta chain variable domain of TCR clone 32439 (TRBV13, TRBJ2-5)
CASSLGPRGETQYF

SEQ ID NO: 64879 - protein, 12 aa, Homo sapiens
  CDR3 for alpha chain variable domain of TCR clone 32440 (TRAV12-3, TRAJ17)
CAMTLTGNKLTF

SEQ ID NO: 64880 - protein, 18 aa, Homo sapiens
  CDR3 for beta chain variable domain of TCR clone 32440 (TRBV7-6, TRBJ2-1)
CASSPRTSGMSSYNEQFF

SEQ ID NO: 64881 - protein, 14 aa, Homo sapiens
  CDR3 for alpha chain variable domain of TCR clone 32441 (TRAV12-2, TRAJ13)
CAVKKTGGYQKVTF

SEQ ID NO: 64882 - protein, 13 aa, Homo sapiens
  CDR3 for beta chain variable domain of TCR clone 32441 (TRBV25-1, TRBJ1-1)
CQHPPGGNTEAFF

SEQ ID NO: 64883 - protein, 14 aa, Homo sapiens
  CDR3 for alpha chain variable domain of TCR clone 32442 (TRAV12-1, TRAJ34)
CVVNLDYNTDKFIF

SEQ ID NO: 64884 - protein, 17 aa, Homo sapiens
  CDR3 for beta chain variable domain of TCR clone 32442 (TRBV20-1, TRBJ2-7)
CSAAGTSGGGSSYEQYF

SEQ ID NO: 64885 - protein, 13 aa, Homo sapiens
  CDR3 for alpha chain variable domain of TCR clone 32443 (TRAV8-4, TRAJ48)
CAVSLFGNEKLTF

SEQ ID NO: 64886 - protein, 15 aa, Homo sapiens
  CDR3 for beta chain variable domain of TCR clone 32443 (TRBV20-1, TRBJ2-7)
CSARGGLAESYEQYF

SEQ ID NO: 64887 - protein, 14 aa, Homo sapiens
  CDR3 for alpha chain variable domain of TCR clone 32444 (TRAV12-1, TRAJ29)
CVVNEGSGDTPLVF

SEQ ID NO: 64888 - protein, 13 aa, Homo sapiens
  CDR3 for beta chain variable domain of TCR clone 32444 (TRBV7-9, TRBJ2-3)
CASSPGSTDTQYF

SEQ ID NO: 64889 - protein, 14 aa, Homo sapiens
  CDR3 for alpha chain variable domain of TCR clone 32445 (TRAV8-3, TRAJ4)
CAVGAAGGYNKLIF

SEQ ID NO: 64890 - protein, 10 aa, Homo sapiens
  CDR3 for beta chain variable domain of TCR clone 32445 (TRBV7-3, TRBJ2-1)
DASSYNEQFF

SEQ ID NO: 64891 - protein, 13 aa, Homo sapiens
  CDR3 for alpha chain variable domain of TCR clone 32446 (TRAV17, TRAJ29)
CATGPSGNTSLVF

SEQ ID NO: 64892 - protein, 14 aa, Homo sapiens
  CDR3 for beta chain variable domain of TCR clone 32446 (TRBV2, TRBJ1-6)
CASEVSSYNSPLHF

SEQ ID NO: 64893 - protein, 16 aa, Homo sapiens
  CDR3 for alpha chain variable domain of TCR clone 32447 (TRAV30, TRAJ24)
CGTEIVDADSWGKFQF

SEQ ID NO: 64894 - protein, 14 aa, Homo sapiens
  CDR3 for beta chain variable domain of TCR clone 32447 (TRBV13, TRBJ2-1)
CASSPRPRHNEQFF

SEQ ID NO: 64895 - protein, 15 aa, Homo sapiens
  CDR3 for alpha chain variable domain of TCR clone 32448 (TRAV12-2, TRAJ53)
CAVNGGGGSSYKLTF

SEQ ID NO: 64896 - protein, 17 aa, Homo sapiens
  CDR3 for beta chain variable domain of TCR clone 32448 (TRBV7-3, TRBJ2-3)
CASSLMKRMRGADTQYF

SEQ ID NO: 64897 - protein, 18 aa, Homo sapiens
  CDR3 for alpha chain variable domain of TCR clone 32449 (TRAV21, TRAJ52)
CAVRPSPAGGTSHGKLTF

SEQ ID NO: 64898 - protein, 16 aa, Homo sapiens
  CDR3 for beta chain variable domain of TCR clone 32449 (TRBV7-3, TRBJ2-1)
CASSLEGYRSYNEQFF

SEQ ID NO: 64899 - protein, 15 aa, Homo sapiens
  CDR3 for alpha chain variable domain of TCR clone 32450 (TRAV2, TRAJ9)
CAVEDRGTGGFKTIF

SEQ ID NO: 64900 - protein, 16 aa, Homo sapiens
  CDR3 for beta chain variable domain of TCR clone 32450 (TRBV24-1, TRBJ2-3)
CATSDSGTGATDTQYF

SEQ ID NO: 64901 - protein, 11 aa, Homo sapiens
  CDR3 for alpha chain variable domain of TCR clone 32451 (TRAV21, TRAJ34)
CAHYNTDKLTF

SEQ ID NO: 64902 - protein, 13 aa, Homo sapiens
  CDR3 for beta chain variable domain of TCR clone 32451 (TRBV7-6, TRBJ1-2)
CASSLVADYGYTF

SEQ ID NO: 64903 - protein, 13 aa, Homo sapiens
  CDR3 for alpha chain variable domain of TCR clone 32452 (TRAV13-1, TRAJ6)
CAASSGGSYIPTF

SEQ ID NO: 64904 - protein, 15 aa, Homo sapiens
  CDR3 for beta chain variable domain of TCR clone 32452 (TRBV12-4, TRBJ2-5)
CASSPPTGLQETQYL

SEQ ID NO: 64905 - protein, 12 aa, Homo sapiens
  CDR3 for alpha chain variable domain of TCR clone 32453 (TRAV1-2, TRAJ9)
CAGCTGGFKTIF

SEQ ID NO: 64906 - protein, 15 aa, Homo sapiens
  CDR3 for beta chain variable domain of TCR clone 32453 (TRBV11-2, TRBJ2-1)
CASSPAGQSLNEQFF

SEQ ID NO: 64907 - protein, 14 aa, Homo sapiens
  CDR3 for alpha chain variable domain of TCR clone 32454 (TRAV12-2, TRAJ13)
CAMKKTGGYQKVTF

SEQ ID NO: 64908 - protein, 13 aa, Homo sapiens
  CDR3 for beta chain variable domain of TCR clone 32454 (TRBV10-3, TRBJ2-7)
CASKLAVNYEQYF

SEQ ID NO: 64909 - protein, 15 aa, Homo sapiens
  CDR3 for alpha chain variable domain of TCR clone 32455 (TRAV12-2, TRAJ53)
CAVNGGGGSNYKLTF

SEQ ID NO: 64910 - protein, 16 aa, Homo sapiens
  CDR3 for beta chain variable domain of TCR clone 32455 (TRBV19, TRBJ2-1)
CASSKAGPSSYNEQFF

SEQ ID NO: 64911 - protein, 10 aa, Homo sapiens
  CDR3 for alpha chain variable domain of TCR clone 32456 (TRAV12-3, TRAJ49)
CAMNNDQFYF

SEQ ID NO: 64912 - protein, 13 aa, Homo sapiens
  CDR3 for beta chain variable domain of TCR clone 32456 (TRBV12-4, TRBJ1-1)
CASSPGTGFEAFF

SEQ ID NO: 64913 - protein, 13 aa, Homo sapiens
  CDR3 for alpha chain variable domain of TCR clone 32457 (TRAV12-3, TRAJ9)
CAMRNTGGFKTIF

SEQ ID NO: 64914 - protein, 13 aa, Homo sapiens
  CDR3 for beta chain variable domain of TCR clone 32457 (TRBV7-9, TRBJ1-2)
CASSLKQNYGYTF

SEQ ID NO: 64915 - protein, 14 aa, Homo sapiens
  CDR3 for alpha chain variable domain of TCR clone 32458 (TRAV8-4, TRAJ13)
CAVTLSGGYQKVTF

SEQ ID NO: 64916 - protein, 14 aa, Homo sapiens
  CDR3 for beta chain variable domain of TCR clone 32458 (TRBV12-4, TRBJ1-1)
CASSLGTGGTEAFF

SEQ ID NO: 64917 - protein, 15 aa, Homo sapiens
  CDR3 for alpha chain variable domain of TCR clone 32459 (TRAV1-2, TRAJ28)
CAVQYSGAGSYQLTF

SEQ ID NO: 64918 - protein, 13 aa, Homo sapiens
  CDR3 for beta chain variable domain of TCR clone 32459 (TRBV20-1, TRBJ2-7)
CSATHTSGYEQSF

SEQ ID NO: 64919 - protein, 16 aa, Homo sapiens
  CDR3 for alpha chain variable domain of TCR clone 32460 (TRAV30, TRAJ24)
CGTEIVDADSWGKFQF

SEQ ID NO: 64920 - protein, 15 aa, Homo sapiens
  CDR3 for beta chain variable domain of TCR clone 32460 (TRBV5-1, TRBJ2-5)
CASSLGLGEIKTQYF

SEQ ID NO: 64921 - protein, 13 aa, Homo sapiens
  CDR3 for alpha chain variable domain of TCR clone 32461 (TRAV12-1, TRAJ26)
CVVRRNYGQNFVF

SEQ ID NO: 64922 - protein, 14 aa, Homo sapiens
  CDR3 for beta chain variable domain of TCR clone 32461 (TRBV6-3, TRBJ1-1)
CASRYTGESTEAFL

SEQ ID NO: 64923 - protein, 16 aa, Homo sapiens
  CDR3 for alpha chain variable domain of TCR clone 32462 (TRAV8-3, TRAJ13)
CAVGAYPSGGYQKVTF

SEQ ID NO: 64924 - protein, 14 aa, Homo sapiens
  CDR3 for beta chain variable domain of TCR clone 32462 (TRBV5-4, TRBJ1-1)
CASSLDSRRDEAFF

SEQ ID NO: 64925 - protein, 12 aa, Homo sapiens
  CDR3 for alpha chain variable domain of TCR clone 32463 (TRAV12-3, TRAJ17)
CAMTLTGNKLTF

SEQ ID NO: 64926 - protein, 15 aa, Homo sapiens
  CDR3 for beta chain variable domain of TCR clone 32463 (TRBV25-1, TRBJ1-4)
CASSKRIATNEKLFF

SEQ ID NO: 64927 - protein, 17 aa, Homo sapiens
  CDR3 for alpha chain variable domain of TCR clone 32464 (TRAV17, TRAJ52)
CATERPSGGTSYGKLTF

SEQ ID NO: 64928 - protein, 17 aa, Homo sapiens
  CDR3 for beta chain variable domain of TCR clone 32464 (TRBV13, TRBJ2-3)
CASSLSRVAGGRNTQYF

SEQ ID NO: 64929 - protein, 12 aa, Homo sapiens
  CDR3 for alpha chain variable domain of TCR clone 32465 (TRAV38-1, TRAJ20)
CAFIWNDYRLSF

SEQ ID NO: 64930 - protein, 14 aa, Homo sapiens
  CDR3 for beta chain variable domain of TCR clone 32465 (TRBV19, TRBJ2-1)
CASSMGSGATEQFF

SEQ ID NO: 64931 - protein, 14 aa, Homo sapiens
  CDR3 for alpha chain variable domain of TCR clone 32466 (TRAV1-2, TRAJ8)
CAVREDTGFQKLVF

SEQ ID NO: 64932 - protein, 12 aa, Homo sapiens
  CDR3 for beta chain variable domain of TCR clone 32466 (TRBV11-3, TRBJ2-2)
CASSLGGGELFF

SEQ ID NO: 64933 - protein, 13 aa, Homo sapiens
  CDR3 for alpha chain variable domain of TCR clone 32467 (TRAV12-3, TRAJ43)
CAMIRPDNNDMRF

SEQ ID NO: 64934 - protein, 12 aa, Homo sapiens
  CDR3 for beta chain variable domain of TCR clone 32467 (TRBV11-2, TRBJ2-5)
CASSLGQETQYF

SEQ ID NO: 64935 - protein, 13 aa, Homo sapiens
  CDR3 for alpha chain variable domain of TCR clone 32468 (TRAV17, TRAJ26)
CATVDNYGQNFVF

SEQ ID NO: 64936 - protein, 16 aa, Homo sapiens
  CDR3 for beta chain variable domain of TCR clone 32468 (TRBV2, TRBJ2-1)
CASSVEGSLSYNEQFF

SEQ ID NO: 64937 - protein, 14 aa, Homo sapiens
  CDR3 for alpha chain variable domain of TCR clone 32469 (TRAV38-1, TRAJ40)
CALRPTSGTYKYIF

SEQ ID NO: 64938 - protein, 13 aa, Homo sapiens
  CDR3 for beta chain variable domain of TCR clone 32469 (TRBV12-4, TRBJ1-1)
CASSPGTGFEAFF

SEQ ID NO: 64939 - protein, 15 aa, Homo sapiens
  CDR3 for alpha chain variable domain of TCR clone 32470 (TRAV3, TRAJ29)
CAVRDINSGNTPLVF

SEQ ID NO: 64940 - protein, 16 aa, Homo sapiens
  CDR3 for beta chain variable domain of TCR clone 32470 (TRBV4-1, TRBJ2-5)
CASSLTFYGDQETQYF

SEQ ID NO: 64941 - protein, 12 aa, Homo sapiens
  CDR3 for alpha chain variable domain of TCR clone 32471 (TRAV12-3, TRAJ17)
CAMTLIGNKLTF

SEQ ID NO: 64942 - protein, 14 aa, Homo sapiens
  CDR3 for beta chain variable domain of TCR clone 32471 (TRBV18, TRBJ2-7)
CASSPRGGAYEQYF

SEQ ID NO: 64943 - protein, 12 aa, Homo sapiens
  CDR3 for alpha chain variable domain of TCR clone 32472 (TRAV13-1, TRAJ21)
CAAKEGFNKFYF

SEQ ID NO: 64944 - protein, 19 aa, Homo sapiens
  CDR3 for beta chain variable domain of TCR clone 32472 (TRBV2, TRBJ2-7)
CVSSDDETSGRANDYEQYF

SEQ ID NO: 64945 - protein, 14 aa, Homo sapiens
  CDR3 for alpha chain variable domain of TCR clone 32473 (TRAV12-3, TRAJ10)
SHLPLTGGGNKLTF

SEQ ID NO: 64946 - protein, 15 aa, Homo sapiens
  CDR3 for beta chain variable domain of TCR clone 32473 (TRBV7-3, TRBJ2-2)
CAGSETGQGTGELFF

SEQ ID NO: 64947 - protein, 12 aa, Homo sapiens
  CDR3 for alpha chain variable domain of TCR clone 32474 (TRAV13-1, TRAJ9)
CASHTGGFKTIF

SEQ ID NO: 64948 - protein, 18 aa, Homo sapiens
  CDR3 for beta chain variable domain of TCR clone 32474 (TRBV11-2, TRBJ2-3)
CASSVGGASRGAPNTQYF

SEQ ID NO: 64949 - protein, 16 aa, Homo sapiens
  CDR3 for alpha chain variable domain of TCR clone 32475 (TRAV16, TRAJ42)
CALSGLLGGSQGNLIF

SEQ ID NO: 64950 - protein, 15 aa, Homo sapiens
  CDR3 for beta chain variable domain of TCR clone 32475 (TRBV5-1, TRBJ2-1)
GASSPGGLAGNEQFF

SEQ ID NO: 64951 - protein, 16 aa, Homo sapiens
  CDR3 for alpha chain variable domain of TCR clone 32476 (TRAV17, TRAJ52)
CATSNAGGTSYGKLTF

SEQ ID NO: 64952 - protein, 14 aa, Homo sapiens
  CDR3 for beta chain variable domain of TCR clone 32476 (TRBV6-1, TRBJ1-3)
CASVQGGGGNTIYF

SEQ ID NO: 64953 - protein, 10 aa, Homo sapiens
  CDR3 for alpha chain variable domain of TCR clone 32477 (TRAV26-1, TRAJ40)
CIAGTYKYIF

SEQ ID NO: 64954 - protein, 16 aa, Homo sapiens
  CDR3 for beta chain variable domain of TCR clone 32477 (TRBV7-6, TRBJ2-3)
CASSPLAGGSTDTQYF

SEQ ID NO: 64955 - protein, 11 aa, Homo sapiens
  CDR3 for alpha chain variable domain of TCR clone 32478 (TRAV4, TRAJ31)
CLAGDNARLMF

SEQ ID NO: 64956 - protein, 16 aa, Homo sapiens
  CDR3 for beta chain variable domain of TCR clone 32478 (TRBV7-2, TRBJ2-5)
CASSSKWLSGQETQYF

SEQ ID NO: 64957 - protein, 15 aa, Homo sapiens
  CDR3 for alpha chain variable domain of TCR clone 32479 (TRAV26-1, TRAJ38)
CIADNAGNNHIQNPD

SEQ ID NO: 64958 - protein, 13 aa, Homo sapiens
  CDR3 for beta chain variable domain of TCR clone 32479 (TRBV20-1, TRBJ1-1)
CSARGGGNTEAFF

SEQ ID NO: 64959 - protein, 14 aa, Homo sapiens
  CDR3 for alpha chain variable domain of TCR clone 32480 (TRAV1-2, TRAJ16)
CAVNRFSDGQKLLF

SEQ ID NO: 64960 - protein, 17 aa, Homo sapiens
  CDR3 for beta chain variable domain of TCR clone 32480 (TRBV4-1, TRBJ2-7)
CASSRDPLGVRGGEQYF

SEQ ID NO: 64961 - protein, 16 aa, Homo sapiens
  CDR3 for alpha chain variable domain of TCR clone 32481 (TRAV3, TRAJ37)
CAVRGKGSGNTGRLIF

SEQ ID NO: 64962 - protein, 16 aa, Homo sapiens
  CDR3 for beta chain variable domain of TCR clone 32481 (TRBV12-5, TRBJ2-5)
CASGPRTSGSQETQYF

SEQ ID NO: 64963 - protein, 10 aa, Homo sapiens
  CDR3 for alpha chain variable domain of TCR clone 32482 (TRAV12-2, TRAJ41)
CAVTGCALNF

SEQ ID NO: 64964 - protein, 15 aa, Homo sapiens
  CDR3 for beta chain variable domain of TCR clone 32482 (TRBV4-2, TRBJ2-1)
CASSQDVGLAGEQFF

SEQ ID NO: 64965 - protein, 14 aa, Homo sapiens
  CDR3 for alpha chain variable domain of TCR clone 32483 (TRAV2, TRAJ23)
CAVGLQNQGGKLIF

SEQ ID NO: 64966 - protein, 13 aa, Homo sapiens
  CDR3 for beta chain variable domain of TCR clone 32483 (TRBV12-4, TRBJ2-5)
CASSPGTEETQYF

SEQ ID NO: 64967 - protein, 13 aa, Homo sapiens
  CDR3 for alpha chain variable domain of TCR clone 32484 (TRAV8-3, TRAJ43)
CAVVPYNNNDMRF

SEQ ID NO: 64968 - protein, 15 aa, Homo sapiens
  CDR3 for beta chain variable domain of TCR clone 32484 (TRBV6-5, TRBJ1-2)
CASSYSQAFNYGYTF

SEQ ID NO: 64969 - protein, 13 aa, Homo sapiens
  CDR3 for alpha chain variable domain of TCR clone 32485 (TRAV24, TRAJ43)
CAFTRHNNNDMRF

SEQ ID NO: 64970 - protein, 13 aa, Homo sapiens
  CDR3 for beta chain variable domain of TCR clone 32485 (TRBV2, TRBJ1-1)
CASSVLMNTGAFF

SEQ ID NO: 64971 - protein, 12 aa, Homo sapiens
  CDR3 for alpha chain variable domain of TCR clone 32486 (TRAV2, TRAJ5)
CALDTSRRALTF

SEQ ID NO: 64972 - protein, 15 aa, Homo sapiens
  CDR3 for beta chain variable domain of TCR clone 32486 (TRBV10-3, TRBJ2-1)
CAISDVQDRAYEQFF

SEQ ID NO: 64973 - protein, 17 aa, Homo sapiens
  CDR3 for alpha chain variable domain of TCR clone 32487 (TRAV8-6, TRAJ8)
CAVKEGIENTGFQKFVF

SEQ ID NO: 64974 - protein, 12 aa, Homo sapiens
  CDR3 for beta chain variable domain of TCR clone 32487 (TRBV19, TRBJ1-4)
CASKDWPGGLFF

SEQ ID NO: 64975 - protein, 11 aa, Homo sapiens
  CDR3 for alpha chain variable domain of TCR clone 32488 (TRAV12-1, TRAJ37)
CVVNTPGKLIF

SEQ ID NO: 64976 - protein, 13 aa, Homo sapiens
  CDR3 for beta chain variable domain of TCR clone 32488 (TRBV12-4, TRBJ1-5)
CASSPDRAQTQHF

SEQ ID NO: 64977 - protein, 14 aa, Homo sapiens
  CDR3 for alpha chain variable domain of TCR clone 32489 (TRAV12-3, TRAJ12)
CASVRMDSSYKLIL

SEQ ID NO: 64978 - protein, 15 aa, Homo sapiens
  CDR3 for beta chain variable domain of TCR clone 32489 (TRBV27, TRBJ2-7)
CASSPPGQGTYEQYF

SEQ ID NO: 64979 - protein, 13 aa, Homo sapiens
  CDR3 for alpha chain variable domain of TCR clone 32490 (TRAV8-3, TRAJ48)
CAVVPFGNEKLTF

SEQ ID NO: 64980 - protein, 15 aa, Homo sapiens
  CDR3 for beta chain variable domain of TCR clone 32490 (TRBV11-2, TRBJ2-1)
CASSSPSPRYNEQFF

SEQ ID NO: 64981 - protein, 11 aa, Homo sapiens
  CDR3 for alpha chain variable domain of TCR clone 32491 (TRAV17, TRAJ9)
CGSTGGFKTIF

SEQ ID NO: 64982 - protein, 14 aa, Homo sapiens
  CDR3 for beta chain variable domain of TCR clone 32491 (TRBV7-9, TRBJ2-2)
CASSLVQDTGELFF

SEQ ID NO: 64983 - protein, 14 aa, Homo sapiens
  CDR3 for alpha chain variable domain of TCR clone 32492 (TRAV1-2, TRAJ29)
CAVRELTSAPPLVF

SEQ ID NO: 64984 - protein, 14 aa, Homo sapiens
  CDR3 for beta chain variable domain of TCR clone 32492 (TRBV3-1, TRBJ2-5)
CASSQGPDQETQYF

SEQ ID NO: 64985 - protein, 11 aa, Homo sapiens
  CDR3 for alpha chain variable domain of TCR clone 32493 (TRAV3, TRAJ17)
CAEAAGNKLTF

SEQ ID NO: 64986 - protein, 15 aa, Homo sapiens
  CDR3 for beta chain variable domain of TCR clone 32493 (TRBV12-4, TRBJ2-7)
CASSLGSGGPYGQYF

SEQ ID NO: 64987 - protein, 12 aa, Homo sapiens
  CDR3 for alpha chain variable domain of TCR clone 32494 (TRAV12-3, TRAJ20)
CAMVRGDHKLSF

SEQ ID NO: 64988 - protein, 12 aa, Homo sapiens
  CDR3 for beta chain variable domain of TCR clone 32494 (TRBV6-1, TRBJ2-7)
CASSDYSYEQYF

SEQ ID NO: 64989 - protein, 11 aa, Homo sapiens
  CDR3 for alpha chain variable domain of TCR clone 32495 (TRAV12-1, TRAJ30)
CVVNGQDKIIF

SEQ ID NO: 64990 - protein, 15 aa, Homo sapiens
  CDR3 for beta chain variable domain of TCR clone 32495 (TRBV28, TRBJ2-5)
CASSSGRTIQETQCF

SEQ ID NO: 64991 - protein, 13 aa, Homo sapiens
  CDR3 for alpha chain variable domain of TCR clone 32496 (TRAV17, TRAJ26)
CATVDNYGQNFVF

SEQ ID NO: 64992 - protein, 16 aa, Homo sapiens
  CDR3 for beta chain variable domain of TCR clone 32496 (TRBV2, TRBJ2-1)
CASSVGGSLPYNEQFF

SEQ ID NO: 64993 - protein, 13 aa, Homo sapiens
  CDR3 for alpha chain variable domain of TCR clone 32497 (TRAV13-1, TRAJ5)
CASSDTGRRALTF

SEQ ID NO: 64994 - protein, 12 aa, Homo sapiens
  CDR3 for beta chain variable domain of TCR clone 32497 (TRBV28, TRBJ2-3)
CASSLYRDTQYF

SEQ ID NO: 64995 - protein, 14 aa, Homo sapiens
  CDR3 for alpha chain variable domain of TCR clone 32498 (TRAV8-3, TRAJ35)
CAVVPQGFGNVPHC

SEQ ID NO: 64996 - protein, 15 aa, Homo sapiens
  CDR3 for beta chain variable domain of TCR clone 32498 (TRBV6-1, TRBJ2-2)
CASSAGQGYTGELFF

SEQ ID NO: 64997 - protein, 13 aa, Homo sapiens
  CDR3 for alpha chain variable domain of TCR clone 32499 (TRAV2, TRAJ40)
CAVVTSGTYKYIF

SEQ ID NO: 64998 - protein, 16 aa, Homo sapiens
  CDR3 for beta chain variable domain of TCR clone 32499 (TRBV7-9, TRBJ2-1)
CASSDVAGGSYNEQFF

SEQ ID NO: 64999 - protein, 10 aa, Homo sapiens
  CDR3 for alpha chain variable domain of TCR clone 32500 (TRAV36/DV7, TRAJ48)
CAAGNEKLTF

SEQ ID NO: 65000 - protein, 12 aa, Homo sapiens
  CDR3 for beta chain variable domain of TCR clone 32500 (TRBV20-1, TRBJ2-5)
CSAGGAGETQYF

SEQ ID NO: 65001 - protein, 14 aa, Homo sapiens
  CDR3 for alpha chain variable domain of TCR clone 32501 (TRAV38-1, TRAJ45)
CAYYSGGGADGLTF

SEQ ID NO: 65002 - protein, 20 aa, Homo sapiens
  CDR3 for beta chain variable domain of TCR clone 32501 (TRBV28, TRBJ2-1)
YASTPIGRSPGLAGGNEQFF

SEQ ID NO: 65003 - protein, 14 aa, Homo sapiens
  CDR3 for alpha chain variable domain of TCR clone 32502 (TRAV17, TRAJ5)
CATVALMGRRALTF

SEQ ID NO: 65004 - protein, 14 aa, Homo sapiens
  CDR3 for beta chain variable domain of TCR clone 32502 (TRBV28, TRBJ2-7)
CASSPYGMAYEQYF

SEQ ID NO: 65005 - protein, 13 aa, Homo sapiens
  CDR3 for alpha chain variable domain of TCR clone 32503 (TRAV2, TRAJ40)
CAVVTSGTYKYIF

SEQ ID NO: 65006 - protein, 15 aa, Homo sapiens
  CDR3 for beta chain variable domain of TCR clone 32503 (TRBV11-3, TRBJ2-3)
CASLKDGREGHTQYF

SEQ ID NO: 65007 - protein, 17 aa, Homo sapiens
  CDR3 for alpha chain variable domain of TCR clone 32504 (TRAV13-2, TRAJ31)
CAGNARLMFGDGTQLVV

SEQ ID NO: 65008 - protein, 14 aa, Homo sapiens
  CDR3 for beta chain variable domain of TCR clone 32504 (TRBV7-9, TRBJ2-1)
CASSLGVADNEQFF

SEQ ID NO: 65009 - protein, 13 aa, Homo sapiens
  CDR3 for alpha chain variable domain of TCR clone 32505 (TRAV23/DV6, TRAJ58)
CAARLIRGSRLTF

SEQ ID NO: 65010 - protein, 13 aa, Homo sapiens
  CDR3 for beta chain variable domain of TCR clone 32505 (TRBV2, TRBJ1-6)
CTDSGSYNSPLHF

SEQ ID NO: 65011 - protein, 13 aa, Homo sapiens
  CDR3 for alpha chain variable domain of TCR clone 32506 (TRAV12-2, TRAJ39)
CAVNNNAGNMLTL

SEQ ID NO: 65012 - protein, 13 aa, Homo sapiens
  CDR3 for beta chain variable domain of TCR clone 32506 (TRBV2, TRBJ1-5)
CATAGPGNQPQHF

SEQ ID NO: 65013 - protein, 11 aa, Homo sapiens
  CDR3 for alpha chain variable domain of TCR clone 32507 (TRAV1-2, TRAJ31)
CAVNHNARLMF

SEQ ID NO: 65014 - protein, 15 aa, Homo sapiens
  CDR3 for beta chain variable domain of TCR clone 32507 (TRBV28, TRBJ2-1)
CASSIIAGGRSEQFF

SEQ ID NO: 65015 - protein, 11 aa, Homo sapiens
  CDR3 for alpha chain variable domain of TCR clone 32508 (TRAV2, TRAJ13)
CASGGYQKVTF

SEQ ID NO: 65016 - protein, 16 aa, Homo sapiens
  CDR3 for beta chain variable domain of TCR clone 32508 (TRBV6-1, TRBJ2-5)
CASSETLDRVAETQYF

SEQ ID NO: 65017 - protein, 14 aa, Homo sapiens
  CDR3 for alpha chain variable domain of TCR clone 32509 (TRAV12-1, TRAJ17)
CVVNYKAAGNKLTF

SEQ ID NO: 65018 - protein, 17 aa, Homo sapiens
  CDR3 for beta chain variable domain of TCR clone 32509 (TRBV20-1, TRBJ2-1)
CSTSSSGLAGSYNEQFF

SEQ ID NO: 65019 - protein, 17 aa, Homo sapiens
  CDR3 for alpha chain variable domain of TCR clone 32510 (TRAV12-1, TRAJ42)
CVVMRMNYGGSQGNLIF

SEQ ID NO: 65020 - protein, 13 aa, Homo sapiens
  CDR3 for beta chain variable domain of TCR clone 32510 (TRBV7-2, TRBJ1-1)
CASSVARPAEAFF

SEQ ID NO: 65021 - protein, 12 aa, Homo sapiens
  CDR3 for alpha chain variable domain of TCR clone 32511 (TRAV12-1, TRAJ40)
CVVYSGTYKYIF

SEQ ID NO: 65022 - protein, 18 aa, Homo sapiens
  CDR3 for beta chain variable domain of TCR clone 32511 (TRBV11-2, TRBJ2-3)
CASSLGGASRGAPDTQYF

SEQ ID NO: 65023 - protein, 15 aa, Homo sapiens
  CDR3 for alpha chain variable domain of TCR clone 32512 (TRAV26-2, TRAJ45)
CILRDRVDQEEVLTA

SEQ ID NO: 65024 - protein, 15 aa, Homo sapiens
  CDR3 for beta chain variable domain of TCR clone 32512 (TRBV7-6, TRBJ2-5)
CASSKPTGPQETQYF

SEQ ID NO: 65025 - protein, 13 aa, Homo sapiens
  CDR3 for alpha chain variable domain of TCR clone 32513 (TRAV12-2, TRAJ6)
CAVNVSRKLHTYI

SEQ ID NO: 65026 - protein, 15 aa, Homo sapiens
  CDR3 for beta chain variable domain of TCR clone 32513 (TRBV20-1, TRBJ2-7)
CSARDRVSGMDEQYF

SEQ ID NO: 65027 - protein, 16 aa, Homo sapiens
  CDR3 for alpha chain variable domain of TCR clone 32514 (TRAV17, TRAJ28)
CATDEYPGAGSYQLTF

SEQ ID NO: 65028 - protein, 13 aa, Homo sapiens
  CDR3 for beta chain variable domain of TCR clone 32514 (TRBV7-9, TRBJ1-2)
CASRTGPNYGYTF

SEQ ID NO: 65029 - protein, 16 aa, Homo sapiens
  CDR3 for alpha chain variable domain of TCR clone 32515 (TRAV3, TRAJ13)
CAVRDENSGGYQKVTF

SEQ ID NO: 65030 - protein, 12 aa, Homo sapiens
  CDR3 for beta chain variable domain of TCR clone 32515 (TRBV5-5, TRBJ2-5)
CASSYFGETQYF

SEQ ID NO: 65031 - protein, 18 aa, Homo sapiens
  CDR3 for alpha chain variable domain of TCR clone 32516 (TRAV26-1, TRAJ23)
CIVRVGLEVWNQGGKLIF

SEQ ID NO: 65032 - protein, 16 aa, Homo sapiens
  CDR3 for beta chain variable domain of TCR clone 32516 (TRBV12-4, TRBJ2-5)
CASSFCVRGRQETQYF

SEQ ID NO: 65033 - protein, 13 aa, Homo sapiens
  CDR3 for alpha chain variable domain of TCR clone 32517 (TRAV13-1, TRAJ37)
CAARSGNTGRLIF

SEQ ID NO: 65034 - protein, 14 aa, Homo sapiens
  CDR3 for beta chain variable domain of TCR clone 32517 (TRBV12-4, TRBJ2-3)
CASSLGQGTDTQYF

SEQ ID NO: 65035 - protein, 11 aa, Homo sapiens
  CDR3 for alpha chain variable domain of TCR clone 32518 (TRAV2, TRAJ13)
CASGGYQKVTF

SEQ ID NO: 65036 - protein, 16 aa, Homo sapiens
  CDR3 for beta chain variable domain of TCR clone 32518 (TRBV6-1, TRBJ2-5)
CASSETLDRGAESQYF

SEQ ID NO: 65037 - protein, 14 aa, Homo sapiens
  CDR3 for alpha chain variable domain of TCR clone 32519 (TRAV13-1, TRAJ40)
CAASMTSGTYKYIF

SEQ ID NO: 65038 - protein, 14 aa, Homo sapiens
  CDR3 for beta chain variable domain of TCR clone 32519 (TRBV7-2, TRBJ2-7)
CASSPKTSFYEQYF

SEQ ID NO: 65039 - protein, 17 aa, Homo sapiens
  CDR3 for alpha chain variable domain of TCR clone 32520 (TRAV3, TRAJ42)
CAVRDRDYGGSQGNLIF

SEQ ID NO: 65040 - protein, 15 aa, Homo sapiens
  CDR3 for beta chain variable domain of TCR clone 32520 (TRBV6-6, TRBJ2-7)
CASIYSYGGSYEQYF

SEQ ID NO: 65041 - protein, 15 aa, Homo sapiens
  CDR3 for alpha chain variable domain of TCR clone 32521 (TRAV2, TRAJ22)
CAVTSRGGSARQLTF

SEQ ID NO: 65042 - protein, 11 aa, Homo sapiens
  CDR3 for beta chain variable domain of TCR clone 32521 (TRBV27, TRBJ2-3)
CASSLGDTQYF

SEQ ID NO: 65043 - protein, 18 aa, Homo sapiens
  CDR3 for alpha chain variable domain of TCR clone 32522 (TRAV13-1, TRAJ52)
CAASKRSAGGTSYGKLSF

SEQ ID NO: 65044 - protein, 13 aa, Homo sapiens
  CDR3 for beta chain variable domain of TCR clone 32522 (TRBV12-4, TRBJ1-2)
CASSLRQGKGYTF

SEQ ID NO: 65045 - protein, 13 aa, Homo sapiens
  CDR3 for alpha chain variable domain of TCR clone 32523 (TRAV14/DV4, TRAJ20)
CAMRESSDYKLSF

SEQ ID NO: 65046 - protein, 15 aa, Homo sapiens
  CDR3 for beta chain variable domain of TCR clone 32523 (TRBV7-9, TRBJ1-1)
CASSRPGTANTEAFF

SEQ ID NO: 65047 - protein, 16 aa, Homo sapiens
  CDR3 for alpha chain variable domain of TCR clone 32524 (TRAV26-1, TRAJ37)
CIVRGDGSGNTGKLIF

SEQ ID NO: 65048 - protein, 17 aa, Homo sapiens
  CDR3 for beta chain variable domain of TCR clone 32524 (TRBV4-1, TRBJ2-7)
CASSRDPLGVRGGEQYS

SEQ ID NO: 65049 - protein, 12 aa, Homo sapiens
  CDR3 for alpha chain variable domain of TCR clone 32525 (TRAV27, TRAJ42)
CAGGGSQGNLIF

SEQ ID NO: 65050 - protein, 13 aa, Homo sapiens
  CDR3 for beta chain variable domain of TCR clone 32525 (TRBV19, TRBJ2-7)
CASSICSSYEQYF

SEQ ID NO: 65051 - protein, 11 aa, Homo sapiens
  CDR3 for alpha chain variable domain of TCR clone 32526 (TRAV35, TRAJ30)
RAGPGDDKIIF

SEQ ID NO: 65052 - protein, 14 aa, Homo sapiens
  CDR3 for beta chain variable domain of TCR clone 32526 (TRBV7-6, TRBJ1-6)
CASSQAGGGSPLHF

SEQ ID NO: 65053 - protein, 12 aa, Homo sapiens
  CDR3 for alpha chain variable domain of TCR clone 32527 (TRAV12-3, TRAJ17)
CAMTLTGNKLTF

SEQ ID NO: 65054 - protein, 15 aa, Homo sapiens
  CDR3 for beta chain variable domain of TCR clone 32527 (TRBV20-1, TRBJ2-7)
CSARDRGAGMDEQYF

SEQ ID NO: 65055 - protein, 14 aa, Homo sapiens
  CDR3 for alpha chain variable domain of TCR clone 32528 (TRAV3, TRAJ21)
CAVESQANLNKFYF

SEQ ID NO: 65056 - protein, 18 aa, Homo sapiens
  CDR3 for beta chain variable domain of TCR clone 32528 (TRBV7-9, TRBJ2-1)
CASSLAVSGTSGRNEQFF

SEQ ID NO: 65057 - protein, 18 aa, Homo sapiens
  CDR3 for alpha chain variable domain of TCR clone 32529 (TRAV26-1, TRAJ23)
CIVRVGLEVWNQGGKLVF

SEQ ID NO: 65058 - protein, 16 aa, Homo sapiens
  CDR3 for beta chain variable domain of TCR clone 32529 (TRBV12-4, TRBJ2-5)
CASSFFVRGRQETQYF

SEQ ID NO: 65059 - protein, 13 aa, Homo sapiens
  CDR3 for alpha chain variable domain of TCR clone 32530 (TRAV27, TRAJ49)
CAPHPYTGNQFYF

SEQ ID NO: 65060 - protein, 16 aa, Homo sapiens
  CDR3 for beta chain variable domain of TCR clone 32530 (TRBV4-1, TRBJ1-2)
CASSQDAGQVLYGYTF

SEQ ID NO: 65061 - protein, 23 aa, Homo sapiens
  CDR3 for alpha chain variable domain of TCR clone 32531 (TRAV3, TRAJ38)
CAVRDCLNAGNNHIQNPDPAVYQ

SEQ ID NO: 65062 - protein, 14 aa, Homo sapiens
  CDR3 for beta chain variable domain of TCR clone 32531 (TRBV5-5, TRBJ1-5)
CASSGQGVDQPQHF

SEQ ID NO: 65063 - protein, 16 aa, Homo sapiens
  CDR3 for alpha chain variable domain of TCR clone 32532 (TRAV12-2, TRAJ50)
CAVGTATKTSYDKVIF

SEQ ID NO: 65064 - protein, 12 aa, Homo sapiens
  CDR3 for beta chain variable domain of TCR clone 32532 (TRBV12-4, TRBJ1-5)
CASSLGRQTQHF

SEQ ID NO: 65065 - protein, 14 aa, Homo sapiens
  CDR3 for alpha chain variable domain of TCR clone 32533 (TRAV1-2, TRAJ16)
CAVNRFSDGQKLLF

SEQ ID NO: 65066 - protein, 15 aa, Homo sapiens
  CDR3 for beta chain variable domain of TCR clone 32533 (TRBV20-1, TRBJ2-7)
CSARDRVAGMDEQYF

SEQ ID NO: 65067 - protein, 19 aa, Homo sapiens
  CDR3 for alpha chain variable domain of TCR clone 32534 (TRAV2, TRAJ20)
ILQVREADAAVYRDCKLSF

SEQ ID NO: 65068 - protein, 13 aa, Homo sapiens
  CDR3 for beta chain variable domain of TCR clone 32534 (TRBV4-2, TRBJ1-1)
CASSQAGNTEAFF

SEQ ID NO: 65069 - protein, 12 aa, Homo sapiens
  CDR3 for alpha chain variable domain of TCR clone 32535 (TRAV27, TRAJ35)
CAGADLGNVLHC

SEQ ID NO: 65070 - protein, 16 aa, Homo sapiens
  CDR3 for beta chain variable domain of TCR clone 32535 (TRBV6-1, TRBJ2-1)
CASILRQGSSYNEQFF

SEQ ID NO: 65071 - protein, 18 aa, Homo sapiens
  CDR3 for alpha chain variable domain of TCR clone 32536 (TRAV9-2, TRAJ52)
CALSRHNAGGTSYGKLTF

SEQ ID NO: 65072 - protein, 12 aa, Homo sapiens
  CDR3 for beta chain variable domain of TCR clone 32536 (TRBV11-2, TRBJ2-2)
CASSLGGGELFF

SEQ ID NO: 65073 - protein, 19 aa, Homo sapiens
  CDR3 for alpha chain variable domain of TCR clone 32537 (TRAV3, TRAJ6)
CAVRDRNPSRSGGSYIPTF

SEQ ID NO: 65074 - protein, 15 aa, Homo sapiens
  CDR3 for beta chain variable domain of TCR clone 32537 (TRBV18, TRBJ2-7)
CAGSPTFMDSYEQYF

SEQ ID NO: 65075 - protein, 14 aa, Homo sapiens
  CDR3 for alpha chain variable domain of TCR clone 32538 (TRAV17, TRAJ54)
CATDANQGAQRLVF

SEQ ID NO: 65076 - protein, 12 aa, Homo sapiens
  CDR3 for beta chain variable domain of TCR clone 32538 (TRBV6-3, TRBJ2-1)
CASSGSYNEQFF

SEQ ID NO: 65077 - protein, 14 aa, Homo sapiens
  CDR3 for alpha chain variable domain of TCR clone 32539 (TRAV2, TRAJ22)
CAVGRGGSARQLTF

SEQ ID NO: 65078 - protein, 12 aa, Homo sapiens
  CDR3 for beta chain variable domain of TCR clone 32539 (TRBV19, TRBJ2-1)
RASSMQDTEQFF

SEQ ID NO: 65079 - protein, 13 aa, Homo sapiens
  CDR3 for alpha chain variable domain of TCR clone 32540 (TRAV12-3, TRAJ54)
CAMTLQGAQKLVF

SEQ ID NO: 65080 - protein, 14 aa, Homo sapiens
  CDR3 for beta chain variable domain of TCR clone 32540 (TRBV4-1, TRBJ2-2)
CASSQAVNTEELFF

SEQ ID NO: 65081 - protein, 15 aa, Homo sapiens
  CDR3 for alpha chain variable domain of TCR clone 32541 (TRAV8-3, TRAJ11)
CAVGLLNSEYSTLTF

SEQ ID NO: 65082 - protein, 16 aa, Homo sapiens
  CDR3 for beta chain variable domain of TCR clone 32541 (TRBV7-9, TRBJ1-2)
CASSLGFSSGEDGYTF

SEQ ID NO: 65083 - protein, 14 aa, Homo sapiens
  CDR3 for alpha chain variable domain of TCR clone 32542 (TRAV23/DV6, TRAJ4)
CAANLSGGSNKLIF

SEQ ID NO: 65084 - protein, 11 aa, Homo sapiens
  CDR3 for beta chain variable domain of TCR clone 32542 (TRBV7-9, TRBJ2-3)
CASSPTDTQYF

SEQ ID NO: 65085 - protein, 15 aa, Homo sapiens
  CDR3 for alpha chain variable domain of TCR clone 32543 (TRAV35, TRAJ50)
CAGQLRKTSYDKAIF

SEQ ID NO: 65086 - protein, 12 aa, Homo sapiens
  CDR3 for beta chain variable domain of TCR clone 32543 (TRBV5-1, TRBJ2-5)
CASSLGLETQYF

SEQ ID NO: 65087 - protein, 17 aa, Homo sapiens
  CDR3 for alpha chain variable domain of TCR clone 32544 (TRAV13-1, TRAJ52)
CAAGRNAGGTSYGKRTF

SEQ ID NO: 65088 - protein, 13 aa, Homo sapiens
  CDR3 for beta chain variable domain of TCR clone 32544 (TRBV7-2, TRBJ1-1)
CASNLKGAKVAFF

SEQ ID NO: 65089 - protein, 15 aa, Homo sapiens
  CDR3 for alpha chain variable domain of TCR clone 32545 (TRAV3, TRAJ22)
CAVRDRGGSARQMTF

SEQ ID NO: 65090 - protein, 14 aa, Homo sapiens
  CDR3 for beta chain variable domain of TCR clone 32545 (TRBV19, TRBJ1-5)
CASSLGLIGQPQHF

SEQ ID NO: 65091 - protein, 17 aa, Homo sapiens
  CDR3 for alpha chain variable domain of TCR clone 32546 (TRAV3, TRAJ6)
CAVRDGPKAGGSYIPTF

SEQ ID NO: 65092 - protein, 20 aa, Homo sapiens
  CDR3 for beta chain variable domain of TCR clone 32546 (TRBV28, TRBJ2-1)
CASTPIGRSPGLAGGNEQFF

SEQ ID NO: 65093 - protein, 11 aa, Homo sapiens
  CDR3 for alpha chain variable domain of TCR clone 32547 (TRAV23/DV6, TRAJ58)
CAARLLRGETS

SEQ ID NO: 65094 - protein, 13 aa, Homo sapiens
  CDR3 for beta chain variable domain of TCR clone 32547 (TRBV7-9, TRBJ1-2)
CASSLKQNYGYTF

SEQ ID NO: 65095 - protein, 14 aa, Homo sapiens
  CDR3 for alpha chain variable domain of TCR clone 32548 (TRAV26-1, TRAJ45)
CIEVTGGGADGLTF

SEQ ID NO: 65096 - protein, 13 aa, Homo sapiens
  CDR3 for beta chain variable domain of TCR clone 32548 (TRBV7-6, TRBJ1-2)
CASSLVADYGYTL

SEQ ID NO: 65097 - protein, 18 aa, Homo sapiens
  CDR3 for alpha chain variable domain of TCR clone 32549 (TRAV21, TRAJ52)
CAVRPSPADGTSYGKLTF

SEQ ID NO: 65098 - protein, 17 aa, Homo sapiens
  CDR3 for beta chain variable domain of TCR clone 32549 (TRBV25-1, TRBJ2-1)
CASSAYGQGRGVYEQFF

SEQ ID NO: 65099 - protein, 14 aa, Homo sapiens
  CDR3 for alpha chain variable domain of TCR clone 32550 (TRAV9-2, TRAJ39)
CALYIYNAGNMLTF

SEQ ID NO: 65100 - protein, 16 aa, Homo sapiens
  CDR3 for beta chain variable domain of TCR clone 32550 (TRBV9, TRBJ1-2)
CASSVEEKVSPYGYTF

SEQ ID NO: 65101 - protein, 15 aa, Homo sapiens
  CDR3 for alpha chain variable domain of TCR clone 32551 (TRAV12-1, TRAJ5)
CVVNMLETGRRALTF

SEQ ID NO: 65102 - protein, 12 aa, Homo sapiens
  CDR3 for beta chain variable domain of TCR clone 32551 (TRBV11-2, TRBJ2-2)
CARSLGGGELFF

SEQ ID NO: 65103 - protein, 16 aa, Homo sapiens
  CDR3 for alpha chain variable domain of TCR clone 32552 (TRAV12-1, TRAJ34)
CEVNPLETPTSSSLGL

SEQ ID NO: 65104 - protein, 20 aa, Homo sapiens
  CDR3 for beta chain variable domain of TCR clone 32552 (TRBV19, TRBJ2-1)
CASSISRTVTSTRLNNEQFF

SEQ ID NO: 65105 - protein, 12 aa, Homo sapiens
  CDR3 for alpha chain variable domain of TCR clone 32553 (TRAV13-2, TRAJ23)
CAERHRGGKLIF

SEQ ID NO: 65106 - protein, 15 aa, Homo sapiens
  CDR3 for beta chain variable domain of TCR clone 32553 (TRBV28, TRBJ2-1)
CASSIIAGGRSEQFF

SEQ ID NO: 65107 - protein, 16 aa, Homo sapiens
  CDR3 for alpha chain variable domain of TCR clone 32554 (TRAV30, TRAJ24)
CGTEIVDADSWGKFQF

SEQ ID NO: 65108 - protein, 15 aa, Homo sapiens
  CDR3 for beta chain variable domain of TCR clone 32554 (TRBV7-9, TRBJ1-4)
RASSARTGGNEKLFF

SEQ ID NO: 65109 - protein, 12 aa, Homo sapiens
  CDR3 for alpha chain variable domain of TCR clone 32555 (TRAV26-1, TRAJ43)
CIVRVYNNDMRF

SEQ ID NO: 65110 - protein, 14 aa, Homo sapiens
  CDR3 for beta chain variable domain of TCR clone 32555 (TRBV25-1, TRBJ1-4)
CASSYSGGQEELFF

SEQ ID NO: 65111 - protein, 14 aa, Homo sapiens
  CDR3 for alpha chain variable domain of TCR clone 32556 (TRAV1-2, TRAJ8)
CAVREDTGFQKPVF

SEQ ID NO: 65112 - protein, 15 aa, Homo sapiens
  CDR3 for beta chain variable domain of TCR clone 32556 (TRBV11-3, TRBJ2-3)
CASLKDGREGDTQYF

SEQ ID NO: 65113 - protein, 14 aa, Homo sapiens
  CDR3 for alpha chain variable domain of TCR clone 32557 (TRAV1-2, TRAJ13)
CAVKHSGGYQKVTF

SEQ ID NO: 65114 - protein, 12 aa, Homo sapiens
  CDR3 for beta chain variable domain of TCR clone 32557 (TRBV7-3, TRBJ2-5)
CASSAPGGTQYF

SEQ ID NO: 65115 - protein, 15 aa, Homo sapiens
  CDR3 for alpha chain variable domain of TCR clone 32558 (TRAV3, TRAJ13)
CAVIVYSGGYQKVTF

SEQ ID NO: 65116 - protein, 15 aa, Homo sapiens
  CDR3 for beta chain variable domain of TCR clone 32558 (TRBV5-7, TRBJ1-2)
CASSLGVAANYGYTF

SEQ ID NO: 65117 - protein, 15 aa, Homo sapiens
  CDR3 for alpha chain variable domain of TCR clone 32559 (TRAV3, TRAJ3)
CAVRDRDSSASKIIF

SEQ ID NO: 65118 - protein, 18 aa, Homo sapiens
  CDR3 for beta chain variable domain of TCR clone 32559 (TRBV25-1, TRBJ1-2)
CVSSGLQNGQGLIFGYTF

SEQ ID NO: 65119 - protein, 10 aa, Homo sapiens
  CDR3 for alpha chain variable domain of TCR clone 32560 (TRAV30, TRAJ48)
CGIGDEKLTF

SEQ ID NO: 65120 - protein, 14 aa, Homo sapiens
  CDR3 for beta chain variable domain of TCR clone 32560 (TRBV7-6, TRBJ2-3)
CASSVAGGTDTQYF

SEQ ID NO: 65121 - protein, 13 aa, Homo sapiens
  CDR3 for alpha chain variable domain of TCR clone 32561 (TRAV8-3, TRAJ28)
CAVGAVGSYQLTF

SEQ ID NO: 65122 - protein, 20 aa, Homo sapiens
  CDR3 for beta chain variable domain of TCR clone 32561 (TRBV7-8, TRBJ2-2)
CASSHLFPGPTIHITGELFF

SEQ ID NO: 65123 - protein, 18 aa, Homo sapiens
  CDR3 for alpha chain variable domain of TCR clone 32562 (TRAV13-1, TRAJ52)
CAASKRSAGGTSYGKLTF

SEQ ID NO: 65124 - protein, 13 aa, Homo sapiens
  CDR3 for beta chain variable domain of TCR clone 32562 (TRBV12-4, TRBJ1-2)
CASSLRQRKGYTF

SEQ ID NO: 65125 - protein, 15 aa, Homo sapiens
  CDR3 for alpha chain variable domain of TCR clone 32563 (TRAV3, TRAJ3)
CAVRDRDSSASKIIF

SEQ ID NO: 65126 - protein, 16 aa, Homo sapiens
  CDR3 for beta chain variable domain of TCR clone 32563 (TRBV6-1, TRBJ2-2)
CASSFGQGANTGELFF

SEQ ID NO: 65127 - protein, 15 aa, Homo sapiens
  CDR3 for alpha chain variable domain of TCR clone 32564 (TRAV23/DV6, TRAJ18)
CAARYRGSTLGRLYS

SEQ ID NO: 65128 - protein, 13 aa, Homo sapiens
  CDR3 for beta chain variable domain of TCR clone 32564 (TRBV7-2, TRBJ2-7)
CASSSPSGSEQYF

SEQ ID NO: 65129 - protein, 15 aa, Homo sapiens
  CDR3 for alpha chain variable domain of TCR clone 32565 (TRAV21, TRAJ53)
CATLNSGGSNYKLTF

SEQ ID NO: 65130 - protein, 15 aa, Homo sapiens
  CDR3 for beta chain variable domain of TCR clone 32565 (TRBV9, TRBJ2-1)
CQQRRWRGNYNEQFF

SEQ ID NO: 65131 - protein, 17 aa, Homo sapiens
  CDR3 for alpha chain variable domain of TCR clone 32566 (TRAV4, TRAJ18)
CLVGERPVGSTLGRLYF

SEQ ID NO: 65132 - protein, 18 aa, Homo sapiens
  CDR3 for beta chain variable domain of TCR clone 32566 (TRBV11-2, TRBJ2-3)
CASSLGGASRGAPNTQYF

SEQ ID NO: 65133 - protein, 13 aa, Homo sapiens
  CDR3 for alpha chain variable domain of TCR clone 32567 (TRAV16, TRAJ54)
CALMVQGAQKMVF

SEQ ID NO: 65134 - protein, 12 aa, Homo sapiens
  CDR3 for beta chain variable domain of TCR clone 32567 (TRBV18, TRBJ2-7)
CASSTAMGEQYF

SEQ ID NO: 65135 - protein, 10 aa, Homo sapiens
  CDR3 for alpha chain variable domain of TCR clone 32568 (TRAV16, TRAJ22)
SAMYLLQLTF

SEQ ID NO: 65136 - protein, 15 aa, Homo sapiens
  CDR3 for beta chain variable domain of TCR clone 32568 (TRBV7-9, TRBJ1-6)
CASSSPGRGNSPLHF

SEQ ID NO: 65137 - protein, 16 aa, Homo sapiens
  CDR3 for alpha chain variable domain of TCR clone 32569 (TRAV3, TRAJ37)
CAVRPHGPGNTGKLIF

SEQ ID NO: 65138 - protein, 16 aa, Homo sapiens
  CDR3 for beta chain variable domain of TCR clone 32569 (TRBV20-1, TRBJ1-4)
CSAPGQGLLTNEKLFF

SEQ ID NO: 65139 - protein, 16 aa, Homo sapiens
  CDR3 for alpha chain variable domain of TCR clone 32570 (TRAV20, TRAJ38)
CAVQASNAGNNRKLIW

SEQ ID NO: 65140 - protein, 16 aa, Homo sapiens
  CDR3 for beta chain variable domain of TCR clone 32570 (TRBV7-8, TRBJ2-6)
CASRVGDSSGANDLTF

SEQ ID NO: 65141 - protein, 11 aa, Homo sapiens
  CDR3 for alpha chain variable domain of TCR clone 32571 (TRAV3, TRAJ21)
CAVGNFNEFYF

SEQ ID NO: 65142 - protein, 12 aa, Homo sapiens
  CDR3 for beta chain variable domain of TCR clone 32571 (TRBV29-1, TRBJ2-3)
CSVTGGADTQYF

SEQ ID NO: 65143 - protein, 14 aa, Homo sapiens
  CDR3 for alpha chain variable domain of TCR clone 32572 (TRAV1-2, TRAJ16)
CAVNRFSDGQKLLF

SEQ ID NO: 65144 - protein, 15 aa, Homo sapiens
  CDR3 for beta chain variable domain of TCR clone 32572 (TRBV4-3, TRBJ1-1)
CASSQELGRGTEAFF

SEQ ID NO: 65145 - protein, 16 aa, Homo sapiens
  CDR3 for alpha chain variable domain of TCR clone 32573 (TRAV3, TRAJ21)
CAVRDRSASTNFTLDL

SEQ ID NO: 65146 - protein, 16 aa, Homo sapiens
  CDR3 for beta chain variable domain of TCR clone 32573 (TRBV7-8, TRBJ2-5)
CASSLESAGGRETQYF

SEQ ID NO: 65147 - protein, 11 aa, Homo sapiens
  CDR3 for alpha chain variable domain of TCR clone 32574 (TRAV3, TRAJ21)
CAVGNFNKFYF

SEQ ID NO: 65148 - protein, 11 aa, Homo sapiens
  CDR3 for beta chain variable domain of TCR clone 32574 (TRBV19, TRBJ1-1)
CASSIGSEAFF

SEQ ID NO: 65149 - protein, 12 aa, Homo sapiens
  CDR3 for alpha chain variable domain of TCR clone 32575 (TRAV1-1, TRAJ8)
CAGGTVFQKLVF

SEQ ID NO: 65150 - protein, 15 aa, Homo sapiens
  CDR3 for beta chain variable domain of TCR clone 32575 (TRBV7-9, TRBJ1-4)
CASSRTGGFNEKLFF

SEQ ID NO: 65151 - protein, 16 aa, Homo sapiens
  CDR3 for alpha chain variable domain of TCR clone 32576 (TRAV38-1, TRAJ37)
CAFKGDGSSNTGTLIF

SEQ ID NO: 65152 - protein, 13 aa, Homo sapiens
  CDR3 for beta chain variable domain of TCR clone 32576 (TRBV12-4, TRBJ2-5)
CASSLFRRETQYF

SEQ ID NO: 65153 - protein, 17 aa, Homo sapiens
  CDR3 for alpha chain variable domain of TCR clone 32577 (TRAV23/DV6, TRAJ57)
CAASSTLSKGGSEKLVF

SEQ ID NO: 65154 - protein, 14 aa, Homo sapiens
  CDR3 for beta chain variable domain of TCR clone 32577 (TRBV25-1, TRBJ1-1)
CASTHLGGNTEAFF

SEQ ID NO: 65155 - protein, 13 aa, Homo sapiens
  CDR3 for alpha chain variable domain of TCR clone 32578 (TRAV1-1, TRAJ9)
CAAKNTGGFKTIF

SEQ ID NO: 65156 - protein, 14 aa, Homo sapiens
  CDR3 for beta chain variable domain of TCR clone 32578 (TRBV20-1, TRBJ2-1)
CSAQIGGSAYEQFF

SEQ ID NO: 65157 - protein, 15 aa, Homo sapiens
  CDR3 for alpha chain variable domain of TCR clone 32579 (TRAV35, TRAJ40)
CAGQLGTSGTYKYIF

SEQ ID NO: 65158 - protein, 14 aa, Homo sapiens
  CDR3 for beta chain variable domain of TCR clone 32579 (TRBV7-3, TRBJ2-1)
CTSSLAGGTNEQFF

SEQ ID NO: 65159 - protein, 15 aa, Homo sapiens
  CDR3 for alpha chain variable domain of TCR clone 32580 (TRAV38-1, TRAJ37)
CAFIHGSGNTGKLIF

SEQ ID NO: 65160 - protein, 12 aa, Homo sapiens
  CDR3 for beta chain variable domain of TCR clone 32580 (TRBV7-9, TRBJ2-7)
CAGSFGSYEQYF

SEQ ID NO: 65161 - protein, 14 aa, Homo sapiens
  CDR3 for alpha chain variable domain of TCR clone 32581 (TRAV12-2, TRAJ17)
CAVLFKAAGNKLTF

SEQ ID NO: 65162 - protein, 15 aa, Homo sapiens
  CDR3 for beta chain variable domain of TCR clone 32581 (TRBV12-4, TRBJ2-5)
CASSPPTGLQETQYF

SEQ ID NO: 65163 - protein, 12 aa, Homo sapiens
  CDR3 for alpha chain variable domain of TCR clone 32582 (TRAV30, TRAJ43)
CGTEERCNDMRF

SEQ ID NO: 65164 - protein, 13 aa, Homo sapiens
  CDR3 for beta chain variable domain of TCR clone 32582 (TRBV27, TRBJ2-7)
CASSFSQGYEQYF

SEQ ID NO: 65165 - protein, 15 aa, Homo sapiens
  CDR3 for alpha chain variable domain of TCR clone 32583 (TRAV12-2, TRAJ53)
CAVNGGGGSNYKLTF

SEQ ID NO: 65166 - protein, 15 aa, Homo sapiens
  CDR3 for beta chain variable domain of TCR clone 32583 (TRBV5-1, TRBJ2-1)
CASSPPRAPYNEQFF

SEQ ID NO: 65167 - protein, 14 aa, Homo sapiens
  CDR3 for alpha chain variable domain of TCR clone 32584 (TRAV9-2, TRAJ39)
CALYIYNAGNMLTF

SEQ ID NO: 65168 - protein, 14 aa, Homo sapiens
  CDR3 for beta chain variable domain of TCR clone 32584 (TRBV6-1, TRBJ1-3)
CASVQWGGGNTIYF

SEQ ID NO: 65169 - protein, 18 aa, Homo sapiens
  CDR3 for alpha chain variable domain of TCR clone 32585 (TRAV13-1, TRAJ52)
CAASKRSAGGTIYGKLTF

SEQ ID NO: 65170 - protein, 13 aa, Homo sapiens
  CDR3 for beta chain variable domain of TCR clone 32585 (TRBV12-4, TRBJ1-2)
CASSLRQGKGYTF

SEQ ID NO: 65171 - protein, 18 aa, Homo sapiens
  CDR3 for alpha chain variable domain of TCR clone 32586 (TRAV12-3, TRAJ52)
YAMSVGGAGGTSYGKLTF

SEQ ID NO: 65172 - protein, 15 aa, Homo sapiens
  CDR3 for beta chain variable domain of TCR clone 32586 (TRBV27, TRBJ1-6)
CASSFDRGLGSPLHF

SEQ ID NO: 65173 - protein, 12 aa, Homo sapiens
  CDR3 for alpha chain variable domain of TCR clone 32587 (TRAV8-3, TRAJ20)
CAVGANDFKLSF

SEQ ID NO: 65174 - protein, 16 aa, Homo sapiens
  CDR3 for beta chain variable domain of TCR clone 32587 (TRBV19, TRBJ2-2)
CASRSPGTGATGELFF

SEQ ID NO: 65175 - protein, 15 aa, Homo sapiens
  CDR3 for alpha chain variable domain of TCR clone 32588 (TRAV8-3, TRAJ45)
CASSYSGGGADGLTF

SEQ ID NO: 65176 - protein, 13 aa, Homo sapiens
  CDR3 for beta chain variable domain of TCR clone 32588 (TRBV10-3, TRBJ2-7)
CASKLAVSYERYF

SEQ ID NO: 65177 - protein, 13 aa, Homo sapiens
  CDR3 for alpha chain variable domain of TCR clone 32589 (TRAV20, TRAJ37)
CAGCSSNTGKLIF

SEQ ID NO: 65178 - protein, 14 aa, Homo sapiens
  CDR3 for beta chain variable domain of TCR clone 32589 (TRBV19, TRBJ2-1)
CASEVTGARNEQFF

SEQ ID NO: 65179 - protein, 17 aa, Homo sapiens
  CDR3 for alpha chain variable domain of TCR clone 32590 (TRAV3, TRAJ6)
CAVRDGPRAGGSYIPTF

SEQ ID NO: 65180 - protein, 20 aa, Homo sapiens
  CDR3 for beta chain variable domain of TCR clone 32590 (TRBV28, TRBJ2-1)
CASTPSGRSPGLAGGNEQFF

SEQ ID NO: 65181 - protein, 13 aa, Homo sapiens
  CDR3 for alpha chain variable domain of TCR clone 32591 (TRAV3, TRAJ29)
CAVRDIIDTHLVF

SEQ ID NO: 65182 - protein, 14 aa, Homo sapiens
  CDR3 for beta chain variable domain of TCR clone 32591 (TRBV27, TRBJ2-1)
CASSATGGYNEQFF

SEQ ID NO: 65183 - protein, 12 aa, Homo sapiens
  CDR3 for alpha chain variable domain of TCR clone 32592 (TRAV13-1, TRAJ21)
CAAKEGFNKFYF

SEQ ID NO: 65184 - protein, 14 aa, Homo sapiens
  CDR3 for beta chain variable domain of TCR clone 32592 (TRBV18, TRBJ1-2)
CASSPDRVVYGYTF

SEQ ID NO: 65185 - protein, 13 aa, Homo sapiens
  CDR3 for alpha chain variable domain of TCR clone 32593 (TRAV2, TRAJ20)
CAVEDPSEYKLSF

SEQ ID NO: 65186 - protein, 16 aa, Homo sapiens
  CDR3 for beta chain variable domain of TCR clone 32593 (TRBV25-1, TRBJ2-7)
CTSSELTGGGIYEQYF

SEQ ID NO: 65187 - protein, 14 aa, Homo sapiens
  CDR3 for alpha chain variable domain of TCR clone 32594 (TRAV1-2, TRAJ8)
CAVREDTGFQKLVF

SEQ ID NO: 65188 - protein, 13 aa, Homo sapiens
  CDR3 for beta chain variable domain of TCR clone 32594 (TRBV2, TRBJ1-1)
CARNPSGGFHAFF

SEQ ID NO: 65189 - protein, 13 aa, Homo sapiens
  CDR3 for alpha chain variable domain of TCR clone 32595 (TRAV13-1, TRAJ39)
CSKYSNAGNMLTF

SEQ ID NO: 65190 - protein, 15 aa, Homo sapiens
  CDR3 for beta chain variable domain of TCR clone 32595 (TRBV11-3, TRBJ2-2)
CASSSDRVNAGELFF

SEQ ID NO: 65191 - protein, 11 aa, Homo sapiens
  CDR3 for alpha chain variable domain of TCR clone 32596 (TRAV3, TRAJ21)
CAVGNFNKFYF

SEQ ID NO: 65192 - protein, 16 aa, Homo sapiens
  CDR3 for beta chain variable domain of TCR clone 32596 (TRBV19, TRBJ2-1)
CGSSKAGPSSYNEQFF

SEQ ID NO: 65193 - protein, 13 aa, Homo sapiens
  CDR3 for alpha chain variable domain of TCR clone 32597 (TRAV12-3, TRAJ53)
CAMRGGSNYKLTF

SEQ ID NO: 65194 - protein, 15 aa, Homo sapiens
  CDR3 for beta chain variable domain of TCR clone 32597 (TRBV2, TRBJ2-1)
CAAQARLVMIGEQFF

SEQ ID NO: 65195 - protein, 18 aa, Homo sapiens
  CDR3 for alpha chain variable domain of TCR clone 32598 (TRAV26-2, TRAJ54)
CILRDVEVGIQGAQKLVF

SEQ ID NO: 65196 - protein, 14 aa, Homo sapiens
  CDR3 for beta chain variable domain of TCR clone 32598 (TRBV13, TRBJ2-7)
CASSLKGASYEQYF

SEQ ID NO: 65197 - protein, 14 aa, Homo sapiens
  CDR3 for alpha chain variable domain of TCR clone 32599 (TRAV23/DV6, TRAJ4)
CAAPSSGGYNKLIS

SEQ ID NO: 65198 - protein, 16 aa, Homo sapiens
  CDR3 for beta chain variable domain of TCR clone 32599 (TRBV19, TRBJ1-1)
CASRFGGPVTGTEAFF

SEQ ID NO: 65199 - protein, 15 aa, Homo sapiens
  CDR3 for alpha chain variable domain of TCR clone 32600 (TRAV17, TRAJ56)
CATDANTGANLKLTF

SEQ ID NO: 65200 - protein, 14 aa, Homo sapiens
  CDR3 for beta chain variable domain of TCR clone 32600 (TRBV19, TRBJ1-5)
CASSLGTGGQPQHF

SEQ ID NO: 65201 - protein, 15 aa, Homo sapiens
  CDR3 for alpha chain variable domain of TCR clone 32601 (TRAV3, TRAJ5)
CAVRDLDTGRRALTF

SEQ ID NO: 65202 - protein, 16 aa, Homo sapiens
  CDR3 for beta chain variable domain of TCR clone 32601 (TRBV2, TRBJ2-1)
CASSVGGSLSYNEQFF

SEQ ID NO: 65203 - protein, 16 aa, Homo sapiens
  CDR3 for alpha chain variable domain of TCR clone 32602 (TRAV12-3, TRAJ53)
CAMSPRSGGSNYKLTF

SEQ ID NO: 65204 - protein, 11 aa, Homo sapiens
  CDR3 for beta chain variable domain of TCR clone 32602 (TRBV29-1, TRBJ2-5)
CSEDRTGTQHF

SEQ ID NO: 65205 - protein, 14 aa, Homo sapiens
  CDR3 for alpha chain variable domain of TCR clone 32603 (TRAV13-1, TRAJ35)
CAASKGGFGNVLHC

SEQ ID NO: 65206 - protein, 15 aa, Homo sapiens
  CDR3 for beta chain variable domain of TCR clone 32603 (TRBV28, TRBJ2-1)
CASSGLAEVDNGQFF

SEQ ID NO: 65207 - protein, 16 aa, Homo sapiens
  CDR3 for alpha chain variable domain of TCR clone 32604 (TRAV27, TRAJ48)
TAAQPGDTGLYLPLAF

SEQ ID NO: 65208 - protein, 13 aa, Homo sapiens
  CDR3 for beta chain variable domain of TCR clone 32604 (TRBV7-2, TRBJ2-5)
CASSQTSVETQYF

SEQ ID NO: 65209 - protein, 15 aa, Homo sapiens
  CDR3 for alpha chain variable domain of TCR clone 32605 (TRAV12-1, TRAJ4)
CVVTPWMGGYNKLIF

SEQ ID NO: 65210 - protein, 14 aa, Homo sapiens
  CDR3 for beta chain variable domain of TCR clone 32605 (TRBV12-4, TRBJ2-5)
CASSLWQKQETQYF

SEQ ID NO: 65211 - protein, 14 aa, Homo sapiens
  CDR3 for alpha chain variable domain of TCR clone 32606 (TRAV1-2, TRAJ16)
CAVNRFSDGQKLLF

SEQ ID NO: 65212 - protein, 11 aa, Homo sapiens
  CDR3 for beta chain variable domain of TCR clone 32606 (TRBV29-1, TRBJ2-5)
CSEDRAGTQYF

SEQ ID NO: 65213 - protein, 13 aa, Homo sapiens
  CDR3 for alpha chain variable domain of TCR clone 32607 (TRAV1-2, TRAJ9)
CAALNTGGFKTIF

SEQ ID NO: 65214 - protein, 13 aa, Homo sapiens
  CDR3 for beta chain variable domain of TCR clone 32607 (TRBV19, TRBJ1-2)
CASSGPGQDGYTF

SEQ ID NO: 65215 - protein, 12 aa, Homo sapiens
  CDR3 for alpha chain variable domain of TCR clone 32608 (TRAV2, TRAJ33)
CAFMDSNYQLIW

SEQ ID NO: 65216 - protein, 16 aa, Homo sapiens
  CDR3 for beta chain variable domain of TCR clone 32608 (TRBV2, TRBJ2-7)
CASSGPWTGPSYEQYF

SEQ ID NO: 65217 - protein, 16 aa, Homo sapiens
  CDR3 for alpha chain variable domain of TCR clone 32609 (TRAV3, TRAJ13)
CAVRDPNSGGYQKVTF

SEQ ID NO: 65218 - protein, 13 aa, Homo sapiens
  CDR3 for beta chain variable domain of TCR clone 32609 (TRBV7-9, TRBJ2-7)
CASSLQGSYDQYF

SEQ ID NO: 65219 - protein, 12 aa, Homo sapiens
  CDR3 for alpha chain variable domain of TCR clone 32610 (TRAV27, TRAJ36)
ASTPAGAKNLFF

SEQ ID NO: 65220 - protein, 13 aa, Homo sapiens
  CDR3 for beta chain variable domain of TCR clone 32610 (TRBV7-9, TRBJ2-3)
CASSPGSTDTQYF

SEQ ID NO: 65221 - protein, 14 aa, Homo sapiens
  CDR3 for alpha chain variable domain of TCR clone 32611 (TRAV20, TRAJ56)
CAVQFAGANSKLTF

SEQ ID NO: 65222 - protein, 14 aa, Homo sapiens
  CDR3 for beta chain variable domain of TCR clone 32611 (TRBV20-1, TRBJ2-7)
CSAKRGRSSYEQYF

SEQ ID NO: 65223 - protein, 13 aa, Homo sapiens
  CDR3 for alpha chain variable domain of TCR clone 32612 (TRAV8-3, TRAJ20)
CAVGRPNDYKPSF

SEQ ID NO: 65224 - protein, 14 aa, Homo sapiens
  CDR3 for beta chain variable domain of TCR clone 32612 (TRBV12-5, TRBJ2-5)
CASGSRTHQETQYF

SEQ ID NO: 65225 - protein, 14 aa, Homo sapiens
  CDR3 for alpha chain variable domain of TCR clone 32613 (TRAV21, TRAJ53)
CRERGGGSNYKLTF

SEQ ID NO: 65226 - protein, 12 aa, Homo sapiens
  CDR3 for beta chain variable domain of TCR clone 32613 (TRBV11-2, TRBJ2-1)
CASSPGNNEQFF

SEQ ID NO: 65227 - protein, 16 aa, Homo sapiens
  CDR3 for alpha chain variable domain of TCR clone 32614 (TRAV3, TRAJ10)
CAVRDMRAGGGNKLTF

SEQ ID NO: 65228 - protein, 14 aa, Homo sapiens
  CDR3 for beta chain variable domain of TCR clone 32614 (TRBV4-2, TRBJ2-1)
CASGLDRAYNEQFF

SEQ ID NO: 65229 - protein, 16 aa, Homo sapiens
  CDR3 for alpha chain variable domain of TCR clone 32615 (TRAV30, TRAJ24)
CGTEIVDADSWGKFQS

SEQ ID NO: 65230 - protein, 16 aa, Homo sapiens
  CDR3 for beta chain variable domain of TCR clone 32615 (TRBV7-3, TRBJ2-2)
CASSLKRGTLSGELFF

SEQ ID NO: 65231 - protein, 13 aa, Homo sapiens
  CDR3 for alpha chain variable domain of TCR clone 32616 (TRAV12-3, TRAJ47)
CAMKKEYGNKLVF

SEQ ID NO: 65232 - protein, 16 aa, Homo sapiens
  CDR3 for beta chain variable domain of TCR clone 32616 (TRBV3-1, TRBJ2-6)
CASSLTWVSGANDLTF

SEQ ID NO: 65233 - protein, 13 aa, Homo sapiens
  CDR3 for alpha chain variable domain of TCR clone 32617 (TRAV13-2, TRAJ48)
CAEMDFGNEKLTF

SEQ ID NO: 65234 - protein, 13 aa, Homo sapiens
  CDR3 for beta chain variable domain of TCR clone 32617 (TRBV7-9, TRBJ1-2)
CARSLKQNYGYTF

SEQ ID NO: 65235 - protein, 15 aa, Homo sapiens
  CDR3 for alpha chain variable domain of TCR clone 32618 (TRAV17, TRAJ35)
CATAFVIGFGNVLHC

SEQ ID NO: 65236 - protein, 15 aa, Homo sapiens
  CDR3 for beta chain variable domain of TCR clone 32618 (TRBV7-9, TRBJ2-7)
CASSLALAEAYEQYL

SEQ ID NO: 65237 - protein, 14 aa, Homo sapiens
  CDR3 for alpha chain variable domain of TCR clone 32619 (TRAV2, TRAJ9)
CAVEDRSGGFKTIF

SEQ ID NO: 65238 - protein, 13 aa, Homo sapiens
  CDR3 for beta chain variable domain of TCR clone 32619 (TRBV19, TRBJ2-1)
CQGARSFQWEQFF

SEQ ID NO: 65239 - protein, 13 aa, Homo sapiens
  CDR3 for alpha chain variable domain of TCR clone 32620 (TRAV35, TRAJ48)
CAVHEFGNEKLTF

SEQ ID NO: 65240 - protein, 14 aa, Homo sapiens
  CDR3 for beta chain variable domain of TCR clone 32620 (TRBV19, TRBJ2-1)
CASPTFVLSGEQFF

SEQ ID NO: 65241 - protein, 13 aa, Homo sapiens
  CDR3 for alpha chain variable domain of TCR clone 32621 (TRAV8-3, TRAJ28)
CAVGAVGSYQLTF

SEQ ID NO: 65242 - protein, 16 aa, Homo sapiens
  CDR3 for beta chain variable domain of TCR clone 32621 (TRBV7-3, TRBJ2-2)
CASSLKRGTLSGELFF

SEQ ID NO: 65243 - protein, 12 aa, Homo sapiens
  CDR3 for alpha chain variable domain of TCR clone 32622 (TRAV12-3, TRAJ21)
CAMFNNSNKFYF

SEQ ID NO: 65244 - protein, 14 aa, Homo sapiens
  CDR3 for beta chain variable domain of TCR clone 32622 (TRBV28, TRBJ2-1)
CASSIQGTVGEQFF

SEQ ID NO: 65245 - protein, 14 aa, Homo sapiens
  CDR3 for alpha chain variable domain of TCR clone 32623 (TRAV16, TRAJ33)
CALSAMDSNYQLIW

SEQ ID NO: 65246 - protein, 17 aa, Homo sapiens
  CDR3 for beta chain variable domain of TCR clone 32623 (TRBV11-2, TRBJ2-1)
CASSLYPPGVEYNEQFF

SEQ ID NO: 65247 - protein, 16 aa, Homo sapiens
  CDR3 for alpha chain variable domain of TCR clone 32624 (TRAV30, TRAJ24)
CGTEIVDADSWGKFQF

SEQ ID NO: 65248 - protein, 13 aa, Homo sapiens
  CDR3 for beta chain variable domain of TCR clone 32624 (TRBV18, TRBJ1-2)
CASSASATEGDTF

SEQ ID NO: 65249 - protein, 13 aa, Homo sapiens
  CDR3 for alpha chain variable domain of TCR clone 32625 (TRAV8-6, TRAJ49)
CAVITNTGNQFYF

SEQ ID NO: 65250 - protein, 14 aa, Homo sapiens
  CDR3 for beta chain variable domain of TCR clone 32625 (TRBV7-2, TRBJ2-7)
CASSPKTSFYEQYF

SEQ ID NO: 65251 - protein, 14 aa, Homo sapiens
  CDR3 for alpha chain variable domain of TCR clone 32626 (TRAV25, TRAJ44)
CAVFPTGTASKLTF

SEQ ID NO: 65252 - protein, 14 aa, Homo sapiens
  CDR3 for beta chain variable domain of TCR clone 32626 (TRBV19, TRBJ1-1)
CASTGHRLNTKAFF

SEQ ID NO: 65253 - protein, 14 aa, Homo sapiens
  CDR3 for alpha chain variable domain of TCR clone 32627 (TRAV17, TRAJ37)
CATGGSSNTGKLIF

SEQ ID NO: 65254 - protein, 13 aa, Homo sapiens
  CDR3 for beta chain variable domain of TCR clone 32627 (TRBV11-2, TRBJ2-1)
CASSLDLVNEQFF

SEQ ID NO: 65255 - protein, 12 aa, Homo sapiens
  CDR3 for alpha chain variable domain of TCR clone 32628 (TRAV16, TRAJ22)
CALEVSARQLTF

SEQ ID NO: 65256 - protein, 14 aa, Homo sapiens
  CDR3 for beta chain variable domain of TCR clone 32628 (TRBV11-2, TRBJ2-3)
CASSSIASTGTQYF

SEQ ID NO: 65257 - protein, 15 aa, Homo sapiens
  CDR3 for alpha chain variable domain of TCR clone 32629 (TRAV13-1, TRAJ44)
CAASRGGGTASKLTF

SEQ ID NO: 65258 - protein, 14 aa, Homo sapiens
  CDR3 for beta chain variable domain of TCR clone 32629 (TRBV7-2, TRBJ2-5)
YASSPRGSSETQYF

SEQ ID NO: 65259 - protein, 15 aa, Homo sapiens
  CDR3 for alpha chain variable domain of TCR clone 32630 (TRAV26-1, TRAJ44)
CIVRANTGTASKLTF

SEQ ID NO: 65260 - protein, 16 aa, Homo sapiens
  CDR3 for beta chain variable domain of TCR clone 32630 (TRBV7-7, TRBJ2-1)
CASSLASGTSYSEQFF

SEQ ID NO: 65261 - protein, 13 aa, Homo sapiens
  CDR3 for alpha chain variable domain of TCR clone 32631 (TRAV12-1, TRAJ31)
CVVNMNNNAILMF

SEQ ID NO: 65262 - protein, 15 aa, Homo sapiens
  CDR3 for beta chain variable domain of TCR clone 32631 (TRBV4-1, TRBJ1-2)
CASSQGQGAAYGYTF

SEQ ID NO: 65263 - protein, 14 aa, Homo sapiens
  CDR3 for alpha chain variable domain of TCR clone 32632 (TRAV3, TRAJ9)
CAVRGNTGGFKTIF

SEQ ID NO: 65264 - protein, 16 aa, Homo sapiens
  CDR3 for beta chain variable domain of TCR clone 32632 (TRBV7-2, TRBJ2-7)
CASSLGLAGGAHEQYF

SEQ ID NO: 65265 - protein, 14 aa, Homo sapiens
  CDR3 for alpha chain variable domain of TCR clone 32633 (TRAV38-1, TRAJ40)
CALRPTSGTYKYIF

SEQ ID NO: 65266 - protein, 14 aa, Homo sapiens
  CDR3 for beta chain variable domain of TCR clone 32633 (TRBV25-1, TRBJ1-1)
CASTHLGGNTESFF

SEQ ID NO: 65267 - protein, 15 aa, Homo sapiens
  CDR3 for alpha chain variable domain of TCR clone 32634 (TRAV8-3, TRAJ45)
CAPSYSGGGADGLTF

SEQ ID NO: 65268 - protein, 15 aa, Homo sapiens
  CDR3 for beta chain variable domain of TCR clone 32634 (TRBV18, TRBJ1-1)
CASSPRQGENTEAFF

SEQ ID NO: 65269 - protein, 13 aa, Homo sapiens
  CDR3 for alpha chain variable domain of TCR clone 32635 (TRAV26-2, TRAJ54)
CIPRVGGAQKLVF

SEQ ID NO: 65270 - protein, 16 aa, Homo sapiens
  CDR3 for beta chain variable domain of TCR clone 32635 (TRBV4-1, TRBJ1-1)
CASSSMSERPNTEAFL

SEQ ID NO: 65271 - protein, 13 aa, Homo sapiens
  CDR3 for alpha chain variable domain of TCR clone 32636 (TRAV13-2, TRAJ48)
CAEMDFGNEKLTF

SEQ ID NO: 65272 - protein, 17 aa, Homo sapiens
  CDR3 for beta chain variable domain of TCR clone 32636 (TRBV7-3, TRBJ2-3)
CASSLMKRMRGADTQYF

SEQ ID NO: 65273 - protein, 14 aa, Homo sapiens
  CDR3 for alpha chain variable domain of TCR clone 32637 (TRAV8-1, TRAJ5)
CAVRTDTGRRALTF

SEQ ID NO: 65274 - protein, 12 aa, Homo sapiens
  CDR3 for beta chain variable domain of TCR clone 32637 (TRBV11-2, TRBJ2-1)
CASSPGDNEQFF

SEQ ID NO: 65275 - protein, 14 aa, Homo sapiens
  CDR3 for alpha chain variable domain of TCR clone 32638 (TRAV1-2, TRAJ8)
CAVREDTGFQKLVF

SEQ ID NO: 65276 - protein, 16 aa, Homo sapiens
  CDR3 for beta chain variable domain of TCR clone 32638 (TRBV7-9, TRBJ2-1)
CASSDVAGGAYNEQFF

SEQ ID NO: 65277 - protein, 15 aa, Homo sapiens
  CDR3 for alpha chain variable domain of TCR clone 32639 (TRAV2, TRAJ15)
CAVEDRGQAGTALIV

SEQ ID NO: 65278 - protein, 13 aa, Homo sapiens
  CDR3 for beta chain variable domain of TCR clone 32639 (TRBV10-2, TRBJ2-7)
CASGASGGYEQYF

SEQ ID NO: 65279 - protein, 14 aa, Homo sapiens
  CDR3 for alpha chain variable domain of TCR clone 32640 (TRAV1-2, TRAJ16)
CAVDRFSDGQKLLF

SEQ ID NO: 65280 - protein, 15 aa, Homo sapiens
  CDR3 for beta chain variable domain of TCR clone 32640 (TRBV9, TRBJ1-6)
CASSVAGTGDSPLHF
